United States Patent Application Publication US 2007/0042381 A1 - sequence listing, part 32

SEQ ID NO: 1417214 - RNA, 13 nt, Human
agaacggaagaag

SEQ ID NO: 1417215 - RNA, 14 nt, Human
ucugaauaaagcaa

SEQ ID NO: 1417216 - RNA, 18 nt, Human
ucugaauaaaguguaaca

SEQ ID NO: 1417217 - RNA, 17 nt, Human
ucugaauaaaguguaac

SEQ ID NO: 1417218 - RNA, 17 nt, Human
ucugaauaaagcaauua

SEQ ID NO: 1417219 - RNA, 21 nt, Human
ucugcaggucccuaauaaagc

SEQ ID NO: 1417220 - RNA, 19 nt, Human
ucugcaggucccuaauaaa

SEQ ID NO: 1417221 - RNA, 22 nt, Human
ucugcaggucccuaauaaagcu

SEQ ID NO: 1417222 - RNA, 23 nt, Human
ucugcaggucccuaauaaagcug

SEQ ID NO: 1417223 - RNA, 20 nt, Human
agaaauuaccuguggauauu

SEQ ID NO: 1417224 - RNA, 19 nt, Human
agaaauuaccuguggauau

SEQ ID NO: 1417225 - RNA, 18 nt, Human
agaaauuaccuguggaua

SEQ ID NO: 1417226 - RNA, 18 nt, Human
agaaauuacacccaaaga

SEQ ID NO: 1417227 - RNA, 15 nt, Human
ucugcaguaaaucuu

SEQ ID NO: 1417228 - RNA, 21 nt, Human
agaaccuggguugcagacagg

SEQ ID NO: 1417229 - RNA, 22 nt, Human
agaaccuggccuucaguguacc

SEQ ID NO: 1417230 - RNA, 14 nt, Human
agaaccuggccuuc

SEQ ID NO: 1417231 - RNA, 13 nt, Human
agaaccuggccuu

SEQ ID NO: 1417232 - RNA, 12 nt, Human
agaaccuggccu

SEQ ID NO: 1417233 - RNA, 21 nt, Human
agaaccuggaacuuggggagu

SEQ ID NO: 1417234 - RNA, 20 nt, Human
agaaccuggaacuuggggag

SEQ ID NO: 1417235 - RNA, 13 nt, Human
agaaccuggaacu

SEQ ID NO: 1417236 - RNA, 12 nt, Human
agaaauuaugug

SEQ ID NO: 1417237 - RNA, 23 nt, Human
agaaucaacauuucucaauaauu

SEQ ID NO: 1417238 - RNA, 21 nt, Human
agaaucaacauuucucaauaa

SEQ ID NO: 1417239 - RNA, 14 nt, Human
agaaucaaacauuu

SEQ ID NO: 1417240 - RNA, 21 nt, Human
agaauagccacauuuggaaua

SEQ ID NO: 1417241 - RNA, 20 nt, Human
agaauagccacauuuggaau

SEQ ID NO: 1417242 - RNA, 15 nt, Human
agaauaaauugauuu

SEQ ID NO: 1417243 - RNA, 21 nt, Human
agaauaaucacgcuuuccuga

SEQ ID NO: 1417244 - RNA, 20 nt, Human
agaauaaucacgcuuuccug

SEQ ID NO: 1417245 - RNA, 17 nt, Human
agaauaaucacgcuuuc

SEQ ID NO: 1417246 - RNA, 21 nt, Human
agaauaaaggcaguuuucuaa

SEQ ID NO: 1417247 - RNA, 20 nt, Human
agaauaaaggcaguuuucua

SEQ ID NO: 1417248 - RNA, 18 nt, Human
agaauaaaggcaguuuuc

SEQ ID NO: 1417249 - RNA, 15 nt, Human
agaauaaaggcaguu

SEQ ID NO: 1417250 - RNA, 14 nt, Human
agaauaaaggcagu

SEQ ID NO: 1417251 - RNA, 13 nt, Human
agaauaaaggcag

SEQ ID NO: 1417252 - RNA, 23 nt, Human
agaaguuugcacuaucuuucagc

SEQ ID NO: 1417253 - RNA, 21 nt, Human
agaaguuugcacuaucuuuca

SEQ ID NO: 1417254 - RNA, 16 nt, Human
agaaguuugcacuauc

SEQ ID NO: 1417255 - RNA, 13 nt, Human
agaaguuugcacu

SEQ ID NO: 1417256 - RNA, 16 nt, Human
agaagugacauugcau

SEQ ID NO: 1417257 - RNA, 17 nt, Human
agaagugacauugcauc

SEQ ID NO: 1417258 - RNA, 16 nt, Human
agaaggcaaaaauagu

SEQ ID NO: 1417259 - RNA, 11 nt, Human
agaaggcaaaa

SEQ ID NO: 1417260 - RNA, 23 nt, Human
agaagcuccucuccccagcccag

SEQ ID NO: 1417261 - RNA, 22 nt, Human
agaagcuccucuccccagccca

SEQ ID NO: 1417262 - RNA, 20 nt, Human
agaagcuccucuccccagcc

SEQ ID NO: 1417263 - RNA, 18 nt, Human
agaagcuccucuccccag

SEQ ID NO: 1417264 - RNA, 17 nt, Human
agaagcuccucucccca

SEQ ID NO: 1417265 - RNA, 14 nt, Human
agaagcuccucucc

SEQ ID NO: 1417266 - RNA, 16 nt, Human
agaagcucccccagca

SEQ ID NO: 1417267 - RNA, 15 nt, Human
agaagcucccccagc

SEQ ID NO: 1417268 - RNA, 13 nt, Human
agaagcuccccca

SEQ ID NO: 1417269 - RNA, 22 nt, Human
agaaguuggggacacauguauu

SEQ ID NO: 1417270 - RNA, 21 nt, Human
agaaguuguaaaguauguauu

SEQ ID NO: 1417271 - RNA, 13 nt, Human
agaaguuucuguc

SEQ ID NO: 1417272 - RNA, 15 nt, Human
agaaguuuagauuuu

SEQ ID NO: 1417273 - RNA, 16 nt, Human
agaaguuuagauuuua

SEQ ID NO: 1417274 - RNA, 23 nt, Human
agaagugcaucuggagagaacag

SEQ ID NO: 1417275 - RNA, 13 nt, Human
agaaguugauaug

SEQ ID NO: 1417276 - RNA, 21 nt, Human
agaagccugaugcugacauuc

SEQ ID NO: 1417277 - RNA, 17 nt, Human
agaagccugaugcugac

SEQ ID NO: 1417278 - RNA, 17 nt, Human
ucuggccuggccagugc

SEQ ID NO: 1417279 - RNA, 14 nt, Human
ucuggccuggccag

SEQ ID NO: 1417280 - RNA, 19 nt, Human
ucuggccuggccagugccc

SEQ ID NO: 1417281 - RNA, 13 nt, Human
ucuggccuggcca

SEQ ID NO: 1417282 - RNA, 15 nt, Human
ucuggccucugcuuu

SEQ ID NO: 1417283 - RNA, 22 nt, Human
ucuggcacagccuggcuguggc

SEQ ID NO: 1417284 - RNA, 23 nt, Human
ucuggcccuugcuuaccucucag

SEQ ID NO: 1417285 - RNA, 19 nt, Human
ucugccuuagucucaguuu

SEQ ID NO: 1417286 - RNA, 15 nt, Human
ucugccuuagucuca

SEQ ID NO: 1417287 - RNA, 17 nt, Human
ucuggaaccucagccug

SEQ ID NO: 1417288 - RNA, 20 nt, Human
ucugcuuugcucuucaagaa

SEQ ID NO: 1417289 - RNA, 23 nt, Human
ucuggaagauggggaccagcagc

SEQ ID NO: 1417290 - RNA, 15 nt, Human
ucuggaagaugggga

SEQ ID NO: 1417291 - RNA, 23 nt, Human
ucuggaaccucagccuggccaga

SEQ ID NO: 1417292 - RNA, 21 nt, Human
ucuggaaccucagccuggcca

SEQ ID NO: 1417293 - RNA, 20 nt, Human
ucuggaaccucagccuggcc

SEQ ID NO: 1417294 - RNA, 19 nt, Human
ucuggaaccucagccuggc

SEQ ID NO: 1417295 - RNA, 18 nt, Human
ucuggaaccucagccugg

SEQ ID NO: 1417296 - RNA, 14 nt, Human
ucuggauuccagag

SEQ ID NO: 1417297 - RNA, 13 nt, Human
ucuggaaguccaa

SEQ ID NO: 1417298 - RNA, 18 nt, Human
ucuggaagugacuuuggc

SEQ ID NO: 1417299 - RNA, 19 nt, Human
ucuggaagugacuuuggcu

SEQ ID NO: 1417300 - RNA, 22 nt, Human
ucuggaagugacuuuggcugca

SEQ ID NO: 1417301 - RNA, 22 nt, Human
ucuggcaaugccacagcccugu

SEQ ID NO: 1417302 - RNA, 23 nt, Human
ucuggcaaugccacagcccuguc

SEQ ID NO: 1417303 - RNA, 21 nt, Human
ucuggcaaugccacagcccug

SEQ ID NO: 1417304 - RNA, 20 nt, Human
ucuggcaaugccacagcccu

SEQ ID NO: 1417305 - RNA, 17 nt, Human
ucuggcaaugccacagc

SEQ ID NO: 1417306 - RNA, 16 nt, Human
ucuggcaaugccacag

SEQ ID NO: 1417307 - RNA, 15 nt, Human
ucuggcaaugccaca

SEQ ID NO: 1417308 - RNA, 14 nt, Human
ucuggcaaugccac

SEQ ID NO: 1417309 - RNA, 23 nt, Human
ucuggcaaggacuuuguacauuu

SEQ ID NO: 1417310 - RNA, 18 nt, Human
ucuggcaaggacuuugua

SEQ ID NO: 1417311 - RNA, 12 nt, Human
ucuggcaaggac

SEQ ID NO: 1417312 - RNA, 16 nt, Human
ucuggcaacaucuuua

SEQ ID NO: 1417313 - RNA, 15 nt, Human
ucuggcaacaucuuu

SEQ ID NO: 1417314 - RNA, 20 nt, Human
ucuggauuccccaucucagg

SEQ ID NO: 1417315 - RNA, 22 nt, Human
ucuggauuccagagcacugcuc

SEQ ID NO: 1417316 - RNA, 21 nt, Human
ucuucccccucucccaguugu

SEQ ID NO: 1417317 - RNA, 18 nt, Human
ucuucccccucucccagu

SEQ ID NO: 1417318 - RNA, 17 nt, Human
ucuucccccucucccag

SEQ ID NO: 1417319 - RNA, 16 nt, Human
ucuucccccucuccca

SEQ ID NO: 1417320 - RNA, 14 nt, Human
ucuucccccucucc

SEQ ID NO: 1417321 - RNA, 14 nt, Human
ucuucccccaccac

SEQ ID NO: 1417322 - RNA, 21 nt, Human
ucuuccccagacgccuggcug

SEQ ID NO: 1417323 - RNA, 19 nt, Human
ucuuccccagacgccuggc

SEQ ID NO: 1417324 - RNA, 13 nt, Human
ucuuccccagacg

SEQ ID NO: 1417325 - RNA, 18 nt, Human
ucuuccucagccagccuc

SEQ ID NO: 1417326 - RNA, 17 nt, Human
ucuuccucagccagccu

SEQ ID NO: 1417327 - RNA, 16 nt, Human
ucuuccucagccagcc

SEQ ID NO: 1417328 - RNA, 13 nt, Human
ucuucucuguugu

SEQ ID NO: 1417329 - RNA, 20 nt, Human
ucuucucucucaauuuuauc

SEQ ID NO: 1417330 - RNA, 18 nt, Human
ucuucucuccagcugacu

SEQ ID NO: 1417331 - RNA, 14 nt, Human
ucuucucuccagcu

SEQ ID NO: 1417332 - RNA, 18 nt, Human
ucuuccugaguggugcca

SEQ ID NO: 1417333 - RNA, 14 nt, Human
ucuuccugaguggu

SEQ ID NO: 1417334 - RNA, 16 nt, Human
ucuuccugacacuuua

SEQ ID NO: 1417335 - RNA, 15 nt, Human
ucuuccugacacuuu

SEQ ID NO: 1417336 - RNA, 13 nt, Human
ucuuccugacacu

SEQ ID NO: 1417337 - RNA, 16 nt, Human
ucuuccucuuccccca

SEQ ID NO: 1417338 - RNA, 14 nt, Human
ucuuccauuugcaa

SEQ ID NO: 1417339 - RNA, 13 nt, Human
ucuuccauuugca

SEQ ID NO: 1417340 - RNA, 17 nt, Human
ucuuccaugcugugcgc

SEQ ID NO: 1417341 - RNA, 15 nt, Human
ucuuccaugcugugc

SEQ ID NO: 1417342 - RNA, 14 nt, Human
ucuuccaugcugug

SEQ ID NO: 1417343 - RNA, 14 nt, Human
ucuucaagaaaucu

SEQ ID NO: 1417344 - RNA, 23 nt, Human
agaaucagagaaggaacauaccc

SEQ ID NO: 1417345 - RNA, 13 nt, Human
agaaucagagaag

SEQ ID NO: 1417346 - RNA, 15 nt, Human
agacauuggcaccua

SEQ ID NO: 1417347 - RNA, 20 nt, Human
agacauuaacucauuagacu

SEQ ID NO: 1417348 - RNA, 22 nt, Human
agacauuaacucauuagacugg

SEQ ID NO: 1417349 - RNA, 19 nt, Human
agacaucugagguuuuauu

SEQ ID NO: 1417350 - RNA, 14 nt, Human
agacccccagcacu

SEQ ID NO: 1417351 - RNA, 24 nt, Human
agaccccuaacccuuugugugcuc

SEQ ID NO: 1417352 - RNA, 20 nt, Human
agacauccaaacuaaaagga

SEQ ID NO: 1417353 - RNA, 16 nt, Human
agacaucagcccuugg

SEQ ID NO: 1417354 - RNA, 14 nt, Human
agacaucagcccuu

SEQ ID NO: 1417355 - RNA, 23 nt, Human
agacauacuaaccagcagaaaug

SEQ ID NO: 1417356 - RNA, 18 nt, Human
agacauaaccacugcuuc

SEQ ID NO: 1417357 - RNA, 23 nt, Human
agacauaaaggaaaagacacauu

SEQ ID NO: 1417358 - RNA, 21 nt, Human
agacauaaaggaaaagacaca

SEQ ID NO: 1417359 - RNA, 16 nt, Human
agacauaaaggaaaag

SEQ ID NO: 1417360 - RNA, 15 nt, Human
agacauaaaggaaaa

SEQ ID NO: 1417361 - RNA, 19 nt, Human
agacauacuaaccagcaga

SEQ ID NO: 1417362 - RNA, 21 nt, Human
ucuucuggggcaggcugggcc

SEQ ID NO: 1417363 - RNA, 20 nt, Human
ucuucuggggcaggcugggc

SEQ ID NO: 1417364 - RNA, 18 nt, Human
ucuucuggggcaggcugg

SEQ ID NO: 1417365 - RNA, 23 nt, Human
ucuucugggagggcagcagggcu

SEQ ID NO: 1417366 - RNA, 22 nt, Human
ucuucugggagggcagcagggc

SEQ ID NO: 1417367 - RNA, 24 nt, Human
ucuucugaacucaaacugaggaau

SEQ ID NO: 1417368 - RNA, 19 nt, Human
ucuucugaacucaaacuga

SEQ ID NO: 1417369 - RNA, 21 nt, Human
ucuucucuuccuuuuaucagu

SEQ ID NO: 1417370 - RNA, 19 nt, Human
ucuucucuuccuuuuauca

SEQ ID NO: 1417371 - RNA, 22 nt, Human
ucuucuggggcaggcugggcca

SEQ ID NO: 1417372 - RNA, 14 nt, Human
agacauaaaggaaa

SEQ ID NO: 1417373 - RNA, 22 nt, Human
ucuucuuaauauguucuuuuaa

SEQ ID NO: 1417374 - RNA, 21 nt, Human
ucuugggcagagcuggcucug

SEQ ID NO: 1417375 - RNA, 20 nt, Human
ucuugggcagagcuggcucu

SEQ ID NO: 1417376 - RNA, 19 nt, Human
ucuugggcagagcuggcuc

SEQ ID NO: 1417377 - RNA, 14 nt, Human
ucuugggaacugaa

SEQ ID NO: 1417378 - RNA, 13 nt, Human
ucuugggaacuga

SEQ ID NO: 1417379 - RNA, 13 nt, Human
ucuuggggaagau

SEQ ID NO: 1417380 - RNA, 23 nt, Human
ucuuggggaguuuaggguggggg

SEQ ID NO: 1417381 - RNA, 23 nt, Human
ucuugggcagagcuggcucugag

SEQ ID NO: 1417382 - RNA, 22 nt, Human
ucuuggggaguuuagggugggg

SEQ ID NO: 1417383 - RNA, 20 nt, Human
ucuuggggggguggccgcug

SEQ ID NO: 1417384 - RNA, 19 nt, Human
ucuuggggggguggccgcu

SEQ ID NO: 1417385 - RNA, 20 nt, Human
ucuuggcuggacccagccag

SEQ ID NO: 1417386 - RNA, 19 nt, Human
ucuuggcuggacccagcca

SEQ ID NO: 1417387 - RNA, 18 nt, Human
ucuuggcuggacccagcc

SEQ ID NO: 1417388 - RNA, 17 nt, Human
ucuuggcuggacccagc

SEQ ID NO: 1417389 - RNA, 14 nt, Human
ucuuggcuggaccc

SEQ ID NO: 1417390 - RNA, 15 nt, Human
ucuuuauaugaagaa

SEQ ID NO: 1417391 - RNA, 11 nt, Human
ucuuuauauga

SEQ ID NO: 1417392 - RNA, 22 nt, Human
ucuuuaacugccguaauuuaac

SEQ ID NO: 1417393 - RNA, 21 nt, Human
ucuuuaacugccguaauuuaa

SEQ ID NO: 1417394 - RNA, 20 nt, Human
ucuuuaacugccguaauuua

SEQ ID NO: 1417395 - RNA, 11 nt, Human
ucuuuaacugc

SEQ ID NO: 1417396 - RNA, 23 nt, Human
ucuuuaacucccauuaccaugua

SEQ ID NO: 1417397 - RNA, 14 nt, Human
ucuuuaaaguucuu

SEQ ID NO: 1417398 - RNA, 12 nt, Human
ucuuuauuuuga

SEQ ID NO: 1417399 - RNA, 23 nt, Human
ucuuuauuuuaaccuuugauaga

SEQ ID NO: 1417400 - RNA, 14 nt, Human
ucuuuaugcuugca

SEQ ID NO: 1417401 - RNA, 15 nt, Human
ucuuuaugcuugcaa

SEQ ID NO: 1417402 - RNA, 15 nt, Human
ucuuucucugaggac

SEQ ID NO: 1417403 - RNA, 13 nt, Human
ucuuucucugagg

SEQ ID NO: 1417404 - RNA, 15 nt, Human
agacuaugaaaaugc

SEQ ID NO: 1417405 - RNA, 20 nt, Human
agacuaucuuacuauuucac

SEQ ID NO: 1417406 - RNA, 22 nt, Human
agaccuuguuacuucugaggua

SEQ ID NO: 1417407 - RNA, 21 nt, Human
agaccuuguuacuucugaggu

SEQ ID NO: 1417408 - RNA, 19 nt, Human
agaccuuguuacuucugag

SEQ ID NO: 1417409 - RNA, 18 nt, Human
agaccuuguuacuucuga

SEQ ID NO: 1417410 - RNA, 18 nt, Human
agaccuguuagcagacag

SEQ ID NO: 1417411 - RNA, 13 nt, Human
agaccuguaauca

SEQ ID NO: 1417412 - RNA, 23 nt, Human
agaccuggcagcucuggacagcc

SEQ ID NO: 1417413 - RNA, 18 nt, Human
agaccuggcagcucugga

SEQ ID NO: 1417414 - RNA, 17 nt, Human
agaccuggcagcucugg

SEQ ID NO: 1417415 - RNA, 16 nt, Human
agaccuggcagcucug

SEQ ID NO: 1417416 - RNA, 15 nt, Human
agaccuggcagcucu

SEQ ID NO: 1417417 - RNA, 14 nt, Human
agaccuggcagcuc

SEQ ID NO: 1417418 - RNA, 11 nt, Human
agaccuggcag

SEQ ID NO: 1417419 - RNA, 19 nt, Human
agaccuguuagcagacagg

SEQ ID NO: 1417420 - RNA, 23 nt, Human
agacucaggccaagaaacgucuu

SEQ ID NO: 1417421 - RNA, 20 nt, Human
agacucaggccaagaaacgu

SEQ ID NO: 1417422 - RNA, 19 nt, Human
agacucaggccaagaaacg

SEQ ID NO: 1417423 - RNA, 20 nt, Human
agacucagcucugacauucu

SEQ ID NO: 1417424 - RNA, 18 nt, Human
agacucagcucugacauu

SEQ ID NO: 1417425 - RNA, 13 nt, Human
agacucagcucug

SEQ ID NO: 1417426 - RNA, 14 nt, Human
ucuugagcaguggc

SEQ ID NO: 1417427 - RNA, 16 nt, Human
ucuugagccuugaacu

SEQ ID NO: 1417428 - RNA, 20 nt, Human
ucuugaguuugucgcucaug

SEQ ID NO: 1417429 - RNA, 14 nt, Human
ucuugaguuugucg

SEQ ID NO: 1417430 - RNA, 13 nt, Human
ucuugaguuuguc

SEQ ID NO: 1417431 - RNA, 19 nt, Human
ucuugaggggaccaggagu

SEQ ID NO: 1417432 - RNA, 18 nt, Human
ucuugaggggaccaggag

SEQ ID NO: 1417433 - RNA, 17 nt, Human
ucuugaggggaccagga

SEQ ID NO: 1417434 - RNA, 15 nt, Human
ucuugaggggaccag

SEQ ID NO: 1417435 - RNA, 22 nt, Human
ucuugaggggaagcuagucuuu

SEQ ID NO: 1417436 - RNA, 16 nt, Human
ucuugagcucuauuau

SEQ ID NO: 1417437 - RNA, 14 nt, Human
ucuugagcucuauu

SEQ ID NO: 1417438 - RNA, 13 nt, Human
ucuugagcucuau

SEQ ID NO: 1417439 - RNA, 22 nt, Human
ucuugagcaguggcugguccag

SEQ ID NO: 1417440 - RNA, 23 nt, Human
ucuugauuauccauauugaguca

SEQ ID NO: 1417441 - RNA, 14 nt, Human
ucuugauuauccau

SEQ ID NO: 1417442 - RNA, 22 nt, Human
ucuugauguaaaaucuugucau

SEQ ID NO: 1417443 - RNA, 21 nt, Human
ucuugauguaaggaugggcau

SEQ ID NO: 1417444 - RNA, 19 nt, Human
ucuugauguaaaaucuugu

SEQ ID NO: 1417445 - RNA, 16 nt, Human
ucuugauguaaaaucu

SEQ ID NO: 1417446 - RNA, 15 nt, Human
ucuugauguaaaauc

SEQ ID NO: 1417447 - RNA, 14 nt, Human
ucuugauguaaaau

SEQ ID NO: 1417448 - RNA, 21 nt, Human
ucuugaugccuggcggggugg

SEQ ID NO: 1417449 - RNA, 18 nt, Human
ucuuuguguagcuuugcu

SEQ ID NO: 1417450 - RNA, 15 nt, Human
ucuuuguguagcuuu

SEQ ID NO: 1417451 - RNA, 13 nt, Human
ucuuuguguagcu

SEQ ID NO: 1417452 - RNA, 21 nt, Human
ucuuugguucuaaggaccuga

SEQ ID NO: 1417453 - RNA, 16 nt, Human
ucuuugguucuaagga

SEQ ID NO: 1417454 - RNA, 15 nt, Human
ucuuugguucuaagg

SEQ ID NO: 1417455 - RNA, 14 nt, Human
ucuuugguucuaag

SEQ ID NO: 1417456 - RNA, 12 nt, Human
ucuuugguucua

SEQ ID NO: 1417457 - RNA, 23 nt, Human
agagacauuaacucauuagacug

SEQ ID NO: 1417458 - RNA, 13 nt, Human
agagacaucagcc

SEQ ID NO: 1417459 - RNA, 23 nt, Human
agagacauacuugaagggccaga

SEQ ID NO: 1417460 - RNA, 22 nt, Human
agagacauacuugaagggccag

SEQ ID NO: 1417461 - RNA, 17 nt, Human
agagacauacuugaagg

SEQ ID NO: 1417462 - RNA, 22 nt, Human
agagacauuaacucauuagacu

SEQ ID NO: 1417463 - RNA, 18 nt, Human
agagacauuaacucauua

SEQ ID NO: 1417464 - RNA, 15 nt, Human
agagacaugcagaga

SEQ ID NO: 1417465 - RNA, 15 nt, Human
agagacaucagcccu

SEQ ID NO: 1417466 - RNA, 10 nt, Human
ucuuucugua

SEQ ID NO: 1417467 - RNA, 21 nt, Human
ucuuucuggcuaugcauuuga

SEQ ID NO: 1417468 - RNA, 13 nt, Human
ucuuucuuagaaa

SEQ ID NO: 1417469 - RNA, 14 nt, Human
ucuuucuuagaaau

SEQ ID NO: 1417470 - RNA, 17 nt, Human
ucuuucucuuucccugg

SEQ ID NO: 1417471 - RNA, 16 nt, Human
ucuuucucuuucccug

SEQ ID NO: 1417472 - RNA, 17 nt, Human
ucuuucucugccaguga

SEQ ID NO: 1417473 - RNA, 16 nt, Human
ucuuucucugccagug

SEQ ID NO: 1417474 - RNA, 15 nt, Human
ucuuucucugccagu

SEQ ID NO: 1417475 - RNA, 13 nt, Human
ucuuucucugcca

SEQ ID NO: 1417476 - RNA, 12 nt, Human
ucuuucucugcc

SEQ ID NO: 1417477 - RNA, 11 nt, Human
ucuuucucugc

SEQ ID NO: 1417478 - RNA, 20 nt, Human
ucuuucuggcuaugcauuug

SEQ ID NO: 1417479 - RNA, 21 nt, Human
ugaaaaaaaaccugagauuua

SEQ ID NO: 1417480 - RNA, 22 nt, Human
ugaaaaaaaaccugagauuuau

SEQ ID NO: 1417481 - RNA, 16 nt, Human
ugaaaaaaaacagugg

SEQ ID NO: 1417482 - RNA, 18 nt, Human
ucuuuuacccuggccccu

SEQ ID NO: 1417483 - RNA, 17 nt, Human
ucuuuuacccuggcccc

SEQ ID NO: 1417484 - RNA, 13 nt, Human
ucuuuuacccugg

SEQ ID NO: 1417485 - RNA, 22 nt, Human
ucuuuuacccuggccccucucc

SEQ ID NO: 1417486 - RNA, 12 nt, Human
ucuuuuacaacu

SEQ ID NO: 1417487 - RNA, 20 nt, Human
ucuuuguuuugugucucuua

SEQ ID NO: 1417488 - RNA, 19 nt, Human
ucuuuguuuugugucucuu

SEQ ID NO: 1417489 - RNA, 18 nt, Human
ucuuuguuuugugucucu

SEQ ID NO: 1417490 - RNA, 17 nt, Human
ucuuuguuuugugucuc

SEQ ID NO: 1417491 - RNA, 16 nt, Human
ucuuuguuuugugucu

SEQ ID NO: 1417492 - RNA, 15 nt, Human
ucuuuguuucuuucu

SEQ ID NO: 1417493 - RNA, 23 nt, Human
ucuuuguucauagcccaguagac

SEQ ID NO: 1417494 - RNA, 16 nt, Human
ucuuuguucauagccc

SEQ ID NO: 1417495 - RNA, 18 nt, Human
ucuuuguuaagacugcug

SEQ ID NO: 1417496 - RNA, 13 nt, Human
ugaaaaagaagaa

SEQ ID NO: 1417497 - RNA, 13 nt, Human
ugaaaaagcgaaa

SEQ ID NO: 1417498 - RNA, 12 nt, Human
ugaaaaaauaua

SEQ ID NO: 1417499 - RNA, 22 nt, Human
ugaaaaaauagagccugaggga

SEQ ID NO: 1417500 - RNA, 16 nt, Human
ugaaaaaaaauaaauu

SEQ ID NO: 1417501 - RNA, 13 nt, Human
ugaaaaaauauau

SEQ ID NO: 1417502 - RNA, 18 nt, Human
ugaaaaaauguauaugca

SEQ ID NO: 1417503 - RNA, 23 nt, Human
ugaaaaaauauauaucaaauaua

SEQ ID NO: 1417504 - RNA, 22 nt, Human
ugaaaaauugcugacuguagcu

SEQ ID NO: 1417505 - RNA, 23 nt, Human
ugaaaaauugcugacuguagcuu

SEQ ID NO: 1417506 - RNA, 16 nt, Human
ugaaaaauugcugacu

SEQ ID NO: 1417507 - RNA, 14 nt, Human
ugaaaaauugcuga

SEQ ID NO: 1417508 - RNA, 21 nt, Human
ugaaaaauuccacucaaaaua

SEQ ID NO: 1417509 - RNA, 19 nt, Human
ugaaaaaugggcacuuaaa

SEQ ID NO: 1417510 - RNA, 15 nt, Human
ugaaaaaguuuguuu

SEQ ID NO: 1417511 - RNA, 16 nt, Human
ugaaaauauaaccagc

SEQ ID NO: 1417512 - RNA, 14 nt, Human
ugaaaauauaacca

SEQ ID NO: 1417513 - RNA, 17 nt, Human
ugaaaagugaagacaga

SEQ ID NO: 1417514 - RNA, 21 nt, Human
ugaaaaguauauugauaaccu

SEQ ID NO: 1417515 - RNA, 22 nt, Human
ugaaaagguuuaugaaaaagaa

SEQ ID NO: 1417516 - RNA, 21 nt, Human
ugaaaagguuuaugaaaaaga

SEQ ID NO: 1417517 - RNA, 19 nt, Human
ugaaaagguuuaugaaaaa

SEQ ID NO: 1417518 - RNA, 20 nt, Human
ugaaaaggguguugggaggg

SEQ ID NO: 1417519 - RNA, 16 nt, Human
ugaaaauauuguuuua

SEQ ID NO: 1417520 - RNA, 20 nt, Human
ugaaaauauuguuuuacaau

SEQ ID NO: 1417521 - RNA, 23 nt, Human
ugaaaauauuguuuuacaauagu

SEQ ID NO: 1417522 - RNA, 20 nt, Human
ugaaaaucuuauaauuuaaa

SEQ ID NO: 1417523 - RNA, 13 nt, Human
ugaaaaugucuug

SEQ ID NO: 1417524 - RNA, 23 nt, Human
ugaaaauguccuugugaugugca

SEQ ID NO: 1417525 - RNA, 19 nt, Human
ugaaaauguccuugugaug

SEQ ID NO: 1417526 - RNA, 18 nt, Human
ugaaaauguccuugugau

SEQ ID NO: 1417527 - RNA, 17 nt, Human
ugaaaauguccuuguga

SEQ ID NO: 1417528 - RNA, 16 nt, Human
ugaaaauguccuugug

SEQ ID NO: 1417529 - RNA, 14 nt, Human
ugaaaauguccuug

SEQ ID NO: 1417530 - RNA, 13 nt, Human
ugaaaauguccuu

SEQ ID NO: 1417531 - RNA, 20 nt, Human
ugaaaauguccaggaaagug

SEQ ID NO: 1417532 - RNA, 16 nt, Human
ugaaaauguccaggaa

SEQ ID NO: 1417533 - RNA, 15 nt, Human
ugaaaaugucuugug

SEQ ID NO: 1417534 - RNA, 14 nt, Human
ugaaaaugucuugu

SEQ ID NO: 1417535 - RNA, 19 nt, Human
ugaaacuccagaugccaca

SEQ ID NO: 1417536 - RNA, 18 nt, Human
ugaaacuccagaugccac

SEQ ID NO: 1417537 - RNA, 19 nt, Human
ugaaacucguuaauuugua

SEQ ID NO: 1417538 - RNA, 17 nt, Human
ugaaacuccagaugcca

SEQ ID NO: 1417539 - RNA, 22 nt, Human
agagccaggggggugaggagcu

SEQ ID NO: 1417540 - RNA, 19 nt, Human
agagccaggagaagcucag

SEQ ID NO: 1417541 - RNA, 22 nt, Human
agagccaggagaagcucagcug

SEQ ID NO: 1417542 - RNA, 18 nt, Human
agagccaggagaagcuca

SEQ ID NO: 1417543 - RNA, 16 nt, Human
agagccaggagaagcu

SEQ ID NO: 1417544 - RNA, 15 nt, Human
agagccaggagaagc

SEQ ID NO: 1417545 - RNA, 13 nt, Human
agagccaggagaa

SEQ ID NO: 1417546 - RNA, 12 nt, Human
agagccaggaga

SEQ ID NO: 1417547 - RNA, 21 nt, Human
agagccagcuaaggggugggg

SEQ ID NO: 1417548 - RNA, 23 nt, Human
agagcaucaugccucugaggcca

SEQ ID NO: 1417549 - RNA, 22 nt, Human
agagcaucaugccucugaggcc

SEQ ID NO: 1417550 - RNA, 21 nt, Human
agagcaucaugccucugaggc

SEQ ID NO: 1417551 - RNA, 20 nt, Human
agagcaucaugccucugagg

SEQ ID NO: 1417552 - RNA, 19 nt, Human
agagcaucaugccucugag

SEQ ID NO: 1417553 - RNA, 18 nt, Human
agagcaucaugccucuga

SEQ ID NO: 1417554 - RNA, 17 nt, Human
agagcaucaugccucug

SEQ ID NO: 1417555 - RNA, 16 nt, Human
agagcaucaugccucu

SEQ ID NO: 1417556 - RNA, 15 nt, Human
agagcaucaugccuc

SEQ ID NO: 1417557 - RNA, 14 nt, Human
agagcaucaugccu

SEQ ID NO: 1417558 - RNA, 13 nt, Human
agagcauaggguc

SEQ ID NO: 1417559 - RNA, 19 nt, Human
agagcaggacugaugucuc

SEQ ID NO: 1417560 - RNA, 17 nt, Human
agagcaggacugauguc

SEQ ID NO: 1417561 - RNA, 22 nt, Human
agagcaggacuccaggcccaag

SEQ ID NO: 1417562 - RNA, 21 nt, Human
agagcaggacuccaggcccaa

SEQ ID NO: 1417563 - RNA, 20 nt, Human
agagcaggacuccaggccca

SEQ ID NO: 1417564 - RNA, 17 nt, Human
agagcaggacuccaggc

SEQ ID NO: 1417565 - RNA, 21 nt, Human
agagcaguuugguuucuagca

SEQ ID NO: 1417566 - RNA, 23 nt, Human
agagcaguuugguuucuagcaug

SEQ ID NO: 1417567 - RNA, 15 nt, Human
agagcaggacuccag

SEQ ID NO: 1417568 - RNA, 13 nt, Human
agagcaggacucc

SEQ ID NO: 1417569 - RNA, 14 nt, Human
agagcaggaauggg

SEQ ID NO: 1417570 - RNA, 22 nt, Human
agagcagcaccuccucagccug

SEQ ID NO: 1417571 - RNA, 23 nt, Human
agagcagcaccuccucagccuga

SEQ ID NO: 1417572 - RNA, 16 nt, Human
agagcagcaccuccuc

SEQ ID NO: 1417573 - RNA, 12 nt, Human
agagcagcaccu

SEQ ID NO: 1417574 - RNA, 13 nt, Human
agagcacugccac

SEQ ID NO: 1417575 - RNA, 12 nt, Human
agagcacugcca

SEQ ID NO: 1417576 - RNA, 20 nt, Human
agagcacgccuguacuagag

SEQ ID NO: 1417577 - RNA, 21 nt, Human
agagcacgccuguacuagagc

SEQ ID NO: 1417578 - RNA, 18 nt, Human
agagcaagaccccaucuc

SEQ ID NO: 1417579 - RNA, 17 nt, Human
agagcuacguauuuaau

SEQ ID NO: 1417580 - RNA, 16 nt, Human
agagcuacguauuuaa

SEQ ID NO: 1417581 - RNA, 14 nt, Human
agagcuacguauuu

SEQ ID NO: 1417582 - RNA, 18 nt, Human
agagcuacauaauuuagu

SEQ ID NO: 1417583 - RNA, 16 nt, Human
agagcuacauaauuua

SEQ ID NO: 1417584 - RNA, 14 nt, Human
agagcuacauaauu

SEQ ID NO: 1417585 - RNA, 11 nt, Human
agagcuacaua

SEQ ID NO: 1417586 - RNA, 23 nt, Human
agagccaggggggugaggagcug

SEQ ID NO: 1417587 - RNA, 13 nt, Human
agagcuccucccu

SEQ ID NO: 1417588 - RNA, 17 nt, Human
agagcuccucccucuca

SEQ ID NO: 1417589 - RNA, 12 nt, Human
agagcuccuccc

SEQ ID NO: 1417590 - RNA, 13 nt, Human
agagcucaggaug

SEQ ID NO: 1417591 - RNA, 12 nt, Human
agagcucaggau

SEQ ID NO: 1417592 - RNA, 10 nt, Human
agagcucagg

SEQ ID NO: 1417593 - RNA, 21 nt, Human
agagcuaggagcaaagccugu

SEQ ID NO: 1417594 - RNA, 20 nt, Human
agagcuaggagcaaagccug

SEQ ID NO: 1417595 - RNA, 19 nt, Human
agagcuaggagcaaagccu

SEQ ID NO: 1417596 - RNA, 18 nt, Human
agagcuaggagcaaagcc

SEQ ID NO: 1417597 - RNA, 13 nt, Human
agagcuaggagca

SEQ ID NO: 1417598 - RNA, 23 nt, Human
agagcugaagguuguggccuuug

SEQ ID NO: 1417599 - RNA, 20 nt, Human
agagcugaagguuguggccu

SEQ ID NO: 1417600 - RNA, 19 nt, Human
agagcugaagguuguggcc

SEQ ID NO: 1417601 - RNA, 16 nt, Human
agagcugauggagaag

SEQ ID NO: 1417602 - RNA, 17 nt, Human
agagcugauggagaagg

SEQ ID NO: 1417603 - RNA, 18 nt, Human
agagcugauggagaagga

SEQ ID NO: 1417604 - RNA, 15 nt, Human
agagagaaaggacuc

SEQ ID NO: 1417605 - RNA, 15 nt, Human
agagaucaaagauga

SEQ ID NO: 1417606 - RNA, 14 nt, Human
agagaucaaagaug

SEQ ID NO: 1417607 - RNA, 14 nt, Human
agagaucaggaaga

SEQ ID NO: 1417608 - RNA, 15 nt, Human
agagaucaggaagag

SEQ ID NO: 1417609 - RNA, 18 nt, Human
agagauguguguugauac

SEQ ID NO: 1417610 - RNA, 17 nt, Human
agagauguguguugaua

SEQ ID NO: 1417611 - RNA, 15 nt, Human
agagauguguguuga

SEQ ID NO: 1417612 - RNA, 20 nt, Human
agagauguguguugauacug

SEQ ID NO: 1417613 - RNA, 14 nt, Human
agagauguguguug

SEQ ID NO: 1417614 - RNA, 13 nt, Human
agagauguguguu

SEQ ID NO: 1417615 - RNA, 12 nt, Human
agagaugugugu

SEQ ID NO: 1417616 - RNA, 18 nt, Human
agagauccaaaagaagcc

SEQ ID NO: 1417617 - RNA, 19 nt, Human
agagaucaggaagagaagg

SEQ ID NO: 1417618 - RNA, 20 nt, Human
agagaucaggaagagaagga

SEQ ID NO: 1417619 - RNA, 16 nt, Human
agagaccuuccagaaa

SEQ ID NO: 1417620 - RNA, 17 nt, Human
agagacgggcccuggug

SEQ ID NO: 1417621 - RNA, 20 nt, Human
ugaaagaauagaacacaguu

SEQ ID NO: 1417622 - RNA, 13 nt, Human
ugaaagaagaaaa

SEQ ID NO: 1417623 - RNA, 14 nt, Human
ugaaacuuucauuc

SEQ ID NO: 1417624 - RNA, 23 nt, Human
ugaaacuuucauuccuucagauu

SEQ ID NO: 1417625 - RNA, 12 nt, Human
ugaaacuuuugg

SEQ ID NO: 1417626 - RNA, 13 nt, Human
agaucaaagauga

SEQ ID NO: 1417627 - RNA, 12 nt, Human
agaucaaagaug

SEQ ID NO: 1417628 - RNA, 23 nt, Human
ugaauuucuuuugccguuauuaa

SEQ ID NO: 1417629 - RNA, 13 nt, Human
ugaauuugugaag

SEQ ID NO: 1417630 - RNA, 21 nt, Human
ugaauuugugaagguggaaau

SEQ ID NO: 1417631 - RNA, 21 nt, Human
ugaauuuuuaaacaaguauuu

SEQ ID NO: 1417632 - RNA, 23 nt, Human
ugaauuuuuaaacaaguauuugu

SEQ ID NO: 1417633 - RNA, 19 nt, Human
ugaauuuuuaaacaaguau

SEQ ID NO: 1417634 - RNA, 17 nt, Human
ugaauuuuuaaacaagu

SEQ ID NO: 1417635 - RNA, 22 nt, Human
ugaauuuuuaaaacccauuuaa

SEQ ID NO: 1417636 - RNA, 16 nt, Human
ugaauuuuguugcugu

SEQ ID NO: 1417637 - RNA, 21 nt, Human
ugaauuuguaaugucuugagc

SEQ ID NO: 1417638 - RNA, 17 nt, Human
ugaauuuguaaugucuu

SEQ ID NO: 1417639 - RNA, 13 nt, Human
ugaauuuguaaug

SEQ ID NO: 1417640 - RNA, 23 nt, Human
ugaauuugugaagguggaaauaa

SEQ ID NO: 1417641 - RNA, 14 nt, Human
ugaauuuuguugcu

SEQ ID NO: 1417642 - RNA, 22 nt, Human
ugacacucccuugggcucccug

SEQ ID NO: 1417643 - RNA, 22 nt, Human
ugacacucauauaauuauaugu

SEQ ID NO: 1417644 - RNA, 16 nt, Human
ugacacucauauaauu

SEQ ID NO: 1417645 - RNA, 23 nt, Human
ugacacuagcccaaugaaaugaa

SEQ ID NO: 1417646 - RNA, 22 nt, Human
ugacacuagcccaaugaaauga

SEQ ID NO: 1417647 - RNA, 21 nt, Human
ugacacuagcccaaugaaaug

SEQ ID NO: 1417648 - RNA, 19 nt, Human
ugacacuagcccaaugaaa

SEQ ID NO: 1417649 - RNA, 18 nt, Human
ugacacuagcccaaugaa

SEQ ID NO: 1417650 - RNA, 22 nt, Human
ugacacauggccccucccccug

SEQ ID NO: 1417651 - RNA, 16 nt, Human
ugacacauggccccuc

SEQ ID NO: 1417652 - RNA, 12 nt, Human
ugacacaugcaa

SEQ ID NO: 1417653 - RNA, 20 nt, Human
ugacacaugcaaggucauuu

SEQ ID NO: 1417654 - RNA, 17 nt, Human
ugacaaaggcaagcacu

SEQ ID NO: 1417655 - RNA, 22 nt, Human
ugacaaagcagauucagaaaug

SEQ ID NO: 1417656 - RNA, 19 nt, Human
ugacaaagacugaguacgu

SEQ ID NO: 1417657 - RNA, 20 nt, Human
ugacaaagguaaaucagacu

SEQ ID NO: 1417658 - RNA, 13 nt, Human
agauaacuaggaa

SEQ ID NO: 1417659 - RNA, 20 nt, Human
agaguuuuggaugcagugcu

SEQ ID NO: 1417660 - RNA, 21 nt, Human
agaguuuuggaugcagugcuc

SEQ ID NO: 1417661 - RNA, 13 nt, Human
agaguuuuggaug

SEQ ID NO: 1417662 - RNA, 17 nt, Human
agaguuuuggaugcagu

SEQ ID NO: 1417663 - RNA, 18 nt, Human
agaguuuuggaugcagug

SEQ ID NO: 1417664 - RNA, 19 nt, Human
agaguuuuggaugcagugc

SEQ ID NO: 1417665 - RNA, 22 nt, Human
agaguuugaugaggcccuccac

SEQ ID NO: 1417666 - RNA, 23 nt, Human
agaguuugaugaggcccuccaca

SEQ ID NO: 1417667 - RNA, 20 nt, Human
agaguuugaugaggcccucc

SEQ ID NO: 1417668 - RNA, 18 nt, Human
agaguuugaugaggcccu

SEQ ID NO: 1417669 - RNA, 11 nt, Human
agauaacuuuu

SEQ ID NO: 1417670 - RNA, 22 nt, Human
agauaacugaaaauuauuuaaa

SEQ ID NO: 1417671 - RNA, 18 nt, Human
agauaacugaaaauuauu

SEQ ID NO: 1417672 - RNA, 15 nt, Human
agauaacugaaaauu

SEQ ID NO: 1417673 - RNA, 13 nt, Human
agaguuuccugaa

SEQ ID NO: 1417674 - RNA, 21 nt, Human
agaguuguuacauuuuuaagu

SEQ ID NO: 1417675 - RNA, 19 nt, Human
agaguuguuacauuuuuaa

SEQ ID NO: 1417676 - RNA, 20 nt, Human
agaguuguuacauuuuuaag

SEQ ID NO: 1417677 - RNA, 17 nt, Human
agaguuguuacauuuuu

SEQ ID NO: 1417678 - RNA, 16 nt, Human
agauacauacagaauu

SEQ ID NO: 1417679 - RNA, 15 nt, Human
agauacuguaucaug

SEQ ID NO: 1417680 - RNA, 16 nt, Human
agauacuguaucauga

SEQ ID NO: 1417681 - RNA, 20 nt, Human
agauauuuugcuuugugauu

SEQ ID NO: 1417682 - RNA, 21 nt, Human
agauauuuugcuuugugauuu

SEQ ID NO: 1417683 - RNA, 22 nt, Human
agauauuuugcuuugugauuuu

SEQ ID NO: 1417684 - RNA, 15 nt, Human
agauacauacagaau

SEQ ID NO: 1417685 - RNA, 14 nt, Human
agauacauacagaa

SEQ ID NO: 1417686 - RNA, 22 nt, Human
agauacaguuacucagaauucu

SEQ ID NO: 1417687 - RNA, 11 nt, Human
agauacuguau

SEQ ID NO: 1417688 - RNA, 13 nt, Human
agauacaguuacu

SEQ ID NO: 1417689 - RNA, 18 nt, Human
ugaagguaaauaaaaaga

SEQ ID NO: 1417690 - RNA, 20 nt, Human
ugaagguaaauaaaaagaaa

SEQ ID NO: 1417691 - RNA, 14 nt, Human
ugaagguaaauaaa

SEQ ID NO: 1417692 - RNA, 22 nt, Human
ugaaggguaauuauauaguuac

SEQ ID NO: 1417693 - RNA, 17 nt, Human
ugaauaaaguguaacaa

SEQ ID NO: 1417694 - RNA, 14 nt, Human
ugaauaaagcaauu

SEQ ID NO: 1417695 - RNA, 14 nt, Human
ugaauaaaugucuu

SEQ ID NO: 1417696 - RNA, 13 nt, Human
ugaauaaaugucu

SEQ ID NO: 1417697 - RNA, 20 nt, Human
ugaauaaaugucacuuuuug

SEQ ID NO: 1417698 - RNA, 19 nt, Human
ugaauaaaugucacuuuuu

SEQ ID NO: 1417699 - RNA, 16 nt, Human
ugaauaaaugucacuu

SEQ ID NO: 1417700 - RNA, 15 nt, Human
ugaauaaaugucacu

SEQ ID NO: 1417701 - RNA, 13 nt, Human
ugaauaaauguca

SEQ ID NO: 1417702 - RNA, 12 nt, Human
ugaauaaauguc

SEQ ID NO: 1417703 - RNA, 23 nt, Human
ugaauaccacucuguaauugcaa

SEQ ID NO: 1417704 - RNA, 19 nt, Human
ugaauaccacucuguaauu

SEQ ID NO: 1417705 - RNA, 18 nt, Human
ugaauaccacucuguaau

SEQ ID NO: 1417706 - RNA, 17 nt, Human
ugaauaccacucuguaa

SEQ ID NO: 1417707 - RNA, 16 nt, Human
ugaauaccacucugua

SEQ ID NO: 1417708 - RNA, 14 nt, Human
ugaauaccugcuca

SEQ ID NO: 1417709 - RNA, 16 nt, Human
ugaauacccuuuucug

SEQ ID NO: 1417710 - RNA, 20 nt, Human
ugaauaccacucuguaauug

SEQ ID NO: 1417711 - RNA, 16 nt, Human
ugaauacuuugaaugu

SEQ ID NO: 1417712 - RNA, 15 nt, Human
ugaauacuuugaaug

SEQ ID NO: 1417713 - RNA, 14 nt, Human
ugaauacuuugaau

SEQ ID NO: 1417714 - RNA, 13 nt, Human
ugaauacuuugaa

SEQ ID NO: 1417715 - RNA, 16 nt, Human
ugaauacuguauuuug

SEQ ID NO: 1417716 - RNA, 14 nt, Human
ugaauacugcuaca

SEQ ID NO: 1417717 - RNA, 15 nt, Human
ugaauacuuuauaaa

SEQ ID NO: 1417718 - RNA, 21 nt, Human
ugaauguaaauuuguacuauu

SEQ ID NO: 1417719 - RNA, 20 nt, Human
ugaauguaaauuuguacuau

SEQ ID NO: 1417720 - RNA, 22 nt, Human
ugaauguaaauuuguacuauuu

SEQ ID NO: 1417721 - RNA, 18 nt, Human
ugaaugggacagaguuga

SEQ ID NO: 1417722 - RNA, 22 nt, Human
ugaauagccauauuuguaaaau

SEQ ID NO: 1417723 - RNA, 18 nt, Human
ugaauaggcgaucacaac

SEQ ID NO: 1417724 - RNA, 19 nt, Human
ugaauaggcgaucacaacg

SEQ ID NO: 1417725 - RNA, 20 nt, Human
ugaauagccauauuuguaaa

SEQ ID NO: 1417726 - RNA, 18 nt, Human
ugaauagccauauuugua

SEQ ID NO: 1417727 - RNA, 17 nt, Human
ugaauaggcgaucacaa

SEQ ID NO: 1417728 - RNA, 16 nt, Human
ugaauagccauauuug

SEQ ID NO: 1417729 - RNA, 18 nt, Human
ugaauagauaugaaagcu

SEQ ID NO: 1417730 - RNA, 21 nt, Human
ugaauagauaugaaagcugau

SEQ ID NO: 1417731 - RNA, 16 nt, Human
ugaauacuuuuuacaa

SEQ ID NO: 1417732 - RNA, 20 nt, Human
ugaauacuuugaauguguuu

SEQ ID NO: 1417733 - RNA, 19 nt, Human
ugaauacuuugaauguguu

SEQ ID NO: 1417734 - RNA, 18 nt, Human
ugaauacuuugaaugugu

SEQ ID NO: 1417735 - RNA, 17 nt, Human
ugaauacuuugaaugug

SEQ ID NO: 1417736 - RNA, 18 nt, Human
ugaauauugccauuaugc

SEQ ID NO: 1417737 - RNA, 16 nt, Human
ugaauauugccauuau

SEQ ID NO: 1417738 - RNA, 15 nt, Human
ugaauauuauuccuc

SEQ ID NO: 1417739 - RNA, 13 nt, Human
ugaauauuauucc

SEQ ID NO: 1417740 - RNA, 18 nt, Human
ugaauauuuaguguucau

SEQ ID NO: 1417741 - RNA, 20 nt, Human
agaggcuuccuucauuuccu

SEQ ID NO: 1417742 - RNA, 22 nt, Human
agaggcuguucccaccaggcug

SEQ ID NO: 1417743 - RNA, 14 nt, Human
agaggcugucuguu

SEQ ID NO: 1417744 - RNA, 14 nt, Human
agaggcuggguuca

SEQ ID NO: 1417745 - RNA, 19 nt, Human
agaggcccucgcugccagc

SEQ ID NO: 1417746 - RNA, 14 nt, Human
agaggcccucgcug

SEQ ID NO: 1417747 - RNA, 24 nt, Human
agagggaggagaaugagccucggc

SEQ ID NO: 1417748 - RNA, 14 nt, Human
agaggcccucaagu

SEQ ID NO: 1417749 - RNA, 17 nt, Human
ugaaagucuguccuuga

SEQ ID NO: 1417750 - RNA, 22 nt, Human
agaggcccccagcccagggcuc

SEQ ID NO: 1417751 - RNA, 21 nt, Human
agaggcccccagcccagggcu

SEQ ID NO: 1417752 - RNA, 20 nt, Human
agaggcccccagcccagggc

SEQ ID NO: 1417753 - RNA, 17 nt, Human
agaggcccccagcccag

SEQ ID NO: 1417754 - RNA, 16 nt, Human
agaggcccccagccca

SEQ ID NO: 1417755 - RNA, 14 nt, Human
agaggcccccagcc

SEQ ID NO: 1417756 - RNA, 23 nt, Human
agaggccccagccucccugaagc

SEQ ID NO: 1417757 - RNA, 16 nt, Human
agaggccccagccucc

SEQ ID NO: 1417758 - RNA, 15 nt, Human
agaggccccagccuc

SEQ ID NO: 1417759 - RNA, 14 nt, Human
agaggccccagccu

SEQ ID NO: 1417760 - RNA, 13 nt, Human
agaggccccagcc

SEQ ID NO: 1417761 - RNA, 12 nt, Human
agaggccccagc

SEQ ID NO: 1417762 - RNA, 16 nt, Human
ugaaagucuguccuug

SEQ ID NO: 1417763 - RNA, 15 nt, Human
ugaaagucuguccuu

SEQ ID NO: 1417764 - RNA, 12 nt, Human
ugaaagucuguc

SEQ ID NO: 1417765 - RNA, 19 nt, Human
ugaaagucacggcugcgca

SEQ ID NO: 1417766 - RNA, 17 nt, Human
ugaaagguuuuuuuuca

SEQ ID NO: 1417767 - RNA, 18 nt, Human
ugaaagguuuuuuuucag

SEQ ID NO: 1417768 - RNA, 19 nt, Human
agagcugauggagaaggaa

SEQ ID NO: 1417769 - RNA, 20 nt, Human
agagcugauggagaaggaag

SEQ ID NO: 1417770 - RNA, 21 nt, Human
agagcugauggagaaggaagg

SEQ ID NO: 1417771 - RNA, 16 nt, Human
agagguguuauuugga

SEQ ID NO: 1417772 - RNA, 24 nt, Human
agaggugggccagucuguggauca

SEQ ID NO: 1417773 - RNA, 19 nt, Human
ugaagccaauucagacagg

SEQ ID NO: 1417774 - RNA, 18 nt, Human
ugaagggggcggccuaug

SEQ ID NO: 1417775 - RNA, 15 nt, Human
ugaagggggcggccu

SEQ ID NO: 1417776 - RNA, 14 nt, Human
ugaagggcccgaga

SEQ ID NO: 1417777 - RNA, 19 nt, Human
ugaagggccagagccaggg

SEQ ID NO: 1417778 - RNA, 18 nt, Human
ugaagggccagagccagg

SEQ ID NO: 1417779 - RNA, 16 nt, Human
ugaagcucacuucugg

SEQ ID NO: 1417780 - RNA, 22 nt, Human
ugaagcuacugugugugugaau

SEQ ID NO: 1417781 - RNA, 14 nt, Human
ugaagcuacugugu

SEQ ID NO: 1417782 - RNA, 20 nt, Human
ugaagcuaucguaaaauuaa

SEQ ID NO: 1417783 - RNA, 17 nt, Human
agauuccuucccaugga

SEQ ID NO: 1417784 - RNA, 15 nt, Human
agauuccuucccaug

SEQ ID NO: 1417785 - RNA, 13 nt, Human
agauuccuuccca

SEQ ID NO: 1417786 - RNA, 24 nt, Human
agauuccggauccuaagcaucuaa

SEQ ID NO: 1417787 - RNA, 23 nt, Human
agauuccggauccuaagcaucua

SEQ ID NO: 1417788 - RNA, 20 nt, Human
agauuccggauccuaagcau

SEQ ID NO: 1417789 - RNA, 18 nt, Human
agauuccggauccuaagc

SEQ ID NO: 1417790 - RNA, 16 nt, Human
agauuccggauccuaa

SEQ ID NO: 1417791 - RNA, 13 nt, Human
agauucuaaagau

SEQ ID NO: 1417792 - RNA, 22 nt, Human
agauugcugaaauuuuauaugc

SEQ ID NO: 1417793 - RNA, 12 nt, Human
agauucuaaaga

SEQ ID NO: 1417794 - RNA, 11 nt, Human
agauucuaaag

SEQ ID NO: 1417795 - RNA, 18 nt, Human
ugacucggggguggggaa

SEQ ID NO: 1417796 - RNA, 19 nt, Human
ugacuuacuguacaugaaa

SEQ ID NO: 1417797 - RNA, 16 nt, Human
agauuuccuucuuuuu

SEQ ID NO: 1417798 - RNA, 21 nt, Human
agauuuccuucuuuuuuucuu

SEQ ID NO: 1417799 - RNA, 14 nt, Human
agauuucugaggaa

SEQ ID NO: 1417800 - RNA, 15 nt, Human
agauuucugaggaaa

SEQ ID NO: 1417801 - RNA, 15 nt, Human
agauuuugauagcaa

SEQ ID NO: 1417802 - RNA, 18 nt, Human
agauuuugauagcaaagc

SEQ ID NO: 1417803 - RNA, 19 nt, Human
agauuuugauagcaaagcg

SEQ ID NO: 1417804 - RNA, 22 nt, Human
agauuuucuuuugccuuuugca

SEQ ID NO: 1417805 - RNA, 19 nt, Human
agauuuucugguucuaaca

SEQ ID NO: 1417806 - RNA, 18 nt, Human
agauuuucugguucuaac

SEQ ID NO: 1417807 - RNA, 17 nt, Human
agauuuucugguucuaa

SEQ ID NO: 1417808 - RNA, 16 nt, Human
agauuuucugguucua

SEQ ID NO: 1417809 - RNA, 12 nt, Human
agauuuucuggu

SEQ ID NO: 1417810 - RNA, 19 nt, Human
agauuuucugcuacuuugc

SEQ ID NO: 1417811 - RNA, 21 nt, Human
agcaacuuguccuagcacaga

SEQ ID NO: 1417812 - RNA, 20 nt, Human
agcaacucuugauuauccau

SEQ ID NO: 1417813 - RNA, 16 nt, Human
agcaacucuugauuau

SEQ ID NO: 1417814 - RNA, 19 nt, Human
agcaagaaggcaaaaauag

SEQ ID NO: 1417815 - RNA, 14 nt, Human
agcaacuuguccua

SEQ ID NO: 1417816 - RNA, 14 nt, Human
agcaacucuugauu

SEQ ID NO: 1417817 - RNA, 16 nt, Human
agcaacuaucagacua

SEQ ID NO: 1417818 - RNA, 16 nt, Human
agcaacuaggccuuca

SEQ ID NO: 1417819 - RNA, 21 nt, Human
agcaacuacagucuaaagcug

SEQ ID NO: 1417820 - RNA, 13 nt, Human
agcaacggcacag

SEQ ID NO: 1417821 - RNA, 23 nt, Human
agcaacgcuauuccagcuguccc

SEQ ID NO: 1417822 - RNA, 20 nt, Human
agcaacgcuauuccagcugu

SEQ ID NO: 1417823 - RNA, 19 nt, Human
agcaacgcuauuccagcug

SEQ ID NO: 1417824 - RNA, 18 nt, Human
agcaacgcuauuccagcu

SEQ ID NO: 1417825 - RNA, 14 nt, Human
agcaaaaaagaaaa

SEQ ID NO: 1417826 - RNA, 12 nt, Human
agcaaaaaagaa

SEQ ID NO: 1417827 - RNA, 18 nt, Human
agauuuuuuuuuuuucuc

SEQ ID NO: 1417828 - RNA, 16 nt, Human
agauuuuuuaauaauu

SEQ ID NO: 1417829 - RNA, 14 nt, Human
agauuuuuuaauaa

SEQ ID NO: 1417830 - RNA, 13 nt, Human
agauuuuuuaaua

SEQ ID NO: 1417831 - RNA, 22 nt, Human
ugagaagugaaugcugggacuc

SEQ ID NO: 1417832 - RNA, 21 nt, Human
ugagaagugaaugcugggacu

SEQ ID NO: 1417833 - RNA, 19 nt, Human
ugagaagugaaugcuggga

SEQ ID NO: 1417834 - RNA, 18 nt, Human
ugagaagugaaugcuggg

SEQ ID NO: 1417835 - RNA, 14 nt, Human
agcaagauuucaga

SEQ ID NO: 1417836 - RNA, 21 nt, Human
agcaagaggccguggcugcug

SEQ ID NO: 1417837 - RNA, 19 nt, Human
agcaagaggccguggcugc

SEQ ID NO: 1417838 - RNA, 22 nt, Human
agcaagacuucucuuugccuca

SEQ ID NO: 1417839 - RNA, 23 nt, Human
agcaagacuucucuuugccucaa

SEQ ID NO: 1417840 - RNA, 21 nt, Human
agcaagacuucucuuugccuc

SEQ ID NO: 1417841 - RNA, 21 nt, Human
agcaagacccuaaacauccau

SEQ ID NO: 1417842 - RNA, 17 nt, Human
agcaagaccccaucuca

SEQ ID NO: 1417843 - RNA, 20 nt, Human
ugaccugugagcccagcugg

SEQ ID NO: 1417844 - RNA, 17 nt, Human
ugaccugaggcuguggu

SEQ ID NO: 1417845 - RNA, 15 nt, Human
ugaccugaggcugug

SEQ ID NO: 1417846 - RNA, 12 nt, Human
ugaccugaggcu

SEQ ID NO: 1417847 - RNA, 21 nt, Human
ugacccggcacccccugcagc

SEQ ID NO: 1417848 - RNA, 16 nt, Human
ugaccuuaaaugcaac

SEQ ID NO: 1417849 - RNA, 14 nt, Human
ugaccuuaaaugca

SEQ ID NO: 1417850 - RNA, 13 nt, Human
ugaccccugcuca

SEQ ID NO: 1417851 - RNA, 20 nt, Human
ugaccccagggcacaggagc

SEQ ID NO: 1417852 - RNA, 19 nt, Human
ugaccccagggcacaggag

SEQ ID NO: 1417853 - RNA, 18 nt, Human
ugaccccagggcacagga

SEQ ID NO: 1417854 - RNA, 17 nt, Human
ugaccccagggcacagg

SEQ ID NO: 1417855 - RNA, 13 nt, Human
ugaccccagggca

SEQ ID NO: 1417856 - RNA, 12 nt, Human
ugaccccagggc

SEQ ID NO: 1417857 - RNA, 11 nt, Human
ugaccccaggg

SEQ ID NO: 1417858 - RNA, 13 nt, Human
ugaccccagagga

SEQ ID NO: 1417859 - RNA, 22 nt, Human
ugaccccaaacaccuuccagcu

SEQ ID NO: 1417860 - RNA, 18 nt, Human
ugacccggcacccccugc

SEQ ID NO: 1417861 - RNA, 22 nt, Human
ugacccggcacccccugcagcu

SEQ ID NO: 1417862 - RNA, 20 nt, Human
ugacccggcacccccugcag

SEQ ID NO: 1417863 - RNA, 19 nt, Human
ugacccggcacccccugca

SEQ ID NO: 1417864 - RNA, 21 nt, Human
ugacccucaucuuucuuccaa

SEQ ID NO: 1417865 - RNA, 22 nt, Human
ugacucaagaagugaagaaugc

SEQ ID NO: 1417866 - RNA, 15 nt, Human
ugacucaagaaguga

SEQ ID NO: 1417867 - RNA, 14 nt, Human
ugacucaagaagug

SEQ ID NO: 1417868 - RNA, 12 nt, Human
ugacucaagaag

SEQ ID NO: 1417869 - RNA, 21 nt, Human
ugacuagggagccauguuuca

SEQ ID NO: 1417870 - RNA, 20 nt, Human
ugacuagggagccauguuuc

SEQ ID NO: 1417871 - RNA, 18 nt, Human
ugacuagggagccauguu

SEQ ID NO: 1417872 - RNA, 17 nt, Human
ugacuagggagccaugu

SEQ ID NO: 1417873 - RNA, 13 nt, Human
ugacuagggagcc

SEQ ID NO: 1417874 - RNA, 23 nt, Human
ugacuagaugauggaugccaaua

SEQ ID NO: 1417875 - RNA, 19 nt, Human
ugacucacaccugaacuga

SEQ ID NO: 1417876 - RNA, 14 nt, Human
ugacucacaccuga

SEQ ID NO: 1417877 - RNA, 17 nt, Human
ugacucgggggugggga

SEQ ID NO: 1417878 - RNA, 16 nt, Human
ugacucgggggugggg

SEQ ID NO: 1417879 - RNA, 13 nt, Human
ugacuuacuguac

SEQ ID NO: 1417880 - RNA, 15 nt, Human
ugacuuacuguacau

SEQ ID NO: 1417881 - RNA, 16 nt, Human
ugacuuacuguacaug

SEQ ID NO: 1417882 - RNA, 19 nt, Human
agauguuugauagauuuuc

SEQ ID NO: 1417883 - RNA, 17 nt, Human
agauguuugauagauuu

SEQ ID NO: 1417884 - RNA, 16 nt, Human
agauguuuauuucagg

SEQ ID NO: 1417885 - RNA, 15 nt, Human
agauguuuauuucag

SEQ ID NO: 1417886 - RNA, 22 nt, Human
agauguuuauucuucuagaguu

SEQ ID NO: 1417887 - RNA, 21 nt, Human
agauguuuauucuucuagagu

SEQ ID NO: 1417888 - RNA, 20 nt, Human
agauguuuauucuucuagag

SEQ ID NO: 1417889 - RNA, 19 nt, Human
agauguuuauucuucuaga

SEQ ID NO: 1417890 - RNA, 18 nt, Human
agauguuuauucuucuag

SEQ ID NO: 1417891 - RNA, 21 nt, Human
agauguucucuaucauuuaau

SEQ ID NO: 1417892 - RNA, 21 nt, Human
ugaccccaaacaccuuccagc

SEQ ID NO: 1417893 - RNA, 13 nt, Human
agauuaagaaaua

SEQ ID NO: 1417894 - RNA, 20 nt, Human
agaugcuccuugggcccuuu

SEQ ID NO: 1417895 - RNA, 15 nt, Human
agaugcuccuugggc

SEQ ID NO: 1417896 - RNA, 16 nt, Human
agaugcugaaaauguc

SEQ ID NO: 1417897 - RNA, 15 nt, Human
agaugcccaaauccu

SEQ ID NO: 1417898 - RNA, 16 nt, Human
agaugcagggcaguca

SEQ ID NO: 1417899 - RNA, 14 nt, Human
ugacacucccuugg

SEQ ID NO: 1417900 - RNA, 13 nt, Human
agaugcagggcag

SEQ ID NO: 1417901 - RNA, 17 nt, Human
agaugcaguucugaaga

SEQ ID NO: 1417902 - RNA, 16 nt, Human
agaugcaguucugaag

SEQ ID NO: 1417903 - RNA, 14 nt, Human
ugauuccuuuaaca

SEQ ID NO: 1417904 - RNA, 15 nt, Human
ugauuccuuuaacaa

SEQ ID NO: 1417905 - RNA, 22 nt, Human
ugauuccuugauggagauauuu

SEQ ID NO: 1417906 - RNA, 18 nt, Human
ugauuccauccaccuuuc

SEQ ID NO: 1417907 - RNA, 16 nt, Human
ugauuccauccaccuu

SEQ ID NO: 1417908 - RNA, 22 nt, Human
ugauucauuuuaacaucugaga

SEQ ID NO: 1417909 - RNA, 21 nt, Human
ugauucaguguuaaaugugau

SEQ ID NO: 1417910 - RNA, 12 nt, Human
ugauucaguguu

SEQ ID NO: 1417911 - RNA, 20 nt, Human
ugauucauuuuaacaucuga

SEQ ID NO: 1417912 - RNA, 24 nt, Human
ugauucaguguuaaaugugaugaa

SEQ ID NO: 1417913 - RNA, 21 nt, Human
agcccaggaagucucaucugg

SEQ ID NO: 1417914 - RNA, 12 nt, Human
agcccagcucca

SEQ ID NO: 1417915 - RNA, 19 nt, Human
agcccagccccacuccucu

SEQ ID NO: 1417916 - RNA, 16 nt, Human
agcccagccccacucc

SEQ ID NO: 1417917 - RNA, 11 nt, Human
agcccagccca

SEQ ID NO: 1417918 - RNA, 16 nt, Human
agcccagcugggucag

SEQ ID NO: 1417919 - RNA, 15 nt, Human
agcccagcuggguca

SEQ ID NO: 1417920 - RNA, 13 nt, Human
agcccagcugggu

SEQ ID NO: 1417921 - RNA, 14 nt, Human
agcccagcucugaa

SEQ ID NO: 1417922 - RNA, 21 nt, Human
agccauauuuguaaaaugaca

SEQ ID NO: 1417923 - RNA, 16 nt, Human
agccaucaaaaugcuu

SEQ ID NO: 1417924 - RNA, 15 nt, Human
agccaucaaaaugcu

SEQ ID NO: 1417925 - RNA, 14 nt, Human
agccaucaaaaugc

SEQ ID NO: 1417926 - RNA, 13 nt, Human
agccaucaaaaug

SEQ ID NO: 1417927 - RNA, 17 nt, Human
agccaugucuucucccu

SEQ ID NO: 1417928 - RNA, 16 nt, Human
agccaugucuucuccc

SEQ ID NO: 1417929 - RNA, 15 nt, Human
agccaugucuucucc

SEQ ID NO: 1417930 - RNA, 22 nt, Human
agcccagagacauacuugaagg

SEQ ID NO: 1417931 - RNA, 21 nt, Human
agcccagagacauacuugaag

SEQ ID NO: 1417932 - RNA, 12 nt, Human
agcccagagaca

SEQ ID NO: 1417933 - RNA, 11 nt, Human
agcccagagac

SEQ ID NO: 1417934 - RNA, 10 nt, Human
agcccagaga

SEQ ID NO: 1417935 - RNA, 21 nt, Human
agccaugucuucucccuggaa

SEQ ID NO: 1417936 - RNA, 13 nt, Human
agccaggcccagc

SEQ ID NO: 1417937 - RNA, 14 nt, Human
agccaggcccagcc

SEQ ID NO: 1417938 - RNA, 23 nt, Human
agccaggggagcagaggggcaga

SEQ ID NO: 1417939 - RNA, 18 nt, Human
agccaggggagcagaggg

SEQ ID NO: 1417940 - RNA, 17 nt, Human
agccaggggagcagagg

SEQ ID NO: 1417941 - RNA, 16 nt, Human
agccagggucuccaga

SEQ ID NO: 1417942 - RNA, 14 nt, Human
agccagggucucca

SEQ ID NO: 1417943 - RNA, 21 nt, Human
agccagggggagcugggccug

SEQ ID NO: 1417944 - RNA, 19 nt, Human
agccagggggagcugggcc

SEQ ID NO: 1417945 - RNA, 16 nt, Human
agccauauuuguaaaa

SEQ ID NO: 1417946 - RNA, 14 nt, Human
agccauauuuguaa

SEQ ID NO: 1417947 - RNA, 10 nt, Human
agccauagug

SEQ ID NO: 1417948 - RNA, 23 nt, Human
agccaguuuggguaaaauacuuu

SEQ ID NO: 1417949 - RNA, 22 nt, Human
agccaguuuggguaaaauacuu

SEQ ID NO: 1417950 - RNA, 23 nt, Human
agccagugcccugagccaggguc

SEQ ID NO: 1417951 - RNA, 18 nt, Human
agccagugcccugagcca

SEQ ID NO: 1417952 - RNA, 17 nt, Human
agccagugcccugagcc

SEQ ID NO: 1417953 - RNA, 16 nt, Human
agccagugcccugagc

SEQ ID NO: 1417954 - RNA, 15 nt, Human
agccagugcccugag

SEQ ID NO: 1417955 - RNA, 15 nt, Human
agccagggucuccag

SEQ ID NO: 1417956 - RNA, 23 nt, Human
agccaguaaaugggggugcauuu

SEQ ID NO: 1417957 - RNA, 14 nt, Human
agccagcuuucccu

SEQ ID NO: 1417958 - RNA, 13 nt, Human
agccagcuuuccc

SEQ ID NO: 1417959 - RNA, 21 nt, Human
agccagcuuguuuacaugcuu

SEQ ID NO: 1417960 - RNA, 20 nt, Human
agccagcuuguuuacaugcu

SEQ ID NO: 1417961 - RNA, 19 nt, Human
agccagcuuguuuacaugc

SEQ ID NO: 1417962 - RNA, 12 nt, Human
agccagcuuguu

SEQ ID NO: 1417963 - RNA, 16 nt, Human
agccagcucugcauua

SEQ ID NO: 1417964 - RNA, 22 nt, Human
agccagaacuugacccugagcu

SEQ ID NO: 1417965 - RNA, 14 nt, Human
agccaggagcuggg

SEQ ID NO: 1417966 - RNA, 18 nt, Human
agccaggagcugggcaga

SEQ ID NO: 1417967 - RNA, 20 nt, Human
agccaggagaagcucagcug

SEQ ID NO: 1417968 - RNA, 15 nt, Human
agccaggagaagcuc

SEQ ID NO: 1417969 - RNA, 14 nt, Human
agccaggagaagcu

SEQ ID NO: 1417970 - RNA, 13 nt, Human
agccaggagaagc

SEQ ID NO: 1417971 - RNA, 23 nt, Human
agccaggaauuucccaggacccu

SEQ ID NO: 1417972 - RNA, 22 nt, Human
agccaggaauuucccaggaccc

SEQ ID NO: 1417973 - RNA, 21 nt, Human
agccaggaauuucccaggacc

SEQ ID NO: 1417974 - RNA, 20 nt, Human
agccaggaauuucccaggac

SEQ ID NO: 1417975 - RNA, 18 nt, Human
agccagcuuucccugccu

SEQ ID NO: 1417976 - RNA, 16 nt, Human
agccagcuuucccugc

SEQ ID NO: 1417977 - RNA, 22 nt, Human
agccagcuuucccugccucuca

SEQ ID NO: 1417978 - RNA, 20 nt, Human
agccaggaagaucccccaga

SEQ ID NO: 1417979 - RNA, 19 nt, Human
agccaggaauuucccagga

SEQ ID NO: 1417980 - RNA, 17 nt, Human
agccaggaauuucccag

SEQ ID NO: 1417981 - RNA, 21 nt, Human
agccaggaagaucccccagaa

SEQ ID NO: 1417982 - RNA, 22 nt, Human
agccaggaagaucccccagaaa

SEQ ID NO: 1417983 - RNA, 14 nt, Human
ugauuacagugcag

SEQ ID NO: 1417984 - RNA, 22 nt, Human
ugauuaaagaugagcuuugucu

SEQ ID NO: 1417985 - RNA, 15 nt, Human
ugauuaaagaugagc

SEQ ID NO: 1417986 - RNA, 16 nt, Human
ugauuacagugcagug

SEQ ID NO: 1417987 - RNA, 22 nt, Human
agccacuccucugacucagggc

SEQ ID NO: 1417988 - RNA, 21 nt, Human
agccacuccucugacucaggg

SEQ ID NO: 1417989 - RNA, 15 nt, Human
agccacuccucugac

SEQ ID NO: 1417990 - RNA, 14 nt, Human
agccacuccucuga

SEQ ID NO: 1417991 - RNA, 17 nt, Human
agccacuuaaaauguuc

SEQ ID NO: 1417992 - RNA, 12 nt, Human
agccacugccau

SEQ ID NO: 1417993 - RNA, 15 nt, Human
agccacuugccugug

SEQ ID NO: 1417994 - RNA, 22 nt, Human
agccacuugccugugcuacaau

SEQ ID NO: 1417995 - RNA, 19 nt, Human
agccacuugccugugcuac

SEQ ID NO: 1417996 - RNA, 13 nt, Human
ugaugaguuguga

SEQ ID NO: 1417997 - RNA, 24 nt, Human
ugaugagggcagcagccagcccug

SEQ ID NO: 1417998 - RNA, 23 nt, Human
ugauuaaaaugcuuccucccagc

SEQ ID NO: 1417999 - RNA, 17 nt, Human
ugauguuuuaaggaugc

SEQ ID NO: 1418000 - RNA, 18 nt, Human
ugauguuuuaaggaugcu

SEQ ID NO: 1418001 - RNA, 15 nt, Human
ugauggugguauguu

SEQ ID NO: 1418002 - RNA, 20 nt, Human
agccacauuuggaauacuuu

SEQ ID NO: 1418003 - RNA, 15 nt, Human
agccacauuuggaau

SEQ ID NO: 1418004 - RNA, 16 nt, Human
agcauuugaaugcauu

SEQ ID NO: 1418005 - RNA, 18 nt, Human
agcauuucucaucaguag

SEQ ID NO: 1418006 - RNA, 11 nt, Human
agcauuugaau

SEQ ID NO: 1418007 - RNA, 12 nt, Human
agcauuugaaug

SEQ ID NO: 1418008 - RNA, 13 nt, Human
agcauuugaaugc

SEQ ID NO: 1418009 - RNA, 14 nt, Human
agcauuugaaugca

SEQ ID NO: 1418010 - RNA, 15 nt, Human
agcauuugaaugcau

SEQ ID NO: 1418011 - RNA, 21 nt, Human
agccaccgaagccgccugugg

SEQ ID NO: 1418012 - RNA, 20 nt, Human
agccaccgaagccgccugug

SEQ ID NO: 1418013 - RNA, 15 nt, Human
agccaccgaagccgc

SEQ ID NO: 1418014 - RNA, 22 nt, Human
agccacccugaggagucugagg

SEQ ID NO: 1418015 - RNA, 21 nt, Human
agccacccugaggagucugag

SEQ ID NO: 1418016 - RNA, 20 nt, Human
agccacccugaggagucuga

SEQ ID NO: 1418017 - RNA, 19 nt, Human
agccacccugaggagucug

SEQ ID NO: 1418018 - RNA, 18 nt, Human
agccacccugaggagucu

SEQ ID NO: 1418019 - RNA, 14 nt, Human
agccacccugagga

SEQ ID NO: 1418020 - RNA, 13 nt, Human
agccacccugagg

SEQ ID NO: 1418021 - RNA, 12 nt, Human
agccacccugag

SEQ ID NO: 1418022 - RNA, 23 nt, Human
agccacauuuggaauacuuuuug

SEQ ID NO: 1418023 - RNA, 22 nt, Human
agccacauuuggaauacuuuuu

SEQ ID NO: 1418024 - RNA, 21 nt, Human
agccacauuuggaauacuuuu

SEQ ID NO: 1418025 - RNA, 14 nt, Human
agccacccugaguu

SEQ ID NO: 1418026 - RNA, 22 nt, Human
agccaccgaagccgccugugga

SEQ ID NO: 1418027 - RNA, 14 nt, Human
ugaucgccuucccc

SEQ ID NO: 1418028 - RNA, 13 nt, Human
ugaucgccuuccc

SEQ ID NO: 1418029 - RNA, 15 nt, Human
ugauccuuacaaguu

SEQ ID NO: 1418030 - RNA, 20 nt, Human
ugauccuguauucagacaga

SEQ ID NO: 1418031 - RNA, 21 nt, Human
ugauccuguauucagacagau

SEQ ID NO: 1418032 - RNA, 20 nt, Human
ugauccuggaggcccaguuc

SEQ ID NO: 1418033 - RNA, 14 nt, Human
ugauccauguaacu

SEQ ID NO: 1418034 - RNA, 13 nt, Human
ugauccauguaac

SEQ ID NO: 1418035 - RNA, 12 nt, Human
ugauccauguaa

SEQ ID NO: 1418036 - RNA, 23 nt, Human
ugaugagggcagcagccagcccu

SEQ ID NO: 1418037 - RNA, 22 nt, Human
ugaugagggcagcagccagccc

SEQ ID NO: 1418038 - RNA, 21 nt, Human
ugaugagggcagcagccagcc

SEQ ID NO: 1418039 - RNA, 19 nt, Human
ugaugagggcagcagccag

SEQ ID NO: 1418040 - RNA, 17 nt, Human
ugaugagggcagcagcc

SEQ ID NO: 1418041 - RNA, 16 nt, Human
ugaugagggcagcagc

SEQ ID NO: 1418042 - RNA, 15 nt, Human
ugaugagggcagcag

SEQ ID NO: 1418043 - RNA, 13 nt, Human
ugaugagggcagc

SEQ ID NO: 1418044 - RNA, 23 nt, Human
ugaugaggcccuccacaccugcg

SEQ ID NO: 1418045 - RNA, 21 nt, Human
ugaugaggcccuccacaccug

SEQ ID NO: 1418046 - RNA, 17 nt, Human
ugaugaggcccuccaca

SEQ ID NO: 1418047 - RNA, 16 nt, Human
ugaugaggcccuccac

SEQ ID NO: 1418048 - RNA, 15 nt, Human
ugaugaggcccucca

SEQ ID NO: 1418049 - RNA, 14 nt, Human
ugaugaggcccucc

SEQ ID NO: 1418050 - RNA, 14 nt, Human
ugaugaauacugua

SEQ ID NO: 1418051 - RNA, 14 nt, Human
ugaugaagagagag

SEQ ID NO: 1418052 - RNA, 15 nt, Human
ugaucgccuucccca

SEQ ID NO: 1418053 - RNA, 18 nt, Human
ugaucggagccuccucuc

SEQ ID NO: 1418054 - RNA, 17 nt, Human
ugaucgccuuucccagg

SEQ ID NO: 1418055 - RNA, 15 nt, Human
ugaucgccuuuccca

SEQ ID NO: 1418056 - RNA, 17 nt, Human
ugaugaagaaguugaua

SEQ ID NO: 1418057 - RNA, 15 nt, Human
agcauugaauggcua

SEQ ID NO: 1418058 - RNA, 23 nt, Human
agcauguuuagacuuuaacauaa

SEQ ID NO: 1418059 - RNA, 24 nt, Human
agcauguuuagacuuuaacauaag

SEQ ID NO: 1418060 - RNA, 22 nt, Human
agcauguuuagacuuuaacaua

SEQ ID NO: 1418061 - RNA, 21 nt, Human
agcauguuuagacuuuaacau

SEQ ID NO: 1418062 - RNA, 18 nt, Human
agcauguuuagacuuuaa

SEQ ID NO: 1418063 - RNA, 13 nt, Human
agcauguuuagac

SEQ ID NO: 1418064 - RNA, 12 nt, Human
agcauguuuaga

SEQ ID NO: 1418065 - RNA, 12 nt, Human
agcauguuacug

SEQ ID NO: 1418066 - RNA, 19 nt, Human
agcaugucuauucagcuuc

SEQ ID NO: 1418067 - RNA, 17 nt, Human
agcaugucuauucagcu

SEQ ID NO: 1418068 - RNA, 20 nt, Human
agcauuguaaaauaauucug

SEQ ID NO: 1418069 - RNA, 16 nt, Human
agcauuguaaaauaau

SEQ ID NO: 1418070 - RNA, 15 nt, Human
agcauuguaaaauaa

SEQ ID NO: 1418071 - RNA, 14 nt, Human
agcauuguaaaaua

SEQ ID NO: 1418072 - RNA, 17 nt, Human
agcauuguaaaagcauu

SEQ ID NO: 1418073 - RNA, 20 nt, Human
agcauuguagugcuuugaga

SEQ ID NO: 1418074 - RNA, 22 nt, Human
agcauuguagugcuuugagaga

SEQ ID NO: 1418075 - RNA, 18 nt, Human
agcauuguagugcuuuga

SEQ ID NO: 1418076 - RNA, 15 nt, Human
agcauuguagugcuu

SEQ ID NO: 1418077 - RNA, 22 nt, Human
agcauuguaaaauuauuucaug

SEQ ID NO: 1418078 - RNA, 14 nt, Human
agcauuucucauca

SEQ ID NO: 1418079 - RNA, 17 nt, Human
agcauuucccuuccuuc

SEQ ID NO: 1418080 - RNA, 16 nt, Human
agcaugucacuaaagc

SEQ ID NO: 1418081 - RNA, 21 nt, Human
agcauguacugagccuuguaa

SEQ ID NO: 1418082 - RNA, 21 nt, Human
agcauguacggauuuucaguu

SEQ ID NO: 1418083 - RNA, 20 nt, Human
agcauguacggauuuucagu

SEQ ID NO: 1418084 - RNA, 17 nt, Human
agcauggcuauuuuaua

SEQ ID NO: 1418085 - RNA, 18 nt, Human
agcauggcuauuuuauau

SEQ ID NO: 1418086 - RNA, 15 nt, Human
agcauggcuauuuua

SEQ ID NO: 1418087 - RNA, 17 nt, Human
agcaugucgucaaagcu

SEQ ID NO: 1418088 - RNA, 20 nt, Human
agcaugucgucaaagcugaa

SEQ ID NO: 1418089 - RNA, 13 nt, Human
agcaucacagaau

SEQ ID NO: 1418090 - RNA, 14 nt, Human
agcaucacagaaug

SEQ ID NO: 1418091 - RNA, 20 nt, Human
agcaucacaugaacuuguaa

SEQ ID NO: 1418092 - RNA, 12 nt, Human
ugaucaaggccu

SEQ ID NO: 1418093 - RNA, 13 nt, Human
ugaucaaggccuu

SEQ ID NO: 1418094 - RNA, 11 nt, Human
ugaucaaggcc

SEQ ID NO: 1418095 - RNA, 20 nt, Human
ugauauuuucugugccugaa

SEQ ID NO: 1418096 - RNA, 17 nt, Human
ugauauuuucugugccu

SEQ ID NO: 1418097 - RNA, 14 nt, Human
ugauauuuucucua

SEQ ID NO: 1418098 - RNA, 15 nt, Human
ugauauuuucucuag

SEQ ID NO: 1418099 - RNA, 19 nt, Human
ugaucaaaaucaauuaaaa

SEQ ID NO: 1418100 - RNA, 17 nt, Human
ugauauucuaagacuua

SEQ ID NO: 1418101 - RNA, 15 nt, Human
ugauauucuaagacu

SEQ ID NO: 1418102 - RNA, 12 nt, Human
ugauauucuaag

SEQ ID NO: 1418103 - RNA, 17 nt, Human
ugauauuucuagcuuau

SEQ ID NO: 1418104 - RNA, 20 nt, Human
ugauacuguugcacgugugu

SEQ ID NO: 1418105 - RNA, 19 nt, Human
ugauacuguugcacgugug

SEQ ID NO: 1418106 - RNA, 18 nt, Human
ugauacuguugcacgugu

SEQ ID NO: 1418107 - RNA, 16 nt, Human
ugauacuguugcacgu

SEQ ID NO: 1418108 - RNA, 14 nt, Human
ugauacuguugcac

SEQ ID NO: 1418109 - RNA, 13 nt, Human
ugauacuguugca

SEQ ID NO: 1418110 - RNA, 11 nt, Human
ugauacuguug

SEQ ID NO: 1418111 - RNA, 22 nt, Human
ugauacuaauaaacuaauaauu

SEQ ID NO: 1418112 - RNA, 16 nt, Human
ugauacuaauaaacua

SEQ ID NO: 1418113 - RNA, 20 nt, Human
ugauacuucgacacuguucu

SEQ ID NO: 1418114 - RNA, 21 nt, Human
ugauacuucgacacuguucuu

SEQ ID NO: 1418115 - RNA, 18 nt, Human
ugauacuucgacacuguu

SEQ ID NO: 1418116 - RNA, 17 nt, Human
ugauacuucgacacugu

SEQ ID NO: 1418117 - RNA, 16 nt, Human
ugauaugugaacaguu

SEQ ID NO: 1418118 - RNA, 19 nt, Human
ugauauguugguagauucu

SEQ ID NO: 1418119 - RNA, 15 nt, Human
ugauaugugaacagu

SEQ ID NO: 1418120 - RNA, 12 nt, Human
ugauaugggucu

SEQ ID NO: 1418121 - RNA, 19 nt, Human
ugauagaaaugccaagcac

SEQ ID NO: 1418122 - RNA, 17 nt, Human
ugauagacaauugaggu

SEQ ID NO: 1418123 - RNA, 18 nt, Human
ugauagacaauugaggua

SEQ ID NO: 1418124 - RNA, 17 nt, Human
ugaguagaguugaucaa

SEQ ID NO: 1418125 - RNA, 21 nt, Human
ugaguacuccacacugcacaa

SEQ ID NO: 1418126 - RNA, 17 nt, Human
ugaguagaaaggccuuu

SEQ ID NO: 1418127 - RNA, 20 nt, Human
ugaguacuccacacugcaca

SEQ ID NO: 1418128 - RNA, 20 nt, Human
ugaguagagagcaagggaag

SEQ ID NO: 1418129 - RNA, 14 nt, Human
ugaguagaguugau

SEQ ID NO: 1418130 - RNA, 18 nt, Human
ugaguagaaaggccuuua

SEQ ID NO: 1418131 - RNA, 23 nt, Human
ugaguagaaaggccuuuaaaauu

SEQ ID NO: 1418132 - RNA, 19 nt, Human
ugaguaacauuugcuguuu

SEQ ID NO: 1418133 - RNA, 18 nt, Human
ugaguaacauuugcuguu

SEQ ID NO: 1418134 - RNA, 17 nt, Human
ugaguaacauuugcugu

SEQ ID NO: 1418135 - RNA, 16 nt, Human
ugaguaacauuugcug

SEQ ID NO: 1418136 - RNA, 15 nt, Human
ugaguaacauuugcu

SEQ ID NO: 1418137 - RNA, 10 nt, Human
ugaguaacau

SEQ ID NO: 1418138 - RNA, 22 nt, Human
ugaguaacugauuuguaacaag

SEQ ID NO: 1418139 - RNA, 22 nt, Human
ugagguuuuauuucauuuuuca

SEQ ID NO: 1418140 - RNA, 15 nt, Human
ugagacaaugccuug

SEQ ID NO: 1418141 - RNA, 16 nt, Human
ugagacaaugccuugu

SEQ ID NO: 1418142 - RNA, 23 nt, Human
ugagacaagaaaauaagagcuca

SEQ ID NO: 1418143 - RNA, 21 nt, Human
ugagacaagaaaauaagagcu

SEQ ID NO: 1418144 - RNA, 18 nt, Human
ugagacaaauggaggccu

SEQ ID NO: 1418145 - RNA, 20 nt, Human
ugagaauuugagugcucuga

SEQ ID NO: 1418146 - RNA, 21 nt, Human
agcauaauacuugcuuuggaa

SEQ ID NO: 1418147 - RNA, 15 nt, Human
agcauacguacacau

SEQ ID NO: 1418148 - RNA, 23 nt, Human
agcauaaguuucugggaccucag

SEQ ID NO: 1418149 - RNA, 17 nt, Human
agcauaaguuucuggga

SEQ ID NO: 1418150 - RNA, 23 nt, Human
agcauaaauguugacaugggaca

SEQ ID NO: 1418151 - RNA, 16 nt, Human
agcauacguacacauu

SEQ ID NO: 1418152 - RNA, 17 nt, Human
agcauacguacacauuu

SEQ ID NO: 1418153 - RNA, 18 nt, Human
agcauacguacacauuuu

SEQ ID NO: 1418154 - RNA, 19 nt, Human
agcauacguacacauuuua

SEQ ID NO: 1418155 - RNA, 20 nt, Human
agcauacguacacauuuuau

SEQ ID NO: 1418156 - RNA, 21 nt, Human
agcauacguacacauuuuauu

SEQ ID NO: 1418157 - RNA, 17 nt, Human
agcauaucugccuuuau

SEQ ID NO: 1418158 - RNA, 20 nt, Human
agcauaucugccuuuauugu

SEQ ID NO: 1418159 - RNA, 22 nt, Human
agcauaucugccuuuauugugu

SEQ ID NO: 1418160 - RNA, 23 nt, Human
agcauaucugccuuuauuguguu

SEQ ID NO: 1418161 - RNA, 18 nt, Human
ugauaaugaacagaacau

SEQ ID NO: 1418162 - RNA, 20 nt, Human
ugauaaugaacagaacauag

SEQ ID NO: 1418163 - RNA, 16 nt, Human
ugauaaugaacagaac

SEQ ID NO: 1418164 - RNA, 15 nt, Human
ugauaaugaacagaa

SEQ ID NO: 1418165 - RNA, 22 nt, Human
ugauaagaucuuuuauuuugcc

SEQ ID NO: 1418166 - RNA, 15 nt, Human
ugauaagaucuuuua

SEQ ID NO: 1418167 - RNA, 12 nt, Human
ugauaagaucuu

SEQ ID NO: 1418168 - RNA, 18 nt, Human
ugauaagagaaucaacau

SEQ ID NO: 1418169 - RNA, 17 nt, Human
ugauaagagaaucaaca

SEQ ID NO: 1418170 - RNA, 15 nt, Human
ugauacuaauaaacu

SEQ ID NO: 1418171 - RNA, 14 nt, Human
ugauacuaauaaac

SEQ ID NO: 1418172 - RNA, 13 nt, Human
ugauacuaauaaa

SEQ ID NO: 1418173 - RNA, 16 nt, Human
ugauacuaagcauuga

SEQ ID NO: 1418174 - RNA, 14 nt, Human
ugauacuaagcauu

SEQ ID NO: 1418175 - RNA, 16 nt, Human
ugauacgaugcuucaa

SEQ ID NO: 1418176 - RNA, 14 nt, Human
ugauacuacaguuu

SEQ ID NO: 1418177 - RNA, 17 nt, Human
ugauacuacaguuuguu

SEQ ID NO: 1418178 - RNA, 21 nt, Human
ugauacagaaaaguugaauuu

SEQ ID NO: 1418179 - RNA, 12 nt, Human
ugauacagaaaa

SEQ ID NO: 1418180 - RNA, 21 nt, Human
ugauacaaugcugugcccuaa

SEQ ID NO: 1418181 - RNA, 20 nt, Human
ugauacaaugcugugcccua

SEQ ID NO: 1418182 - RNA, 22 nt, Human
ugagugggguuaucucuguguu

SEQ ID NO: 1418183 - RNA, 21 nt, Human
ugagugggguuaucucugugu

SEQ ID NO: 1418184 - RNA, 19 nt, Human
ugagugcuugcuuuucaug

SEQ ID NO: 1418185 - RNA, 19 nt, Human
ugagugcucugaucccucu

SEQ ID NO: 1418186 - RNA, 13 nt, Human
ugagugcucugau

SEQ ID NO: 1418187 - RNA, 12 nt, Human
ugagugcucuga

SEQ ID NO: 1418188 - RNA, 18 nt, Human
ugaguauuaaaauguaug

SEQ ID NO: 1418189 - RNA, 14 nt, Human
ugaguauuaaaaug

SEQ ID NO: 1418190 - RNA, 17 nt, Human
ugaguauuaaaauguau

SEQ ID NO: 1418191 - RNA, 18 nt, Human
ugagucaaguuguuccuu

SEQ ID NO: 1418192 - RNA, 15 nt, Human
ugagucaaaaaaucu

SEQ ID NO: 1418193 - RNA, 15 nt, Human
agcccaguagaccuu

SEQ ID NO: 1418194 - RNA, 18 nt, Human
agcccagugcacugaaag

SEQ ID NO: 1418195 - RNA, 18 nt, Human
agcccaguagaccuuguu

SEQ ID NO: 1418196 - RNA, 22 nt, Human
ugauucuauuuauauguacaug

SEQ ID NO: 1418197 - RNA, 21 nt, Human
ugauucuauuuauauguacau

SEQ ID NO: 1418198 - RNA, 18 nt, Human
ugauucgaaugacacugu

SEQ ID NO: 1418199 - RNA, 17 nt, Human
agcccauggagauugac

SEQ ID NO: 1418200 - RNA, 17 nt, Human
agcccauccugaccagc

SEQ ID NO: 1418201 - RNA, 23 nt, Human
agcccauccugaccagcugcucc

SEQ ID NO: 1418202 - RNA, 16 nt, Human
agcccauccugaccag

SEQ ID NO: 1418203 - RNA, 15 nt, Human
agcccauccugacca

SEQ ID NO: 1418204 - RNA, 14 nt, Human
agcccauccugacc

SEQ ID NO: 1418205 - RNA, 14 nt, Human
agcccauaugcuac

SEQ ID NO: 1418206 - RNA, 21 nt, Human
agcccauaugcuaccaccagc

SEQ ID NO: 1418207 - RNA, 17 nt, Human
agcccccagcucccacc

SEQ ID NO: 1418208 - RNA, 16 nt, Human
agcccccagccuguca

SEQ ID NO: 1418209 - RNA, 22 nt, Human
agcccccagcuaagaaccugga

SEQ ID NO: 1418210 - RNA, 20 nt, Human
agcccccagcuaagaaccug

SEQ ID NO: 1418211 - RNA, 19 nt, Human
agcccccagcuaagaaccu

SEQ ID NO: 1418212 - RNA, 12 nt, Human
agcccccagcua

SEQ ID NO: 1418213 - RNA, 15 nt, Human
agcccccagccuguc

SEQ ID NO: 1418214 - RNA, 14 nt, Human
agcccccagccugu

SEQ ID NO: 1418215 - RNA, 13 nt, Human
agcccccagccug

SEQ ID NO: 1418216 - RNA, 14 nt, Human
agcccccagagccc

SEQ ID NO: 1418217 - RNA, 18 nt, Human
agcccccagagcccaggc

SEQ ID NO: 1418218 - RNA, 13 nt, Human
agcccccagagcc

SEQ ID NO: 1418219 - RNA, 12 nt, Human
agcccccagagc

SEQ ID NO: 1418220 - RNA, 19 nt, Human
agcccccaccgugggcagg

SEQ ID NO: 1418221 - RNA, 23 nt, Human
agcccccacccuguuccugcugc

SEQ ID NO: 1418222 - RNA, 22 nt, Human
agcccccacccuguuccugcug

SEQ ID NO: 1418223 - RNA, 19 nt, Human
agcccccacccuguuccug

SEQ ID NO: 1418224 - RNA, 18 nt, Human
agcccccacccuguuccu

SEQ ID NO: 1418225 - RNA, 17 nt, Human
agcccccacccuguucc

SEQ ID NO: 1418226 - RNA, 13 nt, Human
agcccccacccug

SEQ ID NO: 1418227 - RNA, 22 nt, Human
agcccauggagauugaccugga

SEQ ID NO: 1418228 - RNA, 21 nt, Human
agcccauggagauugaccugg

SEQ ID NO: 1418229 - RNA, 19 nt, Human
agcccauggagauugaccu

SEQ ID NO: 1418230 - RNA, 22 nt, Human
agcccccagcucccaccucccc

SEQ ID NO: 1418231 - RNA, 16 nt, Human
agccccugccccuccu

SEQ ID NO: 1418232 - RNA, 20 nt, Human
agcccugucagcaugaauuu

SEQ ID NO: 1418233 - RNA, 22 nt, Human
agccccuucugcucagcucugg

SEQ ID NO: 1418234 - RNA, 19 nt, Human
agccccuucugcucagcuc

SEQ ID NO: 1418235 - RNA, 16 nt, Human
agccccuucugcucag

SEQ ID NO: 1418236 - RNA, 15 nt, Human
agccccuucugcuca

SEQ ID NO: 1418237 - RNA, 22 nt, Human
ugcacguggccucuugagcagu

SEQ ID NO: 1418238 - RNA, 19 nt, Human
ugcacguggccucuugagc

SEQ ID NO: 1418239 - RNA, 18 nt, Human
ugcacaccccacucccac

SEQ ID NO: 1418240 - RNA, 16 nt, Human
ugcacaccccacuccc

SEQ ID NO: 1418241 - RNA, 10 nt, Human
ugcacacauu

SEQ ID NO: 1418242 - RNA, 11 nt, Human
ugcacacauuu

SEQ ID NO: 1418243 - RNA, 22 nt, Human
ugcaccaugcugcuggggaaga

SEQ ID NO: 1418244 - RNA, 23 nt, Human
ugcaccaugcugcuggggaagac

SEQ ID NO: 1418245 - RNA, 19 nt, Human
ugcaccaugcugcugggga

SEQ ID NO: 1418246 - RNA, 19 nt, Human
ugcacaccccacucccaca

SEQ ID NO: 1418247 - RNA, 20 nt, Human
ugcacaccuacuagucacca

SEQ ID NO: 1418248 - RNA, 22 nt, Human
ugcacaccuacuagucaccaga

SEQ ID NO: 1418249 - RNA, 14 nt, Human
agccucccaaagug

SEQ ID NO: 1418250 - RNA, 13 nt, Human
agccucccaaagu

SEQ ID NO: 1418251 - RNA, 16 nt, Human
agccgugguccuuugg

SEQ ID NO: 1418252 - RNA, 13 nt, Human
agccgacccccuc

SEQ ID NO: 1418253 - RNA, 17 nt, Human
agcccuucuuuccacag

SEQ ID NO: 1418254 - RNA, 23 nt, Human
agcccuucuauacccacccagaa

SEQ ID NO: 1418255 - RNA, 21 nt, Human
agcccuucuccauggcccugc

SEQ ID NO: 1418256 - RNA, 20 nt, Human
agccgacccccucucccugc

SEQ ID NO: 1418257 - RNA, 21 nt, Human
agccgacaccuuuuuucaaca

SEQ ID NO: 1418258 - RNA, 23 nt, Human
agcccuucuccauggcccugcca

SEQ ID NO: 1418259 - RNA, 19 nt, Human
ugcacguguguuuuucuau

SEQ ID NO: 1418260 - RNA, 16 nt, Human
ugcacuaucuuucagc

SEQ ID NO: 1418261 - RNA, 22 nt, Human
ugcacguguguuuuucuauuaa

SEQ ID NO: 1418262 - RNA, 18 nt, Human
ugcacguguguuuuucua

SEQ ID NO: 1418263 - RNA, 15 nt, Human
ugcacguguguuuuu

SEQ ID NO: 1418264 - RNA, 13 nt, Human
ugcacguguguuu

SEQ ID NO: 1418265 - RNA, 12 nt, Human
ugcacguguguu

SEQ ID NO: 1418266 - RNA, 11 nt, Human
ugcacgugugu

SEQ ID NO: 1418267 - RNA, 14 nt, Human
ugcacucaaccuua

SEQ ID NO: 1418268 - RNA, 15 nt, Human
ugcacuaucuuucag

SEQ ID NO: 1418269 - RNA, 19 nt, Human
agcccuucuauacccaccc

SEQ ID NO: 1418270 - RNA, 20 nt, Human
agcccuucuauacccaccca

SEQ ID NO: 1418271 - RNA, 22 nt, Human
agcccuucuauacccacccaga

SEQ ID NO: 1418272 - RNA, 23 nt, Human
ugcauaacguauaaaagccuguu

SEQ ID NO: 1418273 - RNA, 23 nt, Human
ugcagucccaagcggugucucuc

SEQ ID NO: 1418274 - RNA, 22 nt, Human
ugcagucccaagcggugucucu

SEQ ID NO: 1418275 - RNA, 21 nt, Human
ugcagucccaagcggugucuc

SEQ ID NO: 1418276 - RNA, 20 nt, Human
ugcagucccaagcggugucu

SEQ ID NO: 1418277 - RNA, 14 nt, Human
ugcagucccaagcg

SEQ ID NO: 1418278 - RNA, 13 nt, Human
ugcagucccaagc

SEQ ID NO: 1418279 - RNA, 11 nt, Human
ugcagucccaa

SEQ ID NO: 1418280 - RNA, 22 nt, Human
ugcaguccugaucagagccgug

SEQ ID NO: 1418281 - RNA, 19 nt, Human
ugcaguccugaucagagcc

SEQ ID NO: 1418282 - RNA, 16 nt, Human
ugcagucucuauacca

SEQ ID NO: 1418283 - RNA, 18 nt, Human
ugcagucucuauaccaau

SEQ ID NO: 1418284 - RNA, 19 nt, Human
ugcagucucuauaccaaua

SEQ ID NO: 1418285 - RNA, 20 nt, Human
ugcagucucuauaccaauaa

SEQ ID NO: 1418286 - RNA, 21 nt, Human
ugcagucucuauaccaauaaa

SEQ ID NO: 1418287 - RNA, 23 nt, Human
ugcagucucuauaccaauaaagu

SEQ ID NO: 1418288 - RNA, 22 nt, Human
ugcagucucuauaccaauaaag

SEQ ID NO: 1418289 - RNA, 18 nt, Human
ugcaguacuuugugcauu

SEQ ID NO: 1418290 - RNA, 17 nt, Human
ugcaguacuuugugcau

SEQ ID NO: 1418291 - RNA, 21 nt, Human
ugcaguaacuguuuuuuaagu

SEQ ID NO: 1418292 - RNA, 18 nt, Human
ugcaguaacuguuuuuua

SEQ ID NO: 1418293 - RNA, 16 nt, Human
ugcaguaacuguuuuu

SEQ ID NO: 1418294 - RNA, 11 nt, Human
ugcaguaacug

SEQ ID NO: 1418295 - RNA, 21 nt, Human
ugcaguaaaucuuuuacaacu

SEQ ID NO: 1418296 - RNA, 18 nt, Human
ugcaguaaaucuuuuaca

SEQ ID NO: 1418297 - RNA, 15 nt, Human
ugcaguaaaucuuuu

SEQ ID NO: 1418298 - RNA, 14 nt, Human
ugcaguaaaucuuu

SEQ ID NO: 1418299 - RNA, 17 nt, Human
ugcaggucccuaauaaa

SEQ ID NO: 1418300 - RNA, 12 nt, Human
ugcaggucccua

SEQ ID NO: 1418301 - RNA, 14 nt, Human
ugcaggucccuaau

SEQ ID NO: 1418302 - RNA, 15 nt, Human
ugcaggucccuaaua

SEQ ID NO: 1418303 - RNA, 16 nt, Human
ugcaggucccuaauaa

SEQ ID NO: 1418304 - RNA, 20 nt, Human
ugcagcucaagagaucccaa

SEQ ID NO: 1418305 - RNA, 17 nt, Human
ugcagcgacuggcauac

SEQ ID NO: 1418306 - RNA, 14 nt, Human
ugcagccugcgcca

SEQ ID NO: 1418307 - RNA, 14 nt, Human
ugcagcccugcugc

SEQ ID NO: 1418308 - RNA, 18 nt, Human
agccugaaccccagggcu

SEQ ID NO: 1418309 - RNA, 17 nt, Human
agccugacaacauuucu

SEQ ID NO: 1418310 - RNA, 21 nt, Human
agccugaauuuuguugcuguu

SEQ ID NO: 1418311 - RNA, 20 nt, Human
agccugaauuuuguugcugu

SEQ ID NO: 1418312 - RNA, 22 nt, Human
agccugacaucaaaaaaggcag

SEQ ID NO: 1418313 - RNA, 18 nt, Human
agccugacccucaucuuu

SEQ ID NO: 1418314 - RNA, 19 nt, Human
agccugaaccccagggcug

SEQ ID NO: 1418315 - RNA, 17 nt, Human
ugcagcccccacugccu

SEQ ID NO: 1418316 - RNA, 23 nt, Human
ugcagcccccacugccuuugacc

SEQ ID NO: 1418317 - RNA, 16 nt, Human
ugccacaaggacuucc

SEQ ID NO: 1418318 - RNA, 15 nt, Human
ugccacaaggacuuc

SEQ ID NO: 1418319 - RNA, 15 nt, Human
ugccaauuagcaauu

SEQ ID NO: 1418320 - RNA, 13 nt, Human
ugccaauuucaag

SEQ ID NO: 1418321 - RNA, 21 nt, Human
ugccaaguccagguccuggug

SEQ ID NO: 1418322 - RNA, 20 nt, Human
ugccaaguccagguccuggu

SEQ ID NO: 1418323 - RNA, 17 nt, Human
ugccaaguccagguccu

SEQ ID NO: 1418324 - RNA, 15 nt, Human
ugccaaguccagguc

SEQ ID NO: 1418325 - RNA, 13 nt, Human
ugccaaguccagg

SEQ ID NO: 1418326 - RNA, 21 nt, Human
ugccaagggcuuuguuuugca

SEQ ID NO: 1418327 - RNA, 21 nt, Human
ugccaagggcauaaauuauug

SEQ ID NO: 1418328 - RNA, 17 nt, Human
ugccaagggcauaaauu

SEQ ID NO: 1418329 - RNA, 22 nt, Human
ugcauuggaacuggaggcaggg

SEQ ID NO: 1418330 - RNA, 21 nt, Human
ugcauuggaacuggaggcagg

SEQ ID NO: 1418331 - RNA, 18 nt, Human
ugcauuggaacuggaggc

SEQ ID NO: 1418332 - RNA, 17 nt, Human
ugcauuggaacuggagg

SEQ ID NO: 1418333 - RNA, 19 nt, Human
ugcauugcuuuuuuuuccu

SEQ ID NO: 1418334 - RNA, 18 nt, Human
ugcauugacuuuccccac

SEQ ID NO: 1418335 - RNA, 22 nt, Human
ugcauugacuuuccccaccaga

SEQ ID NO: 1418336 - RNA, 17 nt, Human
ugcauugacuuucccca

SEQ ID NO: 1418337 - RNA, 20 nt, Human
ugcauugaccgcgacuaauu

SEQ ID NO: 1418338 - RNA, 22 nt, Human
ugcauugaccgcgacuaauuuc

SEQ ID NO: 1418339 - RNA, 23 nt, Human
ugcauugaacacaaacuguaaau

SEQ ID NO: 1418340 - RNA, 18 nt, Human
ugcauuaugcaauuuuua

SEQ ID NO: 1418341 - RNA, 13 nt, Human
ugcauuaugcaau

SEQ ID NO: 1418342 - RNA, 21 nt, Human
ugcauuaucuagauacuguau

SEQ ID NO: 1418343 - RNA, 22 nt, Human
ugcauuaucuagauacuguauc

SEQ ID NO: 1418344 - RNA, 23 nt, Human
agccuugugaugucauacagaga

SEQ ID NO: 1418345 - RNA, 22 nt, Human
agccuugugaugucauacagag

SEQ ID NO: 1418346 - RNA, 21 nt, Human
agccuugugaugucauacaga

SEQ ID NO: 1418347 - RNA, 18 nt, Human
agccuuguaauucuaaau

SEQ ID NO: 1418348 - RNA, 16 nt, Human
agccuuguaauucuaa

SEQ ID NO: 1418349 - RNA, 15 nt, Human
agccuuccacccagg

SEQ ID NO: 1418350 - RNA, 14 nt, Human
agccuuccacccag

SEQ ID NO: 1418351 - RNA, 13 nt, Human
agccuuccaccca

SEQ ID NO: 1418352 - RNA, 20 nt, Human
agccuuggggcugaugcagu

SEQ ID NO: 1418353 - RNA, 14 nt, Human
agcggaggugugga

SEQ ID NO: 1418354 - RNA, 20 nt, Human
ugcauuaucuagauacugua

SEQ ID NO: 1418355 - RNA, 22 nt, Human
agcgccuccauccaaggccagg

SEQ ID NO: 1418356 - RNA, 23 nt, Human
agcgccuccauccaaggccaggu

SEQ ID NO: 1418357 - RNA, 20 nt, Human
agcgccuccauccaaggcca

SEQ ID NO: 1418358 - RNA, 18 nt, Human
agcgccuccauccaaggc

SEQ ID NO: 1418359 - RNA, 18 nt, Human
agcgccuccaacccuagc

SEQ ID NO: 1418360 - RNA, 19 nt, Human
agcgccuccaacccuagca

SEQ ID NO: 1418361 - RNA, 22 nt, Human
agcgccuccaacccuagcaaaa

SEQ ID NO: 1418362 - RNA, 23 nt, Human
agcgccuccaacccuagcaaaag

SEQ ID NO: 1418363 - RNA, 23 nt, Human
agccugggggccuggcuggcuga

SEQ ID NO: 1418364 - RNA, 15 nt, Human
agccuggggucugga

SEQ ID NO: 1418365 - RNA, 22 nt, Human
agccugggggccuggcuggcug

SEQ ID NO: 1418366 - RNA, 21 nt, Human
agccugggggccuggcuggcu

SEQ ID NO: 1418367 - RNA, 20 nt, Human
agccugggggccuggcuggc

SEQ ID NO: 1418368 - RNA, 19 nt, Human
agccugggggccuggcugg

SEQ ID NO: 1418369 - RNA, 18 nt, Human
agccugggggccuggcug

SEQ ID NO: 1418370 - RNA, 17 nt, Human
agccugggggccuggcu

SEQ ID NO: 1418371 - RNA, 16 nt, Human
agccugggggccuggc

SEQ ID NO: 1418372 - RNA, 15 nt, Human
agccugggggccugg

SEQ ID NO: 1418373 - RNA, 14 nt, Human
agccugggggccug

SEQ ID NO: 1418374 - RNA, 22 nt, Human
ugcauacacuuuuucucuuucc

SEQ ID NO: 1418375 - RNA, 12 nt, Human
ugcauaccacuu

SEQ ID NO: 1418376 - RNA, 14 nt, Human
ugcauaccacuuuu

SEQ ID NO: 1418377 - RNA, 23 nt, Human
agccuucaagcucugagggaaag

SEQ ID NO: 1418378 - RNA, 20 nt, Human
agccuucaagcucugaggga

SEQ ID NO: 1418379 - RNA, 19 nt, Human
agccuucaagcucugaggg

SEQ ID NO: 1418380 - RNA, 18 nt, Human
agccuucaagcucugagg

SEQ ID NO: 1418381 - RNA, 17 nt, Human
agccuucaagcucugag

SEQ ID NO: 1418382 - RNA, 16 nt, Human
agccuucaagcucuga

SEQ ID NO: 1418383 - RNA, 15 nt, Human
agccuucaagcucug

SEQ ID NO: 1418384 - RNA, 14 nt, Human
agccuucaagcucu

SEQ ID NO: 1418385 - RNA, 13 nt, Human
agccuucaagcuc

SEQ ID NO: 1418386 - RNA, 20 nt, Human
agccuuagcucucccaacuc

SEQ ID NO: 1418387 - RNA, 19 nt, Human
agccuguucauggcagaug

SEQ ID NO: 1418388 - RNA, 18 nt, Human
agccuguucauggcagau

SEQ ID NO: 1418389 - RNA, 17 nt, Human
agccuguucauggcaga

SEQ ID NO: 1418390 - RNA, 16 nt, Human
agccuguucauggcag

SEQ ID NO: 1418391 - RNA, 14 nt, Human
agccuguucauggc

SEQ ID NO: 1418392 - RNA, 13 nt, Human
agccuguuuaaga

SEQ ID NO: 1418393 - RNA, 15 nt, Human
agccuguuuaagaga

SEQ ID NO: 1418394 - RNA, 17 nt, Human
agcuagacacaugaagg

SEQ ID NO: 1418395 - RNA, 16 nt, Human
agcuagacacaugaag

SEQ ID NO: 1418396 - RNA, 15 nt, Human
agcuagacacaugaa

SEQ ID NO: 1418397 - RNA, 20 nt, Human
agcuagaauugaguguuuaa

SEQ ID NO: 1418398 - RNA, 14 nt, Human
agcuagaauugagu

SEQ ID NO: 1418399 - RNA, 16 nt, Human
agcuacuaaaaucagu

SEQ ID NO: 1418400 - RNA, 17 nt, Human
agcuagaacccucuguu

SEQ ID NO: 1418401 - RNA, 16 nt, Human
agcuagaacccucugu

SEQ ID NO: 1418402 - RNA, 15 nt, Human
agcuagaacccucug

SEQ ID NO: 1418403 - RNA, 16 nt, Human
agcuagaauuugauau

SEQ ID NO: 1418404 - RNA, 13 nt, Human
agcuagaauuuga

SEQ ID NO: 1418405 - RNA, 20 nt, Human
agcggugucucuccugcccc

SEQ ID NO: 1418406 - RNA, 14 nt, Human
agcggugucucucc

SEQ ID NO: 1418407 - RNA, 13 nt, Human
agcgggucugcuc

SEQ ID NO: 1418408 - RNA, 16 nt, Human
agcgggucugcuccca

SEQ ID NO: 1418409 - RNA, 18 nt, Human
agcgggggccuaaaaaaa

SEQ ID NO: 1418410 - RNA, 21 nt, Human
agcgggggaggguaggcagga

SEQ ID NO: 1418411 - RNA, 12 nt, Human
agcgggggaggg

SEQ ID NO: 1418412 - RNA, 13 nt, Human
ugccagagaaccc

SEQ ID NO: 1418413 - RNA, 21 nt, Human
ugccagagaacccagcccacc

SEQ ID NO: 1418414 - RNA, 22 nt, Human
agcuaccugcucagcccugcac

SEQ ID NO: 1418415 - RNA, 21 nt, Human
agcuacccuuuuucuccagcu

SEQ ID NO: 1418416 - RNA, 20 nt, Human
agcgugagcuuaaaauacaa

SEQ ID NO: 1418417 - RNA, 12 nt, Human
agcgugagcuua

SEQ ID NO: 1418418 - RNA, 16 nt, Human
agcgugagcugagcag

SEQ ID NO: 1418419 - RNA, 15 nt, Human
agcgugagcugagca

SEQ ID NO: 1418420 - RNA, 14 nt, Human
agcuacuaaaauca

SEQ ID NO: 1418421 - RNA, 16 nt, Human
agcuacguauuuaaua

SEQ ID NO: 1418422 - RNA, 22 nt, Human
agcuaccuguguggacaggacu

SEQ ID NO: 1418423 - RNA, 20 nt, Human
agcuaccuguguggacagga

SEQ ID NO: 1418424 - RNA, 19 nt, Human
agcuaccuguguggacagg

SEQ ID NO: 1418425 - RNA, 18 nt, Human
agcuaccuguguggacag

SEQ ID NO: 1418426 - RNA, 19 nt, Human
agcuacuaauuuuaaaaug

SEQ ID NO: 1418427 - RNA, 19 nt, Human
ugcccagcccuaaacauca

SEQ ID NO: 1418428 - RNA, 21 nt, Human
ugcccacaggccgcccugcgg

SEQ ID NO: 1418429 - RNA, 14 nt, Human
ugcccacaggccgc

SEQ ID NO: 1418430 - RNA, 12 nt, Human
ugcccacaggcc

SEQ ID NO: 1418431 - RNA, 20 nt, Human
ugcccaagccagaggcuggg

SEQ ID NO: 1418432 - RNA, 18 nt, Human
ugcccaagccagaggcug

SEQ ID NO: 1418433 - RNA, 16 nt, Human
ugcccaagccagaggc

SEQ ID NO: 1418434 - RNA, 15 nt, Human
ugcccaagccagagg

SEQ ID NO: 1418435 - RNA, 14 nt, Human
ugcccaagccagag

SEQ ID NO: 1418436 - RNA, 13 nt, Human
ugcccaagccaga

SEQ ID NO: 1418437 - RNA, 11 nt, Human
ugcccaagcca

SEQ ID NO: 1418438 - RNA, 15 nt, Human
agcuccaaccugcaa

SEQ ID NO: 1418439 - RNA, 14 nt, Human
agcuccaaccugca

SEQ ID NO: 1418440 - RNA, 13 nt, Human
agcuccaaccugc

SEQ ID NO: 1418441 - RNA, 18 nt, Human
agcuccaaccugcaaaga

SEQ ID NO: 1418442 - RNA, 16 nt, Human
agcuccaaccugcaaa

SEQ ID NO: 1418443 - RNA, 21 nt, Human
agcucauccaugccucagaag

SEQ ID NO: 1418444 - RNA, 20 nt, Human
agcucauucuccuuguguua

SEQ ID NO: 1418445 - RNA, 21 nt, Human
agcucauucuccuuguguuac

SEQ ID NO: 1418446 - RNA, 22 nt, Human
agcucaggaaccgaggcaggga

SEQ ID NO: 1418447 - RNA, 21 nt, Human
agcucaggaaccgaggcaggg

SEQ ID NO: 1418448 - RNA, 23 nt, Human
agcucagcugcauuccgcagccc

SEQ ID NO: 1418449 - RNA, 20 nt, Human
agcucaggaaccgaggcagg

SEQ ID NO: 1418450 - RNA, 18 nt, Human
agcucaggacagaugcca

SEQ ID NO: 1418451 - RNA, 17 nt, Human
agcucaggacagaugcc

SEQ ID NO: 1418452 - RNA, 13 nt, Human
agcucaggacaga

SEQ ID NO: 1418453 - RNA, 19 nt, Human
agcucagcugcauuccgca

SEQ ID NO: 1418454 - RNA, 13 nt, Human
agcucagcugcau

SEQ ID NO: 1418455 - RNA, 21 nt, Human
agcuaggagcaaagccuguuc

SEQ ID NO: 1418456 - RNA, 20 nt, Human
agcuaggagcaaagccuguu

SEQ ID NO: 1418457 - RNA, 19 nt, Human
agcuaggagcaaagccugu

SEQ ID NO: 1418458 - RNA, 18 nt, Human
agcuaggagcaaagccug

SEQ ID NO: 1418459 - RNA, 17 nt, Human
agcuaggagcaaagccu

SEQ ID NO: 1418460 - RNA, 16 nt, Human
agcuaggagcaaagcc

SEQ ID NO: 1418461 - RNA, 15 nt, Human
agcuaggagcaaagc

SEQ ID NO: 1418462 - RNA, 13 nt, Human
agcuaggaaugaa

SEQ ID NO: 1418463 - RNA, 12 nt, Human
agcuaggaauga

SEQ ID NO: 1418464 - RNA, 21 nt, Human
agcuaggaagagcaggacucc

SEQ ID NO: 1418465 - RNA, 18 nt, Human
agcuaggaagagcaggac

SEQ ID NO: 1418466 - RNA, 18 nt, Human
agcuaggaauuguguuua

SEQ ID NO: 1418467 - RNA, 14 nt, Human
ugcggcugugugug

SEQ ID NO: 1418468 - RNA, 13 nt, Human
ugcggcugugugu

SEQ ID NO: 1418469 - RNA, 12 nt, Human
ugcggcugugug

SEQ ID NO: 1418470 - RNA, 22 nt, Human
ugcggcuggccauggagaaagc

SEQ ID NO: 1418471 - RNA, 23 nt, Human
ugcggcuggccauggagaaagcu

SEQ ID NO: 1418472 - RNA, 15 nt, Human
ugcggcuggccaugg

SEQ ID NO: 1418473 - RNA, 14 nt, Human
ugcggcuggccaug

SEQ ID NO: 1418474 - RNA, 15 nt, Human
ugcggcuccucaggg

SEQ ID NO: 1418475 - RNA, 13 nt, Human
ugcggcuccucag

SEQ ID NO: 1418476 - RNA, 21 nt, Human
ugcgggugaacaaagcagcca

SEQ ID NO: 1418477 - RNA, 18 nt, Human
ugcgggugaacaaagcag

SEQ ID NO: 1418478 - RNA, 15 nt, Human
ugcggggugggggca

SEQ ID NO: 1418479 - RNA, 22 nt, Human
ugcggggguuccguguccaccc

SEQ ID NO: 1418480 - RNA, 16 nt, Human
ugcgggugagaguaau

SEQ ID NO: 1418481 - RNA, 23 nt, Human
ugcggguggggcuuggggcucac

SEQ ID NO: 1418482 - RNA, 23 nt, Human
ugcgggugaacaaagcagccacg

SEQ ID NO: 1418483 - RNA, 22 nt, Human
ugcgggugaacaaagcagccac

SEQ ID NO: 1418484 - RNA, 22 nt, Human
ugcggaccacccucacuggcuc

SEQ ID NO: 1418485 - RNA, 18 nt, Human
ugcggaccacccucacug

SEQ ID NO: 1418486 - RNA, 14 nt, Human
ugccuuuuauccca

SEQ ID NO: 1418487 - RNA, 17 nt, Human
ugccuuuucccaacucc

SEQ ID NO: 1418488 - RNA, 13 nt, Human
ugcggauggccgg

SEQ ID NO: 1418489 - RNA, 21 nt, Human
ugcggaggaaggaggacccag

SEQ ID NO: 1418490 - RNA, 22 nt, Human
ugcggaggaaggaggacccagg

SEQ ID NO: 1418491 - RNA, 23 nt, Human
ugcggaggaaggaggacccagga

SEQ ID NO: 1418492 - RNA, 17 nt, Human
ugccuuugccaggugac

SEQ ID NO: 1418493 - RNA, 16 nt, Human
ugccuuugccagguga

SEQ ID NO: 1418494 - RNA, 17 nt, Human
ugccuuuggcagaguuc

SEQ ID NO: 1418495 - RNA, 21 nt, Human
ugccuuuccauccauggccag

SEQ ID NO: 1418496 - RNA, 20 nt, Human
ugccuuuccauccauggcca

SEQ ID NO: 1418497 - RNA, 22 nt, Human
ugccuuuccauccauggccagc

SEQ ID NO: 1418498 - RNA, 19 nt, Human
ugccuuucaggaucuauuu

SEQ ID NO: 1418499 - RNA, 17 nt, Human
ugccuuucaggaucuau

SEQ ID NO: 1418500 - RNA, 14 nt, Human
ugccuuaucuugca

SEQ ID NO: 1418501 - RNA, 20 nt, Human
ugccuuagucucaguuugug

SEQ ID NO: 1418502 - RNA, 16 nt, Human
ugccuuagucucaguu

SEQ ID NO: 1418503 - RNA, 13 nt, Human
ugccuuugaccug

SEQ ID NO: 1418504 - RNA, 16 nt, Human
ugccuuucaggaucua

SEQ ID NO: 1418505 - RNA, 17 nt, Human
ugccuuugaccugccuc

SEQ ID NO: 1418506 - RNA, 23 nt, Human
ugccuuugaccugccucccuuca

SEQ ID NO: 1418507 - RNA, 14 nt, Human
agcuuggggaagac

SEQ ID NO: 1418508 - RNA, 20 nt, Human
agcuugaccugaggcugugg

SEQ ID NO: 1418509 - RNA, 15 nt, Human
agcuuagacuaaggc

SEQ ID NO: 1418510 - RNA, 12 nt, Human
ugcuacaauguc

SEQ ID NO: 1418511 - RNA, 11 nt, Human
ugcuacacacu

SEQ ID NO: 1418512 - RNA, 18 nt, Human
agcuguucugucuuccca

SEQ ID NO: 1418513 - RNA, 18 nt, Human
ugcuaagguucuaaggcc

SEQ ID NO: 1418514 - RNA, 17 nt, Human
ugcuaagguucuaaggc

SEQ ID NO: 1418515 - RNA, 16 nt, Human
ugcuaagguucuaagg

SEQ ID NO: 1418516 - RNA, 15 nt, Human
ugcuaagguucuaag

SEQ ID NO: 1418517 - RNA, 14 nt, Human
ugcuaagguucuaa

SEQ ID NO: 1418518 - RNA, 13 nt, Human
ugcuaagguucua

SEQ ID NO: 1418519 - RNA, 12 nt, Human
ugcuaagguucu

SEQ ID NO: 1418520 - RNA, 23 nt, Human
ugcuaaggucuuggaacuugccu

SEQ ID NO: 1418521 - RNA, 15 nt, Human
ugcuaaggucuugga

SEQ ID NO: 1418522 - RNA, 20 nt, Human
ugcuaagccccagcaagcaa

SEQ ID NO: 1418523 - RNA, 21 nt, Human
agcuggcauuacagcuggaga

SEQ ID NO: 1418524 - RNA, 15 nt, Human
agcuggcauuacagc

SEQ ID NO: 1418525 - RNA, 14 nt, Human
agcuggaugagaau

SEQ ID NO: 1418526 - RNA, 16 nt, Human
agcugccggucgcccu

SEQ ID NO: 1418527 - RNA, 21 nt, Human
agcugccuagauucagggaaa

SEQ ID NO: 1418528 - RNA, 19 nt, Human
agcugccggucgcccuuug

SEQ ID NO: 1418529 - RNA, 21 nt, Human
ugccuggaggaccugagccug

SEQ ID NO: 1418530 - RNA, 23 nt, Human
ugccuggaguguaugacugcaca

SEQ ID NO: 1418531 - RNA, 22 nt, Human
ugccuggaggaccugagccugc

SEQ ID NO: 1418532 - RNA, 20 nt, Human
ugccuggaggaccugagccu

SEQ ID NO: 1418533 - RNA, 19 nt, Human
ugccuggaggaccugagcc

SEQ ID NO: 1418534 - RNA, 18 nt, Human
ugccuggaggaccugagc

SEQ ID NO: 1418535 - RNA, 16 nt, Human
ugccuggaggaccuga

SEQ ID NO: 1418536 - RNA, 15 nt, Human
ugccuggaggaccug

SEQ ID NO: 1418537 - RNA, 11 nt, Human
ugccuggagga

SEQ ID NO: 1418538 - RNA, 20 nt, Human
ugccuggagacuuagggcac

SEQ ID NO: 1418539 - RNA, 15 nt, Human
ugcccaggcacugca

SEQ ID NO: 1418540 - RNA, 12 nt, Human
ugcccaggcacu

SEQ ID NO: 1418541 - RNA, 12 nt, Human
ugccuggacccg

SEQ ID NO: 1418542 - RNA, 11 nt, Human
ugccuggaccc

SEQ ID NO: 1418543 - RNA, 13 nt, Human
ugccugccugcuc

SEQ ID NO: 1418544 - RNA, 15 nt, Human
ugccugcccugguga

SEQ ID NO: 1418545 - RNA, 13 nt, Human
ugccugcccuggu

SEQ ID NO: 1418546 - RNA, 15 nt, Human
ugccugcccuauucu

SEQ ID NO: 1418547 - RNA, 14 nt, Human
agcugucuuuugga

SEQ ID NO: 1418548 - RNA, 22 nt, Human
agcuguguguuuggaagacuau

SEQ ID NO: 1418549 - RNA, 15 nt, Human
ugccuuagucucagu

SEQ ID NO: 1418550 - RNA, 19 nt, Human
ugccuguuucccaggccca

SEQ ID NO: 1418551 - RNA, 16 nt, Human
ugccuguuucccaggc

SEQ ID NO: 1418552 - RNA, 14 nt, Human
ugccuguuucccag

SEQ ID NO: 1418553 - RNA, 11 nt, Human
agcuggcucua

SEQ ID NO: 1418554 - RNA, 23 nt, Human
agcuggcucugagcgccuccauc

SEQ ID NO: 1418555 - RNA, 20 nt, Human
agcuggcucugagcgccucc

SEQ ID NO: 1418556 - RNA, 19 nt, Human
agcuggcucugagcgccuc

SEQ ID NO: 1418557 - RNA, 14 nt, Human
agcuggcucugagc

SEQ ID NO: 1418558 - RNA, 13 nt, Human
agcuggcucugag

SEQ ID NO: 1418559 - RNA, 22 nt, Human
agcuguccccccacucccucac

SEQ ID NO: 1418560 - RNA, 23 nt, Human
agcuguccccccacucccucaca

SEQ ID NO: 1418561 - RNA, 14 nt, Human
agcuguccccccac

SEQ ID NO: 1418562 - RNA, 19 nt, Human
agcugucaucaauuaaagg

SEQ ID NO: 1418563 - RNA, 21 nt, Human
agcugggacaccccgacuuuu

SEQ ID NO: 1418564 - RNA, 21 nt, Human
agcuguccuuuuuccucucca

SEQ ID NO: 1418565 - RNA, 17 nt, Human
agcugucugcucagaca

SEQ ID NO: 1418566 - RNA, 11 nt, Human
agcugucugcu

SEQ ID NO: 1418567 - RNA, 23 nt, Human
agcuguccuuuuuccucuccaca

SEQ ID NO: 1418568 - RNA, 20 nt, Human
agcuguccuuuuuccucucc

SEQ ID NO: 1418569 - RNA, 18 nt, Human
agcuguccuuuuuccucu

SEQ ID NO: 1418570 - RNA, 17 nt, Human
agcuguccuuuuuccuc

SEQ ID NO: 1418571 - RNA, 16 nt, Human
agcuguccuuuuuccu

SEQ ID NO: 1418572 - RNA, 14 nt, Human
agcuguccuuuuuc

SEQ ID NO: 1418573 - RNA, 14 nt, Human
agcuguguggcagu

SEQ ID NO: 1418574 - RNA, 16 nt, Human
agcuguguggcagucu

SEQ ID NO: 1418575 - RNA, 23 nt, Human
ugcuuauuugacaacguuucagc

SEQ ID NO: 1418576 - RNA, 21 nt, Human
ugcuuauuuauuguauucugg

SEQ ID NO: 1418577 - RNA, 19 nt, Human
ugcuuauuuauuguauucu

SEQ ID NO: 1418578 - RNA, 18 nt, Human
ugcuuauuuauuguauuc

SEQ ID NO: 1418579 - RNA, 22 nt, Human
ugcuuacugauauauuuuacaa

SEQ ID NO: 1418580 - RNA, 14 nt, Human
ugcuuacugauaua

SEQ ID NO: 1418581 - RNA, 17 nt, Human
ugcuguggccaggaggu

SEQ ID NO: 1418582 - RNA, 16 nt, Human
ugcuguggccaggagg

SEQ ID NO: 1418583 - RNA, 15 nt, Human
ugcuguggccaggag

SEQ ID NO: 1418584 - RNA, 14 nt, Human
ugcuguggccagga

SEQ ID NO: 1418585 - RNA, 13 nt, Human
ugcuguggccagg

SEQ ID NO: 1418586 - RNA, 18 nt, Human
ugcugugcugugcuaugg

SEQ ID NO: 1418587 - RNA, 22 nt, Human
ugcuguggaacuacauuacugu

SEQ ID NO: 1418588 - RNA, 15 nt, Human
ugcugugcugugcua

SEQ ID NO: 1418589 - RNA, 18 nt, Human
ugcugugcgcccagggcu

SEQ ID NO: 1418590 - RNA, 17 nt, Human
ugcugugcgcccagggc

SEQ ID NO: 1418591 - RNA, 16 nt, Human
ugcugugcgcccaggg

SEQ ID NO: 1418592 - RNA, 22 nt, Human
ugcugugauacgaugcuucaag

SEQ ID NO: 1418593 - RNA, 20 nt, Human
ugcugugauacgaugcuuca

SEQ ID NO: 1418594 - RNA, 23 nt, Human
ugcuguauuuuaaaagaaugauu

SEQ ID NO: 1418595 - RNA, 15 nt, Human
ugcuuccaauuuucu

SEQ ID NO: 1418596 - RNA, 21 nt, Human
ugcuucaugugucccagaaga

SEQ ID NO: 1418597 - RNA, 19 nt, Human
ugcuucaugugucccagaa

SEQ ID NO: 1418598 - RNA, 17 nt, Human
ugcuucaugugucccag

SEQ ID NO: 1418599 - RNA, 15 nt, Human
ugcuucauguguccc

SEQ ID NO: 1418600 - RNA, 23 nt, Human
ugcuucaagagaaaaugcgguua

SEQ ID NO: 1418601 - RNA, 16 nt, Human
ugcuucaagagaaaau

SEQ ID NO: 1418602 - RNA, 14 nt, Human
ugcuucaacugucu

SEQ ID NO: 1418603 - RNA, 16 nt, Human
aggacagaugccuccu

SEQ ID NO: 1418604 - RNA, 14 nt, Human
aggacagagagaaa

SEQ ID NO: 1418605 - RNA, 15 nt, Human
aggacagagagaaau

SEQ ID NO: 1418606 - RNA, 23 nt, Human
aggacacgggccuguccacaggc

SEQ ID NO: 1418607 - RNA, 18 nt, Human
aggacacgggccugucca

SEQ ID NO: 1418608 - RNA, 11 nt, Human
aggacacaugu

SEQ ID NO: 1418609 - RNA, 12 nt, Human
aggacacauguc

SEQ ID NO: 1418610 - RNA, 13 nt, Human
aggacacaugucc

SEQ ID NO: 1418611 - RNA, 20 nt, Human
ugcuggaguuucauguacaa

SEQ ID NO: 1418612 - RNA, 16 nt, Human
aggaaggacuaugaaa

SEQ ID NO: 1418613 - RNA, 14 nt, Human
aggaauggaagucc

SEQ ID NO: 1418614 - RNA, 16 nt, Human
ugcuggccucugcgag

SEQ ID NO: 1418615 - RNA, 13 nt, Human
ugcuggccucugc

SEQ ID NO: 1418616 - RNA, 23 nt, Human
ugcuggccgcccccagcccccuc

SEQ ID NO: 1418617 - RNA, 23 nt, Human
ugcugggacucagccuucagaca

SEQ ID NO: 1418618 - RNA, 22 nt, Human
ugcugggacucagccuucagac

SEQ ID NO: 1418619 - RNA, 18 nt, Human
ugcugggacucagccuuc

SEQ ID NO: 1418620 - RNA, 16 nt, Human
ugcugggacucagccu

SEQ ID NO: 1418621 - RNA, 13 nt, Human
ugcuguauuuuaa

SEQ ID NO: 1418622 - RNA, 17 nt, Human
ugcuguauaaaaucagc

SEQ ID NO: 1418623 - RNA, 18 nt, Human
ugcuguauaaaaucagcc

SEQ ID NO: 1418624 - RNA, 22 nt, Human
ugcuguauuuuaaaagaaugau

SEQ ID NO: 1418625 - RNA, 21 nt, Human
ugcuguauuuuaaaagaauga

SEQ ID NO: 1418626 - RNA, 13 nt, Human
ugcuguauaaaau

SEQ ID NO: 1418627 - RNA, 14 nt, Human
ugcuguauaaaauc

SEQ ID NO: 1418628 - RNA, 15 nt, Human
ugcuguauaaaauca

SEQ ID NO: 1418629 - RNA, 16 nt, Human
ugcuguauaaaaucag

SEQ ID NO: 1418630 - RNA, 22 nt, Human
ugcugacuguagcuuuggaagu

SEQ ID NO: 1418631 - RNA, 17 nt, Human
ugcugacuguagcuuug

SEQ ID NO: 1418632 - RNA, 14 nt, Human
ugcugacuguagcu

SEQ ID NO: 1418633 - RNA, 12 nt, Human
aggaaauauuua

SEQ ID NO: 1418634 - RNA, 15 nt, Human
aggaaauauacuuuu

SEQ ID NO: 1418635 - RNA, 13 nt, Human
aggaaauauuuau

SEQ ID NO: 1418636 - RNA, 19 nt, Human
aggaagcccaauugcugga

SEQ ID NO: 1418637 - RNA, 17 nt, Human
aggaagcaagcuuaaug

SEQ ID NO: 1418638 - RNA, 15 nt, Human
aggaagcaagcuuaa

SEQ ID NO: 1418639 - RNA, 21 nt, Human
aggaaaucaacuugcuuauca

SEQ ID NO: 1418640 - RNA, 13 nt, Human
aggaaaucaaaug

SEQ ID NO: 1418641 - RNA, 12 nt, Human
aggaagccuucc

SEQ ID NO: 1418642 - RNA, 20 nt, Human
aggaagccugcaguccugga

SEQ ID NO: 1418643 - RNA, 19 nt, Human
aggaagccugcaguccugg

SEQ ID NO: 1418644 - RNA, 22 nt, Human
aggaagccucagauuccuuccc

SEQ ID NO: 1418645 - RNA, 20 nt, Human
aggaagccucagauuccuuc

SEQ ID NO: 1418646 - RNA, 14 nt, Human
aggaagccucagau

SEQ ID NO: 1418647 - RNA, 13 nt, Human
aggaagccucaga

SEQ ID NO: 1418648 - RNA, 14 nt, Human
aggaagccguccug

SEQ ID NO: 1418649 - RNA, 22 nt, Human
aggaagcccccaccgugggcag

SEQ ID NO: 1418650 - RNA, 15 nt, Human
ugcuauucugucccu

SEQ ID NO: 1418651 - RNA, 14 nt, Human
ugcuauucuguccc

SEQ ID NO: 1418652 - RNA, 13 nt, Human
ugcuauucugucc

SEQ ID NO: 1418653 - RNA, 12 nt, Human
ugcuauucuguc

SEQ ID NO: 1418654 - RNA, 11 nt, Human
ugcuauucugu

SEQ ID NO: 1418655 - RNA, 20 nt, Human
ugcuauucugucccuaggug

SEQ ID NO: 1418656 - RNA, 17 nt, Human
ugcuauucugucccuag

SEQ ID NO: 1418657 - RNA, 16 nt, Human
ugcuauucugucccua

SEQ ID NO: 1418658 - RNA, 14 nt, Human
ugcuaugguuuucu

SEQ ID NO: 1418659 - RNA, 17 nt, Human
ugcuaugguuuucucca

SEQ ID NO: 1418660 - RNA, 15 nt, Human
ugcuauggugcucug

SEQ ID NO: 1418661 - RNA, 20 nt, Human
ugcuaucucugugugcacaa

SEQ ID NO: 1418662 - RNA, 21 nt, Human
ugcuaucucugugugcacaaa

SEQ ID NO: 1418663 - RNA, 16 nt, Human
ugcuaucucugugugc

SEQ ID NO: 1418664 - RNA, 18 nt, Human
agcuuuagaaucccagcc

SEQ ID NO: 1418665 - RNA, 18 nt, Human
agcuuuagaaacagugca

SEQ ID NO: 1418666 - RNA, 18 nt, Human
agcuuuaacuuaaauagu

SEQ ID NO: 1418667 - RNA, 21 nt, Human
agcuuuaaugauaugcuugua

SEQ ID NO: 1418668 - RNA, 14 nt, Human
ugcucccucagacu

SEQ ID NO: 1418669 - RNA, 19 nt, Human
ugcucccucagacuggggc

SEQ ID NO: 1418670 - RNA, 13 nt, Human
ugcucccucagac

SEQ ID NO: 1418671 - RNA, 12 nt, Human
ugcucccucaga

SEQ ID NO: 1418672 - RNA, 15 nt, Human
ugcucccucacaugu

SEQ ID NO: 1418673 - RNA, 14 nt, Human
ugcucauggaauug

SEQ ID NO: 1418674 - RNA, 19 nt, Human
ugcuccaagauucuagaug

SEQ ID NO: 1418675 - RNA, 18 nt, Human
ugcuccaagauucuagau

SEQ ID NO: 1418676 - RNA, 17 nt, Human
ugcuccaagauucuaga

SEQ ID NO: 1418677 - RNA, 16 nt, Human
ugcuccaagauucuag

SEQ ID NO: 1418678 - RNA, 15 nt, Human
ugcuccaagauucua

SEQ ID NO: 1418679 - RNA, 14 nt, Human
ugcuccaagauucu

SEQ ID NO: 1418680 - RNA, 14 nt, Human
ugcucauuucagga

SEQ ID NO: 1418681 - RNA, 22 nt, Human
aggccagccgcgcaucagacug

SEQ ID NO: 1418682 - RNA, 12 nt, Human
aggccagccugg

SEQ ID NO: 1418683 - RNA, 22 nt, Human
aggccagcacucgcuagcagug

SEQ ID NO: 1418684 - RNA, 22 nt, Human
aggccagaggcccccagcccag

SEQ ID NO: 1418685 - RNA, 15 nt, Human
uggcagccuugugau

SEQ ID NO: 1418686 - RNA, 12 nt, Human
uggcagccuugu

SEQ ID NO: 1418687 - RNA, 17 nt, Human
aggcccaguucacccug

SEQ ID NO: 1418688 - RNA, 17 nt, Human
aggcccaggcugggaac

SEQ ID NO: 1418689 - RNA, 16 nt, Human
aggcccaggcugggaa

SEQ ID NO: 1418690 - RNA, 15 nt, Human
aggcccaggcuggga

SEQ ID NO: 1418691 - RNA, 13 nt, Human
aggcccaggcugg

SEQ ID NO: 1418692 - RNA, 18 nt, Human
aggcccaggcugccgucc

SEQ ID NO: 1418693 - RNA, 17 nt, Human
aggcccaggcugccguc

SEQ ID NO: 1418694 - RNA, 15 nt, Human
aggcccaggcugccg

SEQ ID NO: 1418695 - RNA, 13 nt, Human
aggcccaggcugc

SEQ ID NO: 1418696 - RNA, 18 nt, Human
aggcccagccgacccccu

SEQ ID NO: 1418697 - RNA, 20 nt, Human
aggcccagccgacccccucu

SEQ ID NO: 1418698 - RNA, 15 nt, Human
aggccccaacccugu

SEQ ID NO: 1418699 - RNA, 14 nt, Human
aggccccagccucc

SEQ ID NO: 1418700 - RNA, 13 nt, Human
aggccccagccuc

SEQ ID NO: 1418701 - RNA, 12 nt, Human
aggccccagccu

SEQ ID NO: 1418702 - RNA, 23 nt, Human
uggcaaugccacagcccugucag

SEQ ID NO: 1418703 - RNA, 19 nt, Human
uggcaaugccaucaucucc

SEQ ID NO: 1418704 - RNA, 21 nt, Human
uggcaaugccacagcccuguc

SEQ ID NO: 1418705 - RNA, 20 nt, Human
uggcaaugccacagcccugu

SEQ ID NO: 1418706 - RNA, 19 nt, Human
uggcaaugccacagcccug

SEQ ID NO: 1418707 - RNA, 15 nt, Human
uggcaaugccacagc

SEQ ID NO: 1418708 - RNA, 15 nt, Human
uggcaauuuuguaac

SEQ ID NO: 1418709 - RNA, 14 nt, Human
uggcaauuuuguaa

SEQ ID NO: 1418710 - RNA, 13 nt, Human
uggcaauuuugua

SEQ ID NO: 1418711 - RNA, 14 nt, Human
uggcaauuuugugg

SEQ ID NO: 1418712 - RNA, 23 nt, Human
uggagggguguggcuccuuccca

SEQ ID NO: 1418713 - RNA, 14 nt, Human
uggagggguguggc

SEQ ID NO: 1418714 - RNA, 13 nt, Human
uggaggggugugg

SEQ ID NO: 1418715 - RNA, 21 nt, Human
uggagggguaggggcugggaa

SEQ ID NO: 1418716 - RNA, 22 nt, Human
uggagggguaggggcugggaac

SEQ ID NO: 1418717 - RNA, 20 nt, Human
uggagggguaggggcuggga

SEQ ID NO: 1418718 - RNA, 17 nt, Human
uggagggguaggggcug

SEQ ID NO: 1418719 - RNA, 14 nt, Human
aggccaagaggcug

SEQ ID NO: 1418720 - RNA, 21 nt, Human
aggcagcccaggaagucucau

SEQ ID NO: 1418721 - RNA, 17 nt, Human
aggcagcccaggaaguc

SEQ ID NO: 1418722 - RNA, 15 nt, Human
aggcagcccaggaag

SEQ ID NO: 1418723 - RNA, 12 nt, Human
aggcagcccagg

SEQ ID NO: 1418724 - RNA, 22 nt, Human
aggcagccagugcccugagcca

SEQ ID NO: 1418725 - RNA, 20 nt, Human
aggcagccagugcccugagc

SEQ ID NO: 1418726 - RNA, 19 nt, Human
aggcagccagugcccugag

SEQ ID NO: 1418727 - RNA, 18 nt, Human
aggcagccagugcccuga

SEQ ID NO: 1418728 - RNA, 17 nt, Human
aggcagccagugcccug

SEQ ID NO: 1418729 - RNA, 22 nt, Human
uggaugggggaacucagaucca

SEQ ID NO: 1418730 - RNA, 21 nt, Human
uggaugggggaacucagaucc

SEQ ID NO: 1418731 - RNA, 18 nt, Human
uggaugggggaacucaga

SEQ ID NO: 1418732 - RNA, 20 nt, Human
uggauggggcaggccaccug

SEQ ID NO: 1418733 - RNA, 21 nt, Human
uggauggccccagcacagcuu

SEQ ID NO: 1418734 - RNA, 18 nt, Human
uggauggccccagcacag

SEQ ID NO: 1418735 - RNA, 17 nt, Human
uggauggccccagcaca

SEQ ID NO: 1418736 - RNA, 16 nt, Human
uggauggccccagcac

SEQ ID NO: 1418737 - RNA, 15 nt, Human
uggauggccccagca

SEQ ID NO: 1418738 - RNA, 14 nt, Human
uggauggccccagc

SEQ ID NO: 1418739 - RNA, 16 nt, Human
uggagguucuaaggcc

SEQ ID NO: 1418740 - RNA, 15 nt, Human
uggagguucuaaggc

SEQ ID NO: 1418741 - RNA, 13 nt, Human
uggagguucuaag

SEQ ID NO: 1418742 - RNA, 15 nt, Human
uggaguacuuagcua

SEQ ID NO: 1418743 - RNA, 14 nt, Human
uggcaaugccacag

SEQ ID NO: 1418744 - RNA, 13 nt, Human
uggcaaugccaca

SEQ ID NO: 1418745 - RNA, 20 nt, Human
uggcaaucaaacauuuucug

SEQ ID NO: 1418746 - RNA, 20 nt, Human
uggauuacugccauucacuu

SEQ ID NO: 1418747 - RNA, 13 nt, Human
uggauggggcagg

SEQ ID NO: 1418748 - RNA, 17 nt, Human
uggauuauauuaugaag

SEQ ID NO: 1418749 - RNA, 20 nt, Human
uggccucuuuccucagccuu

SEQ ID NO: 1418750 - RNA, 22 nt, Human
uggccucuugagcaguggcugg

SEQ ID NO: 1418751 - RNA, 20 nt, Human
uggccucuugagcaguggcu

SEQ ID NO: 1418752 - RNA, 19 nt, Human
uggccucuugagcaguggc

SEQ ID NO: 1418753 - RNA, 17 nt, Human
uggccucuugagcagug

SEQ ID NO: 1418754 - RNA, 21 nt, Human
aggccugggccgcugccacgu

SEQ ID NO: 1418755 - RNA, 20 nt, Human
aggccugggccgcugccacg

SEQ ID NO: 1418756 - RNA, 23 nt, Human
aggccuguguagcugugaccugc

SEQ ID NO: 1418757 - RNA, 24 nt, Human
aggccuguguagcugugaccugcu

SEQ ID NO: 1418758 - RNA, 22 nt, Human
aggccuguguagcugugaccug

SEQ ID NO: 1418759 - RNA, 21 nt, Human
aggccuguguagcugugaccu

SEQ ID NO: 1418760 - RNA, 16 nt, Human
aggccugggcugggaa

SEQ ID NO: 1418761 - RNA, 21 nt, Human
uggcccugggucccaggaccc

SEQ ID NO: 1418762 - RNA, 22 nt, Human
uggcccugggagaaucgcuccu

SEQ ID NO: 1418763 - RNA, 23 nt, Human
uggcccugggagaaucgcuccug

SEQ ID NO: 1418764 - RNA, 17 nt, Human
uggcccugcuuccugcu

SEQ ID NO: 1418765 - RNA, 14 nt, Human
uggcccugcuuccu

SEQ ID NO: 1418766 - RNA, 23 nt, Human
uggcccaccccacccacuucugc

SEQ ID NO: 1418767 - RNA, 21 nt, Human
uggccgugaaugggugcccac

SEQ ID NO: 1418768 - RNA, 17 nt, Human
uggccgugaaugggugc

SEQ ID NO: 1418769 - RNA, 16 nt, Human
uggccuaaccugccga

SEQ ID NO: 1418770 - RNA, 13 nt, Human
uggccucuucaga

SEQ ID NO: 1418771 - RNA, 14 nt, Human
uggccauggccugc

SEQ ID NO: 1418772 - RNA, 13 nt, Human
uggccauggccug

SEQ ID NO: 1418773 - RNA, 23 nt, Human
uggccauggagaaagcugacuug

SEQ ID NO: 1418774 - RNA, 22 nt, Human
uggccauggagaaagcugacuu

SEQ ID NO: 1418775 - RNA, 18 nt, Human
uggccauggagaaagcug

SEQ ID NO: 1418776 - RNA, 17 nt, Human
uggccauggagaaagcu

SEQ ID NO: 1418777 - RNA, 16 nt, Human
uggccauggagaaagc

SEQ ID NO: 1418778 - RNA, 22 nt, Human
uggccaugcuccucuuccccag

SEQ ID NO: 1418779 - RNA, 21 nt, Human
uggccaugcuccucuucccca

SEQ ID NO: 1418780 - RNA, 17 nt, Human
uggccaugcuccucuuc

SEQ ID NO: 1418781 - RNA, 16 nt, Human
uggccaugcuccucuu

SEQ ID NO: 1418782 - RNA, 21 nt, Human
uggccaugacccugccucucc

SEQ ID NO: 1418783 - RNA, 15 nt, Human
uggccauuugcuuuu

SEQ ID NO: 1418784 - RNA, 14 nt, Human
uggccauuugcuuu

SEQ ID NO: 1418785 - RNA, 22 nt, Human
uggcccaccccacccacuucug

SEQ ID NO: 1418786 - RNA, 19 nt, Human
uggcccaccccacccacuu

SEQ ID NO: 1418787 - RNA, 20 nt, Human
uggccaugacccugccucuc

SEQ ID NO: 1418788 - RNA, 17 nt, Human
uggccaugacccugccu

SEQ ID NO: 1418789 - RNA, 16 nt, Human
uggccaugacccugcc

SEQ ID NO: 1418790 - RNA, 15 nt, Human
uggccaugacccugc

SEQ ID NO: 1418791 - RNA, 14 nt, Human
uggccaugacccug

SEQ ID NO: 1418792 - RNA, 15 nt, Human
uggccaucugcuccu

SEQ ID NO: 1418793 - RNA, 18 nt, Human
uggccaucugcuccugga

SEQ ID NO: 1418794 - RNA, 14 nt, Human
uggccaucugcucc

SEQ ID NO: 1418795 - RNA, 23 nt, Human
uggccauauuuaccucagccugg

SEQ ID NO: 1418796 - RNA, 24 nt, Human
uggccauauuuaccucagccuggg

SEQ ID NO: 1418797 - RNA, 22 nt, Human
uggccauauuuaccucagccug

SEQ ID NO: 1418798 - RNA, 21 nt, Human
uggccauauuuaccucagccu

SEQ ID NO: 1418799 - RNA, 20 nt, Human
uggccauauuuaccucagcc

SEQ ID NO: 1418800 - RNA, 19 nt, Human
uggccauauuuaccucagc

SEQ ID NO: 1418801 - RNA, 18 nt, Human
uggccauauuuaccucag

SEQ ID NO: 1418802 - RNA, 15 nt, Human
uggccauauuuaccu

SEQ ID NO: 1418803 - RNA, 16 nt, Human
uggccauacugugucc

SEQ ID NO: 1418804 - RNA, 18 nt, Human
uggccaguguuuaaaacu

SEQ ID NO: 1418805 - RNA, 19 nt, Human
uggccaguguuuaaaacuu

SEQ ID NO: 1418806 - RNA, 15 nt, Human
uggccaguccaggcu

SEQ ID NO: 1418807 - RNA, 14 nt, Human
uggccaguccaggc

SEQ ID NO: 1418808 - RNA, 16 nt, Human
uggccaguccaggcug

SEQ ID NO: 1418809 - RNA, 17 nt, Human
uggccacaguagucuug

SEQ ID NO: 1418810 - RNA, 11 nt, Human
uggccaccagu

SEQ ID NO: 1418811 - RNA, 16 nt, Human
uggccacagccagggg

SEQ ID NO: 1418812 - RNA, 18 nt, Human
uggccacagccaggggag

SEQ ID NO: 1418813 - RNA, 14 nt, Human
uggccacagccagg

SEQ ID NO: 1418814 - RNA, 13 nt, Human
uggccacagccag

SEQ ID NO: 1418815 - RNA, 12 nt, Human
uggccacagcca

SEQ ID NO: 1418816 - RNA, 18 nt, Human
uggcaugagaaauacaaa

SEQ ID NO: 1418817 - RNA, 21 nt, Human
uggcaugagaaauacaaaaau

SEQ ID NO: 1418818 - RNA, 13 nt, Human
uggcaugagaaau

SEQ ID NO: 1418819 - RNA, 23 nt, Human
uggcaucgcaccauucugacucg

SEQ ID NO: 1418820 - RNA, 22 nt, Human
uggcaucgcaccauucugacuc

SEQ ID NO: 1418821 - RNA, 21 nt, Human
uggcaucgcaccauucugacu

SEQ ID NO: 1418822 - RNA, 20 nt, Human
uggcaucccugggccuuggg

SEQ ID NO: 1418823 - RNA, 16 nt, Human
uggcaucccugggccu

SEQ ID NO: 1418824 - RNA, 15 nt, Human
uggcaucccugggcc

SEQ ID NO: 1418825 - RNA, 14 nt, Human
uggcaucccugggc

SEQ ID NO: 1418826 - RNA, 13 nt, Human
uggcaucccuggg

SEQ ID NO: 1418827 - RNA, 16 nt, Human
uggcauagcucugggg

SEQ ID NO: 1418828 - RNA, 15 nt, Human
uggcauagcucuggg

SEQ ID NO: 1418829 - RNA, 14 nt, Human
uggcauagcucugg

SEQ ID NO: 1418830 - RNA, 18 nt, Human
uggacuuuccugcaacuc

SEQ ID NO: 1418831 - RNA, 14 nt, Human
uggacuuuccugca

SEQ ID NO: 1418832 - RNA, 19 nt, Human
uggacuuuccugcaacuca

SEQ ID NO: 1418833 - RNA, 13 nt, Human
uggagaagaacug

SEQ ID NO: 1418834 - RNA, 13 nt, Human
uggacuuuccugc

SEQ ID NO: 1418835 - RNA, 15 nt, Human
uggacugugugcuca

SEQ ID NO: 1418836 - RNA, 14 nt, Human
uggagaagaacuga

SEQ ID NO: 1418837 - RNA, 14 nt, Human
uggagccccaucag

SEQ ID NO: 1418838 - RNA, 14 nt, Human
aggcacccaucugu

SEQ ID NO: 1418839 - RNA, 20 nt, Human
aggcaccucacaggccccag

SEQ ID NO: 1418840 - RNA, 23 nt, Human
aggcaccuacacucaccugcacu

SEQ ID NO: 1418841 - RNA, 21 nt, Human
aggcaccuacacucaccugca

SEQ ID NO: 1418842 - RNA, 17 nt, Human
uggagcuccagccugac

SEQ ID NO: 1418843 - RNA, 15 nt, Human
uggagcuccagccug

SEQ ID NO: 1418844 - RNA, 14 nt, Human
uggagcuccagccu

SEQ ID NO: 1418845 - RNA, 13 nt, Human
uggagcccuggag

SEQ ID NO: 1418846 - RNA, 14 nt, Human
uggagcccuggaga

SEQ ID NO: 1418847 - RNA, 16 nt, Human
uggagcccuggagacc

SEQ ID NO: 1418848 - RNA, 16 nt, Human
uggagcuccagccuga

SEQ ID NO: 1418849 - RNA, 22 nt, Human
aggcaaggcuguggaccaugga

SEQ ID NO: 1418850 - RNA, 14 nt, Human
uggagcucguggaa

SEQ ID NO: 1418851 - RNA, 13 nt, Human
aggcaaucauggu

SEQ ID NO: 1418852 - RNA, 22 nt, Human
aggcaaacccaucaacaaaaau

SEQ ID NO: 1418853 - RNA, 20 nt, Human
aggcaaaauugcaaaucuug

SEQ ID NO: 1418854 - RNA, 19 nt, Human
aggcaaaauugcaaaucuu

SEQ ID NO: 1418855 - RNA, 19 nt, Human
uggacaagcuucugagacg

SEQ ID NO: 1418856 - RNA, 17 nt, Human
uggacaagcuucugaga

SEQ ID NO: 1418857 - RNA, 16 nt, Human
uggacaagcuucugag

SEQ ID NO: 1418858 - RNA, 22 nt, Human
uggaauugauuugcauugaaca

SEQ ID NO: 1418859 - RNA, 20 nt, Human
uggaauugauuugcauugaa

SEQ ID NO: 1418860 - RNA, 19 nt, Human
uggaauugauuugcauuga

SEQ ID NO: 1418861 - RNA, 18 nt, Human
uggaauugauuugcauug

SEQ ID NO: 1418862 - RNA, 17 nt, Human
uggaauugauuugcauu

SEQ ID NO: 1418863 - RNA, 16 nt, Human
uggaauugauuugcau

SEQ ID NO: 1418864 - RNA, 15 nt, Human
uggaauugauuugca

SEQ ID NO: 1418865 - RNA, 12 nt, Human
uggaauugauuu

SEQ ID NO: 1418866 - RNA, 22 nt, Human
uggaauucuuagucacaaaaua

SEQ ID NO: 1418867 - RNA, 13 nt, Human
uggaauucuaaca

SEQ ID NO: 1418868 - RNA, 16 nt, Human
uggacacacacagacu

SEQ ID NO: 1418869 - RNA, 20 nt, Human
uggacacacacagacuauuu

SEQ ID NO: 1418870 - RNA, 15 nt, Human
uggaccugccugcau

SEQ ID NO: 1418871 - RNA, 14 nt, Human
uggaccugccugca

SEQ ID NO: 1418872 - RNA, 13 nt, Human
uggacccuguugc

SEQ ID NO: 1418873 - RNA, 14 nt, Human
uggacccuguugcu

SEQ ID NO: 1418874 - RNA, 15 nt, Human
uggacccuguugcua

SEQ ID NO: 1418875 - RNA, 16 nt, Human
uggacccuguugcuaa

SEQ ID NO: 1418876 - RNA, 19 nt, Human
aggagcuuugacucaggag

SEQ ID NO: 1418877 - RNA, 18 nt, Human
aggagcuuugacucagga

SEQ ID NO: 1418878 - RNA, 17 nt, Human
aggagcuuugacucagg

SEQ ID NO: 1418879 - RNA, 21 nt, Human
aggagcuggggaucccucccc

SEQ ID NO: 1418880 - RNA, 20 nt, Human
aggagcuggggaucccuccc

SEQ ID NO: 1418881 - RNA, 12 nt, Human
aggagcugggga

SEQ ID NO: 1418882 - RNA, 20 nt, Human
aggagcugggcagaaggcca

SEQ ID NO: 1418883 - RNA, 21 nt, Human
aggagcuccccuccccaacug

SEQ ID NO: 1418884 - RNA, 15 nt, Human
aggagcugauacuuu

SEQ ID NO: 1418885 - RNA, 22 nt, Human
aggagcugacucacaccugaac

SEQ ID NO: 1418886 - RNA, 23 nt, Human
aggagcucuuaacuacaguggcu

SEQ ID NO: 1418887 - RNA, 20 nt, Human
aggagcuccccuccccaacu

SEQ ID NO: 1418888 - RNA, 17 nt, Human
aggagcuccccucccca

SEQ ID NO: 1418889 - RNA, 15 nt, Human
aggagcuccccuccc

SEQ ID NO: 1418890 - RNA, 12 nt, Human
aggagcuccccu

SEQ ID NO: 1418891 - RNA, 22 nt, Human
aggagcuccaguguccugagcu

SEQ ID NO: 1418892 - RNA, 14 nt, Human
aggagcuccagugu

SEQ ID NO: 1418893 - RNA, 22 nt, Human
aggagcuaccuguguggacagg

SEQ ID NO: 1418894 - RNA, 23 nt, Human
aggagcuaccuguguggacagga

SEQ ID NO: 1418895 - RNA, 18 nt, Human
aggagcuaccugugugga

SEQ ID NO: 1418896 - RNA, 17 nt, Human
aggagcuaccugugugg

SEQ ID NO: 1418897 - RNA, 16 nt, Human
aggagcuaccugugug

SEQ ID NO: 1418898 - RNA, 15 nt, Human
aggagcuaccugugu

SEQ ID NO: 1418899 - RNA, 14 nt, Human
aggagcuaccugug

SEQ ID NO: 1418900 - RNA, 12 nt, Human
aggagcuaccug

SEQ ID NO: 1418901 - RNA, 21 nt, Human
aggagcuaaggcucuaugagu

SEQ ID NO: 1418902 - RNA, 14 nt, Human
aggauagagacugg

SEQ ID NO: 1418903 - RNA, 23 nt, Human
aggauagaaguauaccugauuuu

SEQ ID NO: 1418904 - RNA, 20 nt, Human
aggauacgacaguacacugu

SEQ ID NO: 1418905 - RNA, 18 nt, Human
aggauacgacaguacacu

SEQ ID NO: 1418906 - RNA, 22 nt, Human
aggauaccauauacagcucaga

SEQ ID NO: 1418907 - RNA, 15 nt, Human
aggauaccauauaca

SEQ ID NO: 1418908 - RNA, 23 nt, Human
aggagcuuugacucaggagccug

SEQ ID NO: 1418909 - RNA, 16 nt, Human
aggauccggaaagaag

SEQ ID NO: 1418910 - RNA, 14 nt, Human
aggauccggaaaga

SEQ ID NO: 1418911 - RNA, 14 nt, Human
aggauagaugcugg

SEQ ID NO: 1418912 - RNA, 19 nt, Human
aggaucccaugagcuccuu

SEQ ID NO: 1418913 - RNA, 23 nt, Human
uggaagauggggaccagcagccc

SEQ ID NO: 1418914 - RNA, 13 nt, Human
uggaagauccugc

SEQ ID NO: 1418915 - RNA, 21 nt, Human
uggaagauccugcgggugggg

SEQ ID NO: 1418916 - RNA, 18 nt, Human
uggaagauagcugugacu

SEQ ID NO: 1418917 - RNA, 16 nt, Human
uggaagauagcuguga

SEQ ID NO: 1418918 - RNA, 14 nt, Human
uggaagauagcugu

SEQ ID NO: 1418919 - RNA, 21 nt, Human
uggaagauggggaccagcagc

SEQ ID NO: 1418920 - RNA, 20 nt, Human
uggaaaguacacucugcugu

SEQ ID NO: 1418921 - RNA, 19 nt, Human
uggaaaguacacucugcug

SEQ ID NO: 1418922 - RNA, 16 nt, Human
uggaagggaggugggc

SEQ ID NO: 1418923 - RNA, 14 nt, Human
uggaaggcauggcg

SEQ ID NO: 1418924 - RNA, 11 nt, Human
uggaaggcaug

SEQ ID NO: 1418925 - RNA, 13 nt, Human
uggaaggagcaga

SEQ ID NO: 1418926 - RNA, 14 nt, Human
uggaaggagcagaa

SEQ ID NO: 1418927 - RNA, 12 nt, Human
uggaaggagcag

SEQ ID NO: 1418928 - RNA, 16 nt, Human
uggaagcuuggggaag

SEQ ID NO: 1418929 - RNA, 20 nt, Human
aggagcuaaggcucuaugag

SEQ ID NO: 1418930 - RNA, 19 nt, Human
aggagcuaaggcucuauga

SEQ ID NO: 1418931 - RNA, 17 nt, Human
aggagcuaaggcucuau

SEQ ID NO: 1418932 - RNA, 16 nt, Human
aggagcuaaggcucua

SEQ ID NO: 1418933 - RNA, 17 nt, Human
uggaagguauuuaauag

SEQ ID NO: 1418934 - RNA, 13 nt, Human
uggaagguauuua

SEQ ID NO: 1418935 - RNA, 22 nt, Human
uggaaaggugugagacugggaa

SEQ ID NO: 1418936 - RNA, 19 nt, Human
uggaaaggugugagacugg

SEQ ID NO: 1418937 - RNA, 18 nt, Human
ugcuuuugcccauuuuga

SEQ ID NO: 1418938 - RNA, 17 nt, Human
ugcuuuuggcggggagg

SEQ ID NO: 1418939 - RNA, 21 nt, Human
ugcuuuuggcaaaacucuacu

SEQ ID NO: 1418940 - RNA, 19 nt, Human
ugcuuuuggcaaaacucua

SEQ ID NO: 1418941 - RNA, 14 nt, Human
ugcuuuugcccauu

SEQ ID NO: 1418942 - RNA, 12 nt, Human
ugcuuuugccca

SEQ ID NO: 1418943 - RNA, 17 nt, Human
ugcuuugugauuuuugu

SEQ ID NO: 1418944 - RNA, 14 nt, Human
ugcuuguacauaau

SEQ ID NO: 1418945 - RNA, 16 nt, Human
ugcuuguacauaaugc

SEQ ID NO: 1418946 - RNA, 22 nt, Human
ugcuuguacauaaugcgugcau

SEQ ID NO: 1418947 - RNA, 12 nt, Human
ugcuuugugauu

SEQ ID NO: 1418948 - RNA, 14 nt, Human
ugcuuugugauuuu

SEQ ID NO: 1418949 - RNA, 16 nt, Human
ugcuuugugauuuuug

SEQ ID NO: 1418950 - RNA, 15 nt, Human
ugcuuguaacuaaaa

SEQ ID NO: 1418951 - RNA, 17 nt, Human
ugcuuggagcugagcaa

SEQ ID NO: 1418952 - RNA, 15 nt, Human
ugcuuggagcugagc

SEQ ID NO: 1418953 - RNA, 23 nt, Human
ugcuugcuuuucaugcaaacucu

SEQ ID NO: 1418954 - RNA, 12 nt, Human
ugcuuguacaua

SEQ ID NO: 1418955 - RNA, 13 nt, Human
ugcuuguacauaa

SEQ ID NO: 1418956 - RNA, 15 nt, Human
ugcuugcuuugaagu

SEQ ID NO: 1418957 - RNA, 12 nt, Human
ugcuugauuuuu

SEQ ID NO: 1418958 - RNA, 22 nt, Human
ugcuugaugggauucuggacag

SEQ ID NO: 1418959 - RNA, 20 nt, Human
ugcuugaugggauucuggac

SEQ ID NO: 1418960 - RNA, 19 nt, Human
ugcuugaugggauucugga

SEQ ID NO: 1418961 - RNA, 13 nt, Human
ugcuugauagaaa

SEQ ID NO: 1418962 - RNA, 18 nt, Human
ugcuugauagaaaugcca

SEQ ID NO: 1418963 - RNA, 21 nt, Human
aggacagaugccuccuuccuc

SEQ ID NO: 1418964 - RNA, 20 nt, Human
aggacagaugccuccuuccu

SEQ ID NO: 1418965 - RNA, 17 nt, Human
aggacagaugccuccuu

SEQ ID NO: 1418966 - RNA, 23 nt, Human
aggacagcccuucuuuccacaga

SEQ ID NO: 1418967 - RNA, 18 nt, Human
agggccagccucuagagc

SEQ ID NO: 1418968 - RNA, 20 nt, Human
agggcagucgauagagcugu

SEQ ID NO: 1418969 - RNA, 20 nt, Human
agggcagucauuggcugucu

SEQ ID NO: 1418970 - RNA, 22 nt, Human
agggcaguaccugagggucugu

SEQ ID NO: 1418971 - RNA, 18 nt, Human
agggcaguaccugagggu

SEQ ID NO: 1418972 - RNA, 15 nt, Human
agggcaguaccugag

SEQ ID NO: 1418973 - RNA, 16 nt, Human
agggcaggugcuucag

SEQ ID NO: 1418974 - RNA, 17 nt, Human
agggcagggccccaggc

SEQ ID NO: 1418975 - RNA, 12 nt, Human
agggcagggccc

SEQ ID NO: 1418976 - RNA, 22 nt, Human
agggcagggaccacacccugua

SEQ ID NO: 1418977 - RNA, 16 nt, Human
agggcagcgccaggcu

SEQ ID NO: 1418978 - RNA, 14 nt, Human
agggcagcgccagg

SEQ ID NO: 1418979 - RNA, 23 nt, Human
agggcagccagggagagcccagg

SEQ ID NO: 1418980 - RNA, 22 nt, Human
agggcagccagggagagcccag

SEQ ID NO: 1418981 - RNA, 21 nt, Human
agggcagccagggagagccca

SEQ ID NO: 1418982 - RNA, 19 nt, Human
agggcagccagggagagcc

SEQ ID NO: 1418983 - RNA, 15 nt, Human
agggcagccagggag

SEQ ID NO: 1418984 - RNA, 14 nt, Human
agggcagccaggga

SEQ ID NO: 1418985 - RNA, 13 nt, Human
agggcagccaggg

SEQ ID NO: 1418986 - RNA, 15 nt, Human
agggcagcagggcua

SEQ ID NO: 1418987 - RNA, 14 nt, Human
agggcagcagggcu

SEQ ID NO: 1418988 - RNA, 23 nt, Human
agggccggggaacuggccaagcu

SEQ ID NO: 1418989 - RNA, 22 nt, Human
agggccggggaacuggccaagc

SEQ ID NO: 1418990 - RNA, 21 nt, Human
agggccggggaacuggccaag

SEQ ID NO: 1418991 - RNA, 20 nt, Human
agggccggggaacuggccaa

SEQ ID NO: 1418992 - RNA, 19 nt, Human
agggccggggaacuggcca

SEQ ID NO: 1418993 - RNA, 18 nt, Human
agggccggggaacuggcc

SEQ ID NO: 1418994 - RNA, 16 nt, Human
agggcccagagcccag

SEQ ID NO: 1418995 - RNA, 15 nt, Human
agggcccagagccca

SEQ ID NO: 1418996 - RNA, 14 nt, Human
agggcccagagccc

SEQ ID NO: 1418997 - RNA, 13 nt, Human
agggcccagagcc

SEQ ID NO: 1418998 - RNA, 12 nt, Human
agggcccagagc

SEQ ID NO: 1418999 - RNA, 14 nt, Human
ugggccccacccuc

SEQ ID NO: 1419000 - RNA, 16 nt, Human
ugggccccacccucgg

SEQ ID NO: 1419001 - RNA, 15 nt, Human
ugggcccaggccuca

SEQ ID NO: 1419002 - RNA, 16 nt, Human
ugggcccacaccuccu

SEQ ID NO: 1419003 - RNA, 20 nt, Human
ugggcccacaccuccuuccc

SEQ ID NO: 1419004 - RNA, 15 nt, Human
ugggcccacaccucc

SEQ ID NO: 1419005 - RNA, 23 nt, Human
agggcagcagccagcccugccug

SEQ ID NO: 1419006 - RNA, 22 nt, Human
agggcagcagccagcccugccu

SEQ ID NO: 1419007 - RNA, 21 nt, Human
agggcagcagccagcccugcc

SEQ ID NO: 1419008 - RNA, 20 nt, Human
agggcagcagccagcccugc

SEQ ID NO: 1419009 - RNA, 19 nt, Human
agggcagcagccagcccug

SEQ ID NO: 1419010 - RNA, 18 nt, Human
agggcagcagccagcccu

SEQ ID NO: 1419011 - RNA, 17 nt, Human
agggcagcagccagccc

SEQ ID NO: 1419012 - RNA, 16 nt, Human
agggcagcagccagcc

SEQ ID NO: 1419013 - RNA, 15 nt, Human
agggcagcagccagc

SEQ ID NO: 1419014 - RNA, 14 nt, Human
agggcagcagccag

SEQ ID NO: 1419015 - RNA, 13 nt, Human
agggcagcagcca

SEQ ID NO: 1419016 - RNA, 12 nt, Human
agggcagcagcc

SEQ ID NO: 1419017 - RNA, 18 nt, Human
agggagucugccagggcc

SEQ ID NO: 1419018 - RNA, 15 nt, Human
agggagucugccagg

SEQ ID NO: 1419019 - RNA, 19 nt, Human
agggcagagugagacccag

SEQ ID NO: 1419020 - RNA, 13 nt, Human
agggaggggcugu

SEQ ID NO: 1419021 - RNA, 20 nt, Human
ugggccauucuccacagcaa

SEQ ID NO: 1419022 - RNA, 19 nt, Human
ugggccauucuccacagca

SEQ ID NO: 1419023 - RNA, 24 nt, Human
ugggccauguccaaagaggcugcc

SEQ ID NO: 1419024 - RNA, 19 nt, Human
ugggccagacaugccacaa

SEQ ID NO: 1419025 - RNA, 18 nt, Human
ugggccagacaugccaca

SEQ ID NO: 1419026 - RNA, 13 nt, Human
ugggccagacaug

SEQ ID NO: 1419027 - RNA, 18 nt, Human
ugggccagcuuuucaaac

SEQ ID NO: 1419028 - RNA, 21 nt, Human
ugggccagaaguaccagacua

SEQ ID NO: 1419029 - RNA, 18 nt, Human
ugggcacccccagccugg

SEQ ID NO: 1419030 - RNA, 17 nt, Human
ugggcacccccagccug

SEQ ID NO: 1419031 - RNA, 16 nt, Human
ugggcacccccagccu

SEQ ID NO: 1419032 - RNA, 15 nt, Human
ugggcacccccagcc

SEQ ID NO: 1419033 - RNA, 23 nt, Human
ugggcacccccagccugggccua

SEQ ID NO: 1419034 - RNA, 22 nt, Human
ugggcacccccagccugggccu

SEQ ID NO: 1419035 - RNA, 21 nt, Human
ugggcacccccagccugggcc

SEQ ID NO: 1419036 - RNA, 20 nt, Human
ugggcacccccagccugggc

SEQ ID NO: 1419037 - RNA, 19 nt, Human
ugggcacccccagccuggg

SEQ ID NO: 1419038 - RNA, 20 nt, Human
ugggccagaaguaccagacu

SEQ ID NO: 1419039 - RNA, 16 nt, Human
aggccuguuuggccuc

SEQ ID NO: 1419040 - RNA, 18 nt, Human
aggccuguuuggccucuc

SEQ ID NO: 1419041 - RNA, 23 nt, Human
ugggauucaggaaaaggccuggg

SEQ ID NO: 1419042 - RNA, 20 nt, Human
ugggagguguuggcugcacg

SEQ ID NO: 1419043 - RNA, 22 nt, Human
ugggauucaggaaaaggccugg

SEQ ID NO: 1419044 - RNA, 14 nt, Human
ugggaguacaaaag

SEQ ID NO: 1419045 - RNA, 19 nt, Human
ugggaggugagaccaccuc

SEQ ID NO: 1419046 - RNA, 19 nt, Human
ugggauugagucugugcca

SEQ ID NO: 1419047 - RNA, 16 nt, Human
ugggauugagucugug

SEQ ID NO: 1419048 - RNA, 21 nt, Human
ugggauucuggacaggaugug

SEQ ID NO: 1419049 - RNA, 14 nt, Human
ugggauuugcugug

SEQ ID NO: 1419050 - RNA, 16 nt, Human
ugggauuuggucaaca

SEQ ID NO: 1419051 - RNA, 16 nt, Human
uggggcugguucugua

SEQ ID NO: 1419052 - RNA, 18 nt, Human
ugggggaacucagaucca

SEQ ID NO: 1419053 - RNA, 21 nt, Human
ugggggaaagcaaagcacaga

SEQ ID NO: 1419054 - RNA, 22 nt, Human
ugggggaaagcaaagcacagag

SEQ ID NO: 1419055 - RNA, 20 nt, Human
ugggggaaagcaaagcacag

SEQ ID NO: 1419056 - RNA, 17 nt, Human
ugggggaaagcaaagca

SEQ ID NO: 1419057 - RNA, 15 nt, Human
ugggggaaagcaaag

SEQ ID NO: 1419058 - RNA, 16 nt, Human
uggggcuugggggcuc

SEQ ID NO: 1419059 - RNA, 20 nt, Human
ugggggaacucagauccagg

SEQ ID NO: 1419060 - RNA, 12 nt, Human
uggggguuuuuu

SEQ ID NO: 1419061 - RNA, 18 nt, Human
uggggguuguaaauuggc

SEQ ID NO: 1419062 - RNA, 20 nt, Human
uggggaguuaagaccuggca

SEQ ID NO: 1419063 - RNA, 19 nt, Human
uggggaguuaagaccuggc

SEQ ID NO: 1419064 - RNA, 18 nt, Human
uggggaguuaagaccugg

SEQ ID NO: 1419065 - RNA, 17 nt, Human
uggggaguuaagaccug

SEQ ID NO: 1419066 - RNA, 16 nt, Human
uggggaguuaagaccu

SEQ ID NO: 1419067 - RNA, 19 nt, Human
uggggaguuuagggugggg

SEQ ID NO: 1419068 - RNA, 18 nt, Human
uggggaguuuaggguggg

SEQ ID NO: 1419069 - RNA, 19 nt, Human
uggggacuuggccucucuc

SEQ ID NO: 1419070 - RNA, 14 nt, Human
uggggacuuggccu

SEQ ID NO: 1419071 - RNA, 18 nt, Human
uggggaccugguacccuc

SEQ ID NO: 1419072 - RNA, 17 nt, Human
uggggaguggggguggg

SEQ ID NO: 1419073 - RNA, 19 nt, Human
uggggccgccgccucuuuc

SEQ ID NO: 1419074 - RNA, 24 nt, Human
uggggcucuaacgccugagcccag

SEQ ID NO: 1419075 - RNA, 23 nt, Human
uggggcucuaacgccugagccca

SEQ ID NO: 1419076 - RNA, 22 nt, Human
uggggcucuaacgccugagccc

SEQ ID NO: 1419077 - RNA, 20 nt, Human
uggggcuagggggagccccu

SEQ ID NO: 1419078 - RNA, 21 nt, Human
uggggcucuaacgccugagcc

SEQ ID NO: 1419079 - RNA, 20 nt, Human
agggccucaaaggcccgcuc

SEQ ID NO: 1419080 - RNA, 11 nt, Human
ugggcugaggg

SEQ ID NO: 1419081 - RNA, 15 nt, Human
uggggaccagcagcc

SEQ ID NO: 1419082 - RNA, 22 nt, Human
uggggaccagcagccccacacc

SEQ ID NO: 1419083 - RNA, 19 nt, Human
ugggcuggcaguccuggaa

SEQ ID NO: 1419084 - RNA, 18 nt, Human
ugggcuggaugagcuccc

SEQ ID NO: 1419085 - RNA, 16 nt, Human
ugggcuggaugagcuc

SEQ ID NO: 1419086 - RNA, 15 nt, Human
ugggcuggaugagcu

SEQ ID NO: 1419087 - RNA, 18 nt, Human
ugggcuggaaucaggaau

SEQ ID NO: 1419088 - RNA, 15 nt, Human
uggggaagagagccu

SEQ ID NO: 1419089 - RNA, 18 nt, Human
uggggaagacaguggccc

SEQ ID NO: 1419090 - RNA, 24 nt, Human
uggggaagacccauuccuucccag

SEQ ID NO: 1419091 - RNA, 20 nt, Human
uggggaagguuaucagugcu

SEQ ID NO: 1419092 - RNA, 16 nt, Human
uggggaagggccugcc

SEQ ID NO: 1419093 - RNA, 17 nt, Human
uggggaagagagccugc

SEQ ID NO: 1419094 - RNA, 22 nt, Human
uggggaagagagccugcaggau

SEQ ID NO: 1419095 - RNA, 15 nt, Human
uggggaaugaagaua

SEQ ID NO: 1419096 - RNA, 14 nt, Human
uggggaaugaagau

SEQ ID NO: 1419097 - RNA, 19 nt, Human
agguagaauguaaagcuug

SEQ ID NO: 1419098 - RNA, 15 nt, Human
agguaggguuuaauc

SEQ ID NO: 1419099 - RNA, 22 nt, Human
agguagaauuaucuaauuuaua

SEQ ID NO: 1419100 - RNA, 14 nt, Human
agguagaauguaaa

SEQ ID NO: 1419101 - RNA, 21 nt, Human
agguagaauguaaagcuuguc

SEQ ID NO: 1419102 - RNA, 23 nt, Human
agguauaauucacauuguauuca

SEQ ID NO: 1419103 - RNA, 23 nt, Human
agguacuuucauauuuuaaacag

SEQ ID NO: 1419104 - RNA, 23 nt, Human
agguacuucaaauccuugaagau

SEQ ID NO: 1419105 - RNA, 23 nt, Human
agguccagcucuggaggggaggg

SEQ ID NO: 1419106 - RNA, 17 nt, Human
aggucauuuuuuuuaag

SEQ ID NO: 1419107 - RNA, 20 nt, Human
aggucauuuuuuuuaagaaa

SEQ ID NO: 1419108 - RNA, 15 nt, Human
aggucacccuuugcu

SEQ ID NO: 1419109 - RNA, 13 nt, Human
agguauaccucac

SEQ ID NO: 1419110 - RNA, 14 nt, Human
agguauuacacucu

SEQ ID NO: 1419111 - RNA, 18 nt, Human
agguauucguuaucuaau

SEQ ID NO: 1419112 - RNA, 15 nt, Human
aggucacauaaaacu

SEQ ID NO: 1419113 - RNA, 14 nt, Human
agguauuuaucuuu

SEQ ID NO: 1419114 - RNA, 20 nt, Human
agguauucguuaucuaauag

SEQ ID NO: 1419115 - RNA, 14 nt, Human
uggucucacccugg

SEQ ID NO: 1419116 - RNA, 23 nt, Human
uggucucaaacuccugaccucag

SEQ ID NO: 1419117 - RNA, 18 nt, Human
uggucucaaacuccugac

SEQ ID NO: 1419118 - RNA, 23 nt, Human
uggucucacccuggaggcaccug

SEQ ID NO: 1419119 - RNA, 17 nt, Human
uggucucacccuggagg

SEQ ID NO: 1419120 - RNA, 15 nt, Human
uggucucacccugga

SEQ ID NO: 1419121 - RNA, 22 nt, Human
uggucagcccuaggguggagag

SEQ ID NO: 1419122 - RNA, 19 nt, Human
uggucagcccuagggugga

SEQ ID NO: 1419123 - RNA, 15 nt, Human
uggucagcccuaggg

SEQ ID NO: 1419124 - RNA, 18 nt, Human
ugguaggaauagcauguc

SEQ ID NO: 1419125 - RNA, 16 nt, Human
uggucuuguggaauug

SEQ ID NO: 1419126 - RNA, 20 nt, Human
agggugguucaacaaagaaa

SEQ ID NO: 1419127 - RNA, 12 nt, Human
agggugugugcu

SEQ ID NO: 1419128 - RNA, 17 nt, Human
aggguuaugauuaagua

SEQ ID NO: 1419129 - RNA, 22 nt, Human
agggguuccuccccuccagcuc

SEQ ID NO: 1419130 - RNA, 21 nt, Human
agggguuccuccccuccagcu

SEQ ID NO: 1419131 - RNA, 17 nt, Human
agggguuccuccccucc

SEQ ID NO: 1419132 - RNA, 15 nt, Human
agggguuccuccccu

SEQ ID NO: 1419133 - RNA, 14 nt, Human
agggguuccucccc

SEQ ID NO: 1419134 - RNA, 15 nt, Human
agggguuagagcagg

SEQ ID NO: 1419135 - RNA, 15 nt, Human
agggguguggcuccu

SEQ ID NO: 1419136 - RNA, 24 nt, Human
aggggugucuugggcagagcuggc

SEQ ID NO: 1419137 - RNA, 22 nt, Human
aggggugucuugggcagagcug

SEQ ID NO: 1419138 - RNA, 14 nt, Human
aggggugucuuggg

SEQ ID NO: 1419139 - RNA, 14 nt, Human
aggggugggcuggu

SEQ ID NO: 1419140 - RNA, 13 nt, Human
aggggugggcugg

SEQ ID NO: 1419141 - RNA, 23 nt, Human
agggggugauuagagggaggaga

SEQ ID NO: 1419142 - RNA, 17 nt, Human
agggggucuggcuggug

SEQ ID NO: 1419143 - RNA, 16 nt, Human
agggggucuggcuggu

SEQ ID NO: 1419144 - RNA, 15 nt, Human
agggggucuggcugg

SEQ ID NO: 1419145 - RNA, 11 nt, Human
agggggucugg

SEQ ID NO: 1419146 - RNA, 20 nt, Human
agggggauccgacugcuuug

SEQ ID NO: 1419147 - RNA, 19 nt, Human
agggggauccgacugcuuu

SEQ ID NO: 1419148 - RNA, 23 nt, Human
agggggucguggagagcuaggag

SEQ ID NO: 1419149 - RNA, 14 nt, Human
aggggcucccuccg

SEQ ID NO: 1419150 - RNA, 19 nt, Human
agggggucguggagagcua

SEQ ID NO: 1419151 - RNA, 21 nt, Human
aggggagaccucagaaguaaa

SEQ ID NO: 1419152 - RNA, 19 nt, Human
aggggagaccucagaagua

SEQ ID NO: 1419153 - RNA, 20 nt, Human
ugggguauggauucuaaaau

SEQ ID NO: 1419154 - RNA, 19 nt, Human
ugggguauggauucuaaaa

SEQ ID NO: 1419155 - RNA, 22 nt, Human
agggggagcugggccuggucuc

SEQ ID NO: 1419156 - RNA, 22 nt, Human
agggggagccccuucugcucag

SEQ ID NO: 1419157 - RNA, 21 nt, Human
agggggagccccuucugcuca

SEQ ID NO: 1419158 - RNA, 16 nt, Human
agggggagagggcugc

SEQ ID NO: 1419159 - RNA, 15 nt, Human
agggggagagggcug

SEQ ID NO: 1419160 - RNA, 16 nt, Human
agggggaauggcagca

SEQ ID NO: 1419161 - RNA, 22 nt, Human
agggggaaggugggguccugga

SEQ ID NO: 1419162 - RNA, 15 nt, Human
aggggcucccuccgc

SEQ ID NO: 1419163 - RNA, 13 nt, Human
aggggcucccucc

SEQ ID NO: 1419164 - RNA, 17 nt, Human
aggggcuaccaggaaag

SEQ ID NO: 1419165 - RNA, 14 nt, Human
aggggcuaccagga

SEQ ID NO: 1419166 - RNA, 15 nt, Human
aggggcuaccaggaa

SEQ ID NO: 1419167 - RNA, 18 nt, Human
ugggucucaccggcucuc

SEQ ID NO: 1419168 - RNA, 21 nt, Human
ugggucugggagucacacagu

SEQ ID NO: 1419169 - RNA, 23 nt, Human
ugggucucaccggcucucaccug

SEQ ID NO: 1419170 - RNA, 17 nt, Human
ugggugcuacuggggaa

SEQ ID NO: 1419171 - RNA, 12 nt, Human
agggugggaagg

SEQ ID NO: 1419172 - RNA, 11 nt, Human
aggguggcagc

SEQ ID NO: 1419173 - RNA, 13 nt, Human
aggguggcagcaa

SEQ ID NO: 1419174 - RNA, 15 nt, Human
aggguggcagcaaca

SEQ ID NO: 1419175 - RNA, 16 nt, Human
aggguggcagcaacaa

SEQ ID NO: 1419176 - RNA, 22 nt, Human
ugguaggaccaagcaucuuggg

SEQ ID NO: 1419177 - RNA, 16 nt, Human
ugguaggaccaagcau

SEQ ID NO: 1419178 - RNA, 17 nt, Human
ugguaggaauagcaugu

SEQ ID NO: 1419179 - RNA, 21 nt, Human
ugguacuguacagcuggcucu

SEQ ID NO: 1419180 - RNA, 19 nt, Human
ugguacuguacagcuggcu

SEQ ID NO: 1419181 - RNA, 17 nt, Human
ugguacuguacagcugg

SEQ ID NO: 1419182 - RNA, 21 nt, Human
ugguacugacuuugcuugcuu

SEQ ID NO: 1419183 - RNA, 17 nt, Human
ugguacugacuuugcuu

SEQ ID NO: 1419184 - RNA, 22 nt, Human
ugguacucccucucaggaucca

SEQ ID NO: 1419185 - RNA, 17 nt, Human
ugguacucccucucagg

SEQ ID NO: 1419186 - RNA, 14 nt, Human
uggguggcucacuc

SEQ ID NO: 1419187 - RNA, 23 nt, Human
uggguggcuacucugugccagag

SEQ ID NO: 1419188 - RNA, 20 nt, Human
uggguggcuacucugugcca

SEQ ID NO: 1419189 - RNA, 19 nt, Human
uggguggcuacucugugcc

SEQ ID NO: 1419190 - RNA, 14 nt, Human
uggguggcuacucu

SEQ ID NO: 1419191 - RNA, 14 nt, Human
ugguaauauugacu

SEQ ID NO: 1419192 - RNA, 17 nt, Human
ugguaagcuauguccca

SEQ ID NO: 1419193 - RNA, 20 nt, Human
ugguaagcaacauggcuuug

SEQ ID NO: 1419194 - RNA, 19 nt, Human
ugguaagcaacauggcuuu

SEQ ID NO: 1419195 - RNA, 18 nt, Human
ugguaagcaacauggcuu

SEQ ID NO: 1419196 - RNA, 20 nt, Human
ugguaaggggaauugaggac

SEQ ID NO: 1419197 - RNA, 15 nt, Human
uguccgacucuucug

SEQ ID NO: 1419198 - RNA, 23 nt, Human
uguccaaaaccgccagcucuguu

SEQ ID NO: 1419199 - RNA, 22 nt, Human
uguccaaaaccgccagcucugu

SEQ ID NO: 1419200 - RNA, 21 nt, Human
uguccaaaaccgccagcucug

SEQ ID NO: 1419201 - RNA, 20 nt, Human
uguccaaaaccgccagcucu

SEQ ID NO: 1419202 - RNA, 19 nt, Human
uguccaaaaccgccagcuc

SEQ ID NO: 1419203 - RNA, 18 nt, Human
uguccaaaaccgccagcu

SEQ ID NO: 1419204 - RNA, 15 nt, Human
uguccaaaacugccu

SEQ ID NO: 1419205 - RNA, 16 nt, Human
uguccaaaaccgccag

SEQ ID NO: 1419206 - RNA, 15 nt, Human
ugucauuuuuuuucu

SEQ ID NO: 1419207 - RNA, 13 nt, Human
ugucauuuuggua

SEQ ID NO: 1419208 - RNA, 23 nt, Human
uguccgcugggugguacccucug

SEQ ID NO: 1419209 - RNA, 22 nt, Human
uguccgcugggugguacccucu

SEQ ID NO: 1419210 - RNA, 20 nt, Human
uguccgcugggugguacccu

SEQ ID NO: 1419211 - RNA, 15 nt, Human
uguccgcuggguggu

SEQ ID NO: 1419212 - RNA, 21 nt, Human
uguccuuuuuccucuccacac

SEQ ID NO: 1419213 - RNA, 18 nt, Human
uguccuuuuuccucucca

SEQ ID NO: 1419214 - RNA, 17 nt, Human
uguccuuuuuccucucc

SEQ ID NO: 1419215 - RNA, 16 nt, Human
uguccuuuuuccucuc

SEQ ID NO: 1419216 - RNA, 15 nt, Human
uguccuuuuuccucu

SEQ ID NO: 1419217 - RNA, 15 nt, Human
uguccuuuugcaaag

SEQ ID NO: 1419218 - RNA, 22 nt, Human
uguccuuuucauaggucugaaa

SEQ ID NO: 1419219 - RNA, 13 nt, Human
uguccuuuucaua

SEQ ID NO: 1419220 - RNA, 19 nt, Human
uguccuuucuagagcacug

SEQ ID NO: 1419221 - RNA, 18 nt, Human
uguccuuucuagagcacu

SEQ ID NO: 1419222 - RNA, 14 nt, Human
uguccuuucuagag

SEQ ID NO: 1419223 - RNA, 13 nt, Human
uguccuuucuaga

SEQ ID NO: 1419224 - RNA, 23 nt, Human
uguccuuucccuucaguacccuc

SEQ ID NO: 1419225 - RNA, 14 nt, Human
ugucgauuagacug

SEQ ID NO: 1419226 - RNA, 15 nt, Human
uguccuacagaaaaa

SEQ ID NO: 1419227 - RNA, 14 nt, Human
uguccuacagaaaa

SEQ ID NO: 1419228 - RNA, 13 nt, Human
uguccuacagaaa

SEQ ID NO: 1419229 - RNA, 12 nt, Human
uguccuacagaa

SEQ ID NO: 1419230 - RNA, 22 nt, Human
uguccuaauaauaucccacugg

SEQ ID NO: 1419231 - RNA, 14 nt, Human
uguccuuucccuuc

SEQ ID NO: 1419232 - RNA, 13 nt, Human
uguccuuucccuu

SEQ ID NO: 1419233 - RNA, 18 nt, Human
uguccuacagaaaaaccu

SEQ ID NO: 1419234 - RNA, 16 nt, Human
uguccuacagaaaaac

SEQ ID NO: 1419235 - RNA, 17 nt, Human
ugucguuaaaaacagau

SEQ ID NO: 1419236 - RNA, 16 nt, Human
ugucguaaagauuugg

SEQ ID NO: 1419237 - RNA, 23 nt, Human
ugucgauuagacuggacagcuug

SEQ ID NO: 1419238 - RNA, 20 nt, Human
ugucgauuagacuggacagc

SEQ ID NO: 1419239 - RNA, 18 nt, Human
ugucgauuagacuggaca

SEQ ID NO: 1419240 - RNA, 20 nt, Human
ugucguggacacacacagac

SEQ ID NO: 1419241 - RNA, 23 nt, Human
agucagagccaugucuucucccu

SEQ ID NO: 1419242 - RNA, 23 nt, Human
agucagacuggauaguccgucuc

SEQ ID NO: 1419243 - RNA, 16 nt, Human
agucaggaaagagaac

SEQ ID NO: 1419244 - RNA, 22 nt, Human
agucuagauucaaagguucuag

SEQ ID NO: 1419245 - RNA, 21 nt, Human
agucuagauucaaagguucua

SEQ ID NO: 1419246 - RNA, 20 nt, Human
agucuagauucaaagguucu

SEQ ID NO: 1419247 - RNA, 18 nt, Human
agucuagauucaaagguu

SEQ ID NO: 1419248 - RNA, 15 nt, Human
agucuagauucaaag

SEQ ID NO: 1419249 - RNA, 14 nt, Human
agucuagauucaaa

SEQ ID NO: 1419250 - RNA, 23 nt, Human
agucuagauguuuauucuucuag

SEQ ID NO: 1419251 - RNA, 22 nt, Human
agucuaaagauggaguuucuaa

SEQ ID NO: 1419252 - RNA, 21 nt, Human
agucuaaagauggaguuucua

SEQ ID NO: 1419253 - RNA, 20 nt, Human
agucuaaagauggaguuucu

SEQ ID NO: 1419254 - RNA, 21 nt, Human
agucguggggugugcugggag

SEQ ID NO: 1419255 - RNA, 20 nt, Human
agucguggggugugcuggga

SEQ ID NO: 1419256 - RNA, 19 nt, Human
agucguggggugugcuggg

SEQ ID NO: 1419257 - RNA, 18 nt, Human
agucguggggugugcugg

SEQ ID NO: 1419258 - RNA, 16 nt, Human
agucuagauucucugg

SEQ ID NO: 1419259 - RNA, 20 nt, Human
agucuagauucucuggcugu

SEQ ID NO: 1419260 - RNA, 14 nt, Human
agucuagauucucu

SEQ ID NO: 1419261 - RNA, 13 nt, Human
agucuagauucuc

SEQ ID NO: 1419262 - RNA, 17 nt, Human
agucguggggugugcug

SEQ ID NO: 1419263 - RNA, 17 nt, Human
agucgugaccugcuagg

SEQ ID NO: 1419264 - RNA, 15 nt, Human
agucgugccuguguc

SEQ ID NO: 1419265 - RNA, 14 nt, Human
agucgugccugugu

SEQ ID NO: 1419266 - RNA, 13 nt, Human
agucgugccugug

SEQ ID NO: 1419267 - RNA, 12 nt, Human
agucgugccugu

SEQ ID NO: 1419268 - RNA, 21 nt, Human
agucgugagcucuugugagga

SEQ ID NO: 1419269 - RNA, 21 nt, Human
agucgugaccugcuaggccag

SEQ ID NO: 1419270 - RNA, 18 nt, Human
agucgugagcucuuguga

SEQ ID NO: 1419271 - RNA, 13 nt, Human
aguccgugggacg

SEQ ID NO: 1419272 - RNA, 23 nt, Human
aguccgugggacgggaugguucu

SEQ ID NO: 1419273 - RNA, 14 nt, Human
aguccgucaaaaca

SEQ ID NO: 1419274 - RNA, 15 nt, Human
aguccgucaaaacag

SEQ ID NO: 1419275 - RNA, 21 nt, Human
aguccggccccaguacacagg

SEQ ID NO: 1419276 - RNA, 23 nt, Human
agucccugccuggaccagccucu

SEQ ID NO: 1419277 - RNA, 22 nt, Human
agucccugccuggaccagccuc

SEQ ID NO: 1419278 - RNA, 21 nt, Human
agucccugccuggaccagccu

SEQ ID NO: 1419279 - RNA, 15 nt, Human
agucccugccuggac

SEQ ID NO: 1419280 - RNA, 21 nt, Human
agucccugcacagugacuucu

SEQ ID NO: 1419281 - RNA, 19 nt, Human
agucccugcacagugacuu

SEQ ID NO: 1419282 - RNA, 14 nt, Human
agucccugccugga

SEQ ID NO: 1419283 - RNA, 22 nt, Human
aguccaggaugcuaacaucuaa

SEQ ID NO: 1419284 - RNA, 17 nt, Human
agucaggcccaggcacu

SEQ ID NO: 1419285 - RNA, 12 nt, Human
agucaggaaagg

SEQ ID NO: 1419286 - RNA, 18 nt, Human
aguccaggcugccguggg

SEQ ID NO: 1419287 - RNA, 17 nt, Human
aguccaggcugccgugg

SEQ ID NO: 1419288 - RNA, 14 nt, Human
aguccaggcugccg

SEQ ID NO: 1419289 - RNA, 22 nt, Human
aguccaggcuuuuuuaucaugu

SEQ ID NO: 1419290 - RNA, 14 nt, Human
aguaguccugugaa

SEQ ID NO: 1419291 - RNA, 13 nt, Human
aguaguccuguga

SEQ ID NO: 1419292 - RNA, 12 nt, Human
aguaguccugug

SEQ ID NO: 1419293 - RNA, 21 nt, Human
aguagucccugcacagugacu

SEQ ID NO: 1419294 - RNA, 22 nt, Human
aguaggcauuuuuaccaucacu

SEQ ID NO: 1419295 - RNA, 17 nt, Human
aguaggcauuuuuacca

SEQ ID NO: 1419296 - RNA, 13 nt, Human
aguaggagcccag

SEQ ID NO: 1419297 - RNA, 12 nt, Human
aguaguucacau

SEQ ID NO: 1419298 - RNA, 15 nt, Human
ugucaaucuguccgu

SEQ ID NO: 1419299 - RNA, 20 nt, Human
ugucaaucagccuaguugau

SEQ ID NO: 1419300 - RNA, 21 nt, Human
ugucaagaauagcauuguaaa

SEQ ID NO: 1419301 - RNA, 16 nt, Human
uguauuuuuuuacuaa

SEQ ID NO: 1419302 - RNA, 14 nt, Human
uguauuuuuuuacu

SEQ ID NO: 1419303 - RNA, 21 nt, Human
uguauuauuuacauuuaauag

SEQ ID NO: 1419304 - RNA, 18 nt, Human
uguauuauuuacauuuaa

SEQ ID NO: 1419305 - RNA, 18 nt, Human
uguaguaauugacaugug

SEQ ID NO: 1419306 - RNA, 16 nt, Human
uguaguaauugacaug

SEQ ID NO: 1419307 - RNA, 15 nt, Human
uguaguaauugacau

SEQ ID NO: 1419308 - RNA, 14 nt, Human
uguaguaauugaca

SEQ ID NO: 1419309 - RNA, 19 nt, Human
uguaguaaucugcauuauu

SEQ ID NO: 1419310 - RNA, 20 nt, Human
uguaguaacacuaauauauu

SEQ ID NO: 1419311 - RNA, 17 nt, Human
uguaguaacacuaauau

SEQ ID NO: 1419312 - RNA, 15 nt, Human
uguaguaacacuaau

SEQ ID NO: 1419313 - RNA, 14 nt, Human
uguaguaacacuaa

SEQ ID NO: 1419314 - RNA, 21 nt, Human
uguaguaaauaaugcuuugaa

SEQ ID NO: 1419315 - RNA, 18 nt, Human
uguaguaaauaaugcuuu

SEQ ID NO: 1419316 - RNA, 17 nt, Human
uguaguaaauaaugcuu

SEQ ID NO: 1419317 - RNA, 16 nt, Human
uguaguaaauaaugcu

SEQ ID NO: 1419318 - RNA, 20 nt, Human
uguagguugcacacuuuggu

SEQ ID NO: 1419319 - RNA, 18 nt, Human
uguagguugcacacuuug

SEQ ID NO: 1419320 - RNA, 15 nt, Human
uguagguugcacacu

SEQ ID NO: 1419321 - RNA, 18 nt, Human
uguauucagacagaugag

SEQ ID NO: 1419322 - RNA, 14 nt, Human
uguauucagacaga

SEQ ID NO: 1419323 - RNA, 21 nt, Human
uguauuccaagacaugucugu

SEQ ID NO: 1419324 - RNA, 20 nt, Human
uguauuccaagacaugucug

SEQ ID NO: 1419325 - RNA, 15 nt, Human
uguauuccaagacau

SEQ ID NO: 1419326 - RNA, 13 nt, Human
uguauuccaagac

SEQ ID NO: 1419327 - RNA, 17 nt, Human
uguauuuuuaguagaga

SEQ ID NO: 1419328 - RNA, 19 nt, Human
ugucagggaguguucccua

SEQ ID NO: 1419329 - RNA, 20 nt, Human
ugucaguaccuucaaacuag

SEQ ID NO: 1419330 - RNA, 23 nt, Human
ugucaggauugcgagagaugugu

SEQ ID NO: 1419331 - RNA, 14 nt, Human
ugucaggcacuggg

SEQ ID NO: 1419332 - RNA, 22 nt, Human
ugucaggauugcgagagaugug

SEQ ID NO: 1419333 - RNA, 21 nt, Human
ugucaggauugcgagagaugu

SEQ ID NO: 1419334 - RNA, 19 nt, Human
ugucaggauugcgagagau

SEQ ID NO: 1419335 - RNA, 13 nt, Human
ugucaggauugcg

SEQ ID NO: 1419336 - RNA, 16 nt, Human
ugucaggagugugugu

SEQ ID NO: 1419337 - RNA, 23 nt, Human
ugucagggaguguucccuaucca

SEQ ID NO: 1419338 - RNA, 23 nt, Human
ugucagcugcaagguacucuggu

SEQ ID NO: 1419339 - RNA, 22 nt, Human
ugucagcugcaagguacucugg

SEQ ID NO: 1419340 - RNA, 13 nt, Human
agucacugagacc

SEQ ID NO: 1419341 - RNA, 23 nt, Human
agucacugagaccaaggcuuucu

SEQ ID NO: 1419342 - RNA, 21 nt, Human
aguauuugggaagugaagacu

SEQ ID NO: 1419343 - RNA, 20 nt, Human
agucacauuccugaacagga

SEQ ID NO: 1419344 - RNA, 19 nt, Human
agucacauuccugaacagg

SEQ ID NO: 1419345 - RNA, 17 nt, Human
aguauuugggaagugaa

SEQ ID NO: 1419346 - RNA, 16 nt, Human
aguauuucuaugaaau

SEQ ID NO: 1419347 - RNA, 17 nt, Human
aguauaaagaauugugg

SEQ ID NO: 1419348 - RNA, 23 nt, Human
aguaugugggcagauuuucagca

SEQ ID NO: 1419349 - RNA, 13 nt, Human
aguauguauuauu

SEQ ID NO: 1419350 - RNA, 15 nt, Human
aguauuucuaugaaa

SEQ ID NO: 1419351 - RNA, 13 nt, Human
aguauuucuauga

SEQ ID NO: 1419352 - RNA, 20 nt, Human
uguaggagagguugucugug

SEQ ID NO: 1419353 - RNA, 14 nt, Human
uguagguugcacac

SEQ ID NO: 1419354 - RNA, 22 nt, Human
aguagaugcauuuggguccagg

SEQ ID NO: 1419355 - RNA, 23 nt, Human
aguagaugcauuuggguccagga

SEQ ID NO: 1419356 - RNA, 21 nt, Human
aguagaugcauuuggguccag

SEQ ID NO: 1419357 - RNA, 19 nt, Human
aguagauaggccaugggca

SEQ ID NO: 1419358 - RNA, 12 nt, Human
aguagaaaucau

SEQ ID NO: 1419359 - RNA, 18 nt, Human
aguagaaaggccuuuaaa

SEQ ID NO: 1419360 - RNA, 13 nt, Human
aguagagacaggg

SEQ ID NO: 1419361 - RNA, 19 nt, Human
aguagaagucucuuccagu

SEQ ID NO: 1419362 - RNA, 22 nt, Human
aguagagacgagguuucacugu

SEQ ID NO: 1419363 - RNA, 17 nt, Human
aguacacucugcuguuu

SEQ ID NO: 1419364 - RNA, 15 nt, Human
aguacacucugcugu

SEQ ID NO: 1419365 - RNA, 14 nt, Human
aguacacucugcug

SEQ ID NO: 1419366 - RNA, 20 nt, Human
aguacacagcaccagaaugu

SEQ ID NO: 1419367 - RNA, 16 nt, Human
aguacaccccaccucu

SEQ ID NO: 1419368 - RNA, 14 nt, Human
aguacacuguuuca

SEQ ID NO: 1419369 - RNA, 16 nt, Human
aguacacuguuucaaa

SEQ ID NO: 1419370 - RNA, 20 nt, Human
aguacacuguuucaaacuuu

SEQ ID NO: 1419371 - RNA, 16 nt, Human
aguacuuugugcauuc

SEQ ID NO: 1419372 - RNA, 15 nt, Human
aguacuuugugcauu

SEQ ID NO: 1419373 - RNA, 13 nt, Human
aguacuuugugca

SEQ ID NO: 1419374 - RNA, 19 nt, Human
aguacuuuuggcauuuuac

SEQ ID NO: 1419375 - RNA, 14 nt, Human
aguagaaaggccuu

SEQ ID NO: 1419376 - RNA, 15 nt, Human
aguagaaaggccuuu

SEQ ID NO: 1419377 - RNA, 16 nt, Human
aguagaaaggccuuua

SEQ ID NO: 1419378 - RNA, 17 nt, Human
aguagaaaggccuuuaa

SEQ ID NO: 1419379 - RNA, 22 nt, Human
aguaaucaaucuacucaaagca

SEQ ID NO: 1419380 - RNA, 15 nt, Human
aguaauccaagcaaa

SEQ ID NO: 1419381 - RNA, 21 nt, Human
aguaauccaagcaaaugugaa

SEQ ID NO: 1419382 - RNA, 21 nt, Human
aguaauuuguuuaaaaaguaa

SEQ ID NO: 1419383 - RNA, 15 nt, Human
aguaauuugaggaca

SEQ ID NO: 1419384 - RNA, 16 nt, Human
aguacacaauaagcaa

SEQ ID NO: 1419385 - RNA, 17 nt, Human
aguacacaauaagcaaa

SEQ ID NO: 1419386 - RNA, 18 nt, Human
aguacacaauaagcaaaa

SEQ ID NO: 1419387 - RNA, 21 nt, Human
aguacacaauaagcaaaaaca

SEQ ID NO: 1419388 - RNA, 22 nt, Human
aguacacaauaagcaaaaacaa

SEQ ID NO: 1419389 - RNA, 19 nt, Human
aguacaccacaagggucac

SEQ ID NO: 1419390 - RNA, 22 nt, Human
agguuuuccucuucuauuuugu

SEQ ID NO: 1419391 - RNA, 10 nt, Human
agguuuucag

SEQ ID NO: 1419392 - RNA, 22 nt, Human
aguaauaugccugcuauuugaa

SEQ ID NO: 1419393 - RNA, 20 nt, Human
aguaauaugcacacauuuuu

SEQ ID NO: 1419394 - RNA, 18 nt, Human
aguaauaugcacacauuu

SEQ ID NO: 1419395 - RNA, 19 nt, Human
aguaauaugcacacauuuu

SEQ ID NO: 1419396 - RNA, 22 nt, Human
aguaagggcacugacggacuca

SEQ ID NO: 1419397 - RNA, 23 nt, Human
aguaaggaauuuuauuuuuuucu

SEQ ID NO: 1419398 - RNA, 23 nt, Human
uguaccaguuaauuuuuccaacu

SEQ ID NO: 1419399 - RNA, 22 nt, Human
uguaccaguuaauuuuuccaac

SEQ ID NO: 1419400 - RNA, 21 nt, Human
uguaccaguuaauuuuuccaa

SEQ ID NO: 1419401 - RNA, 15 nt, Human
uguaccaguuaauuu

SEQ ID NO: 1419402 - RNA, 14 nt, Human
uguaccaguuaauu

SEQ ID NO: 1419403 - RNA, 12 nt, Human
uguaccaguuaa

SEQ ID NO: 1419404 - RNA, 11 nt, Human
uguaccaguua

SEQ ID NO: 1419405 - RNA, 15 nt, Human
uguaccaagaaucuu

SEQ ID NO: 1419406 - RNA, 19 nt, Human
uguaauuucaggaggaaua

SEQ ID NO: 1419407 - RNA, 23 nt, Human
uguaauuucaggaggaauacuga

SEQ ID NO: 1419408 - RNA, 14 nt, Human
uguaauuugugaua

SEQ ID NO: 1419409 - RNA, 17 nt, Human
uguaccauguacaugaa

SEQ ID NO: 1419410 - RNA, 12 nt, Human
uguaccauguac

SEQ ID NO: 1419411 - RNA, 23 nt, Human
aggugcacugggaggcuccccuu

SEQ ID NO: 1419412 - RNA, 22 nt, Human
aggugcacugggaggcuccccu

SEQ ID NO: 1419413 - RNA, 15 nt, Human
aggugcacugggagg

SEQ ID NO: 1419414 - RNA, 22 nt, Human
aggugcaauuucaagguucuaa

SEQ ID NO: 1419415 - RNA, 21 nt, Human
aggugcaauuucaagguucua

SEQ ID NO: 1419416 - RNA, 20 nt, Human
aggugcaauuucaagguucu

SEQ ID NO: 1419417 - RNA, 19 nt, Human
aggugcaauuucaagguuc

SEQ ID NO: 1419418 - RNA, 18 nt, Human
aggugcaauuucaagguu

SEQ ID NO: 1419419 - RNA, 16 nt, Human
aggugcaauuucaagg

SEQ ID NO: 1419420 - RNA, 17 nt, Human
agguggccaaguuccuc

SEQ ID NO: 1419421 - RNA, 16 nt, Human
agguggccaaguuccu

SEQ ID NO: 1419422 - RNA, 20 nt, Human
aggugcauauuuauaaaaau

SEQ ID NO: 1419423 - RNA, 19 nt, Human
agguggccaaguuccucua

SEQ ID NO: 1419424 - RNA, 14 nt, Human
agguggcccuacug

SEQ ID NO: 1419425 - RNA, 19 nt, Human
aggugggcacuggauuagu

SEQ ID NO: 1419426 - RNA, 21 nt, Human
agguggugguagagaagcaag

SEQ ID NO: 1419427 - RNA, 15 nt, Human
aggugcaauuucaag

SEQ ID NO: 1419428 - RNA, 21 nt, Human
aggugcaacagacuugaaugc

SEQ ID NO: 1419429 - RNA, 15 nt, Human
uguaaaucuacacac

SEQ ID NO: 1419430 - RNA, 10 nt, Human
aggucccuaa

SEQ ID NO: 1419431 - RNA, 18 nt, Human
aggucuuugguucagcua

SEQ ID NO: 1419432 - RNA, 19 nt, Human
aggucuuggaacuugccug

SEQ ID NO: 1419433 - RNA, 21 nt, Human
aggucuuggaacuugccugcc

SEQ ID NO: 1419434 - RNA, 23 nt, Human
uguaagauuuguuuuuaaacugu

SEQ ID NO: 1419435 - RNA, 22 nt, Human
uguaagauuauagauucuaaag

SEQ ID NO: 1419436 - RNA, 21 nt, Human
uguaagauuauagauucuaaa

SEQ ID NO: 1419437 - RNA, 20 nt, Human
uguaagauuauagauucuaa

SEQ ID NO: 1419438 - RNA, 19 nt, Human
uguaagauuauagauucua

SEQ ID NO: 1419439 - RNA, 18 nt, Human
uguaagauuauagauucu

SEQ ID NO: 1419440 - RNA, 16 nt, Human
uguaaguugaagcaaa

SEQ ID NO: 1419441 - RNA, 18 nt, Human
uguaagggccagaaauau

SEQ ID NO: 1419442 - RNA, 21 nt, Human
uguaagauuuguuuuuaaacu

SEQ ID NO: 1419443 - RNA, 13 nt, Human
uguaagauuuguu

SEQ ID NO: 1419444 - RNA, 23 nt, Human
uguaagauuauagauucuaaaga

SEQ ID NO: 1419445 - RNA, 21 nt, Human
uguaagggccagaaauaucuu

SEQ ID NO: 1419446 - RNA, 15 nt, Human
uguaaguaaacgguc

SEQ ID NO: 1419447 - RNA, 20 nt, Human
uguaauuauuuauguauggu

SEQ ID NO: 1419448 - RNA, 19 nt, Human
uguaaguugggcuugcuau

SEQ ID NO: 1419449 - RNA, 21 nt, Human
uguaaguugggcuugcuauuc

SEQ ID NO: 1419450 - RNA, 18 nt, Human
uguaaguugggcuugcua

SEQ ID NO: 1419451 - RNA, 14 nt, Human
uguaaguugggcuu

SEQ ID NO: 1419452 - RNA, 23 nt, Human
uguaauuagugccacuuaaugua

SEQ ID NO: 1419453 - RNA, 21 nt, Human
uguaauuagugccacuuaaug

SEQ ID NO: 1419454 - RNA, 13 nt, Human
agguugcacacuu

SEQ ID NO: 1419455 - RNA, 12 nt, Human
agguugcacacu

SEQ ID NO: 1419456 - RNA, 19 nt, Human
agguugcacacuuugguac

SEQ ID NO: 1419457 - RNA, 17 nt, Human
agguugcacacuuuggu

SEQ ID NO: 1419458 - RNA, 16 nt, Human
agguugcacacuuugg

SEQ ID NO: 1419459 - RNA, 22 nt, Human
agguuggcucugccaguccugu

SEQ ID NO: 1419460 - RNA, 15 nt, Human
agguuggcucugcca

SEQ ID NO: 1419461 - RNA, 21 nt, Human
agguuggcucugccaguccug

SEQ ID NO: 1419462 - RNA, 19 nt, Human
agguuggcucugccagucc

SEQ ID NO: 1419463 - RNA, 18 nt, Human
agguuggcucugccaguc

SEQ ID NO: 1419464 - RNA, 16 nt, Human
agguuggcucugccag

SEQ ID NO: 1419465 - RNA, 24 nt, Human
agguugagcucuucuuaaaguauu

SEQ ID NO: 1419466 - RNA, 17 nt, Human
agguugagcucuucuua

SEQ ID NO: 1419467 - RNA, 13 nt, Human
aggugguguuucu

SEQ ID NO: 1419468 - RNA, 19 nt, Human
agguguagccacaccagga

SEQ ID NO: 1419469 - RNA, 23 nt, Human
uguaacuugauccauuucuaauu

SEQ ID NO: 1419470 - RNA, 22 nt, Human
uguaacuugauccauuucuaau

SEQ ID NO: 1419471 - RNA, 21 nt, Human
uguaagacaaagguuuuccuc

SEQ ID NO: 1419472 - RNA, 20 nt, Human
uguaagacaaagguuuuccu

SEQ ID NO: 1419473 - RNA, 16 nt, Human
uguaacuuuuguaaga

SEQ ID NO: 1419474 - RNA, 15 nt, Human
uguaacuuuuguaag

SEQ ID NO: 1419475 - RNA, 20 nt, Human
uguaacuuuuguaagacaaa

SEQ ID NO: 1419476 - RNA, 17 nt, Human
uguaagaaaauaucacu

SEQ ID NO: 1419477 - RNA, 22 nt, Human
uguggauuuuuuccuucaaagu

SEQ ID NO: 1419478 - RNA, 22 nt, Human
uguggcaaagccuucauugccu

SEQ ID NO: 1419479 - RNA, 20 nt, Human
uguggagccgaggccuaccc

SEQ ID NO: 1419480 - RNA, 19 nt, Human
uguggagccgaggccuacc

SEQ ID NO: 1419481 - RNA, 16 nt, Human
uguggagccgaggccu

SEQ ID NO: 1419482 - RNA, 19 nt, Human
uguggagagggaaugugaa

SEQ ID NO: 1419483 - RNA, 20 nt, Human
uguggagagggaaugugaaa

SEQ ID NO: 1419484 - RNA, 17 nt, Human
uguggagagggaaugug

SEQ ID NO: 1419485 - RNA, 19 nt, Human
uguggccccacccugggcc

SEQ ID NO: 1419486 - RNA, 17 nt, Human
uguggccccacccuggg

SEQ ID NO: 1419487 - RNA, 13 nt, Human
uguggccccaccc

SEQ ID NO: 1419488 - RNA, 12 nt, Human
uguggccccacc

SEQ ID NO: 1419489 - RNA, 20 nt, Human
uguggcagaguuacaguucu

SEQ ID NO: 1419490 - RNA, 19 nt, Human
uguggcagaguuacaguuc

SEQ ID NO: 1419491 - RNA, 15 nt, Human
uguggcagaguuaca

SEQ ID NO: 1419492 - RNA, 14 nt, Human
uguggcagaguuac

SEQ ID NO: 1419493 - RNA, 14 nt, Human
uguggcaagugaau

SEQ ID NO: 1419494 - RNA, 15 nt, Human
uguggcaagugaauu

SEQ ID NO: 1419495 - RNA, 17 nt, Human
uguggcaaggaaaaaca

SEQ ID NO: 1419496 - RNA, 19 nt, Human
uguggcacuggggcagggg

SEQ ID NO: 1419497 - RNA, 22 nt, Human
ugugccuauugcuagagcuccu

SEQ ID NO: 1419498 - RNA, 13 nt, Human
ugugcccuaucac

SEQ ID NO: 1419499 - RNA, 23 nt, Human
ugugccccuugacaacuggcagg

SEQ ID NO: 1419500 - RNA, 16 nt, Human
ugugccccuugacaac

SEQ ID NO: 1419501 - RNA, 21 nt, Human
ugugccccuuccgccacuggg

SEQ ID NO: 1419502 - RNA, 20 nt, Human
ugugccccuuccgccacugg

SEQ ID NO: 1419503 - RNA, 18 nt, Human
ugugccccuuccgccacu

SEQ ID NO: 1419504 - RNA, 21 nt, Human
ugugcccuaaaguguauuuuu

SEQ ID NO: 1419505 - RNA, 20 nt, Human
ugugcccuaaaguguauuuu

SEQ ID NO: 1419506 - RNA, 21 nt, Human
ugugccuccucccucccucuc

SEQ ID NO: 1419507 - RNA, 16 nt, Human
ugugccuccucccucc

SEQ ID NO: 1419508 - RNA, 15 nt, Human
ugugccuccucccuc

SEQ ID NO: 1419509 - RNA, 14 nt, Human
ugugccuccucccu

SEQ ID NO: 1419510 - RNA, 13 nt, Human
ugugccuccuccc

SEQ ID NO: 1419511 - RNA, 16 nt, Human
ugugccuccucacccc

SEQ ID NO: 1419512 - RNA, 15 nt, Human
ugugccuccucaccc

SEQ ID NO: 1419513 - RNA, 14 nt, Human
ugugccuccucacc

SEQ ID NO: 1419514 - RNA, 14 nt, Human
ugugccucagagac

SEQ ID NO: 1419515 - RNA, 16 nt, Human
ugugccucagagacca

SEQ ID NO: 1419516 - RNA, 20 nt, Human
ugugccucgcuccccacucu

SEQ ID NO: 1419517 - RNA, 21 nt, Human
ugugccucgcuccccacucug

SEQ ID NO: 1419518 - RNA, 14 nt, Human
agugaguggcccuu

SEQ ID NO: 1419519 - RNA, 17 nt, Human
agugagucucucugggc

SEQ ID NO: 1419520 - RNA, 24 nt, Human
agugagucucucugggccuuagga

SEQ ID NO: 1419521 - RNA, 15 nt, Human
agugagucucucugg

SEQ ID NO: 1419522 - RNA, 14 nt, Human
agugagucucucug

SEQ ID NO: 1419523 - RNA, 22 nt, Human
uguggccccugaacaagaauug

SEQ ID NO: 1419524 - RNA, 23 nt, Human
uguggccaugacccugccucucc

SEQ ID NO: 1419525 - RNA, 17 nt, Human
uguggccccugaacaag

SEQ ID NO: 1419526 - RNA, 23 nt, Human
uguggccccacccugggcccugg

SEQ ID NO: 1419527 - RNA, 13 nt, Human
agugagucucucu

SEQ ID NO: 1419528 - RNA, 17 nt, Human
agugauugucuuaauau

SEQ ID NO: 1419529 - RNA, 15 nt, Human
agugauugucuuaau

SEQ ID NO: 1419530 - RNA, 21 nt, Human
agugcaaauugucacaggaca

SEQ ID NO: 1419531 - RNA, 18 nt, Human
agugcaaauugucacagg

SEQ ID NO: 1419532 - RNA, 13 nt, Human
agugcaccaaaga

SEQ ID NO: 1419533 - RNA, 22 nt, Human
agugcaaauugucacaggacag

SEQ ID NO: 1419534 - RNA, 15 nt, Human
agugcccucuccccu

SEQ ID NO: 1419535 - RNA, 16 nt, Human
agugcccccacugacc

SEQ ID NO: 1419536 - RNA, 14 nt, Human
agugcccccacuga

SEQ ID NO: 1419537 - RNA, 17 nt, Human
agugccacuguuguuuu

SEQ ID NO: 1419538 - RNA, 17 nt, Human
agugccacuuaauguau

SEQ ID NO: 1419539 - RNA, 16 nt, Human
agugccacuuaaugua

SEQ ID NO: 1419540 - RNA, 14 nt, Human
agugccacuuaaug

SEQ ID NO: 1419541 - RNA, 21 nt, Human
agugcaucuggagagaacagg

SEQ ID NO: 1419542 - RNA, 19 nt, Human
agugcaucuggagagaaca

SEQ ID NO: 1419543 - RNA, 14 nt, Human
agugcaucuggaga

SEQ ID NO: 1419544 - RNA, 22 nt, Human
agugcaguccugaucagagccg

SEQ ID NO: 1419545 - RNA, 16 nt, Human
agugcaguccugauca

SEQ ID NO: 1419546 - RNA, 20 nt, Human
agugcaccaaagagaaugcc

SEQ ID NO: 1419547 - RNA, 18 nt, Human
agugcaccaaagagaaug

SEQ ID NO: 1419548 - RNA, 16 nt, Human
agugcaccaaagagaa

SEQ ID NO: 1419549 - RNA, 14 nt, Human
agugcacuaaugug

SEQ ID NO: 1419550 - RNA, 16 nt, Human
uguguguugauacugu

SEQ ID NO: 1419551 - RNA, 20 nt, Human
uguguguuaagcucugcuau

SEQ ID NO: 1419552 - RNA, 13 nt, Human
uguguugccaagc

SEQ ID NO: 1419553 - RNA, 23 nt, Human
uguguugauacuguugcacgugu

SEQ ID NO: 1419554 - RNA, 16 nt, Human
uguguucccauuucag

SEQ ID NO: 1419555 - RNA, 15 nt, Human
uguguguugauacug

SEQ ID NO: 1419556 - RNA, 19 nt, Human
uguguuaugcaaaagcaag

SEQ ID NO: 1419557 - RNA, 20 nt, Human
ugugucuaagauucuagauc

SEQ ID NO: 1419558 - RNA, 19 nt, Human
ugugucuaagauucuagau

SEQ ID NO: 1419559 - RNA, 18 nt, Human
ugugucuaagauucuaga

SEQ ID NO: 1419560 - RNA, 17 nt, Human
ugugucuaagauucuag

SEQ ID NO: 1419561 - RNA, 16 nt, Human
ugugucuaagauucua

SEQ ID NO: 1419562 - RNA, 22 nt, Human
ugugguuucauguuaguuaccu

SEQ ID NO: 1419563 - RNA, 15 nt, Human
ugugucuaagauucu

SEQ ID NO: 1419564 - RNA, 17 nt, Human
ugugguuucauguuagu

SEQ ID NO: 1419565 - RNA, 15 nt, Human
ugugguuuauauauu

SEQ ID NO: 1419566 - RNA, 23 nt, Human
agugcuuuuaagugaaaaugguc

SEQ ID NO: 1419567 - RNA, 19 nt, Human
agugcuuuuaagugaaaau

SEQ ID NO: 1419568 - RNA, 14 nt, Human
agugcuuugagaga

SEQ ID NO: 1419569 - RNA, 19 nt, Human
uguguugucucuugaguuu

SEQ ID NO: 1419570 - RNA, 13 nt, Human
uguguugucucua

SEQ ID NO: 1419571 - RNA, 22 nt, Human
uguguugggauugagucugugc

SEQ ID NO: 1419572 - RNA, 12 nt, Human
uguguuggcugu

SEQ ID NO: 1419573 - RNA, 17 nt, Human
uguguucccauuucagc

SEQ ID NO: 1419574 - RNA, 16 nt, Human
uguguugccaagcucc

SEQ ID NO: 1419575 - RNA, 21 nt, Human
uguuaacauuccaagacucua

SEQ ID NO: 1419576 - RNA, 20 nt, Human
uguuaacauuccaagacucu

SEQ ID NO: 1419577 - RNA, 16 nt, Human
uguuaacauuccaaga

SEQ ID NO: 1419578 - RNA, 15 nt, Human
uguuaacauuccaag

SEQ ID NO: 1419579 - RNA, 22 nt, Human
uguuaacagaagggagggcaga

SEQ ID NO: 1419580 - RNA, 21 nt, Human
uguuaacagaagggagggcag

SEQ ID NO: 1419581 - RNA, 13 nt, Human
uguuaacagaagg

SEQ ID NO: 1419582 - RNA, 18 nt, Human
agugccugacacacuaac

SEQ ID NO: 1419583 - RNA, 21 nt, Human
agugcccugagccagggucuc

SEQ ID NO: 1419584 - RNA, 23 nt, Human
agugcccugagccagggucucca

SEQ ID NO: 1419585 - RNA, 20 nt, Human
agugcccugagccagggucu

SEQ ID NO: 1419586 - RNA, 16 nt, Human
agugcccugagccagg

SEQ ID NO: 1419587 - RNA, 15 nt, Human
agugcccugagccag

SEQ ID NO: 1419588 - RNA, 13 nt, Human
agugcccugagcc

SEQ ID NO: 1419589 - RNA, 20 nt, Human
agugcugcauuuaaaagaua

SEQ ID NO: 1419590 - RNA, 22 nt, Human
agugcuguuuuguuauauaauu

SEQ ID NO: 1419591 - RNA, 23 nt, Human
agugcuguuuuguuauauaauuu

SEQ ID NO: 1419592 - RNA, 19 nt, Human
agugcugggauuacaggcu

SEQ ID NO: 1419593 - RNA, 20 nt, Human
agugcuguuuuguuauauaa

SEQ ID NO: 1419594 - RNA, 20 nt, Human
agugcugggauuacaggugu

SEQ ID NO: 1419595 - RNA, 20 nt, Human
agugcuggcauuacaggugu

SEQ ID NO: 1419596 - RNA, 22 nt, Human
agugcugcauuuaaaagauaca

SEQ ID NO: 1419597 - RNA, 22 nt, Human
agugcuugcuuuucaugcaaac

SEQ ID NO: 1419598 - RNA, 17 nt, Human
agugcuugcuuuucaug

SEQ ID NO: 1419599 - RNA, 13 nt, Human
agugcuugcuuuu

SEQ ID NO: 1419600 - RNA, 14 nt, Human
ugugguuuauauau

SEQ ID NO: 1419601 - RNA, 21 nt, Human
ugugguucugagauggcuccc

SEQ ID NO: 1419602 - RNA, 16 nt, Human
uguggugagggaagac

SEQ ID NO: 1419603 - RNA, 14 nt, Human
aguuauauuuugca

SEQ ID NO: 1419604 - RNA, 16 nt, Human
aguuauauuuugcagu

SEQ ID NO: 1419605 - RNA, 21 nt, Human
aguucccaguuggagcuccag

SEQ ID NO: 1419606 - RNA, 20 nt, Human
aguucccaguuggagcucca

SEQ ID NO: 1419607 - RNA, 19 nt, Human
aguucccaguuggagcucc

SEQ ID NO: 1419608 - RNA, 18 nt, Human
aguucccaguuggagcuc

SEQ ID NO: 1419609 - RNA, 17 nt, Human
aguucccaguuggagcu

SEQ ID NO: 1419610 - RNA, 22 nt, Human
aguucccacauuaaagaagacc

SEQ ID NO: 1419611 - RNA, 19 nt, Human
aguucccacauuaaagaag

SEQ ID NO: 1419612 - RNA, 18 nt, Human
aguucccacauuaaagaa

SEQ ID NO: 1419613 - RNA, 17 nt, Human
aguucccacauuaaaga

SEQ ID NO: 1419614 - RNA, 15 nt, Human
aguucagaauuuagu

SEQ ID NO: 1419615 - RNA, 22 nt, Human
aguucuaggcacuguaguucua

SEQ ID NO: 1419616 - RNA, 14 nt, Human
aguucuaggcacug

SEQ ID NO: 1419617 - RNA, 10 nt, Human
aguucuaggc

SEQ ID NO: 1419618 - RNA, 15 nt, Human
aguucuaggaaaaua

SEQ ID NO: 1419619 - RNA, 14 nt, Human
aguucuaggaaaau

SEQ ID NO: 1419620 - RNA, 13 nt, Human
aguucuaggaaaa

SEQ ID NO: 1419621 - RNA, 23 nt, Human
aguucuagacauggagguucuaa

SEQ ID NO: 1419622 - RNA, 22 nt, Human
aguucuagacauggagguucua

SEQ ID NO: 1419623 - RNA, 21 nt, Human
aguucuagacauggagguucu

SEQ ID NO: 1419624 - RNA, 10 nt, Human
aguucuagac

SEQ ID NO: 1419625 - RNA, 15 nt, Human
aguucuagaaaaaca

SEQ ID NO: 1419626 - RNA, 14 nt, Human
aguucuagaaaaac

SEQ ID NO: 1419627 - RNA, 12 nt, Human
aguucuagaaaa

SEQ ID NO: 1419628 - RNA, 23 nt, Human
aguucuaccucaggcagcucaag

SEQ ID NO: 1419629 - RNA, 22 nt, Human
aguucuaccucaggcagcucaa

SEQ ID NO: 1419630 - RNA, 22 nt, Human
aguucucccuguacaguguuac

SEQ ID NO: 1419631 - RNA, 13 nt, Human
aguucucccugua

SEQ ID NO: 1419632 - RNA, 17 nt, Human
uguugggguggguauaa

SEQ ID NO: 1419633 - RNA, 18 nt, Human
uguugggguggguauaaa

SEQ ID NO: 1419634 - RNA, 20 nt, Human
uguugggguggguauaaaag

SEQ ID NO: 1419635 - RNA, 19 nt, Human
aguuccucuaacuuggcuc

SEQ ID NO: 1419636 - RNA, 21 nt, Human
aguuccucuaacuuggcucac

SEQ ID NO: 1419637 - RNA, 19 nt, Human
aguucggugagcuacaaau

SEQ ID NO: 1419638 - RNA, 20 nt, Human
aguucuaccucaggcagcuc

SEQ ID NO: 1419639 - RNA, 21 nt, Human
aguucuaauaauuucuaaugu

SEQ ID NO: 1419640 - RNA, 18 nt, Human
aguucgcagccacccuga

SEQ ID NO: 1419641 - RNA, 20 nt, Human
aguucuaauaauuucuaaug

SEQ ID NO: 1419642 - RNA, 21 nt, Human
aguucgcagccacccugagga

SEQ ID NO: 1419643 - RNA, 17 nt, Human
aguucgcagccacccug

SEQ ID NO: 1419644 - RNA, 14 nt, Human
aguucgcagccacc

SEQ ID NO: 1419645 - RNA, 13 nt, Human
aguucgcagccac

SEQ ID NO: 1419646 - RNA, 13 nt, Human
aguuccugcuaaa

SEQ ID NO: 1419647 - RNA, 20 nt, Human
aguucggugagcuacaaaug

SEQ ID NO: 1419648 - RNA, 15 nt, Human
uguuuauguaauuuc

SEQ ID NO: 1419649 - RNA, 14 nt, Human
uguuuauguaauuu

SEQ ID NO: 1419650 - RNA, 13 nt, Human
uguuuaugguaaa

SEQ ID NO: 1419651 - RNA, 16 nt, Human
uguuuaugguaaaaaa

SEQ ID NO: 1419652 - RNA, 17 nt, Human
uguuuauucuucuagag

SEQ ID NO: 1419653 - RNA, 16 nt, Human
uguuuauucuucuaga

SEQ ID NO: 1419654 - RNA, 13 nt, Human
uguuuaguaauca

SEQ ID NO: 1419655 - RNA, 14 nt, Human
uguuuaguaaucau

SEQ ID NO: 1419656 - RNA, 17 nt, Human
uguuuaguaaucauauu

SEQ ID NO: 1419657 - RNA, 18 nt, Human
uguuuauccuuucauaua

SEQ ID NO: 1419658 - RNA, 21 nt, Human
uguuuauccuuucauauaguu

SEQ ID NO: 1419659 - RNA, 17 nt, Human
uguuuauccuuucauau

SEQ ID NO: 1419660 - RNA, 16 nt, Human
uguuuauccuuucaua

SEQ ID NO: 1419661 - RNA, 15 nt, Human
uguuuauccuuucau

SEQ ID NO: 1419662 - RNA, 18 nt, Human
uguuuaguagcagugauu

SEQ ID NO: 1419663 - RNA, 16 nt, Human
uguuuaguagcaguga

SEQ ID NO: 1419664 - RNA, 22 nt, Human
uguuguucuguuaacugaauac

SEQ ID NO: 1419665 - RNA, 13 nt, Human
uguuguuauuuaa

SEQ ID NO: 1419666 - RNA, 11 nt, Human
uguuguuauuu

SEQ ID NO: 1419667 - RNA, 18 nt, Human
uguuguucuguuaacuga

SEQ ID NO: 1419668 - RNA, 13 nt, Human
uguuguucuguua

SEQ ID NO: 1419669 - RNA, 11 nt, Human
uguuguucugu

SEQ ID NO: 1419670 - RNA, 23 nt, Human
uguuguuccaaauacuaaugaaa

SEQ ID NO: 1419671 - RNA, 13 nt, Human
uguugugcuuuua

SEQ ID NO: 1419672 - RNA, 15 nt, Human
uguugucucuugagu

SEQ ID NO: 1419673 - RNA, 20 nt, Human
uguugguugguuuucuucuu

SEQ ID NO: 1419674 - RNA, 15 nt, Human
uguugguugguuuuc

SEQ ID NO: 1419675 - RNA, 14 nt, Human
uguuggucauuuua

SEQ ID NO: 1419676 - RNA, 22 nt, Human
uguugggguggguauaaaagau

SEQ ID NO: 1419677 - RNA, 23 nt, Human
uguugggguggguauaaaagaug

SEQ ID NO: 1419678 - RNA, 18 nt, Human
uguuggugcacagcacaa

SEQ ID NO: 1419679 - RNA, 14 nt, Human
uguuggugcacagc

SEQ ID NO: 1419680 - RNA, 11 nt, Human
uguuggugcac

SEQ ID NO: 1419681 - RNA, 16 nt, Human
uguugucugcaacucu

SEQ ID NO: 1419682 - RNA, 13 nt, Human
uguugucugcaac

SEQ ID NO: 1419683 - RNA, 22 nt, Human
uguuauuauuacuuauuuuuga

SEQ ID NO: 1419684 - RNA, 23 nt, Human
uguuauuaucugggcuuauaucu

SEQ ID NO: 1419685 - RNA, 16 nt, Human
uguuauuaucugggcu

SEQ ID NO: 1419686 - RNA, 23 nt, Human
uguuauuagagauuaccuccuga

SEQ ID NO: 1419687 - RNA, 21 nt, Human
uguuauuagagauuaccuccu

SEQ ID NO: 1419688 - RNA, 16 nt, Human
uguuaucuucucaagu

SEQ ID NO: 1419689 - RNA, 20 nt, Human
uguuaucuucucaaguucua

SEQ ID NO: 1419690 - RNA, 15 nt, Human
uguuaucuucucaag

SEQ ID NO: 1419691 - RNA, 21 nt, Human
uguuaucagucaauauuuuua

SEQ ID NO: 1419692 - RNA, 19 nt, Human
uguuaucaccgugggcucc

SEQ ID NO: 1419693 - RNA, 22 nt, Human
uguuaucaaacaccaacauaaa

SEQ ID NO: 1419694 - RNA, 20 nt, Human
uguuaucaaaacuuucuuuu

SEQ ID NO: 1419695 - RNA, 16 nt, Human
aguggaucacaaagug

SEQ ID NO: 1419696 - RNA, 24 nt, Human
aguggaacgaaaaugaaagcuacu

SEQ ID NO: 1419697 - RNA, 16 nt, Human
aguggaacgaaaauga

SEQ ID NO: 1419698 - RNA, 22 nt, Human
aguggaaagacagcuucucauc

SEQ ID NO: 1419699 - RNA, 14 nt, Human
aguggaaaaggcac

SEQ ID NO: 1419700 - RNA, 18 nt, Human
agugcuuuuggcggggag

SEQ ID NO: 1419701 - RNA, 20 nt, Human
aguggagucugccacccagg

SEQ ID NO: 1419702 - RNA, 19 nt, Human
aguggagucugccacccag

SEQ ID NO: 1419703 - RNA, 17 nt, Human
aguggagucugccaccc

SEQ ID NO: 1419704 - RNA, 14 nt, Human
aguggagucugcca

SEQ ID NO: 1419705 - RNA, 18 nt, Human
aguggaucacucaccauu

SEQ ID NO: 1419706 - RNA, 15 nt, Human
aguggaucacaaagu

SEQ ID NO: 1419707 - RNA, 22 nt, Human
uguuccccuuugcuucauucaa

SEQ ID NO: 1419708 - RNA, 23 nt, Human
uguuccccuuccacugagggcag

SEQ ID NO: 1419709 - RNA, 21 nt, Human
uguuccccuuccacugagggc

SEQ ID NO: 1419710 - RNA, 20 nt, Human
uguuccccuuccacugaggg

SEQ ID NO: 1419711 - RNA, 17 nt, Human
uguuccccuuccacuga

SEQ ID NO: 1419712 - RNA, 14 nt, Human
uguuccccuuccac

SEQ ID NO: 1419713 - RNA, 14 nt, Human
uguuauuuaaagaa

SEQ ID NO: 1419714 - RNA, 15 nt, Human
uguucuuccuggccg

SEQ ID NO: 1419715 - RNA, 13 nt, Human
uguucuuccuggc

SEQ ID NO: 1419716 - RNA, 21 nt, Human
uguucuuccucagccagccuc

SEQ ID NO: 1419717 - RNA, 20 nt, Human
uguucuuccucagccagccu

SEQ ID NO: 1419718 - RNA, 17 nt, Human
uguucuuccucagccag

SEQ ID NO: 1419719 - RNA, 16 nt, Human
uguucuuccucagcca

SEQ ID NO: 1419720 - RNA, 15 nt, Human
uguucuuccucagcc

SEQ ID NO: 1419721 - RNA, 10 nt, Human
uguucuuccu

SEQ ID NO: 1419722 - RNA, 16 nt, Human
uguucuaaguuucuaa

SEQ ID NO: 1419723 - RNA, 14 nt, Human
uguucuaaguuucu

SEQ ID NO: 1419724 - RNA, 12 nt, Human
uguucuaaguuu

SEQ ID NO: 1419725 - RNA, 19 nt, Human
uguucuaaggcucugagag

SEQ ID NO: 1419726 - RNA, 17 nt, Human
uguucuaagucuuucca

SEQ ID NO: 1419727 - RNA, 23 nt, Human
uguucuaaggcucugagagucua

SEQ ID NO: 1419728 - RNA, 18 nt, Human
uguucuaaggcucugaga

SEQ ID NO: 1419729 - RNA, 16 nt, Human
uguucuaaggcucuga

SEQ ID NO: 1419730 - RNA, 15 nt, Human
uguucuaaggcucug

SEQ ID NO: 1419731 - RNA, 16 nt, Human
uguucccuauccaauc

SEQ ID NO: 1419732 - RNA, 23 nt, Human
uguucuaaguuucuaagauucua

SEQ ID NO: 1419733 - RNA, 22 nt, Human
uguucuaaguuucuaagauucu

SEQ ID NO: 1419734 - RNA, 19 nt, Human
uguucuaaguuucuaagau

SEQ ID NO: 1419735 - RNA, 18 nt, Human
uguucuaaguuucuaaga

SEQ ID NO: 1419736 - RNA, 17 nt, Human
uguucuaaguuucuaag

SEQ ID NO: 1419737 - RNA, 13 nt, Human
uguucuuguauuu

SEQ ID NO: 1419738 - RNA, 14 nt, Human
uguucuuguauuua

SEQ ID NO: 1419739 - RNA, 10 nt, Human
uguucuugua

SEQ ID NO: 1419740 - RNA, 22 nt, Human
uguucuugguuuguaaauuaac

SEQ ID NO: 1419741 - RNA, 23 nt, Human
uguucuugaauuuaauaaucugu

SEQ ID NO: 1419742 - RNA, 13 nt, Human
uguucuugaauuu

SEQ ID NO: 1419743 - RNA, 20 nt, Human
uguucuugguuuguaaauua

SEQ ID NO: 1419744 - RNA, 21 nt, Human
aguguuagccuuuuuucccca

SEQ ID NO: 1419745 - RNA, 23 nt, Human
aguguuagccuuuuuuccccaga

SEQ ID NO: 1419746 - RNA, 15 nt, Human
aguguuaaaugugau

SEQ ID NO: 1419747 - RNA, 22 nt, Human
uguucuuagcucaaugagcaug

SEQ ID NO: 1419748 - RNA, 23 nt, Human
aguguuagggaagggccugccac

SEQ ID NO: 1419749 - RNA, 19 nt, Human
aguguuagggaagggccug

SEQ ID NO: 1419750 - RNA, 18 nt, Human
aguguuagggaagggccu

SEQ ID NO: 1419751 - RNA, 15 nt, Human
aguguuagggaaggg

SEQ ID NO: 1419752 - RNA, 23 nt, Human
aguguuaucagucauaacuaaau

SEQ ID NO: 1419753 - RNA, 16 nt, Human
aguguuaucagucaua

SEQ ID NO: 1419754 - RNA, 17 nt, Human
aguguuauuuucauuca

SEQ ID NO: 1419755 - RNA, 21 nt, Human
aguguucauaaauaaaguuug

SEQ ID NO: 1419756 - RNA, 23 nt, Human
aguuauagugaauacugcuacag

SEQ ID NO: 1419757 - RNA, 20 nt, Human
aguuauagugaauacugcua

SEQ ID NO: 1419758 - RNA, 15 nt, Human
aguuauagugaauac

SEQ ID NO: 1419759 - RNA, 14 nt, Human
aguuauagugaaua

SEQ ID NO: 1419760 - RNA, 12 nt, Human
aguuagacuguu

SEQ ID NO: 1419761 - RNA, 19 nt, Human
aguuacuguguaauuagug

SEQ ID NO: 1419762 - RNA, 18 nt, Human
aguuacuguguaauuagu

SEQ ID NO: 1419763 - RNA, 16 nt, Human
aguuacuguguaauua

SEQ ID NO: 1419764 - RNA, 15 nt, Human
aguuacuguguaauu

SEQ ID NO: 1419765 - RNA, 14 nt, Human
aguuacuguguaau

SEQ ID NO: 1419766 - RNA, 11 nt, Human
aguuacugugu

SEQ ID NO: 1419767 - RNA, 16 nt, Human
aguguuggagaagaac

SEQ ID NO: 1419768 - RNA, 14 nt, Human
aguguuggagaaga

SEQ ID NO: 1419769 - RNA, 17 nt, Human
aguguugagccuuuucc

SEQ ID NO: 1419770 - RNA, 20 nt, Human
aguguugagcaucugucccc

SEQ ID NO: 1419771 - RNA, 18 nt, Human
aguguuggagaagaacug

SEQ ID NO: 1419772 - RNA, 17 nt, Human
aguguuggagaagaacu

SEQ ID NO: 1419773 - RNA, 23 nt, Human
aguguuggagaagaacugaaauc

SEQ ID NO: 1419774 - RNA, 19 nt, Human
uuaauugccaccucuaaca

SEQ ID NO: 1419775 - RNA, 15 nt, Human
uuaaugaaaauaaga

SEQ ID NO: 1419776 - RNA, 16 nt, Human
uuaaucuuaguguaug

SEQ ID NO: 1419777 - RNA, 14 nt, Human
uuaaucuuagugua

SEQ ID NO: 1419778 - RNA, 18 nt, Human
uuaaucucuaacagugga

SEQ ID NO: 1419779 - RNA, 17 nt, Human
uuaaucucuaacagugg

SEQ ID NO: 1419780 - RNA, 22 nt, Human
uuaaucauuaggugugacugaa

SEQ ID NO: 1419781 - RNA, 23 nt, Human
uuaaucauuaggugugacugaau

SEQ ID NO: 1419782 - RNA, 13 nt, Human
uuaaucauuaggu

SEQ ID NO: 1419783 - RNA, 13 nt, Human
uuaagucagaaca

SEQ ID NO: 1419784 - RNA, 13 nt, Human
uuaauauugauuu

SEQ ID NO: 1419785 - RNA, 16 nt, Human
uuaauauugauuuauu

SEQ ID NO: 1419786 - RNA, 22 nt, Human
uuaagugcugcauuuaaaagau

SEQ ID NO: 1419787 - RNA, 19 nt, Human
uuaagugcugcauuuaaaa

SEQ ID NO: 1419788 - RNA, 15 nt, Human
uuaagugcugcauuu

SEQ ID NO: 1419789 - RNA, 16 nt, Human
uuaagugcugcauuua

SEQ ID NO: 1419790 - RNA, 22 nt, Human
uuaagaaauagacagcaugaga

SEQ ID NO: 1419791 - RNA, 15 nt, Human
uuaagaaauagaauu

SEQ ID NO: 1419792 - RNA, 20 nt, Human
uuaagaagacugcauuauau

SEQ ID NO: 1419793 - RNA, 17 nt, Human
uuaagguguagccacac

SEQ ID NO: 1419794 - RNA, 14 nt, Human
uuaagguguagcca

SEQ ID NO: 1419795 - RNA, 24 nt, Human
uuaaggggaggaaccagagugcug

SEQ ID NO: 1419796 - RNA, 16 nt, Human
aguuuugcaaagugca

SEQ ID NO: 1419797 - RNA, 18 nt, Human
aguuuugauauuucuagc

SEQ ID NO: 1419798 - RNA, 15 nt, Human
aguuuuggaugcagu

SEQ ID NO: 1419799 - RNA, 17 nt, Human
aguuuuggaugcagugc

SEQ ID NO: 1419800 - RNA, 18 nt, Human
aguuuuggaugcagugcu

SEQ ID NO: 1419801 - RNA, 19 nt, Human
aguuuuggaugcagugcuc

SEQ ID NO: 1419802 - RNA, 23 nt, Human
aguuuuuauggcuuuugugcauu

SEQ ID NO: 1419803 - RNA, 21 nt, Human
auaaaauaugaagacauaaac

SEQ ID NO: 1419804 - RNA, 15 nt, Human
auaaaauaauuuuua

SEQ ID NO: 1419805 - RNA, 22 nt, Human
auaaaauaauuuuaucucuuuc

SEQ ID NO: 1419806 - RNA, 20 nt, Human
uuaagaaaaaggaugcacag

SEQ ID NO: 1419807 - RNA, 11 nt, Human
auaaaaucagc

SEQ ID NO: 1419808 - RNA, 16 nt, Human
auaaaaucagccaauu

SEQ ID NO: 1419809 - RNA, 21 nt, Human
uuaagaaaaaggaugcacaga

SEQ ID NO: 1419810 - RNA, 15 nt, Human
auaaaaucagccaau

SEQ ID NO: 1419811 - RNA, 23 nt, Human
auaaaauaaugggauuuucuuuu

SEQ ID NO: 1419812 - RNA, 12 nt, Human
auaaaauaauuu

SEQ ID NO: 1419813 - RNA, 18 nt, Human
auaaaagccuguuuaaga

SEQ ID NO: 1419814 - RNA, 19 nt, Human
auaaaagccuguuuaagag

SEQ ID NO: 1419815 - RNA, 19 nt, Human
aguuuuuauuaaaccccuu

SEQ ID NO: 1419816 - RNA, 19 nt, Human
auaaaagauggggucugua

SEQ ID NO: 1419817 - RNA, 21 nt, Human
auaaaagauggggucuguaaa

SEQ ID NO: 1419818 - RNA, 18 nt, Human
aguuuuuaugagaaacuu

SEQ ID NO: 1419819 - RNA, 16 nt, Human
aguuuuuaugagaaac

SEQ ID NO: 1419820 - RNA, 17 nt, Human
aguuuuuauauguugua

SEQ ID NO: 1419821 - RNA, 13 nt, Human
auaaaagccuguu

SEQ ID NO: 1419822 - RNA, 22 nt, Human
auaaaagauggggucuguaaaa

SEQ ID NO: 1419823 - RNA, 21 nt, Human
aguuucauguacaagaugaag

SEQ ID NO: 1419824 - RNA, 18 nt, Human
aguuucauguacaagaug

SEQ ID NO: 1419825 - RNA, 15 nt, Human
aguuucauguacaag

SEQ ID NO: 1419826 - RNA, 16 nt, Human
aguuucauauaaagua

SEQ ID NO: 1419827 - RNA, 20 nt, Human
aguuucaguagauugcagaa

SEQ ID NO: 1419828 - RNA, 14 nt, Human
uuaacagagucuga

SEQ ID NO: 1419829 - RNA, 13 nt, Human
uuaacagagucug

SEQ ID NO: 1419830 - RNA, 14 nt, Human
uuaacagaagggag

SEQ ID NO: 1419831 - RNA, 20 nt, Human
uuaacagaagggagggcaga

SEQ ID NO: 1419832 - RNA, 21 nt, Human
uuaacagaaauuguauauugu

SEQ ID NO: 1419833 - RNA, 19 nt, Human
uuaacagaaauuguauauu

SEQ ID NO: 1419834 - RNA, 17 nt, Human
uuaacagaaauuguaua

SEQ ID NO: 1419835 - RNA, 16 nt, Human
uuaacagaaauuguau

SEQ ID NO: 1419836 - RNA, 15 nt, Human
uuaacagaaauugua

SEQ ID NO: 1419837 - RNA, 13 nt, Human
uuaacagaaauug

SEQ ID NO: 1419838 - RNA, 20 nt, Human
uuaacagaaauguacagcaa

SEQ ID NO: 1419839 - RNA, 12 nt, Human
uuaacacacuac

SEQ ID NO: 1419840 - RNA, 17 nt, Human
uuaacaauuaggcagac

SEQ ID NO: 1419841 - RNA, 19 nt, Human
uuaacagaaauguacagca

SEQ ID NO: 1419842 - RNA, 13 nt, Human
uuaaauacagucu

SEQ ID NO: 1419843 - RNA, 20 nt, Human
uuaaauacaggaaacaguug

SEQ ID NO: 1419844 - RNA, 19 nt, Human
uuaaauacaggaaacaguu

SEQ ID NO: 1419845 - RNA, 17 nt, Human
uuaaauacaggaaacag

SEQ ID NO: 1419846 - RNA, 15 nt, Human
uuaaauacaggaaac

SEQ ID NO: 1419847 - RNA, 14 nt, Human
uuaaauacaggaaa

SEQ ID NO: 1419848 - RNA, 10 nt, Human
uuaaauacag

SEQ ID NO: 1419849 - RNA, 20 nt, Human
uuaaaguuaguaucuuuuga

SEQ ID NO: 1419850 - RNA, 19 nt, Human
uuaaauaaugugaaacugg

SEQ ID NO: 1419851 - RNA, 16 nt, Human
uuaaauaaugugaaac

SEQ ID NO: 1419852 - RNA, 18 nt, Human
uuaaauaaugugaaacug

SEQ ID NO: 1419853 - RNA, 16 nt, Human
uuaaacaccuccucau

SEQ ID NO: 1419854 - RNA, 13 nt, Human
uuaaacaccuccu

SEQ ID NO: 1419855 - RNA, 14 nt, Human
uuaaacaaagguug

SEQ ID NO: 1419856 - RNA, 23 nt, Human
uuaaacagugagccugaauuuug

SEQ ID NO: 1419857 - RNA, 18 nt, Human
uuaaacagugagccugaa

SEQ ID NO: 1419858 - RNA, 13 nt, Human
uuaaacagaggau

SEQ ID NO: 1419859 - RNA, 14 nt, Human
uuaaaaaucucaaa

SEQ ID NO: 1419860 - RNA, 15 nt, Human
uuaaaaaucucaaau

SEQ ID NO: 1419861 - RNA, 16 nt, Human
uuaaaaaucucaaauu

SEQ ID NO: 1419862 - RNA, 17 nt, Human
uuaaaaaucucaaauuu

SEQ ID NO: 1419863 - RNA, 18 nt, Human
uuaaaauuuuuuuagaaa

SEQ ID NO: 1419864 - RNA, 19 nt, Human
uuaaacaucaaucuuuaaa

SEQ ID NO: 1419865 - RNA, 23 nt, Human
uuaaacauuaauagcagccuuuc

SEQ ID NO: 1419866 - RNA, 19 nt, Human
uuaaacauuaauagcagcc

SEQ ID NO: 1419867 - RNA, 13 nt, Human
uuaaagugccagu

SEQ ID NO: 1419868 - RNA, 20 nt, Human
uuaaagugacuaauggcaug

SEQ ID NO: 1419869 - RNA, 21 nt, Human
uuaaagugacuaauggcauga

SEQ ID NO: 1419870 - RNA, 13 nt, Human
uuaaaguauucuu

SEQ ID NO: 1419871 - RNA, 22 nt, Human
uuaaagugcuaagguucuaagg

SEQ ID NO: 1419872 - RNA, 21 nt, Human
uuaaagugcuaagguucuaag

SEQ ID NO: 1419873 - RNA, 19 nt, Human
uuaaagugcuaagguucua

SEQ ID NO: 1419874 - RNA, 15 nt, Human
uuaaauaaugugaaa

SEQ ID NO: 1419875 - RNA, 12 nt, Human
uuaaaaaaauaa

SEQ ID NO: 1419876 - RNA, 20 nt, Human
aguugguaacuuuugugaau

SEQ ID NO: 1419877 - RNA, 16 nt, Human
aguugguaacuuuugu

SEQ ID NO: 1419878 - RNA, 15 nt, Human
aguuuaaaaucauca

SEQ ID NO: 1419879 - RNA, 21 nt, Human
aguuuaaaagcacgacagugg

SEQ ID NO: 1419880 - RNA, 18 nt, Human
aguuuaaaacagaagccu

SEQ ID NO: 1419881 - RNA, 21 nt, Human
aguuuaaaaucaucagaaagg

SEQ ID NO: 1419882 - RNA, 14 nt, Human
aguuuaaauuguaa

SEQ ID NO: 1419883 - RNA, 17 nt, Human
aguuggagucacucuua

SEQ ID NO: 1419884 - RNA, 19 nt, Human
aguuggagcuccagccuga

SEQ ID NO: 1419885 - RNA, 13 nt, Human
aguugcuuuucag

SEQ ID NO: 1419886 - RNA, 21 nt, Human
aguuggggucuggcagccucc

SEQ ID NO: 1419887 - RNA, 17 nt, Human
aguuggggucuggcagc

SEQ ID NO: 1419888 - RNA, 20 nt, Human
aguugggcuugcuauucugu

SEQ ID NO: 1419889 - RNA, 16 nt, Human
aguuggggacacaugu

SEQ ID NO: 1419890 - RNA, 15 nt, Human
aguugguaacuuuug

SEQ ID NO: 1419891 - RNA, 19 nt, Human
aguugggcuugcuauucug

SEQ ID NO: 1419892 - RNA, 15 nt, Human
aguugggcuugcuau

SEQ ID NO: 1419893 - RNA, 20 nt, Human
aguuggaguuuuuuguacca

SEQ ID NO: 1419894 - RNA, 19 nt, Human
aguuggaguuuuuuguacc

SEQ ID NO: 1419895 - RNA, 23 nt, Human
uguuuauuuuucuugucuuuauu

SEQ ID NO: 1419896 - RNA, 19 nt, Human
uguuucaaacauauauaac

SEQ ID NO: 1419897 - RNA, 19 nt, Human
uguuuauuuuucuugucuu

SEQ ID NO: 1419898 - RNA, 12 nt, Human
uguuuauuuuuc

SEQ ID NO: 1419899 - RNA, 13 nt, Human
uguuucaaacaua

SEQ ID NO: 1419900 - RNA, 21 nt, Human
aguugcugcuucucccaggca

SEQ ID NO: 1419901 - RNA, 18 nt, Human
aguugcugcuucucccag

SEQ ID NO: 1419902 - RNA, 14 nt, Human
uuacucugccuaca

SEQ ID NO: 1419903 - RNA, 13 nt, Human
uuaccuuucauac

SEQ ID NO: 1419904 - RNA, 16 nt, Human
uuaccuuguauacugu

SEQ ID NO: 1419905 - RNA, 18 nt, Human
uuacucugccuacagaac

SEQ ID NO: 1419906 - RNA, 12 nt, Human
uuagaaagcauu

SEQ ID NO: 1419907 - RNA, 13 nt, Human
uuagaaagcauuu

SEQ ID NO: 1419908 - RNA, 14 nt, Human
uuagaaagcauuug

SEQ ID NO: 1419909 - RNA, 15 nt, Human
uuagaaagcauuuga

SEQ ID NO: 1419910 - RNA, 16 nt, Human
uuagaaagcauuugaa

SEQ ID NO: 1419911 - RNA, 13 nt, Human
uuagaaaucauuu

SEQ ID NO: 1419912 - RNA, 22 nt, Human
uuagaaauauuuuaaaaucagc

SEQ ID NO: 1419913 - RNA, 13 nt, Human
uuagaaauauuuu

SEQ ID NO: 1419914 - RNA, 16 nt, Human
uuagaaagauaauuca

SEQ ID NO: 1419915 - RNA, 23 nt, Human
uuagaaagcauuugaaugcauuu

SEQ ID NO: 1419916 - RNA, 17 nt, Human
uuagaaagcauuugaau

SEQ ID NO: 1419917 - RNA, 18 nt, Human
uuagaaagcauuugaaug

SEQ ID NO: 1419918 - RNA, 19 nt, Human
uuagaaagcauuugaaugc

SEQ ID NO: 1419919 - RNA, 21 nt, Human
uuagaaagcauuugaaugcau

SEQ ID NO: 1419920 - RNA, 23 nt, Human
uuagaaauuaccuguggauauuu

SEQ ID NO: 1419921 - RNA, 19 nt, Human
uuagaaauuaccuguggau

SEQ ID NO: 1419922 - RNA, 16 nt, Human
uuagaaaugcagaauc

SEQ ID NO: 1419923 - RNA, 20 nt, Human
uuagaacacacacacuuacu

SEQ ID NO: 1419924 - RNA, 17 nt, Human
uuagaacacacacacuu

SEQ ID NO: 1419925 - RNA, 17 nt, Human
uuagaaauuuauuuccu

SEQ ID NO: 1419926 - RNA, 20 nt, Human
uuacaggcaugagccacugc

SEQ ID NO: 1419927 - RNA, 23 nt, Human
uuacccauuugggugggaguguu

SEQ ID NO: 1419928 - RNA, 19 nt, Human
uuacccucauguucuuaau

SEQ ID NO: 1419929 - RNA, 19 nt, Human
uuaccuccugagaaaaaag

SEQ ID NO: 1419930 - RNA, 11 nt, Human
uuaccuccuga

SEQ ID NO: 1419931 - RNA, 18 nt, Human
uuaccucagccugggcgc

SEQ ID NO: 1419932 - RNA, 20 nt, Human
uuaccucagccugggcgcug

SEQ ID NO: 1419933 - RNA, 15 nt, Human
uuaccucagccuggg

SEQ ID NO: 1419934 - RNA, 14 nt, Human
uuaccucagccugg

SEQ ID NO: 1419935 - RNA, 13 nt, Human
uuaccucagccug

SEQ ID NO: 1419936 - RNA, 12 nt, Human
uuaccucagccu

SEQ ID NO: 1419937 - RNA, 23 nt, Human
uuaccuacuuugacuuuuugcau

SEQ ID NO: 1419938 - RNA, 13 nt, Human
uuaccuacuuuga

SEQ ID NO: 1419939 - RNA, 18 nt, Human
uuaccuuauaguuacugu

SEQ ID NO: 1419940 - RNA, 13 nt, Human
uuaccuuugacaa

SEQ ID NO: 1419941 - RNA, 20 nt, Human
uuaccuuugacaaagguaaa

SEQ ID NO: 1419942 - RNA, 12 nt, Human
auaacccacuuu

SEQ ID NO: 1419943 - RNA, 19 nt, Human
auaaauuauuguuuuucuu

SEQ ID NO: 1419944 - RNA, 13 nt, Human
auaaauuauuguu

SEQ ID NO: 1419945 - RNA, 18 nt, Human
auaacguuuaagccaaaa

SEQ ID NO: 1419946 - RNA, 17 nt, Human
auaacguuuaagccaaa

SEQ ID NO: 1419947 - RNA, 18 nt, Human
auaacguguucaauauuu

SEQ ID NO: 1419948 - RNA, 20 nt, Human
auaacggaucagaaauacag

SEQ ID NO: 1419949 - RNA, 21 nt, Human
auaacggaucagaaauacaga

SEQ ID NO: 1419950 - RNA, 20 nt, Human
auaacguuuaagccaaaaca

SEQ ID NO: 1419951 - RNA, 22 nt, Human
auaacguuuaagccaaaacaau

SEQ ID NO: 1419952 - RNA, 22 nt, Human
auaacgauaaaagacagugaaa

SEQ ID NO: 1419953 - RNA, 14 nt, Human
auaaccuuaauuua

SEQ ID NO: 1419954 - RNA, 22 nt, Human
auaaccugucucaccuggacuu

SEQ ID NO: 1419955 - RNA, 14 nt, Human
auaacguauaaaag

SEQ ID NO: 1419956 - RNA, 13 nt, Human
auaaauaaaaaua

SEQ ID NO: 1419957 - RNA, 17 nt, Human
auaaagguucaugcaaa

SEQ ID NO: 1419958 - RNA, 15 nt, Human
uuaauuguaaaguaa

SEQ ID NO: 1419959 - RNA, 14 nt, Human
uuaauuguaaucug

SEQ ID NO: 1419960 - RNA, 14 nt, Human
uuaauuguaaagua

SEQ ID NO: 1419961 - RNA, 21 nt, Human
uuaauugggccagcuuuucaa

SEQ ID NO: 1419962 - RNA, 22 nt, Human
uuaauugggccagcuuuucaaa

SEQ ID NO: 1419963 - RNA, 18 nt, Human
uuaauugggccagcuuuu

SEQ ID NO: 1419964 - RNA, 15 nt, Human
auaaagguucaugca

SEQ ID NO: 1419965 - RNA, 14 nt, Human
auaaauaaaaauaa

SEQ ID NO: 1419966 - RNA, 21 nt, Human
auaaaguuuuauauauuauau

SEQ ID NO: 1419967 - RNA, 20 nt, Human
auaaaguuuuauauauuaua

SEQ ID NO: 1419968 - RNA, 18 nt, Human
auaaaguuuuauauauua

SEQ ID NO: 1419969 - RNA, 17 nt, Human
auaaaguuuuauauauu

SEQ ID NO: 1419970 - RNA, 14 nt, Human
auaaaguuuuauau

SEQ ID NO: 1419971 - RNA, 22 nt, Human
auaaaguuuuauauauuauaug

SEQ ID NO: 1419972 - RNA, 19 nt, Human
auaauucuuucaauacaga

SEQ ID NO: 1419973 - RNA, 15 nt, Human
auaauucuuucaaua

SEQ ID NO: 1419974 - RNA, 23 nt, Human
auaauucuuucaauacagauaua

SEQ ID NO: 1419975 - RNA, 15 nt, Human
auaaugcgugcauac

SEQ ID NO: 1419976 - RNA, 20 nt, Human
auaaugcgugcauaccacuu

SEQ ID NO: 1419977 - RNA, 15 nt, Human
auaaucuagaacaca

SEQ ID NO: 1419978 - RNA, 12 nt, Human
auaaucuagaac

SEQ ID NO: 1419979 - RNA, 13 nt, Human
auaauagauucuc

SEQ ID NO: 1419980 - RNA, 18 nt, Human
auaauccuaaacauauga

SEQ ID NO: 1419981 - RNA, 17 nt, Human
auaagaauuauuuugau

SEQ ID NO: 1419982 - RNA, 16 nt, Human
auaagaauucagacau

SEQ ID NO: 1419983 - RNA, 15 nt, Human
auaagagaaucaaca

SEQ ID NO: 1419984 - RNA, 14 nt, Human
auaauaaagaauag

SEQ ID NO: 1419985 - RNA, 13 nt, Human
auaauaaagaaua

SEQ ID NO: 1419986 - RNA, 23 nt, Human
auaauaaagaauagcuuuaauga

SEQ ID NO: 1419987 - RNA, 11 nt, Human
auaauaaagga

SEQ ID NO: 1419988 - RNA, 13 nt, Human
auaauaaaggacu

SEQ ID NO: 1419989 - RNA, 18 nt, Human
auaauaaaggacuguaau

SEQ ID NO: 1419990 - RNA, 15 nt, Human
auaauaaauguacau

SEQ ID NO: 1419991 - RNA, 12 nt, Human
auaauacaccac

SEQ ID NO: 1419992 - RNA, 18 nt, Human
auaauacaccacuacauu

SEQ ID NO: 1419993 - RNA, 20 nt, Human
auaauacaccacuacauucu

SEQ ID NO: 1419994 - RNA, 21 nt, Human
auaauacugcugagauacaua

SEQ ID NO: 1419995 - RNA, 21 nt, Human
auaauacaccacuacauucug

SEQ ID NO: 1419996 - RNA, 12 nt, Human
auaauagauucu

SEQ ID NO: 1419997 - RNA, 22 nt, Human
auaauacugcugagauacauac

SEQ ID NO: 1419998 - RNA, 19 nt, Human
auaauacuugcuuuggaaa

SEQ ID NO: 1419999 - RNA, 14 nt, Human
uuagccuucucugu

SEQ ID NO: 1420000 - RNA, 12 nt, Human
uuagccuucucu

SEQ ID NO: 1420001 - RNA, 14 nt, Human
uuagccuguccugu

SEQ ID NO: 1420002 - RNA, 22 nt, Human
uuagccuggaccucugacagca

SEQ ID NO: 1420003 - RNA, 17 nt, Human
uuagccuucucuguuca

SEQ ID NO: 1420004 - RNA, 15 nt, Human
uuagccuucucuguu

SEQ ID NO: 1420005 - RNA, 23 nt, Human
uuagccuuuuuuccccagacuug

SEQ ID NO: 1420006 - RNA, 20 nt, Human
uuagccuuuuuuccccagac

SEQ ID NO: 1420007 - RNA, 18 nt, Human
uuagccuuuuuuccccag

SEQ ID NO: 1420008 - RNA, 17 nt, Human
uuagccuuuuuucccca

SEQ ID NO: 1420009 - RNA, 12 nt, Human
uuagccuguccu

SEQ ID NO: 1420010 - RNA, 21 nt, Human
uuagccuucucuguucauuuc

SEQ ID NO: 1420011 - RNA, 22 nt, Human
uuagcauuguagugcuuugaga

SEQ ID NO: 1420012 - RNA, 19 nt, Human
uuagcauguuguugaaagg

SEQ ID NO: 1420013 - RNA, 19 nt, Human
auaauuguuguucuguuaa

SEQ ID NO: 1420014 - RNA, 18 nt, Human
auaauuguuguucuguua

SEQ ID NO: 1420015 - RNA, 17 nt, Human
auaauuguuguucuguu

SEQ ID NO: 1420016 - RNA, 15 nt, Human
auaauuguuguucug

SEQ ID NO: 1420017 - RNA, 15 nt, Human
auaauuguucucaga

SEQ ID NO: 1420018 - RNA, 23 nt, Human
auaauuguucucagaaucccuua

SEQ ID NO: 1420019 - RNA, 22 nt, Human
auaauuguuguucuguuaacug

SEQ ID NO: 1420020 - RNA, 21 nt, Human
auaauuguuguucuguuaacu

SEQ ID NO: 1420021 - RNA, 21 nt, Human
auaauuguuuuaucugaauuu

SEQ ID NO: 1420022 - RNA, 16 nt, Human
auaauuuaccuaagau

SEQ ID NO: 1420023 - RNA, 13 nt, Human
auaauuuaccuaa

SEQ ID NO: 1420024 - RNA, 22 nt, Human
uuagcaaagauaucucaucucu

SEQ ID NO: 1420025 - RNA, 23 nt, Human
auaauuguuguucuguuaacuga

SEQ ID NO: 1420026 - RNA, 23 nt, Human
auaauuuaccuaagauuacaaau

SEQ ID NO: 1420027 - RNA, 20 nt, Human
uuaguuuccuuuuuaauaug

SEQ ID NO: 1420028 - RNA, 11 nt, Human
uuaguuuccuu

SEQ ID NO: 1420029 - RNA, 22 nt, Human
uuaguuucaguagauugcagaa

SEQ ID NO: 1420030 - RNA, 23 nt, Human
uuaguaacauguguuaaguauuu

SEQ ID NO: 1420031 - RNA, 12 nt, Human
uuaguaacaugu

SEQ ID NO: 1420032 - RNA, 12 nt, Human
uuaguaaaccaa

SEQ ID NO: 1420033 - RNA, 18 nt, Human
uuaguaaagucaaggaga

SEQ ID NO: 1420034 - RNA, 14 nt, Human
uuaggugucugucc

SEQ ID NO: 1420035 - RNA, 15 nt, Human
uuaguuuguguguug

SEQ ID NO: 1420036 - RNA, 15 nt, Human
uuaguuuguauauau

SEQ ID NO: 1420037 - RNA, 22 nt, Human
uuaggugcaauuucaagguucu

SEQ ID NO: 1420038 - RNA, 18 nt, Human
uuaggugcaauuucaagg

SEQ ID NO: 1420039 - RNA, 21 nt, Human
uuaggugugacugaauuucuu

SEQ ID NO: 1420040 - RNA, 16 nt, Human
uuaggugugacugaau

SEQ ID NO: 1420041 - RNA, 14 nt, Human
uuagggaagggccu

SEQ ID NO: 1420042 - RNA, 21 nt, Human
uuagccuuuuuuccccagacu

SEQ ID NO: 1420043 - RNA, 15 nt, Human
uuagggaaaacauuc

SEQ ID NO: 1420044 - RNA, 16 nt, Human
uuagggaacaauuugg

SEQ ID NO: 1420045 - RNA, 17 nt, Human
uuagggaaaacauucca

SEQ ID NO: 1420046 - RNA, 20 nt, Human
uuagggaaggauacaaaagc

SEQ ID NO: 1420047 - RNA, 13 nt, Human
auauauguacagu

SEQ ID NO: 1420048 - RNA, 12 nt, Human
auauauguauuu

SEQ ID NO: 1420049 - RNA, 15 nt, Human
auauauguauauaca

SEQ ID NO: 1420050 - RNA, 14 nt, Human
auauauguacaguu

SEQ ID NO: 1420051 - RNA, 24 nt, Human
uucaucccaaaggacagccgccug

SEQ ID NO: 1420052 - RNA, 17 nt, Human
uucauccauaacugaac

SEQ ID NO: 1420053 - RNA, 15 nt, Human
uucauccauaacuga

SEQ ID NO: 1420054 - RNA, 23 nt, Human
uucauauuguugcauugcuuuuu

SEQ ID NO: 1420055 - RNA, 21 nt, Human
uucaucccacuccaacucuuc

SEQ ID NO: 1420056 - RNA, 16 nt, Human
auauauuuaaaaauaa

SEQ ID NO: 1420057 - RNA, 14 nt, Human
auauauugaauuaa

SEQ ID NO: 1420058 - RNA, 13 nt, Human
auauauugaauua

SEQ ID NO: 1420059 - RNA, 18 nt, Human
auauauuuaaaaguguca

SEQ ID NO: 1420060 - RNA, 12 nt, Human
auauauuuuaag

SEQ ID NO: 1420061 - RNA, 13 nt, Human
auauauuuuaaga

SEQ ID NO: 1420062 - RNA, 22 nt, Human
uucagaaaugaggccauggacu

SEQ ID NO: 1420063 - RNA, 11 nt, Human
uucagaaaugu

SEQ ID NO: 1420064 - RNA, 13 nt, Human
uucagaaaugugu

SEQ ID NO: 1420065 - RNA, 20 nt, Human
uucauauguaccauguacau

SEQ ID NO: 1420066 - RNA, 19 nt, Human
uucauaauuauuauuuggc

SEQ ID NO: 1420067 - RNA, 19 nt, Human
auauguacccucugaaaua

SEQ ID NO: 1420068 - RNA, 17 nt, Human
auauguacccucugaaa

SEQ ID NO: 1420069 - RNA, 19 nt, Human
auauguaccauguacauga

SEQ ID NO: 1420070 - RNA, 14 nt, Human
auauguaccaugua

SEQ ID NO: 1420071 - RNA, 11 nt, Human
auauguaccaa

SEQ ID NO: 1420072 - RNA, 14 nt, Human
auauguacaugaga

SEQ ID NO: 1420073 - RNA, 16 nt, Human
auauguacaguuaucu

SEQ ID NO: 1420074 - RNA, 14 nt, Human
auauguacaguuau

SEQ ID NO: 1420075 - RNA, 22 nt, Human
auauguaaaugguaugucauuc

SEQ ID NO: 1420076 - RNA, 24 nt, Human
auauguaaaacauuuauuuugaca

SEQ ID NO: 1420077 - RNA, 18 nt, Human
auauguaaaacauuuauu

SEQ ID NO: 1420078 - RNA, 16 nt, Human
auauguaaaacauuua

SEQ ID NO: 1420079 - RNA, 15 nt, Human
auauguaaaacauuu

SEQ ID NO: 1420080 - RNA, 14 nt, Human
auauguaaaacauu

SEQ ID NO: 1420081 - RNA, 13 nt, Human
auauguaaaacau

SEQ ID NO: 1420082 - RNA, 12 nt, Human
auauguaaaaca

SEQ ID NO: 1420083 - RNA, 13 nt, Human
auaugaaagcuga

SEQ ID NO: 1420084 - RNA, 17 nt, Human
auaugaucugucugugg

SEQ ID NO: 1420085 - RNA, 16 nt, Human
auaugaucugucugug

SEQ ID NO: 1420086 - RNA, 15 nt, Human
auaugaucugucugu

SEQ ID NO: 1420087 - RNA, 15 nt, Human
auaugauguuaaaaa

SEQ ID NO: 1420088 - RNA, 21 nt, Human
auaugauguuaaaaaaauaag

SEQ ID NO: 1420089 - RNA, 12 nt, Human
auaugauucaaa

SEQ ID NO: 1420090 - RNA, 14 nt, Human
auaugcacacauuu

SEQ ID NO: 1420091 - RNA, 15 nt, Human
auaugcacacauuuu

SEQ ID NO: 1420092 - RNA, 16 nt, Human
auaugcacacauuuuu

SEQ ID NO: 1420093 - RNA, 22 nt, Human
auaugcacacauuuuuuaaaug

SEQ ID NO: 1420094 - RNA, 23 nt, Human
auaucuccugaaaagguuuauga

SEQ ID NO: 1420095 - RNA, 22 nt, Human
auaucuccugaaaagguuuaug

SEQ ID NO: 1420096 - RNA, 15 nt, Human
auaucuccugaaaag

SEQ ID NO: 1420097 - RNA, 13 nt, Human
auaucuccugaaa

SEQ ID NO: 1420098 - RNA, 12 nt, Human
auaucucaucuc

SEQ ID NO: 1420099 - RNA, 21 nt, Human
auaucuccgucaacucauauu

SEQ ID NO: 1420100 - RNA, 20 nt, Human
auaucuccgucaacucauau

SEQ ID NO: 1420101 - RNA, 19 nt, Human
auaucuccgucaacucaua

SEQ ID NO: 1420102 - RNA, 14 nt, Human
auauauuuuaagac

SEQ ID NO: 1420103 - RNA, 15 nt, Human
auauauuuuaagacg

SEQ ID NO: 1420104 - RNA, 22 nt, Human
uuccagguagcugaaaggggaa

SEQ ID NO: 1420105 - RNA, 20 nt, Human
uuccagggucccucugugua

SEQ ID NO: 1420106 - RNA, 19 nt, Human
uuccagggucccucugugu

SEQ ID NO: 1420107 - RNA, 18 nt, Human
uuccagggucccucugug

SEQ ID NO: 1420108 - RNA, 16 nt, Human
uuccagggucccucug

SEQ ID NO: 1420109 - RNA, 23 nt, Human
uucccaaaggcauuauaaaaaga

SEQ ID NO: 1420110 - RNA, 14 nt, Human
uucccacgaggaau

SEQ ID NO: 1420111 - RNA, 21 nt, Human
uucccaccccaaccugcucuc

SEQ ID NO: 1420112 - RNA, 20 nt, Human
uucccaccccaaccugcucu

SEQ ID NO: 1420113 - RNA, 22 nt, Human
uucccaccccaaccugcucucc

SEQ ID NO: 1420114 - RNA, 21 nt, Human
uucccacccaauucaaaacau

SEQ ID NO: 1420115 - RNA, 18 nt, Human
uucccaccaggcugcuca

SEQ ID NO: 1420116 - RNA, 16 nt, Human
uucccacauuaaagaa

SEQ ID NO: 1420117 - RNA, 18 nt, Human
uucccacaggacauuucu

SEQ ID NO: 1420118 - RNA, 14 nt, Human
uucccaauucacau

SEQ ID NO: 1420119 - RNA, 23 nt, Human
uucccaagugagucucucugggc

SEQ ID NO: 1420120 - RNA, 16 nt, Human
uucccaagggcugccg

SEQ ID NO: 1420121 - RNA, 13 nt, Human
uucccaagggcug

SEQ ID NO: 1420122 - RNA, 11 nt, Human
uucccaagcuc

SEQ ID NO: 1420123 - RNA, 22 nt, Human
uucccaagagcaucaugccucu

SEQ ID NO: 1420124 - RNA, 21 nt, Human
uucccaagagcaucaugccuc

SEQ ID NO: 1420125 - RNA, 20 nt, Human
uucccaagagcaucaugccu

SEQ ID NO: 1420126 - RNA, 15 nt, Human
uucccaacacaaaga

SEQ ID NO: 1420127 - RNA, 13 nt, Human
uucccaacacaaa

SEQ ID NO: 1420128 - RNA, 18 nt, Human
uucccaacuccagaaagu

SEQ ID NO: 1420129 - RNA, 16 nt, Human
uuccaaguugcuaaua

SEQ ID NO: 1420130 - RNA, 15 nt, Human
uuccaagucuccacc

SEQ ID NO: 1420131 - RNA, 17 nt, Human
uuccaagagucuaaaga

SEQ ID NO: 1420132 - RNA, 15 nt, Human
uuccaagagucuaaa

SEQ ID NO: 1420133 - RNA, 22 nt, Human
uuccacaccuuuuauugacaca

SEQ ID NO: 1420134 - RNA, 15 nt, Human
uuccacaccuuuuau

SEQ ID NO: 1420135 - RNA, 17 nt, Human
uuccagcugucccccca

SEQ ID NO: 1420136 - RNA, 18 nt, Human
uuccagcuggaugagaau

SEQ ID NO: 1420137 - RNA, 11 nt, Human
uuccagcuccu

SEQ ID NO: 1420138 - RNA, 14 nt, Human
uuccagcuccugua

SEQ ID NO: 1420139 - RNA, 23 nt, Human
uuccagcuagugacccacaugcc

SEQ ID NO: 1420140 - RNA, 24 nt, Human
uuccagcuagugacccacaugcca

SEQ ID NO: 1420141 - RNA, 12 nt, Human
uuccacccaggg

SEQ ID NO: 1420142 - RNA, 12 nt, Human
uuccacagacgg

SEQ ID NO: 1420143 - RNA, 10 nt, Human
uuccacagac

SEQ ID NO: 1420144 - RNA, 13 nt, Human
uuccacagaggac

SEQ ID NO: 1420145 - RNA, 21 nt, Human
uuccacccaggggcagcccca

SEQ ID NO: 1420146 - RNA, 19 nt, Human
uuccacccaggggcagccc

SEQ ID NO: 1420147 - RNA, 23 nt, Human
uuccacccagugcugaauuuccc

SEQ ID NO: 1420148 - RNA, 21 nt, Human
uucauuuagcuaaacggauuc

SEQ ID NO: 1420149 - RNA, 14 nt, Human
uuccaagagucuaa

SEQ ID NO: 1420150 - RNA, 13 nt, Human
uuccaagagucua

SEQ ID NO: 1420151 - RNA, 12 nt, Human
uuccaagagucu

SEQ ID NO: 1420152 - RNA, 9 nt, Human
uucauucag

SEQ ID NO: 1420153 - RNA, 19 nt, Human
auaugugcuggaauucuaa

SEQ ID NO: 1420154 - RNA, 18 nt, Human
auaugugcuggaauucua

SEQ ID NO: 1420155 - RNA, 16 nt, Human
uucauuccauucugga

SEQ ID NO: 1420156 - RNA, 12 nt, Human
uucauuccucca

SEQ ID NO: 1420157 - RNA, 13 nt, Human
uucauuccuccag

SEQ ID NO: 1420158 - RNA, 13 nt, Human
uucauucugcaag

SEQ ID NO: 1420159 - RNA, 18 nt, Human
uucauucugcaaguauac

SEQ ID NO: 1420160 - RNA, 18 nt, Human
uucauucucccuuucacu

SEQ ID NO: 1420161 - RNA, 21 nt, Human
uucauuccuucagauuuggcu

SEQ ID NO: 1420162 - RNA, 22 nt, Human
uucauuccuucagauuuggcuu

SEQ ID NO: 1420163 - RNA, 14 nt, Human
uucauuccuccagg

SEQ ID NO: 1420164 - RNA, 22 nt, Human
auaguuuucauccauaacugaa

SEQ ID NO: 1420165 - RNA, 23 nt, Human
auaguuuucauccauaacugaac

SEQ ID NO: 1420166 - RNA, 20 nt, Human
auaguuuucauccauaacug

SEQ ID NO: 1420167 - RNA, 13 nt, Human
auaguuuucaucc

SEQ ID NO: 1420168 - RNA, 12 nt, Human
auaguucuaggc

SEQ ID NO: 1420169 - RNA, 23 nt, Human
auaguucuagacauggagguucu

SEQ ID NO: 1420170 - RNA, 14 nt, Human
auaguucuagacau

SEQ ID NO: 1420171 - RNA, 13 nt, Human
auaguucuagaca

SEQ ID NO: 1420172 - RNA, 12 nt, Human
auaguucuagac

SEQ ID NO: 1420173 - RNA, 15 nt, Human
auaguuccugcuaaa

SEQ ID NO: 1420174 - RNA, 18 nt, Human
auaguucagaauuuagug

SEQ ID NO: 1420175 - RNA, 21 nt, Human
auaguucagaauuuaguguau

SEQ ID NO: 1420176 - RNA, 16 nt, Human
auaguuagcuaauaaa

SEQ ID NO: 1420177 - RNA, 15 nt, Human
auaguuagaaccugg

SEQ ID NO: 1420178 - RNA, 20 nt, Human
auaguuacuguguaauuagu

SEQ ID NO: 1420179 - RNA, 18 nt, Human
auaguuacuguguaauua

SEQ ID NO: 1420180 - RNA, 17 nt, Human
auaguuacuguguaauu

SEQ ID NO: 1420181 - RNA, 14 nt, Human
auaguuacugugua

SEQ ID NO: 1420182 - RNA, 13 nt, Human
auaguuacugugu

SEQ ID NO: 1420183 - RNA, 17 nt, Human
auaguuaacacacuacc

SEQ ID NO: 1420184 - RNA, 15 nt, Human
auaguuaacacacua

SEQ ID NO: 1420185 - RNA, 14 nt, Human
auaguuaacacacu

SEQ ID NO: 1420186 - RNA, 19 nt, Human
auaguguagcugaggaggc

SEQ ID NO: 1420187 - RNA, 15 nt, Human
auaguggugugauuu

SEQ ID NO: 1420188 - RNA, 13 nt, Human
auagugaauacug

SEQ ID NO: 1420189 - RNA, 18 nt, Human
auagucuuuuucaguucc

SEQ ID NO: 1420190 - RNA, 16 nt, Human
auagucuuuggagaaa

SEQ ID NO: 1420191 - RNA, 17 nt, Human
auagucuuuugcuuuug

SEQ ID NO: 1420192 - RNA, 16 nt, Human
auagucuuuugcuuuu

SEQ ID NO: 1420193 - RNA, 14 nt, Human
auagucuuuugcuu

SEQ ID NO: 1420194 - RNA, 20 nt, Human
auagugauguaaucuugaau

SEQ ID NO: 1420195 - RNA, 20 nt, Human
auaggcggggcuugccuucu

SEQ ID NO: 1420196 - RNA, 19 nt, Human
auaggcggggcuugccuuc

SEQ ID NO: 1420197 - RNA, 21 nt, Human
auaggcgaucacaacgugcau

SEQ ID NO: 1420198 - RNA, 14 nt, Human
auagucucuuuaaa

SEQ ID NO: 1420199 - RNA, 21 nt, Human
auagucucuuuaaaaggaaag

SEQ ID NO: 1420200 - RNA, 24 nt, Human
auauaaaguaucaucaguguagaa

SEQ ID NO: 1420201 - RNA, 19 nt, Human
auauaaaguaguccuguga

SEQ ID NO: 1420202 - RNA, 19 nt, Human
auauaaaguuuuauauauu

SEQ ID NO: 1420203 - RNA, 22 nt, Human
auauaaaguuuuauauauuaua

SEQ ID NO: 1420204 - RNA, 17 nt, Human
auauaaaguuuuauaua

SEQ ID NO: 1420205 - RNA, 13 nt, Human
auauaaaguuuua

SEQ ID NO: 1420206 - RNA, 20 nt, Human
auauaacuguauuugaaaua

SEQ ID NO: 1420207 - RNA, 17 nt, Human
auauaacuguauuugaa

SEQ ID NO: 1420208 - RNA, 13 nt, Human
auauaacuaacaa

SEQ ID NO: 1420209 - RNA, 20 nt, Human
auauauaaguguacauaugu

SEQ ID NO: 1420210 - RNA, 16 nt, Human
auauauaaguguacau

SEQ ID NO: 1420211 - RNA, 15 nt, Human
auauauaaguguaca

SEQ ID NO: 1420212 - RNA, 13 nt, Human
auauauaaccagu

SEQ ID NO: 1420213 - RNA, 19 nt, Human
auauauaaauauauuauua

SEQ ID NO: 1420214 - RNA, 18 nt, Human
auauauaaauauauuauu

SEQ ID NO: 1420215 - RNA, 14 nt, Human
auauauaaauauau

SEQ ID NO: 1420216 - RNA, 12 nt, Human
auauauaaccag

SEQ ID NO: 1420217 - RNA, 10 nt, Human
auauauaaau

SEQ ID NO: 1420218 - RNA, 13 nt, Human
auauauaaauaua

SEQ ID NO: 1420219 - RNA, 11 nt, Human
auauauaaaua

SEQ ID NO: 1420220 - RNA, 14 nt, Human
auauauaacaaugc

SEQ ID NO: 1420221 - RNA, 24 nt, Human
auauaucuaccccagacuagaugu

SEQ ID NO: 1420222 - RNA, 19 nt, Human
uucacugucuuuaauucug

SEQ ID NO: 1420223 - RNA, 20 nt, Human
uucacugucaccacccugcu

SEQ ID NO: 1420224 - RNA, 23 nt, Human
uucacugucaccacccugcucau

SEQ ID NO: 1420225 - RNA, 13 nt, Human
auauaugaggacu

SEQ ID NO: 1420226 - RNA, 22 nt, Human
uucacuuaaguuaguuccacug

SEQ ID NO: 1420227 - RNA, 16 nt, Human
uucacugucuuuaauu

SEQ ID NO: 1420228 - RNA, 15 nt, Human
auauauauauaaaga

SEQ ID NO: 1420229 - RNA, 14 nt, Human
auauauauaaauau

SEQ ID NO: 1420230 - RNA, 15 nt, Human
auauauauaaauaua

SEQ ID NO: 1420231 - RNA, 15 nt, Human
auauauauauguaca

SEQ ID NO: 1420232 - RNA, 14 nt, Human
auauauauauaugu

SEQ ID NO: 1420233 - RNA, 16 nt, Human
auauauauauauaugu

SEQ ID NO: 1420234 - RNA, 16 nt, Human
auauauauuaucuuuu

SEQ ID NO: 1420235 - RNA, 14 nt, Human
auauauauuauacu

SEQ ID NO: 1420236 - RNA, 12 nt, Human
auauauauuaua

SEQ ID NO: 1420237 - RNA, 20 nt, Human
auauauauguacaguuaucu

SEQ ID NO: 1420238 - RNA, 16 nt, Human
auauauauguacaguu

SEQ ID NO: 1420239 - RNA, 15 nt, Human
auauauauguacagu

SEQ ID NO: 1420240 - RNA, 15 nt, Human
auauaucaugaguga

SEQ ID NO: 1420241 - RNA, 21 nt, Human
auauaucacccagacauaaag

SEQ ID NO: 1420242 - RNA, 17 nt, Human
auauaucacccagacau

SEQ ID NO: 1420243 - RNA, 20 nt, Human
auauauauuaucuuuucaua

SEQ ID NO: 1420244 - RNA, 23 nt, Human
auauauauucuauuacauuuuca

SEQ ID NO: 1420245 - RNA, 21 nt, Human
auauauauuuuuuucugaaau

SEQ ID NO: 1420246 - RNA, 16 nt, Human
uucaagcucugaggga

SEQ ID NO: 1420247 - RNA, 14 nt, Human
uucaagcucugagg

SEQ ID NO: 1420248 - RNA, 12 nt, Human
uucaagcucuga

SEQ ID NO: 1420249 - RNA, 21 nt, Human
uucaagcgauucuccugccuc

SEQ ID NO: 1420250 - RNA, 16 nt, Human
uucaaggaauuucuua

SEQ ID NO: 1420251 - RNA, 14 nt, Human
uucaagguucuaac

SEQ ID NO: 1420252 - RNA, 17 nt, Human
uucaaggucugcuuuuc

SEQ ID NO: 1420253 - RNA, 22 nt, Human
uucaagcagucgugccuguguc

SEQ ID NO: 1420254 - RNA, 18 nt, Human
uucaagcagucgugccug

SEQ ID NO: 1420255 - RNA, 17 nt, Human
uucaagcagucgugccu

SEQ ID NO: 1420256 - RNA, 23 nt, Human
uucaagcagucgugccugugucc

SEQ ID NO: 1420257 - RNA, 20 nt, Human
uucaagccugugcaaugcau

SEQ ID NO: 1420258 - RNA, 18 nt, Human
uucaagcgauucuccugc

SEQ ID NO: 1420259 - RNA, 22 nt, Human
uucaagaggagcccccacccug

SEQ ID NO: 1420260 - RNA, 21 nt, Human
uucaagaggagcccccacccu

SEQ ID NO: 1420261 - RNA, 15 nt, Human
uucaagaggagcccc

SEQ ID NO: 1420262 - RNA, 23 nt, Human
uucaagaggagcccccacccugu

SEQ ID NO: 1420263 - RNA, 14 nt, Human
uucaagcaauccuc

SEQ ID NO: 1420264 - RNA, 16 nt, Human
uucaagcaauccuccc

SEQ ID NO: 1420265 - RNA, 16 nt, Human
uucaaaaguuccaaga

SEQ ID NO: 1420266 - RNA, 20 nt, Human
uucaaaaguuuguuugcuua

SEQ ID NO: 1420267 - RNA, 21 nt, Human
uucaaaauuguuacaaauugu

SEQ ID NO: 1420268 - RNA, 15 nt, Human
uucaaaaguuccaag

SEQ ID NO: 1420269 - RNA, 14 nt, Human
uucaaaaguuccaa

SEQ ID NO: 1420270 - RNA, 12 nt, Human
uucaaaaguucc

SEQ ID NO: 1420271 - RNA, 20 nt, Human
uucaaaaccagguccaauga

SEQ ID NO: 1420272 - RNA, 13 nt, Human
uucaaaagaaagu

SEQ ID NO: 1420273 - RNA, 23 nt, Human
uucaagaauaaucacgcuuuccu

SEQ ID NO: 1420274 - RNA, 14 nt, Human
uucaaacauauaua

SEQ ID NO: 1420275 - RNA, 16 nt, Human
uuaguuuuucauuaaa

SEQ ID NO: 1420276 - RNA, 17 nt, Human
uuaguuuuucauuaaau

SEQ ID NO: 1420277 - RNA, 13 nt, Human
uuaguuuuucauu

SEQ ID NO: 1420278 - RNA, 12 nt, Human
uuaguuuugauu

SEQ ID NO: 1420279 - RNA, 16 nt, Human
uuaguuuugaugaguu

SEQ ID NO: 1420280 - RNA, 16 nt, Human
uuaguuuguguguugu

SEQ ID NO: 1420281 - RNA, 23 nt, Human
uuauuuuuggcguggcugacuua

SEQ ID NO: 1420282 - RNA, 23 nt, Human
uuauuuuugacaguguugaaaau

SEQ ID NO: 1420283 - RNA, 14 nt, Human
uuauuuuucuuguc

SEQ ID NO: 1420284 - RNA, 16 nt, Human
uuauuuuuuaauuauu

SEQ ID NO: 1420285 - RNA, 14 nt, Human
uuauuuuuuaauua

SEQ ID NO: 1420286 - RNA, 13 nt, Human
uuauuuuuuucug

SEQ ID NO: 1420287 - RNA, 17 nt, Human
uuauuuuuuucugaauu

SEQ ID NO: 1420288 - RNA, 18 nt, Human
uucaaaacauugugccau

SEQ ID NO: 1420289 - RNA, 17 nt, Human
uucaaaaccuuuugaaa

SEQ ID NO: 1420290 - RNA, 12 nt, Human
uucaaaagaaag

SEQ ID NO: 1420291 - RNA, 13 nt, Human
uucacaauguuaa

SEQ ID NO: 1420292 - RNA, 15 nt, Human
uucaagguucuaacc

SEQ ID NO: 1420293 - RNA, 13 nt, Human
uucacaucucauu

SEQ ID NO: 1420294 - RNA, 20 nt, Human
uucacaucuaaccucaucuu

SEQ ID NO: 1420295 - RNA, 19 nt, Human
uucacaucuaaccucaucu

SEQ ID NO: 1420296 - RNA, 18 nt, Human
uucacaucuaaccucauc

SEQ ID NO: 1420297 - RNA, 21 nt, Human
uucacaucgcagauucucccu

SEQ ID NO: 1420298 - RNA, 22 nt, Human
uucacaguuugaaauaagcuau

SEQ ID NO: 1420299 - RNA, 23 nt, Human
uucacaguuugaaauaagcuauu

SEQ ID NO: 1420300 - RNA, 17 nt, Human
uucacaguuugaaauaa

SEQ ID NO: 1420301 - RNA, 16 nt, Human
uucacaguuugaaaua

SEQ ID NO: 1420302 - RNA, 14 nt, Human
uucacaguuugaaa

SEQ ID NO: 1420303 - RNA, 21 nt, Human
uucacaguucuuugggccaga

SEQ ID NO: 1420304 - RNA, 20 nt, Human
uucacaguucuuugggccag

SEQ ID NO: 1420305 - RNA, 12 nt, Human
uucacagcuccu

SEQ ID NO: 1420306 - RNA, 19 nt, Human
uucacagccuauaaccaga

SEQ ID NO: 1420307 - RNA, 13 nt, Human
uucacagaaaaua

SEQ ID NO: 1420308 - RNA, 23 nt, Human
auaggaccuuuccaccacagcca

SEQ ID NO: 1420309 - RNA, 20 nt, Human
auaggaccuuuccaccacag

SEQ ID NO: 1420310 - RNA, 14 nt, Human
auaggaccuuucca

SEQ ID NO: 1420311 - RNA, 17 nt, Human
auaggcguaacuaauuu

SEQ ID NO: 1420312 - RNA, 15 nt, Human
uucacauuagaagac

SEQ ID NO: 1420313 - RNA, 16 nt, Human
uucacauuagaagaca

SEQ ID NO: 1420314 - RNA, 15 nt, Human
auagcuuuuuucucu

SEQ ID NO: 1420315 - RNA, 22 nt, Human
auagcuuuucccuuuuuuuaag

SEQ ID NO: 1420316 - RNA, 19 nt, Human
uucuugcuucuuucuagaa

SEQ ID NO: 1420317 - RNA, 17 nt, Human
uucuugcuucuuucuag

SEQ ID NO: 1420318 - RNA, 13 nt, Human
uucuugcaaagua

SEQ ID NO: 1420319 - RNA, 19 nt, Human
uucuugaggggaccaggag

SEQ ID NO: 1420320 - RNA, 20 nt, Human
uucuugaggggaccaggagu

SEQ ID NO: 1420321 - RNA, 23 nt, Human
uucuugaggggaagcuagucuuu

SEQ ID NO: 1420322 - RNA, 21 nt, Human
uucuugaggggaagcuagucu

SEQ ID NO: 1420323 - RNA, 21 nt, Human
uucuugaauuuaauaaucugu

SEQ ID NO: 1420324 - RNA, 19 nt, Human
uucuugauguaaaaucuug

SEQ ID NO: 1420325 - RNA, 20 nt, Human
uucuugauguaaaaucuugu

SEQ ID NO: 1420326 - RNA, 15 nt, Human
uucuugauguaaaau

SEQ ID NO: 1420327 - RNA, 14 nt, Human
uucuugauguaaaa

SEQ ID NO: 1420328 - RNA, 12 nt, Human
uucuugcaaagu

SEQ ID NO: 1420329 - RNA, 17 nt, Human
uucuuuguuucuuucuu

SEQ ID NO: 1420330 - RNA, 19 nt, Human
uucuuuguguagcuuugcu

SEQ ID NO: 1420331 - RNA, 12 nt, Human
uucuuuguguag

SEQ ID NO: 1420332 - RNA, 19 nt, Human
uucuuugaaaaaaaauaaa

SEQ ID NO: 1420333 - RNA, 20 nt, Human
uucuuugaaaaaaaauaaau

SEQ ID NO: 1420334 - RNA, 20 nt, Human
uucuuucuuagaaauuuauu

SEQ ID NO: 1420335 - RNA, 16 nt, Human
uucuuucuuugggaau

SEQ ID NO: 1420336 - RNA, 13 nt, Human
uucuuucuuagaa

SEQ ID NO: 1420337 - RNA, 16 nt, Human
uucuugguugaggaaa

SEQ ID NO: 1420338 - RNA, 14 nt, Human
uucuuucuuagaaa

SEQ ID NO: 1420339 - RNA, 15 nt, Human
uucuuucuuagaaau

SEQ ID NO: 1420340 - RNA, 22 nt, Human
uucuuucuggcuaugcauuuga

SEQ ID NO: 1420341 - RNA, 13 nt, Human
uucuuccuggccg

SEQ ID NO: 1420342 - RNA, 14 nt, Human
uucuuccuggccgc

SEQ ID NO: 1420343 - RNA, 17 nt, Human
uucuuaaacacuugcaa

SEQ ID NO: 1420344 - RNA, 16 nt, Human
uucuuaaacacuugca

SEQ ID NO: 1420345 - RNA, 20 nt, Human
uucuuaaagugccaguauuu

SEQ ID NO: 1420346 - RNA, 15 nt, Human
uucuuaaagugccag

SEQ ID NO: 1420347 - RNA, 13 nt, Human
uucuuaauucuua

SEQ ID NO: 1420348 - RNA, 14 nt, Human
uucuuaaaaaguua

SEQ ID NO: 1420349 - RNA, 17 nt, Human
uucuguuuuguuucgcu

SEQ ID NO: 1420350 - RNA, 18 nt, Human
aucccaccuccaucccag

SEQ ID NO: 1420351 - RNA, 18 nt, Human
uucuguucuuucuggcua

SEQ ID NO: 1420352 - RNA, 13 nt, Human
uucuuuucccccu

SEQ ID NO: 1420353 - RNA, 12 nt, Human
uugaaauaagcu

SEQ ID NO: 1420354 - RNA, 21 nt, Human
uugaaauaagaauucagacau

SEQ ID NO: 1420355 - RNA, 16 nt, Human
uugaaauaagaauuca

SEQ ID NO: 1420356 - RNA, 15 nt, Human
uugaaauaagcuauu

SEQ ID NO: 1420357 - RNA, 20 nt, Human
uugaaagugggcaaaagcuu

SEQ ID NO: 1420358 - RNA, 19 nt, Human
uugaaagugggcaaaagcu

SEQ ID NO: 1420359 - RNA, 16 nt, Human
uucuuuuugaaguauu

SEQ ID NO: 1420360 - RNA, 18 nt, Human
uucuuuuugaaguauuua

SEQ ID NO: 1420361 - RNA, 15 nt, Human
uucuuuuugaaguau

SEQ ID NO: 1420362 - RNA, 18 nt, Human
uugaacacaaacuguaaa

SEQ ID NO: 1420363 - RNA, 15 nt, Human
uugaacacaaacugu

SEQ ID NO: 1420364 - RNA, 14 nt, Human
uugaacacaaacug

SEQ ID NO: 1420365 - RNA, 21 nt, Human
uugaaauauggucuuuugguu

SEQ ID NO: 1420366 - RNA, 18 nt, Human
uugaaauauccugcuuga

SEQ ID NO: 1420367 - RNA, 19 nt, Human
uugaaauauugacuuuuua

SEQ ID NO: 1420368 - RNA, 20 nt, Human
uugaaauauaggaacuuaaa

SEQ ID NO: 1420369 - RNA, 23 nt, Human
auccuaagggucgaaagcucuag

SEQ ID NO: 1420370 - RNA, 22 nt, Human
auccuaagggucgaaagcucua

SEQ ID NO: 1420371 - RNA, 14 nt, Human
auccuaggcugaca

SEQ ID NO: 1420372 - RNA, 20 nt, Human
auccuagguaggguuuaauc

SEQ ID NO: 1420373 - RNA, 16 nt, Human
auccuaggcugacacc

SEQ ID NO: 1420374 - RNA, 21 nt, Human
auccuaagggucgaaagcucu

SEQ ID NO: 1420375 - RNA, 19 nt, Human
auccuaagggucgaaagcu

SEQ ID NO: 1420376 - RNA, 18 nt, Human
auccuaagggucgaaagc

SEQ ID NO: 1420377 - RNA, 21 nt, Human
uugaacacaaacuguaaauaa

SEQ ID NO: 1420378 - RNA, 20 nt, Human
uugaacacaaacuguaaaua

SEQ ID NO: 1420379 - RNA, 12 nt, Human
uugaaccaauaa

SEQ ID NO: 1420380 - RNA, 17 nt, Human
uucugguuccagggucc

SEQ ID NO: 1420381 - RNA, 15 nt, Human
uucugguuccagggu

SEQ ID NO: 1420382 - RNA, 23 nt, Human
uucugguguuggacaagcuucug

SEQ ID NO: 1420383 - RNA, 18 nt, Human
uucuggcuaugcauuuga

SEQ ID NO: 1420384 - RNA, 20 nt, Human
uucuggcuaugcauuugaaa

SEQ ID NO: 1420385 - RNA, 14 nt, Human
aucauuuuuuacuu

SEQ ID NO: 1420386 - RNA, 13 nt, Human
uucuguauaaaug

SEQ ID NO: 1420387 - RNA, 18 nt, Human
uucuguagaaaugguugu

SEQ ID NO: 1420388 - RNA, 20 nt, Human
uucuguagaaaugguuguau

SEQ ID NO: 1420389 - RNA, 21 nt, Human
uucuguagaaaugguuguauu

SEQ ID NO: 1420390 - RNA, 22 nt, Human
uucuguagaaaugguuguauua

SEQ ID NO: 1420391 - RNA, 21 nt, Human
uucugguucuuguguuggcug

SEQ ID NO: 1420392 - RNA, 14 nt, Human
uucugguucuaaca

SEQ ID NO: 1420393 - RNA, 12 nt, Human
uucugguucuaa

SEQ ID NO: 1420394 - RNA, 18 nt, Human
uucugguguuggacaagc

SEQ ID NO: 1420395 - RNA, 13 nt, Human
uucuguagaaaug

SEQ ID NO: 1420396 - RNA, 14 nt, Human
uucuguagaaaugg

SEQ ID NO: 1420397 - RNA, 15 nt, Human
uucuguagaaauggu

SEQ ID NO: 1420398 - RNA, 13 nt, Human
auccauuucuaau

SEQ ID NO: 1420399 - RNA, 12 nt, Human
auccauuucuaa

SEQ ID NO: 1420400 - RNA, 19 nt, Human
auccauuuccccuccuucc

SEQ ID NO: 1420401 - RNA, 18 nt, Human
auccauuuccccuccuuc

SEQ ID NO: 1420402 - RNA, 13 nt, Human
auccauuuccccu

SEQ ID NO: 1420403 - RNA, 15 nt, Human
auccauaacugaaca

SEQ ID NO: 1420404 - RNA, 14 nt, Human
auccauaacugaac

SEQ ID NO: 1420405 - RNA, 11 nt, Human
auccauaaaga

SEQ ID NO: 1420406 - RNA, 14 nt, Human
auccauacauuugu

SEQ ID NO: 1420407 - RNA, 20 nt, Human
aucccaaguagaaucucagu

SEQ ID NO: 1420408 - RNA, 17 nt, Human
aucccaaguagaaucuc

SEQ ID NO: 1420409 - RNA, 23 nt, Human
auccauuucuaauuauguagcuc

SEQ ID NO: 1420410 - RNA, 15 nt, Human
auccauuucuaauua

SEQ ID NO: 1420411 - RNA, 14 nt, Human
auccauuucuaauu

SEQ ID NO: 1420412 - RNA, 15 nt, Human
auccaaguuaaaugu

SEQ ID NO: 1420413 - RNA, 14 nt, Human
auccaaguuaaaug

SEQ ID NO: 1420414 - RNA, 21 nt, Human
auccaaggugggguggaagcu

SEQ ID NO: 1420415 - RNA, 19 nt, Human
auccaaaaucuugaucagu

SEQ ID NO: 1420416 - RNA, 13 nt, Human
auccaaaagcuuu

SEQ ID NO: 1420417 - RNA, 22 nt, Human
auccaaaagaagcccccagcua

SEQ ID NO: 1420418 - RNA, 19 nt, Human
auccaaaagaagcccccag

SEQ ID NO: 1420419 - RNA, 18 nt, Human
auccaaaagaagccccca

SEQ ID NO: 1420420 - RNA, 13 nt, Human
auccaaaagaagc

SEQ ID NO: 1420421 - RNA, 18 nt, Human
auccaaucaaucuugcau

SEQ ID NO: 1420422 - RNA, 13 nt, Human
auccaaucaaucu

SEQ ID NO: 1420423 - RNA, 21 nt, Human
auccaaguuaaauguagaguu

SEQ ID NO: 1420424 - RNA, 16 nt, Human
auccaaguuaaaugua

SEQ ID NO: 1420425 - RNA, 15 nt, Human
aucauuucuauuucu

SEQ ID NO: 1420426 - RNA, 21 nt, Human
aucauuucuauuaaaugagca

SEQ ID NO: 1420427 - RNA, 18 nt, Human
aucauuucuauuaaauga

SEQ ID NO: 1420428 - RNA, 16 nt, Human
aucauuucacuuguca

SEQ ID NO: 1420429 - RNA, 14 nt, Human
aucauuuaauaaua

SEQ ID NO: 1420430 - RNA, 17 nt, Human
aucauuuaauaauauac

SEQ ID NO: 1420431 - RNA, 18 nt, Human
aucauuuaauaauauacu

SEQ ID NO: 1420432 - RNA, 19 nt, Human
aucauuuaauaauauacuu

SEQ ID NO: 1420433 - RNA, 21 nt, Human
aucauuuaauaauauacuugu

SEQ ID NO: 1420434 - RNA, 21 nt, Human
uucuccugaggauguguccca

SEQ ID NO: 1420435 - RNA, 19 nt, Human
uucucuaagagaacaaugu

SEQ ID NO: 1420436 - RNA, 19 nt, Human
aucauugcuuccuccuccc

SEQ ID NO: 1420437 - RNA, 12 nt, Human
aucauuuaauaa

SEQ ID NO: 1420438 - RNA, 13 nt, Human
aucauuuaauaau

SEQ ID NO: 1420439 - RNA, 22 nt, Human
uucugcacuugcgguuccggca

SEQ ID NO: 1420440 - RNA, 13 nt, Human
uucugacagccuc

SEQ ID NO: 1420441 - RNA, 15 nt, Human
uucucuuuuccuuug

SEQ ID NO: 1420442 - RNA, 15 nt, Human
uucucuuugccucaa

SEQ ID NO: 1420443 - RNA, 14 nt, Human
uucucuuugccuca

SEQ ID NO: 1420444 - RNA, 14 nt, Human
uucucuuucccugg

SEQ ID NO: 1420445 - RNA, 24 nt, Human
uucucuaagagaacaaugugcuau

SEQ ID NO: 1420446 - RNA, 12 nt, Human
uucucuaauaug

SEQ ID NO: 1420447 - RNA, 21 nt, Human
uucucuaauauggcaaccauu

SEQ ID NO: 1420448 - RNA, 21 nt, Human
uucucuuucccuggucccuug

SEQ ID NO: 1420449 - RNA, 16 nt, Human
uucucuuuccaugaca

SEQ ID NO: 1420450 - RNA, 23 nt, Human
uucucuuguauaagauccuagau

SEQ ID NO: 1420451 - RNA, 19 nt, Human
aucaaccccagacacuggu

SEQ ID NO: 1420452 - RNA, 18 nt, Human
aucaaccccagacacugg

SEQ ID NO: 1420453 - RNA, 13 nt, Human
aucaagucuguuu

SEQ ID NO: 1420454 - RNA, 20 nt, Human
aucaaguauuugggaaguga

SEQ ID NO: 1420455 - RNA, 21 nt, Human
aucaaguauuugggaagugaa

SEQ ID NO: 1420456 - RNA, 15 nt, Human
aucaagucuguuuac

SEQ ID NO: 1420457 - RNA, 23 nt, Human
aucaagucuguuuacugcaaggu

SEQ ID NO: 1420458 - RNA, 14 nt, Human
aucaaguuauuuuu

SEQ ID NO: 1420459 - RNA, 17 nt, Human
aucaaaugguaucuuuu

SEQ ID NO: 1420460 - RNA, 20 nt, Human
aucaaaucuaccacuguaug

SEQ ID NO: 1420461 - RNA, 18 nt, Human
aucaaaugguaucuuuug

SEQ ID NO: 1420462 - RNA, 13 nt, Human
auauuuuuagaua

SEQ ID NO: 1420463 - RNA, 22 nt, Human
uuccuguccagcuccaaccugc

SEQ ID NO: 1420464 - RNA, 17 nt, Human
uuccuguccagcuccaa

SEQ ID NO: 1420465 - RNA, 16 nt, Human
uuccuguccagcucca

SEQ ID NO: 1420466 - RNA, 15 nt, Human
uuccuguccagcucc

SEQ ID NO: 1420467 - RNA, 21 nt, Human
uuccuguauuuguucccaaga

SEQ ID NO: 1420468 - RNA, 22 nt, Human
uuccuguauuuguucccaagag

SEQ ID NO: 1420469 - RNA, 20 nt, Human
uuccuguauuuguucccaag

SEQ ID NO: 1420470 - RNA, 15 nt, Human
uuccuggugcuggag

SEQ ID NO: 1420471 - RNA, 14 nt, Human
uuccuggugcugga

SEQ ID NO: 1420472 - RNA, 15 nt, Human
uuccuacuggucucu

SEQ ID NO: 1420473 - RNA, 15 nt, Human
uuccucuccacacag

SEQ ID NO: 1420474 - RNA, 22 nt, Human
uuccuuagacucuuuuccuucc

SEQ ID NO: 1420475 - RNA, 11 nt, Human
uuccuggugcu

SEQ ID NO: 1420476 - RNA, 22 nt, Human
uuccuucagagagcagugcuuu

SEQ ID NO: 1420477 - RNA, 12 nt, Human
uuccuucagauu

SEQ ID NO: 1420478 - RNA, 21 nt, Human
uuccuucagagagcagugcuu

SEQ ID NO: 1420479 - RNA, 14 nt, Human
uuccuucagcacuu

SEQ ID NO: 1420480 - RNA, 13 nt, Human
auauuuucuguuu

SEQ ID NO: 1420481 - RNA, 12 nt, Human
auauuuucuguu

SEQ ID NO: 1420482 - RNA, 16 nt, Human
auauuuucucuaggaa

SEQ ID NO: 1420483 - RNA, 13 nt, Human
auauuuucucuag

SEQ ID NO: 1420484 - RNA, 19 nt, Human
auauuuucucuaggaaaua

SEQ ID NO: 1420485 - RNA, 12 nt, Human
auauuuucucua

SEQ ID NO: 1420486 - RNA, 13 nt, Human
auauuuuccuccu

SEQ ID NO: 1420487 - RNA, 19 nt, Human
auauuuuccuauauuacgg

SEQ ID NO: 1420488 - RNA, 13 nt, Human
auauuuuccuaua

SEQ ID NO: 1420489 - RNA, 15 nt, Human
uuccuucagcacuuu

SEQ ID NO: 1420490 - RNA, 19 nt, Human
uuccuaccaagucaaacuu

SEQ ID NO: 1420491 - RNA, 14 nt, Human
uucccuuuucuguu

SEQ ID NO: 1420492 - RNA, 15 nt, Human
uuccccuuccacuga

SEQ ID NO: 1420493 - RNA, 14 nt, Human
uuccccuuccacug

SEQ ID NO: 1420494 - RNA, 20 nt, Human
uuccccuuauccucccugua

SEQ ID NO: 1420495 - RNA, 19 nt, Human
uuccccuuauccucccugu

SEQ ID NO: 1420496 - RNA, 17 nt, Human
uuccccuuauccucccu

SEQ ID NO: 1420497 - RNA, 16 nt, Human
uuccccuuauccuccc

SEQ ID NO: 1420498 - RNA, 21 nt, Human
uuccccuuccacugagggcag

SEQ ID NO: 1420499 - RNA, 22 nt, Human
uucccuagaaacuuccaaaucc

SEQ ID NO: 1420500 - RNA, 15 nt, Human
uucccuauccaauca

SEQ ID NO: 1420501 - RNA, 12 nt, Human
uucccuaucacu

SEQ ID NO: 1420502 - RNA, 16 nt, Human
uucccuaucuuugcca

SEQ ID NO: 1420503 - RNA, 18 nt, Human
uuccccucugcugcuguc

SEQ ID NO: 1420504 - RNA, 15 nt, Human
uuccccucugcugcu

SEQ ID NO: 1420505 - RNA, 14 nt, Human
uuccccucugcugc

SEQ ID NO: 1420506 - RNA, 12 nt, Human
uuccccucugcu

SEQ ID NO: 1420507 - RNA, 22 nt, Human
uucccccuguuucagaggcuca

SEQ ID NO: 1420508 - RNA, 17 nt, Human
uucccccucucccaguu

SEQ ID NO: 1420509 - RNA, 18 nt, Human
uucccccucucccaguug

SEQ ID NO: 1420510 - RNA, 14 nt, Human
uucccccucuccca

SEQ ID NO: 1420511 - RNA, 18 nt, Human
uucccagagcaaaauaau

SEQ ID NO: 1420512 - RNA, 20 nt, Human
uucccacuuucccaccccac

SEQ ID NO: 1420513 - RNA, 18 nt, Human
uucccacuuucccacccc

SEQ ID NO: 1420514 - RNA, 17 nt, Human
uucccacuuucccaccc

SEQ ID NO: 1420515 - RNA, 20 nt, Human
uucccacuuaaaaauuaaau

SEQ ID NO: 1420516 - RNA, 15 nt, Human
uucccacuguuuaag

SEQ ID NO: 1420517 - RNA, 14 nt, Human
uucccacuccaagc

SEQ ID NO: 1420518 - RNA, 21 nt, Human
uucccacuccaagcccagccc

SEQ ID NO: 1420519 - RNA, 20 nt, Human
uucccacggccuuucuagcc

SEQ ID NO: 1420520 - RNA, 11 nt, Human
uucccagaggg

SEQ ID NO: 1420521 - RNA, 23 nt, Human
uucccagagcaaaauaauuuuaa

SEQ ID NO: 1420522 - RNA, 20 nt, Human
auauuuuacauaaauuuagu

SEQ ID NO: 1420523 - RNA, 16 nt, Human
auauuuuacauaaauu

SEQ ID NO: 1420524 - RNA, 15 nt, Human
auauuuuacauaaau

SEQ ID NO: 1420525 - RNA, 23 nt, Human
uucgcauggucacacacugaugc

SEQ ID NO: 1420526 - RNA, 21 nt, Human
uucgcauggucacacacugau

SEQ ID NO: 1420527 - RNA, 20 nt, Human
uucgcauggucacacacuga

SEQ ID NO: 1420528 - RNA, 19 nt, Human
uucgcauggucacacacug

SEQ ID NO: 1420529 - RNA, 18 nt, Human
uucgcauggucacacacu

SEQ ID NO: 1420530 - RNA, 17 nt, Human
uucgcauggucacacac

SEQ ID NO: 1420531 - RNA, 16 nt, Human
uucgcauggucacaca

SEQ ID NO: 1420532 - RNA, 14 nt, Human
uucgcauggucaca

SEQ ID NO: 1420533 - RNA, 22 nt, Human
uucgcaguccacuucugacagc

SEQ ID NO: 1420534 - RNA, 24 nt, Human
uucgcagccacccugaggagucug

SEQ ID NO: 1420535 - RNA, 19 nt, Human
uucgcagccacccugagga

SEQ ID NO: 1420536 - RNA, 23 nt, Human
uucgagauuaucguuuucuuaaa

SEQ ID NO: 1420537 - RNA, 18 nt, Human
uucgcagccacccugagg

SEQ ID NO: 1420538 - RNA, 16 nt, Human
uucgcagccacccuga

SEQ ID NO: 1420539 - RNA, 15 nt, Human
uucgcagccacccug

SEQ ID NO: 1420540 - RNA, 14 nt, Human
uucgcagccacccu

SEQ ID NO: 1420541 - RNA, 13 nt, Human
uucgcagccaccc

SEQ ID NO: 1420542 - RNA, 11 nt, Human
uucgcagccac

SEQ ID NO: 1420543 - RNA, 15 nt, Human
uucgacacuguucuu

SEQ ID NO: 1420544 - RNA, 15 nt, Human
uucgaaugacacugu

SEQ ID NO: 1420545 - RNA, 14 nt, Human
uucgacacuguucu

SEQ ID NO: 1420546 - RNA, 16 nt, Human
uuccuuuuuuuguacc

SEQ ID NO: 1420547 - RNA, 14 nt, Human
uuccuuuuuuugua

SEQ ID NO: 1420548 - RNA, 13 nt, Human
uucgaaaaucaaa

SEQ ID NO: 1420549 - RNA, 19 nt, Human
uucuaaggccuaggauucu

SEQ ID NO: 1420550 - RNA, 22 nt, Human
uucuaaggaccugaaauuccaa

SEQ ID NO: 1420551 - RNA, 21 nt, Human
uucuaaggaccugaaauucca

SEQ ID NO: 1420552 - RNA, 14 nt, Human
uucuaagauucuga

SEQ ID NO: 1420553 - RNA, 17 nt, Human
uucuaagcauaaaagau

SEQ ID NO: 1420554 - RNA, 13 nt, Human
uucuaagauucug

SEQ ID NO: 1420555 - RNA, 19 nt, Human
uucuaagauucuaaugaug

SEQ ID NO: 1420556 - RNA, 17 nt, Human
uucuaagauucuaauga

SEQ ID NO: 1420557 - RNA, 16 nt, Human
uucuaagauucuaaug

SEQ ID NO: 1420558 - RNA, 15 nt, Human
uucuaagauucuaau

SEQ ID NO: 1420559 - RNA, 17 nt, Human
uucuaagauucuaaagg

SEQ ID NO: 1420560 - RNA, 16 nt, Human
uucuaagauucuaaag

SEQ ID NO: 1420561 - RNA, 15 nt, Human
uucuaagauucuaaa

SEQ ID NO: 1420562 - RNA, 14 nt, Human
uucuaagauucuaa

SEQ ID NO: 1420563 - RNA, 13 nt, Human
uucuaagauucua

SEQ ID NO: 1420564 - RNA, 12 nt, Human
uucuaagauucu

SEQ ID NO: 1420565 - RNA, 23 nt, Human
uucuaagaugugauauucuaaga

SEQ ID NO: 1420566 - RNA, 22 nt, Human
uucuaagaugugauauucuaag

SEQ ID NO: 1420567 - RNA, 21 nt, Human
uucuaagaugugauauucuaa

SEQ ID NO: 1420568 - RNA, 20 nt, Human
uucuaagaugugauauucua

SEQ ID NO: 1420569 - RNA, 19 nt, Human
uucuaagaugugauauucu

SEQ ID NO: 1420570 - RNA, 12 nt, Human
uucuaagaugug

SEQ ID NO: 1420571 - RNA, 20 nt, Human
uucuaagaaacauuuauauu

SEQ ID NO: 1420572 - RNA, 22 nt, Human
uucuaacuacaaagguuuaaau

SEQ ID NO: 1420573 - RNA, 23 nt, Human
uucuaacuacaaagguuuaaaug

SEQ ID NO: 1420574 - RNA, 16 nt, Human
uucuaaccuuuacaug

SEQ ID NO: 1420575 - RNA, 15 nt, Human
uucuaaccuuuacau

SEQ ID NO: 1420576 - RNA, 23 nt, Human
uucuaagaaacauuuauauugau

SEQ ID NO: 1420577 - RNA, 16 nt, Human
uucuaagaaacauuua

SEQ ID NO: 1420578 - RNA, 14 nt, Human
uucuaagaaacauu

SEQ ID NO: 1420579 - RNA, 14 nt, Human
uucuaaccuuuaca

SEQ ID NO: 1420580 - RNA, 14 nt, Human
uucuaacaagucau

SEQ ID NO: 1420581 - RNA, 20 nt, Human
uucuaaaguucuaagauucu

SEQ ID NO: 1420582 - RNA, 18 nt, Human
uucuaaaguucuaagauu

SEQ ID NO: 1420583 - RNA, 17 nt, Human
uucuaaaguucuaagau

SEQ ID NO: 1420584 - RNA, 16 nt, Human
uucuaaaguucuaaga

SEQ ID NO: 1420585 - RNA, 14 nt, Human
uucuaaaguucuaa

SEQ ID NO: 1420586 - RNA, 19 nt, Human
uucuaaaucuccaaaauaa

SEQ ID NO: 1420587 - RNA, 13 nt, Human
uucuaaaguucua

SEQ ID NO: 1420588 - RNA, 12 nt, Human
uucuaaaguucu

SEQ ID NO: 1420589 - RNA, 15 nt, Human
uucuaaaguaaaaac

SEQ ID NO: 1420590 - RNA, 15 nt, Human
uucucagauuucuga

SEQ ID NO: 1420591 - RNA, 20 nt, Human
uucucagauuucugaggaaa

SEQ ID NO: 1420592 - RNA, 14 nt, Human
uucucagauuucug

SEQ ID NO: 1420593 - RNA, 16 nt, Human
uucucagauuucugag

SEQ ID NO: 1420594 - RNA, 20 nt, Human
aucacuuucucaguuuucau

SEQ ID NO: 1420595 - RNA, 21 nt, Human
aucacuuucucaguuuucaua

SEQ ID NO: 1420596 - RNA, 18 nt, Human
aucacuuucucaguuuuc

SEQ ID NO: 1420597 - RNA, 22 nt, Human
aucagaaaggaaaaacaaacuc

SEQ ID NO: 1420598 - RNA, 20 nt, Human
aucagaaaggaaaaacaaac

SEQ ID NO: 1420599 - RNA, 14 nt, Human
aucagaaagaggca

SEQ ID NO: 1420600 - RNA, 16 nt, Human
aucagaaacacccuca

SEQ ID NO: 1420601 - RNA, 20 nt, Human
aucagaaacacccucacacu

SEQ ID NO: 1420602 - RNA, 20 nt, Human
aucaggacccagaggaaggg

SEQ ID NO: 1420603 - RNA, 18 nt, Human
aucaggacccagaggaag

SEQ ID NO: 1420604 - RNA, 14 nt, Human
aucaggacccugga

SEQ ID NO: 1420605 - RNA, 16 nt, Human
aucaggacccagagga

SEQ ID NO: 1420606 - RNA, 22 nt, Human
aucaggaauauuuuccaaagag

SEQ ID NO: 1420607 - RNA, 19 nt, Human
aucaggaauauuuuccaaa

SEQ ID NO: 1420608 - RNA, 13 nt, Human
aucagacugacag

SEQ ID NO: 1420609 - RNA, 20 nt, Human
aucagaccauaauguuacau

SEQ ID NO: 1420610 - RNA, 16 nt, Human
aucagaccauaauguu

SEQ ID NO: 1420611 - RNA, 17 nt, Human
aucagaaagggagggcu

SEQ ID NO: 1420612 - RNA, 16 nt, Human
aucagaaagggagggc

SEQ ID NO: 1420613 - RNA, 15 nt, Human
aucagaaagggaggg

SEQ ID NO: 1420614 - RNA, 17 nt, Human
aucagacugacaguuua

SEQ ID NO: 1420615 - RNA, 20 nt, Human
aucagacuaagccagcaccg

SEQ ID NO: 1420616 - RNA, 19 nt, Human
aucagacuaagccagcacc

SEQ ID NO: 1420617 - RNA, 17 nt, Human
aucagacuaagccagca

SEQ ID NO: 1420618 - RNA, 16 nt, Human
aucagacuaagccagc

SEQ ID NO: 1420619 - RNA, 19 nt, Human
aucagacuaugaaguuuuu

SEQ ID NO: 1420620 - RNA, 22 nt, Human
uucuauaaguuuuauguuaaau

SEQ ID NO: 1420621 - RNA, 21 nt, Human
uucuauaaguuuuauguuaaa

SEQ ID NO: 1420622 - RNA, 16 nt, Human
uucuaguucugccagg

SEQ ID NO: 1420623 - RNA, 15 nt, Human
uucuaguucugccag

SEQ ID NO: 1420624 - RNA, 13 nt, Human
uucuauaauuuaa

SEQ ID NO: 1420625 - RNA, 14 nt, Human
uucuauaauuuaaa

SEQ ID NO: 1420626 - RNA, 12 nt, Human
uucuagaccaau

SEQ ID NO: 1420627 - RNA, 23 nt, Human
uucuagacauggagguucuaagg

SEQ ID NO: 1420628 - RNA, 22 nt, Human
uucuagacauggagguucuaag

SEQ ID NO: 1420629 - RNA, 20 nt, Human
uucuagacauggagguucua

SEQ ID NO: 1420630 - RNA, 22 nt, Human
uucuagaaagagaaacaguugg

SEQ ID NO: 1420631 - RNA, 19 nt, Human
uucuagaaagagaaacagu

SEQ ID NO: 1420632 - RNA, 12 nt, Human
uucuagaaaaac

SEQ ID NO: 1420633 - RNA, 17 nt, Human
uucuaaggccuaggauu

SEQ ID NO: 1420634 - RNA, 15 nt, Human
uucuaaggccuagga

SEQ ID NO: 1420635 - RNA, 23 nt, Human
uucuaaggaccugaaauuccaaa

SEQ ID NO: 1420636 - RNA, 21 nt, Human
uucuagguuucaaagaugcug

SEQ ID NO: 1420637 - RNA, 23 nt, Human
uucuagaucagaugcuccaagau

SEQ ID NO: 1420638 - RNA, 22 nt, Human
uucuagaucagaugcuccaaga

SEQ ID NO: 1420639 - RNA, 16 nt, Human
uucuagaucagaugcu

SEQ ID NO: 1420640 - RNA, 19 nt, Human
uucuagaguucagaguccu

SEQ ID NO: 1420641 - RNA, 14 nt, Human
uucuagaguucaga

SEQ ID NO: 1420642 - RNA, 16 nt, Human
uucuagagcacugcca

SEQ ID NO: 1420643 - RNA, 15 nt, Human
uucuaguguagaauu

SEQ ID NO: 1420644 - RNA, 17 nt, Human
augcagugccuuucuuc

SEQ ID NO: 1420645 - RNA, 17 nt, Human
augcaguucugaagaag

SEQ ID NO: 1420646 - RNA, 15 nt, Human
augcaguucugaaga

SEQ ID NO: 1420647 - RNA, 24 nt, Human
augcagugcucgcuguugcugaau

SEQ ID NO: 1420648 - RNA, 21 nt, Human
augcagugcucgcuguugcug

SEQ ID NO: 1420649 - RNA, 23 nt, Human
augcagugcucgcuguugcugaa

SEQ ID NO: 1420650 - RNA, 13 nt, Human
augcagugcucgc

SEQ ID NO: 1420651 - RNA, 17 nt, Human
augcagugcucgcuguu

SEQ ID NO: 1420652 - RNA, 19 nt, Human
augcagugcucgcuguugc

SEQ ID NO: 1420653 - RNA, 20 nt, Human
augcagugcucgcuguugcu

SEQ ID NO: 1420654 - RNA, 15 nt, Human
augcagggcagucau

SEQ ID NO: 1420655 - RNA, 13 nt, Human
augcagggcaguc

SEQ ID NO: 1420656 - RNA, 15 nt, Human
augccacugccuucg

SEQ ID NO: 1420657 - RNA, 14 nt, Human
augccacugccuuc

SEQ ID NO: 1420658 - RNA, 16 nt, Human
augcccagagacccag

SEQ ID NO: 1420659 - RNA, 14 nt, Human
augcccagagaccc

SEQ ID NO: 1420660 - RNA, 11 nt, Human
augcccagaga

SEQ ID NO: 1420661 - RNA, 10 nt, Human
augcccagag

SEQ ID NO: 1420662 - RNA, 18 nt, Human
augcccagagacccagcg

SEQ ID NO: 1420663 - RNA, 17 nt, Human
augcccagagacccagc

SEQ ID NO: 1420664 - RNA, 19 nt, Human
augccaaauuaaaaaagau

SEQ ID NO: 1420665 - RNA, 22 nt, Human
augccaaauuaaaaaagauaaa

SEQ ID NO: 1420666 - RNA, 18 nt, Human
augccaaauuaaaaaaga

SEQ ID NO: 1420667 - RNA, 15 nt, Human
augccaaauuaaaaa

SEQ ID NO: 1420668 - RNA, 14 nt, Human
augccaaauuaaaa

SEQ ID NO: 1420669 - RNA, 13 nt, Human
augccaaauuaaa

SEQ ID NO: 1420670 - RNA, 18 nt, Human
augcaguugucucuguuu

SEQ ID NO: 1420671 - RNA, 16 nt, Human
augcaguugucucugu

SEQ ID NO: 1420672 - RNA, 15 nt, Human
augcaguugucucug

SEQ ID NO: 1420673 - RNA, 14 nt, Human
augcaguugucucu

SEQ ID NO: 1420674 - RNA, 19 nt, Human
augcaguucugaagaagau

SEQ ID NO: 1420675 - RNA, 18 nt, Human
augcaguucugaagaaga

SEQ ID NO: 1420676 - RNA, 13 nt, Human
uuuaagcucugag

SEQ ID NO: 1420677 - RNA, 18 nt, Human
uuuaagccaaaacaaugu

SEQ ID NO: 1420678 - RNA, 20 nt, Human
uuuaagccaaaacaauguuu

SEQ ID NO: 1420679 - RNA, 12 nt, Human
uuuaagccaaaa

SEQ ID NO: 1420680 - RNA, 15 nt, Human
uuuaagugcugcauu

SEQ ID NO: 1420681 - RNA, 16 nt, Human
uuuaagugcugcauuu

SEQ ID NO: 1420682 - RNA, 16 nt, Human
uuuaaugaagaucuaa

SEQ ID NO: 1420683 - RNA, 16 nt, Human
uuuaaugaacaaaugg

SEQ ID NO: 1420684 - RNA, 15 nt, Human
uuuaaugaacaaaug

SEQ ID NO: 1420685 - RNA, 19 nt, Human
uuuaagcucugagcuguca

SEQ ID NO: 1420686 - RNA, 18 nt, Human
uuuaagcucugagcuguc

SEQ ID NO: 1420687 - RNA, 17 nt, Human
uuuaagcucugagcugu

SEQ ID NO: 1420688 - RNA, 14 nt, Human
uuuaagcucugagc

SEQ ID NO: 1420689 - RNA, 19 nt, Human
uuuaaugaagaucuaaaua

SEQ ID NO: 1420690 - RNA, 17 nt, Human
uuuaagugcugcauuua

SEQ ID NO: 1420691 - RNA, 19 nt, Human
uuuaagugcugcauuuaaa

SEQ ID NO: 1420692 - RNA, 18 nt, Human
uuuaauguauaguaaauc

SEQ ID NO: 1420693 - RNA, 19 nt, Human
uuuaauggggugcaccugu

SEQ ID NO: 1420694 - RNA, 23 nt, Human
uuuaaugccgauauacucuagau

SEQ ID NO: 1420695 - RNA, 12 nt, Human
uuuaauuguaaa

SEQ ID NO: 1420696 - RNA, 21 nt, Human
uuuaauuguaaaguaaaagcu

SEQ ID NO: 1420697 - RNA, 15 nt, Human
uuuaauuguaaagua

SEQ ID NO: 1420698 - RNA, 12 nt, Human
uuuaauuuuaca

SEQ ID NO: 1420699 - RNA, 14 nt, Human
uuuaagauaauuau

SEQ ID NO: 1420700 - RNA, 15 nt, Human
uuuaagauaauuaua

SEQ ID NO: 1420701 - RNA, 11 nt, Human
uuuaaauugug

SEQ ID NO: 1420702 - RNA, 12 nt, Human
uuuaaauugugu

SEQ ID NO: 1420703 - RNA, 21 nt, Human
augcacuuugcuuuaauauaa

SEQ ID NO: 1420704 - RNA, 20 nt, Human
augcacuuugcuuuaauaua

SEQ ID NO: 1420705 - RNA, 19 nt, Human
augcacuuugcuuuaauau

SEQ ID NO: 1420706 - RNA, 18 nt, Human
augcacuuugcuuuaaua

SEQ ID NO: 1420707 - RNA, 23 nt, Human
augcacuuugcuuuaauauaaau

SEQ ID NO: 1420708 - RNA, 22 nt, Human
augcacuuugcuuuaauauaaa

SEQ ID NO: 1420709 - RNA, 14 nt, Human
uuuaaauguauacu

SEQ ID NO: 1420710 - RNA, 15 nt, Human
uuuaaauguauacua

SEQ ID NO: 1420711 - RNA, 14 nt, Human
uuuaaauguuuuuu

SEQ ID NO: 1420712 - RNA, 21 nt, Human
uuguuggcguaggcuacagag

SEQ ID NO: 1420713 - RNA, 18 nt, Human
uuguuggcguaggcuaca

SEQ ID NO: 1420714 - RNA, 15 nt, Human
uuguucuguuaacug

SEQ ID NO: 1420715 - RNA, 16 nt, Human
uuguuggcauagcucu

SEQ ID NO: 1420716 - RNA, 14 nt, Human
uuguucuguuaacu

SEQ ID NO: 1420717 - RNA, 14 nt, Human
uuguucugucacca

SEQ ID NO: 1420718 - RNA, 17 nt, Human
uuguguguugucucuug

SEQ ID NO: 1420719 - RNA, 15 nt, Human
uuguguguugucucu

SEQ ID NO: 1420720 - RNA, 13 nt, Human
uuguguguugucu

SEQ ID NO: 1420721 - RNA, 16 nt, Human
uuguguggauucuuua

SEQ ID NO: 1420722 - RNA, 13 nt, Human
uuguguggauucu

SEQ ID NO: 1420723 - RNA, 15 nt, Human
uugugugcucuccau

SEQ ID NO: 1420724 - RNA, 14 nt, Human
uugugugcucucca

SEQ ID NO: 1420725 - RNA, 13 nt, Human
uugugugcucucc

SEQ ID NO: 1420726 - RNA, 18 nt, Human
uuguguaagaaauacaga

SEQ ID NO: 1420727 - RNA, 20 nt, Human
uugugguuuauauauuuaaa

SEQ ID NO: 1420728 - RNA, 23 nt, Human
uugugugaaagguacuucaaauc

SEQ ID NO: 1420729 - RNA, 14 nt, Human
uuguguaagaaaua

SEQ ID NO: 1420730 - RNA, 13 nt, Human
uugugggccuggg

SEQ ID NO: 1420731 - RNA, 18 nt, Human
uuguggccuuugcgcucc

SEQ ID NO: 1420732 - RNA, 23 nt, Human
uugugggccugggcuccuggacc

SEQ ID NO: 1420733 - RNA, 19 nt, Human
uugugggccugggcuccug

SEQ ID NO: 1420734 - RNA, 18 nt, Human
uugugggccugggcuccu

SEQ ID NO: 1420735 - RNA, 15 nt, Human
uugugggccugggcu

SEQ ID NO: 1420736 - RNA, 14 nt, Human
uugugggccugggc

SEQ ID NO: 1420737 - RNA, 16 nt, Human
uugugggggacuguaa

SEQ ID NO: 1420738 - RNA, 17 nt, Human
uuguggggccugggagg

SEQ ID NO: 1420739 - RNA, 14 nt, Human
uuguggggccuggg

SEQ ID NO: 1420740 - RNA, 20 nt, Human
uugugggccugggcuccugg

SEQ ID NO: 1420741 - RNA, 19 nt, Human
uugugggggacuguaaguu

SEQ ID NO: 1420742 - RNA, 18 nt, Human
uugugggggacuguaagu

SEQ ID NO: 1420743 - RNA, 17 nt, Human
uuguggccuaagaggcu

SEQ ID NO: 1420744 - RNA, 19 nt, Human
uugugauacaaugcugugc

SEQ ID NO: 1420745 - RNA, 22 nt, Human
uugugaguuuaccuuguauacu

SEQ ID NO: 1420746 - RNA, 18 nt, Human
uugugauacaaugcugug

SEQ ID NO: 1420747 - RNA, 23 nt, Human
augagagacacacugaagaagca

SEQ ID NO: 1420748 - RNA, 21 nt, Human
augagagacacacugaagaag

SEQ ID NO: 1420749 - RNA, 20 nt, Human
augagagacacacugaagaa

SEQ ID NO: 1420750 - RNA, 16 nt, Human
augcacuuugcuuuaa

SEQ ID NO: 1420751 - RNA, 15 nt, Human
augcacuuugcuuua

SEQ ID NO: 1420752 - RNA, 13 nt, Human
augcacuuugcuu

SEQ ID NO: 1420753 - RNA, 12 nt, Human
augcacuuugcu

SEQ ID NO: 1420754 - RNA, 22 nt, Human
augcacuuucuauccucuguaa

SEQ ID NO: 1420755 - RNA, 20 nt, Human
augcacuucaaauucaaaua

SEQ ID NO: 1420756 - RNA, 19 nt, Human
augcacuuauaauuuuccu

SEQ ID NO: 1420757 - RNA, 21 nt, Human
augcaccaccaagccaaggga

SEQ ID NO: 1420758 - RNA, 18 nt, Human
augcaccaccaagccaag

SEQ ID NO: 1420759 - RNA, 15 nt, Human
augcaccaccaagcc

SEQ ID NO: 1420760 - RNA, 18 nt, Human
augcaaaucaauuacugg

SEQ ID NO: 1420761 - RNA, 14 nt, Human
augcaccaccaagc

SEQ ID NO: 1420762 - RNA, 17 nt, Human
augcacaugaacuuaga

SEQ ID NO: 1420763 - RNA, 14 nt, Human
augcacaucccugg

SEQ ID NO: 1420764 - RNA, 21 nt, Human
augauuuuaaguuucucugca

SEQ ID NO: 1420765 - RNA, 21 nt, Human
augauuucaugcuaucucugu

SEQ ID NO: 1420766 - RNA, 20 nt, Human
augauuucaugcuaucucug

SEQ ID NO: 1420767 - RNA, 21 nt, Human
augauuucaguucuaggaaaa

SEQ ID NO: 1420768 - RNA, 20 nt, Human
augauuucaguucuaggaaa

SEQ ID NO: 1420769 - RNA, 14 nt, Human
augauuucaguagc

SEQ ID NO: 1420770 - RNA, 21 nt, Human
augauuuccuugaauguggcu

SEQ ID NO: 1420771 - RNA, 14 nt, Human
augauuucuucuua

SEQ ID NO: 1420772 - RNA, 13 nt, Human
uuguugugcuuuu

SEQ ID NO: 1420773 - RNA, 16 nt, Human
uuguuguccuuuucau

SEQ ID NO: 1420774 - RNA, 14 nt, Human
uuguuguccuuuuc

SEQ ID NO: 1420775 - RNA, 20 nt, Human
augauuaaauaagauucuaa

SEQ ID NO: 1420776 - RNA, 19 nt, Human
augauuaaauaagauucua

SEQ ID NO: 1420777 - RNA, 23 nt, Human
augauuagaaauuaccuguggau

SEQ ID NO: 1420778 - RNA, 22 nt, Human
augauuaugaauuacauuugua

SEQ ID NO: 1420779 - RNA, 18 nt, Human
uuguuguaaccugcugug

SEQ ID NO: 1420780 - RNA, 15 nt, Human
uuguuguaaccugcu

SEQ ID NO: 1420781 - RNA, 20 nt, Human
uuguugguugguuuucuucu

SEQ ID NO: 1420782 - RNA, 16 nt, Human
uuguugguugguuuuc

SEQ ID NO: 1420783 - RNA, 15 nt, Human
uuguuggugcacagc

SEQ ID NO: 1420784 - RNA, 22 nt, Human
uuguuggcguaggcuacagaga

SEQ ID NO: 1420785 - RNA, 23 nt, Human
uuguuggcguaggcuacagagaa

SEQ ID NO: 1420786 - RNA, 23 nt, Human
uuguuguagauugauuguauugu

SEQ ID NO: 1420787 - RNA, 20 nt, Human
uuguuguagauugauuguau

SEQ ID NO: 1420788 - RNA, 15 nt, Human
uuguugucugcaacu

SEQ ID NO: 1420789 - RNA, 24 nt, Human
augauuaaauaagauucuaacggu

SEQ ID NO: 1420790 - RNA, 13 nt, Human
augauucauuuua

SEQ ID NO: 1420791 - RNA, 16 nt, Human
augauucaguguuaaa

SEQ ID NO: 1420792 - RNA, 21 nt, Human
augauucaaaugucuauaaac

SEQ ID NO: 1420793 - RNA, 12 nt, Human
augauucccagc

SEQ ID NO: 1420794 - RNA, 14 nt, Human
auggccuucauauc

SEQ ID NO: 1420795 - RNA, 17 nt, Human
auggccugcaaacuggg

SEQ ID NO: 1420796 - RNA, 23 nt, Human
auggccuucauaucauccacaca

SEQ ID NO: 1420797 - RNA, 18 nt, Human
auggccugcaaacuggga

SEQ ID NO: 1420798 - RNA, 22 nt, Human
auggccgugaaugggugcccac

SEQ ID NO: 1420799 - RNA, 22 nt, Human
auggccugcaaacugggaaccc

SEQ ID NO: 1420800 - RNA, 21 nt, Human
auggccagccccuuagacaga

SEQ ID NO: 1420801 - RNA, 19 nt, Human
auggccagccccuuagaca

SEQ ID NO: 1420802 - RNA, 17 nt, Human
auggccagccccuuaga

SEQ ID NO: 1420803 - RNA, 13 nt, Human
auggccagccccu

SEQ ID NO: 1420804 - RNA, 13 nt, Human
auggccagcagca

SEQ ID NO: 1420805 - RNA, 18 nt, Human
auggcaugagaaauacaa

SEQ ID NO: 1420806 - RNA, 22 nt, Human
auggccacaguagucuugauga

SEQ ID NO: 1420807 - RNA, 19 nt, Human
auggcaugagaaauacaaa

SEQ ID NO: 1420808 - RNA, 21 nt, Human
auggcagaaggcaaacccauc

SEQ ID NO: 1420809 - RNA, 20 nt, Human
auggcagaaggcaaacccau

SEQ ID NO: 1420810 - RNA, 15 nt, Human
auggcagaaggcaaa

SEQ ID NO: 1420811 - RNA, 20 nt, Human
auggccagcuggaggcaggg

SEQ ID NO: 1420812 - RNA, 14 nt, Human
auggccagcuggag

SEQ ID NO: 1420813 - RNA, 22 nt, Human
auggccagccccuuagacagag

SEQ ID NO: 1420814 - RNA, 18 nt, Human
auggccgugaaugggugc

SEQ ID NO: 1420815 - RNA, 18 nt, Human
auggccggagaggaccgg

SEQ ID NO: 1420816 - RNA, 15 nt, Human
auggcaacagaucug

SEQ ID NO: 1420817 - RNA, 14 nt, Human
auggcaacagaucu

SEQ ID NO: 1420818 - RNA, 18 nt, Human
auggcaaaggaaggugga

SEQ ID NO: 1420819 - RNA, 20 nt, Human
auggauuuuucuuuaacugc

SEQ ID NO: 1420820 - RNA, 19 nt, Human
auggauuuuucuuuaacug

SEQ ID NO: 1420821 - RNA, 16 nt, Human
auggauuuuucuuuaa

SEQ ID NO: 1420822 - RNA, 15 nt, Human
auggauuuuucuuua

SEQ ID NO: 1420823 - RNA, 21 nt, Human
auggauuuugggagugacuca

SEQ ID NO: 1420824 - RNA, 15 nt, Human
auggauuuugggagu

SEQ ID NO: 1420825 - RNA, 17 nt, Human
auggauuucuuugaaaa

SEQ ID NO: 1420826 - RNA, 16 nt, Human
auggcaauuuuguaac

SEQ ID NO: 1420827 - RNA, 15 nt, Human
auggcaauuuuguaa

SEQ ID NO: 1420828 - RNA, 22 nt, Human
auggcaaucaaacauuuucugg

SEQ ID NO: 1420829 - RNA, 16 nt, Human
auggcaaccauuauaa

SEQ ID NO: 1420830 - RNA, 15 nt, Human
auggcaaccauuaua

SEQ ID NO: 1420831 - RNA, 24 nt, Human
auggcaacagaucuggaaccucag

SEQ ID NO: 1420832 - RNA, 17 nt, Human
auggcaacagaucugga

SEQ ID NO: 1420833 - RNA, 16 nt, Human
auggcaacagaucugg

SEQ ID NO: 1420834 - RNA, 18 nt, Human
auggcaaccauuauaacc

SEQ ID NO: 1420835 - RNA, 13 nt, Human
auggcagaaggca

SEQ ID NO: 1420836 - RNA, 13 nt, Human
auggcagaaaagu

SEQ ID NO: 1420837 - RNA, 17 nt, Human
auggcacaucagcacga

SEQ ID NO: 1420838 - RNA, 23 nt, Human
auggcacaucagcacgauuucug

SEQ ID NO: 1420839 - RNA, 23 nt, Human
uuuccccauuuagguuucugagu

SEQ ID NO: 1420840 - RNA, 15 nt, Human
uuuccccagacuugu

SEQ ID NO: 1420841 - RNA, 18 nt, Human
uuuccccaccagaugcug

SEQ ID NO: 1420842 - RNA, 16 nt, Human
uuucccauggggaggg

SEQ ID NO: 1420843 - RNA, 17 nt, Human
auggacaucuugucauu

SEQ ID NO: 1420844 - RNA, 12 nt, Human
auggacaucuug

SEQ ID NO: 1420845 - RNA, 19 nt, Human
auggacaggcuggcuccag

SEQ ID NO: 1420846 - RNA, 18 nt, Human
auggacagggcaugccac

SEQ ID NO: 1420847 - RNA, 14 nt, Human
auggacaggcuggc

SEQ ID NO: 1420848 - RNA, 20 nt, Human
auggacaucuugucauuuuu

SEQ ID NO: 1420849 - RNA, 19 nt, Human
auggacaucuugucauuuu

SEQ ID NO: 1420850 - RNA, 19 nt, Human
uuucauuaaauaaauuuga

SEQ ID NO: 1420851 - RNA, 18 nt, Human
uuucauuaaauaaauuug

SEQ ID NO: 1420852 - RNA, 17 nt, Human
uuucauuaaauaaauuu

SEQ ID NO: 1420853 - RNA, 15 nt, Human
uuucauuaaauaaau

SEQ ID NO: 1420854 - RNA, 14 nt, Human
uuucauuaaauaaa

SEQ ID NO: 1420855 - RNA, 15 nt, Human
uuucauguuuuugau

SEQ ID NO: 1420856 - RNA, 19 nt, Human
uuucauguuaguuaccuua

SEQ ID NO: 1420857 - RNA, 16 nt, Human
uuucaugcuaucucug

SEQ ID NO: 1420858 - RNA, 18 nt, Human
uuucaugcaaacucuuug

SEQ ID NO: 1420859 - RNA, 17 nt, Human
uuucaugcaaacucuuu

SEQ ID NO: 1420860 - RNA, 13 nt, Human
uuucaugcaaacu

SEQ ID NO: 1420861 - RNA, 16 nt, Human
uuucaugauuagaaau

SEQ ID NO: 1420862 - RNA, 19 nt, Human
uuucaugcuaucucugugu

SEQ ID NO: 1420863 - RNA, 21 nt, Human
uuucaugcaaacucuuugguc

SEQ ID NO: 1420864 - RNA, 19 nt, Human
uuucaugcuguucaugaaa

SEQ ID NO: 1420865 - RNA, 22 nt, Human
uuucaucuucaguugucucuga

SEQ ID NO: 1420866 - RNA, 17 nt, Human
uuucaucuucaguuguc

SEQ ID NO: 1420867 - RNA, 16 nt, Human
uuucaucuucaguugu

SEQ ID NO: 1420868 - RNA, 15 nt, Human
uuucaucuucaguug

SEQ ID NO: 1420869 - RNA, 22 nt, Human
uuucaugauaaugaacagaaca

SEQ ID NO: 1420870 - RNA, 19 nt, Human
uuucaugauaaugaacaga

SEQ ID NO: 1420871 - RNA, 17 nt, Human
uuucaugaccaguaaag

SEQ ID NO: 1420872 - RNA, 24 nt, Human
uuucaugaccaguaaaggcugcug

SEQ ID NO: 1420873 - RNA, 11 nt, Human
uuucagacucc

SEQ ID NO: 1420874 - RNA, 21 nt, Human
uuucagacucccauuccugaa

SEQ ID NO: 1420875 - RNA, 15 nt, Human
uuucagaauauguca

SEQ ID NO: 1420876 - RNA, 23 nt, Human
uuucagaaguuaguuuguauaua

SEQ ID NO: 1420877 - RNA, 22 nt, Human
uuucagaaguuaguuuguauau

SEQ ID NO: 1420878 - RNA, 20 nt, Human
uuucagaaguuaguuuguau

SEQ ID NO: 1420879 - RNA, 16 nt, Human
uuucagaaguuaguuu

SEQ ID NO: 1420880 - RNA, 17 nt, Human
uuucauauuuuaaacag

SEQ ID NO: 1420881 - RNA, 16 nt, Human
auggaauacucuuaua

SEQ ID NO: 1420882 - RNA, 17 nt, Human
auggaauacucuuauau

SEQ ID NO: 1420883 - RNA, 21 nt, Human
augcuggcuauagaugucuuu

SEQ ID NO: 1420884 - RNA, 22 nt, Human
augcuggcuauagaugucuuuu

SEQ ID NO: 1420885 - RNA, 23 nt, Human
augcuggcccagggcccagagcc

SEQ ID NO: 1420886 - RNA, 20 nt, Human
augcuggccuugccacacuc

SEQ ID NO: 1420887 - RNA, 22 nt, Human
augcuggcccagggcccagagc

SEQ ID NO: 1420888 - RNA, 21 nt, Human
augcuggcccagggcccagag

SEQ ID NO: 1420889 - RNA, 20 nt, Human
augcuggcccagggcccaga

SEQ ID NO: 1420890 - RNA, 19 nt, Human
augcuggcccagggcccag

SEQ ID NO: 1420891 - RNA, 18 nt, Human
augcuggcccagggccca

SEQ ID NO: 1420892 - RNA, 16 nt, Human
augcuggcccagggcc

SEQ ID NO: 1420893 - RNA, 15 nt, Human
augcuggcccagggc

SEQ ID NO: 1420894 - RNA, 13 nt, Human
augcuggcccagg

SEQ ID NO: 1420895 - RNA, 12 nt, Human
augcuggcccag

SEQ ID NO: 1420896 - RNA, 19 nt, Human
augcucuccaaaccacuuu

SEQ ID NO: 1420897 - RNA, 16 nt, Human
augcuccuugggcccu

SEQ ID NO: 1420898 - RNA, 15 nt, Human
augcuccuugggccc

SEQ ID NO: 1420899 - RNA, 18 nt, Human
uuuauuacguaugucugg

SEQ ID NO: 1420900 - RNA, 16 nt, Human
uuuauuacuguaagaa

SEQ ID NO: 1420901 - RNA, 19 nt, Human
uuuauuacguaugucuggu

SEQ ID NO: 1420902 - RNA, 16 nt, Human
uuuauuacguaugucu

SEQ ID NO: 1420903 - RNA, 14 nt, Human
uuuauuacguaugu

SEQ ID NO: 1420904 - RNA, 22 nt, Human
augcuguacaucuauuuuggau

SEQ ID NO: 1420905 - RNA, 16 nt, Human
augcuguacaucuauu

SEQ ID NO: 1420906 - RNA, 12 nt, Human
augcuguacauc

SEQ ID NO: 1420907 - RNA, 22 nt, Human
augcugucuacacuaagagaga

SEQ ID NO: 1420908 - RNA, 23 nt, Human
augcugucuacacuaagagagaa

SEQ ID NO: 1420909 - RNA, 21 nt, Human
uuuaugguaacugcuuucugu

SEQ ID NO: 1420910 - RNA, 23 nt, Human
uuuaugguaacugcuuucuguuc

SEQ ID NO: 1420911 - RNA, 19 nt, Human
uuuaugguaaaaaauuuau

SEQ ID NO: 1420912 - RNA, 24 nt, Human
uuuauggcuuuugugcauuaucua

SEQ ID NO: 1420913 - RNA, 22 nt, Human
uuuaugggucagaguuccgacu

SEQ ID NO: 1420914 - RNA, 13 nt, Human
uuuauauaagcuu

SEQ ID NO: 1420915 - RNA, 21 nt, Human
uuuauguuauauauaaauaua

SEQ ID NO: 1420916 - RNA, 19 nt, Human
uuuauguuccauuaaacga

SEQ ID NO: 1420917 - RNA, 22 nt, Human
uuuauguuauauauaaauauau

SEQ ID NO: 1420918 - RNA, 20 nt, Human
uuuauguuauauauaaauau

SEQ ID NO: 1420919 - RNA, 17 nt, Human
uuuauguuauauauaaa

SEQ ID NO: 1420920 - RNA, 14 nt, Human
uuuauguuauauau

SEQ ID NO: 1420921 - RNA, 20 nt, Human
uuuauguuacuacaugcacu

SEQ ID NO: 1420922 - RNA, 20 nt, Human
uuuauguuaagggaagaauu

SEQ ID NO: 1420923 - RNA, 18 nt, Human
uuuauuaaaaacugagug

SEQ ID NO: 1420924 - RNA, 13 nt, Human
uuuauuaaaaacu

SEQ ID NO: 1420925 - RNA, 19 nt, Human
uuuagauuuucuuuugccu

SEQ ID NO: 1420926 - RNA, 19 nt, Human
uuuagauuuucugguucua

SEQ ID NO: 1420927 - RNA, 17 nt, Human
uuuagauguaauuuugu

SEQ ID NO: 1420928 - RNA, 21 nt, Human
uuuagaugauaaagagacagu

SEQ ID NO: 1420929 - RNA, 22 nt, Human
augcccccuaauccccuucucc

SEQ ID NO: 1420930 - RNA, 18 nt, Human
augccccaucccaugcug

SEQ ID NO: 1420931 - RNA, 10 nt, Human
uuuaggaaau

SEQ ID NO: 1420932 - RNA, 22 nt, Human
uuuagcuggaaaaguauguuag

SEQ ID NO: 1420933 - RNA, 18 nt, Human
uuuaggaagcaagcuuaa

SEQ ID NO: 1420934 - RNA, 22 nt, Human
uuuaggaaguugacuuauagua

SEQ ID NO: 1420935 - RNA, 22 nt, Human
uuuaguagcagugauugucuua

SEQ ID NO: 1420936 - RNA, 16 nt, Human
uuuaguaucuuuuuau

SEQ ID NO: 1420937 - RNA, 15 nt, Human
uuuagucaugugacc

SEQ ID NO: 1420938 - RNA, 21 nt, Human
uuuaguagcagugauugucuu

SEQ ID NO: 1420939 - RNA, 21 nt, Human
augagaaacuuaaauguuauu

SEQ ID NO: 1420940 - RNA, 20 nt, Human
augagaaacuuaaauguuau

SEQ ID NO: 1420941 - RNA, 11 nt, Human
augagaaacuu

SEQ ID NO: 1420942 - RNA, 21 nt, Human
augacuuucuuuuuguagcug

SEQ ID NO: 1420943 - RNA, 20 nt, Human
augacuuucuuuuuguagcu

SEQ ID NO: 1420944 - RNA, 22 nt, Human
augacuugggcacccccagccu

SEQ ID NO: 1420945 - RNA, 21 nt, Human
augacuugggcacccccagcc

SEQ ID NO: 1420946 - RNA, 20 nt, Human
augacuugggcacccccagc

SEQ ID NO: 1420947 - RNA, 23 nt, Human
augacuugggcacccccagccug

SEQ ID NO: 1420948 - RNA, 18 nt, Human
augacuugggcaccccca

SEQ ID NO: 1420949 - RNA, 16 nt, Human
augacuuacuguacau

SEQ ID NO: 1420950 - RNA, 17 nt, Human
augacuuacuguacaug

SEQ ID NO: 1420951 - RNA, 19 nt, Human
augacaauuuuuuccacuu

SEQ ID NO: 1420952 - RNA, 18 nt, Human
augacaaucauguguguu

SEQ ID NO: 1420953 - RNA, 17 nt, Human
augacaaucaugugugu

SEQ ID NO: 1420954 - RNA, 15 nt, Human
augaccaaaguccuu

SEQ ID NO: 1420955 - RNA, 18 nt, Human
augacauuuauuuuucau

SEQ ID NO: 1420956 - RNA, 22 nt, Human
augacauuuauaucacauguuu

SEQ ID NO: 1420957 - RNA, 14 nt, Human
augacuuacuguac

SEQ ID NO: 1420958 - RNA, 15 nt, Human
augagaaaucuaaaa

SEQ ID NO: 1420959 - RNA, 18 nt, Human
augagaaaucuaaaaaac

SEQ ID NO: 1420960 - RNA, 14 nt, Human
augagaacucugag

SEQ ID NO: 1420961 - RNA, 22 nt, Human
augagaaauacaaaaauacuca

SEQ ID NO: 1420962 - RNA, 13 nt, Human
augagaacaaaca

SEQ ID NO: 1420963 - RNA, 15 nt, Human
augagaaauacaaaa

SEQ ID NO: 1420964 - RNA, 19 nt, Human
augagaaagccuucuuuug

SEQ ID NO: 1420965 - RNA, 15 nt, Human
augagaaagccuucu

SEQ ID NO: 1420966 - RNA, 14 nt, Human
augagaaagccuuc

SEQ ID NO: 1420967 - RNA, 23 nt, Human
augagaaaucuaaaaaacgaaaa

SEQ ID NO: 1420968 - RNA, 18 nt, Human
augagaccacuguuauca

SEQ ID NO: 1420969 - RNA, 21 nt, Human
augagaauuugagugcucuga

SEQ ID NO: 1420970 - RNA, 23 nt, Human
augagaaucuacccccagaucca

SEQ ID NO: 1420971 - RNA, 11 nt, Human
augagaaucua

SEQ ID NO: 1420972 - RNA, 16 nt, Human
augagaaggaacuucc

SEQ ID NO: 1420973 - RNA, 19 nt, Human
augagagacacacugaaga

SEQ ID NO: 1420974 - RNA, 17 nt, Human
augagagacacacugaa

SEQ ID NO: 1420975 - RNA, 14 nt, Human
augagagacacacu

SEQ ID NO: 1420976 - RNA, 13 nt, Human
augagagacacac

SEQ ID NO: 1420977 - RNA, 12 nt, Human
augaauuuagug

SEQ ID NO: 1420978 - RNA, 19 nt, Human
uuguauauuguguuugugu

SEQ ID NO: 1420979 - RNA, 18 nt, Human
augaauuuuagcuuuugu

SEQ ID NO: 1420980 - RNA, 17 nt, Human
augaauuuuagcuuuug

SEQ ID NO: 1420981 - RNA, 16 nt, Human
augaauuuuagcuuuu

SEQ ID NO: 1420982 - RNA, 14 nt, Human
augaauuuuagcuu

SEQ ID NO: 1420983 - RNA, 14 nt, Human
augaauuuguaaug

SEQ ID NO: 1420984 - RNA, 19 nt, Human
augaauuuguaaugucuug

SEQ ID NO: 1420985 - RNA, 14 nt, Human
augacacaugcaag

SEQ ID NO: 1420986 - RNA, 22 nt, Human
augacacaugcaaggucauuuu

SEQ ID NO: 1420987 - RNA, 15 nt, Human
uuguauauuguguuu

SEQ ID NO: 1420988 - RNA, 13 nt, Human
uuguauauugugu

SEQ ID NO: 1420989 - RNA, 14 nt, Human
uuguauauuguaau

SEQ ID NO: 1420990 - RNA, 18 nt, Human
uuguauaguuaacacacu

SEQ ID NO: 1420991 - RNA, 19 nt, Human
uuguauaguuaacacacua

SEQ ID NO: 1420992 - RNA, 16 nt, Human
uuguauaguuaacaca

SEQ ID NO: 1420993 - RNA, 13 nt, Human
uuguauaguuaac

SEQ ID NO: 1420994 - RNA, 20 nt, Human
uuguauaccuuguaauuuga

SEQ ID NO: 1420995 - RNA, 17 nt, Human
uuguagugcuuugagag

SEQ ID NO: 1420996 - RNA, 23 nt, Human
uuguagugcuuugagagagaaag

SEQ ID NO: 1420997 - RNA, 19 nt, Human
uuguauaaaauaauuuuua

SEQ ID NO: 1420998 - RNA, 23 nt, Human
uuguaguguuggagaagaacuga

SEQ ID NO: 1420999 - RNA, 17 nt, Human
uuguauaaaauaauuuu

SEQ ID NO: 1421000 - RNA, 16 nt, Human
uuguauaaaauaauuu

SEQ ID NO: 1421001 - RNA, 14 nt, Human
uuguaggguuucua

SEQ ID NO: 1421002 - RNA, 13 nt, Human
uuguaggguuucu

SEQ ID NO: 1421003 - RNA, 21 nt, Human
uuguaguagcguuuuuuaaau

SEQ ID NO: 1421004 - RNA, 19 nt, Human
uuguagugccacuguuguu

SEQ ID NO: 1421005 - RNA, 22 nt, Human
uuguaguagcguuuuuuaaaug

SEQ ID NO: 1421006 - RNA, 23 nt, Human
uuguaguagcguuuuuuaaaugu

SEQ ID NO: 1421007 - RNA, 21 nt, Human
uuguaggggaggggcuccuuu

SEQ ID NO: 1421008 - RNA, 23 nt, Human
uuguacaaaauaaacaaauaaca

SEQ ID NO: 1421009 - RNA, 22 nt, Human
uugguucuugaggggaccagga

SEQ ID NO: 1421010 - RNA, 20 nt, Human
uugguugaaaauaaaaagau

SEQ ID NO: 1421011 - RNA, 23 nt, Human
uugguucuugaggggaccaggag

SEQ ID NO: 1421012 - RNA, 15 nt, Human
uugguucuugagggg

SEQ ID NO: 1421013 - RNA, 18 nt, Human
uugguucuagcgcaguuu

SEQ ID NO: 1421014 - RNA, 20 nt, Human
uugguucuagcgcaguuuuu

SEQ ID NO: 1421015 - RNA, 22 nt, Human
uugguuuaaagaaaguguauuu

SEQ ID NO: 1421016 - RNA, 18 nt, Human
uugguuuaaagaaagugu

SEQ ID NO: 1421017 - RNA, 17 nt, Human
uugguuuaaagaaagug

SEQ ID NO: 1421018 - RNA, 18 nt, Human
uugguugguaggguggga

SEQ ID NO: 1421019 - RNA, 23 nt, Human
uugguuuaaagaaaguguauuug

SEQ ID NO: 1421020 - RNA, 21 nt, Human
aucuuuacaaaacuacaugag

SEQ ID NO: 1421021 - RNA, 17 nt, Human
aucuuuacaaaacuaca

SEQ ID NO: 1421022 - RNA, 22 nt, Human
aucuuuaauuuuacauuuccua

SEQ ID NO: 1421023 - RNA, 16 nt, Human
aucuuuaauuuuacau

SEQ ID NO: 1421024 - RNA, 21 nt, Human
aucuuuaauuuuacauuuccu

SEQ ID NO: 1421025 - RNA, 16 nt, Human
aucuuugccacccuca

SEQ ID NO: 1421026 - RNA, 15 nt, Human
aucuuugccacccuc

SEQ ID NO: 1421027 - RNA, 15 nt, Human
aucuuuauaaaugua

SEQ ID NO: 1421028 - RNA, 14 nt, Human
aucuuugccacccu

SEQ ID NO: 1421029 - RNA, 19 nt, Human
aucuuuuuaccuuucauac

SEQ ID NO: 1421030 - RNA, 18 nt, Human
aucuuuuuaccuuucaua

SEQ ID NO: 1421031 - RNA, 12 nt, Human
augaaagauuca

SEQ ID NO: 1421032 - RNA, 13 nt, Human
aucuuuuuauuca

SEQ ID NO: 1421033 - RNA, 22 nt, Human
aucuuuuguauuaagaaaggaa

SEQ ID NO: 1421034 - RNA, 23 nt, Human
uuggcugagauaugaacauauug

SEQ ID NO: 1421035 - RNA, 22 nt, Human
uuggcugaaauucuccuggagg

SEQ ID NO: 1421036 - RNA, 21 nt, Human
uuggcugaaauucuccuggag

SEQ ID NO: 1421037 - RNA, 20 nt, Human
uuggcugaaauucuccugga

SEQ ID NO: 1421038 - RNA, 19 nt, Human
uuggcugaaauucuccugg

SEQ ID NO: 1421039 - RNA, 19 nt, Human
uuggcucugccaguccugu

SEQ ID NO: 1421040 - RNA, 23 nt, Human
uuggcucugccaguccuguccuu

SEQ ID NO: 1421041 - RNA, 16 nt, Human
uuggcucugccagucc

SEQ ID NO: 1421042 - RNA, 14 nt, Human
uuggcucugccagu

SEQ ID NO: 1421043 - RNA, 13 nt, Human
uuggcucugccag

SEQ ID NO: 1421044 - RNA, 12 nt, Human
uuggcucugcca

SEQ ID NO: 1421045 - RNA, 22 nt, Human
uuggcucgaaucucugugccuu

SEQ ID NO: 1421046 - RNA, 23 nt, Human
uuggcguaggcuacagagaagcc

SEQ ID NO: 1421047 - RNA, 22 nt, Human
uuggcguaggcuacagagaagc

SEQ ID NO: 1421048 - RNA, 21 nt, Human
uuggcguaggcuacagagaag

SEQ ID NO: 1421049 - RNA, 20 nt, Human
uuggcguaggcuacagagaa

SEQ ID NO: 1421050 - RNA, 19 nt, Human
uuggcguaggcuacagaga

SEQ ID NO: 1421051 - RNA, 18 nt, Human
uuggcguaggcuacagag

SEQ ID NO: 1421052 - RNA, 17 nt, Human
uuggcguaggcuacaga

SEQ ID NO: 1421053 - RNA, 22 nt, Human
uuggcggggaggaggaaauccc

SEQ ID NO: 1421054 - RNA, 18 nt, Human
uuggcuagagguucaaag

SEQ ID NO: 1421055 - RNA, 19 nt, Human
uuggauauuuuuuacuuua

SEQ ID NO: 1421056 - RNA, 19 nt, Human
uuggauauguaaaacauuu

SEQ ID NO: 1421057 - RNA, 19 nt, Human
uuggauacuuggauuuagu

SEQ ID NO: 1421058 - RNA, 18 nt, Human
uuggauccuguguggaga

SEQ ID NO: 1421059 - RNA, 13 nt, Human
uuggauccugugu

SEQ ID NO: 1421060 - RNA, 20 nt, Human
uuggauauguaaaacauuua

SEQ ID NO: 1421061 - RNA, 23 nt, Human
uuggaugcagugcucgcuguugc

SEQ ID NO: 1421062 - RNA, 24 nt, Human
uuggaugcagugcucgcuguugcu

SEQ ID NO: 1421063 - RNA, 22 nt, Human
uuggaguguuccccuuccacug

SEQ ID NO: 1421064 - RNA, 19 nt, Human
uuggaguguuccccuucca

SEQ ID NO: 1421065 - RNA, 23 nt, Human
aucuugcuucccuaaucuauggu

SEQ ID NO: 1421066 - RNA, 23 nt, Human
aucuugcuuucuuuguuuggcug

SEQ ID NO: 1421067 - RNA, 15 nt, Human
uuggagugcaguggc

SEQ ID NO: 1421068 - RNA, 18 nt, Human
uugguucuaaggaccuga

SEQ ID NO: 1421069 - RNA, 14 nt, Human
uugguucuaaggac

SEQ ID NO: 1421070 - RNA, 13 nt, Human
uugguucuaagga

SEQ ID NO: 1421071 - RNA, 15 nt, Human
uugguuccuucccaa

SEQ ID NO: 1421072 - RNA, 17 nt, Human
uuggggguucaggcccg

SEQ ID NO: 1421073 - RNA, 20 nt, Human
uuggggguccuccuccaggg

SEQ ID NO: 1421074 - RNA, 13 nt, Human
uuggggggguggc

SEQ ID NO: 1421075 - RNA, 20 nt, Human
uuggggggguggccgcugag

SEQ ID NO: 1421076 - RNA, 23 nt, Human
uuggggggaguaaagaauuauuu

SEQ ID NO: 1421077 - RNA, 19 nt, Human
uuggggggaaggggacccu

SEQ ID NO: 1421078 - RNA, 22 nt, Human
uuggggcaggaguagcugagcu

SEQ ID NO: 1421079 - RNA, 23 nt, Human
uuggggcaggaguagcugagcuc

SEQ ID NO: 1421080 - RNA, 20 nt, Human
uuggggcaggaguagcugag

SEQ ID NO: 1421081 - RNA, 19 nt, Human
uugggccugcuccagaccu

SEQ ID NO: 1421082 - RNA, 14 nt, Human
augaauuaaauaaa

SEQ ID NO: 1421083 - RNA, 14 nt, Human
augaauuaaagugg

SEQ ID NO: 1421084 - RNA, 22 nt, Human
augaauguuuacacucuuugua

SEQ ID NO: 1421085 - RNA, 11 nt, Human
augaauguuua

SEQ ID NO: 1421086 - RNA, 17 nt, Human
augaaugugaagccuuc

SEQ ID NO: 1421087 - RNA, 18 nt, Human
augaaugugaagccuucc

SEQ ID NO: 1421088 - RNA, 16 nt, Human
augaaugugaagccuu

SEQ ID NO: 1421089 - RNA, 15 nt, Human
augaaugugaagccu

SEQ ID NO: 1421090 - RNA, 19 nt, Human
uugggcccacaccuccuuc

SEQ ID NO: 1421091 - RNA, 18 nt, Human
uugggccagcuuuucaaa

SEQ ID NO: 1421092 - RNA, 17 nt, Human
uugggccagacaugcca

SEQ ID NO: 1421093 - RNA, 16 nt, Human
augaauuaaauaaacc

SEQ ID NO: 1421094 - RNA, 15 nt, Human
augaauuaaguuuuu

SEQ ID NO: 1421095 - RNA, 20 nt, Human
uugggcccacaccuccuucc

SEQ ID NO: 1421096 - RNA, 22 nt, Human
uugggcccacaccuccuucccu

SEQ ID NO: 1421097 - RNA, 20 nt, Human
uugggccugcuccagaccug

SEQ ID NO: 1421098 - RNA, 17 nt, Human
uugggccugcuccagac

SEQ ID NO: 1421099 - RNA, 16 nt, Human
uugggccugcuccaga

SEQ ID NO: 1421100 - RNA, 15 nt, Human
augaagauacugaaa

SEQ ID NO: 1421101 - RNA, 20 nt, Human
augaacuuagauuuuacaug

SEQ ID NO: 1421102 - RNA, 19 nt, Human
augaacuuagauuuuacau

SEQ ID NO: 1421103 - RNA, 12 nt, Human
augaacuuagau

SEQ ID NO: 1421104 - RNA, 16 nt, Human
augaacucuuaaucaa

SEQ ID NO: 1421105 - RNA, 14 nt, Human
augaacucaacuuu

SEQ ID NO: 1421106 - RNA, 20 nt, Human
augaaauauuauguuaaaac

SEQ ID NO: 1421107 - RNA, 18 nt, Human
augaaauauuauguuaaa

SEQ ID NO: 1421108 - RNA, 17 nt, Human
augaaauauuauguuaa

SEQ ID NO: 1421109 - RNA, 16 nt, Human
augaaugagaaucuac

SEQ ID NO: 1421110 - RNA, 14 nt, Human
augaaugugaagcc

SEQ ID NO: 1421111 - RNA, 22 nt, Human
augaagaucuaaauaaaaugcu

SEQ ID NO: 1421112 - RNA, 22 nt, Human
augaacuuagauuuuacaugaa

SEQ ID NO: 1421113 - RNA, 17 nt, Human
augaagauacugaaaua

SEQ ID NO: 1421114 - RNA, 16 nt, Human
augaagauacugaaau

SEQ ID NO: 1421115 - RNA, 20 nt, Human
uugauguaaggaugggcaug

SEQ ID NO: 1421116 - RNA, 23 nt, Human
uugauguaaagauguucuggaua

SEQ ID NO: 1421117 - RNA, 14 nt, Human
uugauguaaagaug

SEQ ID NO: 1421118 - RNA, 21 nt, Human
uugauguaaaaucuugucaug

SEQ ID NO: 1421119 - RNA, 18 nt, Human
uugauguaaaaucuuguc

SEQ ID NO: 1421120 - RNA, 16 nt, Human
uugauguaaaaucuug

SEQ ID NO: 1421121 - RNA, 15 nt, Human
uugauguaaaaucuu

SEQ ID NO: 1421122 - RNA, 13 nt, Human
uugauguaaaauc

SEQ ID NO: 1421123 - RNA, 19 nt, Human
uugauggugguauguuuuc

SEQ ID NO: 1421124 - RNA, 17 nt, Human
uugaugggauucuggac

SEQ ID NO: 1421125 - RNA, 18 nt, Human
uugauggugguauguuuu

SEQ ID NO: 1421126 - RNA, 14 nt, Human
uugaugccaaaaaa

SEQ ID NO: 1421127 - RNA, 14 nt, Human
uugauggagauauu

SEQ ID NO: 1421128 - RNA, 22 nt, Human
uugaugccaaaaaaaaauacau

SEQ ID NO: 1421129 - RNA, 15 nt, Human
uugaugggauuuggu

SEQ ID NO: 1421130 - RNA, 12 nt, Human
uugaugccuggc

SEQ ID NO: 1421131 - RNA, 12 nt, Human
aucucuucaguc

SEQ ID NO: 1421132 - RNA, 13 nt, Human
aucucuucagucu

SEQ ID NO: 1421133 - RNA, 21 nt, Human
aucucuucagucucuauacca

SEQ ID NO: 1421134 - RNA, 14 nt, Human
uugcacacuuuggu

SEQ ID NO: 1421135 - RNA, 20 nt, Human
uugcacacuuugguaccaga

SEQ ID NO: 1421136 - RNA, 19 nt, Human
uugcacagccaaauuuaaa

SEQ ID NO: 1421137 - RNA, 13 nt, Human
uugcacaugucuu

SEQ ID NO: 1421138 - RNA, 15 nt, Human
uugcacaugucuuaa

SEQ ID NO: 1421139 - RNA, 16 nt, Human
uugcacaugucuuaau

SEQ ID NO: 1421140 - RNA, 21 nt, Human
uugcacagucacugcucuuca

SEQ ID NO: 1421141 - RNA, 16 nt, Human
uugcacagcuaugaag

SEQ ID NO: 1421142 - RNA, 18 nt, Human
uugcacagccaaauuuaa

SEQ ID NO: 1421143 - RNA, 19 nt, Human
uugcacaaaccaauuaaac

SEQ ID NO: 1421144 - RNA, 15 nt, Human
uugcauguggaucaa

SEQ ID NO: 1421145 - RNA, 21 nt, Human
uugcauguaguaacacuaaua

SEQ ID NO: 1421146 - RNA, 16 nt, Human
uugcacauguuuccuc

SEQ ID NO: 1421147 - RNA, 17 nt, Human
uugcacaugucuuaaug

SEQ ID NO: 1421148 - RNA, 21 nt, Human
uugcacaugucuuaaugaagu

SEQ ID NO: 1421149 - RNA, 22 nt, Human
uugcacaugucuuaaugaaguu

SEQ ID NO: 1421150 - RNA, 20 nt, Human
uugcaucucccagauaaugu

SEQ ID NO: 1421151 - RNA, 23 nt, Human
uugcaucccaaaccacgccucuu

SEQ ID NO: 1421152 - RNA, 14 nt, Human
uugcaucugaaaau

SEQ ID NO: 1421153 - RNA, 20 nt, Human
aucucagaaagugccugaca

SEQ ID NO: 1421154 - RNA, 19 nt, Human
aucucagaaagugccugac

SEQ ID NO: 1421155 - RNA, 18 nt, Human
aucucagaaagugccuga

SEQ ID NO: 1421156 - RNA, 20 nt, Human
aucucagaucaguguaccau

SEQ ID NO: 1421157 - RNA, 17 nt, Human
aucucagaaagugccug

SEQ ID NO: 1421158 - RNA, 16 nt, Human
aucucagaaagugccu

SEQ ID NO: 1421159 - RNA, 15 nt, Human
aucucagaaagugcc

SEQ ID NO: 1421160 - RNA, 12 nt, Human
aucucagaaagu

SEQ ID NO: 1421161 - RNA, 17 nt, Human
aucucaggccagagcca

SEQ ID NO: 1421162 - RNA, 14 nt, Human
aucucaggccagag

SEQ ID NO: 1421163 - RNA, 18 nt, Human
aucucaggccagagccaa

SEQ ID NO: 1421164 - RNA, 14 nt, Human
aucucagcucacug

SEQ ID NO: 1421165 - RNA, 11 nt, Human
aucucagcuca

SEQ ID NO: 1421166 - RNA, 13 nt, Human
aucucagcucacu

SEQ ID NO: 1421167 - RNA, 15 nt, Human
aucucagcucacuac

SEQ ID NO: 1421168 - RNA, 23 nt, Human
auccuaugcaugguuucagcacu

SEQ ID NO: 1421169 - RNA, 22 nt, Human
auccuaugcaugguuucagcac

SEQ ID NO: 1421170 - RNA, 21 nt, Human
auccuaugcaugguuucagca

SEQ ID NO: 1421171 - RNA, 17 nt, Human
auccuaugcaugguuuc

SEQ ID NO: 1421172 - RNA, 13 nt, Human
auccuaugcaugg

SEQ ID NO: 1421173 - RNA, 21 nt, Human
auccuaucucuccaaccagau

SEQ ID NO: 1421174 - RNA, 16 nt, Human
auccuaucucuccaac

SEQ ID NO: 1421175 - RNA, 13 nt, Human
aucucaauauuuc

SEQ ID NO: 1421176 - RNA, 14 nt, Human
aucucaauucuucc

SEQ ID NO: 1421177 - RNA, 16 nt, Human
aucucaauucuucccu

SEQ ID NO: 1421178 - RNA, 19 nt, Human
aucucccauuuuggaauuu

SEQ ID NO: 1421179 - RNA, 19 nt, Human
aucucccaccuagcagcac

SEQ ID NO: 1421180 - RNA, 18 nt, Human
aucucccaccuagcagca

SEQ ID NO: 1421181 - RNA, 22 nt, Human
aucuccauugugccuaagucca

SEQ ID NO: 1421182 - RNA, 18 nt, Human
aucucccauuuuggaauu

SEQ ID NO: 1421183 - RNA, 17 nt, Human
aucucccauuuuggaau

SEQ ID NO: 1421184 - RNA, 20 nt, Human
aucucccagauaaugugaaa

SEQ ID NO: 1421185 - RNA, 19 nt, Human
aucucccagauaaugugaa

SEQ ID NO: 1421186 - RNA, 20 nt, Human
aucucccaccuagcagcacc

SEQ ID NO: 1421187 - RNA, 16 nt, Human
aucuccccaucauugg

SEQ ID NO: 1421188 - RNA, 23 nt, Human
aucucauuuuuccguaaaaauga

SEQ ID NO: 1421189 - RNA, 16 nt, Human
aucuccagcggcccug

SEQ ID NO: 1421190 - RNA, 13 nt, Human
aucuccaaaauaa

SEQ ID NO: 1421191 - RNA, 21 nt, Human
aucucauuuuuccguaaaaau

SEQ ID NO: 1421192 - RNA, 19 nt, Human
aucucaucucagugaagaa

SEQ ID NO: 1421193 - RNA, 20 nt, Human
aucucaucucagugaagaau

SEQ ID NO: 1421194 - RNA, 23 nt, Human
aucucauuuccaagcaaguauua

SEQ ID NO: 1421195 - RNA, 21 nt, Human
aucucaguugauuuucuggau

SEQ ID NO: 1421196 - RNA, 19 nt, Human
aucucaguugauuuucugg

SEQ ID NO: 1421197 - RNA, 17 nt, Human
aucucagugaagaauac

SEQ ID NO: 1421198 - RNA, 15 nt, Human
aucucagugaagaau

SEQ ID NO: 1421199 - RNA, 14 nt, Human
aucucagugaagaa

SEQ ID NO: 1421200 - RNA, 20 nt, Human
aucucagugaagaauacuuc

SEQ ID NO: 1421201 - RNA, 21 nt, Human
aucucauuuccaagcaaguau

SEQ ID NO: 1421202 - RNA, 13 nt, Human
uugcauuaugcaa

SEQ ID NO: 1421203 - RNA, 14 nt, Human
uugcauuaugcaau

SEQ ID NO: 1421204 - RNA, 22 nt, Human
uugcauuaaauucacaaacuuu

SEQ ID NO: 1421205 - RNA, 21 nt, Human
uugcauuaaauucacaaacuu

SEQ ID NO: 1421206 - RNA, 20 nt, Human
uugcauuaaauucacaaacu

SEQ ID NO: 1421207 - RNA, 13 nt, Human
uugcauuaaauuc

SEQ ID NO: 1421208 - RNA, 15 nt, Human
uugcauuaaauuaca

SEQ ID NO: 1421209 - RNA, 13 nt, Human
uugcauuaaauua

SEQ ID NO: 1421210 - RNA, 14 nt, Human
uugccguuauuaaa

SEQ ID NO: 1421211 - RNA, 20 nt, Human
aucugcagggggugugucug

SEQ ID NO: 1421212 - RNA, 21 nt, Human
aucugcaauucaaaaguucca

SEQ ID NO: 1421213 - RNA, 21 nt, Human
aucugauuuguaacccacuga

SEQ ID NO: 1421214 - RNA, 17 nt, Human
aucugauugugauguga

SEQ ID NO: 1421215 - RNA, 22 nt, Human
aucugauaggguuugugacagg

SEQ ID NO: 1421216 - RNA, 12 nt, Human
aucugauagggu

SEQ ID NO: 1421217 - RNA, 14 nt, Human
aucugaguccugga

SEQ ID NO: 1421218 - RNA, 17 nt, Human
aucugaguccuggauga

SEQ ID NO: 1421219 - RNA, 19 nt, Human
aucugaucagaacaaaugu

SEQ ID NO: 1421220 - RNA, 18 nt, Human
aucugaucagaacaaaug

SEQ ID NO: 1421221 - RNA, 23 nt, Human
uugccucaaauaaaaagugcuuu

SEQ ID NO: 1421222 - RNA, 13 nt, Human
aucugaguccugg

SEQ ID NO: 1421223 - RNA, 16 nt, Human
aucugagucagagcca

SEQ ID NO: 1421224 - RNA, 15 nt, Human
aucugugugaaacuu

SEQ ID NO: 1421225 - RNA, 20 nt, Human
aucugugugaaacuuucauu

SEQ ID NO: 1421226 - RNA, 15 nt, Human
aucugugucuuguuu

SEQ ID NO: 1421227 - RNA, 13 nt, Human
aucuuagauucuc

SEQ ID NO: 1421228 - RNA, 16 nt, Human
aucuuacuauuucaca

SEQ ID NO: 1421229 - RNA, 15 nt, Human
aucuugcuucccuaa

SEQ ID NO: 1421230 - RNA, 14 nt, Human
aucuugcuucccua

SEQ ID NO: 1421231 - RNA, 17 nt, Human
aucuugacuacagucag

SEQ ID NO: 1421232 - RNA, 16 nt, Human
aucuugacucacugca

SEQ ID NO: 1421233 - RNA, 23 nt, Human
aucuuagauucucugugucuaag

SEQ ID NO: 1421234 - RNA, 22 nt, Human
aucuuagauucucugugucuaa

SEQ ID NO: 1421235 - RNA, 20 nt, Human
aucuuagauucucugugucu

SEQ ID NO: 1421236 - RNA, 18 nt, Human
aucuuagauucucugugu

SEQ ID NO: 1421237 - RNA, 15 nt, Human
aucuuagauucucug

SEQ ID NO: 1421238 - RNA, 23 nt, Human
aucugguagaagggaaagcccau

SEQ ID NO: 1421239 - RNA, 14 nt, Human
aucugcauucccag

SEQ ID NO: 1421240 - RNA, 16 nt, Human
aucuguaaaucuacac

SEQ ID NO: 1421241 - RNA, 15 nt, Human
aucuguaaaucuaca

SEQ ID NO: 1421242 - RNA, 22 nt, Human
aucuguaaacuguguauuccaa

SEQ ID NO: 1421243 - RNA, 17 nt, Human
aucuguaaacuguguau

SEQ ID NO: 1421244 - RNA, 14 nt, Human
aucuguaaacugug

SEQ ID NO: 1421245 - RNA, 13 nt, Human
aucuguaaacugu

SEQ ID NO: 1421246 - RNA, 19 nt, Human
aucugguagaagggaaagc

SEQ ID NO: 1421247 - RNA, 18 nt, Human
aucuguaaugguacugac

SEQ ID NO: 1421248 - RNA, 18 nt, Human
auuuuauguugcauagaa

SEQ ID NO: 1421249 - RNA, 21 nt, Human
auuuuauguugcauagaauaa

SEQ ID NO: 1421250 - RNA, 12 nt, Human
auuuuauuauga

SEQ ID NO: 1421251 - RNA, 13 nt, Human
auuuuauuaugca

SEQ ID NO: 1421252 - RNA, 15 nt, Human
auuuuauuaugaaga

SEQ ID NO: 1421253 - RNA, 14 nt, Human
auuuuauuaugaag

SEQ ID NO: 1421254 - RNA, 17 nt, Human
auuuuauuaugcaugaa

SEQ ID NO: 1421255 - RNA, 14 nt, Human
auuuuauuaugcau

SEQ ID NO: 1421256 - RNA, 15 nt, Human
auuuuauuaugcaug

SEQ ID NO: 1421257 - RNA, 22 nt, Human
auuuuauuuaccccuccccuau

SEQ ID NO: 1421258 - RNA, 23 nt, Human
auuuuauuaugaagaaggugaau

SEQ ID NO: 1421259 - RNA, 22 nt, Human
auuuuauuaugaagaaggugaa

SEQ ID NO: 1421260 - RNA, 16 nt, Human
auuuuauuaugaagaa

SEQ ID NO: 1421261 - RNA, 21 nt, Human
auuuuacacgcuuuugugaug

SEQ ID NO: 1421262 - RNA, 12 nt, Human
auuuuacaauuu

SEQ ID NO: 1421263 - RNA, 13 nt, Human
auuuuacauaaau

SEQ ID NO: 1421264 - RNA, 20 nt, Human
auuuuacuguacagacagaa

SEQ ID NO: 1421265 - RNA, 22 nt, Human
auuuuacuguacagacagaaaa

SEQ ID NO: 1421266 - RNA, 16 nt, Human
auuuuaauaauguuuc

SEQ ID NO: 1421267 - RNA, 15 nt, Human
auuuuaauaauguuu

SEQ ID NO: 1421268 - RNA, 14 nt, Human
auuuuaauaauguu

SEQ ID NO: 1421269 - RNA, 16 nt, Human
auuuguauaugguauu

SEQ ID NO: 1421270 - RNA, 16 nt, Human
auuuguaggguuucua

SEQ ID NO: 1421271 - RNA, 19 nt, Human
auuuguaguguuggagaag

SEQ ID NO: 1421272 - RNA, 15 nt, Human
auuuggggcuuccaa

SEQ ID NO: 1421273 - RNA, 15 nt, Human
auuuggaauacuuuu

SEQ ID NO: 1421274 - RNA, 14 nt, Human
auuuggaauacuuu

SEQ ID NO: 1421275 - RNA, 13 nt, Human
auuuggaauacuu

SEQ ID NO: 1421276 - RNA, 17 nt, Human
auuuggaaccuuguuuu

SEQ ID NO: 1421277 - RNA, 17 nt, Human
auuuggguucugccugc

SEQ ID NO: 1421278 - RNA, 17 nt, Human
auuuggugguuucagaa

SEQ ID NO: 1421279 - RNA, 14 nt, Human
auuugggugggagu

SEQ ID NO: 1421280 - RNA, 17 nt, Human
auuuggguccaggagga

SEQ ID NO: 1421281 - RNA, 16 nt, Human
auuuggguccaggagg

SEQ ID NO: 1421282 - RNA, 15 nt, Human
auuuggguccaggag

SEQ ID NO: 1421283 - RNA, 14 nt, Human
auuuggguccagga

SEQ ID NO: 1421284 - RNA, 23 nt, Human
auuugguaaggggaauugaggac

SEQ ID NO: 1421285 - RNA, 17 nt, Human
auuugguuuucacauug

SEQ ID NO: 1421286 - RNA, 15 nt, Human
auuugguuuucacau

SEQ ID NO: 1421287 - RNA, 22 nt, Human
auuugguuuucacauuggaaac

SEQ ID NO: 1421288 - RNA, 21 nt, Human
auuugguuuucacauuggaaa

SEQ ID NO: 1421289 - RNA, 18 nt, Human
auuuggugguuucagaaa

SEQ ID NO: 1421290 - RNA, 20 nt, Human
auuuggugguuucagaaaug

SEQ ID NO: 1421291 - RNA, 23 nt, Human
auuuguacugaaaaaugguaauu

SEQ ID NO: 1421292 - RNA, 19 nt, Human
auuuguaaaaugacaauca

SEQ ID NO: 1421293 - RNA, 22 nt, Human
auuuguaaaaugacaaucaugu

SEQ ID NO: 1421294 - RNA, 16 nt, Human
auuuguaaaaugacaa

SEQ ID NO: 1421295 - RNA, 15 nt, Human
auuuguaaaaugaca

SEQ ID NO: 1421296 - RNA, 22 nt, Human
auuuguacuauuuaacugacua

SEQ ID NO: 1421297 - RNA, 20 nt, Human
auuuguacuauuuaacugac

SEQ ID NO: 1421298 - RNA, 19 nt, Human
auuuguacuauuuaacuga

SEQ ID NO: 1421299 - RNA, 18 nt, Human
auuuguaguguuggagaa

SEQ ID NO: 1421300 - RNA, 15 nt, Human
auuucuaauuaugua

SEQ ID NO: 1421301 - RNA, 19 nt, Human
auuucuaauuauguagcuc

SEQ ID NO: 1421302 - RNA, 14 nt, Human
auuucuaauuaugu

SEQ ID NO: 1421303 - RNA, 18 nt, Human
auuucuaauguuggacac

SEQ ID NO: 1421304 - RNA, 22 nt, Human
auuugaaugauuuuucuuuaca

SEQ ID NO: 1421305 - RNA, 12 nt, Human
auuugaaugcau

SEQ ID NO: 1421306 - RNA, 14 nt, Human
auuugaaugcauuu

SEQ ID NO: 1421307 - RNA, 20 nt, Human
auuugaaugauuuuucuuua

SEQ ID NO: 1421308 - RNA, 17 nt, Human
auuugaaugauuuuucu

SEQ ID NO: 1421309 - RNA, 20 nt, Human
auuucuuuugccguuauuaa

SEQ ID NO: 1421310 - RNA, 15 nt, Human
auuugaaugcauuuu

SEQ ID NO: 1421311 - RNA, 16 nt, Human
auuugaaugcauuuug

SEQ ID NO: 1421312 - RNA, 18 nt, Human
auuugaaugcauuuuguu

SEQ ID NO: 1421313 - RNA, 22 nt, Human
auuugaggacaaccauuccaga

SEQ ID NO: 1421314 - RNA, 15 nt, Human
auuugaggucuguuc

SEQ ID NO: 1421315 - RNA, 23 nt, Human
auuugaggucuguucuuuccaaa

SEQ ID NO: 1421316 - RNA, 16 nt, Human
auuugagugcucugau

SEQ ID NO: 1421317 - RNA, 14 nt, Human
auuugagugcucug

SEQ ID NO: 1421318 - RNA, 16 nt, Human
auuuggaaccuuguuu

SEQ ID NO: 1421319 - RNA, 23 nt, Human
auuuauuaaagaaaaaaauguau

SEQ ID NO: 1421320 - RNA, 20 nt, Human
auuuauuaaagaaaaaaaug

SEQ ID NO: 1421321 - RNA, 18 nt, Human
auuuauuaaagaaaaaaa

SEQ ID NO: 1421322 - RNA, 17 nt, Human
auuuauuaaagaaaaaa

SEQ ID NO: 1421323 - RNA, 16 nt, Human
auuuauuaaagaaaaa

SEQ ID NO: 1421324 - RNA, 15 nt, Human
auuuauuaaagaaaa

SEQ ID NO: 1421325 - RNA, 14 nt, Human
auuuauuaaagaaa

SEQ ID NO: 1421326 - RNA, 13 nt, Human
auuuauuaaagaa

SEQ ID NO: 1421327 - RNA, 12 nt, Human
auuuauuaaaga

SEQ ID NO: 1421328 - RNA, 19 nt, Human
auuuaguaauagccugggu

SEQ ID NO: 1421329 - RNA, 14 nt, Human
auuuaguaaaccaa

SEQ ID NO: 1421330 - RNA, 23 nt, Human
auuuagguuuuuguuuguuuccu

SEQ ID NO: 1421331 - RNA, 23 nt, Human
auuuagguuucugaguuccugca

SEQ ID NO: 1421332 - RNA, 22 nt, Human
auuuauuaaagaaaaaaaugua

SEQ ID NO: 1421333 - RNA, 13 nt, Human
auuuauuauggca

SEQ ID NO: 1421334 - RNA, 22 nt, Human
auuuauuacuguaagaaaauau

SEQ ID NO: 1421335 - RNA, 22 nt, Human
auuuagcuaaacggauuccaaa

SEQ ID NO: 1421336 - RNA, 21 nt, Human
auuuagcuaaacggauuccaa

SEQ ID NO: 1421337 - RNA, 22 nt, Human
auuuagccuguccugucaucau

SEQ ID NO: 1421338 - RNA, 16 nt, Human
auuuagccuguccugu

SEQ ID NO: 1421339 - RNA, 15 nt, Human
auuuagccuguccug

SEQ ID NO: 1421340 - RNA, 14 nt, Human
auuuagccuguccu

SEQ ID NO: 1421341 - RNA, 20 nt, Human
auuuagcauuguagugcuuu

SEQ ID NO: 1421342 - RNA, 22 nt, Human
auuuagcauuguagugcuuuga

SEQ ID NO: 1421343 - RNA, 19 nt, Human
auuuagcauuguagugcuu

SEQ ID NO: 1421344 - RNA, 13 nt, Human
auuuagcauugua

SEQ ID NO: 1421345 - RNA, 17 nt, Human
auuuacgcuuugauuca

SEQ ID NO: 1421346 - RNA, 15 nt, Human
auuuacgcuuugauu

SEQ ID NO: 1421347 - RNA, 15 nt, Human
auuuaccucagccug

SEQ ID NO: 1421348 - RNA, 16 nt, Human
auuuaccucagccugg

SEQ ID NO: 1421349 - RNA, 15 nt, Human
auuuagcauguuguu

SEQ ID NO: 1421350 - RNA, 19 nt, Human
auuuacgcuuugauucaua

SEQ ID NO: 1421351 - RNA, 21 nt, Human
auuuagguuucugaguuccug

SEQ ID NO: 1421352 - RNA, 17 nt, Human
auuuagguuucugaguu

SEQ ID NO: 1421353 - RNA, 14 nt, Human
auuuagguuucuga

SEQ ID NO: 1421354 - RNA, 17 nt, Human
auuuaggagaagccagg

SEQ ID NO: 1421355 - RNA, 14 nt, Human
auuuaggagaagcc

SEQ ID NO: 1421356 - RNA, 23 nt, Human
auuuagcuaaacggauuccaaag

SEQ ID NO: 1421357 - RNA, 16 nt, Human
auuuaggaaguugacu

SEQ ID NO: 1421358 - RNA, 23 nt, Human
auuuaggaaguugacuuauagua

SEQ ID NO: 1421359 - RNA, 14 nt, Human
auuuccuugaaugu

SEQ ID NO: 1421360 - RNA, 21 nt, Human
auuucuaaaucuccaaaauaa

SEQ ID NO: 1421361 - RNA, 12 nt, Human
auuucuaaaucu

SEQ ID NO: 1421362 - RNA, 13 nt, Human
auuucuaaaucuc

SEQ ID NO: 1421363 - RNA, 22 nt, Human
auuuccugggagcuuuuguaga

SEQ ID NO: 1421364 - RNA, 23 nt, Human
auuuccugggagcuuuuguagaa

SEQ ID NO: 1421365 - RNA, 16 nt, Human
auuuauuauggcacau

SEQ ID NO: 1421366 - RNA, 23 nt, Human
auuucuuuugccguuauuaaaaa

SEQ ID NO: 1421367 - RNA, 20 nt, Human
auugcgagagauguguguug

SEQ ID NO: 1421368 - RNA, 21 nt, Human
auugcguuugaccuuuuaugu

SEQ ID NO: 1421369 - RNA, 20 nt, Human
auugcguuugaccuuuuaug

SEQ ID NO: 1421370 - RNA, 21 nt, Human
auugcgagagauguguguuga

SEQ ID NO: 1421371 - RNA, 14 nt, Human
auuggcuuuauccu

SEQ ID NO: 1421372 - RNA, 17 nt, Human
auuggcuuuauccucuu

SEQ ID NO: 1421373 - RNA, 21 nt, Human
auuggcuuuauccucuuuaga

SEQ ID NO: 1421374 - RNA, 15 nt, Human
auuguauguggucau

SEQ ID NO: 1421375 - RNA, 19 nt, Human
auugcgagagauguguguu

SEQ ID NO: 1421376 - RNA, 17 nt, Human
auuguauauuguaauuu

SEQ ID NO: 1421377 - RNA, 15 nt, Human
auuguauauuguaau

SEQ ID NO: 1421378 - RNA, 17 nt, Human
auuguauauuguguuug

SEQ ID NO: 1421379 - RNA, 15 nt, Human
auuguauauuacaau

SEQ ID NO: 1421380 - RNA, 13 nt, Human
auuguauauugua

SEQ ID NO: 1421381 - RNA, 15 nt, Human
auuguauauucacuu

SEQ ID NO: 1421382 - RNA, 13 nt, Human
auuguauauucac

SEQ ID NO: 1421383 - RNA, 14 nt, Human
auuguauauucacu

SEQ ID NO: 1421384 - RNA, 17 nt, Human
auuguauauuacaauga

SEQ ID NO: 1421385 - RNA, 18 nt, Human
auuguauauuacaaugau

SEQ ID NO: 1421386 - RNA, 19 nt, Human
auuguauauuacaaugauc

SEQ ID NO: 1421387 - RNA, 20 nt, Human
auuguauauuacaaugauca

SEQ ID NO: 1421388 - RNA, 16 nt, Human
auugucuuaauauugu

SEQ ID NO: 1421389 - RNA, 15 nt, Human
auugugaaauuauuc

SEQ ID NO: 1421390 - RNA, 14 nt, Human
auuguauuacaaau

SEQ ID NO: 1421391 - RNA, 18 nt, Human
auugucugaacuugcauu

SEQ ID NO: 1421392 - RNA, 16 nt, Human
auugucugaacuugca

SEQ ID NO: 1421393 - RNA, 23 nt, Human
auugucugaaaagugaagacaga

SEQ ID NO: 1421394 - RNA, 15 nt, Human
auuguauuacaaauc

SEQ ID NO: 1421395 - RNA, 23 nt, Human
auuuaaaacagacacuggcaugg

SEQ ID NO: 1421396 - RNA, 18 nt, Human
auuuaaaacagacacugg

SEQ ID NO: 1421397 - RNA, 17 nt, Human
auuuaaaacagacacug

SEQ ID NO: 1421398 - RNA, 16 nt, Human
auuuaaaacagacacu

SEQ ID NO: 1421399 - RNA, 15 nt, Human
auuuaaaacagacac

SEQ ID NO: 1421400 - RNA, 22 nt, Human
auuguuucaauugcaucuccca

SEQ ID NO: 1421401 - RNA, 15 nt, Human
auugugcuucuuucu

SEQ ID NO: 1421402 - RNA, 22 nt, Human
auugugccaugucaaacaaaua

SEQ ID NO: 1421403 - RNA, 21 nt, Human
auugugccaugucaaacaaau

SEQ ID NO: 1421404 - RNA, 18 nt, Human
auugugccaugucaaaca

SEQ ID NO: 1421405 - RNA, 13 nt, Human
auuuaaaagauac

SEQ ID NO: 1421406 - RNA, 15 nt, Human
auuuaaagccuccuc

SEQ ID NO: 1421407 - RNA, 20 nt, Human
auuuaaagcagguucuuguu

SEQ ID NO: 1421408 - RNA, 19 nt, Human
auuuaaagcagguucuugu

SEQ ID NO: 1421409 - RNA, 16 nt, Human
auuuaaagcagguucu

SEQ ID NO: 1421410 - RNA, 15 nt, Human
auuuaaagcagguuc

SEQ ID NO: 1421411 - RNA, 12 nt, Human
auuuaaagcagg

SEQ ID NO: 1421412 - RNA, 11 nt, Human
auuuaaagcag

SEQ ID NO: 1421413 - RNA, 11 nt, Human
auuuaaaacuu

SEQ ID NO: 1421414 - RNA, 13 nt, Human
auuuaaaacuguu

SEQ ID NO: 1421415 - RNA, 21 nt, Human
auuuaaaacauuaaaauauaa

SEQ ID NO: 1421416 - RNA, 20 nt, Human
auuuaaaacauuaaaauaua

SEQ ID NO: 1421417 - RNA, 19 nt, Human
auuuaaaacauuaaaauau

SEQ ID NO: 1421418 - RNA, 13 nt, Human
auuuaaaacauua

SEQ ID NO: 1421419 - RNA, 14 nt, Human
auuuaaaguuguuu

SEQ ID NO: 1421420 - RNA, 22 nt, Human
auuuaaaguuguuugugccuuu

SEQ ID NO: 1421421 - RNA, 16 nt, Human
auuuaacagaaaugua

SEQ ID NO: 1421422 - RNA, 22 nt, Human
auuuaacagaaauuguauauug

SEQ ID NO: 1421423 - RNA, 20 nt, Human
auuuaacagaaauuguauau

SEQ ID NO: 1421424 - RNA, 18 nt, Human
auuuaacagaaauuguau

SEQ ID NO: 1421425 - RNA, 17 nt, Human
auuuaacagaaauugua

SEQ ID NO: 1421426 - RNA, 16 nt, Human
auuuaacagaaauugu

SEQ ID NO: 1421427 - RNA, 14 nt, Human
auuuaacagaaauu

SEQ ID NO: 1421428 - RNA, 20 nt, Human
auuuaacagaaauguacagc

SEQ ID NO: 1421429 - RNA, 17 nt, Human
auuuaacagaaauguac

SEQ ID NO: 1421430 - RNA, 19 nt, Human
auuuaacagaaauguacag

SEQ ID NO: 1421431 - RNA, 14 nt, Human
auuuaccucagccu

SEQ ID NO: 1421432 - RNA, 13 nt, Human
auuuaccucagcc

SEQ ID NO: 1421433 - RNA, 12 nt, Human
auuuaccucagc

SEQ ID NO: 1421434 - RNA, 11 nt, Human
auuuaccucag

SEQ ID NO: 1421435 - RNA, 18 nt, Human
auuuaccuaagauuacaa

SEQ ID NO: 1421436 - RNA, 17 nt, Human
auuuaccuaagauuaca

SEQ ID NO: 1421437 - RNA, 15 nt, Human
auuuaccuaagauua

SEQ ID NO: 1421438 - RNA, 14 nt, Human
auuuaccuaagauu

SEQ ID NO: 1421439 - RNA, 19 nt, Human
auuuacccuucuuuucuga

SEQ ID NO: 1421440 - RNA, 22 nt, Human
auuuacaacugggggaggguga

SEQ ID NO: 1421441 - RNA, 14 nt, Human
auuuacaaacugaa

SEQ ID NO: 1421442 - RNA, 15 nt, Human
auuuacaaacugaag

SEQ ID NO: 1421443 - RNA, 23 nt, Human
auuuacaaaaauauaaaauauga

SEQ ID NO: 1421444 - RNA, 20 nt, Human
auuuacaaaaauauaaaaua

SEQ ID NO: 1421445 - RNA, 19 nt, Human
auuuacaaaaauauaaaau

SEQ ID NO: 1421446 - RNA, 16 nt, Human
auuuacaaaugggaaa

SEQ ID NO: 1421447 - RNA, 13 nt, Human
auuuaacugacua

SEQ ID NO: 1421448 - RNA, 23 nt, Human
auuuaaccccccuguacacaacu

SEQ ID NO: 1421449 - RNA, 13 nt, Human
auuuaacugccuu

SEQ ID NO: 1421450 - RNA, 16 nt, Human
auuuaaccccccugua

SEQ ID NO: 1421451 - RNA, 13 nt, Human
auuuaacucucuu

SEQ ID NO: 1421452 - RNA, 18 nt, Human
auuuaaccucuaaauucu

SEQ ID NO: 1421453 - RNA, 21 nt, Human
auuuaaccccccuguacacaa

SEQ ID NO: 1421454 - RNA, 20 nt, Human
auuuaaccccccuguacaca

SEQ ID NO: 1421455 - RNA, 19 nt, Human
auuuaaccccccuguacac

SEQ ID NO: 1421456 - RNA, 18 nt, Human
auuuaaccccccuguaca

SEQ ID NO: 1421457 - RNA, 16 nt, Human
auuuaaccucuaaauu

SEQ ID NO: 1421458 - RNA, 22 nt, Human
auucucacagcuccaagaauuu

SEQ ID NO: 1421459 - RNA, 21 nt, Human
auucucacagcuccaagaauu

SEQ ID NO: 1421460 - RNA, 23 nt, Human
auucuagaucagaugcuccaaga

SEQ ID NO: 1421461 - RNA, 22 nt, Human
auucuagaucagaugcuccaag

SEQ ID NO: 1421462 - RNA, 19 nt, Human
auucucacagcuccaagaa

SEQ ID NO: 1421463 - RNA, 15 nt, Human
auugccucacuucag

SEQ ID NO: 1421464 - RNA, 18 nt, Human
auugccauauugcacaug

SEQ ID NO: 1421465 - RNA, 19 nt, Human
auugccauauugcacaugu

SEQ ID NO: 1421466 - RNA, 22 nt, Human
auugccauauugcacaugucuu

SEQ ID NO: 1421467 - RNA, 20 nt, Human
auugccaaaaagugaaauaa

SEQ ID NO: 1421468 - RNA, 19 nt, Human
auugcaguuuaucauucaa

SEQ ID NO: 1421469 - RNA, 18 nt, Human
auugcaguuuaucauuca

SEQ ID NO: 1421470 - RNA, 17 nt, Human
auugcaguuuaucauuc

SEQ ID NO: 1421471 - RNA, 14 nt, Human
auugcaguuuauca

SEQ ID NO: 1421472 - RNA, 23 nt, Human
auugcaguuuaucauucaagugu

SEQ ID NO: 1421473 - RNA, 22 nt, Human
auugccaccucuaacagcacca

SEQ ID NO: 1421474 - RNA, 21 nt, Human
auugccaccucuaacagcacc

SEQ ID NO: 1421475 - RNA, 12 nt, Human
auugccaccucu

SEQ ID NO: 1421476 - RNA, 14 nt, Human
auugccaagggcuu

SEQ ID NO: 1421477 - RNA, 12 nt, Human
auugccauauug

SEQ ID NO: 1421478 - RNA, 15 nt, Human
auugccauauugcac

SEQ ID NO: 1421479 - RNA, 16 nt, Human
auugccauauugcaca

SEQ ID NO: 1421480 - RNA, 17 nt, Human
auugccauauugcacau

SEQ ID NO: 1421481 - RNA, 17 nt, Human
auugcagaaaauucugu

SEQ ID NO: 1421482 - RNA, 18 nt, Human
auugcagaaaauucugug

SEQ ID NO: 1421483 - RNA, 21 nt, Human
auugcacaugucuuaaugaag

SEQ ID NO: 1421484 - RNA, 16 nt, Human
auugcacaugucuuaa

SEQ ID NO: 1421485 - RNA, 18 nt, Human
auugcacaugucuuaaug

SEQ ID NO: 1421486 - RNA, 20 nt, Human
auugcacaugucuuaaugaa

SEQ ID NO: 1421487 - RNA, 17 nt, Human
auugcaggauggugucu

SEQ ID NO: 1421488 - RNA, 14 nt, Human
auugcaggauggug

SEQ ID NO: 1421489 - RNA, 17 nt, Human
auugcaauaucugaagc

SEQ ID NO: 1421490 - RNA, 16 nt, Human
auugcaauaucugaag

SEQ ID NO: 1421491 - RNA, 14 nt, Human
auugcaauaucuga

SEQ ID NO: 1421492 - RNA, 20 nt, Human
auugaccgcgacuaauuuca

SEQ ID NO: 1421493 - RNA, 17 nt, Human
auugaccgcgacuaauu

SEQ ID NO: 1421494 - RNA, 23 nt, Human
auugaccgcgacuaauuucaaaa

SEQ ID NO: 1421495 - RNA, 19 nt, Human
auugcaaaucuugaaauua

SEQ ID NO: 1421496 - RNA, 17 nt, Human
auugcaaaucuugaaau

SEQ ID NO: 1421497 - RNA, 16 nt, Human
auugcaaaucuugaaa

SEQ ID NO: 1421498 - RNA, 12 nt, Human
auugcaaaucuu

SEQ ID NO: 1421499 - RNA, 22 nt, Human
auugaccuauuuccagaaauac

SEQ ID NO: 1421500 - RNA, 14 nt, Human
auucaguuucauaa

SEQ ID NO: 1421501 - RNA, 13 nt, Human
auucaguuucaua

SEQ ID NO: 1421502 - RNA, 19 nt, Human
auucaggacugcugguuug

SEQ ID NO: 1421503 - RNA, 18 nt, Human
auucaaaauaggguauau

SEQ ID NO: 1421504 - RNA, 21 nt, Human
auucaaaaguuccaagagucu

SEQ ID NO: 1421505 - RNA, 20 nt, Human
auucaaaauaggguauauuu

SEQ ID NO: 1421506 - RNA, 12 nt, Human
auuauuuucauc

SEQ ID NO: 1421507 - RNA, 23 nt, Human
auuauuuucauccuugucuuauu

SEQ ID NO: 1421508 - RNA, 14 nt, Human
auucagcucaugga

SEQ ID NO: 1421509 - RNA, 12 nt, Human
auuccgucacca

SEQ ID NO: 1421510 - RNA, 19 nt, Human
auuccggauccuaagcauc

SEQ ID NO: 1421511 - RNA, 16 nt, Human
auuccggauccuaagc

SEQ ID NO: 1421512 - RNA, 15 nt, Human
auuccggauccuaag

SEQ ID NO: 1421513 - RNA, 13 nt, Human
auuccggauccua

SEQ ID NO: 1421514 - RNA, 19 nt, Human
auucccuuccugccagccc

SEQ ID NO: 1421515 - RNA, 23 nt, Human
auucccuuccugccagccccugc

SEQ ID NO: 1421516 - RNA, 15 nt, Human
auucccuuccugcca

SEQ ID NO: 1421517 - RNA, 16 nt, Human
auucccuucaucugga

SEQ ID NO: 1421518 - RNA, 19 nt, Human
auucccuucaucuggaacc

SEQ ID NO: 1421519 - RNA, 15 nt, Human
auucaguuuucauuu

SEQ ID NO: 1421520 - RNA, 13 nt, Human
auucaguuuucau

SEQ ID NO: 1421521 - RNA, 17 nt, Human
auucaguuucauaaaag

SEQ ID NO: 1421522 - RNA, 14 nt, Human
auucaguuuucauu

SEQ ID NO: 1421523 - RNA, 16 nt, Human
auuccaccugcaauca

SEQ ID NO: 1421524 - RNA, 16 nt, Human
auuccaugugcccagu

SEQ ID NO: 1421525 - RNA, 14 nt, Human
auuccaugugccca

SEQ ID NO: 1421526 - RNA, 17 nt, Human
auuccaugacugcuugc

SEQ ID NO: 1421527 - RNA, 20 nt, Human
auuccaugacugcuugcccu

SEQ ID NO: 1421528 - RNA, 14 nt, Human
auuccaugacugcu

SEQ ID NO: 1421529 - RNA, 13 nt, Human
auuccaugacugc

SEQ ID NO: 1421530 - RNA, 23 nt, Human
auuccauugguccaagauuccgg

SEQ ID NO: 1421531 - RNA, 17 nt, Human
auuccauugguccaaga

SEQ ID NO: 1421532 - RNA, 16 nt, Human
auuccauugguccaag

SEQ ID NO: 1421533 - RNA, 15 nt, Human
auuccaugugcccag

SEQ ID NO: 1421534 - RNA, 21 nt, Human
auuccauucuggaagugacuu

SEQ ID NO: 1421535 - RNA, 20 nt, Human
auuacugccauucacuucau

SEQ ID NO: 1421536 - RNA, 13 nt, Human
auuacugccauuc

SEQ ID NO: 1421537 - RNA, 17 nt, Human
auuacugcaugcacuuc

SEQ ID NO: 1421538 - RNA, 14 nt, Human
auuacugcaugcac

SEQ ID NO: 1421539 - RNA, 15 nt, Human
auuacucugaaauug

SEQ ID NO: 1421540 - RNA, 19 nt, Human
auuaccuguggauauuugu

SEQ ID NO: 1421541 - RNA, 16 nt, Human
auuaccuguggauauu

SEQ ID NO: 1421542 - RNA, 15 nt, Human
auuaccuguggauau

SEQ ID NO: 1421543 - RNA, 14 nt, Human
auuaccuguggaua

SEQ ID NO: 1421544 - RNA, 14 nt, Human
auuaccaaccuguu

SEQ ID NO: 1421545 - RNA, 17 nt, Human
auuaccuccugagaaaa

SEQ ID NO: 1421546 - RNA, 13 nt, Human
auuaccuccugag

SEQ ID NO: 1421547 - RNA, 12 nt, Human
auuaccuccuga

SEQ ID NO: 1421548 - RNA, 16 nt, Human
auuaccaaccuguuac

SEQ ID NO: 1421549 - RNA, 15 nt, Human
auuacauuuucagug

SEQ ID NO: 1421550 - RNA, 19 nt, Human
auuaccacagacauacuaa

SEQ ID NO: 1421551 - RNA, 16 nt, Human
auuacauuuguauaaa

SEQ ID NO: 1421552 - RNA, 15 nt, Human
auuacauuuguauaa

SEQ ID NO: 1421553 - RNA, 19 nt, Human
auuaaugaaaauaagaauu

SEQ ID NO: 1421554 - RNA, 17 nt, Human
auuaaugaaaauaagaa

SEQ ID NO: 1421555 - RNA, 12 nt, Human
auuaaugcacuu

SEQ ID NO: 1421556 - RNA, 11 nt, Human
auuaaugcacu

SEQ ID NO: 1421557 - RNA, 13 nt, Human
auuacauuuguau

SEQ ID NO: 1421558 - RNA, 20 nt, Human
auuaagagagucuauuuacg

SEQ ID NO: 1421559 - RNA, 13 nt, Human
uuuuuuaaaaaag

SEQ ID NO: 1421560 - RNA, 12 nt, Human
uuuuuguugaca

SEQ ID NO: 1421561 - RNA, 15 nt, Human
uuuuuguuuguuugu

SEQ ID NO: 1421562 - RNA, 13 nt, Human
uuuuuguugacau

SEQ ID NO: 1421563 - RNA, 20 nt, Human
uuuuuguucugguccuuuuu

SEQ ID NO: 1421564 - RNA, 23 nt, Human
uuuuuuaaaaaagaaacauuugg

SEQ ID NO: 1421565 - RNA, 16 nt, Human
auuaaucugccucccu

SEQ ID NO: 1421566 - RNA, 22 nt, Human
auuaaucuuaguguaugauuac

SEQ ID NO: 1421567 - RNA, 21 nt, Human
auuaaucuuaguguaugauua

SEQ ID NO: 1421568 - RNA, 20 nt, Human
auuaaucuuaguguaugauu

SEQ ID NO: 1421569 - RNA, 19 nt, Human
auuaaucuuaguguaugau

SEQ ID NO: 1421570 - RNA, 17 nt, Human
auuaaucuuaguguaug

SEQ ID NO: 1421571 - RNA, 16 nt, Human
auuaaucuuaguguau

SEQ ID NO: 1421572 - RNA, 20 nt, Human
auuaauaucccuacauguau

SEQ ID NO: 1421573 - RNA, 19 nt, Human
auuaauaucccuacaugua

SEQ ID NO: 1421574 - RNA, 18 nt, Human
auuaauaucccuacaugu

SEQ ID NO: 1421575 - RNA, 17 nt, Human
auuaauauauauuaucu

SEQ ID NO: 1421576 - RNA, 21 nt, Human
auuaaguaaugauaacuggaa

SEQ ID NO: 1421577 - RNA, 15 nt, Human
auuaaguaaugauaa

SEQ ID NO: 1421578 - RNA, 13 nt, Human
auuaaguaaugau

SEQ ID NO: 1421579 - RNA, 16 nt, Human
auuauuuauauaugua

SEQ ID NO: 1421580 - RNA, 16 nt, Human
auuauuccucaaaaaa

SEQ ID NO: 1421581 - RNA, 13 nt, Human
auuauuacagugu

SEQ ID NO: 1421582 - RNA, 15 nt, Human
auuauuacaguguuu

SEQ ID NO: 1421583 - RNA, 16 nt, Human
auuauuaauuuaugca

SEQ ID NO: 1421584 - RNA, 22 nt, Human
auuauuaaugaaaauaagaauu

SEQ ID NO: 1421585 - RNA, 12 nt, Human
auuauuuguguu

SEQ ID NO: 1421586 - RNA, 22 nt, Human
auuauuuguguuuuaauuuaaa

SEQ ID NO: 1421587 - RNA, 15 nt, Human
auuauuuguguuuua

SEQ ID NO: 1421588 - RNA, 15 nt, Human
auuauuuauguauug

SEQ ID NO: 1421589 - RNA, 14 nt, Human
auuauuuauguauu

SEQ ID NO: 1421590 - RNA, 19 nt, Human
auuauuuauguauggugca

SEQ ID NO: 1421591 - RNA, 16 nt, Human
auuauuuauguauggu

SEQ ID NO: 1421592 - RNA, 14 nt, Human
auuauuuauguaug

SEQ ID NO: 1421593 - RNA, 13 nt, Human
auuauuuauguau

SEQ ID NO: 1421594 - RNA, 12 nt, Human
auuauuuaugua

SEQ ID NO: 1421595 - RNA, 16 nt, Human
auuauuuuauguugca

SEQ ID NO: 1421596 - RNA, 18 nt, Human
auuauuuuauguugcaua

SEQ ID NO: 1421597 - RNA, 14 nt, Human
auuaucccagcugc

SEQ ID NO: 1421598 - RNA, 17 nt, Human
auuauccauauugaguc

SEQ ID NO: 1421599 - RNA, 14 nt, Human
auuauccauauuga

SEQ ID NO: 1421600 - RNA, 17 nt, Human
auuauccagguaaucca

SEQ ID NO: 1421601 - RNA, 21 nt, Human
auuaucaggcaaauuugcauu

SEQ ID NO: 1421602 - RNA, 20 nt, Human
auuaucaggcaaauuugcau

SEQ ID NO: 1421603 - RNA, 12 nt, Human
auuaucagaugc

SEQ ID NO: 1421604 - RNA, 19 nt, Human
auuaucaauuaccacacca

SEQ ID NO: 1421605 - RNA, 17 nt, Human
auuauauuuacaaaugg

SEQ ID NO: 1421606 - RNA, 19 nt, Human
auuaucguuuucuuaaagu

SEQ ID NO: 1421607 - RNA, 14 nt, Human
auuauuaaugaaaa

SEQ ID NO: 1421608 - RNA, 23 nt, Human
auuauuaacauaccuaagaagua

SEQ ID NO: 1421609 - RNA, 14 nt, Human
auuaucugggcuua

SEQ ID NO: 1421610 - RNA, 12 nt, Human
auuaucuuaaaa

SEQ ID NO: 1421611 - RNA, 19 nt, Human
auuaucuauagcuaaguac

SEQ ID NO: 1421612 - RNA, 22 nt, Human
auuaucuauagcuaaguacaca

SEQ ID NO: 1421613 - RNA, 18 nt, Human
auuauagauucuaaagau

SEQ ID NO: 1421614 - RNA, 17 nt, Human
auuauagauucuaaaga

SEQ ID NO: 1421615 - RNA, 16 nt, Human
auuauagauucuaaag

SEQ ID NO: 1421616 - RNA, 15 nt, Human
auuauagauucuaaa

SEQ ID NO: 1421617 - RNA, 14 nt, Human
auuauagauucuaa

SEQ ID NO: 1421618 - RNA, 13 nt, Human
auuauagauucua

SEQ ID NO: 1421619 - RNA, 21 nt, Human
auuauacuuguaauuauggag

SEQ ID NO: 1421620 - RNA, 20 nt, Human
auuauacuuguaauuaugga

SEQ ID NO: 1421621 - RNA, 18 nt, Human
auuauaaucuuauaauug

SEQ ID NO: 1421622 - RNA, 14 nt, Human
auuauaaugaauuu

SEQ ID NO: 1421623 - RNA, 13 nt, Human
auuauaaugaauu

SEQ ID NO: 1421624 - RNA, 19 nt, Human
auuauagauucuaaagauu

SEQ ID NO: 1421625 - RNA, 17 nt, Human
auuauaggaucauuugu

SEQ ID NO: 1421626 - RNA, 16 nt, Human
auuauauuuacaaaug

SEQ ID NO: 1421627 - RNA, 21 nt, Human
auuagaagacaauugacaaca

SEQ ID NO: 1421628 - RNA, 21 nt, Human
auuagaaauauuuuaaaauca

SEQ ID NO: 1421629 - RNA, 22 nt, Human
auuagaaauuaccuguggauau

SEQ ID NO: 1421630 - RNA, 24 nt, Human
auuagaaauauuuuaaaaucagcu

SEQ ID NO: 1421631 - RNA, 17 nt, Human
auuagaaauauuuuaaa

SEQ ID NO: 1421632 - RNA, 15 nt, Human
auuagaaauauuuua

SEQ ID NO: 1421633 - RNA, 14 nt, Human
auuagaaauauuuu

SEQ ID NO: 1421634 - RNA, 12 nt, Human
auuagaaauauu

SEQ ID NO: 1421635 - RNA, 15 nt, Human
auuagaaauaaagca

SEQ ID NO: 1421636 - RNA, 14 nt, Human
auuacuuuugcugu

SEQ ID NO: 1421637 - RNA, 14 nt, Human
auuacuuugugaau

SEQ ID NO: 1421638 - RNA, 23 nt, Human
auuacuuuggggcuaauuuaaca

SEQ ID NO: 1421639 - RNA, 21 nt, Human
auuacuuuggggcuaauuuaa

SEQ ID NO: 1421640 - RNA, 22 nt, Human
auuacuggccuuuuucauuuau

SEQ ID NO: 1421641 - RNA, 21 nt, Human
auuacuggccuuuuucauuua

SEQ ID NO: 1421642 - RNA, 17 nt, Human
auuacuggccuuuuuca

SEQ ID NO: 1421643 - RNA, 14 nt, Human
auuauaaucuuaua

SEQ ID NO: 1421644 - RNA, 22 nt, Human
auuauaauauacuauauuuaug

SEQ ID NO: 1421645 - RNA, 19 nt, Human
auuagagggaggagaauga

SEQ ID NO: 1421646 - RNA, 16 nt, Human
auuagagccuguaaac

SEQ ID NO: 1421647 - RNA, 13 nt, Human
auuagagccugua

SEQ ID NO: 1421648 - RNA, 20 nt, Human
auuagagauuaccuccugag

SEQ ID NO: 1421649 - RNA, 13 nt, Human
auuagaauuauuu

SEQ ID NO: 1421650 - RNA, 14 nt, Human
auuagaauuauuua

SEQ ID NO: 1421651 - RNA, 21 nt, Human
auuagaaucaaacauuuugaa

SEQ ID NO: 1421652 - RNA, 20 nt, Human
auuagaaucaaacauuuuga

SEQ ID NO: 1421653 - RNA, 19 nt, Human
auuagaaucaaacauuuug

SEQ ID NO: 1421654 - RNA, 14 nt, Human
uuuuaaguugcuga

SEQ ID NO: 1421655 - RNA, 23 nt, Human
auguuaguuaccuuauaguuacu

SEQ ID NO: 1421656 - RNA, 22 nt, Human
auguuaguuaccuuauaguuac

SEQ ID NO: 1421657 - RNA, 21 nt, Human
auguuaguuaccuuauaguua

SEQ ID NO: 1421658 - RNA, 20 nt, Human
auguuaguuaccuuauaguu

SEQ ID NO: 1421659 - RNA, 14 nt, Human
auguuauauauaaa

SEQ ID NO: 1421660 - RNA, 16 nt, Human
uuuuaagugcugcauu

SEQ ID NO: 1421661 - RNA, 17 nt, Human
uuuuaagugcugcauuu

SEQ ID NO: 1421662 - RNA, 21 nt, Human
uuuuaagugcugcauuuaaaa

SEQ ID NO: 1421663 - RNA, 22 nt, Human
auguuauauauaaauauauuau

SEQ ID NO: 1421664 - RNA, 19 nt, Human
auguuauauauaaauauau

SEQ ID NO: 1421665 - RNA, 18 nt, Human
auguuauauauaaauaua

SEQ ID NO: 1421666 - RNA, 17 nt, Human
auguuauauauaaauau

SEQ ID NO: 1421667 - RNA, 15 nt, Human
auguuauauauaaau

SEQ ID NO: 1421668 - RNA, 16 nt, Human
auguuaucuucucaag

SEQ ID NO: 1421669 - RNA, 15 nt, Human
auguuaucuucucaa

SEQ ID NO: 1421670 - RNA, 19 nt, Human
auguugaauacuuuuuaca

SEQ ID NO: 1421671 - RNA, 15 nt, Human
auguugaauacuuuu

SEQ ID NO: 1421672 - RNA, 14 nt, Human
auguugaauacuuu

SEQ ID NO: 1421673 - RNA, 15 nt, Human
auguugacaugggac

SEQ ID NO: 1421674 - RNA, 23 nt, Human
uuuuagccuucucuguucauuuc

SEQ ID NO: 1421675 - RNA, 16 nt, Human
uuuuagccuucucugu

SEQ ID NO: 1421676 - RNA, 23 nt, Human
uuuuagcaaagauaucucaucuc

SEQ ID NO: 1421677 - RNA, 22 nt, Human
uuuuagauuuucugguucuaac

SEQ ID NO: 1421678 - RNA, 22 nt, Human
uuuuaguuuuucauuaaauaaa

SEQ ID NO: 1421679 - RNA, 16 nt, Human
uuuuaguuuuucauua

SEQ ID NO: 1421680 - RNA, 12 nt, Human
uuuuauaaacuu

SEQ ID NO: 1421681 - RNA, 13 nt, Human
uuuuauaaacuuu

SEQ ID NO: 1421682 - RNA, 18 nt, Human
auguugauuacagugcag

SEQ ID NO: 1421683 - RNA, 22 nt, Human
auguugagaaucccaaauuuga

SEQ ID NO: 1421684 - RNA, 16 nt, Human
auguugagaaucccaa

SEQ ID NO: 1421685 - RNA, 15 nt, Human
auguugcauagaaua

SEQ ID NO: 1421686 - RNA, 18 nt, Human
uuuuaguuuuucauuaaa

SEQ ID NO: 1421687 - RNA, 19 nt, Human
uuuuauaaacuuuaccuuu

SEQ ID NO: 1421688 - RNA, 14 nt, Human
uuuuauaaacuuua

SEQ ID NO: 1421689 - RNA, 17 nt, Human
uuuuauaaacuuuaccu

SEQ ID NO: 1421690 - RNA, 22 nt, Human
uuuuauaaauacugcaaaucag

SEQ ID NO: 1421691 - RNA, 13 nt, Human
uuuuauaaauacu

SEQ ID NO: 1421692 - RNA, 14 nt, Human
uuuuauaauuuugu

SEQ ID NO: 1421693 - RNA, 19 nt, Human
uuuuauggcacuaguauuu

SEQ ID NO: 1421694 - RNA, 22 nt, Human
uuuuauggcacuaguauuucua

SEQ ID NO: 1421695 - RNA, 19 nt, Human
uuuuauaauucucauuaaa

SEQ ID NO: 1421696 - RNA, 18 nt, Human
uuuuaugugaaacauguu

SEQ ID NO: 1421697 - RNA, 19 nt, Human
uuuuauguaguaauugaca

SEQ ID NO: 1421698 - RNA, 19 nt, Human
uuuuaugugaaacauguuu

SEQ ID NO: 1421699 - RNA, 22 nt, Human
uuuuauguugcauagaauaaaa

SEQ ID NO: 1421700 - RNA, 14 nt, Human
uuuuauuaugcauu

SEQ ID NO: 1421701 - RNA, 20 nt, Human
uuuuccaggcuucugcuggg

SEQ ID NO: 1421702 - RNA, 19 nt, Human
uuuuccaggcuucugcugg

SEQ ID NO: 1421703 - RNA, 17 nt, Human
uuuuccaggcuucugcu

SEQ ID NO: 1421704 - RNA, 18 nt, Human
uuuucauuaaauaaauuu

SEQ ID NO: 1421705 - RNA, 14 nt, Human
uuuucauuaaauaa

SEQ ID NO: 1421706 - RNA, 20 nt, Human
uuuucauuaaauaaauuuga

SEQ ID NO: 1421707 - RNA, 22 nt, Human
uuuucauuaaauaaauuugacu

SEQ ID NO: 1421708 - RNA, 20 nt, Human
uuuucauuccaugugcccag

SEQ ID NO: 1421709 - RNA, 21 nt, Human
uuuucauuccaugugcccagu

SEQ ID NO: 1421710 - RNA, 19 nt, Human
uuuucagcaaacucuuuuc

SEQ ID NO: 1421711 - RNA, 18 nt, Human
uuuucagcaaacucuuuu

SEQ ID NO: 1421712 - RNA, 17 nt, Human
uuuucagaugugaacca

SEQ ID NO: 1421713 - RNA, 18 nt, Human
uuuucagaugugaaccau

SEQ ID NO: 1421714 - RNA, 11 nt, Human
uuuucagaugu

SEQ ID NO: 1421715 - RNA, 21 nt, Human
uuuuauucagcucauggacuu

SEQ ID NO: 1421716 - RNA, 22 nt, Human
auuaagaaggcaaaaauguaaa

SEQ ID NO: 1421717 - RNA, 19 nt, Human
auuaagaaggcaaaaaugu

SEQ ID NO: 1421718 - RNA, 15 nt, Human
auuaagaaggcaaaa

SEQ ID NO: 1421719 - RNA, 23 nt, Human
auuaagaaaggaagcauuguaaa

SEQ ID NO: 1421720 - RNA, 12 nt, Human
auuaagaaauag

SEQ ID NO: 1421721 - RNA, 11 nt, Human
auuaagaaaua

SEQ ID NO: 1421722 - RNA, 17 nt, Human
auuaagaaaggaagcau

SEQ ID NO: 1421723 - RNA, 13 nt, Human
auuaagaaaggaa

SEQ ID NO: 1421724 - RNA, 12 nt, Human
auuaagaaagga

SEQ ID NO: 1421725 - RNA, 13 nt, Human
auuaacuuuaaug

SEQ ID NO: 1421726 - RNA, 23 nt, Human
auuaacuuuuauaaacuuuaccu

SEQ ID NO: 1421727 - RNA, 18 nt, Human
auuaacuggguaaugaaa

SEQ ID NO: 1421728 - RNA, 17 nt, Human
auuaacucauuagacug

SEQ ID NO: 1421729 - RNA, 12 nt, Human
auuaacucauua

SEQ ID NO: 1421730 - RNA, 15 nt, Human
auuaacgauguccaa

SEQ ID NO: 1421731 - RNA, 14 nt, Human
auuaaccucugcac

SEQ ID NO: 1421732 - RNA, 19 nt, Human
auuaacuggguaaugaaac

SEQ ID NO: 1421733 - RNA, 22 nt, Human
auuaacuggguaaugaaacaaa

SEQ ID NO: 1421734 - RNA, 12 nt, Human
auuaacuuuuau

SEQ ID NO: 1421735 - RNA, 16 nt, Human
auuaacuuuuauaaac

SEQ ID NO: 1421736 - RNA, 17 nt, Human
auuaacuuuuauaaacu

SEQ ID NO: 1421737 - RNA, 19 nt, Human
auuaacuuuuauaaacuuu

SEQ ID NO: 1421738 - RNA, 20 nt, Human
auuaacuuuuauaaacuuua

SEQ ID NO: 1421739 - RNA, 13 nt, Human
auuaaccucugca

SEQ ID NO: 1421740 - RNA, 13 nt, Human
auuaaccucucac

SEQ ID NO: 1421741 - RNA, 13 nt, Human
auuaaccuagaga

SEQ ID NO: 1421742 - RNA, 11 nt, Human
auuaaccuaga

SEQ ID NO: 1421743 - RNA, 21 nt, Human
auuaacccacuagcucuuguu

SEQ ID NO: 1421744 - RNA, 17 nt, Human
auuaaacuuaaucuaaa

SEQ ID NO: 1421745 - RNA, 19 nt, Human
auuaaacuuaaucuaaaug

SEQ ID NO: 1421746 - RNA, 21 nt, Human
auuaaacuuaaucuaaaugga

SEQ ID NO: 1421747 - RNA, 18 nt, Human
auuaaaauauaaucucua

SEQ ID NO: 1421748 - RNA, 13 nt, Human
auuaaaauauaau

SEQ ID NO: 1421749 - RNA, 16 nt, Human
auuaaaagcaaaucau

SEQ ID NO: 1421750 - RNA, 22 nt, Human
auuaaaagcaaaucauuuguuu

SEQ ID NO: 1421751 - RNA, 15 nt, Human
auuaaaagcaaauca

SEQ ID NO: 1421752 - RNA, 15 nt, Human
auuaaaagacucauc

SEQ ID NO: 1421753 - RNA, 14 nt, Human
auuaaaagacucau

SEQ ID NO: 1421754 - RNA, 13 nt, Human
auuaaaagacuca

SEQ ID NO: 1421755 - RNA, 12 nt, Human
auuaaaagacuc

SEQ ID NO: 1421756 - RNA, 11 nt, Human
auuaaaagacu

SEQ ID NO: 1421757 - RNA, 18 nt, Human
auuaaaaagguuuacaga

SEQ ID NO: 1421758 - RNA, 19 nt, Human
auuaaaaagguuuacagaa

SEQ ID NO: 1421759 - RNA, 20 nt, Human
auuaaaaacugagugacucu

SEQ ID NO: 1421760 - RNA, 14 nt, Human
auuaaaaacugagu

SEQ ID NO: 1421761 - RNA, 13 nt, Human
auuaaaaacugag

SEQ ID NO: 1421762 - RNA, 18 nt, Human
auuaaaaaagauaaacac

SEQ ID NO: 1421763 - RNA, 23 nt, Human
auguuuucgaaaaucaaauggua

SEQ ID NO: 1421764 - RNA, 21 nt, Human
auguuuucugaaaauauaacc

SEQ ID NO: 1421765 - RNA, 20 nt, Human
auguuuucugaaaauauaac

SEQ ID NO: 1421766 - RNA, 18 nt, Human
auguuuucugaaaauaua

SEQ ID NO: 1421767 - RNA, 22 nt, Human
auguuuucgaaaaucaaauggu

SEQ ID NO: 1421768 - RNA, 20 nt, Human
auguuuucgaaaaucaaaug

SEQ ID NO: 1421769 - RNA, 18 nt, Human
auguuuucgaaaaucaaa

SEQ ID NO: 1421770 - RNA, 19 nt, Human
auguuuuuguucaaagcca

SEQ ID NO: 1421771 - RNA, 22 nt, Human
auguuuuugaucaaaaacuauu

SEQ ID NO: 1421772 - RNA, 22 nt, Human
auguugucuaagaaauugaaua

SEQ ID NO: 1421773 - RNA, 17 nt, Human
auguugucuaagaaauu

SEQ ID NO: 1421774 - RNA, 16 nt, Human
auguugucuaagaaau

SEQ ID NO: 1421775 - RNA, 14 nt, Human
auguugucuaagaa

SEQ ID NO: 1421776 - RNA, 13 nt, Human
auguugucuaaga

SEQ ID NO: 1421777 - RNA, 19 nt, Human
auguuguaauauuucuuca

SEQ ID NO: 1421778 - RNA, 17 nt, Human
auguuguaauauuucuu

SEQ ID NO: 1421779 - RNA, 14 nt, Human
auguuguaauauuu

SEQ ID NO: 1421780 - RNA, 14 nt, Human
auguuguaagcaac

SEQ ID NO: 1421781 - RNA, 23 nt, Human
uuuucuauuucacuggagcacaa

SEQ ID NO: 1421782 - RNA, 16 nt, Human
uuuucuauuuuaauaa

SEQ ID NO: 1421783 - RNA, 18 nt, Human
uuuucuauuucacuggag

SEQ ID NO: 1421784 - RNA, 21 nt, Human
uuuucuauuaaaagacucauc

SEQ ID NO: 1421785 - RNA, 20 nt, Human
uuuucuauuaaaagacucau

SEQ ID NO: 1421786 - RNA, 19 nt, Human
uuuucuauuaaaagacuca

SEQ ID NO: 1421787 - RNA, 18 nt, Human
uuuucuauuaaaagacuc

SEQ ID NO: 1421788 - RNA, 17 nt, Human
uuuucuauuaaaagacu

SEQ ID NO: 1421789 - RNA, 16 nt, Human
uuuucuauuaaaagac

SEQ ID NO: 1421790 - RNA, 15 nt, Human
uuuucuauuaaaaga

SEQ ID NO: 1421791 - RNA, 14 nt, Human
uuuucuauuaaaag

SEQ ID NO: 1421792 - RNA, 13 nt, Human
uuuucuauuaaaa

SEQ ID NO: 1421793 - RNA, 12 nt, Human
uuuucuauuaaa

SEQ ID NO: 1421794 - RNA, 11 nt, Human
uuuucuauuaa

SEQ ID NO: 1421795 - RNA, 21 nt, Human
auguuucaaacauauauaaca

SEQ ID NO: 1421796 - RNA, 14 nt, Human
auguuuauuucagg

SEQ ID NO: 1421797 - RNA, 19 nt, Human
auguuuauucuucuagagu

SEQ ID NO: 1421798 - RNA, 21 nt, Human
auguuuauucuucuagaguuc

SEQ ID NO: 1421799 - RNA, 18 nt, Human
auguuucaaacauauaua

SEQ ID NO: 1421800 - RNA, 18 nt, Human
auguuuagacuuuaacau

SEQ ID NO: 1421801 - RNA, 17 nt, Human
auguuuagacuuuaaca

SEQ ID NO: 1421802 - RNA, 21 nt, Human
auguuuagacuuuaacauaag

SEQ ID NO: 1421803 - RNA, 19 nt, Human
auguuuagacuuuaacaua

SEQ ID NO: 1421804 - RNA, 18 nt, Human
auguuuauucuucuagag

SEQ ID NO: 1421805 - RNA, 17 nt, Human
auguuuauucuucuaga

SEQ ID NO: 1421806 - RNA, 16 nt, Human
auguuuauucuucuag

SEQ ID NO: 1421807 - RNA, 22 nt, Human
auguuuacacucuuuguaagag

SEQ ID NO: 1421808 - RNA, 13 nt, Human
uuuuaaaaaagaa

SEQ ID NO: 1421809 - RNA, 18 nt, Human
uuuguuugaacugauaaa

SEQ ID NO: 1421810 - RNA, 15 nt, Human
uuuguuugguauugu

SEQ ID NO: 1421811 - RNA, 16 nt, Human
uuuguuugguauugua

SEQ ID NO: 1421812 - RNA, 18 nt, Human
uuuguuugguauuguauu

SEQ ID NO: 1421813 - RNA, 23 nt, Human
uuuuaaaaaagcuuaaaacuuug

SEQ ID NO: 1421814 - RNA, 22 nt, Human
uuuuaaaaaagcuuaaaacuuu

SEQ ID NO: 1421815 - RNA, 21 nt, Human
uuuuaaaaaagcuuaaaacuu

SEQ ID NO: 1421816 - RNA, 20 nt, Human
uuuuaaaaaagcuuaaaacu

SEQ ID NO: 1421817 - RNA, 17 nt, Human
uuuuaaaaaagcuuaaa

SEQ ID NO: 1421818 - RNA, 15 nt, Human
uuuuaaaaaagcuua

SEQ ID NO: 1421819 - RNA, 14 nt, Human
uuuuaaaaaagcuu

SEQ ID NO: 1421820 - RNA, 14 nt, Human
uuuuaaaaagcaaa

SEQ ID NO: 1421821 - RNA, 16 nt, Human
uuuuaaaaaaugguca

SEQ ID NO: 1421822 - RNA, 17 nt, Human
uuuuaaaaaauggucac

SEQ ID NO: 1421823 - RNA, 20 nt, Human
uuuuaaaaauuguuaauuuu

SEQ ID NO: 1421824 - RNA, 17 nt, Human
uuuuaaaaauagacacu

SEQ ID NO: 1421825 - RNA, 13 nt, Human
uuuuaaaacccag

SEQ ID NO: 1421826 - RNA, 13 nt, Human
uuuuaacauuccu

SEQ ID NO: 1421827 - RNA, 14 nt, Human
uuuuaacauuccuc

SEQ ID NO: 1421828 - RNA, 15 nt, Human
uuuuaaaagaaugau

SEQ ID NO: 1421829 - RNA, 14 nt, Human
uuuuaaaagaauga

SEQ ID NO: 1421830 - RNA, 18 nt, Human
uuuuaacuuuguuuuauu

SEQ ID NO: 1421831 - RNA, 14 nt, Human
uuuuaacuuuguuu

SEQ ID NO: 1421832 - RNA, 13 nt, Human
uuuuaacuuuguu

SEQ ID NO: 1421833 - RNA, 12 nt, Human
uuuuaacuuugu

SEQ ID NO: 1421834 - RNA, 11 nt, Human
uuuuaacuuug

SEQ ID NO: 1421835 - RNA, 14 nt, Human
uuuuaacuguggau

SEQ ID NO: 1421836 - RNA, 13 nt, Human
uuuuaagaauauc

SEQ ID NO: 1421837 - RNA, 19 nt, Human
uuuuaagaauugaguaaug

SEQ ID NO: 1421838 - RNA, 15 nt, Human
uuuuaacuuuguuuu

SEQ ID NO: 1421839 - RNA, 16 nt, Human
uuuuaagaauaucugu

SEQ ID NO: 1421840 - RNA, 15 nt, Human
uuuuaagcucugagc

SEQ ID NO: 1421841 - RNA, 15 nt, Human
uuuuaaguauuuagg

SEQ ID NO: 1421842 - RNA, 15 nt, Human
uuuuaagugcugcau

SEQ ID NO: 1421843 - RNA, 16 nt, Human
uuuuaaguaaggaauu

SEQ ID NO: 1421844 - RNA, 12 nt, Human
augucuuaauga

SEQ ID NO: 1421845 - RNA, 16 nt, Human
augucuguucuacaua

SEQ ID NO: 1421846 - RNA, 13 nt, Human
augucuuaaugaa

SEQ ID NO: 1421847 - RNA, 16 nt, Human
augucuuaaugaaguu

SEQ ID NO: 1421848 - RNA, 18 nt, Human
augucuuaaugaaguuug

SEQ ID NO: 1421849 - RNA, 19 nt, Human
augucuuaaugaaguuuga

SEQ ID NO: 1421850 - RNA, 14 nt, Human
augucuguucuaca

SEQ ID NO: 1421851 - RNA, 14 nt, Human
augucuguggauuu

SEQ ID NO: 1421852 - RNA, 21 nt, Human
augucugguucucaauuccaa

SEQ ID NO: 1421853 - RNA, 23 nt, Human
augucugguucucaauuccaaca

SEQ ID NO: 1421854 - RNA, 19 nt, Human
augucugguucucaauucc

SEQ ID NO: 1421855 - RNA, 17 nt, Human
augucugguucucaauu

SEQ ID NO: 1421856 - RNA, 16 nt, Human
augucugguucucaau

SEQ ID NO: 1421857 - RNA, 14 nt, Human
augucugguucuca

SEQ ID NO: 1421858 - RNA, 13 nt, Human
augucugguucuc

SEQ ID NO: 1421859 - RNA, 12 nt, Human
augucuggggca

SEQ ID NO: 1421860 - RNA, 23 nt, Human
augucuggagaccaccagggcau

SEQ ID NO: 1421861 - RNA, 18 nt, Human
augucuggagaccaccag

SEQ ID NO: 1421862 - RNA, 14 nt, Human
augucuggagacca

SEQ ID NO: 1421863 - RNA, 13 nt, Human
augucuggagacc

SEQ ID NO: 1421864 - RNA, 12 nt, Human
augucuggagac

SEQ ID NO: 1421865 - RNA, 19 nt, Human
uuuguaacccacugagagg

SEQ ID NO: 1421866 - RNA, 15 nt, Human
uuuguacugaaaaau

SEQ ID NO: 1421867 - RNA, 14 nt, Human
uuuguacugaaaaa

SEQ ID NO: 1421868 - RNA, 19 nt, Human
uuuguaccauuuuaaaguu

SEQ ID NO: 1421869 - RNA, 18 nt, Human
uuuguacauuugggaguu

SEQ ID NO: 1421870 - RNA, 18 nt, Human
uuugugagucaauacaua

SEQ ID NO: 1421871 - RNA, 15 nt, Human
uuugugauacaaugc

SEQ ID NO: 1421872 - RNA, 17 nt, Human
uuuguuucuuucucuga

SEQ ID NO: 1421873 - RNA, 12 nt, Human
uuuguuugaacu

SEQ ID NO: 1421874 - RNA, 13 nt, Human
uuuguuugaacug

SEQ ID NO: 1421875 - RNA, 14 nt, Human
uuuguuugaacuga

SEQ ID NO: 1421876 - RNA, 19 nt, Human
uuugucgcucaugugugca

SEQ ID NO: 1421877 - RNA, 20 nt, Human
uuuguagcuggggcuuugau

SEQ ID NO: 1421878 - RNA, 17 nt, Human
uuuguagaagucacauu

SEQ ID NO: 1421879 - RNA, 23 nt, Human
uuugggagagacuuguuuuggau

SEQ ID NO: 1421880 - RNA, 14 nt, Human
uuugggagagacuu

SEQ ID NO: 1421881 - RNA, 21 nt, Human
uuugggagacaugugacauuu

SEQ ID NO: 1421882 - RNA, 18 nt, Human
uuugggagacaugugaca

SEQ ID NO: 1421883 - RNA, 16 nt, Human
uuugggagacauguga

SEQ ID NO: 1421884 - RNA, 16 nt, Human
uuugggaauauuugaa

SEQ ID NO: 1421885 - RNA, 17 nt, Human
uuugggaauauuugaau

SEQ ID NO: 1421886 - RNA, 22 nt, Human
uuugggaagugaagacuggaag

SEQ ID NO: 1421887 - RNA, 20 nt, Human
uuugggaagugaagacugga

SEQ ID NO: 1421888 - RNA, 16 nt, Human
uuuggcuaguccuugu

SEQ ID NO: 1421889 - RNA, 18 nt, Human
uuuggggcagaaaggacu

SEQ ID NO: 1421890 - RNA, 20 nt, Human
uuuggggcaggaguagcuga

SEQ ID NO: 1421891 - RNA, 14 nt, Human
uuuggggauauuuu

SEQ ID NO: 1421892 - RNA, 17 nt, Human
uuuggccaucugcuccu

SEQ ID NO: 1421893 - RNA, 23 nt, Human
uuuggccaaugcaccuaaagaaa

SEQ ID NO: 1421894 - RNA, 21 nt, Human
uuugcuguuuuaaacauuaau

SEQ ID NO: 1421895 - RNA, 21 nt, Human
uuugcugugaggcuguccugu

SEQ ID NO: 1421896 - RNA, 19 nt, Human
uuugcugugaggcuguccu

SEQ ID NO: 1421897 - RNA, 17 nt, Human
uuugcugugaggcuguc

SEQ ID NO: 1421898 - RNA, 18 nt, Human
uuugcucagcuucuccaa

SEQ ID NO: 1421899 - RNA, 13 nt, Human
uuugcucauggaa

SEQ ID NO: 1421900 - RNA, 18 nt, Human
uuugcccagaaagaagau

SEQ ID NO: 1421901 - RNA, 19 nt, Human
uuugcacauguuuccucua

SEQ ID NO: 1421902 - RNA, 16 nt, Human
uuugcacagcucuccg

SEQ ID NO: 1421903 - RNA, 12 nt, Human
uuugcacagcuc

SEQ ID NO: 1421904 - RNA, 24 nt, Human
uuugcaaggugcauuuuuacuauu

SEQ ID NO: 1421905 - RNA, 21 nt, Human
uuugcuaauuuuuauuaauuu

SEQ ID NO: 1421906 - RNA, 14 nt, Human
uuugcuaauuuuua

SEQ ID NO: 1421907 - RNA, 12 nt, Human
uuugcccuuuga

SEQ ID NO: 1421908 - RNA, 14 nt, Human
uuugccccuuuaua

SEQ ID NO: 1421909 - RNA, 13 nt, Human
uuugcccauuuug

SEQ ID NO: 1421910 - RNA, 12 nt, Human
uuugcucaugga

SEQ ID NO: 1421911 - RNA, 11 nt, Human
uuugcucaugg

SEQ ID NO: 1421912 - RNA, 12 nt, Human
auguauggugca

SEQ ID NO: 1421913 - RNA, 22 nt, Human
auguauggugcaauguguguau

SEQ ID NO: 1421914 - RNA, 21 nt, Human
auguauggguaggguaaauca

SEQ ID NO: 1421915 - RNA, 19 nt, Human
auguauggguaggguaaau

SEQ ID NO: 1421916 - RNA, 17 nt, Human
auguaucauagaaaugu

SEQ ID NO: 1421917 - RNA, 16 nt, Human
auguaucauagaaaug

SEQ ID NO: 1421918 - RNA, 23 nt, Human
auguauaacuaggagcuuugacu

SEQ ID NO: 1421919 - RNA, 11 nt, Human
auguaucacua

SEQ ID NO: 1421920 - RNA, 20 nt, Human
auguaguuuuuauauguugu

SEQ ID NO: 1421921 - RNA, 21 nt, Human
auguaguuuuuauauguugua

SEQ ID NO: 1421922 - RNA, 18 nt, Human
auguaguucugcuccaga

SEQ ID NO: 1421923 - RNA, 17 nt, Human
auguaguucugcuccag

SEQ ID NO: 1421924 - RNA, 23 nt, Human
auguaguauuuuuuguauaauug

SEQ ID NO: 1421925 - RNA, 22 nt, Human
auguaguauuuuuuguauaauu

SEQ ID NO: 1421926 - RNA, 21 nt, Human
auguaguauuuuuuguauaau

SEQ ID NO: 1421927 - RNA, 12 nt, Human
auguaguauuuu

SEQ ID NO: 1421928 - RNA, 15 nt, Human
uuuggggcuugauga

SEQ ID NO: 1421929 - RNA, 20 nt, Human
augucaggguaccuggggcc

SEQ ID NO: 1421930 - RNA, 17 nt, Human
augucaguaccuucaaa

SEQ ID NO: 1421931 - RNA, 14 nt, Human
auguccauuuacac

SEQ ID NO: 1421932 - RNA, 16 nt, Human
augucuauucagcuuc

SEQ ID NO: 1421933 - RNA, 15 nt, Human
augucuauucagcuu

SEQ ID NO: 1421934 - RNA, 14 nt, Human
augucuauucagcu

SEQ ID NO: 1421935 - RNA, 22 nt, Human
augucuauaaaccgaacugaug

SEQ ID NO: 1421936 - RNA, 22 nt, Human
cacaguggaaagacagcuucuc

SEQ ID NO: 1421937 - RNA, 18 nt, Human
cacagugcucuuuucucc

SEQ ID NO: 1421938 - RNA, 16 nt, Human
cacagugcucuuuucu

SEQ ID NO: 1421939 - RNA, 14 nt, Human
cacagcuuuugcaa

SEQ ID NO: 1421940 - RNA, 16 nt, Human
cacaguguuggagguu

SEQ ID NO: 1421941 - RNA, 13 nt, Human
cacagcuuuugca

SEQ ID NO: 1421942 - RNA, 12 nt, Human
cacagcuuuugc

SEQ ID NO: 1421943 - RNA, 19 nt, Human
cacaggaaccacaagacug

SEQ ID NO: 1421944 - RNA, 13 nt, Human
cacaggaaaccag

SEQ ID NO: 1421945 - RNA, 22 nt, Human
cacagcuugaccugaggcugug

SEQ ID NO: 1421946 - RNA, 21 nt, Human
cacagcuugaccugaggcugu

SEQ ID NO: 1421947 - RNA, 20 nt, Human
cacagcuugaccugaggcug

SEQ ID NO: 1421948 - RNA, 19 nt, Human
cacagcuugaccugaggcu

SEQ ID NO: 1421949 - RNA, 18 nt, Human
cacagcuugaccugaggc

SEQ ID NO: 1421950 - RNA, 15 nt, Human
cacagcugccucuuc

SEQ ID NO: 1421951 - RNA, 22 nt, Human
cacagcugccucuucccucuuc

SEQ ID NO: 1421952 - RNA, 17 nt, Human
caaacugaggaauuuca

SEQ ID NO: 1421953 - RNA, 21 nt, Human
caaacaaaaagguucucaggu

SEQ ID NO: 1421954 - RNA, 20 nt, Human
caaacaaaaagguucucagg

SEQ ID NO: 1421955 - RNA, 14 nt, Human
caaacaccuuccag

SEQ ID NO: 1421956 - RNA, 21 nt, Human
caaacaccuuccagcuccugu

SEQ ID NO: 1421957 - RNA, 12 nt, Human
caaacaccuucc

SEQ ID NO: 1421958 - RNA, 15 nt, Human
caaacaccucccagg

SEQ ID NO: 1421959 - RNA, 14 nt, Human
caaacaccucccag

SEQ ID NO: 1421960 - RNA, 16 nt, Human
caaacaaaaagguucu

SEQ ID NO: 1421961 - RNA, 18 nt, Human
caaaaucuugaucaguua

SEQ ID NO: 1421962 - RNA, 16 nt, Human
caaaaucuugaucagu

SEQ ID NO: 1421963 - RNA, 23 nt, Human
caaaaucucuccacuuucagcug

SEQ ID NO: 1421964 - RNA, 22 nt, Human
caaaaucuugaucaguuaagaa

SEQ ID NO: 1421965 - RNA, 20 nt, Human
caaaccugaccccugcucag

SEQ ID NO: 1421966 - RNA, 19 nt, Human
caaaccugaccccugcuca

SEQ ID NO: 1421967 - RNA, 19 nt, Human
caaacuccugaccucaggc

SEQ ID NO: 1421968 - RNA, 17 nt, Human
caaacugaagcagccuc

SEQ ID NO: 1421969 - RNA, 19 nt, Human
caaacucuuuggucguuuu

SEQ ID NO: 1421970 - RNA, 18 nt, Human
caaacuccugaccucagg

SEQ ID NO: 1421971 - RNA, 23 nt, Human
caaacugaagcagccucucccca

SEQ ID NO: 1421972 - RNA, 16 nt, Human
caaacugacucuuaag

SEQ ID NO: 1421973 - RNA, 14 nt, Human
caaacucuuugguc

SEQ ID NO: 1421974 - RNA, 21 nt, Human
caaacugacucuuaagaagac

SEQ ID NO: 1421975 - RNA, 17 nt, Human
caaacugacucuuaaga

SEQ ID NO: 1421976 - RNA, 23 nt, Human
caaaaguuccaagagucuaaaga

SEQ ID NO: 1421977 - RNA, 18 nt, Human
caaaaguuccaagagucu

SEQ ID NO: 1421978 - RNA, 14 nt, Human
caaaaguuccaaga

SEQ ID NO: 1421979 - RNA, 19 nt, Human
caaaaguuacauguuugca

SEQ ID NO: 1421980 - RNA, 18 nt, Human
caaaaguuacauguuugc

SEQ ID NO: 1421981 - RNA, 15 nt, Human
caaaacugcauuuca

SEQ ID NO: 1421982 - RNA, 18 nt, Human
caaaaguuuguuugcuua

SEQ ID NO: 1421983 - RNA, 19 nt, Human
caaaacucuacuuaaucca

SEQ ID NO: 1421984 - RNA, 11 nt, Human
caaaacucuac

SEQ ID NO: 1421985 - RNA, 18 nt, Human
auuuuauuuuauuaugca

SEQ ID NO: 1421986 - RNA, 16 nt, Human
caaaauaaaacuuuuu

SEQ ID NO: 1421987 - RNA, 20 nt, Human
caaaauaaaacuuuuuaaaa

SEQ ID NO: 1421988 - RNA, 16 nt, Human
caaaauccuugcuuau

SEQ ID NO: 1421989 - RNA, 15 nt, Human
caaaaucagguaacu

SEQ ID NO: 1421990 - RNA, 22 nt, Human
caaaaucucuccacuuucagcu

SEQ ID NO: 1421991 - RNA, 21 nt, Human
caaaaucucuccacuuucagc

SEQ ID NO: 1421992 - RNA, 16 nt, Human
caaaaucucuccacuu

SEQ ID NO: 1421993 - RNA, 19 nt, Human
caaaaucucccauuuugga

SEQ ID NO: 1421994 - RNA, 20 nt, Human
caaaauccuugcuuaugaca

SEQ ID NO: 1421995 - RNA, 22 nt, Human
caaaauauauuuuguuuacaaa

SEQ ID NO: 1421996 - RNA, 20 nt, Human
caaaauauauuuuguuuaca

SEQ ID NO: 1421997 - RNA, 16 nt, Human
caaaauagugccacua

SEQ ID NO: 1421998 - RNA, 21 nt, Human
caaaauaggguauauuuuccu

SEQ ID NO: 1421999 - RNA, 18 nt, Human
caaaauaggguauauuuu

SEQ ID NO: 1422000 - RNA, 17 nt, Human
caaaauaggguauauuu

SEQ ID NO: 1422001 - RNA, 13 nt, Human
caaaauagggacu

SEQ ID NO: 1422002 - RNA, 16 nt, Human
caaaauauuuguacau

SEQ ID NO: 1422003 - RNA, 17 nt, Human
caaaauauuuguacaua

SEQ ID NO: 1422004 - RNA, 16 nt, Human
caaaaucaauuaaaau

SEQ ID NO: 1422005 - RNA, 13 nt, Human
caagagauaacug

SEQ ID NO: 1422006 - RNA, 13 nt, Human
caagagacugagu

SEQ ID NO: 1422007 - RNA, 15 nt, Human
caagagacugaguca

SEQ ID NO: 1422008 - RNA, 12 nt, Human
caagagacugag

SEQ ID NO: 1422009 - RNA, 18 nt, Human
caagagaagcauucucau

SEQ ID NO: 1422010 - RNA, 22 nt, Human
caagagaagcauucucauugga

SEQ ID NO: 1422011 - RNA, 16 nt, Human
caagagaagcauucuc

SEQ ID NO: 1422012 - RNA, 14 nt, Human
caagagaagcauuc

SEQ ID NO: 1422013 - RNA, 13 nt, Human
caagagaagcauu

SEQ ID NO: 1422014 - RNA, 23 nt, Human
caagaagcauuuuguaaguugaa

SEQ ID NO: 1422015 - RNA, 17 nt, Human
caagaagcauuuuguaa

SEQ ID NO: 1422016 - RNA, 13 nt, Human
caagagccacagu

SEQ ID NO: 1422017 - RNA, 23 nt, Human
caagagcaucaugccucugaggc

SEQ ID NO: 1422018 - RNA, 22 nt, Human
caagagcaucaugccucugagg

SEQ ID NO: 1422019 - RNA, 21 nt, Human
caagagcaucaugccucugag

SEQ ID NO: 1422020 - RNA, 20 nt, Human
caagagcaucaugccucuga

SEQ ID NO: 1422021 - RNA, 19 nt, Human
caagagcaucaugccucug

SEQ ID NO: 1422022 - RNA, 18 nt, Human
caagagcaucaugccucu

SEQ ID NO: 1422023 - RNA, 16 nt, Human
caagagcaucaugccu

SEQ ID NO: 1422024 - RNA, 19 nt, Human
caagaggccguggcugcug

SEQ ID NO: 1422025 - RNA, 21 nt, Human
caagaggagcccccacccugu

SEQ ID NO: 1422026 - RNA, 14 nt, Human
caagaggagccccc

SEQ ID NO: 1422027 - RNA, 14 nt, Human
caagaggagaucca

SEQ ID NO: 1422028 - RNA, 19 nt, Human
caagagcuacauaauuuag

SEQ ID NO: 1422029 - RNA, 22 nt, Human
caagagcuacguauuuaauagc

SEQ ID NO: 1422030 - RNA, 23 nt, Human
caacguggcuuuuuuuuuuuccc

SEQ ID NO: 1422031 - RNA, 17 nt, Human
caacguggcccagagaa

SEQ ID NO: 1422032 - RNA, 19 nt, Human
caacguggcccagagaagc

SEQ ID NO: 1422033 - RNA, 20 nt, Human
caacguggcccagagaagcc

SEQ ID NO: 1422034 - RNA, 21 nt, Human
caacguggcccagagaagcca

SEQ ID NO: 1422035 - RNA, 20 nt, Human
caacgugcucuuuguuuugu

SEQ ID NO: 1422036 - RNA, 13 nt, Human
caacguggcccag

SEQ ID NO: 1422037 - RNA, 14 nt, Human
caacguggcccaga

SEQ ID NO: 1422038 - RNA, 18 nt, Human
caacgugcauugugcuuc

SEQ ID NO: 1422039 - RNA, 16 nt, Human
caacuuggcugcagga

SEQ ID NO: 1422040 - RNA, 14 nt, Human
caacuugcuuauca

SEQ ID NO: 1422041 - RNA, 18 nt, Human
caacgugcucuuuguuuu

SEQ ID NO: 1422042 - RNA, 20 nt, Human
caacuuguccuagcacagau

SEQ ID NO: 1422043 - RNA, 19 nt, Human
caacuuguccuagcacaga

SEQ ID NO: 1422044 - RNA, 13 nt, Human
caacuuguccuag

SEQ ID NO: 1422045 - RNA, 18 nt, Human
caagaagcaguggccuua

SEQ ID NO: 1422046 - RNA, 14 nt, Human
caagaagcaguggc

SEQ ID NO: 1422047 - RNA, 13 nt, Human
caagaagcagugg

SEQ ID NO: 1422048 - RNA, 23 nt, Human
caaagagaaugcccuucuccuua

SEQ ID NO: 1422049 - RNA, 18 nt, Human
caaagagaaugcccuucu

SEQ ID NO: 1422050 - RNA, 21 nt, Human
caaagaaggcauuugcagggu

SEQ ID NO: 1422051 - RNA, 22 nt, Human
caaagaaggcauuugcaggguc

SEQ ID NO: 1422052 - RNA, 19 nt, Human
caaagaaccaaagaagaaa

SEQ ID NO: 1422053 - RNA, 18 nt, Human
caaagaaccuucucuaug

SEQ ID NO: 1422054 - RNA, 17 nt, Human
caaagaaccaaagaaga

SEQ ID NO: 1422055 - RNA, 14 nt, Human
caaagaaccaaaga

SEQ ID NO: 1422056 - RNA, 18 nt, Human
caaaguguuuucucugaa

SEQ ID NO: 1422057 - RNA, 15 nt, Human
caaaguguuuucucu

SEQ ID NO: 1422058 - RNA, 20 nt, Human
caaauguuaaaauguguugu

SEQ ID NO: 1422059 - RNA, 21 nt, Human
caaauggcgucuggaagucca

SEQ ID NO: 1422060 - RNA, 19 nt, Human
caaauggcgucuggaaguc

SEQ ID NO: 1422061 - RNA, 22 nt, Human
caaauggcgucuggaaguccaa

SEQ ID NO: 1422062 - RNA, 18 nt, Human
caaauggcgucuggaagu

SEQ ID NO: 1422063 - RNA, 22 nt, Human
caaauggauuuugggagugacu

SEQ ID NO: 1422064 - RNA, 19 nt, Human
caaaucacauauuuuaaaa

SEQ ID NO: 1422065 - RNA, 14 nt, Human
caaaucaccacaaa

SEQ ID NO: 1422066 - RNA, 18 nt, Human
caaaucacauauuuuaaa

SEQ ID NO: 1422067 - RNA, 15 nt, Human
caaaucacauauuuu

SEQ ID NO: 1422068 - RNA, 14 nt, Human
caaaucacauauuu

SEQ ID NO: 1422069 - RNA, 16 nt, Human
caaaucaauuacuggu

SEQ ID NO: 1422070 - RNA, 20 nt, Human
caaaucaaucuguaaaacua

SEQ ID NO: 1422071 - RNA, 23 nt, Human
caaauauauucagccuggcuuca

SEQ ID NO: 1422072 - RNA, 20 nt, Human
caaauauuuauuuucuuucu

SEQ ID NO: 1422073 - RNA, 18 nt, Human
caaaucaaaaucucucca

SEQ ID NO: 1422074 - RNA, 17 nt, Human
caaaucaaucuguaaaa

SEQ ID NO: 1422075 - RNA, 17 nt, Human
caacagcaaacaggugc

SEQ ID NO: 1422076 - RNA, 15 nt, Human
caacagcaaacaggu

SEQ ID NO: 1422077 - RNA, 23 nt, Human
caacagaucuggaaccucagccu

SEQ ID NO: 1422078 - RNA, 17 nt, Human
caacagaucuggaaccu

SEQ ID NO: 1422079 - RNA, 14 nt, Human
caacagaucuggaa

SEQ ID NO: 1422080 - RNA, 13 nt, Human
caacagaucugga

SEQ ID NO: 1422081 - RNA, 14 nt, Human
caacagaucaguaa

SEQ ID NO: 1422082 - RNA, 20 nt, Human
caacagagacugaauagaua

SEQ ID NO: 1422083 - RNA, 15 nt, Human
caaauuaguuauaua

SEQ ID NO: 1422084 - RNA, 14 nt, Human
caaauuaguuauau

SEQ ID NO: 1422085 - RNA, 21 nt, Human
caaauuacuuugugaauagaa

SEQ ID NO: 1422086 - RNA, 18 nt, Human
caaauuacuuugugaaua

SEQ ID NO: 1422087 - RNA, 18 nt, Human
caaauguuaaaauguguu

SEQ ID NO: 1422088 - RNA, 19 nt, Human
caaauguuaaaauguguug

SEQ ID NO: 1422089 - RNA, 19 nt, Human
caaauuuguaggguuucua

SEQ ID NO: 1422090 - RNA, 17 nt, Human
caaauuugauugauuug

SEQ ID NO: 1422091 - RNA, 14 nt, Human
caaauuugauugau

SEQ ID NO: 1422092 - RNA, 15 nt, Human
caaauuucuaaaucu

SEQ ID NO: 1422093 - RNA, 22 nt, Human
caaauuucuaaaucuccaaaau

SEQ ID NO: 1422094 - RNA, 21 nt, Human
caacauaguauucaugacuau

SEQ ID NO: 1422095 - RNA, 20 nt, Human
caacaggccucagggcuccu

SEQ ID NO: 1422096 - RNA, 19 nt, Human
caacaggccucagggcucc

SEQ ID NO: 1422097 - RNA, 16 nt, Human
caacaggccucagggc

SEQ ID NO: 1422098 - RNA, 15 nt, Human
caacaggccucaggg

SEQ ID NO: 1422099 - RNA, 17 nt, Human
caaccugcucuccucuu

SEQ ID NO: 1422100 - RNA, 23 nt, Human
caacauagugggacccugucucu

SEQ ID NO: 1422101 - RNA, 23 nt, Human
caacagcguuccuagagaagaca

SEQ ID NO: 1422102 - RNA, 15 nt, Human
caacagcguuccuag

SEQ ID NO: 1422103 - RNA, 15 nt, Human
caacagcgcccaaag

SEQ ID NO: 1422104 - RNA, 12 nt, Human
caacagcgccca

SEQ ID NO: 1422105 - RNA, 20 nt, Human
caacagcuggacccugacca

SEQ ID NO: 1422106 - RNA, 19 nt, Human
caacagcuggacccugacc

SEQ ID NO: 1422107 - RNA, 16 nt, Human
caacagcuggacccug

SEQ ID NO: 1422108 - RNA, 19 nt, Human
cacagauaacugaaaauua

SEQ ID NO: 1422109 - RNA, 22 nt, Human
cacagauaacugaaaauuauuu

SEQ ID NO: 1422110 - RNA, 14 nt, Human
cacagaucacagcu

SEQ ID NO: 1422111 - RNA, 19 nt, Human
cacagaucacagcuucagc

SEQ ID NO: 1422112 - RNA, 22 nt, Human
cacagaucacagcuucagccag

SEQ ID NO: 1422113 - RNA, 16 nt, Human
cacagagggcgugugc

SEQ ID NO: 1422114 - RNA, 22 nt, Human
cacagaguuguuacauuuuuaa

SEQ ID NO: 1422115 - RNA, 21 nt, Human
cacagaggcagcccgcacacc

SEQ ID NO: 1422116 - RNA, 19 nt, Human
cacagaggacacagagaag

SEQ ID NO: 1422117 - RNA, 15 nt, Human
cacagaggacacaga

SEQ ID NO: 1422118 - RNA, 14 nt, Human
cacacugaagaagc

SEQ ID NO: 1422119 - RNA, 13 nt, Human
cacacugaagaag

SEQ ID NO: 1422120 - RNA, 21 nt, Human
cacagcaguucugcagaggac

SEQ ID NO: 1422121 - RNA, 13 nt, Human
cacagccaccccu

SEQ ID NO: 1422122 - RNA, 13 nt, Human
cacagcccuguca

SEQ ID NO: 1422123 - RNA, 23 nt, Human
cacagcccuuaugcgguuaauuu

SEQ ID NO: 1422124 - RNA, 22 nt, Human
cacagcccugucagcaugaauu

SEQ ID NO: 1422125 - RNA, 23 nt, Human
cacagcccugucagcaugaauuu

SEQ ID NO: 1422126 - RNA, 19 nt, Human
cacagcccugucagcauga

SEQ ID NO: 1422127 - RNA, 18 nt, Human
cacagcccugucagcaug

SEQ ID NO: 1422128 - RNA, 16 nt, Human
cacagcccugucagca

SEQ ID NO: 1422129 - RNA, 14 nt, Human
cacagcccugucag

SEQ ID NO: 1422130 - RNA, 14 nt, Human
cacagcugagaggc

SEQ ID NO: 1422131 - RNA, 21 nt, Human
cacagcugccggucgcccuuu

SEQ ID NO: 1422132 - RNA, 14 nt, Human
cacagcugccucuu

SEQ ID NO: 1422133 - RNA, 17 nt, Human
caauguuucuucuaggu

SEQ ID NO: 1422134 - RNA, 22 nt, Human
caauguuucaagaggagccccc

SEQ ID NO: 1422135 - RNA, 21 nt, Human
caauguuaaacuuauaaccca

SEQ ID NO: 1422136 - RNA, 18 nt, Human
caauguguguauauggac

SEQ ID NO: 1422137 - RNA, 17 nt, Human
caauguguguauaugga

SEQ ID NO: 1422138 - RNA, 16 nt, Human
caauguguguauaugg

SEQ ID NO: 1422139 - RNA, 15 nt, Human
caauguguguauaug

SEQ ID NO: 1422140 - RNA, 14 nt, Human
caauguguguauau

SEQ ID NO: 1422141 - RNA, 12 nt, Human
caauguguguau

SEQ ID NO: 1422142 - RNA, 23 nt, Human
caauguguauaaacaagaaaaau

SEQ ID NO: 1422143 - RNA, 21 nt, Human
caauguguauaaacaagaaaa

SEQ ID NO: 1422144 - RNA, 20 nt, Human
caauguguauaaacaagaaa

SEQ ID NO: 1422145 - RNA, 18 nt, Human
caauguguauaaacaaga

SEQ ID NO: 1422146 - RNA, 17 nt, Human
caauguguauaaacaag

SEQ ID NO: 1422147 - RNA, 16 nt, Human
caauguguauaaacaa

SEQ ID NO: 1422148 - RNA, 15 nt, Human
caauguguauaaaca

SEQ ID NO: 1422149 - RNA, 13 nt, Human
caauaucugaagc

SEQ ID NO: 1422150 - RNA, 23 nt, Human
caauaucugaagcccucccaggu

SEQ ID NO: 1422151 - RNA, 23 nt, Human
caauguggcaaggaaaaacaggu

SEQ ID NO: 1422152 - RNA, 13 nt, Human
caaugugcucucg

SEQ ID NO: 1422153 - RNA, 22 nt, Human
cacaaaauaaccaauccuggac

SEQ ID NO: 1422154 - RNA, 23 nt, Human
caauuuuuuuuauuaguauuguu

SEQ ID NO: 1422155 - RNA, 20 nt, Human
caauuuuuuuuauuaguauu

SEQ ID NO: 1422156 - RNA, 17 nt, Human
caauuuuuuuuauuagu

SEQ ID NO: 1422157 - RNA, 21 nt, Human
caauuuuuuaucaugcauguc

SEQ ID NO: 1422158 - RNA, 21 nt, Human
caauuuuuuaagugaaaauau

SEQ ID NO: 1422159 - RNA, 20 nt, Human
caauuuuuuaagugaaaaua

SEQ ID NO: 1422160 - RNA, 22 nt, Human
cacaaaauauauuuuguuuaca

SEQ ID NO: 1422161 - RNA, 17 nt, Human
caauuccccucugcugc

SEQ ID NO: 1422162 - RNA, 14 nt, Human
caauuccccucugc

SEQ ID NO: 1422163 - RNA, 13 nt, Human
caauuccccucug

SEQ ID NO: 1422164 - RNA, 12 nt, Human
caauuccccucu

SEQ ID NO: 1422165 - RNA, 11 nt, Human
caauuccccuc

SEQ ID NO: 1422166 - RNA, 23 nt, Human
caauuaggcagacucuuuaugcu

SEQ ID NO: 1422167 - RNA, 13 nt, Human
caauuccaccugc

SEQ ID NO: 1422168 - RNA, 21 nt, Human
caauuagcaauugacugucac

SEQ ID NO: 1422169 - RNA, 17 nt, Human
caauuacugguccaaaa

SEQ ID NO: 1422170 - RNA, 23 nt, Human
caauuaaaaaaaaagaucuguuu

SEQ ID NO: 1422171 - RNA, 21 nt, Human
cacacaaauuaucuuaaaacu

SEQ ID NO: 1422172 - RNA, 13 nt, Human
cacacaccuguag

SEQ ID NO: 1422173 - RNA, 11 nt, Human
cacacaccugu

SEQ ID NO: 1422174 - RNA, 12 nt, Human
cacacacguuau

SEQ ID NO: 1422175 - RNA, 18 nt, Human
cacaauaaaaauguuuaa

SEQ ID NO: 1422176 - RNA, 16 nt, Human
cacaaguuauuuaaau

SEQ ID NO: 1422177 - RNA, 23 nt, Human
cacacaaaagggaacccagcucu

SEQ ID NO: 1422178 - RNA, 23 nt, Human
cacaaugagauugaauuucacug

SEQ ID NO: 1422179 - RNA, 22 nt, Human
cacaaugcagugccuuucuucu

SEQ ID NO: 1422180 - RNA, 15 nt, Human
cacaauagaauuaua

SEQ ID NO: 1422181 - RNA, 14 nt, Human
cacaauagaauuau

SEQ ID NO: 1422182 - RNA, 15 nt, Human
cacaauaauuuucua

SEQ ID NO: 1422183 - RNA, 17 nt, Human
cacaauaacuccuccca

SEQ ID NO: 1422184 - RNA, 16 nt, Human
cacaauaacuccuccc

SEQ ID NO: 1422185 - RNA, 16 nt, Human
cacaauaaauggcugu

SEQ ID NO: 1422186 - RNA, 20 nt, Human
cacaauaacuccucccaggg

SEQ ID NO: 1422187 - RNA, 13 nt, Human
cacaauaagcaaa

SEQ ID NO: 1422188 - RNA, 19 nt, Human
caauagcagacaguguuuu

SEQ ID NO: 1422189 - RNA, 16 nt, Human
caauagcacauaugga

SEQ ID NO: 1422190 - RNA, 14 nt, Human
caauagugucaucc

SEQ ID NO: 1422191 - RNA, 17 nt, Human
caauagcacauauggaa

SEQ ID NO: 1422192 - RNA, 19 nt, Human
caauagucaaauuguguga

SEQ ID NO: 1422193 - RNA, 15 nt, Human
caauaacguuuaagc

SEQ ID NO: 1422194 - RNA, 23 nt, Human
caauaacguuuaagccaaaacaa

SEQ ID NO: 1422195 - RNA, 19 nt, Human
caauaacuccucccagggu

SEQ ID NO: 1422196 - RNA, 18 nt, Human
caauaacuccucccaggg

SEQ ID NO: 1422197 - RNA, 17 nt, Human
caauaacuccucccagg

SEQ ID NO: 1422198 - RNA, 16 nt, Human
caauaacuccucccag

SEQ ID NO: 1422199 - RNA, 12 nt, Human
caauaagcaaaa

SEQ ID NO: 1422200 - RNA, 16 nt, Human
caagggucaggccuuu

SEQ ID NO: 1422201 - RNA, 18 nt, Human
caagggucaggccuuuga

SEQ ID NO: 1422202 - RNA, 15 nt, Human
caagggucaggccuu

SEQ ID NO: 1422203 - RNA, 16 nt, Human
caagggaaccuguguc

SEQ ID NO: 1422204 - RNA, 15 nt, Human
caagggaaccugugu

SEQ ID NO: 1422205 - RNA, 16 nt, Human
caagggaaaagucucu

SEQ ID NO: 1422206 - RNA, 15 nt, Human
caagggaaaagucuc

SEQ ID NO: 1422207 - RNA, 15 nt, Human
caaggcuuucucuac

SEQ ID NO: 1422208 - RNA, 21 nt, Human
caauaaagugacccugcucuc

SEQ ID NO: 1422209 - RNA, 20 nt, Human
caauaaaguauuuaauuagu

SEQ ID NO: 1422210 - RNA, 22 nt, Human
caauaaaguauuuaauuagugc

SEQ ID NO: 1422211 - RNA, 14 nt, Human
caauaaagugaccc

SEQ ID NO: 1422212 - RNA, 13 nt, Human
caauaaauagaca

SEQ ID NO: 1422213 - RNA, 17 nt, Human
caauaaaguauuuaauu

SEQ ID NO: 1422214 - RNA, 15 nt, Human
caauaaauggcugua

SEQ ID NO: 1422215 - RNA, 20 nt, Human
caauaaaucugacccagugc

SEQ ID NO: 1422216 - RNA, 18 nt, Human
caauaaaucugacccagu

SEQ ID NO: 1422217 - RNA, 17 nt, Human
caauaaaucugacccag

SEQ ID NO: 1422218 - RNA, 16 nt, Human
caauaaauagaccauu

SEQ ID NO: 1422219 - RNA, 17 nt, Human
caauaaauagacacgca

SEQ ID NO: 1422220 - RNA, 20 nt, Human
caagagugaauucccucacu

SEQ ID NO: 1422221 - RNA, 19 nt, Human
caagagugaauucccucac

SEQ ID NO: 1422222 - RNA, 15 nt, Human
caagagucuaaagau

SEQ ID NO: 1422223 - RNA, 14 nt, Human
caagagucuaaaga

SEQ ID NO: 1422224 - RNA, 16 nt, Human
caagaggagcccccac

SEQ ID NO: 1422225 - RNA, 14 nt, Human
caagcugcaucuag

SEQ ID NO: 1422226 - RNA, 15 nt, Human
caagcgauucucuug

SEQ ID NO: 1422227 - RNA, 21 nt, Human
caagcgauucucuugccucaa

SEQ ID NO: 1422228 - RNA, 14 nt, Human
caagcugcuguggc

SEQ ID NO: 1422229 - RNA, 16 nt, Human
caaggagauuuacaac

SEQ ID NO: 1422230 - RNA, 18 nt, Human
caaggaaaaaauaacaau

SEQ ID NO: 1422231 - RNA, 20 nt, Human
caaggaaaaaauaacaauga

SEQ ID NO: 1422232 - RNA, 16 nt, Human
caaggacuuuguacau

SEQ ID NO: 1422233 - RNA, 19 nt, Human
cccgcaccccccaagcugu

SEQ ID NO: 1422234 - RNA, 14 nt, Human
cccgccugcccuca

SEQ ID NO: 1422235 - RNA, 13 nt, Human
cccgccugcccuc

SEQ ID NO: 1422236 - RNA, 12 nt, Human
cccgcacaccug

SEQ ID NO: 1422237 - RNA, 14 nt, Human
cccgauuguaacuc

SEQ ID NO: 1422238 - RNA, 21 nt, Human
cccgaggaggugucucaggcu

SEQ ID NO: 1422239 - RNA, 12 nt, Human
cccgaggcccgc

SEQ ID NO: 1422240 - RNA, 19 nt, Human
cccgaggaggugucucagg

SEQ ID NO: 1422241 - RNA, 15 nt, Human
cccgaggcccgcaug

SEQ ID NO: 1422242 - RNA, 13 nt, Human
cccgaggcccgca

SEQ ID NO: 1422243 - RNA, 21 nt, Human
cccgcucuacaucuucugccu

SEQ ID NO: 1422244 - RNA, 13 nt, Human
cccgcucaggcug

SEQ ID NO: 1422245 - RNA, 23 nt, Human
cccgcgauguggaacugcugcca

SEQ ID NO: 1422246 - RNA, 22 nt, Human
cccgcgauguggaacugcugcc

SEQ ID NO: 1422247 - RNA, 17 nt, Human
cccgcgauguggaacug

SEQ ID NO: 1422248 - RNA, 14 nt, Human
cccgccuuggccug

SEQ ID NO: 1422249 - RNA, 13 nt, Human
cccgccuuggccu

SEQ ID NO: 1422250 - RNA, 12 nt, Human
cccgccuuggcc

SEQ ID NO: 1422251 - RNA, 17 nt, Human
cccgccugcccucaugg

SEQ ID NO: 1422252 - RNA, 17 nt, Human
ccccuuccgccacuggg

SEQ ID NO: 1422253 - RNA, 16 nt, Human
ccccuuccgccacugg

SEQ ID NO: 1422254 - RNA, 14 nt, Human
ccccuuccgccacu

SEQ ID NO: 1422255 - RNA, 17 nt, Human
ccccuuauccucccugu

SEQ ID NO: 1422256 - RNA, 18 nt, Human
ccccuuauccucccugua

SEQ ID NO: 1422257 - RNA, 15 nt, Human
ccccuuauccucccu

SEQ ID NO: 1422258 - RNA, 14 nt, Human
ccccuuauccuccc

SEQ ID NO: 1422259 - RNA, 24 nt, Human
ccccuuagacagaggcccucaagu

SEQ ID NO: 1422260 - RNA, 17 nt, Human
ccccuuagacagaggcc

SEQ ID NO: 1422261 - RNA, 13 nt, Human
ccccuuagacaga

SEQ ID NO: 1422262 - RNA, 15 nt, Human
ccccuguaggccuca

SEQ ID NO: 1422263 - RNA, 16 nt, Human
ccccuguacacaacuc

SEQ ID NO: 1422264 - RNA, 11 nt, Human
ccccuguacac

SEQ ID NO: 1422265 - RNA, 22 nt, Human
ccccagguccagcucuggaggg

SEQ ID NO: 1422266 - RNA, 21 nt, Human
ccccagguccagcucuggagg

SEQ ID NO: 1422267 - RNA, 17 nt, Human
ccccagguccagcucug

SEQ ID NO: 1422268 - RNA, 23 nt, Human
ccccagguaggggccccucucag

SEQ ID NO: 1422269 - RNA, 20 nt, Human
ccccagguaggggccccucu

SEQ ID NO: 1422270 - RNA, 18 nt, Human
ccccaggguccugggagg

SEQ ID NO: 1422271 - RNA, 20 nt, Human
ccccaggguccugggaggag

SEQ ID NO: 1422272 - RNA, 17 nt, Human
ccccaggguccugggag

SEQ ID NO: 1422273 - RNA, 16 nt, Human
ccccaggguccuggga

SEQ ID NO: 1422274 - RNA, 22 nt, Human
ccccuggcagagaugccucccu

SEQ ID NO: 1422275 - RNA, 22 nt, Human
ccccagggcuguaacugccagg

SEQ ID NO: 1422276 - RNA, 22 nt, Human
ccccagggcagccagggagagc

SEQ ID NO: 1422277 - RNA, 16 nt, Human
ccccagggcagccagg

SEQ ID NO: 1422278 - RNA, 15 nt, Human
ccccagggcagccag

SEQ ID NO: 1422279 - RNA, 12 nt, Human
ccccagggcagc

SEQ ID NO: 1422280 - RNA, 22 nt, Human
ccccagcugucaucaauuaaag

SEQ ID NO: 1422281 - RNA, 21 nt, Human
ccccaggaccuggcugccaua

SEQ ID NO: 1422282 - RNA, 20 nt, Human
ccccaggaccuggcugccau

SEQ ID NO: 1422283 - RNA, 17 nt, Human
ccccaggaccuggcugc

SEQ ID NO: 1422284 - RNA, 15 nt, Human
ccccaggaccuggcu

SEQ ID NO: 1422285 - RNA, 21 nt, Human
ccccaggaccagcucaggaca

SEQ ID NO: 1422286 - RNA, 19 nt, Human
ccccaggaccagcucagga

SEQ ID NO: 1422287 - RNA, 18 nt, Human
ccccaggaccagcucagg

SEQ ID NO: 1422288 - RNA, 16 nt, Human
ccccagcccccuaaga

SEQ ID NO: 1422289 - RNA, 18 nt, Human
ccccaccagccucaccag

SEQ ID NO: 1422290 - RNA, 16 nt, Human
ccccagccugggccua

SEQ ID NO: 1422291 - RNA, 13 nt, Human
ccccagccugggc

SEQ ID NO: 1422292 - RNA, 12 nt, Human
ccccagccuggg

SEQ ID NO: 1422293 - RNA, 11 nt, Human
ccccagccugg

SEQ ID NO: 1422294 - RNA, 15 nt, Human
ccccagccugggccu

SEQ ID NO: 1422295 - RNA, 21 nt, Human
ccccagcuggggccaggcugg

SEQ ID NO: 1422296 - RNA, 22 nt, Human
ccccagcuggggccaggcuggg

SEQ ID NO: 1422297 - RNA, 17 nt, Human
cccggcacccccugcag

SEQ ID NO: 1422298 - RNA, 16 nt, Human
cccggcacccccugca

SEQ ID NO: 1422299 - RNA, 15 nt, Human
cccggcacccccugc

SEQ ID NO: 1422300 - RNA, 13 nt, Human
cccggcacccccu

SEQ ID NO: 1422301 - RNA, 11 nt, Human
cccggcacccc

SEQ ID NO: 1422302 - RNA, 19 nt, Human
cccggaggcggugggccug

SEQ ID NO: 1422303 - RNA, 18 nt, Human
cccggagguugggugggc

SEQ ID NO: 1422304 - RNA, 23 nt, Human
cccggagaagugugccuucucuc

SEQ ID NO: 1422305 - RNA, 20 nt, Human
cccggacgcccaggacccca

SEQ ID NO: 1422306 - RNA, 19 nt, Human
cccggaauuccgucaccac

SEQ ID NO: 1422307 - RNA, 21 nt, Human
cccggcagggcgggcagaggg

SEQ ID NO: 1422308 - RNA, 14 nt, Human
cccggcagggcggg

SEQ ID NO: 1422309 - RNA, 12 nt, Human
cccggcagggcg

SEQ ID NO: 1422310 - RNA, 18 nt, Human
cccggcacccccugcagc

SEQ ID NO: 1422311 - RNA, 19 nt, Human
cccggcacccccugcagcu

SEQ ID NO: 1422312 - RNA, 14 nt, Human
cccguuucuggugg

SEQ ID NO: 1422313 - RNA, 16 nt, Human
cccguuucuccaccua

SEQ ID NO: 1422314 - RNA, 12 nt, Human
cccguuucucca

SEQ ID NO: 1422315 - RNA, 13 nt, Human
cccguggaggcug

SEQ ID NO: 1422316 - RNA, 17 nt, Human
cccguggaggcugcucg

SEQ ID NO: 1422317 - RNA, 22 nt, Human
cccgugccaaguccagguccug

SEQ ID NO: 1422318 - RNA, 21 nt, Human
cccgugccaaguccagguccu

SEQ ID NO: 1422319 - RNA, 15 nt, Human
cccgugccaagucca

SEQ ID NO: 1422320 - RNA, 13 nt, Human
cccguuuugucac

SEQ ID NO: 1422321 - RNA, 20 nt, Human
cccuaaaagaaacccugcac

SEQ ID NO: 1422322 - RNA, 17 nt, Human
cccuaaaguguauuuuu

SEQ ID NO: 1422323 - RNA, 13 nt, Human
cccuaaagccuca

SEQ ID NO: 1422324 - RNA, 19 nt, Human
cccuaaauaauaaaaauaa

SEQ ID NO: 1422325 - RNA, 15 nt, Human
cccuaaccaaguucc

SEQ ID NO: 1422326 - RNA, 22 nt, Human
cccuaaaguguauuuuuuuacu

SEQ ID NO: 1422327 - RNA, 14 nt, Human
cccuagagucccag

SEQ ID NO: 1422328 - RNA, 18 nt, Human
cccucagggcaaagccag

SEQ ID NO: 1422329 - RNA, 16 nt, Human
cccucagggcaaagcc

SEQ ID NO: 1422330 - RNA, 10 nt, Human
cccucagggc

SEQ ID NO: 1422331 - RNA, 21 nt, Human
cccuaagcagaaagugccuuu

SEQ ID NO: 1422332 - RNA, 20 nt, Human
cccuaagcagaaagugccuu

SEQ ID NO: 1422333 - RNA, 16 nt, Human
cccuaagcagaaagug

SEQ ID NO: 1422334 - RNA, 18 nt, Human
cccuaagagagcaccugg

SEQ ID NO: 1422335 - RNA, 14 nt, Human
cccuaagagagcac

SEQ ID NO: 1422336 - RNA, 14 nt, Human
cccuaacccuuugu

SEQ ID NO: 1422337 - RNA, 12 nt, Human
cccuaauaaagc

SEQ ID NO: 1422338 - RNA, 13 nt, Human
cccuaauaaagcu

SEQ ID NO: 1422339 - RNA, 14 nt, Human
cccuaauaaagcug

SEQ ID NO: 1422340 - RNA, 17 nt, Human
cccuagaaacuuccaaa

SEQ ID NO: 1422341 - RNA, 18 nt, Human
cccuacuucuuuugcucu

SEQ ID NO: 1422342 - RNA, 19 nt, Human
cccuacuucuuuugcucuu

SEQ ID NO: 1422343 - RNA, 15 nt, Human
cccuaauaaagcugu

SEQ ID NO: 1422344 - RNA, 18 nt, Human
cccuaauaaagcugugug

SEQ ID NO: 1422345 - RNA, 18 nt, Human
cccuccccuccaucccug

SEQ ID NO: 1422346 - RNA, 20 nt, Human
cccucccuguuccccagaga

SEQ ID NO: 1422347 - RNA, 19 nt, Human
cccucccuguuccccagag

SEQ ID NO: 1422348 - RNA, 14 nt, Human
cccuccgccauucu

SEQ ID NO: 1422349 - RNA, 17 nt, Human
cccuccccgcacccccc

SEQ ID NO: 1422350 - RNA, 16 nt, Human
cccuccccgcaccccc

SEQ ID NO: 1422351 - RNA, 15 nt, Human
cccucccccuugucc

SEQ ID NO: 1422352 - RNA, 13 nt, Human
cccucccccuugu

SEQ ID NO: 1422353 - RNA, 12 nt, Human
cccucccccuug

SEQ ID NO: 1422354 - RNA, 14 nt, Human
cccucccccugcca

SEQ ID NO: 1422355 - RNA, 13 nt, Human
cccucccccugag

SEQ ID NO: 1422356 - RNA, 22 nt, Human
cccuccaucccuggcccccucc

SEQ ID NO: 1422357 - RNA, 17 nt, Human
cccuccaucccuggccc

SEQ ID NO: 1422358 - RNA, 15 nt, Human
cccuccacaccugcg

SEQ ID NO: 1422359 - RNA, 17 nt, Human
cccuccacaccugcggc

SEQ ID NO: 1422360 - RNA, 13 nt, Human
cccuccacaccug

SEQ ID NO: 1422361 - RNA, 14 nt, Human
cccuccaucccugg

SEQ ID NO: 1422362 - RNA, 13 nt, Human
cccuccaucccug

SEQ ID NO: 1422363 - RNA, 12 nt, Human
cccuccaucccu

SEQ ID NO: 1422364 - RNA, 15 nt, Human
cccuccagcucccug

SEQ ID NO: 1422365 - RNA, 17 nt, Human
cccucaucccgagcacc

SEQ ID NO: 1422366 - RNA, 19 nt, Human
cccucaucaaggacacggg

SEQ ID NO: 1422367 - RNA, 16 nt, Human
cccucaucaaggacac

SEQ ID NO: 1422368 - RNA, 19 nt, Human
cccucaguagucccugcac

SEQ ID NO: 1422369 - RNA, 21 nt, Human
cccucagggcaaagccagguc

SEQ ID NO: 1422370 - RNA, 20 nt, Human
cccucagggcaaagccaggu

SEQ ID NO: 1422371 - RNA, 19 nt, Human
cccucagggcaaagccagg

SEQ ID NO: 1422372 - RNA, 21 nt, Human
cccucauggccccucugaccu

SEQ ID NO: 1422373 - RNA, 17 nt, Human
cccucauggccccucug

SEQ ID NO: 1422374 - RNA, 16 nt, Human
cccucauggccccucu

SEQ ID NO: 1422375 - RNA, 14 nt, Human
cccucaucuguccc

SEQ ID NO: 1422376 - RNA, 13 nt, Human
cccucaucugucc

SEQ ID NO: 1422377 - RNA, 17 nt, Human
cccucaucucucugccc

SEQ ID NO: 1422378 - RNA, 14 nt, Human
cccucaucuuucuu

SEQ ID NO: 1422379 - RNA, 12 nt, Human
cccucaugcugu

SEQ ID NO: 1422380 - RNA, 23 nt, Human
cccuggguagcgggggaggguag

SEQ ID NO: 1422381 - RNA, 17 nt, Human
cccugggguggccacca

SEQ ID NO: 1422382 - RNA, 23 nt, Human
cccuggggccuguacugccugcu

SEQ ID NO: 1422383 - RNA, 16 nt, Human
cccuggugggccaaca

SEQ ID NO: 1422384 - RNA, 22 nt, Human
cccugguggcccucuccccugc

SEQ ID NO: 1422385 - RNA, 21 nt, Human
cccugguggcccucuccccug

SEQ ID NO: 1422386 - RNA, 20 nt, Human
cccugguggcccucuccccu

SEQ ID NO: 1422387 - RNA, 19 nt, Human
cccuggaggcacugaagug

SEQ ID NO: 1422388 - RNA, 16 nt, Human
cccugggaggcucugg

SEQ ID NO: 1422389 - RNA, 14 nt, Human
cccuggagcagcca

SEQ ID NO: 1422390 - RNA, 16 nt, Human
cccuggagcagccacc

SEQ ID NO: 1422391 - RNA, 20 nt, Human
cccuggagcagccaccccau

SEQ ID NO: 1422392 - RNA, 22 nt, Human
cccuggggccuguacugccugc

SEQ ID NO: 1422393 - RNA, 21 nt, Human
cccuggggccuguacugccug

SEQ ID NO: 1422394 - RNA, 20 nt, Human
cccuggggccuguacugccu

SEQ ID NO: 1422395 - RNA, 17 nt, Human
cccugggauucaggaaa

SEQ ID NO: 1422396 - RNA, 18 nt, Human
cccugggagggacaugcu

SEQ ID NO: 1422397 - RNA, 23 nt, Human
cccugggagggacaugcuuagca

SEQ ID NO: 1422398 - RNA, 21 nt, Human
cccuggagggggaauggcagc

SEQ ID NO: 1422399 - RNA, 15 nt, Human
cccuggaggcaccug

SEQ ID NO: 1422400 - RNA, 17 nt, Human
cccugggaggcucugga

SEQ ID NO: 1422401 - RNA, 18 nt, Human
cccugggaggcucuggag

SEQ ID NO: 1422402 - RNA, 24 nt, Human
cccugccuggaggaccugagccug

SEQ ID NO: 1422403 - RNA, 23 nt, Human
cccugccuggaggaccugagccu

SEQ ID NO: 1422404 - RNA, 22 nt, Human
cccugccuggaggaccugagcc

SEQ ID NO: 1422405 - RNA, 22 nt, Human
cccugcuuugggcuugggccua

SEQ ID NO: 1422406 - RNA, 18 nt, Human
cccugcuuugggcuuggg

SEQ ID NO: 1422407 - RNA, 17 nt, Human
cccugcuuugggcuugg

SEQ ID NO: 1422408 - RNA, 22 nt, Human
cccuggagaccccaccagccuc

SEQ ID NO: 1422409 - RNA, 10 nt, Human
cccugcuuuu

SEQ ID NO: 1422410 - RNA, 15 nt, Human
cccuggaaaccuucc

SEQ ID NO: 1422411 - RNA, 16 nt, Human
cccuggaaaccuucca

SEQ ID NO: 1422412 - RNA, 19 nt, Human
cccuggaaaccuuccaccc

SEQ ID NO: 1422413 - RNA, 21 nt, Human
cccuggaaaccuuccacccag

SEQ ID NO: 1422414 - RNA, 18 nt, Human
cccuggaacugucucuca

SEQ ID NO: 1422415 - RNA, 15 nt, Human
cccuggaacugucuc

SEQ ID NO: 1422416 - RNA, 22 nt, Human
cccuggaaaccuuccacccagu

SEQ ID NO: 1422417 - RNA, 12 nt, Human
cccugccuggag

SEQ ID NO: 1422418 - RNA, 11 nt, Human
cccugccugga

SEQ ID NO: 1422419 - RNA, 10 nt, Human
cccugccugg

SEQ ID NO: 1422420 - RNA, 18 nt, Human
cccugccuggaccagccu

SEQ ID NO: 1422421 - RNA, 13 nt, Human
cccugccuggacc

SEQ ID NO: 1422422 - RNA, 12 nt, Human
cccugccuggac

SEQ ID NO: 1422423 - RNA, 21 nt, Human
cccugccuggaggaccugagc

SEQ ID NO: 1422424 - RNA, 19 nt, Human
cccugccuggaggaccuga

SEQ ID NO: 1422425 - RNA, 18 nt, Human
cccugccuggaggaccug

SEQ ID NO: 1422426 - RNA, 17 nt, Human
cccugccuggaggaccu

SEQ ID NO: 1422427 - RNA, 16 nt, Human
cccugccuggaggacc

SEQ ID NO: 1422428 - RNA, 15 nt, Human
cccugccuggaggac

SEQ ID NO: 1422429 - RNA, 14 nt, Human
cccugccuggagga

SEQ ID NO: 1422430 - RNA, 13 nt, Human
cccugccuggagg

SEQ ID NO: 1422431 - RNA, 12 nt, Human
cccugccucuca

SEQ ID NO: 1422432 - RNA, 21 nt, Human
cccugccucucugcagguccc

SEQ ID NO: 1422433 - RNA, 22 nt, Human
cccugccucucugcaggucccu

SEQ ID NO: 1422434 - RNA, 23 nt, Human
cccugauuuaggagaagccagga

SEQ ID NO: 1422435 - RNA, 21 nt, Human
cccugauuuaggagaagccag

SEQ ID NO: 1422436 - RNA, 20 nt, Human
cccugaucccagagagcccg

SEQ ID NO: 1422437 - RNA, 17 nt, Human
cccugaucccagagagc

SEQ ID NO: 1422438 - RNA, 14 nt, Human
cccugaucccagag

SEQ ID NO: 1422439 - RNA, 17 nt, Human
cccucucagcuccaggu

SEQ ID NO: 1422440 - RNA, 14 nt, Human
cccucucagcucca

SEQ ID NO: 1422441 - RNA, 13 nt, Human
cccucucagcucc

SEQ ID NO: 1422442 - RNA, 18 nt, Human
cccucucagcccucacac

SEQ ID NO: 1422443 - RNA, 15 nt, Human
cccucucagcccuca

SEQ ID NO: 1422444 - RNA, 14 nt, Human
cccucucagcccuc

SEQ ID NO: 1422445 - RNA, 12 nt, Human
cccucucagccc

SEQ ID NO: 1422446 - RNA, 17 nt, Human
cccucucaacacccagu

SEQ ID NO: 1422447 - RNA, 13 nt, Human
cccucucaccaaa

SEQ ID NO: 1422448 - RNA, 21 nt, Human
cccucuacagagcuucccuga

SEQ ID NO: 1422449 - RNA, 18 nt, Human
cccucuacagagcuuccc

SEQ ID NO: 1422450 - RNA, 13 nt, Human
cccuccgcccugc

SEQ ID NO: 1422451 - RNA, 19 nt, Human
cccugcagacccugcccuu

SEQ ID NO: 1422452 - RNA, 17 nt, Human
cccugcagacccugccc

SEQ ID NO: 1422453 - RNA, 16 nt, Human
cccugcagacccugcc

SEQ ID NO: 1422454 - RNA, 15 nt, Human
cccugcagacccugc

SEQ ID NO: 1422455 - RNA, 14 nt, Human
cccugcagacccug

SEQ ID NO: 1422456 - RNA, 13 nt, Human
cccugcagacccu

SEQ ID NO: 1422457 - RNA, 23 nt, Human
cccugcagaaccggagagccagc

SEQ ID NO: 1422458 - RNA, 20 nt, Human
cccugcaaaaggacucucag

SEQ ID NO: 1422459 - RNA, 18 nt, Human
cccugcaaaaggacucuc

SEQ ID NO: 1422460 - RNA, 14 nt, Human
cccugccaccaggc

SEQ ID NO: 1422461 - RNA, 23 nt, Human
cccugcauuggaacuggaggcag

SEQ ID NO: 1422462 - RNA, 22 nt, Human
cccugcauuggaacuggaggca

SEQ ID NO: 1422463 - RNA, 21 nt, Human
cccugcauuggaacuggaggc

SEQ ID NO: 1422464 - RNA, 16 nt, Human
cccugcauggcugagc

SEQ ID NO: 1422465 - RNA, 21 nt, Human
cccugcauggcugagcugccc

SEQ ID NO: 1422466 - RNA, 15 nt, Human
cccugccaccaggcc

SEQ ID NO: 1422467 - RNA, 14 nt, Human
cccugccaccuccu

SEQ ID NO: 1422468 - RNA, 17 nt, Human
cccugccaccuccugcc

SEQ ID NO: 1422469 - RNA, 22 nt, Human
cccugccaggagcuuuggaccu

SEQ ID NO: 1422470 - RNA, 18 nt, Human
cccugccaccuccugccu

SEQ ID NO: 1422471 - RNA, 12 nt, Human
cccugccagggc

SEQ ID NO: 1422472 - RNA, 14 nt, Human
cccugccagggcag

SEQ ID NO: 1422473 - RNA, 20 nt, Human
cccugcccacccucuggaga

SEQ ID NO: 1422474 - RNA, 11 nt, Human
cccugccucuc

SEQ ID NO: 1422475 - RNA, 18 nt, Human
cccugccucucugcaggu

SEQ ID NO: 1422476 - RNA, 16 nt, Human
ccuacuggucucucua

SEQ ID NO: 1422477 - RNA, 16 nt, Human
ccuacugcccaggcac

SEQ ID NO: 1422478 - RNA, 20 nt, Human
ccuacugcccaggcacugca

SEQ ID NO: 1422479 - RNA, 13 nt, Human
ccuacugcccagg

SEQ ID NO: 1422480 - RNA, 19 nt, Human
ccuacuguaauuugugaua

SEQ ID NO: 1422481 - RNA, 19 nt, Human
ccuacaugaaacagaaaca

SEQ ID NO: 1422482 - RNA, 22 nt, Human
ccuacaguuuuaacuguggaua

SEQ ID NO: 1422483 - RNA, 21 nt, Human
ccuacaguuuuaacuguggau

SEQ ID NO: 1422484 - RNA, 20 nt, Human
ccuacaguuuuaacugugga

SEQ ID NO: 1422485 - RNA, 19 nt, Human
ccuacaguuuuaacugugg

SEQ ID NO: 1422486 - RNA, 17 nt, Human
ccuacaguuuuaacugu

SEQ ID NO: 1422487 - RNA, 15 nt, Human
ccuacaguuuuaacu

SEQ ID NO: 1422488 - RNA, 23 nt, Human
ccuacuguucuaaagcucugaca

SEQ ID NO: 1422489 - RNA, 22 nt, Human
ccuacuguucuaaagcucugac

SEQ ID NO: 1422490 - RNA, 19 nt, Human
ccuacuguucuaaagcucu

SEQ ID NO: 1422491 - RNA, 16 nt, Human
ccuacuguucuaaagc

SEQ ID NO: 1422492 - RNA, 15 nt, Human
ccuacuguucuaaag

SEQ ID NO: 1422493 - RNA, 13 nt, Human
ccuacuguucuaa

SEQ ID NO: 1422494 - RNA, 20 nt, Human
ccuagaaacaacacuguagu

SEQ ID NO: 1422495 - RNA, 19 nt, Human
ccuagaaacaacacuguag

SEQ ID NO: 1422496 - RNA, 18 nt, Human
ccuagaaacaacacugua

SEQ ID NO: 1422497 - RNA, 17 nt, Human
ccuagaaacaacacugu

SEQ ID NO: 1422498 - RNA, 19 nt, Human
ccuagacuguaaaccucuc

SEQ ID NO: 1422499 - RNA, 23 nt, Human
ccuagaccagcagacagagccag

SEQ ID NO: 1422500 - RNA, 13 nt, Human
ccuagaccagcag

SEQ ID NO: 1422501 - RNA, 22 nt, Human
ccuagguauaauucacauugua

SEQ ID NO: 1422502 - RNA, 22 nt, Human
ccgugugguaagcaacauggcu

SEQ ID NO: 1422503 - RNA, 23 nt, Human
ccgugugguaagcaacauggcuu

SEQ ID NO: 1422504 - RNA, 21 nt, Human
ccgugugguaagcaacauggc

SEQ ID NO: 1422505 - RNA, 20 nt, Human
ccgugugggagaccggccug

SEQ ID NO: 1422506 - RNA, 17 nt, Human
ccguuagcuccuguggc

SEQ ID NO: 1422507 - RNA, 15 nt, Human
ccguuagcuccugug

SEQ ID NO: 1422508 - RNA, 14 nt, Human
ccguuagcuccugu

SEQ ID NO: 1422509 - RNA, 13 nt, Human
ccguuagcuccug

SEQ ID NO: 1422510 - RNA, 13 nt, Human
ccuaaacauauga

SEQ ID NO: 1422511 - RNA, 18 nt, Human
ccguuagcuccuguggcc

SEQ ID NO: 1422512 - RNA, 21 nt, Human
ccuacagaaaaaccuuggguu

SEQ ID NO: 1422513 - RNA, 20 nt, Human
ccuacagaacuucagaaaga

SEQ ID NO: 1422514 - RNA, 22 nt, Human
ccuaacaacauuguagccucaa

SEQ ID NO: 1422515 - RNA, 21 nt, Human
ccuaacaacauuguagccuca

SEQ ID NO: 1422516 - RNA, 22 nt, Human
ccuaaauuuuccuguccucuuu

SEQ ID NO: 1422517 - RNA, 20 nt, Human
ccuaaauuuuccuguccucu

SEQ ID NO: 1422518 - RNA, 15 nt, Human
ccuaaauuauuuacu

SEQ ID NO: 1422519 - RNA, 18 nt, Human
ccuaaauggccucaugug

SEQ ID NO: 1422520 - RNA, 14 nt, Human
ccuaaauggccuca

SEQ ID NO: 1422521 - RNA, 12 nt, Human
ccguuauuaaaa

SEQ ID NO: 1422522 - RNA, 14 nt, Human
cccuuucccacccc

SEQ ID NO: 1422523 - RNA, 12 nt, Human
cccuuucccacc

SEQ ID NO: 1422524 - RNA, 20 nt, Human
cccuuucacaggcagccagu

SEQ ID NO: 1422525 - RNA, 15 nt, Human
cccuuucacaggcag

SEQ ID NO: 1422526 - RNA, 18 nt, Human
cccuuuagaucucugaag

SEQ ID NO: 1422527 - RNA, 20 nt, Human
cccuuguuuggggcaggagu

SEQ ID NO: 1422528 - RNA, 21 nt, Human
cccuugugaaucaagggucag

SEQ ID NO: 1422529 - RNA, 23 nt, Human
cccuuguagcuccuccccuggag

SEQ ID NO: 1422530 - RNA, 21 nt, Human
cccuuguagcuccuccccugg

SEQ ID NO: 1422531 - RNA, 18 nt, Human
cccuuguauccccugcag

SEQ ID NO: 1422532 - RNA, 18 nt, Human
cccuuguagcuccucccc

SEQ ID NO: 1422533 - RNA, 17 nt, Human
cccuuguagcuccuccc

SEQ ID NO: 1422534 - RNA, 21 nt, Human
cccuugacaacuggcaggcag

SEQ ID NO: 1422535 - RNA, 18 nt, Human
cccuugacaacuggcagg

SEQ ID NO: 1422536 - RNA, 17 nt, Human
cccuugacaacuggcag

SEQ ID NO: 1422537 - RNA, 12 nt, Human
cccuugaacucu

SEQ ID NO: 1422538 - RNA, 18 nt, Human
cccuuccgccacuggggc

SEQ ID NO: 1422539 - RNA, 11 nt, Human
cccuucuuuuu

SEQ ID NO: 1422540 - RNA, 14 nt, Human
cccuuggacacgcu

SEQ ID NO: 1422541 - RNA, 16 nt, Human
cccuuggacacgcuca

SEQ ID NO: 1422542 - RNA, 19 nt, Human
cccuugacaacuggcaggc

SEQ ID NO: 1422543 - RNA, 15 nt, Human
cccuugacaccugcu

SEQ ID NO: 1422544 - RNA, 16 nt, Human
cccuuccgccacuggg

SEQ ID NO: 1422545 - RNA, 15 nt, Human
cccuuccgccacugg

SEQ ID NO: 1422546 - RNA, 19 nt, Human
cccuucccuugagcccucu

SEQ ID NO: 1422547 - RNA, 23 nt, Human
cccuucccacaggacauuucucu

SEQ ID NO: 1422548 - RNA, 14 nt, Human
cccuucccacagga

SEQ ID NO: 1422549 - RNA, 16 nt, Human
cccuucaugcauggaa

SEQ ID NO: 1422550 - RNA, 17 nt, Human
cccuguguugucucuag

SEQ ID NO: 1422551 - RNA, 16 nt, Human
cccuguguugucucua

SEQ ID NO: 1422552 - RNA, 15 nt, Human
cccuguguugucucu

SEQ ID NO: 1422553 - RNA, 13 nt, Human
cccuguguugucu

SEQ ID NO: 1422554 - RNA, 21 nt, Human
cccuguguugucucuagagca

SEQ ID NO: 1422555 - RNA, 18 nt, Human
cccuguguugucucuaga

SEQ ID NO: 1422556 - RNA, 23 nt, Human
cccuggugggccaacaaagaaca

SEQ ID NO: 1422557 - RNA, 17 nt, Human
cccuucaguacccucuc

SEQ ID NO: 1422558 - RNA, 23 nt, Human
cccuguguugucucuagagcagg

SEQ ID NO: 1422559 - RNA, 21 nt, Human
cccuucaguacccucucagcu

SEQ ID NO: 1422560 - RNA, 20 nt, Human
cccuucaguacccucucagc

SEQ ID NO: 1422561 - RNA, 19 nt, Human
cccuucaguacccucucag

SEQ ID NO: 1422562 - RNA, 14 nt, Human
cccuucaucuggaa

SEQ ID NO: 1422563 - RNA, 16 nt, Human
cccuucaucuggaacc

SEQ ID NO: 1422564 - RNA, 16 nt, Human
ccguggaggcugcucg

SEQ ID NO: 1422565 - RNA, 23 nt, Human
ccguggauugcacguggccucuu

SEQ ID NO: 1422566 - RNA, 22 nt, Human
ccguggauugcacguggccucu

SEQ ID NO: 1422567 - RNA, 20 nt, Human
ccguggauugcacguggccu

SEQ ID NO: 1422568 - RNA, 19 nt, Human
ccguggauugcacguggcc

SEQ ID NO: 1422569 - RNA, 22 nt, Human
ccguggaggcugcucggggugc

SEQ ID NO: 1422570 - RNA, 15 nt, Human
ccguggaggcugcuc

SEQ ID NO: 1422571 - RNA, 14 nt, Human
ccguggaggcugcu

SEQ ID NO: 1422572 - RNA, 12 nt, Human
ccguggaggcug

SEQ ID NO: 1422573 - RNA, 11 nt, Human
ccguggaggcu

SEQ ID NO: 1422574 - RNA, 14 nt, Human
ccgguguucuaaga

SEQ ID NO: 1422575 - RNA, 13 nt, Human
ccgguguucuaag

SEQ ID NO: 1422576 - RNA, 12 nt, Human
ccgguguucuaa

SEQ ID NO: 1422577 - RNA, 22 nt, Human
ccggucgcccuuugcugcaugg

SEQ ID NO: 1422578 - RNA, 23 nt, Human
ccggucgcccuuugcugcauggc

SEQ ID NO: 1422579 - RNA, 18 nt, Human
ccggucgcccuuugcugc

SEQ ID NO: 1422580 - RNA, 14 nt, Human
ccggggcagccccc

SEQ ID NO: 1422581 - RNA, 20 nt, Human
ccggggaacuggccaagcug

SEQ ID NO: 1422582 - RNA, 19 nt, Human
ccggggaacuggccaagcu

SEQ ID NO: 1422583 - RNA, 18 nt, Human
ccggggaacuggccaagc

SEQ ID NO: 1422584 - RNA, 17 nt, Human
ccggggaacuggccaag

SEQ ID NO: 1422585 - RNA, 16 nt, Human
ccggggaacuggccaa

SEQ ID NO: 1422586 - RNA, 19 nt, Human
ccggggccugggcaggagg

SEQ ID NO: 1422587 - RNA, 15 nt, Human
ccggggccagcacuu

SEQ ID NO: 1422588 - RNA, 15 nt, Human
ccggggccugggcag

SEQ ID NO: 1422589 - RNA, 15 nt, Human
ccggggaacuggcca

SEQ ID NO: 1422590 - RNA, 15 nt, Human
ccgggagcucaggaa

SEQ ID NO: 1422591 - RNA, 13 nt, Human
ccgggagcucagg

SEQ ID NO: 1422592 - RNA, 14 nt, Human
ccggagaguggggg

SEQ ID NO: 1422593 - RNA, 16 nt, Human
ccggagagugggggug

SEQ ID NO: 1422594 - RNA, 14 nt, Human
ccggagaggaccgg

SEQ ID NO: 1422595 - RNA, 14 nt, Human
ccggagagccagcu

SEQ ID NO: 1422596 - RNA, 13 nt, Human
ccggagagccagc

SEQ ID NO: 1422597 - RNA, 16 nt, Human
ccggacuuuucugcaa

SEQ ID NO: 1422598 - RNA, 15 nt, Human
ccggacuuuucugca

SEQ ID NO: 1422599 - RNA, 23 nt, Human
ccggacuuagaaaaccagcucag

SEQ ID NO: 1422600 - RNA, 20 nt, Human
ccggacucaagccccggacu

SEQ ID NO: 1422601 - RNA, 23 nt, Human
cccuuucccaccccaaccugcuc

SEQ ID NO: 1422602 - RNA, 20 nt, Human
cccuuucccaccccaaccug

SEQ ID NO: 1422603 - RNA, 17 nt, Human
cccuuucccaccccaac

SEQ ID NO: 1422604 - RNA, 19 nt, Human
ccggcuuuguggcacuggg

SEQ ID NO: 1422605 - RNA, 17 nt, Human
ccggcuuuguggcacug

SEQ ID NO: 1422606 - RNA, 16 nt, Human
ccggcuuuguggcacu

SEQ ID NO: 1422607 - RNA, 16 nt, Human
ccggaucugagggaga

SEQ ID NO: 1422608 - RNA, 20 nt, Human
ccuaucuccagcggcccugu

SEQ ID NO: 1422609 - RNA, 13 nt, Human
ccuaucccaccuc

SEQ ID NO: 1422610 - RNA, 23 nt, Human
ccuagugaaggcuucucucugug

SEQ ID NO: 1422611 - RNA, 22 nt, Human
ccuagugaaggcuucucucugu

SEQ ID NO: 1422612 - RNA, 21 nt, Human
ccuagugaaggcuucucucug

SEQ ID NO: 1422613 - RNA, 19 nt, Human
ccuagugaaggcuucucuc

SEQ ID NO: 1422614 - RNA, 18 nt, Human
ccuagugaaggcuucucu

SEQ ID NO: 1422615 - RNA, 13 nt, Human
ccucacagugaac

SEQ ID NO: 1422616 - RNA, 22 nt, Human
ccuauugcuagagcuccucccu

SEQ ID NO: 1422617 - RNA, 18 nt, Human
ccuauugcuagagcuccu

SEQ ID NO: 1422618 - RNA, 16 nt, Human
ccuauugcuagagcuc

SEQ ID NO: 1422619 - RNA, 12 nt, Human
ccucacacuggg

SEQ ID NO: 1422620 - RNA, 11 nt, Human
ccucacacagc

SEQ ID NO: 1422621 - RNA, 13 nt, Human
ccucacacuggga

SEQ ID NO: 1422622 - RNA, 15 nt, Human
ccucacacugggacu

SEQ ID NO: 1422623 - RNA, 12 nt, Human
ccuaucugggcu

SEQ ID NO: 1422624 - RNA, 19 nt, Human
ccuaucugggcuuccugga

SEQ ID NO: 1422625 - RNA, 18 nt, Human
ccuaucugggcuuccugg

SEQ ID NO: 1422626 - RNA, 17 nt, Human
ccuaucugggcuuccug

SEQ ID NO: 1422627 - RNA, 16 nt, Human
ccuaucugggcuuccu

SEQ ID NO: 1422628 - RNA, 22 nt, Human
ccuauguuuuuguucaaagcca

SEQ ID NO: 1422629 - RNA, 22 nt, Human
ccuaucugggcuuccuggagca

SEQ ID NO: 1422630 - RNA, 20 nt, Human
ccuaucugggcuuccuggag

SEQ ID NO: 1422631 - RNA, 16 nt, Human
ccuauuaucccagcug

SEQ ID NO: 1422632 - RNA, 12 nt, Human
ccuauuauccca

SEQ ID NO: 1422633 - RNA, 16 nt, Human
ccuauuaaccuagaga

SEQ ID NO: 1422634 - RNA, 17 nt, Human
ccuauuaucugucagcu

SEQ ID NO: 1422635 - RNA, 18 nt, Human
ccuauuaucccagcugcc

SEQ ID NO: 1422636 - RNA, 17 nt, Human
ccuauuaucccagcugc

SEQ ID NO: 1422637 - RNA, 21 nt, Human
ccuauucaacacacacaugcu

SEQ ID NO: 1422638 - RNA, 23 nt, Human
ccuauucaacacacacaugcuuc

SEQ ID NO: 1422639 - RNA, 18 nt, Human
ccucagccccgcguggaa

SEQ ID NO: 1422640 - RNA, 14 nt, Human
ccucagccagccuc

SEQ ID NO: 1422641 - RNA, 13 nt, Human
ccucagccagccu

SEQ ID NO: 1422642 - RNA, 12 nt, Human
ccucagccagcc

SEQ ID NO: 1422643 - RNA, 21 nt, Human
ccucagauuccuucccaugga

SEQ ID NO: 1422644 - RNA, 22 nt, Human
ccucagauuccuucccauggag

SEQ ID NO: 1422645 - RNA, 17 nt, Human
ccucagauuccuuccca

SEQ ID NO: 1422646 - RNA, 16 nt, Human
ccucagauuccuuccc

SEQ ID NO: 1422647 - RNA, 23 nt, Human
ccucagauggcagcuuuuaaaag

SEQ ID NO: 1422648 - RNA, 21 nt, Human
ccucagauggcagcuuuuaaa

SEQ ID NO: 1422649 - RNA, 17 nt, Human
ccucagauggcagcuuu

SEQ ID NO: 1422650 - RNA, 16 nt, Human
ccucagauggcagcuu

SEQ ID NO: 1422651 - RNA, 15 nt, Human
ccucagauggcagcu

SEQ ID NO: 1422652 - RNA, 14 nt, Human
ccucagauggcagc

SEQ ID NO: 1422653 - RNA, 20 nt, Human
ccucagaugcacaugagcug

SEQ ID NO: 1422654 - RNA, 16 nt, Human
ccucagggacucaggu

SEQ ID NO: 1422655 - RNA, 15 nt, Human
ccucagggacucagg

SEQ ID NO: 1422656 - RNA, 19 nt, Human
ccucacuggcucuccuggc

SEQ ID NO: 1422657 - RNA, 18 nt, Human
ccucacuggcucuccugg

SEQ ID NO: 1422658 - RNA, 17 nt, Human
ccucacuggcucuccug

SEQ ID NO: 1422659 - RNA, 16 nt, Human
ccucacuggcucuccu

SEQ ID NO: 1422660 - RNA, 13 nt, Human
ccucacuggcucu

SEQ ID NO: 1422661 - RNA, 16 nt, Human
ccucagagacaucagc

SEQ ID NO: 1422662 - RNA, 15 nt, Human
ccucagacuggggca

SEQ ID NO: 1422663 - RNA, 20 nt, Human
ccucacuguauccagguucc

SEQ ID NO: 1422664 - RNA, 21 nt, Human
ccucagagaccagggcuccag

SEQ ID NO: 1422665 - RNA, 19 nt, Human
ccucagagaccagggcucc

SEQ ID NO: 1422666 - RNA, 17 nt, Human
ccucagagaccagggcu

SEQ ID NO: 1422667 - RNA, 16 nt, Human
ccucagagaccagggc

SEQ ID NO: 1422668 - RNA, 14 nt, Human
ccucagagaccagg

SEQ ID NO: 1422669 - RNA, 20 nt, Human
ccucagagacaucagcccuu

SEQ ID NO: 1422670 - RNA, 19 nt, Human
ccucacucgucucccccaa

SEQ ID NO: 1422671 - RNA, 13 nt, Human
ccucaccuccucu

SEQ ID NO: 1422672 - RNA, 22 nt, Human
ccucacccugccuuaucuugca

SEQ ID NO: 1422673 - RNA, 15 nt, Human
ccucacccugccuua

SEQ ID NO: 1422674 - RNA, 14 nt, Human
ccucacccugccuu

SEQ ID NO: 1422675 - RNA, 18 nt, Human
ccucaccgagugggggca

SEQ ID NO: 1422676 - RNA, 12 nt, Human
ccucaccauucc

SEQ ID NO: 1422677 - RNA, 18 nt, Human
ccucaccagcccuggcaa

SEQ ID NO: 1422678 - RNA, 19 nt, Human
ccucugagacuccagaccu

SEQ ID NO: 1422679 - RNA, 15 nt, Human
ccucugagacuccag

SEQ ID NO: 1422680 - RNA, 22 nt, Human
ccucugacucagggcuccuggg

SEQ ID NO: 1422681 - RNA, 21 nt, Human
ccucugacucagggcuccugg

SEQ ID NO: 1422682 - RNA, 19 nt, Human
ccucugacucagggcuccu

SEQ ID NO: 1422683 - RNA, 17 nt, Human
ccucugacucagggcuc

SEQ ID NO: 1422684 - RNA, 16 nt, Human
ccucugacucagggcu

SEQ ID NO: 1422685 - RNA, 12 nt, Human
ccucugacucag

SEQ ID NO: 1422686 - RNA, 17 nt, Human
ccucugaccugcacugg

SEQ ID NO: 1422687 - RNA, 16 nt, Human
ccucugaccugcacug

SEQ ID NO: 1422688 - RNA, 14 nt, Human
ccucugaccugcac

SEQ ID NO: 1422689 - RNA, 19 nt, Human
ccucugacagcagcaucuc

SEQ ID NO: 1422690 - RNA, 20 nt, Human
ccucugacagcagcaucucu

SEQ ID NO: 1422691 - RNA, 18 nt, Human
ccucugacagcagcaucu

SEQ ID NO: 1422692 - RNA, 15 nt, Human
ccucugacagcagca

SEQ ID NO: 1422693 - RNA, 14 nt, Human
ccucugacagcagc

SEQ ID NO: 1422694 - RNA, 13 nt, Human
ccucugacagcag

SEQ ID NO: 1422695 - RNA, 12 nt, Human
ccucugacagca

SEQ ID NO: 1422696 - RNA, 12 nt, Human
ccucugaaauac

SEQ ID NO: 1422697 - RNA, 22 nt, Human
ccucucccuugggcucugauga

SEQ ID NO: 1422698 - RNA, 20 nt, Human
ccucucccuugggcucugau

SEQ ID NO: 1422699 - RNA, 19 nt, Human
ccucucccuugggcucuga

SEQ ID NO: 1422700 - RNA, 22 nt, Human
ccucugaggccagccuggccuc

SEQ ID NO: 1422701 - RNA, 21 nt, Human
ccucugaggccagccuggccu

SEQ ID NO: 1422702 - RNA, 20 nt, Human
ccucugaggccagccuggcc

SEQ ID NO: 1422703 - RNA, 19 nt, Human
ccucugaggccagccuggc

SEQ ID NO: 1422704 - RNA, 18 nt, Human
ccucugaggccagccugg

SEQ ID NO: 1422705 - RNA, 17 nt, Human
ccucugaggccagccug

SEQ ID NO: 1422706 - RNA, 16 nt, Human
ccucugaggccagccu

SEQ ID NO: 1422707 - RNA, 15 nt, Human
ccucugaggccagcc

SEQ ID NO: 1422708 - RNA, 14 nt, Human
ccucugaggccagc

SEQ ID NO: 1422709 - RNA, 12 nt, Human
ccucugaggcca

SEQ ID NO: 1422710 - RNA, 16 nt, Human
ccucugagacuccaga

SEQ ID NO: 1422711 - RNA, 14 nt, Human
ccucugcagcaaua

SEQ ID NO: 1422712 - RNA, 18 nt, Human
ccucugcagcaauaaagc

SEQ ID NO: 1422713 - RNA, 19 nt, Human
ccucugcagcaauaaagca

SEQ ID NO: 1422714 - RNA, 22 nt, Human
ccucuacugggaaggcuacuuc

SEQ ID NO: 1422715 - RNA, 17 nt, Human
ccucuacugggaaggcu

SEQ ID NO: 1422716 - RNA, 16 nt, Human
ccucuacugggaaggc

SEQ ID NO: 1422717 - RNA, 14 nt, Human
ccucuacugggaag

SEQ ID NO: 1422718 - RNA, 15 nt, Human
ccucuaccccaauuu

SEQ ID NO: 1422719 - RNA, 11 nt, Human
ccucuacaggg

SEQ ID NO: 1422720 - RNA, 24 nt, Human
ccucuacagagcuucccugacuca

SEQ ID NO: 1422721 - RNA, 21 nt, Human
ccucuacagagcuucccugac

SEQ ID NO: 1422722 - RNA, 20 nt, Human
ccucuacagagcuucccuga

SEQ ID NO: 1422723 - RNA, 19 nt, Human
ccucucccacccucuuccu

SEQ ID NO: 1422724 - RNA, 18 nt, Human
ccucucccacccucuucc

SEQ ID NO: 1422725 - RNA, 16 nt, Human
ccucucccacccucuu

SEQ ID NO: 1422726 - RNA, 15 nt, Human
ccucucccacccucu

SEQ ID NO: 1422727 - RNA, 14 nt, Human
ccucucccacccuc

SEQ ID NO: 1422728 - RNA, 13 nt, Human
ccucucccacccu

SEQ ID NO: 1422729 - RNA, 12 nt, Human
ccucucccaggc

SEQ ID NO: 1422730 - RNA, 20 nt, Human
ccucucccacccucuuccua

SEQ ID NO: 1422731 - RNA, 14 nt, Human
ccucucccugcaug

SEQ ID NO: 1422732 - RNA, 16 nt, Human
ccucucccugcauggc

SEQ ID NO: 1422733 - RNA, 23 nt, Human
ccucucccuccuccaggaagccu

SEQ ID NO: 1422734 - RNA, 18 nt, Human
ccucucccuccuccagga

SEQ ID NO: 1422735 - RNA, 18 nt, Human
ccucuccccugccugccc

SEQ ID NO: 1422736 - RNA, 17 nt, Human
ccucuccccagcccaga

SEQ ID NO: 1422737 - RNA, 16 nt, Human
ccucuccccagcccag

SEQ ID NO: 1422738 - RNA, 14 nt, Human
ccucuccccagccc

SEQ ID NO: 1422739 - RNA, 12 nt, Human
ccucuccccagc

SEQ ID NO: 1422740 - RNA, 18 nt, Human
ccuccuucuucagggacu

SEQ ID NO: 1422741 - RNA, 22 nt, Human
ccuccuucugagcuccuguccc

SEQ ID NO: 1422742 - RNA, 21 nt, Human
ccuccuucugagcuccugucc

SEQ ID NO: 1422743 - RNA, 20 nt, Human
ccuccuucugagcuccuguc

SEQ ID NO: 1422744 - RNA, 19 nt, Human
ccuccuucugagcuccugu

SEQ ID NO: 1422745 - RNA, 17 nt, Human
ccuccuucugagcuccu

SEQ ID NO: 1422746 - RNA, 19 nt, Human
ccuccucuaagguugggca

SEQ ID NO: 1422747 - RNA, 18 nt, Human
ccuccuccagggacagca

SEQ ID NO: 1422748 - RNA, 23 nt, Human
ccuccucccacccggcugcagag

SEQ ID NO: 1422749 - RNA, 19 nt, Human
ccuccucccacccggcugc

SEQ ID NO: 1422750 - RNA, 16 nt, Human
ccuccucccacccggc

SEQ ID NO: 1422751 - RNA, 16 nt, Human
ccuccuccagggacag

SEQ ID NO: 1422752 - RNA, 15 nt, Human
ccuccuccagggaca

SEQ ID NO: 1422753 - RNA, 14 nt, Human
ccuccuccagggac

SEQ ID NO: 1422754 - RNA, 13 nt, Human
ccuccuccaggga

SEQ ID NO: 1422755 - RNA, 12 nt, Human
ccuccuccaggg

SEQ ID NO: 1422756 - RNA, 19 nt, Human
ccuccuuucaucacacugg

SEQ ID NO: 1422757 - RNA, 14 nt, Human
ccuccuucugcugc

SEQ ID NO: 1422758 - RNA, 18 nt, Human
ccucuacagagcuucccu

SEQ ID NO: 1422759 - RNA, 19 nt, Human
ccucuaagguugggcaggg

SEQ ID NO: 1422760 - RNA, 21 nt, Human
ccucuaacuuggcucacacuc

SEQ ID NO: 1422761 - RNA, 17 nt, Human
ccucuaacuuggcucac

SEQ ID NO: 1422762 - RNA, 15 nt, Human
ccucguggacaccug

SEQ ID NO: 1422763 - RNA, 16 nt, Human
ccucguggacaccugc

SEQ ID NO: 1422764 - RNA, 17 nt, Human
ccucguggacaccugcc

SEQ ID NO: 1422765 - RNA, 18 nt, Human
ccucguggacaccugccc

SEQ ID NO: 1422766 - RNA, 20 nt, Human
ccucguggacaccugcccug

SEQ ID NO: 1422767 - RNA, 21 nt, Human
ccucguggacaccugcccugc

SEQ ID NO: 1422768 - RNA, 22 nt, Human
ccucguggacaccugcccugcc

SEQ ID NO: 1422769 - RNA, 21 nt, Human
ccucccucugcugucaccuug

SEQ ID NO: 1422770 - RNA, 14 nt, Human
ccucccucugcugu

SEQ ID NO: 1422771 - RNA, 22 nt, Human
ccucccucucguaagauuuccu

SEQ ID NO: 1422772 - RNA, 20 nt, Human
ccucccgagcuccucuucca

SEQ ID NO: 1422773 - RNA, 19 nt, Human
ccucccgagcuccucuucc

SEQ ID NO: 1422774 - RNA, 14 nt, Human
ccucccgagcuccu

SEQ ID NO: 1422775 - RNA, 21 nt, Human
ccuccccgcaccccccaagcu

SEQ ID NO: 1422776 - RNA, 15 nt, Human
ccuccccgcaccccc

SEQ ID NO: 1422777 - RNA, 14 nt, Human
ccucccccuguccc

SEQ ID NO: 1422778 - RNA, 16 nt, Human
ccucccccugccagga

SEQ ID NO: 1422779 - RNA, 14 nt, Human
ccucccccugccag

SEQ ID NO: 1422780 - RNA, 13 nt, Human
ccucccccugcca

SEQ ID NO: 1422781 - RNA, 19 nt, Human
ccucccccccaugcacugu

SEQ ID NO: 1422782 - RNA, 17 nt, Human
ccucccccccaugcacu

SEQ ID NO: 1422783 - RNA, 16 nt, Human
ccucccccccaugcac

SEQ ID NO: 1422784 - RNA, 15 nt, Human
ccucccccccaugca

SEQ ID NO: 1422785 - RNA, 12 nt, Human
ccucccccugag

SEQ ID NO: 1422786 - RNA, 12 nt, Human
ccuccaugggcc

SEQ ID NO: 1422787 - RNA, 16 nt, Human
ccuccccuccaucccu

SEQ ID NO: 1422788 - RNA, 20 nt, Human
ccuccccuccaucccuggcc

SEQ ID NO: 1422789 - RNA, 14 nt, Human
ccuccccuccaucc

SEQ ID NO: 1422790 - RNA, 13 nt, Human
ccuccccuccagc

SEQ ID NO: 1422791 - RNA, 12 nt, Human
ccuccccuccag

SEQ ID NO: 1422792 - RNA, 18 nt, Human
ccuccccugccagggcag

SEQ ID NO: 1422793 - RNA, 16 nt, Human
ccuccccugccagggc

SEQ ID NO: 1422794 - RNA, 13 nt, Human
ccuccccugccag

SEQ ID NO: 1422795 - RNA, 17 nt, Human
ccuccccugccaccagg

SEQ ID NO: 1422796 - RNA, 14 nt, Human
ccuccccugccacc

SEQ ID NO: 1422797 - RNA, 13 nt, Human
ccuccccugccac

SEQ ID NO: 1422798 - RNA, 12 nt, Human
ccuccccugcca

SEQ ID NO: 1422799 - RNA, 19 nt, Human
ccucaguuuuaucauuuuc

SEQ ID NO: 1422800 - RNA, 13 nt, Human
ccuccaggaagcc

SEQ ID NO: 1422801 - RNA, 15 nt, Human
ccuccaggaagccuu

SEQ ID NO: 1422802 - RNA, 17 nt, Human
ccuccagcuuuccugua

SEQ ID NO: 1422803 - RNA, 14 nt, Human
ccuccagcuuuccu

SEQ ID NO: 1422804 - RNA, 13 nt, Human
ccuccagcuuucc

SEQ ID NO: 1422805 - RNA, 11 nt, Human
ccuccagcugu

SEQ ID NO: 1422806 - RNA, 12 nt, Human
ccuccagcuguu

SEQ ID NO: 1422807 - RNA, 18 nt, Human
ccuccagcucccugugcc

SEQ ID NO: 1422808 - RNA, 21 nt, Human
ccuccagcucccugugccccc

SEQ ID NO: 1422809 - RNA, 20 nt, Human
ccuccacucuuucuuucaau

SEQ ID NO: 1422810 - RNA, 15 nt, Human
ccuccacucuuucuu

SEQ ID NO: 1422811 - RNA, 18 nt, Human
ccuccaugggccccaggg

SEQ ID NO: 1422812 - RNA, 11 nt, Human
ccuccauggga

SEQ ID NO: 1422813 - RNA, 17 nt, Human
ccuccaucccuggcccc

SEQ ID NO: 1422814 - RNA, 16 nt, Human
ccuccaucccuggccc

SEQ ID NO: 1422815 - RNA, 14 nt, Human
ccuccaucccuggc

SEQ ID NO: 1422816 - RNA, 23 nt, Human
ccuccauccuacccccugugccu

SEQ ID NO: 1422817 - RNA, 22 nt, Human
ccuccauccuacccccugugcc

SEQ ID NO: 1422818 - RNA, 12 nt, Human
ccuccaucccug

SEQ ID NO: 1422819 - RNA, 17 nt, Human
ccuccauccuacccccu

SEQ ID NO: 1422820 - RNA, 17 nt, Human
ccuccagggugugugcu

SEQ ID NO: 1422821 - RNA, 20 nt, Human
ccuccaggguggcagcaaca

SEQ ID NO: 1422822 - RNA, 21 nt, Human
ccuccaggguggcagcaacaa

SEQ ID NO: 1422823 - RNA, 12 nt, Human
cccaguguggcu

SEQ ID NO: 1422824 - RNA, 16 nt, Human
cccaguguuuuaggag

SEQ ID NO: 1422825 - RNA, 17 nt, Human
cccaguguuuuaggagc

SEQ ID NO: 1422826 - RNA, 14 nt, Human
cccaguucacccug

SEQ ID NO: 1422827 - RNA, 14 nt, Human
cccaguuaaucuug

SEQ ID NO: 1422828 - RNA, 18 nt, Human
cccagugcccucuccccu

SEQ ID NO: 1422829 - RNA, 14 nt, Human
cccagugcccccac

SEQ ID NO: 1422830 - RNA, 14 nt, Human
cccagugcccucuc

SEQ ID NO: 1422831 - RNA, 22 nt, Human
cccagugcccccacugaccaga

SEQ ID NO: 1422832 - RNA, 20 nt, Human
cccagugcccccacugacca

SEQ ID NO: 1422833 - RNA, 19 nt, Human
cccagugcccccacugacc

SEQ ID NO: 1422834 - RNA, 22 nt, Human
cccaguacacaggggcuugacu

SEQ ID NO: 1422835 - RNA, 18 nt, Human
cccaguacaccccaccuc

SEQ ID NO: 1422836 - RNA, 19 nt, Human
cccaguacaccccaccucu

SEQ ID NO: 1422837 - RNA, 15 nt, Human
cccaguaacucaucu

SEQ ID NO: 1422838 - RNA, 18 nt, Human
cccaguaaaauugccaua

SEQ ID NO: 1422839 - RNA, 22 nt, Human
cccagguaggggccccucucag

SEQ ID NO: 1422840 - RNA, 14 nt, Human
cccagguccagcuc

SEQ ID NO: 1422841 - RNA, 23 nt, Human
cccagguaggggccccucucagc

SEQ ID NO: 1422842 - RNA, 12 nt, Human
cccaguaaaauu

SEQ ID NO: 1422843 - RNA, 13 nt, Human
cccaguaaaauug

SEQ ID NO: 1422844 - RNA, 16 nt, Human
cccaguaaaauugcca

SEQ ID NO: 1422845 - RNA, 17 nt, Human
cccaguaaaauugccau

SEQ ID NO: 1422846 - RNA, 21 nt, Human
cccagguaggggccccucuca

SEQ ID NO: 1422847 - RNA, 20 nt, Human
cccagguaggggccccucuc

SEQ ID NO: 1422848 - RNA, 17 nt, Human
cccagguaggggccccu

SEQ ID NO: 1422849 - RNA, 20 nt, Human
cccagguaggccaagguguc

SEQ ID NO: 1422850 - RNA, 17 nt, Human
cccagguaggccaaggu

SEQ ID NO: 1422851 - RNA, 19 nt, Human
cccauggggagggauucug

SEQ ID NO: 1422852 - RNA, 12 nt, Human
cccaucuugcuu

SEQ ID NO: 1422853 - RNA, 14 nt, Human
cccaucucaugccc

SEQ ID NO: 1422854 - RNA, 20 nt, Human
cccaucucaugccccuggcu

SEQ ID NO: 1422855 - RNA, 23 nt, Human
cccaucucaggccagagccaagg

SEQ ID NO: 1422856 - RNA, 16 nt, Human
cccaucucaggccaga

SEQ ID NO: 1422857 - RNA, 11 nt, Human
cccaucucagg

SEQ ID NO: 1422858 - RNA, 22 nt, Human
cccaucguugcccccauuucug

SEQ ID NO: 1422859 - RNA, 20 nt, Human
cccaucguugcccccauuuc

SEQ ID NO: 1422860 - RNA, 22 nt, Human
cccaucgucucggccuucacaa

SEQ ID NO: 1422861 - RNA, 19 nt, Human
cccaucgucucggccuuca

SEQ ID NO: 1422862 - RNA, 20 nt, Human
ccccaacuacccccagcugu

SEQ ID NO: 1422863 - RNA, 20 nt, Human
ccccaaccugcucuccucuu

SEQ ID NO: 1422864 - RNA, 21 nt, Human
ccccaaccugcucuccucuuc

SEQ ID NO: 1422865 - RNA, 19 nt, Human
ccccaaccugcucuccucu

SEQ ID NO: 1422866 - RNA, 16 nt, Human
ccccaaccugcucucc

SEQ ID NO: 1422867 - RNA, 15 nt, Human
ccccaaccugcucuc

SEQ ID NO: 1422868 - RNA, 14 nt, Human
ccccaaccugcucu

SEQ ID NO: 1422869 - RNA, 13 nt, Human
ccccaaccugcuc

SEQ ID NO: 1422870 - RNA, 23 nt, Human
ccccaacccguggaggcugcucg

SEQ ID NO: 1422871 - RNA, 20 nt, Human
ccccaacccguggaggcugc

SEQ ID NO: 1422872 - RNA, 21 nt, Human
ccccaaagcuuuccugcccca

SEQ ID NO: 1422873 - RNA, 19 nt, Human
ccccaaagcuuuccugccc

SEQ ID NO: 1422874 - RNA, 18 nt, Human
ccccaaagcuuuccugcc

SEQ ID NO: 1422875 - RNA, 16 nt, Human
ccccaaagcuuuccug

SEQ ID NO: 1422876 - RNA, 17 nt, Human
cccauggugcuaggaag

SEQ ID NO: 1422877 - RNA, 17 nt, Human
cccaugucuacacagau

SEQ ID NO: 1422878 - RNA, 13 nt, Human
cccauguuucaaa

SEQ ID NO: 1422879 - RNA, 18 nt, Human
cccauuagaccaagcuug

SEQ ID NO: 1422880 - RNA, 21 nt, Human
cccauguucugucccuugccc

SEQ ID NO: 1422881 - RNA, 21 nt, Human
cccauguguccugguucccgu

SEQ ID NO: 1422882 - RNA, 15 nt, Human
cccauguucuguccc

SEQ ID NO: 1422883 - RNA, 20 nt, Human
ccaugcgcccccuccgcccu

SEQ ID NO: 1422884 - RNA, 14 nt, Human
ccaugcgcccccuc

SEQ ID NO: 1422885 - RNA, 15 nt, Human
ccaugaaccaagacc

SEQ ID NO: 1422886 - RNA, 17 nt, Human
ccaugcugaggccuggg

SEQ ID NO: 1422887 - RNA, 16 nt, Human
ccaugcugaggccugg

SEQ ID NO: 1422888 - RNA, 15 nt, Human
ccaugcugaggccug

SEQ ID NO: 1422889 - RNA, 21 nt, Human
ccaugcugcuggggaagacag

SEQ ID NO: 1422890 - RNA, 20 nt, Human
ccaugcugcuggggaagaca

SEQ ID NO: 1422891 - RNA, 19 nt, Human
ccaugcugcuggggaagac

SEQ ID NO: 1422892 - RNA, 14 nt, Human
ccaugcugcugggg

SEQ ID NO: 1422893 - RNA, 13 nt, Human
ccaugugcccagu

SEQ ID NO: 1422894 - RNA, 23 nt, Human
ccauggaguggcagcccagccag

SEQ ID NO: 1422895 - RNA, 21 nt, Human
ccauggaguggcagcccagcc

SEQ ID NO: 1422896 - RNA, 20 nt, Human
ccauggaguggcagcccagc

SEQ ID NO: 1422897 - RNA, 19 nt, Human
ccauggaguggcagcccag

SEQ ID NO: 1422898 - RNA, 15 nt, Human
ccauggaguggcagc

SEQ ID NO: 1422899 - RNA, 20 nt, Human
ccauggccagcagcaccugc

SEQ ID NO: 1422900 - RNA, 21 nt, Human
ccauggccagcagcaccugcc

SEQ ID NO: 1422901 - RNA, 16 nt, Human
ccauggccagcagcac

SEQ ID NO: 1422902 - RNA, 13 nt, Human
ccauggccagcag

SEQ ID NO: 1422903 - RNA, 14 nt, Human
ccauggcaggaagg

SEQ ID NO: 1422904 - RNA, 22 nt, Human
ccauggaguggcagcccagcca

SEQ ID NO: 1422905 - RNA, 18 nt, Human
ccauggagauugaccugg

SEQ ID NO: 1422906 - RNA, 19 nt, Human
ccauggagauugaccugga

SEQ ID NO: 1422907 - RNA, 14 nt, Human
ccauggaguggcag

SEQ ID NO: 1422908 - RNA, 19 nt, Human
ccauggagggagggagugg

SEQ ID NO: 1422909 - RNA, 23 nt, Human
ccauggagaaagcugacuuggcu

SEQ ID NO: 1422910 - RNA, 20 nt, Human
ccauggagaaagcugacuug

SEQ ID NO: 1422911 - RNA, 19 nt, Human
ccauggagaaagcugacuu

SEQ ID NO: 1422912 - RNA, 18 nt, Human
ccauggagaaagcugacu

SEQ ID NO: 1422913 - RNA, 15 nt, Human
ccauggacaggcugg

SEQ ID NO: 1422914 - RNA, 14 nt, Human
ccauggacaggcug

SEQ ID NO: 1422915 - RNA, 19 nt, Human
ccauggacacuacacccag

SEQ ID NO: 1422916 - RNA, 20 nt, Human
ccauggacacuacacccagc

SEQ ID NO: 1422917 - RNA, 21 nt, Human
ccauggacacuacacccagca

SEQ ID NO: 1422918 - RNA, 22 nt, Human
ccauggacacuacacccagcaa

SEQ ID NO: 1422919 - RNA, 23 nt, Human
ccauggacacuacacccagcaau

SEQ ID NO: 1422920 - RNA, 17 nt, Human
cccagagcaccugcugu

SEQ ID NO: 1422921 - RNA, 20 nt, Human
cccagagcaccugcugucug

SEQ ID NO: 1422922 - RNA, 14 nt, Human
cccagagcaccugc

SEQ ID NO: 1422923 - RNA, 15 nt, Human
cccagagagcccgag

SEQ ID NO: 1422924 - RNA, 13 nt, Human
cccagagagcccg

SEQ ID NO: 1422925 - RNA, 23 nt, Human
cccagacuuguuggcguaggcua

SEQ ID NO: 1422926 - RNA, 10 nt, Human
cccagacuug

SEQ ID NO: 1422927 - RNA, 20 nt, Human
cccagacucagacauuggca

SEQ ID NO: 1422928 - RNA, 16 nt, Human
cccagacucagacauu

SEQ ID NO: 1422929 - RNA, 13 nt, Human
cccagacucagac

SEQ ID NO: 1422930 - RNA, 12 nt, Human
cccagacucaga

SEQ ID NO: 1422931 - RNA, 23 nt, Human
cccagacuagauguaguauuuuu

SEQ ID NO: 1422932 - RNA, 20 nt, Human
cccagacuagauguaguauu

SEQ ID NO: 1422933 - RNA, 19 nt, Human
cccagacgccuggcugcug

SEQ ID NO: 1422934 - RNA, 15 nt, Human
cccagacgccuggcu

SEQ ID NO: 1422935 - RNA, 22 nt, Human
cccagaccuguuagcagacagg

SEQ ID NO: 1422936 - RNA, 21 nt, Human
cccagaccuguuagcagacag

SEQ ID NO: 1422937 - RNA, 19 nt, Human
cccagacauaaaggaaaag

SEQ ID NO: 1422938 - RNA, 17 nt, Human
cccagacauaaaggaaa

SEQ ID NO: 1422939 - RNA, 16 nt, Human
cccagacauaaaggaa

SEQ ID NO: 1422940 - RNA, 16 nt, Human
cccagacacugguuug

SEQ ID NO: 1422941 - RNA, 15 nt, Human
cccacgagggcuggc

SEQ ID NO: 1422942 - RNA, 22 nt, Human
ccauuccugggaaauauucccu

SEQ ID NO: 1422943 - RNA, 16 nt, Human
ccauuccugaagaacc

SEQ ID NO: 1422944 - RNA, 13 nt, Human
ccauuccugaaga

SEQ ID NO: 1422945 - RNA, 18 nt, Human
ccaugugguggcacaggc

SEQ ID NO: 1422946 - RNA, 17 nt, Human
ccaugugguggcacagg

SEQ ID NO: 1422947 - RNA, 15 nt, Human
ccauggagaaagcug

SEQ ID NO: 1422948 - RNA, 18 nt, Human
ccauucauuccauucugg

SEQ ID NO: 1422949 - RNA, 20 nt, Human
ccauguuggccaggaugguc

SEQ ID NO: 1422950 - RNA, 20 nt, Human
ccauucauuccauucuggaa

SEQ ID NO: 1422951 - RNA, 15 nt, Human
cccagccucuggcau

SEQ ID NO: 1422952 - RNA, 18 nt, Human
cccagccucccugaagcc

SEQ ID NO: 1422953 - RNA, 17 nt, Human
cccagccucccugaagc

SEQ ID NO: 1422954 - RNA, 16 nt, Human
cccagccucccugaag

SEQ ID NO: 1422955 - RNA, 19 nt, Human
cccagcccucaucccgagc

SEQ ID NO: 1422956 - RNA, 14 nt, Human
cccagcccucaucc

SEQ ID NO: 1422957 - RNA, 16 nt, Human
cccagcccucaucccg

SEQ ID NO: 1422958 - RNA, 15 nt, Human
cccagcccucauccc

SEQ ID NO: 1422959 - RNA, 21 nt, Human
cccagcccccuaagagagcac

SEQ ID NO: 1422960 - RNA, 18 nt, Human
cccagcccccuaagagag

SEQ ID NO: 1422961 - RNA, 17 nt, Human
cccagccccagccaggg

SEQ ID NO: 1422962 - RNA, 15 nt, Human
cccagccccagccag

SEQ ID NO: 1422963 - RNA, 22 nt, Human
cccagccccacuccucugcuga

SEQ ID NO: 1422964 - RNA, 12 nt, Human
cccagccccagc

SEQ ID NO: 1422965 - RNA, 16 nt, Human
cccagagcccaggcuc

SEQ ID NO: 1422966 - RNA, 19 nt, Human
cccagagcccaggcucggc

SEQ ID NO: 1422967 - RNA, 15 nt, Human
cccagagcccaggcu

SEQ ID NO: 1422968 - RNA, 14 nt, Human
cccagagcccaggc

SEQ ID NO: 1422969 - RNA, 17 nt, Human
cccagagcccagcucca

SEQ ID NO: 1422970 - RNA, 16 nt, Human
cccagagcccagcucc

SEQ ID NO: 1422971 - RNA, 15 nt, Human
cccagagcccagcuc

SEQ ID NO: 1422972 - RNA, 13 nt, Human
cccagagcccagc

SEQ ID NO: 1422973 - RNA, 12 nt, Human
cccagagcccag

SEQ ID NO: 1422974 - RNA, 20 nt, Human
cccagaggagccaccaguuc

SEQ ID NO: 1422975 - RNA, 24 nt, Human
cccagaggaaggggccagaggcuc

SEQ ID NO: 1422976 - RNA, 23 nt, Human
cccagaggaaggggccagaggcu

SEQ ID NO: 1422977 - RNA, 22 nt, Human
cccagaggaaggggccagaggc

SEQ ID NO: 1422978 - RNA, 21 nt, Human
cccagaggaaggggccagagg

SEQ ID NO: 1422979 - RNA, 16 nt, Human
cccagaggauugcugc

SEQ ID NO: 1422980 - RNA, 16 nt, Human
cccagccccacuccuc

SEQ ID NO: 1422981 - RNA, 23 nt, Human
cccagcaaagcccccagagccca

SEQ ID NO: 1422982 - RNA, 17 nt, Human
cccagcaaagcccccag

SEQ ID NO: 1422983 - RNA, 15 nt, Human
cccagcaaagccccc

SEQ ID NO: 1422984 - RNA, 17 nt, Human
cccaggagacaguucaa

SEQ ID NO: 1422985 - RNA, 15 nt, Human
cccaggagacaguuc

SEQ ID NO: 1422986 - RNA, 16 nt, Human
cccaggaccuggcugc

SEQ ID NO: 1422987 - RNA, 18 nt, Human
cccaggaccuggcugcca

SEQ ID NO: 1422988 - RNA, 23 nt, Human
cccaggacccuggacccagccag

SEQ ID NO: 1422989 - RNA, 20 nt, Human
cccaggacccuggacccagc

SEQ ID NO: 1422990 - RNA, 19 nt, Human
cccaggacccuggacccag

SEQ ID NO: 1422991 - RNA, 20 nt, Human
cccaggaccccauggcagug

SEQ ID NO: 1422992 - RNA, 23 nt, Human
cccaggacccugaaggggccaug

SEQ ID NO: 1422993 - RNA, 13 nt, Human
cccaggacccuga

SEQ ID NO: 1422994 - RNA, 12 nt, Human
cccaggacccug

SEQ ID NO: 1422995 - RNA, 11 nt, Human
cccaggacccu

SEQ ID NO: 1422996 - RNA, 12 nt, Human
cccaggacccca

SEQ ID NO: 1422997 - RNA, 22 nt, Human
cccaggaccagcucaggacaga

SEQ ID NO: 1422998 - RNA, 21 nt, Human
cccaggaccagcucaggacag

SEQ ID NO: 1422999 - RNA, 20 nt, Human
cccaggaccagcucaggaca

SEQ ID NO: 1423000 - RNA, 17 nt, Human
cccaggaccagcucagg

SEQ ID NO: 1423001 - RNA, 16 nt, Human
cccaggaccagcucag

SEQ ID NO: 1423002 - RNA, 15 nt, Human
cccaggaccagcuca

SEQ ID NO: 1423003 - RNA, 14 nt, Human
cccaggaccagcuc

SEQ ID NO: 1423004 - RNA, 23 nt, Human
cccaggaccagaagcucccccag

SEQ ID NO: 1423005 - RNA, 12 nt, Human
cccaggaccagc

SEQ ID NO: 1423006 - RNA, 22 nt, Human
cccaggaccagaagcuccccca

SEQ ID NO: 1423007 - RNA, 15 nt, Human
cccaggaccagaagc

SEQ ID NO: 1423008 - RNA, 12 nt, Human
cccaggaccaga

SEQ ID NO: 1423009 - RNA, 23 nt, Human
cccaggaccacaggcucaggcag

SEQ ID NO: 1423010 - RNA, 22 nt, Human
cccaggaccacaggcucaggca

SEQ ID NO: 1423011 - RNA, 21 nt, Human
cccaggaccacaggcucaggc

SEQ ID NO: 1423012 - RNA, 17 nt, Human
cccaggaccacaggcuc

SEQ ID NO: 1423013 - RNA, 16 nt, Human
cccaggaccacaggcu

SEQ ID NO: 1423014 - RNA, 17 nt, Human
cccaggacaggauccag

SEQ ID NO: 1423015 - RNA, 23 nt, Human
cccagcuaggaagagcaggacuc

SEQ ID NO: 1423016 - RNA, 22 nt, Human
cccagcuaggaagagcaggacu

SEQ ID NO: 1423017 - RNA, 18 nt, Human
cccagcuaggaagagcag

SEQ ID NO: 1423018 - RNA, 13 nt, Human
cccagcuaggaag

SEQ ID NO: 1423019 - RNA, 12 nt, Human
cccagcucugaa

SEQ ID NO: 1423020 - RNA, 11 nt, Human
cccagcucaau

SEQ ID NO: 1423021 - RNA, 19 nt, Human
cccagccugucagauccag

SEQ ID NO: 1423022 - RNA, 18 nt, Human
cccagccugucagaucca

SEQ ID NO: 1423023 - RNA, 14 nt, Human
cccagccugucaga

SEQ ID NO: 1423024 - RNA, 12 nt, Human
cccagccuguca

SEQ ID NO: 1423025 - RNA, 11 nt, Human
cccagccuguc

SEQ ID NO: 1423026 - RNA, 10 nt, Human
cccagccugu

SEQ ID NO: 1423027 - RNA, 19 nt, Human
cccagccugggccuaugga

SEQ ID NO: 1423028 - RNA, 18 nt, Human
cccagccugggccuaugg

SEQ ID NO: 1423029 - RNA, 16 nt, Human
cccagccugggccuau

SEQ ID NO: 1423030 - RNA, 15 nt, Human
cccagccugggccua

SEQ ID NO: 1423031 - RNA, 14 nt, Human
cccagccugggccu

SEQ ID NO: 1423032 - RNA, 12 nt, Human
cccagccugggc

SEQ ID NO: 1423033 - RNA, 13 nt, Human
cccagccugggcc

SEQ ID NO: 1423034 - RNA, 11 nt, Human
cccagccuggg

SEQ ID NO: 1423035 - RNA, 22 nt, Human
cccagccuuuguuccccacugg

SEQ ID NO: 1423036 - RNA, 22 nt, Human
cccagccugucagauccaggag

SEQ ID NO: 1423037 - RNA, 22 nt, Human
cccagcucugaaaccaguguua

SEQ ID NO: 1423038 - RNA, 14 nt, Human
cccagcucugaaac

SEQ ID NO: 1423039 - RNA, 10 nt, Human
cccaggacag

SEQ ID NO: 1423040 - RNA, 22 nt, Human
ccaggagcacggcucugucccc

SEQ ID NO: 1423041 - RNA, 19 nt, Human
ccaggagcacggcucuguc

SEQ ID NO: 1423042 - RNA, 18 nt, Human
ccaggagcacggcucugu

SEQ ID NO: 1423043 - RNA, 17 nt, Human
ccaggagcacggcucug

SEQ ID NO: 1423044 - RNA, 16 nt, Human
ccaggagcacggcucu

SEQ ID NO: 1423045 - RNA, 21 nt, Human
ccaggacuuauuuaaacucug

SEQ ID NO: 1423046 - RNA, 22 nt, Human
ccaggacucugcagccucagag

SEQ ID NO: 1423047 - RNA, 21 nt, Human
ccaggacucugcagccucaga

SEQ ID NO: 1423048 - RNA, 20 nt, Human
ccaggacucugcagccucag

SEQ ID NO: 1423049 - RNA, 19 nt, Human
ccaggacucugcagccuca

SEQ ID NO: 1423050 - RNA, 18 nt, Human
ccaggacucugcagccuc

SEQ ID NO: 1423051 - RNA, 17 nt, Human
ccaggacucugcagccu

SEQ ID NO: 1423052 - RNA, 16 nt, Human
ccaggacucugcagcc

SEQ ID NO: 1423053 - RNA, 15 nt, Human
ccaggacucugcagc

SEQ ID NO: 1423054 - RNA, 13 nt, Human
ccaggagaagcuc

SEQ ID NO: 1423055 - RNA, 14 nt, Human
ccaggacucugcag

SEQ ID NO: 1423056 - RNA, 14 nt, Human
ccaggagaagcuca

SEQ ID NO: 1423057 - RNA, 11 nt, Human
ccaggagaagc

SEQ ID NO: 1423058 - RNA, 20 nt, Human
ccaggagaagaaagagguga

SEQ ID NO: 1423059 - RNA, 15 nt, Human
ccaggagaagaaaga

SEQ ID NO: 1423060 - RNA, 18 nt, Human
ccaggaccuggcugccau

SEQ ID NO: 1423061 - RNA, 17 nt, Human
ccaggaccuggcugcca

SEQ ID NO: 1423062 - RNA, 15 nt, Human
ccaggaccuggcugc

SEQ ID NO: 1423063 - RNA, 19 nt, Human
ccaggacccuggacccagc

SEQ ID NO: 1423064 - RNA, 18 nt, Human
ccaggacccuggacccag

SEQ ID NO: 1423065 - RNA, 11 nt, Human
ccaggacccca

SEQ ID NO: 1423066 - RNA, 23 nt, Human
ccaggacccugaaggggccauga

SEQ ID NO: 1423067 - RNA, 19 nt, Human
ccaggacccugaaggggcc

SEQ ID NO: 1423068 - RNA, 18 nt, Human
ccaggacccugaaggggc

SEQ ID NO: 1423069 - RNA, 16 nt, Human
ccaggacccugaaggg

SEQ ID NO: 1423070 - RNA, 14 nt, Human
ccaggacccugaag

SEQ ID NO: 1423071 - RNA, 23 nt, Human
ccaggaccagucaaccugggcaa

SEQ ID NO: 1423072 - RNA, 21 nt, Human
ccaggaccacaggcucaggca

SEQ ID NO: 1423073 - RNA, 20 nt, Human
ccaggaccagcucaggacag

SEQ ID NO: 1423074 - RNA, 17 nt, Human
ccaggaccagcucagga

SEQ ID NO: 1423075 - RNA, 16 nt, Human
ccaggaccagcucagg

SEQ ID NO: 1423076 - RNA, 15 nt, Human
ccaggaccagcucag

SEQ ID NO: 1423077 - RNA, 14 nt, Human
ccaggaccagcuca

SEQ ID NO: 1423078 - RNA, 13 nt, Human
ccaggaccagcuc

SEQ ID NO: 1423079 - RNA, 19 nt, Human
ccaggaccacaggcucagg

SEQ ID NO: 1423080 - RNA, 18 nt, Human
ccaggaccacaggcucag

SEQ ID NO: 1423081 - RNA, 17 nt, Human
ccaggaccacaggcuca

SEQ ID NO: 1423082 - RNA, 16 nt, Human
ccaggaccacaggcuc

SEQ ID NO: 1423083 - RNA, 14 nt, Human
ccagcuguguccaa

SEQ ID NO: 1423084 - RNA, 13 nt, Human
ccaggaccacagg

SEQ ID NO: 1423085 - RNA, 13 nt, Human
ccagcugugucca

SEQ ID NO: 1423086 - RNA, 23 nt, Human
ccagcugugguuuucuuuugcca

SEQ ID NO: 1423087 - RNA, 15 nt, Human
ccagcugugguuuuc

SEQ ID NO: 1423088 - RNA, 14 nt, Human
ccagcugugguuuu

SEQ ID NO: 1423089 - RNA, 13 nt, Human
ccagcugugguuu

SEQ ID NO: 1423090 - RNA, 21 nt, Human
ccagcugugcuuaugguacca

SEQ ID NO: 1423091 - RNA, 15 nt, Human
ccagcugugcuuaug

SEQ ID NO: 1423092 - RNA, 14 nt, Human
ccagcugugcuuau

SEQ ID NO: 1423093 - RNA, 15 nt, Human
ccagccucuggcauu

SEQ ID NO: 1423094 - RNA, 23 nt, Human
ccagccucgcccauccccuugag

SEQ ID NO: 1423095 - RNA, 20 nt, Human
ccagcugagcgccaggaugg

SEQ ID NO: 1423096 - RNA, 17 nt, Human
ccagcugagcgccagga

SEQ ID NO: 1423097 - RNA, 15 nt, Human
ccagcugagcgccag

SEQ ID NO: 1423098 - RNA, 23 nt, Human
ccagcugacuaaacuuuuuuucu

SEQ ID NO: 1423099 - RNA, 17 nt, Human
ccagcugacuaaacuuu

SEQ ID NO: 1423100 - RNA, 14 nt, Human
ccagcugacuaaac

SEQ ID NO: 1423101 - RNA, 23 nt, Human
ccagcucuguucuuccucagcca

SEQ ID NO: 1423102 - RNA, 22 nt, Human
ccagcucuguucuuccucagcc

SEQ ID NO: 1423103 - RNA, 21 nt, Human
ccagcucuguucuuccucagc

SEQ ID NO: 1423104 - RNA, 20 nt, Human
ccagcucuguucuuccucag

SEQ ID NO: 1423105 - RNA, 17 nt, Human
ccagcucuguucuuccu

SEQ ID NO: 1423106 - RNA, 16 nt, Human
ccagcucuguucuucc

SEQ ID NO: 1423107 - RNA, 14 nt, Human
ccagcucuguucuu

SEQ ID NO: 1423108 - RNA, 13 nt, Human
ccagcucuguucu

SEQ ID NO: 1423109 - RNA, 12 nt, Human
ccagcucuguuc

SEQ ID NO: 1423110 - RNA, 21 nt, Human
ccagcucuguaucaggaccca

SEQ ID NO: 1423111 - RNA, 18 nt, Human
ccagcucuguaucaggac

SEQ ID NO: 1423112 - RNA, 14 nt, Human
ccagcucuguauca

SEQ ID NO: 1423113 - RNA, 14 nt, Human
ccagcucuggaggg

SEQ ID NO: 1423114 - RNA, 21 nt, Human
ccagcucugaaaccaguguua

SEQ ID NO: 1423115 - RNA, 20 nt, Human
ccagcucugaaaccaguguu

SEQ ID NO: 1423116 - RNA, 15 nt, Human
ccagcucugaaacca

SEQ ID NO: 1423117 - RNA, 19 nt, Human
ccagccuggccuccugccu

SEQ ID NO: 1423118 - RNA, 18 nt, Human
ccagccuggccuccugcc

SEQ ID NO: 1423119 - RNA, 17 nt, Human
ccagccuggccuccugc

SEQ ID NO: 1423120 - RNA, 16 nt, Human
ccagccuggccuccug

SEQ ID NO: 1423121 - RNA, 15 nt, Human
ccagccuggccuccu

SEQ ID NO: 1423122 - RNA, 14 nt, Human
ccagccuggccucc

SEQ ID NO: 1423123 - RNA, 13 nt, Human
ccagccuggccuc

SEQ ID NO: 1423124 - RNA, 12 nt, Human
ccagccuggccu

SEQ ID NO: 1423125 - RNA, 13 nt, Human
ccagccuggccca

SEQ ID NO: 1423126 - RNA, 12 nt, Human
ccagccuggccc

SEQ ID NO: 1423127 - RNA, 17 nt, Human
ccagcugggucaggcag

SEQ ID NO: 1423128 - RNA, 16 nt, Human
ccagcugggucaggca

SEQ ID NO: 1423129 - RNA, 14 nt, Human
ccagcugggcucug

SEQ ID NO: 1423130 - RNA, 19 nt, Human
ccagcuguccccccacucc

SEQ ID NO: 1423131 - RNA, 18 nt, Human
ccagcuguccccccacuc

SEQ ID NO: 1423132 - RNA, 15 nt, Human
ccagcugucccccca

SEQ ID NO: 1423133 - RNA, 18 nt, Human
ccagcugggucaggcagg

SEQ ID NO: 1423134 - RNA, 13 nt, Human
ccagcugcacuga

SEQ ID NO: 1423135 - RNA, 23 nt, Human
ccaggccucucccuccuccagga

SEQ ID NO: 1423136 - RNA, 19 nt, Human
ccaggccugaaagaggcug

SEQ ID NO: 1423137 - RNA, 20 nt, Human
ccagggacagaggccccagc

SEQ ID NO: 1423138 - RNA, 18 nt, Human
ccagggacagaggcccca

SEQ ID NO: 1423139 - RNA, 13 nt, Human
ccagggacagagg

SEQ ID NO: 1423140 - RNA, 18 nt, Human
ccagggacaccugggaga

SEQ ID NO: 1423141 - RNA, 20 nt, Human
ccagggacaccugggagaaa

SEQ ID NO: 1423142 - RNA, 23 nt, Human
ccagggacagaggccccagccuc

SEQ ID NO: 1423143 - RNA, 22 nt, Human
ccagggacagaggccccagccu

SEQ ID NO: 1423144 - RNA, 21 nt, Human
ccagggacagaggccccagcc

SEQ ID NO: 1423145 - RNA, 15 nt, Human
ccagggacucugccg

SEQ ID NO: 1423146 - RNA, 15 nt, Human
ccagggagaagcucc

SEQ ID NO: 1423147 - RNA, 14 nt, Human
ccagggagaagcuc

SEQ ID NO: 1423148 - RNA, 13 nt, Human
ccagggagaagcu

SEQ ID NO: 1423149 - RNA, 14 nt, Human
ccagggaccggcgg

SEQ ID NO: 1423150 - RNA, 12 nt, Human
ccagugcugaau

SEQ ID NO: 1423151 - RNA, 22 nt, Human
ccagugcugaauuucccucucu

SEQ ID NO: 1423152 - RNA, 14 nt, Human
ccaguggauuccca

SEQ ID NO: 1423153 - RNA, 20 nt, Human
ccagugggaggugagaccac

SEQ ID NO: 1423154 - RNA, 23 nt, Human
ccagugggaggugagaccaccuc

SEQ ID NO: 1423155 - RNA, 17 nt, Human
ccaucaacaaaaauugu

SEQ ID NO: 1423156 - RNA, 19 nt, Human
ccaucaaaaugcuuuuuau

SEQ ID NO: 1423157 - RNA, 16 nt, Human
ccaucaaaaugcuuuu

SEQ ID NO: 1423158 - RNA, 20 nt, Human
ccauauuuguaaaaugacaa

SEQ ID NO: 1423159 - RNA, 22 nt, Human
ccauauuuguaaaaugacaauc

SEQ ID NO: 1423160 - RNA, 19 nt, Human
ccauauuuguaaaaugaca

SEQ ID NO: 1423161 - RNA, 17 nt, Human
ccauauuuguaaaauga

SEQ ID NO: 1423162 - RNA, 16 nt, Human
ccauauuuguaaaaug

SEQ ID NO: 1423163 - RNA, 15 nt, Human
ccauauuuguaaaau

SEQ ID NO: 1423164 - RNA, 14 nt, Human
ccauauuuguaaaa

SEQ ID NO: 1423165 - RNA, 13 nt, Human
ccauauuuguaaa

SEQ ID NO: 1423166 - RNA, 12 nt, Human
ccauauuuguaa

SEQ ID NO: 1423167 - RNA, 20 nt, Human
ccauauuuaccucagccugg

SEQ ID NO: 1423168 - RNA, 21 nt, Human
ccauauuuaccucagccuggg

SEQ ID NO: 1423169 - RNA, 19 nt, Human
ccauauuuaccucagccug

SEQ ID NO: 1423170 - RNA, 18 nt, Human
ccauauuuaccucagccu

SEQ ID NO: 1423171 - RNA, 18 nt, Human
ccaucacugaguuuucca

SEQ ID NO: 1423172 - RNA, 17 nt, Human
ccaucaccucagauggc

SEQ ID NO: 1423173 - RNA, 16 nt, Human
ccaucaccucagaugg

SEQ ID NO: 1423174 - RNA, 21 nt, Human
ccaucaccuacucacacaggc

SEQ ID NO: 1423175 - RNA, 19 nt, Human
ccaucaccuacucacacag

SEQ ID NO: 1423176 - RNA, 13 nt, Human
ccaucaaccucug

SEQ ID NO: 1423177 - RNA, 18 nt, Human
ccaucaacaaaaauuguc

SEQ ID NO: 1423178 - RNA, 22 nt, Human
ccauccuguguguuaagcucug

SEQ ID NO: 1423179 - RNA, 14 nt, Human
ccauccuguguguu

SEQ ID NO: 1423180 - RNA, 13 nt, Human
ccauccugugugu

SEQ ID NO: 1423181 - RNA, 14 nt, Human
ccaucucaggccag

SEQ ID NO: 1423182 - RNA, 21 nt, Human
ccaucucaugccccuggcugg

SEQ ID NO: 1423183 - RNA, 20 nt, Human
ccaucucaugccccuggcug

SEQ ID NO: 1423184 - RNA, 18 nt, Human
ccaucucaggccagagcc

SEQ ID NO: 1423185 - RNA, 11 nt, Human
ccaucucaggc

SEQ ID NO: 1423186 - RNA, 12 nt, Human
ccauccugacca

SEQ ID NO: 1423187 - RNA, 20 nt, Human
ccaucagaaacacccucaca

SEQ ID NO: 1423188 - RNA, 18 nt, Human
ccaucagaaacacccuca

SEQ ID NO: 1423189 - RNA, 13 nt, Human
ccaagacucuaga

SEQ ID NO: 1423190 - RNA, 18 nt, Human
ccaagagcaucaugccuc

SEQ ID NO: 1423191 - RNA, 17 nt, Human
ccaagagcaucaugccu

SEQ ID NO: 1423192 - RNA, 16 nt, Human
ccaagagcaucaugcc

SEQ ID NO: 1423193 - RNA, 23 nt, Human
ccaagagcaucaugccucugagg

SEQ ID NO: 1423194 - RNA, 22 nt, Human
ccaagagcaucaugccucugag

SEQ ID NO: 1423195 - RNA, 21 nt, Human
ccaagagcaucaugccucuga

SEQ ID NO: 1423196 - RNA, 19 nt, Human
ccaagagcaucaugccucu

SEQ ID NO: 1423197 - RNA, 17 nt, Human
ccaacacgcaccugccu

SEQ ID NO: 1423198 - RNA, 16 nt, Human
ccaacacgcaccugcc

SEQ ID NO: 1423199 - RNA, 18 nt, Human
ccaacaucacagcccagc

SEQ ID NO: 1423200 - RNA, 17 nt, Human
ccaacaucacagcccag

SEQ ID NO: 1423201 - RNA, 15 nt, Human
ccaacauaaaaauga

SEQ ID NO: 1423202 - RNA, 22 nt, Human
ccaacaguuuaaugaagaucua

SEQ ID NO: 1423203 - RNA, 11 nt, Human
ccaaauuuaaa

SEQ ID NO: 1423204 - RNA, 18 nt, Human
ccaaauuuaaaacuguug

SEQ ID NO: 1423205 - RNA, 13 nt, Human
ccaaagcacauuu

SEQ ID NO: 1423206 - RNA, 14 nt, Human
ccaaagcagacagc

SEQ ID NO: 1423207 - RNA, 13 nt, Human
ccaaagcagacag

SEQ ID NO: 1423208 - RNA, 17 nt, Human
ccaaagcaagcaagagg

SEQ ID NO: 1423209 - RNA, 16 nt, Human
ccaaagcaagcaagag

SEQ ID NO: 1423210 - RNA, 22 nt, Human
ccaaagaguagaauugcauuga

SEQ ID NO: 1423211 - RNA, 18 nt, Human
ccaaccugcucuccucuu

SEQ ID NO: 1423212 - RNA, 20 nt, Human
ccaaccugcucuccucuucu

SEQ ID NO: 1423213 - RNA, 17 nt, Human
ccaaccugcucuccucu

SEQ ID NO: 1423214 - RNA, 16 nt, Human
ccaaccugcucuccuc

SEQ ID NO: 1423215 - RNA, 15 nt, Human
ccaaccugcucuccu

SEQ ID NO: 1423216 - RNA, 13 nt, Human
ccaaccugcucuc

SEQ ID NO: 1423217 - RNA, 12 nt, Human
ccaaccugcucu

SEQ ID NO: 1423218 - RNA, 19 nt, Human
ccaaccugcaaagaucugu

SEQ ID NO: 1423219 - RNA, 18 nt, Human
ccaaccugcaaagaucug

SEQ ID NO: 1423220 - RNA, 17 nt, Human
ccaaccugcaaagaucu

SEQ ID NO: 1423221 - RNA, 23 nt, Human
ccaaccuuagauguucuaagucu

SEQ ID NO: 1423222 - RNA, 15 nt, Human
ccaaccuguuaccua

SEQ ID NO: 1423223 - RNA, 23 nt, Human
ccaagacaugucuguucuacaua

SEQ ID NO: 1423224 - RNA, 21 nt, Human
ccaagacaugucuguucuaca

SEQ ID NO: 1423225 - RNA, 16 nt, Human
ccaacccuguccuccc

SEQ ID NO: 1423226 - RNA, 21 nt, Human
ccaacaugcacugauguugug

SEQ ID NO: 1423227 - RNA, 17 nt, Human
ccaacaugcacugaugu

SEQ ID NO: 1423228 - RNA, 13 nt, Human
ccaacaugcacug

SEQ ID NO: 1423229 - RNA, 23 nt, Human
ccaacaugcacugauguuguguu

SEQ ID NO: 1423230 - RNA, 9 nt, Human
ccaaagagu

SEQ ID NO: 1423231 - RNA, 23 nt, Human
ccaaagaggcugccccucucacc

SEQ ID NO: 1423232 - RNA, 22 nt, Human
ccaaagaggcugccccucucac

SEQ ID NO: 1423233 - RNA, 21 nt, Human
ccaaagaggcugccccucuca

SEQ ID NO: 1423234 - RNA, 20 nt, Human
ccaaagaggcugccccucuc

SEQ ID NO: 1423235 - RNA, 17 nt, Human
ccaaagaggcugccccu

SEQ ID NO: 1423236 - RNA, 18 nt, Human
ccaagcaggaaaugaaaa

SEQ ID NO: 1423237 - RNA, 22 nt, Human
ccaagagcuacguauuuaauag

SEQ ID NO: 1423238 - RNA, 13 nt, Human
ccaaggccagguu

SEQ ID NO: 1423239 - RNA, 17 nt, Human
ccaagcuccaagcccca

SEQ ID NO: 1423240 - RNA, 15 nt, Human
ccaagcuccaagccc

SEQ ID NO: 1423241 - RNA, 13 nt, Human
ccaagcuccaagc

SEQ ID NO: 1423242 - RNA, 13 nt, Human
ccacaaaaacagg

SEQ ID NO: 1423243 - RNA, 14 nt, Human
ccacaaacuguaau

SEQ ID NO: 1423244 - RNA, 23 nt, Human
ccacaaaauaaccaauccuggac

SEQ ID NO: 1423245 - RNA, 22 nt, Human
ccacaaaaacagguauauacuu

SEQ ID NO: 1423246 - RNA, 23 nt, Human
ccaauuuuuuaagugaaaauaua

SEQ ID NO: 1423247 - RNA, 22 nt, Human
ccaauuucggauuuuuuccaaa

SEQ ID NO: 1423248 - RNA, 23 nt, Human
ccaauuucggauuuuuuccaaaa

SEQ ID NO: 1423249 - RNA, 21 nt, Human
ccaauuucggauuuuuuccaa

SEQ ID NO: 1423250 - RNA, 20 nt, Human
ccaauuucggauuuuuucca

SEQ ID NO: 1423251 - RNA, 16 nt, Human
ccaauuucagacuccc

SEQ ID NO: 1423252 - RNA, 19 nt, Human
ccaauuucaaguuccaagu

SEQ ID NO: 1423253 - RNA, 15 nt, Human
ccacaacuauuuuca

SEQ ID NO: 1423254 - RNA, 16 nt, Human
ccacaacaugaggcca

SEQ ID NO: 1423255 - RNA, 17 nt, Human
ccacaacaugaggccac

SEQ ID NO: 1423256 - RNA, 12 nt, Human
ccacaacaugag

SEQ ID NO: 1423257 - RNA, 22 nt, Human
ccacaaaugggaaaaccagacu

SEQ ID NO: 1423258 - RNA, 22 nt, Human
ccaagugaccuauaccuguguu

SEQ ID NO: 1423259 - RNA, 20 nt, Human
ccaagugagucucucugggc

SEQ ID NO: 1423260 - RNA, 22 nt, Human
ccaagguuuaaagagucuagau

SEQ ID NO: 1423261 - RNA, 16 nt, Human
ccaaguuaaauguaga

SEQ ID NO: 1423262 - RNA, 23 nt, Human
ccaagguuuaaagagucuagauu

SEQ ID NO: 1423263 - RNA, 20 nt, Human
ccaagguuuaaagagucuag

SEQ ID NO: 1423264 - RNA, 19 nt, Human
ccaagguuuaaagagucua

SEQ ID NO: 1423265 - RNA, 16 nt, Human
ccaagguucuccaaca

SEQ ID NO: 1423266 - RNA, 22 nt, Human
ccaagguguccuacagaaaaac

SEQ ID NO: 1423267 - RNA, 21 nt, Human
ccaagguguccuacagaaaaa

SEQ ID NO: 1423268 - RNA, 20 nt, Human
ccaagguguccuacagaaaa

SEQ ID NO: 1423269 - RNA, 19 nt, Human
ccaagguguccuacagaaa

SEQ ID NO: 1423270 - RNA, 18 nt, Human
ccaagguguccuacagaa

SEQ ID NO: 1423271 - RNA, 17 nt, Human
ccaagguguccuacaga

SEQ ID NO: 1423272 - RNA, 16 nt, Human
ccaagguguccuacag

SEQ ID NO: 1423273 - RNA, 15 nt, Human
ccaagguguccuaca

SEQ ID NO: 1423274 - RNA, 13 nt, Human
ccaagguguccua

SEQ ID NO: 1423275 - RNA, 20 nt, Human
ccacacaaggauagaugcug

SEQ ID NO: 1423276 - RNA, 22 nt, Human
ccacacaaggauagaugcuggc

SEQ ID NO: 1423277 - RNA, 20 nt, Human
ccacaagugcccuccaggcu

SEQ ID NO: 1423278 - RNA, 16 nt, Human
ccacaagugcccucca

SEQ ID NO: 1423279 - RNA, 21 nt, Human
ccacaaggacuuccuguccag

SEQ ID NO: 1423280 - RNA, 17 nt, Human
ccacaaggacuuccugu

SEQ ID NO: 1423281 - RNA, 20 nt, Human
ccacaagccugagggaaagg

SEQ ID NO: 1423282 - RNA, 21 nt, Human
ccacaagccugagggaaaggc

SEQ ID NO: 1423283 - RNA, 14 nt, Human
ccacaagccugagg

SEQ ID NO: 1423284 - RNA, 21 nt, Human
ccacaagccucugcccaggca

SEQ ID NO: 1423285 - RNA, 12 nt, Human
ccacaagccucu

SEQ ID NO: 1423286 - RNA, 17 nt, Human
ccacaacuauuuucaga

SEQ ID NO: 1423287 - RNA, 19 nt, Human
cauuugacccuugcuguga

SEQ ID NO: 1423288 - RNA, 13 nt, Human
cauuugaaugcau

SEQ ID NO: 1423289 - RNA, 14 nt, Human
cauuugaaugcauu

SEQ ID NO: 1423290 - RNA, 15 nt, Human
cauuugaaugcauuu

SEQ ID NO: 1423291 - RNA, 18 nt, Human
cauuugaaugcauuuugu

SEQ ID NO: 1423292 - RNA, 23 nt, Human
cauuugaaugcauuuuguuuggu

SEQ ID NO: 1423293 - RNA, 17 nt, Human
cauuugaggucuguucu

SEQ ID NO: 1423294 - RNA, 18 nt, Human
cauuugaggucuguucuu

SEQ ID NO: 1423295 - RNA, 19 nt, Human
cauuugaggucuguucuuu

SEQ ID NO: 1423296 - RNA, 15 nt, Human
ccaaagagugauagu

SEQ ID NO: 1423297 - RNA, 16 nt, Human
ccaaagaggcugcccc

SEQ ID NO: 1423298 - RNA, 14 nt, Human
ccaaagaggcugcc

SEQ ID NO: 1423299 - RNA, 13 nt, Human
ccaaagaggcugc

SEQ ID NO: 1423300 - RNA, 12 nt, Human
ccaaagaggcug

SEQ ID NO: 1423301 - RNA, 15 nt, Human
ccaaagaaccaaaga

SEQ ID NO: 1423302 - RNA, 19 nt, Human
ccaaagaaccaaagaagaa

SEQ ID NO: 1423303 - RNA, 14 nt, Human
ccaaagaacagccu

SEQ ID NO: 1423304 - RNA, 22 nt, Human
ccaaacgcccuuuccuccucag

SEQ ID NO: 1423305 - RNA, 14 nt, Human
ccaaacuaauuuuu

SEQ ID NO: 1423306 - RNA, 21 nt, Human
ccaaacgcccuuuccuccuca

SEQ ID NO: 1423307 - RNA, 14 nt, Human
ccaaacugccuaag

SEQ ID NO: 1423308 - RNA, 19 nt, Human
ccaaacugccuaagcccuc

SEQ ID NO: 1423309 - RNA, 16 nt, Human
ccaaaccucaccaacu

SEQ ID NO: 1423310 - RNA, 15 nt, Human
ccaaaccucaccaac

SEQ ID NO: 1423311 - RNA, 13 nt, Human
ccaaaccucacca

SEQ ID NO: 1423312 - RNA, 23 nt, Human
ccaaaauaaauaaggaaaagcuu

SEQ ID NO: 1423313 - RNA, 20 nt, Human
ccaaaaguuacauguuugca

SEQ ID NO: 1423314 - RNA, 18 nt, Human
ccaaaauaaaacuuuuua

SEQ ID NO: 1423315 - RNA, 21 nt, Human
ccaaaauaaaacuuuuuaaaa

SEQ ID NO: 1423316 - RNA, 14 nt, Human
cauuuugguacuuu

SEQ ID NO: 1423317 - RNA, 16 nt, Human
cauuuugguacuuugg

SEQ ID NO: 1423318 - RNA, 19 nt, Human
cauuuuguuugguauugua

SEQ ID NO: 1423319 - RNA, 20 nt, Human
cauuuuguuugguauuguau

SEQ ID NO: 1423320 - RNA, 21 nt, Human
cauuuuguuugguauuguauu

SEQ ID NO: 1423321 - RNA, 22 nt, Human
cauuuuguuugguauuguauuu

SEQ ID NO: 1423322 - RNA, 23 nt, Human
cauuuuguuugguauuguauuua

SEQ ID NO: 1423323 - RNA, 15 nt, Human
cauuuuuaagugcug

SEQ ID NO: 1423324 - RNA, 20 nt, Human
cauuuuuaagugcugcauuu

SEQ ID NO: 1423325 - RNA, 21 nt, Human
cauuuuuaagugcugcauuua

SEQ ID NO: 1423326 - RNA, 22 nt, Human
cauuuuggagaguuuccugaaa

SEQ ID NO: 1423327 - RNA, 20 nt, Human
cauuuuggagaguuuccuga

SEQ ID NO: 1423328 - RNA, 15 nt, Human
cauuuugaaucacau

SEQ ID NO: 1423329 - RNA, 23 nt, Human
cauuuugaaucacaugaauuauu

SEQ ID NO: 1423330 - RNA, 21 nt, Human
cauuuugaaagucuguccuug

SEQ ID NO: 1423331 - RNA, 19 nt, Human
cauuuugaaagucuguccu

SEQ ID NO: 1423332 - RNA, 12 nt, Human
cauuuugaaagu

SEQ ID NO: 1423333 - RNA, 22 nt, Human
cauuuucuggccaguguuuaaa

SEQ ID NO: 1423334 - RNA, 23 nt, Human
cauuuucuggccaguguuuaaaa

SEQ ID NO: 1423335 - RNA, 10 nt, Human
cauuuucugg

SEQ ID NO: 1423336 - RNA, 22 nt, Human
cauuuuauuuuauuaugcauga

SEQ ID NO: 1423337 - RNA, 21 nt, Human
cauuuuauuuuauuaugcaug

SEQ ID NO: 1423338 - RNA, 19 nt, Human
cauuuuauuuuauuaugca

SEQ ID NO: 1423339 - RNA, 17 nt, Human
cauuuuaauuauuauuc

SEQ ID NO: 1423340 - RNA, 16 nt, Human
cauuuuaacaucugag

SEQ ID NO: 1423341 - RNA, 17 nt, Human
cauuuuaaaguuaguau

SEQ ID NO: 1423342 - RNA, 18 nt, Human
cauuugcucauggaauug

SEQ ID NO: 1423343 - RNA, 22 nt, Human
cauuugaggucuguucuuucca

SEQ ID NO: 1423344 - RNA, 16 nt, Human
cauuugcucauggaau

SEQ ID NO: 1423345 - RNA, 15 nt, Human
cauuugcucauggaa

SEQ ID NO: 1423346 - RNA, 16 nt, Human
cauugacuuuccccac

SEQ ID NO: 1423347 - RNA, 21 nt, Human
cauugacuuuccccaccagau

SEQ ID NO: 1423348 - RNA, 16 nt, Human
cauugcaucaaagcau

SEQ ID NO: 1423349 - RNA, 18 nt, Human
cauuucccaacacaaaga

SEQ ID NO: 1423350 - RNA, 17 nt, Human
cauuuaaauacagucuu

SEQ ID NO: 1423351 - RNA, 23 nt, Human
cauuucuucuacaacucauacac

SEQ ID NO: 1423352 - RNA, 18 nt, Human
cauuucugaggugcacug

SEQ ID NO: 1423353 - RNA, 21 nt, Human
cauuucugaggugcacuggga

SEQ ID NO: 1423354 - RNA, 13 nt, Human
cauuucugaggug

SEQ ID NO: 1423355 - RNA, 15 nt, Human
cauuucucuaagaga

SEQ ID NO: 1423356 - RNA, 12 nt, Human
cauuucucaucc

SEQ ID NO: 1423357 - RNA, 19 nt, Human
cauuucuauuucuccucca

SEQ ID NO: 1423358 - RNA, 15 nt, Human
cauuuccccuccuuc

SEQ ID NO: 1423359 - RNA, 15 nt, Human
cauuuccuaaauaua

SEQ ID NO: 1423360 - RNA, 22 nt, Human
cauugaccgcgacuaauuucaa

SEQ ID NO: 1423361 - RNA, 21 nt, Human
cauugaccgcgacuaauuuca

SEQ ID NO: 1423362 - RNA, 18 nt, Human
cauugaacacaaacugua

SEQ ID NO: 1423363 - RNA, 17 nt, Human
cauugaacacaaacugu

SEQ ID NO: 1423364 - RNA, 16 nt, Human
cauugaacacaaacug

SEQ ID NO: 1423365 - RNA, 15 nt, Human
cauugaacacaaacu

SEQ ID NO: 1423366 - RNA, 14 nt, Human
cauugaacacaaac

SEQ ID NO: 1423367 - RNA, 15 nt, Human
cauugaccuauuucc

SEQ ID NO: 1423368 - RNA, 21 nt, Human
cauugaccuauuuccagaaau

SEQ ID NO: 1423369 - RNA, 16 nt, Human
cauugaaaagagcuga

SEQ ID NO: 1423370 - RNA, 22 nt, Human
caugcaucuguuuauucuauag

SEQ ID NO: 1423371 - RNA, 15 nt, Human
caugcaucuguuuau

SEQ ID NO: 1423372 - RNA, 13 nt, Human
caugcaucuguuu

SEQ ID NO: 1423373 - RNA, 14 nt, Human
caugcaucaucuca

SEQ ID NO: 1423374 - RNA, 15 nt, Human
caugcauacacucuc

SEQ ID NO: 1423375 - RNA, 19 nt, Human
caugccauuuguacugacc

SEQ ID NO: 1423376 - RNA, 18 nt, Human
caugccauuuguacugac

SEQ ID NO: 1423377 - RNA, 17 nt, Human
caugccauuuguacuga

SEQ ID NO: 1423378 - RNA, 17 nt, Human
caugccaguaacaggcu

SEQ ID NO: 1423379 - RNA, 19 nt, Human
caugccaguaacaggcuca

SEQ ID NO: 1423380 - RNA, 18 nt, Human
caugccaggcuaauuuuu

SEQ ID NO: 1423381 - RNA, 16 nt, Human
caugccaggcuaauuu

SEQ ID NO: 1423382 - RNA, 18 nt, Human
caugcccagagacccagc

SEQ ID NO: 1423383 - RNA, 18 nt, Human
caugccccaucccaugcu

SEQ ID NO: 1423384 - RNA, 19 nt, Human
caugcccagagacccagcg

SEQ ID NO: 1423385 - RNA, 17 nt, Human
caugcccagagacccag

SEQ ID NO: 1423386 - RNA, 16 nt, Human
caugcccagagaccca

SEQ ID NO: 1423387 - RNA, 14 nt, Human
caugcccagagacc

SEQ ID NO: 1423388 - RNA, 13 nt, Human
caugccccugaac

SEQ ID NO: 1423389 - RNA, 21 nt, Human
caugccagcuacuuccuccuc

SEQ ID NO: 1423390 - RNA, 21 nt, Human
caugccacaaggacuuccugu

SEQ ID NO: 1423391 - RNA, 17 nt, Human
caugccacaaggacuuc

SEQ ID NO: 1423392 - RNA, 20 nt, Human
caugcauuacugcaugcacu

SEQ ID NO: 1423393 - RNA, 17 nt, Human
caugcauuacugcaugc

SEQ ID NO: 1423394 - RNA, 15 nt, Human
caugcauuacugcau

SEQ ID NO: 1423395 - RNA, 21 nt, Human
caugcauguccuguaaagguu

SEQ ID NO: 1423396 - RNA, 18 nt, Human
caugcauguccuguaaag

SEQ ID NO: 1423397 - RNA, 17 nt, Human
caugcauguccuguaaa

SEQ ID NO: 1423398 - RNA, 15 nt, Human
caugcauggaaauuc

SEQ ID NO: 1423399 - RNA, 16 nt, Human
caugcauguccuguaa

SEQ ID NO: 1423400 - RNA, 17 nt, Human
caugcauggaaauuccc

SEQ ID NO: 1423401 - RNA, 14 nt, Human
caugccccuggcug

SEQ ID NO: 1423402 - RNA, 21 nt, Human
caugccucugaggccagccug

SEQ ID NO: 1423403 - RNA, 20 nt, Human
caugccucugaggccagccu

SEQ ID NO: 1423404 - RNA, 19 nt, Human
caugccucugaggccagcc

SEQ ID NO: 1423405 - RNA, 18 nt, Human
caugccucugaggccagc

SEQ ID NO: 1423406 - RNA, 17 nt, Human
caugccucugaggccag

SEQ ID NO: 1423407 - RNA, 16 nt, Human
caugccucugaggcca

SEQ ID NO: 1423408 - RNA, 15 nt, Human
caugccucugaggcc

SEQ ID NO: 1423409 - RNA, 14 nt, Human
caugccucugaggc

SEQ ID NO: 1423410 - RNA, 13 nt, Human
caugccucugagg

SEQ ID NO: 1423411 - RNA, 22 nt, Human
caugccucugaggccagccugg

SEQ ID NO: 1423412 - RNA, 23 nt, Human
caugccucugaggccagccuggc

SEQ ID NO: 1423413 - RNA, 19 nt, Human
caugcccugugcaaccucu

SEQ ID NO: 1423414 - RNA, 18 nt, Human
caugcccugugcaaccuc

SEQ ID NO: 1423415 - RNA, 14 nt, Human
caugcccugugcaa

SEQ ID NO: 1423416 - RNA, 21 nt, Human
caugcccggcuaauuuuugua

SEQ ID NO: 1423417 - RNA, 16 nt, Human
caugccccuggcuggg

SEQ ID NO: 1423418 - RNA, 15 nt, Human
caugccccuggcugg

SEQ ID NO: 1423419 - RNA, 18 nt, Human
caugccucagaagugcau

SEQ ID NO: 1423420 - RNA, 16 nt, Human
caugccucagaagugc

SEQ ID NO: 1423421 - RNA, 23 nt, Human
caugcccugugcaaccucuuggc

SEQ ID NO: 1423422 - RNA, 20 nt, Human
caugggccccaggggaacac

SEQ ID NO: 1423423 - RNA, 20 nt, Human
caugggcccaggccucacca

SEQ ID NO: 1423424 - RNA, 20 nt, Human
cauggggagggauucugguu

SEQ ID NO: 1423425 - RNA, 11 nt, Human
cauggggaggg

SEQ ID NO: 1423426 - RNA, 13 nt, Human
caugggggagggg

SEQ ID NO: 1423427 - RNA, 23 nt, Human
cauggggagggauucugguucca

SEQ ID NO: 1423428 - RNA, 15 nt, Human
cauggucccacaucc

SEQ ID NO: 1423429 - RNA, 19 nt, Human
cauggucagcccuagggug

SEQ ID NO: 1423430 - RNA, 16 nt, Human
cauggucagcccuagg

SEQ ID NO: 1423431 - RNA, 21 nt, Human
cauggucacacacugaugcuu

SEQ ID NO: 1423432 - RNA, 17 nt, Human
cauggucacacacugau

SEQ ID NO: 1423433 - RNA, 21 nt, Human
caugggggagggggcagaagu

SEQ ID NO: 1423434 - RNA, 19 nt, Human
caugggggagggggcagaa

SEQ ID NO: 1423435 - RNA, 17 nt, Human
caugggggagggggcag

SEQ ID NO: 1423436 - RNA, 17 nt, Human
cauggucggaaaacaug

SEQ ID NO: 1423437 - RNA, 22 nt, Human
cauggagaaagcugacuuggcu

SEQ ID NO: 1423438 - RNA, 23 nt, Human
cauggagaaagcugacuuggcug

SEQ ID NO: 1423439 - RNA, 18 nt, Human
cauggagauugaccugga

SEQ ID NO: 1423440 - RNA, 21 nt, Human
cauggagaaagcugacuuggc

SEQ ID NO: 1423441 - RNA, 20 nt, Human
cauggagaaagcugacuugg

SEQ ID NO: 1423442 - RNA, 19 nt, Human
cauggagaaagcugacuug

SEQ ID NO: 1423443 - RNA, 18 nt, Human
cauggagaaagcugacuu

SEQ ID NO: 1423444 - RNA, 17 nt, Human
cauggagaaagcugacu

SEQ ID NO: 1423445 - RNA, 15 nt, Human
cauggagaaagcuga

SEQ ID NO: 1423446 - RNA, 14 nt, Human
cauggagaaagcug

SEQ ID NO: 1423447 - RNA, 13 nt, Human
cauggagaaagcu

SEQ ID NO: 1423448 - RNA, 22 nt, Human
cauggcacagagauucugaacu

SEQ ID NO: 1423449 - RNA, 13 nt, Human
cauggauuucuuu

SEQ ID NO: 1423450 - RNA, 12 nt, Human
cauggauuucuu

SEQ ID NO: 1423451 - RNA, 19 nt, Human
cauggaugggggaacucag

SEQ ID NO: 1423452 - RNA, 13 nt, Human
cauggcagaaggc

SEQ ID NO: 1423453 - RNA, 18 nt, Human
cauggauauaguuuuacu

SEQ ID NO: 1423454 - RNA, 22 nt, Human
cauggaguggcagcccagccag

SEQ ID NO: 1423455 - RNA, 23 nt, Human
cauggaguggcagcccagccagc

SEQ ID NO: 1423456 - RNA, 21 nt, Human
cauggaguggcagcccagcca

SEQ ID NO: 1423457 - RNA, 20 nt, Human
cauggaguggcagcccagcc

SEQ ID NO: 1423458 - RNA, 19 nt, Human
cauggaguggcagcccagc

SEQ ID NO: 1423459 - RNA, 17 nt, Human
cauggaguggcagccca

SEQ ID NO: 1423460 - RNA, 15 nt, Human
cauggaguggcagcc

SEQ ID NO: 1423461 - RNA, 14 nt, Human
cauggaguggcagc

SEQ ID NO: 1423462 - RNA, 13 nt, Human
cauggaguggcag

SEQ ID NO: 1423463 - RNA, 18 nt, Human
cauggagguucuaaggcc

SEQ ID NO: 1423464 - RNA, 17 nt, Human
cauggagguucuaaggc

SEQ ID NO: 1423465 - RNA, 17 nt, Human
cauggagauucucauaa

SEQ ID NO: 1423466 - RNA, 14 nt, Human
caugcgcucagggc

SEQ ID NO: 1423467 - RNA, 23 nt, Human
caugcgcccccuccgcccugcca

SEQ ID NO: 1423468 - RNA, 21 nt, Human
caugcgcccccuccgcccugc

SEQ ID NO: 1423469 - RNA, 21 nt, Human
caugcuaagagaaguagaaau

SEQ ID NO: 1423470 - RNA, 17 nt, Human
caugcuaagagaaguag

SEQ ID NO: 1423471 - RNA, 16 nt, Human
caugcuaagagaagua

SEQ ID NO: 1423472 - RNA, 13 nt, Human
caugcuaagagaa

SEQ ID NO: 1423473 - RNA, 17 nt, Human
caugcguguuucugacu

SEQ ID NO: 1423474 - RNA, 16 nt, Human
caugcguguuucugac

SEQ ID NO: 1423475 - RNA, 21 nt, Human
caugcgguagccagcacacag

SEQ ID NO: 1423476 - RNA, 19 nt, Human
caugcgguagccagcacac

SEQ ID NO: 1423477 - RNA, 17 nt, Human
caugcgguagccagcac

SEQ ID NO: 1423478 - RNA, 16 nt, Human
caugcgguagccagca

SEQ ID NO: 1423479 - RNA, 15 nt, Human
caugcgguagccagc

SEQ ID NO: 1423480 - RNA, 14 nt, Human
caugcgguagccag

SEQ ID NO: 1423481 - RNA, 13 nt, Human
caugcgguagcca

SEQ ID NO: 1423482 - RNA, 15 nt, Human
caugcgcucagggcc

SEQ ID NO: 1423483 - RNA, 22 nt, Human
caugcgcucagggccaugcuga

SEQ ID NO: 1423484 - RNA, 19 nt, Human
caugcuaagagaaguagaa

SEQ ID NO: 1423485 - RNA, 23 nt, Human
caugcugucuacacuaagagaga

SEQ ID NO: 1423486 - RNA, 15 nt, Human
cauggaacacuucga

SEQ ID NO: 1423487 - RNA, 20 nt, Human
caugcuucccuuuccugagu

SEQ ID NO: 1423488 - RNA, 23 nt, Human
caugcuuagcaguccccuucccu

SEQ ID NO: 1423489 - RNA, 17 nt, Human
caugcuuagcagucccc

SEQ ID NO: 1423490 - RNA, 16 nt, Human
caugcuucacaauguu

SEQ ID NO: 1423491 - RNA, 19 nt, Human
caugcuuauuccaugacug

SEQ ID NO: 1423492 - RNA, 17 nt, Human
caugcuuauuccaugac

SEQ ID NO: 1423493 - RNA, 16 nt, Human
caugcuuauuccauga

SEQ ID NO: 1423494 - RNA, 21 nt, Human
caugcuuauuccaugacugcu

SEQ ID NO: 1423495 - RNA, 15 nt, Human
caugcuucccuuucc

SEQ ID NO: 1423496 - RNA, 18 nt, Human
cauggacaggcuggcucc

SEQ ID NO: 1423497 - RNA, 16 nt, Human
cauggacaggcuggcu

SEQ ID NO: 1423498 - RNA, 15 nt, Human
cauggacaggcuggc

SEQ ID NO: 1423499 - RNA, 14 nt, Human
cauggacaggcugg

SEQ ID NO: 1423500 - RNA, 21 nt, Human
cauggacacuacacccagcaa

SEQ ID NO: 1423501 - RNA, 22 nt, Human
cauggacacuacacccagcaau

SEQ ID NO: 1423502 - RNA, 23 nt, Human
cauggacacuacacccagcaaua

SEQ ID NO: 1423503 - RNA, 18 nt, Human
caugugugcaacagggua

SEQ ID NO: 1423504 - RNA, 23 nt, Human
caugugguggcacaggcccccuu

SEQ ID NO: 1423505 - RNA, 22 nt, Human
caugugguggcacaggcccccu

SEQ ID NO: 1423506 - RNA, 18 nt, Human
cauguggggccaggucac

SEQ ID NO: 1423507 - RNA, 23 nt, Human
cauguggggccaggucacccuuu

SEQ ID NO: 1423508 - RNA, 17 nt, Human
cauguggggccagguca

SEQ ID NO: 1423509 - RNA, 15 nt, Human
cauguggggccaggu

SEQ ID NO: 1423510 - RNA, 14 nt, Human
cauguggggccagg

SEQ ID NO: 1423511 - RNA, 15 nt, Human
cauguggcuggaaga

SEQ ID NO: 1423512 - RNA, 13 nt, Human
cauguggcuggaa

SEQ ID NO: 1423513 - RNA, 12 nt, Human
cauguggcugga

SEQ ID NO: 1423514 - RNA, 24 nt, Human
caugugcugcccuacagcacccug

SEQ ID NO: 1423515 - RNA, 24 nt, Human
caugugccagggcaaugaugaaug

SEQ ID NO: 1423516 - RNA, 22 nt, Human
caugugccagggcaaugaugaa

SEQ ID NO: 1423517 - RNA, 18 nt, Human
caugugaccacucugucu

SEQ ID NO: 1423518 - RNA, 12 nt, Human
caugugacauuu

SEQ ID NO: 1423519 - RNA, 16 nt, Human
caugugaccacucugu

SEQ ID NO: 1423520 - RNA, 16 nt, Human
caugugacauuuauau

SEQ ID NO: 1423521 - RNA, 14 nt, Human
caugugacauuuau

SEQ ID NO: 1423522 - RNA, 13 nt, Human
caugugacauuua

SEQ ID NO: 1423523 - RNA, 21 nt, Human
cauguuuucugaaaauauaac

SEQ ID NO: 1423524 - RNA, 22 nt, Human
cauguuucuuuguaaugaaaac

SEQ ID NO: 1423525 - RNA, 22 nt, Human
cauguguguccacgacugucuc

SEQ ID NO: 1423526 - RNA, 21 nt, Human
cauguguguccacgacugucu

SEQ ID NO: 1423527 - RNA, 12 nt, Human
caugugugucca

SEQ ID NO: 1423528 - RNA, 13 nt, Human
cauguguggaagu

SEQ ID NO: 1423529 - RNA, 21 nt, Human
caugugugguacaugguguuu

SEQ ID NO: 1423530 - RNA, 19 nt, Human
cauguuuagacuuuaacau

SEQ ID NO: 1423531 - RNA, 12 nt, Human
cauguguggaag

SEQ ID NO: 1423532 - RNA, 23 nt, Human
cauguguguccacgacugucucc

SEQ ID NO: 1423533 - RNA, 15 nt, Human
cauguuuaucugcuu

SEQ ID NO: 1423534 - RNA, 21 nt, Human
cauguuucuuuguaaugaaaa

SEQ ID NO: 1423535 - RNA, 14 nt, Human
cauguaauccucaa

SEQ ID NO: 1423536 - RNA, 21 nt, Human
cauguaacugccuagaaacaa

SEQ ID NO: 1423537 - RNA, 20 nt, Human
cauguaacugccuagaaaca

SEQ ID NO: 1423538 - RNA, 19 nt, Human
cauguaacugccuagaaac

SEQ ID NO: 1423539 - RNA, 16 nt, Human
cauguaacugccuaga

SEQ ID NO: 1423540 - RNA, 15 nt, Human
cauguaacugccuag

SEQ ID NO: 1423541 - RNA, 14 nt, Human
cauguaacugccua

SEQ ID NO: 1423542 - RNA, 20 nt, Human
cauguaacgcaaguucccag

SEQ ID NO: 1423543 - RNA, 19 nt, Human
cauguaacgcaaguuccca

SEQ ID NO: 1423544 - RNA, 19 nt, Human
caugguuaccaugucuuuc

SEQ ID NO: 1423545 - RNA, 18 nt, Human
caugguuaccaugucuuu

SEQ ID NO: 1423546 - RNA, 17 nt, Human
caugguuaccaugucuu

SEQ ID NO: 1423547 - RNA, 19 nt, Human
caugguuaagaguccaaga

SEQ ID NO: 1423548 - RNA, 16 nt, Human
caugguuaagagucca

SEQ ID NO: 1423549 - RNA, 13 nt, Human
caugguuaagagu

SEQ ID NO: 1423550 - RNA, 19 nt, Human
caugguguucuccugcugc

SEQ ID NO: 1423551 - RNA, 17 nt, Human
caugguguucuccugcu

SEQ ID NO: 1423552 - RNA, 16 nt, Human
caugguguucuccugc

SEQ ID NO: 1423553 - RNA, 15 nt, Human
caugguguucuccug

SEQ ID NO: 1423554 - RNA, 14 nt, Human
caugguguucuccu

SEQ ID NO: 1423555 - RNA, 18 nt, Human
cauggugugaucgucuga

SEQ ID NO: 1423556 - RNA, 16 nt, Human
caugguguccagacag

SEQ ID NO: 1423557 - RNA, 22 nt, Human
cauggugccccaggaccagcuc

SEQ ID NO: 1423558 - RNA, 20 nt, Human
cauggugccccaggaccagc

SEQ ID NO: 1423559 - RNA, 19 nt, Human
cauggugccccaggaccag

SEQ ID NO: 1423560 - RNA, 18 nt, Human
cauggugccccaggacca

SEQ ID NO: 1423561 - RNA, 17 nt, Human
cauggugccccaggacc

SEQ ID NO: 1423562 - RNA, 16 nt, Human
cauggugccccaggac

SEQ ID NO: 1423563 - RNA, 22 nt, Human
cauggucccacaucccugggcc

SEQ ID NO: 1423564 - RNA, 21 nt, Human
cauggucccacaucccugggc

SEQ ID NO: 1423565 - RNA, 20 nt, Human
cauggucccacaucccuggg

SEQ ID NO: 1423566 - RNA, 15 nt, Human
cauggugccccagga

SEQ ID NO: 1423567 - RNA, 23 nt, Human
cauggucccacaucccugggccu

SEQ ID NO: 1423568 - RNA, 19 nt, Human
cauggucccacaucccugg

SEQ ID NO: 1423569 - RNA, 18 nt, Human
cauggucccacaucccug

SEQ ID NO: 1423570 - RNA, 17 nt, Human
cauggucccacaucccu

SEQ ID NO: 1423571 - RNA, 16 nt, Human
cauggucccacauccc

SEQ ID NO: 1423572 - RNA, 16 nt, Human
cauggucggaaaacau

SEQ ID NO: 1423573 - RNA, 17 nt, Human
cauguccuucugagccc

SEQ ID NO: 1423574 - RNA, 15 nt, Human
cauguacaugaagaa

SEQ ID NO: 1423575 - RNA, 15 nt, Human
caugugaaaucauuc

SEQ ID NO: 1423576 - RNA, 16 nt, Human
caugugaaaucauuca

SEQ ID NO: 1423577 - RNA, 17 nt, Human
caugugaaaucauucau

SEQ ID NO: 1423578 - RNA, 13 nt, Human
cauuaaauucaca

SEQ ID NO: 1423579 - RNA, 20 nt, Human
cauuaaauuacagaaauuua

SEQ ID NO: 1423580 - RNA, 11 nt, Human
cauuaaauaaa

SEQ ID NO: 1423581 - RNA, 13 nt, Human
cauuaaauaaauu

SEQ ID NO: 1423582 - RNA, 14 nt, Human
cauuaaagaagacc

SEQ ID NO: 1423583 - RNA, 15 nt, Human
cauuaaagaagaccu

SEQ ID NO: 1423584 - RNA, 11 nt, Human
cauuaaagaag

SEQ ID NO: 1423585 - RNA, 22 nt, Human
cauuaaacgauuuuuaaaaugu

SEQ ID NO: 1423586 - RNA, 18 nt, Human
cauuaaucugccucccuc

SEQ ID NO: 1423587 - RNA, 20 nt, Human
cauuaaucaguucauuagaa

SEQ ID NO: 1423588 - RNA, 18 nt, Human
cauuaauagcagccuuuc

SEQ ID NO: 1423589 - RNA, 20 nt, Human
cauuaauagcagccuuucuc

SEQ ID NO: 1423590 - RNA, 17 nt, Human
cauuaauagcagccuuu

SEQ ID NO: 1423591 - RNA, 15 nt, Human
cauuaauagcagccu

SEQ ID NO: 1423592 - RNA, 14 nt, Human
cauuaaauuacaga

SEQ ID NO: 1423593 - RNA, 21 nt, Human
cauuaaauucacaaacuuuua

SEQ ID NO: 1423594 - RNA, 18 nt, Human
cauuaaauucacaaacuu

SEQ ID NO: 1423595 - RNA, 17 nt, Human
cauuaaauucacaaacu

SEQ ID NO: 1423596 - RNA, 14 nt, Human
cauuaaauucacaa

SEQ ID NO: 1423597 - RNA, 12 nt, Human
cauuaaucugcc

SEQ ID NO: 1423598 - RNA, 15 nt, Human
cauuaccauguaaug

SEQ ID NO: 1423599 - RNA, 12 nt, Human
cauuaauucuau

SEQ ID NO: 1423600 - RNA, 20 nt, Human
cauuagacuggaacuugaac

SEQ ID NO: 1423601 - RNA, 16 nt, Human
cauuagacuggaacuu

SEQ ID NO: 1423602 - RNA, 15 nt, Human
cauuacuauaagaac

SEQ ID NO: 1423603 - RNA, 18 nt, Human
cauuagaccaagcuuguc

SEQ ID NO: 1423604 - RNA, 16 nt, Human
cauuauuuauguauug

SEQ ID NO: 1423605 - RNA, 15 nt, Human
cauuauuuauguauu

SEQ ID NO: 1423606 - RNA, 22 nt, Human
cauuauuuauguauugugcaau

SEQ ID NO: 1423607 - RNA, 21 nt, Human
cauccaaggccagguucuccg

SEQ ID NO: 1423608 - RNA, 21 nt, Human
cauccaaagcagacagcucca

SEQ ID NO: 1423609 - RNA, 18 nt, Human
cauccaaagcagacagcu

SEQ ID NO: 1423610 - RNA, 17 nt, Human
cauccaaagcagacagc

SEQ ID NO: 1423611 - RNA, 16 nt, Human
cauccaaagcagacag

SEQ ID NO: 1423612 - RNA, 15 nt, Human
cauccaaagcagaca

SEQ ID NO: 1423613 - RNA, 23 nt, Human
cauccaaaaucuugaucaguuaa

SEQ ID NO: 1423614 - RNA, 17 nt, Human
cauccaaaaucuugauc

SEQ ID NO: 1423615 - RNA, 23 nt, Human
cauccaaaauaguuaagacauga

SEQ ID NO: 1423616 - RNA, 14 nt, Human
caucauuuuuuacu

SEQ ID NO: 1423617 - RNA, 20 nt, Human
caucauuucuuuuugggaga

SEQ ID NO: 1423618 - RNA, 15 nt, Human
caucauuucacuugu

SEQ ID NO: 1423619 - RNA, 12 nt, Human
caucauuucacu

SEQ ID NO: 1423620 - RNA, 24 nt, Human
caucauucucugucucauccauca

SEQ ID NO: 1423621 - RNA, 22 nt, Human
caucauucucugucucauccau

SEQ ID NO: 1423622 - RNA, 21 nt, Human
caucauucucugucucaucca

SEQ ID NO: 1423623 - RNA, 16 nt, Human
caucacagcccagccc

SEQ ID NO: 1423624 - RNA, 14 nt, Human
caucccuccccagu

SEQ ID NO: 1423625 - RNA, 13 nt, Human
caucccucaccca

SEQ ID NO: 1423626 - RNA, 14 nt, Human
caucccucacccau

SEQ ID NO: 1423627 - RNA, 13 nt, Human
caucccuccccag

SEQ ID NO: 1423628 - RNA, 20 nt, Human
caucccucacccauccuaga

SEQ ID NO: 1423629 - RNA, 14 nt, Human
cauccaccccaucc

SEQ ID NO: 1423630 - RNA, 12 nt, Human
cauccaccccau

SEQ ID NO: 1423631 - RNA, 20 nt, Human
cauccacauacccugaccug

SEQ ID NO: 1423632 - RNA, 17 nt, Human
cauccacaugggagccg

SEQ ID NO: 1423633 - RNA, 14 nt, Human
cauccacacaugaa

SEQ ID NO: 1423634 - RNA, 14 nt, Human
cauccaaguuaaau

SEQ ID NO: 1423635 - RNA, 15 nt, Human
cauccagcucacuca

SEQ ID NO: 1423636 - RNA, 23 nt, Human
cauccagcagauuuccagccuuc

SEQ ID NO: 1423637 - RNA, 11 nt, Human
cauccagggcc

SEQ ID NO: 1423638 - RNA, 22 nt, Human
cauccaggaggaauaagcuccc

SEQ ID NO: 1423639 - RNA, 21 nt, Human
cauccagggcccccaucucau

SEQ ID NO: 1423640 - RNA, 13 nt, Human
cauccagggggca

SEQ ID NO: 1423641 - RNA, 12 nt, Human
cauccuccagcc

SEQ ID NO: 1423642 - RNA, 17 nt, Human
cauccuccagauagugu

SEQ ID NO: 1423643 - RNA, 21 nt, Human
cauccuccacguucugcucau

SEQ ID NO: 1423644 - RNA, 20 nt, Human
cauccuccacguucugcuca

SEQ ID NO: 1423645 - RNA, 18 nt, Human
cauccuccacguucugcu

SEQ ID NO: 1423646 - RNA, 22 nt, Human
cauccucaaagaaaguguauug

SEQ ID NO: 1423647 - RNA, 15 nt, Human
cauccuccagccccu

SEQ ID NO: 1423648 - RNA, 14 nt, Human
cauccuccagcccc

SEQ ID NO: 1423649 - RNA, 13 nt, Human
cauccuccagccc

SEQ ID NO: 1423650 - RNA, 19 nt, Human
cauccuacccccugugccu

SEQ ID NO: 1423651 - RNA, 20 nt, Human
cauccucaaagaaaguguau

SEQ ID NO: 1423652 - RNA, 14 nt, Human
cauccucaaagaaa

SEQ ID NO: 1423653 - RNA, 17 nt, Human
cauccuaggcugacacc

SEQ ID NO: 1423654 - RNA, 15 nt, Human
cauccuaccgucuuu

SEQ ID NO: 1423655 - RNA, 20 nt, Human
caucucauuuaauccucccu

SEQ ID NO: 1423656 - RNA, 22 nt, Human
caucucaugccccuggcuggga

SEQ ID NO: 1423657 - RNA, 22 nt, Human
caucucagugaagaauacuucu

SEQ ID NO: 1423658 - RNA, 21 nt, Human
caucucagugaagaauacuuc

SEQ ID NO: 1423659 - RNA, 17 nt, Human
caucucaguaugaauua

SEQ ID NO: 1423660 - RNA, 18 nt, Human
caucucaggccagagcca

SEQ ID NO: 1423661 - RNA, 17 nt, Human
caucucaggccagagcc

SEQ ID NO: 1423662 - RNA, 14 nt, Human
caucucaggccaga

SEQ ID NO: 1423663 - RNA, 19 nt, Human
caucucagcucacugcaac

SEQ ID NO: 1423664 - RNA, 20 nt, Human
caucucagcucacugcaacc

SEQ ID NO: 1423665 - RNA, 21 nt, Human
caucucaacaggccucagggc

SEQ ID NO: 1423666 - RNA, 22 nt, Human
caucucaacaggccucagggcu

SEQ ID NO: 1423667 - RNA, 20 nt, Human
caucucaacaggccucaggg

SEQ ID NO: 1423668 - RNA, 19 nt, Human
caucucaacaggccucagg

SEQ ID NO: 1423669 - RNA, 15 nt, Human
caucucaacaggccu

SEQ ID NO: 1423670 - RNA, 16 nt, Human
caucuauuuuggauug

SEQ ID NO: 1423671 - RNA, 14 nt, Human
caucuauuuuggau

SEQ ID NO: 1423672 - RNA, 22 nt, Human
caucuagugagcagucaggaaa

SEQ ID NO: 1423673 - RNA, 17 nt, Human
caucuauagaaagcuau

SEQ ID NO: 1423674 - RNA, 20 nt, Human
cauccuccucccacccggcu

SEQ ID NO: 1423675 - RNA, 16 nt, Human
cauccuccucccaccc

SEQ ID NO: 1423676 - RNA, 13 nt, Human
cauccuccuccca

SEQ ID NO: 1423677 - RNA, 20 nt, Human
caucuaaguuauaagacucu

SEQ ID NO: 1423678 - RNA, 23 nt, Human
cauccucuggcuuggccacagcc

SEQ ID NO: 1423679 - RNA, 19 nt, Human
cauccucuggagccagccg

SEQ ID NO: 1423680 - RNA, 18 nt, Human
cauccucuggagccagcc

SEQ ID NO: 1423681 - RNA, 17 nt, Human
cauccucuggagccagc

SEQ ID NO: 1423682 - RNA, 11 nt, Human
cauccucucca

SEQ ID NO: 1423683 - RNA, 19 nt, Human
caucuagaggcuuccuuca

SEQ ID NO: 1423684 - RNA, 20 nt, Human
caucuaccuagauuuaauau

SEQ ID NO: 1423685 - RNA, 19 nt, Human
caucuaccuagauuuaaua

SEQ ID NO: 1423686 - RNA, 23 nt, Human
caucuagaggcuuccuucauuuc

SEQ ID NO: 1423687 - RNA, 22 nt, Human
caucuagaggcuuccuucauuu

SEQ ID NO: 1423688 - RNA, 21 nt, Human
caucuagaggcuuccuucauu

SEQ ID NO: 1423689 - RNA, 20 nt, Human
caucuagaggcuuccuucau

SEQ ID NO: 1423690 - RNA, 12 nt, Human
caucuaggauuu

SEQ ID NO: 1423691 - RNA, 14 nt, Human
caucuagugagcag

SEQ ID NO: 1423692 - RNA, 18 nt, Human
caucuagguaaauuacag

SEQ ID NO: 1423693 - RNA, 17 nt, Human
caucuagguaaauuaca

SEQ ID NO: 1423694 - RNA, 12 nt, Human
caucuugcuacc

SEQ ID NO: 1423695 - RNA, 19 nt, Human
caucuugcccgcucaggcu

SEQ ID NO: 1423696 - RNA, 20 nt, Human
caucuugcccgcucaggcug

SEQ ID NO: 1423697 - RNA, 18 nt, Human
caucuugcccgcucaggc

SEQ ID NO: 1423698 - RNA, 17 nt, Human
caucuugcauuaugcaa

SEQ ID NO: 1423699 - RNA, 16 nt, Human
caucuugcauuaugca

SEQ ID NO: 1423700 - RNA, 13 nt, Human
caucuugcauuau

SEQ ID NO: 1423701 - RNA, 13 nt, Human
caucuucugccuu

SEQ ID NO: 1423702 - RNA, 21 nt, Human
caucuucuaaacccaauccaa

SEQ ID NO: 1423703 - RNA, 11 nt, Human
caucuuggggg

SEQ ID NO: 1423704 - RNA, 16 nt, Human
caucuuggaacugcau

SEQ ID NO: 1423705 - RNA, 15 nt, Human
caucuugcuucccua

SEQ ID NO: 1423706 - RNA, 14 nt, Human
caucuugcuucccu

SEQ ID NO: 1423707 - RNA, 13 nt, Human
caucuugcuuccc

SEQ ID NO: 1423708 - RNA, 23 nt, Human
caucuugcuaccaguauuuagaa

SEQ ID NO: 1423709 - RNA, 22 nt, Human
caucuugcuaccaguauuuaga

SEQ ID NO: 1423710 - RNA, 20 nt, Human
caucuugcuaccaguauuua

SEQ ID NO: 1423711 - RNA, 18 nt, Human
caucuugcuaccaguauu

SEQ ID NO: 1423712 - RNA, 17 nt, Human
caucuugcuaccaguau

SEQ ID NO: 1423713 - RNA, 16 nt, Human
caucuugcuaccagua

SEQ ID NO: 1423714 - RNA, 14 nt, Human
caucuugcuaccag

SEQ ID NO: 1423715 - RNA, 23 nt, Human
caucucugggcuggaugagcucc

SEQ ID NO: 1423716 - RNA, 22 nt, Human
caucucccagauaaugugaaaa

SEQ ID NO: 1423717 - RNA, 18 nt, Human
caucucccagauaaugug

SEQ ID NO: 1423718 - RNA, 17 nt, Human
caucucccagauaaugu

SEQ ID NO: 1423719 - RNA, 21 nt, Human
caucucccaccuagcagcacc

SEQ ID NO: 1423720 - RNA, 13 nt, Human
caucuccaagcag

SEQ ID NO: 1423721 - RNA, 19 nt, Human
caucucauuuaauccuccc

SEQ ID NO: 1423722 - RNA, 23 nt, Human
caucuucaguugucucugaugca

SEQ ID NO: 1423723 - RNA, 22 nt, Human
caucuucaguugucucugaugc

SEQ ID NO: 1423724 - RNA, 20 nt, Human
caucuucaguugucucugau

SEQ ID NO: 1423725 - RNA, 15 nt, Human
caucuucaguugucu

SEQ ID NO: 1423726 - RNA, 14 nt, Human
caucuucaguuguc

SEQ ID NO: 1423727 - RNA, 15 nt, Human
caucugaguccugga

SEQ ID NO: 1423728 - RNA, 13 nt, Human
caucugauuaaaa

SEQ ID NO: 1423729 - RNA, 21 nt, Human
caucugaguccuggaugauac

SEQ ID NO: 1423730 - RNA, 21 nt, Human
caucugagguuuuauuucauu

SEQ ID NO: 1423731 - RNA, 15 nt, Human
caucugagguuuuau

SEQ ID NO: 1423732 - RNA, 23 nt, Human
caucugagaaaagcuuugaaccc

SEQ ID NO: 1423733 - RNA, 14 nt, Human
caucugagaaaagc

SEQ ID NO: 1423734 - RNA, 16 nt, Human
caucucuuguuuaaau

SEQ ID NO: 1423735 - RNA, 23 nt, Human
cauagaucagcaaaccggggccu

SEQ ID NO: 1423736 - RNA, 21 nt, Human
cauagauaaaacaucuuugaa

SEQ ID NO: 1423737 - RNA, 21 nt, Human
cauagagccggguguccccaa

SEQ ID NO: 1423738 - RNA, 22 nt, Human
cauagagccggguguccccaac

SEQ ID NO: 1423739 - RNA, 20 nt, Human
cauagagccgggugucccca

SEQ ID NO: 1423740 - RNA, 18 nt, Human
cauagauaaaacaucuuu

SEQ ID NO: 1423741 - RNA, 12 nt, Human
cauauaaaguau

SEQ ID NO: 1423742 - RNA, 13 nt, Human
cauaguucagaau

SEQ ID NO: 1423743 - RNA, 12 nt, Human
cauaguucagaa

SEQ ID NO: 1423744 - RNA, 17 nt, Human
cauauauauacuauuaa

SEQ ID NO: 1423745 - RNA, 17 nt, Human
cauauacagcucagaag

SEQ ID NO: 1423746 - RNA, 16 nt, Human
cauauaauuauauguu

SEQ ID NO: 1423747 - RNA, 22 nt, Human
cauauaauuauauguuguaagc

SEQ ID NO: 1423748 - RNA, 15 nt, Human
cauauaauuauaugu

SEQ ID NO: 1423749 - RNA, 18 nt, Human
cauauaauguuguuauuu

SEQ ID NO: 1423750 - RNA, 17 nt, Human
cauauaauguuguuauu

SEQ ID NO: 1423751 - RNA, 15 nt, Human
cauauaauguuguua

SEQ ID NO: 1423752 - RNA, 18 nt, Human
cauaucacacacauugcu

SEQ ID NO: 1423753 - RNA, 16 nt, Human
cauaucacacacauug

SEQ ID NO: 1423754 - RNA, 14 nt, Human
cauaucacacacau

SEQ ID NO: 1423755 - RNA, 14 nt, Human
cauauauauacuau

SEQ ID NO: 1423756 - RNA, 22 nt, Human
cauaugaguaagggcacugacg

SEQ ID NO: 1423757 - RNA, 20 nt, Human
cauaucauccacacaugaau

SEQ ID NO: 1423758 - RNA, 18 nt, Human
cauaucauccacacauga

SEQ ID NO: 1423759 - RNA, 17 nt, Human
cauaucauccacacaug

SEQ ID NO: 1423760 - RNA, 14 nt, Human
cauaucauccacac

SEQ ID NO: 1423761 - RNA, 15 nt, Human
cauaugauguacaug

SEQ ID NO: 1423762 - RNA, 17 nt, Human
cauaugauguacaugua

SEQ ID NO: 1423763 - RNA, 14 nt, Human
cauaugauuuacau

SEQ ID NO: 1423764 - RNA, 15 nt, Human
cauaugaucugucug

SEQ ID NO: 1423765 - RNA, 21 nt, Human
cauaugauguacauguacuga

SEQ ID NO: 1423766 - RNA, 17 nt, Human
cauacuguaacauucag

SEQ ID NO: 1423767 - RNA, 22 nt, Human
cauacuggccuggacuguuuuc

SEQ ID NO: 1423768 - RNA, 18 nt, Human
cauacuggccuggacugu

SEQ ID NO: 1423769 - RNA, 15 nt, Human
cauacuggccuggac

SEQ ID NO: 1423770 - RNA, 13 nt, Human
cauacuggccugg

SEQ ID NO: 1423771 - RNA, 22 nt, Human
cauacucauuuuucaugauaau

SEQ ID NO: 1423772 - RNA, 23 nt, Human
cauacuugaacguuuucuaauug

SEQ ID NO: 1423773 - RNA, 23 nt, Human
cauacuugaagggccagagccag

SEQ ID NO: 1423774 - RNA, 22 nt, Human
cauacuugaagggccagagcca

SEQ ID NO: 1423775 - RNA, 21 nt, Human
cauacuugaagggccagagcc

SEQ ID NO: 1423776 - RNA, 20 nt, Human
cauacuugaagggccagagc

SEQ ID NO: 1423777 - RNA, 18 nt, Human
cauacuugaagggccaga

SEQ ID NO: 1423778 - RNA, 17 nt, Human
cauacuugaagggccag

SEQ ID NO: 1423779 - RNA, 14 nt, Human
cauacuugaagggc

SEQ ID NO: 1423780 - RNA, 13 nt, Human
cauacuugaaggg

SEQ ID NO: 1423781 - RNA, 22 nt, Human
cauacuugaacguuuucuaauu

SEQ ID NO: 1423782 - RNA, 21 nt, Human
cauacuugaacguuuucuaau

SEQ ID NO: 1423783 - RNA, 20 nt, Human
cauacuugaacguuuucuaa

SEQ ID NO: 1423784 - RNA, 20 nt, Human
cauacuuuuuaaauguaaag

SEQ ID NO: 1423785 - RNA, 16 nt, Human
cauacuuuuuaaaugu

SEQ ID NO: 1423786 - RNA, 14 nt, Human
cauacuuuccugua

SEQ ID NO: 1423787 - RNA, 22 nt, Human
cauacuuuuuaaauguaaagau

SEQ ID NO: 1423788 - RNA, 19 nt, Human
cauagacagaagaaacaag

SEQ ID NO: 1423789 - RNA, 23 nt, Human
cauagaaauguaacuuuuguaag

SEQ ID NO: 1423790 - RNA, 14 nt, Human
cauagaauaaaauu

SEQ ID NO: 1423791 - RNA, 20 nt, Human
cauagacagaagaaacaagg

SEQ ID NO: 1423792 - RNA, 15 nt, Human
cauagacagaagaaa

SEQ ID NO: 1423793 - RNA, 20 nt, Human
cauagaauaaaauuuuuaau

SEQ ID NO: 1423794 - RNA, 17 nt, Human
cauauuuaccucagccu

SEQ ID NO: 1423795 - RNA, 12 nt, Human
cauauuuauaaa

SEQ ID NO: 1423796 - RNA, 18 nt, Human
cauauuuaccucagccug

SEQ ID NO: 1423797 - RNA, 19 nt, Human
cauauuuaccucagccugg

SEQ ID NO: 1423798 - RNA, 17 nt, Human
cauauuuauaaaaauaa

SEQ ID NO: 1423799 - RNA, 17 nt, Human
caucacagcccagcccg

SEQ ID NO: 1423800 - RNA, 14 nt, Human
caucacagcccagc

SEQ ID NO: 1423801 - RNA, 13 nt, Human
caucacagcccag

SEQ ID NO: 1423802 - RNA, 19 nt, Human
caucacacugggugguggc

SEQ ID NO: 1423803 - RNA, 14 nt, Human
caucacacugggug

SEQ ID NO: 1423804 - RNA, 12 nt, Human
caucacagaaug

SEQ ID NO: 1423805 - RNA, 16 nt, Human
caucaauuaaaggcaa

SEQ ID NO: 1423806 - RNA, 19 nt, Human
caucaauggggccagucag

SEQ ID NO: 1423807 - RNA, 22 nt, Human
caucaauggggccagucaggcc

SEQ ID NO: 1423808 - RNA, 19 nt, Human
caucaaguugugccaaauu

SEQ ID NO: 1423809 - RNA, 15 nt, Human
caucaaaaugcuuuu

SEQ ID NO: 1423810 - RNA, 13 nt, Human
caucaaaaugcuu

SEQ ID NO: 1423811 - RNA, 15 nt, Human
caucaagacuuugcu

SEQ ID NO: 1423812 - RNA, 23 nt, Human
caucaaagaggcugaggcuggca

SEQ ID NO: 1423813 - RNA, 11 nt, Human
caucaaagagg

SEQ ID NO: 1423814 - RNA, 14 nt, Human
caucaaguaauaca

SEQ ID NO: 1423815 - RNA, 21 nt, Human
caucaaggacacgggccuguc

SEQ ID NO: 1423816 - RNA, 20 nt, Human
caucaaggacacgggccugu

SEQ ID NO: 1423817 - RNA, 12 nt, Human
caucaagagaau

SEQ ID NO: 1423818 - RNA, 17 nt, Human
caucaagagacugaguc

SEQ ID NO: 1423819 - RNA, 22 nt, Human
caucaagacuuugcuaaagaca

SEQ ID NO: 1423820 - RNA, 16 nt, Human
caucaagacuuugcua

SEQ ID NO: 1423821 - RNA, 22 nt, Human
caucaagucuuucacauuuaaa

SEQ ID NO: 1423822 - RNA, 18 nt, Human
caucaaaaacuuuggagu

SEQ ID NO: 1423823 - RNA, 21 nt, Human
caucaaaaaaggcaguuacca

SEQ ID NO: 1423824 - RNA, 15 nt, Human
caucaaaaaaggcag

SEQ ID NO: 1423825 - RNA, 16 nt, Human
cauauuuaccucagcc

SEQ ID NO: 1423826 - RNA, 18 nt, Human
cauauuuucaccauuuga

SEQ ID NO: 1423827 - RNA, 12 nt, Human
cauauuuucaug

SEQ ID NO: 1423828 - RNA, 19 nt, Human
cauacccugaccuggcccc

SEQ ID NO: 1423829 - RNA, 18 nt, Human
cauacccugaccuggccc

SEQ ID NO: 1423830 - RNA, 16 nt, Human
cauacccugaccuggc

SEQ ID NO: 1423831 - RNA, 15 nt, Human
cauacccugaccugg

SEQ ID NO: 1423832 - RNA, 14 nt, Human
cauacccugaccug

SEQ ID NO: 1423833 - RNA, 20 nt, Human
cauaccccuuacaaaugaaa

SEQ ID NO: 1423834 - RNA, 18 nt, Human
cauaccccuuacaaauga

SEQ ID NO: 1423835 - RNA, 15 nt, Human
cauacccccuccccc

SEQ ID NO: 1423836 - RNA, 13 nt, Human
cauacccccuccc

SEQ ID NO: 1423837 - RNA, 21 nt, Human
cauaccuccuauggguuguca

SEQ ID NO: 1423838 - RNA, 22 nt, Human
cauacccuggccgcccccugcc

SEQ ID NO: 1423839 - RNA, 17 nt, Human
cauacgcucagcucauc

SEQ ID NO: 1423840 - RNA, 13 nt, Human
cauacguacacau

SEQ ID NO: 1423841 - RNA, 15 nt, Human
cauacguacacauuu

SEQ ID NO: 1423842 - RNA, 16 nt, Human
cauacguacacauuuu

SEQ ID NO: 1423843 - RNA, 17 nt, Human
cauacguacacauuuua

SEQ ID NO: 1423844 - RNA, 18 nt, Human
cauacguacacauuuuau

SEQ ID NO: 1423845 - RNA, 14 nt, Human
cauacuaaccagca

SEQ ID NO: 1423846 - RNA, 21 nt, Human
cauacuaaccagcagaaaugc

SEQ ID NO: 1423847 - RNA, 22 nt, Human
caguuggaguuuuuuguaccaa

SEQ ID NO: 1423848 - RNA, 22 nt, Human
caguuggagcuccagccugaca

SEQ ID NO: 1423849 - RNA, 21 nt, Human
caguuggagcuccagccugac

SEQ ID NO: 1423850 - RNA, 17 nt, Human
caguuggagcuccagcc

SEQ ID NO: 1423851 - RNA, 20 nt, Human
caguuggacuuuuuaaaaau

SEQ ID NO: 1423852 - RNA, 15 nt, Human
caguuggacuuuuua

SEQ ID NO: 1423853 - RNA, 13 nt, Human
caguuggacuuuu

SEQ ID NO: 1423854 - RNA, 13 nt, Human
caguugccuuuua

SEQ ID NO: 1423855 - RNA, 22 nt, Human
caguugccuuuuaucccaaagu

SEQ ID NO: 1423856 - RNA, 23 nt, Human
caguugcauguaguaacacuaau

SEQ ID NO: 1423857 - RNA, 17 nt, Human
caguugucucugaugca

SEQ ID NO: 1423858 - RNA, 15 nt, Human
caguugucucugaug

SEQ ID NO: 1423859 - RNA, 14 nt, Human
caguugucucugau

SEQ ID NO: 1423860 - RNA, 13 nt, Human
caguugucucuga

SEQ ID NO: 1423861 - RNA, 11 nt, Human
caguugucucu

SEQ ID NO: 1423862 - RNA, 22 nt, Human
caguugucccgauuguaacuca

SEQ ID NO: 1423863 - RNA, 21 nt, Human
caguugucccgauuguaacuc

SEQ ID NO: 1423864 - RNA, 20 nt, Human
caguugucccgauuguaacu

SEQ ID NO: 1423865 - RNA, 18 nt, Human
caguugucccgauuguaa

SEQ ID NO: 1423866 - RNA, 21 nt, Human
caguuguauuuaacagaaauu

SEQ ID NO: 1423867 - RNA, 18 nt, Human
caguuguauuuaacagaa

SEQ ID NO: 1423868 - RNA, 14 nt, Human
caguuguauuuaac

SEQ ID NO: 1423869 - RNA, 17 nt, Human
caguugguaacuuuugu

SEQ ID NO: 1423870 - RNA, 16 nt, Human
caguugguaacuuuug

SEQ ID NO: 1423871 - RNA, 14 nt, Human
caguugguaacuuu

SEQ ID NO: 1423872 - RNA, 13 nt, Human
caguugucucugu

SEQ ID NO: 1423873 - RNA, 22 nt, Human
caguugucucugaugcagcuua

SEQ ID NO: 1423874 - RNA, 21 nt, Human
caguugucucugaugcagcuu

SEQ ID NO: 1423875 - RNA, 15 nt, Human
caguugucucuguuu

SEQ ID NO: 1423876 - RNA, 23 nt, Human
caguuuuuuuuuucuugucuaua

SEQ ID NO: 1423877 - RNA, 18 nt, Human
caguuuuuuuuuucuugu

SEQ ID NO: 1423878 - RNA, 16 nt, Human
caguuuuuuaugcuaa

SEQ ID NO: 1423879 - RNA, 19 nt, Human
caguuuuuucaccuggaag

SEQ ID NO: 1423880 - RNA, 13 nt, Human
caguuuuuauuaa

SEQ ID NO: 1423881 - RNA, 22 nt, Human
caguucuuugggccagacaugc

SEQ ID NO: 1423882 - RNA, 21 nt, Human
caguucuuugggccagacaug

SEQ ID NO: 1423883 - RNA, 20 nt, Human
caguucuuugggccagacau

SEQ ID NO: 1423884 - RNA, 14 nt, Human
caguugaauuucau

SEQ ID NO: 1423885 - RNA, 19 nt, Human
caguugaagggaggggcug

SEQ ID NO: 1423886 - RNA, 17 nt, Human
caguugauuuucuggau

SEQ ID NO: 1423887 - RNA, 16 nt, Human
caguugauuuucugga

SEQ ID NO: 1423888 - RNA, 16 nt, Human
caguugagacaagaaa

SEQ ID NO: 1423889 - RNA, 18 nt, Human
caguugagacaagaaaau

SEQ ID NO: 1423890 - RNA, 21 nt, Human
caguugcauguaguaacacua

SEQ ID NO: 1423891 - RNA, 20 nt, Human
caguugcauguaguaacacu

SEQ ID NO: 1423892 - RNA, 19 nt, Human
caguugcauguaguaacac

SEQ ID NO: 1423893 - RNA, 18 nt, Human
caguugcauguaguaaca

SEQ ID NO: 1423894 - RNA, 16 nt, Human
caguugcauguaguaa

SEQ ID NO: 1423895 - RNA, 19 nt, Human
caguugcagucacucuagu

SEQ ID NO: 1423896 - RNA, 14 nt, Human
caguugcagucacu

SEQ ID NO: 1423897 - RNA, 11 nt, Human
caguugcaguc

SEQ ID NO: 1423898 - RNA, 11 nt, Human
caguugcagcc

SEQ ID NO: 1423899 - RNA, 15 nt, Human
cauaaaaaugaucua

SEQ ID NO: 1423900 - RNA, 12 nt, Human
cauaaaacaggu

SEQ ID NO: 1423901 - RNA, 22 nt, Human
cauaaaaaggacaucagcaaac

SEQ ID NO: 1423902 - RNA, 21 nt, Human
caguuuuuuuuuucuugucua

SEQ ID NO: 1423903 - RNA, 20 nt, Human
caguuuuuuuuuucuugucu

SEQ ID NO: 1423904 - RNA, 19 nt, Human
caguuuuuuuuuucuuguc

SEQ ID NO: 1423905 - RNA, 13 nt, Human
cauaaaaaggaca

SEQ ID NO: 1423906 - RNA, 19 nt, Human
cauaaaaaggacaucagca

SEQ ID NO: 1423907 - RNA, 20 nt, Human
cauaaaaaggacaucagcaa

SEQ ID NO: 1423908 - RNA, 21 nt, Human
cauaaaaaggacaucagcaaa

SEQ ID NO: 1423909 - RNA, 21 nt, Human
cauaaacccaguugccaucug

SEQ ID NO: 1423910 - RNA, 22 nt, Human
cauaaacaagaccacguuucua

SEQ ID NO: 1423911 - RNA, 20 nt, Human
cauaaacaagaccacguuuc

SEQ ID NO: 1423912 - RNA, 21 nt, Human
cauaaacaagaccacguuucu

SEQ ID NO: 1423913 - RNA, 14 nt, Human
cauaaagcaggcag

SEQ ID NO: 1423914 - RNA, 16 nt, Human
cauaaagcaggcagaa

SEQ ID NO: 1423915 - RNA, 18 nt, Human
cauaaccuuaccagauuu

SEQ ID NO: 1423916 - RNA, 23 nt, Human
cauaaccugucucaccuggacuu

SEQ ID NO: 1423917 - RNA, 17 nt, Human
cauaacggaucagaaau

SEQ ID NO: 1423918 - RNA, 21 nt, Human
cauaacggaucagaaauacag

SEQ ID NO: 1423919 - RNA, 12 nt, Human
cauaaccugucu

SEQ ID NO: 1423920 - RNA, 22 nt, Human
cauaacccaagguaccauccua

SEQ ID NO: 1423921 - RNA, 15 nt, Human
cauaaccacugcuuc

SEQ ID NO: 1423922 - RNA, 14 nt, Human
cauaaccacugcuu

SEQ ID NO: 1423923 - RNA, 13 nt, Human
cauaaccacugcu

SEQ ID NO: 1423924 - RNA, 16 nt, Human
cauaacaauuccucua

SEQ ID NO: 1423925 - RNA, 15 nt, Human
cauaacaauuccucu

SEQ ID NO: 1423926 - RNA, 14 nt, Human
cauaacaauuccuc

SEQ ID NO: 1423927 - RNA, 15 nt, Human
cauaacaacuucaua

SEQ ID NO: 1423928 - RNA, 20 nt, Human
cauaaauuuaguauuuuguu

SEQ ID NO: 1423929 - RNA, 19 nt, Human
cauaaauuuaguauuuugu

SEQ ID NO: 1423930 - RNA, 17 nt, Human
cauaacaauuccucuac

SEQ ID NO: 1423931 - RNA, 21 nt, Human
cauaaaggaaaagacacauuu

SEQ ID NO: 1423932 - RNA, 19 nt, Human
cauaaaggaaaagacacau

SEQ ID NO: 1423933 - RNA, 15 nt, Human
cauaaaggaaaagac

SEQ ID NO: 1423934 - RNA, 13 nt, Human
cauaaaggaaaag

SEQ ID NO: 1423935 - RNA, 21 nt, Human
cauaaaguugauaaagauuuu

SEQ ID NO: 1423936 - RNA, 14 nt, Human
cauaaagucuugcc

SEQ ID NO: 1423937 - RNA, 12 nt, Human
cauaaauuauug

SEQ ID NO: 1423938 - RNA, 11 nt, Human
cauaaauuauu

SEQ ID NO: 1423939 - RNA, 16 nt, Human
cauaaauccuugauga

SEQ ID NO: 1423940 - RNA, 19 nt, Human
cauaagaaaacuaagaaau

SEQ ID NO: 1423941 - RNA, 14 nt, Human
cauaacugaacauc

SEQ ID NO: 1423942 - RNA, 14 nt, Human
cauaacugaaaaug

SEQ ID NO: 1423943 - RNA, 11 nt, Human
cauaacugaaa

SEQ ID NO: 1423944 - RNA, 22 nt, Human
cauaacggaucagaaauacaga

SEQ ID NO: 1423945 - RNA, 12 nt, Human
cauaaguuucug

SEQ ID NO: 1423946 - RNA, 15 nt, Human
cauaaguauuucaaa

SEQ ID NO: 1423947 - RNA, 19 nt, Human
cauaaguauuaugucucuu

SEQ ID NO: 1423948 - RNA, 19 nt, Human
cauaaggcuucaaaauguu

SEQ ID NO: 1423949 - RNA, 15 nt, Human
cauaaggcuucaaaa

SEQ ID NO: 1423950 - RNA, 18 nt, Human
cauaagcuauuuuucuaa

SEQ ID NO: 1423951 - RNA, 20 nt, Human
cauaagcuauuuuucuaacu

SEQ ID NO: 1423952 - RNA, 17 nt, Human
cauaagcuauuuuucua

SEQ ID NO: 1423953 - RNA, 16 nt, Human
cauaagcuauuuuucu

SEQ ID NO: 1423954 - RNA, 18 nt, Human
cauaagcuuaugcuuaaa

SEQ ID NO: 1423955 - RNA, 14 nt, Human
cauaccaaugaaaa

SEQ ID NO: 1423956 - RNA, 18 nt, Human
cauacauuuucuaagaaa

SEQ ID NO: 1423957 - RNA, 19 nt, Human
cauaccacuuuuguucuug

SEQ ID NO: 1423958 - RNA, 13 nt, Human
cauaccacuuuug

SEQ ID NO: 1423959 - RNA, 14 nt, Human
cauaccacuuuugu

SEQ ID NO: 1423960 - RNA, 15 nt, Human
cauaccacuuuuguu

SEQ ID NO: 1423961 - RNA, 18 nt, Human
cauaccacuuuuguucuu

SEQ ID NO: 1423962 - RNA, 16 nt, Human
cauacauuuucuaaga

SEQ ID NO: 1423963 - RNA, 14 nt, Human
cauacauuuucuaa

SEQ ID NO: 1423964 - RNA, 16 nt, Human
cauaaucacucuaauu

SEQ ID NO: 1423965 - RNA, 15 nt, Human
cauaaucacucuaau

SEQ ID NO: 1423966 - RNA, 17 nt, Human
cauaauccaguaaaaua

SEQ ID NO: 1423967 - RNA, 18 nt, Human
cauaauccaguaaaauaa

SEQ ID NO: 1423968 - RNA, 15 nt, Human
cauaauacuugcuuu

SEQ ID NO: 1423969 - RNA, 20 nt, Human
caguucugugguuucauguu

SEQ ID NO: 1423970 - RNA, 19 nt, Human
caguucuuugggccagaca

SEQ ID NO: 1423971 - RNA, 18 nt, Human
caguucuuugggccagac

SEQ ID NO: 1423972 - RNA, 17 nt, Human
caguucuuugggccaga

SEQ ID NO: 1423973 - RNA, 16 nt, Human
caguucuuugggccag

SEQ ID NO: 1423974 - RNA, 12 nt, Human
caguucuaggaa

SEQ ID NO: 1423975 - RNA, 15 nt, Human
caguucuaggaaaau

SEQ ID NO: 1423976 - RNA, 11 nt, Human
caguucuagga

SEQ ID NO: 1423977 - RNA, 18 nt, Human
caguucuaaccuccuaag

SEQ ID NO: 1423978 - RNA, 15 nt, Human
caguucuaaccuccu

SEQ ID NO: 1423979 - RNA, 22 nt, Human
caguucgcagccacccugagga

SEQ ID NO: 1423980 - RNA, 21 nt, Human
caguucgcagccacccugagg

SEQ ID NO: 1423981 - RNA, 19 nt, Human
caguucgcagccacccuga

SEQ ID NO: 1423982 - RNA, 18 nt, Human
caguucgcagccacccug

SEQ ID NO: 1423983 - RNA, 16 nt, Human
caguucgcagccaccc

SEQ ID NO: 1423984 - RNA, 15 nt, Human
caguucgcagccacc

SEQ ID NO: 1423985 - RNA, 14 nt, Human
caguucgcagccac

SEQ ID NO: 1423986 - RNA, 13 nt, Human
caguucgcagcca

SEQ ID NO: 1423987 - RNA, 21 nt, Human
caguucgacucugugcuggcc

SEQ ID NO: 1423988 - RNA, 22 nt, Human
caguucggugagcuacaaaugc

SEQ ID NO: 1423989 - RNA, 12 nt, Human
caguucugaaga

SEQ ID NO: 1423990 - RNA, 14 nt, Human
caguucugaagaag

SEQ ID NO: 1423991 - RNA, 13 nt, Human
caguucugaagaa

SEQ ID NO: 1423992 - RNA, 20 nt, Human
caguucucauggguggcacu

SEQ ID NO: 1423993 - RNA, 22 nt, Human
caguucugaagaagaugguacc

SEQ ID NO: 1423994 - RNA, 16 nt, Human
caguucugaagaagau

SEQ ID NO: 1423995 - RNA, 15 nt, Human
caguucugaagaaga

SEQ ID NO: 1423996 - RNA, 19 nt, Human
caguuaauuuuuccaacua

SEQ ID NO: 1423997 - RNA, 16 nt, Human
caguuaauuuuuccaa

SEQ ID NO: 1423998 - RNA, 14 nt, Human
caguuaauuuuucc

SEQ ID NO: 1423999 - RNA, 13 nt, Human
caguuaauuuuuc

SEQ ID NO: 1424000 - RNA, 12 nt, Human
caguuaauuuuu

SEQ ID NO: 1424001 - RNA, 12 nt, Human
caguuaaucuug

SEQ ID NO: 1424002 - RNA, 15 nt, Human
caguuaaucuugcuu

SEQ ID NO: 1424003 - RNA, 16 nt, Human
caguuaagaaauuuca

SEQ ID NO: 1424004 - RNA, 15 nt, Human
caguuaagaaauuuc

SEQ ID NO: 1424005 - RNA, 19 nt, Human
caguuccuguggcucccuc

SEQ ID NO: 1424006 - RNA, 18 nt, Human
caguuccuguggcucccu

SEQ ID NO: 1424007 - RNA, 23 nt, Human
caguuaccauuaaaccaucuccc

SEQ ID NO: 1424008 - RNA, 20 nt, Human
caguuaccauuaaaccaucu

SEQ ID NO: 1424009 - RNA, 19 nt, Human
caguuaccauuaaaccauc

SEQ ID NO: 1424010 - RNA, 18 nt, Human
caguuaccauuaaaccau

SEQ ID NO: 1424011 - RNA, 22 nt, Human
caguuacauaauucacucugag

SEQ ID NO: 1424012 - RNA, 21 nt, Human
caguuaccucugccucagaaa

SEQ ID NO: 1424013 - RNA, 14 nt, Human
caguuacucagaau

SEQ ID NO: 1424014 - RNA, 19 nt, Human
caguguuaaaugugaugaa

SEQ ID NO: 1424015 - RNA, 14 nt, Human
caguguuaaaugug

SEQ ID NO: 1424016 - RNA, 19 nt, Human
caguguuagggaagggccu

SEQ ID NO: 1424017 - RNA, 18 nt, Human
caguguugagccuuuucc

SEQ ID NO: 1424018 - RNA, 19 nt, Human
caguguuguggauuuaaca

SEQ ID NO: 1424019 - RNA, 20 nt, Human
caguguuguggauuuaacag

SEQ ID NO: 1424020 - RNA, 22 nt, Human
caguguuguggauuuaacagaa

SEQ ID NO: 1424021 - RNA, 14 nt, Human
caguguuuaaaacu

SEQ ID NO: 1424022 - RNA, 18 nt, Human
caguguuuauccuuucau

SEQ ID NO: 1424023 - RNA, 20 nt, Human
caguguugucaccagaucug

SEQ ID NO: 1424024 - RNA, 14 nt, Human
caguguugucacca

SEQ ID NO: 1424025 - RNA, 18 nt, Human
caguguuggggaugccuu

SEQ ID NO: 1424026 - RNA, 20 nt, Human
caguguuuuaggagcaugag

SEQ ID NO: 1424027 - RNA, 21 nt, Human
caguguuuuuagaccuguguu

SEQ ID NO: 1424028 - RNA, 22 nt, Human
caguguuuucugggauaaguaa

SEQ ID NO: 1424029 - RNA, 15 nt, Human
caguguuuucuggga

SEQ ID NO: 1424030 - RNA, 16 nt, Human
caguguuuuaggagca

SEQ ID NO: 1424031 - RNA, 19 nt, Human
caguuaaaaaaaauuuuaa

SEQ ID NO: 1424032 - RNA, 16 nt, Human
caguuaaaaaaaauuu

SEQ ID NO: 1424033 - RNA, 15 nt, Human
caguuaaaaaaaauu

SEQ ID NO: 1424034 - RNA, 21 nt, Human
caguuaacuauugcauuuaua

SEQ ID NO: 1424035 - RNA, 24 nt, Human
caguuaacuauugcauuuauaugu

SEQ ID NO: 1424036 - RNA, 22 nt, Human
caguguguggcuuucagagccu

SEQ ID NO: 1424037 - RNA, 21 nt, Human
caguguguggcuuucagagcc

SEQ ID NO: 1424038 - RNA, 20 nt, Human
caguguggaggccacuguuu

SEQ ID NO: 1424039 - RNA, 19 nt, Human
caguguggaggccacuguu

SEQ ID NO: 1424040 - RNA, 18 nt, Human
caguguggaggccacugu

SEQ ID NO: 1424041 - RNA, 21 nt, Human
cagugugcaaggcagccgugg

SEQ ID NO: 1424042 - RNA, 20 nt, Human
cagugugcaaggcagccgug

SEQ ID NO: 1424043 - RNA, 18 nt, Human
cagugugcaaggcagccg

SEQ ID NO: 1424044 - RNA, 14 nt, Human
cagugugcaaggca

SEQ ID NO: 1424045 - RNA, 19 nt, Human
cagugugaggccagggcag

SEQ ID NO: 1424046 - RNA, 18 nt, Human
cagugugaggccagggca

SEQ ID NO: 1424047 - RNA, 17 nt, Human
cagugugaggccagggc

SEQ ID NO: 1424048 - RNA, 16 nt, Human
cagugugaggccaggg

SEQ ID NO: 1424049 - RNA, 23 nt, Human
cagugucuguguuuugaaagaau

SEQ ID NO: 1424050 - RNA, 13 nt, Human
cagugucuguguu

SEQ ID NO: 1424051 - RNA, 21 nt, Human
cagugucuuuuuuuguauagu

SEQ ID NO: 1424052 - RNA, 23 nt, Human
cagugucuuuuuuuguauaguua

SEQ ID NO: 1424053 - RNA, 19 nt, Human
cagugucuuuuuuuguaua

SEQ ID NO: 1424054 - RNA, 17 nt, Human
cagugucuuuuuuugua

SEQ ID NO: 1424055 - RNA, 12 nt, Human
cagugucuuuuu

SEQ ID NO: 1424056 - RNA, 20 nt, Human
caguguccuuggcaggcuga

SEQ ID NO: 1424057 - RNA, 19 nt, Human
caguguccugagcucagcg

SEQ ID NO: 1424058 - RNA, 22 nt, Human
caguguccugagcucagcgugg

SEQ ID NO: 1424059 - RNA, 18 nt, Human
caguguccugagcucagc

SEQ ID NO: 1424060 - RNA, 16 nt, Human
caguguccugagcuca

SEQ ID NO: 1424061 - RNA, 15 nt, Human
caguguccugagcuc

SEQ ID NO: 1424062 - RNA, 14 nt, Human
caguguccugagcu

SEQ ID NO: 1424063 - RNA, 13 nt, Human
caguguccugagc

SEQ ID NO: 1424064 - RNA, 22 nt, Human
cagugucauuucucauccacau

SEQ ID NO: 1424065 - RNA, 17 nt, Human
caguguauggaaauaaa

SEQ ID NO: 1424066 - RNA, 16 nt, Human
cagugucauuucucau

SEQ ID NO: 1424067 - RNA, 16 nt, Human
cagugucaggcacugg

SEQ ID NO: 1424068 - RNA, 13 nt, Human
cagugucaggcac

SEQ ID NO: 1424069 - RNA, 21 nt, Human
cagugcuuuuggcggggagga

SEQ ID NO: 1424070 - RNA, 12 nt, Human
cagugcuuuugg

SEQ ID NO: 1424071 - RNA, 20 nt, Human
cagugcuuuuaagugaaaau

SEQ ID NO: 1424072 - RNA, 17 nt, Human
caguggaucacaaagug

SEQ ID NO: 1424073 - RNA, 20 nt, Human
caguggaggaagagggacag

SEQ ID NO: 1424074 - RNA, 15 nt, Human
caguggaggaagagg

SEQ ID NO: 1424075 - RNA, 19 nt, Human
cagugggaaaaauguagga

SEQ ID NO: 1424076 - RNA, 18 nt, Human
cagugggaaaaauguagg

SEQ ID NO: 1424077 - RNA, 20 nt, Human
caguggcugguccagggcua

SEQ ID NO: 1424078 - RNA, 19 nt, Human
caguggcugguccagggcu

SEQ ID NO: 1424079 - RNA, 18 nt, Human
caguggcugguccagggc

SEQ ID NO: 1424080 - RNA, 21 nt, Human
caguggcaggcagaggcccag

SEQ ID NO: 1424081 - RNA, 20 nt, Human
caguggcaggcagaggccca

SEQ ID NO: 1424082 - RNA, 14 nt, Human
caguggcaggcaga

SEQ ID NO: 1424083 - RNA, 13 nt, Human
caguggcaggcag

SEQ ID NO: 1424084 - RNA, 21 nt, Human
caguggcccauggcauuuuau

SEQ ID NO: 1424085 - RNA, 21 nt, Human
caguggcaucaucucagcuca

SEQ ID NO: 1424086 - RNA, 11 nt, Human
caguggccuua

SEQ ID NO: 1424087 - RNA, 16 nt, Human
caguggcccauggcau

SEQ ID NO: 1424088 - RNA, 21 nt, Human
caguggcgcgaucucagcuca

SEQ ID NO: 1424089 - RNA, 21 nt, Human
caguggcgugaucucagcuca

SEQ ID NO: 1424090 - RNA, 21 nt, Human
cgcggcccucaguagucccug

SEQ ID NO: 1424091 - RNA, 14 nt, Human
cgcggcccucagua

SEQ ID NO: 1424092 - RNA, 21 nt, Human
cgcuaaucccgauucacccug

SEQ ID NO: 1424093 - RNA, 23 nt, Human
cgcucagcucauccaugccucag

SEQ ID NO: 1424094 - RNA, 22 nt, Human
cgcucagggccaugcugaggcc

SEQ ID NO: 1424095 - RNA, 21 nt, Human
cgcucagggccaugcugaggc

SEQ ID NO: 1424096 - RNA, 20 nt, Human
cgcucagggccaugcugagg

SEQ ID NO: 1424097 - RNA, 19 nt, Human
cgcucagggccaugcugag

SEQ ID NO: 1424098 - RNA, 15 nt, Human
cgcuccagcugcccc

SEQ ID NO: 1424099 - RNA, 23 nt, Human
cgcuacaccacucuggcagccac

SEQ ID NO: 1424100 - RNA, 20 nt, Human
cgcuacaccacucuggcagc

SEQ ID NO: 1424101 - RNA, 17 nt, Human
cgcuacaccacucuggc

SEQ ID NO: 1424102 - RNA, 16 nt, Human
cgcuacaccacucugg

SEQ ID NO: 1424103 - RNA, 23 nt, Human
cgcuaauucaaggaauuucuuaa

SEQ ID NO: 1424104 - RNA, 20 nt, Human
cgcuuggcgaugccagccaa

SEQ ID NO: 1424105 - RNA, 22 nt, Human
cgcuuggcgaugccagccaagc

SEQ ID NO: 1424106 - RNA, 15 nt, Human
cggaaaacaugcuac

SEQ ID NO: 1424107 - RNA, 20 nt, Human
cggaaaacaugcuacacacu

SEQ ID NO: 1424108 - RNA, 22 nt, Human
cgcuuggagcuauuuuccaggc

SEQ ID NO: 1424109 - RNA, 14 nt, Human
cgcuuggagcagag

SEQ ID NO: 1424110 - RNA, 22 nt, Human
cgcuucuugccucugugcugug

SEQ ID NO: 1424111 - RNA, 16 nt, Human
cgcuugaagccugaac

SEQ ID NO: 1424112 - RNA, 19 nt, Human
cgcuucuugccucugugcu

SEQ ID NO: 1424113 - RNA, 18 nt, Human
cgcuucuugccucugugc

SEQ ID NO: 1424114 - RNA, 16 nt, Human
cgcuguccuuucuaga

SEQ ID NO: 1424115 - RNA, 17 nt, Human
cgcuguccuuucuagag

SEQ ID NO: 1424116 - RNA, 20 nt, Human
cgcugucaggauugcgagag

SEQ ID NO: 1424117 - RNA, 22 nt, Human
cgcugggugguacccucuggag

SEQ ID NO: 1424118 - RNA, 19 nt, Human
cgcugggugguacccucug

SEQ ID NO: 1424119 - RNA, 14 nt, Human
cgcugggugguacc

SEQ ID NO: 1424120 - RNA, 13 nt, Human
cgcuccagcugcc

SEQ ID NO: 1424121 - RNA, 18 nt, Human
cgcugucaggauugcgag

SEQ ID NO: 1424122 - RNA, 13 nt, Human
cgcugucacaggc

SEQ ID NO: 1424123 - RNA, 18 nt, Human
cgcugguccuuucuuccg

SEQ ID NO: 1424124 - RNA, 21 nt, Human
cgccaggauggaacacggcca

SEQ ID NO: 1424125 - RNA, 22 nt, Human
cgcccacaggaagccugcaguc

SEQ ID NO: 1424126 - RNA, 21 nt, Human
cgcccacaggaagccugcagu

SEQ ID NO: 1424127 - RNA, 20 nt, Human
cgcccacaggaagccugcag

SEQ ID NO: 1424128 - RNA, 14 nt, Human
cgccagcucuguuc

SEQ ID NO: 1424129 - RNA, 19 nt, Human
cgccagcucuguucuuccu

SEQ ID NO: 1424130 - RNA, 12 nt, Human
cgccagcucugu

SEQ ID NO: 1424131 - RNA, 22 nt, Human
ccucugcccaggcacugcuagg

SEQ ID NO: 1424132 - RNA, 22 nt, Human
cgcccagagacccaagcugccu

SEQ ID NO: 1424133 - RNA, 20 nt, Human
cgcccaggcuggagugcagu

SEQ ID NO: 1424134 - RNA, 18 nt, Human
cgcccccugucucucagg

SEQ ID NO: 1424135 - RNA, 13 nt, Human
cgcccccugucuc

SEQ ID NO: 1424136 - RNA, 23 nt, Human
cgcgauguggaacugcugccacu

SEQ ID NO: 1424137 - RNA, 22 nt, Human
cgcgauguggaacugcugccac

SEQ ID NO: 1424138 - RNA, 21 nt, Human
cgcgauguggaacugcugcca

SEQ ID NO: 1424139 - RNA, 20 nt, Human
cgcgauguggaacugcugcc

SEQ ID NO: 1424140 - RNA, 18 nt, Human
cgcgauguggaacugcug

SEQ ID NO: 1424141 - RNA, 19 nt, Human
cgcccuuuccuccucaggc

SEQ ID NO: 1424142 - RNA, 17 nt, Human
cgcccuuuccuccucag

SEQ ID NO: 1424143 - RNA, 16 nt, Human
cgcccuuuccuccuca

SEQ ID NO: 1424144 - RNA, 14 nt, Human
cgcccuuuccuccu

SEQ ID NO: 1424145 - RNA, 16 nt, Human
cgcccuggacugugug

SEQ ID NO: 1424146 - RNA, 18 nt, Human
cggcugggaggagggcag

SEQ ID NO: 1424147 - RNA, 18 nt, Human
cggccacacagcugccgg

SEQ ID NO: 1424148 - RNA, 16 nt, Human
cggccacacagcugcc

SEQ ID NO: 1424149 - RNA, 15 nt, Human
cggccacacagcugc

SEQ ID NO: 1424150 - RNA, 13 nt, Human
cggcauuuguuuc

SEQ ID NO: 1424151 - RNA, 21 nt, Human
cggcauggacaauggaccgga

SEQ ID NO: 1424152 - RNA, 23 nt, Human
cggcagcuucugcccccugcaga

SEQ ID NO: 1424153 - RNA, 22 nt, Human
cggcagcuucugcccccugcag

SEQ ID NO: 1424154 - RNA, 21 nt, Human
cggcagcuucugcccccugca

SEQ ID NO: 1424155 - RNA, 20 nt, Human
cggcagcuucugcccccugc

SEQ ID NO: 1424156 - RNA, 17 nt, Human
cggcagcuucugccccc

SEQ ID NO: 1424157 - RNA, 13 nt, Human
cggcagcagcccc

SEQ ID NO: 1424158 - RNA, 22 nt, Human
cggcaccugggcccuggggccu

SEQ ID NO: 1424159 - RNA, 23 nt, Human
cggcaccugggcccuggggccug

SEQ ID NO: 1424160 - RNA, 20 nt, Human
cggcaccugggcccuggggc

SEQ ID NO: 1424161 - RNA, 19 nt, Human
cggcaccugggcccugggg

SEQ ID NO: 1424162 - RNA, 17 nt, Human
cggcaccugggcccugg

SEQ ID NO: 1424163 - RNA, 13 nt, Human
cggcaccugggcc

SEQ ID NO: 1424164 - RNA, 20 nt, Human
cggcacccccugcagcuugu

SEQ ID NO: 1424165 - RNA, 19 nt, Human
cggcacccccugcagcuug

SEQ ID NO: 1424166 - RNA, 17 nt, Human
cggcacccccugcagcu

SEQ ID NO: 1424167 - RNA, 16 nt, Human
cggcacccccugcagc

SEQ ID NO: 1424168 - RNA, 15 nt, Human
cggcacccccugcag

SEQ ID NO: 1424169 - RNA, 21 nt, Human
cggcacagggucugcucuuuc

SEQ ID NO: 1424170 - RNA, 19 nt, Human
cggaaggguaaacaauaua

SEQ ID NO: 1424171 - RNA, 18 nt, Human
cggaaggguaaacaauau

SEQ ID NO: 1424172 - RNA, 17 nt, Human
cggaaggguaaacaaua

SEQ ID NO: 1424173 - RNA, 15 nt, Human
cggaaggguaaacaa

SEQ ID NO: 1424174 - RNA, 16 nt, Human
cgcuuuuugaaaaagc

SEQ ID NO: 1424175 - RNA, 11 nt, Human
cgcuuuuugaa

SEQ ID NO: 1424176 - RNA, 23 nt, Human
cggccggccagccccuggcccca

SEQ ID NO: 1424177 - RNA, 16 nt, Human
cggccggccagccccu

SEQ ID NO: 1424178 - RNA, 14 nt, Human
cggccggccagccc

SEQ ID NO: 1424179 - RNA, 20 nt, Human
cggcugcagaggccagaggc

SEQ ID NO: 1424180 - RNA, 15 nt, Human
cggcugcagaggcca

SEQ ID NO: 1424181 - RNA, 12 nt, Human
cggcugcagagg

SEQ ID NO: 1424182 - RNA, 19 nt, Human
cggccuaugacuugggcac

SEQ ID NO: 1424183 - RNA, 18 nt, Human
cggccuaugacuugggca

SEQ ID NO: 1424184 - RNA, 17 nt, Human
cggccuaugacuugggc

SEQ ID NO: 1424185 - RNA, 17 nt, Human
cggcccaauccaaggug

SEQ ID NO: 1424186 - RNA, 15 nt, Human
cggcccaauccaagg

SEQ ID NO: 1424187 - RNA, 17 nt, Human
cggcccaggauggcuuu

SEQ ID NO: 1424188 - RNA, 17 nt, Human
cggccacacagcugccg

SEQ ID NO: 1424189 - RNA, 16 nt, Human
cggccagggagaagcu

SEQ ID NO: 1424190 - RNA, 17 nt, Human
cggccagggagaagcuc

SEQ ID NO: 1424191 - RNA, 17 nt, Human
cggcccacaauuaauuu

SEQ ID NO: 1424192 - RNA, 16 nt, Human
cgggcagagggcugga

SEQ ID NO: 1424193 - RNA, 15 nt, Human
cgggcagagggcugg

SEQ ID NO: 1424194 - RNA, 14 nt, Human
cgggcagagggcug

SEQ ID NO: 1424195 - RNA, 16 nt, Human
cgggaugguucuggcu

SEQ ID NO: 1424196 - RNA, 12 nt, Human
cggcugggagga

SEQ ID NO: 1424197 - RNA, 22 nt, Human
cgggagccaugcgcccccuccg

SEQ ID NO: 1424198 - RNA, 17 nt, Human
cgggagccugacccuca

SEQ ID NO: 1424199 - RNA, 12 nt, Human
cgggagacagca

SEQ ID NO: 1424200 - RNA, 13 nt, Human
cgggacugcggag

SEQ ID NO: 1424201 - RNA, 18 nt, Human
cggggugcacaggagggg

SEQ ID NO: 1424202 - RNA, 16 nt, Human
cggggugcccacaggc

SEQ ID NO: 1424203 - RNA, 17 nt, Human
cggggugcacaggaggg

SEQ ID NO: 1424204 - RNA, 16 nt, Human
cggggugcacaggagg

SEQ ID NO: 1424205 - RNA, 15 nt, Human
cggggugcacaggag

SEQ ID NO: 1424206 - RNA, 22 nt, Human
cggggugagggggggcucccug

SEQ ID NO: 1424207 - RNA, 22 nt, Human
cggggguuccguguccaccccc

SEQ ID NO: 1424208 - RNA, 20 nt, Human
cggggguuccguguccaccc

SEQ ID NO: 1424209 - RNA, 19 nt, Human
cggggguuccguguccacc

SEQ ID NO: 1424210 - RNA, 21 nt, Human
cggggguggcggcggccccua

SEQ ID NO: 1424211 - RNA, 17 nt, Human
cggggguggcggcggcc

SEQ ID NO: 1424212 - RNA, 21 nt, Human
cgggggcagucugagagaggc

SEQ ID NO: 1424213 - RNA, 18 nt, Human
cgggggcagucugagaga

SEQ ID NO: 1424214 - RNA, 17 nt, Human
cgggggcagucugagag

SEQ ID NO: 1424215 - RNA, 19 nt, Human
cgggggaggguaggcagga

SEQ ID NO: 1424216 - RNA, 18 nt, Human
cggggcuugccuucuggu

SEQ ID NO: 1424217 - RNA, 16 nt, Human
cggggcuugccuucug

SEQ ID NO: 1424218 - RNA, 15 nt, Human
cggggcuugccuucu

SEQ ID NO: 1424219 - RNA, 12 nt, Human
cggggcuugccu

SEQ ID NO: 1424220 - RNA, 13 nt, Human
cggggcugggaag

SEQ ID NO: 1424221 - RNA, 19 nt, Human
cggggccugggcaggaggg

SEQ ID NO: 1424222 - RNA, 22 nt, Human
cgggcagagggcuggaggccca

SEQ ID NO: 1424223 - RNA, 23 nt, Human
cgggcagagggcuggaggcccag

SEQ ID NO: 1424224 - RNA, 19 nt, Human
cgggcagagggcuggaggc

SEQ ID NO: 1424225 - RNA, 18 nt, Human
cgggcagagggcuggagg

SEQ ID NO: 1424226 - RNA, 17 nt, Human
cggggccugggcaggag

SEQ ID NO: 1424227 - RNA, 14 nt, Human
cggggacucagccc

SEQ ID NO: 1424228 - RNA, 17 nt, Human
cggguugugugucuguu

SEQ ID NO: 1424229 - RNA, 16 nt, Human
cggguugugugucugu

SEQ ID NO: 1424230 - RNA, 20 nt, Human
cggguggggcuuggggcuca

SEQ ID NO: 1424231 - RNA, 16 nt, Human
cggguggggcuugggg

SEQ ID NO: 1424232 - RNA, 16 nt, Human
cgggugccagaagcua

SEQ ID NO: 1424233 - RNA, 21 nt, Human
cgggugaacaaagcagccacg

SEQ ID NO: 1424234 - RNA, 22 nt, Human
cggggugggguggcugcagccu

SEQ ID NO: 1424235 - RNA, 16 nt, Human
cggggugggggcagca

SEQ ID NO: 1424236 - RNA, 20 nt, Human
cgggugaacaaagcagccac

SEQ ID NO: 1424237 - RNA, 14 nt, Human
cgggucugcuccca

SEQ ID NO: 1424238 - RNA, 17 nt, Human
cgggucugcucccaagg

SEQ ID NO: 1424239 - RNA, 13 nt, Human
cgggucugcuccc

SEQ ID NO: 1424240 - RNA, 13 nt, Human
cgggucugccucu

SEQ ID NO: 1424241 - RNA, 22 nt, Human
cgguauccccccaucuugcuuc

SEQ ID NO: 1424242 - RNA, 18 nt, Human
cgguauccccccaucuug

SEQ ID NO: 1424243 - RNA, 18 nt, Human
cgguagguucagccaagg

SEQ ID NO: 1424244 - RNA, 22 nt, Human
cgguagccagcacacagggcag

SEQ ID NO: 1424245 - RNA, 21 nt, Human
cgguagccagcacacagggca

SEQ ID NO: 1424246 - RNA, 15 nt, Human
cgguagccagcacac

SEQ ID NO: 1424247 - RNA, 14 nt, Human
cggucugugccccu

SEQ ID NO: 1424248 - RNA, 21 nt, Human
cggucuguucuguuucaaggc

SEQ ID NO: 1424249 - RNA, 20 nt, Human
cggugcccaagccagaggcu

SEQ ID NO: 1424250 - RNA, 18 nt, Human
cggugcccaagccagagg

SEQ ID NO: 1424251 - RNA, 15 nt, Human
cggugcccaagccag

SEQ ID NO: 1424252 - RNA, 14 nt, Human
cggugcccaagcca

SEQ ID NO: 1424253 - RNA, 17 nt, Human
cggugagcuacaaaugc

SEQ ID NO: 1424254 - RNA, 13 nt, Human
cggucugugcccc

SEQ ID NO: 1424255 - RNA, 24 nt, Human
cggucgcccuuugcugcauggcag

SEQ ID NO: 1424256 - RNA, 17 nt, Human
cggucggggcaucuggc

SEQ ID NO: 1424257 - RNA, 22 nt, Human
cuacagagaaaccagcuuccuu

SEQ ID NO: 1424258 - RNA, 20 nt, Human
cgugccaaguccagguccug

SEQ ID NO: 1424259 - RNA, 15 nt, Human
cgugccaaguccagg

SEQ ID NO: 1424260 - RNA, 21 nt, Human
cgugcauugugcuucuuucuu

SEQ ID NO: 1424261 - RNA, 12 nt, Human
cgugcauugugc

SEQ ID NO: 1424262 - RNA, 15 nt, Human
cgugcauugugcuuc

SEQ ID NO: 1424263 - RNA, 13 nt, Human
cgucuucuccaac

SEQ ID NO: 1424264 - RNA, 19 nt, Human
cgugaaaacacauuugcuu

SEQ ID NO: 1424265 - RNA, 18 nt, Human
cgucuuuuccuguuuccu

SEQ ID NO: 1424266 - RNA, 23 nt, Human
cggugccuuuauuuccacugugc

SEQ ID NO: 1424267 - RNA, 21 nt, Human
cggugccuuuauuuccacugu

SEQ ID NO: 1424268 - RNA, 17 nt, Human
cggugccuuuauuucca

SEQ ID NO: 1424269 - RNA, 23 nt, Human
cggugcccaagccagaggcuggg

SEQ ID NO: 1424270 - RNA, 13 nt, Human
cguccugccugug

SEQ ID NO: 1424271 - RNA, 13 nt, Human
cguccugagaaag

SEQ ID NO: 1424272 - RNA, 15 nt, Human
cguccuccucuguga

SEQ ID NO: 1424273 - RNA, 14 nt, Human
cguccuccucugug

SEQ ID NO: 1424274 - RNA, 13 nt, Human
cguccuccucugu

SEQ ID NO: 1424275 - RNA, 12 nt, Human
cguccuccucug

SEQ ID NO: 1424276 - RNA, 22 nt, Human
cguccuuacuccugugggagcc

SEQ ID NO: 1424277 - RNA, 20 nt, Human
cguccuuacuccugugggag

SEQ ID NO: 1424278 - RNA, 17 nt, Human
cguccuuacuccugugg

SEQ ID NO: 1424279 - RNA, 16 nt, Human
cguccuuacuccugug

SEQ ID NO: 1424280 - RNA, 15 nt, Human
cguccuuacuccugu

SEQ ID NO: 1424281 - RNA, 15 nt, Human
cguccugccuguggc

SEQ ID NO: 1424282 - RNA, 14 nt, Human
cguccugccugugg

SEQ ID NO: 1424283 - RNA, 16 nt, Human
cguccugccuguggcg

SEQ ID NO: 1424284 - RNA, 21 nt, Human
cgucuccaggggcugcuuccu

SEQ ID NO: 1424285 - RNA, 20 nt, Human
cgucuccaggggcugcuucc

SEQ ID NO: 1424286 - RNA, 19 nt, Human
cgucuccaggggcugcuuc

SEQ ID NO: 1424287 - RNA, 14 nt, Human
cgucuccaggggcu

SEQ ID NO: 1424288 - RNA, 11 nt, Human
cgucucagugu

SEQ ID NO: 1424289 - RNA, 21 nt, Human
cguccuuacuccugugggagc

SEQ ID NO: 1424290 - RNA, 21 nt, Human
cguggagggguaggggcuggg

SEQ ID NO: 1424291 - RNA, 23 nt, Human
cguggagggguaggggcugggaa

SEQ ID NO: 1424292 - RNA, 17 nt, Human
cguggauugcacguggc

SEQ ID NO: 1424293 - RNA, 20 nt, Human
cguggagggguaggggcugg

SEQ ID NO: 1424294 - RNA, 19 nt, Human
cguggagggguaggggcug

SEQ ID NO: 1424295 - RNA, 18 nt, Human
cguggagggguaggggcu

SEQ ID NO: 1424296 - RNA, 14 nt, Human
cguggaggcugcuc

SEQ ID NO: 1424297 - RNA, 15 nt, Human
cguggaggcugcucg

SEQ ID NO: 1424298 - RNA, 13 nt, Human
cguggaggcugcu

SEQ ID NO: 1424299 - RNA, 23 nt, Human
cguggcuguggcauccagagucc

SEQ ID NO: 1424300 - RNA, 15 nt, Human
cguggcccagagaag

SEQ ID NO: 1424301 - RNA, 16 nt, Human
cguggcccagagaagc

SEQ ID NO: 1424302 - RNA, 13 nt, Human
cgugggcucccug

SEQ ID NO: 1424303 - RNA, 21 nt, Human
cgugggccccacccucgggga

SEQ ID NO: 1424304 - RNA, 14 nt, Human
cgugggcauugucu

SEQ ID NO: 1424305 - RNA, 20 nt, Human
cgugggacggugcccaagcc

SEQ ID NO: 1424306 - RNA, 19 nt, Human
cgugggacggugcccaagc

SEQ ID NO: 1424307 - RNA, 16 nt, Human
cguugcccccauuucu

SEQ ID NO: 1424308 - RNA, 21 nt, Human
cguugcccccauuucugaggu

SEQ ID NO: 1424309 - RNA, 12 nt, Human
cguugcccccau

SEQ ID NO: 1424310 - RNA, 11 nt, Human
cguggggaggu

SEQ ID NO: 1424311 - RNA, 17 nt, Human
cgugggcucccugacug

SEQ ID NO: 1424312 - RNA, 21 nt, Human
cgugccaaguccagguccugg

SEQ ID NO: 1424313 - RNA, 23 nt, Human
cgugccaaguccagguccuggug

SEQ ID NO: 1424314 - RNA, 23 nt, Human
cgugcucuuuguuuugugucucu

SEQ ID NO: 1424315 - RNA, 22 nt, Human
cgugcucuuuguuuugugucuc

SEQ ID NO: 1424316 - RNA, 17 nt, Human
cgugcucuuuguuuugu

SEQ ID NO: 1424317 - RNA, 16 nt, Human
cgugcucuuuguuuug

SEQ ID NO: 1424318 - RNA, 14 nt, Human
cgugcucuuuguuu

SEQ ID NO: 1424319 - RNA, 19 nt, Human
cgugcucgccccagcaggu

SEQ ID NO: 1424320 - RNA, 18 nt, Human
cguggagagcuaggagca

SEQ ID NO: 1424321 - RNA, 19 nt, Human
cguggagagcuaggagcaa

SEQ ID NO: 1424322 - RNA, 15 nt, Human
cguggagagcuagga

SEQ ID NO: 1424323 - RNA, 21 nt, Human
cguggacugagugggaagccc

SEQ ID NO: 1424324 - RNA, 19 nt, Human
cguggacugagugggaagc

SEQ ID NO: 1424325 - RNA, 15 nt, Human
cguggacugaguggg

SEQ ID NO: 1424326 - RNA, 22 nt, Human
cguggaaugcccuucacuguca

SEQ ID NO: 1424327 - RNA, 12 nt, Human
cguggacaccug

SEQ ID NO: 1424328 - RNA, 13 nt, Human
cguggacaccugc

SEQ ID NO: 1424329 - RNA, 14 nt, Human
cguggacaccugcc

SEQ ID NO: 1424330 - RNA, 15 nt, Human
cguggacaccugccc

SEQ ID NO: 1424331 - RNA, 17 nt, Human
cguggacaccugcccug

SEQ ID NO: 1424332 - RNA, 18 nt, Human
cguggacaccugcccugc

SEQ ID NO: 1424333 - RNA, 19 nt, Human
cguggacaccugcccugcc

SEQ ID NO: 1424334 - RNA, 14 nt, Human
cuaaaagaaacuuu

SEQ ID NO: 1424335 - RNA, 16 nt, Human
cuaaaagauauaagug

SEQ ID NO: 1424336 - RNA, 13 nt, Human
cuaaaagaaacuu

SEQ ID NO: 1424337 - RNA, 17 nt, Human
cuaaaacucuuucggua

SEQ ID NO: 1424338 - RNA, 12 nt, Human
cuaaacauccau

SEQ ID NO: 1424339 - RNA, 23 nt, Human
cuaaacaucauucauuuuuguug

SEQ ID NO: 1424340 - RNA, 17 nt, Human
cuaaacacgugacacaa

SEQ ID NO: 1424341 - RNA, 18 nt, Human
cuaaacacgugacacaaa

SEQ ID NO: 1424342 - RNA, 16 nt, Human
cuaaacccaauccaaa

SEQ ID NO: 1424343 - RNA, 19 nt, Human
cuaaacccaauccaaaugg

SEQ ID NO: 1424344 - RNA, 15 nt, Human
cuaaacccaauccaa

SEQ ID NO: 1424345 - RNA, 13 nt, Human
cuaaacaucauuc

SEQ ID NO: 1424346 - RNA, 22 nt, Human
cguuuaagccaaaacaauguuu

SEQ ID NO: 1424347 - RNA, 18 nt, Human
cguuuaagccaaaacaau

SEQ ID NO: 1424348 - RNA, 17 nt, Human
cguuuaagccaaaacaa

SEQ ID NO: 1424349 - RNA, 16 nt, Human
cguuggagaagcccgu

SEQ ID NO: 1424350 - RNA, 16 nt, Human
cguuguccucagcccc

SEQ ID NO: 1424351 - RNA, 16 nt, Human
cuaaauggccucaugu

SEQ ID NO: 1424352 - RNA, 13 nt, Human
cuaaauggccuca

SEQ ID NO: 1424353 - RNA, 12 nt, Human
cuaaauggccuc

SEQ ID NO: 1424354 - RNA, 13 nt, Human
cuaaaugcccugc

SEQ ID NO: 1424355 - RNA, 18 nt, Human
cuaaauggaaccacucua

SEQ ID NO: 1424356 - RNA, 16 nt, Human
cuaaauggaaccacuc

SEQ ID NO: 1424357 - RNA, 17 nt, Human
cuaaauggaaccacucu

SEQ ID NO: 1424358 - RNA, 14 nt, Human
cuaaaugcccugcu

SEQ ID NO: 1424359 - RNA, 16 nt, Human
cuaaaugaauguuuac

SEQ ID NO: 1424360 - RNA, 15 nt, Human
cuaaauggaaccacu

SEQ ID NO: 1424361 - RNA, 20 nt, Human
cuaaaucuccaaaauaaaac

SEQ ID NO: 1424362 - RNA, 17 nt, Human
cuaaacggauuccaaag

SEQ ID NO: 1424363 - RNA, 16 nt, Human
cuaaacggauuccaaa

SEQ ID NO: 1424364 - RNA, 15 nt, Human
cuaaacggauuccaa

SEQ ID NO: 1424365 - RNA, 18 nt, Human
cuaaauauauuuuaagac

SEQ ID NO: 1424366 - RNA, 20 nt, Human
cuaaauauauuuuaagacga

SEQ ID NO: 1424367 - RNA, 20 nt, Human
cuaaauauuaugagaugcug

SEQ ID NO: 1424368 - RNA, 22 nt, Human
cuaaauauggacugcucaggaa

SEQ ID NO: 1424369 - RNA, 16 nt, Human
cuaaauauggacugcu

SEQ ID NO: 1424370 - RNA, 21 nt, Human
cuaaauccuuuacuguuaguc

SEQ ID NO: 1424371 - RNA, 17 nt, Human
cuaaauccuuuacuguu

SEQ ID NO: 1424372 - RNA, 23 nt, Human
cuaaauuauuuacugcaaaaaga

SEQ ID NO: 1424373 - RNA, 15 nt, Human
cuaaauuauuuacug

SEQ ID NO: 1424374 - RNA, 14 nt, Human
cuaaauuauuuacu

SEQ ID NO: 1424375 - RNA, 19 nt, Human
cuaaauggccucauguggc

SEQ ID NO: 1424376 - RNA, 17 nt, Human
cuaaauggccucaugug

SEQ ID NO: 1424377 - RNA, 21 nt, Human
cuaaaugugcaauagaaggug

SEQ ID NO: 1424378 - RNA, 18 nt, Human
cuaaaugugcaauagaag

SEQ ID NO: 1424379 - RNA, 22 nt, Human
cuaaauguaguucugcuccaga

SEQ ID NO: 1424380 - RNA, 17 nt, Human
cuaacacucagaagccu

SEQ ID NO: 1424381 - RNA, 16 nt, Human
cuaacacucagaagcc

SEQ ID NO: 1424382 - RNA, 23 nt, Human
cuaacacggugcucauuuuuucu

SEQ ID NO: 1424383 - RNA, 14 nt, Human
cuaacacccagucu

SEQ ID NO: 1424384 - RNA, 15 nt, Human
cuaacaaugacauuu

SEQ ID NO: 1424385 - RNA, 13 nt, Human
cuaacaaugacau

SEQ ID NO: 1424386 - RNA, 22 nt, Human
cuaacaaucagcuccuuccugg

SEQ ID NO: 1424387 - RNA, 23 nt, Human
cuaacacucagaagccugggggc

SEQ ID NO: 1424388 - RNA, 22 nt, Human
cuaacacucagaagccuggggg

SEQ ID NO: 1424389 - RNA, 20 nt, Human
cuaacacucagaagccuggg

SEQ ID NO: 1424390 - RNA, 19 nt, Human
cuaacacucagaagccugg

SEQ ID NO: 1424391 - RNA, 15 nt, Human
cuaacaugauuuggg

SEQ ID NO: 1424392 - RNA, 20 nt, Human
cuaugcaugguuucagcacu

SEQ ID NO: 1424393 - RNA, 19 nt, Human
cuaugcaugguuucagcac

SEQ ID NO: 1424394 - RNA, 20 nt, Human
cuaugacuugggcaccccca

SEQ ID NO: 1424395 - RNA, 23 nt, Human
cuaugacuugggcacccccagcc

SEQ ID NO: 1424396 - RNA, 16 nt, Human
cuaugacuugggcacc

SEQ ID NO: 1424397 - RNA, 21 nt, Human
cuaugaccucgcccuccacaa

SEQ ID NO: 1424398 - RNA, 11 nt, Human
cuaugcauuug

SEQ ID NO: 1424399 - RNA, 12 nt, Human
cuaugcauuuga

SEQ ID NO: 1424400 - RNA, 21 nt, Human
cuaugcauuugaaaauuuuga

SEQ ID NO: 1424401 - RNA, 17 nt, Human
cucaagcugcaucuaga

SEQ ID NO: 1424402 - RNA, 20 nt, Human
cucaagcucuuccuuacucc

SEQ ID NO: 1424403 - RNA, 17 nt, Human
cucaagcgauucuccug

SEQ ID NO: 1424404 - RNA, 16 nt, Human
cucaagcgauucuccu

SEQ ID NO: 1424405 - RNA, 16 nt, Human
cucaagaugaaggcaa

SEQ ID NO: 1424406 - RNA, 22 nt, Human
cucaagcccugcagucacagcu

SEQ ID NO: 1424407 - RNA, 23 nt, Human
cucaacugccuacuccaaaaugu

SEQ ID NO: 1424408 - RNA, 15 nt, Human
cucaacugccuacuc

SEQ ID NO: 1424409 - RNA, 13 nt, Human
cucaacugccuac

SEQ ID NO: 1424410 - RNA, 18 nt, Human
cucaacuagcagauacag

SEQ ID NO: 1424411 - RNA, 16 nt, Human
cucaaccuuaagaccu

SEQ ID NO: 1424412 - RNA, 18 nt, Human
cucaacguugcuccccau

SEQ ID NO: 1424413 - RNA, 16 nt, Human
cucaacguauuguuuc

SEQ ID NO: 1424414 - RNA, 15 nt, Human
cucaacguauuguuu

SEQ ID NO: 1424415 - RNA, 24 nt, Human
cucaaauguucuaaguuucuaaga

SEQ ID NO: 1424416 - RNA, 23 nt, Human
cucaaauguucuaaguuucuaag

SEQ ID NO: 1424417 - RNA, 22 nt, Human
cucaaauguucuaaguuucuaa

SEQ ID NO: 1424418 - RNA, 21 nt, Human
cucaaauguucuaaguuucua

SEQ ID NO: 1424419 - RNA, 19 nt, Human
cucaaauguucuaaguuuc

SEQ ID NO: 1424420 - RNA, 17 nt, Human
cucaaauguucuaaguu

SEQ ID NO: 1424421 - RNA, 16 nt, Human
cucaaauguucuaagu

SEQ ID NO: 1424422 - RNA, 15 nt, Human
cucaaauguucuaag

SEQ ID NO: 1424423 - RNA, 13 nt, Human
cucaaauguucua

SEQ ID NO: 1424424 - RNA, 21 nt, Human
cucaaauggggccagauccag

SEQ ID NO: 1424425 - RNA, 20 nt, Human
cucaaauggggccagaucca

SEQ ID NO: 1424426 - RNA, 19 nt, Human
cucaaauggggccagaucc

SEQ ID NO: 1424427 - RNA, 14 nt, Human
cucaaccucuacag

SEQ ID NO: 1424428 - RNA, 13 nt, Human
cucaaauuucuaa

SEQ ID NO: 1424429 - RNA, 23 nt, Human
cuaugcaugguuucagcacuagc

SEQ ID NO: 1424430 - RNA, 21 nt, Human
cuaugcaugguuucagcacua

SEQ ID NO: 1424431 - RNA, 14 nt, Human
cuaugcauuugaaa

SEQ ID NO: 1424432 - RNA, 17 nt, Human
cucaaauggggccagau

SEQ ID NO: 1424433 - RNA, 16 nt, Human
cucaaauggggccaga

SEQ ID NO: 1424434 - RNA, 15 nt, Human
cucaaauggggccag

SEQ ID NO: 1424435 - RNA, 19 nt, Human
cuauuuuguaaacucaaaa

SEQ ID NO: 1424436 - RNA, 12 nt, Human
cuauuuuguaaa

SEQ ID NO: 1424437 - RNA, 17 nt, Human
cuauuuuggauuguaua

SEQ ID NO: 1424438 - RNA, 21 nt, Human
cuauuuuccaggcuucugcug

SEQ ID NO: 1424439 - RNA, 23 nt, Human
cuauuuuccaggcuucugcuggg

SEQ ID NO: 1424440 - RNA, 19 nt, Human
cuauuuuccaggcuucugc

SEQ ID NO: 1424441 - RNA, 22 nt, Human
cuauuuucagaugugaaccauu

SEQ ID NO: 1424442 - RNA, 18 nt, Human
cuauuuucagaugugaac

SEQ ID NO: 1424443 - RNA, 12 nt, Human
cuauuuucagau

SEQ ID NO: 1424444 - RNA, 19 nt, Human
cuauuuguaaaucugccac

SEQ ID NO: 1424445 - RNA, 21 nt, Human
cuauuuguaaaucugccacaa

SEQ ID NO: 1424446 - RNA, 18 nt, Human
cuauuuguaaaucugcca

SEQ ID NO: 1424447 - RNA, 14 nt, Human
cuauuuguaaaucu

SEQ ID NO: 1424448 - RNA, 18 nt, Human
cuauuuuaauaaacacuc

SEQ ID NO: 1424449 - RNA, 16 nt, Human
cuauuuuauuaugaag

SEQ ID NO: 1424450 - RNA, 22 nt, Human
cuauuuuaauaaacacucuuga

SEQ ID NO: 1424451 - RNA, 17 nt, Human
cucacuauaccaguaua

SEQ ID NO: 1424452 - RNA, 23 nt, Human
cucacuaggcccccacuugccuc

SEQ ID NO: 1424453 - RNA, 21 nt, Human
cucacccccuucuccauccac

SEQ ID NO: 1424454 - RNA, 20 nt, Human
cucacccccuucuccaucca

SEQ ID NO: 1424455 - RNA, 19 nt, Human
cucacccccuucuccaucc

SEQ ID NO: 1424456 - RNA, 17 nt, Human
cucacccccuucuccau

SEQ ID NO: 1424457 - RNA, 16 nt, Human
cucacccccuucucca

SEQ ID NO: 1424458 - RNA, 15 nt, Human
cucacccccuucucc

SEQ ID NO: 1424459 - RNA, 14 nt, Human
cucacccccucacc

SEQ ID NO: 1424460 - RNA, 22 nt, Human
cucacccagugcccucuccccu

SEQ ID NO: 1424461 - RNA, 17 nt, Human
cucacccauccuagagg

SEQ ID NO: 1424462 - RNA, 15 nt, Human
cucacagugcuuuua

SEQ ID NO: 1424463 - RNA, 18 nt, Human
cucacagugggagccagg

SEQ ID NO: 1424464 - RNA, 22 nt, Human
cucacagugaacacucaguggc

SEQ ID NO: 1424465 - RNA, 19 nt, Human
cucacagugggagccaggg

SEQ ID NO: 1424466 - RNA, 22 nt, Human
cucacagugggagccagggcug

SEQ ID NO: 1424467 - RNA, 22 nt, Human
cucaaggacuuugcagccggca

SEQ ID NO: 1424468 - RNA, 16 nt, Human
cucaaggacuuugcag

SEQ ID NO: 1424469 - RNA, 22 nt, Human
cucacaugucaguaccuucaaa

SEQ ID NO: 1424470 - RNA, 14 nt, Human
cucacccagugccc

SEQ ID NO: 1424471 - RNA, 14 nt, Human
cucacccauccuag

SEQ ID NO: 1424472 - RNA, 15 nt, Human
cucacccauccuaga

SEQ ID NO: 1424473 - RNA, 16 nt, Human
cucacaucagagugac

SEQ ID NO: 1424474 - RNA, 13 nt, Human
cucacauuuauau

SEQ ID NO: 1424475 - RNA, 19 nt, Human
cuauauuguuugcuaagca

SEQ ID NO: 1424476 - RNA, 22 nt, Human
cuaguuauuuacaggaacuuca

SEQ ID NO: 1424477 - RNA, 20 nt, Human
cuaguuauuuacaggaacuu

SEQ ID NO: 1424478 - RNA, 23 nt, Human
cuaguuauacuuauuuguauaug

SEQ ID NO: 1424479 - RNA, 16 nt, Human
cuaguuauacuuauuu

SEQ ID NO: 1424480 - RNA, 20 nt, Human
cuaucaaccccagacacugg

SEQ ID NO: 1424481 - RNA, 19 nt, Human
cuaucaaccccagacacug

SEQ ID NO: 1424482 - RNA, 17 nt, Human
cuaucaaccccagacac

SEQ ID NO: 1424483 - RNA, 21 nt, Human
cuaucaaccccagacacuggu

SEQ ID NO: 1424484 - RNA, 15 nt, Human
cuaucuuaauacuaa

SEQ ID NO: 1424485 - RNA, 19 nt, Human
cuaucacccaacgcuccaa

SEQ ID NO: 1424486 - RNA, 16 nt, Human
cuaucacccaacgcuc

SEQ ID NO: 1424487 - RNA, 20 nt, Human
cuaucaaguauuauaccuuu

SEQ ID NO: 1424488 - RNA, 17 nt, Human
cuaugaauucuaaguga

SEQ ID NO: 1424489 - RNA, 14 nt, Human
cuaugacacaugca

SEQ ID NO: 1424490 - RNA, 18 nt, Human
cuaugaaauauuauguua

SEQ ID NO: 1424491 - RNA, 17 nt, Human
cuaugaaaaugcuggcu

SEQ ID NO: 1424492 - RNA, 21 nt, Human
cuaugaaaagcuagaauugag

SEQ ID NO: 1424493 - RNA, 16 nt, Human
cuaugaaaagcuagaa

SEQ ID NO: 1424494 - RNA, 21 nt, Human
cuaucuuugccacccucaugc

SEQ ID NO: 1424495 - RNA, 13 nt, Human
cuaugaaauauua

SEQ ID NO: 1424496 - RNA, 14 nt, Human
cuaucuuugccacc

SEQ ID NO: 1424497 - RNA, 15 nt, Human
cuaucuuugccaccc

SEQ ID NO: 1424498 - RNA, 18 nt, Human
cuaucuuugccacccuca

SEQ ID NO: 1424499 - RNA, 19 nt, Human
cuaucuuugccacccucau

SEQ ID NO: 1424500 - RNA, 18 nt, Human
cuaucuuacuauuucaca

SEQ ID NO: 1424501 - RNA, 12 nt, Human
cuaucuuugcca

SEQ ID NO: 1424502 - RNA, 16 nt, Human
cuagucuuuugcuuuu

SEQ ID NO: 1424503 - RNA, 15 nt, Human
cuagucuuuugcuuu

SEQ ID NO: 1424504 - RNA, 14 nt, Human
cuagucuuuugcuu

SEQ ID NO: 1424505 - RNA, 13 nt, Human
cuagucuuuugcu

SEQ ID NO: 1424506 - RNA, 12 nt, Human
cuaguccuuguu

SEQ ID NO: 1424507 - RNA, 14 nt, Human
cuagugugaauuaa

SEQ ID NO: 1424508 - RNA, 13 nt, Human
cuaguguagaauu

SEQ ID NO: 1424509 - RNA, 20 nt, Human
cuaguguagaauugugcaac

SEQ ID NO: 1424510 - RNA, 22 nt, Human
cuaguacuugggagaccuguaa

SEQ ID NO: 1424511 - RNA, 17 nt, Human
cuaggcccccacuugcc

SEQ ID NO: 1424512 - RNA, 16 nt, Human
cuaggcccccacuugc

SEQ ID NO: 1424513 - RNA, 15 nt, Human
cuaggcccccacuug

SEQ ID NO: 1424514 - RNA, 13 nt, Human
cuaggcccccacu

SEQ ID NO: 1424515 - RNA, 15 nt, Human
cuaggccagagccca

SEQ ID NO: 1424516 - RNA, 16 nt, Human
cuaggccagagcccac

SEQ ID NO: 1424517 - RNA, 14 nt, Human
cuaggccagagccc

SEQ ID NO: 1424518 - RNA, 22 nt, Human
cuaggcauucuggaccucuggg

SEQ ID NO: 1424519 - RNA, 21 nt, Human
cuaggcauucuggaccucugg

SEQ ID NO: 1424520 - RNA, 20 nt, Human
cuaggcauucuggaccucug

SEQ ID NO: 1424521 - RNA, 17 nt, Human
cuaggcauucuggaccu

SEQ ID NO: 1424522 - RNA, 14 nt, Human
cuaggcauucugga

SEQ ID NO: 1424523 - RNA, 20 nt, Human
cuaggcaguucaaagcagga

SEQ ID NO: 1424524 - RNA, 23 nt, Human
cuaguauuccagaccugaagaau

SEQ ID NO: 1424525 - RNA, 20 nt, Human
cuaguauuucuaugaaauau

SEQ ID NO: 1424526 - RNA, 19 nt, Human
cuaguauuucuaugaaaua

SEQ ID NO: 1424527 - RNA, 22 nt, Human
cuaguauuucuaugaaauauua

SEQ ID NO: 1424528 - RNA, 19 nt, Human
cuagcagcaccguucugug

SEQ ID NO: 1424529 - RNA, 12 nt, Human
cuagcagcaccg

SEQ ID NO: 1424530 - RNA, 21 nt, Human
cuagcagcaccguucugugca

SEQ ID NO: 1424531 - RNA, 20 nt, Human
cuagcagcaccguucugugc

SEQ ID NO: 1424532 - RNA, 15 nt, Human
cuaggaagaggagug

SEQ ID NO: 1424533 - RNA, 23 nt, Human
cuaggaagagcaggacuccaggc

SEQ ID NO: 1424534 - RNA, 19 nt, Human
cuaggaagagcaggacucc

SEQ ID NO: 1424535 - RNA, 22 nt, Human
cuagcagcaccguucugugcac

SEQ ID NO: 1424536 - RNA, 21 nt, Human
cuaggcacuguaguucuaaga

SEQ ID NO: 1424537 - RNA, 20 nt, Human
cuaggcacuguaguucuaag

SEQ ID NO: 1424538 - RNA, 19 nt, Human
cuaggcacuguaguucuaa

SEQ ID NO: 1424539 - RNA, 13 nt, Human
cuaggcaacauag

SEQ ID NO: 1424540 - RNA, 13 nt, Human
cuaggauucuaaa

SEQ ID NO: 1424541 - RNA, 13 nt, Human
cuaggauuucaug

SEQ ID NO: 1424542 - RNA, 22 nt, Human
cuaggaugugcauucuccagcc

SEQ ID NO: 1424543 - RNA, 16 nt, Human
cuaggaggguccucug

SEQ ID NO: 1424544 - RNA, 20 nt, Human
cuaggaggguccucugagac

SEQ ID NO: 1424545 - RNA, 15 nt, Human
cuaggaggguccucu

SEQ ID NO: 1424546 - RNA, 23 nt, Human
cuaggagcuuugacucaggagcc

SEQ ID NO: 1424547 - RNA, 23 nt, Human
cuaggagggagacacuggccccu

SEQ ID NO: 1424548 - RNA, 20 nt, Human
cuaggagcuuugacucagga

SEQ ID NO: 1424549 - RNA, 17 nt, Human
cuaggagcuuugacuca

SEQ ID NO: 1424550 - RNA, 18 nt, Human
cuaggagcaaagccuguu

SEQ ID NO: 1424551 - RNA, 20 nt, Human
cuaggagcaaagccuguuca

SEQ ID NO: 1424552 - RNA, 17 nt, Human
cuaggagcaaagccugu

SEQ ID NO: 1424553 - RNA, 16 nt, Human
cuaggagcaaagccug

SEQ ID NO: 1424554 - RNA, 15 nt, Human
cuaggagcaaagccu

SEQ ID NO: 1424555 - RNA, 13 nt, Human
cuaggagcaaagc

SEQ ID NO: 1424556 - RNA, 22 nt, Human
cuaggagggagacacuggcccc

SEQ ID NO: 1424557 - RNA, 18 nt, Human
cuaggagggagacacugg

SEQ ID NO: 1424558 - RNA, 13 nt, Human
cuaggagggagac

SEQ ID NO: 1424559 - RNA, 22 nt, Human
cuaggagcuuugacucaggagc

SEQ ID NO: 1424560 - RNA, 21 nt, Human
cuaggagcuuugacucaggag

SEQ ID NO: 1424561 - RNA, 17 nt, Human
cuaggaaugaaauccug

SEQ ID NO: 1424562 - RNA, 16 nt, Human
cuaggaaugaaauccu

SEQ ID NO: 1424563 - RNA, 15 nt, Human
cuaggaagccucaga

SEQ ID NO: 1424564 - RNA, 16 nt, Human
cuaggaagccucagau

SEQ ID NO: 1424565 - RNA, 14 nt, Human
cuaggaagccucag

SEQ ID NO: 1424566 - RNA, 16 nt, Human
cuaggaagaggagugg

SEQ ID NO: 1424567 - RNA, 23 nt, Human
cuaggaccaugguuaagagucca

SEQ ID NO: 1424568 - RNA, 21 nt, Human
cuaggaccaugguuaagaguc

SEQ ID NO: 1424569 - RNA, 23 nt, Human
cuaggagaaccaaaucuggaagc

SEQ ID NO: 1424570 - RNA, 21 nt, Human
cuaggagaaccaaaucuggaa

SEQ ID NO: 1424571 - RNA, 18 nt, Human
cuaggagaaccaaaucug

SEQ ID NO: 1424572 - RNA, 22 nt, Human
cuaggacugaauuaugaaacuu

SEQ ID NO: 1424573 - RNA, 20 nt, Human
cuagagucugaacagcugua

SEQ ID NO: 1424574 - RNA, 19 nt, Human
cuagagucugaacagcugu

SEQ ID NO: 1424575 - RNA, 16 nt, Human
cuagagucugaacagc

SEQ ID NO: 1424576 - RNA, 21 nt, Human
cuagagucccagguuggcucu

SEQ ID NO: 1424577 - RNA, 23 nt, Human
cuagaguccaagguuuaaagagu

SEQ ID NO: 1424578 - RNA, 20 nt, Human
cuagaguccaagguuuaaag

SEQ ID NO: 1424579 - RNA, 15 nt, Human
cuagaguccaagguu

SEQ ID NO: 1424580 - RNA, 19 nt, Human
cuagaggugagaaauuuaa

SEQ ID NO: 1424581 - RNA, 17 nt, Human
cuagaggugagaaauuu

SEQ ID NO: 1424582 - RNA, 15 nt, Human
cuagaggugagaaau

SEQ ID NO: 1424583 - RNA, 15 nt, Human
cuagagguucaaaga

SEQ ID NO: 1424584 - RNA, 16 nt, Human
cuagaggaagcagcca

SEQ ID NO: 1424585 - RNA, 20 nt, Human
cuagagcuccucccucucaa

SEQ ID NO: 1424586 - RNA, 19 nt, Human
cuagagcuccucccucuca

SEQ ID NO: 1424587 - RNA, 17 nt, Human
cuagagcuccucccucu

SEQ ID NO: 1424588 - RNA, 15 nt, Human
cuagagcuccucccu

SEQ ID NO: 1424589 - RNA, 13 nt, Human
cuagagcuccucc

SEQ ID NO: 1424590 - RNA, 12 nt, Human
cuagagcuccuc

SEQ ID NO: 1424591 - RNA, 11 nt, Human
cuagagcuccu

SEQ ID NO: 1424592 - RNA, 17 nt, Human
cuagaccuccagcuguu

SEQ ID NO: 1424593 - RNA, 16 nt, Human
cuagaccuccagcugu

SEQ ID NO: 1424594 - RNA, 21 nt, Human
cuacuuugauaugacuguuuu

SEQ ID NO: 1424595 - RNA, 17 nt, Human
cuacuuugauaugacug

SEQ ID NO: 1424596 - RNA, 23 nt, Human
cuagauguuuauucuucuagagu

SEQ ID NO: 1424597 - RNA, 21 nt, Human
cuagauguuuauucuucuaga

SEQ ID NO: 1424598 - RNA, 21 nt, Human
cuagauguauaacuaggagcu

SEQ ID NO: 1424599 - RNA, 23 nt, Human
cuagauguaguauuuuuuguaua

SEQ ID NO: 1424600 - RNA, 22 nt, Human
cuagauguaguauuuuuuguau

SEQ ID NO: 1424601 - RNA, 20 nt, Human
cuagauguaguauuuuuugu

SEQ ID NO: 1424602 - RNA, 16 nt, Human
cuagauguaguauuuu

SEQ ID NO: 1424603 - RNA, 18 nt, Human
cuagauggaccugccugc

SEQ ID NO: 1424604 - RNA, 16 nt, Human
cuagauggaccugccu

SEQ ID NO: 1424605 - RNA, 13 nt, Human
cuagauggaccug

SEQ ID NO: 1424606 - RNA, 22 nt, Human
cuagaugauuaaauaagauucu

SEQ ID NO: 1424607 - RNA, 23 nt, Human
cuagaugauuaaauaagauucua

SEQ ID NO: 1424608 - RNA, 21 nt, Human
cuagaugauuaaauaagauuc

SEQ ID NO: 1424609 - RNA, 20 nt, Human
cuagaugauuaaauaagauu

SEQ ID NO: 1424610 - RNA, 17 nt, Human
cuagauccuaagggucg

SEQ ID NO: 1424611 - RNA, 17 nt, Human
cuagaugaaguuuuaca

SEQ ID NO: 1424612 - RNA, 16 nt, Human
cuagauccuaaggguc

SEQ ID NO: 1424613 - RNA, 15 nt, Human
cuagauccuaagggu

SEQ ID NO: 1424614 - RNA, 22 nt, Human
cuagaucauaaggcuucaaaau

SEQ ID NO: 1424615 - RNA, 18 nt, Human
cuagaucauaaggcuuca

SEQ ID NO: 1424616 - RNA, 17 nt, Human
cuagaucauaaggcuuc

SEQ ID NO: 1424617 - RNA, 15 nt, Human
cuagaucauaaggcu

SEQ ID NO: 1424618 - RNA, 20 nt, Human
cuagaucagaugcuccaaga

SEQ ID NO: 1424619 - RNA, 18 nt, Human
cuagaucagaugcuccaa

SEQ ID NO: 1424620 - RNA, 15 nt, Human
cuagaucagaugcuc

SEQ ID NO: 1424621 - RNA, 18 nt, Human
cuagauuuaauauaaagu

SEQ ID NO: 1424622 - RNA, 14 nt, Human
cuagauuuaauaua

SEQ ID NO: 1424623 - RNA, 12 nt, Human
cuagauuuaaua

SEQ ID NO: 1424624 - RNA, 21 nt, Human
cuagauugcuaaggagcugau

SEQ ID NO: 1424625 - RNA, 24 nt, Human
cuagauugagagaagagacaaaca

SEQ ID NO: 1424626 - RNA, 23 nt, Human
cuagauuccauugguccaagauu

SEQ ID NO: 1424627 - RNA, 22 nt, Human
cuagauuccauugguccaagau

SEQ ID NO: 1424628 - RNA, 14 nt, Human
cuagauucagggaa

SEQ ID NO: 1424629 - RNA, 21 nt, Human
cuagauucaaagguucuaggu

SEQ ID NO: 1424630 - RNA, 20 nt, Human
cuagauucaaagguucuagg

SEQ ID NO: 1424631 - RNA, 18 nt, Human
cuagauucaaagguucua

SEQ ID NO: 1424632 - RNA, 17 nt, Human
cuagauucaaagguucu

SEQ ID NO: 1424633 - RNA, 16 nt, Human
cuagauucaaagguuc

SEQ ID NO: 1424634 - RNA, 15 nt, Human
cuagauucaaagguu

SEQ ID NO: 1424635 - RNA, 14 nt, Human
cuagauucaaaggu

SEQ ID NO: 1424636 - RNA, 12 nt, Human
cuagauucaaag

SEQ ID NO: 1424637 - RNA, 22 nt, Human
cuagauguuuauucuucuagag

SEQ ID NO: 1424638 - RNA, 14 nt, Human
cuagcacagauggc

SEQ ID NO: 1424639 - RNA, 17 nt, Human
cuagcaaaagugcaaga

SEQ ID NO: 1424640 - RNA, 16 nt, Human
cuagcaaaagugcaag

SEQ ID NO: 1424641 - RNA, 15 nt, Human
cuacccuaaccaagu

SEQ ID NO: 1424642 - RNA, 15 nt, Human
cuacugaaugucauu

SEQ ID NO: 1424643 - RNA, 14 nt, Human
cuacugaagcccuu

SEQ ID NO: 1424644 - RNA, 13 nt, Human
cuacugaagcccu

SEQ ID NO: 1424645 - RNA, 22 nt, Human
cuacugacggaguccuguguuu

SEQ ID NO: 1424646 - RNA, 20 nt, Human
cuacugacauguggggccag

SEQ ID NO: 1424647 - RNA, 15 nt, Human
cuacugacauguggg

SEQ ID NO: 1424648 - RNA, 14 nt, Human
cuacugacaugugg

SEQ ID NO: 1424649 - RNA, 21 nt, Human
cuacuguaaggcaaucauggu

SEQ ID NO: 1424650 - RNA, 16 nt, Human
cuacuguaauuuguga

SEQ ID NO: 1424651 - RNA, 17 nt, Human
cuacuguaauuugugau

SEQ ID NO: 1424652 - RNA, 20 nt, Human
cuacuuccuccuccccacuu

SEQ ID NO: 1424653 - RNA, 19 nt, Human
cuacuuccuccuccccacu

SEQ ID NO: 1424654 - RNA, 17 nt, Human
cuacuuccuccucccca

SEQ ID NO: 1424655 - RNA, 18 nt, Human
cuacuucuguaauugugu

SEQ ID NO: 1424656 - RNA, 17 nt, Human
cuacuucuguaauugug

SEQ ID NO: 1424657 - RNA, 17 nt, Human
cuacuucggggcuggga

SEQ ID NO: 1424658 - RNA, 13 nt, Human
cuacuuccuccuc

SEQ ID NO: 1424659 - RNA, 23 nt, Human
cuacuuccccauggcccugagcg

SEQ ID NO: 1424660 - RNA, 22 nt, Human
cuacuuccccauggcccugagc

SEQ ID NO: 1424661 - RNA, 16 nt, Human
cuacuguguuaugcaa

SEQ ID NO: 1424662 - RNA, 20 nt, Human
cuacugugugugugaaugaa

SEQ ID NO: 1424663 - RNA, 19 nt, Human
cuacugugugugugaauga

SEQ ID NO: 1424664 - RNA, 17 nt, Human
cuacugugugugugaau

SEQ ID NO: 1424665 - RNA, 15 nt, Human
cuacuguguguguga

SEQ ID NO: 1424666 - RNA, 23 nt, Human
cuacuguguuaugcaaaagcaag

SEQ ID NO: 1424667 - RNA, 19 nt, Human
cuacuuccaaacuaauuuu

SEQ ID NO: 1424668 - RNA, 16 nt, Human
cuacuuccaaacuaau

SEQ ID NO: 1424669 - RNA, 22 nt, Human
cuacuuauuguagcauccugga

SEQ ID NO: 1424670 - RNA, 21 nt, Human
cuacuuugacuuuuugcauuu

SEQ ID NO: 1424671 - RNA, 20 nt, Human
cuacuuugacuuuuugcauu

SEQ ID NO: 1424672 - RNA, 19 nt, Human
cuacuuugacuuuuugcau

SEQ ID NO: 1424673 - RNA, 18 nt, Human
cuacuuugacuuuuugca

SEQ ID NO: 1424674 - RNA, 18 nt, Human
cuacuuuauaacuaacau

SEQ ID NO: 1424675 - RNA, 14 nt, Human
cuacuuuauaacua

SEQ ID NO: 1424676 - RNA, 19 nt, Human
cuacuuuauaacuaacaug

SEQ ID NO: 1424677 - RNA, 22 nt, Human
cuacuuucugugucuauggauu

SEQ ID NO: 1424678 - RNA, 14 nt, Human
cuacuugcucaggu

SEQ ID NO: 1424679 - RNA, 22 nt, Human
cuacuucuuuugcucuuagcug

SEQ ID NO: 1424680 - RNA, 23 nt, Human
cuacuucuuuuuucaaaagaaag

SEQ ID NO: 1424681 - RNA, 21 nt, Human
cuacuguaauuugugauacaa

SEQ ID NO: 1424682 - RNA, 19 nt, Human
cuaagccagcaccggacca

SEQ ID NO: 1424683 - RNA, 14 nt, Human
cuaagcaucuaagu

SEQ ID NO: 1424684 - RNA, 15 nt, Human
cuaagcaucuaaguu

SEQ ID NO: 1424685 - RNA, 13 nt, Human
cuaagcaucuaag

SEQ ID NO: 1424686 - RNA, 21 nt, Human
cuaagcauaaaagaugaaaga

SEQ ID NO: 1424687 - RNA, 22 nt, Human
cuaagcagaaagugccuuucag

SEQ ID NO: 1424688 - RNA, 23 nt, Human
cuaagcagaaagugccuuucagg

SEQ ID NO: 1424689 - RNA, 21 nt, Human
cuaagcagaaagugccuuuca

SEQ ID NO: 1424690 - RNA, 19 nt, Human
cuaagcagaaagugccuuu

SEQ ID NO: 1424691 - RNA, 18 nt, Human
cuaagcagaaagugccuu

SEQ ID NO: 1424692 - RNA, 17 nt, Human
cuaagcagaaagugccu

SEQ ID NO: 1424693 - RNA, 16 nt, Human
cuaagcagaaagugcc

SEQ ID NO: 1424694 - RNA, 15 nt, Human
cuaagcagaaagugc

SEQ ID NO: 1424695 - RNA, 14 nt, Human
cuaagcagaaagug

SEQ ID NO: 1424696 - RNA, 13 nt, Human
cuaagcagaaagu

SEQ ID NO: 1424697 - RNA, 23 nt, Human
cuaagcacgggccauaugaauaa

SEQ ID NO: 1424698 - RNA, 16 nt, Human
cuaagcaacuaggccu

SEQ ID NO: 1424699 - RNA, 19 nt, Human
cuaagauucugauuuuagg

SEQ ID NO: 1424700 - RNA, 20 nt, Human
cuaagcacgggccauaugaa

SEQ ID NO: 1424701 - RNA, 18 nt, Human
cuaagauucugauuuuag

SEQ ID NO: 1424702 - RNA, 12 nt, Human
cuaagauucuga

SEQ ID NO: 1424703 - RNA, 11 nt, Human
cuaagauucug

SEQ ID NO: 1424704 - RNA, 22 nt, Human
cuaagauucuagaucagaugcu

SEQ ID NO: 1424705 - RNA, 18 nt, Human
cuaagauucuagaucaga

SEQ ID NO: 1424706 - RNA, 16 nt, Human
cuaagauucuagauca

SEQ ID NO: 1424707 - RNA, 15 nt, Human
cuaagauucuagauc

SEQ ID NO: 1424708 - RNA, 14 nt, Human
cuaagauucuagau

SEQ ID NO: 1424709 - RNA, 13 nt, Human
cuaagauucuaga

SEQ ID NO: 1424710 - RNA, 12 nt, Human
cuaagauucuag

SEQ ID NO: 1424711 - RNA, 21 nt, Human
cuaagauucuaaugaugauca

SEQ ID NO: 1424712 - RNA, 15 nt, Human
cuaagauucuaauga

SEQ ID NO: 1424713 - RNA, 13 nt, Human
cuaagauucuaau

SEQ ID NO: 1424714 - RNA, 18 nt, Human
cuaagauucuaaaggucc

SEQ ID NO: 1424715 - RNA, 17 nt, Human
cuaaccagcagaaaugc

SEQ ID NO: 1424716 - RNA, 17 nt, Human
cuaacauguccugccua

SEQ ID NO: 1424717 - RNA, 16 nt, Human
cuaaccagcagaaaug

SEQ ID NO: 1424718 - RNA, 21 nt, Human
cuaaggcucugagagucuaga

SEQ ID NO: 1424719 - RNA, 20 nt, Human
cuaaggcucugagagucuag

SEQ ID NO: 1424720 - RNA, 23 nt, Human
cuaaggcucugagagucuagauu

SEQ ID NO: 1424721 - RNA, 22 nt, Human
cuaaggcucugagagucuagau

SEQ ID NO: 1424722 - RNA, 23 nt, Human
cuaaggaguguagcaacuacagu

SEQ ID NO: 1424723 - RNA, 23 nt, Human
cuaagggucgaaagcucuagaau

SEQ ID NO: 1424724 - RNA, 21 nt, Human
cuaagggucgaaagcucuaga

SEQ ID NO: 1424725 - RNA, 19 nt, Human
cuaagggucgaaagcucua

SEQ ID NO: 1424726 - RNA, 18 nt, Human
cuaagggucgaaagcucu

SEQ ID NO: 1424727 - RNA, 17 nt, Human
cuaagggucgaaagcuc

SEQ ID NO: 1424728 - RNA, 22 nt, Human
cuaagguccgguguucuaagau

SEQ ID NO: 1424729 - RNA, 21 nt, Human
cuaagguccgguguucuaaga

SEQ ID NO: 1424730 - RNA, 20 nt, Human
cuaagguccgguguucuaag

SEQ ID NO: 1424731 - RNA, 19 nt, Human
cuaagguccgguguucuaa

SEQ ID NO: 1424732 - RNA, 22 nt, Human
cuaagggucgaaagcucuagaa

SEQ ID NO: 1424733 - RNA, 14 nt, Human
cuaagcuaggaaug

SEQ ID NO: 1424734 - RNA, 23 nt, Human
cuaagcgcuagaggaagcagcca

SEQ ID NO: 1424735 - RNA, 15 nt, Human
cuaagccccagcaag

SEQ ID NO: 1424736 - RNA, 16 nt, Human
cuaagccccagcaagc

SEQ ID NO: 1424737 - RNA, 17 nt, Human
cuaagccccagcaagca

SEQ ID NO: 1424738 - RNA, 19 nt, Human
cuaagccccagcaagcaau

SEQ ID NO: 1424739 - RNA, 22 nt, Human
cuaagcuaggaaugaaauccug

SEQ ID NO: 1424740 - RNA, 17 nt, Human
cuaagcuaggaaugaaa

SEQ ID NO: 1424741 - RNA, 23 nt, Human
cuaaggucuuggaacuugccugc

SEQ ID NO: 1424742 - RNA, 21 nt, Human
cuaaggucuuggaacuugccu

SEQ ID NO: 1424743 - RNA, 12 nt, Human
cuaauaaagcug

SEQ ID NO: 1424744 - RNA, 17 nt, Human
cuaauauuuuccuccug

SEQ ID NO: 1424745 - RNA, 13 nt, Human
cuaauauuuuccu

SEQ ID NO: 1424746 - RNA, 21 nt, Human
cuaauaaacuaauaauugcag

SEQ ID NO: 1424747 - RNA, 19 nt, Human
cuaauaaacuaauaauugc

SEQ ID NO: 1424748 - RNA, 18 nt, Human
cuaauaaacuaauaauug

SEQ ID NO: 1424749 - RNA, 13 nt, Human
cuaauaaagcugu

SEQ ID NO: 1424750 - RNA, 17 nt, Human
cuaauaaacuaauaauu

SEQ ID NO: 1424751 - RNA, 15 nt, Human
cuaauaaacuaauaa

SEQ ID NO: 1424752 - RNA, 12 nt, Human
cuaagguucuaa

SEQ ID NO: 1424753 - RNA, 11 nt, Human
cuaagguucua

SEQ ID NO: 1424754 - RNA, 14 nt, Human
cuaauaaagcugug

SEQ ID NO: 1424755 - RNA, 20 nt, Human
cuaauccccuucuccccugc

SEQ ID NO: 1424756 - RNA, 18 nt, Human
cuaauccccuucuccccu

SEQ ID NO: 1424757 - RNA, 16 nt, Human
cuaauccccuucuccc

SEQ ID NO: 1424758 - RNA, 15 nt, Human
cuaauccccuucucc

SEQ ID NO: 1424759 - RNA, 18 nt, Human
cuaaucccgauucacccu

SEQ ID NO: 1424760 - RNA, 23 nt, Human
cuaauccaggcagauccaggacu

SEQ ID NO: 1424761 - RNA, 20 nt, Human
cuaauccaggcagauccagg

SEQ ID NO: 1424762 - RNA, 19 nt, Human
cuaauccaggcagauccag

SEQ ID NO: 1424763 - RNA, 18 nt, Human
cuaauccaggcagaucca

SEQ ID NO: 1424764 - RNA, 17 nt, Human
cuaauccaggcagaucc

SEQ ID NO: 1424765 - RNA, 20 nt, Human
cuaaucucuguaaagcuaaa

SEQ ID NO: 1424766 - RNA, 14 nt, Human
cuaaucucuguaaa

SEQ ID NO: 1424767 - RNA, 20 nt, Human
cuaaucuauggucgggagac

SEQ ID NO: 1424768 - RNA, 18 nt, Human
cuaaucuauggucgggag

SEQ ID NO: 1424769 - RNA, 19 nt, Human
cuaaucuagauaucgacuu

SEQ ID NO: 1424770 - RNA, 16 nt, Human
cuaaucuacuuucugu

SEQ ID NO: 1424771 - RNA, 21 nt, Human
cuaaucuuauucauuuucucu

SEQ ID NO: 1424772 - RNA, 19 nt, Human
cuaaucuuauucauuuucu

SEQ ID NO: 1424773 - RNA, 18 nt, Human
cuaaucuuauucauuuuc

SEQ ID NO: 1424774 - RNA, 17 nt, Human
cuaaucuuauucauuuu

SEQ ID NO: 1424775 - RNA, 19 nt, Human
cuacaagcuaaaauuagau

SEQ ID NO: 1424776 - RNA, 17 nt, Human
cuacaagcuaaaauuag

SEQ ID NO: 1424777 - RNA, 19 nt, Human
cuaauuaauuguaaucuga

SEQ ID NO: 1424778 - RNA, 17 nt, Human
cuaauuaauuguaaucu

SEQ ID NO: 1424779 - RNA, 23 nt, Human
cuaauguggaccuuagaauacag

SEQ ID NO: 1424780 - RNA, 15 nt, Human
cuacagagaaaccag

SEQ ID NO: 1424781 - RNA, 14 nt, Human
cuacagagaaacca

SEQ ID NO: 1424782 - RNA, 12 nt, Human
cuacagagaaac

SEQ ID NO: 1424783 - RNA, 11 nt, Human
cuacagagaaa

SEQ ID NO: 1424784 - RNA, 10 nt, Human
cuacagagaa

SEQ ID NO: 1424785 - RNA, 19 nt, Human
cuacagaacuucagaaaga

SEQ ID NO: 1424786 - RNA, 20 nt, Human
cuacagaacuucagaaagac

SEQ ID NO: 1424787 - RNA, 17 nt, Human
cuacagaacuucagaaa

SEQ ID NO: 1424788 - RNA, 17 nt, Human
cuacagaaaaaccuugg

SEQ ID NO: 1424789 - RNA, 20 nt, Human
cuacagaaaaaccuuggguu

SEQ ID NO: 1424790 - RNA, 16 nt, Human
cuacagaaaaaccuug

SEQ ID NO: 1424791 - RNA, 15 nt, Human
cuacagaaaaaccuu

SEQ ID NO: 1424792 - RNA, 14 nt, Human
cuacagaaaaaccu

SEQ ID NO: 1424793 - RNA, 13 nt, Human
cuacagaaaaacc

SEQ ID NO: 1424794 - RNA, 12 nt, Human
cuacagaaaaac

SEQ ID NO: 1424795 - RNA, 23 nt, Human
cuacagagaagccuucaagcucu

SEQ ID NO: 1424796 - RNA, 15 nt, Human
cuacagagaagccuu

SEQ ID NO: 1424797 - RNA, 14 nt, Human
cuacagagaagccu

SEQ ID NO: 1424798 - RNA, 13 nt, Human
cuacagagaagcc

SEQ ID NO: 1424799 - RNA, 12 nt, Human
cuacagagaagc

SEQ ID NO: 1424800 - RNA, 11 nt, Human
cuacagagaag

SEQ ID NO: 1424801 - RNA, 21 nt, Human
cuacagagaaaccagcuuccu

SEQ ID NO: 1424802 - RNA, 20 nt, Human
cuacagagaaaccagcuucc

SEQ ID NO: 1424803 - RNA, 19 nt, Human
cuacagagaaaccagcuuc

SEQ ID NO: 1424804 - RNA, 18 nt, Human
cuacagagaaaccagcuu

SEQ ID NO: 1424805 - RNA, 17 nt, Human
cuacagagaaaccagcu

SEQ ID NO: 1424806 - RNA, 16 nt, Human
cuacagagaaaccagc

SEQ ID NO: 1424807 - RNA, 18 nt, Human
cuacagagcuucccugac

SEQ ID NO: 1424808 - RNA, 17 nt, Human
cuacagagcuucccuga

SEQ ID NO: 1424809 - RNA, 16 nt, Human
cuacagagcuucccug

SEQ ID NO: 1424810 - RNA, 17 nt, Human
cuacagagaagccuuca

SEQ ID NO: 1424811 - RNA, 16 nt, Human
cuacagagaagccuuc

SEQ ID NO: 1424812 - RNA, 21 nt, Human
cuacacacugcauguuuguga

SEQ ID NO: 1424813 - RNA, 12 nt, Human
cuacacacccug

SEQ ID NO: 1424814 - RNA, 16 nt, Human
cuacaauucauugugu

SEQ ID NO: 1424815 - RNA, 13 nt, Human
cuacacacugcau

SEQ ID NO: 1424816 - RNA, 15 nt, Human
cuacacacugcaugu

SEQ ID NO: 1424817 - RNA, 20 nt, Human
cuaccccgcagacaccuugg

SEQ ID NO: 1424818 - RNA, 15 nt, Human
cuaccccgcagacac

SEQ ID NO: 1424819 - RNA, 14 nt, Human
cuacccccugugcc

SEQ ID NO: 1424820 - RNA, 13 nt, Human
cuacccccugugc

SEQ ID NO: 1424821 - RNA, 15 nt, Human
cuacccgcagaguuc

SEQ ID NO: 1424822 - RNA, 22 nt, Human
cuacagagaagccuucaagcuc

SEQ ID NO: 1424823 - RNA, 20 nt, Human
cuacagagcuucccugacuc

SEQ ID NO: 1424824 - RNA, 20 nt, Human
cuaccaguauuuagaagcca

SEQ ID NO: 1424825 - RNA, 19 nt, Human
cuaccaguauuuagaagcc

SEQ ID NO: 1424826 - RNA, 13 nt, Human
cuaccaguauuua

SEQ ID NO: 1424827 - RNA, 22 nt, Human
cuaccaggucaaaauagugcca

SEQ ID NO: 1424828 - RNA, 12 nt, Human
cuaccaggaaag

SEQ ID NO: 1424829 - RNA, 14 nt, Human
cuccccagggaagc

SEQ ID NO: 1424830 - RNA, 15 nt, Human
cuccccagcucccag

SEQ ID NO: 1424831 - RNA, 16 nt, Human
cuccccagcucccagg

SEQ ID NO: 1424832 - RNA, 14 nt, Human
cuccccagcuccca

SEQ ID NO: 1424833 - RNA, 18 nt, Human
cuccccagggaagcagca

SEQ ID NO: 1424834 - RNA, 21 nt, Human
cuccccacucugcucugaugc

SEQ ID NO: 1424835 - RNA, 15 nt, Human
cuccccaacccccaa

SEQ ID NO: 1424836 - RNA, 16 nt, Human
cucccauuuuggaauu

SEQ ID NO: 1424837 - RNA, 23 nt, Human
cuccccaacugaccaccuuuguu

SEQ ID NO: 1424838 - RNA, 20 nt, Human
cuccccaacugaccaccuuu

SEQ ID NO: 1424839 - RNA, 22 nt, Human
cuccccacucugcucugaugca

SEQ ID NO: 1424840 - RNA, 20 nt, Human
cuccccacucugcucugaug

SEQ ID NO: 1424841 - RNA, 20 nt, Human
cucccggagguugggugggc

SEQ ID NO: 1424842 - RNA, 19 nt, Human
cucccggagguuggguggg

SEQ ID NO: 1424843 - RNA, 22 nt, Human
cucccggaauuccgucaccacg

SEQ ID NO: 1424844 - RNA, 19 nt, Human
cucccuauuaaccuagaga

SEQ ID NO: 1424845 - RNA, 18 nt, Human
cucccuauacugcuugga

SEQ ID NO: 1424846 - RNA, 21 nt, Human
cucccuauacugcuuggagcu

SEQ ID NO: 1424847 - RNA, 17 nt, Human
cucccuaguuccuucau

SEQ ID NO: 1424848 - RNA, 13 nt, Human
cucccuacccuaa

SEQ ID NO: 1424849 - RNA, 21 nt, Human
cucccaggguuuuaacuuugu

SEQ ID NO: 1424850 - RNA, 22 nt, Human
cucccaggguuuuaacuuuguu

SEQ ID NO: 1424851 - RNA, 20 nt, Human
cucccaggguuuuaacuuug

SEQ ID NO: 1424852 - RNA, 16 nt, Human
cucccaggguuuuaac

SEQ ID NO: 1424853 - RNA, 15 nt, Human
cucccaggguuuuaa

SEQ ID NO: 1424854 - RNA, 12 nt, Human
cucccaggguuu

SEQ ID NO: 1424855 - RNA, 21 nt, Human
cucccaggggcucccuccgcc

SEQ ID NO: 1424856 - RNA, 19 nt, Human
cucccaggggcucccuccg

SEQ ID NO: 1424857 - RNA, 22 nt, Human
cucccaaagugcugggauuaca

SEQ ID NO: 1424858 - RNA, 22 nt, Human
cucccaggggcucccuccgccc

SEQ ID NO: 1424859 - RNA, 18 nt, Human
cucccaggggcucccucc

SEQ ID NO: 1424860 - RNA, 17 nt, Human
cucccaggggcucccuc

SEQ ID NO: 1424861 - RNA, 16 nt, Human
cucccaggggcucccu

SEQ ID NO: 1424862 - RNA, 21 nt, Human
cucccaaagugcugggauuaa

SEQ ID NO: 1424863 - RNA, 22 nt, Human
cucccaagcaccugggauuaca

SEQ ID NO: 1424864 - RNA, 22 nt, Human
cuccauccuacccccugugccu

SEQ ID NO: 1424865 - RNA, 20 nt, Human
cuccauccuacccccugugc

SEQ ID NO: 1424866 - RNA, 23 nt, Human
cuccauccuacccccugugccuu

SEQ ID NO: 1424867 - RNA, 18 nt, Human
cuccauccuacccccugu

SEQ ID NO: 1424868 - RNA, 23 nt, Human
cuccaucugguagaagggaaagc

SEQ ID NO: 1424869 - RNA, 15 nt, Human
cuccaucugguagaa

SEQ ID NO: 1424870 - RNA, 14 nt, Human
cuccaucugguaga

SEQ ID NO: 1424871 - RNA, 20 nt, Human
cuccauggcccugccaugcu

SEQ ID NO: 1424872 - RNA, 15 nt, Human
cuccugcagccccag

SEQ ID NO: 1424873 - RNA, 14 nt, Human
cuccugcagaccac

SEQ ID NO: 1424874 - RNA, 17 nt, Human
cuccugcacuuacuugc

SEQ ID NO: 1424875 - RNA, 15 nt, Human
cuccugcacuuacuu

SEQ ID NO: 1424876 - RNA, 16 nt, Human
cuccugagugcuugcu

SEQ ID NO: 1424877 - RNA, 19 nt, Human
cuccugagugcuugcuuuu

SEQ ID NO: 1424878 - RNA, 23 nt, Human
cuccucuccccagcccagagaca

SEQ ID NO: 1424879 - RNA, 22 nt, Human
cuccucuccccagcccagagac

SEQ ID NO: 1424880 - RNA, 21 nt, Human
cuccucuccccagcccagaga

SEQ ID NO: 1424881 - RNA, 20 nt, Human
cuccucuccccagcccagag

SEQ ID NO: 1424882 - RNA, 19 nt, Human
cuccucuccccagcccaga

SEQ ID NO: 1424883 - RNA, 18 nt, Human
cuccucuccccagcccag

SEQ ID NO: 1424884 - RNA, 17 nt, Human
cuccucuccccagccca

SEQ ID NO: 1424885 - RNA, 22 nt, Human
cuccugcacuuacuugcuuauu

SEQ ID NO: 1424886 - RNA, 20 nt, Human
cuccugcacuuacuugcuua

SEQ ID NO: 1424887 - RNA, 19 nt, Human
cuccugcacuuacuugcuu

SEQ ID NO: 1424888 - RNA, 18 nt, Human
cuccugcacuuacuugcu

SEQ ID NO: 1424889 - RNA, 20 nt, Human
cuccuguggccccacccugg

SEQ ID NO: 1424890 - RNA, 19 nt, Human
cuccuguggccccacccug

SEQ ID NO: 1424891 - RNA, 13 nt, Human
cuccuguggcccc

SEQ ID NO: 1424892 - RNA, 22 nt, Human
cuccugugcucagcccugagga

SEQ ID NO: 1424893 - RNA, 20 nt, Human
cuccugugcucagcccugag

SEQ ID NO: 1424894 - RNA, 19 nt, Human
cuccugugcucagcccuga

SEQ ID NO: 1424895 - RNA, 17 nt, Human
cuccugugcucagcccu

SEQ ID NO: 1424896 - RNA, 16 nt, Human
cuccugugcucagccc

SEQ ID NO: 1424897 - RNA, 14 nt, Human
cuccugugcucagc

SEQ ID NO: 1424898 - RNA, 11 nt, Human
cuccugugacc

SEQ ID NO: 1424899 - RNA, 19 nt, Human
cuccugugggagccucgca

SEQ ID NO: 1424900 - RNA, 18 nt, Human
cuccugugggagccucgc

SEQ ID NO: 1424901 - RNA, 17 nt, Human
cuccugugggagccucg

SEQ ID NO: 1424902 - RNA, 16 nt, Human
cuccugugggagccuc

SEQ ID NO: 1424903 - RNA, 15 nt, Human
cuccugugggagccu

SEQ ID NO: 1424904 - RNA, 13 nt, Human
cuccugugggagc

SEQ ID NO: 1424905 - RNA, 22 nt, Human
cuccuguggccccacccugggc

SEQ ID NO: 1424906 - RNA, 21 nt, Human
cuccuguggccccacccuggg

SEQ ID NO: 1424907 - RNA, 23 nt, Human
cuccugcuaacggugcucagggg

SEQ ID NO: 1424908 - RNA, 14 nt, Human
cuccugccuugaaa

SEQ ID NO: 1424909 - RNA, 21 nt, Human
cuccugccuugaaaaagacau

SEQ ID NO: 1424910 - RNA, 20 nt, Human
cuccugccuuccuccugggc

SEQ ID NO: 1424911 - RNA, 19 nt, Human
cuccugccuuccuccuggg

SEQ ID NO: 1424912 - RNA, 18 nt, Human
cuccugccuuccuccugg

SEQ ID NO: 1424913 - RNA, 16 nt, Human
cuccugccuuccuccu

SEQ ID NO: 1424914 - RNA, 15 nt, Human
cuccugccucuacug

SEQ ID NO: 1424915 - RNA, 22 nt, Human
cuccugccucuacugggaaggc

SEQ ID NO: 1424916 - RNA, 12 nt, Human
cuccugccucua

SEQ ID NO: 1424917 - RNA, 21 nt, Human
cuccucacccccagcuuugcu

SEQ ID NO: 1424918 - RNA, 20 nt, Human
cuccucacccccagcuuugc

SEQ ID NO: 1424919 - RNA, 17 nt, Human
cuccucacccccagcuu

SEQ ID NO: 1424920 - RNA, 12 nt, Human
cuccucaucccg

SEQ ID NO: 1424921 - RNA, 16 nt, Human
cuccgcccccagguag

SEQ ID NO: 1424922 - RNA, 15 nt, Human
cuccgcccccaggua

SEQ ID NO: 1424923 - RNA, 13 nt, Human
cuccgccauccac

SEQ ID NO: 1424924 - RNA, 23 nt, Human
cuccgccauucucaagcccugca

SEQ ID NO: 1424925 - RNA, 14 nt, Human
cuccgcccugccac

SEQ ID NO: 1424926 - RNA, 13 nt, Human
cuccgcccugcca

SEQ ID NO: 1424927 - RNA, 16 nt, Human
cuccgcccugccacuc

SEQ ID NO: 1424928 - RNA, 15 nt, Human
cuccgcccugccacu

SEQ ID NO: 1424929 - RNA, 17 nt, Human
cuccgcccugccacuca

SEQ ID NO: 1424930 - RNA, 23 nt, Human
cucccucagugcccucauuuuau

SEQ ID NO: 1424931 - RNA, 14 nt, Human
cucccucagugccc

SEQ ID NO: 1424932 - RNA, 23 nt, Human
cucccucaucaaggacacgggcc

SEQ ID NO: 1424933 - RNA, 22 nt, Human
cucccucaucaaggacacgggc

SEQ ID NO: 1424934 - RNA, 10 nt, Human
cuccucccuc

SEQ ID NO: 1424935 - RNA, 15 nt, Human
cuccuccccuggagg

SEQ ID NO: 1424936 - RNA, 19 nt, Human
cuccuccccaacugugggg

SEQ ID NO: 1424937 - RNA, 21 nt, Human
cuccucccaggguuuuaacuu

SEQ ID NO: 1424938 - RNA, 22 nt, Human
cuccucccaggguuuuaacuuu

SEQ ID NO: 1424939 - RNA, 23 nt, Human
cuccuccccuggagggggaaugg

SEQ ID NO: 1424940 - RNA, 14 nt, Human
cuccuccccuggag

SEQ ID NO: 1424941 - RNA, 15 nt, Human
cuccucuccccagcc

SEQ ID NO: 1424942 - RNA, 24 nt, Human
cuccucgagaucccaacacugcca

SEQ ID NO: 1424943 - RNA, 21 nt, Human
cuccucgagaucccaacacug

SEQ ID NO: 1424944 - RNA, 15 nt, Human
cuccuccuuuuucca

SEQ ID NO: 1424945 - RNA, 15 nt, Human
cuccuccuuuuuccu

SEQ ID NO: 1424946 - RNA, 17 nt, Human
cuccucgagaucccaac

SEQ ID NO: 1424947 - RNA, 18 nt, Human
cuccucauucacaucgca

SEQ ID NO: 1424948 - RNA, 20 nt, Human
cuccucauguacauacccug

SEQ ID NO: 1424949 - RNA, 11 nt, Human
cuccucaugua

SEQ ID NO: 1424950 - RNA, 15 nt, Human
cuccucaucccgugu

SEQ ID NO: 1424951 - RNA, 14 nt, Human
cuccuccagggaca

SEQ ID NO: 1424952 - RNA, 13 nt, Human
cuccuccagggac

SEQ ID NO: 1424953 - RNA, 16 nt, Human
cuccuccaggaagccu

SEQ ID NO: 1424954 - RNA, 15 nt, Human
cuccuccaccucaac

SEQ ID NO: 1424955 - RNA, 15 nt, Human
cuccuccaggaagcc

SEQ ID NO: 1424956 - RNA, 14 nt, Human
cuccuccaccucaa

SEQ ID NO: 1424957 - RNA, 13 nt, Human
cuccuccagggug

SEQ ID NO: 1424958 - RNA, 21 nt, Human
cuccuccaggguggcagcaac

SEQ ID NO: 1424959 - RNA, 14 nt, Human
cuccucccaggguu

SEQ ID NO: 1424960 - RNA, 12 nt, Human
cuccucccaggg

SEQ ID NO: 1424961 - RNA, 18 nt, Human
cuccuccaugggagaaaa

SEQ ID NO: 1424962 - RNA, 15 nt, Human
cuccuccaugggaga

SEQ ID NO: 1424963 - RNA, 22 nt, Human
cuccuccaggguggcagcaaca

SEQ ID NO: 1424964 - RNA, 16 nt, Human
cucuaacgccugagcc

SEQ ID NO: 1424965 - RNA, 15 nt, Human
cucuaacgccugagc

SEQ ID NO: 1424966 - RNA, 13 nt, Human
cucuaacgccuga

SEQ ID NO: 1424967 - RNA, 12 nt, Human
cucuaacgccug

SEQ ID NO: 1424968 - RNA, 13 nt, Human
cucuaacauuucc

SEQ ID NO: 1424969 - RNA, 22 nt, Human
cucuaagaucuuagauucucug

SEQ ID NO: 1424970 - RNA, 19 nt, Human
cucuaagaucuuagauucu

SEQ ID NO: 1424971 - RNA, 16 nt, Human
cucuaagaucuuagau

SEQ ID NO: 1424972 - RNA, 14 nt, Human
cucuaagaucuuag

SEQ ID NO: 1424973 - RNA, 14 nt, Human
cucuaagaaagaac

SEQ ID NO: 1424974 - RNA, 12 nt, Human
cucuaagaaaga

SEQ ID NO: 1424975 - RNA, 20 nt, Human
cucuaacuuggcucacacuc

SEQ ID NO: 1424976 - RNA, 22 nt, Human
cucuaacgccugagcccaggga

SEQ ID NO: 1424977 - RNA, 21 nt, Human
cucuaacgccugagcccaggg

SEQ ID NO: 1424978 - RNA, 20 nt, Human
cucuaacgccugagcccagg

SEQ ID NO: 1424979 - RNA, 18 nt, Human
cucuaacgccugagccca

SEQ ID NO: 1424980 - RNA, 17 nt, Human
cucuaacgccugagccc

SEQ ID NO: 1424981 - RNA, 20 nt, Human
cucuaauucacagugcucuu

SEQ ID NO: 1424982 - RNA, 17 nt, Human
cucuacaaacucccacu

SEQ ID NO: 1424983 - RNA, 16 nt, Human
cucuacaaacucccac

SEQ ID NO: 1424984 - RNA, 18 nt, Human
cucuaauucuauuaaagu

SEQ ID NO: 1424985 - RNA, 22 nt, Human
cucuacagagcuucccugacuc

SEQ ID NO: 1424986 - RNA, 20 nt, Human
cucuacagagcuucccugac

SEQ ID NO: 1424987 - RNA, 18 nt, Human
cucuacagagcuucccug

SEQ ID NO: 1424988 - RNA, 17 nt, Human
cucuacagagcuucccu

SEQ ID NO: 1424989 - RNA, 15 nt, Human
cucuacaucuucugc

SEQ ID NO: 1424990 - RNA, 23 nt, Human
cucuacagagcuucccugacuca

SEQ ID NO: 1424991 - RNA, 17 nt, Human
cucggaggaagccccca

SEQ ID NO: 1424992 - RNA, 13 nt, Human
cucggaggaagcc

SEQ ID NO: 1424993 - RNA, 13 nt, Human
cucgcuguugcug

SEQ ID NO: 1424994 - RNA, 15 nt, Human
cucgcuguugcugaa

SEQ ID NO: 1424995 - RNA, 16 nt, Human
cucgcuguugcugaau

SEQ ID NO: 1424996 - RNA, 22 nt, Human
cucggcuccccauguguccugg

SEQ ID NO: 1424997 - RNA, 19 nt, Human
cucggcuccccaugugucc

SEQ ID NO: 1424998 - RNA, 18 nt, Human
cucgcuguccuuucuaga

SEQ ID NO: 1424999 - RNA, 12 nt, Human
cucgcuguugcu

SEQ ID NO: 1425000 - RNA, 19 nt, Human
cucgcuggacucucagucu

SEQ ID NO: 1425001 - RNA, 16 nt, Human
cucgcuggacucucag

SEQ ID NO: 1425002 - RNA, 15 nt, Human
cucgcuggacucuca

SEQ ID NO: 1425003 - RNA, 21 nt, Human
cuccuucaacaauucuaaaau

SEQ ID NO: 1425004 - RNA, 19 nt, Human
cucgcugccagcucuguau

SEQ ID NO: 1425005 - RNA, 16 nt, Human
cucgcugccagcucug

SEQ ID NO: 1425006 - RNA, 13 nt, Human
cucgcugccagcu

SEQ ID NO: 1425007 - RNA, 19 nt, Human
cucuacugggaaggcuacu

SEQ ID NO: 1425008 - RNA, 16 nt, Human
cucuacugggaaggcu

SEQ ID NO: 1425009 - RNA, 13 nt, Human
cucuacugggaag

SEQ ID NO: 1425010 - RNA, 12 nt, Human
cucuacugggaa

SEQ ID NO: 1425011 - RNA, 20 nt, Human
cucuacugaaugucauugaa

SEQ ID NO: 1425012 - RNA, 17 nt, Human
cucuacugaaugucauu

SEQ ID NO: 1425013 - RNA, 20 nt, Human
cucuacuaaugccucuucau

SEQ ID NO: 1425014 - RNA, 21 nt, Human
cucuacuaacaaucagcuccu

SEQ ID NO: 1425015 - RNA, 22 nt, Human
cucuaccuucuccccagcuccc

SEQ ID NO: 1425016 - RNA, 21 nt, Human
cucuaccuucuccccagcucc

SEQ ID NO: 1425017 - RNA, 18 nt, Human
cucuaccuucuccccagc

SEQ ID NO: 1425018 - RNA, 16 nt, Human
cucuaccuucucccca

SEQ ID NO: 1425019 - RNA, 15 nt, Human
cucuaccuucucccc

SEQ ID NO: 1425020 - RNA, 14 nt, Human
cucuaccuucuccc

SEQ ID NO: 1425021 - RNA, 22 nt, Human
cucuacccugcauggcugagcu

SEQ ID NO: 1425022 - RNA, 18 nt, Human
cucuacuuaauccaaugg

SEQ ID NO: 1425023 - RNA, 17 nt, Human
cucuacuuaauccaaug

SEQ ID NO: 1425024 - RNA, 14 nt, Human
cucuaccccaauuu

SEQ ID NO: 1425025 - RNA, 16 nt, Human
cucuacccauauuaca

SEQ ID NO: 1425026 - RNA, 19 nt, Human
cucuacccauauuacagau

SEQ ID NO: 1425027 - RNA, 22 nt, Human
cucuaccugacacucccuuggg

SEQ ID NO: 1425028 - RNA, 12 nt, Human
cucuaccugaca

SEQ ID NO: 1425029 - RNA, 18 nt, Human
cucuacaucuucugccuu

SEQ ID NO: 1425030 - RNA, 17 nt, Human
cucuacaucuucugccu

SEQ ID NO: 1425031 - RNA, 22 nt, Human
cucuagucaaugacaugaauuu

SEQ ID NO: 1425032 - RNA, 18 nt, Human
cucuagucaaugacauga

SEQ ID NO: 1425033 - RNA, 15 nt, Human
cucuagucaaugaca

SEQ ID NO: 1425034 - RNA, 15 nt, Human
cucuaguauuccaga

SEQ ID NO: 1425035 - RNA, 23 nt, Human
cucuagguacgaugacaguguuc

SEQ ID NO: 1425036 - RNA, 21 nt, Human
cucuaggguacauggugcugg

SEQ ID NO: 1425037 - RNA, 16 nt, Human
cucuagcugugggggu

SEQ ID NO: 1425038 - RNA, 17 nt, Human
cucuaggaaauauuuau

SEQ ID NO: 1425039 - RNA, 22 nt, Human
cucuagagcagacuacagcugg

SEQ ID NO: 1425040 - RNA, 16 nt, Human
cucuagagcagggauu

SEQ ID NO: 1425041 - RNA, 13 nt, Human
cucuagagcaggg

SEQ ID NO: 1425042 - RNA, 19 nt, Human
cucuagagcagacuacagc

SEQ ID NO: 1425043 - RNA, 21 nt, Human
cucuagagaaauaagaucuuu

SEQ ID NO: 1425044 - RNA, 21 nt, Human
cucuagacacugccacacagg

SEQ ID NO: 1425045 - RNA, 16 nt, Human
cucuagacacugccac

SEQ ID NO: 1425046 - RNA, 12 nt, Human
cucuagaaucug

SEQ ID NO: 1425047 - RNA, 12 nt, Human
cucuagauucca

SEQ ID NO: 1425048 - RNA, 14 nt, Human
cucuagaucauaag

SEQ ID NO: 1425049 - RNA, 16 nt, Human
cucuagaguccaaggu

SEQ ID NO: 1425050 - RNA, 15 nt, Human
cucuagaguccaagg

SEQ ID NO: 1425051 - RNA, 13 nt, Human
cucuagaguccaa

SEQ ID NO: 1425052 - RNA, 15 nt, Human
cucuaggaaauauuu

SEQ ID NO: 1425053 - RNA, 17 nt, Human
cucuagugcgguuuacu

SEQ ID NO: 1425054 - RNA, 18 nt, Human
cucuaguucuuuguucau

SEQ ID NO: 1425055 - RNA, 15 nt, Human
cucuaguucuuuguu

SEQ ID NO: 1425056 - RNA, 13 nt, Human
cucuaguucuuug

SEQ ID NO: 1425057 - RNA, 21 nt, Human
cucuaguuugauuaaauucuu

SEQ ID NO: 1425058 - RNA, 19 nt, Human
cucuaguuugauuaaauuc

SEQ ID NO: 1425059 - RNA, 20 nt, Human
cucuaguuugauuaaauucu

SEQ ID NO: 1425060 - RNA, 15 nt, Human
cucuaguuugauuaa

SEQ ID NO: 1425061 - RNA, 15 nt, Human
cucuauaccaauaaa

SEQ ID NO: 1425062 - RNA, 16 nt, Human
cucuauaccaauaaag

SEQ ID NO: 1425063 - RNA, 17 nt, Human
cucuauaccaauaaagu

SEQ ID NO: 1425064 - RNA, 21 nt, Human
cucuccacucaugugacucuu

SEQ ID NO: 1425065 - RNA, 22 nt, Human
cucuccacucaugugacucuuu

SEQ ID NO: 1425066 - RNA, 17 nt, Human
cucucauuuagccuguc

SEQ ID NO: 1425067 - RNA, 18 nt, Human
cucucauuuagccugucc

SEQ ID NO: 1425068 - RNA, 15 nt, Human
cucuccaaaccacuu

SEQ ID NO: 1425069 - RNA, 16 nt, Human
cucuccaaaccacuuu

SEQ ID NO: 1425070 - RNA, 15 nt, Human
cucuccugccccuug

SEQ ID NO: 1425071 - RNA, 12 nt, Human
cucuccucuucu

SEQ ID NO: 1425072 - RNA, 16 nt, Human
cucuccagcugacuaa

SEQ ID NO: 1425073 - RNA, 15 nt, Human
cucuccagcugacua

SEQ ID NO: 1425074 - RNA, 14 nt, Human
cucuccagcugacu

SEQ ID NO: 1425075 - RNA, 18 nt, Human
cucuccagccucagcucu

SEQ ID NO: 1425076 - RNA, 22 nt, Human
cucuccuggcuucccaucccca

SEQ ID NO: 1425077 - RNA, 13 nt, Human
cucuccuggcuuc

SEQ ID NO: 1425078 - RNA, 12 nt, Human
cucuccuggcuu

SEQ ID NO: 1425079 - RNA, 14 nt, Human
cucuccuuccugug

SEQ ID NO: 1425080 - RNA, 22 nt, Human
cucuccuucaugacagccucca

SEQ ID NO: 1425081 - RNA, 18 nt, Human
cucuccugucucccuccu

SEQ ID NO: 1425082 - RNA, 17 nt, Human
cucuccuggcuucccau

SEQ ID NO: 1425083 - RNA, 16 nt, Human
cucuccuggcuuccca

SEQ ID NO: 1425084 - RNA, 17 nt, Human
cucuccugucucccucc

SEQ ID NO: 1425085 - RNA, 15 nt, Human
cucuccugucucccu

SEQ ID NO: 1425086 - RNA, 22 nt, Human
cucucuaggguacauggugcug

SEQ ID NO: 1425087 - RNA, 14 nt, Human
cucucuaugccucu

SEQ ID NO: 1425088 - RNA, 24 nt, Human
cucucuauccucucuuccucuucc

SEQ ID NO: 1425089 - RNA, 14 nt, Human
cucucuauccucuc

SEQ ID NO: 1425090 - RNA, 23 nt, Human
cucucuaggguacauggugcugg

SEQ ID NO: 1425091 - RNA, 21 nt, Human
cucucucauacccucccuccc

SEQ ID NO: 1425092 - RNA, 21 nt, Human
cugacuagggagccauguuuc

SEQ ID NO: 1425093 - RNA, 15 nt, Human
cugaccacacgcggg

SEQ ID NO: 1425094 - RNA, 15 nt, Human
cugaccaaacagcca

SEQ ID NO: 1425095 - RNA, 21 nt, Human
cugacauuuggaguguucccc

SEQ ID NO: 1425096 - RNA, 18 nt, Human
cugacauuuggaguguuc

SEQ ID NO: 1425097 - RNA, 21 nt, Human
cugacauguggggccagguca

SEQ ID NO: 1425098 - RNA, 19 nt, Human
cugacauguggggccaggu

SEQ ID NO: 1425099 - RNA, 14 nt, Human
cugacauguggggc

SEQ ID NO: 1425100 - RNA, 23 nt, Human
cugacaugaagcuguugugugag

SEQ ID NO: 1425101 - RNA, 17 nt, Human
cugacaucaaaaaaggc

SEQ ID NO: 1425102 - RNA, 15 nt, Human
cugacaucaaaaaag

SEQ ID NO: 1425103 - RNA, 13 nt, Human
cugacaucaaaaa

SEQ ID NO: 1425104 - RNA, 19 nt, Human
cugacaguuuacagacgcu

SEQ ID NO: 1425105 - RNA, 21 nt, Human
cugacaggugaggucuguucc

SEQ ID NO: 1425106 - RNA, 17 nt, Human
cugacagcagcaucucu

SEQ ID NO: 1425107 - RNA, 16 nt, Human
cugacagcagcaucuc

SEQ ID NO: 1425108 - RNA, 15 nt, Human
cugacagcagcaucu

SEQ ID NO: 1425109 - RNA, 11 nt, Human
cugacagcagc

SEQ ID NO: 1425110 - RNA, 14 nt, Human
cugacuuggcuggu

SEQ ID NO: 1425111 - RNA, 12 nt, Human
cugacuuggcug

SEQ ID NO: 1425112 - RNA, 19 nt, Human
cugacuucugccuggagac

SEQ ID NO: 1425113 - RNA, 18 nt, Human
cugacuucugccuggaga

SEQ ID NO: 1425114 - RNA, 16 nt, Human
cugacuucugccugga

SEQ ID NO: 1425115 - RNA, 15 nt, Human
cugacuucugccugg

SEQ ID NO: 1425116 - RNA, 14 nt, Human
cugacuucugccug

SEQ ID NO: 1425117 - RNA, 13 nt, Human
cugacuucugccu

SEQ ID NO: 1425118 - RNA, 12 nt, Human
cugacuucugcc

SEQ ID NO: 1425119 - RNA, 11 nt, Human
cugacuucugc

SEQ ID NO: 1425120 - RNA, 23 nt, Human
cugacuucaucucccaccuagca

SEQ ID NO: 1425121 - RNA, 17 nt, Human
cugacuucaucucccac

SEQ ID NO: 1425122 - RNA, 15 nt, Human
cugacucagggcucc

SEQ ID NO: 1425123 - RNA, 14 nt, Human
cugacucagggcuc

SEQ ID NO: 1425124 - RNA, 12 nt, Human
cugacucagggc

SEQ ID NO: 1425125 - RNA, 22 nt, Human
cugacucacaccugaacugaac

SEQ ID NO: 1425126 - RNA, 23 nt, Human
cugacuauucuugauguaaaauc

SEQ ID NO: 1425127 - RNA, 22 nt, Human
cugacuauucuugauguaaaau

SEQ ID NO: 1425128 - RNA, 21 nt, Human
cugacuauucuugauguaaaa

SEQ ID NO: 1425129 - RNA, 20 nt, Human
cugacuauucuugauguaaa

SEQ ID NO: 1425130 - RNA, 19 nt, Human
cugacuauucuugauguaa

SEQ ID NO: 1425131 - RNA, 18 nt, Human
cugacuauucuugaugua

SEQ ID NO: 1425132 - RNA, 18 nt, Human
cugacuagggagccaugu

SEQ ID NO: 1425133 - RNA, 17 nt, Human
cugacucuuaagaagac

SEQ ID NO: 1425134 - RNA, 20 nt, Human
cugagaaccuggccuucagu

SEQ ID NO: 1425135 - RNA, 19 nt, Human
cugagaaccuggccuucag

SEQ ID NO: 1425136 - RNA, 18 nt, Human
cugagaaccuggccuuca

SEQ ID NO: 1425137 - RNA, 17 nt, Human
cugagaaccuggccuuc

SEQ ID NO: 1425138 - RNA, 16 nt, Human
cugagaaccuggccuu

SEQ ID NO: 1425139 - RNA, 15 nt, Human
cugagaaccuggccu

SEQ ID NO: 1425140 - RNA, 14 nt, Human
cugagaaccuggcc

SEQ ID NO: 1425141 - RNA, 13 nt, Human
cugagaaccuggc

SEQ ID NO: 1425142 - RNA, 12 nt, Human
cugagaaccugg

SEQ ID NO: 1425143 - RNA, 21 nt, Human
cugagaauuguugagauacuu

SEQ ID NO: 1425144 - RNA, 17 nt, Human
cugagacaaauggaggc

SEQ ID NO: 1425145 - RNA, 16 nt, Human
cugagaaucagacuga

SEQ ID NO: 1425146 - RNA, 19 nt, Human
cugacuuucuuuuuugaua

SEQ ID NO: 1425147 - RNA, 22 nt, Human
cugacuuggcuggugugguaca

SEQ ID NO: 1425148 - RNA, 20 nt, Human
cugacuuggcugguguggua

SEQ ID NO: 1425149 - RNA, 17 nt, Human
cugacuuggcuggugug

SEQ ID NO: 1425150 - RNA, 16 nt, Human
cugacuuggcuggugu

SEQ ID NO: 1425151 - RNA, 15 nt, Human
cugacuuggcuggug

SEQ ID NO: 1425152 - RNA, 22 nt, Human
cugagaaccguagaugauuuca

SEQ ID NO: 1425153 - RNA, 16 nt, Human
cugagaaagcucaaag

SEQ ID NO: 1425154 - RNA, 11 nt, Human
cugagaaauuu

SEQ ID NO: 1425155 - RNA, 14 nt, Human
cugagaaauuuaua

SEQ ID NO: 1425156 - RNA, 21 nt, Human
cugagcuauuucaucuauuuu

SEQ ID NO: 1425157 - RNA, 16 nt, Human
cugagcuauuucaucu

SEQ ID NO: 1425158 - RNA, 13 nt, Human
cugagcuauuuca

SEQ ID NO: 1425159 - RNA, 15 nt, Human
cugagcuagaacccu

SEQ ID NO: 1425160 - RNA, 18 nt, Human
cugagcgaguggagucug

SEQ ID NO: 1425161 - RNA, 22 nt, Human
cugagcgccuccauccaaggcc

SEQ ID NO: 1425162 - RNA, 15 nt, Human
cugagcgccuccauc

SEQ ID NO: 1425163 - RNA, 13 nt, Human
cugagcgccucca

SEQ ID NO: 1425164 - RNA, 15 nt, Human
cugagcgccaggaug

SEQ ID NO: 1425165 - RNA, 21 nt, Human
cugagcgaguggagucugcca

SEQ ID NO: 1425166 - RNA, 20 nt, Human
cugagcgaggagaugcuccu

SEQ ID NO: 1425167 - RNA, 21 nt, Human
cugagccuuguaauucuaaau

SEQ ID NO: 1425168 - RNA, 22 nt, Human
cugagcuccuguccccugcuac

SEQ ID NO: 1425169 - RNA, 17 nt, Human
cugagcuccuguccccu

SEQ ID NO: 1425170 - RNA, 12 nt, Human
cugagcuccugu

SEQ ID NO: 1425171 - RNA, 17 nt, Human
cugagcuccagcuccuu

SEQ ID NO: 1425172 - RNA, 22 nt, Human
cugagcuccagcuccuuugggc

SEQ ID NO: 1425173 - RNA, 17 nt, Human
cugagcucagcguggag

SEQ ID NO: 1425174 - RNA, 16 nt, Human
cugagcucagcgugga

SEQ ID NO: 1425175 - RNA, 15 nt, Human
cugagcucagcgugg

SEQ ID NO: 1425176 - RNA, 22 nt, Human
cugagcucacaaggcagcaagg

SEQ ID NO: 1425177 - RNA, 23 nt, Human
cugagcucacaaggcagcaaggc

SEQ ID NO: 1425178 - RNA, 20 nt, Human
cugagcucacaaggcagcaa

SEQ ID NO: 1425179 - RNA, 19 nt, Human
cugagcucacaaggcagca

SEQ ID NO: 1425180 - RNA, 18 nt, Human
cugagcucacaaggcagc

SEQ ID NO: 1425181 - RNA, 17 nt, Human
cugagcucacaaggcag

SEQ ID NO: 1425182 - RNA, 14 nt, Human
cugagcucacaagg

SEQ ID NO: 1425183 - RNA, 19 nt, Human
cugagccugccgagcaacc

SEQ ID NO: 1425184 - RNA, 16 nt, Human
cugagccugccgagca

SEQ ID NO: 1425185 - RNA, 15 nt, Human
cugagccugccgagc

SEQ ID NO: 1425186 - RNA, 14 nt, Human
cugagccugccgag

SEQ ID NO: 1425187 - RNA, 13 nt, Human
cugagccugccga

SEQ ID NO: 1425188 - RNA, 12 nt, Human
cugagccugccg

SEQ ID NO: 1425189 - RNA, 16 nt, Human
cugagccuuguaauuc

SEQ ID NO: 1425190 - RNA, 15 nt, Human
cugagccuuguaauu

SEQ ID NO: 1425191 - RNA, 16 nt, Human
cugagccggccccagg

SEQ ID NO: 1425192 - RNA, 23 nt, Human
cugagccggccccaggcucgugg

SEQ ID NO: 1425193 - RNA, 19 nt, Human
cugagccggccccaggcuc

SEQ ID NO: 1425194 - RNA, 18 nt, Human
cugagccggccccaggcu

SEQ ID NO: 1425195 - RNA, 23 nt, Human
cugagcccgguaagagcaaaaga

SEQ ID NO: 1425196 - RNA, 20 nt, Human
cugagccagggucuccagaa

SEQ ID NO: 1425197 - RNA, 22 nt, Human
cugagccagugucaggaggaag

SEQ ID NO: 1425198 - RNA, 16 nt, Human
cugagccagugucagg

SEQ ID NO: 1425199 - RNA, 22 nt, Human
cugagccagggucuccagaaag

SEQ ID NO: 1425200 - RNA, 19 nt, Human
cugagccagggucuccaga

SEQ ID NO: 1425201 - RNA, 18 nt, Human
cugagccagggucuccag

SEQ ID NO: 1425202 - RNA, 17 nt, Human
cugagccagggucucca

SEQ ID NO: 1425203 - RNA, 15 nt, Human
cugagacaaugccuu

SEQ ID NO: 1425204 - RNA, 20 nt, Human
cugagacaaauggaggccug

SEQ ID NO: 1425205 - RNA, 22 nt, Human
cugaggccagccuggccuccug

SEQ ID NO: 1425206 - RNA, 20 nt, Human
cugaggccagccuggccucc

SEQ ID NO: 1425207 - RNA, 19 nt, Human
cugaggccagccuggccuc

SEQ ID NO: 1425208 - RNA, 18 nt, Human
cugaggccagccuggccu

SEQ ID NO: 1425209 - RNA, 17 nt, Human
cugaggccagccuggcc

SEQ ID NO: 1425210 - RNA, 16 nt, Human
cugaggccagccuggc

SEQ ID NO: 1425211 - RNA, 15 nt, Human
cugaggccagccugg

SEQ ID NO: 1425212 - RNA, 14 nt, Human
cugaggccagccug

SEQ ID NO: 1425213 - RNA, 24 nt, Human
cugaggcagcagugugaggccagg

SEQ ID NO: 1425214 - RNA, 23 nt, Human
cugaggcagcagugugaggccag

SEQ ID NO: 1425215 - RNA, 22 nt, Human
cugaggcagcagugugaggcca

SEQ ID NO: 1425216 - RNA, 17 nt, Human
cugaggcagcaguguga

SEQ ID NO: 1425217 - RNA, 15 nt, Human
cugaggcagcagugu

SEQ ID NO: 1425218 - RNA, 13 nt, Human
cugaggccagccu

SEQ ID NO: 1425219 - RNA, 12 nt, Human
cugaggccagcc

SEQ ID NO: 1425220 - RNA, 17 nt, Human
cugaggccacccagagg

SEQ ID NO: 1425221 - RNA, 24 nt, Human
cugaggccacacucagcacaaggc

SEQ ID NO: 1425222 - RNA, 21 nt, Human
cugaggccacacucagcacaa

SEQ ID NO: 1425223 - RNA, 20 nt, Human
cugaggccacacucagcaca

SEQ ID NO: 1425224 - RNA, 14 nt, Human
cugaggccacacuc

SEQ ID NO: 1425225 - RNA, 12 nt, Human
cugaggccacac

SEQ ID NO: 1425226 - RNA, 22 nt, Human
cugagcucugagaggcccugga

SEQ ID NO: 1425227 - RNA, 23 nt, Human
cugagcucugagaggcccuggau

SEQ ID NO: 1425228 - RNA, 21 nt, Human
cugagcucugagaggcccugg

SEQ ID NO: 1425229 - RNA, 20 nt, Human
cugagcucugagaggcccug

SEQ ID NO: 1425230 - RNA, 19 nt, Human
cugagcucugagaggcccu

SEQ ID NO: 1425231 - RNA, 18 nt, Human
cugagcucugagaggccc

SEQ ID NO: 1425232 - RNA, 17 nt, Human
cugagcucugagaggcc

SEQ ID NO: 1425233 - RNA, 16 nt, Human
cugagcucugagaggc

SEQ ID NO: 1425234 - RNA, 15 nt, Human
cugagcucugagagg

SEQ ID NO: 1425235 - RNA, 14 nt, Human
cugagcucugagag

SEQ ID NO: 1425236 - RNA, 13 nt, Human
cugagcucugaga

SEQ ID NO: 1425237 - RNA, 12 nt, Human
cugagcucugag

SEQ ID NO: 1425238 - RNA, 19 nt, Human
cugaggagucugagguccu

SEQ ID NO: 1425239 - RNA, 15 nt, Human
cugagcugaggcagc

SEQ ID NO: 1425240 - RNA, 13 nt, Human
cugagcugaggca

SEQ ID NO: 1425241 - RNA, 12 nt, Human
cugagcugaggc

SEQ ID NO: 1425242 - RNA, 15 nt, Human
cugagcugaccagcc

SEQ ID NO: 1425243 - RNA, 17 nt, Human
cugaggaucagaguaau

SEQ ID NO: 1425244 - RNA, 20 nt, Human
cugaggagucugagguccug

SEQ ID NO: 1425245 - RNA, 19 nt, Human
cugaggaucagaguaaucc

SEQ ID NO: 1425246 - RNA, 21 nt, Human
cucugcuucucugacuucugc

SEQ ID NO: 1425247 - RNA, 17 nt, Human
cucugcuucucugacuu

SEQ ID NO: 1425248 - RNA, 16 nt, Human
cucugcuucucugacu

SEQ ID NO: 1425249 - RNA, 15 nt, Human
cucugcuucucugac

SEQ ID NO: 1425250 - RNA, 14 nt, Human
cucugcuucucuga

SEQ ID NO: 1425251 - RNA, 13 nt, Human
cucugcuucucug

SEQ ID NO: 1425252 - RNA, 12 nt, Human
cucugcuucucu

SEQ ID NO: 1425253 - RNA, 14 nt, Human
cucugcuucucacg

SEQ ID NO: 1425254 - RNA, 13 nt, Human
cucucucccuuuu

SEQ ID NO: 1425255 - RNA, 21 nt, Human
cucuggagggguguggcuccu

SEQ ID NO: 1425256 - RNA, 20 nt, Human
cucuggagggguguggcucc

SEQ ID NO: 1425257 - RNA, 19 nt, Human
cucuggagggguguggcuc

SEQ ID NO: 1425258 - RNA, 16 nt, Human
cucuggaggggagggg

SEQ ID NO: 1425259 - RNA, 15 nt, Human
cucuggaggggaggg

SEQ ID NO: 1425260 - RNA, 14 nt, Human
cucuggaggggagg

SEQ ID NO: 1425261 - RNA, 22 nt, Human
cucuggcagccacacuucucag

SEQ ID NO: 1425262 - RNA, 17 nt, Human
cucuggcagccacacuu

SEQ ID NO: 1425263 - RNA, 16 nt, Human
cucuguucauuuccuc

SEQ ID NO: 1425264 - RNA, 17 nt, Human
cucuguucauuuccuca

SEQ ID NO: 1425265 - RNA, 17 nt, Human
cucugugggcuggcagu

SEQ ID NO: 1425266 - RNA, 22 nt, Human
cucugugcuuuuaaaugcauaa

SEQ ID NO: 1425267 - RNA, 19 nt, Human
cucuguguauuugcuuuuu

SEQ ID NO: 1425268 - RNA, 18 nt, Human
cucuguguauuugcuuuu

SEQ ID NO: 1425269 - RNA, 22 nt, Human
cucuguucaaagcugccugucc

SEQ ID NO: 1425270 - RNA, 15 nt, Human
cucuguucaaagcug

SEQ ID NO: 1425271 - RNA, 22 nt, Human
cucuguuacacuuuuuggaagu

SEQ ID NO: 1425272 - RNA, 18 nt, Human
cucuguucaaagcugccu

SEQ ID NO: 1425273 - RNA, 15 nt, Human
cucuguucauuccuc

SEQ ID NO: 1425274 - RNA, 17 nt, Human
cucuguucauuccucca

SEQ ID NO: 1425275 - RNA, 14 nt, Human
cucuguucauuucc

SEQ ID NO: 1425276 - RNA, 13 nt, Human
cucuguucauuuc

SEQ ID NO: 1425277 - RNA, 18 nt, Human
cucuguucauuccuccag

SEQ ID NO: 1425278 - RNA, 19 nt, Human
cucuguucauuccuccagg

SEQ ID NO: 1425279 - RNA, 19 nt, Human
cucugugccagagccuggg

SEQ ID NO: 1425280 - RNA, 18 nt, Human
cucugugccagagccugg

SEQ ID NO: 1425281 - RNA, 17 nt, Human
cucugugccagagccug

SEQ ID NO: 1425282 - RNA, 16 nt, Human
cucugugccagagccu

SEQ ID NO: 1425283 - RNA, 15 nt, Human
cucugugccagagcc

SEQ ID NO: 1425284 - RNA, 14 nt, Human
cucugugccagagc

SEQ ID NO: 1425285 - RNA, 20 nt, Human
cucugugcacuuauuuauga

SEQ ID NO: 1425286 - RNA, 17 nt, Human
cucugucuucuggacug

SEQ ID NO: 1425287 - RNA, 14 nt, Human
cucugucuucugga

SEQ ID NO: 1425288 - RNA, 13 nt, Human
cucugucuucugg

SEQ ID NO: 1425289 - RNA, 20 nt, Human
cucugucuggcaaugccaca

SEQ ID NO: 1425290 - RNA, 17 nt, Human
cucugucuggcaaugcc

SEQ ID NO: 1425291 - RNA, 23 nt, Human
cucugucuucuuugcccacaaug

SEQ ID NO: 1425292 - RNA, 13 nt, Human
cucugugcugugu

SEQ ID NO: 1425293 - RNA, 16 nt, Human
cucugugcuggccagc

SEQ ID NO: 1425294 - RNA, 19 nt, Human
cucugugcuggccagcgag

SEQ ID NO: 1425295 - RNA, 15 nt, Human
cucugugcuggccag

SEQ ID NO: 1425296 - RNA, 12 nt, Human
cucugugcuggc

SEQ ID NO: 1425297 - RNA, 13 nt, Human
cucugugccuucg

SEQ ID NO: 1425298 - RNA, 21 nt, Human
cucugugccagagccuggggc

SEQ ID NO: 1425299 - RNA, 20 nt, Human
cucugugccagagccugggg

SEQ ID NO: 1425300 - RNA, 21 nt, Human
cucuggcuuggccacagccag

SEQ ID NO: 1425301 - RNA, 20 nt, Human
cucuggcuuggccacagcca

SEQ ID NO: 1425302 - RNA, 22 nt, Human
cucuggcuguaaggcucuagau

SEQ ID NO: 1425303 - RNA, 21 nt, Human
cucuggcuguaaggcucuaga

SEQ ID NO: 1425304 - RNA, 20 nt, Human
cucuggcuguaaggcucuag

SEQ ID NO: 1425305 - RNA, 19 nt, Human
cucuggcuguaaggcucua

SEQ ID NO: 1425306 - RNA, 15 nt, Human
cucugucucauccau

SEQ ID NO: 1425307 - RNA, 14 nt, Human
cucugucucaucca

SEQ ID NO: 1425308 - RNA, 22 nt, Human
cucuggcuuggccacagccagg

SEQ ID NO: 1425309 - RNA, 23 nt, Human
cucugucucgagcgcccugcaga

SEQ ID NO: 1425310 - RNA, 22 nt, Human
cucugucucgagcgcccugcag

SEQ ID NO: 1425311 - RNA, 21 nt, Human
cucugucucgagcgcccugca

SEQ ID NO: 1425312 - RNA, 20 nt, Human
cucugucucgagcgcccugc

SEQ ID NO: 1425313 - RNA, 18 nt, Human
cucugucucgagcgcccu

SEQ ID NO: 1425314 - RNA, 13 nt, Human
cucugucucgagc

SEQ ID NO: 1425315 - RNA, 22 nt, Human
cucugucuccuaagcuggagug

SEQ ID NO: 1425316 - RNA, 15 nt, Human
cugaacuaaagugcu

SEQ ID NO: 1425317 - RNA, 19 nt, Human
cugaacagcugguguagcu

SEQ ID NO: 1425318 - RNA, 12 nt, Human
cugaacagugga

SEQ ID NO: 1425319 - RNA, 13 nt, Human
cugaacagcugua

SEQ ID NO: 1425320 - RNA, 16 nt, Human
cugaacagcuggugua

SEQ ID NO: 1425321 - RNA, 15 nt, Human
cugaacagcuggugu

SEQ ID NO: 1425322 - RNA, 17 nt, Human
cugaacaucacagcuua

SEQ ID NO: 1425323 - RNA, 13 nt, Human
cugaacucacuuu

SEQ ID NO: 1425324 - RNA, 18 nt, Human
cugaacucaaacugagga

SEQ ID NO: 1425325 - RNA, 15 nt, Human
cugaacucaaacuga

SEQ ID NO: 1425326 - RNA, 19 nt, Human
cugaacuaaagugcugcac

SEQ ID NO: 1425327 - RNA, 23 nt, Human
cugaagacaccguucauucaggc

SEQ ID NO: 1425328 - RNA, 19 nt, Human
cugaacugauggguuucuc

SEQ ID NO: 1425329 - RNA, 13 nt, Human
cugaacugaacac

SEQ ID NO: 1425330 - RNA, 21 nt, Human
cugaacuccugccauagucuu

SEQ ID NO: 1425331 - RNA, 23 nt, Human
cugaagaagcaccaaucaugaau

SEQ ID NO: 1425332 - RNA, 14 nt, Human
cugaacagcuggug

SEQ ID NO: 1425333 - RNA, 13 nt, Human
cugaacagcuggu

SEQ ID NO: 1425334 - RNA, 12 nt, Human
cugaacagcugg

SEQ ID NO: 1425335 - RNA, 20 nt, Human
cugaacaccauugaaggcuu

SEQ ID NO: 1425336 - RNA, 19 nt, Human
cugaacaccauugaaggcu

SEQ ID NO: 1425337 - RNA, 18 nt, Human
cugaacaccauugaaggc

SEQ ID NO: 1425338 - RNA, 22 nt, Human
cugaacaccauagguagaaugu

SEQ ID NO: 1425339 - RNA, 19 nt, Human
cugaaauuuuauaugcuua

SEQ ID NO: 1425340 - RNA, 13 nt, Human
cugaaauuuuaua

SEQ ID NO: 1425341 - RNA, 14 nt, Human
cugaaauuucagau

SEQ ID NO: 1425342 - RNA, 16 nt, Human
cugaaauuuccuggga

SEQ ID NO: 1425343 - RNA, 20 nt, Human
cugaaauucuccuggagguc

SEQ ID NO: 1425344 - RNA, 13 nt, Human
cugaaaugaagau

SEQ ID NO: 1425345 - RNA, 18 nt, Human
cugaaaucaauuaaaagu

SEQ ID NO: 1425346 - RNA, 23 nt, Human
cugaaauuuccugggagcuuuug

SEQ ID NO: 1425347 - RNA, 13 nt, Human
cugaaauuucaga

SEQ ID NO: 1425348 - RNA, 13 nt, Human
cugaaauuuccug

SEQ ID NO: 1425349 - RNA, 14 nt, Human
cucuuugagaaaua

SEQ ID NO: 1425350 - RNA, 10 nt, Human
cucuuugaga

SEQ ID NO: 1425351 - RNA, 12 nt, Human
cucuuugccuca

SEQ ID NO: 1425352 - RNA, 12 nt, Human
cucuuugagaaa

SEQ ID NO: 1425353 - RNA, 13 nt, Human
cucuuugccucaa

SEQ ID NO: 1425354 - RNA, 17 nt, Human
cucuuucccuggucccu

SEQ ID NO: 1425355 - RNA, 15 nt, Human
cucuuucccuggucc

SEQ ID NO: 1425356 - RNA, 14 nt, Human
cucuuucccugguc

SEQ ID NO: 1425357 - RNA, 13 nt, Human
cucuuucccuggu

SEQ ID NO: 1425358 - RNA, 17 nt, Human
cucuuuaugaucuggcc

SEQ ID NO: 1425359 - RNA, 21 nt, Human
cucuuuaugcuugcaaaaacu

SEQ ID NO: 1425360 - RNA, 15 nt, Human
cucuuucuguauaua

SEQ ID NO: 1425361 - RNA, 15 nt, Human
cucuuucugucuucu

SEQ ID NO: 1425362 - RNA, 15 nt, Human
cucuuucuucccaug

SEQ ID NO: 1425363 - RNA, 17 nt, Human
cucuuucuuucaauaaa

SEQ ID NO: 1425364 - RNA, 16 nt, Human
cugaaagccauggaga

SEQ ID NO: 1425365 - RNA, 21 nt, Human
cugaaauaaacgucuuaaaua

SEQ ID NO: 1425366 - RNA, 23 nt, Human
cucuuggggaguuuagggugggg

SEQ ID NO: 1425367 - RNA, 12 nt, Human
cucuucuuuaga

SEQ ID NO: 1425368 - RNA, 17 nt, Human
cucuucuuuagaacagg

SEQ ID NO: 1425369 - RNA, 23 nt, Human
cucuucuuuuaaaccauuuucuu

SEQ ID NO: 1425370 - RNA, 22 nt, Human
cucuugaaauauaggaacuuaa

SEQ ID NO: 1425371 - RNA, 20 nt, Human
cucuucuugaaauuuuaacc

SEQ ID NO: 1425372 - RNA, 15 nt, Human
cucuucuugaaauuu

SEQ ID NO: 1425373 - RNA, 20 nt, Human
cucuucuuccagguagcuga

SEQ ID NO: 1425374 - RNA, 20 nt, Human
cucuuccuacuggucucucu

SEQ ID NO: 1425375 - RNA, 18 nt, Human
cucuuccuacuggucucu

SEQ ID NO: 1425376 - RNA, 16 nt, Human
cucuuccuacuggucu

SEQ ID NO: 1425377 - RNA, 20 nt, Human
cucuuccgugacgucacugg

SEQ ID NO: 1425378 - RNA, 14 nt, Human
cucuucccucuucc

SEQ ID NO: 1425379 - RNA, 14 nt, Human
cucuuuauacagcu

SEQ ID NO: 1425380 - RNA, 15 nt, Human
cucuuuagaguuaga

SEQ ID NO: 1425381 - RNA, 17 nt, Human
cucuuuagaguuagacu

SEQ ID NO: 1425382 - RNA, 18 nt, Human
cucuuuagaguuagacug

SEQ ID NO: 1425383 - RNA, 19 nt, Human
cucuuuagaguuagacugu

SEQ ID NO: 1425384 - RNA, 21 nt, Human
cucuuuagaguuagacuguug

SEQ ID NO: 1425385 - RNA, 20 nt, Human
cucuuuaaaaggaaagaaaa

SEQ ID NO: 1425386 - RNA, 23 nt, Human
cucuuuaaaaggaaagaaaacau

SEQ ID NO: 1425387 - RNA, 21 nt, Human
cucuuguugagccgugggcaa

SEQ ID NO: 1425388 - RNA, 16 nt, Human
cucuuguugagccgug

SEQ ID NO: 1425389 - RNA, 19 nt, Human
cucuucuuucauuucuucu

SEQ ID NO: 1425390 - RNA, 19 nt, Human
cucuuuaaaaggaaagaaa

SEQ ID NO: 1425391 - RNA, 17 nt, Human
cugcugguccgugggac

SEQ ID NO: 1425392 - RNA, 16 nt, Human
cugcugguccguggga

SEQ ID NO: 1425393 - RNA, 19 nt, Human
cugcuggggccugggacaa

SEQ ID NO: 1425394 - RNA, 22 nt, Human
cugcuggggccugggacaacug

SEQ ID NO: 1425395 - RNA, 18 nt, Human
cugcuggggccugggaca

SEQ ID NO: 1425396 - RNA, 17 nt, Human
cugcuggggccugggac

SEQ ID NO: 1425397 - RNA, 16 nt, Human
cugcuggggccuggga

SEQ ID NO: 1425398 - RNA, 15 nt, Human
cugcuggggccuggg

SEQ ID NO: 1425399 - RNA, 14 nt, Human
cugcuggggccugg

SEQ ID NO: 1425400 - RNA, 13 nt, Human
cugcuggggccug

SEQ ID NO: 1425401 - RNA, 16 nt, Human
cugcugggcucaguga

SEQ ID NO: 1425402 - RNA, 18 nt, Human
cugcugggcucagugaag

SEQ ID NO: 1425403 - RNA, 15 nt, Human
cugcugggcucagug

SEQ ID NO: 1425404 - RNA, 14 nt, Human
cugcugggcucagu

SEQ ID NO: 1425405 - RNA, 13 nt, Human
cugcugccugccu

SEQ ID NO: 1425406 - RNA, 19 nt, Human
cugcuucucccaggcaagg

SEQ ID NO: 1425407 - RNA, 18 nt, Human
cugcuucucccaggcaag

SEQ ID NO: 1425408 - RNA, 17 nt, Human
cugcuucucccaggcaa

SEQ ID NO: 1425409 - RNA, 15 nt, Human
cugcuucucccaggc

SEQ ID NO: 1425410 - RNA, 14 nt, Human
cugcuucucccagg

SEQ ID NO: 1425411 - RNA, 13 nt, Human
cugcuucucccag

SEQ ID NO: 1425412 - RNA, 14 nt, Human
cugcuuccugcuug

SEQ ID NO: 1425413 - RNA, 15 nt, Human
cugcuuccugcuugc

SEQ ID NO: 1425414 - RNA, 13 nt, Human
cugcuuccugcuu

SEQ ID NO: 1425415 - RNA, 12 nt, Human
cugcuuccugcu

SEQ ID NO: 1425416 - RNA, 20 nt, Human
cugcugucccucccccuugu

SEQ ID NO: 1425417 - RNA, 17 nt, Human
cugcugucccucccccu

SEQ ID NO: 1425418 - RNA, 16 nt, Human
cugcuugaggaaaaca

SEQ ID NO: 1425419 - RNA, 14 nt, Human
cugcuugaggaaaa

SEQ ID NO: 1425420 - RNA, 13 nt, Human
cugcuugaggaaa

SEQ ID NO: 1425421 - RNA, 12 nt, Human
cugcuugaggaa

SEQ ID NO: 1425422 - RNA, 20 nt, Human
cugcuucucugacuucugcc

SEQ ID NO: 1425423 - RNA, 19 nt, Human
cugcuucucugacuucugc

SEQ ID NO: 1425424 - RNA, 17 nt, Human
cugcuucucugacuucu

SEQ ID NO: 1425425 - RNA, 16 nt, Human
cugcuucucugacuuc

SEQ ID NO: 1425426 - RNA, 15 nt, Human
cugcuucucugacuu

SEQ ID NO: 1425427 - RNA, 14 nt, Human
cugcuucucugacu

SEQ ID NO: 1425428 - RNA, 13 nt, Human
cugcuucucugac

SEQ ID NO: 1425429 - RNA, 21 nt, Human
cugcuucucccaggcaaggcu

SEQ ID NO: 1425430 - RNA, 20 nt, Human
cugcuucucccaggcaaggc

SEQ ID NO: 1425431 - RNA, 22 nt, Human
cugcuucucccaggcaaggcug

SEQ ID NO: 1425432 - RNA, 23 nt, Human
cugcuucucugacuucugccugg

SEQ ID NO: 1425433 - RNA, 22 nt, Human
cugcuucucugacuucugccug

SEQ ID NO: 1425434 - RNA, 21 nt, Human
cugcuucucugacuucugccu

SEQ ID NO: 1425435 - RNA, 19 nt, Human
cugcuucugacauaaucca

SEQ ID NO: 1425436 - RNA, 18 nt, Human
cugcuugguccuugauuu

SEQ ID NO: 1425437 - RNA, 21 nt, Human
cugcuuggggggugaugaggg

SEQ ID NO: 1425438 - RNA, 22 nt, Human
cugcuuggggggugaugagggc

SEQ ID NO: 1425439 - RNA, 19 nt, Human
cugcuuggggggugaugag

SEQ ID NO: 1425440 - RNA, 16 nt, Human
cugcuuggagcugagc

SEQ ID NO: 1425441 - RNA, 17 nt, Human
cugcuuggagcugagca

SEQ ID NO: 1425442 - RNA, 20 nt, Human
cugcuugcccuaagcagaaa

SEQ ID NO: 1425443 - RNA, 22 nt, Human
cugcuugcccuaagcagaaagu

SEQ ID NO: 1425444 - RNA, 19 nt, Human
cugcuugcccuaagcagaa

SEQ ID NO: 1425445 - RNA, 16 nt, Human
cugcuugcccuaagca

SEQ ID NO: 1425446 - RNA, 15 nt, Human
cugcuugcccuaagc

SEQ ID NO: 1425447 - RNA, 13 nt, Human
cugcuugcccuaa

SEQ ID NO: 1425448 - RNA, 21 nt, Human
cugcuugccaaggcagaggcc

SEQ ID NO: 1425449 - RNA, 18 nt, Human
cugcuugccaaggcagag

SEQ ID NO: 1425450 - RNA, 20 nt, Human
cugcuugauuuuugccucuu

SEQ ID NO: 1425451 - RNA, 23 nt, Human
cugcuugccaaggcagaggccug

SEQ ID NO: 1425452 - RNA, 13 nt, Human
cugcuugauuuuu

SEQ ID NO: 1425453 - RNA, 23 nt, Human
cugcuugaugggauucuggacag

SEQ ID NO: 1425454 - RNA, 21 nt, Human
cugcuugaugggauucuggac

SEQ ID NO: 1425455 - RNA, 20 nt, Human
cugcuuugggaagccgugcu

SEQ ID NO: 1425456 - RNA, 21 nt, Human
cugcuuugcucuucaagaaau

SEQ ID NO: 1425457 - RNA, 12 nt, Human
cugcuuugggcu

SEQ ID NO: 1425458 - RNA, 17 nt, Human
cugcuuuaaccacccca

SEQ ID NO: 1425459 - RNA, 17 nt, Human
cugcuuucuguuccaaa

SEQ ID NO: 1425460 - RNA, 18 nt, Human
cugcuuucuguuccaaau

SEQ ID NO: 1425461 - RNA, 17 nt, Human
cuggaagcuaauuugca

SEQ ID NO: 1425462 - RNA, 17 nt, Human
cuggaagccagcuuucc

SEQ ID NO: 1425463 - RNA, 16 nt, Human
cuggaagccagcuuuc

SEQ ID NO: 1425464 - RNA, 15 nt, Human
cuggaagccagcuuu

SEQ ID NO: 1425465 - RNA, 22 nt, Human
cuggaagccaaaauguaggcuu

SEQ ID NO: 1425466 - RNA, 20 nt, Human
cuggaagcugggaggucagg

SEQ ID NO: 1425467 - RNA, 15 nt, Human
cuggaagcugggagg

SEQ ID NO: 1425468 - RNA, 22 nt, Human
cuggaagcuaauuugcauuaaa

SEQ ID NO: 1425469 - RNA, 19 nt, Human
cuggaagcuaauuugcauu

SEQ ID NO: 1425470 - RNA, 18 nt, Human
cuggaagcuaauuugcau

SEQ ID NO: 1425471 - RNA, 19 nt, Human
cuggaaggggaagggacac

SEQ ID NO: 1425472 - RNA, 15 nt, Human
cuggaagggaggugg

SEQ ID NO: 1425473 - RNA, 19 nt, Human
cuggaaguccaauguggca

SEQ ID NO: 1425474 - RNA, 16 nt, Human
cuggaaguccaaugug

SEQ ID NO: 1425475 - RNA, 15 nt, Human
cuggaagugacuuug

SEQ ID NO: 1425476 - RNA, 18 nt, Human
cuggaagugacuuuggcu

SEQ ID NO: 1425477 - RNA, 14 nt, Human
cugccugcucccau

SEQ ID NO: 1425478 - RNA, 13 nt, Human
cugccugcuccca

SEQ ID NO: 1425479 - RNA, 21 nt, Human
cugccugccagcugcacugau

SEQ ID NO: 1425480 - RNA, 20 nt, Human
cugccugccagcugcacuga

SEQ ID NO: 1425481 - RNA, 16 nt, Human
cugccugccagcugca

SEQ ID NO: 1425482 - RNA, 15 nt, Human
cugccugccagcugc

SEQ ID NO: 1425483 - RNA, 17 nt, Human
cugccugcauaggaguu

SEQ ID NO: 1425484 - RNA, 14 nt, Human
cugcccugcccugc

SEQ ID NO: 1425485 - RNA, 15 nt, Human
cugcccugcccugcc

SEQ ID NO: 1425486 - RNA, 22 nt, Human
cugcccucucccaaaaaacuac

SEQ ID NO: 1425487 - RNA, 22 nt, Human
cugcgcccuuaacugcauccag

SEQ ID NO: 1425488 - RNA, 12 nt, Human
cugcgcacugug

SEQ ID NO: 1425489 - RNA, 20 nt, Human
cugccuucgcuucuugccuc

SEQ ID NO: 1425490 - RNA, 17 nt, Human
cugccuucgcuucuugc

SEQ ID NO: 1425491 - RNA, 15 nt, Human
cugccuucgcuucuu

SEQ ID NO: 1425492 - RNA, 14 nt, Human
cugccuucgcuucu

SEQ ID NO: 1425493 - RNA, 13 nt, Human
cugccuucgcuuc

SEQ ID NO: 1425494 - RNA, 21 nt, Human
cugccuuccuccugggcccuc

SEQ ID NO: 1425495 - RNA, 18 nt, Human
cugccuuccuccugggcc

SEQ ID NO: 1425496 - RNA, 16 nt, Human
cugccuuccuccuggg

SEQ ID NO: 1425497 - RNA, 15 nt, Human
cugccuuccuccugg

SEQ ID NO: 1425498 - RNA, 14 nt, Human
cugccuuccuccug

SEQ ID NO: 1425499 - RNA, 13 nt, Human
cugccuuccuccu

SEQ ID NO: 1425500 - RNA, 19 nt, Human
cugccuggaagagcagccc

SEQ ID NO: 1425501 - RNA, 13 nt, Human
cugccugcuuggg

SEQ ID NO: 1425502 - RNA, 12 nt, Human
cugccugcuugg

SEQ ID NO: 1425503 - RNA, 18 nt, Human
cugccugcucgcucccug

SEQ ID NO: 1425504 - RNA, 18 nt, Human
cugccugcucccauccug

SEQ ID NO: 1425505 - RNA, 15 nt, Human
cugccugcucccauc

SEQ ID NO: 1425506 - RNA, 22 nt, Human
cugccugcuuuuuauggccugu

SEQ ID NO: 1425507 - RNA, 17 nt, Human
cugcucuaacagcccuc

SEQ ID NO: 1425508 - RNA, 12 nt, Human
cugcucuaacag

SEQ ID NO: 1425509 - RNA, 22 nt, Human
cugcucguccccaagugaccua

SEQ ID NO: 1425510 - RNA, 21 nt, Human
cugcucguccccaagugaccu

SEQ ID NO: 1425511 - RNA, 18 nt, Human
cugcucguccccaaguga

SEQ ID NO: 1425512 - RNA, 23 nt, Human
cugcucggggugcacaggagggg

SEQ ID NO: 1425513 - RNA, 22 nt, Human
cugcucggggugcacaggaggg

SEQ ID NO: 1425514 - RNA, 21 nt, Human
cugcucggggugcacaggagg

SEQ ID NO: 1425515 - RNA, 20 nt, Human
cugcucggggugcacaggag

SEQ ID NO: 1425516 - RNA, 19 nt, Human
cugcucggggugcacagga

SEQ ID NO: 1425517 - RNA, 18 nt, Human
cugcucggggugcacagg

SEQ ID NO: 1425518 - RNA, 18 nt, Human
cugcucccauccugugug

SEQ ID NO: 1425519 - RNA, 19 nt, Human
cugcucccauccugugugu

SEQ ID NO: 1425520 - RNA, 14 nt, Human
cugcucccauccug

SEQ ID NO: 1425521 - RNA, 23 nt, Human
cugcgggugaacaaagcagccac

SEQ ID NO: 1425522 - RNA, 22 nt, Human
cugcgggugaacaaagcagcca

SEQ ID NO: 1425523 - RNA, 22 nt, Human
cugcucugcgugucaccugugc

SEQ ID NO: 1425524 - RNA, 21 nt, Human
cugcucugcgugucaccugug

SEQ ID NO: 1425525 - RNA, 20 nt, Human
cugcucugcgugucaccugu

SEQ ID NO: 1425526 - RNA, 18 nt, Human
cugcucugaugcaucaga

SEQ ID NO: 1425527 - RNA, 13 nt, Human
cugcucugaugca

SEQ ID NO: 1425528 - RNA, 12 nt, Human
cugcucugaugc

SEQ ID NO: 1425529 - RNA, 17 nt, Human
cugcucggggugcacag

SEQ ID NO: 1425530 - RNA, 15 nt, Human
cugcucuuggcugga

SEQ ID NO: 1425531 - RNA, 22 nt, Human
cugcucugguuguuucuguucc

SEQ ID NO: 1425532 - RNA, 21 nt, Human
cugcucugguuguuucuguuc

SEQ ID NO: 1425533 - RNA, 18 nt, Human
cugcucugguuguuucug

SEQ ID NO: 1425534 - RNA, 17 nt, Human
cugcucugguuguuucu

SEQ ID NO: 1425535 - RNA, 20 nt, Human
cugcucuuggcuggacccag

SEQ ID NO: 1425536 - RNA, 19 nt, Human
cugcucuuggcuggaccca

SEQ ID NO: 1425537 - RNA, 17 nt, Human
cugcucuuggcuggacc

SEQ ID NO: 1425538 - RNA, 16 nt, Human
cugcucuuggcuggac

SEQ ID NO: 1425539 - RNA, 22 nt, Human
cugcucuuggcuggacccagcc

SEQ ID NO: 1425540 - RNA, 21 nt, Human
cugcucuuggcuggacccagc

SEQ ID NO: 1425541 - RNA, 15 nt, Human
cugcugccucccucu

SEQ ID NO: 1425542 - RNA, 11 nt, Human
cugcugccugc

SEQ ID NO: 1425543 - RNA, 14 nt, Human
cugcugccugcuuu

SEQ ID NO: 1425544 - RNA, 23 nt, Human
cugcugccugcuuuuuauggccu

SEQ ID NO: 1425545 - RNA, 15 nt, Human
cugccauuaaagaau

SEQ ID NO: 1425546 - RNA, 17 nt, Human
cugccagcugcacugau

SEQ ID NO: 1425547 - RNA, 16 nt, Human
cugccagcugcacuga

SEQ ID NO: 1425548 - RNA, 11 nt, Human
cugccaggaga

SEQ ID NO: 1425549 - RNA, 13 nt, Human
cugccagcugcac

SEQ ID NO: 1425550 - RNA, 12 nt, Human
cugccagcugca

SEQ ID NO: 1425551 - RNA, 11 nt, Human
cugccagcugc

SEQ ID NO: 1425552 - RNA, 17 nt, Human
cugccagcucuguauca

SEQ ID NO: 1425553 - RNA, 17 nt, Human
cugccaccuccccccac

SEQ ID NO: 1425554 - RNA, 21 nt, Human
cugccaccuccccccacaagu

SEQ ID NO: 1425555 - RNA, 14 nt, Human
cugccacccuugac

SEQ ID NO: 1425556 - RNA, 16 nt, Human
cugccacccaggaucc

SEQ ID NO: 1425557 - RNA, 14 nt, Human
cugccacccaggau

SEQ ID NO: 1425558 - RNA, 12 nt, Human
cugccacccagg

SEQ ID NO: 1425559 - RNA, 23 nt, Human
cugccacccagccccagccaggg

SEQ ID NO: 1425560 - RNA, 20 nt, Human
cugccacccagccccagcca

SEQ ID NO: 1425561 - RNA, 18 nt, Human
cugccacccagccccagc

SEQ ID NO: 1425562 - RNA, 17 nt, Human
cugccacccagccccag

SEQ ID NO: 1425563 - RNA, 21 nt, Human
cugcauauguugaauacuuuu

SEQ ID NO: 1425564 - RNA, 14 nt, Human
cugcauauguugaa

SEQ ID NO: 1425565 - RNA, 23 nt, Human
cugcauaggaguuuggaggaagu

SEQ ID NO: 1425566 - RNA, 22 nt, Human
cugcauaggaguuuggaggaag

SEQ ID NO: 1425567 - RNA, 20 nt, Human
cugcauaggaguuuggagga

SEQ ID NO: 1425568 - RNA, 22 nt, Human
cugcauaauguuucuggauuuc

SEQ ID NO: 1425569 - RNA, 15 nt, Human
cugcauaauguuucu

SEQ ID NO: 1425570 - RNA, 20 nt, Human
cugcauacuuuuuaaaugua

SEQ ID NO: 1425571 - RNA, 14 nt, Human
cugcauacuuuuua

SEQ ID NO: 1425572 - RNA, 17 nt, Human
cugcccuaccugcccca

SEQ ID NO: 1425573 - RNA, 19 nt, Human
cugcccgggagcucaggaa

SEQ ID NO: 1425574 - RNA, 22 nt, Human
cugccccuuggacacgcucagu

SEQ ID NO: 1425575 - RNA, 21 nt, Human
cugcccaccucagccucccaa

SEQ ID NO: 1425576 - RNA, 15 nt, Human
cugcccacagcaggc

SEQ ID NO: 1425577 - RNA, 17 nt, Human
cugccauuaaagaauau

SEQ ID NO: 1425578 - RNA, 17 nt, Human
cugccauucacuucaua

SEQ ID NO: 1425579 - RNA, 20 nt, Human
cugccccacuuguccuuagc

SEQ ID NO: 1425580 - RNA, 21 nt, Human
cugccccacuuguccuuagcc

SEQ ID NO: 1425581 - RNA, 18 nt, Human
cugccccacuuguccuua

SEQ ID NO: 1425582 - RNA, 24 nt, Human
cugccccaacuccuuccagcuagu

SEQ ID NO: 1425583 - RNA, 13 nt, Human
cugccccaacucu

SEQ ID NO: 1425584 - RNA, 22 nt, Human
cugccccaacuccuuccagcua

SEQ ID NO: 1425585 - RNA, 20 nt, Human
cugccccaacuccuuccagc

SEQ ID NO: 1425586 - RNA, 15 nt, Human
cugccccaacuccuu

SEQ ID NO: 1425587 - RNA, 21 nt, Human
cugcagaggccagaggccccc

SEQ ID NO: 1425588 - RNA, 20 nt, Human
cugcagaggccagaggcccc

SEQ ID NO: 1425589 - RNA, 17 nt, Human
cugcagaggccagaggc

SEQ ID NO: 1425590 - RNA, 15 nt, Human
cugcagcaauaaagc

SEQ ID NO: 1425591 - RNA, 16 nt, Human
cugcagcaauaaagca

SEQ ID NO: 1425592 - RNA, 16 nt, Human
cugcagacuucccagc

SEQ ID NO: 1425593 - RNA, 15 nt, Human
cugcagacuucccag

SEQ ID NO: 1425594 - RNA, 14 nt, Human
cugcagacuuccca

SEQ ID NO: 1425595 - RNA, 15 nt, Human
cugcagacucacugu

SEQ ID NO: 1425596 - RNA, 21 nt, Human
cugcagacccugcccuuguuu

SEQ ID NO: 1425597 - RNA, 17 nt, Human
cugcagacccugcccuu

SEQ ID NO: 1425598 - RNA, 16 nt, Human
cugcagacccugcccu

SEQ ID NO: 1425599 - RNA, 13 nt, Human
cugcagaggccag

SEQ ID NO: 1425600 - RNA, 11 nt, Human
cugcagaggcc

SEQ ID NO: 1425601 - RNA, 12 nt, Human
cugcagaggacg

SEQ ID NO: 1425602 - RNA, 17 nt, Human
cugcagacuucccagcu

SEQ ID NO: 1425603 - RNA, 15 nt, Human
cugcagacccugccc

SEQ ID NO: 1425604 - RNA, 14 nt, Human
cugcagacccugcc

SEQ ID NO: 1425605 - RNA, 13 nt, Human
cugcagacccugc

SEQ ID NO: 1425606 - RNA, 15 nt, Human
cugcagaccacgccc

SEQ ID NO: 1425607 - RNA, 22 nt, Human
cugcagaauuuggguucugccu

SEQ ID NO: 1425608 - RNA, 18 nt, Human
cugcacuguaaaaugugg

SEQ ID NO: 1425609 - RNA, 16 nt, Human
cugcacuguaaaaugu

SEQ ID NO: 1425610 - RNA, 20 nt, Human
cugcacuguaaaauguggga

SEQ ID NO: 1425611 - RNA, 15 nt, Human
cugcacuguaaaaug

SEQ ID NO: 1425612 - RNA, 14 nt, Human
cugcacuguaaaau

SEQ ID NO: 1425613 - RNA, 13 nt, Human
cugcacuguaaaa

SEQ ID NO: 1425614 - RNA, 11 nt, Human
cugcacuguaa

SEQ ID NO: 1425615 - RNA, 22 nt, Human
cugcacuggggagcccgucuca

SEQ ID NO: 1425616 - RNA, 16 nt, Human
cugcacuggggagccc

SEQ ID NO: 1425617 - RNA, 22 nt, Human
cugcacucccaccugacacacc

SEQ ID NO: 1425618 - RNA, 19 nt, Human
cugcacucccaccugacac

SEQ ID NO: 1425619 - RNA, 18 nt, Human
cugcacucccaccugaca

SEQ ID NO: 1425620 - RNA, 16 nt, Human
cugcacucccaccuga

SEQ ID NO: 1425621 - RNA, 20 nt, Human
cugcacuccagucuggguga

SEQ ID NO: 1425622 - RNA, 23 nt, Human
cugaggccagccuggccuccugc

SEQ ID NO: 1425623 - RNA, 23 nt, Human
cugcagggggugugucugcucag

SEQ ID NO: 1425624 - RNA, 20 nt, Human
cugcagggggugugucugcu

SEQ ID NO: 1425625 - RNA, 17 nt, Human
cugcagggggugugucu

SEQ ID NO: 1425626 - RNA, 17 nt, Human
cugcagcaauaaagcag

SEQ ID NO: 1425627 - RNA, 11 nt, Human
cugcagguccc

SEQ ID NO: 1425628 - RNA, 12 nt, Human
cugcaggucccu

SEQ ID NO: 1425629 - RNA, 13 nt, Human
cugcaggucccua

SEQ ID NO: 1425630 - RNA, 14 nt, Human
cugcaggucccuaa

SEQ ID NO: 1425631 - RNA, 15 nt, Human
cugcaggucccuaau

SEQ ID NO: 1425632 - RNA, 16 nt, Human
cugcaggucccuaaua

SEQ ID NO: 1425633 - RNA, 17 nt, Human
cugcaggucccuaauaa

SEQ ID NO: 1425634 - RNA, 18 nt, Human
cugcaggucccuaauaaa

SEQ ID NO: 1425635 - RNA, 21 nt, Human
cugcaguucgacucugugcug

SEQ ID NO: 1425636 - RNA, 20 nt, Human
cugcaguucgacucugugcu

SEQ ID NO: 1425637 - RNA, 17 nt, Human
cugcaguucgacucugu

SEQ ID NO: 1425638 - RNA, 15 nt, Human
cugcaguucgacucu

SEQ ID NO: 1425639 - RNA, 23 nt, Human
cugcagucccagcggugggaccu

SEQ ID NO: 1425640 - RNA, 13 nt, Human
cugcaguccugga

SEQ ID NO: 1425641 - RNA, 17 nt, Human
cugcagucucuauacca

SEQ ID NO: 1425642 - RNA, 13 nt, Human
cugcagucacagc

SEQ ID NO: 1425643 - RNA, 14 nt, Human
cugcagucacagcu

SEQ ID NO: 1425644 - RNA, 21 nt, Human
cugcagucucuauaccaauaa

SEQ ID NO: 1425645 - RNA, 23 nt, Human
cugcagucucuauaccaauaaag

SEQ ID NO: 1425646 - RNA, 19 nt, Human
cugcaggucccuaauaaag

SEQ ID NO: 1425647 - RNA, 20 nt, Human
cugcaggucccuaauaaagc

SEQ ID NO: 1425648 - RNA, 21 nt, Human
cugcaggucccuaauaaagcu

SEQ ID NO: 1425649 - RNA, 22 nt, Human
cugcaggucccuaauaaagcug

SEQ ID NO: 1425650 - RNA, 17 nt, Human
cugcaguaaaucuuuua

SEQ ID NO: 1425651 - RNA, 14 nt, Human
cugcaguaaaucuu

SEQ ID NO: 1425652 - RNA, 23 nt, Human
cugcaggucccuaauaaagcugu

SEQ ID NO: 1425653 - RNA, 14 nt, Human
cuggccuggacugu

SEQ ID NO: 1425654 - RNA, 20 nt, Human
cuggccccaggaccuggcug

SEQ ID NO: 1425655 - RNA, 16 nt, Human
cuggccccaggaccug

SEQ ID NO: 1425656 - RNA, 18 nt, Human
cuggccaguccaggcugc

SEQ ID NO: 1425657 - RNA, 17 nt, Human
cuggccaguccaggcug

SEQ ID NO: 1425658 - RNA, 16 nt, Human
cuggccaguccaggcu

SEQ ID NO: 1425659 - RNA, 15 nt, Human
cuggccaguccaggc

SEQ ID NO: 1425660 - RNA, 23 nt, Human
cuggccagggccacgcuccagcu

SEQ ID NO: 1425661 - RNA, 22 nt, Human
cuggccagggccacgcuccagc

SEQ ID NO: 1425662 - RNA, 20 nt, Human
cuggccagggccacgcucca

SEQ ID NO: 1425663 - RNA, 18 nt, Human
cuggccagggccacgcuc

SEQ ID NO: 1425664 - RNA, 17 nt, Human
cuggccagggccacgcu

SEQ ID NO: 1425665 - RNA, 14 nt, Human
cuggccagggccac

SEQ ID NO: 1425666 - RNA, 13 nt, Human
cuggccagggcca

SEQ ID NO: 1425667 - RNA, 23 nt, Human
cuggccagcgagcgcccagcucc

SEQ ID NO: 1425668 - RNA, 20 nt, Human
cuggccagcgagcgcccagc

SEQ ID NO: 1425669 - RNA, 12 nt, Human
cuggccagcgag

SEQ ID NO: 1425670 - RNA, 14 nt, Human
cuggccucccaaau

SEQ ID NO: 1425671 - RNA, 19 nt, Human
cuggcccccucccuggaug

SEQ ID NO: 1425672 - RNA, 22 nt, Human
cuggccucacccaccccugcac

SEQ ID NO: 1425673 - RNA, 18 nt, Human
cuggcccccucccuggau

SEQ ID NO: 1425674 - RNA, 17 nt, Human
cuggcccccucccugga

SEQ ID NO: 1425675 - RNA, 16 nt, Human
cuggccucccaaauga

SEQ ID NO: 1425676 - RNA, 17 nt, Human
cuggccccauggucagc

SEQ ID NO: 1425677 - RNA, 21 nt, Human
cuggccccaggaccuggcugc

SEQ ID NO: 1425678 - RNA, 16 nt, Human
cuggcccccucccugg

SEQ ID NO: 1425679 - RNA, 15 nt, Human
cuggcccccucccug

SEQ ID NO: 1425680 - RNA, 13 nt, Human
cuggcccccuccc

SEQ ID NO: 1425681 - RNA, 22 nt, Human
cuggccccccugguccccuccu

SEQ ID NO: 1425682 - RNA, 19 nt, Human
cuggccccccugguccccu

SEQ ID NO: 1425683 - RNA, 13 nt, Human
cuggccccccugg

SEQ ID NO: 1425684 - RNA, 16 nt, Human
cuggcauuacagcugg

SEQ ID NO: 1425685 - RNA, 15 nt, Human
cuggcauuacagcug

SEQ ID NO: 1425686 - RNA, 22 nt, Human
cuggccaagcugaggugcccag

SEQ ID NO: 1425687 - RNA, 23 nt, Human
cuggccaagcugaggugcccagg

SEQ ID NO: 1425688 - RNA, 21 nt, Human
cuggccaagcugaggugccca

SEQ ID NO: 1425689 - RNA, 19 nt, Human
cuggccaagcugaggugcc

SEQ ID NO: 1425690 - RNA, 19 nt, Human
cuggcauuagaauuauuua

SEQ ID NO: 1425691 - RNA, 18 nt, Human
cuggcaugucaacagcgu

SEQ ID NO: 1425692 - RNA, 18 nt, Human
cuggcauuagaauuauuu

SEQ ID NO: 1425693 - RNA, 23 nt, Human
cuggcauuacaggugugagccac

SEQ ID NO: 1425694 - RNA, 15 nt, Human
cuggcacagccuggc

SEQ ID NO: 1425695 - RNA, 20 nt, Human
cuggcaaggacuuuguacau

SEQ ID NO: 1425696 - RNA, 19 nt, Human
cuggcaaggacuuuguaca

SEQ ID NO: 1425697 - RNA, 21 nt, Human
cuggcacagccuggcuguggc

SEQ ID NO: 1425698 - RNA, 16 nt, Human
cuggcacagccuggcu

SEQ ID NO: 1425699 - RNA, 23 nt, Human
cuggcacagccuggcuguggccu

SEQ ID NO: 1425700 - RNA, 17 nt, Human
cuggcaacaucuuuauc

SEQ ID NO: 1425701 - RNA, 14 nt, Human
cuggcaacaucuuu

SEQ ID NO: 1425702 - RNA, 16 nt, Human
cuggcaacacagaggc

SEQ ID NO: 1425703 - RNA, 15 nt, Human
cuggcaacacagagg

SEQ ID NO: 1425704 - RNA, 24 nt, Human
cuggaaugaguugaggccacugug

SEQ ID NO: 1425705 - RNA, 19 nt, Human
cuggaaugaguugaggcca

SEQ ID NO: 1425706 - RNA, 20 nt, Human
cuggaagugcuaauuuugaa

SEQ ID NO: 1425707 - RNA, 18 nt, Human
cuggaauauauaaccagu

SEQ ID NO: 1425708 - RNA, 20 nt, Human
cuggaaucagcucaggacug

SEQ ID NO: 1425709 - RNA, 23 nt, Human
cuggaaucaggaauauuuuccaa

SEQ ID NO: 1425710 - RNA, 18 nt, Human
cuggaauacaugaaauau

SEQ ID NO: 1425711 - RNA, 17 nt, Human
cuggcuggcugagggca

SEQ ID NO: 1425712 - RNA, 15 nt, Human
cuggcuggcugaggg

SEQ ID NO: 1425713 - RNA, 14 nt, Human
cuggcuggcugagg

SEQ ID NO: 1425714 - RNA, 11 nt, Human
cuggcuggcug

SEQ ID NO: 1425715 - RNA, 13 nt, Human
cuggcuggccuca

SEQ ID NO: 1425716 - RNA, 17 nt, Human
cuggcuggccucaccca

SEQ ID NO: 1425717 - RNA, 22 nt, Human
cuggcgacacguagcagcuuag

SEQ ID NO: 1425718 - RNA, 21 nt, Human
cuggccuuuuucauuuaucua

SEQ ID NO: 1425719 - RNA, 20 nt, Human
cuggccuuuuucauuuaucu

SEQ ID NO: 1425720 - RNA, 19 nt, Human
cuggccuuuuucauuuauc

SEQ ID NO: 1425721 - RNA, 17 nt, Human
cuggccuuuuucauuua

SEQ ID NO: 1425722 - RNA, 20 nt, Human
cuggcuguaaggcucuagau

SEQ ID NO: 1425723 - RNA, 19 nt, Human
cuggcuguaaggcucuaga

SEQ ID NO: 1425724 - RNA, 18 nt, Human
cuggcuguggccuaaccu

SEQ ID NO: 1425725 - RNA, 18 nt, Human
cuggcugguagagcaggu

SEQ ID NO: 1425726 - RNA, 17 nt, Human
cuggcugguagagcagg

SEQ ID NO: 1425727 - RNA, 16 nt, Human
cuggcuggcugagggc

SEQ ID NO: 1425728 - RNA, 23 nt, Human
cuggcugggacguggcucagcca

SEQ ID NO: 1425729 - RNA, 21 nt, Human
cuggcugggacguggcucagc

SEQ ID NO: 1425730 - RNA, 19 nt, Human
cuggcugggacguggcuca

SEQ ID NO: 1425731 - RNA, 16 nt, Human
cuggcugggacguggc

SEQ ID NO: 1425732 - RNA, 12 nt, Human
cuggcugggacg

SEQ ID NO: 1425733 - RNA, 17 nt, Human
cuggcuguaaggcucua

SEQ ID NO: 1425734 - RNA, 16 nt, Human
cuggcuguaaggcucu

SEQ ID NO: 1425735 - RNA, 15 nt, Human
cuggcuguaaggcuc

SEQ ID NO: 1425736 - RNA, 22 nt, Human
cuggcugguguuaacagaaggg

SEQ ID NO: 1425737 - RNA, 21 nt, Human
cuggcugguguuaacagaagg

SEQ ID NO: 1425738 - RNA, 18 nt, Human
cuggcugguguuaacaga

SEQ ID NO: 1425739 - RNA, 16 nt, Human
cuggcugguguuaaca

SEQ ID NO: 1425740 - RNA, 12 nt, Human
cuggcugguguu

SEQ ID NO: 1425741 - RNA, 13 nt, Human
cugggagaggcag

SEQ ID NO: 1425742 - RNA, 16 nt, Human
cugggaaagccccugc

SEQ ID NO: 1425743 - RNA, 18 nt, Human
cugggaaagccccugccc

SEQ ID NO: 1425744 - RNA, 20 nt, Human
cugggaaagggauuuucagc

SEQ ID NO: 1425745 - RNA, 22 nt, Human
cugggaaaaacuuuggaaccag

SEQ ID NO: 1425746 - RNA, 23 nt, Human
cugggaaaaacuuuggaaccaga

SEQ ID NO: 1425747 - RNA, 23 nt, Human
cuggcuuuuauuaaugcacuuuc

SEQ ID NO: 1425748 - RNA, 22 nt, Human
cuggcuuuuauuaaugcacuuu

SEQ ID NO: 1425749 - RNA, 14 nt, Human
cuggcuuuuauuaa

SEQ ID NO: 1425750 - RNA, 23 nt, Human
cuggcuuucauuuucucucaggu

SEQ ID NO: 1425751 - RNA, 22 nt, Human
cuggcuuucauuuucucucagg

SEQ ID NO: 1425752 - RNA, 21 nt, Human
cuggcuuucauuuucucucag

SEQ ID NO: 1425753 - RNA, 23 nt, Human
cuggcuugggacuaaaugcccug

SEQ ID NO: 1425754 - RNA, 16 nt, Human
cuggcuugggcagcau

SEQ ID NO: 1425755 - RNA, 20 nt, Human
cuggcuuggccacagccagg

SEQ ID NO: 1425756 - RNA, 18 nt, Human
cuggcuuggccacagcca

SEQ ID NO: 1425757 - RNA, 22 nt, Human
cugggagucacacaguguugga

SEQ ID NO: 1425758 - RNA, 17 nt, Human
cugggagucacacagug

SEQ ID NO: 1425759 - RNA, 16 nt, Human
cugggagucacacagu

SEQ ID NO: 1425760 - RNA, 19 nt, Human
cugggccuauggagagccc

SEQ ID NO: 1425761 - RNA, 18 nt, Human
cugggccuauggagagcc

SEQ ID NO: 1425762 - RNA, 17 nt, Human
cugggccuauggagagc

SEQ ID NO: 1425763 - RNA, 16 nt, Human
cugggccuauggagag

SEQ ID NO: 1425764 - RNA, 12 nt, Human
cugggccuaugg

SEQ ID NO: 1425765 - RNA, 16 nt, Human
cugggccgcugccacg

SEQ ID NO: 1425766 - RNA, 15 nt, Human
cugggccgcugccac

SEQ ID NO: 1425767 - RNA, 22 nt, Human
cugggcccuggggccuguacug

SEQ ID NO: 1425768 - RNA, 20 nt, Human
cugggcccuggggccuguac

SEQ ID NO: 1425769 - RNA, 18 nt, Human
cugggcccuggggccugu

SEQ ID NO: 1425770 - RNA, 17 nt, Human
cugggcccuggggccug

SEQ ID NO: 1425771 - RNA, 15 nt, Human
cugggcccuggggcc

SEQ ID NO: 1425772 - RNA, 14 nt, Human
cugggcccuggggc

SEQ ID NO: 1425773 - RNA, 13 nt, Human
cugggcccugggg

SEQ ID NO: 1425774 - RNA, 12 nt, Human
cugggcccuggg

SEQ ID NO: 1425775 - RNA, 18 nt, Human
cugggcccugggcuggaa

SEQ ID NO: 1425776 - RNA, 16 nt, Human
cugggcccugggcugg

SEQ ID NO: 1425777 - RNA, 15 nt, Human
cugggcccugggcug

SEQ ID NO: 1425778 - RNA, 14 nt, Human
cugggcccugggcu

SEQ ID NO: 1425779 - RNA, 13 nt, Human
cugggcccugggc

SEQ ID NO: 1425780 - RNA, 10 nt, Human
cugggccccu

SEQ ID NO: 1425781 - RNA, 13 nt, Human
cugggcccaugaa

SEQ ID NO: 1425782 - RNA, 23 nt, Human
cugggauuacaggugugagccac

SEQ ID NO: 1425783 - RNA, 16 nt, Human
cugggagcccccagcc

SEQ ID NO: 1425784 - RNA, 19 nt, Human
cugggagauucaagggacc

SEQ ID NO: 1425785 - RNA, 15 nt, Human
cugggagauucaagg

SEQ ID NO: 1425786 - RNA, 20 nt, Human
cugggagaggcagcccagga

SEQ ID NO: 1425787 - RNA, 23 nt, Human
cugggagaggcagcccaggaagu

SEQ ID NO: 1425788 - RNA, 19 nt, Human
cugggagaggcagcccagg

SEQ ID NO: 1425789 - RNA, 18 nt, Human
cugggagaggcagcccag

SEQ ID NO: 1425790 - RNA, 15 nt, Human
cugggagaggcagcc

SEQ ID NO: 1425791 - RNA, 14 nt, Human
cugggagaggcagc

SEQ ID NO: 1425792 - RNA, 20 nt, Human
cugggagcccccagccuguc

SEQ ID NO: 1425793 - RNA, 19 nt, Human
cugggagcccccagccugu

SEQ ID NO: 1425794 - RNA, 18 nt, Human
cugggagcccccagccug

SEQ ID NO: 1425795 - RNA, 17 nt, Human
cugggagcccccagccu

SEQ ID NO: 1425796 - RNA, 22 nt, Human
cugggaggaaggacuucccugu

SEQ ID NO: 1425797 - RNA, 21 nt, Human
cugggagcccccagccuguca

SEQ ID NO: 1425798 - RNA, 21 nt, Human
cugggagcuccacucugcuuc

SEQ ID NO: 1425799 - RNA, 20 nt, Human
cugggagcuccacucugcuu

SEQ ID NO: 1425800 - RNA, 17 nt, Human
cugggagcuccacucug

SEQ ID NO: 1425801 - RNA, 16 nt, Human
cugggagcuccacucu

SEQ ID NO: 1425802 - RNA, 23 nt, Human
cugggagcccccagccugucaga

SEQ ID NO: 1425803 - RNA, 14 nt, Human
cugggaggaaggac

SEQ ID NO: 1425804 - RNA, 19 nt, Human
cugggaggagggcaggcau

SEQ ID NO: 1425805 - RNA, 14 nt, Human
cugggagucacaca

SEQ ID NO: 1425806 - RNA, 23 nt, Human
cugggaguaguugucuuuccugg

SEQ ID NO: 1425807 - RNA, 21 nt, Human
cugggaguaguugucuuuccu

SEQ ID NO: 1425808 - RNA, 22 nt, Human
cugggaggcucuggagcccacu

SEQ ID NO: 1425809 - RNA, 18 nt, Human
cugggaggcucuggagcc

SEQ ID NO: 1425810 - RNA, 20 nt, Human
cugggaggcucuggagccca

SEQ ID NO: 1425811 - RNA, 21 nt, Human
cugggaggcucuggagcccac

SEQ ID NO: 1425812 - RNA, 16 nt, Human
cuguaccaguuaauuu

SEQ ID NO: 1425813 - RNA, 12 nt, Human
cuguaccaguua

SEQ ID NO: 1425814 - RNA, 15 nt, Human
cuguacauuguggga

SEQ ID NO: 1425815 - RNA, 13 nt, Human
cuguacaguguua

SEQ ID NO: 1425816 - RNA, 21 nt, Human
cuguacagugucuuuuuuugu

SEQ ID NO: 1425817 - RNA, 13 nt, Human
cuguacccaguuu

SEQ ID NO: 1425818 - RNA, 18 nt, Human
cuguaccaguuaauuuuu

SEQ ID NO: 1425819 - RNA, 17 nt, Human
cuguaccaguuaauuuu

SEQ ID NO: 1425820 - RNA, 21 nt, Human
cuguaccucuugagccuugaa

SEQ ID NO: 1425821 - RNA, 15 nt, Human
cuguacaguguuacc

SEQ ID NO: 1425822 - RNA, 16 nt, Human
cuguacagugucuuuu

SEQ ID NO: 1425823 - RNA, 15 nt, Human
cuguacagugucuuu

SEQ ID NO: 1425824 - RNA, 14 nt, Human
cuguacagugucuu

SEQ ID NO: 1425825 - RNA, 11 nt, Human
cuguacagugu

SEQ ID NO: 1425826 - RNA, 18 nt, Human
cuguacagcuggcucuac

SEQ ID NO: 1425827 - RNA, 17 nt, Human
cuguacagcuggcucua

SEQ ID NO: 1425828 - RNA, 16 nt, Human
cuguacagcuggcucu

SEQ ID NO: 1425829 - RNA, 15 nt, Human
cuguacagcuggcuc

SEQ ID NO: 1425830 - RNA, 22 nt, Human
cuguacaugaaaacacauuuuu

SEQ ID NO: 1425831 - RNA, 23 nt, Human
cuguacaugaaaacacauuuuuc

SEQ ID NO: 1425832 - RNA, 24 nt, Human
cuguaaguugggcuugcuauucug

SEQ ID NO: 1425833 - RNA, 22 nt, Human
cuguaaguugggcuugcuauuc

SEQ ID NO: 1425834 - RNA, 21 nt, Human
cuguaaguugggcuugcuauu

SEQ ID NO: 1425835 - RNA, 22 nt, Human
cuguaauaaacucauuucuagc

SEQ ID NO: 1425836 - RNA, 21 nt, Human
cuguaauuugugauacaaugc

SEQ ID NO: 1425837 - RNA, 22 nt, Human
cuguaauuugugauacaaugcu

SEQ ID NO: 1425838 - RNA, 20 nt, Human
cuguaaguagaugcauuugg

SEQ ID NO: 1425839 - RNA, 22 nt, Human
cuguaaggcucuagaucauaag

SEQ ID NO: 1425840 - RNA, 20 nt, Human
cuguaaggcucuagaucaua

SEQ ID NO: 1425841 - RNA, 18 nt, Human
cuguaaggcucuagauca

SEQ ID NO: 1425842 - RNA, 17 nt, Human
cuguaaggcucuagauc

SEQ ID NO: 1425843 - RNA, 16 nt, Human
cuguaaggcucuagau

SEQ ID NO: 1425844 - RNA, 15 nt, Human
cuguaaggcucuaga

SEQ ID NO: 1425845 - RNA, 14 nt, Human
cuguaaggcucuag

SEQ ID NO: 1425846 - RNA, 13 nt, Human
cuguaaggcucua

SEQ ID NO: 1425847 - RNA, 18 nt, Human
cuguaauuugugauacaa

SEQ ID NO: 1425848 - RNA, 17 nt, Human
cuguaauuugugauaca

SEQ ID NO: 1425849 - RNA, 22 nt, Human
cuggugugguacagagaagcca

SEQ ID NO: 1425850 - RNA, 21 nt, Human
cuggugugguacagagaagcc

SEQ ID NO: 1425851 - RNA, 20 nt, Human
cuggugugguacagagaagc

SEQ ID NO: 1425852 - RNA, 19 nt, Human
cuggugugguacagagaag

SEQ ID NO: 1425853 - RNA, 18 nt, Human
cuggugugguacagagaa

SEQ ID NO: 1425854 - RNA, 17 nt, Human
cuggugugguacagaga

SEQ ID NO: 1425855 - RNA, 16 nt, Human
cuggugugguacagag

SEQ ID NO: 1425856 - RNA, 14 nt, Human
cuggugugguacag

SEQ ID NO: 1425857 - RNA, 15 nt, Human
cugguggcacaggag

SEQ ID NO: 1425858 - RNA, 18 nt, Human
cuggucucacccuggagg

SEQ ID NO: 1425859 - RNA, 23 nt, Human
cuggucucacccuggaggcaccu

SEQ ID NO: 1425860 - RNA, 17 nt, Human
cuggucucacccuggag

SEQ ID NO: 1425861 - RNA, 16 nt, Human
cuggucucacccugga

SEQ ID NO: 1425862 - RNA, 13 nt, Human
cuggucucacccu

SEQ ID NO: 1425863 - RNA, 23 nt, Human
cuggucucaaacuccugaccuca

SEQ ID NO: 1425864 - RNA, 14 nt, Human
cugguggcacagga

SEQ ID NO: 1425865 - RNA, 22 nt, Human
cugguuagguuaggacuugccc

SEQ ID NO: 1425866 - RNA, 19 nt, Human
cugguuaaauaaggcaggg

SEQ ID NO: 1425867 - RNA, 22 nt, Human
cugguguuaacagaagggaggg

SEQ ID NO: 1425868 - RNA, 17 nt, Human
cugguguuaacagaagg

SEQ ID NO: 1425869 - RNA, 16 nt, Human
cugguguuaacagaag

SEQ ID NO: 1425870 - RNA, 15 nt, Human
cugguguuaacagaa

SEQ ID NO: 1425871 - RNA, 14 nt, Human
cugguguuaacaga

SEQ ID NO: 1425872 - RNA, 13 nt, Human
cugguguuaacag

SEQ ID NO: 1425873 - RNA, 12 nt, Human
cugguguuaaca

SEQ ID NO: 1425874 - RNA, 23 nt, Human
cuggugugguacagagaagccag

SEQ ID NO: 1425875 - RNA, 22 nt, Human
cugguguuggacaagcuucuga

SEQ ID NO: 1425876 - RNA, 20 nt, Human
cugguguuggacaagcuucu

SEQ ID NO: 1425877 - RNA, 13 nt, Human
cugguguuucuug

SEQ ID NO: 1425878 - RNA, 14 nt, Human
cugguguuucuuga

SEQ ID NO: 1425879 - RNA, 22 nt, Human
cugguuccagggucccucugug

SEQ ID NO: 1425880 - RNA, 18 nt, Human
cugguuccagggucccuc

SEQ ID NO: 1425881 - RNA, 16 nt, Human
cugguuccaggguccc

SEQ ID NO: 1425882 - RNA, 15 nt, Human
cugguuccagggucc

SEQ ID NO: 1425883 - RNA, 14 nt, Human
cugguuccaggguc

SEQ ID NO: 1425884 - RNA, 13 nt, Human
cugguuccagggu

SEQ ID NO: 1425885 - RNA, 20 nt, Human
cugguucacacugaccaaga

SEQ ID NO: 1425886 - RNA, 21 nt, Human
cuguaaggauccggaaagaag

SEQ ID NO: 1425887 - RNA, 23 nt, Human
cugguuccagggucccucugugu

SEQ ID NO: 1425888 - RNA, 16 nt, Human
cugguuccauggccuc

SEQ ID NO: 1425889 - RNA, 18 nt, Human
cuguaaggcaaucauggu

SEQ ID NO: 1425890 - RNA, 18 nt, Human
cugguaggaccaagcauc

SEQ ID NO: 1425891 - RNA, 17 nt, Human
cugguaggaccaagcau

SEQ ID NO: 1425892 - RNA, 15 nt, Human
cugguaggaccaagc

SEQ ID NO: 1425893 - RNA, 23 nt, Human
cugguaggaauagcaugucacua

SEQ ID NO: 1425894 - RNA, 22 nt, Human
cugguaggaauagcaugucacu

SEQ ID NO: 1425895 - RNA, 20 nt, Human
cugguaggaauagcauguca

SEQ ID NO: 1425896 - RNA, 13 nt, Human
cugguagagcagg

SEQ ID NO: 1425897 - RNA, 22 nt, Human
cugguagaagggaaagcccaua

SEQ ID NO: 1425898 - RNA, 21 nt, Human
cugguagaagggaaagcccau

SEQ ID NO: 1425899 - RNA, 17 nt, Human
cugguagaagggaaagc

SEQ ID NO: 1425900 - RNA, 23 nt, Human
cuggucaccuaggaagccucaga

SEQ ID NO: 1425901 - RNA, 18 nt, Human
cuggucacggauuugugu

SEQ ID NO: 1425902 - RNA, 22 nt, Human
cuggucaccuaggaagccucag

SEQ ID NO: 1425903 - RNA, 19 nt, Human
cuggucaccuaggaagccu

SEQ ID NO: 1425904 - RNA, 18 nt, Human
cuggucaccuaggaagcc

SEQ ID NO: 1425905 - RNA, 17 nt, Human
cuggucaccuaggaagc

SEQ ID NO: 1425906 - RNA, 16 nt, Human
cuggucaccuaggaag

SEQ ID NO: 1425907 - RNA, 14 nt, Human
cuggucaccuagga

SEQ ID NO: 1425908 - RNA, 22 nt, Human
cugguccaaaagauugcugaaa

SEQ ID NO: 1425909 - RNA, 15 nt, Human
cugguccaaaagauu

SEQ ID NO: 1425910 - RNA, 22 nt, Human
cugggcuccggaggacucacca

SEQ ID NO: 1425911 - RNA, 22 nt, Human
cugggccuauggagagcccugg

SEQ ID NO: 1425912 - RNA, 23 nt, Human
cugggccuauggagagcccuggg

SEQ ID NO: 1425913 - RNA, 21 nt, Human
cugggccuauggagagcccug

SEQ ID NO: 1425914 - RNA, 20 nt, Human
cugggccuauggagagcccu

SEQ ID NO: 1425915 - RNA, 23 nt, Human
cuggguugggaucagggguagga

SEQ ID NO: 1425916 - RNA, 16 nt, Human
cuggguugggaucagg

SEQ ID NO: 1425917 - RNA, 14 nt, Human
cuggguugggauca

SEQ ID NO: 1425918 - RNA, 17 nt, Human
cugggucgcccuggacu

SEQ ID NO: 1425919 - RNA, 18 nt, Human
cugggucgcccuggacug

SEQ ID NO: 1425920 - RNA, 19 nt, Human
cugggucucaccggcucuc

SEQ ID NO: 1425921 - RNA, 23 nt, Human
cugggucucaccggcucucaccu

SEQ ID NO: 1425922 - RNA, 22 nt, Human
cugggucgcccuggacugugug

SEQ ID NO: 1425923 - RNA, 21 nt, Human
cugucccuugccucaaugcca

SEQ ID NO: 1425924 - RNA, 20 nt, Human
cugucccuugccucaaugcc

SEQ ID NO: 1425925 - RNA, 16 nt, Human
cugucccuugccucaa

SEQ ID NO: 1425926 - RNA, 15 nt, Human
cugucccuugccuca

SEQ ID NO: 1425927 - RNA, 13 nt, Human
cugucccuugccu

SEQ ID NO: 1425928 - RNA, 22 nt, Human
cugucccuugccccccuggccu

SEQ ID NO: 1425929 - RNA, 21 nt, Human
cugucccuugccccccuggcc

SEQ ID NO: 1425930 - RNA, 20 nt, Human
cugucccuugccccccuggc

SEQ ID NO: 1425931 - RNA, 18 nt, Human
cugucccuugccccccug

SEQ ID NO: 1425932 - RNA, 12 nt, Human
cugucccuccgg

SEQ ID NO: 1425933 - RNA, 15 nt, Human
cugucccucccccuu

SEQ ID NO: 1425934 - RNA, 11 nt, Human
cugucccuagg

SEQ ID NO: 1425935 - RNA, 21 nt, Human
cuguccccccacucccucaca

SEQ ID NO: 1425936 - RNA, 16 nt, Human
cuguccccccacuccc

SEQ ID NO: 1425937 - RNA, 15 nt, Human
cuguccccccacucc

SEQ ID NO: 1425938 - RNA, 13 nt, Human
cuguccccccacu

SEQ ID NO: 1425939 - RNA, 15 nt, Human
cuguccccagccugg

SEQ ID NO: 1425940 - RNA, 16 nt, Human
cuguccccagccuggg

SEQ ID NO: 1425941 - RNA, 14 nt, Human
cuguccccagccug

SEQ ID NO: 1425942 - RNA, 12 nt, Human
cuguccccagcc

SEQ ID NO: 1425943 - RNA, 17 nt, Human
cugucucucaugaaccu

SEQ ID NO: 1425944 - RNA, 13 nt, Human
cugucucucauga

SEQ ID NO: 1425945 - RNA, 20 nt, Human
cugucucucagggccaggcc

SEQ ID NO: 1425946 - RNA, 19 nt, Human
cugucucucagggccaggc

SEQ ID NO: 1425947 - RNA, 22 nt, Human
cugucucgagcgcccugcagac

SEQ ID NO: 1425948 - RNA, 23 nt, Human
cugucucgagcgcccugcagacc

SEQ ID NO: 1425949 - RNA, 21 nt, Human
cugucucgagcgcccugcaga

SEQ ID NO: 1425950 - RNA, 20 nt, Human
cugucucgagcgcccugcag

SEQ ID NO: 1425951 - RNA, 19 nt, Human
cugucucgagcgcccugca

SEQ ID NO: 1425952 - RNA, 18 nt, Human
cugucucgagcgcccugc

SEQ ID NO: 1425953 - RNA, 17 nt, Human
cugucucgagcgcccug

SEQ ID NO: 1425954 - RNA, 16 nt, Human
cugucucgagcgcccu

SEQ ID NO: 1425955 - RNA, 15 nt, Human
cugucucgagcgccc

SEQ ID NO: 1425956 - RNA, 20 nt, Human
cugucuccucucucuguaau

SEQ ID NO: 1425957 - RNA, 21 nt, Human
cugucucauccaucaucaugu

SEQ ID NO: 1425958 - RNA, 20 nt, Human
cugucucauccaucaucaug

SEQ ID NO: 1425959 - RNA, 17 nt, Human
cugucucauccaucauc

SEQ ID NO: 1425960 - RNA, 16 nt, Human
cugucucauccaucau

SEQ ID NO: 1425961 - RNA, 15 nt, Human
cugucucauccauca

SEQ ID NO: 1425962 - RNA, 12 nt, Human
cugucucaucca

SEQ ID NO: 1425963 - RNA, 13 nt, Human
cuguccucagccu

SEQ ID NO: 1425964 - RNA, 23 nt, Human
cugucccuugccccccuggccuc

SEQ ID NO: 1425965 - RNA, 12 nt, Human
cuguccagaaag

SEQ ID NO: 1425966 - RNA, 22 nt, Human
cuguccacaggcuucugagcag

SEQ ID NO: 1425967 - RNA, 17 nt, Human
cuguccacaggcuucug

SEQ ID NO: 1425968 - RNA, 16 nt, Human
cugucccacccccacc

SEQ ID NO: 1425969 - RNA, 14 nt, Human
cugucccaccccca

SEQ ID NO: 1425970 - RNA, 19 nt, Human
cuguauuuuaaaagaauga

SEQ ID NO: 1425971 - RNA, 15 nt, Human
cuguccaaacugccu

SEQ ID NO: 1425972 - RNA, 20 nt, Human
cuguccaaacugccuaagcc

SEQ ID NO: 1425973 - RNA, 19 nt, Human
cuguauuuguucccaagag

SEQ ID NO: 1425974 - RNA, 18 nt, Human
cuguauuuguucccaaga

SEQ ID NO: 1425975 - RNA, 17 nt, Human
cuguauuuguucccaag

SEQ ID NO: 1425976 - RNA, 16 nt, Human
cuguauuuguucccaa

SEQ ID NO: 1425977 - RNA, 15 nt, Human
cuguauuuguuccca

SEQ ID NO: 1425978 - RNA, 16 nt, Human
cuguauuuuaaaagaa

SEQ ID NO: 1425979 - RNA, 13 nt, Human
cuguauuuuaaaa

SEQ ID NO: 1425980 - RNA, 18 nt, Human
cuguauuugaaucagccu

SEQ ID NO: 1425981 - RNA, 22 nt, Human
cuguauuugaaauaagaauuca

SEQ ID NO: 1425982 - RNA, 18 nt, Human
cuguauuugaaauaagaa

SEQ ID NO: 1425983 - RNA, 15 nt, Human
cuguauuaagccacu

SEQ ID NO: 1425984 - RNA, 16 nt, Human
cuguauguucaacuag

SEQ ID NO: 1425985 - RNA, 13 nt, Human
cuguauauacuuu

SEQ ID NO: 1425986 - RNA, 15 nt, Human
cuguaugauucccag

SEQ ID NO: 1425987 - RNA, 20 nt, Human
cuguaccuuuugaggagccc

SEQ ID NO: 1425988 - RNA, 14 nt, Human
cuguaccugagagg

SEQ ID NO: 1425989 - RNA, 22 nt, Human
cuguaccucuugagccuugaac

SEQ ID NO: 1425990 - RNA, 20 nt, Human
cuguauagcugcuuccagug

SEQ ID NO: 1425991 - RNA, 22 nt, Human
cuguaccuuuugaggagcccca

SEQ ID NO: 1425992 - RNA, 19 nt, Human
cuugcacgaccgccccagu

SEQ ID NO: 1425993 - RNA, 20 nt, Human
cuugcacgaccgccccaguu

SEQ ID NO: 1425994 - RNA, 22 nt, Human
cuugagugggguuaucucugug

SEQ ID NO: 1425995 - RNA, 23 nt, Human
cuugagugggguuaucucugugu

SEQ ID NO: 1425996 - RNA, 21 nt, Human
cuugagugggguuaucucugu

SEQ ID NO: 1425997 - RNA, 16 nt, Human
cuugaggucucagccc

SEQ ID NO: 1425998 - RNA, 16 nt, Human
cuugagugcucaguag

SEQ ID NO: 1425999 - RNA, 22 nt, Human
cuugcaaaguaucccuacugua

SEQ ID NO: 1426000 - RNA, 23 nt, Human
cuugcaggaaggacuaugaaaag

SEQ ID NO: 1426001 - RNA, 16 nt, Human
cuugagcaguggcugg

SEQ ID NO: 1426002 - RNA, 14 nt, Human
cuugagcaguggcu

SEQ ID NO: 1426003 - RNA, 13 nt, Human
cuugagcaguggc

SEQ ID NO: 1426004 - RNA, 21 nt, Human
cuugaccaggcugccucccuu

SEQ ID NO: 1426005 - RNA, 16 nt, Human
cuugagccaguaauug

SEQ ID NO: 1426006 - RNA, 13 nt, Human
cuugagccaguaa

SEQ ID NO: 1426007 - RNA, 22 nt, Human
cuugagcauguuacugacagag

SEQ ID NO: 1426008 - RNA, 16 nt, Human
cuugagcauguuacug

SEQ ID NO: 1426009 - RNA, 21 nt, Human
cuugagcaguggcugguccag

SEQ ID NO: 1426010 - RNA, 19 nt, Human
cuugagccuugaacuuuga

SEQ ID NO: 1426011 - RNA, 12 nt, Human
cuugaggacaca

SEQ ID NO: 1426012 - RNA, 13 nt, Human
cuugaggacacau

SEQ ID NO: 1426013 - RNA, 14 nt, Human
cuugaggacacaug

SEQ ID NO: 1426014 - RNA, 15 nt, Human
cuugaggacacaugu

SEQ ID NO: 1426015 - RNA, 16 nt, Human
cuugaggacacauguc

SEQ ID NO: 1426016 - RNA, 20 nt, Human
cuugagccuugaacuuugac

SEQ ID NO: 1426017 - RNA, 22 nt, Human
cuugagccuugaacuuugaccu

SEQ ID NO: 1426018 - RNA, 18 nt, Human
cuugaggucucagccccu

SEQ ID NO: 1426019 - RNA, 18 nt, Human
cuugagggcaagagccac

SEQ ID NO: 1426020 - RNA, 17 nt, Human
cuugaggacacaugucc

SEQ ID NO: 1426021 - RNA, 18 nt, Human
cuugaggacacaugucca

SEQ ID NO: 1426022 - RNA, 14 nt, Human
cuucuuuugcucuu

SEQ ID NO: 1426023 - RNA, 13 nt, Human
cuucuuuugcucu

SEQ ID NO: 1426024 - RNA, 19 nt, Human
cuucuuuuaaaccauuuuc

SEQ ID NO: 1426025 - RNA, 21 nt, Human
cuugaaauuaagaaggcaaaa

SEQ ID NO: 1426026 - RNA, 19 nt, Human
cuugaaauauccugcuuga

SEQ ID NO: 1426027 - RNA, 18 nt, Human
cuugaaauauccugcuug

SEQ ID NO: 1426028 - RNA, 19 nt, Human
cuugaaauauaggaacuua

SEQ ID NO: 1426029 - RNA, 19 nt, Human
cuucuuuuuucaaaagaaa

SEQ ID NO: 1426030 - RNA, 20 nt, Human
cuucuuuuuucaaaagaaag

SEQ ID NO: 1426031 - RNA, 16 nt, Human
cuucuuucuagaaaga

SEQ ID NO: 1426032 - RNA, 21 nt, Human
cuucuuucuuugggaauauuu

SEQ ID NO: 1426033 - RNA, 17 nt, Human
cuucuuucauuucuucu

SEQ ID NO: 1426034 - RNA, 19 nt, Human
cuucuuuccacagaagcuc

SEQ ID NO: 1426035 - RNA, 13 nt, Human
cuucuuuccacag

SEQ ID NO: 1426036 - RNA, 14 nt, Human
cuugaaauuuuaac

SEQ ID NO: 1426037 - RNA, 13 nt, Human
cuugaaauuuuaa

SEQ ID NO: 1426038 - RNA, 20 nt, Human
cuugaaauuaagaaggcaaa

SEQ ID NO: 1426039 - RNA, 13 nt, Human
cuugaccaggcug

SEQ ID NO: 1426040 - RNA, 14 nt, Human
cuugaacugauuca

SEQ ID NO: 1426041 - RNA, 15 nt, Human
cuugaacuuugaccu

SEQ ID NO: 1426042 - RNA, 21 nt, Human
cuuggauucuuuccauuugca

SEQ ID NO: 1426043 - RNA, 18 nt, Human
cuuggauucuuuccauuu

SEQ ID NO: 1426044 - RNA, 17 nt, Human
cuuggauucuuuccauu

SEQ ID NO: 1426045 - RNA, 16 nt, Human
cuuggauucuuuccau

SEQ ID NO: 1426046 - RNA, 17 nt, Human
cuuggauuccugauagu

SEQ ID NO: 1426047 - RNA, 18 nt, Human
cuuggauguaccugcccc

SEQ ID NO: 1426048 - RNA, 16 nt, Human
cuuggauacuuggauu

SEQ ID NO: 1426049 - RNA, 20 nt, Human
cuuggagcuauuuuccaggc

SEQ ID NO: 1426050 - RNA, 19 nt, Human
cuuggagcuauuuuccagg

SEQ ID NO: 1426051 - RNA, 22 nt, Human
cuuggcucgaaucucugugccu

SEQ ID NO: 1426052 - RNA, 21 nt, Human
cuuggcucgaaucucugugcc

SEQ ID NO: 1426053 - RNA, 20 nt, Human
cuuggcucgaaucucugugc

SEQ ID NO: 1426054 - RNA, 19 nt, Human
cuuggcucgaaucucugug

SEQ ID NO: 1426055 - RNA, 18 nt, Human
cuuggcucgaaucucugu

SEQ ID NO: 1426056 - RNA, 23 nt, Human
cuuggcucacacucgacaugaaa

SEQ ID NO: 1426057 - RNA, 21 nt, Human
cuugcuuucuuuguuuggcug

SEQ ID NO: 1426058 - RNA, 18 nt, Human
cuugcuuggggaacuugu

SEQ ID NO: 1426059 - RNA, 16 nt, Human
cuugcuggucuaguca

SEQ ID NO: 1426060 - RNA, 22 nt, Human
cuuggacauccuccucccaccc

SEQ ID NO: 1426061 - RNA, 21 nt, Human
cuuggacauccuccucccacc

SEQ ID NO: 1426062 - RNA, 20 nt, Human
cuuggacauccuccucccac

SEQ ID NO: 1426063 - RNA, 19 nt, Human
cuuggacauccuccuccca

SEQ ID NO: 1426064 - RNA, 17 nt, Human
cuuggacauccuccucc

SEQ ID NO: 1426065 - RNA, 16 nt, Human
cuuggacauccuccuc

SEQ ID NO: 1426066 - RNA, 15 nt, Human
cuuggacauccuccu

SEQ ID NO: 1426067 - RNA, 14 nt, Human
cuugcuuuucaugc

SEQ ID NO: 1426068 - RNA, 13 nt, Human
cuugcuuuucaug

SEQ ID NO: 1426069 - RNA, 15 nt, Human
cuugcuuuuaaaauc

SEQ ID NO: 1426070 - RNA, 13 nt, Human
cuugcuggaagac

SEQ ID NO: 1426071 - RNA, 13 nt, Human
cuugcauguaacg

SEQ ID NO: 1426072 - RNA, 14 nt, Human
cuugcauugcagag

SEQ ID NO: 1426073 - RNA, 17 nt, Human
cuugccaaauauaaaua

SEQ ID NO: 1426074 - RNA, 23 nt, Human
cuuggcuggugugguacagagaa

SEQ ID NO: 1426075 - RNA, 22 nt, Human
cuuggcuggugugguacagaga

SEQ ID NO: 1426076 - RNA, 21 nt, Human
cuuggcuggugugguacagag

SEQ ID NO: 1426077 - RNA, 20 nt, Human
cuuggcuggugugguacaga

SEQ ID NO: 1426078 - RNA, 14 nt, Human
cuuggcuggugugg

SEQ ID NO: 1426079 - RNA, 13 nt, Human
cuuggcuggugug

SEQ ID NO: 1426080 - RNA, 12 nt, Human
cuuggcuggugu

SEQ ID NO: 1426081 - RNA, 13 nt, Human
cuuggcugcagga

SEQ ID NO: 1426082 - RNA, 21 nt, Human
cuuggggauucuuccaucuga

SEQ ID NO: 1426083 - RNA, 19 nt, Human
cuuggggauucuuccaucu

SEQ ID NO: 1426084 - RNA, 21 nt, Human
cuuggggaguuuagggugggg

SEQ ID NO: 1426085 - RNA, 20 nt, Human
cuuggggaguuuaggguggg

SEQ ID NO: 1426086 - RNA, 23 nt, Human
cuuggggaguuaagaccuggcag

SEQ ID NO: 1426087 - RNA, 22 nt, Human
cuuggggaguuaagaccuggca

SEQ ID NO: 1426088 - RNA, 20 nt, Human
cuugguuuuuacugcucuga

SEQ ID NO: 1426089 - RNA, 21 nt, Human
cuugguuuugcuacauaauua

SEQ ID NO: 1426090 - RNA, 22 nt, Human
cuugguuuuuacugcucugaga

SEQ ID NO: 1426091 - RNA, 21 nt, Human
cuugguuuuuacugcucugag

SEQ ID NO: 1426092 - RNA, 12 nt, Human
cuuguaaauaua

SEQ ID NO: 1426093 - RNA, 23 nt, Human
cuugguuuuuacugcucugagaa

SEQ ID NO: 1426094 - RNA, 18 nt, Human
cuuguaaaggaauuuaaa

SEQ ID NO: 1426095 - RNA, 20 nt, Human
cuugucaggaguguguguga

SEQ ID NO: 1426096 - RNA, 21 nt, Human
cuugucaggagugugugugag

SEQ ID NO: 1426097 - RNA, 17 nt, Human
cuugucaggagugugug

SEQ ID NO: 1426098 - RNA, 22 nt, Human
cuugucacugguagaccaaaau

SEQ ID NO: 1426099 - RNA, 23 nt, Human
cuugucacugguagaccaaaaua

SEQ ID NO: 1426100 - RNA, 15 nt, Human
cuugucacugguaga

SEQ ID NO: 1426101 - RNA, 23 nt, Human
cuugucacgccagacuucccacg

SEQ ID NO: 1426102 - RNA, 18 nt, Human
cuuguauuauguguguuu

SEQ ID NO: 1426103 - RNA, 19 nt, Human
cuuguaaauauaaagacgu

SEQ ID NO: 1426104 - RNA, 22 nt, Human
cuuguaacuaaaauaauuuugu

SEQ ID NO: 1426105 - RNA, 17 nt, Human
cuuguaacuaaaauaau

SEQ ID NO: 1426106 - RNA, 16 nt, Human
cuuguaacuaaaauaa

SEQ ID NO: 1426107 - RNA, 14 nt, Human
cuuguaacuaaaau

SEQ ID NO: 1426108 - RNA, 23 nt, Human
cuuguaaauuauuaauuuaugca

SEQ ID NO: 1426109 - RNA, 17 nt, Human
cuuguaaauauaaagac

SEQ ID NO: 1426110 - RNA, 16 nt, Human
cuuguaaauauaaaga

SEQ ID NO: 1426111 - RNA, 14 nt, Human
cuuguaaauauaaa

SEQ ID NO: 1426112 - RNA, 13 nt, Human
cuuguaaauauaa

SEQ ID NO: 1426113 - RNA, 18 nt, Human
cuuguauccccugcaggc

SEQ ID NO: 1426114 - RNA, 13 nt, Human
cuuguauuaugug

SEQ ID NO: 1426115 - RNA, 22 nt, Human
cuuuccacggagccacuccucu

SEQ ID NO: 1426116 - RNA, 21 nt, Human
cuuuccacggagccacuccuc

SEQ ID NO: 1426117 - RNA, 18 nt, Human
cuuucauuccuucagauu

SEQ ID NO: 1426118 - RNA, 16 nt, Human
cuuuccaaaguacacu

SEQ ID NO: 1426119 - RNA, 22 nt, Human
cuuuccaaaguacacuguuuca

SEQ ID NO: 1426120 - RNA, 23 nt, Human
cuuucccuuguagcuccuccccu

SEQ ID NO: 1426121 - RNA, 21 nt, Human
cuuucccuuguagcuccuccc

SEQ ID NO: 1426122 - RNA, 19 nt, Human
cuuuccccaccagaugcug

SEQ ID NO: 1426123 - RNA, 22 nt, Human
cuuuccccaccagaugcugaaa

SEQ ID NO: 1426124 - RNA, 18 nt, Human
cuuuccccaccagaugcu

SEQ ID NO: 1426125 - RNA, 17 nt, Human
cuuucccauggggaggg

SEQ ID NO: 1426126 - RNA, 21 nt, Human
cuuucauguaaacugugcacc

SEQ ID NO: 1426127 - RNA, 20 nt, Human
cuuucauguaaacugugcac

SEQ ID NO: 1426128 - RNA, 19 nt, Human
cuuucauguaaacugugca

SEQ ID NO: 1426129 - RNA, 17 nt, Human
cuuucauguaaacugug

SEQ ID NO: 1426130 - RNA, 23 nt, Human
cuuucaagcagucgugccugugu

SEQ ID NO: 1426131 - RNA, 22 nt, Human
cuuucaagcagucgugccugug

SEQ ID NO: 1426132 - RNA, 20 nt, Human
cuuucaagcagucgugccug

SEQ ID NO: 1426133 - RNA, 19 nt, Human
cuuucaagcagucgugccu

SEQ ID NO: 1426134 - RNA, 19 nt, Human
cuuucaaaaccuuuugaaa

SEQ ID NO: 1426135 - RNA, 11 nt, Human
cuuuauuuuga

SEQ ID NO: 1426136 - RNA, 21 nt, Human
cuuguguguaugcacaugaac

SEQ ID NO: 1426137 - RNA, 20 nt, Human
cuuguguguaugcacaugaa

SEQ ID NO: 1426138 - RNA, 21 nt, Human
cuugugucucugugcuuuuaa

SEQ ID NO: 1426139 - RNA, 18 nt, Human
cuugugucucugugcuuu

SEQ ID NO: 1426140 - RNA, 17 nt, Human
cuugugucucugugcuu

SEQ ID NO: 1426141 - RNA, 14 nt, Human
cuugucaugugaca

SEQ ID NO: 1426142 - RNA, 13 nt, Human
cuuuauuuugaga

SEQ ID NO: 1426143 - RNA, 22 nt, Human
cuuguguguaugcacaugaacu

SEQ ID NO: 1426144 - RNA, 19 nt, Human
cuuuauuuuguguuuagga

SEQ ID NO: 1426145 - RNA, 16 nt, Human
cuuugaauguguuuca

SEQ ID NO: 1426146 - RNA, 14 nt, Human
cuuugaauguguuu

SEQ ID NO: 1426147 - RNA, 16 nt, Human
cuuugaaugcggccca

SEQ ID NO: 1426148 - RNA, 23 nt, Human
cuuugaauccucucucuguguua

SEQ ID NO: 1426149 - RNA, 19 nt, Human
cuuugaauccucucucugu

SEQ ID NO: 1426150 - RNA, 18 nt, Human
cuuugaauccucucucug

SEQ ID NO: 1426151 - RNA, 19 nt, Human
cuuugaauaaaugucacuu

SEQ ID NO: 1426152 - RNA, 18 nt, Human
cuuugaauaaaugucacu

SEQ ID NO: 1426153 - RNA, 16 nt, Human
cuuugaauaaauguca

SEQ ID NO: 1426154 - RNA, 14 nt, Human
cuuugaauaaaugu

SEQ ID NO: 1426155 - RNA, 12 nt, Human
cuuugaauaaau

SEQ ID NO: 1426156 - RNA, 21 nt, Human
cuuugaaguuagcuuuaacuu

SEQ ID NO: 1426157 - RNA, 11 nt, Human
cuuugaauaaa

SEQ ID NO: 1426158 - RNA, 16 nt, Human
cuuugaagucauacca

SEQ ID NO: 1426159 - RNA, 17 nt, Human
cuuugaaguagcucuuu

SEQ ID NO: 1426160 - RNA, 13 nt, Human
cuuugaaguagcu

SEQ ID NO: 1426161 - RNA, 18 nt, Human
cuuugaaggggccucacc

SEQ ID NO: 1426162 - RNA, 18 nt, Human
cuuugaauguguuucaca

SEQ ID NO: 1426163 - RNA, 23 nt, Human
cuuugaauguguuucacaguuug

SEQ ID NO: 1426164 - RNA, 24 nt, Human
cuuuggaaaguacacucugcuguu

SEQ ID NO: 1426165 - RNA, 23 nt, Human
cuuuggaaaguacacucugcugu

SEQ ID NO: 1426166 - RNA, 22 nt, Human
cuuuggaaaguacacucugcug

SEQ ID NO: 1426167 - RNA, 11 nt, Human
cuuugccucaa

SEQ ID NO: 1426168 - RNA, 16 nt, Human
cuuugcccuucuuucu

SEQ ID NO: 1426169 - RNA, 19 nt, Human
cuuugcccuucuuucuacc

SEQ ID NO: 1426170 - RNA, 18 nt, Human
cuuugcccaguuggagac

SEQ ID NO: 1426171 - RNA, 15 nt, Human
cuuugcccagaaaga

SEQ ID NO: 1426172 - RNA, 14 nt, Human
cuuugcccacaaug

SEQ ID NO: 1426173 - RNA, 22 nt, Human
cuuugccaggugacugucuggg

SEQ ID NO: 1426174 - RNA, 21 nt, Human
cuuugccaggugacugucugg

SEQ ID NO: 1426175 - RNA, 16 nt, Human
cuuugcacugauauau

SEQ ID NO: 1426176 - RNA, 13 nt, Human
cuuugccagguga

SEQ ID NO: 1426177 - RNA, 21 nt, Human
cuuugccacccucaugcugug

SEQ ID NO: 1426178 - RNA, 23 nt, Human
cuuucuguuccaaauucaguuuc

SEQ ID NO: 1426179 - RNA, 11 nt, Human
cuuucuuagaa

SEQ ID NO: 1426180 - RNA, 13 nt, Human
cuuucuuagaaau

SEQ ID NO: 1426181 - RNA, 14 nt, Human
cuuucuuagaaauu

SEQ ID NO: 1426182 - RNA, 22 nt, Human
cuuucuuccaaacaggcucaga

SEQ ID NO: 1426183 - RNA, 19 nt, Human
cuuucuuccaaacaggcuc

SEQ ID NO: 1426184 - RNA, 13 nt, Human
cuuucuuccaaac

SEQ ID NO: 1426185 - RNA, 17 nt, Human
cuuucuuagaaauuuau

SEQ ID NO: 1426186 - RNA, 16 nt, Human
cuuugaaggggccuca

SEQ ID NO: 1426187 - RNA, 20 nt, Human
cuuugaaauugaaccuuugu

SEQ ID NO: 1426188 - RNA, 23 nt, Human
cuuugaaauugaaccuuugugcc

SEQ ID NO: 1426189 - RNA, 18 nt, Human
cuuugaaauugaaccuuu

SEQ ID NO: 1426190 - RNA, 20 nt, Human
cuuugaaauuauguaaauua

SEQ ID NO: 1426191 - RNA, 22 nt, Human
cuuucuuuucuggaauguaauc

SEQ ID NO: 1426192 - RNA, 18 nt, Human
cuuucuuuguuuggcugg

SEQ ID NO: 1426193 - RNA, 23 nt, Human
cuuucuuugggaauauuugaauc

SEQ ID NO: 1426194 - RNA, 18 nt, Human
cuuucuuugggaauauuu

SEQ ID NO: 1426195 - RNA, 20 nt, Human
cuuucuuugggaauauuuga

SEQ ID NO: 1426196 - RNA, 21 nt, Human
cuuucuuugggaauauuugaa

SEQ ID NO: 1426197 - RNA, 22 nt, Human
cuuucuuugggaauauuugaau

SEQ ID NO: 1426198 - RNA, 15 nt, Human
cuuucuuuauuuuga

SEQ ID NO: 1426199 - RNA, 13 nt, Human
cuuucuuucuuua

SEQ ID NO: 1426200 - RNA, 16 nt, Human
cuuucuuucuuagaaa

SEQ ID NO: 1426201 - RNA, 17 nt, Human
cuuucuuucuuagaaau

SEQ ID NO: 1426202 - RNA, 21 nt, Human
cuuucuuucaauaaaacgcag

SEQ ID NO: 1426203 - RNA, 15 nt, Human
cuuucuuucuuagaa

SEQ ID NO: 1426204 - RNA, 20 nt, Human
cuuuucuaacagaaagcaug

SEQ ID NO: 1426205 - RNA, 16 nt, Human
cuuuucuaacagaaag

SEQ ID NO: 1426206 - RNA, 24 nt, Human
cuuuugcaaccaggaacagcaaau

SEQ ID NO: 1426207 - RNA, 17 nt, Human
cuuuugcaaccaggaac

SEQ ID NO: 1426208 - RNA, 16 nt, Human
cuuuugcaaccaggaa

SEQ ID NO: 1426209 - RNA, 15 nt, Human
cuuuugcaaccagga

SEQ ID NO: 1426210 - RNA, 21 nt, Human
cuuuugcaaagaaagaaaaaa

SEQ ID NO: 1426211 - RNA, 20 nt, Human
cuuuugcaaagaaagaaaaa

SEQ ID NO: 1426212 - RNA, 13 nt, Human
cuuuugauauuaa

SEQ ID NO: 1426213 - RNA, 16 nt, Human
cuuuugauauuaaauu

SEQ ID NO: 1426214 - RNA, 23 nt, Human
cuuuugauaugcauauuuguuua

SEQ ID NO: 1426215 - RNA, 15 nt, Human
cuuuugauaugcaua

SEQ ID NO: 1426216 - RNA, 13 nt, Human
cuuuucuuuucuu

SEQ ID NO: 1426217 - RNA, 14 nt, Human
cuuuuuaauaugcu

SEQ ID NO: 1426218 - RNA, 21 nt, Human
cuuuuuaaauguaaagauauu

SEQ ID NO: 1426219 - RNA, 20 nt, Human
cuuuuuaaauguaaagauau

SEQ ID NO: 1426220 - RNA, 18 nt, Human
cuuuugcaacuuaauacu

SEQ ID NO: 1426221 - RNA, 16 nt, Human
cuuuuuaccuuucaua

SEQ ID NO: 1426222 - RNA, 17 nt, Human
cuuuuuaccuuucauac

SEQ ID NO: 1426223 - RNA, 15 nt, Human
cuuuuuaccuuucau

SEQ ID NO: 1426224 - RNA, 16 nt, Human
cuuuuuaauaugcuua

SEQ ID NO: 1426225 - RNA, 15 nt, Human
cuuuuuaauaugcuu

SEQ ID NO: 1426226 - RNA, 23 nt, Human
cuuuuuccaacuuggcugcagga

SEQ ID NO: 1426227 - RNA, 17 nt, Human
cuuuuuccaacaagaag

SEQ ID NO: 1426228 - RNA, 14 nt, Human
cuuuuuauauauau

SEQ ID NO: 1426229 - RNA, 23 nt, Human
cuuuuucauuuaucuauaauuua

SEQ ID NO: 1426230 - RNA, 15 nt, Human
cuuuuucauuuaucu

SEQ ID NO: 1426231 - RNA, 13 nt, Human
cuuuuucauuuau

SEQ ID NO: 1426232 - RNA, 12 nt, Human
cuuuuucauuua

SEQ ID NO: 1426233 - RNA, 20 nt, Human
cuuuuuauauauauauauaa

SEQ ID NO: 1426234 - RNA, 13 nt, Human
cuuuuuccagagg

SEQ ID NO: 1426235 - RNA, 15 nt, Human
cuuuuuuauacauaa

SEQ ID NO: 1426236 - RNA, 16 nt, Human
cuuuuuuauacauaaa

SEQ ID NO: 1426237 - RNA, 17 nt, Human
cuuuuuuauacauaaac

SEQ ID NO: 1426238 - RNA, 21 nt, Human
cuuuuucuccagcugggcucu

SEQ ID NO: 1426239 - RNA, 22 nt, Human
cuuuuuccaacucagaaauuca

SEQ ID NO: 1426240 - RNA, 18 nt, Human
cuuuuuuauacauaaaca

SEQ ID NO: 1426241 - RNA, 19 nt, Human
cuuuuuuaucaugugaaau

SEQ ID NO: 1426242 - RNA, 16 nt, Human
cuuuuuucaaaagaaa

SEQ ID NO: 1426243 - RNA, 16 nt, Human
cuuuuccucucucccg

SEQ ID NO: 1426244 - RNA, 19 nt, Human
cuuuucccuuugugaguca

SEQ ID NO: 1426245 - RNA, 20 nt, Human
cuuuuccuucccuuuucugu

SEQ ID NO: 1426246 - RNA, 22 nt, Human
cuuuuccuucccuuuucuguuc

SEQ ID NO: 1426247 - RNA, 16 nt, Human
cuuuuccuucccuuuu

SEQ ID NO: 1426248 - RNA, 15 nt, Human
cuuuuccuucccaaa

SEQ ID NO: 1426249 - RNA, 18 nt, Human
cuuuuccucucucccgga

SEQ ID NO: 1426250 - RNA, 21 nt, Human
cuuuucacauccauuuccccu

SEQ ID NO: 1426251 - RNA, 18 nt, Human
cuuuuaaugaacaaaugg

SEQ ID NO: 1426252 - RNA, 16 nt, Human
cuuuuaaugaacaaau

SEQ ID NO: 1426253 - RNA, 15 nt, Human
cuuuuaaugaacaaa

SEQ ID NO: 1426254 - RNA, 16 nt, Human
cuuuggaccuaaucca

SEQ ID NO: 1426255 - RNA, 21 nt, Human
cuuuggaccuaaauggccuca

SEQ ID NO: 1426256 - RNA, 22 nt, Human
cuuuggaaccagacucuugccu

SEQ ID NO: 1426257 - RNA, 23 nt, Human
cuuuggaaccagacucuugccug

SEQ ID NO: 1426258 - RNA, 21 nt, Human
cuuuggaaccagacucuugcc

SEQ ID NO: 1426259 - RNA, 16 nt, Human
cuuuggaaccagacuc

SEQ ID NO: 1426260 - RNA, 15 nt, Human
cuuuggaaccagacu

SEQ ID NO: 1426261 - RNA, 14 nt, Human
cuuuggaaccagac

SEQ ID NO: 1426262 - RNA, 17 nt, Human
cuuuggaccuaauccaa

SEQ ID NO: 1426263 - RNA, 12 nt, Human
cuuuggacuugu

SEQ ID NO: 1426264 - RNA, 18 nt, Human
cuuuggaguccccucacc

SEQ ID NO: 1426265 - RNA, 16 nt, Human
cuuuggaguccccuca

SEQ ID NO: 1426266 - RNA, 14 nt, Human
cuuuggaguccccu

SEQ ID NO: 1426267 - RNA, 22 nt, Human
cuuuggaguccccucaccuccu

SEQ ID NO: 1426268 - RNA, 22 nt, Human
cuuuuaacagagucugaaccua

SEQ ID NO: 1426269 - RNA, 22 nt, Human
cuuuuaacuguuguagaagaca

SEQ ID NO: 1426270 - RNA, 15 nt, Human
cuuuuaaacugugua

SEQ ID NO: 1426271 - RNA, 13 nt, Human
cuuuuaaacugug

SEQ ID NO: 1426272 - RNA, 12 nt, Human
cuuuuaaacugu

SEQ ID NO: 1426273 - RNA, 17 nt, Human
cuuuuaaaccauuuucu

SEQ ID NO: 1426274 - RNA, 15 nt, Human
cuuuuaaaagauuuu

SEQ ID NO: 1426275 - RNA, 22 nt, Human
cuuuuaaagaaaaaaauugaaa

SEQ ID NO: 1426276 - RNA, 21 nt, Human
cuuuuaaagaaaaaaauugaa

SEQ ID NO: 1426277 - RNA, 15 nt, Human
cuuuuaaagaaaaaa

SEQ ID NO: 1426278 - RNA, 23 nt, Human
cuuuuaaagaaaaaaauugaaau

SEQ ID NO: 1426279 - RNA, 22 nt, Human
cuuuuaaaugauugaauuauau

SEQ ID NO: 1426280 - RNA, 15 nt, Human
gaaacugcagggaaa

SEQ ID NO: 1426281 - RNA, 22 nt, Human
gaaacugaggaauuuucuuugu

SEQ ID NO: 1426282 - RNA, 18 nt, Human
gaaacugaggaauuuucu

SEQ ID NO: 1426283 - RNA, 20 nt, Human
gaaagcaagaaucagagaag

SEQ ID NO: 1426284 - RNA, 18 nt, Human
gaaagcaaagcacagaga

SEQ ID NO: 1426285 - RNA, 16 nt, Human
gaaagcaaagcacaga

SEQ ID NO: 1426286 - RNA, 15 nt, Human
gaaagcaaagcacag

SEQ ID NO: 1426287 - RNA, 12 nt, Human
gaaagcaaagca

SEQ ID NO: 1426288 - RNA, 16 nt, Human
gaaagagauacagagg

SEQ ID NO: 1426289 - RNA, 17 nt, Human
gaaagauaauucacugu

SEQ ID NO: 1426290 - RNA, 14 nt, Human
gaaagauaacuagg

SEQ ID NO: 1426291 - RNA, 12 nt, Human
gaaaaagaagca

SEQ ID NO: 1426292 - RNA, 15 nt, Human
gaaaaagacauucag

SEQ ID NO: 1426293 - RNA, 14 nt, Human
gaaaaagaagaauc

SEQ ID NO: 1426294 - RNA, 22 nt, Human
gaaaaacuuuggaaccagacuc

SEQ ID NO: 1426295 - RNA, 21 nt, Human
gaaaaacuuuggaaccagacu

SEQ ID NO: 1426296 - RNA, 20 nt, Human
gaaaaaucuaagugauauaa

SEQ ID NO: 1426297 - RNA, 16 nt, Human
gaaaaaucuaagugau

SEQ ID NO: 1426298 - RNA, 17 nt, Human
gaaaaauguaggagacu

SEQ ID NO: 1426299 - RNA, 14 nt, Human
gaaaaauguaggag

SEQ ID NO: 1426300 - RNA, 12 nt, Human
gaaaaauguagg

SEQ ID NO: 1426301 - RNA, 15 nt, Human
gaaaccuuccaccca

SEQ ID NO: 1426302 - RNA, 17 nt, Human
gaaaccuuccacccagu

SEQ ID NO: 1426303 - RNA, 16 nt, Human
gaaacugacacaugcu

SEQ ID NO: 1426304 - RNA, 23 nt, Human
gaaacgagacuuuccauuacaag

SEQ ID NO: 1426305 - RNA, 20 nt, Human
gaaacuaggugcauauuuau

SEQ ID NO: 1426306 - RNA, 21 nt, Human
gaaacgagacuuuccauuaca

SEQ ID NO: 1426307 - RNA, 23 nt, Human
gaaaguguauuuggaaauaaagu

SEQ ID NO: 1426308 - RNA, 15 nt, Human
gaaaguguauuugga

SEQ ID NO: 1426309 - RNA, 11 nt, Human
gaaaguguauu

SEQ ID NO: 1426310 - RNA, 18 nt, Human
gaaagugggcaaaagcuu

SEQ ID NO: 1426311 - RNA, 17 nt, Human
gaaagugggcaaaagcu

SEQ ID NO: 1426312 - RNA, 22 nt, Human
gaaagugccuuucaggaucuau

SEQ ID NO: 1426313 - RNA, 21 nt, Human
gaaagugccuuucaggaucua

SEQ ID NO: 1426314 - RNA, 17 nt, Human
gaaagugccuuucagga

SEQ ID NO: 1426315 - RNA, 23 nt, Human
gaaagucuguccuugaaggacua

SEQ ID NO: 1426316 - RNA, 16 nt, Human
gaaagucuguccuuga

SEQ ID NO: 1426317 - RNA, 15 nt, Human
gaaagucuguccuug

SEQ ID NO: 1426318 - RNA, 16 nt, Human
gaaagugccuuucagg

SEQ ID NO: 1426319 - RNA, 15 nt, Human
gaaagugccuuucag

SEQ ID NO: 1426320 - RNA, 13 nt, Human
gaaagugccugac

SEQ ID NO: 1426321 - RNA, 21 nt, Human
gaaagugauaucccccagccu

SEQ ID NO: 1426322 - RNA, 19 nt, Human
gaaauaaaaggaagccaaa

SEQ ID NO: 1426323 - RNA, 18 nt, Human
gaaauaaaaggaagccaa

SEQ ID NO: 1426324 - RNA, 17 nt, Human
gaaauaaaaggaagcca

SEQ ID NO: 1426325 - RNA, 16 nt, Human
gaaauaaaaggaagcc

SEQ ID NO: 1426326 - RNA, 23 nt, Human
gaaagccaaggagucacugagac

SEQ ID NO: 1426327 - RNA, 21 nt, Human
gaaagcauuugaaugcauuuu

SEQ ID NO: 1426328 - RNA, 18 nt, Human
gaaagcauuugaaugcau

SEQ ID NO: 1426329 - RNA, 20 nt, Human
gaaagcauuugaaugcauuu

SEQ ID NO: 1426330 - RNA, 12 nt, Human
gaaagcauuuga

SEQ ID NO: 1426331 - RNA, 14 nt, Human
gaaagcauuugaau

SEQ ID NO: 1426332 - RNA, 15 nt, Human
gaaagcauuugaaug

SEQ ID NO: 1426333 - RNA, 16 nt, Human
gaaagcauuugaaugc

SEQ ID NO: 1426334 - RNA, 17 nt, Human
gaaagcauuugaaugca

SEQ ID NO: 1426335 - RNA, 12 nt, Human
gaaaggagaugu

SEQ ID NO: 1426336 - RNA, 21 nt, Human
gaaaggaagcauuguaaaaua

SEQ ID NO: 1426337 - RNA, 23 nt, Human
gaaaggaagcauuguaaaauaau

SEQ ID NO: 1426338 - RNA, 14 nt, Human
gaaagucuguccuu

SEQ ID NO: 1426339 - RNA, 13 nt, Human
gaaagucuguccu

SEQ ID NO: 1426340 - RNA, 18 nt, Human
gaaagucauuggcuuuau

SEQ ID NO: 1426341 - RNA, 21 nt, Human
gaaagucauuggcuuuauccu

SEQ ID NO: 1426342 - RNA, 20 nt, Human
gaaagucagccauaucucca

SEQ ID NO: 1426343 - RNA, 14 nt, Human
gaaagucauuggcu

SEQ ID NO: 1426344 - RNA, 17 nt, Human
gaaagucauuggcuuua

SEQ ID NO: 1426345 - RNA, 19 nt, Human
gaacagcugguguagcuac

SEQ ID NO: 1426346 - RNA, 15 nt, Human
gaacagcugguguag

SEQ ID NO: 1426347 - RNA, 15 nt, Human
gaacagcuguaaucu

SEQ ID NO: 1426348 - RNA, 24 nt, Human
gaacagcugguguagcuacagaga

SEQ ID NO: 1426349 - RNA, 23 nt, Human
gaacagcugguguagcuacagag

SEQ ID NO: 1426350 - RNA, 22 nt, Human
gaacagcugguguagcuacaga

SEQ ID NO: 1426351 - RNA, 20 nt, Human
gaacagcugguguagcuaca

SEQ ID NO: 1426352 - RNA, 17 nt, Human
gaacaggauauucucac

SEQ ID NO: 1426353 - RNA, 21 nt, Human
gaacagggaaaauaggcagga

SEQ ID NO: 1426354 - RNA, 20 nt, Human
gaacagggaaaauaggcagg

SEQ ID NO: 1426355 - RNA, 20 nt, Human
gaacaguuguguuugaagca

SEQ ID NO: 1426356 - RNA, 24 nt, Human
gaacaguuaccucugccucagaaa

SEQ ID NO: 1426357 - RNA, 15 nt, Human
gaaccaacacuaaca

SEQ ID NO: 1426358 - RNA, 19 nt, Human
gaaccaacaaguaaauauu

SEQ ID NO: 1426359 - RNA, 24 nt, Human
gaaccaacaaccucaacugccuac

SEQ ID NO: 1426360 - RNA, 17 nt, Human
gaaccaaaucuggaagc

SEQ ID NO: 1426361 - RNA, 16 nt, Human
gaaccaaaucuggaag

SEQ ID NO: 1426362 - RNA, 19 nt, Human
gaacaugugagagguuuga

SEQ ID NO: 1426363 - RNA, 15 nt, Human
gaacauggggaggag

SEQ ID NO: 1426364 - RNA, 19 nt, Human
gaacauggccuaagggcca

SEQ ID NO: 1426365 - RNA, 18 nt, Human
gaacaucugaguccugga

SEQ ID NO: 1426366 - RNA, 21 nt, Human
gaacaucugaguccuggauga

SEQ ID NO: 1426367 - RNA, 17 nt, Human
gaacaucugaguccugg

SEQ ID NO: 1426368 - RNA, 17 nt, Human
gaacaucccuuuuucaa

SEQ ID NO: 1426369 - RNA, 22 nt, Human
gaacaguuguguuugaagcaca

SEQ ID NO: 1426370 - RNA, 21 nt, Human
gaaauuuccugggagcuuuug

SEQ ID NO: 1426371 - RNA, 19 nt, Human
gaaauuaccuguggauauu

SEQ ID NO: 1426372 - RNA, 23 nt, Human
gaaauuaguacuccccuccuuga

SEQ ID NO: 1426373 - RNA, 22 nt, Human
gaaauuaugugacauuuuacau

SEQ ID NO: 1426374 - RNA, 23 nt, Human
gaaauuaugugacauuuuacauu

SEQ ID NO: 1426375 - RNA, 12 nt, Human
gaaauuccaaag

SEQ ID NO: 1426376 - RNA, 17 nt, Human
gaaauucccuucaucug

SEQ ID NO: 1426377 - RNA, 21 nt, Human
gaaauucccuucaucuggaac

SEQ ID NO: 1426378 - RNA, 22 nt, Human
gaaauucccuucaucuggaacc

SEQ ID NO: 1426379 - RNA, 18 nt, Human
gaaauuaccuguggauau

SEQ ID NO: 1426380 - RNA, 17 nt, Human
gaaauuaccuguggaua

SEQ ID NO: 1426381 - RNA, 16 nt, Human
gaaauuaccuguggau

SEQ ID NO: 1426382 - RNA, 23 nt, Human
gaaaugugguagccucacuuuua

SEQ ID NO: 1426383 - RNA, 17 nt, Human
gaaauguacagcaagga

SEQ ID NO: 1426384 - RNA, 22 nt, Human
gaaaugaggccauggacucugu

SEQ ID NO: 1426385 - RNA, 13 nt, Human
gaaauauuuauuu

SEQ ID NO: 1426386 - RNA, 15 nt, Human
gaaaugaauuaaagu

SEQ ID NO: 1426387 - RNA, 15 nt, Human
gaaauauccugcuug

SEQ ID NO: 1426388 - RNA, 16 nt, Human
gaaauauuuauuuuaa

SEQ ID NO: 1426389 - RNA, 15 nt, Human
gaaauauuuauuuua

SEQ ID NO: 1426390 - RNA, 15 nt, Human
gaaauauauauuaua

SEQ ID NO: 1426391 - RNA, 22 nt, Human
gaaauauauauuauacuuguaa

SEQ ID NO: 1426392 - RNA, 14 nt, Human
gaaauauauauuau

SEQ ID NO: 1426393 - RNA, 13 nt, Human
gaaauauauauua

SEQ ID NO: 1426394 - RNA, 12 nt, Human
gaaauauauauu

SEQ ID NO: 1426395 - RNA, 11 nt, Human
gaaauauauau

SEQ ID NO: 1426396 - RNA, 20 nt, Human
gaaauaaaggaugugauugu

SEQ ID NO: 1426397 - RNA, 17 nt, Human
gaaauaaaggaugugau

SEQ ID NO: 1426398 - RNA, 21 nt, Human
gaaauaaacgucuuaaauauu

SEQ ID NO: 1426399 - RNA, 18 nt, Human
gaaauaaacgucuuaaau

SEQ ID NO: 1426400 - RNA, 17 nt, Human
gaaauaaacgucuuaaa

SEQ ID NO: 1426401 - RNA, 16 nt, Human
gaaauaaacgucuuaa

SEQ ID NO: 1426402 - RNA, 23 nt, Human
gaaauaaaaggaagccaaagagu

SEQ ID NO: 1426403 - RNA, 14 nt, Human
gaaauaaacgucuu

SEQ ID NO: 1426404 - RNA, 10 nt, Human
gaagccuucc

SEQ ID NO: 1426405 - RNA, 20 nt, Human
gaagccuucaagcucugagg

SEQ ID NO: 1426406 - RNA, 22 nt, Human
gaagccuucaagcucugaggga

SEQ ID NO: 1426407 - RNA, 19 nt, Human
gaagccuucaagcucugag

SEQ ID NO: 1426408 - RNA, 18 nt, Human
gaagccuucaagcucuga

SEQ ID NO: 1426409 - RNA, 17 nt, Human
gaagccuucaagcucug

SEQ ID NO: 1426410 - RNA, 16 nt, Human
gaagccuucaagcucu

SEQ ID NO: 1426411 - RNA, 21 nt, Human
gaagccugggggccuggcugg

SEQ ID NO: 1426412 - RNA, 22 nt, Human
gaagccugggggccuggcuggc

SEQ ID NO: 1426413 - RNA, 20 nt, Human
gaagccugggggccuggcug

SEQ ID NO: 1426414 - RNA, 19 nt, Human
gaagccugggggccuggcu

SEQ ID NO: 1426415 - RNA, 18 nt, Human
gaagccugggggccuggc

SEQ ID NO: 1426416 - RNA, 17 nt, Human
gaagccugggggccugg

SEQ ID NO: 1426417 - RNA, 16 nt, Human
gaagccugggggccug

SEQ ID NO: 1426418 - RNA, 13 nt, Human
gaagccugggggc

SEQ ID NO: 1426419 - RNA, 12 nt, Human
gaagccuggggg

SEQ ID NO: 1426420 - RNA, 16 nt, Human
gaagcuguugugugag

SEQ ID NO: 1426421 - RNA, 13 nt, Human
gaagcauuuguuu

SEQ ID NO: 1426422 - RNA, 19 nt, Human
gaagcauuuguuucuacuu

SEQ ID NO: 1426423 - RNA, 13 nt, Human
gaagccaaagagu

SEQ ID NO: 1426424 - RNA, 13 nt, Human
gaaggaggaccca

SEQ ID NO: 1426425 - RNA, 14 nt, Human
gaaggaggacccag

SEQ ID NO: 1426426 - RNA, 15 nt, Human
gaaggaggacccagg

SEQ ID NO: 1426427 - RNA, 16 nt, Human
gaaggaggacccagga

SEQ ID NO: 1426428 - RNA, 17 nt, Human
gaaggaggacccaggac

SEQ ID NO: 1426429 - RNA, 22 nt, Human
gaaggaggagccuguccugccu

SEQ ID NO: 1426430 - RNA, 16 nt, Human
gaaggaggagccuguc

SEQ ID NO: 1426431 - RNA, 15 nt, Human
gaaggaggagccugu

SEQ ID NO: 1426432 - RNA, 18 nt, Human
gaaggaggacccaggaca

SEQ ID NO: 1426433 - RNA, 19 nt, Human
gaaggaggacccaggacag

SEQ ID NO: 1426434 - RNA, 18 nt, Human
gaaggaaggcagggagga

SEQ ID NO: 1426435 - RNA, 19 nt, Human
gaaggaaggcagggaggag

SEQ ID NO: 1426436 - RNA, 20 nt, Human
gaaggaaggcagggaggagg

SEQ ID NO: 1426437 - RNA, 22 nt, Human
gaaggaaggcuccaucuccagu

SEQ ID NO: 1426438 - RNA, 21 nt, Human
gaaggcagggggaaggugggg

SEQ ID NO: 1426439 - RNA, 21 nt, Human
gaaggauucugcuggccucug

SEQ ID NO: 1426440 - RNA, 16 nt, Human
gaaggauucugcuggc

SEQ ID NO: 1426441 - RNA, 21 nt, Human
gaaggaucccaugagcuccuu

SEQ ID NO: 1426442 - RNA, 14 nt, Human
gaaggaugcugucu

SEQ ID NO: 1426443 - RNA, 21 nt, Human
gaaggaggcuaugcucagggg

SEQ ID NO: 1426444 - RNA, 17 nt, Human
gaaggggccagaggcuc

SEQ ID NO: 1426445 - RNA, 16 nt, Human
gaaggggccagaggcu

SEQ ID NO: 1426446 - RNA, 14 nt, Human
gaaggggccagagg

SEQ ID NO: 1426447 - RNA, 23 nt, Human
gaaggcauuugcaggguccucuu

SEQ ID NO: 1426448 - RNA, 17 nt, Human
gaaggcauuugcagggu

SEQ ID NO: 1426449 - RNA, 13 nt, Human
gaaggcauggcgg

SEQ ID NO: 1426450 - RNA, 22 nt, Human
gaaggcagggggaagguggggu

SEQ ID NO: 1426451 - RNA, 19 nt, Human
gaaggcauuugcagggucc

SEQ ID NO: 1426452 - RNA, 22 nt, Human
gaaggggccucaccgagugggg

SEQ ID NO: 1426453 - RNA, 22 nt, Human
gaaggugaauagccauauuugu

SEQ ID NO: 1426454 - RNA, 12 nt, Human
gaaggugaauag

SEQ ID NO: 1426455 - RNA, 14 nt, Human
gaagggggcggccu

SEQ ID NO: 1426456 - RNA, 15 nt, Human
gaagucacagggcag

SEQ ID NO: 1426457 - RNA, 13 nt, Human
gaagucacagggc

SEQ ID NO: 1426458 - RNA, 16 nt, Human
gaagucaaagcaagga

SEQ ID NO: 1426459 - RNA, 15 nt, Human
gaagucaaagcaagg

SEQ ID NO: 1426460 - RNA, 21 nt, Human
gaaguauuuuuucaguauuau

SEQ ID NO: 1426461 - RNA, 19 nt, Human
gaaguauuuugcuggaaua

SEQ ID NO: 1426462 - RNA, 21 nt, Human
gaaguaauaugcacacauuuu

SEQ ID NO: 1426463 - RNA, 21 nt, Human
gaaggugaggagcuugaaacc

SEQ ID NO: 1426464 - RNA, 21 nt, Human
gaaggugauuuaagggcccag

SEQ ID NO: 1426465 - RNA, 19 nt, Human
gaaggugauguugccaucc

SEQ ID NO: 1426466 - RNA, 14 nt, Human
gaaguaacuacagu

SEQ ID NO: 1426467 - RNA, 19 nt, Human
gaaguaauaugcacacauu

SEQ ID NO: 1426468 - RNA, 20 nt, Human
gaaguaauaugcacacauuu

SEQ ID NO: 1426469 - RNA, 20 nt, Human
gaagucacauuccugaacag

SEQ ID NO: 1426470 - RNA, 16 nt, Human
gaagucacauuccuga

SEQ ID NO: 1426471 - RNA, 21 nt, Human
gaagucacauuccugaacagg

SEQ ID NO: 1426472 - RNA, 20 nt, Human
gaagucacagggcaguaccu

SEQ ID NO: 1426473 - RNA, 16 nt, Human
gaagucacagggcagu

SEQ ID NO: 1426474 - RNA, 24 nt, Human
gaagucguccuuacuccuguggga

SEQ ID NO: 1426475 - RNA, 23 nt, Human
gaagucguccuuacuccuguggg

SEQ ID NO: 1426476 - RNA, 22 nt, Human
gaagucguccuuacuccugugg

SEQ ID NO: 1426477 - RNA, 15 nt, Human
gaaguccggccccag

SEQ ID NO: 1426478 - RNA, 17 nt, Human
gaaguccaauguggcaa

SEQ ID NO: 1426479 - RNA, 14 nt, Human
gaaguccaaugugg

SEQ ID NO: 1426480 - RNA, 23 nt, Human
gaaguccaagcauuuagauguau

SEQ ID NO: 1426481 - RNA, 13 nt, Human
gaagaaccagucc

SEQ ID NO: 1426482 - RNA, 15 nt, Human
gaagaaaguggaaaa

SEQ ID NO: 1426483 - RNA, 17 nt, Human
gaagaaagaggugaccc

SEQ ID NO: 1426484 - RNA, 23 nt, Human
gaagaaagaggugaccccagggc

SEQ ID NO: 1426485 - RNA, 14 nt, Human
gaagaaagaagaca

SEQ ID NO: 1426486 - RNA, 20 nt, Human
gaagaaagaacggaagaaga

SEQ ID NO: 1426487 - RNA, 16 nt, Human
gaacuuugaccucugc

SEQ ID NO: 1426488 - RNA, 22 nt, Human
gaacuuugaccucugcagcaau

SEQ ID NO: 1426489 - RNA, 22 nt, Human
gaacuuggggaguuaagaccug

SEQ ID NO: 1426490 - RNA, 24 nt, Human
gaacuuuccacauucagagcuuac

SEQ ID NO: 1426491 - RNA, 20 nt, Human
gaacuugugucccuaaugug

SEQ ID NO: 1426492 - RNA, 19 nt, Human
gaaccaauaaaauaauuuu

SEQ ID NO: 1426493 - RNA, 15 nt, Human
gaaccacaagacugc

SEQ ID NO: 1426494 - RNA, 14 nt, Human
gaaccacaagacug

SEQ ID NO: 1426495 - RNA, 16 nt, Human
gaacuugaacugauuc

SEQ ID NO: 1426496 - RNA, 15 nt, Human
gaacuugaacugauu

SEQ ID NO: 1426497 - RNA, 22 nt, Human
gaacuugaaauauccugcuuga

SEQ ID NO: 1426498 - RNA, 14 nt, Human
gaacuuaaauaaug

SEQ ID NO: 1426499 - RNA, 17 nt, Human
gaacuuaaauaauguga

SEQ ID NO: 1426500 - RNA, 10 nt, Human
gaagaggacu

SEQ ID NO: 1426501 - RNA, 22 nt, Human
gaagagccuuccacccaggggc

SEQ ID NO: 1426502 - RNA, 22 nt, Human
gaagagcgagagaucaaagaug

SEQ ID NO: 1426503 - RNA, 19 nt, Human
gaagagccuuccacccagg

SEQ ID NO: 1426504 - RNA, 17 nt, Human
gaagagccuuccaccca

SEQ ID NO: 1426505 - RNA, 16 nt, Human
gaagaagggcacccua

SEQ ID NO: 1426506 - RNA, 14 nt, Human
gaagaaggugaaua

SEQ ID NO: 1426507 - RNA, 15 nt, Human
gaagagccuuccacc

SEQ ID NO: 1426508 - RNA, 19 nt, Human
gaagaaguuucaucauuuu

SEQ ID NO: 1426509 - RNA, 14 nt, Human
gaagaugacugagg

SEQ ID NO: 1426510 - RNA, 13 nt, Human
gaagaugacugag

SEQ ID NO: 1426511 - RNA, 14 nt, Human
gaagauucuuuccc

SEQ ID NO: 1426512 - RNA, 17 nt, Human
gaagauugagauguguu

SEQ ID NO: 1426513 - RNA, 22 nt, Human
gaagauugagauguguucacaa

SEQ ID NO: 1426514 - RNA, 21 nt, Human
gaagaucuaaauaaaaugcua

SEQ ID NO: 1426515 - RNA, 14 nt, Human
gaagauccugcggg

SEQ ID NO: 1426516 - RNA, 22 nt, Human
gaagauccugcggguggggcuu

SEQ ID NO: 1426517 - RNA, 14 nt, Human
gaagaucccccaga

SEQ ID NO: 1426518 - RNA, 15 nt, Human
gaagaucccccagaa

SEQ ID NO: 1426519 - RNA, 18 nt, Human
gaagaucccccagaaaag

SEQ ID NO: 1426520 - RNA, 19 nt, Human
gacacggucggggcaucug

SEQ ID NO: 1426521 - RNA, 22 nt, Human
gacagccaacuauggccugugg

SEQ ID NO: 1426522 - RNA, 20 nt, Human
gacagaugaggcuuuccaug

SEQ ID NO: 1426523 - RNA, 15 nt, Human
gacagaugaggcuuu

SEQ ID NO: 1426524 - RNA, 20 nt, Human
gacagaugaaugccguggau

SEQ ID NO: 1426525 - RNA, 19 nt, Human
gacagaugaaugccgugga

SEQ ID NO: 1426526 - RNA, 16 nt, Human
gacagaugaggcuuuc

SEQ ID NO: 1426527 - RNA, 12 nt, Human
gacagcaugaga

SEQ ID NO: 1426528 - RNA, 19 nt, Human
gacagccaacuauggccug

SEQ ID NO: 1426529 - RNA, 24 nt, Human
gacaggacuaacacucagaagccu

SEQ ID NO: 1426530 - RNA, 23 nt, Human
gacaggacuaacacucagaagcc

SEQ ID NO: 1426531 - RNA, 22 nt, Human
gacaggacuaacacucagaagc

SEQ ID NO: 1426532 - RNA, 21 nt, Human
gacaggacuaacacucagaag

SEQ ID NO: 1426533 - RNA, 19 nt, Human
gacaggacuaacacucaga

SEQ ID NO: 1426534 - RNA, 22 nt, Human
gacagcuucucauccugcaggc

SEQ ID NO: 1426535 - RNA, 21 nt, Human
gacagcuucucauccugcagg

SEQ ID NO: 1426536 - RNA, 19 nt, Human
gacagcugugccucgcucc

SEQ ID NO: 1426537 - RNA, 17 nt, Human
gacagcugugccucgcu

SEQ ID NO: 1426538 - RNA, 15 nt, Human
gacagcugugccucg

SEQ ID NO: 1426539 - RNA, 14 nt, Human
gacagcugugccuc

SEQ ID NO: 1426540 - RNA, 13 nt, Human
gacagcugugccu

SEQ ID NO: 1426541 - RNA, 18 nt, Human
gacaggauccaggccggc

SEQ ID NO: 1426542 - RNA, 13 nt, Human
gacaggauccagg

SEQ ID NO: 1426543 - RNA, 15 nt, Human
gacaggauccaggcc

SEQ ID NO: 1426544 - RNA, 17 nt, Human
gacauacccccuccccc

SEQ ID NO: 1426545 - RNA, 22 nt, Human
gacaggcuggcuccagaugcag

SEQ ID NO: 1426546 - RNA, 21 nt, Human
gacaggcuggcuccagaugca

SEQ ID NO: 1426547 - RNA, 14 nt, Human
gacaggcuggcucc

SEQ ID NO: 1426548 - RNA, 12 nt, Human
gacaggcuggcu

SEQ ID NO: 1426549 - RNA, 15 nt, Human
gacauacuaaccagc

SEQ ID NO: 1426550 - RNA, 16 nt, Human
gacauacuaaccagca

SEQ ID NO: 1426551 - RNA, 17 nt, Human
gacaggcucuuagcagc

SEQ ID NO: 1426552 - RNA, 13 nt, Human
gacaggcucuuag

SEQ ID NO: 1426553 - RNA, 19 nt, Human
gacaggcucuuagcagcuu

SEQ ID NO: 1426554 - RNA, 18 nt, Human
gacaggcucuuagcagcu

SEQ ID NO: 1426555 - RNA, 22 nt, Human
gacaggcuggaagauagcugug

SEQ ID NO: 1426556 - RNA, 21 nt, Human
gacaggcuggaagauagcugu

SEQ ID NO: 1426557 - RNA, 20 nt, Human
gacaugaagauucuuuccca

SEQ ID NO: 1426558 - RNA, 17 nt, Human
gacaucuugucauuuuu

SEQ ID NO: 1426559 - RNA, 19 nt, Human
gacaucaaaaaaggcaguu

SEQ ID NO: 1426560 - RNA, 18 nt, Human
gacaucaaaaaaggcagu

SEQ ID NO: 1426561 - RNA, 23 nt, Human
gacauacuaaccagcagaaaugc

SEQ ID NO: 1426562 - RNA, 17 nt, Human
gacaugucuguucuaca

SEQ ID NO: 1426563 - RNA, 15 nt, Human
gacaugucuguucua

SEQ ID NO: 1426564 - RNA, 21 nt, Human
gaccaaagggagucugccagg

SEQ ID NO: 1426565 - RNA, 16 nt, Human
gaccaaagggagucug

SEQ ID NO: 1426566 - RNA, 19 nt, Human
gaccaaaaguuacauguuu

SEQ ID NO: 1426567 - RNA, 14 nt, Human
gaccaaaaguuaca

SEQ ID NO: 1426568 - RNA, 19 nt, Human
gacauggagguucuaaggc

SEQ ID NO: 1426569 - RNA, 16 nt, Human
gacauggagguucuaa

SEQ ID NO: 1426570 - RNA, 15 nt, Human
gacauggagguucua

SEQ ID NO: 1426571 - RNA, 14 nt, Human
gacauggagguucu

SEQ ID NO: 1426572 - RNA, 23 nt, Human
gacaugcgguagccagcacacag

SEQ ID NO: 1426573 - RNA, 22 nt, Human
gacaugcgguagccagcacaca

SEQ ID NO: 1426574 - RNA, 19 nt, Human
gacaugcgguagccagcac

SEQ ID NO: 1426575 - RNA, 22 nt, Human
gacaugaagccacgggugccag

SEQ ID NO: 1426576 - RNA, 18 nt, Human
gacaugcgguagccagca

SEQ ID NO: 1426577 - RNA, 16 nt, Human
gacaugaagcuguugu

SEQ ID NO: 1426578 - RNA, 13 nt, Human
gacaugaagccac

SEQ ID NO: 1426579 - RNA, 21 nt, Human
gacauggagguucuaaggccu

SEQ ID NO: 1426580 - RNA, 20 nt, Human
gacauggagguucuaaggcc

SEQ ID NO: 1426581 - RNA, 22 nt, Human
gacaugggacauuugcucaugg

SEQ ID NO: 1426582 - RNA, 17 nt, Human
gacacacacagacuauu

SEQ ID NO: 1426583 - RNA, 13 nt, Human
gacaauuuauuau

SEQ ID NO: 1426584 - RNA, 19 nt, Human
gacaauuuauuauggcaca

SEQ ID NO: 1426585 - RNA, 15 nt, Human
gacaaucaugugugu

SEQ ID NO: 1426586 - RNA, 12 nt, Human
gacaauuuauua

SEQ ID NO: 1426587 - RNA, 17 nt, Human
gacaaugacuuacugua

SEQ ID NO: 1426588 - RNA, 20 nt, Human
gacaaugacuuacuguacau

SEQ ID NO: 1426589 - RNA, 21 nt, Human
gacaaugacuuacuguacaug

SEQ ID NO: 1426590 - RNA, 14 nt, Human
gacaauaaaacauu

SEQ ID NO: 1426591 - RNA, 20 nt, Human
gacaaguggacucagggcag

SEQ ID NO: 1426592 - RNA, 15 nt, Human
gacaaguggacucag

SEQ ID NO: 1426593 - RNA, 20 nt, Human
gacaagugcugaacagugga

SEQ ID NO: 1426594 - RNA, 14 nt, Human
gacaaucaugugug

SEQ ID NO: 1426595 - RNA, 13 nt, Human
gacaaucaugugu

SEQ ID NO: 1426596 - RNA, 16 nt, Human
gacaagccagaacuug

SEQ ID NO: 1426597 - RNA, 21 nt, Human
gacaagcauggucccacaucc

SEQ ID NO: 1426598 - RNA, 15 nt, Human
gacaagcucacagac

SEQ ID NO: 1426599 - RNA, 22 nt, Human
gacacggucggggcaucuggcc

SEQ ID NO: 1426600 - RNA, 19 nt, Human
gacaccuuuuuucaacagu

SEQ ID NO: 1426601 - RNA, 13 nt, Human
gacaccugcccug

SEQ ID NO: 1426602 - RNA, 14 nt, Human
gacaccugcccugc

SEQ ID NO: 1426603 - RNA, 15 nt, Human
gacaccugcccugcc

SEQ ID NO: 1426604 - RNA, 16 nt, Human
gacaccugcccugccc

SEQ ID NO: 1426605 - RNA, 22 nt, Human
gacaccugcccugcccugccac

SEQ ID NO: 1426606 - RNA, 14 nt, Human
gacaccuuuagguu

SEQ ID NO: 1426607 - RNA, 12 nt, Human
gacaccugggag

SEQ ID NO: 1426608 - RNA, 14 nt, Human
gacaccuuggacau

SEQ ID NO: 1426609 - RNA, 18 nt, Human
gacaccugggagaaaucu

SEQ ID NO: 1426610 - RNA, 23 nt, Human
gacaccugcccugcccugccacc

SEQ ID NO: 1426611 - RNA, 19 nt, Human
gacacauacucauuuuuca

SEQ ID NO: 1426612 - RNA, 21 nt, Human
gacacaggccuguguagcugu

SEQ ID NO: 1426613 - RNA, 17 nt, Human
gacacaggccuguguag

SEQ ID NO: 1426614 - RNA, 16 nt, Human
gacacaggccugugua

SEQ ID NO: 1426615 - RNA, 15 nt, Human
gacacaggccugugu

SEQ ID NO: 1426616 - RNA, 14 nt, Human
gacacaggccugug

SEQ ID NO: 1426617 - RNA, 13 nt, Human
gacacaggccugu

SEQ ID NO: 1426618 - RNA, 12 nt, Human
gacacaggccug

SEQ ID NO: 1426619 - RNA, 23 nt, Human
gacacccuucucccacucuccua

SEQ ID NO: 1426620 - RNA, 19 nt, Human
gacacccuucucccacucu

SEQ ID NO: 1426621 - RNA, 15 nt, Human
gacacccuucuccca

SEQ ID NO: 1426622 - RNA, 15 nt, Human
gacaccuaacucuuc

SEQ ID NO: 1426623 - RNA, 13 nt, Human
gacaccucuuuuu

SEQ ID NO: 1426624 - RNA, 18 nt, Human
gacaccuaacucuucuuu

SEQ ID NO: 1426625 - RNA, 16 nt, Human
gacaccuaacucuucu

SEQ ID NO: 1426626 - RNA, 20 nt, Human
gacaccuaggcuaggguggg

SEQ ID NO: 1426627 - RNA, 16 nt, Human
gacaccuaggcuaggg

SEQ ID NO: 1426628 - RNA, 15 nt, Human
gacaccuaggcuagg

SEQ ID NO: 1426629 - RNA, 9 nt, Human
gacaccugc

SEQ ID NO: 1426630 - RNA, 10 nt, Human
gacaccugcc

SEQ ID NO: 1426631 - RNA, 11 nt, Human
gacaccugccc

SEQ ID NO: 1426632 - RNA, 12 nt, Human
gacaccugcccu

SEQ ID NO: 1426633 - RNA, 19 nt, Human
gaccccaucaccuacucac

SEQ ID NO: 1426634 - RNA, 21 nt, Human
gaccccagggcacaggagcua

SEQ ID NO: 1426635 - RNA, 19 nt, Human
gaccccagggcacaggagc

SEQ ID NO: 1426636 - RNA, 18 nt, Human
gaccccagggcacaggag

SEQ ID NO: 1426637 - RNA, 17 nt, Human
gaccccagggcacagga

SEQ ID NO: 1426638 - RNA, 16 nt, Human
gaccccagggcacagg

SEQ ID NO: 1426639 - RNA, 15 nt, Human
gaccccagggcacag

SEQ ID NO: 1426640 - RNA, 14 nt, Human
gaccccagggcaca

SEQ ID NO: 1426641 - RNA, 13 nt, Human
gaccccagggcac

SEQ ID NO: 1426642 - RNA, 11 nt, Human
gaccccagggc

SEQ ID NO: 1426643 - RNA, 20 nt, Human
gaccaagauggcccauccug

SEQ ID NO: 1426644 - RNA, 16 nt, Human
gacccagcggacacac

SEQ ID NO: 1426645 - RNA, 12 nt, Human
gacccacaugcu

SEQ ID NO: 1426646 - RNA, 23 nt, Human
gacccacaugccauuuguacuga

SEQ ID NO: 1426647 - RNA, 14 nt, Human
gacccacaugccau

SEQ ID NO: 1426648 - RNA, 21 nt, Human
gacccaggaaaggcaggauug

SEQ ID NO: 1426649 - RNA, 15 nt, Human
gacccaggaaaggca

SEQ ID NO: 1426650 - RNA, 12 nt, Human
gacccaggacag

SEQ ID NO: 1426651 - RNA, 13 nt, Human
gacccaggacagg

SEQ ID NO: 1426652 - RNA, 22 nt, Human
gacccaggacaggauccaggcc

SEQ ID NO: 1426653 - RNA, 17 nt, Human
gaccugaggcugugguc

SEQ ID NO: 1426654 - RNA, 15 nt, Human
gaccugaggcugugg

SEQ ID NO: 1426655 - RNA, 14 nt, Human
gaccugaggcugug

SEQ ID NO: 1426656 - RNA, 13 nt, Human
gaccugaggcugu

SEQ ID NO: 1426657 - RNA, 18 nt, Human
gaccucaggcaaucugcc

SEQ ID NO: 1426658 - RNA, 20 nt, Human
gaccugcacuggggagcccg

SEQ ID NO: 1426659 - RNA, 16 nt, Human
gaccugcacuggggag

SEQ ID NO: 1426660 - RNA, 21 nt, Human
gaccugauccuggaggcccag

SEQ ID NO: 1426661 - RNA, 18 nt, Human
gaccugauccuggaggcc

SEQ ID NO: 1426662 - RNA, 15 nt, Human
gaccugauccuggag

SEQ ID NO: 1426663 - RNA, 14 nt, Human
gaccugauccugga

SEQ ID NO: 1426664 - RNA, 23 nt, Human
gaccugauuucugagcauuuaau

SEQ ID NO: 1426665 - RNA, 11 nt, Human
gaccugccucc

SEQ ID NO: 1426666 - RNA, 22 nt, Human
gaccugccucccuucaugcaug

SEQ ID NO: 1426667 - RNA, 16 nt, Human
gaccucagaaguaaag

SEQ ID NO: 1426668 - RNA, 13 nt, Human
gaccucagaagua

SEQ ID NO: 1426669 - RNA, 21 nt, Human
gaccucaccaagcugcugugg

SEQ ID NO: 1426670 - RNA, 23 nt, Human
gaccuacagggggucuggcuggu

SEQ ID NO: 1426671 - RNA, 22 nt, Human
gaccuacagggggucuggcugg

SEQ ID NO: 1426672 - RNA, 21 nt, Human
gaccuacagggggucuggcug

SEQ ID NO: 1426673 - RNA, 20 nt, Human
gaccuacagggggucuggcu

SEQ ID NO: 1426674 - RNA, 13 nt, Human
gaccuacaggggg

SEQ ID NO: 1426675 - RNA, 20 nt, Human
gaccuaaauggccucaugug

SEQ ID NO: 1426676 - RNA, 16 nt, Human
gaccuaaauggccuca

SEQ ID NO: 1426677 - RNA, 17 nt, Human
gaccggagagugggggu

SEQ ID NO: 1426678 - RNA, 17 nt, Human
gacccuugacaccugcu

SEQ ID NO: 1426679 - RNA, 19 nt, Human
gacccuucccuugagcccu

SEQ ID NO: 1426680 - RNA, 21 nt, Human
gacccuguugcuaagccccag

SEQ ID NO: 1426681 - RNA, 15 nt, Human
gacccuguugcuaag

SEQ ID NO: 1426682 - RNA, 16 nt, Human
gacccuguugcuaagc

SEQ ID NO: 1426683 - RNA, 19 nt, Human
gaccggccugccaggagga

SEQ ID NO: 1426684 - RNA, 15 nt, Human
gaccggcggcucgga

SEQ ID NO: 1426685 - RNA, 18 nt, Human
gaccggccugccaggagg

SEQ ID NO: 1426686 - RNA, 17 nt, Human
gaccggccugccaggag

SEQ ID NO: 1426687 - RNA, 16 nt, Human
gaccggccugccagga

SEQ ID NO: 1426688 - RNA, 15 nt, Human
gaccggccugccagg

SEQ ID NO: 1426689 - RNA, 19 nt, Human
gaccggcggaccccagcca

SEQ ID NO: 1426690 - RNA, 20 nt, Human
gaccggcggaccccagccau

SEQ ID NO: 1426691 - RNA, 19 nt, Human
gacucagggcuccuggguu

SEQ ID NO: 1426692 - RNA, 17 nt, Human
gacucagggcuccuggg

SEQ ID NO: 1426693 - RNA, 16 nt, Human
gacucagggcuccugg

SEQ ID NO: 1426694 - RNA, 14 nt, Human
gacucagggcuccu

SEQ ID NO: 1426695 - RNA, 13 nt, Human
gacucagggcucc

SEQ ID NO: 1426696 - RNA, 12 nt, Human
gacucagggcuc

SEQ ID NO: 1426697 - RNA, 23 nt, Human
gacucagggcagcgccaggcuga

SEQ ID NO: 1426698 - RNA, 18 nt, Human
gacucagggcagcgccag

SEQ ID NO: 1426699 - RNA, 17 nt, Human
gacucagggcagcgcca

SEQ ID NO: 1426700 - RNA, 16 nt, Human
gacucagggcagcgcc

SEQ ID NO: 1426701 - RNA, 13 nt, Human
gacucagggcagc

SEQ ID NO: 1426702 - RNA, 12 nt, Human
gacucagggcag

SEQ ID NO: 1426703 - RNA, 23 nt, Human
gacucaggcccccaccuggcuca

SEQ ID NO: 1426704 - RNA, 22 nt, Human
gacucaggcccccaccuggcuc

SEQ ID NO: 1426705 - RNA, 15 nt, Human
gacucaggagccugu

SEQ ID NO: 1426706 - RNA, 16 nt, Human
gacucaggagccugug

SEQ ID NO: 1426707 - RNA, 23 nt, Human
gacucagcucugacauucugauu

SEQ ID NO: 1426708 - RNA, 22 nt, Human
gacucagcucugacauucugau

SEQ ID NO: 1426709 - RNA, 19 nt, Human
gacuagaccuccagcuguu

SEQ ID NO: 1426710 - RNA, 20 nt, Human
gacuagaaaauuuaaaacau

SEQ ID NO: 1426711 - RNA, 20 nt, Human
gacuacuugggagcaccgcc

SEQ ID NO: 1426712 - RNA, 18 nt, Human
gacuacuugggagcaccg

SEQ ID NO: 1426713 - RNA, 22 nt, Human
gacuacagcuggggugcaggga

SEQ ID NO: 1426714 - RNA, 19 nt, Human
gacuacagcuggggugcag

SEQ ID NO: 1426715 - RNA, 22 nt, Human
gacuaauuucaaaaugcuuuuu

SEQ ID NO: 1426716 - RNA, 13 nt, Human
gacuaauuucaaa

SEQ ID NO: 1426717 - RNA, 12 nt, Human
gacuaauuucaa

SEQ ID NO: 1426718 - RNA, 23 nt, Human
gacucccauuccugaagaaccag

SEQ ID NO: 1426719 - RNA, 22 nt, Human
gacucccauuccugaagaacca

SEQ ID NO: 1426720 - RNA, 13 nt, Human
gacucccauuccu

SEQ ID NO: 1426721 - RNA, 18 nt, Human
gacuccaggcccaaggcu

SEQ ID NO: 1426722 - RNA, 19 nt, Human
gacuccaggcccaaggcuc

SEQ ID NO: 1426723 - RNA, 19 nt, Human
gacucagguggcccuacug

SEQ ID NO: 1426724 - RNA, 14 nt, Human
gacuccaggcccaa

SEQ ID NO: 1426725 - RNA, 12 nt, Human
gacuccaggccc

SEQ ID NO: 1426726 - RNA, 17 nt, Human
gacucauucugaaggag

SEQ ID NO: 1426727 - RNA, 16 nt, Human
gacucauucugaagga

SEQ ID NO: 1426728 - RNA, 13 nt, Human
gacucauucugaa

SEQ ID NO: 1426729 - RNA, 20 nt, Human
gaccuggaagggaggugggc

SEQ ID NO: 1426730 - RNA, 19 nt, Human
gaccugcugagcucugaga

SEQ ID NO: 1426731 - RNA, 22 nt, Human
gaccugcugagcucugagaggc

SEQ ID NO: 1426732 - RNA, 18 nt, Human
gaccugcugagcucugag

SEQ ID NO: 1426733 - RNA, 17 nt, Human
gaccugcugagcucuga

SEQ ID NO: 1426734 - RNA, 16 nt, Human
gaccugcugagcucug

SEQ ID NO: 1426735 - RNA, 14 nt, Human
gaccugcugagcuc

SEQ ID NO: 1426736 - RNA, 13 nt, Human
gaccugcugagcu

SEQ ID NO: 1426737 - RNA, 11 nt, Human
gaccugcugag

SEQ ID NO: 1426738 - RNA, 19 nt, Human
gaccugcugaccugugcac

SEQ ID NO: 1426739 - RNA, 18 nt, Human
gaccugcugaccugugca

SEQ ID NO: 1426740 - RNA, 21 nt, Human
gaccugcuaggccagagccca

SEQ ID NO: 1426741 - RNA, 10 nt, Human
gaccugcuga

SEQ ID NO: 1426742 - RNA, 23 nt, Human
gaccugcuaggccagagcccacu

SEQ ID NO: 1426743 - RNA, 19 nt, Human
gaccugcuaggccagagcc

SEQ ID NO: 1426744 - RNA, 18 nt, Human
gaccugcuaggccagagc

SEQ ID NO: 1426745 - RNA, 17 nt, Human
gaccugcuaggccagag

SEQ ID NO: 1426746 - RNA, 15 nt, Human
gaccugcuaggccag

SEQ ID NO: 1426747 - RNA, 12 nt, Human
gaccugccugua

SEQ ID NO: 1426748 - RNA, 18 nt, Human
gaccugccugcauaggag

SEQ ID NO: 1426749 - RNA, 21 nt, Human
gacgacaagugcugaacagug

SEQ ID NO: 1426750 - RNA, 18 nt, Human
gaccuuuccaccacagcc

SEQ ID NO: 1426751 - RNA, 17 nt, Human
gaccuuuccaccacagc

SEQ ID NO: 1426752 - RNA, 13 nt, Human
gaccuuuccacca

SEQ ID NO: 1426753 - RNA, 23 nt, Human
gaccuuuccaccacagccagcac

SEQ ID NO: 1426754 - RNA, 21 nt, Human
gaccuuuccaccacagccagc

SEQ ID NO: 1426755 - RNA, 16 nt, Human
gaccuuguuacuucug

SEQ ID NO: 1426756 - RNA, 17 nt, Human
gaccuuguuacuucuga

SEQ ID NO: 1426757 - RNA, 23 nt, Human
gacggugcccaagccagaggcug

SEQ ID NO: 1426758 - RNA, 18 nt, Human
gacggugcccaagccaga

SEQ ID NO: 1426759 - RNA, 16 nt, Human
gacggugcccaagcca

SEQ ID NO: 1426760 - RNA, 12 nt, Human
gacgcacugagc

SEQ ID NO: 1426761 - RNA, 19 nt, Human
gacgcaagggccugauggg

SEQ ID NO: 1426762 - RNA, 18 nt, Human
gacgaggggugucuuggg

SEQ ID NO: 1426763 - RNA, 22 nt, Human
gacgacacggucggggcaucug

SEQ ID NO: 1426764 - RNA, 15 nt, Human
gacgcauaugaguaa

SEQ ID NO: 1426765 - RNA, 15 nt, Human
gacgcacugagcaac

SEQ ID NO: 1426766 - RNA, 17 nt, Human
gacgggguuucaccaug

SEQ ID NO: 1426767 - RNA, 16 nt, Human
gacggguuucaccaug

SEQ ID NO: 1426768 - RNA, 21 nt, Human
gagacuuagggcaccaggggu

SEQ ID NO: 1426769 - RNA, 18 nt, Human
gagacuuagggcaccagg

SEQ ID NO: 1426770 - RNA, 16 nt, Human
gagacuguuuggaaau

SEQ ID NO: 1426771 - RNA, 14 nt, Human
gagacuguuuggaa

SEQ ID NO: 1426772 - RNA, 23 nt, Human
gagacugugugugcccucugggc

SEQ ID NO: 1426773 - RNA, 22 nt, Human
gagacugugugugcccucuggg

SEQ ID NO: 1426774 - RNA, 21 nt, Human
gagacugugugugcccucugg

SEQ ID NO: 1426775 - RNA, 19 nt, Human
gagacugugugugcccucu

SEQ ID NO: 1426776 - RNA, 17 nt, Human
gagacugugugugcccu

SEQ ID NO: 1426777 - RNA, 22 nt, Human
gagacugucuggccccccuggu

SEQ ID NO: 1426778 - RNA, 21 nt, Human
gagacugucuggccccccugg

SEQ ID NO: 1426779 - RNA, 15 nt, Human
gagacugcccagcua

SEQ ID NO: 1426780 - RNA, 12 nt, Human
gagaccagggcu

SEQ ID NO: 1426781 - RNA, 12 nt, Human
gagaccaccagg

SEQ ID NO: 1426782 - RNA, 13 nt, Human
gagaccagggcuc

SEQ ID NO: 1426783 - RNA, 22 nt, Human
gagaccaagauggcccauccug

SEQ ID NO: 1426784 - RNA, 12 nt, Human
gagaccaccucu

SEQ ID NO: 1426785 - RNA, 21 nt, Human
gagacauacuugaagggccag

SEQ ID NO: 1426786 - RNA, 20 nt, Human
gagacauacuugaagggcca

SEQ ID NO: 1426787 - RNA, 18 nt, Human
gagacauacuugaagggc

SEQ ID NO: 1426788 - RNA, 15 nt, Human
gagacauacuugaag

SEQ ID NO: 1426789 - RNA, 16 nt, Human
gagacauuaacucauu

SEQ ID NO: 1426790 - RNA, 22 nt, Human
gagacauuaacucauuagacug

SEQ ID NO: 1426791 - RNA, 14 nt, Human
gagacaugugacau

SEQ ID NO: 1426792 - RNA, 13 nt, Human
gagacaucagccc

SEQ ID NO: 1426793 - RNA, 19 nt, Human
gagacauaaccacugcuuc

SEQ ID NO: 1426794 - RNA, 11 nt, Human
gagacauccag

SEQ ID NO: 1426795 - RNA, 13 nt, Human
gagacaugugaca

SEQ ID NO: 1426796 - RNA, 12 nt, Human
gagacauccagc

SEQ ID NO: 1426797 - RNA, 21 nt, Human
gagagggcucgaggggugggc

SEQ ID NO: 1426798 - RNA, 18 nt, Human
gagagggcgcaggccgug

SEQ ID NO: 1426799 - RNA, 17 nt, Human
gagagggcgcaggccgu

SEQ ID NO: 1426800 - RNA, 16 nt, Human
gagagggcgcaggccg

SEQ ID NO: 1426801 - RNA, 15 nt, Human
gagagggcgcaggcc

SEQ ID NO: 1426802 - RNA, 23 nt, Human
gagaggugggccagucuguggau

SEQ ID NO: 1426803 - RNA, 22 nt, Human
gagaggugggccagucugugga

SEQ ID NO: 1426804 - RNA, 14 nt, Human
gagaggugggccag

SEQ ID NO: 1426805 - RNA, 20 nt, Human
gagagggcucgagggguggg

SEQ ID NO: 1426806 - RNA, 20 nt, Human
gagagguuugcagucccaag

SEQ ID NO: 1426807 - RNA, 17 nt, Human
gagagguugucuguggc

SEQ ID NO: 1426808 - RNA, 14 nt, Human
gagaguuuccugaa

SEQ ID NO: 1426809 - RNA, 17 nt, Human
gagauacagaauuuuau

SEQ ID NO: 1426810 - RNA, 21 nt, Human
gagacuuuccauuacaaguau

SEQ ID NO: 1426811 - RNA, 11 nt, Human
gagacuuguuu

SEQ ID NO: 1426812 - RNA, 19 nt, Human
gagagacacacugaagaag

SEQ ID NO: 1426813 - RNA, 22 nt, Human
gagagccagcuaaggggugggg

SEQ ID NO: 1426814 - RNA, 21 nt, Human
gagagaggccauucuuuccca

SEQ ID NO: 1426815 - RNA, 13 nt, Human
gagagaggccauu

SEQ ID NO: 1426816 - RNA, 17 nt, Human
gagagagguugaaaaac

SEQ ID NO: 1426817 - RNA, 16 nt, Human
gagagccaccaagagg

SEQ ID NO: 1426818 - RNA, 13 nt, Human
gagagcagugcuu

SEQ ID NO: 1426819 - RNA, 16 nt, Human
gagagcagugcuuuug

SEQ ID NO: 1426820 - RNA, 21 nt, Human
gagagaguuguuuuaauaacu

SEQ ID NO: 1426821 - RNA, 16 nt, Human
gagagaguugaaccua

SEQ ID NO: 1426822 - RNA, 19 nt, Human
gagagagguugaaaaacaa

SEQ ID NO: 1426823 - RNA, 24 nt, Human
gagaaacuuaaauguuauuaucug

SEQ ID NO: 1426824 - RNA, 23 nt, Human
gagaaaccagcuuccuucagaga

SEQ ID NO: 1426825 - RNA, 21 nt, Human
gagaaaccagcuuccuucaga

SEQ ID NO: 1426826 - RNA, 19 nt, Human
gagaaaccagcuuccuuca

SEQ ID NO: 1426827 - RNA, 17 nt, Human
gagaaaccagcuuccuu

SEQ ID NO: 1426828 - RNA, 16 nt, Human
gagaaaccagcuuccu

SEQ ID NO: 1426829 - RNA, 15 nt, Human
gagaaaccagcuucc

SEQ ID NO: 1426830 - RNA, 14 nt, Human
gagaaaccagcuuc

SEQ ID NO: 1426831 - RNA, 13 nt, Human
gagaaaccagcuu

SEQ ID NO: 1426832 - RNA, 22 nt, Human
gagaaacaguugguaacuuuug

SEQ ID NO: 1426833 - RNA, 21 nt, Human
gagaaacaguugguaacuuuu

SEQ ID NO: 1426834 - RNA, 19 nt, Human
gagaaacaguugguaacuu

SEQ ID NO: 1426835 - RNA, 18 nt, Human
gagaaacaguugguaacu

SEQ ID NO: 1426836 - RNA, 17 nt, Human
gagaaacaguugguaac

SEQ ID NO: 1426837 - RNA, 20 nt, Human
gagaaauauggacacuuaau

SEQ ID NO: 1426838 - RNA, 23 nt, Human
gagaaauagcuuaugaaaagaau

SEQ ID NO: 1426839 - RNA, 15 nt, Human
gagaaauacaaaaau

SEQ ID NO: 1426840 - RNA, 14 nt, Human
gagaaauacaaaaa

SEQ ID NO: 1426841 - RNA, 18 nt, Human
gagaaauaagugcccucu

SEQ ID NO: 1426842 - RNA, 18 nt, Human
gagaaccaaaucuggaag

SEQ ID NO: 1426843 - RNA, 17 nt, Human
gagaaccaaaucuggaa

SEQ ID NO: 1426844 - RNA, 13 nt, Human
gagaaccaaaucu

SEQ ID NO: 1426845 - RNA, 17 nt, Human
gagaacaaacagaucga

SEQ ID NO: 1426846 - RNA, 23 nt, Human
gagaaaucuggcuucuggccagg

SEQ ID NO: 1426847 - RNA, 12 nt, Human
gagaaaugaaaa

SEQ ID NO: 1426848 - RNA, 16 nt, Human
gacucgggggugggga

SEQ ID NO: 1426849 - RNA, 14 nt, Human
gacucggggguggg

SEQ ID NO: 1426850 - RNA, 15 nt, Human
gacuuguuuuugcac

SEQ ID NO: 1426851 - RNA, 16 nt, Human
gacuuguuuuugcaca

SEQ ID NO: 1426852 - RNA, 19 nt, Human
gacuuguauauuuuaagaa

SEQ ID NO: 1426853 - RNA, 13 nt, Human
gacucgguuucuc

SEQ ID NO: 1426854 - RNA, 19 nt, Human
gacucgguuucuccaaacu

SEQ ID NO: 1426855 - RNA, 18 nt, Human
gacuugucccgggacacc

SEQ ID NO: 1426856 - RNA, 16 nt, Human
gacuugugucucugug

SEQ ID NO: 1426857 - RNA, 13 nt, Human
gacuugugucucu

SEQ ID NO: 1426858 - RNA, 18 nt, Human
gacuugugucccaugauc

SEQ ID NO: 1426859 - RNA, 13 nt, Human
gacuuguguccca

SEQ ID NO: 1426860 - RNA, 23 nt, Human
gacuuguuggcguaggcuacaga

SEQ ID NO: 1426861 - RNA, 17 nt, Human
gagacaacgugcucuuu

SEQ ID NO: 1426862 - RNA, 16 nt, Human
gagacaaauggaggcc

SEQ ID NO: 1426863 - RNA, 22 nt, Human
gagacaaacaccucccaggaga

SEQ ID NO: 1426864 - RNA, 20 nt, Human
gagacaaacaccucccagga

SEQ ID NO: 1426865 - RNA, 19 nt, Human
gagacaaacaccucccagg

SEQ ID NO: 1426866 - RNA, 21 nt, Human
gagaauuucuaccauuucaga

SEQ ID NO: 1426867 - RNA, 15 nt, Human
gagacacaccugagg

SEQ ID NO: 1426868 - RNA, 18 nt, Human
gagacacacugaagaagc

SEQ ID NO: 1426869 - RNA, 9 nt, Human
gagacagag

SEQ ID NO: 1426870 - RNA, 15 nt, Human
gagacagacuagaag

SEQ ID NO: 1426871 - RNA, 17 nt, Human
gagacacugguggggau

SEQ ID NO: 1426872 - RNA, 14 nt, Human
gagacacugguggg

SEQ ID NO: 1426873 - RNA, 17 nt, Human
gagacacuggccccuca

SEQ ID NO: 1426874 - RNA, 15 nt, Human
gagacacuggccccu

SEQ ID NO: 1426875 - RNA, 17 nt, Human
gagacagacuagaaguu

SEQ ID NO: 1426876 - RNA, 16 nt, Human
gagacagccaacuaug

SEQ ID NO: 1426877 - RNA, 12 nt, Human
gagaagccuuca

SEQ ID NO: 1426878 - RNA, 16 nt, Human
gagaagcccgugugag

SEQ ID NO: 1426879 - RNA, 15 nt, Human
gagaagcccguguga

SEQ ID NO: 1426880 - RNA, 14 nt, Human
gagaagcccgugug

SEQ ID NO: 1426881 - RNA, 22 nt, Human
gagaagccaucaccucagaugg

SEQ ID NO: 1426882 - RNA, 23 nt, Human
gagaagccaucaccucagauggc

SEQ ID NO: 1426883 - RNA, 20 nt, Human
gagaagccaucaccucagau

SEQ ID NO: 1426884 - RNA, 19 nt, Human
gagaagccaucaccucaga

SEQ ID NO: 1426885 - RNA, 17 nt, Human
gagaagccaucaccuca

SEQ ID NO: 1426886 - RNA, 23 nt, Human
gagaagccaggaauuucccagga

SEQ ID NO: 1426887 - RNA, 22 nt, Human
gagaagccaggaauuucccagg

SEQ ID NO: 1426888 - RNA, 12 nt, Human
gagaagccagga

SEQ ID NO: 1426889 - RNA, 20 nt, Human
gagaagccagcuuguuuaca

SEQ ID NO: 1426890 - RNA, 16 nt, Human
gagaagccagcuuguu

SEQ ID NO: 1426891 - RNA, 13 nt, Human
gagaaugagccuc

SEQ ID NO: 1426892 - RNA, 20 nt, Human
gagaacccagcccacccccg

SEQ ID NO: 1426893 - RNA, 16 nt, Human
gagaagaacugaaauc

SEQ ID NO: 1426894 - RNA, 14 nt, Human
gagaagaacugaaa

SEQ ID NO: 1426895 - RNA, 22 nt, Human
gagaagcaaguaaaaaggcuaa

SEQ ID NO: 1426896 - RNA, 13 nt, Human
gagauacauacag

SEQ ID NO: 1426897 - RNA, 16 nt, Human
gagauacauacagaau

SEQ ID NO: 1426898 - RNA, 14 nt, Human
gagaguuuuggaug

SEQ ID NO: 1426899 - RNA, 17 nt, Human
gagauaguuuucaucca

SEQ ID NO: 1426900 - RNA, 16 nt, Human
gagauaguuuucaucc

SEQ ID NO: 1426901 - RNA, 15 nt, Human
gagauaguuuucauc

SEQ ID NO: 1426902 - RNA, 15 nt, Human
gagcagaggggcuga

SEQ ID NO: 1426903 - RNA, 20 nt, Human
gagcagaggggcagaggccc

SEQ ID NO: 1426904 - RNA, 16 nt, Human
gagcagaggggcagag

SEQ ID NO: 1426905 - RNA, 20 nt, Human
gagcagccaccccaugcugg

SEQ ID NO: 1426906 - RNA, 16 nt, Human
gagcagaggggcugaa

SEQ ID NO: 1426907 - RNA, 20 nt, Human
gagcagagcugauggagaag

SEQ ID NO: 1426908 - RNA, 23 nt, Human
gagcagagcugauggagaaggaa

SEQ ID NO: 1426909 - RNA, 15 nt, Human
gagcagccuggagcc

SEQ ID NO: 1426910 - RNA, 21 nt, Human
gagcagccuggagcccuggag

SEQ ID NO: 1426911 - RNA, 22 nt, Human
gagcagccuggagcccuggaga

SEQ ID NO: 1426912 - RNA, 12 nt, Human
gagccagggucu

SEQ ID NO: 1426913 - RNA, 17 nt, Human
gagccaggagaagcuca

SEQ ID NO: 1426914 - RNA, 18 nt, Human
gagccagcuaaggggugg

SEQ ID NO: 1426915 - RNA, 20 nt, Human
gagccagccgagcaggaggc

SEQ ID NO: 1426916 - RNA, 21 nt, Human
gagccagccgagcaggaggcc

SEQ ID NO: 1426917 - RNA, 19 nt, Human
gagccagccgagcaggagg

SEQ ID NO: 1426918 - RNA, 14 nt, Human
gagccagccgagca

SEQ ID NO: 1426919 - RNA, 14 nt, Human
gagcagcgagccug

SEQ ID NO: 1426920 - RNA, 22 nt, Human
gagccagcuaagggguggggcu

SEQ ID NO: 1426921 - RNA, 21 nt, Human
gagccagcuaagggguggggc

SEQ ID NO: 1426922 - RNA, 20 nt, Human
gagccaggaagaucccccag

SEQ ID NO: 1426923 - RNA, 21 nt, Human
gagccaggagaagcucagcug

SEQ ID NO: 1426924 - RNA, 15 nt, Human
gagccaggagaagcu

SEQ ID NO: 1426925 - RNA, 14 nt, Human
gagccaggagaagc

SEQ ID NO: 1426926 - RNA, 13 nt, Human
gagccaggagaag

SEQ ID NO: 1426927 - RNA, 12 nt, Human
gagccaggagaa

SEQ ID NO: 1426928 - RNA, 21 nt, Human
gagccaggaagaucccccaga

SEQ ID NO: 1426929 - RNA, 19 nt, Human
gagccugaauuuuguugcu

SEQ ID NO: 1426930 - RNA, 21 nt, Human
gagccugacccucaucuuucu

SEQ ID NO: 1426931 - RNA, 15 nt, Human
gagccugagggaucu

SEQ ID NO: 1426932 - RNA, 12 nt, Human
gagccugaggga

SEQ ID NO: 1426933 - RNA, 10 nt, Human
gagccugagg

SEQ ID NO: 1426934 - RNA, 23 nt, Human
gagccucgcaacccgugccaagu

SEQ ID NO: 1426935 - RNA, 20 nt, Human
gagccucgcaacccgugcca

SEQ ID NO: 1426936 - RNA, 19 nt, Human
gagccucgcaacccgugcc

SEQ ID NO: 1426937 - RNA, 22 nt, Human
gagccuccucucucaaacuggg

SEQ ID NO: 1426938 - RNA, 17 nt, Human
gagccgugguccuuugg

SEQ ID NO: 1426939 - RNA, 13 nt, Human
gagccgugguccu

SEQ ID NO: 1426940 - RNA, 22 nt, Human
gagccggggugggguggcugca

SEQ ID NO: 1426941 - RNA, 20 nt, Human
gagccggguggaucgccuga

SEQ ID NO: 1426942 - RNA, 19 nt, Human
gagccggguguccccaaca

SEQ ID NO: 1426943 - RNA, 22 nt, Human
gagccgggucugccucuucugg

SEQ ID NO: 1426944 - RNA, 21 nt, Human
gagccgggucugccucuucug

SEQ ID NO: 1426945 - RNA, 20 nt, Human
gagccgggucugccucuucu

SEQ ID NO: 1426946 - RNA, 17 nt, Human
gagccgggucugccucu

SEQ ID NO: 1426947 - RNA, 20 nt, Human
gagccggggugggguggcug

SEQ ID NO: 1426948 - RNA, 23 nt, Human
gagccggccccaggcucguggac

SEQ ID NO: 1426949 - RNA, 16 nt, Human
gagccggccccaggcu

SEQ ID NO: 1426950 - RNA, 22 nt, Human
gagccgauuguccuaucuccag

SEQ ID NO: 1426951 - RNA, 22 nt, Human
gagcccacuccaucugguagaa

SEQ ID NO: 1426952 - RNA, 14 nt, Human
gagcccacuccauc

SEQ ID NO: 1426953 - RNA, 20 nt, Human
gagcccacgacacugcagcc

SEQ ID NO: 1426954 - RNA, 18 nt, Human
gagcccacuguacuugcu

SEQ ID NO: 1426955 - RNA, 21 nt, Human
gagcccacuguacuugcucuu

SEQ ID NO: 1426956 - RNA, 11 nt, Human
gagcccacugu

SEQ ID NO: 1426957 - RNA, 23 nt, Human
gagcccacuguacuugcucuuga

SEQ ID NO: 1426958 - RNA, 23 nt, Human
gagcccuucuauacccacccaga

SEQ ID NO: 1426959 - RNA, 17 nt, Human
gaggaaaucccuucaua

SEQ ID NO: 1426960 - RNA, 20 nt, Human
gaggaaaucccuucauacuu

SEQ ID NO: 1426961 - RNA, 15 nt, Human
gaggaaaucccuuca

SEQ ID NO: 1426962 - RNA, 13 nt, Human
gaggaaaucccuu

SEQ ID NO: 1426963 - RNA, 12 nt, Human
gaggaaagucau

SEQ ID NO: 1426964 - RNA, 18 nt, Human
gaggaaagucauuggcuu

SEQ ID NO: 1426965 - RNA, 20 nt, Human
gaggaaagucauuggcuuua

SEQ ID NO: 1426966 - RNA, 13 nt, Human
gaggaagaauggu

SEQ ID NO: 1426967 - RNA, 15 nt, Human
gagcuuugacucagg

SEQ ID NO: 1426968 - RNA, 23 nt, Human
gagcuuucugaacagcuggugua

SEQ ID NO: 1426969 - RNA, 22 nt, Human
gagcuuucugaacagcuggugu

SEQ ID NO: 1426970 - RNA, 20 nt, Human
gagcuuucugaacagcuggu

SEQ ID NO: 1426971 - RNA, 19 nt, Human
gagcuuucugaacagcugg

SEQ ID NO: 1426972 - RNA, 17 nt, Human
gagcuuucugaacagcu

SEQ ID NO: 1426973 - RNA, 13 nt, Human
gagcuugggaaug

SEQ ID NO: 1426974 - RNA, 16 nt, Human
gagcugccuggacccg

SEQ ID NO: 1426975 - RNA, 15 nt, Human
gagcugccuggaccc

SEQ ID NO: 1426976 - RNA, 14 nt, Human
gagcugccuggacc

SEQ ID NO: 1426977 - RNA, 12 nt, Human
gagcugccugga

SEQ ID NO: 1426978 - RNA, 18 nt, Human
gagcuuugacucaggagc

SEQ ID NO: 1426979 - RNA, 21 nt, Human
gagcuuugacucaggagccug

SEQ ID NO: 1426980 - RNA, 23 nt, Human
gagcuuugucuacuucaaaaguu

SEQ ID NO: 1426981 - RNA, 14 nt, Human
gagcuuuuguagaa

SEQ ID NO: 1426982 - RNA, 19 nt, Human
gagcucagaaaauaucccu

SEQ ID NO: 1426983 - RNA, 22 nt, Human
gagcucacaaggcagcaaggcc

SEQ ID NO: 1426984 - RNA, 23 nt, Human
gagcucacaaggcagcaaggccc

SEQ ID NO: 1426985 - RNA, 21 nt, Human
gagcucacaaggcagcaaggc

SEQ ID NO: 1426986 - RNA, 20 nt, Human
gagcucacaaggcagcaagg

SEQ ID NO: 1426987 - RNA, 18 nt, Human
gagcucacaaggcagcaa

SEQ ID NO: 1426988 - RNA, 17 nt, Human
gagcucacaaggcagca

SEQ ID NO: 1426989 - RNA, 16 nt, Human
gagcucacaaggcagc

SEQ ID NO: 1426990 - RNA, 14 nt, Human
gagcucacaaggca

SEQ ID NO: 1426991 - RNA, 13 nt, Human
gagcuauugcugu

SEQ ID NO: 1426992 - RNA, 20 nt, Human
gagcuaggagcaaagccugu

SEQ ID NO: 1426993 - RNA, 21 nt, Human
gagcuaggagcaaagccuguu

SEQ ID NO: 1426994 - RNA, 19 nt, Human
gagcuaggagcaaagccug

SEQ ID NO: 1426995 - RNA, 18 nt, Human
gagcuaggagcaaagccu

SEQ ID NO: 1426996 - RNA, 17 nt, Human
gagcuaggagcaaagcc

SEQ ID NO: 1426997 - RNA, 12 nt, Human
gagcuaggagca

SEQ ID NO: 1426998 - RNA, 22 nt, Human
gagcucaggaaccgaggcaggg

SEQ ID NO: 1426999 - RNA, 21 nt, Human
gagcucaggaaccgaggcagg

SEQ ID NO: 1427000 - RNA, 22 nt, Human
gagcuccacucugcuucucuga

SEQ ID NO: 1427001 - RNA, 20 nt, Human
gagcucagaaaauaucccuc

SEQ ID NO: 1427002 - RNA, 23 nt, Human
gagcucagaaaauaucccuccug

SEQ ID NO: 1427003 - RNA, 13 nt, Human
gagcucagcgugg

SEQ ID NO: 1427004 - RNA, 20 nt, Human
gagcucaggaaccgaggcag

SEQ ID NO: 1427005 - RNA, 22 nt, Human
gagccugccgagcaaccguggc

SEQ ID NO: 1427006 - RNA, 23 nt, Human
gagccugccgagcaaccguggcc

SEQ ID NO: 1427007 - RNA, 21 nt, Human
gagccugccgagcaaccgugg

SEQ ID NO: 1427008 - RNA, 18 nt, Human
gagccugccgagcaaccg

SEQ ID NO: 1427009 - RNA, 16 nt, Human
gagccugccgagcaac

SEQ ID NO: 1427010 - RNA, 15 nt, Human
gagccugccgagcaa

SEQ ID NO: 1427011 - RNA, 14 nt, Human
gagccugccgagca

SEQ ID NO: 1427012 - RNA, 13 nt, Human
gagccugccgagc

SEQ ID NO: 1427013 - RNA, 14 nt, Human
gagcugaccagccg

SEQ ID NO: 1427014 - RNA, 20 nt, Human
gagcugaagguuguggccuu

SEQ ID NO: 1427015 - RNA, 22 nt, Human
gagcugaagguuguggccuuug

SEQ ID NO: 1427016 - RNA, 21 nt, Human
gagcucuugugaggaaaguca

SEQ ID NO: 1427017 - RNA, 17 nt, Human
gagcugaggccacacuc

SEQ ID NO: 1427018 - RNA, 16 nt, Human
gagcugaggcagcagu

SEQ ID NO: 1427019 - RNA, 15 nt, Human
gagcugauggagaag

SEQ ID NO: 1427020 - RNA, 16 nt, Human
gagcugauggagaagg

SEQ ID NO: 1427021 - RNA, 20 nt, Human
gagcucccacaagccugagg

SEQ ID NO: 1427022 - RNA, 19 nt, Human
gagcucccacaagccugag

SEQ ID NO: 1427023 - RNA, 17 nt, Human
gagcucccacaagccug

SEQ ID NO: 1427024 - RNA, 20 nt, Human
gagcuccuuaaggcucuuuu

SEQ ID NO: 1427025 - RNA, 23 nt, Human
gagcuccaguguccugagcucag

SEQ ID NO: 1427026 - RNA, 22 nt, Human
gagcuccaguguccugagcuca

SEQ ID NO: 1427027 - RNA, 19 nt, Human
gagcuccaguguccugagc

SEQ ID NO: 1427028 - RNA, 18 nt, Human
gagcuccaguguccugag

SEQ ID NO: 1427029 - RNA, 16 nt, Human
gagcuccaguguccug

SEQ ID NO: 1427030 - RNA, 14 nt, Human
gagcuccagugucc

SEQ ID NO: 1427031 - RNA, 20 nt, Human
gagcuccagcuccuuugggc

SEQ ID NO: 1427032 - RNA, 19 nt, Human
gagcuccagcuccuuuggg

SEQ ID NO: 1427033 - RNA, 14 nt, Human
gagcuccagcuccu

SEQ ID NO: 1427034 - RNA, 14 nt, Human
gagcuccagccuga

SEQ ID NO: 1427035 - RNA, 16 nt, Human
gagcucgugggacagu

SEQ ID NO: 1427036 - RNA, 17 nt, Human
gagcucuugugaggaaa

SEQ ID NO: 1427037 - RNA, 23 nt, Human
gaucagccccacccuggccuaga

SEQ ID NO: 1427038 - RNA, 22 nt, Human
gaucagccccacccuggccuag

SEQ ID NO: 1427039 - RNA, 21 nt, Human
gaucagccccacccuggccua

SEQ ID NO: 1427040 - RNA, 16 nt, Human
gaucagccccacccug

SEQ ID NO: 1427041 - RNA, 18 nt, Human
gaucagccagugaccaac

SEQ ID NO: 1427042 - RNA, 19 nt, Human
gaucagcaaaccggggccu

SEQ ID NO: 1427043 - RNA, 22 nt, Human
gaucagaugcuccaagauucua

SEQ ID NO: 1427044 - RNA, 21 nt, Human
gaucagaugcuccaagauucu

SEQ ID NO: 1427045 - RNA, 17 nt, Human
gaucagaugcuccaaga

SEQ ID NO: 1427046 - RNA, 19 nt, Human
gaucaauuauaguuucuga

SEQ ID NO: 1427047 - RNA, 18 nt, Human
gaucaauuauaguuucug

SEQ ID NO: 1427048 - RNA, 16 nt, Human
gaucaauuauaguuuc

SEQ ID NO: 1427049 - RNA, 22 nt, Human
gaucaaggccuuauuggaaagc

SEQ ID NO: 1427050 - RNA, 23 nt, Human
gaucaaggccuuauuggaaagca

SEQ ID NO: 1427051 - RNA, 13 nt, Human
gaucaaggccuua

SEQ ID NO: 1427052 - RNA, 23 nt, Human
gauagucuuuugcuuuuggcaaa

SEQ ID NO: 1427053 - RNA, 21 nt, Human
gaucaaguuauuuuuaauuug

SEQ ID NO: 1427054 - RNA, 23 nt, Human
gaucagugggccuccaaggaggg

SEQ ID NO: 1427055 - RNA, 19 nt, Human
gaucaguauuuaacuaauu

SEQ ID NO: 1427056 - RNA, 17 nt, Human
gaucaguauuuaacuaa

SEQ ID NO: 1427057 - RNA, 18 nt, Human
gaucaguuauaaguagca

SEQ ID NO: 1427058 - RNA, 21 nt, Human
gaucaguuaagaaauuucaca

SEQ ID NO: 1427059 - RNA, 20 nt, Human
gaucaguguaccauuugccu

SEQ ID NO: 1427060 - RNA, 14 nt, Human
gaucaguuaacuau

SEQ ID NO: 1427061 - RNA, 21 nt, Human
gaucauguguggaaguuauua

SEQ ID NO: 1427062 - RNA, 14 nt, Human
gaucauugugaaau

SEQ ID NO: 1427063 - RNA, 18 nt, Human
gaucauuuguuggaauga

SEQ ID NO: 1427064 - RNA, 15 nt, Human
gaucauguguggaag

SEQ ID NO: 1427065 - RNA, 20 nt, Human
gaucauugugaaauuauuca

SEQ ID NO: 1427066 - RNA, 17 nt, Human
gaucccaugagcuccuu

SEQ ID NO: 1427067 - RNA, 12 nt, Human
gaucccccagaa

SEQ ID NO: 1427068 - RNA, 22 nt, Human
gauaaguguucugucugacuuu

SEQ ID NO: 1427069 - RNA, 20 nt, Human
gauaagguaaaaugccauga

SEQ ID NO: 1427070 - RNA, 15 nt, Human
gauaaggccuguggg

SEQ ID NO: 1427071 - RNA, 13 nt, Human
gauaaggaaauca

SEQ ID NO: 1427072 - RNA, 20 nt, Human
gauaagaucuuuuauuuugc

SEQ ID NO: 1427073 - RNA, 14 nt, Human
gauaagaucuuuua

SEQ ID NO: 1427074 - RNA, 16 nt, Human
gauaagaguuggcugg

SEQ ID NO: 1427075 - RNA, 22 nt, Human
gauaagaguagaaacugcaggg

SEQ ID NO: 1427076 - RNA, 21 nt, Human
gauaaauauugagcagaucua

SEQ ID NO: 1427077 - RNA, 17 nt, Human
gauaaagauuuuuuaau

SEQ ID NO: 1427078 - RNA, 17 nt, Human
gauaaagccucaagguu

SEQ ID NO: 1427079 - RNA, 19 nt, Human
gauaaagauuuuuuaauaa

SEQ ID NO: 1427080 - RNA, 19 nt, Human
gauaaaguugguaaaccuu

SEQ ID NO: 1427081 - RNA, 18 nt, Human
gauagaugcuggcccagg

SEQ ID NO: 1427082 - RNA, 17 nt, Human
gauagaugcuggcccag

SEQ ID NO: 1427083 - RNA, 16 nt, Human
gauagaugcuggccca

SEQ ID NO: 1427084 - RNA, 12 nt, Human
gauagaugcugg

SEQ ID NO: 1427085 - RNA, 21 nt, Human
gauagaugcuggcccagggcc

SEQ ID NO: 1427086 - RNA, 20 nt, Human
gauagaugcuggcccagggc

SEQ ID NO: 1427087 - RNA, 19 nt, Human
gauaaguguucugucugac

SEQ ID NO: 1427088 - RNA, 17 nt, Human
gauaagguaaaaugcca

SEQ ID NO: 1427089 - RNA, 11 nt, Human
gauacagaaaa

SEQ ID NO: 1427090 - RNA, 18 nt, Human
gauaauacaccacuacau

SEQ ID NO: 1427091 - RNA, 21 nt, Human
gauaauacaccacuacauucu

SEQ ID NO: 1427092 - RNA, 22 nt, Human
gauaauacaccacuacauucug

SEQ ID NO: 1427093 - RNA, 23 nt, Human
gauggaugccaauauuaaaucug

SEQ ID NO: 1427094 - RNA, 12 nt, Human
gaugccagccaa

SEQ ID NO: 1427095 - RNA, 18 nt, Human
gauggcucccaggggcuc

SEQ ID NO: 1427096 - RNA, 23 nt, Human
gauggcucccaggggcucccucc

SEQ ID NO: 1427097 - RNA, 13 nt, Human
gauggcucccagg

SEQ ID NO: 1427098 - RNA, 15 nt, Human
gaugccacacaagga

SEQ ID NO: 1427099 - RNA, 19 nt, Human
gaugccaauauuaaaucug

SEQ ID NO: 1427100 - RNA, 19 nt, Human
gaugccaaaaaaaaauaca

SEQ ID NO: 1427101 - RNA, 22 nt, Human
gaugcauuuggguccaggagga

SEQ ID NO: 1427102 - RNA, 21 nt, Human
gaugcauuuggguccaggagg

SEQ ID NO: 1427103 - RNA, 20 nt, Human
gaugcauuuggguccaggag

SEQ ID NO: 1427104 - RNA, 19 nt, Human
gaugcauuuggguccagga

SEQ ID NO: 1427105 - RNA, 18 nt, Human
gaugcauuuggguccagg

SEQ ID NO: 1427106 - RNA, 16 nt, Human
gaugcauuugggucca

SEQ ID NO: 1427107 - RNA, 15 nt, Human
gaugcauuugggucc

SEQ ID NO: 1427108 - RNA, 17 nt, Human
gaugaaguuuuacauug

SEQ ID NO: 1427109 - RNA, 16 nt, Human
gaugaaguuuuacauu

SEQ ID NO: 1427110 - RNA, 16 nt, Human
gaugcacaucccugga

SEQ ID NO: 1427111 - RNA, 15 nt, Human
gaugcacaucccugg

SEQ ID NO: 1427112 - RNA, 16 nt, Human
gaugcaccaccaagcc

SEQ ID NO: 1427113 - RNA, 22 nt, Human
gaugcacagaguuguuacauuu

SEQ ID NO: 1427114 - RNA, 16 nt, Human
gaugaagggcccgaga

SEQ ID NO: 1427115 - RNA, 21 nt, Human
gaugaagagagagagggccug

SEQ ID NO: 1427116 - RNA, 15 nt, Human
gaucuuuuauuuugc

SEQ ID NO: 1427117 - RNA, 14 nt, Human
gaucuuuuauuuug

SEQ ID NO: 1427118 - RNA, 19 nt, Human
gaugaaaauaaagaaugga

SEQ ID NO: 1427119 - RNA, 18 nt, Human
gaugaaaauaaagaaugg

SEQ ID NO: 1427120 - RNA, 17 nt, Human
gaucuguuuugaaggca

SEQ ID NO: 1427121 - RNA, 13 nt, Human
gaucuguuuugaa

SEQ ID NO: 1427122 - RNA, 13 nt, Human
gaucugucugugg

SEQ ID NO: 1427123 - RNA, 19 nt, Human
gaucuguuuugaaggcaaa

SEQ ID NO: 1427124 - RNA, 18 nt, Human
gaucuguuuugaaggcaa

SEQ ID NO: 1427125 - RNA, 15 nt, Human
gaucccuagcuguga

SEQ ID NO: 1427126 - RNA, 12 nt, Human
gaucccucaucu

SEQ ID NO: 1427127 - RNA, 21 nt, Human
gaucccuagcugugaccucuc

SEQ ID NO: 1427128 - RNA, 19 nt, Human
gaucccuagcugugaccuc

SEQ ID NO: 1427129 - RNA, 13 nt, Human
gauccuggaaauc

SEQ ID NO: 1427130 - RNA, 16 nt, Human
gaucguucaaagcaug

SEQ ID NO: 1427131 - RNA, 18 nt, Human
gaucgucugacugguguu

SEQ ID NO: 1427132 - RNA, 19 nt, Human
gaucggcaggacacccuga

SEQ ID NO: 1427133 - RNA, 13 nt, Human
gaucggcaggaca

SEQ ID NO: 1427134 - RNA, 17 nt, Human
gaucgccuuccccaccc

SEQ ID NO: 1427135 - RNA, 17 nt, Human
gaucggagccuccucuc

SEQ ID NO: 1427136 - RNA, 20 nt, Human
gaucggagccuccucucuca

SEQ ID NO: 1427137 - RNA, 16 nt, Human
gaucgccuuccccacc

SEQ ID NO: 1427138 - RNA, 14 nt, Human
gaucgccuucccca

SEQ ID NO: 1427139 - RNA, 13 nt, Human
gaucgccuucccc

SEQ ID NO: 1427140 - RNA, 18 nt, Human
gauccugcggguggggcu

SEQ ID NO: 1427141 - RNA, 17 nt, Human
gauccugcggguggggc

SEQ ID NO: 1427142 - RNA, 19 nt, Human
gaucucaccaggcagccuc

SEQ ID NO: 1427143 - RNA, 16 nt, Human
gaucucaccaggcagc

SEQ ID NO: 1427144 - RNA, 15 nt, Human
gaucucaccaggcag

SEQ ID NO: 1427145 - RNA, 14 nt, Human
gaucucaccaggca

SEQ ID NO: 1427146 - RNA, 16 nt, Human
gaucuauuucauguuu

SEQ ID NO: 1427147 - RNA, 14 nt, Human
gaucuauuucaugu

SEQ ID NO: 1427148 - RNA, 13 nt, Human
gaucuauuucaug

SEQ ID NO: 1427149 - RNA, 17 nt, Human
gaucuaaauaaaaugcu

SEQ ID NO: 1427150 - RNA, 16 nt, Human
gaucuaaauaaaaugc

SEQ ID NO: 1427151 - RNA, 14 nt, Human
gaucuaaauaaaau

SEQ ID NO: 1427152 - RNA, 11 nt, Human
gaucuaaauaa

SEQ ID NO: 1427153 - RNA, 20 nt, Human
gaucucaccaggcagccucu

SEQ ID NO: 1427154 - RNA, 23 nt, Human
gaucucaccaggcagccucuggg

SEQ ID NO: 1427155 - RNA, 12 nt, Human
gaucucagcuca

SEQ ID NO: 1427156 - RNA, 17 nt, Human
gaucucagcucacuaca

SEQ ID NO: 1427157 - RNA, 17 nt, Human
gaucucagcucacugca

SEQ ID NO: 1427158 - RNA, 19 nt, Human
gaucucagcucacugcaac

SEQ ID NO: 1427159 - RNA, 15 nt, Human
gcaaggcagccgugg

SEQ ID NO: 1427160 - RNA, 13 nt, Human
gcaaggcagccgu

SEQ ID NO: 1427161 - RNA, 19 nt, Human
gcaaggacuuuguacauuu

SEQ ID NO: 1427162 - RNA, 16 nt, Human
gcaaggacuuuguaca

SEQ ID NO: 1427163 - RNA, 14 nt, Human
gcaaggacuuugua

SEQ ID NO: 1427164 - RNA, 17 nt, Human
gcaaggaccuaaaacau

SEQ ID NO: 1427165 - RNA, 18 nt, Human
gcaaggagauuuacaacu

SEQ ID NO: 1427166 - RNA, 18 nt, Human
gcaagcauucagaagaaa

SEQ ID NO: 1427167 - RNA, 10 nt, Human
gcaagccaga

SEQ ID NO: 1427168 - RNA, 23 nt, Human
gcaaggcccgagcagcugagcag

SEQ ID NO: 1427169 - RNA, 22 nt, Human
gcaaggcccgagcagcugagca

SEQ ID NO: 1427170 - RNA, 21 nt, Human
gcaaggcccgagcagcugagc

SEQ ID NO: 1427171 - RNA, 20 nt, Human
gcaaggcccgagcagcugag

SEQ ID NO: 1427172 - RNA, 19 nt, Human
gcaaggcccgagcagcuga

SEQ ID NO: 1427173 - RNA, 18 nt, Human
gcaaggcccgagcagcug

SEQ ID NO: 1427174 - RNA, 17 nt, Human
gcaaggcccgagcagcu

SEQ ID NO: 1427175 - RNA, 16 nt, Human
gcaaggcccgagcagc

SEQ ID NO: 1427176 - RNA, 14 nt, Human
gcaaggcccgagca

SEQ ID NO: 1427177 - RNA, 24 nt, Human
gcaaggcccgagcagcugagcagg

SEQ ID NO: 1427178 - RNA, 20 nt, Human
gcaaggccugguguuucuug

SEQ ID NO: 1427179 - RNA, 19 nt, Human
gcaaugccaucaucuccug

SEQ ID NO: 1427180 - RNA, 18 nt, Human
gcaaugccaucaucuccu

SEQ ID NO: 1427181 - RNA, 15 nt, Human
gcaaugccaucaucu

SEQ ID NO: 1427182 - RNA, 21 nt, Human
gcaaugccacagcccugucag

SEQ ID NO: 1427183 - RNA, 19 nt, Human
gcaaugccacagcccuguc

SEQ ID NO: 1427184 - RNA, 17 nt, Human
gcaaugccacagcccug

SEQ ID NO: 1427185 - RNA, 13 nt, Human
gcaaugccacagc

SEQ ID NO: 1427186 - RNA, 17 nt, Human
gcaaugaugaaugagaa

SEQ ID NO: 1427187 - RNA, 16 nt, Human
gcaaugaugaaugaga

SEQ ID NO: 1427188 - RNA, 17 nt, Human
gcaagguacucugguga

SEQ ID NO: 1427189 - RNA, 15 nt, Human
gcaagguacucuggu

SEQ ID NO: 1427190 - RNA, 14 nt, Human
gcaaggucauuuuu

SEQ ID NO: 1427191 - RNA, 13 nt, Human
gcaacagaucugg

SEQ ID NO: 1427192 - RNA, 12 nt, Human
gcaacagaucug

SEQ ID NO: 1427193 - RNA, 15 nt, Human
gcaacagaucaguaa

SEQ ID NO: 1427194 - RNA, 19 nt, Human
gcaacacuggucugcuguu

SEQ ID NO: 1427195 - RNA, 18 nt, Human
gcaacacuggucugcugu

SEQ ID NO: 1427196 - RNA, 22 nt, Human
gcaaaucgaaugaaauuaacug

SEQ ID NO: 1427197 - RNA, 16 nt, Human
gcaacagaucaguaaa

SEQ ID NO: 1427198 - RNA, 22 nt, Human
gcaacagaucuggaaccucagc

SEQ ID NO: 1427199 - RNA, 20 nt, Human
gcaacagaucuggaaccuca

SEQ ID NO: 1427200 - RNA, 18 nt, Human
gcaacagaucuggaaccu

SEQ ID NO: 1427201 - RNA, 17 nt, Human
gcaacagaucuggaacc

SEQ ID NO: 1427202 - RNA, 16 nt, Human
gcaacagaucuggaac

SEQ ID NO: 1427203 - RNA, 14 nt, Human
gcaacagaucugga

SEQ ID NO: 1427204 - RNA, 23 nt, Human
gcaagaaggcaaaaauaguuugg

SEQ ID NO: 1427205 - RNA, 20 nt, Human
gcaagaaggcaaaaauaguu

SEQ ID NO: 1427206 - RNA, 16 nt, Human
gcaagaaggcaaaaau

SEQ ID NO: 1427207 - RNA, 14 nt, Human
gcaagaaggaggcu

SEQ ID NO: 1427208 - RNA, 23 nt, Human
gcaagaggccguggcugcugugg

SEQ ID NO: 1427209 - RNA, 22 nt, Human
gcaagaggccguggcugcugug

SEQ ID NO: 1427210 - RNA, 20 nt, Human
gcaagaggccguggcugcug

SEQ ID NO: 1427211 - RNA, 18 nt, Human
gcaagaggccguggcugc

SEQ ID NO: 1427212 - RNA, 22 nt, Human
gcaagacuucucuuugccucaa

SEQ ID NO: 1427213 - RNA, 21 nt, Human
gcaagacuucucuuugccuca

SEQ ID NO: 1427214 - RNA, 19 nt, Human
gcaagacuucucuuugccu

SEQ ID NO: 1427215 - RNA, 15 nt, Human
gcaagaccaguugaa

SEQ ID NO: 1427216 - RNA, 21 nt, Human
gcaagaaggcaaaaauaguuu

SEQ ID NO: 1427217 - RNA, 21 nt, Human
gcaagaaucagagaaggaaca

SEQ ID NO: 1427218 - RNA, 21 nt, Human
gcaaaucaccacaaacuguaa

SEQ ID NO: 1427219 - RNA, 17 nt, Human
gcaaaucaggcuuuugu

SEQ ID NO: 1427220 - RNA, 14 nt, Human
gcaaaucauuuguu

SEQ ID NO: 1427221 - RNA, 18 nt, Human
gcaaaucauuuguuuaaa

SEQ ID NO: 1427222 - RNA, 19 nt, Human
gcaaagccuguucauggca

SEQ ID NO: 1427223 - RNA, 12 nt, Human
gcaaagccuguu

SEQ ID NO: 1427224 - RNA, 11 nt, Human
gcaaagccugu

SEQ ID NO: 1427225 - RNA, 23 nt, Human
gcaaagcccccagagcccaggcu

SEQ ID NO: 1427226 - RNA, 19 nt, Human
gcaaagcccccagagccca

SEQ ID NO: 1427227 - RNA, 15 nt, Human
gcaaagcccccagag

SEQ ID NO: 1427228 - RNA, 13 nt, Human
gcaaagcccccag

SEQ ID NO: 1427229 - RNA, 16 nt, Human
gcaaaguaucccuacu

SEQ ID NO: 1427230 - RNA, 12 nt, Human
gcaaacacuuaa

SEQ ID NO: 1427231 - RNA, 17 nt, Human
gcaaaauugcaaaucuu

SEQ ID NO: 1427232 - RNA, 13 nt, Human
gcaaaauugcaaa

SEQ ID NO: 1427233 - RNA, 17 nt, Human
gauuuuuuaauaauuua

SEQ ID NO: 1427234 - RNA, 16 nt, Human
gauuuuuuaauaauuu

SEQ ID NO: 1427235 - RNA, 22 nt, Human
gauuuuuguuuuguuuuuacaa

SEQ ID NO: 1427236 - RNA, 13 nt, Human
gauuuuugccucu

SEQ ID NO: 1427237 - RNA, 15 nt, Human
gauuuuucuuuacaa

SEQ ID NO: 1427238 - RNA, 16 nt, Human
gcaaagccaggucccu

SEQ ID NO: 1427239 - RNA, 21 nt, Human
gcaaacaggaucaguuaacua

SEQ ID NO: 1427240 - RNA, 18 nt, Human
gauugcaauaucugaagc

SEQ ID NO: 1427241 - RNA, 14 nt, Human
gauucuaaagauuc

SEQ ID NO: 1427242 - RNA, 13 nt, Human
gauucuaaagauu

SEQ ID NO: 1427243 - RNA, 12 nt, Human
gauucuaaagau

SEQ ID NO: 1427244 - RNA, 11 nt, Human
gauucuaaaga

SEQ ID NO: 1427245 - RNA, 22 nt, Human
gauucuaaaaugugauguucua

SEQ ID NO: 1427246 - RNA, 12 nt, Human
gauucuaaaaug

SEQ ID NO: 1427247 - RNA, 11 nt, Human
gauucuaaaau

SEQ ID NO: 1427248 - RNA, 17 nt, Human
gauucgguaucccccca

SEQ ID NO: 1427249 - RNA, 16 nt, Human
gauucgguaucccccc

SEQ ID NO: 1427250 - RNA, 16 nt, Human
gauucgaaugacacug

SEQ ID NO: 1427251 - RNA, 17 nt, Human
gauucgaaugacacugu

SEQ ID NO: 1427252 - RNA, 20 nt, Human
gauuccuuuaacaacauguu

SEQ ID NO: 1427253 - RNA, 21 nt, Human
gauuccuuuaacaacauguuu

SEQ ID NO: 1427254 - RNA, 15 nt, Human
gauuccuuuaacaac

SEQ ID NO: 1427255 - RNA, 14 nt, Human
gauuccuuuaacaa

SEQ ID NO: 1427256 - RNA, 13 nt, Human
gauuccuuuaaca

SEQ ID NO: 1427257 - RNA, 12 nt, Human
gauuccuuccca

SEQ ID NO: 1427258 - RNA, 13 nt, Human
gauuccuucccau

SEQ ID NO: 1427259 - RNA, 18 nt, Human
gauuccuuagacucuuuu

SEQ ID NO: 1427260 - RNA, 22 nt, Human
gaugggggaacucagauccagg

SEQ ID NO: 1427261 - RNA, 20 nt, Human
gaugggggaacucagaucca

SEQ ID NO: 1427262 - RNA, 19 nt, Human
gaugggggaacucagaucc

SEQ ID NO: 1427263 - RNA, 16 nt, Human
gaugggggaacucaga

SEQ ID NO: 1427264 - RNA, 23 nt, Human
gauggggcaggccaccuggcucu

SEQ ID NO: 1427265 - RNA, 21 nt, Human
gauggcuuugaaugcggccca

SEQ ID NO: 1427266 - RNA, 16 nt, Human
gauggggaccagcagc

SEQ ID NO: 1427267 - RNA, 18 nt, Human
gauggggaccagcagccc

SEQ ID NO: 1427268 - RNA, 18 nt, Human
gauggggguuucaccaua

SEQ ID NO: 1427269 - RNA, 16 nt, Human
gauggggucuguaaaa

SEQ ID NO: 1427270 - RNA, 19 nt, Human
gauucauaguaacuucuua

SEQ ID NO: 1427271 - RNA, 18 nt, Human
gauuccauugguccaaga

SEQ ID NO: 1427272 - RNA, 19 nt, Human
gauuccagagcacugcucc

SEQ ID NO: 1427273 - RNA, 14 nt, Human
gauuugucccaggu

SEQ ID NO: 1427274 - RNA, 19 nt, Human
gauuuguaacccacugaga

SEQ ID NO: 1427275 - RNA, 14 nt, Human
gauuuguacugaaa

SEQ ID NO: 1427276 - RNA, 22 nt, Human
gauuugugucugugacuuuugu

SEQ ID NO: 1427277 - RNA, 19 nt, Human
gauuuucaaagcuuuuucc

SEQ ID NO: 1427278 - RNA, 18 nt, Human
gauuuucaaagcuuuuuc

SEQ ID NO: 1427279 - RNA, 20 nt, Human
gauuuuucuuuacaaaacaa

SEQ ID NO: 1427280 - RNA, 14 nt, Human
gauuuuucuuuaca

SEQ ID NO: 1427281 - RNA, 15 nt, Human
gauuuuucuuuaacu

SEQ ID NO: 1427282 - RNA, 13 nt, Human
gauuuuucuuuaa

SEQ ID NO: 1427283 - RNA, 12 nt, Human
gauuuuucuuua

SEQ ID NO: 1427284 - RNA, 15 nt, Human
gauuuuuaugucugg

SEQ ID NO: 1427285 - RNA, 16 nt, Human
gauuuucugguucuaa

SEQ ID NO: 1427286 - RNA, 15 nt, Human
gauuuucugguucua

SEQ ID NO: 1427287 - RNA, 20 nt, Human
gauuuucugcuacuuugcug

SEQ ID NO: 1427288 - RNA, 14 nt, Human
gauuuucaguuacu

SEQ ID NO: 1427289 - RNA, 12 nt, Human
gauuuucaguua

SEQ ID NO: 1427290 - RNA, 19 nt, Human
gauuuucagcccucagaau

SEQ ID NO: 1427291 - RNA, 11 nt, Human
gauuuucagcc

SEQ ID NO: 1427292 - RNA, 15 nt, Human
gauuuucagcccuca

SEQ ID NO: 1427293 - RNA, 13 nt, Human
gauuuuccaaaug

SEQ ID NO: 1427294 - RNA, 15 nt, Human
gauuuuccugaaaac

SEQ ID NO: 1427295 - RNA, 21 nt, Human
gauuugcauugaacacaaacu

SEQ ID NO: 1427296 - RNA, 21 nt, Human
gauuucuguuuagauaauaca

SEQ ID NO: 1427297 - RNA, 11 nt, Human
gauuucuguuu

SEQ ID NO: 1427298 - RNA, 19 nt, Human
gauuucuguuuagauaaua

SEQ ID NO: 1427299 - RNA, 20 nt, Human
gauuuggcuugacaaaggca

SEQ ID NO: 1427300 - RNA, 22 nt, Human
gauuuggucaacacuaacauga

SEQ ID NO: 1427301 - RNA, 14 nt, Human
gauuucugaggaaa

SEQ ID NO: 1427302 - RNA, 18 nt, Human
gauuuccguuaaaauacc

SEQ ID NO: 1427303 - RNA, 15 nt, Human
gauuuccguuaaaau

SEQ ID NO: 1427304 - RNA, 19 nt, Human
gauugcagaaaauucugug

SEQ ID NO: 1427305 - RNA, 23 nt, Human
gauugcacguggccucuugagca

SEQ ID NO: 1427306 - RNA, 20 nt, Human
gauugcacguggccucuuga

SEQ ID NO: 1427307 - RNA, 19 nt, Human
gauugcacguggccucuug

SEQ ID NO: 1427308 - RNA, 17 nt, Human
gauugcacguggccucu

SEQ ID NO: 1427309 - RNA, 16 nt, Human
gauugcacguggccuc

SEQ ID NO: 1427310 - RNA, 15 nt, Human
gauugcacguggccu

SEQ ID NO: 1427311 - RNA, 21 nt, Human
gauugcaauaucugaagcccu

SEQ ID NO: 1427312 - RNA, 15 nt, Human
gauuuccagccuucu

SEQ ID NO: 1427313 - RNA, 23 nt, Human
gcagaauccuaggcuccacccca

SEQ ID NO: 1427314 - RNA, 14 nt, Human
gcagaauaguauuu

SEQ ID NO: 1427315 - RNA, 22 nt, Human
gcacuuccucucgcggcccuca

SEQ ID NO: 1427316 - RNA, 20 nt, Human
gcacuuccucucgcggcccu

SEQ ID NO: 1427317 - RNA, 18 nt, Human
gcacuucaaauucaaaua

SEQ ID NO: 1427318 - RNA, 18 nt, Human
gcacuuauuuaaugccga

SEQ ID NO: 1427319 - RNA, 22 nt, Human
gcacuuacugguaggaccaagc

SEQ ID NO: 1427320 - RNA, 23 nt, Human
gcacuguaaaaugugggauuaug

SEQ ID NO: 1427321 - RNA, 16 nt, Human
gcacuguaaaaugugg

SEQ ID NO: 1427322 - RNA, 14 nt, Human
gcacuguaaaaugu

SEQ ID NO: 1427323 - RNA, 13 nt, Human
gcacuguaaaaug

SEQ ID NO: 1427324 - RNA, 12 nt, Human
gcacuguaaaau

SEQ ID NO: 1427325 - RNA, 9 nt, Human
gcacuguaa

SEQ ID NO: 1427326 - RNA, 18 nt, Human
gcacuuaaagcuuucaga

SEQ ID NO: 1427327 - RNA, 20 nt, Human
gcagacaggccccgugaggc

SEQ ID NO: 1427328 - RNA, 15 nt, Human
gcagacagcuccacc

SEQ ID NO: 1427329 - RNA, 13 nt, Human
gcacugcccuggu

SEQ ID NO: 1427330 - RNA, 12 nt, Human
gcacugcccugg

SEQ ID NO: 1427331 - RNA, 21 nt, Human
gcacugcccauggacaggcug

SEQ ID NO: 1427332 - RNA, 23 nt, Human
gcacugccaggagggacaaagga

SEQ ID NO: 1427333 - RNA, 18 nt, Human
gcacugccaggagggaca

SEQ ID NO: 1427334 - RNA, 17 nt, Human
gcacugccaggagggac

SEQ ID NO: 1427335 - RNA, 16 nt, Human
gcacugccaggaggga

SEQ ID NO: 1427336 - RNA, 15 nt, Human
gcacugccaggaggg

SEQ ID NO: 1427337 - RNA, 14 nt, Human
gcacugccaggagg

SEQ ID NO: 1427338 - RNA, 13 nt, Human
gcacugccaggag

SEQ ID NO: 1427339 - RNA, 14 nt, Human
gcacugccacuggg

SEQ ID NO: 1427340 - RNA, 13 nt, Human
gcacugccacugg

SEQ ID NO: 1427341 - RNA, 19 nt, Human
gcacguggccucuugagca

SEQ ID NO: 1427342 - RNA, 17 nt, Human
gcacguggccucuugag

SEQ ID NO: 1427343 - RNA, 15 nt, Human
gcacguggccucuug

SEQ ID NO: 1427344 - RNA, 14 nt, Human
gcacguggccucuu

SEQ ID NO: 1427345 - RNA, 13 nt, Human
gcacguggccucu

SEQ ID NO: 1427346 - RNA, 18 nt, Human
gcacguaaaguacuugua

SEQ ID NO: 1427347 - RNA, 21 nt, Human
gcacguaaaguacuuguaguu

SEQ ID NO: 1427348 - RNA, 17 nt, Human
gcacguaaaguacuugu

SEQ ID NO: 1427349 - RNA, 19 nt, Human
gcacugccugcucccaucc

SEQ ID NO: 1427350 - RNA, 21 nt, Human
gcacugccugcucccauccug

SEQ ID NO: 1427351 - RNA, 19 nt, Human
gcacugcccugguggcccu

SEQ ID NO: 1427352 - RNA, 23 nt, Human
gcaccauucugacucgguuucuc

SEQ ID NO: 1427353 - RNA, 17 nt, Human
gcaccauucugacucgg

SEQ ID NO: 1427354 - RNA, 15 nt, Human
gcaccauucugacuc

SEQ ID NO: 1427355 - RNA, 23 nt, Human
gcaccaugcugcuggggaagaca

SEQ ID NO: 1427356 - RNA, 20 nt, Human
gcaccaugcugcuggggaag

SEQ ID NO: 1427357 - RNA, 18 nt, Human
gcaccaugcugcugggga

SEQ ID NO: 1427358 - RNA, 16 nt, Human
gcaccaugcugcuggg

SEQ ID NO: 1427359 - RNA, 13 nt, Human
gcaccaggaagcc

SEQ ID NO: 1427360 - RNA, 16 nt, Human
gcaccagaauguauau

SEQ ID NO: 1427361 - RNA, 22 nt, Human
gcaaugccacagcccugucagc

SEQ ID NO: 1427362 - RNA, 18 nt, Human
gcaccacuguguauuuaa

SEQ ID NO: 1427363 - RNA, 14 nt, Human
gcaccagacaccca

SEQ ID NO: 1427364 - RNA, 16 nt, Human
gcaccugggcccuggg

SEQ ID NO: 1427365 - RNA, 15 nt, Human
gcaccugggcccugg

SEQ ID NO: 1427366 - RNA, 18 nt, Human
gcaccuggcaucgcacca

SEQ ID NO: 1427367 - RNA, 22 nt, Human
gcaccuggaauauauaaccagu

SEQ ID NO: 1427368 - RNA, 21 nt, Human
gcacccuaguucuaccucagg

SEQ ID NO: 1427369 - RNA, 18 nt, Human
gcaccuggaauauauaac

SEQ ID NO: 1427370 - RNA, 21 nt, Human
gcaccuggaauauauaaccag

SEQ ID NO: 1427371 - RNA, 16 nt, Human
gcacgaccgccccagu

SEQ ID NO: 1427372 - RNA, 15 nt, Human
gcacgaaauguuauu

SEQ ID NO: 1427373 - RNA, 18 nt, Human
gcaccuuucuaguugaaa

SEQ ID NO: 1427374 - RNA, 17 nt, Human
gcaccuuucuaguugaa

SEQ ID NO: 1427375 - RNA, 13 nt, Human
gcaccuuucuagu

SEQ ID NO: 1427376 - RNA, 17 nt, Human
gcaccugggcccugggg

SEQ ID NO: 1427377 - RNA, 13 nt, Human
gcacgacagugga

SEQ ID NO: 1427378 - RNA, 14 nt, Human
gcacggcagccaca

SEQ ID NO: 1427379 - RNA, 12 nt, Human
gcacgauuucug

SEQ ID NO: 1427380 - RNA, 22 nt, Human
gcacggcucuguccccagccug

SEQ ID NO: 1427381 - RNA, 20 nt, Human
gcacggcucuguccccagcc

SEQ ID NO: 1427382 - RNA, 19 nt, Human
gcacggcucuguccccagc

SEQ ID NO: 1427383 - RNA, 18 nt, Human
gcacggcucuguccccag

SEQ ID NO: 1427384 - RNA, 14 nt, Human
gcacggcucugucc

SEQ ID NO: 1427385 - RNA, 16 nt, Human
gcacggcagccacagc

SEQ ID NO: 1427386 - RNA, 16 nt, Human
gcaggcagaggcccag

SEQ ID NO: 1427387 - RNA, 15 nt, Human
gcaggcagaggccca

SEQ ID NO: 1427388 - RNA, 21 nt, Human
gcaggcagccagcaucugggc

SEQ ID NO: 1427389 - RNA, 19 nt, Human
gcaggcagccagcaucugg

SEQ ID NO: 1427390 - RNA, 14 nt, Human
gcaggcagccagca

SEQ ID NO: 1427391 - RNA, 21 nt, Human
gcaggcagaggcccaggcugc

SEQ ID NO: 1427392 - RNA, 20 nt, Human
gcaggcagaggcccaggcug

SEQ ID NO: 1427393 - RNA, 19 nt, Human
gcaggcagaggcccaggcu

SEQ ID NO: 1427394 - RNA, 23 nt, Human
gcaggaaaugaaaaugucuugug

SEQ ID NO: 1427395 - RNA, 21 nt, Human
gcaggaaaugaaaaugucuug

SEQ ID NO: 1427396 - RNA, 19 nt, Human
gcagcuuuagaaucccagc

SEQ ID NO: 1427397 - RNA, 16 nt, Human
gcagcuuuuaaaagau

SEQ ID NO: 1427398 - RNA, 11 nt, Human
gcaggaaggcu

SEQ ID NO: 1427399 - RNA, 22 nt, Human
gcaggaaggagcugccuggacc

SEQ ID NO: 1427400 - RNA, 23 nt, Human
gcaggaaggagcugccuggaccc

SEQ ID NO: 1427401 - RNA, 21 nt, Human
gcaggaaggagcugccuggac

SEQ ID NO: 1427402 - RNA, 20 nt, Human
gcaggaaggagcugccugga

SEQ ID NO: 1427403 - RNA, 19 nt, Human
gcaggaaggagcugccugg

SEQ ID NO: 1427404 - RNA, 18 nt, Human
gcaggaaggagcugccug

SEQ ID NO: 1427405 - RNA, 17 nt, Human
gcaggaaggagcugccu

SEQ ID NO: 1427406 - RNA, 16 nt, Human
gcaggaaggagcugcc

SEQ ID NO: 1427407 - RNA, 15 nt, Human
gcaggaaggagcugc

SEQ ID NO: 1427408 - RNA, 14 nt, Human
gcaggaaggagcug

SEQ ID NO: 1427409 - RNA, 13 nt, Human
gcaggaaggagcu

SEQ ID NO: 1427410 - RNA, 23 nt, Human
gcagcuuguagccagccggggcg

SEQ ID NO: 1427411 - RNA, 22 nt, Human
gcagcuuguagccagccggggc

SEQ ID NO: 1427412 - RNA, 21 nt, Human
gcagcuuguagccagccgggg

SEQ ID NO: 1427413 - RNA, 20 nt, Human
gcagcuuguagccagccggg

SEQ ID NO: 1427414 - RNA, 19 nt, Human
gcagcuuguagccagccgg

SEQ ID NO: 1427415 - RNA, 18 nt, Human
gcagcuuguagccagccg

SEQ ID NO: 1427416 - RNA, 17 nt, Human
gcagcuuguagccagcc

SEQ ID NO: 1427417 - RNA, 16 nt, Human
gcagcuuguagccagc

SEQ ID NO: 1427418 - RNA, 15 nt, Human
gcagcuuguagccag

SEQ ID NO: 1427419 - RNA, 14 nt, Human
gcagcuuguagcca

SEQ ID NO: 1427420 - RNA, 18 nt, Human
gcagcucaagagauccca

SEQ ID NO: 1427421 - RNA, 23 nt, Human
gcagcucaagcagcgaccgcccc

SEQ ID NO: 1427422 - RNA, 16 nt, Human
gcagcucaagagaucc

SEQ ID NO: 1427423 - RNA, 12 nt, Human
gcagccuuguga

SEQ ID NO: 1427424 - RNA, 17 nt, Human
gcagccuggggcuggcc

SEQ ID NO: 1427425 - RNA, 14 nt, Human
gcagccuggggcug

SEQ ID NO: 1427426 - RNA, 10 nt, Human
gcagccuggg

SEQ ID NO: 1427427 - RNA, 20 nt, Human
gcagcccugcugcugccugc

SEQ ID NO: 1427428 - RNA, 21 nt, Human
gcagcccugcugcugccugcc

SEQ ID NO: 1427429 - RNA, 23 nt, Human
gcagcccccagcucccaccuccc

SEQ ID NO: 1427430 - RNA, 19 nt, Human
gcagcccccagcucccacc

SEQ ID NO: 1427431 - RNA, 14 nt, Human
gcagcccccagcuc

SEQ ID NO: 1427432 - RNA, 19 nt, Human
gcagcccccacccccaagg

SEQ ID NO: 1427433 - RNA, 17 nt, Human
gcagcaauuuaaauguu

SEQ ID NO: 1427434 - RNA, 12 nt, Human
gcagcaauuuaa

SEQ ID NO: 1427435 - RNA, 15 nt, Human
gcagcaauuuaaaug

SEQ ID NO: 1427436 - RNA, 16 nt, Human
gcagcaauuuaaaugu

SEQ ID NO: 1427437 - RNA, 16 nt, Human
gcagcaauaaagcagc

SEQ ID NO: 1427438 - RNA, 23 nt, Human
gcagcaauaaagcagcguuucua

SEQ ID NO: 1427439 - RNA, 15 nt, Human
gcagacccugcccuu

SEQ ID NO: 1427440 - RNA, 14 nt, Human
gcagacccugcccu

SEQ ID NO: 1427441 - RNA, 17 nt, Human
gcagaccacauugcuuu

SEQ ID NO: 1427442 - RNA, 23 nt, Human
gcagaccacgcccguccugccug

SEQ ID NO: 1427443 - RNA, 20 nt, Human
gcagaccacgcccguccugc

SEQ ID NO: 1427444 - RNA, 21 nt, Human
gcagaccaccccgccugcccu

SEQ ID NO: 1427445 - RNA, 17 nt, Human
gcagaccaccccgccug

SEQ ID NO: 1427446 - RNA, 13 nt, Human
gcagaccaccccg

SEQ ID NO: 1427447 - RNA, 19 nt, Human
gcagacaugugcacuugaa

SEQ ID NO: 1427448 - RNA, 17 nt, Human
gcagacauuuuaaaaaa

SEQ ID NO: 1427449 - RNA, 14 nt, Human
gcagauccaggacu

SEQ ID NO: 1427450 - RNA, 21 nt, Human
gcagauuuucagcaaacucuu

SEQ ID NO: 1427451 - RNA, 19 nt, Human
gcagauucucccuugcucu

SEQ ID NO: 1427452 - RNA, 21 nt, Human
gcagauucucccuugcucugc

SEQ ID NO: 1427453 - RNA, 19 nt, Human
gcagauucagaaaugaggc

SEQ ID NO: 1427454 - RNA, 21 nt, Human
gcagauucagaaaugaggcca

SEQ ID NO: 1427455 - RNA, 17 nt, Human
gcagauucagaaaugag

SEQ ID NO: 1427456 - RNA, 15 nt, Human
gcaguucugaagaag

SEQ ID NO: 1427457 - RNA, 17 nt, Human
gcaguucugaagaagau

SEQ ID NO: 1427458 - RNA, 13 nt, Human
gcauagaaguaaa

SEQ ID NO: 1427459 - RNA, 22 nt, Human
gcaguggcgugaucucagcuca

SEQ ID NO: 1427460 - RNA, 15 nt, Human
gcagugugaggccag

SEQ ID NO: 1427461 - RNA, 18 nt, Human
gcagugucuguguuuuga

SEQ ID NO: 1427462 - RNA, 18 nt, Human
gcaguggcgcgaucucag

SEQ ID NO: 1427463 - RNA, 22 nt, Human
gcaguggcgcgaucucagcuca

SEQ ID NO: 1427464 - RNA, 23 nt, Human
gcaguggugguuuucuguucuuu

SEQ ID NO: 1427465 - RNA, 23 nt, Human
gcauaugaguaagggcacugacg

SEQ ID NO: 1427466 - RNA, 19 nt, Human
gcauaugaguaagggcacu

SEQ ID NO: 1427467 - RNA, 12 nt, Human
gcauaucugccu

SEQ ID NO: 1427468 - RNA, 14 nt, Human
gcauaucugccuuu

SEQ ID NO: 1427469 - RNA, 15 nt, Human
gcauaucugccuuua

SEQ ID NO: 1427470 - RNA, 16 nt, Human
gcauaucugccuuuau

SEQ ID NO: 1427471 - RNA, 18 nt, Human
gcauaucugccuuuauug

SEQ ID NO: 1427472 - RNA, 21 nt, Human
gcauaucugccuuuauugugu

SEQ ID NO: 1427473 - RNA, 22 nt, Human
gcauaucugccuuuauuguguu

SEQ ID NO: 1427474 - RNA, 13 nt, Human
gcauaucauaaug

SEQ ID NO: 1427475 - RNA, 20 nt, Human
gcauaguaccaaucauuuua

SEQ ID NO: 1427476 - RNA, 13 nt, Human
gcauacuuuuuaa

SEQ ID NO: 1427477 - RNA, 17 nt, Human
gcauagguuuaauaauu

SEQ ID NO: 1427478 - RNA, 14 nt, Human
gcaggggccuggag

SEQ ID NO: 1427479 - RNA, 13 nt, Human
gcaggggccugga

SEQ ID NO: 1427480 - RNA, 15 nt, Human
gcaggggccuccaug

SEQ ID NO: 1427481 - RNA, 20 nt, Human
gcaggggccgggggcagucu

SEQ ID NO: 1427482 - RNA, 19 nt, Human
gcaggggccgggggcaguc

SEQ ID NO: 1427483 - RNA, 20 nt, Human
gcaggggccuggagauccuc

SEQ ID NO: 1427484 - RNA, 16 nt, Human
gcaggggccuggagau

SEQ ID NO: 1427485 - RNA, 22 nt, Human
gcagggccggggaacuggccaa

SEQ ID NO: 1427486 - RNA, 23 nt, Human
gcagggccggggaacuggccaag

SEQ ID NO: 1427487 - RNA, 20 nt, Human
gcagggccggggaacuggcc

SEQ ID NO: 1427488 - RNA, 14 nt, Human
gcagggccggggaa

SEQ ID NO: 1427489 - RNA, 13 nt, Human
gcagggccgggga

SEQ ID NO: 1427490 - RNA, 21 nt, Human
gcagggccccaggcauugcca

SEQ ID NO: 1427491 - RNA, 13 nt, Human
gcagggcagucau

SEQ ID NO: 1427492 - RNA, 22 nt, Human
gcagggugggcuuguggggccu

SEQ ID NO: 1427493 - RNA, 22 nt, Human
gcagggugcaguaucaugcccu

SEQ ID NO: 1427494 - RNA, 22 nt, Human
gcagguaugaucggcaggacac

SEQ ID NO: 1427495 - RNA, 13 nt, Human
gcagugcuuuugg

SEQ ID NO: 1427496 - RNA, 22 nt, Human
gcaguggcaggcagaggcccag

SEQ ID NO: 1427497 - RNA, 15 nt, Human
gcaguggcaggcaga

SEQ ID NO: 1427498 - RNA, 23 nt, Human
gcaguggauggccgugaaugggu

SEQ ID NO: 1427499 - RNA, 12 nt, Human
gcaguggccuua

SEQ ID NO: 1427500 - RNA, 22 nt, Human
gcaguggcaucaucucagcuca

SEQ ID NO: 1427501 - RNA, 22 nt, Human
gcaugagggguuccuccccucc

SEQ ID NO: 1427502 - RNA, 20 nt, Human
gcaugagggguuccuccccu

SEQ ID NO: 1427503 - RNA, 19 nt, Human
gcaugagggguuccucccc

SEQ ID NO: 1427504 - RNA, 17 nt, Human
gcaugagggguuccucc

SEQ ID NO: 1427505 - RNA, 14 nt, Human
gcaugagaaauaca

SEQ ID NO: 1427506 - RNA, 17 nt, Human
gcaugagaaauacaaaa

SEQ ID NO: 1427507 - RNA, 15 nt, Human
gcaugagaggaggca

SEQ ID NO: 1427508 - RNA, 17 nt, Human
gcaugagaggaggcagc

SEQ ID NO: 1427509 - RNA, 15 nt, Human
gcaugcggcccagga

SEQ ID NO: 1427510 - RNA, 20 nt, Human
gcauggauauaguuuuacuu

SEQ ID NO: 1427511 - RNA, 18 nt, Human
gcauggauuucuuugaaa

SEQ ID NO: 1427512 - RNA, 16 nt, Human
gcauggauuucuuuga

SEQ ID NO: 1427513 - RNA, 15 nt, Human
gcauggauuucuuug

SEQ ID NO: 1427514 - RNA, 13 nt, Human
gcauuauauuuau

SEQ ID NO: 1427515 - RNA, 22 nt, Human
gcaucuuggggggguggccgcu

SEQ ID NO: 1427516 - RNA, 19 nt, Human
gcaucuuuuguauuaagaa

SEQ ID NO: 1427517 - RNA, 23 nt, Human
gcaucuuuuguauuaagaaagga

SEQ ID NO: 1427518 - RNA, 16 nt, Human
gcaucuuuuguauuaa

SEQ ID NO: 1427519 - RNA, 12 nt, Human
gcaucuuuugua

SEQ ID NO: 1427520 - RNA, 18 nt, Human
gcaugaaguaauaugcac

SEQ ID NO: 1427521 - RNA, 22 nt, Human
gcaucagaaagggagggcucug

SEQ ID NO: 1427522 - RNA, 23 nt, Human
gcaucagaaagggagggcucuga

SEQ ID NO: 1427523 - RNA, 21 nt, Human
gcaucagaaagggagggcucu

SEQ ID NO: 1427524 - RNA, 19 nt, Human
gcaucagaaagggagggcu

SEQ ID NO: 1427525 - RNA, 22 nt, Human
gcaucagacugugaaccccacg

SEQ ID NO: 1427526 - RNA, 18 nt, Human
gcaucagaaagggagggc

SEQ ID NO: 1427527 - RNA, 16 nt, Human
gcaucagaaagggagg

SEQ ID NO: 1427528 - RNA, 17 nt, Human
gcaucagaaagaggcag

SEQ ID NO: 1427529 - RNA, 13 nt, Human
gcaucagaaagag

SEQ ID NO: 1427530 - RNA, 23 nt, Human
gcaucacuuaacggaccaaagca

SEQ ID NO: 1427531 - RNA, 13 nt, Human
gcaucuguuuauu

SEQ ID NO: 1427532 - RNA, 16 nt, Human
gcaucugaaaauugau

SEQ ID NO: 1427533 - RNA, 17 nt, Human
gccaaaccucaccaacu

SEQ ID NO: 1427534 - RNA, 22 nt, Human
gccaaaaagugaaauaaugugu

SEQ ID NO: 1427535 - RNA, 13 nt, Human
gccaaaaauagcu

SEQ ID NO: 1427536 - RNA, 17 nt, Human
gccaaaaagugaaauaa

SEQ ID NO: 1427537 - RNA, 16 nt, Human
gccaaaaaaaaauaca

SEQ ID NO: 1427538 - RNA, 22 nt, Human
gcauuuguuucuuucucugagg

SEQ ID NO: 1427539 - RNA, 18 nt, Human
gcauuuuguuugguauug

SEQ ID NO: 1427540 - RNA, 21 nt, Human
gcauuuuguuugguauuguau

SEQ ID NO: 1427541 - RNA, 23 nt, Human
gcauuuuguuugguauuguauuu

SEQ ID NO: 1427542 - RNA, 18 nt, Human
gcauuuguuugaacugau

SEQ ID NO: 1427543 - RNA, 19 nt, Human
gcauugaacacaaacugua

SEQ ID NO: 1427544 - RNA, 18 nt, Human
gcauugaacacaaacugu

SEQ ID NO: 1427545 - RNA, 16 nt, Human
gcauugaacacaaacu

SEQ ID NO: 1427546 - RNA, 12 nt, Human
gcauugaacaca

SEQ ID NO: 1427547 - RNA, 16 nt, Human
gcauugaaaagagcug

SEQ ID NO: 1427548 - RNA, 20 nt, Human
gcauuuguuuauguaauuuc

SEQ ID NO: 1427549 - RNA, 19 nt, Human
gcauuuguuuauguaauuu

SEQ ID NO: 1427550 - RNA, 18 nt, Human
gcauuuguuuauguaauu

SEQ ID NO: 1427551 - RNA, 16 nt, Human
gcauuuguguugaaga

SEQ ID NO: 1427552 - RNA, 16 nt, Human
gcauuuguuugaacug

SEQ ID NO: 1427553 - RNA, 22 nt, Human
gcauuauuggaauauaauuguu

SEQ ID NO: 1427554 - RNA, 23 nt, Human
gcauuauuggaauauaauuguuu

SEQ ID NO: 1427555 - RNA, 19 nt, Human
gcauuaucuagauacugua

SEQ ID NO: 1427556 - RNA, 17 nt, Human
gcauuaucuagauacug

SEQ ID NO: 1427557 - RNA, 13 nt, Human
gcauucuucucug

SEQ ID NO: 1427558 - RNA, 14 nt, Human
gcauucuucucugu

SEQ ID NO: 1427559 - RNA, 19 nt, Human
gcauucuggaccucugggu

SEQ ID NO: 1427560 - RNA, 16 nt, Human
gcauucuggaccucug

SEQ ID NO: 1427561 - RNA, 20 nt, Human
gcauucugccucucuaggac

SEQ ID NO: 1427562 - RNA, 16 nt, Human
gcauucagaagaaaaa

SEQ ID NO: 1427563 - RNA, 18 nt, Human
gcauucagaagaaaaaga

SEQ ID NO: 1427564 - RNA, 19 nt, Human
gcauucaaauguauuacag

SEQ ID NO: 1427565 - RNA, 16 nt, Human
gcccccugucucucag

SEQ ID NO: 1427566 - RNA, 14 nt, Human
gcccccugucucuc

SEQ ID NO: 1427567 - RNA, 15 nt, Human
gcccccugcugccau

SEQ ID NO: 1427568 - RNA, 18 nt, Human
gcccccugccccccagcc

SEQ ID NO: 1427569 - RNA, 14 nt, Human
gcccccugcccccc

SEQ ID NO: 1427570 - RNA, 12 nt, Human
gcccccacccug

SEQ ID NO: 1427571 - RNA, 11 nt, Human
gcccccacccu

SEQ ID NO: 1427572 - RNA, 14 nt, Human
gcccccaccccauu

SEQ ID NO: 1427573 - RNA, 22 nt, Human
gcccccaaccauuuccucagac

SEQ ID NO: 1427574 - RNA, 21 nt, Human
gcccccaaccauuuccucaga

SEQ ID NO: 1427575 - RNA, 15 nt, Human
gccccauuccuggga

SEQ ID NO: 1427576 - RNA, 12 nt, Human
gccccauuccug

SEQ ID NO: 1427577 - RNA, 12 nt, Human
gccccaggccug

SEQ ID NO: 1427578 - RNA, 20 nt, Human
gccccagcacagcuugaccu

SEQ ID NO: 1427579 - RNA, 13 nt, Human
gccccagcacagc

SEQ ID NO: 1427580 - RNA, 19 nt, Human
gccccaggggaacacuggg

SEQ ID NO: 1427581 - RNA, 19 nt, Human
gccccaggcucguggacug

SEQ ID NO: 1427582 - RNA, 15 nt, Human
gccccaggccugaaa

SEQ ID NO: 1427583 - RNA, 18 nt, Human
gccccaggggaacacugg

SEQ ID NO: 1427584 - RNA, 14 nt, Human
gccccagugacagc

SEQ ID NO: 1427585 - RNA, 22 nt, Human
gccccaguuccuguggcucccu

SEQ ID NO: 1427586 - RNA, 15 nt, Human
gccccaucagcucca

SEQ ID NO: 1427587 - RNA, 16 nt, Human
gccccaucagcuccag

SEQ ID NO: 1427588 - RNA, 17 nt, Human
gccccaucagcuccagc

SEQ ID NO: 1427589 - RNA, 14 nt, Human
gccccaucagugcu

SEQ ID NO: 1427590 - RNA, 20 nt, Human
gccccacccugggcccuggg

SEQ ID NO: 1427591 - RNA, 19 nt, Human
gccccacccugggcccugg

SEQ ID NO: 1427592 - RNA, 16 nt, Human
gccccacccugggccc

SEQ ID NO: 1427593 - RNA, 15 nt, Human
gccccacccugggcc

SEQ ID NO: 1427594 - RNA, 12 nt, Human
gcccaucagggu

SEQ ID NO: 1427595 - RNA, 21 nt, Human
gcccaucaggguaggcuggag

SEQ ID NO: 1427596 - RNA, 14 nt, Human
gccccacccugggc

SEQ ID NO: 1427597 - RNA, 22 nt, Human
gcccauaugcuaccaccagcug

SEQ ID NO: 1427598 - RNA, 23 nt, Human
gcccauaugcuaccaccagcugu

SEQ ID NO: 1427599 - RNA, 21 nt, Human
gcccauaugcuaccaccagcu

SEQ ID NO: 1427600 - RNA, 20 nt, Human
gcccauaugcuaccaccagc

SEQ ID NO: 1427601 - RNA, 21 nt, Human
gcccagggcugggaggaagga

SEQ ID NO: 1427602 - RNA, 20 nt, Human
gcccagggcugggaggaagg

SEQ ID NO: 1427603 - RNA, 17 nt, Human
gcccagggcugggagga

SEQ ID NO: 1427604 - RNA, 13 nt, Human
gccccacuccucu

SEQ ID NO: 1427605 - RNA, 20 nt, Human
gccccacuccucugcugacc

SEQ ID NO: 1427606 - RNA, 12 nt, Human
gccccacuccuc

SEQ ID NO: 1427607 - RNA, 24 nt, Human
gccccacccugggcccugggcugg

SEQ ID NO: 1427608 - RNA, 23 nt, Human
gccccacccugggcccugggcug

SEQ ID NO: 1427609 - RNA, 22 nt, Human
gccccacccugggcccugggcu

SEQ ID NO: 1427610 - RNA, 17 nt, Human
gccccacuuguccuuag

SEQ ID NO: 1427611 - RNA, 18 nt, Human
gccccacuuguccuuagc

SEQ ID NO: 1427612 - RNA, 16 nt, Human
gccccacuuguccuua

SEQ ID NO: 1427613 - RNA, 14 nt, Human
gccccacuuguccu

SEQ ID NO: 1427614 - RNA, 15 nt, Human
gcccagggcugggag

SEQ ID NO: 1427615 - RNA, 18 nt, Human
gcccagggcuccugcacu

SEQ ID NO: 1427616 - RNA, 16 nt, Human
gcccagggcuccugca

SEQ ID NO: 1427617 - RNA, 15 nt, Human
gcccagggcuccugc

SEQ ID NO: 1427618 - RNA, 14 nt, Human
gcccagggcuccug

SEQ ID NO: 1427619 - RNA, 12 nt, Human
gcccagggcucc

SEQ ID NO: 1427620 - RNA, 21 nt, Human
gcccagggaggccgaagcuaa

SEQ ID NO: 1427621 - RNA, 13 nt, Human
gcccagggaggcc

SEQ ID NO: 1427622 - RNA, 12 nt, Human
gcccagggaggc

SEQ ID NO: 1427623 - RNA, 20 nt, Human
gcccaggcuggagugcagug

SEQ ID NO: 1427624 - RNA, 19 nt, Human
gcccaggcuggagugcagu

SEQ ID NO: 1427625 - RNA, 14 nt, Human
gcccaggccucacc

SEQ ID NO: 1427626 - RNA, 12 nt, Human
gcccaggccuca

SEQ ID NO: 1427627 - RNA, 13 nt, Human
gcccagagcccag

SEQ ID NO: 1427628 - RNA, 19 nt, Human
gcccgggagcucaggaacc

SEQ ID NO: 1427629 - RNA, 17 nt, Human
gcccgggagcucaggaa

SEQ ID NO: 1427630 - RNA, 15 nt, Human
gcccggcuccugguc

SEQ ID NO: 1427631 - RNA, 15 nt, Human
gcccgggagcucagg

SEQ ID NO: 1427632 - RNA, 22 nt, Human
gcccucauggccccucugaccu

SEQ ID NO: 1427633 - RNA, 19 nt, Human
gcccucauggccccucuga

SEQ ID NO: 1427634 - RNA, 14 nt, Human
gcccuccaggcuuu

SEQ ID NO: 1427635 - RNA, 18 nt, Human
gcccuccacaccugcggc

SEQ ID NO: 1427636 - RNA, 19 nt, Human
gcccuccacaccugcggcc

SEQ ID NO: 1427637 - RNA, 16 nt, Human
gcccuccacaccugcg

SEQ ID NO: 1427638 - RNA, 15 nt, Human
gcccuccacaccugc

SEQ ID NO: 1427639 - RNA, 14 nt, Human
gcccuccacaccug

SEQ ID NO: 1427640 - RNA, 13 nt, Human
gcccuccacaccu

SEQ ID NO: 1427641 - RNA, 17 nt, Human
gcccugcagacccugcc

SEQ ID NO: 1427642 - RNA, 16 nt, Human
gcccugcagacccugc

SEQ ID NO: 1427643 - RNA, 23 nt, Human
gcccugagccagggucuccagaa

SEQ ID NO: 1427644 - RNA, 22 nt, Human
gcccugagccagggucuccaga

SEQ ID NO: 1427645 - RNA, 21 nt, Human
gcccugagccagggucuccag

SEQ ID NO: 1427646 - RNA, 19 nt, Human
gcccugagccagggucucc

SEQ ID NO: 1427647 - RNA, 12 nt, Human
gcccugagccag

SEQ ID NO: 1427648 - RNA, 21 nt, Human
gcccucccuguuccccagaga

SEQ ID NO: 1427649 - RNA, 22 nt, Human
gcccucccuguuccccagagaa

SEQ ID NO: 1427650 - RNA, 23 nt, Human
gcccuccgccauucucaagcccu

SEQ ID NO: 1427651 - RNA, 20 nt, Human
gcccucccuguuccccagag

SEQ ID NO: 1427652 - RNA, 18 nt, Human
gcccucccuguuccccag

SEQ ID NO: 1427653 - RNA, 18 nt, Human
gccccucacccugccuua

SEQ ID NO: 1427654 - RNA, 17 nt, Human
gcccccugucucucagg

SEQ ID NO: 1427655 - RNA, 19 nt, Human
gccccucuggucgcuccug

SEQ ID NO: 1427656 - RNA, 18 nt, Human
gccccucuggucgcuccu

SEQ ID NO: 1427657 - RNA, 14 nt, Human
gccccucuggucgc

SEQ ID NO: 1427658 - RNA, 20 nt, Human
gccccucccucccagagcac

SEQ ID NO: 1427659 - RNA, 18 nt, Human
gccccucccucccagagc

SEQ ID NO: 1427660 - RNA, 16 nt, Human
gccccucccucccaga

SEQ ID NO: 1427661 - RNA, 16 nt, Human
gccccuccccuccaaa

SEQ ID NO: 1427662 - RNA, 17 nt, Human
gccccuccccuccaaaa

SEQ ID NO: 1427663 - RNA, 16 nt, Human
gccccucccccugcca

SEQ ID NO: 1427664 - RNA, 23 nt, Human
gccccuuucccuuguagcuccuc

SEQ ID NO: 1427665 - RNA, 21 nt, Human
gccccuuucccuuguagcucc

SEQ ID NO: 1427666 - RNA, 13 nt, Human
gccccuuuauaaa

SEQ ID NO: 1427667 - RNA, 12 nt, Human
gccccuuuauaa

SEQ ID NO: 1427668 - RNA, 15 nt, Human
gccccuuggacacgc

SEQ ID NO: 1427669 - RNA, 19 nt, Human
gccccuugacaacuggcag

SEQ ID NO: 1427670 - RNA, 23 nt, Human
gccccuucugcucagcucugggc

SEQ ID NO: 1427671 - RNA, 20 nt, Human
gccccuucugcucagcucug

SEQ ID NO: 1427672 - RNA, 19 nt, Human
gccccuucugcucagcucu

SEQ ID NO: 1427673 - RNA, 13 nt, Human
gcccgcacaccug

SEQ ID NO: 1427674 - RNA, 23 nt, Human
gcccgaggaggugucucaggcug

SEQ ID NO: 1427675 - RNA, 22 nt, Human
gcccgaggaggugucucaggcu

SEQ ID NO: 1427676 - RNA, 21 nt, Human
gcccgaggaggugucucaggc

SEQ ID NO: 1427677 - RNA, 20 nt, Human
gcccgaggaggugucucagg

SEQ ID NO: 1427678 - RNA, 19 nt, Human
gcccgaggaggugucucag

SEQ ID NO: 1427679 - RNA, 16 nt, Human
gccccugaacaagaau

SEQ ID NO: 1427680 - RNA, 23 nt, Human
gccccucuuggagaagucucagc

SEQ ID NO: 1427681 - RNA, 22 nt, Human
gccccucuuggagaagucucag

SEQ ID NO: 1427682 - RNA, 17 nt, Human
gccccucuuggagaagu

SEQ ID NO: 1427683 - RNA, 22 nt, Human
gccccucuggucgcuccugccc

SEQ ID NO: 1427684 - RNA, 20 nt, Human
gccccucuggucgcuccugc

SEQ ID NO: 1427685 - RNA, 15 nt, Human
gccccugggguggcc

SEQ ID NO: 1427686 - RNA, 22 nt, Human
gccccugagacaaauggaggcc

SEQ ID NO: 1427687 - RNA, 18 nt, Human
gccccuucugcucagcuc

SEQ ID NO: 1427688 - RNA, 17 nt, Human
gccccuucugcucagcu

SEQ ID NO: 1427689 - RNA, 15 nt, Human
gccccuucugcucag

SEQ ID NO: 1427690 - RNA, 14 nt, Human
gccccuucugcuca

SEQ ID NO: 1427691 - RNA, 21 nt, Human
gccccugggguggccaccagu

SEQ ID NO: 1427692 - RNA, 20 nt, Human
gccccuggucccucugcagu

SEQ ID NO: 1427693 - RNA, 13 nt, Human
gccaggcucucuu

SEQ ID NO: 1427694 - RNA, 15 nt, Human
gccaggcuaauuuuu

SEQ ID NO: 1427695 - RNA, 21 nt, Human
gccaggagcacggcucugucc

SEQ ID NO: 1427696 - RNA, 19 nt, Human
gccaggagcacggcucugu

SEQ ID NO: 1427697 - RNA, 18 nt, Human
gccaggagcacggcucug

SEQ ID NO: 1427698 - RNA, 22 nt, Human
gccaggagaagcucagcugcau

SEQ ID NO: 1427699 - RNA, 19 nt, Human
gccaggagaagcucagcug

SEQ ID NO: 1427700 - RNA, 17 nt, Human
gccaggagaagcucagc

SEQ ID NO: 1427701 - RNA, 15 nt, Human
gccaggagaagcuca

SEQ ID NO: 1427702 - RNA, 14 nt, Human
gccaggagaagcuc

SEQ ID NO: 1427703 - RNA, 13 nt, Human
gccaggagaagcu

SEQ ID NO: 1427704 - RNA, 12 nt, Human
gccaggagaagc

SEQ ID NO: 1427705 - RNA, 21 nt, Human
gccaggacucugcagccucag

SEQ ID NO: 1427706 - RNA, 20 nt, Human
gccaggacucugcagccuca

SEQ ID NO: 1427707 - RNA, 19 nt, Human
gccaggacucugcagccuc

SEQ ID NO: 1427708 - RNA, 18 nt, Human
gccaggacucugcagccu

SEQ ID NO: 1427709 - RNA, 17 nt, Human
gccaggacucugcagcc

SEQ ID NO: 1427710 - RNA, 16 nt, Human
gccaggacucugcagc

SEQ ID NO: 1427711 - RNA, 15 nt, Human
gccaggacucugcag

SEQ ID NO: 1427712 - RNA, 14 nt, Human
gccaggacucugca

SEQ ID NO: 1427713 - RNA, 13 nt, Human
gccaggacucugc

SEQ ID NO: 1427714 - RNA, 23 nt, Human
gccaggaccagucccagagcagg

SEQ ID NO: 1427715 - RNA, 22 nt, Human
gccaggaccagucaaccugggc

SEQ ID NO: 1427716 - RNA, 23 nt, Human
gccaggaauuucccaggacccug

SEQ ID NO: 1427717 - RNA, 22 nt, Human
gccaggaauuucccaggacccu

SEQ ID NO: 1427718 - RNA, 21 nt, Human
gccaggaauuucccaggaccc

SEQ ID NO: 1427719 - RNA, 20 nt, Human
gccaggaauuucccaggacc

SEQ ID NO: 1427720 - RNA, 19 nt, Human
gccaggaauuucccaggac

SEQ ID NO: 1427721 - RNA, 18 nt, Human
gccaggaauuucccagga

SEQ ID NO: 1427722 - RNA, 17 nt, Human
gccaggaauuucccagg

SEQ ID NO: 1427723 - RNA, 22 nt, Human
gccaggaagcuuuggugagaac

SEQ ID NO: 1427724 - RNA, 20 nt, Human
gccagcugcacugaugcugc

SEQ ID NO: 1427725 - RNA, 14 nt, Human
gccagcugcacuga

SEQ ID NO: 1427726 - RNA, 23 nt, Human
gccagcucuguucuuccucagcc

SEQ ID NO: 1427727 - RNA, 22 nt, Human
gccagcucuguucuuccucagc

SEQ ID NO: 1427728 - RNA, 21 nt, Human
gccagcucuguucuuccucag

SEQ ID NO: 1427729 - RNA, 18 nt, Human
gccagcucuguucuuccu

SEQ ID NO: 1427730 - RNA, 13 nt, Human
gccagcucuguuc

SEQ ID NO: 1427731 - RNA, 12 nt, Human
gccagcucuguu

SEQ ID NO: 1427732 - RNA, 23 nt, Human
gccagcucuguaucaggacccag

SEQ ID NO: 1427733 - RNA, 22 nt, Human
gccagccuggccuccugccucu

SEQ ID NO: 1427734 - RNA, 23 nt, Human
gccagccuggccuccugccucua

SEQ ID NO: 1427735 - RNA, 20 nt, Human
gccagccuggccuccugccu

SEQ ID NO: 1427736 - RNA, 19 nt, Human
gccagccuggccuccugcc

SEQ ID NO: 1427737 - RNA, 17 nt, Human
gccagccuggccuccug

SEQ ID NO: 1427738 - RNA, 16 nt, Human
gccagccuggccuccu

SEQ ID NO: 1427739 - RNA, 15 nt, Human
gccagccuggccucc

SEQ ID NO: 1427740 - RNA, 14 nt, Human
gccagccuggccuc

SEQ ID NO: 1427741 - RNA, 13 nt, Human
gccagccuggccu

SEQ ID NO: 1427742 - RNA, 12 nt, Human
gccagccuggcc

SEQ ID NO: 1427743 - RNA, 14 nt, Human
gccagccucgccca

SEQ ID NO: 1427744 - RNA, 23 nt, Human
gccagccggggcgaguggcacgu

SEQ ID NO: 1427745 - RNA, 20 nt, Human
gccagccgcgcaucagacug

SEQ ID NO: 1427746 - RNA, 19 nt, Human
gccagccgcgcaucagacu

SEQ ID NO: 1427747 - RNA, 24 nt, Human
gccagccgagcaggaggccuagga

SEQ ID NO: 1427748 - RNA, 21 nt, Human
gccagccgagcaggaggccua

SEQ ID NO: 1427749 - RNA, 22 nt, Human
gccagaggcucguugacuggcu

SEQ ID NO: 1427750 - RNA, 24 nt, Human
gccagaggcccccagcccagggcu

SEQ ID NO: 1427751 - RNA, 23 nt, Human
gccagaggcccccagcccagggc

SEQ ID NO: 1427752 - RNA, 20 nt, Human
gccagaggcccccagcccag

SEQ ID NO: 1427753 - RNA, 19 nt, Human
gccagaggcccccagccca

SEQ ID NO: 1427754 - RNA, 18 nt, Human
gccagaggcccccagccc

SEQ ID NO: 1427755 - RNA, 16 nt, Human
gccagaggcccccagc

SEQ ID NO: 1427756 - RNA, 15 nt, Human
gccagaggcccccag

SEQ ID NO: 1427757 - RNA, 14 nt, Human
gccagaggccccca

SEQ ID NO: 1427758 - RNA, 22 nt, Human
gccagagauccaaaagaagccc

SEQ ID NO: 1427759 - RNA, 21 nt, Human
gccagagauccaaaagaagcc

SEQ ID NO: 1427760 - RNA, 20 nt, Human
gccagagauccaaaagaagc

SEQ ID NO: 1427761 - RNA, 16 nt, Human
gccagagauccaaaag

SEQ ID NO: 1427762 - RNA, 13 nt, Human
gccagagauccaa

SEQ ID NO: 1427763 - RNA, 22 nt, Human
gccagaugcacaucccuggaag

SEQ ID NO: 1427764 - RNA, 21 nt, Human
gccagaugcacaucccuggaa

SEQ ID NO: 1427765 - RNA, 20 nt, Human
gccagauccagccugggguc

SEQ ID NO: 1427766 - RNA, 17 nt, Human
gccagauccagccuggg

SEQ ID NO: 1427767 - RNA, 16 nt, Human
gccagauccagccugg

SEQ ID NO: 1427768 - RNA, 15 nt, Human
gccagauccagccug

SEQ ID NO: 1427769 - RNA, 13 nt, Human
gccagaggcuggg

SEQ ID NO: 1427770 - RNA, 12 nt, Human
gccagaggcugg

SEQ ID NO: 1427771 - RNA, 21 nt, Human
gccacuccucugacucagggc

SEQ ID NO: 1427772 - RNA, 17 nt, Human
gccacuccucugacuca

SEQ ID NO: 1427773 - RNA, 15 nt, Human
gccacuccucugacu

SEQ ID NO: 1427774 - RNA, 14 nt, Human
gccacuccucugac

SEQ ID NO: 1427775 - RNA, 13 nt, Human
gccacuccucuga

SEQ ID NO: 1427776 - RNA, 21 nt, Human
gccacuccgagaggugggcca

SEQ ID NO: 1427777 - RNA, 20 nt, Human
gccaacacgcaccugccuca

SEQ ID NO: 1427778 - RNA, 17 nt, Human
gccaacacgcaccugcc

SEQ ID NO: 1427779 - RNA, 21 nt, Human
gccaaauuuaaaacuguugga

SEQ ID NO: 1427780 - RNA, 23 nt, Human
gccaacacgcaccugccucagga

SEQ ID NO: 1427781 - RNA, 21 nt, Human
gccaacacgcaccugccucag

SEQ ID NO: 1427782 - RNA, 16 nt, Human
gcccagaauaaguuau

SEQ ID NO: 1427783 - RNA, 23 nt, Human
gcccagaauaaguuauugcaguu

SEQ ID NO: 1427784 - RNA, 20 nt, Human
gcccagaauaaguuauugca

SEQ ID NO: 1427785 - RNA, 22 nt, Human
gcccaccccacccacuucugca

SEQ ID NO: 1427786 - RNA, 21 nt, Human
gcccaccccacccacuucugc

SEQ ID NO: 1427787 - RNA, 16 nt, Human
gcccaccccacccacu

SEQ ID NO: 1427788 - RNA, 14 nt, Human
gcccaaggcucccg

SEQ ID NO: 1427789 - RNA, 15 nt, Human
gcccaaggcucccgg

SEQ ID NO: 1427790 - RNA, 23 nt, Human
gcccaagccagaggcuggguuca

SEQ ID NO: 1427791 - RNA, 21 nt, Human
gcccaagccagaggcuggguu

SEQ ID NO: 1427792 - RNA, 18 nt, Human
gcccaagccagaggcugg

SEQ ID NO: 1427793 - RNA, 17 nt, Human
gcccaagccagaggcug

SEQ ID NO: 1427794 - RNA, 16 nt, Human
gcccaagccagaggcu

SEQ ID NO: 1427795 - RNA, 15 nt, Human
gcccaagccagaggc

SEQ ID NO: 1427796 - RNA, 21 nt, Human
gcccaccauuuggcaucccug

SEQ ID NO: 1427797 - RNA, 15 nt, Human
gcccacauuggaaga

SEQ ID NO: 1427798 - RNA, 16 nt, Human
gcccacagugucaggc

SEQ ID NO: 1427799 - RNA, 21 nt, Human
gccaugcuccucuuccccaga

SEQ ID NO: 1427800 - RNA, 20 nt, Human
gccaugcuccucuuccccag

SEQ ID NO: 1427801 - RNA, 18 nt, Human
gccaugcuccucuucccc

SEQ ID NO: 1427802 - RNA, 16 nt, Human
gccaugcuccucuucc

SEQ ID NO: 1427803 - RNA, 21 nt, Human
gccaguccaggcugccguggg

SEQ ID NO: 1427804 - RNA, 20 nt, Human
gccaguccaggcugccgugg

SEQ ID NO: 1427805 - RNA, 14 nt, Human
gccaguccaggcug

SEQ ID NO: 1427806 - RNA, 13 nt, Human
gccaguccaggcu

SEQ ID NO: 1427807 - RNA, 14 nt, Human
gccaguauuuuaaa

SEQ ID NO: 1427808 - RNA, 16 nt, Human
gccaguaacaggcuca

SEQ ID NO: 1427809 - RNA, 22 nt, Human
gccaguaacgcgucuuccugag

SEQ ID NO: 1427810 - RNA, 21 nt, Human
gccaguaacgcgucuuccuga

SEQ ID NO: 1427811 - RNA, 20 nt, Human
gccaguaacgcgucuuccug

SEQ ID NO: 1427812 - RNA, 12 nt, Human
gccaguauuuua

SEQ ID NO: 1427813 - RNA, 23 nt, Human
gccaucaucuccugccuuccucc

SEQ ID NO: 1427814 - RNA, 23 nt, Human
gccaucaccucagauggcagcuu

SEQ ID NO: 1427815 - RNA, 19 nt, Human
gccaucaccucagauggca

SEQ ID NO: 1427816 - RNA, 15 nt, Human
gccaucaccucagau

SEQ ID NO: 1427817 - RNA, 14 nt, Human
gccaucaccucaga

SEQ ID NO: 1427818 - RNA, 12 nt, Human
gccagucaggcc

SEQ ID NO: 1427819 - RNA, 19 nt, Human
gccaguaacgcgucuuccu

SEQ ID NO: 1427820 - RNA, 15 nt, Human
gccaguaacaggcuc

SEQ ID NO: 1427821 - RNA, 23 nt, Human
gccaguaaaugggggugcauuug

SEQ ID NO: 1427822 - RNA, 17 nt, Human
gccaggcuggucuaaaa

SEQ ID NO: 1427823 - RNA, 20 nt, Human
gccaggcugaccacagcaca

SEQ ID NO: 1427824 - RNA, 19 nt, Human
gccaggcugaccacagcac

SEQ ID NO: 1427825 - RNA, 18 nt, Human
gccaggcugaccacagca

SEQ ID NO: 1427826 - RNA, 23 nt, Human
gccaggcugggucgcccuggacu

SEQ ID NO: 1427827 - RNA, 17 nt, Human
gccaggcugaccacagc

SEQ ID NO: 1427828 - RNA, 16 nt, Human
gccaggcugaccacag

SEQ ID NO: 1427829 - RNA, 15 nt, Human
gccaggcugaccaca

SEQ ID NO: 1427830 - RNA, 17 nt, Human
gccaggcugggucgccc

SEQ ID NO: 1427831 - RNA, 21 nt, Human
gccaucugggcuccuccaggg

SEQ ID NO: 1427832 - RNA, 16 nt, Human
gccaucugcuccugga

SEQ ID NO: 1427833 - RNA, 23 nt, Human
gccaugauggcaacagaucugga

SEQ ID NO: 1427834 - RNA, 21 nt, Human
gccaugauggcaacagaucug

SEQ ID NO: 1427835 - RNA, 19 nt, Human
gccaugauggcaacagauc

SEQ ID NO: 1427836 - RNA, 17 nt, Human
gccaugauggcaacaga

SEQ ID NO: 1427837 - RNA, 19 nt, Human
gccaugaugccucugucuu

SEQ ID NO: 1427838 - RNA, 15 nt, Human
gccaugaugccucug

SEQ ID NO: 1427839 - RNA, 13 nt, Human
gccaugaugccuc

SEQ ID NO: 1427840 - RNA, 20 nt, Human
gccaugaguuccagaaagua

SEQ ID NO: 1427841 - RNA, 18 nt, Human
gccaugacccugccucuc

SEQ ID NO: 1427842 - RNA, 17 nt, Human
gccaugacccugccucu

SEQ ID NO: 1427843 - RNA, 16 nt, Human
gccaugacccugccuc

SEQ ID NO: 1427844 - RNA, 21 nt, Human
gccaugacccugccucuccca

SEQ ID NO: 1427845 - RNA, 14 nt, Human
gccaugacccugcc

SEQ ID NO: 1427846 - RNA, 23 nt, Human
gccaugacaacuucuaauugcca

SEQ ID NO: 1427847 - RNA, 19 nt, Human
gccaugacaacuucuaauu

SEQ ID NO: 1427848 - RNA, 12 nt, Human
gccaucugcucc

SEQ ID NO: 1427849 - RNA, 20 nt, Human
gccaugcgcccccuccgccc

SEQ ID NO: 1427850 - RNA, 18 nt, Human
gccaugaugccucugucu

SEQ ID NO: 1427851 - RNA, 24 nt, Human
gccgacccccucucccugcauggc

SEQ ID NO: 1427852 - RNA, 19 nt, Human
gccggcuucaugccagcua

SEQ ID NO: 1427853 - RNA, 13 nt, Human
gccggcuccuugg

SEQ ID NO: 1427854 - RNA, 20 nt, Human
gccgggaccacccugagccg

SEQ ID NO: 1427855 - RNA, 18 nt, Human
gccgggaccacccugagc

SEQ ID NO: 1427856 - RNA, 22 nt, Human
gccggggaacuggccaagcuga

SEQ ID NO: 1427857 - RNA, 20 nt, Human
gccggggaacuggccaagcu

SEQ ID NO: 1427858 - RNA, 17 nt, Human
gccggggaacuggccaa

SEQ ID NO: 1427859 - RNA, 16 nt, Human
gccggggaacuggcca

SEQ ID NO: 1427860 - RNA, 22 nt, Human
gccgggaccacccugagccggc

SEQ ID NO: 1427861 - RNA, 23 nt, Human
gccgacccccucucccugcaugg

SEQ ID NO: 1427862 - RNA, 20 nt, Human
gccgacccccucucccugca

SEQ ID NO: 1427863 - RNA, 19 nt, Human
gccgaagcuaacagggaag

SEQ ID NO: 1427864 - RNA, 15 nt, Human
gccgaagcuaacagg

SEQ ID NO: 1427865 - RNA, 14 nt, Human
gccgaagcuaacag

SEQ ID NO: 1427866 - RNA, 21 nt, Human
gcccuuguuuggggcaggagu

SEQ ID NO: 1427867 - RNA, 20 nt, Human
gcccuuguuuggggcaggag

SEQ ID NO: 1427868 - RNA, 19 nt, Human
gcccuuguuuggggcagga

SEQ ID NO: 1427869 - RNA, 18 nt, Human
gcccuuguuuggggcagg

SEQ ID NO: 1427870 - RNA, 17 nt, Human
gcccuuguuuggggcag

SEQ ID NO: 1427871 - RNA, 23 nt, Human
gcccuugugaaucaagggucagg

SEQ ID NO: 1427872 - RNA, 21 nt, Human
gcccuuggggguccuccucca

SEQ ID NO: 1427873 - RNA, 22 nt, Human
gcccuuggggguccuccuccag

SEQ ID NO: 1427874 - RNA, 20 nt, Human
gcccuuggggguccuccucc

SEQ ID NO: 1427875 - RNA, 18 nt, Human
gcccuugcuuaccucuca

SEQ ID NO: 1427876 - RNA, 22 nt, Human
gcccugcuuccugcuugccaag

SEQ ID NO: 1427877 - RNA, 19 nt, Human
gcccugcuuccugcuugcc

SEQ ID NO: 1427878 - RNA, 16 nt, Human
gcccugcuuccugcuu

SEQ ID NO: 1427879 - RNA, 15 nt, Human
gcccugcuuccugcu

SEQ ID NO: 1427880 - RNA, 20 nt, Human
gcccugcagacccugcccuu

SEQ ID NO: 1427881 - RNA, 19 nt, Human
gcccugcagacccugcccu

SEQ ID NO: 1427882 - RNA, 18 nt, Human
gcccugcagacccugccc

SEQ ID NO: 1427883 - RNA, 17 nt, Human
gccgucagugcugugcu

SEQ ID NO: 1427884 - RNA, 14 nt, Human
gccguaauuuaacu

SEQ ID NO: 1427885 - RNA, 13 nt, Human
gccguaauuuaac

SEQ ID NO: 1427886 - RNA, 21 nt, Human
gccggucgcccuuugcugcau

SEQ ID NO: 1427887 - RNA, 24 nt, Human
gccggucgcccuuugcugcauggc

SEQ ID NO: 1427888 - RNA, 23 nt, Human
gccguccuaaccucgggccugcu

SEQ ID NO: 1427889 - RNA, 20 nt, Human
gccguccccuagagucccag

SEQ ID NO: 1427890 - RNA, 23 nt, Human
gccgugggccccacccucgggga

SEQ ID NO: 1427891 - RNA, 18 nt, Human
gccgugggccccacccuc

SEQ ID NO: 1427892 - RNA, 17 nt, Human
gccgugggccccacccu

SEQ ID NO: 1427893 - RNA, 23 nt, Human
gccgugggcaauugucugaaaag

SEQ ID NO: 1427894 - RNA, 20 nt, Human
gccgugcucgccccagcagg

SEQ ID NO: 1427895 - RNA, 23 nt, Human
gccguggggccgccgccucuuuc

SEQ ID NO: 1427896 - RNA, 20 nt, Human
gccguggggccgccgccucu

SEQ ID NO: 1427897 - RNA, 23 nt, Human
gccguggugauuuagcaggaagc

SEQ ID NO: 1427898 - RNA, 21 nt, Human
gccgugcucgccccagcaggu

SEQ ID NO: 1427899 - RNA, 17 nt, Human
gccgugcucgccccagc

SEQ ID NO: 1427900 - RNA, 22 nt, Human
gccucaagguuuuagguucuaa

SEQ ID NO: 1427901 - RNA, 21 nt, Human
gccucaagguuuuagguucua

SEQ ID NO: 1427902 - RNA, 20 nt, Human
gccucaagguuuuagguucu

SEQ ID NO: 1427903 - RNA, 21 nt, Human
gccuauuaucugucagcugca

SEQ ID NO: 1427904 - RNA, 22 nt, Human
gccuauggagagcccugggacc

SEQ ID NO: 1427905 - RNA, 21 nt, Human
gccuauggagagcccugggac

SEQ ID NO: 1427906 - RNA, 20 nt, Human
gccuauggagagcccuggga

SEQ ID NO: 1427907 - RNA, 19 nt, Human
gccuauggagagcccuggg

SEQ ID NO: 1427908 - RNA, 18 nt, Human
gccuauggagagcccugg

SEQ ID NO: 1427909 - RNA, 17 nt, Human
gccuauggagagcccug

SEQ ID NO: 1427910 - RNA, 16 nt, Human
gccuauggagagcccu

SEQ ID NO: 1427911 - RNA, 14 nt, Human
gccuauggagagcc

SEQ ID NO: 1427912 - RNA, 13 nt, Human
gccuauggagagc

SEQ ID NO: 1427913 - RNA, 15 nt, Human
gccuaaccgagauca

SEQ ID NO: 1427914 - RNA, 17 nt, Human
gccuaaccugccgagag

SEQ ID NO: 1427915 - RNA, 16 nt, Human
gccgugguccuuuggg

SEQ ID NO: 1427916 - RNA, 22 nt, Human
gccgugugugugcguccugucg

SEQ ID NO: 1427917 - RNA, 14 nt, Human
gccucucuacaguc

SEQ ID NO: 1427918 - RNA, 18 nt, Human
gccuccguccccugccca

SEQ ID NO: 1427919 - RNA, 24 nt, Human
gccucuccacucaugugacucuuu

SEQ ID NO: 1427920 - RNA, 21 nt, Human
gccucuccacucaugugacuc

SEQ ID NO: 1427921 - RNA, 23 nt, Human
gccucucuauccucucuuccucu

SEQ ID NO: 1427922 - RNA, 21 nt, Human
gccucucuauccucucuuccu

SEQ ID NO: 1427923 - RNA, 20 nt, Human
gccucucuauccucucuucc

SEQ ID NO: 1427924 - RNA, 17 nt, Human
gccucugaggccagccu

SEQ ID NO: 1427925 - RNA, 16 nt, Human
gccucugaggccagcc

SEQ ID NO: 1427926 - RNA, 15 nt, Human
gccucugaggccagc

SEQ ID NO: 1427927 - RNA, 14 nt, Human
gccucugaggccag

SEQ ID NO: 1427928 - RNA, 13 nt, Human
gccucugaggcca

SEQ ID NO: 1427929 - RNA, 12 nt, Human
gccucugaggcc

SEQ ID NO: 1427930 - RNA, 21 nt, Human
gccucugaggccagccuggcc

SEQ ID NO: 1427931 - RNA, 20 nt, Human
gccucugaggccagccuggc

SEQ ID NO: 1427932 - RNA, 19 nt, Human
gccucugaggccagccugg

SEQ ID NO: 1427933 - RNA, 18 nt, Human
gccucugaggccagccug

SEQ ID NO: 1427934 - RNA, 21 nt, Human
gccugaggucaggaguucaag

SEQ ID NO: 1427935 - RNA, 20 nt, Human
gccugagggaaaggccagca

SEQ ID NO: 1427936 - RNA, 18 nt, Human
gccugagggaaaggccag

SEQ ID NO: 1427937 - RNA, 16 nt, Human
gccugagguuacugga

SEQ ID NO: 1427938 - RNA, 13 nt, Human
gccugagucaccu

SEQ ID NO: 1427939 - RNA, 21 nt, Human
gccugaguagaaaggccuuua

SEQ ID NO: 1427940 - RNA, 13 nt, Human
gccugaguacucc

SEQ ID NO: 1427941 - RNA, 16 nt, Human
gccugaguagaaaggc

SEQ ID NO: 1427942 - RNA, 19 nt, Human
gccugacuagggagccaug

SEQ ID NO: 1427943 - RNA, 20 nt, Human
gccugacuagggagccaugu

SEQ ID NO: 1427944 - RNA, 21 nt, Human
gccucugcccaggcacugcua

SEQ ID NO: 1427945 - RNA, 23 nt, Human
gccucugccaaaggaugugauau

SEQ ID NO: 1427946 - RNA, 22 nt, Human
gccucugaggccagccuggccu

SEQ ID NO: 1427947 - RNA, 23 nt, Human
gccucugaggccagccuggccuc

SEQ ID NO: 1427948 - RNA, 15 nt, Human
gccucccaaaugagc

SEQ ID NO: 1427949 - RNA, 18 nt, Human
gccucagauuccuuccca

SEQ ID NO: 1427950 - RNA, 16 nt, Human
gccucagauuccuucc

SEQ ID NO: 1427951 - RNA, 22 nt, Human
gccucagauuccuucccaugga

SEQ ID NO: 1427952 - RNA, 15 nt, Human
gccucagauuccuuc

SEQ ID NO: 1427953 - RNA, 18 nt, Human
gccucagagaccagggcu

SEQ ID NO: 1427954 - RNA, 17 nt, Human
gccucagagaccagggc

SEQ ID NO: 1427955 - RNA, 15 nt, Human
gccucagagaccagg

SEQ ID NO: 1427956 - RNA, 12 nt, Human
gccucagagacc

SEQ ID NO: 1427957 - RNA, 14 nt, Human
gccucccagguuca

SEQ ID NO: 1427958 - RNA, 19 nt, Human
gccuccucacccccagcuu

SEQ ID NO: 1427959 - RNA, 18 nt, Human
gccuccucacccccagcu

SEQ ID NO: 1427960 - RNA, 17 nt, Human
gccuccucacccccagc

SEQ ID NO: 1427961 - RNA, 16 nt, Human
gccuccucacccccag

SEQ ID NO: 1427962 - RNA, 14 nt, Human
gccuccucaccccc

SEQ ID NO: 1427963 - RNA, 16 nt, Human
gccucucaucaacuga

SEQ ID NO: 1427964 - RNA, 21 nt, Human
gccuccucacccccagcuuug

SEQ ID NO: 1427965 - RNA, 19 nt, Human
gccucucaucaacugaaug

SEQ ID NO: 1427966 - RNA, 18 nt, Human
gccucucaucaacugaau

SEQ ID NO: 1427967 - RNA, 15 nt, Human
gccucccuucaugca

SEQ ID NO: 1427968 - RNA, 18 nt, Human
gccucccuucaugcaugg

SEQ ID NO: 1427969 - RNA, 20 nt, Human
gccucccuucaugcauggaa

SEQ ID NO: 1427970 - RNA, 22 nt, Human
gccucccuucaugcauggaaau

SEQ ID NO: 1427971 - RNA, 14 nt, Human
gccucccuuguggc

SEQ ID NO: 1427972 - RNA, 23 nt, Human
gccucccuucaugcauggaaauu

SEQ ID NO: 1427973 - RNA, 15 nt, Human
gccugccaccuggac

SEQ ID NO: 1427974 - RNA, 14 nt, Human
gccugccaccugga

SEQ ID NO: 1427975 - RNA, 13 nt, Human
gccugccaccugg

SEQ ID NO: 1427976 - RNA, 12 nt, Human
gccugccaccug

SEQ ID NO: 1427977 - RNA, 21 nt, Human
gccugccaccuccccccacaa

SEQ ID NO: 1427978 - RNA, 17 nt, Human
gccugagggaaaggcca

SEQ ID NO: 1427979 - RNA, 13 nt, Human
gccugccaccucc

SEQ ID NO: 1427980 - RNA, 23 nt, Human
gccugcaaacugggaaccccuuu

SEQ ID NO: 1427981 - RNA, 17 nt, Human
gccugcaaacugggaac

SEQ ID NO: 1427982 - RNA, 16 nt, Human
gccugcaaacugggaa

SEQ ID NO: 1427983 - RNA, 14 nt, Human
gccugcaaacuggg

SEQ ID NO: 1427984 - RNA, 13 nt, Human
gccugcaaacugg

SEQ ID NO: 1427985 - RNA, 22 nt, Human
gccugccaccuggaccccugca

SEQ ID NO: 1427986 - RNA, 18 nt, Human
gccugccaccuggacccc

SEQ ID NO: 1427987 - RNA, 17 nt, Human
gccugccaccuggaccc

SEQ ID NO: 1427988 - RNA, 16 nt, Human
gccugccaccuggacc

SEQ ID NO: 1427989 - RNA, 15 nt, Human
gccugccagcugcac

SEQ ID NO: 1427990 - RNA, 14 nt, Human
gccugccagcugca

SEQ ID NO: 1427991 - RNA, 23 nt, Human
gccugccaggaggacccagggcu

SEQ ID NO: 1427992 - RNA, 21 nt, Human
gccugccaggaggacccaggg

SEQ ID NO: 1427993 - RNA, 20 nt, Human
gccugccaggaggacccagg

SEQ ID NO: 1427994 - RNA, 18 nt, Human
gccugccaggaggaccca

SEQ ID NO: 1427995 - RNA, 14 nt, Human
gccugccaggagga

SEQ ID NO: 1427996 - RNA, 13 nt, Human
gccugccaggagg

SEQ ID NO: 1427997 - RNA, 12 nt, Human
gccugccaggag

SEQ ID NO: 1427998 - RNA, 11 nt, Human
gccugccagga

SEQ ID NO: 1427999 - RNA, 23 nt, Human
gccugccaccuggaccccugcau

SEQ ID NO: 1428000 - RNA, 18 nt, Human
gccugccagcugcacuga

SEQ ID NO: 1428001 - RNA, 21 nt, Human
gccugggggugccaggaccag

SEQ ID NO: 1428002 - RNA, 17 nt, Human
gccugggggugccagga

SEQ ID NO: 1428003 - RNA, 16 nt, Human
gccugggggugccagg

SEQ ID NO: 1428004 - RNA, 20 nt, Human
gccuggugcccagcacaugu

SEQ ID NO: 1428005 - RNA, 19 nt, Human
gccuggggugacccggcac

SEQ ID NO: 1428006 - RNA, 22 nt, Human
gccuggggugacccggcacccc

SEQ ID NO: 1428007 - RNA, 18 nt, Human
gccuggggugacccggca

SEQ ID NO: 1428008 - RNA, 14 nt, Human
gccuggggucugga

SEQ ID NO: 1428009 - RNA, 22 nt, Human
gccuggucucacccuggaggca

SEQ ID NO: 1428010 - RNA, 20 nt, Human
gccuggucucacccuggagg

SEQ ID NO: 1428011 - RNA, 19 nt, Human
gccuggucucacccuggag

SEQ ID NO: 1428012 - RNA, 18 nt, Human
gccuggucucacccugga

SEQ ID NO: 1428013 - RNA, 22 nt, Human
gccuuaucuugcaccccaaagc

SEQ ID NO: 1428014 - RNA, 19 nt, Human
gccuuacccucauguucuu

SEQ ID NO: 1428015 - RNA, 12 nt, Human
gccuguuuaaga

SEQ ID NO: 1428016 - RNA, 21 nt, Human
gccuguuuggccucucuaucc

SEQ ID NO: 1428017 - RNA, 16 nt, Human
gccuguuuggccucuc

SEQ ID NO: 1428018 - RNA, 14 nt, Human
gccuguuuggccuc

SEQ ID NO: 1428019 - RNA, 19 nt, Human
gccuguuucccaggcccac

SEQ ID NO: 1428020 - RNA, 13 nt, Human
gccuguuuaagag

SEQ ID NO: 1428021 - RNA, 18 nt, Human
gccuuacccucauguucu

SEQ ID NO: 1428022 - RNA, 11 nt, Human
gccuugcuugu

SEQ ID NO: 1428023 - RNA, 13 nt, Human
gccuugcuuguua

SEQ ID NO: 1428024 - RNA, 19 nt, Human
gccuuccuguuuuucacau

SEQ ID NO: 1428025 - RNA, 21 nt, Human
gccuucauaucauccacacau

SEQ ID NO: 1428026 - RNA, 18 nt, Human
gccuucauaucauccaca

SEQ ID NO: 1428027 - RNA, 17 nt, Human
gccuuccacccaggggc

SEQ ID NO: 1428028 - RNA, 14 nt, Human
gccuuccacccagg

SEQ ID NO: 1428029 - RNA, 12 nt, Human
gccuuccaccca

SEQ ID NO: 1428030 - RNA, 16 nt, Human
gccuucauucugcaag

SEQ ID NO: 1428031 - RNA, 23 nt, Human
gccuuuuuuccccagacuuguug

SEQ ID NO: 1428032 - RNA, 20 nt, Human
gccuuuuuuccccagacuug

SEQ ID NO: 1428033 - RNA, 19 nt, Human
gccuuuuuuccccagacuu

SEQ ID NO: 1428034 - RNA, 17 nt, Human
gccuuuuuuccccagac

SEQ ID NO: 1428035 - RNA, 16 nt, Human
gccuuuuuuccccaga

SEQ ID NO: 1428036 - RNA, 15 nt, Human
gccuuuuuuccccag

SEQ ID NO: 1428037 - RNA, 14 nt, Human
gccuuuuuucccca

SEQ ID NO: 1428038 - RNA, 13 nt, Human
gccuuuuuucccc

SEQ ID NO: 1428039 - RNA, 17 nt, Human
gccuuuuuguuucaaug

SEQ ID NO: 1428040 - RNA, 22 nt, Human
gccuuuuucauuuaucuauaau

SEQ ID NO: 1428041 - RNA, 22 nt, Human
gcgaaaaaaucagguggcuuuu

SEQ ID NO: 1428042 - RNA, 23 nt, Human
gccuuuuuucuguauaaaugucu

SEQ ID NO: 1428043 - RNA, 15 nt, Human
gccuuuuuucuguau

SEQ ID NO: 1428044 - RNA, 19 nt, Human
gccuuuuucauuuaucuau

SEQ ID NO: 1428045 - RNA, 18 nt, Human
gccuuuuucauuuaucua

SEQ ID NO: 1428046 - RNA, 17 nt, Human
gccuuuuucauuuaucu

SEQ ID NO: 1428047 - RNA, 15 nt, Human
gccuuuuucauuuau

SEQ ID NO: 1428048 - RNA, 14 nt, Human
gccuuuuucauuua

SEQ ID NO: 1428049 - RNA, 13 nt, Human
gccuuuggcaggu

SEQ ID NO: 1428050 - RNA, 16 nt, Human
gccuuuggcagaguuc

SEQ ID NO: 1428051 - RNA, 15 nt, Human
gccuuuggcaggugc

SEQ ID NO: 1428052 - RNA, 15 nt, Human
gccuuugcgcuccug

SEQ ID NO: 1428053 - RNA, 15 nt, Human
gccuuugccagguga

SEQ ID NO: 1428054 - RNA, 16 nt, Human
gccuuugccaggugac

SEQ ID NO: 1428055 - RNA, 14 nt, Human
gccuuugccaggug

SEQ ID NO: 1428056 - RNA, 14 nt, Human
gccuuugagcucag

SEQ ID NO: 1428057 - RNA, 21 nt, Human
gccuuugcgcuccuggcccag

SEQ ID NO: 1428058 - RNA, 19 nt, Human
gccuuugcgcuccuggccc

SEQ ID NO: 1428059 - RNA, 18 nt, Human
gccuuugcgcuccuggcc

SEQ ID NO: 1428060 - RNA, 16 nt, Human
gccuuugcgcuccugg

SEQ ID NO: 1428061 - RNA, 23 nt, Human
gccuuugcgcuccuggcccagcc

SEQ ID NO: 1428062 - RNA, 18 nt, Human
gccuuuggacuugucccg

SEQ ID NO: 1428063 - RNA, 23 nt, Human
gccuuggccuguguucuuccugg

SEQ ID NO: 1428064 - RNA, 16 nt, Human
gccuuggccuggagca

SEQ ID NO: 1428065 - RNA, 15 nt, Human
gccuuggccuggagc

SEQ ID NO: 1428066 - RNA, 14 nt, Human
gccuuggccuggag

SEQ ID NO: 1428067 - RNA, 13 nt, Human
gccuuggccugga

SEQ ID NO: 1428068 - RNA, 12 nt, Human
gccuuggccugg

SEQ ID NO: 1428069 - RNA, 11 nt, Human
gccuuggccug

SEQ ID NO: 1428070 - RNA, 15 nt, Human
gccuuggccucccaa

SEQ ID NO: 1428071 - RNA, 15 nt, Human
gccuuggccuguguu

SEQ ID NO: 1428072 - RNA, 16 nt, Human
gccuuugaccugccuc

SEQ ID NO: 1428073 - RNA, 22 nt, Human
gcuaccuguguggacaggacua

SEQ ID NO: 1428074 - RNA, 17 nt, Human
gcuaccuguguggacag

SEQ ID NO: 1428075 - RNA, 14 nt, Human
gcuaccugugugga

SEQ ID NO: 1428076 - RNA, 20 nt, Human
gcuaccugcucagcccugca

SEQ ID NO: 1428077 - RNA, 19 nt, Human
gcuaccugcucagcccugc

SEQ ID NO: 1428078 - RNA, 20 nt, Human
gcuaccuguguggacaggac

SEQ ID NO: 1428079 - RNA, 19 nt, Human
gcuaccuguguggacagga

SEQ ID NO: 1428080 - RNA, 18 nt, Human
gcuaccuguguggacagg

SEQ ID NO: 1428081 - RNA, 16 nt, Human
gcuaccuuuguauucu

SEQ ID NO: 1428082 - RNA, 20 nt, Human
gcuaccuuuguauucucucc

SEQ ID NO: 1428083 - RNA, 21 nt, Human
gcuauagaugucuuuucccau

SEQ ID NO: 1428084 - RNA, 20 nt, Human
gcuauagaugucuuuuccca

SEQ ID NO: 1428085 - RNA, 16 nt, Human
gcuauagaugucuuuu

SEQ ID NO: 1428086 - RNA, 16 nt, Human
gcuagacacaugaagg

SEQ ID NO: 1428087 - RNA, 21 nt, Human
gcuagaauugaguguuuaaag

SEQ ID NO: 1428088 - RNA, 19 nt, Human
gcuacagcaauuucuaauu

SEQ ID NO: 1428089 - RNA, 17 nt, Human
gcuacagcaauuucuaa

SEQ ID NO: 1428090 - RNA, 18 nt, Human
gcuacagagaagccuuca

SEQ ID NO: 1428091 - RNA, 23 nt, Human
gcuacagagaagccuucaagcuc

SEQ ID NO: 1428092 - RNA, 17 nt, Human
gcuacagagaagccuuc

SEQ ID NO: 1428093 - RNA, 16 nt, Human
gcuacagagaagccuu

SEQ ID NO: 1428094 - RNA, 15 nt, Human
gcuacagagaagccu

SEQ ID NO: 1428095 - RNA, 14 nt, Human
gcuacagagaagcc

SEQ ID NO: 1428096 - RNA, 16 nt, Human
gcuacacagaucacag

SEQ ID NO: 1428097 - RNA, 14 nt, Human
gcuaagagaaguag

SEQ ID NO: 1428098 - RNA, 13 nt, Human
gcuaagagaagua

SEQ ID NO: 1428099 - RNA, 13 nt, Human
gcuacacacugca

SEQ ID NO: 1428100 - RNA, 20 nt, Human
gcuacacacugcauguuugu

SEQ ID NO: 1428101 - RNA, 19 nt, Human
gcuaaagcaauaugcauuu

SEQ ID NO: 1428102 - RNA, 17 nt, Human
gcuaaagcaauaugcau

SEQ ID NO: 1428103 - RNA, 15 nt, Human
gcuaaagacaugaag

SEQ ID NO: 1428104 - RNA, 15 nt, Human
gcuaaagcccagaga

SEQ ID NO: 1428105 - RNA, 21 nt, Human
gcgucuggaaguccaaugugg

SEQ ID NO: 1428106 - RNA, 16 nt, Human
gcgucuacccugggau

SEQ ID NO: 1428107 - RNA, 12 nt, Human
gcgguucaggaa

SEQ ID NO: 1428108 - RNA, 22 nt, Human
gcgguuauaaaaaaugguucag

SEQ ID NO: 1428109 - RNA, 23 nt, Human
gcgguuaugaaauucacccccuu

SEQ ID NO: 1428110 - RNA, 19 nt, Human
gcgguuauaaaaaaugguu

SEQ ID NO: 1428111 - RNA, 18 nt, Human
gcgguuauaaaaaauggu

SEQ ID NO: 1428112 - RNA, 21 nt, Human
gcggugucucuccugccccuu

SEQ ID NO: 1428113 - RNA, 14 nt, Human
gcggugggccuggu

SEQ ID NO: 1428114 - RNA, 20 nt, Human
gcggugggaccuagggaggc

SEQ ID NO: 1428115 - RNA, 17 nt, Human
gcggugcuugauagaaa

SEQ ID NO: 1428116 - RNA, 22 nt, Human
gcgggugaacaaagcagccacg

SEQ ID NO: 1428117 - RNA, 21 nt, Human
gcgggugaacaaagcagccac

SEQ ID NO: 1428118 - RNA, 17 nt, Human
gcgggucugcucccaag

SEQ ID NO: 1428119 - RNA, 15 nt, Human
gcgggucugcuccca

SEQ ID NO: 1428120 - RNA, 23 nt, Human
gcguaaguacagagaagccauca

SEQ ID NO: 1428121 - RNA, 21 nt, Human
gcguaaguacagagaagccau

SEQ ID NO: 1428122 - RNA, 20 nt, Human
gcguaaguacagagaagcca

SEQ ID NO: 1428123 - RNA, 19 nt, Human
gcguaaguacagagaagcc

SEQ ID NO: 1428124 - RNA, 18 nt, Human
gcguaaguacagagaagc

SEQ ID NO: 1428125 - RNA, 17 nt, Human
gcguaaguacagagaag

SEQ ID NO: 1428126 - RNA, 16 nt, Human
gcguaaguacagagaa

SEQ ID NO: 1428127 - RNA, 15 nt, Human
gcguaaguacagaga

SEQ ID NO: 1428128 - RNA, 14 nt, Human
gcguaaguacagag

SEQ ID NO: 1428129 - RNA, 21 nt, Human
gcgguuugguuugcagcgacu

SEQ ID NO: 1428130 - RNA, 20 nt, Human
gcgguuuacucacugcugca

SEQ ID NO: 1428131 - RNA, 18 nt, Human
gcgguuccggcauggaca

SEQ ID NO: 1428132 - RNA, 15 nt, Human
gcgucuacccuggga

SEQ ID NO: 1428133 - RNA, 14 nt, Human
gcgucuacccuggg

SEQ ID NO: 1428134 - RNA, 18 nt, Human
gcgggcagagggcuggag

SEQ ID NO: 1428135 - RNA, 23 nt, Human
gcggggguuccguguccaccccc

SEQ ID NO: 1428136 - RNA, 21 nt, Human
gcggggcuugccuucuggugu

SEQ ID NO: 1428137 - RNA, 15 nt, Human
gcgggcgcgugagug

SEQ ID NO: 1428138 - RNA, 19 nt, Human
gcgggcagagggcuggagg

SEQ ID NO: 1428139 - RNA, 17 nt, Human
gcgggcagagggcugga

SEQ ID NO: 1428140 - RNA, 16 nt, Human
gcgggcagagggcugg

SEQ ID NO: 1428141 - RNA, 15 nt, Human
gcgggcagagggcug

SEQ ID NO: 1428142 - RNA, 10 nt, Human
gcggacacac

SEQ ID NO: 1428143 - RNA, 16 nt, Human
gcgcucagggccaugc

SEQ ID NO: 1428144 - RNA, 22 nt, Human
gcgcuaauucaaggaauuucuu

SEQ ID NO: 1428145 - RNA, 19 nt, Human
gcgcgugcaugugugcgug

SEQ ID NO: 1428146 - RNA, 18 nt, Human
gcgcggcugggaggaggg

SEQ ID NO: 1428147 - RNA, 12 nt, Human
gcgcggcuggga

SEQ ID NO: 1428148 - RNA, 22 nt, Human
gcgcucagggccaugcugaggc

SEQ ID NO: 1428149 - RNA, 13 nt, Human
gcgcucagggcca

SEQ ID NO: 1428150 - RNA, 20 nt, Human
gcgcuaucucccugccuccu

SEQ ID NO: 1428151 - RNA, 15 nt, Human
gcgcuaucucccugc

SEQ ID NO: 1428152 - RNA, 15 nt, Human
gcgccgucuccaggg

SEQ ID NO: 1428153 - RNA, 13 nt, Human
gcgccgucuccag

SEQ ID NO: 1428154 - RNA, 22 nt, Human
gcgccgucuccaggggcugcuu

SEQ ID NO: 1428155 - RNA, 20 nt, Human
gcgcgagggccucaaaggcc

SEQ ID NO: 1428156 - RNA, 15 nt, Human
gcgcgaucucagcuc

SEQ ID NO: 1428157 - RNA, 16 nt, Human
gcgcgaucucagcuca

SEQ ID NO: 1428158 - RNA, 13 nt, Human
uuuugaaucaaua

SEQ ID NO: 1428159 - RNA, 13 nt, Human
uuuugaaaaacug

SEQ ID NO: 1428160 - RNA, 20 nt, Human
uuuugacaaggggcaguggu

SEQ ID NO: 1428161 - RNA, 16 nt, Human
uuuuggauuguauauu

SEQ ID NO: 1428162 - RNA, 11 nt, Human
uuuuggaugcc

SEQ ID NO: 1428163 - RNA, 11 nt, Human
uuuuggcaccu

SEQ ID NO: 1428164 - RNA, 19 nt, Human
uuuuggcaaaacucuacuu

SEQ ID NO: 1428165 - RNA, 19 nt, Human
uuuugguaaagacuggcuu

SEQ ID NO: 1428166 - RNA, 22 nt, Human
uuuuggcugaaauucuccugga

SEQ ID NO: 1428167 - RNA, 21 nt, Human
uuuugguccaaguugugcuua

SEQ ID NO: 1428168 - RNA, 14 nt, Human
uuuuggucauugua

SEQ ID NO: 1428169 - RNA, 18 nt, Human
uuuuggucuggagggaag

SEQ ID NO: 1428170 - RNA, 12 nt, Human
uuuuaauucauu

SEQ ID NO: 1428171 - RNA, 23 nt, Human
uuuuaauuauuauuuauauaugu

SEQ ID NO: 1428172 - RNA, 20 nt, Human
uuuuaauuauuauuuauaua

SEQ ID NO: 1428173 - RNA, 17 nt, Human
uuuuaauuauuauucuu

SEQ ID NO: 1428174 - RNA, 16 nt, Human
uuuuaauuauuauucu

SEQ ID NO: 1428175 - RNA, 11 nt, Human
uuuuaauuauu

SEQ ID NO: 1428176 - RNA, 16 nt, Human
uuuuccuucaaaguuu

SEQ ID NO: 1428177 - RNA, 21 nt, Human
uuuuccuguccucuuucagcu

SEQ ID NO: 1428178 - RNA, 22 nt, Human
uuuuccuguccucuuucagcuc

SEQ ID NO: 1428179 - RNA, 20 nt, Human
uuuuccuguccucuuucagc

SEQ ID NO: 1428180 - RNA, 13 nt, Human
uuuuccuguccuc

SEQ ID NO: 1428181 - RNA, 12 nt, Human
uuuuccuguccu

SEQ ID NO: 1428182 - RNA, 17 nt, Human
uuuuaauuuacaaaaau

SEQ ID NO: 1428183 - RNA, 14 nt, Human
uuuuccugaaaacc

SEQ ID NO: 1428184 - RNA, 16 nt, Human
uuuucuuuguguagcu

SEQ ID NO: 1428185 - RNA, 19 nt, Human
uuuucuuuguguagcuuug

SEQ ID NO: 1428186 - RNA, 12 nt, Human
uuuucuuugugu

SEQ ID NO: 1428187 - RNA, 15 nt, Human
uuuucuuugaauaaa

SEQ ID NO: 1428188 - RNA, 20 nt, Human
uuuucuuugaauaaauguca

SEQ ID NO: 1428189 - RNA, 13 nt, Human
uuuucuuugaaua

SEQ ID NO: 1428190 - RNA, 11 nt, Human
uuuucuuucuc

SEQ ID NO: 1428191 - RNA, 18 nt, Human
uuuucuaagaaacauuua

SEQ ID NO: 1428192 - RNA, 16 nt, Human
uuuucuaagaaacauu

SEQ ID NO: 1428193 - RNA, 12 nt, Human
uuuucuaacugg

SEQ ID NO: 1428194 - RNA, 23 nt, Human
uuuucuaacagaaagcaugauuu

SEQ ID NO: 1428195 - RNA, 20 nt, Human
uuuucuaaaggaguuuaugu

SEQ ID NO: 1428196 - RNA, 18 nt, Human
uuuucuaaaguaaaaaca

SEQ ID NO: 1428197 - RNA, 19 nt, Human
uuuuguaauaauaaagaau

SEQ ID NO: 1428198 - RNA, 17 nt, Human
uuuuguaauaauaaaga

SEQ ID NO: 1428199 - RNA, 19 nt, Human
uuuuguaaguugaagcaaa

SEQ ID NO: 1428200 - RNA, 14 nt, Human
uuuuguaagacaaa

SEQ ID NO: 1428201 - RNA, 18 nt, Human
uuuuguaaacucaaaaua

SEQ ID NO: 1428202 - RNA, 20 nt, Human
uuuuguauaguuaacacacu

SEQ ID NO: 1428203 - RNA, 16 nt, Human
uuuuguauaaaauaga

SEQ ID NO: 1428204 - RNA, 24 nt, Human
uuuuguauaauuggauuuccuaau

SEQ ID NO: 1428205 - RNA, 23 nt, Human
uuuuguauaauuggauuuccuaa

SEQ ID NO: 1428206 - RNA, 16 nt, Human
uuuuguauaauuggau

SEQ ID NO: 1428207 - RNA, 14 nt, Human
uuuuguauaauugg

SEQ ID NO: 1428208 - RNA, 21 nt, Human
uuuuguagcuggggcuuugau

SEQ ID NO: 1428209 - RNA, 11 nt, Human
uuuuguaccaa

SEQ ID NO: 1428210 - RNA, 15 nt, Human
uuuugucuacacacc

SEQ ID NO: 1428211 - RNA, 23 nt, Human
uuuugucaaugcaguugucucug

SEQ ID NO: 1428212 - RNA, 18 nt, Human
uuuugucacuuuuucuga

SEQ ID NO: 1428213 - RNA, 17 nt, Human
uuuuguauucucugagc

SEQ ID NO: 1428214 - RNA, 14 nt, Human
uuuuuaaaaagcaa

SEQ ID NO: 1428215 - RNA, 23 nt, Human
uuuuuaaaaaagcuuaaaacuuu

SEQ ID NO: 1428216 - RNA, 22 nt, Human
uuuuuaaaaaagcuuaaaacuu

SEQ ID NO: 1428217 - RNA, 17 nt, Human
uuuuuaaaaaagcuuaa

SEQ ID NO: 1428218 - RNA, 15 nt, Human
uuuuuaaaaaagcuu

SEQ ID NO: 1428219 - RNA, 18 nt, Human
uuuuuaaaaaagaaacau

SEQ ID NO: 1428220 - RNA, 21 nt, Human
uuuuuaaacuguacagugucu

SEQ ID NO: 1428221 - RNA, 19 nt, Human
uuuuuaaacuguacagugu

SEQ ID NO: 1428222 - RNA, 18 nt, Human
uuuuuaaacuguacagug

SEQ ID NO: 1428223 - RNA, 17 nt, Human
uuuuuaaacuguacagu

SEQ ID NO: 1428224 - RNA, 16 nt, Human
uuuuuaaacuguacag

SEQ ID NO: 1428225 - RNA, 15 nt, Human
uuuuuaaacuguaca

SEQ ID NO: 1428226 - RNA, 13 nt, Human
uuuuuaaacugua

SEQ ID NO: 1428227 - RNA, 13 nt, Human
uuuuuaaacauca

SEQ ID NO: 1428228 - RNA, 16 nt, Human
uuuuuaaacaaguauu

SEQ ID NO: 1428229 - RNA, 12 nt, Human
uuuuuaaagacu

SEQ ID NO: 1428230 - RNA, 13 nt, Human
uuuuuaaagacuu

SEQ ID NO: 1428231 - RNA, 18 nt, Human
uuuuuaaagacuuuuaug

SEQ ID NO: 1428232 - RNA, 20 nt, Human
uuuuuaagcucugagcuguc

SEQ ID NO: 1428233 - RNA, 14 nt, Human
uuuuuaagcucuga

SEQ ID NO: 1428234 - RNA, 13 nt, Human
uuuuuaagaauug

SEQ ID NO: 1428235 - RNA, 18 nt, Human
uuuuuaagaauaucugua

SEQ ID NO: 1428236 - RNA, 17 nt, Human
uuuuuaagaauaucugu

SEQ ID NO: 1428237 - RNA, 16 nt, Human
uuuuuaagaauaucug

SEQ ID NO: 1428238 - RNA, 11 nt, Human
uuuuuaaaugc

SEQ ID NO: 1428239 - RNA, 20 nt, Human
uuuuuaagugaaaauauagc

SEQ ID NO: 1428240 - RNA, 13 nt, Human
uuuuuaagugaaa

SEQ ID NO: 1428241 - RNA, 18 nt, Human
uuuuuccuagcccucuca

SEQ ID NO: 1428242 - RNA, 13 nt, Human
uuuuuccucucca

SEQ ID NO: 1428243 - RNA, 13 nt, Human
uuuuucuaaagga

SEQ ID NO: 1428244 - RNA, 16 nt, Human
uuuuucguuuguuugu

SEQ ID NO: 1428245 - RNA, 18 nt, Human
uuuuuccuuuaacugaca

SEQ ID NO: 1428246 - RNA, 10 nt, Human
uuuuuccuuu

SEQ ID NO: 1428247 - RNA, 19 nt, Human
uuuuuccuucaaaguuuaa

SEQ ID NO: 1428248 - RNA, 18 nt, Human
uuuuuccuucaaaguuua

SEQ ID NO: 1428249 - RNA, 22 nt, Human
uuuuuccuucaaaguuuaauaa

SEQ ID NO: 1428250 - RNA, 21 nt, Human
uuuuucuauuaaaagacucau

SEQ ID NO: 1428251 - RNA, 19 nt, Human
uuuuucuauuaaaagacuc

SEQ ID NO: 1428252 - RNA, 18 nt, Human
uuuuucuauuaaaagacu

SEQ ID NO: 1428253 - RNA, 13 nt, Human
uuuuucuauuaaa

SEQ ID NO: 1428254 - RNA, 11 nt, Human
uuuuucuauua

SEQ ID NO: 1428255 - RNA, 14 nt, Human
uuuuucuaaaggag

SEQ ID NO: 1428256 - RNA, 15 nt, Human
uuuuucuaacuacaa

SEQ ID NO: 1428257 - RNA, 18 nt, Human
uuuuucucucaacaccau

SEQ ID NO: 1428258 - RNA, 16 nt, Human
uuuuucucucaacacc

SEQ ID NO: 1428259 - RNA, 21 nt, Human
uuuuucucgcuguccuuucua

SEQ ID NO: 1428260 - RNA, 23 nt, Human
uuuuucucugauacagaaaaguu

SEQ ID NO: 1428261 - RNA, 19 nt, Human
uuuuucucuaggaaauauu

SEQ ID NO: 1428262 - RNA, 21 nt, Human
uuuuuuggccaucugcuccug

SEQ ID NO: 1428263 - RNA, 17 nt, Human
uuuuuugcaguaacugu

SEQ ID NO: 1428264 - RNA, 10 nt, Human
uuuuuugcag

SEQ ID NO: 1428265 - RNA, 9 nt, Human
uuuuuugca

SEQ ID NO: 1428266 - RNA, 15 nt, Human
uuuuugaagcuguau

SEQ ID NO: 1428267 - RNA, 10 nt, Human
uuuuuugaga

SEQ ID NO: 1428268 - RNA, 12 nt, Human
uuuuuuguugac

SEQ ID NO: 1428269 - RNA, 12 nt, Human
uuuuuuguauag

SEQ ID NO: 1428270 - RNA, 15 nt, Human
uuuuuuguauaguua

SEQ ID NO: 1428271 - RNA, 14 nt, Human
uuuuuuguaccauu

SEQ ID NO: 1428272 - RNA, 13 nt, Human
uuuuuuguaccaa

SEQ ID NO: 1428273 - RNA, 16 nt, Human
uuuuuugggcagcaau

SEQ ID NO: 1428274 - RNA, 19 nt, Human
uuuuucuuuauaagaaagc

SEQ ID NO: 1428275 - RNA, 17 nt, Human
uuuuucuugucuauaaa

SEQ ID NO: 1428276 - RNA, 12 nt, Human
uuuuucuuuaca

SEQ ID NO: 1428277 - RNA, 22 nt, Human
uuuuucuugucuauaaagcauu

SEQ ID NO: 1428278 - RNA, 12 nt, Human
uuuuucuugucu

SEQ ID NO: 1428279 - RNA, 17 nt, Human
uuuuucugauaaaagau

SEQ ID NO: 1428280 - RNA, 13 nt, Human
uuuuucugauaaa

SEQ ID NO: 1428281 - RNA, 17 nt, Human
uuuuugaaaaagcgaaa

SEQ ID NO: 1428282 - RNA, 21 nt, Human
uuuuucuuuucggaaaucuua

SEQ ID NO: 1428283 - RNA, 23 nt, Human
uuuuugaaaaagcgaaaaaauca

SEQ ID NO: 1428284 - RNA, 20 nt, Human
uuuuugaaaagcagacauuu

SEQ ID NO: 1428285 - RNA, 16 nt, Human
uuuuaaugaacaaaug

SEQ ID NO: 1428286 - RNA, 21 nt, Human
uuuuaaucucuaacaguggac

SEQ ID NO: 1428287 - RNA, 20 nt, Human
uuuuaauccgccaauauuag

SEQ ID NO: 1428288 - RNA, 19 nt, Human
uuuuaauccgccaauauua

SEQ ID NO: 1428289 - RNA, 18 nt, Human
uuuuaauccgccaauauu

SEQ ID NO: 1428290 - RNA, 22 nt, Human
uuuuaauaugcuuaaaauaagc

SEQ ID NO: 1428291 - RNA, 18 nt, Human
uuuuaaagaccccuaacc

SEQ ID NO: 1428292 - RNA, 13 nt, Human
uuuuaaagaauug

SEQ ID NO: 1428293 - RNA, 11 nt, Human
uuuuaaaugca

SEQ ID NO: 1428294 - RNA, 12 nt, Human
uuuuaaaugcac

SEQ ID NO: 1428295 - RNA, 19 nt, Human
uuuuaaaugcauaaaugca

SEQ ID NO: 1428296 - RNA, 12 nt, Human
uuuuaaauguau

SEQ ID NO: 1428297 - RNA, 21 nt, Human
uuuuaaaugcaccuggaauau

SEQ ID NO: 1428298 - RNA, 20 nt, Human
uuuuaaauucccguuuuguc

SEQ ID NO: 1428299 - RNA, 16 nt, Human
uuuuaaauguauacua

SEQ ID NO: 1428300 - RNA, 14 nt, Human
uuuguaucuugaug

SEQ ID NO: 1428301 - RNA, 20 nt, Human
uuuguauaaaagugugaaau

SEQ ID NO: 1428302 - RNA, 14 nt, Human
uuuguauaaaagug

SEQ ID NO: 1428303 - RNA, 20 nt, Human
uuuguucgcauggucacaca

SEQ ID NO: 1428304 - RNA, 12 nt, Human
uuuuaaagaauu

SEQ ID NO: 1428305 - RNA, 18 nt, Human
uuuuaaagacuuuuauga

SEQ ID NO: 1428306 - RNA, 17 nt, Human
uuuguugacauucugaa

SEQ ID NO: 1428307 - RNA, 16 nt, Human
uuuguugacauucuga

SEQ ID NO: 1428308 - RNA, 15 nt, Human
uuuguugacauucug

SEQ ID NO: 1428309 - RNA, 14 nt, Human
uuuguugacauuag

SEQ ID NO: 1428310 - RNA, 13 nt, Human
uuuguugacauua

SEQ ID NO: 1428311 - RNA, 21 nt, Human
uuuuaaaagaaugauuaugaa

SEQ ID NO: 1428312 - RNA, 15 nt, Human
uuugcauuaaauuac

SEQ ID NO: 1428313 - RNA, 14 nt, Human
uuugcauuaaauua

SEQ ID NO: 1428314 - RNA, 14 nt, Human
uuugcaucucagua

SEQ ID NO: 1428315 - RNA, 15 nt, Human
uuugcuuugugauuu

SEQ ID NO: 1428316 - RNA, 16 nt, Human
uuugcuuugugauuuu

SEQ ID NO: 1428317 - RNA, 19 nt, Human
uuugcauuaaauuacagaa

SEQ ID NO: 1428318 - RNA, 16 nt, Human
uuugcauuaaauuaca

SEQ ID NO: 1428319 - RNA, 22 nt, Human
uuugaaugauuuuucuuuacaa

SEQ ID NO: 1428320 - RNA, 13 nt, Human
uuugaaugcauuu

SEQ ID NO: 1428321 - RNA, 21 nt, Human
uuugaaucuugucucaaugcu

SEQ ID NO: 1428322 - RNA, 17 nt, Human
uuugaaugauuuuucuu

SEQ ID NO: 1428323 - RNA, 14 nt, Human
uuugaaugcauuuu

SEQ ID NO: 1428324 - RNA, 16 nt, Human
uuugaaugcauuuugu

SEQ ID NO: 1428325 - RNA, 15 nt, Human
uuugaauguguuuca

SEQ ID NO: 1428326 - RNA, 21 nt, Human
uuugaauguuaaauaaauugu

SEQ ID NO: 1428327 - RNA, 22 nt, Human
uuugaauguuaaauaaauugua

SEQ ID NO: 1428328 - RNA, 17 nt, Human
uuugaauguguuucaca

SEQ ID NO: 1428329 - RNA, 13 nt, Human
uuugaauguuaaa

SEQ ID NO: 1428330 - RNA, 16 nt, Human
uuugaauguuaaauaa

SEQ ID NO: 1428331 - RNA, 18 nt, Human
uuugaauguuaaauaaau

SEQ ID NO: 1428332 - RNA, 13 nt, Human
uuugcaucucagu

SEQ ID NO: 1428333 - RNA, 15 nt, Human
uuugcaucugaaaau

SEQ ID NO: 1428334 - RNA, 21 nt, Human
uuugguuucccaagagcuacg

SEQ ID NO: 1428335 - RNA, 19 nt, Human
uuuggugguuucagaaaug

SEQ ID NO: 1428336 - RNA, 19 nt, Human
uuugguuuucacauuggaa

SEQ ID NO: 1428337 - RNA, 14 nt, Human
uuuggugagaaccu

SEQ ID NO: 1428338 - RNA, 13 nt, Human
uuugguuucuagc

SEQ ID NO: 1428339 - RNA, 21 nt, Human
uuuggugcuucucagauuucu

SEQ ID NO: 1428340 - RNA, 16 nt, Human
uuuguauaaaauaauu

SEQ ID NO: 1428341 - RNA, 14 nt, Human
uuuguauaaaauaa

SEQ ID NO: 1428342 - RNA, 13 nt, Human
uuuguauaaaaua

SEQ ID NO: 1428343 - RNA, 18 nt, Human
uuuggugauuacauuuua

SEQ ID NO: 1428344 - RNA, 19 nt, Human
uuuggauauguaaaacauu

SEQ ID NO: 1428345 - RNA, 15 nt, Human
uuuggucucuugcuu

SEQ ID NO: 1428346 - RNA, 10 nt, Human
uuuggaugcc

SEQ ID NO: 1428347 - RNA, 21 nt, Human
uuuggauauguaaaacauuua

SEQ ID NO: 1428348 - RNA, 15 nt, Human
uuuggauauguaaaa

SEQ ID NO: 1428349 - RNA, 17 nt, Human
uuuggagguuuauuacg

SEQ ID NO: 1428350 - RNA, 20 nt, Human
uuuggaguccccucaccucc

SEQ ID NO: 1428351 - RNA, 11 nt, Human
uuuggaaugug

SEQ ID NO: 1428352 - RNA, 19 nt, Human
uuuggacaaaauggaauac

SEQ ID NO: 1428353 - RNA, 18 nt, Human
uuuggagaguuuccugaa

SEQ ID NO: 1428354 - RNA, 17 nt, Human
uuuggaguccccucacc

SEQ ID NO: 1428355 - RNA, 18 nt, Human
uuuggagggaagcucuug

SEQ ID NO: 1428356 - RNA, 18 nt, Human
uuucuuaaaccuucaguu

SEQ ID NO: 1428357 - RNA, 16 nt, Human
uuucuuaaaccuucag

SEQ ID NO: 1428358 - RNA, 17 nt, Human
uuucuuaaaaaguuaua

SEQ ID NO: 1428359 - RNA, 12 nt, Human
uuucuguuuucu

SEQ ID NO: 1428360 - RNA, 14 nt, Human
uuucugaccaaaga

SEQ ID NO: 1428361 - RNA, 18 nt, Human
uuucuuagggaaggauac

SEQ ID NO: 1428362 - RNA, 23 nt, Human
uuucuuagggaaggauacaaaag

SEQ ID NO: 1428363 - RNA, 22 nt, Human
uuucuucacugcaacaugauga

SEQ ID NO: 1428364 - RNA, 19 nt, Human
uuucuucacugcaacauga

SEQ ID NO: 1428365 - RNA, 17 nt, Human
uuucuucacugcaacau

SEQ ID NO: 1428366 - RNA, 16 nt, Human
uuucuucacugcaaca

SEQ ID NO: 1428367 - RNA, 18 nt, Human
uuucuucaccaaaucuug

SEQ ID NO: 1428368 - RNA, 23 nt, Human
uuucuuccuaccaagucaaacuu

SEQ ID NO: 1428369 - RNA, 22 nt, Human
uuucuuccuaccaagucaaacu

SEQ ID NO: 1428370 - RNA, 17 nt, Human
uuucuuccuaccaaguc

SEQ ID NO: 1428371 - RNA, 14 nt, Human
uuugaacuuuuuau

SEQ ID NO: 1428372 - RNA, 18 nt, Human
uuugaagaacaugugaga

SEQ ID NO: 1428373 - RNA, 17 nt, Human
uuugaagaacaugugag

SEQ ID NO: 1428374 - RNA, 13 nt, Human
uuucuugccucau

SEQ ID NO: 1428375 - RNA, 17 nt, Human
uuugaacugauaaagau

SEQ ID NO: 1428376 - RNA, 19 nt, Human
uuugaacugauaaagauga

SEQ ID NO: 1428377 - RNA, 12 nt, Human
uuucuugccuca

SEQ ID NO: 1428378 - RNA, 15 nt, Human
uuugaacugauaaag

SEQ ID NO: 1428379 - RNA, 19 nt, Human
uuugaauccucucucugug

SEQ ID NO: 1428380 - RNA, 12 nt, Human
uuugaaucuugu

SEQ ID NO: 1428381 - RNA, 16 nt, Human
uuugaaucuugucuca

SEQ ID NO: 1428382 - RNA, 18 nt, Human
uuugaaucuugucucaau

SEQ ID NO: 1428383 - RNA, 18 nt, Human
uuugaaucacaugaauua

SEQ ID NO: 1428384 - RNA, 19 nt, Human
uuugaaucaauaauauauu

SEQ ID NO: 1428385 - RNA, 18 nt, Human
uuugaagcacagugauca

SEQ ID NO: 1428386 - RNA, 18 nt, Human
uuugaaucaucaagucuu

SEQ ID NO: 1428387 - RNA, 13 nt, Human
uuuccucccucag

SEQ ID NO: 1428388 - RNA, 18 nt, Human
uuuccucauuuuuauaau

SEQ ID NO: 1428389 - RNA, 19 nt, Human
uuuccucagacucuaagaa

SEQ ID NO: 1428390 - RNA, 20 nt, Human
uuuccuggacacucagaccu

SEQ ID NO: 1428391 - RNA, 16 nt, Human
uuuccuggacacucag

SEQ ID NO: 1428392 - RNA, 20 nt, Human
uuaccaaccuguuaccuacu

SEQ ID NO: 1428393 - RNA, 14 nt, Human
uuaccacagacaua

SEQ ID NO: 1428394 - RNA, 17 nt, Human
uuaccacagacauacua

SEQ ID NO: 1428395 - RNA, 12 nt, Human
uuacauuuucag

SEQ ID NO: 1428396 - RNA, 18 nt, Human
uuacauuuuaaacacauu

SEQ ID NO: 1428397 - RNA, 13 nt, Human
uuaccaaccuguu

SEQ ID NO: 1428398 - RNA, 12 nt, Human
uuaccaaccugu

SEQ ID NO: 1428399 - RNA, 23 nt, Human
uuaccaaagaugaaugaagcaaa

SEQ ID NO: 1428400 - RNA, 16 nt, Human
uuaccaaagaugaaug

SEQ ID NO: 1428401 - RNA, 21 nt, Human
uuaccaaaaauaaauauaucu

SEQ ID NO: 1428402 - RNA, 21 nt, Human
uuacauuuuuugggcagcaau

SEQ ID NO: 1428403 - RNA, 16 nt, Human
uuucuagagcacugcc

SEQ ID NO: 1428404 - RNA, 13 nt, Human
uuucuagaccaau

SEQ ID NO: 1428405 - RNA, 13 nt, Human
uuucuagaaagag

SEQ ID NO: 1428406 - RNA, 22 nt, Human
uuucuacuuugaagucauacca

SEQ ID NO: 1428407 - RNA, 18 nt, Human
uuucuacuuugaagucau

SEQ ID NO: 1428408 - RNA, 12 nt, Human
uuucuaaaguaa

SEQ ID NO: 1428409 - RNA, 14 nt, Human
uuucuaaaguaaaa

SEQ ID NO: 1428410 - RNA, 20 nt, Human
uuucuaaaggcuaccuuugu

SEQ ID NO: 1428411 - RNA, 21 nt, Human
uuucuaaaggcuaccuuugua

SEQ ID NO: 1428412 - RNA, 22 nt, Human
uuucugaacagcugguguagcu

SEQ ID NO: 1428413 - RNA, 19 nt, Human
uuucugaacagcuggugua

SEQ ID NO: 1428414 - RNA, 17 nt, Human
uuucugaacagcuggug

SEQ ID NO: 1428415 - RNA, 16 nt, Human
uuucugaacagcuggu

SEQ ID NO: 1428416 - RNA, 15 nt, Human
uuucugaacagcugg

SEQ ID NO: 1428417 - RNA, 13 nt, Human
uuucugaacagcu

SEQ ID NO: 1428418 - RNA, 20 nt, Human
uuucuguucuuucuggcuau

SEQ ID NO: 1428419 - RNA, 21 nt, Human
uuucucugcagaaacuacuga

SEQ ID NO: 1428420 - RNA, 13 nt, Human
uuucucugcagaa

SEQ ID NO: 1428421 - RNA, 11 nt, Human
uuucucugcca

SEQ ID NO: 1428422 - RNA, 21 nt, Human
uuucugaaauuuccugggagc

SEQ ID NO: 1428423 - RNA, 18 nt, Human
uuucucugauacagaaaa

SEQ ID NO: 1428424 - RNA, 17 nt, Human
uuucucugauacagaaa

SEQ ID NO: 1428425 - RNA, 16 nt, Human
uuucucugauacagaa

SEQ ID NO: 1428426 - RNA, 15 nt, Human
uuucucugauacaga

SEQ ID NO: 1428427 - RNA, 17 nt, Human
guauauauuuuuuuuua

SEQ ID NO: 1428428 - RNA, 16 nt, Human
guauaugguauuuauu

SEQ ID NO: 1428429 - RNA, 13 nt, Human
guauauuacaaug

SEQ ID NO: 1428430 - RNA, 14 nt, Human
guauauuacaauga

SEQ ID NO: 1428431 - RNA, 18 nt, Human
guaucuaggcaacauagu

SEQ ID NO: 1428432 - RNA, 21 nt, Human
guaucucagaaagugccugac

SEQ ID NO: 1428433 - RNA, 22 nt, Human
guaucucagaaagugccugaca

SEQ ID NO: 1428434 - RNA, 20 nt, Human
guaucucagaaagugccuga

SEQ ID NO: 1428435 - RNA, 18 nt, Human
guaucucagaaagugccu

SEQ ID NO: 1428436 - RNA, 14 nt, Human
guaucucagaaagu

SEQ ID NO: 1428437 - RNA, 13 nt, Human
guaucucagaaag

SEQ ID NO: 1428438 - RNA, 11 nt, Human
guaucucagaa

SEQ ID NO: 1428439 - RNA, 17 nt, Human
guaucuaugcauuuucu

SEQ ID NO: 1428440 - RNA, 12 nt, Human
guaucucuucag

SEQ ID NO: 1428441 - RNA, 13 nt, Human
guaucucuucagu

SEQ ID NO: 1428442 - RNA, 17 nt, Human
guaucucuucagucucu

SEQ ID NO: 1428443 - RNA, 18 nt, Human
guauauauauauauaugu

SEQ ID NO: 1428444 - RNA, 23 nt, Human
guauauauauauauauguacagu

SEQ ID NO: 1428445 - RNA, 10 nt, Human
guauauauau

SEQ ID NO: 1428446 - RNA, 23 nt, Human
guauauacuuugaaaggagaugu

SEQ ID NO: 1428447 - RNA, 13 nt, Human
guauauacuuuuu

SEQ ID NO: 1428448 - RNA, 12 nt, Human
guauauacuuuu

SEQ ID NO: 1428449 - RNA, 12 nt, Human
guauauacuuug

SEQ ID NO: 1428450 - RNA, 23 nt, Human
guauauacacccaagaugggcau

SEQ ID NO: 1428451 - RNA, 14 nt, Human
guauaguuaacaca

SEQ ID NO: 1428452 - RNA, 18 nt, Human
guauagcugcuuccagug

SEQ ID NO: 1428453 - RNA, 20 nt, Human
guauagcaugcaucuguuua

SEQ ID NO: 1428454 - RNA, 18 nt, Human
guauagcaugcaucuguu

SEQ ID NO: 1428455 - RNA, 17 nt, Human
guaugaaacuaaagccu

SEQ ID NO: 1428456 - RNA, 13 nt, Human
guaucuuuugaua

SEQ ID NO: 1428457 - RNA, 18 nt, Human
guaugaauuauucaauuu

SEQ ID NO: 1428458 - RNA, 14 nt, Human
guaugaauuauuca

SEQ ID NO: 1428459 - RNA, 16 nt, Human
guaugaagaguguuau

SEQ ID NO: 1428460 - RNA, 19 nt, Human
guaugaaacuaaagccuuu

SEQ ID NO: 1428461 - RNA, 13 nt, Human
guaugaggcauuu

SEQ ID NO: 1428462 - RNA, 15 nt, Human
guaugaggcauuugu

SEQ ID NO: 1428463 - RNA, 19 nt, Human
guaugaacuugaggacaca

SEQ ID NO: 1428464 - RNA, 20 nt, Human
guaugaacuugaggacacau

SEQ ID NO: 1428465 - RNA, 22 nt, Human
guaugaacuugaggacacaugu

SEQ ID NO: 1428466 - RNA, 23 nt, Human
guaugaacuugaggacacauguc

SEQ ID NO: 1428467 - RNA, 17 nt, Human
guaugaaccaccgcgcc

SEQ ID NO: 1428468 - RNA, 15 nt, Human
guaugaacuugagga

SEQ ID NO: 1428469 - RNA, 16 nt, Human
guaugaacuugaggac

SEQ ID NO: 1428470 - RNA, 14 nt, Human
guauuaagaaagga

SEQ ID NO: 1428471 - RNA, 12 nt, Human
guauuaagaaag

SEQ ID NO: 1428472 - RNA, 14 nt, Human
guauuaaaauguau

SEQ ID NO: 1428473 - RNA, 17 nt, Human
guauuaaaauguaugca

SEQ ID NO: 1428474 - RNA, 19 nt, Human
guauguucuaaccuuuaca

SEQ ID NO: 1428475 - RNA, 22 nt, Human
guauguucaacuaggaucagaa

SEQ ID NO: 1428476 - RNA, 16 nt, Human
guaugauacuucgaca

SEQ ID NO: 1428477 - RNA, 24 nt, Human
guaugauagguuauuuugauguaa

SEQ ID NO: 1428478 - RNA, 17 nt, Human
guaugaggcauuuguuu

SEQ ID NO: 1428479 - RNA, 20 nt, Human
guaugaggcauuuguuugaa

SEQ ID NO: 1428480 - RNA, 17 nt, Human
guauguuagugcaaauu

SEQ ID NO: 1428481 - RNA, 13 nt, Human
guagggagggcgg

SEQ ID NO: 1428482 - RNA, 22 nt, Human
guaggcuacagagaagccuuca

SEQ ID NO: 1428483 - RNA, 20 nt, Human
guaggcuacagagaagccuu

SEQ ID NO: 1428484 - RNA, 19 nt, Human
guaggcuacagagaagccu

SEQ ID NO: 1428485 - RNA, 18 nt, Human
guaggcuacagagaagcc

SEQ ID NO: 1428486 - RNA, 17 nt, Human
guaggcuacagagaagc

SEQ ID NO: 1428487 - RNA, 16 nt, Human
guaggcuacagagaag

SEQ ID NO: 1428488 - RNA, 15 nt, Human
guaggcuacagagaa

SEQ ID NO: 1428489 - RNA, 14 nt, Human
guaggcuacagaga

SEQ ID NO: 1428490 - RNA, 21 nt, Human
guaggcuacagagaagccuuc

SEQ ID NO: 1428491 - RNA, 16 nt, Human
guagccccagugacag

SEQ ID NO: 1428492 - RNA, 19 nt, Human
guagccccagugacagcua

SEQ ID NO: 1428493 - RNA, 15 nt, Human
guagccccagugaca

SEQ ID NO: 1428494 - RNA, 15 nt, Human
guagccagccggggc

SEQ ID NO: 1428495 - RNA, 21 nt, Human
guagccagccggggcgagugg

SEQ ID NO: 1428496 - RNA, 11 nt, Human
guagccagccg

SEQ ID NO: 1428497 - RNA, 15 nt, Human
guagccacaccagga

SEQ ID NO: 1428498 - RNA, 21 nt, Human
guagccagcacacagggcagu

SEQ ID NO: 1428499 - RNA, 19 nt, Human
guagccagcacacagggca

SEQ ID NO: 1428500 - RNA, 18 nt, Human
guagccagcacacagggc

SEQ ID NO: 1428501 - RNA, 15 nt, Human
guagccagcacacag

SEQ ID NO: 1428502 - RNA, 16 nt, Human
guagccacaccaggau

SEQ ID NO: 1428503 - RNA, 13 nt, Human
guagccacaccag

SEQ ID NO: 1428504 - RNA, 17 nt, Human
guagcaugcuuguugca

SEQ ID NO: 1428505 - RNA, 21 nt, Human
guagcauuuguguugaagagg

SEQ ID NO: 1428506 - RNA, 14 nt, Human
guagauuuuccaaa

SEQ ID NO: 1428507 - RNA, 23 nt, Human
guagauugcagaaaauucugugc

SEQ ID NO: 1428508 - RNA, 21 nt, Human
guagauugcagaaaauucugu

SEQ ID NO: 1428509 - RNA, 13 nt, Human
guagauugcagaa

SEQ ID NO: 1428510 - RNA, 15 nt, Human
guagauugauuguau

SEQ ID NO: 1428511 - RNA, 18 nt, Human
guagauucagguaauaca

SEQ ID NO: 1428512 - RNA, 14 nt, Human
guagauucagguaa

SEQ ID NO: 1428513 - RNA, 13 nt, Human
gcuacagagaagc

SEQ ID NO: 1428514 - RNA, 23 nt, Human
guagcacaaguuauuuaaaucug

SEQ ID NO: 1428515 - RNA, 13 nt, Human
guagcacuuacug

SEQ ID NO: 1428516 - RNA, 16 nt, Human
guagcauccuggaaua

SEQ ID NO: 1428517 - RNA, 21 nt, Human
guagaugggagggaggcucag

SEQ ID NO: 1428518 - RNA, 17 nt, Human
guagaugggagggaggc

SEQ ID NO: 1428519 - RNA, 22 nt, Human
guagaugcauuuggguccagga

SEQ ID NO: 1428520 - RNA, 20 nt, Human
guagaugcauuuggguccag

SEQ ID NO: 1428521 - RNA, 15 nt, Human
guagaugcauuuggg

SEQ ID NO: 1428522 - RNA, 22 nt, Human
guagauauuggacaaagaaccu

SEQ ID NO: 1428523 - RNA, 15 nt, Human
guagaguugcugaga

SEQ ID NO: 1428524 - RNA, 23 nt, Human
guagaguugcugagagggcucga

SEQ ID NO: 1428525 - RNA, 21 nt, Human
guagauaaguguucugucuga

SEQ ID NO: 1428526 - RNA, 14 nt, Human
guagaguugcugag

SEQ ID NO: 1428527 - RNA, 19 nt, Human
guagaguugaucaaaauca

SEQ ID NO: 1428528 - RNA, 12 nt, Human
guaggguuucua

SEQ ID NO: 1428529 - RNA, 13 nt, Human
guaggcuacagag

SEQ ID NO: 1428530 - RNA, 15 nt, Human
guagggugggagugg

SEQ ID NO: 1428531 - RNA, 12 nt, Human
guagggugggag

SEQ ID NO: 1428532 - RNA, 23 nt, Human
guaggguuuaauccccaguaaaa

SEQ ID NO: 1428533 - RNA, 16 nt, Human
guagguucagccaagg

SEQ ID NO: 1428534 - RNA, 15 nt, Human
guagguucagccaag

SEQ ID NO: 1428535 - RNA, 23 nt, Human
guagguggaagcuagacacauga

SEQ ID NO: 1428536 - RNA, 24 nt, Human
guagguggaagcuagacacaugaa

SEQ ID NO: 1428537 - RNA, 22 nt, Human
guaggguaauuaguaacaugug

SEQ ID NO: 1428538 - RNA, 22 nt, Human
guaggguaaaucaguaagaggu

SEQ ID NO: 1428539 - RNA, 20 nt, Human
guagggggcuggaggagccc

SEQ ID NO: 1428540 - RNA, 17 nt, Human
guaggggcugggaacag

SEQ ID NO: 1428541 - RNA, 15 nt, Human
guaggggcugggaac

SEQ ID NO: 1428542 - RNA, 13 nt, Human
guaggggcuggga

SEQ ID NO: 1428543 - RNA, 20 nt, Human
guaggggccccucucagccc

SEQ ID NO: 1428544 - RNA, 13 nt, Human
guaggggccccuc

SEQ ID NO: 1428545 - RNA, 21 nt, Human
guagggggcuggaggagccca

SEQ ID NO: 1428546 - RNA, 19 nt, Human
guagggggcuggaggagcc

SEQ ID NO: 1428547 - RNA, 17 nt, Human
guagggggcuggaggag

SEQ ID NO: 1428548 - RNA, 16 nt, Human
guagggggcuggagga

SEQ ID NO: 1428549 - RNA, 16 nt, Human
guaggggcugggaaca

SEQ ID NO: 1428550 - RNA, 22 nt, Human
guaggggcuuauaauaaaggac

SEQ ID NO: 1428551 - RNA, 16 nt, Human
guaguaccaaaauaaa

SEQ ID NO: 1428552 - RNA, 15 nt, Human
guaguaccaaaauaa

SEQ ID NO: 1428553 - RNA, 15 nt, Human
guaguaacacuaaua

SEQ ID NO: 1428554 - RNA, 15 nt, Human
guaguaauugacaug

SEQ ID NO: 1428555 - RNA, 14 nt, Human
guaguaacacuaau

SEQ ID NO: 1428556 - RNA, 13 nt, Human
guaguaacacuaa

SEQ ID NO: 1428557 - RNA, 21 nt, Human
guaguaaauaaugcuuugaaa

SEQ ID NO: 1428558 - RNA, 17 nt, Human
guaguaaauaaugcuuu

SEQ ID NO: 1428559 - RNA, 15 nt, Human
guaguaaauaaugcu

SEQ ID NO: 1428560 - RNA, 18 nt, Human
guagguugcacacuuugg

SEQ ID NO: 1428561 - RNA, 19 nt, Human
guagguugcacacuuuggu

SEQ ID NO: 1428562 - RNA, 14 nt, Human
guagguugcacacu

SEQ ID NO: 1428563 - RNA, 13 nt, Human
guagguugcacac

SEQ ID NO: 1428564 - RNA, 17 nt, Human
guagguucagccaaggu

SEQ ID NO: 1428565 - RNA, 23 nt, Human
guaguauuuuuuguauaauugga

SEQ ID NO: 1428566 - RNA, 20 nt, Human
guaguauuuuuuguauaauu

SEQ ID NO: 1428567 - RNA, 19 nt, Human
guaguauuuuuuguauaau

SEQ ID NO: 1428568 - RNA, 15 nt, Human
guaguauuuuuugua

SEQ ID NO: 1428569 - RNA, 20 nt, Human
guaguauggccugugucacu

SEQ ID NO: 1428570 - RNA, 17 nt, Human
guaguauggccuguguc

SEQ ID NO: 1428571 - RNA, 13 nt, Human
guaguaugauggg

SEQ ID NO: 1428572 - RNA, 22 nt, Human
guaguaugauagguuauuuuga

SEQ ID NO: 1428573 - RNA, 16 nt, Human
guaguaggcauuuuua

SEQ ID NO: 1428574 - RNA, 22 nt, Human
guaguagcguuuuuuaaaugua

SEQ ID NO: 1428575 - RNA, 12 nt, Human
guaguccuguga

SEQ ID NO: 1428576 - RNA, 12 nt, Human
guagucuugaug

SEQ ID NO: 1428577 - RNA, 16 nt, Human
guagucuugaugacca

SEQ ID NO: 1428578 - RNA, 19 nt, Human
guagugauuuuuaugccac

SEQ ID NO: 1428579 - RNA, 23 nt, Human
guagugcuacaggguccaacaua

SEQ ID NO: 1428580 - RNA, 17 nt, Human
guaguguuggagaagaa

SEQ ID NO: 1428581 - RNA, 15 nt, Human
guaguguuggagaag

SEQ ID NO: 1428582 - RNA, 14 nt, Human
guaguguuggagaa

SEQ ID NO: 1428583 - RNA, 17 nt, Human
guauaauucacauugua

SEQ ID NO: 1428584 - RNA, 13 nt, Human
guagugcuuugag

SEQ ID NO: 1428585 - RNA, 20 nt, Human
guauaauuggauuuccuaau

SEQ ID NO: 1428586 - RNA, 19 nt, Human
guauaauuggauuuccuaa

SEQ ID NO: 1428587 - RNA, 18 nt, Human
guauaauuggauuuccua

SEQ ID NO: 1428588 - RNA, 23 nt, Human
guauacuagggagccauuugaga

SEQ ID NO: 1428589 - RNA, 13 nt, Human
guauaccucacuu

SEQ ID NO: 1428590 - RNA, 15 nt, Human
guauaccugauuuuu

SEQ ID NO: 1428591 - RNA, 15 nt, Human
guauacuguaggcac

SEQ ID NO: 1428592 - RNA, 15 nt, Human
guauacuauaguacc

SEQ ID NO: 1428593 - RNA, 22 nt, Human
gucagagccaugucuucucccu

SEQ ID NO: 1428594 - RNA, 21 nt, Human
gucagagccaugucuucuccc

SEQ ID NO: 1428595 - RNA, 20 nt, Human
gucagagccaugucuucucc

SEQ ID NO: 1428596 - RNA, 18 nt, Human
gucagauccaggagcucc

SEQ ID NO: 1428597 - RNA, 17 nt, Human
gucagauccaggagcuc

SEQ ID NO: 1428598 - RNA, 14 nt, Human
gucagauccaggag

SEQ ID NO: 1428599 - RNA, 20 nt, Human
gucagauccaggagcuccag

SEQ ID NO: 1428600 - RNA, 15 nt, Human
gucagacccuggagg

SEQ ID NO: 1428601 - RNA, 18 nt, Human
gucagacgccugaggaac

SEQ ID NO: 1428602 - RNA, 17 nt, Human
gucagacgccugaggaa

SEQ ID NO: 1428603 - RNA, 16 nt, Human
gucagacgccugagga

SEQ ID NO: 1428604 - RNA, 16 nt, Human
gucagacccuggaggc

SEQ ID NO: 1428605 - RNA, 19 nt, Human
gucacucuagucaaugaca

SEQ ID NO: 1428606 - RNA, 22 nt, Human
gucacuaaagcaggccuuuuga

SEQ ID NO: 1428607 - RNA, 13 nt, Human
gucacucaaggcg

SEQ ID NO: 1428608 - RNA, 16 nt, Human
gucacuacgccuggcu

SEQ ID NO: 1428609 - RNA, 22 nt, Human
gucaauaaaauccauacauuug

SEQ ID NO: 1428610 - RNA, 23 nt, Human
gucaauaaaauccauacauuugu

SEQ ID NO: 1428611 - RNA, 18 nt, Human
gucaaucaagucuguuua

SEQ ID NO: 1428612 - RNA, 23 nt, Human
gucaaugacaugaauuuuagcuu

SEQ ID NO: 1428613 - RNA, 16 nt, Human
gucaaugacaugaauu

SEQ ID NO: 1428614 - RNA, 19 nt, Human
gucaccacgacuggccagg

SEQ ID NO: 1428615 - RNA, 17 nt, Human
gucaccacgacuggcca

SEQ ID NO: 1428616 - RNA, 16 nt, Human
gucaccacgacuggcc

SEQ ID NO: 1428617 - RNA, 17 nt, Human
gucaccacccugcucau

SEQ ID NO: 1428618 - RNA, 13 nt, Human
gucaccagguacu

SEQ ID NO: 1428619 - RNA, 13 nt, Human
gucaccagagacu

SEQ ID NO: 1428620 - RNA, 21 nt, Human
gucaccacgacuggccagggc

SEQ ID NO: 1428621 - RNA, 16 nt, Human
gucaccagagacuuua

SEQ ID NO: 1428622 - RNA, 18 nt, Human
guauuuuguauuguuuca

SEQ ID NO: 1428623 - RNA, 17 nt, Human
guauuuucaauagccac

SEQ ID NO: 1428624 - RNA, 13 nt, Human
guauuuucaauag

SEQ ID NO: 1428625 - RNA, 22 nt, Human
guauuuuauguuauauauaaau

SEQ ID NO: 1428626 - RNA, 17 nt, Human
guauuuuauguuauaua

SEQ ID NO: 1428627 - RNA, 16 nt, Human
guauuuuauguuauau

SEQ ID NO: 1428628 - RNA, 13 nt, Human
guauuuuauguua

SEQ ID NO: 1428629 - RNA, 20 nt, Human
guauuuuagugaacuugaaa

SEQ ID NO: 1428630 - RNA, 19 nt, Human
guauuuuagugaacuugaa

SEQ ID NO: 1428631 - RNA, 21 nt, Human
guauuuuaguaagagauuccu

SEQ ID NO: 1428632 - RNA, 23 nt, Human
guauuuuaaaauagcguucuugu

SEQ ID NO: 1428633 - RNA, 18 nt, Human
guauuuuaaaauagcguu

SEQ ID NO: 1428634 - RNA, 16 nt, Human
guauuacacucuguaa

SEQ ID NO: 1428635 - RNA, 18 nt, Human
guauuacacucuguaauu

SEQ ID NO: 1428636 - RNA, 20 nt, Human
guauuuuaaaagaaugauua

SEQ ID NO: 1428637 - RNA, 16 nt, Human
guauuaagaaaggaag

SEQ ID NO: 1428638 - RNA, 15 nt, Human
guauuaagaaaggaa

SEQ ID NO: 1428639 - RNA, 18 nt, Human
guccagggcuagugacuu

SEQ ID NO: 1428640 - RNA, 14 nt, Human
guccagcuccaacc

SEQ ID NO: 1428641 - RNA, 23 nt, Human
guccagguccugguggggcagcu

SEQ ID NO: 1428642 - RNA, 22 nt, Human
guccagguccugguggggcagc

SEQ ID NO: 1428643 - RNA, 21 nt, Human
guccagguccugguggggcag

SEQ ID NO: 1428644 - RNA, 17 nt, Human
guccagguccugguggg

SEQ ID NO: 1428645 - RNA, 16 nt, Human
guccagguccuggugg

SEQ ID NO: 1428646 - RNA, 15 nt, Human
guccagguccuggug

SEQ ID NO: 1428647 - RNA, 23 nt, Human
guccaguccuaucugggcuuccu

SEQ ID NO: 1428648 - RNA, 19 nt, Human
guccaguccuaucugggcu

SEQ ID NO: 1428649 - RNA, 18 nt, Human
guccaguccuaucugggc

SEQ ID NO: 1428650 - RNA, 17 nt, Human
guccaguccuaucuggg

SEQ ID NO: 1428651 - RNA, 17 nt, Human
guccaguccaguccuau

SEQ ID NO: 1428652 - RNA, 15 nt, Human
guccaguccaguccu

SEQ ID NO: 1428653 - RNA, 18 nt, Human
guccacgacugucuccau

SEQ ID NO: 1428654 - RNA, 16 nt, Human
guccacgacugucucc

SEQ ID NO: 1428655 - RNA, 15 nt, Human
guccacgacugucuc

SEQ ID NO: 1428656 - RNA, 18 nt, Human
guccagagagaccgagga

SEQ ID NO: 1428657 - RNA, 20 nt, Human
guccagagagaccgaggagg

SEQ ID NO: 1428658 - RNA, 22 nt, Human
guccacaggcuucugagcagcg

SEQ ID NO: 1428659 - RNA, 11 nt, Human
gucauuaaaug

SEQ ID NO: 1428660 - RNA, 13 nt, Human
gucauguuuaucu

SEQ ID NO: 1428661 - RNA, 14 nt, Human
gucauguuuaucug

SEQ ID NO: 1428662 - RNA, 22 nt, Human
gucagcugggacaccccgacuu

SEQ ID NO: 1428663 - RNA, 13 nt, Human
gucaggaaagaga

SEQ ID NO: 1428664 - RNA, 21 nt, Human
gucauuguuauauaaucauua

SEQ ID NO: 1428665 - RNA, 14 nt, Human
gucauuggcuuuau

SEQ ID NO: 1428666 - RNA, 17 nt, Human
gucauuggcuuuauccu

SEQ ID NO: 1428667 - RNA, 21 nt, Human
gucauucgcuacuaugauuua

SEQ ID NO: 1428668 - RNA, 16 nt, Human
gucauucguucugugg

SEQ ID NO: 1428669 - RNA, 21 nt, Human
gucauucagauaugauucaaa

SEQ ID NO: 1428670 - RNA, 13 nt, Human
gucauuagccuga

SEQ ID NO: 1428671 - RNA, 19 nt, Human
gucauuagccugaguagaa

SEQ ID NO: 1428672 - RNA, 21 nt, Human
gucauuagccugaguagaaag

SEQ ID NO: 1428673 - RNA, 15 nt, Human
gucccaucccugcgu

SEQ ID NO: 1428674 - RNA, 19 nt, Human
guccccaacagcgcccaaa

SEQ ID NO: 1428675 - RNA, 16 nt, Human
guccccaacagcgccc

SEQ ID NO: 1428676 - RNA, 15 nt, Human
guccccaacagcgcc

SEQ ID NO: 1428677 - RNA, 21 nt, Human
gucccauuuuagccaagcuua

SEQ ID NO: 1428678 - RNA, 13 nt, Human
gucccauguggug

SEQ ID NO: 1428679 - RNA, 17 nt, Human
gucccaugaucccugug

SEQ ID NO: 1428680 - RNA, 16 nt, Human
gucccuaauaaagcug

SEQ ID NO: 1428681 - RNA, 17 nt, Human
gucccuaauaaagcugu

SEQ ID NO: 1428682 - RNA, 13 nt, Human
gucccucugugua

SEQ ID NO: 1428683 - RNA, 12 nt, Human
gucccucugugu

SEQ ID NO: 1428684 - RNA, 11 nt, Human
gucccucugug

SEQ ID NO: 1428685 - RNA, 22 nt, Human
gucccucucauuuagccugucc

SEQ ID NO: 1428686 - RNA, 22 nt, Human
gucccucuguguauuugcuuuu

SEQ ID NO: 1428687 - RNA, 14 nt, Human
gucccucuguguau

SEQ ID NO: 1428688 - RNA, 21 nt, Human
gucccugcacagugacuucug

SEQ ID NO: 1428689 - RNA, 23 nt, Human
gucccuccgggaccuggugcugc

SEQ ID NO: 1428690 - RNA, 16 nt, Human
gucccucccccuuguc

SEQ ID NO: 1428691 - RNA, 21 nt, Human
gucccuaccccauggugcuag

SEQ ID NO: 1428692 - RNA, 18 nt, Human
gucccuaauaaagcugug

SEQ ID NO: 1428693 - RNA, 20 nt, Human
gucccuaauaaagcugugug

SEQ ID NO: 1428694 - RNA, 12 nt, Human
gucucuugcuug

SEQ ID NO: 1428695 - RNA, 19 nt, Human
gucugacuuucuuuuuuga

SEQ ID NO: 1428696 - RNA, 19 nt, Human
gucucuucugaauaaagca

SEQ ID NO: 1428697 - RNA, 20 nt, Human
gucucuucugaauaaagcaa

SEQ ID NO: 1428698 - RNA, 21 nt, Human
gucucuucugaauaaagcaau

SEQ ID NO: 1428699 - RNA, 22 nt, Human
gucucuucugaauaaagcaauu

SEQ ID NO: 1428700 - RNA, 22 nt, Human
gucucuucugagcuauuucauc

SEQ ID NO: 1428701 - RNA, 14 nt, Human
gucucuucugagcu

SEQ ID NO: 1428702 - RNA, 23 nt, Human
gucucuucugaauaaagcaauua

SEQ ID NO: 1428703 - RNA, 21 nt, Human
gucucuggauuauauuaugaa

SEQ ID NO: 1428704 - RNA, 23 nt, Human
gucucucuucucuccagcugacu

SEQ ID NO: 1428705 - RNA, 20 nt, Human
gucucucuucucuccagcug

SEQ ID NO: 1428706 - RNA, 19 nt, Human
gucucucuucucuccagcu

SEQ ID NO: 1428707 - RNA, 15 nt, Human
gucucucuucucucc

SEQ ID NO: 1428708 - RNA, 14 nt, Human
gucucucuucucuc

SEQ ID NO: 1428709 - RNA, 19 nt, Human
gucucucucucucuacaaa

SEQ ID NO: 1428710 - RNA, 18 nt, Human
gucucucugggccuuagg

SEQ ID NO: 1428711 - RNA, 15 nt, Human
gucucugaugcagcu

SEQ ID NO: 1428712 - RNA, 19 nt, Human
gucucugaggggcuaccag

SEQ ID NO: 1428713 - RNA, 19 nt, Human
gucucugaugcagcuuaua

SEQ ID NO: 1428714 - RNA, 16 nt, Human
gucucugaugcagcuu

SEQ ID NO: 1428715 - RNA, 17 nt, Human
gucucuggaauuugaaa

SEQ ID NO: 1428716 - RNA, 19 nt, Human
gucucaccuggacuuaagc

SEQ ID NO: 1428717 - RNA, 20 nt, Human
gucucaccggcucucaccug

SEQ ID NO: 1428718 - RNA, 19 nt, Human
gucucaccggcucucaccu

SEQ ID NO: 1428719 - RNA, 18 nt, Human
gucucaccggcucucacc

SEQ ID NO: 1428720 - RNA, 20 nt, Human
gucucacccuggaggcaccu

SEQ ID NO: 1428721 - RNA, 12 nt, Human
gucucuagagca

SEQ ID NO: 1428722 - RNA, 21 nt, Human
gucucuaauucuauuaaagug

SEQ ID NO: 1428723 - RNA, 15 nt, Human
gucucaggcugccug

SEQ ID NO: 1428724 - RNA, 13 nt, Human
gucucaggcugcc

SEQ ID NO: 1428725 - RNA, 19 nt, Human
gucucagccccuuucccuu

SEQ ID NO: 1428726 - RNA, 14 nt, Human
gucucaggcugccu

SEQ ID NO: 1428727 - RNA, 18 nt, Human
gucucuagagcagggauu

SEQ ID NO: 1428728 - RNA, 15 nt, Human
gucucucucucucua

SEQ ID NO: 1428729 - RNA, 17 nt, Human
gucucuauaccaauaaa

SEQ ID NO: 1428730 - RNA, 18 nt, Human
gucucuauaccaauaaag

SEQ ID NO: 1428731 - RNA, 19 nt, Human
gucucuauaccaauaaagu

SEQ ID NO: 1428732 - RNA, 20 nt, Human
gucucuauaccaauaaagug

SEQ ID NO: 1428733 - RNA, 23 nt, Human
guccuuacuccugugggagccuc

SEQ ID NO: 1428734 - RNA, 22 nt, Human
guccuuacuccugugggagccu

SEQ ID NO: 1428735 - RNA, 18 nt, Human
guccuuacuccuguggga

SEQ ID NO: 1428736 - RNA, 17 nt, Human
guccuuacuccuguggg

SEQ ID NO: 1428737 - RNA, 15 nt, Human
guccuuacuccugug

SEQ ID NO: 1428738 - RNA, 13 nt, Human
guccuuacuccug

SEQ ID NO: 1428739 - RNA, 23 nt, Human
gucccugcacagugacuucugag

SEQ ID NO: 1428740 - RNA, 13 nt, Human
gucccugccugga

SEQ ID NO: 1428741 - RNA, 18 nt, Human
gucggggcaucuggccug

SEQ ID NO: 1428742 - RNA, 14 nt, Human
gucggggcaucugg

SEQ ID NO: 1428743 - RNA, 18 nt, Human
gucggcugaccaugcuca

SEQ ID NO: 1428744 - RNA, 17 nt, Human
gucggcugaccaugcuc

SEQ ID NO: 1428745 - RNA, 14 nt, Human
gucggcugaccaug

SEQ ID NO: 1428746 - RNA, 14 nt, Human
guccuuagccugga

SEQ ID NO: 1428747 - RNA, 13 nt, Human
guccuuagccugg

SEQ ID NO: 1428748 - RNA, 12 nt, Human
gucggagcccug

SEQ ID NO: 1428749 - RNA, 21 nt, Human
gucggaaaacaugcuacacac

SEQ ID NO: 1428750 - RNA, 16 nt, Human
gucggagcccugucuc

SEQ ID NO: 1428751 - RNA, 21 nt, Human
gucuaaagcugguuuaauguu

SEQ ID NO: 1428752 - RNA, 23 nt, Human
gucuaaagauggaguuucuaagg

SEQ ID NO: 1428753 - RNA, 21 nt, Human
gucguggagagcuaggagcaa

SEQ ID NO: 1428754 - RNA, 15 nt, Human
gucucacccuggagg

SEQ ID NO: 1428755 - RNA, 17 nt, Human
gucguggggugugcugg

SEQ ID NO: 1428756 - RNA, 24 nt, Human
gucguggagagcuaggagcaaagc

SEQ ID NO: 1428757 - RNA, 20 nt, Human
gucguggagagcuaggagca

SEQ ID NO: 1428758 - RNA, 19 nt, Human
gucguggagagcuaggagc

SEQ ID NO: 1428759 - RNA, 18 nt, Human
gucguggagagcuaggag

SEQ ID NO: 1428760 - RNA, 23 nt, Human
gucguggacacacacagacuauu

SEQ ID NO: 1428761 - RNA, 18 nt, Human
gucgugccuguguccaug

SEQ ID NO: 1428762 - RNA, 17 nt, Human
gucgugccuguguccau

SEQ ID NO: 1428763 - RNA, 15 nt, Human
gucgugccugugucc

SEQ ID NO: 1428764 - RNA, 14 nt, Human
gucgugccuguguc

SEQ ID NO: 1428765 - RNA, 13 nt, Human
gucgugccugugu

SEQ ID NO: 1428766 - RNA, 12 nt, Human
gucgugccugug

SEQ ID NO: 1428767 - RNA, 17 nt, Human
gucgugagcucuuguga

SEQ ID NO: 1428768 - RNA, 17 nt, Human
gucguccuuacuccugu

SEQ ID NO: 1428769 - RNA, 12 nt, Human
gucguaaagauu

SEQ ID NO: 1428770 - RNA, 14 nt, Human
gucguaaagauuug

SEQ ID NO: 1428771 - RNA, 14 nt, Human
gucggugccuucaa

SEQ ID NO: 1428772 - RNA, 14 nt, Human
gucggucugugccc

SEQ ID NO: 1428773 - RNA, 18 nt, Human
gucgucaaagcugaaaug

SEQ ID NO: 1428774 - RNA, 13 nt, Human
gucuguggauuuu

SEQ ID NO: 1428775 - RNA, 16 nt, Human
gucuguggauuuuuuc

SEQ ID NO: 1428776 - RNA, 13 nt, Human
gucuguggaucag

SEQ ID NO: 1428777 - RNA, 22 nt, Human
gucugugccccuuccgccacug

SEQ ID NO: 1428778 - RNA, 18 nt, Human
gucuguucuguuucaagg

SEQ ID NO: 1428779 - RNA, 21 nt, Human
gucuguuccccauggccacuu

SEQ ID NO: 1428780 - RNA, 17 nt, Human
gucuguucacuuuuccu

SEQ ID NO: 1428781 - RNA, 16 nt, Human
gucuguuaugcuguga

SEQ ID NO: 1428782 - RNA, 17 nt, Human
gucuguguuuugaaaga

SEQ ID NO: 1428783 - RNA, 22 nt, Human
gucuguuggcaggcuggccagu

SEQ ID NO: 1428784 - RNA, 21 nt, Human
gucuguuggcaggcuggccag

SEQ ID NO: 1428785 - RNA, 20 nt, Human
gucuguuggcaggcuggcca

SEQ ID NO: 1428786 - RNA, 13 nt, Human
gucuguuuacugc

SEQ ID NO: 1428787 - RNA, 12 nt, Human
gucuguuuacug

SEQ ID NO: 1428788 - RNA, 19 nt, Human
gucuguuggcaggcuggcc

SEQ ID NO: 1428789 - RNA, 18 nt, Human
gucuguuggcaggcuggc

SEQ ID NO: 1428790 - RNA, 16 nt, Human
gucuguuggcaggcug

SEQ ID NO: 1428791 - RNA, 14 nt, Human
gucuguuggcaggc

SEQ ID NO: 1428792 - RNA, 19 nt, Human
gucuguugauuaaagauga

SEQ ID NO: 1428793 - RNA, 16 nt, Human
gucuguugauuaaaga

SEQ ID NO: 1428794 - RNA, 13 nt, Human
gucuguugauuaa

SEQ ID NO: 1428795 - RNA, 14 nt, Human
gucuguucuuucca

SEQ ID NO: 1428796 - RNA, 17 nt, Human
gucuguucuuuccaaag

SEQ ID NO: 1428797 - RNA, 23 nt, Human
gucugcucagacagaaccccuac

SEQ ID NO: 1428798 - RNA, 16 nt, Human
gucugcuaucauuauu

SEQ ID NO: 1428799 - RNA, 11 nt, Human
gucugccucuu

SEQ ID NO: 1428800 - RNA, 17 nt, Human
gucugcccucugcaucc

SEQ ID NO: 1428801 - RNA, 21 nt, Human
gucugcccucugcauccucug

SEQ ID NO: 1428802 - RNA, 17 nt, Human
gucugccccgcccucau

SEQ ID NO: 1428803 - RNA, 21 nt, Human
gucugccagggccccucuccc

SEQ ID NO: 1428804 - RNA, 10 nt, Human
gucugccagg

SEQ ID NO: 1428805 - RNA, 18 nt, Human
gucugagagaggccauuc

SEQ ID NO: 1428806 - RNA, 15 nt, Human
gucugagagaggcca

SEQ ID NO: 1428807 - RNA, 14 nt, Human
gucugagagaggcc

SEQ ID NO: 1428808 - RNA, 13 nt, Human
gucugagagaggc

SEQ ID NO: 1428809 - RNA, 23 nt, Human
gucugugccccuuccgccacugg

SEQ ID NO: 1428810 - RNA, 20 nt, Human
gucugugccccuuccgccac

SEQ ID NO: 1428811 - RNA, 19 nt, Human
gucugugccccuuccgcca

SEQ ID NO: 1428812 - RNA, 13 nt, Human
gucugugccccuu

SEQ ID NO: 1428813 - RNA, 20 nt, Human
gucuucuuugcccacaaugc

SEQ ID NO: 1428814 - RNA, 20 nt, Human
gucuucuuacuuggaacuga

SEQ ID NO: 1428815 - RNA, 17 nt, Human
gucuucuuugcccacaa

SEQ ID NO: 1428816 - RNA, 17 nt, Human
gucuucuuacuuggaac

SEQ ID NO: 1428817 - RNA, 15 nt, Human
gucuucucccuggaa

SEQ ID NO: 1428818 - RNA, 20 nt, Human
gucuucuccaacaccaccuc

SEQ ID NO: 1428819 - RNA, 18 nt, Human
gucuugaugaccaaaguc

SEQ ID NO: 1428820 - RNA, 16 nt, Human
gucuugagcucuauua

SEQ ID NO: 1428821 - RNA, 14 nt, Human
gucuugagcucuau

SEQ ID NO: 1428822 - RNA, 22 nt, Human
gucuuggaacuugccugccuuu

SEQ ID NO: 1428823 - RNA, 17 nt, Human
gucuuggaacuugccug

SEQ ID NO: 1428824 - RNA, 16 nt, Human
gucuuggaacuugccu

SEQ ID NO: 1428825 - RNA, 20 nt, Human
gucuugggcagagcuggcuc

SEQ ID NO: 1428826 - RNA, 19 nt, Human
gucuugggcagagcuggcu

SEQ ID NO: 1428827 - RNA, 16 nt, Human
gucuugggcagagcug

SEQ ID NO: 1428828 - RNA, 22 nt, Human
gucuugggcagagcuggcucug

SEQ ID NO: 1428829 - RNA, 21 nt, Human
gucuugggcagagcuggcucu

SEQ ID NO: 1428830 - RNA, 16 nt, Human
gugacagacaggcucu

SEQ ID NO: 1428831 - RNA, 15 nt, Human
gugacagacaggcuc

SEQ ID NO: 1428832 - RNA, 21 nt, Human
gugacacaaacacacacaaaa

SEQ ID NO: 1428833 - RNA, 18 nt, Human
gugacacaaacacacaca

SEQ ID NO: 1428834 - RNA, 14 nt, Human
gugacacaaacaca

SEQ ID NO: 1428835 - RNA, 13 nt, Human
gugacacaaacac

SEQ ID NO: 1428836 - RNA, 14 nt, Human
gugacaauaaaaca

SEQ ID NO: 1428837 - RNA, 12 nt, Human
gugacaauaaaa

SEQ ID NO: 1428838 - RNA, 17 nt, Human
gugacagacaggcucuu

SEQ ID NO: 1428839 - RNA, 19 nt, Human
gugaaaacacauuugcuuu

SEQ ID NO: 1428840 - RNA, 22 nt, Human
gucuuuuuuuguauaguuaaca

SEQ ID NO: 1428841 - RNA, 17 nt, Human
gucuuuuuuuguauagu

SEQ ID NO: 1428842 - RNA, 16 nt, Human
gucuuuuuuuguauag

SEQ ID NO: 1428843 - RNA, 15 nt, Human
gucuuuuuuuguaua

SEQ ID NO: 1428844 - RNA, 13 nt, Human
gugaaugaacacu

SEQ ID NO: 1428845 - RNA, 18 nt, Human
gugaacaaagcagccacg

SEQ ID NO: 1428846 - RNA, 17 nt, Human
gugaacaaagcagccac

SEQ ID NO: 1428847 - RNA, 13 nt, Human
gugaauucccuca

SEQ ID NO: 1428848 - RNA, 14 nt, Human
gugaauucccucac

SEQ ID NO: 1428849 - RNA, 21 nt, Human
gugaaugcugggacucagccu

SEQ ID NO: 1428850 - RNA, 20 nt, Human
gugaaugcugggacucagcc

SEQ ID NO: 1428851 - RNA, 15 nt, Human
gugaaugcugggacu

SEQ ID NO: 1428852 - RNA, 13 nt, Human
gugaaugcuggga

SEQ ID NO: 1428853 - RNA, 22 nt, Human
gugaguucucccuguacagugu

SEQ ID NO: 1428854 - RNA, 13 nt, Human
gugaguucucccu

SEQ ID NO: 1428855 - RNA, 17 nt, Human
gugaguguuuuuaucuu

SEQ ID NO: 1428856 - RNA, 20 nt, Human
gugaguuggcuuaccuggcc

SEQ ID NO: 1428857 - RNA, 16 nt, Human
gugaguuggcuuaccu

SEQ ID NO: 1428858 - RNA, 12 nt, Human
gugaguuggcuu

SEQ ID NO: 1428859 - RNA, 15 nt, Human
gugauacaaugcugu

SEQ ID NO: 1428860 - RNA, 17 nt, Human
gugauacaaugcugugc

SEQ ID NO: 1428861 - RNA, 18 nt, Human
gugaucauguguggaagu

SEQ ID NO: 1428862 - RNA, 17 nt, Human
gugaucauguguggaag

SEQ ID NO: 1428863 - RNA, 16 nt, Human
gugaucauguguggaa

SEQ ID NO: 1428864 - RNA, 20 nt, Human
gugaucagaccauaauguua

SEQ ID NO: 1428865 - RNA, 13 nt, Human
gugauauucuaag

SEQ ID NO: 1428866 - RNA, 14 nt, Human
gugauaugcacaau

SEQ ID NO: 1428867 - RNA, 19 nt, Human
gugauaugcacaauguaga

SEQ ID NO: 1428868 - RNA, 23 nt, Human
gugauauauaaguguacauaugu

SEQ ID NO: 1428869 - RNA, 21 nt, Human
gugauauauaaguguacauau

SEQ ID NO: 1428870 - RNA, 22 nt, Human
gugauagucuuuugcuuuuggc

SEQ ID NO: 1428871 - RNA, 19 nt, Human
gugauauaaguguguguuu

SEQ ID NO: 1428872 - RNA, 23 nt, Human
gugacuaacuagacaccaaaguu

SEQ ID NO: 1428873 - RNA, 17 nt, Human
gugacuaauggcaugag

SEQ ID NO: 1428874 - RNA, 21 nt, Human
gugacgucuggguggcccuua

SEQ ID NO: 1428875 - RNA, 19 nt, Human
gugacgucuggguggcccu

SEQ ID NO: 1428876 - RNA, 16 nt, Human
gugacgucuggguggc

SEQ ID NO: 1428877 - RNA, 15 nt, Human
gugacgucugggugg

SEQ ID NO: 1428878 - RNA, 20 nt, Human
gugagcccagcugggucagg

SEQ ID NO: 1428879 - RNA, 18 nt, Human
gugagcccagcuggguca

SEQ ID NO: 1428880 - RNA, 15 nt, Human
gugagcccagcuggg

SEQ ID NO: 1428881 - RNA, 13 nt, Human
gugaggagcuggg

SEQ ID NO: 1428882 - RNA, 14 nt, Human
gugagcuacaaaug

SEQ ID NO: 1428883 - RNA, 18 nt, Human
gugaggagcuugaaaccc

SEQ ID NO: 1428884 - RNA, 21 nt, Human
gugccccucuccuucuuagcu

SEQ ID NO: 1428885 - RNA, 21 nt, Human
gugcccccuucaagccugugc

SEQ ID NO: 1428886 - RNA, 19 nt, Human
gugccaugucaaacaaaua

SEQ ID NO: 1428887 - RNA, 16 nt, Human
gugccaggugagguca

SEQ ID NO: 1428888 - RNA, 22 nt, Human
gugccaggugaggucagcacau

SEQ ID NO: 1428889 - RNA, 14 nt, Human
gugccuucauuugg

SEQ ID NO: 1428890 - RNA, 12 nt, Human
gugccuucauuu

SEQ ID NO: 1428891 - RNA, 11 nt, Human
gugccuucauu

SEQ ID NO: 1428892 - RNA, 22 nt, Human
gugccuucaagaaaacaggcac

SEQ ID NO: 1428893 - RNA, 20 nt, Human
gugccccuuccgccacuggg

SEQ ID NO: 1428894 - RNA, 22 nt, Human
gugccccuuccgccacuggggc

SEQ ID NO: 1428895 - RNA, 19 nt, Human
gugccccuuccgccacugg

SEQ ID NO: 1428896 - RNA, 17 nt, Human
gugccccuuccgccacu

SEQ ID NO: 1428897 - RNA, 15 nt, Human
gugccccuuccgcca

SEQ ID NO: 1428898 - RNA, 15 nt, Human
gugccuucucucucc

SEQ ID NO: 1428899 - RNA, 23 nt, Human
gugccuuccuguuuuucacauuu

SEQ ID NO: 1428900 - RNA, 14 nt, Human
gugccuucucucuc

SEQ ID NO: 1428901 - RNA, 13 nt, Human
gugcgugaauauu

SEQ ID NO: 1428902 - RNA, 13 nt, Human
gugcguccugucg

SEQ ID NO: 1428903 - RNA, 15 nt, Human
gugcguccacgagcu

SEQ ID NO: 1428904 - RNA, 16 nt, Human
gugcggcuggccaugg

SEQ ID NO: 1428905 - RNA, 15 nt, Human
gugcggaccacccuc

SEQ ID NO: 1428906 - RNA, 13 nt, Human
gugcgcccagggc

SEQ ID NO: 1428907 - RNA, 12 nt, Human
gugcgcccaggg

SEQ ID NO: 1428908 - RNA, 18 nt, Human
gugcgagggacccagcua

SEQ ID NO: 1428909 - RNA, 16 nt, Human
gugcgcccagggcugg

SEQ ID NO: 1428910 - RNA, 15 nt, Human
gugcgcccagggcug

SEQ ID NO: 1428911 - RNA, 14 nt, Human
gugcgcccagggcu

SEQ ID NO: 1428912 - RNA, 20 nt, Human
gugcgugguggucccugggu

SEQ ID NO: 1428913 - RNA, 19 nt, Human
gugcgugguggucccuggg

SEQ ID NO: 1428914 - RNA, 15 nt, Human
gugcguggugguccc

SEQ ID NO: 1428915 - RNA, 13 nt, Human
gugcguggugcga

SEQ ID NO: 1428916 - RNA, 21 nt, Human
gugcguggaaugcccuucacu

SEQ ID NO: 1428917 - RNA, 16 nt, Human
gugcuaagguucuaag

SEQ ID NO: 1428918 - RNA, 20 nt, Human
gugcuaagugugaacuggac

SEQ ID NO: 1428919 - RNA, 17 nt, Human
gugcuaagugugaacug

SEQ ID NO: 1428920 - RNA, 18 nt, Human
gugcuaagugugaacugg

SEQ ID NO: 1428921 - RNA, 17 nt, Human
gugcuaagguucuaagg

SEQ ID NO: 1428922 - RNA, 13 nt, Human
gugcuaaguguga

SEQ ID NO: 1428923 - RNA, 14 nt, Human
gugcuaagugugaa

SEQ ID NO: 1428924 - RNA, 16 nt, Human
gugcuaagugugaacu

SEQ ID NO: 1428925 - RNA, 15 nt, Human
gugcuaagguucuaa

SEQ ID NO: 1428926 - RNA, 14 nt, Human
gugcuaagguucua

SEQ ID NO: 1428927 - RNA, 13 nt, Human
gugcuaagguucu

SEQ ID NO: 1428928 - RNA, 16 nt, Human
gugccaggaccaguca

SEQ ID NO: 1428929 - RNA, 13 nt, Human
gugccaggaccag

SEQ ID NO: 1428930 - RNA, 20 nt, Human
gugcaucaggcuuucuuuuu

SEQ ID NO: 1428931 - RNA, 11 nt, Human
gugcaucaggc

SEQ ID NO: 1428932 - RNA, 22 nt, Human
gugcauaccacuuuuguucuug

SEQ ID NO: 1428933 - RNA, 18 nt, Human
gugcagccgcugagcgag

SEQ ID NO: 1428934 - RNA, 17 nt, Human
gugcagccgcugagcga

SEQ ID NO: 1428935 - RNA, 19 nt, Human
gugcagcccccacugccuu

SEQ ID NO: 1428936 - RNA, 18 nt, Human
gugauuuacgcucauugu

SEQ ID NO: 1428937 - RNA, 20 nt, Human
gugauccacccgccucagcc

SEQ ID NO: 1428938 - RNA, 24 nt, Human
gugauccacccgccucagccuccc

SEQ ID NO: 1428939 - RNA, 13 nt, Human
gugauuuuuguaa

SEQ ID NO: 1428940 - RNA, 18 nt, Human
gugauuuuuguaauuuuu

SEQ ID NO: 1428941 - RNA, 21 nt, Human
gugauuuuuaugccaccugaa

SEQ ID NO: 1428942 - RNA, 15 nt, Human
gugcacugcccaugg

SEQ ID NO: 1428943 - RNA, 20 nt, Human
gugcacugcccauggacagg

SEQ ID NO: 1428944 - RNA, 19 nt, Human
gugcacugcccauggacag

SEQ ID NO: 1428945 - RNA, 21 nt, Human
gugcacugcccauggacaggc

SEQ ID NO: 1428946 - RNA, 13 nt, Human
gugcacuggcccc

SEQ ID NO: 1428947 - RNA, 20 nt, Human
gugcacugggaggcuccccu

SEQ ID NO: 1428948 - RNA, 21 nt, Human
gugcacugggaggcuccccuu

SEQ ID NO: 1428949 - RNA, 16 nt, Human
gugcacuggccccacc

SEQ ID NO: 1428950 - RNA, 17 nt, Human
gugcacuggccccaccc

SEQ ID NO: 1428951 - RNA, 15 nt, Human
gugcacugggaggcu

SEQ ID NO: 1428952 - RNA, 13 nt, Human
gugcacugggagg

SEQ ID NO: 1428953 - RNA, 18 nt, Human
gugcacuggccccacccu

SEQ ID NO: 1428954 - RNA, 17 nt, Human
guggcuggaagauccug

SEQ ID NO: 1428955 - RNA, 12 nt, Human
guggcuggaaga

SEQ ID NO: 1428956 - RNA, 20 nt, Human
guggcuggaagauccugcgg

SEQ ID NO: 1428957 - RNA, 17 nt, Human
guggcugguccagggcu

SEQ ID NO: 1428958 - RNA, 15 nt, Human
guggcugguccaggg

SEQ ID NO: 1428959 - RNA, 18 nt, Human
guggcuggguuuacacgc

SEQ ID NO: 1428960 - RNA, 22 nt, Human
guggcucacucagcacuuggcc

SEQ ID NO: 1428961 - RNA, 15 nt, Human
guggcucagccagca

SEQ ID NO: 1428962 - RNA, 16 nt, Human
guggcucgggaggcga

SEQ ID NO: 1428963 - RNA, 15 nt, Human
guggcugcuguggga

SEQ ID NO: 1428964 - RNA, 13 nt, Human
guggcuccuuccc

SEQ ID NO: 1428965 - RNA, 23 nt, Human
guggcuacucugugccagagccu

SEQ ID NO: 1428966 - RNA, 22 nt, Human
guggcuacucugugccagagcc

SEQ ID NO: 1428967 - RNA, 21 nt, Human
guggcuacucugugccagagc

SEQ ID NO: 1428968 - RNA, 20 nt, Human
guggcuacucugugccagag

SEQ ID NO: 1428969 - RNA, 18 nt, Human
guggcuacucugugccag

SEQ ID NO: 1428970 - RNA, 17 nt, Human
guggcuacucugugcca

SEQ ID NO: 1428971 - RNA, 16 nt, Human
guggcuacucugugcc

SEQ ID NO: 1428972 - RNA, 15 nt, Human
guggcuacucugugc

SEQ ID NO: 1428973 - RNA, 13 nt, Human
gugcuaauuuuga

SEQ ID NO: 1428974 - RNA, 15 nt, Human
gugcuaauuuugaaa

SEQ ID NO: 1428975 - RNA, 12 nt, Human
guggggaguggg

SEQ ID NO: 1428976 - RNA, 19 nt, Human
guggggauaggccagccgc

SEQ ID NO: 1428977 - RNA, 22 nt, Human
gugggcuuguggggccugggag

SEQ ID NO: 1428978 - RNA, 14 nt, Human
gugggcuugauucu

SEQ ID NO: 1428979 - RNA, 17 nt, Human
guggggagacugggcug

SEQ ID NO: 1428980 - RNA, 21 nt, Human
guggggagagacgggcccugg

SEQ ID NO: 1428981 - RNA, 13 nt, Human
guggggcagaggc

SEQ ID NO: 1428982 - RNA, 15 nt, Human
guggguuccacagac

SEQ ID NO: 1428983 - RNA, 14 nt, Human
guggguuccacaga

SEQ ID NO: 1428984 - RNA, 17 nt, Human
guggggcagcuccucug

SEQ ID NO: 1428985 - RNA, 14 nt, Human
guggggccagguca

SEQ ID NO: 1428986 - RNA, 18 nt, Human
guggguuuuuuaguugaa

SEQ ID NO: 1428987 - RNA, 12 nt, Human
gugguaaaaagg

SEQ ID NO: 1428988 - RNA, 21 nt, Human
gugggccugggcuccuggacc

SEQ ID NO: 1428989 - RNA, 20 nt, Human
gugggccugggcuccuggac

SEQ ID NO: 1428990 - RNA, 18 nt, Human
gugggccugggcuccugg

SEQ ID NO: 1428991 - RNA, 17 nt, Human
gugggccugggcuccug

SEQ ID NO: 1428992 - RNA, 15 nt, Human
gugggcucccugacu

SEQ ID NO: 1428993 - RNA, 14 nt, Human
gugggcucccugac

SEQ ID NO: 1428994 - RNA, 13 nt, Human
gugggcucccuga

SEQ ID NO: 1428995 - RNA, 12 nt, Human
gugggcuaagca

SEQ ID NO: 1428996 - RNA, 14 nt, Human
gugggccccacccu

SEQ ID NO: 1428997 - RNA, 18 nt, Human
gugggccagucuguggau

SEQ ID NO: 1428998 - RNA, 17 nt, Human
gugggccagucugugga

SEQ ID NO: 1428999 - RNA, 13 nt, Human
gugggccugggcu

SEQ ID NO: 1429000 - RNA, 16 nt, Human
gugggccagucugugg

SEQ ID NO: 1429001 - RNA, 15 nt, Human
gugggccagucugug

SEQ ID NO: 1429002 - RNA, 17 nt, Human
gugggccaacaaagaac

SEQ ID NO: 1429003 - RNA, 15 nt, Human
gugggcauucaaaug

SEQ ID NO: 1429004 - RNA, 21 nt, Human
gugguauuuucaauagccacu

SEQ ID NO: 1429005 - RNA, 14 nt, Human
guggucacagcugu

SEQ ID NO: 1429006 - RNA, 22 nt, Human
guggucacagcggaggugugga

SEQ ID NO: 1429007 - RNA, 18 nt, Human
guggucacagcggaggug

SEQ ID NO: 1429008 - RNA, 16 nt, Human
guggucacagcggagg

SEQ ID NO: 1429009 - RNA, 15 nt, Human
guggucacagcggag

SEQ ID NO: 1429010 - RNA, 23 nt, Human
gugguauuuucaauagccacuaa

SEQ ID NO: 1429011 - RNA, 14 nt, Human
gugguauuuucaau

SEQ ID NO: 1429012 - RNA, 23 nt, Human
gugguacagagaagccagcuugu

SEQ ID NO: 1429013 - RNA, 22 nt, Human
gugguacagagaagccagcuug

SEQ ID NO: 1429014 - RNA, 18 nt, Human
gugguacagagaagccag

SEQ ID NO: 1429015 - RNA, 17 nt, Human
gugguacagagaagcca

SEQ ID NO: 1429016 - RNA, 16 nt, Human
gugguacagagaagcc

SEQ ID NO: 1429017 - RNA, 15 nt, Human
gugguacagagaagc

SEQ ID NO: 1429018 - RNA, 14 nt, Human
gugguacagagaag

SEQ ID NO: 1429019 - RNA, 13 nt, Human
gugguacagagaa

SEQ ID NO: 1429020 - RNA, 12 nt, Human
gugguacagaga

SEQ ID NO: 1429021 - RNA, 21 nt, Human
gugguaagcaacauggcuuug

SEQ ID NO: 1429022 - RNA, 14 nt, Human
gugguacccucugg

SEQ ID NO: 1429023 - RNA, 13 nt, Human
gugguagagaagc

SEQ ID NO: 1429024 - RNA, 19 nt, Human
guggucuguuggcaggcug

SEQ ID NO: 1429025 - RNA, 17 nt, Human
guggucuguuggcaggc

SEQ ID NO: 1429026 - RNA, 13 nt, Human
guggucuguuggc

SEQ ID NO: 1429027 - RNA, 23 nt, Human
guggucuguuggcaggcuggcca

SEQ ID NO: 1429028 - RNA, 22 nt, Human
guggucuguuggcaggcuggcc

SEQ ID NO: 1429029 - RNA, 21 nt, Human
guggucuguuggcaggcuggc

SEQ ID NO: 1429030 - RNA, 20 nt, Human
guggucuguuggcaggcugg

SEQ ID NO: 1429031 - RNA, 21 nt, Human
guguaaguagauaggccaugg

SEQ ID NO: 1429032 - RNA, 19 nt, Human
guguaagggccagaaauau

SEQ ID NO: 1429033 - RNA, 21 nt, Human
guguaagauuuguuuuuaaac

SEQ ID NO: 1429034 - RNA, 17 nt, Human
guggugcgagugcguga

SEQ ID NO: 1429035 - RNA, 17 nt, Human
guguaagacaaaaagcu

SEQ ID NO: 1429036 - RNA, 18 nt, Human
guguaauugagaaggaaa

SEQ ID NO: 1429037 - RNA, 14 nt, Human
guguacauaacuga

SEQ ID NO: 1429038 - RNA, 15 nt, Human
guguacauaugugcu

SEQ ID NO: 1429039 - RNA, 12 nt, Human
guguacauaugu

SEQ ID NO: 1429040 - RNA, 16 nt, Human
guguacauaacugaaa

SEQ ID NO: 1429041 - RNA, 20 nt, Human
guguagcuacagagaaacca

SEQ ID NO: 1429042 - RNA, 18 nt, Human
guguagcuacagagaaac

SEQ ID NO: 1429043 - RNA, 17 nt, Human
guguagcuacagagaaa

SEQ ID NO: 1429044 - RNA, 16 nt, Human
guguagcuacagagaa

SEQ ID NO: 1429045 - RNA, 15 nt, Human
guguagcuacagaga

SEQ ID NO: 1429046 - RNA, 20 nt, Human
guguagccuuuuuguauaaa

SEQ ID NO: 1429047 - RNA, 13 nt, Human
guguagccuuuuu

SEQ ID NO: 1429048 - RNA, 12 nt, Human
guguagccuuuu

SEQ ID NO: 1429049 - RNA, 11 nt, Human
guguagccuuu

SEQ ID NO: 1429050 - RNA, 17 nt, Human
guguagccacaccagga

SEQ ID NO: 1429051 - RNA, 16 nt, Human
guguagcaacuacagu

SEQ ID NO: 1429052 - RNA, 19 nt, Human
guguagaacacuaauucau

SEQ ID NO: 1429053 - RNA, 15 nt, Human
guguagaacacuaau

SEQ ID NO: 1429054 - RNA, 14 nt, Human
guguagaacacuaa

SEQ ID NO: 1429055 - RNA, 22 nt, Human
guguaccgcgucuacccuggga

SEQ ID NO: 1429056 - RNA, 20 nt, Human
guguaccgcgucuacccugg

SEQ ID NO: 1429057 - RNA, 17 nt, Human
guguaccauuugccucc

SEQ ID NO: 1429058 - RNA, 14 nt, Human
guguauaaacaaga

SEQ ID NO: 1429059 - RNA, 12 nt, Human
guguauaaacaa

SEQ ID NO: 1429060 - RNA, 18 nt, Human
guguauaaaaauaaaaaa

SEQ ID NO: 1429061 - RNA, 14 nt, Human
guguauaaaaauaa

SEQ ID NO: 1429062 - RNA, 12 nt, Human
guguauaaaaau

SEQ ID NO: 1429063 - RNA, 17 nt, Human
guguaguucauguaaau

SEQ ID NO: 1429064 - RNA, 15 nt, Human
guguaguucauguaa

SEQ ID NO: 1429065 - RNA, 23 nt, Human
guguagcugugaccugcugagcu

SEQ ID NO: 1429066 - RNA, 14 nt, Human
guguagcuuugcuc

SEQ ID NO: 1429067 - RNA, 22 nt, Human
guguagcugugaccugcugagc

SEQ ID NO: 1429068 - RNA, 21 nt, Human
guguagcugugaccugcugag

SEQ ID NO: 1429069 - RNA, 20 nt, Human
guguagcugugaccugcuga

SEQ ID NO: 1429070 - RNA, 19 nt, Human
guguagcugugaccugcug

SEQ ID NO: 1429071 - RNA, 18 nt, Human
guguagcugugaccugcu

SEQ ID NO: 1429072 - RNA, 16 nt, Human
guguagcugugaccug

SEQ ID NO: 1429073 - RNA, 15 nt, Human
guguagcugugaccu

SEQ ID NO: 1429074 - RNA, 12 nt, Human
guguagcuguga

SEQ ID NO: 1429075 - RNA, 22 nt, Human
guguagcuacagagaaaccagc

SEQ ID NO: 1429076 - RNA, 13 nt, Human
guguauauggaca

SEQ ID NO: 1429077 - RNA, 12 nt, Human
guguauauauau

SEQ ID NO: 1429078 - RNA, 19 nt, Human
guguauaaacaagaaaaau

SEQ ID NO: 1429079 - RNA, 17 nt, Human
guguauaaacaagaaaa

SEQ ID NO: 1429080 - RNA, 14 nt, Human
gugucccccucugu

SEQ ID NO: 1429081 - RNA, 18 nt, Human
gugucccccucuguccag

SEQ ID NO: 1429082 - RNA, 19 nt, Human
guguccccaacagcgccca

SEQ ID NO: 1429083 - RNA, 18 nt, Human
guguccccaacagcgccc

SEQ ID NO: 1429084 - RNA, 12 nt, Human
guguccccaaca

SEQ ID NO: 1429085 - RNA, 18 nt, Human
gugucccagaagaugacu

SEQ ID NO: 1429086 - RNA, 22 nt, Human
gugucccagaagaugacugagg

SEQ ID NO: 1429087 - RNA, 19 nt, Human
guguauggaaauaaaugua

SEQ ID NO: 1429088 - RNA, 17 nt, Human
guguaugcacaugaacu

SEQ ID NO: 1429089 - RNA, 14 nt, Human
guguaugcacagua

SEQ ID NO: 1429090 - RNA, 22 nt, Human
guguuagggaagggccugccac

SEQ ID NO: 1429091 - RNA, 16 nt, Human
guguuagggaagggcc

SEQ ID NO: 1429092 - RNA, 21 nt, Human
guguuagccuuuuuuccccag

SEQ ID NO: 1429093 - RNA, 15 nt, Human
guguuacuguaauuc

SEQ ID NO: 1429094 - RNA, 19 nt, Human
guguuacuguaauuccuca

SEQ ID NO: 1429095 - RNA, 23 nt, Human
guguuagggaagggccugccaca

SEQ ID NO: 1429096 - RNA, 21 nt, Human
guguuacuaaaaaaaagauga

SEQ ID NO: 1429097 - RNA, 20 nt, Human
guguuacuaaaaaaaagaug

SEQ ID NO: 1429098 - RNA, 12 nt, Human
guguuaccugua

SEQ ID NO: 1429099 - RNA, 14 nt, Human
guguuacuaaguuu

SEQ ID NO: 1429100 - RNA, 16 nt, Human
guguuaccugaaaaca

SEQ ID NO: 1429101 - RNA, 23 nt, Human
guguuacccaguaacucaucugu

SEQ ID NO: 1429102 - RNA, 15 nt, Human
guguuaauuuuugau

SEQ ID NO: 1429103 - RNA, 12 nt, Human
guguuaauuuuu

SEQ ID NO: 1429104 - RNA, 12 nt, Human
guguuacuaagu

SEQ ID NO: 1429105 - RNA, 13 nt, Human
guguguuuuaaaa

SEQ ID NO: 1429106 - RNA, 16 nt, Human
guguguuuuaaaauga

SEQ ID NO: 1429107 - RNA, 19 nt, Human
guguguuuuaaaaugagaa

SEQ ID NO: 1429108 - RNA, 14 nt, Human
guguuaagcucugc

SEQ ID NO: 1429109 - RNA, 15 nt, Human
guguuaagcucugcu

SEQ ID NO: 1429110 - RNA, 17 nt, Human
guguuaacauuccaaga

SEQ ID NO: 1429111 - RNA, 14 nt, Human
guguuaacauucca

SEQ ID NO: 1429112 - RNA, 23 nt, Human
guguuaacagaagggagggcaga

SEQ ID NO: 1429113 - RNA, 22 nt, Human
guguuaacagaagggagggcag

SEQ ID NO: 1429114 - RNA, 14 nt, Human
guguuaacagaagg

SEQ ID NO: 1429115 - RNA, 21 nt, Human
guguuaaaugugaugaauacu

SEQ ID NO: 1429116 - RNA, 21 nt, Human
guguguuuuucuauuaaaaga

SEQ ID NO: 1429117 - RNA, 20 nt, Human
guguguuuuucuauuaaaag

SEQ ID NO: 1429118 - RNA, 16 nt, Human
guguguuuuucuauua

SEQ ID NO: 1429119 - RNA, 15 nt, Human
guguguuuuucuauu

SEQ ID NO: 1429120 - RNA, 14 nt, Human
guguguuuuucuau

SEQ ID NO: 1429121 - RNA, 14 nt, Human
guguguuuuucaua

SEQ ID NO: 1429122 - RNA, 16 nt, Human
guguucuccuuuuccu

SEQ ID NO: 1429123 - RNA, 11 nt, Human
guguucuccuu

SEQ ID NO: 1429124 - RNA, 23 nt, Human
guguucuccugcugcucccucag

SEQ ID NO: 1429125 - RNA, 22 nt, Human
guguucuccugcugcucccuca

SEQ ID NO: 1429126 - RNA, 20 nt, Human
guguucuccugcugcucccu

SEQ ID NO: 1429127 - RNA, 15 nt, Human
guguucuccugcugc

SEQ ID NO: 1429128 - RNA, 22 nt, Human
guguucuaagaugugauauucu

SEQ ID NO: 1429129 - RNA, 13 nt, Human
guguucuaagaug

SEQ ID NO: 1429130 - RNA, 14 nt, Human
guguuccuuccgcu

SEQ ID NO: 1429131 - RNA, 15 nt, Human
guguucccuauccaa

SEQ ID NO: 1429132 - RNA, 23 nt, Human
guguuccccuuccacugagggca

SEQ ID NO: 1429133 - RNA, 22 nt, Human
guguuccccuuccacugagggc

SEQ ID NO: 1429134 - RNA, 19 nt, Human
guguuccccuuccacugag

SEQ ID NO: 1429135 - RNA, 18 nt, Human
guguuccccuuccacuga

SEQ ID NO: 1429136 - RNA, 21 nt, Human
guguucccauuucagcugauc

SEQ ID NO: 1429137 - RNA, 17 nt, Human
guguuccccacuguauc

SEQ ID NO: 1429138 - RNA, 17 nt, Human
guguucccauuucagcu

SEQ ID NO: 1429139 - RNA, 14 nt, Human
guguucauuguuuc

SEQ ID NO: 1429140 - RNA, 16 nt, Human
guguucaauauuuucu

SEQ ID NO: 1429141 - RNA, 14 nt, Human
guguucaauauuuu

SEQ ID NO: 1429142 - RNA, 23 nt, Human
guguuauuuuguuuuuccuucca

SEQ ID NO: 1429143 - RNA, 20 nt, Human
guguuauuuucauucaaagu

SEQ ID NO: 1429144 - RNA, 21 nt, Human
guguuauuuggaaccuuguuu

SEQ ID NO: 1429145 - RNA, 16 nt, Human
guguuaucaccuagcu

SEQ ID NO: 1429146 - RNA, 16 nt, Human
guguuuuguucaccau

SEQ ID NO: 1429147 - RNA, 20 nt, Human
guguuuugaaagaauagaac

SEQ ID NO: 1429148 - RNA, 15 nt, Human
guguuuugaaagaau

SEQ ID NO: 1429149 - RNA, 15 nt, Human
guguuuuaauuuaaa

SEQ ID NO: 1429150 - RNA, 13 nt, Human
guguucugugaua

SEQ ID NO: 1429151 - RNA, 14 nt, Human
guguuuuaauuuaa

SEQ ID NO: 1429152 - RNA, 19 nt, Human
guguuuuuuuaugaauggg

SEQ ID NO: 1429153 - RNA, 22 nt, Human
guguuuuucuauuaaaagacuc

SEQ ID NO: 1429154 - RNA, 23 nt, Human
guguuuuucuauuaaaagacuca

SEQ ID NO: 1429155 - RNA, 21 nt, Human
guguuuuucuauuaaaagacu

SEQ ID NO: 1429156 - RNA, 19 nt, Human
guguuuuucuauuaaaaga

SEQ ID NO: 1429157 - RNA, 18 nt, Human
guguuuuucuauuaaaag

SEQ ID NO: 1429158 - RNA, 17 nt, Human
guguuuuucuauuaaaa

SEQ ID NO: 1429159 - RNA, 15 nt, Human
guguuuuucuauuaa

SEQ ID NO: 1429160 - RNA, 14 nt, Human
guguuuuucuauua

SEQ ID NO: 1429161 - RNA, 21 nt, Human
guguuuuguucaccauuauaa

SEQ ID NO: 1429162 - RNA, 18 nt, Human
guguuuuucauaaagcag

SEQ ID NO: 1429163 - RNA, 15 nt, Human
guuaagaaauuucac

SEQ ID NO: 1429164 - RNA, 15 nt, Human
guuaagaaaauaaau

SEQ ID NO: 1429165 - RNA, 14 nt, Human
guuaagaaaauaaa

SEQ ID NO: 1429166 - RNA, 22 nt, Human
guuacacuuuuuggaagugaaa

SEQ ID NO: 1429167 - RNA, 18 nt, Human
guuacacuuuuuggaagu

SEQ ID NO: 1429168 - RNA, 17 nt, Human
guuacacuuuuuggaag

SEQ ID NO: 1429169 - RNA, 21 nt, Human
guuaacacacuaccgaaugug

SEQ ID NO: 1429170 - RNA, 12 nt, Human
guuaaauguaga

SEQ ID NO: 1429171 - RNA, 23 nt, Human
guuaacauuccaagacucuagag

SEQ ID NO: 1429172 - RNA, 23 nt, Human
guuaacagaagggagggcagagc

SEQ ID NO: 1429173 - RNA, 21 nt, Human
guuaacagaagggagggcaga

SEQ ID NO: 1429174 - RNA, 20 nt, Human
guuaacagaagggagggcag

SEQ ID NO: 1429175 - RNA, 23 nt, Human
guuaacugaauaccacucuguaa

SEQ ID NO: 1429176 - RNA, 22 nt, Human
guuaacugaauaccacucugua

SEQ ID NO: 1429177 - RNA, 20 nt, Human
guuaacugaauaccacucug

SEQ ID NO: 1429178 - RNA, 16 nt, Human
guuaacugaauaccac

SEQ ID NO: 1429179 - RNA, 14 nt, Human
guuaacugaauacc

SEQ ID NO: 1429180 - RNA, 24 nt, Human
guuaacauuccaagacucuagagu

SEQ ID NO: 1429181 - RNA, 17 nt, Human
guuaacuauugcauuua

SEQ ID NO: 1429182 - RNA, 20 nt, Human
guuaaaaacagauuuggaaa

SEQ ID NO: 1429183 - RNA, 12 nt, Human
guuaaaaugugu

SEQ ID NO: 1429184 - RNA, 22 nt, Human
guuaaaauaccagccaguaaau

SEQ ID NO: 1429185 - RNA, 20 nt, Human
guuaaauacaggaaacaguu

SEQ ID NO: 1429186 - RNA, 16 nt, Human
guuaaauacaggaaac

SEQ ID NO: 1429187 - RNA, 22 nt, Human
guuaaauaaauuguauauucac

SEQ ID NO: 1429188 - RNA, 20 nt, Human
guuaaauaaauuguauauuc

SEQ ID NO: 1429189 - RNA, 21 nt, Human
guuaaauaaauuguauauuca

SEQ ID NO: 1429190 - RNA, 18 nt, Human
guuaaaggugaacauugg

SEQ ID NO: 1429191 - RNA, 13 nt, Human
guuaaauaaauug

SEQ ID NO: 1429192 - RNA, 17 nt, Human
guuaaauaaauuguaua

SEQ ID NO: 1429193 - RNA, 18 nt, Human
guuaaauaaauuguauau

SEQ ID NO: 1429194 - RNA, 19 nt, Human
guuaaauaaauuguauauu

SEQ ID NO: 1429195 - RNA, 15 nt, Human
guuaaacuagcauau

SEQ ID NO: 1429196 - RNA, 19 nt, Human
guuaaacuagcauaucugc

SEQ ID NO: 1429197 - RNA, 20 nt, Human
guuaaacuagcauaucugcc

SEQ ID NO: 1429198 - RNA, 21 nt, Human
guuaaacuagcauaucugccu

SEQ ID NO: 1429199 - RNA, 22 nt, Human
guuaaacuagcauaucugccuu

SEQ ID NO: 1429200 - RNA, 23 nt, Human
guuaaacuagcauaucugccuuu

SEQ ID NO: 1429201 - RNA, 15 nt, Human
guuaaagcugccggc

SEQ ID NO: 1429202 - RNA, 13 nt, Human
gugugcaggagcg

SEQ ID NO: 1429203 - RNA, 19 nt, Human
gugugcacgcgugugcagg

SEQ ID NO: 1429204 - RNA, 16 nt, Human
gugugcaccaggguug

SEQ ID NO: 1429205 - RNA, 20 nt, Human
gugugcacaaauauuuauuu

SEQ ID NO: 1429206 - RNA, 17 nt, Human
gugugcaaggcagccgu

SEQ ID NO: 1429207 - RNA, 14 nt, Human
gugugcaaggcagc

SEQ ID NO: 1429208 - RNA, 14 nt, Human
gugugaucgucuga

SEQ ID NO: 1429209 - RNA, 15 nt, Human
gugucugcucaguaa

SEQ ID NO: 1429210 - RNA, 17 nt, Human
gugucuggcacagccug

SEQ ID NO: 1429211 - RNA, 16 nt, Human
gugucugagagauuca

SEQ ID NO: 1429212 - RNA, 15 nt, Human
guguccugagcucag

SEQ ID NO: 1429213 - RNA, 13 nt, Human
guguccugagcuc

SEQ ID NO: 1429214 - RNA, 23 nt, Human
guguccugagccccagggagagg

SEQ ID NO: 1429215 - RNA, 22 nt, Human
guguccugagcucagcguggag

SEQ ID NO: 1429216 - RNA, 21 nt, Human
guguccugcaccggggccugg

SEQ ID NO: 1429217 - RNA, 13 nt, Human
guguccugacacu

SEQ ID NO: 1429218 - RNA, 18 nt, Human
guguccucuucccucucu

SEQ ID NO: 1429219 - RNA, 20 nt, Human
guguccuccugggguucuuu

SEQ ID NO: 1429220 - RNA, 13 nt, Human
guguccuacagaa

SEQ ID NO: 1429221 - RNA, 14 nt, Human
guguccuacagaaa

SEQ ID NO: 1429222 - RNA, 12 nt, Human
guguccuacaga

SEQ ID NO: 1429223 - RNA, 14 nt, Human
gugucccuaaugug

SEQ ID NO: 1429224 - RNA, 16 nt, Human
gugucucaggcugccu

SEQ ID NO: 1429225 - RNA, 15 nt, Human
gugucucaggcugcc

SEQ ID NO: 1429226 - RNA, 14 nt, Human
gugucucaggcugc

SEQ ID NO: 1429227 - RNA, 12 nt, Human
gugucucaggcu

SEQ ID NO: 1429228 - RNA, 11 nt, Human
gugucucaggc

SEQ ID NO: 1429229 - RNA, 20 nt, Human
gugucuaagauucuagauca

SEQ ID NO: 1429230 - RNA, 19 nt, Human
gugucuaagauucuagauc

SEQ ID NO: 1429231 - RNA, 18 nt, Human
gugucuaagauucuagau

SEQ ID NO: 1429232 - RNA, 17 nt, Human
gugucuaagauucuaga

SEQ ID NO: 1429233 - RNA, 16 nt, Human
gugucuaagauucuag

SEQ ID NO: 1429234 - RNA, 15 nt, Human
gugucuaagauucua

SEQ ID NO: 1429235 - RNA, 14 nt, Human
gugucuaagauucu

SEQ ID NO: 1429236 - RNA, 20 nt, Human
gugucucaggcugccugagu

SEQ ID NO: 1429237 - RNA, 19 nt, Human
gugucucaggcugccugag

SEQ ID NO: 1429238 - RNA, 17 nt, Human
gugucucaggcugccug

SEQ ID NO: 1429239 - RNA, 17 nt, Human
gugugcuuuuuuugugu

SEQ ID NO: 1429240 - RNA, 19 nt, Human
gugugcugggagcuccacu

SEQ ID NO: 1429241 - RNA, 12 nt, Human
gugugcugggag

SEQ ID NO: 1429242 - RNA, 11 nt, Human
gugugcuggga

SEQ ID NO: 1429243 - RNA, 23 nt, Human
gugugcucuccauucugcuccuu

SEQ ID NO: 1429244 - RNA, 22 nt, Human
gugugcucuccauucugcuccu

SEQ ID NO: 1429245 - RNA, 21 nt, Human
gugugcucuccauucugcucc

SEQ ID NO: 1429246 - RNA, 16 nt, Human
gugugcucuccauucu

SEQ ID NO: 1429247 - RNA, 15 nt, Human
gugugcucuccauuc

SEQ ID NO: 1429248 - RNA, 18 nt, Human
gugugcucaggagcccug

SEQ ID NO: 1429249 - RNA, 19 nt, Human
gugugcucaggagcccugg

SEQ ID NO: 1429250 - RNA, 21 nt, Human
gugugcccucugggcucugag

SEQ ID NO: 1429251 - RNA, 22 nt, Human
gugugcccucugggcucugagu

SEQ ID NO: 1429252 - RNA, 17 nt, Human
gugugcccucugggcuc

SEQ ID NO: 1429253 - RNA, 16 nt, Human
gugugcccucugggcu

SEQ ID NO: 1429254 - RNA, 13 nt, Human
gugugcccucugg

SEQ ID NO: 1429255 - RNA, 16 nt, Human
gugugcccccuucaag

SEQ ID NO: 1429256 - RNA, 16 nt, Human
gugugcggcugugugu

SEQ ID NO: 1429257 - RNA, 14 nt, Human
gugugcguccuguc

SEQ ID NO: 1429258 - RNA, 16 nt, Human
gugugcguccugucgg

SEQ ID NO: 1429259 - RNA, 16 nt, Human
gugugcucaggagccc

SEQ ID NO: 1429260 - RNA, 17 nt, Human
gugugcucaggagcccu

SEQ ID NO: 1429261 - RNA, 14 nt, Human
guguggcuccuucc

SEQ ID NO: 1429262 - RNA, 21 nt, Human
guguggagagggaaugugaaa

SEQ ID NO: 1429263 - RNA, 11 nt, Human
gugugggagac

SEQ ID NO: 1429264 - RNA, 19 nt, Human
guguggcuuucagagccuc

SEQ ID NO: 1429265 - RNA, 16 nt, Human
guguguugauacuguu

SEQ ID NO: 1429266 - RNA, 20 nt, Human
guguggagagggaaugugaa

SEQ ID NO: 1429267 - RNA, 18 nt, Human
guguggagagggaaugug

SEQ ID NO: 1429268 - RNA, 13 nt, Human
guguggacaggac

SEQ ID NO: 1429269 - RNA, 14 nt, Human
guguggacaggacu

SEQ ID NO: 1429270 - RNA, 21 nt, Human
guguggaaguuauuaacuuua

SEQ ID NO: 1429271 - RNA, 16 nt, Human
gugugcuuuuuuugug

SEQ ID NO: 1429272 - RNA, 16 nt, Human
guguguugucucuuga

SEQ ID NO: 1429273 - RNA, 14 nt, Human
guguguugucucuu

SEQ ID NO: 1429274 - RNA, 22 nt, Human
guguguugauacuguugcacgu

SEQ ID NO: 1429275 - RNA, 23 nt, Human
guguguugauacuguugcacgug

SEQ ID NO: 1429276 - RNA, 21 nt, Human
guguguugauacuguugcacg

SEQ ID NO: 1429277 - RNA, 20 nt, Human
guguguugauacuguugcac

SEQ ID NO: 1429278 - RNA, 19 nt, Human
guguguugauacuguugca

SEQ ID NO: 1429279 - RNA, 17 nt, Human
guguguugauacuguug

SEQ ID NO: 1429280 - RNA, 12 nt, Human
guguguuuuaaa

SEQ ID NO: 1429281 - RNA, 17 nt, Human
guuccugcugcugucug

SEQ ID NO: 1429282 - RNA, 22 nt, Human
guuccugcugcugucugggugc

SEQ ID NO: 1429283 - RNA, 15 nt, Human
guuccugcugcuguc

SEQ ID NO: 1429284 - RNA, 14 nt, Human
guuccugcugcugu

SEQ ID NO: 1429285 - RNA, 11 nt, Human
guuccugcugc

SEQ ID NO: 1429286 - RNA, 12 nt, Human
guuccugcaugc

SEQ ID NO: 1429287 - RNA, 12 nt, Human
guuccuucccaa

SEQ ID NO: 1429288 - RNA, 16 nt, Human
guuccuguggcucccu

SEQ ID NO: 1429289 - RNA, 14 nt, Human
guuccuguggcucc

SEQ ID NO: 1429290 - RNA, 23 nt, Human
guuccuccccuccagcucccugu

SEQ ID NO: 1429291 - RNA, 16 nt, Human
guuccuccccuccagc

SEQ ID NO: 1429292 - RNA, 19 nt, Human
guuccagggucccucugug

SEQ ID NO: 1429293 - RNA, 17 nt, Human
guuccagggucccucug

SEQ ID NO: 1429294 - RNA, 14 nt, Human
guuccagaaaguaa

SEQ ID NO: 1429295 - RNA, 19 nt, Human
guuccacuuauagccucug

SEQ ID NO: 1429296 - RNA, 17 nt, Human
guuccagaagugugacu

SEQ ID NO: 1429297 - RNA, 21 nt, Human
guuccagggucccucugugua

SEQ ID NO: 1429298 - RNA, 20 nt, Human
guuccagggucccucugugu

SEQ ID NO: 1429299 - RNA, 19 nt, Human
guuccuaagagugcugggc

SEQ ID NO: 1429300 - RNA, 15 nt, Human
guuccggcauggaca

SEQ ID NO: 1429301 - RNA, 14 nt, Human
guuccuagagaaga

SEQ ID NO: 1429302 - RNA, 23 nt, Human
guuccuagugauggcuuaugaua

SEQ ID NO: 1429303 - RNA, 18 nt, Human
guuccacuuauagccucu

SEQ ID NO: 1429304 - RNA, 14 nt, Human
guuccacugagacc

SEQ ID NO: 1429305 - RNA, 13 nt, Human
guuccacugagac

SEQ ID NO: 1429306 - RNA, 12 nt, Human
guuccacugaga

SEQ ID NO: 1429307 - RNA, 12 nt, Human
guuccacagacg

SEQ ID NO: 1429308 - RNA, 14 nt, Human
guuccacagaggac

SEQ ID NO: 1429309 - RNA, 11 nt, Human
guuccacagac

SEQ ID NO: 1429310 - RNA, 20 nt, Human
guuccaagagucuaaagaug

SEQ ID NO: 1429311 - RNA, 18 nt, Human
guuccaagagucuaaaga

SEQ ID NO: 1429312 - RNA, 16 nt, Human
guuccaagagucuaaa

SEQ ID NO: 1429313 - RNA, 14 nt, Human
guuccaagagucua

SEQ ID NO: 1429314 - RNA, 20 nt, Human
guuccaaauucaguuucaua

SEQ ID NO: 1429315 - RNA, 15 nt, Human
guuccaaauucaguu

SEQ ID NO: 1429316 - RNA, 14 nt, Human
guuccaaauucagu

SEQ ID NO: 1429317 - RNA, 19 nt, Human
guucauuagaaauauuuua

SEQ ID NO: 1429318 - RNA, 16 nt, Human
guucauuagaaauauu

SEQ ID NO: 1429319 - RNA, 18 nt, Human
guucauuagaaauauuuu

SEQ ID NO: 1429320 - RNA, 13 nt, Human
guucauuccucca

SEQ ID NO: 1429321 - RNA, 14 nt, Human
guucauuccuccag

SEQ ID NO: 1429322 - RNA, 13 nt, Human
guucauuugugua

SEQ ID NO: 1429323 - RNA, 13 nt, Human
guucauuuccuca

SEQ ID NO: 1429324 - RNA, 16 nt, Human
guucauugcacuuuga

SEQ ID NO: 1429325 - RNA, 15 nt, Human
guucauuccuccagg

SEQ ID NO: 1429326 - RNA, 22 nt, Human
guucagcacugucccuugccuc

SEQ ID NO: 1429327 - RNA, 16 nt, Human
guucagcacugucccu

SEQ ID NO: 1429328 - RNA, 15 nt, Human
guucagcacuguccc

SEQ ID NO: 1429329 - RNA, 14 nt, Human
guucagcacugucc

SEQ ID NO: 1429330 - RNA, 12 nt, Human
guucagccaagg

SEQ ID NO: 1429331 - RNA, 19 nt, Human
guucagcauggcauccaag

SEQ ID NO: 1429332 - RNA, 12 nt, Human
guucagaauuua

SEQ ID NO: 1429333 - RNA, 18 nt, Human
guucagcacugucccuug

SEQ ID NO: 1429334 - RNA, 15 nt, Human
guucagccaagguuu

SEQ ID NO: 1429335 - RNA, 12 nt, Human
guucaugaaaga

SEQ ID NO: 1429336 - RNA, 16 nt, Human
guucaugcagcugugg

SEQ ID NO: 1429337 - RNA, 15 nt, Human
guucaugcagcugug

SEQ ID NO: 1429338 - RNA, 14 nt, Human
guucaugagaaucu

SEQ ID NO: 1429339 - RNA, 19 nt, Human
guucaugagaaucuauauu

SEQ ID NO: 1429340 - RNA, 12 nt, Human
guucaugagaau

SEQ ID NO: 1429341 - RNA, 20 nt, Human
guucaugggggagggggcag

SEQ ID NO: 1429342 - RNA, 16 nt, Human
guucauguaaauaaua

SEQ ID NO: 1429343 - RNA, 22 nt, Human
guucauggcagauguaggaggg

SEQ ID NO: 1429344 - RNA, 19 nt, Human
guucagaguccuuaaaaug

SEQ ID NO: 1429345 - RNA, 22 nt, Human
guucagaauuuaguguauccau

SEQ ID NO: 1429346 - RNA, 20 nt, Human
guucagaauuaaacuuuuaa

SEQ ID NO: 1429347 - RNA, 20 nt, Human
guucacuuuugacaaaggca

SEQ ID NO: 1429348 - RNA, 16 nt, Human
guucacuuuugacaaa

SEQ ID NO: 1429349 - RNA, 17 nt, Human
guucaccauuauaauga

SEQ ID NO: 1429350 - RNA, 16 nt, Human
guucacaccagagaac

SEQ ID NO: 1429351 - RNA, 12 nt, Human
guucaauauuuu

SEQ ID NO: 1429352 - RNA, 21 nt, Human
guucaauauaagcuuuucuuu

SEQ ID NO: 1429353 - RNA, 13 nt, Human
guuaugcugugac

SEQ ID NO: 1429354 - RNA, 16 nt, Human
guuaugcaaaagcaag

SEQ ID NO: 1429355 - RNA, 20 nt, Human
guuaugauuuuuuuuucaua

SEQ ID NO: 1429356 - RNA, 19 nt, Human
guuauuaaaaaucucaaau

SEQ ID NO: 1429357 - RNA, 22 nt, Human
guuauuagagauuaccuccuga

SEQ ID NO: 1429358 - RNA, 21 nt, Human
guuauuaacuuuaauguuuuu

SEQ ID NO: 1429359 - RNA, 17 nt, Human
guuauuauauuuacaaa

SEQ ID NO: 1429360 - RNA, 13 nt, Human
guuauauauaaau

SEQ ID NO: 1429361 - RNA, 14 nt, Human
guuauauaauuuag

SEQ ID NO: 1429362 - RNA, 15 nt, Human
guuauauaauuuaga

SEQ ID NO: 1429363 - RNA, 12 nt, Human
guuauauaauuu

SEQ ID NO: 1429364 - RNA, 13 nt, Human
guuauauaaucau

SEQ ID NO: 1429365 - RNA, 21 nt, Human
guuauagugaauacugcuaca

SEQ ID NO: 1429366 - RNA, 20 nt, Human
guuauagacagucguuccca

SEQ ID NO: 1429367 - RNA, 14 nt, Human
guuauaagacucuc

SEQ ID NO: 1429368 - RNA, 13 nt, Human
guuauaagacucu

SEQ ID NO: 1429369 - RNA, 14 nt, Human
guuauauuuugcag

SEQ ID NO: 1429370 - RNA, 19 nt, Human
guuauauugaaaaaauaga

SEQ ID NO: 1429371 - RNA, 22 nt, Human
guuauauauggggaugguaguu

SEQ ID NO: 1429372 - RNA, 22 nt, Human
guuauauauaaauauauuauua

SEQ ID NO: 1429373 - RNA, 19 nt, Human
guuauauauaaauauauua

SEQ ID NO: 1429374 - RNA, 16 nt, Human
guuauauauaaauaua

SEQ ID NO: 1429375 - RNA, 14 nt, Human
guuauauauaaaua

SEQ ID NO: 1429376 - RNA, 20 nt, Human
guuaucaccuagcugaaugu

SEQ ID NO: 1429377 - RNA, 22 nt, Human
guuaucaccgugggcucccuga

SEQ ID NO: 1429378 - RNA, 20 nt, Human
guuaucaccgugggcucccu

SEQ ID NO: 1429379 - RNA, 17 nt, Human
guuaucagugcuucccg

SEQ ID NO: 1429380 - RNA, 16 nt, Human
guuaucagugcuuccc

SEQ ID NO: 1429381 - RNA, 13 nt, Human
guuaucagugcuu

SEQ ID NO: 1429382 - RNA, 17 nt, Human
guuaugacuauguaaac

SEQ ID NO: 1429383 - RNA, 23 nt, Human
guuaucuucucaaguucuaagau

SEQ ID NO: 1429384 - RNA, 21 nt, Human
guuaucuucucaaguucuaag

SEQ ID NO: 1429385 - RNA, 19 nt, Human
guuaucuucucaaguucua

SEQ ID NO: 1429386 - RNA, 18 nt, Human
guuaucuucucaaguucu

SEQ ID NO: 1429387 - RNA, 20 nt, Human
guuaugaaauucacccccuu

SEQ ID NO: 1429388 - RNA, 22 nt, Human
guuaucuucucaaguucuaaga

SEQ ID NO: 1429389 - RNA, 15 nt, Human
guuaugacuauguaa

SEQ ID NO: 1429390 - RNA, 20 nt, Human
guuauccaccugccuuggcu

SEQ ID NO: 1429391 - RNA, 21 nt, Human
guuaucuaaguuaauuuaaag

SEQ ID NO: 1429392 - RNA, 18 nt, Human
guuaucuaaguuaauuua

SEQ ID NO: 1429393 - RNA, 15 nt, Human
guuaucuaaguuaau

SEQ ID NO: 1429394 - RNA, 12 nt, Human
guuaucucugug

SEQ ID NO: 1429395 - RNA, 19 nt, Human
guuaucuaauagggcaauu

SEQ ID NO: 1429396 - RNA, 14 nt, Human
guuaucucuguguu

SEQ ID NO: 1429397 - RNA, 13 nt, Human
guuaucucugugu

SEQ ID NO: 1429398 - RNA, 15 nt, Human
guuauaaagauacag

SEQ ID NO: 1429399 - RNA, 14 nt, Human
guuauaaagauaca

SEQ ID NO: 1429400 - RNA, 16 nt, Human
guuauaaaaaaugguu

SEQ ID NO: 1429401 - RNA, 22 nt, Human
guuauaaaaaaugguucagaau

SEQ ID NO: 1429402 - RNA, 15 nt, Human
guuauaaaaaauggu

SEQ ID NO: 1429403 - RNA, 21 nt, Human
guuaguuuguauauauuauua

SEQ ID NO: 1429404 - RNA, 17 nt, Human
guuaguuuguauauauu

SEQ ID NO: 1429405 - RNA, 16 nt, Human
guuaguuuguauauau

SEQ ID NO: 1429406 - RNA, 16 nt, Human
guuaguuccacugaga

SEQ ID NO: 1429407 - RNA, 18 nt, Human
guuacguagccuaaggcu

SEQ ID NO: 1429408 - RNA, 22 nt, Human
guuaccuuauaguuacugugua

SEQ ID NO: 1429409 - RNA, 20 nt, Human
guuaccuuauaguuacugug

SEQ ID NO: 1429410 - RNA, 18 nt, Human
guuaccuuauaguuacug

SEQ ID NO: 1429411 - RNA, 15 nt, Human
guuaccuuauaguua

SEQ ID NO: 1429412 - RNA, 15 nt, Human
guuacuacaugcacu

SEQ ID NO: 1429413 - RNA, 22 nt, Human
guuacuaaguuuuuauggcuuu

SEQ ID NO: 1429414 - RNA, 15 nt, Human
guuacucagaauucu

SEQ ID NO: 1429415 - RNA, 16 nt, Human
guuacauguuugcacc

SEQ ID NO: 1429416 - RNA, 14 nt, Human
guuacauguuugca

SEQ ID NO: 1429417 - RNA, 15 nt, Human
guuacaguucugugg

SEQ ID NO: 1429418 - RNA, 14 nt, Human
guuacaguucugug

SEQ ID NO: 1429419 - RNA, 13 nt, Human
guuacaguucugu

SEQ ID NO: 1429420 - RNA, 13 nt, Human
guuacagaagcug

SEQ ID NO: 1429421 - RNA, 21 nt, Human
guuaccauuaaaccaucuccc

SEQ ID NO: 1429422 - RNA, 19 nt, Human
guuaccauuaaaccaucuc

SEQ ID NO: 1429423 - RNA, 16 nt, Human
guuaccauuaaaccau

SEQ ID NO: 1429424 - RNA, 15 nt, Human
guuaccaugucuuuc

SEQ ID NO: 1429425 - RNA, 21 nt, Human
guuacauuuuuaagugcugca

SEQ ID NO: 1429426 - RNA, 23 nt, Human
guuaccauuaaaccaucucccug

SEQ ID NO: 1429427 - RNA, 16 nt, Human
guuacccaaauuaaga

SEQ ID NO: 1429428 - RNA, 16 nt, Human
guuaccuacuuugacu

SEQ ID NO: 1429429 - RNA, 13 nt, Human
guuaccuacuuug

SEQ ID NO: 1429430 - RNA, 20 nt, Human
guuacccaguaacucaucug

SEQ ID NO: 1429431 - RNA, 16 nt, Human
guuaccauuuacaugu

SEQ ID NO: 1429432 - RNA, 13 nt, Human
guuaccuguagau

SEQ ID NO: 1429433 - RNA, 22 nt, Human
guuaccugaaaacacugugcac

SEQ ID NO: 1429434 - RNA, 21 nt, Human
guuaccucuauauaccaaagc

SEQ ID NO: 1429435 - RNA, 17 nt, Human
guuaccucuauauacca

SEQ ID NO: 1429436 - RNA, 23 nt, Human
guuaccucugccucagaaaacaa

SEQ ID NO: 1429437 - RNA, 20 nt, Human
guuggcaggcuggccagucc

SEQ ID NO: 1429438 - RNA, 17 nt, Human
guuggcaggcuggccag

SEQ ID NO: 1429439 - RNA, 16 nt, Human
guuggcaggcuggcca

SEQ ID NO: 1429440 - RNA, 15 nt, Human
guuggcaggcuggcc

SEQ ID NO: 1429441 - RNA, 14 nt, Human
guuggcaggcuggc

SEQ ID NO: 1429442 - RNA, 13 nt, Human
guuggcaggcugg

SEQ ID NO: 1429443 - RNA, 18 nt, Human
guuggcauagcucugggg

SEQ ID NO: 1429444 - RNA, 15 nt, Human
guuggcauagcucug

SEQ ID NO: 1429445 - RNA, 19 nt, Human
guuggcauagcucuggggu

SEQ ID NO: 1429446 - RNA, 19 nt, Human
guugccaagcuccaagccc

SEQ ID NO: 1429447 - RNA, 18 nt, Human
guugccaagcuccaagcc

SEQ ID NO: 1429448 - RNA, 15 nt, Human
guugccaagcuccaa

SEQ ID NO: 1429449 - RNA, 21 nt, Human
guugccaaauauguccugggg

SEQ ID NO: 1429450 - RNA, 23 nt, Human
guugccauccuaccgucuuuucc

SEQ ID NO: 1429451 - RNA, 21 nt, Human
guuggacaccuuuagguucuu

SEQ ID NO: 1429452 - RNA, 17 nt, Human
guuggacaagcuucuga

SEQ ID NO: 1429453 - RNA, 22 nt, Human
guuggaauggauuuuucuuuaa

SEQ ID NO: 1429454 - RNA, 17 nt, Human
guuggagcuccagccug

SEQ ID NO: 1429455 - RNA, 13 nt, Human
guuggagcuccag

SEQ ID NO: 1429456 - RNA, 14 nt, Human
guuggagugcagug

SEQ ID NO: 1429457 - RNA, 15 nt, Human
guuggagugcagugg

SEQ ID NO: 1429458 - RNA, 23 nt, Human
guugcacguguguuuuucuauua

SEQ ID NO: 1429459 - RNA, 22 nt, Human
guugcacguguguuuuucuauu

SEQ ID NO: 1429460 - RNA, 21 nt, Human
guugcacguguguuuuucuau

SEQ ID NO: 1429461 - RNA, 19 nt, Human
guugcacguguguuuuucu

SEQ ID NO: 1429462 - RNA, 17 nt, Human
guugcacguguguuuuu

SEQ ID NO: 1429463 - RNA, 15 nt, Human
guugcagacaggaau

SEQ ID NO: 1429464 - RNA, 14 nt, Human
guugcagacaggaa

SEQ ID NO: 1429465 - RNA, 20 nt, Human
guugccaaauauguccuggg

SEQ ID NO: 1429466 - RNA, 19 nt, Human
guugccaaauauguccugg

SEQ ID NO: 1429467 - RNA, 23 nt, Human
guugcauuuguuuuguuuacaga

SEQ ID NO: 1429468 - RNA, 16 nt, Human
guugcauguaguaaca

SEQ ID NO: 1429469 - RNA, 20 nt, Human
guugcauuaaaaaugcauau

SEQ ID NO: 1429470 - RNA, 20 nt, Human
guugcauguaguaacacuaa

SEQ ID NO: 1429471 - RNA, 17 nt, Human
guugcagucacucuagu

SEQ ID NO: 1429472 - RNA, 23 nt, Human
guugcagcuguuuuguugacauu

SEQ ID NO: 1429473 - RNA, 20 nt, Human
guugcagcuguuuuguugac

SEQ ID NO: 1429474 - RNA, 20 nt, Human
guugcagacaggaaucuuaa

SEQ ID NO: 1429475 - RNA, 16 nt, Human
guugcagacaggaauc

SEQ ID NO: 1429476 - RNA, 23 nt, Human
guugcagcccugcugcugccugc

SEQ ID NO: 1429477 - RNA, 15 nt, Human
guugcacacuuuggu

SEQ ID NO: 1429478 - RNA, 14 nt, Human
guugcacacuuugg

SEQ ID NO: 1429479 - RNA, 16 nt, Human
guugcacagcuaugaa

SEQ ID NO: 1429480 - RNA, 23 nt, Human
guugauuuuuuuuuuuuuuuccu

SEQ ID NO: 1429481 - RNA, 16 nt, Human
guugcaacuuuguaua

SEQ ID NO: 1429482 - RNA, 23 nt, Human
guugauucgguauccccccaucu

SEQ ID NO: 1429483 - RNA, 16 nt, Human
guugauuacagugcag

SEQ ID NO: 1429484 - RNA, 22 nt, Human
guugauuuuuuuuuuuuuuucc

SEQ ID NO: 1429485 - RNA, 14 nt, Human
guugcaacuuugua

SEQ ID NO: 1429486 - RNA, 23 nt, Human
guugaaagguuuuuuuucaguug

SEQ ID NO: 1429487 - RNA, 18 nt, Human
guugaagcaaaucgaaug

SEQ ID NO: 1429488 - RNA, 18 nt, Human
guugaagagguuuuaaag

SEQ ID NO: 1429489 - RNA, 14 nt, Human
guugaaagguuuuu

SEQ ID NO: 1429490 - RNA, 13 nt, Human
guugaaagguuuu

SEQ ID NO: 1429491 - RNA, 16 nt, Human
guugaaauaugauguu

SEQ ID NO: 1429492 - RNA, 21 nt, Human
guugaaagguuuuuuuucagu

SEQ ID NO: 1429493 - RNA, 20 nt, Human
guugaaagguuuuuuuucag

SEQ ID NO: 1429494 - RNA, 14 nt, Human
guugauuaaagaug

SEQ ID NO: 1429495 - RNA, 21 nt, Human
guugauggugguauguuuuca

SEQ ID NO: 1429496 - RNA, 20 nt, Human
guugauggugguauguuuuc

SEQ ID NO: 1429497 - RNA, 23 nt, Human
guugaagcaaaucgaaugaaauu

SEQ ID NO: 1429498 - RNA, 17 nt, Human
guugaauacuuuuuaca

SEQ ID NO: 1429499 - RNA, 13 nt, Human
guugaauacuuuu

SEQ ID NO: 1429500 - RNA, 17 nt, Human
guucugcuccagacagg

SEQ ID NO: 1429501 - RNA, 20 nt, Human
guucugcuccagacagggaa

SEQ ID NO: 1429502 - RNA, 16 nt, Human
guucugcuccagacag

SEQ ID NO: 1429503 - RNA, 23 nt, Human
guucugcucaucauucucugucu

SEQ ID NO: 1429504 - RNA, 18 nt, Human
guucugcucaucauucuc

SEQ ID NO: 1429505 - RNA, 15 nt, Human
guucugcucaucauu

SEQ ID NO: 1429506 - RNA, 22 nt, Human
guucugcucugguuguuucugu

SEQ ID NO: 1429507 - RNA, 14 nt, Human
guucugcucugguu

SEQ ID NO: 1429508 - RNA, 21 nt, Human
guugaaaaaguuuguuuuugc

SEQ ID NO: 1429509 - RNA, 22 nt, Human
guugaaaauaaaguguauauuu

SEQ ID NO: 1429510 - RNA, 19 nt, Human
guugaaaaaguuuguuuuu

SEQ ID NO: 1429511 - RNA, 20 nt, Human
guucuuuguucauagcccag

SEQ ID NO: 1429512 - RNA, 13 nt, Human
guucuuuguucau

SEQ ID NO: 1429513 - RNA, 22 nt, Human
guucuuugggccagacaugcca

SEQ ID NO: 1429514 - RNA, 17 nt, Human
guucuuugggccagaca

SEQ ID NO: 1429515 - RNA, 16 nt, Human
guucuuugggccagac

SEQ ID NO: 1429516 - RNA, 15 nt, Human
guucuuugggccaga

SEQ ID NO: 1429517 - RNA, 11 nt, Human
guucuuuggaa

SEQ ID NO: 1429518 - RNA, 23 nt, Human
guucuuugcugcauucugccucu

SEQ ID NO: 1429519 - RNA, 19 nt, Human
guucuuuuugaaguauuua

SEQ ID NO: 1429520 - RNA, 21 nt, Human
guucuuuguucauagcccagu

SEQ ID NO: 1429521 - RNA, 22 nt, Human
guucuuucauuugcuuuggaag

SEQ ID NO: 1429522 - RNA, 20 nt, Human
guucuuucauuugcuuugga

SEQ ID NO: 1429523 - RNA, 16 nt, Human
guucuggcuguuugag

SEQ ID NO: 1429524 - RNA, 13 nt, Human
guucuuuccaaag

SEQ ID NO: 1429525 - RNA, 14 nt, Human
guucuuuccaaagu

SEQ ID NO: 1429526 - RNA, 18 nt, Human
guucuuuccaaaguacac

SEQ ID NO: 1429527 - RNA, 20 nt, Human
guucuuuccaaaguacacug

SEQ ID NO: 1429528 - RNA, 23 nt, Human
guucugccugccagcugcacuga

SEQ ID NO: 1429529 - RNA, 22 nt, Human
guucugccugccagcugcacug

SEQ ID NO: 1429530 - RNA, 19 nt, Human
guucugccugccagcugca

SEQ ID NO: 1429531 - RNA, 17 nt, Human
guucugccugccagcug

SEQ ID NO: 1429532 - RNA, 15 nt, Human
guucugccugccagc

SEQ ID NO: 1429533 - RNA, 13 nt, Human
guucugccugcca

SEQ ID NO: 1429534 - RNA, 14 nt, Human
guucugccaggaga

SEQ ID NO: 1429535 - RNA, 13 nt, Human
guucugccaggag

SEQ ID NO: 1429536 - RNA, 12 nt, Human
guucugccagga

SEQ ID NO: 1429537 - RNA, 20 nt, Human
guucugagauggcucccagg

SEQ ID NO: 1429538 - RNA, 21 nt, Human
guucugagauggcucccaggg

SEQ ID NO: 1429539 - RNA, 15 nt, Human
guucugaagaagaug

SEQ ID NO: 1429540 - RNA, 14 nt, Human
guucugaagaagau

SEQ ID NO: 1429541 - RNA, 19 nt, Human
guucuaauaauuucuaaug

SEQ ID NO: 1429542 - RNA, 17 nt, Human
guucuaauaauuucuaa

SEQ ID NO: 1429543 - RNA, 22 nt, Human
guucuaaguuucuaagauucua

SEQ ID NO: 1429544 - RNA, 21 nt, Human
guucuaaguuucuaagauucu

SEQ ID NO: 1429545 - RNA, 19 nt, Human
guucuaaguuucuaagauu

SEQ ID NO: 1429546 - RNA, 18 nt, Human
guucuaaguuucuaagau

SEQ ID NO: 1429547 - RNA, 17 nt, Human
guucuaaguuucuaaga

SEQ ID NO: 1429548 - RNA, 16 nt, Human
guucuaaguuucuaag

SEQ ID NO: 1429549 - RNA, 15 nt, Human
guucuaaguuucuaa

SEQ ID NO: 1429550 - RNA, 14 nt, Human
guucuaaguuucua

SEQ ID NO: 1429551 - RNA, 19 nt, Human
guucuaagucuuuccauug

SEQ ID NO: 1429552 - RNA, 17 nt, Human
guucuaagucuuuccau

SEQ ID NO: 1429553 - RNA, 13 nt, Human
guucugaagaaga

SEQ ID NO: 1429554 - RNA, 12 nt, Human
guucugaagaag

SEQ ID NO: 1429555 - RNA, 16 nt, Human
guucuaagucuuucca

SEQ ID NO: 1429556 - RNA, 17 nt, Human
guucuaaggcucugaga

SEQ ID NO: 1429557 - RNA, 16 nt, Human
guucuaaggcucugag

SEQ ID NO: 1429558 - RNA, 14 nt, Human
guucuaaggcucug

SEQ ID NO: 1429559 - RNA, 13 nt, Human
guucuaaggcucu

SEQ ID NO: 1429560 - RNA, 12 nt, Human
guucuaaggcuc

SEQ ID NO: 1429561 - RNA, 11 nt, Human
guucuaaggcu

SEQ ID NO: 1429562 - RNA, 23 nt, Human
guucuaaggccuaggauucuaaa

SEQ ID NO: 1429563 - RNA, 22 nt, Human
guucuaaggccuaggauucuaa

SEQ ID NO: 1429564 - RNA, 21 nt, Human
guucuaaggccuaggauucua

SEQ ID NO: 1429565 - RNA, 20 nt, Human
guucuaaggccuaggauucu

SEQ ID NO: 1429566 - RNA, 13 nt, Human
guucuaaggccua

SEQ ID NO: 1429567 - RNA, 11 nt, Human
guucuaaggcc

SEQ ID NO: 1429568 - RNA, 15 nt, Human
guucuaagauucuga

SEQ ID NO: 1429569 - RNA, 14 nt, Human
guucuaagauucug

SEQ ID NO: 1429570 - RNA, 20 nt, Human
guucuaagauucuaaugaug

SEQ ID NO: 1429571 - RNA, 17 nt, Human
guucuaagauucuaaug

SEQ ID NO: 1429572 - RNA, 15 nt, Human
guucuaagauucuaa

SEQ ID NO: 1429573 - RNA, 14 nt, Human
guucuaagauucua

SEQ ID NO: 1429574 - RNA, 13 nt, Human
guucuaagauucu

SEQ ID NO: 1429575 - RNA, 22 nt, Human
guucuaagaugugauauucuaa

SEQ ID NO: 1429576 - RNA, 21 nt, Human
guucuaagaugugauauucua

SEQ ID NO: 1429577 - RNA, 13 nt, Human
guucuaagaugug

SEQ ID NO: 1429578 - RNA, 21 nt, Human
guucuaagacucaaauguucu

SEQ ID NO: 1429579 - RNA, 20 nt, Human
guucuaagacucaaauguuc

SEQ ID NO: 1429580 - RNA, 17 nt, Human
guucuaagacucaaaug

SEQ ID NO: 1429581 - RNA, 15 nt, Human
guucuaagacucaaa

SEQ ID NO: 1429582 - RNA, 16 nt, Human
guucuaaccuuuacau

SEQ ID NO: 1429583 - RNA, 13 nt, Human
guucuaaccuccu

SEQ ID NO: 1429584 - RNA, 21 nt, Human
guucuaaaguucuaagauucu

SEQ ID NO: 1429585 - RNA, 19 nt, Human
guucuaaaguucuaagauu

SEQ ID NO: 1429586 - RNA, 18 nt, Human
guucuaaaguucuaagau

SEQ ID NO: 1429587 - RNA, 17 nt, Human
guucuaaaguucuaaga

SEQ ID NO: 1429588 - RNA, 16 nt, Human
guucuaaaguucuaag

SEQ ID NO: 1429589 - RNA, 15 nt, Human
guucuaaaguucuaa

SEQ ID NO: 1429590 - RNA, 14 nt, Human
guucuaaaguucua

SEQ ID NO: 1429591 - RNA, 13 nt, Human
guucuaaaguucu

SEQ ID NO: 1429592 - RNA, 12 nt, Human
guucuaaaguuc

SEQ ID NO: 1429593 - RNA, 16 nt, Human
guucuaaagcucugac

SEQ ID NO: 1429594 - RNA, 14 nt, Human
guucuaaagcucug

SEQ ID NO: 1429595 - RNA, 12 nt, Human
guucuaaagcuc

SEQ ID NO: 1429596 - RNA, 10 nt, Human
guucuaaagc

SEQ ID NO: 1429597 - RNA, 16 nt, Human
guucuaaaagguguga

SEQ ID NO: 1429598 - RNA, 19 nt, Human
guucuaaaaauugugauca

SEQ ID NO: 1429599 - RNA, 20 nt, Human
guucgcagccacccugagga

SEQ ID NO: 1429600 - RNA, 20 nt, Human
guucgcauggucacacacug

SEQ ID NO: 1429601 - RNA, 14 nt, Human
guucgcauggucac

SEQ ID NO: 1429602 - RNA, 19 nt, Human
guucgcagccacccugagg

SEQ ID NO: 1429603 - RNA, 17 nt, Human
guucgcagccacccuga

SEQ ID NO: 1429604 - RNA, 16 nt, Human
guucgcagccacccug

SEQ ID NO: 1429605 - RNA, 15 nt, Human
guucgcagccacccu

SEQ ID NO: 1429606 - RNA, 13 nt, Human
guucgcagccacc

SEQ ID NO: 1429607 - RNA, 20 nt, Human
guuccuucccugugccuccu

SEQ ID NO: 1429608 - RNA, 17 nt, Human
guuccuucccaauccag

SEQ ID NO: 1429609 - RNA, 14 nt, Human
guuccuucccaauc

SEQ ID NO: 1429610 - RNA, 13 nt, Human
guuccuucccaau

SEQ ID NO: 1429611 - RNA, 13 nt, Human
guuccuuucuuuu

SEQ ID NO: 1429612 - RNA, 18 nt, Human
guuccuuggccaugcaga

SEQ ID NO: 1429613 - RNA, 21 nt, Human
uaaacauuaauagcagccuuu

SEQ ID NO: 1429614 - RNA, 22 nt, Human
uaaacauuaauagcagccuuuc

SEQ ID NO: 1429615 - RNA, 20 nt, Human
uaaacauuaauagcagccuu

SEQ ID NO: 1429616 - RNA, 22 nt, Human
uaaacuguguauuccaagacau

SEQ ID NO: 1429617 - RNA, 17 nt, Human
uaaacuguguauuccaa

SEQ ID NO: 1429618 - RNA, 18 nt, Human
uaaacuguguacauaacu

SEQ ID NO: 1429619 - RNA, 15 nt, Human
uaaacuguguacaua

SEQ ID NO: 1429620 - RNA, 20 nt, Human
uaaacuguacagugucuuuu

SEQ ID NO: 1429621 - RNA, 14 nt, Human
uaaacugugcacca

SEQ ID NO: 1429622 - RNA, 12 nt, Human
uaaacugugcac

SEQ ID NO: 1429623 - RNA, 19 nt, Human
uaaacuguacagugucuuu

SEQ ID NO: 1429624 - RNA, 15 nt, Human
uaaagaaaaacaaac

SEQ ID NO: 1429625 - RNA, 14 nt, Human
uaaagaaaaacaaa

SEQ ID NO: 1429626 - RNA, 23 nt, Human
uaaagaaaaaaauugaaauguaa

SEQ ID NO: 1429627 - RNA, 22 nt, Human
uaaagaaaaaaauugaaaugua

SEQ ID NO: 1429628 - RNA, 21 nt, Human
uaaagaaaaaaauugaaaugu

SEQ ID NO: 1429629 - RNA, 20 nt, Human
uaaagaaaaaaauugaaaug

SEQ ID NO: 1429630 - RNA, 18 nt, Human
uaaagaaaaaaauugaaa

SEQ ID NO: 1429631 - RNA, 17 nt, Human
uaaagaaaaaaauugaa

SEQ ID NO: 1429632 - RNA, 16 nt, Human
uaaagaaaaaaauuga

SEQ ID NO: 1429633 - RNA, 15 nt, Human
uaaagaaaaaaauug

SEQ ID NO: 1429634 - RNA, 23 nt, Human
uaaagaaaaaaauguauuuuaug

SEQ ID NO: 1429635 - RNA, 17 nt, Human
uaaagaaaaaaauguau

SEQ ID NO: 1429636 - RNA, 16 nt, Human
uaaagaaaaaaaugua

SEQ ID NO: 1429637 - RNA, 11 nt, Human
uaaagaaaaaa

SEQ ID NO: 1429638 - RNA, 12 nt, Human
uaaagaaaaaaa

SEQ ID NO: 1429639 - RNA, 9 nt, Human
uaaagaaaa

SEQ ID NO: 1429640 - RNA, 20 nt, Human
uaaacuuuuuuucuguacca

SEQ ID NO: 1429641 - RNA, 18 nt, Human
uaaacuuccccaucuucu

SEQ ID NO: 1429642 - RNA, 18 nt, Human
uaaacuguacagugucuu

SEQ ID NO: 1429643 - RNA, 16 nt, Human
uaaacuuauaacccac

SEQ ID NO: 1429644 - RNA, 13 nt, Human
uaaacuuaaucua

SEQ ID NO: 1429645 - RNA, 19 nt, Human
uaaaaucuugucaugugua

SEQ ID NO: 1429646 - RNA, 14 nt, Human
uaaaaucuugucau

SEQ ID NO: 1429647 - RNA, 12 nt, Human
uaaaaucuuguc

SEQ ID NO: 1429648 - RNA, 11 nt, Human
uaaaaucuugu

SEQ ID NO: 1429649 - RNA, 20 nt, Human
uaaacaagaccacguuucua

SEQ ID NO: 1429650 - RNA, 21 nt, Human
uaaacaagaccacguuucuaa

SEQ ID NO: 1429651 - RNA, 22 nt, Human
uaaacaagaccacguuucuaaa

SEQ ID NO: 1429652 - RNA, 19 nt, Human
uaaaaucuuauaguucuag

SEQ ID NO: 1429653 - RNA, 18 nt, Human
uaaaaucuuauaguucua

SEQ ID NO: 1429654 - RNA, 17 nt, Human
uaaaaucuuauaguucu

SEQ ID NO: 1429655 - RNA, 13 nt, Human
uaaaaucuuauag

SEQ ID NO: 1429656 - RNA, 14 nt, Human
uaaaaucugucacg

SEQ ID NO: 1429657 - RNA, 13 nt, Human
uaaaaucugucac

SEQ ID NO: 1429658 - RNA, 18 nt, Human
uaaaauccauacauuugu

SEQ ID NO: 1429659 - RNA, 18 nt, Human
uaaaaucuugucaugugu

SEQ ID NO: 1429660 - RNA, 16 nt, Human
uaaaaucuugucaugu

SEQ ID NO: 1429661 - RNA, 15 nt, Human
uaaaaucuugucaug

SEQ ID NO: 1429662 - RNA, 23 nt, Human
uaaacaagaccacguuucuaaag

SEQ ID NO: 1429663 - RNA, 15 nt, Human
uaaacacucuugaaa

SEQ ID NO: 1429664 - RNA, 17 nt, Human
uaaacacucuugaaaaa

SEQ ID NO: 1429665 - RNA, 17 nt, Human
uaaacaucauucauuuu

SEQ ID NO: 1429666 - RNA, 15 nt, Human
uaaacaucauucauu

SEQ ID NO: 1429667 - RNA, 18 nt, Human
uaaacaucaaucuuuaaa

SEQ ID NO: 1429668 - RNA, 15 nt, Human
uaaacaucaaucuuu

SEQ ID NO: 1429669 - RNA, 18 nt, Human
uaaacacucuugaaaaau

SEQ ID NO: 1429670 - RNA, 17 nt, Human
uaaagcaauaugcauuu

SEQ ID NO: 1429671 - RNA, 15 nt, Human
uaaagcaauaugcau

SEQ ID NO: 1429672 - RNA, 18 nt, Human
uaaagaaaagaugcacuu

SEQ ID NO: 1429673 - RNA, 18 nt, Human
uaaagaaaaucucuguga

SEQ ID NO: 1429674 - RNA, 15 nt, Human
uaaagaaaagaugca

SEQ ID NO: 1429675 - RNA, 14 nt, Human
uaaagaaaagaugc

SEQ ID NO: 1429676 - RNA, 13 nt, Human
uaaagaaaagaug

SEQ ID NO: 1429677 - RNA, 12 nt, Human
uaaagaaaagau

SEQ ID NO: 1429678 - RNA, 18 nt, Human
uaaagcaggcagaacuca

SEQ ID NO: 1429679 - RNA, 19 nt, Human
uaaagcagcguuucuauga

SEQ ID NO: 1429680 - RNA, 16 nt, Human
uaaagcagcguuucua

SEQ ID NO: 1429681 - RNA, 17 nt, Human
uaaagcagcguuucuau

SEQ ID NO: 1429682 - RNA, 16 nt, Human
uaaagcagguucuugu

SEQ ID NO: 1429683 - RNA, 20 nt, Human
uaaagcaggccuuuugauau

SEQ ID NO: 1429684 - RNA, 19 nt, Human
uaaagcaggccuuuugaua

SEQ ID NO: 1429685 - RNA, 18 nt, Human
uaaagcaggccuuuugau

SEQ ID NO: 1429686 - RNA, 12 nt, Human
uaaagccuccuc

SEQ ID NO: 1429687 - RNA, 11 nt, Human
uaaagccucaa

SEQ ID NO: 1429688 - RNA, 15 nt, Human
uaaagccaugcugga

SEQ ID NO: 1429689 - RNA, 17 nt, Human
uaaagcagguucuuguu

SEQ ID NO: 1429690 - RNA, 12 nt, Human
uaaaguucuaag

SEQ ID NO: 1429691 - RNA, 18 nt, Human
uaaaguucaacauguuau

SEQ ID NO: 1429692 - RNA, 15 nt, Human
uaaaguucaacaugu

SEQ ID NO: 1429693 - RNA, 20 nt, Human
uaaaguuaguaucuuuugau

SEQ ID NO: 1429694 - RNA, 14 nt, Human
uaaaguuaaguuga

SEQ ID NO: 1429695 - RNA, 14 nt, Human
uaaaguguuugaaa

SEQ ID NO: 1429696 - RNA, 17 nt, Human
uaaaggcuaccuuugua

SEQ ID NO: 1429697 - RNA, 23 nt, Human
uaaagcuuucagaauaugucagu

SEQ ID NO: 1429698 - RNA, 19 nt, Human
uaaagcuuucagaauaugu

SEQ ID NO: 1429699 - RNA, 11 nt, Human
uaaagcuuguc

SEQ ID NO: 1429700 - RNA, 19 nt, Human
uaaagcuugcaacaaaauu

SEQ ID NO: 1429701 - RNA, 19 nt, Human
uaaagcugguuuaauguuu

SEQ ID NO: 1429702 - RNA, 15 nt, Human
uaaagcugguuuaau

SEQ ID NO: 1429703 - RNA, 21 nt, Human
uaaagccucaagguuuuaggu

SEQ ID NO: 1429704 - RNA, 17 nt, Human
uaaaggcaguuuucuaa

SEQ ID NO: 1429705 - RNA, 15 nt, Human
uaaaggcuaccuuug

SEQ ID NO: 1429706 - RNA, 14 nt, Human
uaaaggcaguuuuc

SEQ ID NO: 1429707 - RNA, 16 nt, Human
uaaaggaaaagacaca

SEQ ID NO: 1429708 - RNA, 17 nt, Human
uaaaggaaaagacacau

SEQ ID NO: 1429709 - RNA, 14 nt, Human
uaaaggaaaagaca

SEQ ID NO: 1429710 - RNA, 11 nt, Human
uaaaggaaaag

SEQ ID NO: 1429711 - RNA, 14 nt, Human
uaaaggaauuuaaa

SEQ ID NO: 1429712 - RNA, 21 nt, Human
uaaaacagguagaauuaucua

SEQ ID NO: 1429713 - RNA, 19 nt, Human
uaaaacagacacuggcaug

SEQ ID NO: 1429714 - RNA, 18 nt, Human
uaaaacagacacuggcau

SEQ ID NO: 1429715 - RNA, 17 nt, Human
uaaaacagacacuggca

SEQ ID NO: 1429716 - RNA, 15 nt, Human
uaaaacagacacugg

SEQ ID NO: 1429717 - RNA, 13 nt, Human
uaaaacagacacu

SEQ ID NO: 1429718 - RNA, 14 nt, Human
uaaaacagaagccu

SEQ ID NO: 1429719 - RNA, 11 nt, Human
uaaaacacuug

SEQ ID NO: 1429720 - RNA, 14 nt, Human
uaaaacacacaggu

SEQ ID NO: 1429721 - RNA, 13 nt, Human
uaaaacaaugaau

SEQ ID NO: 1429722 - RNA, 22 nt, Human
uaaaaauuguuaauuuuuccua

SEQ ID NO: 1429723 - RNA, 17 nt, Human
uaaaaauugugaucaga

SEQ ID NO: 1429724 - RNA, 23 nt, Human
uaaaaauuaaauuggaaagcagg

SEQ ID NO: 1429725 - RNA, 21 nt, Human
uaaaaauguucuauuuuaauu

SEQ ID NO: 1429726 - RNA, 22 nt, Human
uaaaacaagcacuaaacaaaga

SEQ ID NO: 1429727 - RNA, 20 nt, Human
uaaaaagauugaaguauuuu

SEQ ID NO: 1429728 - RNA, 18 nt, Human
uaaaaagauugaaguauu

SEQ ID NO: 1429729 - RNA, 14 nt, Human
uaaaaagaucacuu

SEQ ID NO: 1429730 - RNA, 13 nt, Human
uaaaaagaaaggc

SEQ ID NO: 1429731 - RNA, 15 nt, Human
uaaaaagaagugcug

SEQ ID NO: 1429732 - RNA, 22 nt, Human
uaaaaacagauuuggaaagacu

SEQ ID NO: 1429733 - RNA, 20 nt, Human
uaaaaacagauuuggaaaga

SEQ ID NO: 1429734 - RNA, 20 nt, Human
guuuuguuucgcucuuugag

SEQ ID NO: 1429735 - RNA, 14 nt, Human
guuuuguuuacaga

SEQ ID NO: 1429736 - RNA, 21 nt, Human
guuuuuacaaauguuaaaaug

SEQ ID NO: 1429737 - RNA, 13 nt, Human
guuuuuaauguau

SEQ ID NO: 1429738 - RNA, 12 nt, Human
guuuuuaaugua

SEQ ID NO: 1429739 - RNA, 13 nt, Human
guuuuguuuacag

SEQ ID NO: 1429740 - RNA, 19 nt, Human
guuuuuaauaaaagaaaau

SEQ ID NO: 1429741 - RNA, 18 nt, Human
guuuuuaauguauaguaa

SEQ ID NO: 1429742 - RNA, 21 nt, Human
uaaaaacaaagaaauuaugug

SEQ ID NO: 1429743 - RNA, 20 nt, Human
uaaaacauuuauuuugacau

SEQ ID NO: 1429744 - RNA, 14 nt, Human
uaaaacauuuauuu

SEQ ID NO: 1429745 - RNA, 12 nt, Human
uaaaacauuaau

SEQ ID NO: 1429746 - RNA, 19 nt, Human
uaaaacauuaaaauauaau

SEQ ID NO: 1429747 - RNA, 16 nt, Human
uaaaacauuaaaauau

SEQ ID NO: 1429748 - RNA, 15 nt, Human
uaaaacauuaaaaua

SEQ ID NO: 1429749 - RNA, 12 nt, Human
uaaaacauuaaa

SEQ ID NO: 1429750 - RNA, 19 nt, Human
uaaaacaucuuugaaauua

SEQ ID NO: 1429751 - RNA, 17 nt, Human
uaaaacaucauuacuau

SEQ ID NO: 1429752 - RNA, 22 nt, Human
uaaaacagguagaauuaucuaa

SEQ ID NO: 1429753 - RNA, 21 nt, Human
uaaaacagguuauaacagugu

SEQ ID NO: 1429754 - RNA, 17 nt, Human
uaaaagcaaaaaagaaa

SEQ ID NO: 1429755 - RNA, 16 nt, Human
uaaaagcaaaaaagaa

SEQ ID NO: 1429756 - RNA, 12 nt, Human
uaaaagcaaaaa

SEQ ID NO: 1429757 - RNA, 18 nt, Human
uaaaagauauaagugcug

SEQ ID NO: 1429758 - RNA, 19 nt, Human
uaaaagauauaagugcugu

SEQ ID NO: 1429759 - RNA, 20 nt, Human
uaaaagauauaagugcugua

SEQ ID NO: 1429760 - RNA, 21 nt, Human
uaaaagauauaagugcuguau

SEQ ID NO: 1429761 - RNA, 21 nt, Human
uaaaagauacaguuacucaga

SEQ ID NO: 1429762 - RNA, 12 nt, Human
uaaaagauauaa

SEQ ID NO: 1429763 - RNA, 13 nt, Human
uaaaagauauaag

SEQ ID NO: 1429764 - RNA, 16 nt, Human
uaaaagauauaagugc

SEQ ID NO: 1429765 - RNA, 17 nt, Human
uaaaagauacaguuacu

SEQ ID NO: 1429766 - RNA, 20 nt, Human
uaaaagauacaguuacucag

SEQ ID NO: 1429767 - RNA, 14 nt, Human
uaaaagauacaguu

SEQ ID NO: 1429768 - RNA, 14 nt, Human
uaaaaggaagccaa

SEQ ID NO: 1429769 - RNA, 21 nt, Human
uaaaagcaaaucauuuguuua

SEQ ID NO: 1429770 - RNA, 20 nt, Human
uaaaagcaaaucauuuguuu

SEQ ID NO: 1429771 - RNA, 15 nt, Human
uaaaagcaaaucauu

SEQ ID NO: 1429772 - RNA, 14 nt, Human
uaaaagcaaaucau

SEQ ID NO: 1429773 - RNA, 13 nt, Human
uaaaagcaaauca

SEQ ID NO: 1429774 - RNA, 23 nt, Human
uaaaagcaaaaaagaaaaccuuu

SEQ ID NO: 1429775 - RNA, 22 nt, Human
uaaaagcaaaaaagaaaaccuu

SEQ ID NO: 1429776 - RNA, 20 nt, Human
uaaaagcaaaaaagaaaacc

SEQ ID NO: 1429777 - RNA, 19 nt, Human
uaaaagcaaaaaagaaaac

SEQ ID NO: 1429778 - RNA, 18 nt, Human
uaaaagcaaaaaagaaaa

SEQ ID NO: 1429779 - RNA, 15 nt, Human
uaaaaggaaagaaaa

SEQ ID NO: 1429780 - RNA, 13 nt, Human
uaaaagcacgaca

SEQ ID NO: 1429781 - RNA, 19 nt, Human
uaaaaggaagccaaagagu

SEQ ID NO: 1429782 - RNA, 21 nt, Human
uaaaaggaaagaaaacaucuu

SEQ ID NO: 1429783 - RNA, 20 nt, Human
uaaaaucagcuauuuuguga

SEQ ID NO: 1429784 - RNA, 22 nt, Human
uaaaagguauuaaauugauguu

SEQ ID NO: 1429785 - RNA, 17 nt, Human
uaaaauccauacauuug

SEQ ID NO: 1429786 - RNA, 15 nt, Human
uaaaauccauacauu

SEQ ID NO: 1429787 - RNA, 18 nt, Human
guuugucgcucaugugug

SEQ ID NO: 1429788 - RNA, 13 nt, Human
guuugucauuagc

SEQ ID NO: 1429789 - RNA, 15 nt, Human
guuugucauuagccu

SEQ ID NO: 1429790 - RNA, 21 nt, Human
guuugucauuagccugaguag

SEQ ID NO: 1429791 - RNA, 13 nt, Human
guuuguaugaaac

SEQ ID NO: 1429792 - RNA, 22 nt, Human
guuuguagugccacuguuguuu

SEQ ID NO: 1429793 - RNA, 15 nt, Human
guuugugugucuuaa

SEQ ID NO: 1429794 - RNA, 14 nt, Human
guuugugugucuua

SEQ ID NO: 1429795 - RNA, 13 nt, Human
guuugugugucuu

SEQ ID NO: 1429796 - RNA, 22 nt, Human
guuuguguauuuacgcuuugau

SEQ ID NO: 1429797 - RNA, 17 nt, Human
guuuguguucuguuuug

SEQ ID NO: 1429798 - RNA, 15 nt, Human
guuuguguucuguuu

SEQ ID NO: 1429799 - RNA, 20 nt, Human
guuuguguguugucucuuga

SEQ ID NO: 1429800 - RNA, 17 nt, Human
guuuggguuuuuuuccu

SEQ ID NO: 1429801 - RNA, 15 nt, Human
guuugguauuguauu

SEQ ID NO: 1429802 - RNA, 20 nt, Human
guuuggguaaaauacuuuua

SEQ ID NO: 1429803 - RNA, 19 nt, Human
guuuggguaaaauacuuuu

SEQ ID NO: 1429804 - RNA, 23 nt, Human
guuuggggcaggaguagcugagc

SEQ ID NO: 1429805 - RNA, 21 nt, Human
guuuggggcaggaguagcuga

SEQ ID NO: 1429806 - RNA, 17 nt, Human
guuuggggcaggaguag

SEQ ID NO: 1429807 - RNA, 15 nt, Human
guuuggggcaggagu

SEQ ID NO: 1429808 - RNA, 19 nt, Human
guuuggggcagaaaggacu

SEQ ID NO: 1429809 - RNA, 13 nt, Human
guuuggugcuucu

SEQ ID NO: 1429810 - RNA, 17 nt, Human
guuugguauuguauuua

SEQ ID NO: 1429811 - RNA, 18 nt, Human
guuugguauuguauuuau

SEQ ID NO: 1429812 - RNA, 19 nt, Human
guuugacuagaugauggau

SEQ ID NO: 1429813 - RNA, 23 nt, Human
guuugauuaaauucuugcaaagu

SEQ ID NO: 1429814 - RNA, 18 nt, Human
guuugacuagaugaugga

SEQ ID NO: 1429815 - RNA, 16 nt, Human
guuugacuagaugaug

SEQ ID NO: 1429816 - RNA, 17 nt, Human
guuugaauguuaaauaa

SEQ ID NO: 1429817 - RNA, 19 nt, Human
guuucuuuguaaugaaaac

SEQ ID NO: 1429818 - RNA, 16 nt, Human
guuugaauguuaaaua

SEQ ID NO: 1429819 - RNA, 22 nt, Human
guuucuugccucauuuuuuucc

SEQ ID NO: 1429820 - RNA, 14 nt, Human
guuucuugccucau

SEQ ID NO: 1429821 - RNA, 13 nt, Human
guuucuugccuca

SEQ ID NO: 1429822 - RNA, 23 nt, Human
guuucuugccucauuuuuuuccu

SEQ ID NO: 1429823 - RNA, 21 nt, Human
guuucuuaaauaagaaacuuu

SEQ ID NO: 1429824 - RNA, 22 nt, Human
guuucuuaaauaagaaacuuuu

SEQ ID NO: 1429825 - RNA, 18 nt, Human
guuucccuacugaagccc

SEQ ID NO: 1429826 - RNA, 22 nt, Human
guuuccucuguucaaagcugcc

SEQ ID NO: 1429827 - RNA, 20 nt, Human
guuuccucuguucaaagcug

SEQ ID NO: 1429828 - RNA, 13 nt, Human
guuuccucuguuc

SEQ ID NO: 1429829 - RNA, 22 nt, Human
guuuccucuaguucuuuguuca

SEQ ID NO: 1429830 - RNA, 18 nt, Human
guuuccucuaguucuuug

SEQ ID NO: 1429831 - RNA, 17 nt, Human
guuuccuccaagcuauu

SEQ ID NO: 1429832 - RNA, 22 nt, Human
guuuuguugacauucugaaugc

SEQ ID NO: 1429833 - RNA, 21 nt, Human
guuuuguugacauucugaaug

SEQ ID NO: 1429834 - RNA, 18 nt, Human
guuuuguugacauucuga

SEQ ID NO: 1429835 - RNA, 17 nt, Human
guuuuguugacauucug

SEQ ID NO: 1429836 - RNA, 16 nt, Human
guuuuguugacauucu

SEQ ID NO: 1429837 - RNA, 14 nt, Human
guuuuguugacauu

SEQ ID NO: 1429838 - RNA, 21 nt, Human
guuuuguucaccauuauaaug

SEQ ID NO: 1429839 - RNA, 14 nt, Human
guuuuguucaccau

SEQ ID NO: 1429840 - RNA, 17 nt, Human
guuuuguuauauaauuu

SEQ ID NO: 1429841 - RNA, 18 nt, Human
guuuuguguuuguuguag

SEQ ID NO: 1429842 - RNA, 17 nt, Human
guuuuguguuuguugua

SEQ ID NO: 1429843 - RNA, 17 nt, Human
guuuuccuaugcuuuga

SEQ ID NO: 1429844 - RNA, 21 nt, Human
guuuuccuaugcuuugaaaca

SEQ ID NO: 1429845 - RNA, 12 nt, Human
guuuguuuuugg

SEQ ID NO: 1429846 - RNA, 14 nt, Human
guuuguuuuugcgu

SEQ ID NO: 1429847 - RNA, 13 nt, Human
guuuguuuguugc

SEQ ID NO: 1429848 - RNA, 15 nt, Human
guuuuaaaaagccag

SEQ ID NO: 1429849 - RNA, 16 nt, Human
guuuuaaaaagccagu

SEQ ID NO: 1429850 - RNA, 15 nt, Human
guuuuaaaaugagaa

SEQ ID NO: 1429851 - RNA, 16 nt, Human
guuuuaaaaugagaaa

SEQ ID NO: 1429852 - RNA, 20 nt, Human
guuuucaaaauuguuacaaa

SEQ ID NO: 1429853 - RNA, 17 nt, Human
guuuuaaaaugagaaau

SEQ ID NO: 1429854 - RNA, 14 nt, Human
guuguccuuuucau

SEQ ID NO: 1429855 - RNA, 23 nt, Human
guuguccucagccccgcguggaa

SEQ ID NO: 1429856 - RNA, 17 nt, Human
guuguccucagccccgc

SEQ ID NO: 1429857 - RNA, 16 nt, Human
guugucaccagaucug

SEQ ID NO: 1429858 - RNA, 22 nt, Human
guugucaagaauagcauuguaa

SEQ ID NO: 1429859 - RNA, 18 nt, Human
guugucaagaauagcauu

SEQ ID NO: 1429860 - RNA, 14 nt, Human
guugucaagaauag

SEQ ID NO: 1429861 - RNA, 23 nt, Human
guuggccauauuuaccucagccu

SEQ ID NO: 1429862 - RNA, 22 nt, Human
guuggccauauuuaccucagcc

SEQ ID NO: 1429863 - RNA, 18 nt, Human
guuggccaggcuggucua

SEQ ID NO: 1429864 - RNA, 21 nt, Human
guuggcguaggcuacagagaa

SEQ ID NO: 1429865 - RNA, 20 nt, Human
guuggcguaggcuacagaga

SEQ ID NO: 1429866 - RNA, 19 nt, Human
guuggcguaggcuacagag

SEQ ID NO: 1429867 - RNA, 18 nt, Human
guuggcguaggcuacaga

SEQ ID NO: 1429868 - RNA, 23 nt, Human
guuggcucugccaguccuguccu

SEQ ID NO: 1429869 - RNA, 19 nt, Human
guuggcucugccaguccug

SEQ ID NO: 1429870 - RNA, 15 nt, Human
guuggcucugccagu

SEQ ID NO: 1429871 - RNA, 23 nt, Human
guuggcguaggcuacagagaagc

SEQ ID NO: 1429872 - RNA, 22 nt, Human
guuggcguaggcuacagagaag

SEQ ID NO: 1429873 - RNA, 24 nt, Human
guuggcguaggcuacagagaagcc

SEQ ID NO: 1429874 - RNA, 22 nt, Human
guuggcucugccaguccugucc

SEQ ID NO: 1429875 - RNA, 24 nt, Human
guuguggccuuugcgcuccuggcc

SEQ ID NO: 1429876 - RNA, 21 nt, Human
guuguggccuuugcgcuccug

SEQ ID NO: 1429877 - RNA, 13 nt, Human
guuguggccuuug

SEQ ID NO: 1429878 - RNA, 22 nt, Human
guuguggauuuaacagaaaugu

SEQ ID NO: 1429879 - RNA, 12 nt, Human
guugugccaaau

SEQ ID NO: 1429880 - RNA, 20 nt, Human
guugugaguuuaccuuguau

SEQ ID NO: 1429881 - RNA, 16 nt, Human
guugucuggcaaggac

SEQ ID NO: 1429882 - RNA, 14 nt, Human
guugucuggcaagg

SEQ ID NO: 1429883 - RNA, 20 nt, Human
guugucucugaugcagcuua

SEQ ID NO: 1429884 - RNA, 14 nt, Human
guugucucugaugc

SEQ ID NO: 1429885 - RNA, 11 nt, Human
guugucucuga

SEQ ID NO: 1429886 - RNA, 18 nt, Human
guugucucuagagcaggg

SEQ ID NO: 1429887 - RNA, 18 nt, Human
guugucuaagaaauugaa

SEQ ID NO: 1429888 - RNA, 21 nt, Human
guugucuaagaaauugaauac

SEQ ID NO: 1429889 - RNA, 15 nt, Human
guugucuaagaaauu

SEQ ID NO: 1429890 - RNA, 14 nt, Human
guugucuaagaaau

SEQ ID NO: 1429891 - RNA, 17 nt, Human
guugucguaaagauuug

SEQ ID NO: 1429892 - RNA, 15 nt, Human
guuguccuuuucaua

SEQ ID NO: 1429893 - RNA, 13 nt, Human
guugucucuguuu

SEQ ID NO: 1429894 - RNA, 18 nt, Human
guugucucugaugcagcu

SEQ ID NO: 1429895 - RNA, 15 nt, Human
guugucucugaugca

SEQ ID NO: 1429896 - RNA, 19 nt, Human
guugucugcaacucugaag

SEQ ID NO: 1429897 - RNA, 22 nt, Human
guuuacuagggaucccucaucu

SEQ ID NO: 1429898 - RNA, 12 nt, Human
guuuaccuugua

SEQ ID NO: 1429899 - RNA, 15 nt, Human
guuuaccaguugccu

SEQ ID NO: 1429900 - RNA, 18 nt, Human
guuuaccaguugccuuuu

SEQ ID NO: 1429901 - RNA, 15 nt, Human
guuuaccagaaagca

SEQ ID NO: 1429902 - RNA, 16 nt, Human
guuuagaacacacaca

SEQ ID NO: 1429903 - RNA, 14 nt, Human
guuuagauaauaca

SEQ ID NO: 1429904 - RNA, 15 nt, Human
guuuagauaauacac

SEQ ID NO: 1429905 - RNA, 13 nt, Human
guuguuucuguuc

SEQ ID NO: 1429906 - RNA, 10 nt, Human
guuguucuuu

SEQ ID NO: 1429907 - RNA, 18 nt, Human
guuguucuguuaacugaa

SEQ ID NO: 1429908 - RNA, 15 nt, Human
guuguucuguuaacu

SEQ ID NO: 1429909 - RNA, 14 nt, Human
guuguucuguuaac

SEQ ID NO: 1429910 - RNA, 12 nt, Human
guuguucuguua

SEQ ID NO: 1429911 - RNA, 13 nt, Human
guuguucgggcca

SEQ ID NO: 1429912 - RNA, 14 nt, Human
guuguuucuguucc

SEQ ID NO: 1429913 - RNA, 17 nt, Human
guuguuucuguuccaaa

SEQ ID NO: 1429914 - RNA, 16 nt, Human
guuguucgggccaagg

SEQ ID NO: 1429915 - RNA, 17 nt, Human
guuguuaugugaucaug

SEQ ID NO: 1429916 - RNA, 14 nt, Human
guuguuacauuuuu

SEQ ID NO: 1429917 - RNA, 15 nt, Human
guuguuacauuuuua

SEQ ID NO: 1429918 - RNA, 19 nt, Human
guuuauacacuguguaaau

SEQ ID NO: 1429919 - RNA, 18 nt, Human
guuuaguggcucaacauu

SEQ ID NO: 1429920 - RNA, 15 nt, Human
guuuauacacugugu

SEQ ID NO: 1429921 - RNA, 20 nt, Human
guuuauauaagcuuguauuc

SEQ ID NO: 1429922 - RNA, 19 nt, Human
guuuaggaacuacugagga

SEQ ID NO: 1429923 - RNA, 21 nt, Human
guuuagcuggaaaaguauguu

SEQ ID NO: 1429924 - RNA, 20 nt, Human
guuuagcuggaaaaguaugu

SEQ ID NO: 1429925 - RNA, 18 nt, Human
guuuaugaaaaagaagaa

SEQ ID NO: 1429926 - RNA, 15 nt, Human
guuuauccuuucaua

SEQ ID NO: 1429927 - RNA, 22 nt, Human
guuuauccuuucauauaguuag

SEQ ID NO: 1429928 - RNA, 20 nt, Human
guuuaucauucaaguguaaa

SEQ ID NO: 1429929 - RNA, 17 nt, Human
guuuaucauucaagugu

SEQ ID NO: 1429930 - RNA, 16 nt, Human
guuuaucauucaagug

SEQ ID NO: 1429931 - RNA, 15 nt, Human
guuuaucauucaagu

SEQ ID NO: 1429932 - RNA, 14 nt, Human
guuuaucauucaag

SEQ ID NO: 1429933 - RNA, 14 nt, Human
guuuaucaguaaau

SEQ ID NO: 1429934 - RNA, 21 nt, Human
guuucauguuaguuaccuuau

SEQ ID NO: 1429935 - RNA, 17 nt, Human
guuucauguuaguuacc

SEQ ID NO: 1429936 - RNA, 18 nt, Human
guuucauguaauccucaa

SEQ ID NO: 1429937 - RNA, 22 nt, Human
guuucauauuuuucauagcuaa

SEQ ID NO: 1429938 - RNA, 12 nt, Human
uaaccacugcuu

SEQ ID NO: 1429939 - RNA, 13 nt, Human
uaaccacugcuuc

SEQ ID NO: 1429940 - RNA, 17 nt, Human
uaacauuugcuguuuua

SEQ ID NO: 1429941 - RNA, 22 nt, Human
uaacauuugcuguuuuaaacau

SEQ ID NO: 1429942 - RNA, 16 nt, Human
uaacauuugcuguuuu

SEQ ID NO: 1429943 - RNA, 14 nt, Human
uaacauuugcuguu

SEQ ID NO: 1429944 - RNA, 13 nt, Human
uaacauuugcugu

SEQ ID NO: 1429945 - RNA, 23 nt, Human
uaacauuccucaugaauguaaau

SEQ ID NO: 1429946 - RNA, 22 nt, Human
uaacauuccucaugaauguaaa

SEQ ID NO: 1429947 - RNA, 21 nt, Human
uaacauuccucaugaauguaa

SEQ ID NO: 1429948 - RNA, 20 nt, Human
uaacauuccucaugaaugua

SEQ ID NO: 1429949 - RNA, 11 nt, Human
uaacauuccuc

SEQ ID NO: 1429950 - RNA, 12 nt, Human
uaacagaaaugu

SEQ ID NO: 1429951 - RNA, 11 nt, Human
uaacagaaaug

SEQ ID NO: 1429952 - RNA, 17 nt, Human
uaacccacugagaggac

SEQ ID NO: 1429953 - RNA, 19 nt, Human
uaaccauguguuauguuuu

SEQ ID NO: 1429954 - RNA, 22 nt, Human
uaaccagacacauacucauuuu

SEQ ID NO: 1429955 - RNA, 20 nt, Human
uaaccagacacauacucauu

SEQ ID NO: 1429956 - RNA, 22 nt, Human
uaaccagaucuagucaaucaag

SEQ ID NO: 1429957 - RNA, 23 nt, Human
uaaccaguguuguggauuuaaca

SEQ ID NO: 1429958 - RNA, 13 nt, Human
uaaccagaucauu

SEQ ID NO: 1429959 - RNA, 23 nt, Human
uaacugaacauccaaaaucuuga

SEQ ID NO: 1429960 - RNA, 20 nt, Human
uaacugaaaauuauuuaaac

SEQ ID NO: 1429961 - RNA, 21 nt, Human
uaacugaaaaugugcuauacu

SEQ ID NO: 1429962 - RNA, 20 nt, Human
uaacugaaaaugugcuauac

SEQ ID NO: 1429963 - RNA, 14 nt, Human
uaacugaaaaugug

SEQ ID NO: 1429964 - RNA, 22 nt, Human
uaacucuucuuucauuucuucu

SEQ ID NO: 1429965 - RNA, 14 nt, Human
uaacucucuuuaug

SEQ ID NO: 1429966 - RNA, 18 nt, Human
uaacuccucccaggguuu

SEQ ID NO: 1429967 - RNA, 21 nt, Human
uaacuccucccaggguuuuaa

SEQ ID NO: 1429968 - RNA, 16 nt, Human
uaacuccucccagggu

SEQ ID NO: 1429969 - RNA, 15 nt, Human
uaacuccucccaggg

SEQ ID NO: 1429970 - RNA, 18 nt, Human
uaacugaauaccacucug

SEQ ID NO: 1429971 - RNA, 16 nt, Human
uaacugaauaccacuc

SEQ ID NO: 1429972 - RNA, 15 nt, Human
uaacugaauaccacu

SEQ ID NO: 1429973 - RNA, 14 nt, Human
uaacugaauaccac

SEQ ID NO: 1429974 - RNA, 21 nt, Human
uaacugaauaccacucuguaa

SEQ ID NO: 1429975 - RNA, 19 nt, Human
uaacugaauaccacucugu

SEQ ID NO: 1429976 - RNA, 22 nt, Human
uaacugaauaccacucuguaau

SEQ ID NO: 1429977 - RNA, 22 nt, Human
uaacugacuauucuugauguaa

SEQ ID NO: 1429978 - RNA, 17 nt, Human
uaacugacaagccaucu

SEQ ID NO: 1429979 - RNA, 16 nt, Human
uaacugacaagccauc

SEQ ID NO: 1429980 - RNA, 20 nt, Human
uaacugacaagccaucuuga

SEQ ID NO: 1429981 - RNA, 21 nt, Human
uaacugacuauucuugaugua

SEQ ID NO: 1429982 - RNA, 14 nt, Human
uaacugacuauucu

SEQ ID NO: 1429983 - RNA, 17 nt, Human
uaaccccccuguacaca

SEQ ID NO: 1429984 - RNA, 16 nt, Human
uaaccccccuguacac

SEQ ID NO: 1429985 - RNA, 15 nt, Human
uaacuauugcauuua

SEQ ID NO: 1429986 - RNA, 12 nt, Human
uaacuccuccca

SEQ ID NO: 1429987 - RNA, 14 nt, Human
uaacucccauuacc

SEQ ID NO: 1429988 - RNA, 16 nt, Human
uaacuauugcauuuau

SEQ ID NO: 1429989 - RNA, 21 nt, Human
uaacuauugcauuuauaugua

SEQ ID NO: 1429990 - RNA, 23 nt, Human
uaacuauugcauuuauauguacc

SEQ ID NO: 1429991 - RNA, 16 nt, Human
uaacuuuuuuuuuucu

SEQ ID NO: 1429992 - RNA, 19 nt, Human
uaagaaaaaggaugcacag

SEQ ID NO: 1429993 - RNA, 23 nt, Human
uaagaaaaaggaugcacagaguu

SEQ ID NO: 1429994 - RNA, 19 nt, Human
uaacuuuuuuuuuucuuua

SEQ ID NO: 1429995 - RNA, 22 nt, Human
uaacuuuugugaauuaggcugu

SEQ ID NO: 1429996 - RNA, 16 nt, Human
uaacuuuugugaauua

SEQ ID NO: 1429997 - RNA, 16 nt, Human
uaagaaaaaggaugca

SEQ ID NO: 1429998 - RNA, 18 nt, Human
uaagaaaaaggaugcaca

SEQ ID NO: 1429999 - RNA, 12 nt, Human
uaacuuuuguga

SEQ ID NO: 1430000 - RNA, 18 nt, Human
uaacuuuuguaagacaaa

SEQ ID NO: 1430001 - RNA, 13 nt, Human
uaacuuuuguaag

SEQ ID NO: 1430002 - RNA, 14 nt, Human
uaacuggaaagaag

SEQ ID NO: 1430003 - RNA, 15 nt, Human
uaacuggaaagaagu

SEQ ID NO: 1430004 - RNA, 13 nt, Human
uaacuggaaagaa

SEQ ID NO: 1430005 - RNA, 22 nt, Human
uaacuggaaaacagaacacuua

SEQ ID NO: 1430006 - RNA, 21 nt, Human
uaacuggaaaacagaacacuu

SEQ ID NO: 1430007 - RNA, 20 nt, Human
uaacuggaaaacagaacacu

SEQ ID NO: 1430008 - RNA, 18 nt, Human
uaacuggagccccaucag

SEQ ID NO: 1430009 - RNA, 19 nt, Human
uaacuggaaaacagaacac

SEQ ID NO: 1430010 - RNA, 18 nt, Human
uaacuggaaaacagaaca

SEQ ID NO: 1430011 - RNA, 15 nt, Human
uaacuggaaaacaga

SEQ ID NO: 1430012 - RNA, 21 nt, Human
uaacugcuuucuguuccaaau

SEQ ID NO: 1430013 - RNA, 20 nt, Human
uaacugcuuucuguuccaaa

SEQ ID NO: 1430014 - RNA, 17 nt, Human
uaacugcuuucuguucc

SEQ ID NO: 1430015 - RNA, 14 nt, Human
uaacugcuuucugu

SEQ ID NO: 1430016 - RNA, 15 nt, Human
uaacuggaaacuuca

SEQ ID NO: 1430017 - RNA, 21 nt, Human
uaagaaacuuuuuuauuuaaa

SEQ ID NO: 1430018 - RNA, 19 nt, Human
uaagaaacuuuuuuauuua

SEQ ID NO: 1430019 - RNA, 23 nt, Human
uaagaaaccuacugcccaggcac

SEQ ID NO: 1430020 - RNA, 17 nt, Human
uaagaaauugaauacuu

SEQ ID NO: 1430021 - RNA, 15 nt, Human
uaagaaauugaauac

SEQ ID NO: 1430022 - RNA, 14 nt, Human
uaagaaauugaaua

SEQ ID NO: 1430023 - RNA, 20 nt, Human
uaagaaacuuuuuuauuuaa

SEQ ID NO: 1430024 - RNA, 21 nt, Human
uaagaaacaacucuuugagaa

SEQ ID NO: 1430025 - RNA, 20 nt, Human
uaagaaacaacucuuugaga

SEQ ID NO: 1430026 - RNA, 15 nt, Human
uaagaaaauaaaugu

SEQ ID NO: 1430027 - RNA, 21 nt, Human
uaagaaaauaucacuugucaa

SEQ ID NO: 1430028 - RNA, 14 nt, Human
uaagaaauuucaca

SEQ ID NO: 1430029 - RNA, 23 nt, Human
uaagaaauugaauacuuugaaug

SEQ ID NO: 1430030 - RNA, 22 nt, Human
uaagaaauugaauacuuugaau

SEQ ID NO: 1430031 - RNA, 21 nt, Human
uaagaaauugaauacuuugaa

SEQ ID NO: 1430032 - RNA, 18 nt, Human
uaagaaauugaauacuuu

SEQ ID NO: 1430033 - RNA, 14 nt, Human
uaagaaccuggaac

SEQ ID NO: 1430034 - RNA, 13 nt, Human
uaagagagaauga

SEQ ID NO: 1430035 - RNA, 23 nt, Human
uaagagagaaugagagacacacu

SEQ ID NO: 1430036 - RNA, 14 nt, Human
uaagagagaaugag

SEQ ID NO: 1430037 - RNA, 13 nt, Human
uaaaugcccugcu

SEQ ID NO: 1430038 - RNA, 12 nt, Human
uaaaugcccugc

SEQ ID NO: 1430039 - RNA, 22 nt, Human
uaaauggccucauguggcugga

SEQ ID NO: 1430040 - RNA, 16 nt, Human
uaaauggccucaugug

SEQ ID NO: 1430041 - RNA, 12 nt, Human
uaaauggccuca

SEQ ID NO: 1430042 - RNA, 16 nt, Human
uaaauggaaccacucu

SEQ ID NO: 1430043 - RNA, 18 nt, Human
uaaaguuguuugugccuu

SEQ ID NO: 1430044 - RNA, 22 nt, Human
uaaaguucuaagauucugauuu

SEQ ID NO: 1430045 - RNA, 19 nt, Human
uaaaguucuaagauucuga

SEQ ID NO: 1430046 - RNA, 18 nt, Human
uaaaguucuaagauucug

SEQ ID NO: 1430047 - RNA, 17 nt, Human
uaaaguucuaagauucu

SEQ ID NO: 1430048 - RNA, 16 nt, Human
uaaaguucuaagauuc

SEQ ID NO: 1430049 - RNA, 15 nt, Human
uaaaguucuaagauu

SEQ ID NO: 1430050 - RNA, 14 nt, Human
uaaaguucuaagau

SEQ ID NO: 1430051 - RNA, 13 nt, Human
uaaaguucuaaga

SEQ ID NO: 1430052 - RNA, 16 nt, Human
uaaaguugguaaaccu

SEQ ID NO: 1430053 - RNA, 20 nt, Human
uaaaguugauaaagauuuuu

SEQ ID NO: 1430054 - RNA, 16 nt, Human
uaaaguugauaaagau

SEQ ID NO: 1430055 - RNA, 23 nt, Human
uaaaguucuguacucaaauguag

SEQ ID NO: 1430056 - RNA, 17 nt, Human
uaaaguugguaaaccuu

SEQ ID NO: 1430057 - RNA, 17 nt, Human
uaaauggggcucacaaa

SEQ ID NO: 1430058 - RNA, 18 nt, Human
uaaaugggggugcauuug

SEQ ID NO: 1430059 - RNA, 19 nt, Human
uaaaugggggugcauuuga

SEQ ID NO: 1430060 - RNA, 13 nt, Human
uaaauggcuguaa

SEQ ID NO: 1430061 - RNA, 23 nt, Human
uaaauggccucauguggcuggaa

SEQ ID NO: 1430062 - RNA, 20 nt, Human
uaaauggcuuccuggcaaua

SEQ ID NO: 1430063 - RNA, 14 nt, Human
uaaaugggggugca

SEQ ID NO: 1430064 - RNA, 17 nt, Human
uaaaugggggugcauuu

SEQ ID NO: 1430065 - RNA, 23 nt, Human
uaaaugucacuuuuugaggcaaa

SEQ ID NO: 1430066 - RNA, 22 nt, Human
uaaaugucacuuuuugaggcaa

SEQ ID NO: 1430067 - RNA, 21 nt, Human
uaaaugucacuuuuugaggca

SEQ ID NO: 1430068 - RNA, 17 nt, Human
uaaaugucacuuuuuga

SEQ ID NO: 1430069 - RNA, 15 nt, Human
uaaauguauacuaua

SEQ ID NO: 1430070 - RNA, 17 nt, Human
uaaauguauacuauagu

SEQ ID NO: 1430071 - RNA, 20 nt, Human
uaaauguauacuauaguacc

SEQ ID NO: 1430072 - RNA, 17 nt, Human
uaaauguaaagauauuu

SEQ ID NO: 1430073 - RNA, 16 nt, Human
uaaauguaaagauauu

SEQ ID NO: 1430074 - RNA, 13 nt, Human
uaaauguaaagau

SEQ ID NO: 1430075 - RNA, 17 nt, Human
uaaauguaaagacaaaa

SEQ ID NO: 1430076 - RNA, 18 nt, Human
uaaauguagaguuuuuaa

SEQ ID NO: 1430077 - RNA, 17 nt, Human
uaaauguagaguuuuua

SEQ ID NO: 1430078 - RNA, 21 nt, Human
uaaauguaguucugcuccaga

SEQ ID NO: 1430079 - RNA, 12 nt, Human
uaaauguauacu

SEQ ID NO: 1430080 - RNA, 13 nt, Human
uaaauguauacua

SEQ ID NO: 1430081 - RNA, 18 nt, Human
uaaauucacaaacuuuua

SEQ ID NO: 1430082 - RNA, 16 nt, Human
uaaauucacaaacuuu

SEQ ID NO: 1430083 - RNA, 22 nt, Human
uaaaugugcaauagaaggugau

SEQ ID NO: 1430084 - RNA, 19 nt, Human
uaaaugugcaauagaaggu

SEQ ID NO: 1430085 - RNA, 19 nt, Human
uaaaugugauucaccucuu

SEQ ID NO: 1430086 - RNA, 19 nt, Human
uaaaugugaugaauacugu

SEQ ID NO: 1430087 - RNA, 19 nt, Human
uaaaugucuuuaaugcaau

SEQ ID NO: 1430088 - RNA, 18 nt, Human
uaaaugucuuuaaugcaa

SEQ ID NO: 1430089 - RNA, 20 nt, Human
uaaaugucuuuaaugcaaua

SEQ ID NO: 1430090 - RNA, 19 nt, Human
uaaauucccguuuugucac

SEQ ID NO: 1430091 - RNA, 18 nt, Human
uaaauucccguuuuguca

SEQ ID NO: 1430092 - RNA, 22 nt, Human
uaaauucucucucuugcaggaa

SEQ ID NO: 1430093 - RNA, 16 nt, Human
uaaauucuugcaaagu

SEQ ID NO: 1430094 - RNA, 17 nt, Human
uaaauucuugcaaagua

SEQ ID NO: 1430095 - RNA, 18 nt, Human
uaaauucuugcaaaguau

SEQ ID NO: 1430096 - RNA, 22 nt, Human
uaaauucuugcaaaguaucccu

SEQ ID NO: 1430097 - RNA, 21 nt, Human
uaacacucagaagccuggggg

SEQ ID NO: 1430098 - RNA, 20 nt, Human
uaacacucagaagccugggg

SEQ ID NO: 1430099 - RNA, 19 nt, Human
uaacacucagaagccuggg

SEQ ID NO: 1430100 - RNA, 18 nt, Human
uaacacucagaagccugg

SEQ ID NO: 1430101 - RNA, 14 nt, Human
uaacacucagaagc

SEQ ID NO: 1430102 - RNA, 23 nt, Human
uaacacuaauauauuuaaaaaua

SEQ ID NO: 1430103 - RNA, 22 nt, Human
uaacacuaauauauuuaaaaau

SEQ ID NO: 1430104 - RNA, 20 nt, Human
uaacacuaauauauuuaaaa

SEQ ID NO: 1430105 - RNA, 16 nt, Human
uaacacuaauauauuu

SEQ ID NO: 1430106 - RNA, 13 nt, Human
uaacacuaauaua

SEQ ID NO: 1430107 - RNA, 18 nt, Human
uaaauuugacuuuucugu

SEQ ID NO: 1430108 - RNA, 19 nt, Human
uaaauuugacuuuucugua

SEQ ID NO: 1430109 - RNA, 17 nt, Human
uaaauuugacuuuucug

SEQ ID NO: 1430110 - RNA, 20 nt, Human
uaaauuucuauuuuuaucug

SEQ ID NO: 1430111 - RNA, 15 nt, Human
uaaauuuauuuucuu

SEQ ID NO: 1430112 - RNA, 13 nt, Human
uaaauucuuucau

SEQ ID NO: 1430113 - RNA, 22 nt, Human
uaauguuucaaacauauauaac

SEQ ID NO: 1430114 - RNA, 18 nt, Human
uaauguuguuauuuaaag

SEQ ID NO: 1430115 - RNA, 14 nt, Human
uaauguuguuauuu

SEQ ID NO: 1430116 - RNA, 21 nt, Human
uaauguuggacaccuuuaggu

SEQ ID NO: 1430117 - RNA, 21 nt, Human
uaauguuggguagaaagagau

SEQ ID NO: 1430118 - RNA, 23 nt, Human
uaaugguacugacuuugcuugcu

SEQ ID NO: 1430119 - RNA, 19 nt, Human
uaaugguacugacuuugcu

SEQ ID NO: 1430120 - RNA, 22 nt, Human
uaauggcugauaauuuuaaauu

SEQ ID NO: 1430121 - RNA, 15 nt, Human
uaaugggauuuucuu

SEQ ID NO: 1430122 - RNA, 22 nt, Human
uaauguuucuggauuucauacu

SEQ ID NO: 1430123 - RNA, 23 nt, Human
uaauguuuuuugccacagcuuuu

SEQ ID NO: 1430124 - RNA, 21 nt, Human
uaauguuuuuugccacagcuu

SEQ ID NO: 1430125 - RNA, 22 nt, Human
uaauguuuuuugccacagcuuu

SEQ ID NO: 1430126 - RNA, 15 nt, Human
uaaugcuuugaaauu

SEQ ID NO: 1430127 - RNA, 15 nt, Human
uaauggcaugagaaa

SEQ ID NO: 1430128 - RNA, 21 nt, Human
uaauggcaguuauauuuugca

SEQ ID NO: 1430129 - RNA, 15 nt, Human
uaauggcaguuauau

SEQ ID NO: 1430130 - RNA, 21 nt, Human
uaauggcugauaauuuuaaau

SEQ ID NO: 1430131 - RNA, 17 nt, Human
uaauggcaugagaaaua

SEQ ID NO: 1430132 - RNA, 23 nt, Human
uaaugauaacuggaaacuucagc

SEQ ID NO: 1430133 - RNA, 15 nt, Human
uaaugcgugcauacc

SEQ ID NO: 1430134 - RNA, 22 nt, Human
uaaugauaacuggaaacuucag

SEQ ID NO: 1430135 - RNA, 17 nt, Human
uaaugauaacuggaaac

SEQ ID NO: 1430136 - RNA, 19 nt, Human
uaaugcgugcauaccacuu

SEQ ID NO: 1430137 - RNA, 22 nt, Human
uaaugcgugcauaccacuuuug

SEQ ID NO: 1430138 - RNA, 23 nt, Human
uaaugcgugcauaccacuuuugu

SEQ ID NO: 1430139 - RNA, 15 nt, Human
uaaucugccucccuc

SEQ ID NO: 1430140 - RNA, 22 nt, Human
uaaucuagauaucgacuuguuu

SEQ ID NO: 1430141 - RNA, 17 nt, Human
uaaucuagauaucgacu

SEQ ID NO: 1430142 - RNA, 22 nt, Human
uaaucuagaacacaggcaaaau

SEQ ID NO: 1430143 - RNA, 14 nt, Human
uaaucuagaacaca

SEQ ID NO: 1430144 - RNA, 18 nt, Human
uaauccgccaauauuagu

SEQ ID NO: 1430145 - RNA, 13 nt, Human
uaaucugccuccc

SEQ ID NO: 1430146 - RNA, 16 nt, Human
uaauccgccaauauua

SEQ ID NO: 1430147 - RNA, 21 nt, Human
uaauccgaaucucuuuuugcu

SEQ ID NO: 1430148 - RNA, 19 nt, Human
uaauccgaaucucuuuuug

SEQ ID NO: 1430149 - RNA, 21 nt, Human
uaaucccugcuuuuuguguuu

SEQ ID NO: 1430150 - RNA, 17 nt, Human
uaaucccugcuuuuugu

SEQ ID NO: 1430151 - RNA, 14 nt, Human
uaaucccugcuuuu

SEQ ID NO: 1430152 - RNA, 13 nt, Human
uaaucccugcuuu

SEQ ID NO: 1430153 - RNA, 21 nt, Human
uaauccccuucuccccugcac

SEQ ID NO: 1430154 - RNA, 17 nt, Human
uaaucccgauucacccu

SEQ ID NO: 1430155 - RNA, 13 nt, Human
uaaucuaaaugga

SEQ ID NO: 1430156 - RNA, 18 nt, Human
uaauccccuucuccccug

SEQ ID NO: 1430157 - RNA, 17 nt, Human
uaauccccuucuccccu

SEQ ID NO: 1430158 - RNA, 15 nt, Human
uaauccccuucuccc

SEQ ID NO: 1430159 - RNA, 14 nt, Human
uaauccccuucucc

SEQ ID NO: 1430160 - RNA, 18 nt, Human
uaauaugcuuaaaauaag

SEQ ID NO: 1430161 - RNA, 19 nt, Human
uaauaugcacacauuuuuu

SEQ ID NO: 1430162 - RNA, 22 nt, Human
uaauauggccacaguagucuug

SEQ ID NO: 1430163 - RNA, 15 nt, Human
uaauaugcacacauu

SEQ ID NO: 1430164 - RNA, 16 nt, Human
uaauaugcacacauuu

SEQ ID NO: 1430165 - RNA, 17 nt, Human
uaauaugcacacauuuu

SEQ ID NO: 1430166 - RNA, 18 nt, Human
uaauaugcacacauuuuu

SEQ ID NO: 1430167 - RNA, 15 nt, Human
uaauauccuaaacau

SEQ ID NO: 1430168 - RNA, 17 nt, Human
uaauauccuaaacauca

SEQ ID NO: 1430169 - RNA, 14 nt, Human
uaauauccuaaaca

SEQ ID NO: 1430170 - RNA, 12 nt, Human
uaauauccuaaa

SEQ ID NO: 1430171 - RNA, 18 nt, Human
uaauaucccuacauguau

SEQ ID NO: 1430172 - RNA, 17 nt, Human
uaauaucccuacaugua

SEQ ID NO: 1430173 - RNA, 23 nt, Human
uaauaucccacugggagaaagga

SEQ ID NO: 1430174 - RNA, 14 nt, Human
uaauaauguuucaa

SEQ ID NO: 1430175 - RNA, 21 nt, Human
uaaguauuuuccuguugucaa

SEQ ID NO: 1430176 - RNA, 20 nt, Human
uaaguauuuuccuguuguca

SEQ ID NO: 1430177 - RNA, 17 nt, Human
uaagucaaccugccuga

SEQ ID NO: 1430178 - RNA, 15 nt, Human
uaagucaaccugccu

SEQ ID NO: 1430179 - RNA, 16 nt, Human
uaagucaacaguaaac

SEQ ID NO: 1430180 - RNA, 15 nt, Human
uaagucaacaguaaa

SEQ ID NO: 1430181 - RNA, 14 nt, Human
uaagucaacaguaa

SEQ ID NO: 1430182 - RNA, 14 nt, Human
uaagucagaacagc

SEQ ID NO: 1430183 - RNA, 17 nt, Human
uaagucaacaguaaacc

SEQ ID NO: 1430184 - RNA, 21 nt, Human
uaagguguagccacaccagga

SEQ ID NO: 1430185 - RNA, 19 nt, Human
uaagguguagccacaccag

SEQ ID NO: 1430186 - RNA, 13 nt, Human
uaagguguagcca

SEQ ID NO: 1430187 - RNA, 21 nt, Human
uaaggugcucucuuucugucu

SEQ ID NO: 1430188 - RNA, 21 nt, Human
uaagguccgguguucuaagau

SEQ ID NO: 1430189 - RNA, 20 nt, Human
uaagguccgguguucuaaga

SEQ ID NO: 1430190 - RNA, 18 nt, Human
uaagguccgguguucuaa

SEQ ID NO: 1430191 - RNA, 17 nt, Human
uaagguccgguguucua

SEQ ID NO: 1430192 - RNA, 19 nt, Human
uaagguacaagaagcauuu

SEQ ID NO: 1430193 - RNA, 18 nt, Human
uaagguacaagaagcauu

SEQ ID NO: 1430194 - RNA, 17 nt, Human
uaagggucgaaagcucu

SEQ ID NO: 1430195 - RNA, 13 nt, Human
uaagggguggggc

SEQ ID NO: 1430196 - RNA, 13 nt, Human
uaagggaagaauu

SEQ ID NO: 1430197 - RNA, 16 nt, Human
uaagggcccaggucag

SEQ ID NO: 1430198 - RNA, 14 nt, Human
uaagggcacugacg

SEQ ID NO: 1430199 - RNA, 19 nt, Human
uaagggccagaaauaucuu

SEQ ID NO: 1430200 - RNA, 19 nt, Human
uaaggggaggaaccagagu

SEQ ID NO: 1430201 - RNA, 16 nt, Human
uaagccuaaaaguggg

SEQ ID NO: 1430202 - RNA, 22 nt, Human
uaagcgcuagaggaagcagcca

SEQ ID NO: 1430203 - RNA, 18 nt, Human
uaagcccagugcacugaa

SEQ ID NO: 1430204 - RNA, 16 nt, Human
uaagccccagcaagca

SEQ ID NO: 1430205 - RNA, 17 nt, Human
uaagccccagcaagcaa

SEQ ID NO: 1430206 - RNA, 22 nt, Human
uaagccccagcaagcaauccua

SEQ ID NO: 1430207 - RNA, 15 nt, Human
uaagccaugggagac

SEQ ID NO: 1430208 - RNA, 22 nt, Human
uaaggcuguguaagauuuguuu

SEQ ID NO: 1430209 - RNA, 16 nt, Human
uaaggcuguguaagau

SEQ ID NO: 1430210 - RNA, 13 nt, Human
uaaggcuguguaa

SEQ ID NO: 1430211 - RNA, 24 nt, Human
uaaggcucugagagucuagauucu

SEQ ID NO: 1430212 - RNA, 22 nt, Human
uaaggcucugagagucuagauu

SEQ ID NO: 1430213 - RNA, 19 nt, Human
uaaggcucugagagucuag

SEQ ID NO: 1430214 - RNA, 20 nt, Human
uaaggcaacaaaagaagccc

SEQ ID NO: 1430215 - RNA, 15 nt, Human
uaaggcucugagagu

SEQ ID NO: 1430216 - RNA, 14 nt, Human
uaaggcucugagag

SEQ ID NO: 1430217 - RNA, 22 nt, Human
uaaggcucuaugagucuagaug

SEQ ID NO: 1430218 - RNA, 19 nt, Human
uaaggcucuaugagucuag

SEQ ID NO: 1430219 - RNA, 14 nt, Human
uaaggcaaucaugg

SEQ ID NO: 1430220 - RNA, 18 nt, Human
uaaguguacauaugugcu

SEQ ID NO: 1430221 - RNA, 14 nt, Human
uaaguguacauaug

SEQ ID NO: 1430222 - RNA, 12 nt, Human
uaagugugaacu

SEQ ID NO: 1430223 - RNA, 14 nt, Human
uaagugugaacugg

SEQ ID NO: 1430224 - RNA, 15 nt, Human
uaagugugaacugga

SEQ ID NO: 1430225 - RNA, 14 nt, Human
uaagugcuguauaa

SEQ ID NO: 1430226 - RNA, 12 nt, Human
uaagugcuguau

SEQ ID NO: 1430227 - RNA, 15 nt, Human
uaagugcugcauuua

SEQ ID NO: 1430228 - RNA, 16 nt, Human
uaagugcugcauuuaa

SEQ ID NO: 1430229 - RNA, 18 nt, Human
uaagugcugcauuuaaaa

SEQ ID NO: 1430230 - RNA, 22 nt, Human
uaagugcugcauuuaaaagaua

SEQ ID NO: 1430231 - RNA, 12 nt, Human
uaauaaagcugu

SEQ ID NO: 1430232 - RNA, 12 nt, Human
uaauaaaggacu

SEQ ID NO: 1430233 - RNA, 13 nt, Human
uaauaaaggacug

SEQ ID NO: 1430234 - RNA, 22 nt, Human
uaagugugaacuggacccuguu

SEQ ID NO: 1430235 - RNA, 16 nt, Human
uaauaaaggacuguaa

SEQ ID NO: 1430236 - RNA, 20 nt, Human
uaauaaaggacuguaaucuu

SEQ ID NO: 1430237 - RNA, 21 nt, Human
uaagugcccucucccacccuc

SEQ ID NO: 1430238 - RNA, 15 nt, Human
uaagugcccucuccc

SEQ ID NO: 1430239 - RNA, 14 nt, Human
uaagugcccucucc

SEQ ID NO: 1430240 - RNA, 16 nt, Human
uaagugcccucuccca

SEQ ID NO: 1430241 - RNA, 14 nt, Human
uaagugcugcauuu

SEQ ID NO: 1430242 - RNA, 18 nt, Human
uaagugaacacccaugaa

SEQ ID NO: 1430243 - RNA, 22 nt, Human
uaagugauugcugguuuuaguu

SEQ ID NO: 1430244 - RNA, 15 nt, Human
uaagugaaaauauag

SEQ ID NO: 1430245 - RNA, 22 nt, Human
uaaguccaguccaguccuaucu

SEQ ID NO: 1430246 - RNA, 14 nt, Human
uaaguccaguccag

SEQ ID NO: 1430247 - RNA, 13 nt, Human
uaagucagaacag

SEQ ID NO: 1430248 - RNA, 12 nt, Human
uaaguccagugu

SEQ ID NO: 1430249 - RNA, 13 nt, Human
uacuaauuccaca

SEQ ID NO: 1430250 - RNA, 16 nt, Human
uacuaaugaaaacaga

SEQ ID NO: 1430251 - RNA, 13 nt, Human
uacuaaugaaaac

SEQ ID NO: 1430252 - RNA, 16 nt, Human
uacuaauuccacaccu

SEQ ID NO: 1430253 - RNA, 13 nt, Human
uacuacaguuugu

SEQ ID NO: 1430254 - RNA, 14 nt, Human
uacuacaguuuguu

SEQ ID NO: 1430255 - RNA, 20 nt, Human
uacuacaguuuguuaguaug

SEQ ID NO: 1430256 - RNA, 20 nt, Human
uacucccaggcacugucuua

SEQ ID NO: 1430257 - RNA, 17 nt, Human
uacuccacacugcacaa

SEQ ID NO: 1430258 - RNA, 16 nt, Human
uacucauuuuucauga

SEQ ID NO: 1430259 - RNA, 14 nt, Human
uacucauuuuucau

SEQ ID NO: 1430260 - RNA, 11 nt, Human
uacucauuuuu

SEQ ID NO: 1430261 - RNA, 14 nt, Human
uacuccacacugca

SEQ ID NO: 1430262 - RNA, 13 nt, Human
uacuccacacugc

SEQ ID NO: 1430263 - RNA, 14 nt, Human
uacucccucucagg

SEQ ID NO: 1430264 - RNA, 13 nt, Human
uacucccaggcac

SEQ ID NO: 1430265 - RNA, 19 nt, Human
uacuccuaugaucugaguc

SEQ ID NO: 1430266 - RNA, 17 nt, Human
uacugcagccuccagag

SEQ ID NO: 1430267 - RNA, 12 nt, Human
uacugcagccuc

SEQ ID NO: 1430268 - RNA, 21 nt, Human
uacugcaagguucaacuuauu

SEQ ID NO: 1430269 - RNA, 22 nt, Human
uacugcaaaucaggcuuuuguu

SEQ ID NO: 1430270 - RNA, 13 nt, Human
uacugcaugcacu

SEQ ID NO: 1430271 - RNA, 23 nt, Human
uacugcaaaucaggcuuuuguuu

SEQ ID NO: 1430272 - RNA, 21 nt, Human
uacugcaaaucaggcuuuugu

SEQ ID NO: 1430273 - RNA, 14 nt, Human
uacugcaaaucagg

SEQ ID NO: 1430274 - RNA, 16 nt, Human
uacugcaaaaagaaaa

SEQ ID NO: 1430275 - RNA, 22 nt, Human
uacucuaagaucuuagauucuc

SEQ ID NO: 1430276 - RNA, 21 nt, Human
uacucuaagaucuuagauucu

SEQ ID NO: 1430277 - RNA, 20 nt, Human
uacucuaagaucuuagauuc

SEQ ID NO: 1430278 - RNA, 18 nt, Human
uacucuaagaucuuagau

SEQ ID NO: 1430279 - RNA, 15 nt, Human
uacucuaagaucuua

SEQ ID NO: 1430280 - RNA, 13 nt, Human
uacucuaagaucu

SEQ ID NO: 1430281 - RNA, 17 nt, Human
uacuccuaugaucugag

SEQ ID NO: 1430282 - RNA, 22 nt, Human
uacugccgucagugcugugcug

SEQ ID NO: 1430283 - RNA, 20 nt, Human
uacugccauucacuucauaa

SEQ ID NO: 1430284 - RNA, 14 nt, Human
uacugccuauuuua

SEQ ID NO: 1430285 - RNA, 16 nt, Human
uacugccugcuugggg

SEQ ID NO: 1430286 - RNA, 14 nt, Human
uacugccugcuugg

SEQ ID NO: 1430287 - RNA, 12 nt, Human
uacugccugcuu

SEQ ID NO: 1430288 - RNA, 11 nt, Human
uacugccugcu

SEQ ID NO: 1430289 - RNA, 10 nt, Human
uacugccugc

SEQ ID NO: 1430290 - RNA, 21 nt, Human
uacugccuauuuuaauaaaca

SEQ ID NO: 1430291 - RNA, 17 nt, Human
uacuugaagggccagag

SEQ ID NO: 1430292 - RNA, 16 nt, Human
uacuugaagggccaga

SEQ ID NO: 1430293 - RNA, 15 nt, Human
uacuugaagggccag

SEQ ID NO: 1430294 - RNA, 14 nt, Human
uacuugaagggcca

SEQ ID NO: 1430295 - RNA, 12 nt, Human
uacuugaagggc

SEQ ID NO: 1430296 - RNA, 11 nt, Human
uacuugaaggg

SEQ ID NO: 1430297 - RNA, 24 nt, Human
uacuugaacguuuucuaauugcuu

SEQ ID NO: 1430298 - RNA, 23 nt, Human
uacuugaacguuuucuaauugcu

SEQ ID NO: 1430299 - RNA, 21 nt, Human
uacuugaacguuuucuaauug

SEQ ID NO: 1430300 - RNA, 20 nt, Human
uacuugaacguuuucuaauu

SEQ ID NO: 1430301 - RNA, 19 nt, Human
uacuugaacguuuucuaau

SEQ ID NO: 1430302 - RNA, 18 nt, Human
uacuugaacguuuucuaa

SEQ ID NO: 1430303 - RNA, 16 nt, Human
uacuugaacguuuucu

SEQ ID NO: 1430304 - RNA, 19 nt, Human
uacuguuuauuaaaguaca

SEQ ID NO: 1430305 - RNA, 14 nt, Human
uacuuguaauuaug

SEQ ID NO: 1430306 - RNA, 15 nt, Human
uacuuguaauuaugg

SEQ ID NO: 1430307 - RNA, 13 nt, Human
uacuuguaauuau

SEQ ID NO: 1430308 - RNA, 12 nt, Human
uacuuguaauua

SEQ ID NO: 1430309 - RNA, 20 nt, Human
uacuuguaaauauaaagacg

SEQ ID NO: 1430310 - RNA, 19 nt, Human
uacuuguaaauauaaagac

SEQ ID NO: 1430311 - RNA, 20 nt, Human
uacuugaagggccagagcca

SEQ ID NO: 1430312 - RNA, 19 nt, Human
uacuugaagggccagagcc

SEQ ID NO: 1430313 - RNA, 18 nt, Human
uacuugaagggccagagc

SEQ ID NO: 1430314 - RNA, 20 nt, Human
uacuugcucuugaugccugg

SEQ ID NO: 1430315 - RNA, 13 nt, Human
uacuugcucuuga

SEQ ID NO: 1430316 - RNA, 14 nt, Human
uacuugcucuugau

SEQ ID NO: 1430317 - RNA, 18 nt, Human
uacuugcucuugaugccu

SEQ ID NO: 1430318 - RNA, 19 nt, Human
uacuugcucuugaugccug

SEQ ID NO: 1430319 - RNA, 22 nt, Human
uacuguguuaugcaaaagcaag

SEQ ID NO: 1430320 - RNA, 17 nt, Human
uacuguguuaugcaaaa

SEQ ID NO: 1430321 - RNA, 16 nt, Human
uacuguguuaugcaaa

SEQ ID NO: 1430322 - RNA, 15 nt, Human
uacuguguuaugcaa

SEQ ID NO: 1430323 - RNA, 23 nt, Human
uacugugugugugaaugaacacu

SEQ ID NO: 1430324 - RNA, 22 nt, Human
uacugugugugugaaugaacac

SEQ ID NO: 1430325 - RNA, 23 nt, Human
uacugucauccucaaagaaagug

SEQ ID NO: 1430326 - RNA, 18 nt, Human
uacuggaaauuaggggau

SEQ ID NO: 1430327 - RNA, 14 nt, Human
uacuggaaagcuuu

SEQ ID NO: 1430328 - RNA, 19 nt, Human
uacugcuuggagcugagca

SEQ ID NO: 1430329 - RNA, 24 nt, Human
uacugcuuggagcugagcaaauca

SEQ ID NO: 1430330 - RNA, 21 nt, Human
uacugcugagauacauacaga

SEQ ID NO: 1430331 - RNA, 20 nt, Human
uacugcugagauacauacag

SEQ ID NO: 1430332 - RNA, 13 nt, Human
uacugcuuaauuc

SEQ ID NO: 1430333 - RNA, 19 nt, Human
uacugcuuaauucaaauaa

SEQ ID NO: 1430334 - RNA, 20 nt, Human
uacugcuuaauucaaauaau

SEQ ID NO: 1430335 - RNA, 22 nt, Human
uacugcgacuuucugccuggag

SEQ ID NO: 1430336 - RNA, 21 nt, Human
uacugcgacuuucugccugga

SEQ ID NO: 1430337 - RNA, 20 nt, Human
uacugcgacuuucugccugg

SEQ ID NO: 1430338 - RNA, 19 nt, Human
uacugcgacuuucugccug

SEQ ID NO: 1430339 - RNA, 18 nt, Human
uacugcgacuuucugccu

SEQ ID NO: 1430340 - RNA, 17 nt, Human
uacugcgacuuucugcc

SEQ ID NO: 1430341 - RNA, 16 nt, Human
uacugcgacuuucugc

SEQ ID NO: 1430342 - RNA, 12 nt, Human
uacugcgacuuu

SEQ ID NO: 1430343 - RNA, 20 nt, Human
uacugcuacagcaauuucua

SEQ ID NO: 1430344 - RNA, 14 nt, Human
uacugcucugagaa

SEQ ID NO: 1430345 - RNA, 13 nt, Human
uacugcucugaga

SEQ ID NO: 1430346 - RNA, 12 nt, Human
uacugcucugag

SEQ ID NO: 1430347 - RNA, 15 nt, Human
uacugcucuccucca

SEQ ID NO: 1430348 - RNA, 17 nt, Human
uaccuuauaguuacugu

SEQ ID NO: 1430349 - RNA, 16 nt, Human
uaccuuauaguuacug

SEQ ID NO: 1430350 - RNA, 18 nt, Human
uaccuuauaguuacugug

SEQ ID NO: 1430351 - RNA, 21 nt, Human
uaccuuuugaggagccccagc

SEQ ID NO: 1430352 - RNA, 13 nt, Human
uaccuuuuuuaga

SEQ ID NO: 1430353 - RNA, 19 nt, Human
uaccuuuuuuagaguugau

SEQ ID NO: 1430354 - RNA, 22 nt, Human
uaccuuuuuuagaguugauacu

SEQ ID NO: 1430355 - RNA, 14 nt, Human
uaccuccugagaaa

SEQ ID NO: 1430356 - RNA, 13 nt, Human
uaccuccugagaa

SEQ ID NO: 1430357 - RNA, 16 nt, Human
uaccucuauauaccaa

SEQ ID NO: 1430358 - RNA, 15 nt, Human
uaccucuauauacca

SEQ ID NO: 1430359 - RNA, 23 nt, Human
uaccucuccagccucagcucuca

SEQ ID NO: 1430360 - RNA, 21 nt, Human
uaccucuugagccuugaacuu

SEQ ID NO: 1430361 - RNA, 20 nt, Human
uaccuuuuuauuugcaugug

SEQ ID NO: 1430362 - RNA, 17 nt, Human
uaccuuuuuuauacaua

SEQ ID NO: 1430363 - RNA, 13 nt, Human
uaccuuuuuuaua

SEQ ID NO: 1430364 - RNA, 16 nt, Human
uaccuuuuuuauacau

SEQ ID NO: 1430365 - RNA, 20 nt, Human
uacgaaauaauuguuguucu

SEQ ID NO: 1430366 - RNA, 22 nt, Human
uacgaaauaauuguuguucugu

SEQ ID NO: 1430367 - RNA, 17 nt, Human
uacgaaauaauuguugu

SEQ ID NO: 1430368 - RNA, 16 nt, Human
uacgaaauaauuguug

SEQ ID NO: 1430369 - RNA, 16 nt, Human
uacuaaggacguuguu

SEQ ID NO: 1430370 - RNA, 19 nt, Human
uacuaaggaagauuacuca

SEQ ID NO: 1430371 - RNA, 20 nt, Human
uacuaagcauugaauggcua

SEQ ID NO: 1430372 - RNA, 21 nt, Human
uacuaauagacaauuuauuau

SEQ ID NO: 1430373 - RNA, 14 nt, Human
uacuaaagccaaac

SEQ ID NO: 1430374 - RNA, 17 nt, Human
uacuaaccagcagaaau

SEQ ID NO: 1430375 - RNA, 23 nt, Human
uacuaacaaucagcuccuuccug

SEQ ID NO: 1430376 - RNA, 18 nt, Human
uacuaaagccaaacauau

SEQ ID NO: 1430377 - RNA, 22 nt, Human
uacgaaccuacaguuuuaacug

SEQ ID NO: 1430378 - RNA, 17 nt, Human
uaccucagccugggcgc

SEQ ID NO: 1430379 - RNA, 18 nt, Human
uaccucaggcagcucaag

SEQ ID NO: 1430380 - RNA, 17 nt, Human
uaccucaggcagcucaa

SEQ ID NO: 1430381 - RNA, 16 nt, Human
uaccucaggcagcuca

SEQ ID NO: 1430382 - RNA, 14 nt, Human
uaccucaggcagcu

SEQ ID NO: 1430383 - RNA, 21 nt, Human
uaccucagccugggcgcuggu

SEQ ID NO: 1430384 - RNA, 15 nt, Human
uaccucagccugggc

SEQ ID NO: 1430385 - RNA, 14 nt, Human
uaccucagccuggg

SEQ ID NO: 1430386 - RNA, 21 nt, Human
uaccuaucccaccuccauccc

SEQ ID NO: 1430387 - RNA, 13 nt, Human
uaccucagccugg

SEQ ID NO: 1430388 - RNA, 11 nt, Human
uaccucagccu

SEQ ID NO: 1430389 - RNA, 22 nt, Human
uaccuagcgggauggggcuccc

SEQ ID NO: 1430390 - RNA, 18 nt, Human
uaccuagauuuaauauaa

SEQ ID NO: 1430391 - RNA, 21 nt, Human
uaccuacuuugacuuuuugca

SEQ ID NO: 1430392 - RNA, 14 nt, Human
uaccuacuuugacu

SEQ ID NO: 1430393 - RNA, 13 nt, Human
uaccuacuuugac

SEQ ID NO: 1430394 - RNA, 17 nt, Human
uaccuaagaaguacauu

SEQ ID NO: 1430395 - RNA, 22 nt, Human
uaccuaagauuacaaaucagaa

SEQ ID NO: 1430396 - RNA, 20 nt, Human
uaccuaagauuacaaaucag

SEQ ID NO: 1430397 - RNA, 17 nt, Human
uaccuaagauuacaaau

SEQ ID NO: 1430398 - RNA, 16 nt, Human
uaccgaaugugucuuu

SEQ ID NO: 1430399 - RNA, 17 nt, Human
uaccgaaugugucuuua

SEQ ID NO: 1430400 - RNA, 15 nt, Human
uaccgaaugugucuu

SEQ ID NO: 1430401 - RNA, 14 nt, Human
uaccgaaugugucu

SEQ ID NO: 1430402 - RNA, 20 nt, Human
uaccgaguucaagugauuuu

SEQ ID NO: 1430403 - RNA, 19 nt, Human
uaccgcgucuacccuggga

SEQ ID NO: 1430404 - RNA, 20 nt, Human
uaccguaggcuuuguauuca

SEQ ID NO: 1430405 - RNA, 15 nt, Human
uaccaaaaauaaaua

SEQ ID NO: 1430406 - RNA, 20 nt, Human
uacauuuuuugggcagcaau

SEQ ID NO: 1430407 - RNA, 23 nt, Human
uacauuuuuaagugcugcauuua

SEQ ID NO: 1430408 - RNA, 22 nt, Human
uaccaaaaaucucaauauuuca

SEQ ID NO: 1430409 - RNA, 14 nt, Human
uacaaagguuuaaa

SEQ ID NO: 1430410 - RNA, 18 nt, Human
uacaaaggcuuauuaauu

SEQ ID NO: 1430411 - RNA, 17 nt, Human
uacaaagcccuuuuaua

SEQ ID NO: 1430412 - RNA, 15 nt, Human
uacaaacugaagagu

SEQ ID NO: 1430413 - RNA, 19 nt, Human
uacaaacucccacuuguca

SEQ ID NO: 1430414 - RNA, 19 nt, Human
uacaaacugaagaguaauc

SEQ ID NO: 1430415 - RNA, 18 nt, Human
uacaaagguuuaaaugaa

SEQ ID NO: 1430416 - RNA, 17 nt, Human
uacaaagguuuaaauga

SEQ ID NO: 1430417 - RNA, 16 nt, Human
uacaaagguuuaaaug

SEQ ID NO: 1430418 - RNA, 15 nt, Human
uacaaagguuuaaau

SEQ ID NO: 1430419 - RNA, 12 nt, Human
uacaaaugaaaa

SEQ ID NO: 1430420 - RNA, 22 nt, Human
uacaaaucagaagucaucuugc

SEQ ID NO: 1430421 - RNA, 21 nt, Human
uacaaaucagaagucaucuug

SEQ ID NO: 1430422 - RNA, 20 nt, Human
uacaaaucagaagucaucuu

SEQ ID NO: 1430423 - RNA, 19 nt, Human
uacaaaucagaagucaucu

SEQ ID NO: 1430424 - RNA, 17 nt, Human
uacaaaucagaagucau

SEQ ID NO: 1430425 - RNA, 16 nt, Human
uacaaaucagaaguca

SEQ ID NO: 1430426 - RNA, 16 nt, Human
uacaaaucaaguauuu

SEQ ID NO: 1430427 - RNA, 20 nt, Human
uacaaagguuuaaaugaaca

SEQ ID NO: 1430428 - RNA, 19 nt, Human
uacaaagguuuaaaugaac

SEQ ID NO: 1430429 - RNA, 22 nt, Human
uaauuuuuacagaauugcuugu

SEQ ID NO: 1430430 - RNA, 17 nt, Human
uaauuuuuauauuugaa

SEQ ID NO: 1430431 - RNA, 16 nt, Human
uaauuuuuauauuuga

SEQ ID NO: 1430432 - RNA, 17 nt, Human
uaauuuuuacagaauug

SEQ ID NO: 1430433 - RNA, 16 nt, Human
uaauuuuuacagaauu

SEQ ID NO: 1430434 - RNA, 12 nt, Human
uaauuuuuauau

SEQ ID NO: 1430435 - RNA, 20 nt, Human
uaauuuuguguaagaaauac

SEQ ID NO: 1430436 - RNA, 19 nt, Human
uaauuuuguguaagaaaua

SEQ ID NO: 1430437 - RNA, 13 nt, Human
uaauuuuguguaa

SEQ ID NO: 1430438 - RNA, 18 nt, Human
uaauuuugugaagcaaaa

SEQ ID NO: 1430439 - RNA, 22 nt, Human
uaauuagugccacuuaauguau

SEQ ID NO: 1430440 - RNA, 21 nt, Human
uaauuagugccacuuaaugua

SEQ ID NO: 1430441 - RNA, 19 nt, Human
uaauuagugccacuuaaug

SEQ ID NO: 1430442 - RNA, 14 nt, Human
uaauuagugccacu

SEQ ID NO: 1430443 - RNA, 14 nt, Human
uaauuccuucagca

SEQ ID NO: 1430444 - RNA, 20 nt, Human
uaauuagugcuaagugugaa

SEQ ID NO: 1430445 - RNA, 12 nt, Human
uaauuagugcua

SEQ ID NO: 1430446 - RNA, 14 nt, Human
uaauuagugcuaag

SEQ ID NO: 1430447 - RNA, 15 nt, Human
uaauuagugcuaagu

SEQ ID NO: 1430448 - RNA, 16 nt, Human
uaauuagugcuaagug

SEQ ID NO: 1430449 - RNA, 23 nt, Human
uaauucuauuaaagugcuaaggu

SEQ ID NO: 1430450 - RNA, 15 nt, Human
uaauucuaugccugu

SEQ ID NO: 1430451 - RNA, 15 nt, Human
uaauucuaugagaua

SEQ ID NO: 1430452 - RNA, 18 nt, Human
uaauucuaaaugaauguu

SEQ ID NO: 1430453 - RNA, 11 nt, Human
uaauucuaaau

SEQ ID NO: 1430454 - RNA, 21 nt, Human
uaauuccuucagcacuuuaga

SEQ ID NO: 1430455 - RNA, 20 nt, Human
uaauuccuucagcacuuuag

SEQ ID NO: 1430456 - RNA, 15 nt, Human
uacacucugcuguuu

SEQ ID NO: 1430457 - RNA, 16 nt, Human
uacacucuuuguaaga

SEQ ID NO: 1430458 - RNA, 23 nt, Human
uacacucugcuguuugacaccuc

SEQ ID NO: 1430459 - RNA, 14 nt, Human
uacacucugcuguu

SEQ ID NO: 1430460 - RNA, 13 nt, Human
uacacucugcugu

SEQ ID NO: 1430461 - RNA, 19 nt, Human
uacacucguaugauacuuc

SEQ ID NO: 1430462 - RNA, 21 nt, Human
uacacucucaaagcaaauaau

SEQ ID NO: 1430463 - RNA, 21 nt, Human
uacacauguaucuaugcauuu

SEQ ID NO: 1430464 - RNA, 19 nt, Human
uacacauuuuauuuuauua

SEQ ID NO: 1430465 - RNA, 13 nt, Human
uacacagucagcu

SEQ ID NO: 1430466 - RNA, 16 nt, Human
uacacacggugccuuu

SEQ ID NO: 1430467 - RNA, 17 nt, Human
uacacacggugccuuua

SEQ ID NO: 1430468 - RNA, 17 nt, Human
uacacacugcauguuug

SEQ ID NO: 1430469 - RNA, 15 nt, Human
uacacacugcauguu

SEQ ID NO: 1430470 - RNA, 15 nt, Human
uacaagaagcauuuu

SEQ ID NO: 1430471 - RNA, 14 nt, Human
uacaagaagcauuu

SEQ ID NO: 1430472 - RNA, 23 nt, Human
uacaacugccucgaaacacagaa

SEQ ID NO: 1430473 - RNA, 17 nt, Human
uacaacucauacacucg

SEQ ID NO: 1430474 - RNA, 15 nt, Human
uacaacggagucaaa

SEQ ID NO: 1430475 - RNA, 22 nt, Human
uacaacggagucaaaaauuaaa

SEQ ID NO: 1430476 - RNA, 21 nt, Human
uacaaauguuaaaauguguug

SEQ ID NO: 1430477 - RNA, 23 nt, Human
uacaaauguuaaaauguguuguu

SEQ ID NO: 1430478 - RNA, 18 nt, Human
uacaaauguuaaaaugug

SEQ ID NO: 1430479 - RNA, 17 nt, Human
uacaaauguuaaaaugu

SEQ ID NO: 1430480 - RNA, 13 nt, Human
uacaaauggauuu

SEQ ID NO: 1430481 - RNA, 16 nt, Human
uacaaccaauggaaug

SEQ ID NO: 1430482 - RNA, 15 nt, Human
uacaaccuccgccuc

SEQ ID NO: 1430483 - RNA, 21 nt, Human
uacagcucagaaguuucuucu

SEQ ID NO: 1430484 - RNA, 17 nt, Human
uacagcuggggugcagg

SEQ ID NO: 1430485 - RNA, 13 nt, Human
uacagcuggcucu

SEQ ID NO: 1430486 - RNA, 18 nt, Human
uacagcuguauugucuga

SEQ ID NO: 1430487 - RNA, 19 nt, Human
uacagcuguauugucugaa

SEQ ID NO: 1430488 - RNA, 14 nt, Human
uacagcuguauugu

SEQ ID NO: 1430489 - RNA, 15 nt, Human
uacagcuggggugca

SEQ ID NO: 1430490 - RNA, 17 nt, Human
uacacuguguaaauacc

SEQ ID NO: 1430491 - RNA, 20 nt, Human
uacacuguuucaaacuuuac

SEQ ID NO: 1430492 - RNA, 22 nt, Human
uacacuguuucaaacuuuacua

SEQ ID NO: 1430493 - RNA, 21 nt, Human
uacaguucugugguuucaugu

SEQ ID NO: 1430494 - RNA, 15 nt, Human
uacaguucugugguu

SEQ ID NO: 1430495 - RNA, 14 nt, Human
uacaguucuguggu

SEQ ID NO: 1430496 - RNA, 20 nt, Human
uacaguucugcucugguugu

SEQ ID NO: 1430497 - RNA, 13 nt, Human
uacaguucugcuc

SEQ ID NO: 1430498 - RNA, 18 nt, Human
uacaguuuguuaguauga

SEQ ID NO: 1430499 - RNA, 14 nt, Human
uacaggauuugaaa

SEQ ID NO: 1430500 - RNA, 20 nt, Human
uacaggaugaugacuaugga

SEQ ID NO: 1430501 - RNA, 23 nt, Human
uacaguucggugagcuacaaaug

SEQ ID NO: 1430502 - RNA, 20 nt, Human
uacaguuuuaacuguggaua

SEQ ID NO: 1430503 - RNA, 21 nt, Human
uacaguuuuaacuguggauau

SEQ ID NO: 1430504 - RNA, 19 nt, Human
uacaguuuuaacuguggau

SEQ ID NO: 1430505 - RNA, 17 nt, Human
uacaguuuuaacugugg

SEQ ID NO: 1430506 - RNA, 15 nt, Human
uacaguuuuaacugu

SEQ ID NO: 1430507 - RNA, 14 nt, Human
uacaguuuuaacug

SEQ ID NO: 1430508 - RNA, 19 nt, Human
uacaguuuguuaguaugag

SEQ ID NO: 1430509 - RNA, 21 nt, Human
uacaguuuguuaguaugaggc

SEQ ID NO: 1430510 - RNA, 21 nt, Human
uacauaacugaaaaugugcua

SEQ ID NO: 1430511 - RNA, 17 nt, Human
uacauaacugaaaaugu

SEQ ID NO: 1430512 - RNA, 15 nt, Human
uacauaacugaaaau

SEQ ID NO: 1430513 - RNA, 13 nt, Human
uacauaacugaaa

SEQ ID NO: 1430514 - RNA, 18 nt, Human
uacaguuuugaguagagu

SEQ ID NO: 1430515 - RNA, 16 nt, Human
uacaugaaaacacauu

SEQ ID NO: 1430516 - RNA, 17 nt, Human
uacaugaaaacacauuu

SEQ ID NO: 1430517 - RNA, 18 nt, Human
uacaugaaaacacauuuu

SEQ ID NO: 1430518 - RNA, 19 nt, Human
uacaugaaaacacauuuuu

SEQ ID NO: 1430519 - RNA, 23 nt, Human
uacaugaaaacacauuuuucuua

SEQ ID NO: 1430520 - RNA, 23 nt, Human
uacaugcuuauuccaugacugcu

SEQ ID NO: 1430521 - RNA, 21 nt, Human
uacaugcuuauuccaugacug

SEQ ID NO: 1430522 - RNA, 20 nt, Human
uacaugcuuauuccaugacu

SEQ ID NO: 1430523 - RNA, 17 nt, Human
uacaugcuuauuccaug

SEQ ID NO: 1430524 - RNA, 16 nt, Human
uacaugcuuauuccau

SEQ ID NO: 1430525 - RNA, 15 nt, Human
uacaugcuuauucca

SEQ ID NO: 1430526 - RNA, 12 nt, Human
uacaugcuuauu

SEQ ID NO: 1430527 - RNA, 19 nt, Human
uacaugcuaagagaaguag

SEQ ID NO: 1430528 - RNA, 18 nt, Human
uacaugcuaagagaagua

SEQ ID NO: 1430529 - RNA, 17 nt, Human
uacaugcuaagagaagu

SEQ ID NO: 1430530 - RNA, 22 nt, Human
uacaugcauugagcucucucau

SEQ ID NO: 1430531 - RNA, 20 nt, Human
uacaugcauuacugcaugca

SEQ ID NO: 1430532 - RNA, 21 nt, Human
uacaugcauacacucucaaag

SEQ ID NO: 1430533 - RNA, 20 nt, Human
uacaugcauacacucucaaa

SEQ ID NO: 1430534 - RNA, 14 nt, Human
uacaugcauacacu

SEQ ID NO: 1430535 - RNA, 21 nt, Human
uacaugcacuuggcugcauaa

SEQ ID NO: 1430536 - RNA, 21 nt, Human
uacaugaaacagaaacaaaaa

SEQ ID NO: 1430537 - RNA, 15 nt, Human
uacaugaaacagaaa

SEQ ID NO: 1430538 - RNA, 14 nt, Human
uacaugaaacagaa

SEQ ID NO: 1430539 - RNA, 13 nt, Human
uacaugaaacaga

SEQ ID NO: 1430540 - RNA, 12 nt, Human
uacaugaaacag

SEQ ID NO: 1430541 - RNA, 21 nt, Human
uacauggcuggagcuagaauu

SEQ ID NO: 1430542 - RNA, 14 nt, Human
uacauuuuuaagug

SEQ ID NO: 1430543 - RNA, 19 nt, Human
uacauuuuuaagugcugca

SEQ ID NO: 1430544 - RNA, 22 nt, Human
uacauuuuuaagugcugcauuu

SEQ ID NO: 1430545 - RNA, 15 nt, Human
uagagugucuuucca

SEQ ID NO: 1430546 - RNA, 17 nt, Human
uagagucugaacagcug

SEQ ID NO: 1430547 - RNA, 17 nt, Human
uagaggugagaaauuua

SEQ ID NO: 1430548 - RNA, 16 nt, Human
uagaggugagaaauuu

SEQ ID NO: 1430549 - RNA, 22 nt, Human
uagagucccagguuggcucugc

SEQ ID NO: 1430550 - RNA, 14 nt, Human
uagaguugauacua

SEQ ID NO: 1430551 - RNA, 17 nt, Human
uagaguugauacuacag

SEQ ID NO: 1430552 - RNA, 13 nt, Human
uagaguuagacug

SEQ ID NO: 1430553 - RNA, 14 nt, Human
uagaguuagacugu

SEQ ID NO: 1430554 - RNA, 19 nt, Human
uagagaaguauacauaagu

SEQ ID NO: 1430555 - RNA, 18 nt, Human
uagagaagacaggcugga

SEQ ID NO: 1430556 - RNA, 15 nt, Human
uagagaagacaggcu

SEQ ID NO: 1430557 - RNA, 13 nt, Human
uagagaagcaagu

SEQ ID NO: 1430558 - RNA, 16 nt, Human
uagagaagcaaguaaa

SEQ ID NO: 1430559 - RNA, 14 nt, Human
uagagguucaaaga

SEQ ID NO: 1430560 - RNA, 15 nt, Human
uagagguucaaagau

SEQ ID NO: 1430561 - RNA, 22 nt, Human
uagaccagcagacagagccagg

SEQ ID NO: 1430562 - RNA, 19 nt, Human
uagaccagcagacagagcc

SEQ ID NO: 1430563 - RNA, 10 nt, Human
uagaccaaua

SEQ ID NO: 1430564 - RNA, 12 nt, Human
uagaccaauaaa

SEQ ID NO: 1430565 - RNA, 23 nt, Human
uagacuaaggccauuauuguacu

SEQ ID NO: 1430566 - RNA, 19 nt, Human
uagaccuuguuacuucuga

SEQ ID NO: 1430567 - RNA, 17 nt, Human
uagaccuuguuacuucu

SEQ ID NO: 1430568 - RNA, 23 nt, Human
uagacggagcccuggcaugucaa

SEQ ID NO: 1430569 - RNA, 22 nt, Human
uagacuucaagcauggcuauuu

SEQ ID NO: 1430570 - RNA, 18 nt, Human
uagacugugauucagaaa

SEQ ID NO: 1430571 - RNA, 23 nt, Human
uagacuguugggguggguauaaa

SEQ ID NO: 1430572 - RNA, 17 nt, Human
uagacugugauucagaa

SEQ ID NO: 1430573 - RNA, 21 nt, Human
uagaaugauuucaugcuaucu

SEQ ID NO: 1430574 - RNA, 12 nt, Human
uagaaugacagu

SEQ ID NO: 1430575 - RNA, 22 nt, Human
uagaaucugcaauucaaaaguu

SEQ ID NO: 1430576 - RNA, 18 nt, Human
uagaaucugcaauucaaa

SEQ ID NO: 1430577 - RNA, 21 nt, Human
uagaaucccagcccccugacc

SEQ ID NO: 1430578 - RNA, 22 nt, Human
uagaaucccagcccccugacca

SEQ ID NO: 1430579 - RNA, 18 nt, Human
uagaaucccagcccccug

SEQ ID NO: 1430580 - RNA, 16 nt, Human
uagaaugauuucaugc

SEQ ID NO: 1430581 - RNA, 17 nt, Human
uagaauguaaagcuugu

SEQ ID NO: 1430582 - RNA, 15 nt, Human
uagaauguaaagcuu

SEQ ID NO: 1430583 - RNA, 18 nt, Human
uagaauguaaagcuuguc

SEQ ID NO: 1430584 - RNA, 21 nt, Human
uagaauuauaacuggaaagaa

SEQ ID NO: 1430585 - RNA, 16 nt, Human
uagaauuauuuaaaca

SEQ ID NO: 1430586 - RNA, 15 nt, Human
uagaauuauuuaaac

SEQ ID NO: 1430587 - RNA, 12 nt, Human
uagaauuauuua

SEQ ID NO: 1430588 - RNA, 23 nt, Human
uagaauuaucuaauuuauaaaaa

SEQ ID NO: 1430589 - RNA, 22 nt, Human
uagaauuaucuaauuuauaaaa

SEQ ID NO: 1430590 - RNA, 21 nt, Human
uagaauuaucuaauuuauaaa

SEQ ID NO: 1430591 - RNA, 19 nt, Human
uagaauuaucuaauuuaua

SEQ ID NO: 1430592 - RNA, 16 nt, Human
uagaauuaucuaauuu

SEQ ID NO: 1430593 - RNA, 15 nt, Human
uagaauuaucuaauu

SEQ ID NO: 1430594 - RNA, 22 nt, Human
uagaauuauaacuguaaagaug

SEQ ID NO: 1430595 - RNA, 15 nt, Human
uacuuguuucagagu

SEQ ID NO: 1430596 - RNA, 14 nt, Human
uacuuguuucagag

SEQ ID NO: 1430597 - RNA, 20 nt, Human
uacuuguggacuaaaagaua

SEQ ID NO: 1430598 - RNA, 22 nt, Human
uacuuguggacuaaaagauaua

SEQ ID NO: 1430599 - RNA, 23 nt, Human
uacuuguggacuaaaagauauaa

SEQ ID NO: 1430600 - RNA, 15 nt, Human
uacuuguggacuaaa

SEQ ID NO: 1430601 - RNA, 16 nt, Human
uacuuguggacuaaaa

SEQ ID NO: 1430602 - RNA, 19 nt, Human
uacuuguggacuaaaagau

SEQ ID NO: 1430603 - RNA, 22 nt, Human
uagaauaaaggcaguuuucuaa

SEQ ID NO: 1430604 - RNA, 21 nt, Human
uagaauaaaggcaguuuucua

SEQ ID NO: 1430605 - RNA, 19 nt, Human
uagaauaaaggcaguuuuc

SEQ ID NO: 1430606 - RNA, 23 nt, Human
uagaauaccacaggaaccacaag

SEQ ID NO: 1430607 - RNA, 23 nt, Human
uagaauacaguuuugaguagagu

SEQ ID NO: 1430608 - RNA, 22 nt, Human
uagaaucaaacauuuugaaagu

SEQ ID NO: 1430609 - RNA, 21 nt, Human
uagaaucaaacauuuugaaag

SEQ ID NO: 1430610 - RNA, 13 nt, Human
uagaauaugccuu

SEQ ID NO: 1430611 - RNA, 20 nt, Human
uagccuguccugucaucauc

SEQ ID NO: 1430612 - RNA, 16 nt, Human
uagccuguccugucau

SEQ ID NO: 1430613 - RNA, 14 nt, Human
uagccuguccuguc

SEQ ID NO: 1430614 - RNA, 13 nt, Human
uagccuguccugu

SEQ ID NO: 1430615 - RNA, 12 nt, Human
uagccuguccug

SEQ ID NO: 1430616 - RNA, 11 nt, Human
uagccuguccu

SEQ ID NO: 1430617 - RNA, 12 nt, Human
uagcucauucuc

SEQ ID NO: 1430618 - RNA, 11 nt, Human
uagccuggcua

SEQ ID NO: 1430619 - RNA, 14 nt, Human
uagccuggcuuggg

SEQ ID NO: 1430620 - RNA, 22 nt, Human
uagccuggaccucugacagcag

SEQ ID NO: 1430621 - RNA, 23 nt, Human
uagccuggaccucugacagcagc

SEQ ID NO: 1430622 - RNA, 21 nt, Human
uagccuggaccucugacagca

SEQ ID NO: 1430623 - RNA, 17 nt, Human
uagccuggaccucugac

SEQ ID NO: 1430624 - RNA, 11 nt, Human
uagccuggacc

SEQ ID NO: 1430625 - RNA, 21 nt, Human
uagccuaaggcuccuguuuug

SEQ ID NO: 1430626 - RNA, 20 nt, Human
uagccuaaggcuccuguuuu

SEQ ID NO: 1430627 - RNA, 12 nt, Human
uagcugagcuca

SEQ ID NO: 1430628 - RNA, 14 nt, Human
uagcugaucaguuu

SEQ ID NO: 1430629 - RNA, 21 nt, Human
uagcugagcucacaaggcagc

SEQ ID NO: 1430630 - RNA, 11 nt, Human
uagcugagcuc

SEQ ID NO: 1430631 - RNA, 19 nt, Human
uagcugaauguuuuucuaa

SEQ ID NO: 1430632 - RNA, 18 nt, Human
uagcugaauguuuuucua

SEQ ID NO: 1430633 - RNA, 15 nt, Human
uagcugaauguuuuu

SEQ ID NO: 1430634 - RNA, 19 nt, Human
uagcucuuugucagggagu

SEQ ID NO: 1430635 - RNA, 18 nt, Human
uagcucuuugucagggag

SEQ ID NO: 1430636 - RNA, 23 nt, Human
uagcaugcuuguugcaauugccu

SEQ ID NO: 1430637 - RNA, 18 nt, Human
uagcaugcuuguugcaau

SEQ ID NO: 1430638 - RNA, 17 nt, Human
uagcaugcuuguugcaa

SEQ ID NO: 1430639 - RNA, 16 nt, Human
uagcaugaagacagag

SEQ ID NO: 1430640 - RNA, 23 nt, Human
uagccagccggggcgaguggcac

SEQ ID NO: 1430641 - RNA, 23 nt, Human
uagccauauuuguaaaaugacaa

SEQ ID NO: 1430642 - RNA, 20 nt, Human
uagccauauuuguaaaauga

SEQ ID NO: 1430643 - RNA, 19 nt, Human
uagccauauuuguaaaaug

SEQ ID NO: 1430644 - RNA, 17 nt, Human
uagccauauuuguaaaa

SEQ ID NO: 1430645 - RNA, 15 nt, Human
uagccauauuuguaa

SEQ ID NO: 1430646 - RNA, 21 nt, Human
uagcccccugguaauagcugu

SEQ ID NO: 1430647 - RNA, 22 nt, Human
uagccauauuuguaaaaugaca

SEQ ID NO: 1430648 - RNA, 22 nt, Human
uagccccugggguggccaccag

SEQ ID NO: 1430649 - RNA, 14 nt, Human
uagccccugaaagc

SEQ ID NO: 1430650 - RNA, 22 nt, Human
uagcccccugguaauagcugua

SEQ ID NO: 1430651 - RNA, 16 nt, Human
uagccccucuccugga

SEQ ID NO: 1430652 - RNA, 23 nt, Human
uagauacccuacgcuguccagaa

SEQ ID NO: 1430653 - RNA, 17 nt, Human
uagaguuagacuguugg

SEQ ID NO: 1430654 - RNA, 15 nt, Human
uagaguuagacuguu

SEQ ID NO: 1430655 - RNA, 16 nt, Human
uagaguuagacuguug

SEQ ID NO: 1430656 - RNA, 16 nt, Human
uagauacuguaucaug

SEQ ID NO: 1430657 - RNA, 17 nt, Human
uagauagcccuguccug

SEQ ID NO: 1430658 - RNA, 15 nt, Human
uagauagcccugucc

SEQ ID NO: 1430659 - RNA, 14 nt, Human
uagauaggccaugg

SEQ ID NO: 1430660 - RNA, 23 nt, Human
uagauagcccuguccugguggua

SEQ ID NO: 1430661 - RNA, 19 nt, Human
uagauagcccuguccuggu

SEQ ID NO: 1430662 - RNA, 16 nt, Human
uagauuuuaaucaaau

SEQ ID NO: 1430663 - RNA, 20 nt, Human
uagauuugugugcaucaggc

SEQ ID NO: 1430664 - RNA, 22 nt, Human
uagauuugugugcaucaggcuu

SEQ ID NO: 1430665 - RNA, 19 nt, Human
uagauuugugugcaucagg

SEQ ID NO: 1430666 - RNA, 24 nt, Human
uagauuuggcuccucugcuucuca

SEQ ID NO: 1430667 - RNA, 20 nt, Human
uagauuuggcuccucugcuu

SEQ ID NO: 1430668 - RNA, 23 nt, Human
uagauuucauaguucagaauuua

SEQ ID NO: 1430669 - RNA, 22 nt, Human
uagauuucauaguucagaauuu

SEQ ID NO: 1430670 - RNA, 20 nt, Human
uagauuucauaguucagaau

SEQ ID NO: 1430671 - RNA, 19 nt, Human
uagauuucauaguucagaa

SEQ ID NO: 1430672 - RNA, 18 nt, Human
uagauuucauaguucaga

SEQ ID NO: 1430673 - RNA, 16 nt, Human
uagauuucauaguuca

SEQ ID NO: 1430674 - RNA, 11 nt, Human
uagauuuaugg

SEQ ID NO: 1430675 - RNA, 14 nt, Human
uagauucuaaagau

SEQ ID NO: 1430676 - RNA, 13 nt, Human
uagauucuaaaga

SEQ ID NO: 1430677 - RNA, 12 nt, Human
uagauucuaaag

SEQ ID NO: 1430678 - RNA, 11 nt, Human
uagauucuaaa

SEQ ID NO: 1430679 - RNA, 21 nt, Human
uagauuccauugguccaagau

SEQ ID NO: 1430680 - RNA, 20 nt, Human
uagauuccauugguccaaga

SEQ ID NO: 1430681 - RNA, 19 nt, Human
uagauucagguaauacaaa

SEQ ID NO: 1430682 - RNA, 17 nt, Human
uagauucagguaauaca

SEQ ID NO: 1430683 - RNA, 18 nt, Human
uagauucaaagguucuag

SEQ ID NO: 1430684 - RNA, 17 nt, Human
uagauucaaagguucua

SEQ ID NO: 1430685 - RNA, 16 nt, Human
uagauucaaagguucu

SEQ ID NO: 1430686 - RNA, 15 nt, Human
uagauucaaagguuc

SEQ ID NO: 1430687 - RNA, 13 nt, Human
uagauucaaaggu

SEQ ID NO: 1430688 - RNA, 20 nt, Human
uagauaggaagaaagaagac

SEQ ID NO: 1430689 - RNA, 22 nt, Human
uagcagcggaacaaggagucag

SEQ ID NO: 1430690 - RNA, 16 nt, Human
uagcagccuuucucuc

SEQ ID NO: 1430691 - RNA, 13 nt, Human
uagcagccuuucu

SEQ ID NO: 1430692 - RNA, 12 nt, Human
uagcagccuuuc

SEQ ID NO: 1430693 - RNA, 18 nt, Human
uagauuuuacaugaagua

SEQ ID NO: 1430694 - RNA, 17 nt, Human
uagauuuuacaugaagu

SEQ ID NO: 1430695 - RNA, 16 nt, Human
uagauuuuacaugaag

SEQ ID NO: 1430696 - RNA, 20 nt, Human
uagauuuuacaugaaguauu

SEQ ID NO: 1430697 - RNA, 15 nt, Human
uagauuuuacaugaa

SEQ ID NO: 1430698 - RNA, 14 nt, Human
uagauuuuacauga

SEQ ID NO: 1430699 - RNA, 18 nt, Human
uagauuuuaaucaaauuu

SEQ ID NO: 1430700 - RNA, 17 nt, Human
uagauuuuaaucaaauu

SEQ ID NO: 1430701 - RNA, 15 nt, Human
uagcagcuuccagau

SEQ ID NO: 1430702 - RNA, 14 nt, Human
uagcagcuuccaga

SEQ ID NO: 1430703 - RNA, 17 nt, Human
uagcauacguacacauu

SEQ ID NO: 1430704 - RNA, 18 nt, Human
uagcauacguacacauuu

SEQ ID NO: 1430705 - RNA, 19 nt, Human
uagcauacguacacauuuu

SEQ ID NO: 1430706 - RNA, 18 nt, Human
uagcauccuggaauaucu

SEQ ID NO: 1430707 - RNA, 16 nt, Human
uagcauccuggaauau

SEQ ID NO: 1430708 - RNA, 15 nt, Human
uagcauccuggaaua

SEQ ID NO: 1430709 - RNA, 13 nt, Human
uagcauccuggaa

SEQ ID NO: 1430710 - RNA, 14 nt, Human
uagcauaucugccu

SEQ ID NO: 1430711 - RNA, 16 nt, Human
uagcauaucugccuuu

SEQ ID NO: 1430712 - RNA, 17 nt, Human
uagcauaucugccuuua

SEQ ID NO: 1430713 - RNA, 18 nt, Human
uagcauaucugccuuuau

SEQ ID NO: 1430714 - RNA, 21 nt, Human
uagcauaucugccuuuauugu

SEQ ID NO: 1430715 - RNA, 22 nt, Human
uagcauaucugccuuuauugug

SEQ ID NO: 1430716 - RNA, 23 nt, Human
uagcauaucugccuuuauugugu

SEQ ID NO: 1430717 - RNA, 19 nt, Human
uaggugcuauuugucaucu

SEQ ID NO: 1430718 - RNA, 22 nt, Human
uaggucugaaauuuuucuucuu

SEQ ID NO: 1430719 - RNA, 18 nt, Human
uaggucugaaauuuuucu

SEQ ID NO: 1430720 - RNA, 14 nt, Human
uaggucugaaauuu

SEQ ID NO: 1430721 - RNA, 12 nt, Human
uaggucugaaau

SEQ ID NO: 1430722 - RNA, 18 nt, Human
uaggcuuaguuugugugu

SEQ ID NO: 1430723 - RNA, 21 nt, Human
uaggcuguaacuacuuuauaa

SEQ ID NO: 1430724 - RNA, 19 nt, Human
uaggcuguaacuacuuuau

SEQ ID NO: 1430725 - RNA, 20 nt, Human
uaggcuggaguuagggacug

SEQ ID NO: 1430726 - RNA, 23 nt, Human
uaggcugacaccuaacucuucuu

SEQ ID NO: 1430727 - RNA, 21 nt, Human
uaggcugacaccuaacucuuc

SEQ ID NO: 1430728 - RNA, 19 nt, Human
uaggcugacaccuaacucu

SEQ ID NO: 1430729 - RNA, 16 nt, Human
uagcugugaccucucc

SEQ ID NO: 1430730 - RNA, 21 nt, Human
uagcugucugcucagacagaa

SEQ ID NO: 1430731 - RNA, 22 nt, Human
uagcuguccuuuuuccucucca

SEQ ID NO: 1430732 - RNA, 14 nt, Human
uagcugggacuaca

SEQ ID NO: 1430733 - RNA, 19 nt, Human
uaggucugaaauuuuucuu

SEQ ID NO: 1430734 - RNA, 19 nt, Human
uaggugugacugaauuucu

SEQ ID NO: 1430735 - RNA, 21 nt, Human
uaggugugacugaauuucuuu

SEQ ID NO: 1430736 - RNA, 23 nt, Human
uaggugugacugaauuucuuuug

SEQ ID NO: 1430737 - RNA, 21 nt, Human
uagguguuuuguucaccauua

SEQ ID NO: 1430738 - RNA, 20 nt, Human
uagguggguugaaagccaag

SEQ ID NO: 1430739 - RNA, 14 nt, Human
uagguucagccaag

SEQ ID NO: 1430740 - RNA, 22 nt, Human
uagguuauuuugauguaaagau

SEQ ID NO: 1430741 - RNA, 18 nt, Human
uagguugcacacuuuggu

SEQ ID NO: 1430742 - RNA, 17 nt, Human
uagguugcacacuuugg

SEQ ID NO: 1430743 - RNA, 16 nt, Human
uagguugcacacuuug

SEQ ID NO: 1430744 - RNA, 13 nt, Human
uagguugcacacu

SEQ ID NO: 1430745 - RNA, 12 nt, Human
uagguugcacac

SEQ ID NO: 1430746 - RNA, 18 nt, Human
uagguucuuugcugcauu

SEQ ID NO: 1430747 - RNA, 22 nt, Human
uagguucuaaaguucuaagauu

SEQ ID NO: 1430748 - RNA, 21 nt, Human
uagguucuaaaguucuaagau

SEQ ID NO: 1430749 - RNA, 20 nt, Human
uagguucuaaaguucuaaga

SEQ ID NO: 1430750 - RNA, 18 nt, Human
uagguucuaaaguucuaa

SEQ ID NO: 1430751 - RNA, 17 nt, Human
uagguucuaaaguucua

SEQ ID NO: 1430752 - RNA, 16 nt, Human
uagguucuaaaguucu

SEQ ID NO: 1430753 - RNA, 15 nt, Human
uagguucuaaaguuc

SEQ ID NO: 1430754 - RNA, 15 nt, Human
uagguucagccaagg

SEQ ID NO: 1430755 - RNA, 12 nt, Human
uagguucuaaaa

SEQ ID NO: 1430756 - RNA, 13 nt, Human
uagguucuaaagu

SEQ ID NO: 1430757 - RNA, 20 nt, Human
uaguagcagugauugucuua

SEQ ID NO: 1430758 - RNA, 19 nt, Human
uaguagcguuuuuuaaaug

SEQ ID NO: 1430759 - RNA, 21 nt, Human
uaguagcguuuuuuaaaugua

SEQ ID NO: 1430760 - RNA, 23 nt, Human
uaguagcguuuuuuaaauguaua

SEQ ID NO: 1430761 - RNA, 17 nt, Human
uaguaugaggcauuugu

SEQ ID NO: 1430762 - RNA, 18 nt, Human
uaguaugaggcauuuguu

SEQ ID NO: 1430763 - RNA, 12 nt, Human
uaguugaauuuu

SEQ ID NO: 1430764 - RNA, 23 nt, Human
uaguugaauuuuuuuuaacauuc

SEQ ID NO: 1430765 - RNA, 17 nt, Human
uaguugaaaauaaagug

SEQ ID NO: 1430766 - RNA, 17 nt, Human
uaguucuuacugcuuaa

SEQ ID NO: 1430767 - RNA, 21 nt, Human
uaguauuguuguccuuuucau

SEQ ID NO: 1430768 - RNA, 17 nt, Human
uaguauuguuguccuuu

SEQ ID NO: 1430769 - RNA, 16 nt, Human
uaguauuguuguccuu

SEQ ID NO: 1430770 - RNA, 13 nt, Human
uaguauuguuguc

SEQ ID NO: 1430771 - RNA, 22 nt, Human
uaguauuguuguccuuuucaua

SEQ ID NO: 1430772 - RNA, 16 nt, Human
uaguauuucuaugaaa

SEQ ID NO: 1430773 - RNA, 16 nt, Human
uaguauggccuguguc

SEQ ID NO: 1430774 - RNA, 16 nt, Human
uaguaggcauuuuuac

SEQ ID NO: 1430775 - RNA, 19 nt, Human
uaguauggccugugucacu

SEQ ID NO: 1430776 - RNA, 17 nt, Human
uaguauggccuguguca

SEQ ID NO: 1430777 - RNA, 17 nt, Human
uaguauuguccaggucu

SEQ ID NO: 1430778 - RNA, 22 nt, Human
uauaaacaagaaaaauaaagaa

SEQ ID NO: 1430779 - RNA, 20 nt, Human
uauaaacaagaaaaauaaag

SEQ ID NO: 1430780 - RNA, 19 nt, Human
uauaaacaagaaaaauaaa

SEQ ID NO: 1430781 - RNA, 15 nt, Human
uauaaacaagaaaaa

SEQ ID NO: 1430782 - RNA, 13 nt, Human
uauaaacaagaaa

SEQ ID NO: 1430783 - RNA, 21 nt, Human
uauaaacaagaaaaauaaaga

SEQ ID NO: 1430784 - RNA, 22 nt, Human
uaguugaauuuuuuuuaacauu

SEQ ID NO: 1430785 - RNA, 15 nt, Human
uaguuugauuaaauu

SEQ ID NO: 1430786 - RNA, 16 nt, Human
uaguuugauuaaauuc

SEQ ID NO: 1430787 - RNA, 21 nt, Human
uaguuugauuaaauucuugca

SEQ ID NO: 1430788 - RNA, 18 nt, Human
uauaaaccgaacugaugu

SEQ ID NO: 1430789 - RNA, 11 nt, Human
uauaaacuuua

SEQ ID NO: 1430790 - RNA, 13 nt, Human
uauaaacuuuacc

SEQ ID NO: 1430791 - RNA, 14 nt, Human
uauaaacuuuaccu

SEQ ID NO: 1430792 - RNA, 15 nt, Human
uauaaacuuuaccuu

SEQ ID NO: 1430793 - RNA, 16 nt, Human
uauaaacuuuaccuuu

SEQ ID NO: 1430794 - RNA, 17 nt, Human
uauaaacuuuaccuuuu

SEQ ID NO: 1430795 - RNA, 18 nt, Human
uauaaacuuuaccuuuuu

SEQ ID NO: 1430796 - RNA, 16 nt, Human
uaucaugagugaauaa

SEQ ID NO: 1430797 - RNA, 18 nt, Human
uaucaucagauagcaucu

SEQ ID NO: 1430798 - RNA, 21 nt, Human
uaucauauauauacauacaug

SEQ ID NO: 1430799 - RNA, 18 nt, Human
uaucauagaaauguaacu

SEQ ID NO: 1430800 - RNA, 23 nt, Human
uaucauagaaauguaacuuuugu

SEQ ID NO: 1430801 - RNA, 14 nt, Human
uaucaugcccugug

SEQ ID NO: 1430802 - RNA, 19 nt, Human
uaucaugcauguccuguaa

SEQ ID NO: 1430803 - RNA, 17 nt, Human
uaucaugcauguccugu

SEQ ID NO: 1430804 - RNA, 14 nt, Human
uaucauucaagugu

SEQ ID NO: 1430805 - RNA, 13 nt, Human
uaucauucaagug

SEQ ID NO: 1430806 - RNA, 15 nt, Human
uaucauagaaaugua

SEQ ID NO: 1430807 - RNA, 14 nt, Human
uaucauagaaaugu

SEQ ID NO: 1430808 - RNA, 22 nt, Human
uaucagucauaacuaaauaaag

SEQ ID NO: 1430809 - RNA, 21 nt, Human
uaucagucaauauuuuuagau

SEQ ID NO: 1430810 - RNA, 20 nt, Human
uaucagucaauauuuuuaga

SEQ ID NO: 1430811 - RNA, 9 nt, Human
uaucaguag

SEQ ID NO: 1430812 - RNA, 15 nt, Human
uaucaguaaauaacu

SEQ ID NO: 1430813 - RNA, 22 nt, Human
uaucaaacccuagccuugcuug

SEQ ID NO: 1430814 - RNA, 17 nt, Human
uaucaaacccuagccuu

SEQ ID NO: 1430815 - RNA, 23 nt, Human
uaucaaacaccaacauaaaaaug

SEQ ID NO: 1430816 - RNA, 19 nt, Human
uaucaaacaccaacauaaa

SEQ ID NO: 1430817 - RNA, 23 nt, Human
uaucaaacccuagccuugcuugu

SEQ ID NO: 1430818 - RNA, 21 nt, Human
uaucaaacccuagccuugcuu

SEQ ID NO: 1430819 - RNA, 20 nt, Human
uaucaaacccuagccuugcu

SEQ ID NO: 1430820 - RNA, 19 nt, Human
uaucaaacccuagccuugc

SEQ ID NO: 1430821 - RNA, 18 nt, Human
uaucaaacccuagccuug

SEQ ID NO: 1430822 - RNA, 18 nt, Human
uauauggacaaaacaaga

SEQ ID NO: 1430823 - RNA, 22 nt, Human
uauauggaaauauauauuauac

SEQ ID NO: 1430824 - RNA, 22 nt, Human
uauauuugggccugcuccagac

SEQ ID NO: 1430825 - RNA, 17 nt, Human
uauauggaaauucugcu

SEQ ID NO: 1430826 - RNA, 19 nt, Human
uauauggaaauauauauua

SEQ ID NO: 1430827 - RNA, 18 nt, Human
uauauggaaauauauauu

SEQ ID NO: 1430828 - RNA, 14 nt, Human
uauauggaaauaua

SEQ ID NO: 1430829 - RNA, 19 nt, Human
uauaugaagaaaaucacuu

SEQ ID NO: 1430830 - RNA, 16 nt, Human
uauaugcuucuguuuu

SEQ ID NO: 1430831 - RNA, 18 nt, Human
uauaugaagaaaaucacu

SEQ ID NO: 1430832 - RNA, 14 nt, Human
uauaugcuucuguu

SEQ ID NO: 1430833 - RNA, 19 nt, Human
uaucaaaacuuucuuuucu

SEQ ID NO: 1430834 - RNA, 21 nt, Human
uauauuuuuuuuuaagcucug

SEQ ID NO: 1430835 - RNA, 20 nt, Human
uauauuuuuuucugaaauuu

SEQ ID NO: 1430836 - RNA, 19 nt, Human
uauauuuuuuucugaaauu

SEQ ID NO: 1430837 - RNA, 16 nt, Human
uauauuuuuuucugaa

SEQ ID NO: 1430838 - RNA, 17 nt, Human
uauauuuuguuuacaaa

SEQ ID NO: 1430839 - RNA, 15 nt, Human
uauauuuucuuucuc

SEQ ID NO: 1430840 - RNA, 14 nt, Human
uauauuuucuguuu

SEQ ID NO: 1430841 - RNA, 14 nt, Human
uauauuuuccuaua

SEQ ID NO: 1430842 - RNA, 23 nt, Human
uauauaaagaaaaugauacagca

SEQ ID NO: 1430843 - RNA, 19 nt, Human
uauauaacaaugcuguauu

SEQ ID NO: 1430844 - RNA, 17 nt, Human
uauauaacaaugcugua

SEQ ID NO: 1430845 - RNA, 13 nt, Human
uauaucuggccuc

SEQ ID NO: 1430846 - RNA, 12 nt, Human
uauauaaagaaa

SEQ ID NO: 1430847 - RNA, 23 nt, Human
uauaguuuuacuuuuaaacugug

SEQ ID NO: 1430848 - RNA, 22 nt, Human
uauaguuuuacuuuuaaacugu

SEQ ID NO: 1430849 - RNA, 18 nt, Human
uauagugauguaaucuug

SEQ ID NO: 1430850 - RNA, 13 nt, Human
uauagugauguaa

SEQ ID NO: 1430851 - RNA, 12 nt, Human
uauaguacauga

SEQ ID NO: 1430852 - RNA, 13 nt, Human
uauaguacaugau

SEQ ID NO: 1430853 - RNA, 14 nt, Human
uauaguacaugaua

SEQ ID NO: 1430854 - RNA, 16 nt, Human
uauaguacaugauaaa

SEQ ID NO: 1430855 - RNA, 16 nt, Human
uauaaaguaguccugu

SEQ ID NO: 1430856 - RNA, 18 nt, Human
uauaaaguaguccuguga

SEQ ID NO: 1430857 - RNA, 21 nt, Human
uauaaaguuuuauauauuaua

SEQ ID NO: 1430858 - RNA, 22 nt, Human
uauaaaguuuuauauauuauau

SEQ ID NO: 1430859 - RNA, 18 nt, Human
uauaaaguuuuauauauu

SEQ ID NO: 1430860 - RNA, 17 nt, Human
uauaaaguuuuauauau

SEQ ID NO: 1430861 - RNA, 18 nt, Human
uauaaauacugcaaauca

SEQ ID NO: 1430862 - RNA, 11 nt, Human
uauacuuuuuu

SEQ ID NO: 1430863 - RNA, 20 nt, Human
uauacuuucccuacccucua

SEQ ID NO: 1430864 - RNA, 17 nt, Human
uauacuuucccuacccu

SEQ ID NO: 1430865 - RNA, 16 nt, Human
uauacuuucccuaccc

SEQ ID NO: 1430866 - RNA, 12 nt, Human
uauacuuucccu

SEQ ID NO: 1430867 - RNA, 13 nt, Human
uauacuuuuacaa

SEQ ID NO: 1430868 - RNA, 13 nt, Human
uauagaaagcuau

SEQ ID NO: 1430869 - RNA, 24 nt, Human
uauagaaagcuauauaagacaaga

SEQ ID NO: 1430870 - RNA, 13 nt, Human
uauagaaguuuag

SEQ ID NO: 1430871 - RNA, 22 nt, Human
uauagaaguauaaagaauugug

SEQ ID NO: 1430872 - RNA, 19 nt, Human
uauagaaguauaaagaauu

SEQ ID NO: 1430873 - RNA, 18 nt, Human
uauagaacugaaugagaa

SEQ ID NO: 1430874 - RNA, 17 nt, Human
uauagaacugaaugaga

SEQ ID NO: 1430875 - RNA, 23 nt, Human
ucaggugcuggggccugguuccc

SEQ ID NO: 1430876 - RNA, 15 nt, Human
ucaggugcuggggcc

SEQ ID NO: 1430877 - RNA, 12 nt, Human
ucaguccaggau

SEQ ID NO: 1430878 - RNA, 18 nt, Human
ucaguccccacagauaac

SEQ ID NO: 1430879 - RNA, 20 nt, Human
ucagucucugagcagugaau

SEQ ID NO: 1430880 - RNA, 17 nt, Human
ucagucucugagcagug

SEQ ID NO: 1430881 - RNA, 15 nt, Human
ucagucucugagcag

SEQ ID NO: 1430882 - RNA, 13 nt, Human
ucagucucugagc

SEQ ID NO: 1430883 - RNA, 22 nt, Human
ucagucucuauaccaauaaagu

SEQ ID NO: 1430884 - RNA, 20 nt, Human
ucagucucucuucucuccag

SEQ ID NO: 1430885 - RNA, 23 nt, Human
ucagucucuauaccaauaaagug

SEQ ID NO: 1430886 - RNA, 21 nt, Human
ucaguguuaaaugugaugaau

SEQ ID NO: 1430887 - RNA, 17 nt, Human
ucaguguuaaaugugau

SEQ ID NO: 1430888 - RNA, 15 nt, Human
ucaguguuaaaugug

SEQ ID NO: 1430889 - RNA, 13 nt, Human
ucaguuaagaaau

SEQ ID NO: 1430890 - RNA, 16 nt, Human
ucaguuaacuauugca

SEQ ID NO: 1430891 - RNA, 20 nt, Human
ucaguuaacuauugcauuua

SEQ ID NO: 1430892 - RNA, 19 nt, Human
ucaucaagagaauuugggg

SEQ ID NO: 1430893 - RNA, 21 nt, Human
ucaucaagagaauuuggggcu

SEQ ID NO: 1430894 - RNA, 13 nt, Human
ucaucaagagaau

SEQ ID NO: 1430895 - RNA, 22 nt, Human
ucaucaacugaaugaggucagc

SEQ ID NO: 1430896 - RNA, 15 nt, Human
ucaucaacugaauga

SEQ ID NO: 1430897 - RNA, 13 nt, Human
ucaucaacugaau

SEQ ID NO: 1430898 - RNA, 16 nt, Human
ucaucaucauggccag

SEQ ID NO: 1430899 - RNA, 17 nt, Human
ucauccaaguuaaaugu

SEQ ID NO: 1430900 - RNA, 22 nt, Human
ucaucauucucugucucaucca

SEQ ID NO: 1430901 - RNA, 20 nt, Human
ucaucauucucugucucauc

SEQ ID NO: 1430902 - RNA, 17 nt, Human
ucaucaucauggccagc

SEQ ID NO: 1430903 - RNA, 16 nt, Human
ucaguucuaggaaaau

SEQ ID NO: 1430904 - RNA, 15 nt, Human
ucaguucuaggaaaa

SEQ ID NO: 1430905 - RNA, 13 nt, Human
ucaguucuaggaa

SEQ ID NO: 1430906 - RNA, 22 nt, Human
ucauacuugaacguuuucuaau

SEQ ID NO: 1430907 - RNA, 21 nt, Human
ucauacuugaacguuuucuaa

SEQ ID NO: 1430908 - RNA, 19 nt, Human
ucauacuugaacguuuucu

SEQ ID NO: 1430909 - RNA, 15 nt, Human
ucauacuugaacguu

SEQ ID NO: 1430910 - RNA, 14 nt, Human
ucauacuugaacgu

SEQ ID NO: 1430911 - RNA, 12 nt, Human
ucauacuugaac

SEQ ID NO: 1430912 - RNA, 23 nt, Human
ucauagaaauguaacuuuuguaa

SEQ ID NO: 1430913 - RNA, 22 nt, Human
ucauagaaauguaacuuuugua

SEQ ID NO: 1430914 - RNA, 13 nt, Human
ucauagaaaugua

SEQ ID NO: 1430915 - RNA, 23 nt, Human
ucauacuugaacguuuucuaauu

SEQ ID NO: 1430916 - RNA, 22 nt, Human
ucauauuuuucauagcuaaaaa

SEQ ID NO: 1430917 - RNA, 17 nt, Human
ucaucuuucuuccaaac

SEQ ID NO: 1430918 - RNA, 14 nt, Human
ucaucuuucuucca

SEQ ID NO: 1430919 - RNA, 23 nt, Human
ucaucuggcaacaucuuuauccg

SEQ ID NO: 1430920 - RNA, 19 nt, Human
ucaucuggcaacaucuuua

SEQ ID NO: 1430921 - RNA, 13 nt, Human
ucaucuggaacca

SEQ ID NO: 1430922 - RNA, 17 nt, Human
ucaucuggauuccagag

SEQ ID NO: 1430923 - RNA, 12 nt, Human
ucauccacccca

SEQ ID NO: 1430924 - RNA, 19 nt, Human
ucauccacauacccugacc

SEQ ID NO: 1430925 - RNA, 19 nt, Human
ucauccaaguuaaauguag

SEQ ID NO: 1430926 - RNA, 14 nt, Human
ucaucugcuggucc

SEQ ID NO: 1430927 - RNA, 13 nt, Human
ucaucugcugguc

SEQ ID NO: 1430928 - RNA, 16 nt, Human
ucauccaccccauccc

SEQ ID NO: 1430929 - RNA, 14 nt, Human
ucauccaccccauc

SEQ ID NO: 1430930 - RNA, 19 nt, Human
ucaucugcugguccguggg

SEQ ID NO: 1430931 - RNA, 12 nt, Human
ucaucuggaacc

SEQ ID NO: 1430932 - RNA, 18 nt, Human
ucaucuggaaccaucaga

SEQ ID NO: 1430933 - RNA, 19 nt, Human
ucauggaauuggagcucgu

SEQ ID NO: 1430934 - RNA, 13 nt, Human
ucaugaaagauuc

SEQ ID NO: 1430935 - RNA, 15 nt, Human
ucaugaaagauucaa

SEQ ID NO: 1430936 - RNA, 21 nt, Human
ucauggaauuggagcucgugg

SEQ ID NO: 1430937 - RNA, 16 nt, Human
ucauggccagcuggag

SEQ ID NO: 1430938 - RNA, 18 nt, Human
ucauggccccucugaccu

SEQ ID NO: 1430939 - RNA, 14 nt, Human
ucauggccccucug

SEQ ID NO: 1430940 - RNA, 13 nt, Human
ucauggccccucu

SEQ ID NO: 1430941 - RNA, 22 nt, Human
ucauggcagauguaggagggac

SEQ ID NO: 1430942 - RNA, 21 nt, Human
ucauggcagauguaggaggga

SEQ ID NO: 1430943 - RNA, 18 nt, Human
ucauggcagauguaggag

SEQ ID NO: 1430944 - RNA, 22 nt, Human
ucauggcagaaggcaaacccau

SEQ ID NO: 1430945 - RNA, 23 nt, Human
ucauggaugggggaacucagauc

SEQ ID NO: 1430946 - RNA, 24 nt, Human
ucauggacuucugccagcauaaua

SEQ ID NO: 1430947 - RNA, 20 nt, Human
ucagccucccaaguagcugg

SEQ ID NO: 1430948 - RNA, 23 nt, Human
ucagccuccauccuacccccugu

SEQ ID NO: 1430949 - RNA, 19 nt, Human
ucagccugaaccccagggc

SEQ ID NO: 1430950 - RNA, 17 nt, Human
ucagccugaaccccagg

SEQ ID NO: 1430951 - RNA, 17 nt, Human
ucagcuccuuccuggag

SEQ ID NO: 1430952 - RNA, 16 nt, Human
ucagcuccuuccugga

SEQ ID NO: 1430953 - RNA, 15 nt, Human
ucagcuccuuccugg

SEQ ID NO: 1430954 - RNA, 14 nt, Human
ucagcuccuuccug

SEQ ID NO: 1430955 - RNA, 18 nt, Human
ucagcuccugaccaguug

SEQ ID NO: 1430956 - RNA, 17 nt, Human
ucagcuccugaccaguu

SEQ ID NO: 1430957 - RNA, 12 nt, Human
ucagcuccugac

SEQ ID NO: 1430958 - RNA, 11 nt, Human
ucagcuccuga

SEQ ID NO: 1430959 - RNA, 17 nt, Human
ucaggaggcaggaccuu

SEQ ID NO: 1430960 - RNA, 19 nt, Human
ucaggaggaauacugaaca

SEQ ID NO: 1430961 - RNA, 17 nt, Human
ucaggaggaauacugaa

SEQ ID NO: 1430962 - RNA, 23 nt, Human
ucaggaggaaggcuuacacccac

SEQ ID NO: 1430963 - RNA, 16 nt, Human
ucaggaggaaggcuua

SEQ ID NO: 1430964 - RNA, 20 nt, Human
ucaggagagaguugaaccua

SEQ ID NO: 1430965 - RNA, 17 nt, Human
ucaggacuugaaagaaa

SEQ ID NO: 1430966 - RNA, 16 nt, Human
ucaggacuugaaagaa

SEQ ID NO: 1430967 - RNA, 23 nt, Human
ucaggacugggagcccccagccu

SEQ ID NO: 1430968 - RNA, 22 nt, Human
ucaggacugggagcccccagcc

SEQ ID NO: 1430969 - RNA, 21 nt, Human
ucaggacugggagcccccagc

SEQ ID NO: 1430970 - RNA, 15 nt, Human
ucaggacugggagcc

SEQ ID NO: 1430971 - RNA, 14 nt, Human
ucaggacugggagc

SEQ ID NO: 1430972 - RNA, 13 nt, Human
ucaggacugggag

SEQ ID NO: 1430973 - RNA, 12 nt, Human
ucaggacuggga

SEQ ID NO: 1430974 - RNA, 19 nt, Human
ucaggacccagaggaaggg

SEQ ID NO: 1430975 - RNA, 16 nt, Human
ucaggacccagaggaa

SEQ ID NO: 1430976 - RNA, 15 nt, Human
ucaggacccagagga

SEQ ID NO: 1430977 - RNA, 20 nt, Human
ucaggaccaaagcuuucaug

SEQ ID NO: 1430978 - RNA, 15 nt, Human
ucaggacagaugcca

SEQ ID NO: 1430979 - RNA, 14 nt, Human
ucaggacagaugcc

SEQ ID NO: 1430980 - RNA, 19 nt, Human
ucagcucucaguugcagcc

SEQ ID NO: 1430981 - RNA, 22 nt, Human
ucagcagggacuguaaacacag

SEQ ID NO: 1430982 - RNA, 18 nt, Human
ucagcagggacuguaaac

SEQ ID NO: 1430983 - RNA, 17 nt, Human
ucagcagggacuguaaa

SEQ ID NO: 1430984 - RNA, 17 nt, Human
ucagcacgauuucuguu

SEQ ID NO: 1430985 - RNA, 18 nt, Human
ucagcacgauuucuguuu

SEQ ID NO: 1430986 - RNA, 15 nt, Human
ucagcacgauuucug

SEQ ID NO: 1430987 - RNA, 16 nt, Human
ucagcacgauuucugu

SEQ ID NO: 1430988 - RNA, 23 nt, Human
ucagaucaguguaccauuugccu

SEQ ID NO: 1430989 - RNA, 16 nt, Human
ucagauccagggacag

SEQ ID NO: 1430990 - RNA, 15 nt, Human
ucagauccagggaca

SEQ ID NO: 1430991 - RNA, 14 nt, Human
ucagauccagggac

SEQ ID NO: 1430992 - RNA, 18 nt, Human
ucagauccaggagcucca

SEQ ID NO: 1430993 - RNA, 16 nt, Human
ucagauccaggagcuc

SEQ ID NO: 1430994 - RNA, 15 nt, Human
ucagauccaggagcu

SEQ ID NO: 1430995 - RNA, 14 nt, Human
ucagauccaggagc

SEQ ID NO: 1430996 - RNA, 20 nt, Human
ucagcacaucucaacaggcc

SEQ ID NO: 1430997 - RNA, 16 nt, Human
ucagcacaucucaaca

SEQ ID NO: 1430998 - RNA, 14 nt, Human
ucagcacaucucaa

SEQ ID NO: 1430999 - RNA, 14 nt, Human
ucagauccuccuca

SEQ ID NO: 1431000 - RNA, 15 nt, Human
ucagauccuccucau

SEQ ID NO: 1431001 - RNA, 13 nt, Human
ucagauccuccuc

SEQ ID NO: 1431002 - RNA, 15 nt, Human
ucagaucucuaacuu

SEQ ID NO: 1431003 - RNA, 22 nt, Human
ucagauaagguaaaaugccaug

SEQ ID NO: 1431004 - RNA, 18 nt, Human
ucagauaugauucaaaug

SEQ ID NO: 1431005 - RNA, 17 nt, Human
ucagauaugauucaaau

SEQ ID NO: 1431006 - RNA, 17 nt, Human
ucagauagaaugacagu

SEQ ID NO: 1431007 - RNA, 20 nt, Human
ucagauaagguaaaaugcca

SEQ ID NO: 1431008 - RNA, 16 nt, Human
uaucauuuaauaauau

SEQ ID NO: 1431009 - RNA, 19 nt, Human
uaucauugcuuccuccucc

SEQ ID NO: 1431010 - RNA, 14 nt, Human
uaucauuccaaagg

SEQ ID NO: 1431011 - RNA, 22 nt, Human
uaucauucaaguguaaaauauu

SEQ ID NO: 1431012 - RNA, 23 nt, Human
ucagauaagguaaaaugccauga

SEQ ID NO: 1431013 - RNA, 14 nt, Human
uaucauuuaauaau

SEQ ID NO: 1431014 - RNA, 23 nt, Human
uccaagccccaucuucuaaaugg

SEQ ID NO: 1431015 - RNA, 19 nt, Human
uccaagccccaucuucuaa

SEQ ID NO: 1431016 - RNA, 15 nt, Human
uccaagccccaucuu

SEQ ID NO: 1431017 - RNA, 21 nt, Human
uccaagcccagcccauggaga

SEQ ID NO: 1431018 - RNA, 19 nt, Human
uccaagcccagcccaugga

SEQ ID NO: 1431019 - RNA, 19 nt, Human
uccaagcagcuuagaguug

SEQ ID NO: 1431020 - RNA, 15 nt, Human
uccaagcagcuuaga

SEQ ID NO: 1431021 - RNA, 14 nt, Human
uccaagcagcuuag

SEQ ID NO: 1431022 - RNA, 23 nt, Human
uccaagcagccugagcaacucuu

SEQ ID NO: 1431023 - RNA, 22 nt, Human
uccaagcagcuuagaguuggcc

SEQ ID NO: 1431024 - RNA, 22 nt, Human
uccaagcuaagcacugccacug

SEQ ID NO: 1431025 - RNA, 14 nt, Human
uccaagcuaagcac

SEQ ID NO: 1431026 - RNA, 21 nt, Human
uccacaccuuuuauugacaca

SEQ ID NO: 1431027 - RNA, 15 nt, Human
uccacaccuuuuauu

SEQ ID NO: 1431028 - RNA, 15 nt, Human
uccacaccugcggcc

SEQ ID NO: 1431029 - RNA, 18 nt, Human
uccacaccugcggcccaa

SEQ ID NO: 1431030 - RNA, 14 nt, Human
uccacaccugcggc

SEQ ID NO: 1431031 - RNA, 13 nt, Human
uccacaccugcgg

SEQ ID NO: 1431032 - RNA, 13 nt, Human
uccacacaugaau

SEQ ID NO: 1431033 - RNA, 17 nt, Human
uccacacaugaaucugc

SEQ ID NO: 1431034 - RNA, 19 nt, Human
uccacacagugcucaaggc

SEQ ID NO: 1431035 - RNA, 20 nt, Human
uccacagcaaccccaggcug

SEQ ID NO: 1431036 - RNA, 19 nt, Human
uccacagcaaccccaggcu

SEQ ID NO: 1431037 - RNA, 18 nt, Human
uccacagccugcaaguca

SEQ ID NO: 1431038 - RNA, 15 nt, Human
uccacagccugcaag

SEQ ID NO: 1431039 - RNA, 23 nt, Human
uccacagcugccucuucccucuu

SEQ ID NO: 1431040 - RNA, 18 nt, Human
ucauguacaagaugaagg

SEQ ID NO: 1431041 - RNA, 17 nt, Human
ucauguacaagaugaag

SEQ ID NO: 1431042 - RNA, 16 nt, Human
ucauguacaagaugaa

SEQ ID NO: 1431043 - RNA, 23 nt, Human
ucaugucaaauauuuagauguaa

SEQ ID NO: 1431044 - RNA, 16 nt, Human
uccaagacucuagagu

SEQ ID NO: 1431045 - RNA, 15 nt, Human
uccaagacucuagag

SEQ ID NO: 1431046 - RNA, 14 nt, Human
uccaagacucuaga

SEQ ID NO: 1431047 - RNA, 13 nt, Human
uccaagacucuag

SEQ ID NO: 1431048 - RNA, 21 nt, Human
uccaagagcuacauaauuuag

SEQ ID NO: 1431049 - RNA, 15 nt, Human
uccaagagucuaaag

SEQ ID NO: 1431050 - RNA, 23 nt, Human
uccaagacucuagaguccaaggu

SEQ ID NO: 1431051 - RNA, 20 nt, Human
uccaagacucuagaguccaa

SEQ ID NO: 1431052 - RNA, 17 nt, Human
uccaagcaaaugugaau

SEQ ID NO: 1431053 - RNA, 17 nt, Human
uccagggcccccaucuc

SEQ ID NO: 1431054 - RNA, 23 nt, Human
uccaggagaaggccaauuccuau

SEQ ID NO: 1431055 - RNA, 20 nt, Human
uccaggagaaggccaauucc

SEQ ID NO: 1431056 - RNA, 16 nt, Human
uccaggagaaggccaa

SEQ ID NO: 1431057 - RNA, 23 nt, Human
uccaggacuauauuugggccugc

SEQ ID NO: 1431058 - RNA, 20 nt, Human
uccaggacuauauuugggcc

SEQ ID NO: 1431059 - RNA, 22 nt, Human
uccaggaaaguggccaagaagc

SEQ ID NO: 1431060 - RNA, 19 nt, Human
uccagcugggcucugcaau

SEQ ID NO: 1431061 - RNA, 15 nt, Human
uccagaugccacaau

SEQ ID NO: 1431062 - RNA, 19 nt, Human
uccagaugcagggcaguca

SEQ ID NO: 1431063 - RNA, 18 nt, Human
uccagaugcagggcaguc

SEQ ID NO: 1431064 - RNA, 17 nt, Human
uccagaugcagggcagu

SEQ ID NO: 1431065 - RNA, 16 nt, Human
uccagaugcagggcag

SEQ ID NO: 1431066 - RNA, 17 nt, Human
uccagauugacgacaag

SEQ ID NO: 1431067 - RNA, 17 nt, Human
uccagauuagagccugu

SEQ ID NO: 1431068 - RNA, 22 nt, Human
uccacccuggccgaguccaagc

SEQ ID NO: 1431069 - RNA, 16 nt, Human
uccacaggcuucugag

SEQ ID NO: 1431070 - RNA, 15 nt, Human
uccacuuuaucuuga

SEQ ID NO: 1431071 - RNA, 18 nt, Human
uccacuuucagcugucuu

SEQ ID NO: 1431072 - RNA, 17 nt, Human
uccacuuucagcugucu

SEQ ID NO: 1431073 - RNA, 16 nt, Human
uccacuuucagcuguc

SEQ ID NO: 1431074 - RNA, 15 nt, Human
uccacuuucagcugu

SEQ ID NO: 1431075 - RNA, 14 nt, Human
uccacuuucagcug

SEQ ID NO: 1431076 - RNA, 13 nt, Human
uccacuuucagcu

SEQ ID NO: 1431077 - RNA, 12 nt, Human
uccacuuucagc

SEQ ID NO: 1431078 - RNA, 15 nt, Human
uccacuucugacagc

SEQ ID NO: 1431079 - RNA, 14 nt, Human
uccacuucugacag

SEQ ID NO: 1431080 - RNA, 23 nt, Human
uccacuuauagccucugucuggc

SEQ ID NO: 1431081 - RNA, 22 nt, Human
uccacuuauagccucugucugg

SEQ ID NO: 1431082 - RNA, 20 nt, Human
uccacuuauagccucugucu

SEQ ID NO: 1431083 - RNA, 16 nt, Human
uccacuuauagccucu

SEQ ID NO: 1431084 - RNA, 17 nt, Human
uccacuuuaucuugaau

SEQ ID NO: 1431085 - RNA, 12 nt, Human
uccagagggcac

SEQ ID NO: 1431086 - RNA, 20 nt, Human
uccagaggcuauuauuuuca

SEQ ID NO: 1431087 - RNA, 15 nt, Human
uccagaugcagggca

SEQ ID NO: 1431088 - RNA, 17 nt, Human
uccagagggcacucugc

SEQ ID NO: 1431089 - RNA, 15 nt, Human
uccagagucccugcc

SEQ ID NO: 1431090 - RNA, 17 nt, Human
uccagagcacugcucca

SEQ ID NO: 1431091 - RNA, 16 nt, Human
ucccagggccugucuc

SEQ ID NO: 1431092 - RNA, 16 nt, Human
ucccagggacaccugg

SEQ ID NO: 1431093 - RNA, 21 nt, Human
ucccagggagcaugagaggag

SEQ ID NO: 1431094 - RNA, 22 nt, Human
ucccagggagcaugagaggagg

SEQ ID NO: 1431095 - RNA, 20 nt, Human
ucccaggcaaggcuguggac

SEQ ID NO: 1431096 - RNA, 19 nt, Human
ucccaggcaaggcugugga

SEQ ID NO: 1431097 - RNA, 17 nt, Human
ucccaggcaaggcugug

SEQ ID NO: 1431098 - RNA, 16 nt, Human
ucccaggcaaggcugu

SEQ ID NO: 1431099 - RNA, 15 nt, Human
ucccaggcaaggcug

SEQ ID NO: 1431100 - RNA, 18 nt, Human
ucccacuuaaaaauuaaa

SEQ ID NO: 1431101 - RNA, 13 nt, Human
ucccacucuccua

SEQ ID NO: 1431102 - RNA, 16 nt, Human
ucccacucuccuaggc

SEQ ID NO: 1431103 - RNA, 17 nt, Human
ucccacuccaagcccag

SEQ ID NO: 1431104 - RNA, 22 nt, Human
ucccacuccaagcccagcccau

SEQ ID NO: 1431105 - RNA, 13 nt, Human
ucccacuccaagc

SEQ ID NO: 1431106 - RNA, 14 nt, Human
ucccacuccaagcc

SEQ ID NO: 1431107 - RNA, 13 nt, Human
ucccaggcaaggc

SEQ ID NO: 1431108 - RNA, 21 nt, Human
ucccacuucagccucccaagc

SEQ ID NO: 1431109 - RNA, 17 nt, Human
ucccacggccuuucuag

SEQ ID NO: 1431110 - RNA, 15 nt, Human
ucccacggccuuucu

SEQ ID NO: 1431111 - RNA, 20 nt, Human
ucccaccuuucgggccaugu

SEQ ID NO: 1431112 - RNA, 22 nt, Human
ucccacucacaacagcugccug

SEQ ID NO: 1431113 - RNA, 17 nt, Human
ucccacucacaacagcu

SEQ ID NO: 1431114 - RNA, 21 nt, Human
ucccaccuccugacacccuuc

SEQ ID NO: 1431115 - RNA, 20 nt, Human
ucccaccuccugacacccuu

SEQ ID NO: 1431116 - RNA, 18 nt, Human
ucccaccuccccuugggc

SEQ ID NO: 1431117 - RNA, 17 nt, Human
ucccaagcggugucucu

SEQ ID NO: 1431118 - RNA, 13 nt, Human
ucccaagagcuac

SEQ ID NO: 1431119 - RNA, 22 nt, Human
ucccaagagcaucaugccucug

SEQ ID NO: 1431120 - RNA, 21 nt, Human
ucccaagcaccugggauuaca

SEQ ID NO: 1431121 - RNA, 17 nt, Human
ucccaccuccccuuggg

SEQ ID NO: 1431122 - RNA, 15 nt, Human
ucccaccuccccuug

SEQ ID NO: 1431123 - RNA, 17 nt, Human
ucccaccuccaucccag

SEQ ID NO: 1431124 - RNA, 15 nt, Human
ucccaccuccauccc

SEQ ID NO: 1431125 - RNA, 16 nt, Human
ucccaagcggugucuc

SEQ ID NO: 1431126 - RNA, 20 nt, Human
ucccaagcaccugggauuac

SEQ ID NO: 1431127 - RNA, 21 nt, Human
uccaugcacccucauacacag

SEQ ID NO: 1431128 - RNA, 12 nt, Human
uccaugauucua

SEQ ID NO: 1431129 - RNA, 19 nt, Human
uccaugcguguuucugacu

SEQ ID NO: 1431130 - RNA, 18 nt, Human
uccaugcguguuucugac

SEQ ID NO: 1431131 - RNA, 16 nt, Human
uccaugcgcucagggc

SEQ ID NO: 1431132 - RNA, 15 nt, Human
uccaugcgcucaggg

SEQ ID NO: 1431133 - RNA, 20 nt, Human
uccaugcguguuucugacuc

SEQ ID NO: 1431134 - RNA, 16 nt, Human
uccaugugcccaguua

SEQ ID NO: 1431135 - RNA, 14 nt, Human
uccaugugcccagu

SEQ ID NO: 1431136 - RNA, 15 nt, Human
ucccaacacugccag

SEQ ID NO: 1431137 - RNA, 14 nt, Human
ucccaacacugcca

SEQ ID NO: 1431138 - RNA, 16 nt, Human
ucccaacacugccagc

SEQ ID NO: 1431139 - RNA, 13 nt, Human
uccauaucacaca

SEQ ID NO: 1431140 - RNA, 15 nt, Human
uccauaucacacaca

SEQ ID NO: 1431141 - RNA, 14 nt, Human
uccagggcuaguga

SEQ ID NO: 1431142 - RNA, 18 nt, Human
uccauaaugcauucuucu

SEQ ID NO: 1431143 - RNA, 22 nt, Human
uccauaaugcauucuucucugu

SEQ ID NO: 1431144 - RNA, 12 nt, Human
uccauacauuug

SEQ ID NO: 1431145 - RNA, 23 nt, Human
uccucgagaucccaacacugcca

SEQ ID NO: 1431146 - RNA, 16 nt, Human
uccucgagaucccaac

SEQ ID NO: 1431147 - RNA, 11 nt, Human
uccuccuggaa

SEQ ID NO: 1431148 - RNA, 12 nt, Human
uccuccugcuca

SEQ ID NO: 1431149 - RNA, 14 nt, Human
uccuccuuuuucca

SEQ ID NO: 1431150 - RNA, 16 nt, Human
uccuccugggcccucu

SEQ ID NO: 1431151 - RNA, 15 nt, Human
uccuccugggcccuc

SEQ ID NO: 1431152 - RNA, 14 nt, Human
uccuccugggcccu

SEQ ID NO: 1431153 - RNA, 15 nt, Human
uccucuggcuuggcc

SEQ ID NO: 1431154 - RNA, 17 nt, Human
uccucuggagccagccg

SEQ ID NO: 1431155 - RNA, 13 nt, Human
uccucuggagcca

SEQ ID NO: 1431156 - RNA, 22 nt, Human
uccucuggcuuggccacagcca

SEQ ID NO: 1431157 - RNA, 19 nt, Human
uccucugucagucacagcc

SEQ ID NO: 1431158 - RNA, 23 nt, Human
uccucuggcuuggccacagccag

SEQ ID NO: 1431159 - RNA, 22 nt, Human
uccucugucagucacagccacc

SEQ ID NO: 1431160 - RNA, 21 nt, Human
uccucugucagucacagccac

SEQ ID NO: 1431161 - RNA, 17 nt, Human
uccuccgucaccucaga

SEQ ID NO: 1431162 - RNA, 20 nt, Human
uccuccugcagaccacgccc

SEQ ID NO: 1431163 - RNA, 15 nt, Human
uccuccugcagacca

SEQ ID NO: 1431164 - RNA, 12 nt, Human
uccuccugcaga

SEQ ID NO: 1431165 - RNA, 12 nt, Human
uccuccucaggc

SEQ ID NO: 1431166 - RNA, 14 nt, Human
uccuaagccuaaaa

SEQ ID NO: 1431167 - RNA, 16 nt, Human
uccggauccuaagcau

SEQ ID NO: 1431168 - RNA, 14 nt, Human
uccuaagcaucuaa

SEQ ID NO: 1431169 - RNA, 13 nt, Human
uccuaagcaucua

SEQ ID NO: 1431170 - RNA, 21 nt, Human
uccuaagcaacuaggccuuca

SEQ ID NO: 1431171 - RNA, 19 nt, Human
uccuaagagugcugggcau

SEQ ID NO: 1431172 - RNA, 17 nt, Human
uccuaagagugcugggc

SEQ ID NO: 1431173 - RNA, 21 nt, Human
uccuauugugcaauguaaaua

SEQ ID NO: 1431174 - RNA, 20 nt, Human
uccuaugcuuugaaacagaa

SEQ ID NO: 1431175 - RNA, 14 nt, Human
uccuaugcuuugaa

SEQ ID NO: 1431176 - RNA, 13 nt, Human
uccuaugcuuuga

SEQ ID NO: 1431177 - RNA, 22 nt, Human
uccuaugcaugguuucagcacu

SEQ ID NO: 1431178 - RNA, 21 nt, Human
uccuaugcaugguuucagcac

SEQ ID NO: 1431179 - RNA, 20 nt, Human
uccuaugcaugguuucagca

SEQ ID NO: 1431180 - RNA, 12 nt, Human
uccuaugcaugg

SEQ ID NO: 1431181 - RNA, 20 nt, Human
uccuaucugggcuuccugga

SEQ ID NO: 1431182 - RNA, 19 nt, Human
uccuaucugggcuuccugg

SEQ ID NO: 1431183 - RNA, 18 nt, Human
uccuaucugggcuuccug

SEQ ID NO: 1431184 - RNA, 16 nt, Human
uccuaucugggcuucc

SEQ ID NO: 1431185 - RNA, 13 nt, Human
uccuaucugggcu

SEQ ID NO: 1431186 - RNA, 23 nt, Human
uccuaucuccagcggcccuguca

SEQ ID NO: 1431187 - RNA, 19 nt, Human
uccuaucuccagcggcccu

SEQ ID NO: 1431188 - RNA, 17 nt, Human
uccuaucuccagcggcc

SEQ ID NO: 1431189 - RNA, 17 nt, Human
uccuaagcaucuaaguu

SEQ ID NO: 1431190 - RNA, 13 nt, Human
uccuauccuccua

SEQ ID NO: 1431191 - RNA, 16 nt, Human
uccuaagcaucuaagu

SEQ ID NO: 1431192 - RNA, 15 nt, Human
uccuaagcaucuaag

SEQ ID NO: 1431193 - RNA, 15 nt, Human
uccgcccccagguag

SEQ ID NO: 1431194 - RNA, 16 nt, Human
uccgcccccagguagg

SEQ ID NO: 1431195 - RNA, 14 nt, Human
uccgcccccaggua

SEQ ID NO: 1431196 - RNA, 21 nt, Human
uccgcccacaggaagccugca

SEQ ID NO: 1431197 - RNA, 21 nt, Human
uccgaggacccaggaaaggca

SEQ ID NO: 1431198 - RNA, 16 nt, Human
uccgagaggugggcca

SEQ ID NO: 1431199 - RNA, 16 nt, Human
uccgcccugccacuca

SEQ ID NO: 1431200 - RNA, 15 nt, Human
uccgcccugccacuc

SEQ ID NO: 1431201 - RNA, 14 nt, Human
uccgcccugccacu

SEQ ID NO: 1431202 - RNA, 13 nt, Human
uccgcccugccac

SEQ ID NO: 1431203 - RNA, 12 nt, Human
uccggaaagaag

SEQ ID NO: 1431204 - RNA, 15 nt, Human
uccgacugcuuugga

SEQ ID NO: 1431205 - RNA, 12 nt, Human
uccgacugcuuu

SEQ ID NO: 1431206 - RNA, 16 nt, Human
uccgacucacaccacu

SEQ ID NO: 1431207 - RNA, 17 nt, Human
uccgacucuucugagca

SEQ ID NO: 1431208 - RNA, 23 nt, Human
ucccugggagggacaugcuuagc

SEQ ID NO: 1431209 - RNA, 22 nt, Human
ucccugcauggcauccuccagc

SEQ ID NO: 1431210 - RNA, 23 nt, Human
ucccugcauggcauccuccagcc

SEQ ID NO: 1431211 - RNA, 20 nt, Human
ucccuggggcuagggggagc

SEQ ID NO: 1431212 - RNA, 16 nt, Human
ucccugggccuugggc

SEQ ID NO: 1431213 - RNA, 15 nt, Human
ucccugggccuuggg

SEQ ID NO: 1431214 - RNA, 14 nt, Human
ucccugggccuugg

SEQ ID NO: 1431215 - RNA, 13 nt, Human
ucccugggccuug

SEQ ID NO: 1431216 - RNA, 21 nt, Human
ucccugggccugcugcugaga

SEQ ID NO: 1431217 - RNA, 20 nt, Human
ucccugggccugcugcugag

SEQ ID NO: 1431218 - RNA, 19 nt, Human
ucccugggccugcugcuga

SEQ ID NO: 1431219 - RNA, 18 nt, Human
ucccugggccugcugcug

SEQ ID NO: 1431220 - RNA, 17 nt, Human
ucccugggccugcugcu

SEQ ID NO: 1431221 - RNA, 16 nt, Human
ucccugggccugcugc

SEQ ID NO: 1431222 - RNA, 15 nt, Human
ucccugggccugcug

SEQ ID NO: 1431223 - RNA, 14 nt, Human
ucccugggccugcu

SEQ ID NO: 1431224 - RNA, 13 nt, Human
ucccugggccugc

SEQ ID NO: 1431225 - RNA, 12 nt, Human
ucccugggccug

SEQ ID NO: 1431226 - RNA, 19 nt, Human
ucccugggccuugggcucc

SEQ ID NO: 1431227 - RNA, 21 nt, Human
ucccugcauggcauccuccag

SEQ ID NO: 1431228 - RNA, 20 nt, Human
ucccugcauggcauccucca

SEQ ID NO: 1431229 - RNA, 13 nt, Human
ucccugcauggca

SEQ ID NO: 1431230 - RNA, 21 nt, Human
ucccucuuagucuagguccuu

SEQ ID NO: 1431231 - RNA, 16 nt, Human
ucccucucccaggccc

SEQ ID NO: 1431232 - RNA, 15 nt, Human
ucccucucccaggcc

SEQ ID NO: 1431233 - RNA, 14 nt, Human
ucccucucccaggc

SEQ ID NO: 1431234 - RNA, 13 nt, Human
ucccucucccagg

SEQ ID NO: 1431235 - RNA, 12 nt, Human
ucccucucccag

SEQ ID NO: 1431236 - RNA, 21 nt, Human
ucccucucauuuagccugucc

SEQ ID NO: 1431237 - RNA, 22 nt, Human
ucccucucauuuagccuguccu

SEQ ID NO: 1431238 - RNA, 10 nt, Human
ucccucucau

SEQ ID NO: 1431239 - RNA, 16 nt, Human
ucccucucaggaucca

SEQ ID NO: 1431240 - RNA, 17 nt, Human
ucccucucaacacccag

SEQ ID NO: 1431241 - RNA, 14 nt, Human
ucccucucuggaga

SEQ ID NO: 1431242 - RNA, 15 nt, Human
ucccucucuggagaa

SEQ ID NO: 1431243 - RNA, 13 nt, Human
ucccucucuggag

SEQ ID NO: 1431244 - RNA, 22 nt, Human
ucccucugcagucucuauacca

SEQ ID NO: 1431245 - RNA, 16 nt, Human
ucccucugcagucucu

SEQ ID NO: 1431246 - RNA, 14 nt, Human
ucccuccgccccca

SEQ ID NO: 1431247 - RNA, 15 nt, Human
ucccuccgggaccug

SEQ ID NO: 1431248 - RNA, 14 nt, Human
ucccuccgggaccu

SEQ ID NO: 1431249 - RNA, 19 nt, Human
ucccuccgcccccagguag

SEQ ID NO: 1431250 - RNA, 18 nt, Human
ucccuagaaacuuccaaa

SEQ ID NO: 1431251 - RNA, 19 nt, Human
ucccuagaaacuuccaaau

SEQ ID NO: 1431252 - RNA, 18 nt, Human
ucccuagcugugaccucu

SEQ ID NO: 1431253 - RNA, 19 nt, Human
ucccaugaucccuguguug

SEQ ID NO: 1431254 - RNA, 16 nt, Human
ucccaugaucccugug

SEQ ID NO: 1431255 - RNA, 15 nt, Human
ucccaugaucccugu

SEQ ID NO: 1431256 - RNA, 23 nt, Human
ucccaugagcuccuuaaggcucu

SEQ ID NO: 1431257 - RNA, 16 nt, Human
ucccuacccucuagag

SEQ ID NO: 1431258 - RNA, 19 nt, Human
ucccuacccuaaccaaguu

SEQ ID NO: 1431259 - RNA, 13 nt, Human
ucucaaauuucua

SEQ ID NO: 1431260 - RNA, 14 nt, Human
ucucaaauuucuaa

SEQ ID NO: 1431261 - RNA, 16 nt, Human
ucucaaauuucuaaau

SEQ ID NO: 1431262 - RNA, 14 nt, Human
ucuauccucuguaa

SEQ ID NO: 1431263 - RNA, 23 nt, Human
ucucaauuccaacaguuuaauga

SEQ ID NO: 1431264 - RNA, 22 nt, Human
ucucaauuccaacaguuuaaug

SEQ ID NO: 1431265 - RNA, 16 nt, Human
ucucaauuccaacagu

SEQ ID NO: 1431266 - RNA, 15 nt, Human
ucucaauuccaacag

SEQ ID NO: 1431267 - RNA, 13 nt, Human
ucuaugaaauauu

SEQ ID NO: 1431268 - RNA, 18 nt, Human
ucucaaauuucuaaaucu

SEQ ID NO: 1431269 - RNA, 14 nt, Human
ucucagauuucuga

SEQ ID NO: 1431270 - RNA, 18 nt, Human
ucucagaaugucauuuug

SEQ ID NO: 1431271 - RNA, 16 nt, Human
ucucaguuuucauaag

SEQ ID NO: 1431272 - RNA, 15 nt, Human
ucucaguuuucauaa

SEQ ID NO: 1431273 - RNA, 19 nt, Human
ucucaguuugugugucuua

SEQ ID NO: 1431274 - RNA, 18 nt, Human
ucucaguuugugugucuu

SEQ ID NO: 1431275 - RNA, 17 nt, Human
ucucaguuugugugucu

SEQ ID NO: 1431276 - RNA, 16 nt, Human
ucucaguuuguguguc

SEQ ID NO: 1431277 - RNA, 21 nt, Human
ucucaguugcagcccugcugc

SEQ ID NO: 1431278 - RNA, 17 nt, Human
ucucagauuucugagga

SEQ ID NO: 1431279 - RNA, 18 nt, Human
ucucagauuucugaggaa

SEQ ID NO: 1431280 - RNA, 21 nt, Human
ucuaauucuauuaaagugcua

SEQ ID NO: 1431281 - RNA, 20 nt, Human
ucuaaucuagauaucgacuu

SEQ ID NO: 1431282 - RNA, 19 nt, Human
ucuaaucuagauaucgacu

SEQ ID NO: 1431283 - RNA, 18 nt, Human
ucuaaucaugaaacuccc

SEQ ID NO: 1431284 - RNA, 23 nt, Human
ucgucucuuuuacccuggccccu

SEQ ID NO: 1431285 - RNA, 21 nt, Human
ucgucucggccuucacaaucu

SEQ ID NO: 1431286 - RNA, 16 nt, Human
ucguccuuacuccugu

SEQ ID NO: 1431287 - RNA, 19 nt, Human
ucguccuuacuccuguggg

SEQ ID NO: 1431288 - RNA, 15 nt, Human
ucguccuuacuccug

SEQ ID NO: 1431289 - RNA, 19 nt, Human
ucguccucguuuguguucu

SEQ ID NO: 1431290 - RNA, 14 nt, Human
ucguccccaaguga

SEQ ID NO: 1431291 - RNA, 14 nt, Human
ucuaauuuauaaaa

SEQ ID NO: 1431292 - RNA, 13 nt, Human
ucuaauuuauaaa

SEQ ID NO: 1431293 - RNA, 15 nt, Human
ucuaauugcuuauuu

SEQ ID NO: 1431294 - RNA, 18 nt, Human
ucuaauugcuuauuuauu

SEQ ID NO: 1431295 - RNA, 14 nt, Human
ucuaauugcuuauu

SEQ ID NO: 1431296 - RNA, 13 nt, Human
ucuaauugcuuau

SEQ ID NO: 1431297 - RNA, 12 nt, Human
ucuaauugcuua

SEQ ID NO: 1431298 - RNA, 14 nt, Human
ucuaauugccaugu

SEQ ID NO: 1431299 - RNA, 15 nt, Human
ucuaauugccaugua

SEQ ID NO: 1431300 - RNA, 13 nt, Human
ucuaauugccaug

SEQ ID NO: 1431301 - RNA, 15 nt, Human
ucuaauuuuuaagaa

SEQ ID NO: 1431302 - RNA, 15 nt, Human
ucuacuaauuccaca

SEQ ID NO: 1431303 - RNA, 19 nt, Human
ucuacuaaugccucuucau

SEQ ID NO: 1431304 - RNA, 14 nt, Human
ucuaauuuuuaaga

SEQ ID NO: 1431305 - RNA, 21 nt, Human
ucuacucacuuuucccacucc

SEQ ID NO: 1431306 - RNA, 20 nt, Human
ucuacucacuuuucccacuc

SEQ ID NO: 1431307 - RNA, 18 nt, Human
ucuacuaauuccacaccu

SEQ ID NO: 1431308 - RNA, 24 nt, Human
ucuaggcacuguaguucuaagacu

SEQ ID NO: 1431309 - RNA, 22 nt, Human
ucuaggcacuguaguucuaaga

SEQ ID NO: 1431310 - RNA, 21 nt, Human
ucuaggcacuguaguucuaag

SEQ ID NO: 1431311 - RNA, 15 nt, Human
ucuaggcacuguagu

SEQ ID NO: 1431312 - RNA, 21 nt, Human
ucuaggcaguucaaagcagga

SEQ ID NO: 1431313 - RNA, 15 nt, Human
ucuagguccccauac

SEQ ID NO: 1431314 - RNA, 17 nt, Human
ucuagguaggaaaugug

SEQ ID NO: 1431315 - RNA, 21 nt, Human
ucuagguacgaugacaguguu

SEQ ID NO: 1431316 - RNA, 15 nt, Human
ucuagguaaauuaca

SEQ ID NO: 1431317 - RNA, 14 nt, Human
ucuagguucuaaaa

SEQ ID NO: 1431318 - RNA, 17 nt, Human
ucuagguccccauacuc

SEQ ID NO: 1431319 - RNA, 23 nt, Human
ucuagguucuaaaaauugugauc

SEQ ID NO: 1431320 - RNA, 13 nt, Human
ucuauauuuuaca

SEQ ID NO: 1431321 - RNA, 13 nt, Human
ucggaggaagccc

SEQ ID NO: 1431322 - RNA, 12 nt, Human
ucggaggaagcc

SEQ ID NO: 1431323 - RNA, 19 nt, Human
ucggaaaaauaaucaaaag

SEQ ID NO: 1431324 - RNA, 13 nt, Human
ucggaaaaauaau

SEQ ID NO: 1431325 - RNA, 19 nt, Human
ucgcuuuauuggcugagau

SEQ ID NO: 1431326 - RNA, 14 nt, Human
ucggagcccugucu

SEQ ID NO: 1431327 - RNA, 15 nt, Human
ucggagcccugucuc

SEQ ID NO: 1431328 - RNA, 21 nt, Human
ucgcuucuugccucugugcug

SEQ ID NO: 1431329 - RNA, 16 nt, Human
ucgcccauccccuuga

SEQ ID NO: 1431330 - RNA, 15 nt, Human
ucggaaaacaugcua

SEQ ID NO: 1431331 - RNA, 18 nt, Human
ucggaaaacaugcuacac

SEQ ID NO: 1431332 - RNA, 16 nt, Human
ucgccacacaguauuu

SEQ ID NO: 1431333 - RNA, 20 nt, Human
ucgcauggucacacacugau

SEQ ID NO: 1431334 - RNA, 19 nt, Human
ucgcauggucacacacuga

SEQ ID NO: 1431335 - RNA, 16 nt, Human
ucgcagccacccugag

SEQ ID NO: 1431336 - RNA, 14 nt, Human
ucgcagccacccug

SEQ ID NO: 1431337 - RNA, 13 nt, Human
ucgcagccacccu

SEQ ID NO: 1431338 - RNA, 12 nt, Human
ucgcagccaccc

SEQ ID NO: 1431339 - RNA, 21 nt, Human
ucgauuagacuggacagcuug

SEQ ID NO: 1431340 - RNA, 22 nt, Human
ucgauuagacuggacagcuugu

SEQ ID NO: 1431341 - RNA, 18 nt, Human
ucgauuagacuggacagc

SEQ ID NO: 1431342 - RNA, 14 nt, Human
ucgauuagacugga

SEQ ID NO: 1431343 - RNA, 13 nt, Human
ucgauuagacugg

SEQ ID NO: 1431344 - RNA, 12 nt, Human
ucgauuagacug

SEQ ID NO: 1431345 - RNA, 21 nt, Human
ucgcagccacccugaggaguc

SEQ ID NO: 1431346 - RNA, 23 nt, Human
ucgcagccacccugaggagucug

SEQ ID NO: 1431347 - RNA, 20 nt, Human
ucgcagccacccugaggagu

SEQ ID NO: 1431348 - RNA, 19 nt, Human
ucgcagccacccugaggag

SEQ ID NO: 1431349 - RNA, 18 nt, Human
ucgcagccacccugagga

SEQ ID NO: 1431350 - RNA, 17 nt, Human
ucgcagccacccugagg

SEQ ID NO: 1431351 - RNA, 14 nt, Human
ucgaugcaaugaac

SEQ ID NO: 1431352 - RNA, 23 nt, Human
ucgauacugcgacuuucugccug

SEQ ID NO: 1431353 - RNA, 22 nt, Human
ucgauacugcgacuuucugccu

SEQ ID NO: 1431354 - RNA, 20 nt, Human
ucgauacugcgacuuucugc

SEQ ID NO: 1431355 - RNA, 19 nt, Human
ucgauacugcgacuuucug

SEQ ID NO: 1431356 - RNA, 22 nt, Human
uccuuuugacacugcucuaaca

SEQ ID NO: 1431357 - RNA, 20 nt, Human
uccuuuugacacugcucuaa

SEQ ID NO: 1431358 - RNA, 18 nt, Human
uccuuuugacacugcucu

SEQ ID NO: 1431359 - RNA, 16 nt, Human
uccuuuugacacugcu

SEQ ID NO: 1431360 - RNA, 14 nt, Human
uccuuuugacacug

SEQ ID NO: 1431361 - RNA, 13 nt, Human
uccuuuugacacu

SEQ ID NO: 1431362 - RNA, 17 nt, Human
uccuuugugcuuaguua

SEQ ID NO: 1431363 - RNA, 23 nt, Human
uccuuugggcuucagcugccagu

SEQ ID NO: 1431364 - RNA, 21 nt, Human
uccuuugaauccucucucugu

SEQ ID NO: 1431365 - RNA, 20 nt, Human
uccuuugaauccucucucug

SEQ ID NO: 1431366 - RNA, 19 nt, Human
uccuugaagaacugcaggc

SEQ ID NO: 1431367 - RNA, 18 nt, Human
uccuugaagaacugcagg

SEQ ID NO: 1431368 - RNA, 22 nt, Human
uccuugcuuaugacaucacuug

SEQ ID NO: 1431369 - RNA, 16 nt, Human
uccuguccagcuccaa

SEQ ID NO: 1431370 - RNA, 15 nt, Human
uccuguccagcucca

SEQ ID NO: 1431371 - RNA, 14 nt, Human
uccuguccagcucc

SEQ ID NO: 1431372 - RNA, 13 nt, Human
uccuguccagcuc

SEQ ID NO: 1431373 - RNA, 18 nt, Human
uccugaggcuuuggauuu

SEQ ID NO: 1431374 - RNA, 17 nt, Human
uccugaggcuuuggauu

SEQ ID NO: 1431375 - RNA, 16 nt, Human
uccugaggcuuuggau

SEQ ID NO: 1431376 - RNA, 17 nt, Human
uccuguccccugcuaca

SEQ ID NO: 1431377 - RNA, 16 nt, Human
uccuguccccugcuac

SEQ ID NO: 1431378 - RNA, 17 nt, Human
uccuguccagcuccaac

SEQ ID NO: 1431379 - RNA, 17 nt, Human
uccuuaucgaaacucau

SEQ ID NO: 1431380 - RNA, 20 nt, Human
uccuuacuuuuuauauauau

SEQ ID NO: 1431381 - RNA, 18 nt, Human
uccuuacuuuuuauauau

SEQ ID NO: 1431382 - RNA, 17 nt, Human
uccuuacuuuuuauaua

SEQ ID NO: 1431383 - RNA, 23 nt, Human
uccuuacuccugugggagccucg

SEQ ID NO: 1431384 - RNA, 22 nt, Human
uccuuacuccugugggagccuc

SEQ ID NO: 1431385 - RNA, 20 nt, Human
uccuuacuccugugggagcc

SEQ ID NO: 1431386 - RNA, 17 nt, Human
uccuuacuccuguggga

SEQ ID NO: 1431387 - RNA, 16 nt, Human
uccuuacuccuguggg

SEQ ID NO: 1431388 - RNA, 14 nt, Human
uccuuacuccugug

SEQ ID NO: 1431389 - RNA, 16 nt, Human
uccuuacucccaggca

SEQ ID NO: 1431390 - RNA, 20 nt, Human
uccuuaccuuuuuauuugca

SEQ ID NO: 1431391 - RNA, 15 nt, Human
uccuuaccuuuuuau

SEQ ID NO: 1431392 - RNA, 21 nt, Human
ucugcaauucaaaaguuccaa

SEQ ID NO: 1431393 - RNA, 19 nt, Human
ucugcaauucaaaaguucc

SEQ ID NO: 1431394 - RNA, 16 nt, Human
ucugcaauucaaaagu

SEQ ID NO: 1431395 - RNA, 14 nt, Human
ucugcaauucaaaa

SEQ ID NO: 1431396 - RNA, 22 nt, Human
ucugcaaguauacuagggagcc

SEQ ID NO: 1431397 - RNA, 23 nt, Human
ucugcaaguauacuagggagcca

SEQ ID NO: 1431398 - RNA, 17 nt, Human
ucugcaaggucuuuggu

SEQ ID NO: 1431399 - RNA, 20 nt, Human
ucugcacuacugacaugugg

SEQ ID NO: 1431400 - RNA, 18 nt, Human
ucugcacuacugacaugu

SEQ ID NO: 1431401 - RNA, 16 nt, Human
ucugcaguaaaucuuu

SEQ ID NO: 1431402 - RNA, 21 nt, Human
ucugcacucccaccugacaca

SEQ ID NO: 1431403 - RNA, 18 nt, Human
ucugcacucccaccugac

SEQ ID NO: 1431404 - RNA, 21 nt, Human
ucugcacuacugacauguggg

SEQ ID NO: 1431405 - RNA, 24 nt, Human
ucugcaaacaccaacauguuggga

SEQ ID NO: 1431406 - RNA, 22 nt, Human
ucugauuuuaggagcuaaggcu

SEQ ID NO: 1431407 - RNA, 13 nt, Human
ucugauuuuagga

SEQ ID NO: 1431408 - RNA, 22 nt, Human
ucugauuuguaacccacugaga

SEQ ID NO: 1431409 - RNA, 17 nt, Human
ucugauuuguaacccac

SEQ ID NO: 1431410 - RNA, 13 nt, Human
ucugagcuccagc

SEQ ID NO: 1431411 - RNA, 22 nt, Human
ucugagcuauuucaucuauuuu

SEQ ID NO: 1431412 - RNA, 20 nt, Human
ucugagcuauuucaucuauu

SEQ ID NO: 1431413 - RNA, 17 nt, Human
ucugagcuauuucaucu

SEQ ID NO: 1431414 - RNA, 14 nt, Human
ucugagcgccucca

SEQ ID NO: 1431415 - RNA, 21 nt, Human
ucugagcgccuccauccaagg

SEQ ID NO: 1431416 - RNA, 23 nt, Human
ucugagcccgguaagagcaaaag

SEQ ID NO: 1431417 - RNA, 21 nt, Human
ucugagcccgguaagagcaaa

SEQ ID NO: 1431418 - RNA, 22 nt, Human
ucugagagucuagauucucugg

SEQ ID NO: 1431419 - RNA, 21 nt, Human
ucugagagucuagauucucug

SEQ ID NO: 1431420 - RNA, 19 nt, Human
ucugagagucuagauucuc

SEQ ID NO: 1431421 - RNA, 18 nt, Human
ucugagagucuagauucu

SEQ ID NO: 1431422 - RNA, 17 nt, Human
ucugagagucuagauuc

SEQ ID NO: 1431423 - RNA, 16 nt, Human
ucugagagucuagauu

SEQ ID NO: 1431424 - RNA, 15 nt, Human
ucugagagucuagau

SEQ ID NO: 1431425 - RNA, 14 nt, Human
ucugagagucuaga

SEQ ID NO: 1431426 - RNA, 18 nt, Human
ucugagaggcccuggauc

SEQ ID NO: 1431427 - RNA, 17 nt, Human
ucugagaggcccuggau

SEQ ID NO: 1431428 - RNA, 16 nt, Human
ucugagaggcccugga

SEQ ID NO: 1431429 - RNA, 14 nt, Human
ucugagaggcccug

SEQ ID NO: 1431430 - RNA, 13 nt, Human
ucugagaggcccu

SEQ ID NO: 1431431 - RNA, 14 nt, Human
ucucauccaucauc

SEQ ID NO: 1431432 - RNA, 13 nt, Human
ucucauccaucau

SEQ ID NO: 1431433 - RNA, 12 nt, Human
ucucauccacau

SEQ ID NO: 1431434 - RNA, 17 nt, Human
ucucaucaacugaauga

SEQ ID NO: 1431435 - RNA, 15 nt, Human
ucucaucaacugaau

SEQ ID NO: 1431436 - RNA, 17 nt, Human
ucugccugccagcugca

SEQ ID NO: 1431437 - RNA, 16 nt, Human
ucugccugccagcugc

SEQ ID NO: 1431438 - RNA, 19 nt, Human
ucugccucuucugggaggg

SEQ ID NO: 1431439 - RNA, 18 nt, Human
ucugccucuucugggagg

SEQ ID NO: 1431440 - RNA, 17 nt, Human
ucugccucuucugggag

SEQ ID NO: 1431441 - RNA, 15 nt, Human
ucugccucuucuggg

SEQ ID NO: 1431442 - RNA, 14 nt, Human
ucugccucuucugg

SEQ ID NO: 1431443 - RNA, 22 nt, Human
ucugccuccccuuaaaggggag

SEQ ID NO: 1431444 - RNA, 21 nt, Human
ucugccuacagaacuucagaa

SEQ ID NO: 1431445 - RNA, 15 nt, Human
ucugccucucuagga

SEQ ID NO: 1431446 - RNA, 12 nt, Human
ucugcccaaccc

SEQ ID NO: 1431447 - RNA, 21 nt, Human
ucugcauauguugaauacuuu

SEQ ID NO: 1431448 - RNA, 19 nt, Human
ucugcauauguugaauacu

SEQ ID NO: 1431449 - RNA, 18 nt, Human
ucugcauauguugaauac

SEQ ID NO: 1431450 - RNA, 16 nt, Human
ucugcauauguugaau

SEQ ID NO: 1431451 - RNA, 15 nt, Human
ucugcauauguugaa

SEQ ID NO: 1431452 - RNA, 14 nt, Human
ucugcagucucuau

SEQ ID NO: 1431453 - RNA, 18 nt, Human
ucugcagucucuauacca

SEQ ID NO: 1431454 - RNA, 20 nt, Human
ucugcagucucuauaccaau

SEQ ID NO: 1431455 - RNA, 21 nt, Human
ucugcagucucuauaccaaua

SEQ ID NO: 1431456 - RNA, 22 nt, Human
ucugcccaccucagccucccaa

SEQ ID NO: 1431457 - RNA, 12 nt, Human
ucugcuccuucc

SEQ ID NO: 1431458 - RNA, 15 nt, Human
ucugcuccuucccca

SEQ ID NO: 1431459 - RNA, 12 nt, Human
ucugcuccugga

SEQ ID NO: 1431460 - RNA, 22 nt, Human
ucugccugccagcugcacugau

SEQ ID NO: 1431461 - RNA, 21 nt, Human
ucugccugccagcugcacuga

SEQ ID NO: 1431462 - RNA, 18 nt, Human
ucugccugccagcugcac

SEQ ID NO: 1431463 - RNA, 21 nt, Human
ucugcucugguuguuucuguu

SEQ ID NO: 1431464 - RNA, 18 nt, Human
ucugcucugguuguuucu

SEQ ID NO: 1431465 - RNA, 21 nt, Human
ucugcucugcgugucaccugu

SEQ ID NO: 1431466 - RNA, 16 nt, Human
ucugcucugcguguca

SEQ ID NO: 1431467 - RNA, 13 nt, Human
ucugcucugaugc

SEQ ID NO: 1431468 - RNA, 14 nt, Human
ucugcucugaugca

SEQ ID NO: 1431469 - RNA, 11 nt, Human
ucugcucugau

SEQ ID NO: 1431470 - RNA, 17 nt, Human
ucugcucuuucucugcc

SEQ ID NO: 1431471 - RNA, 16 nt, Human
ucugcucuuucucugc

SEQ ID NO: 1431472 - RNA, 15 nt, Human
ucugcucuuucucug

SEQ ID NO: 1431473 - RNA, 14 nt, Human
ucugcucuuucucu

SEQ ID NO: 1431474 - RNA, 19 nt, Human
ucugcucuuucucugccag

SEQ ID NO: 1431475 - RNA, 18 nt, Human
ucugcucuuucucugcca

SEQ ID NO: 1431476 - RNA, 20 nt, Human
ucugcucuuucucugccagu

SEQ ID NO: 1431477 - RNA, 21 nt, Human
ucuggagaaagggcccugggc

SEQ ID NO: 1431478 - RNA, 15 nt, Human
ucuggaccucugggu

SEQ ID NO: 1431479 - RNA, 14 nt, Human
ucuggaccucuggg

SEQ ID NO: 1431480 - RNA, 19 nt, Human
ucuggacaggauguguuug

SEQ ID NO: 1431481 - RNA, 20 nt, Human
ucuggacagccccacccugg

SEQ ID NO: 1431482 - RNA, 13 nt, Human
ucugcuggaguuu

SEQ ID NO: 1431483 - RNA, 18 nt, Human
ucugcugcugucccuccc

SEQ ID NO: 1431484 - RNA, 19 nt, Human
ucugcugccucccucugcu

SEQ ID NO: 1431485 - RNA, 22 nt, Human
ucuggaauguaaucaauguuuc

SEQ ID NO: 1431486 - RNA, 18 nt, Human
ucuggaauguaaucaaug

SEQ ID NO: 1431487 - RNA, 16 nt, Human
ucuggaauguaaucaa

SEQ ID NO: 1431488 - RNA, 15 nt, Human
ucuggaauguaauca

SEQ ID NO: 1431489 - RNA, 19 nt, Human
ucugcuggaguuucaugua

SEQ ID NO: 1431490 - RNA, 23 nt, Human
ucugcuggaguuucauguacaag

SEQ ID NO: 1431491 - RNA, 19 nt, Human
ucuggacagccccacccug

SEQ ID NO: 1431492 - RNA, 18 nt, Human
ucuggacagccccacccu

SEQ ID NO: 1431493 - RNA, 14 nt, Human
ucuggaauuugaaa

SEQ ID NO: 1431494 - RNA, 17 nt, Human
ucugucucauccaucau

SEQ ID NO: 1431495 - RNA, 21 nt, Human
ucugucucauccaucaucaug

SEQ ID NO: 1431496 - RNA, 13 nt, Human
ucugucucaucca

SEQ ID NO: 1431497 - RNA, 23 nt, Human
ucugucuacuugcucagguacuu

SEQ ID NO: 1431498 - RNA, 18 nt, Human
ucugucuacuugcucagg

SEQ ID NO: 1431499 - RNA, 15 nt, Human
ucugucuacuugcuc

SEQ ID NO: 1431500 - RNA, 18 nt, Human
ucuguccugaaggccuga

SEQ ID NO: 1431501 - RNA, 17 nt, Human
ucugucgcccaugcugg

SEQ ID NO: 1431502 - RNA, 23 nt, Human
ucuguccucagccuugccagaga

SEQ ID NO: 1431503 - RNA, 21 nt, Human
ucuguccucagccuugccaga

SEQ ID NO: 1431504 - RNA, 19 nt, Human
ucuguccucagccuugcca

SEQ ID NO: 1431505 - RNA, 15 nt, Human
ucuguccucagccuu

SEQ ID NO: 1431506 - RNA, 14 nt, Human
ucuguccucagccu

SEQ ID NO: 1431507 - RNA, 13 nt, Human
ucuguccucagcc

SEQ ID NO: 1431508 - RNA, 13 nt, Human
ucuguaauugugu

SEQ ID NO: 1431509 - RNA, 17 nt, Human
ucuguaauuguguguga

SEQ ID NO: 1431510 - RNA, 14 nt, Human
ucuguaauugcaaa

SEQ ID NO: 1431511 - RNA, 13 nt, Human
ucuguaauugcaa

SEQ ID NO: 1431512 - RNA, 12 nt, Human
ucuguaauugca

SEQ ID NO: 1431513 - RNA, 20 nt, Human
ucuguaauucagguuuuucc

SEQ ID NO: 1431514 - RNA, 17 nt, Human
ucuggugaagcucacuu

SEQ ID NO: 1431515 - RNA, 20 nt, Human
ucuggcuucuggccaggaag

SEQ ID NO: 1431516 - RNA, 16 nt, Human
ucuguaaacuguguau

SEQ ID NO: 1431517 - RNA, 15 nt, Human
ucuguaaacugugua

SEQ ID NO: 1431518 - RNA, 14 nt, Human
ucuguaaacugugu

SEQ ID NO: 1431519 - RNA, 13 nt, Human
ucuguaaacugug

SEQ ID NO: 1431520 - RNA, 12 nt, Human
ucuguaaacugu

SEQ ID NO: 1431521 - RNA, 22 nt, Human
ucuguaaaaucuuucuuucuua

SEQ ID NO: 1431522 - RNA, 23 nt, Human
ucuguaaaaucuuucuuucuuag

SEQ ID NO: 1431523 - RNA, 13 nt, Human
ucuguaaagcuaa

SEQ ID NO: 1431524 - RNA, 19 nt, Human
ucuguaaagcuaaaauaaa

SEQ ID NO: 1431525 - RNA, 22 nt, Human
ucuguaaacuguguauuccaag

SEQ ID NO: 1431526 - RNA, 19 nt, Human
ucuguaaacuguguauucc

SEQ ID NO: 1431527 - RNA, 16 nt, Human
ucuguaaaucuacaca

SEQ ID NO: 1431528 - RNA, 20 nt, Human
ucuguaagaaaccuacugcc

SEQ ID NO: 1431529 - RNA, 14 nt, Human
ucuguaagaaaccu

SEQ ID NO: 1431530 - RNA, 22 nt, Human
ucuguaagaaaccuacugccca

SEQ ID NO: 1431531 - RNA, 16 nt, Human
ucuguaauucagguuu

SEQ ID NO: 1431532 - RNA, 19 nt, Human
ucuggcuucuggccaggaa

SEQ ID NO: 1431533 - RNA, 18 nt, Human
ucuggcuucuggccagga

SEQ ID NO: 1431534 - RNA, 15 nt, Human
ucuggcuucuggcca

SEQ ID NO: 1431535 - RNA, 21 nt, Human
ucuggcuguaaggcucuagau

SEQ ID NO: 1431536 - RNA, 18 nt, Human
ucuggcuguaaggcucua

SEQ ID NO: 1431537 - RNA, 16 nt, Human
ucuggcuguaaggcuc

SEQ ID NO: 1431538 - RNA, 22 nt, Human
ucuggcuguaaggcucuagauc

SEQ ID NO: 1431539 - RNA, 20 nt, Human
ucuggcugguguuaacagaa

SEQ ID NO: 1431540 - RNA, 18 nt, Human
ucuggcugguguuaacag

SEQ ID NO: 1431541 - RNA, 17 nt, Human
ucuggcugguguuaaca

SEQ ID NO: 1431542 - RNA, 13 nt, Human
ucuggcugguguu

SEQ ID NO: 1431543 - RNA, 12 nt, Human
ucuggcuggugu

SEQ ID NO: 1431544 - RNA, 18 nt, Human
ucuggcugguagagcagg

SEQ ID NO: 1431545 - RNA, 22 nt, Human
ucuggagccagccgagcaggag

SEQ ID NO: 1431546 - RNA, 14 nt, Human
ucuggagccagccg

SEQ ID NO: 1431547 - RNA, 15 nt, Human
ucuggagcauuucuc

SEQ ID NO: 1431548 - RNA, 12 nt, Human
ucuggagcccac

SEQ ID NO: 1431549 - RNA, 16 nt, Human
ucuggagcccacugua

SEQ ID NO: 1431550 - RNA, 22 nt, Human
ucuggagcccacuguacuugcu

SEQ ID NO: 1431551 - RNA, 14 nt, Human
ugaaaacagaaugu

SEQ ID NO: 1431552 - RNA, 18 nt, Human
ugaaaacacugugcacau

SEQ ID NO: 1431553 - RNA, 16 nt, Human
ugaaaacacugugcac

SEQ ID NO: 1431554 - RNA, 24 nt, Human
ucuuuucccccuuugugcacauuu

SEQ ID NO: 1431555 - RNA, 19 nt, Human
ucuuuucccccauuaauca

SEQ ID NO: 1431556 - RNA, 21 nt, Human
ucuuuucccauuuaucuaaau

SEQ ID NO: 1431557 - RNA, 20 nt, Human
ucuuuucccauuuaucuaaa

SEQ ID NO: 1431558 - RNA, 19 nt, Human
ucuuuucccauuuaucuaa

SEQ ID NO: 1431559 - RNA, 16 nt, Human
ucuuuucccauuuauc

SEQ ID NO: 1431560 - RNA, 19 nt, Human
ucuuuucccacuguuuaag

SEQ ID NO: 1431561 - RNA, 14 nt, Human
ucuuuucauacauu

SEQ ID NO: 1431562 - RNA, 12 nt, Human
ucuuuuguauua

SEQ ID NO: 1431563 - RNA, 20 nt, Human
ucuuuuguucgcauggucac

SEQ ID NO: 1431564 - RNA, 19 nt, Human
ucuuuuuaccuuucauaca

SEQ ID NO: 1431565 - RNA, 21 nt, Human
ugaaaacacauuuuucuuagg

SEQ ID NO: 1431566 - RNA, 14 nt, Human
ugaaaauuauuuaa

SEQ ID NO: 1431567 - RNA, 17 nt, Human
ugaaaauuauuuaaacc

SEQ ID NO: 1431568 - RNA, 13 nt, Human
ugaaaauuauuua

SEQ ID NO: 1431569 - RNA, 18 nt, Human
ugaaaaccacauuggaga

SEQ ID NO: 1431570 - RNA, 15 nt, Human
ugaaacacuuugcau

SEQ ID NO: 1431571 - RNA, 12 nt, Human
ugaaaauuuuga

SEQ ID NO: 1431572 - RNA, 23 nt, Human
ucuuuucauacauuuucuaagaa

SEQ ID NO: 1431573 - RNA, 13 nt, Human
ucuuuucauacau

SEQ ID NO: 1431574 - RNA, 12 nt, Human
ucuuugccucaa

SEQ ID NO: 1431575 - RNA, 12 nt, Human
ucuuugagaggg

SEQ ID NO: 1431576 - RNA, 21 nt, Human
ucuuugccacccucaugcugu

SEQ ID NO: 1431577 - RNA, 22 nt, Human
ucuuugccacccucaugcugug

SEQ ID NO: 1431578 - RNA, 14 nt, Human
ucuugugcacuggc

SEQ ID NO: 1431579 - RNA, 23 nt, Human
ucuuuccaaaguacacuguuuca

SEQ ID NO: 1431580 - RNA, 22 nt, Human
ucuugugcacuggcaccaagug

SEQ ID NO: 1431581 - RNA, 13 nt, Human
ucuugugaggaaa

SEQ ID NO: 1431582 - RNA, 23 nt, Human
ucuugugaggaaagucauuggcu

SEQ ID NO: 1431583 - RNA, 15 nt, Human
ucuugucuauaaagc

SEQ ID NO: 1431584 - RNA, 21 nt, Human
ucuugucucaaugcucauaac

SEQ ID NO: 1431585 - RNA, 18 nt, Human
ucuugucucaaugcucau

SEQ ID NO: 1431586 - RNA, 20 nt, Human
ucuugucucaaugcucauaa

SEQ ID NO: 1431587 - RNA, 20 nt, Human
ucuuugaauaaaugucacuu

SEQ ID NO: 1431588 - RNA, 21 nt, Human
ucuuugaauaaaugucacuuu

SEQ ID NO: 1431589 - RNA, 17 nt, Human
ucuuugaauaaauguca

SEQ ID NO: 1431590 - RNA, 16 nt, Human
ucuuugaauaaauguc

SEQ ID NO: 1431591 - RNA, 18 nt, Human
ucuuucccauggggaggg

SEQ ID NO: 1431592 - RNA, 22 nt, Human
ucuuuccauuugcauuuguuua

SEQ ID NO: 1431593 - RNA, 17 nt, Human
ucuuuccauuugcauuu

SEQ ID NO: 1431594 - RNA, 16 nt, Human
ucuuuccauuugcauu

SEQ ID NO: 1431595 - RNA, 14 nt, Human
ucuuuccauuugca

SEQ ID NO: 1431596 - RNA, 19 nt, Human
ucuuuccaaccggcuuugu

SEQ ID NO: 1431597 - RNA, 13 nt, Human
ucuuuccauuugc

SEQ ID NO: 1431598 - RNA, 22 nt, Human
ucuuguguguaugcacaugaac

SEQ ID NO: 1431599 - RNA, 19 nt, Human
ucuuuccacagaagcucca

SEQ ID NO: 1431600 - RNA, 21 nt, Human
ucuuguguguaugcacaugaa

SEQ ID NO: 1431601 - RNA, 15 nt, Human
ucuuguguguaugca

SEQ ID NO: 1431602 - RNA, 17 nt, Human
ucuuuccacagaagcuc

SEQ ID NO: 1431603 - RNA, 23 nt, Human
ucuuccuugaagaacugcaggcc

SEQ ID NO: 1431604 - RNA, 14 nt, Human
ucuuccuuuuauca

SEQ ID NO: 1431605 - RNA, 22 nt, Human
ucuucuuuuaaaccauuuucuu

SEQ ID NO: 1431606 - RNA, 21 nt, Human
ucuucuuuuaaaccauuuucu

SEQ ID NO: 1431607 - RNA, 20 nt, Human
ucuugaaauuaagaaggcaa

SEQ ID NO: 1431608 - RNA, 14 nt, Human
ucuugaaauuaaga

SEQ ID NO: 1431609 - RNA, 22 nt, Human
ucuugaaauuaagaaggcaaaa

SEQ ID NO: 1431610 - RNA, 20 nt, Human
ucuugaaauauaggaacuua

SEQ ID NO: 1431611 - RNA, 21 nt, Human
ucuugaaauauaggaacuuaa

SEQ ID NO: 1431612 - RNA, 21 nt, Human
ucuugaaauuaagaaggcaaa

SEQ ID NO: 1431613 - RNA, 16 nt, Human
ucuugucuauaaagca

SEQ ID NO: 1431614 - RNA, 14 nt, Human
ucuugucucaaugc

SEQ ID NO: 1431615 - RNA, 13 nt, Human
ucuugucuauaaa

SEQ ID NO: 1431616 - RNA, 12 nt, Human
ucuugucuauaa

SEQ ID NO: 1431617 - RNA, 15 nt, Human
ucuugucucaaugcu

SEQ ID NO: 1431618 - RNA, 17 nt, Human
ucuugucucaaugcuca

SEQ ID NO: 1431619 - RNA, 20 nt, Human
ucuuguauaagauccuagau

SEQ ID NO: 1431620 - RNA, 21 nt, Human
ucuuguauaagauccuagauc

SEQ ID NO: 1431621 - RNA, 15 nt, Human
ucuuguaauuuuaca

SEQ ID NO: 1431622 - RNA, 19 nt, Human
ucuuguaauuuuacacgcu

SEQ ID NO: 1431623 - RNA, 11 nt, Human
ucuuguaauuu

SEQ ID NO: 1431624 - RNA, 13 nt, Human
ucuuguaauuuua

SEQ ID NO: 1431625 - RNA, 17 nt, Human
ucuugcccgcucaggcu

SEQ ID NO: 1431626 - RNA, 17 nt, Human
ucuugcauuaugcaauu

SEQ ID NO: 1431627 - RNA, 15 nt, Human
ucuugcauuaugcaa

SEQ ID NO: 1431628 - RNA, 12 nt, Human
ucuugcauguaa

SEQ ID NO: 1431629 - RNA, 19 nt, Human
ucuugccaaauauaaauaa

SEQ ID NO: 1431630 - RNA, 20 nt, Human
ucuucauaacaauuuuagga

SEQ ID NO: 1431631 - RNA, 16 nt, Human
ucuucauguuucagga

SEQ ID NO: 1431632 - RNA, 17 nt, Human
ucuucaguugucucuga

SEQ ID NO: 1431633 - RNA, 16 nt, Human
ucuucaguugucucug

SEQ ID NO: 1431634 - RNA, 21 nt, Human
ucuucaguugucucugaugca

SEQ ID NO: 1431635 - RNA, 15 nt, Human
ucuucaguugucucu

SEQ ID NO: 1431636 - RNA, 15 nt, Human
ucuucagaggcccuc

SEQ ID NO: 1431637 - RNA, 14 nt, Human
ucuucagaggcccu

SEQ ID NO: 1431638 - RNA, 15 nt, Human
ucuucagaucucuaa

SEQ ID NO: 1431639 - RNA, 14 nt, Human
ucuuaugcaauuuc

SEQ ID NO: 1431640 - RNA, 14 nt, Human
ucuucagaucucua

SEQ ID NO: 1431641 - RNA, 16 nt, Human
ucuuauccuccaccgu

SEQ ID NO: 1431642 - RNA, 17 nt, Human
ucuuagucuagguccuu

SEQ ID NO: 1431643 - RNA, 22 nt, Human
ucuuagcucaaugagcauguuu

SEQ ID NO: 1431644 - RNA, 16 nt, Human
ucuuagcagcuuccag

SEQ ID NO: 1431645 - RNA, 21 nt, Human
ucuuagauucucugugucuaa

SEQ ID NO: 1431646 - RNA, 12 nt, Human
ucuuagauucuc

SEQ ID NO: 1431647 - RNA, 21 nt, Human
ucugugugcacaaauauuuau

SEQ ID NO: 1431648 - RNA, 14 nt, Human
ucugugugcacaaa

SEQ ID NO: 1431649 - RNA, 19 nt, Human
ucugugugaaacuuucauu

SEQ ID NO: 1431650 - RNA, 21 nt, Human
ucugugugaaacuuucauucc

SEQ ID NO: 1431651 - RNA, 16 nt, Human
ucugugugaaacuuuc

SEQ ID NO: 1431652 - RNA, 21 nt, Human
ucuuagcucaaugagcauguu

SEQ ID NO: 1431653 - RNA, 19 nt, Human
ucuuagcucaaugagcaug

SEQ ID NO: 1431654 - RNA, 18 nt, Human
ucuuagcucaaugagcau

SEQ ID NO: 1431655 - RNA, 16 nt, Human
ucuuagcucaaugagc

SEQ ID NO: 1431656 - RNA, 15 nt, Human
ucuuagcucaaugag

SEQ ID NO: 1431657 - RNA, 21 nt, Human
ucuuagcuaucauugcuuccu

SEQ ID NO: 1431658 - RNA, 20 nt, Human
ucuuagcuaucauugcuucc

SEQ ID NO: 1431659 - RNA, 13 nt, Human
ucuuauaauuuaa

SEQ ID NO: 1431660 - RNA, 14 nt, Human
ucuuauaauuuaaa

SEQ ID NO: 1431661 - RNA, 14 nt, Human
ugagcugaggcagc

SEQ ID NO: 1431662 - RNA, 14 nt, Human
ugagcugagcaggc

SEQ ID NO: 1431663 - RNA, 24 nt, Human
ugagcugaccagccgugagcaugu

SEQ ID NO: 1431664 - RNA, 15 nt, Human
ugagcugaccagccg

SEQ ID NO: 1431665 - RNA, 14 nt, Human
ugagcucagcgugg

SEQ ID NO: 1431666 - RNA, 23 nt, Human
ugagcucacaaggcagcaaggcc

SEQ ID NO: 1431667 - RNA, 23 nt, Human
ugagcucagaaaauaucccuccu

SEQ ID NO: 1431668 - RNA, 22 nt, Human
ugagcucacaaggcagcaaggc

SEQ ID NO: 1431669 - RNA, 20 nt, Human
ugagcucacaaggcagcaag

SEQ ID NO: 1431670 - RNA, 19 nt, Human
ugagcucacaaggcagcaa

SEQ ID NO: 1431671 - RNA, 18 nt, Human
ugagcucacaaggcagca

SEQ ID NO: 1431672 - RNA, 17 nt, Human
ugagcucacaaggcagc

SEQ ID NO: 1431673 - RNA, 15 nt, Human
ugagcuauuucaucu

SEQ ID NO: 1431674 - RNA, 16 nt, Human
ugagcuauugcuguuc

SEQ ID NO: 1431675 - RNA, 15 nt, Human
ugagcagucaggaaa

SEQ ID NO: 1431676 - RNA, 21 nt, Human
ugaggagucugagguccugag

SEQ ID NO: 1431677 - RNA, 22 nt, Human
ugaggagucugagguccugagc

SEQ ID NO: 1431678 - RNA, 17 nt, Human
ugaggagucugaggucc

SEQ ID NO: 1431679 - RNA, 16 nt, Human
ugaggagucugagguc

SEQ ID NO: 1431680 - RNA, 15 nt, Human
ugaggagucugaggu

SEQ ID NO: 1431681 - RNA, 14 nt, Human
ugaggagucugagg

SEQ ID NO: 1431682 - RNA, 13 nt, Human
ugaggagucugag

SEQ ID NO: 1431683 - RNA, 20 nt, Human
ugagcuuaaaauacaagacu

SEQ ID NO: 1431684 - RNA, 19 nt, Human
ugagcuuaaaauacaagac

SEQ ID NO: 1431685 - RNA, 17 nt, Human
ugagcuuaaaauacaag

SEQ ID NO: 1431686 - RNA, 16 nt, Human
ugagcuuaaaauacaa

SEQ ID NO: 1431687 - RNA, 22 nt, Human
ugagcuuaaaauacaagacugc

SEQ ID NO: 1431688 - RNA, 21 nt, Human
ugagcuuaaaauacaagacug

SEQ ID NO: 1431689 - RNA, 17 nt, Human
ugagcugcccacagcag

SEQ ID NO: 1431690 - RNA, 16 nt, Human
ugagcugucaacgaga

SEQ ID NO: 1431691 - RNA, 14 nt, Human
ugaggcaaaagaag

SEQ ID NO: 1431692 - RNA, 22 nt, Human
ugaggauguaaagaucaauaaa

SEQ ID NO: 1431693 - RNA, 20 nt, Human
ugaggauacgacaguacacu

SEQ ID NO: 1431694 - RNA, 19 nt, Human
ugaggaucagaguaaucca

SEQ ID NO: 1431695 - RNA, 13 nt, Human
ugaggaucagagu

SEQ ID NO: 1431696 - RNA, 17 nt, Human
ugaggaucagaguaauc

SEQ ID NO: 1431697 - RNA, 19 nt, Human
ugaggugcacugggaggcu

SEQ ID NO: 1431698 - RNA, 15 nt, Human
ugaggugcacuggga

SEQ ID NO: 1431699 - RNA, 22 nt, Human
ugaggucagcacaucucaacag

SEQ ID NO: 1431700 - RNA, 14 nt, Human
ugaggcuguccugu

SEQ ID NO: 1431701 - RNA, 13 nt, Human
ugaggcuguccug

SEQ ID NO: 1431702 - RNA, 12 nt, Human
ugaggcuguccu

SEQ ID NO: 1431703 - RNA, 15 nt, Human
ugagguguccaacug

SEQ ID NO: 1431704 - RNA, 22 nt, Human
ugaguccccauugaggcuuggu

SEQ ID NO: 1431705 - RNA, 20 nt, Human
ugaguccccauugaggcuug

SEQ ID NO: 1431706 - RNA, 15 nt, Human
ugaggugccuguccc

SEQ ID NO: 1431707 - RNA, 14 nt, Human
ugaggugccugucc

SEQ ID NO: 1431708 - RNA, 18 nt, Human
ugaggugcccaggagaag

SEQ ID NO: 1431709 - RNA, 17 nt, Human
ugaggugcccaggagaa

SEQ ID NO: 1431710 - RNA, 16 nt, Human
ugaggugcccaggaga

SEQ ID NO: 1431711 - RNA, 15 nt, Human
ugaggugcccaggag

SEQ ID NO: 1431712 - RNA, 14 nt, Human
ugaggugcccagga

SEQ ID NO: 1431713 - RNA, 13 nt, Human
ugaggugcccagg

SEQ ID NO: 1431714 - RNA, 12 nt, Human
ugaggugcccag

SEQ ID NO: 1431715 - RNA, 16 nt, Human
ugaggugcacugggag

SEQ ID NO: 1431716 - RNA, 16 nt, Human
ugaggugccuguccca

SEQ ID NO: 1431717 - RNA, 21 nt, Human
ugaggcgagaagggcugcuuc

SEQ ID NO: 1431718 - RNA, 20 nt, Human
ugaggcgagaagggcugcuu

SEQ ID NO: 1431719 - RNA, 22 nt, Human
ugaggccugggccgcugccacg

SEQ ID NO: 1431720 - RNA, 13 nt, Human
ugaggccugggcc

SEQ ID NO: 1431721 - RNA, 12 nt, Human
ugaggccugggc

SEQ ID NO: 1431722 - RNA, 23 nt, Human
ugaggcgccccaacccguggagg

SEQ ID NO: 1431723 - RNA, 23 nt, Human
ugaggccuggacuuuccugcaac

SEQ ID NO: 1431724 - RNA, 20 nt, Human
ugaggccuggacuuuccugc

SEQ ID NO: 1431725 - RNA, 19 nt, Human
ugaggccuggacuuuccug

SEQ ID NO: 1431726 - RNA, 17 nt, Human
ugaggccuggacuuucc

SEQ ID NO: 1431727 - RNA, 14 nt, Human
ugaggccuggacuu

SEQ ID NO: 1431728 - RNA, 12 nt, Human
ugaggccuggac

SEQ ID NO: 1431729 - RNA, 11 nt, Human
ugaggccugga

SEQ ID NO: 1431730 - RNA, 21 nt, Human
ugaggcagcagugugaggcca

SEQ ID NO: 1431731 - RNA, 20 nt, Human
ugaggcacaugucagcaagu

SEQ ID NO: 1431732 - RNA, 17 nt, Human
ugaggcacaugucagca

SEQ ID NO: 1431733 - RNA, 12 nt, Human
ugaggcaaaaga

SEQ ID NO: 1431734 - RNA, 15 nt, Human
ugaggcacuggcgag

SEQ ID NO: 1431735 - RNA, 15 nt, Human
ugagauaguuuucau

SEQ ID NO: 1431736 - RNA, 21 nt, Human
ugagauacauacagaauuacu

SEQ ID NO: 1431737 - RNA, 20 nt, Human
ugagauaccagcgaggaggc

SEQ ID NO: 1431738 - RNA, 21 nt, Human
ugagauaccagcgaggaggcu

SEQ ID NO: 1431739 - RNA, 15 nt, Human
ugagauacauacaga

SEQ ID NO: 1431740 - RNA, 14 nt, Human
ugagauacauacag

SEQ ID NO: 1431741 - RNA, 22 nt, Human
ugagagggcucgaggggugggc

SEQ ID NO: 1431742 - RNA, 22 nt, Human
ugagaguuuuggaugcagugcu

SEQ ID NO: 1431743 - RNA, 17 nt, Human
ugagcagcgagccugcu

SEQ ID NO: 1431744 - RNA, 16 nt, Human
ugagcagccuggagcc

SEQ ID NO: 1431745 - RNA, 18 nt, Human
ugagcagccuggagcccu

SEQ ID NO: 1431746 - RNA, 21 nt, Human
ugagcagccuggagcccugga

SEQ ID NO: 1431747 - RNA, 12 nt, Human
ugagcagggccg

SEQ ID NO: 1431748 - RNA, 22 nt, Human
ugagcaggccacacuucaaacu

SEQ ID NO: 1431749 - RNA, 16 nt, Human
ugagcagggccgggga

SEQ ID NO: 1431750 - RNA, 14 nt, Human
ugagcagggccggg

SEQ ID NO: 1431751 - RNA, 20 nt, Human
ugagcagggccggggaacug

SEQ ID NO: 1431752 - RNA, 19 nt, Human
ugagaggcugucuguugua

SEQ ID NO: 1431753 - RNA, 19 nt, Human
ugagaggcugggaauggag

SEQ ID NO: 1431754 - RNA, 13 nt, Human
ugagacauccagc

SEQ ID NO: 1431755 - RNA, 18 nt, Human
ugagaaacuuaaauguua

SEQ ID NO: 1431756 - RNA, 19 nt, Human
ugagaaaggguagaauucu

SEQ ID NO: 1431757 - RNA, 16 nt, Human
ugagaaagccuucuuu

SEQ ID NO: 1431758 - RNA, 14 nt, Human
ugagaaagccuucu

SEQ ID NO: 1431759 - RNA, 19 nt, Human
ugagaaacuuaaauguuau

SEQ ID NO: 1431760 - RNA, 17 nt, Human
ugagaaauauggacacu

SEQ ID NO: 1431761 - RNA, 15 nt, Human
ugagaaauauggaca

SEQ ID NO: 1431762 - RNA, 22 nt, Human
ugagaaauagcuuaugaaaaga

SEQ ID NO: 1431763 - RNA, 21 nt, Human
ugagaaauauggacacuuaau

SEQ ID NO: 1431764 - RNA, 13 nt, Human
ugagaaaucuaaa

SEQ ID NO: 1431765 - RNA, 10 nt, Human
ugagacaucc

SEQ ID NO: 1431766 - RNA, 12 nt, Human
ugagacauccag

SEQ ID NO: 1431767 - RNA, 14 nt, Human
ugacuuuuugcauu

SEQ ID NO: 1431768 - RNA, 14 nt, Human
ugacuuuugugaaa

SEQ ID NO: 1431769 - RNA, 22 nt, Human
ugacuuuucuguaauucagguu

SEQ ID NO: 1431770 - RNA, 19 nt, Human
ugacuuuucuguaauucag

SEQ ID NO: 1431771 - RNA, 13 nt, Human
ugacuuuucugua

SEQ ID NO: 1431772 - RNA, 17 nt, Human
ugacuuugcuugcuuug

SEQ ID NO: 1431773 - RNA, 20 nt, Human
ugagaaacaacaauuucuac

SEQ ID NO: 1431774 - RNA, 19 nt, Human
ugagaaaagcuuugaaccc

SEQ ID NO: 1431775 - RNA, 12 nt, Human
ugagaaaacaug

SEQ ID NO: 1431776 - RNA, 23 nt, Human
ugacuuuuugcauuuaaaacaga

SEQ ID NO: 1431777 - RNA, 17 nt, Human
ugacuuuuugcauuuaa

SEQ ID NO: 1431778 - RNA, 18 nt, Human
ugagaaaaauauauacua

SEQ ID NO: 1431779 - RNA, 16 nt, Human
ugacuaauggcaugag

SEQ ID NO: 1431780 - RNA, 14 nt, Human
ugacuaauggcaug

SEQ ID NO: 1431781 - RNA, 23 nt, Human
ugacuaacuagacaccaaaguuc

SEQ ID NO: 1431782 - RNA, 20 nt, Human
ugacuaacuagacaccaaag

SEQ ID NO: 1431783 - RNA, 21 nt, Human
ugacuaacaggccaaagaguc

SEQ ID NO: 1431784 - RNA, 17 nt, Human
ugacuaacaggccaaag

SEQ ID NO: 1431785 - RNA, 21 nt, Human
ugacuaaacuuuuuuucugua

SEQ ID NO: 1431786 - RNA, 19 nt, Human
ugacuaaacuuuuuuucug

SEQ ID NO: 1431787 - RNA, 18 nt, Human
ugacuaaacuuuuuuucu

SEQ ID NO: 1431788 - RNA, 12 nt, Human
ugacuaaacuuu

SEQ ID NO: 1431789 - RNA, 14 nt, Human
ugacuaaaauauuu

SEQ ID NO: 1431790 - RNA, 17 nt, Human
ugaccagccgugagcau

SEQ ID NO: 1431791 - RNA, 19 nt, Human
ugaccaugcucaucugcug

SEQ ID NO: 1431792 - RNA, 18 nt, Human
ugaccaugcucaucugcu

SEQ ID NO: 1431793 - RNA, 16 nt, Human
ugaccaugcucaucug

SEQ ID NO: 1431794 - RNA, 12 nt, Human
ugaccaugcuca

SEQ ID NO: 1431795 - RNA, 17 nt, Human
ugacuacagucaggaaa

SEQ ID NO: 1431796 - RNA, 16 nt, Human
ugacuacagucaggaa

SEQ ID NO: 1431797 - RNA, 15 nt, Human
ugacuaauggcauga

SEQ ID NO: 1431798 - RNA, 18 nt, Human
ugacuacagucaggaaag

SEQ ID NO: 1431799 - RNA, 16 nt, Human
ugacucuuaagaagac

SEQ ID NO: 1431800 - RNA, 15 nt, Human
ugacucuuaagaaga

SEQ ID NO: 1431801 - RNA, 14 nt, Human
ugacucuuaagaag

SEQ ID NO: 1431802 - RNA, 16 nt, Human
ugacugcuugcccuaa

SEQ ID NO: 1431803 - RNA, 14 nt, Human
ugacugcuugcccu

SEQ ID NO: 1431804 - RNA, 19 nt, Human
ugacucuuuccaaccggcu

SEQ ID NO: 1431805 - RNA, 13 nt, Human
ugacucuuuccaa

SEQ ID NO: 1431806 - RNA, 14 nt, Human
ugacucuuggcaca

SEQ ID NO: 1431807 - RNA, 19 nt, Human
ugacucuuggcacagcaug

SEQ ID NO: 1431808 - RNA, 16 nt, Human
ugacucuuuccaaccg

SEQ ID NO: 1431809 - RNA, 14 nt, Human
ugacucuuuccaac

SEQ ID NO: 1431810 - RNA, 21 nt, Human
ugacuuuccccaccagaugcu

SEQ ID NO: 1431811 - RNA, 12 nt, Human
ugacuuucccca

SEQ ID NO: 1431812 - RNA, 16 nt, Human
ugacugggaccaggca

SEQ ID NO: 1431813 - RNA, 15 nt, Human
ugacuggcuaaagcu

SEQ ID NO: 1431814 - RNA, 13 nt, Human
ugacuuugcuugc

SEQ ID NO: 1431815 - RNA, 13 nt, Human
ugacuuucuuuuu

SEQ ID NO: 1431816 - RNA, 23 nt, Human
ugacuuuccccaccagaugcuga

SEQ ID NO: 1431817 - RNA, 22 nt, Human
ugacuuuccccaccagaugcug

SEQ ID NO: 1431818 - RNA, 16 nt, Human
ugacuuugcuugcuuu

SEQ ID NO: 1431819 - RNA, 15 nt, Human
ugacuuugcuugcuu

SEQ ID NO: 1431820 - RNA, 16 nt, Human
ugacuuuggcugcaug

SEQ ID NO: 1431821 - RNA, 19 nt, Human
ugacaucggaaaaauaauc

SEQ ID NO: 1431822 - RNA, 21 nt, Human
ugacaucggaaaaauaaucaa

SEQ ID NO: 1431823 - RNA, 18 nt, Human
ugacaucagguuuuuccc

SEQ ID NO: 1431824 - RNA, 23 nt, Human
ugacaucacuuguacaaaauaaa

SEQ ID NO: 1431825 - RNA, 22 nt, Human
ugacaucacuuguacaaaauaa

SEQ ID NO: 1431826 - RNA, 21 nt, Human
ugacaucacuuguacaaaaua

SEQ ID NO: 1431827 - RNA, 20 nt, Human
ugacaucacuuguacaaaau

SEQ ID NO: 1431828 - RNA, 19 nt, Human
ugacaucacuuguacaaaa

SEQ ID NO: 1431829 - RNA, 18 nt, Human
ugacaucacuuguacaaa

SEQ ID NO: 1431830 - RNA, 17 nt, Human
ugacaucacuuguacaa

SEQ ID NO: 1431831 - RNA, 16 nt, Human
ugacaucacuuguaca

SEQ ID NO: 1431832 - RNA, 13 nt, Human
ugacaucacuugu

SEQ ID NO: 1431833 - RNA, 14 nt, Human
ugacaucaaaaaag

SEQ ID NO: 1431834 - RNA, 17 nt, Human
ugacaugcaucaucuca

SEQ ID NO: 1431835 - RNA, 22 nt, Human
ugacaugaauuuuagcuuuugu

SEQ ID NO: 1431836 - RNA, 21 nt, Human
ugacaugaauuuuagcuuuug

SEQ ID NO: 1431837 - RNA, 17 nt, Human
ugacaugaauuuuagcu

SEQ ID NO: 1431838 - RNA, 15 nt, Human
ugacaugaagcuguu

SEQ ID NO: 1431839 - RNA, 18 nt, Human
ugacauguggggccaggu

SEQ ID NO: 1431840 - RNA, 17 nt, Human
ugacauguggggccagg

SEQ ID NO: 1431841 - RNA, 20 nt, Human
ugacauguggggccagguca

SEQ ID NO: 1431842 - RNA, 19 nt, Human
ugacauguggggccagguc

SEQ ID NO: 1431843 - RNA, 16 nt, Human
ugacaugggacauuug

SEQ ID NO: 1431844 - RNA, 17 nt, Human
ugacaacuggcaggcag

SEQ ID NO: 1431845 - RNA, 18 nt, Human
ugacaacuggcaggcagg

SEQ ID NO: 1431846 - RNA, 15 nt, Human
ugacaacuggcaggc

SEQ ID NO: 1431847 - RNA, 14 nt, Human
ugacaacuggcagg

SEQ ID NO: 1431848 - RNA, 13 nt, Human
ugacaacuggcag

SEQ ID NO: 1431849 - RNA, 21 nt, Human
ugacaacguuucagcgacucc

SEQ ID NO: 1431850 - RNA, 17 nt, Human
ugacaaccacuggucug

SEQ ID NO: 1431851 - RNA, 19 nt, Human
ugacaaccaugagaccacu

SEQ ID NO: 1431852 - RNA, 16 nt, Human
ugacaaccacuggucu

SEQ ID NO: 1431853 - RNA, 16 nt, Human
ugacaauaaaacauua

SEQ ID NO: 1431854 - RNA, 14 nt, Human
ugacaauaaaacau

SEQ ID NO: 1431855 - RNA, 13 nt, Human
ugacaauaaaaca

SEQ ID NO: 1431856 - RNA, 12 nt, Human
ugacaauaaaac

SEQ ID NO: 1431857 - RNA, 19 nt, Human
ugaauuguaacuguucuug

SEQ ID NO: 1431858 - RNA, 14 nt, Human
ugaauuacauuugu

SEQ ID NO: 1431859 - RNA, 23 nt, Human
ugaauuaauaucccuacauguau

SEQ ID NO: 1431860 - RNA, 22 nt, Human
ugaauuaauaucccuacaugua

SEQ ID NO: 1431861 - RNA, 19 nt, Human
ugaauuaauaucccuacau

SEQ ID NO: 1431862 - RNA, 16 nt, Human
ugaauuaauaucccua

SEQ ID NO: 1431863 - RNA, 13 nt, Human
ugaauuacauuug

SEQ ID NO: 1431864 - RNA, 18 nt, Human
ugaauuaagcccaauuaa

SEQ ID NO: 1431865 - RNA, 17 nt, Human
ugaauuaaauaaacccu

SEQ ID NO: 1431866 - RNA, 14 nt, Human
ugaauuaaguuuuu

SEQ ID NO: 1431867 - RNA, 16 nt, Human
ugacaacauuucuaua

SEQ ID NO: 1431868 - RNA, 23 nt, Human
ugacaacauuucuauagccaaaa

SEQ ID NO: 1431869 - RNA, 16 nt, Human
ugaauuuaaauagcuu

SEQ ID NO: 1431870 - RNA, 22 nt, Human
ugaaugaagcaaaugucaugcu

SEQ ID NO: 1431871 - RNA, 11 nt, Human
ugaaugaagca

SEQ ID NO: 1431872 - RNA, 15 nt, Human
ugaaugaacacucuu

SEQ ID NO: 1431873 - RNA, 12 nt, Human
ugaaugaacacu

SEQ ID NO: 1431874 - RNA, 24 nt, Human
ugaaucuugucucaaugcucauaa

SEQ ID NO: 1431875 - RNA, 21 nt, Human
ugaaucuugucucaaugcuca

SEQ ID NO: 1431876 - RNA, 23 nt, Human
ugaaucuugucucaaugcucaua

SEQ ID NO: 1431877 - RNA, 13 nt, Human
ugaaucuugucuc

SEQ ID NO: 1431878 - RNA, 15 nt, Human
ugaaucuugucucaa

SEQ ID NO: 1431879 - RNA, 16 nt, Human
ugaaucuugucucaau

SEQ ID NO: 1431880 - RNA, 19 nt, Human
ugaaucuugucucaaugcu

SEQ ID NO: 1431881 - RNA, 20 nt, Human
ugaaucuugucucaaugcuc

SEQ ID NO: 1431882 - RNA, 20 nt, Human
ugaauguuuuucuaaaggag

SEQ ID NO: 1431883 - RNA, 18 nt, Human
ugaauguuuuucuaaagg

SEQ ID NO: 1431884 - RNA, 17 nt, Human
ugaauguuuuucuaaag

SEQ ID NO: 1431885 - RNA, 16 nt, Human
ugaauguuuuucuaaa

SEQ ID NO: 1431886 - RNA, 15 nt, Human
ugaauguuuuucuaa

SEQ ID NO: 1431887 - RNA, 13 nt, Human
ugaauguuuuucu

SEQ ID NO: 1431888 - RNA, 22 nt, Human
ugaauguuuacacucuuuguaa

SEQ ID NO: 1431889 - RNA, 19 nt, Human
ugaauguuuacacucuuug

SEQ ID NO: 1431890 - RNA, 19 nt, Human
ugaaugcaaaccauagcac

SEQ ID NO: 1431891 - RNA, 15 nt, Human
ugaaugcaaaccaua

SEQ ID NO: 1431892 - RNA, 20 nt, Human
ugaaugauuuuucuuuacaa

SEQ ID NO: 1431893 - RNA, 19 nt, Human
ugaaugauuuuucuuuaca

SEQ ID NO: 1431894 - RNA, 16 nt, Human
ugaaugauuuuucuuu

SEQ ID NO: 1431895 - RNA, 15 nt, Human
ugaaugauuuuucuu

SEQ ID NO: 1431896 - RNA, 24 nt, Human
ugaaugaagcaaaugucaugcugc

SEQ ID NO: 1431897 - RNA, 16 nt, Human
ugaaugauucaguguu

SEQ ID NO: 1431898 - RNA, 21 nt, Human
ugaauccucucucuguguuac

SEQ ID NO: 1431899 - RNA, 16 nt, Human
ugaauccucucucugu

SEQ ID NO: 1431900 - RNA, 14 nt, Human
ugaauccucucucu

SEQ ID NO: 1431901 - RNA, 14 nt, Human
ugaaucacaugaau

SEQ ID NO: 1431902 - RNA, 17 nt, Human
ugaaguuuuacauuguu

SEQ ID NO: 1431903 - RNA, 16 nt, Human
ugaaguuuuacauugu

SEQ ID NO: 1431904 - RNA, 15 nt, Human
ugaaguuuuacauug

SEQ ID NO: 1431905 - RNA, 14 nt, Human
ugaaguuuuacauu

SEQ ID NO: 1431906 - RNA, 16 nt, Human
ugaaguuugaauguua

SEQ ID NO: 1431907 - RNA, 17 nt, Human
ugaaguuugaauguuaa

SEQ ID NO: 1431908 - RNA, 18 nt, Human
ugaaguuugaauguuaaa

SEQ ID NO: 1431909 - RNA, 20 nt, Human
ugaaguuugaauguuaaaua

SEQ ID NO: 1431910 - RNA, 21 nt, Human
ugaaguuugaauguuaaauaa

SEQ ID NO: 1431911 - RNA, 14 nt, Human
ugaaguuugaaugu

SEQ ID NO: 1431912 - RNA, 15 nt, Human
ugaaguuugaauguu

SEQ ID NO: 1431913 - RNA, 12 nt, Human
ugaaguuugaau

SEQ ID NO: 1431914 - RNA, 13 nt, Human
ugaaguuugaaug

SEQ ID NO: 1431915 - RNA, 19 nt, Human
ugaaggcuucucucugugg

SEQ ID NO: 1431916 - RNA, 16 nt, Human
ugaaggcuucucucug

SEQ ID NO: 1431917 - RNA, 15 nt, Human
ugaaggcuucucucu

SEQ ID NO: 1431918 - RNA, 13 nt, Human
ugaaggcuucucu

SEQ ID NO: 1431919 - RNA, 14 nt, Human
ugaaggcuguacac

SEQ ID NO: 1431920 - RNA, 21 nt, Human
ugaacuugaggacacaugucc

SEQ ID NO: 1431921 - RNA, 22 nt, Human
ugaacuugaggacacaugucca

SEQ ID NO: 1431922 - RNA, 17 nt, Human
ugaacuugaggacacau

SEQ ID NO: 1431923 - RNA, 18 nt, Human
ugaacuugaggacacaug

SEQ ID NO: 1431924 - RNA, 19 nt, Human
ugaacuugaggacacaugu

SEQ ID NO: 1431925 - RNA, 20 nt, Human
ugaacuugaggacacauguc

SEQ ID NO: 1431926 - RNA, 21 nt, Human
ugaacuuagauuuuacaugaa

SEQ ID NO: 1431927 - RNA, 20 nt, Human
ugaacuuagauuuuacauga

SEQ ID NO: 1431928 - RNA, 19 nt, Human
ugaacuuagauuuuacaug

SEQ ID NO: 1431929 - RNA, 18 nt, Human
ugaacuuagauuuuacau

SEQ ID NO: 1431930 - RNA, 17 nt, Human
ugaacuuagauuuuaca

SEQ ID NO: 1431931 - RNA, 21 nt, Human
ugaacuugaaauauccugcuu

SEQ ID NO: 1431932 - RNA, 16 nt, Human
ugaacuugaggacaca

SEQ ID NO: 1431933 - RNA, 23 nt, Human
ugaaacagaaaaauauguaccaa

SEQ ID NO: 1431934 - RNA, 16 nt, Human
ugaaacagaaacaaaa

SEQ ID NO: 1431935 - RNA, 14 nt, Human
ugaaacagaaacaa

SEQ ID NO: 1431936 - RNA, 13 nt, Human
ugaaacagaaaca

SEQ ID NO: 1431937 - RNA, 15 nt, Human
ugaaacagaaaaaua

SEQ ID NO: 1431938 - RNA, 12 nt, Human
ugaaacagaaaa

SEQ ID NO: 1431939 - RNA, 16 nt, Human
ugaaacacuuugcaua

SEQ ID NO: 1431940 - RNA, 13 nt, Human
ugaaacauguuuc

SEQ ID NO: 1431941 - RNA, 14 nt, Human
ugaaggccugaggu

SEQ ID NO: 1431942 - RNA, 12 nt, Human
ugaaggccugag

SEQ ID NO: 1431943 - RNA, 23 nt, Human
ugaagaguguuauuuucauucaa

SEQ ID NO: 1431944 - RNA, 21 nt, Human
ugaagcuuuuaugugaaacau

SEQ ID NO: 1431945 - RNA, 17 nt, Human
ugaagagccacugccau

SEQ ID NO: 1431946 - RNA, 17 nt, Human
ugaagacuggaagcuaa

SEQ ID NO: 1431947 - RNA, 15 nt, Human
ugaagacuggaagcu

SEQ ID NO: 1431948 - RNA, 17 nt, Human
ugaagacuaugaaaaug

SEQ ID NO: 1431949 - RNA, 16 nt, Human
ugaagacuaugaaaau

SEQ ID NO: 1431950 - RNA, 23 nt, Human
ugaagaguaaucaaucuacucaa

SEQ ID NO: 1431951 - RNA, 23 nt, Human
ugaagaguaagucaaccugccug

SEQ ID NO: 1431952 - RNA, 21 nt, Human
ugaagagguuuuaaagcuucc

SEQ ID NO: 1431953 - RNA, 20 nt, Human
ugaagagguuuuaaagcuuc

SEQ ID NO: 1431954 - RNA, 21 nt, Human
ugccugacuagggagccaugu

SEQ ID NO: 1431955 - RNA, 23 nt, Human
ugccugacccuacuucuuuugcu

SEQ ID NO: 1431956 - RNA, 18 nt, Human
ugccugacauuuggagug

SEQ ID NO: 1431957 - RNA, 21 nt, Human
ugccuguagccccagugacag

SEQ ID NO: 1431958 - RNA, 22 nt, Human
ugccuguagccccagugacagc

SEQ ID NO: 1431959 - RNA, 20 nt, Human
ugccuguagccccagugaca

SEQ ID NO: 1431960 - RNA, 23 nt, Human
ugccucuacugggaaggcuacuu

SEQ ID NO: 1431961 - RNA, 23 nt, Human
ugccucgaaacacagaaaccuuu

SEQ ID NO: 1431962 - RNA, 21 nt, Human
ugccccuuccgccacuggggc

SEQ ID NO: 1431963 - RNA, 20 nt, Human
ugccccuuccgccacugggg

SEQ ID NO: 1431964 - RNA, 23 nt, Human
ugccccuuccgccacuggggcuc

SEQ ID NO: 1431965 - RNA, 19 nt, Human
ugccccuuccgccacuggg

SEQ ID NO: 1431966 - RNA, 18 nt, Human
ugccccuuccgccacugg

SEQ ID NO: 1431967 - RNA, 17 nt, Human
ugccccuuccgccacug

SEQ ID NO: 1431968 - RNA, 14 nt, Human
ugccccuuccgcca

SEQ ID NO: 1431969 - RNA, 13 nt, Human
ugccccuggcugg

SEQ ID NO: 1431970 - RNA, 21 nt, Human
ugccucuucugggagggcagc

SEQ ID NO: 1431971 - RNA, 20 nt, Human
ugccucuucugggagggcag

SEQ ID NO: 1431972 - RNA, 19 nt, Human
ugccucuucugggagggca

SEQ ID NO: 1431973 - RNA, 16 nt, Human
ugccucuucugggagg

SEQ ID NO: 1431974 - RNA, 16 nt, Human
ugccugacacacuaac

SEQ ID NO: 1431975 - RNA, 16 nt, Human
ugccucucccaggcag

SEQ ID NO: 1431976 - RNA, 17 nt, Human
ugccucucccaggcagg

SEQ ID NO: 1431977 - RNA, 13 nt, Human
ugccucucccagg

SEQ ID NO: 1431978 - RNA, 21 nt, Human
ugccucucaucaacugaauga

SEQ ID NO: 1431979 - RNA, 18 nt, Human
ugccucucaucaacugaa

SEQ ID NO: 1431980 - RNA, 15 nt, Human
ugccucuucugggag

SEQ ID NO: 1431981 - RNA, 20 nt, Human
ugccucucgcuccucaaccc

SEQ ID NO: 1431982 - RNA, 9 nt, Human
ugccucucu

SEQ ID NO: 1431983 - RNA, 17 nt, Human
ugcgugacaauaaaaca

SEQ ID NO: 1431984 - RNA, 15 nt, Human
ugcgugacaauaaaa

SEQ ID NO: 1431985 - RNA, 14 nt, Human
ugcgugacaauaaa

SEQ ID NO: 1431986 - RNA, 22 nt, Human
ugcgugacaauaaaacauuaau

SEQ ID NO: 1431987 - RNA, 13 nt, Human
ugcuaacaucuaa

SEQ ID NO: 1431988 - RNA, 22 nt, Human
ugcuaagagaaguagaaaucau

SEQ ID NO: 1431989 - RNA, 13 nt, Human
ugcuaagagaagu

SEQ ID NO: 1431990 - RNA, 16 nt, Human
ugcuaacaucuaaaaa

SEQ ID NO: 1431991 - RNA, 23 nt, Human
ugcuaaauaaaauuuguugcaua

SEQ ID NO: 1431992 - RNA, 22 nt, Human
ugcuaaauaaaauuuguugcau

SEQ ID NO: 1431993 - RNA, 21 nt, Human
ugcuaaauaaaauuuguugca

SEQ ID NO: 1431994 - RNA, 17 nt, Human
ugcuaaauaaaauuugu

SEQ ID NO: 1431995 - RNA, 12 nt, Human
ugcuaaagacau

SEQ ID NO: 1431996 - RNA, 16 nt, Human
ugcgauagagucucac

SEQ ID NO: 1431997 - RNA, 14 nt, Human
ugcgauagagucuc

SEQ ID NO: 1431998 - RNA, 13 nt, Human
ugcgauagagucu

SEQ ID NO: 1431999 - RNA, 16 nt, Human
ugccuugaaaaagaca

SEQ ID NO: 1432000 - RNA, 20 nt, Human
ugcgagugcucauuucagga

SEQ ID NO: 1432001 - RNA, 16 nt, Human
ugccuucuacuuuuaa

SEQ ID NO: 1432002 - RNA, 20 nt, Human
ugccuucgucuuucccaugg

SEQ ID NO: 1432003 - RNA, 23 nt, Human
ugccuucgcuucuugccucugug

SEQ ID NO: 1432004 - RNA, 22 nt, Human
ugccuucgcuucuugccucugu

SEQ ID NO: 1432005 - RNA, 21 nt, Human
ugccuucgcuucuugccucug

SEQ ID NO: 1432006 - RNA, 17 nt, Human
ugccuucucaacuccaa

SEQ ID NO: 1432007 - RNA, 15 nt, Human
ugccuucucaacucc

SEQ ID NO: 1432008 - RNA, 16 nt, Human
ugcuggaauucuaaca

SEQ ID NO: 1432009 - RNA, 17 nt, Human
ugcuggaauaaguucaa

SEQ ID NO: 1432010 - RNA, 22 nt, Human
ugcuggaagacgcaagggccug

SEQ ID NO: 1432011 - RNA, 18 nt, Human
ugcuggaaaauaauacug

SEQ ID NO: 1432012 - RNA, 14 nt, Human
ugcugcugugugcu

SEQ ID NO: 1432013 - RNA, 17 nt, Human
ugcugcugucugggugc

SEQ ID NO: 1432014 - RNA, 23 nt, Human
ugcugcuggggaagacaguggcc

SEQ ID NO: 1432015 - RNA, 13 nt, Human
ugcugcugucccu

SEQ ID NO: 1432016 - RNA, 24 nt, Human
ugcugcuggggaagacaguggccc

SEQ ID NO: 1432017 - RNA, 22 nt, Human
ugcugcuggggaagacaguggc

SEQ ID NO: 1432018 - RNA, 21 nt, Human
ugcugcuggggaagacagugg

SEQ ID NO: 1432019 - RNA, 20 nt, Human
ugcugcuggggaagacagug

SEQ ID NO: 1432020 - RNA, 19 nt, Human
ugcugcuggggaagacagu

SEQ ID NO: 1432021 - RNA, 15 nt, Human
ugcugcuggggaaga

SEQ ID NO: 1432022 - RNA, 14 nt, Human
ugcugcuggggaag

SEQ ID NO: 1432023 - RNA, 17 nt, Human
ugcugcugggcucagug

SEQ ID NO: 1432024 - RNA, 14 nt, Human
ugcugcugggcuca

SEQ ID NO: 1432025 - RNA, 13 nt, Human
ugcugcugggcuc

SEQ ID NO: 1432026 - RNA, 15 nt, Human
ugcugcuacuuauau

SEQ ID NO: 1432027 - RNA, 19 nt, Human
ugcugcuaauauuuuccuc

SEQ ID NO: 1432028 - RNA, 23 nt, Human
ugcugcauggcagggggcugcug

SEQ ID NO: 1432029 - RNA, 22 nt, Human
ugcugcauggcagggggcugcu

SEQ ID NO: 1432030 - RNA, 21 nt, Human
ugcugcauggcagggggcugc

SEQ ID NO: 1432031 - RNA, 16 nt, Human
ugcugcauggcagggg

SEQ ID NO: 1432032 - RNA, 14 nt, Human
ugcugcauuuaaaa

SEQ ID NO: 1432033 - RNA, 14 nt, Human
ugcugcauggcagg

SEQ ID NO: 1432034 - RNA, 19 nt, Human
ugcugcaagcacagcccuu

SEQ ID NO: 1432035 - RNA, 20 nt, Human
ugcugcaaaccugaccccug

SEQ ID NO: 1432036 - RNA, 14 nt, Human
ugcugcaaaccuga

SEQ ID NO: 1432037 - RNA, 13 nt, Human
ugcugcaaaccug

SEQ ID NO: 1432038 - RNA, 14 nt, Human
ugcugaacagugga

SEQ ID NO: 1432039 - RNA, 17 nt, Human
ugcugaaauuuuauaug

SEQ ID NO: 1432040 - RNA, 21 nt, Human
ugcucuccauucugcuccuuc

SEQ ID NO: 1432041 - RNA, 20 nt, Human
ugcucuccauucugcuccuu

SEQ ID NO: 1432042 - RNA, 19 nt, Human
ugcucuccauucugcuccu

SEQ ID NO: 1432043 - RNA, 14 nt, Human
ugcucgcccugcgg

SEQ ID NO: 1432044 - RNA, 13 nt, Human
ugcucgcccugcg

SEQ ID NO: 1432045 - RNA, 13 nt, Human
ugcucgcuguugc

SEQ ID NO: 1432046 - RNA, 14 nt, Human
ugcucgcuguugcu

SEQ ID NO: 1432047 - RNA, 15 nt, Human
ugcucgcuguugcug

SEQ ID NO: 1432048 - RNA, 17 nt, Human
ugcucgcuguugcugaa

SEQ ID NO: 1432049 - RNA, 18 nt, Human
ugcucgcuguugcugaau

SEQ ID NO: 1432050 - RNA, 16 nt, Human
ugcucgccccagcagg

SEQ ID NO: 1432051 - RNA, 14 nt, Human
ugcucgccccagca

SEQ ID NO: 1432052 - RNA, 14 nt, Human
ugcucaggggcccu

SEQ ID NO: 1432053 - RNA, 17 nt, Human
ugcucaggggcccugga

SEQ ID NO: 1432054 - RNA, 18 nt, Human
ugcucaggggcccuggag

SEQ ID NO: 1432055 - RNA, 20 nt, Human
ugcucaggggcccuggagca

SEQ ID NO: 1432056 - RNA, 17 nt, Human
ugcucagcucugggcca

SEQ ID NO: 1432057 - RNA, 13 nt, Human
ugcucagcccugc

SEQ ID NO: 1432058 - RNA, 19 nt, Human
ugcucagcccugaggacag

SEQ ID NO: 1432059 - RNA, 17 nt, Human
ugcucagcccugaggac

SEQ ID NO: 1432060 - RNA, 16 nt, Human
ugcucagcccugagga

SEQ ID NO: 1432061 - RNA, 17 nt, Human
ugcucaguaauuugagg

SEQ ID NO: 1432062 - RNA, 16 nt, Human
ugcucaguagucagac

SEQ ID NO: 1432063 - RNA, 17 nt, Human
ugcucaggugcuggggc

SEQ ID NO: 1432064 - RNA, 17 nt, Human
ugcucagguacuuguaa

SEQ ID NO: 1432065 - RNA, 13 nt, Human
ugcucagguacuu

SEQ ID NO: 1432066 - RNA, 21 nt, Human
ugcucagggggcgccuguggu

SEQ ID NO: 1432067 - RNA, 17 nt, Human
ugcucagagcaguguuu

SEQ ID NO: 1432068 - RNA, 21 nt, Human
ugcucaauaaaugauucuuag

SEQ ID NO: 1432069 - RNA, 16 nt, Human
ugcucaaggccagcuu

SEQ ID NO: 1432070 - RNA, 13 nt, Human
ugcucaaggccag

SEQ ID NO: 1432071 - RNA, 16 nt, Human
ugcuaagagaaguaga

SEQ ID NO: 1432072 - RNA, 15 nt, Human
ugcuaagccccagca

SEQ ID NO: 1432073 - RNA, 18 nt, Human
ugcuaagccccagcaagc

SEQ ID NO: 1432074 - RNA, 19 nt, Human
ugcuaagcauuccaacuau

SEQ ID NO: 1432075 - RNA, 15 nt, Human
ugcuaagcauuccaa

SEQ ID NO: 1432076 - RNA, 20 nt, Human
ugcaggcccuggccuccccu

SEQ ID NO: 1432077 - RNA, 16 nt, Human
ugcaggcccuggccuc

SEQ ID NO: 1432078 - RNA, 15 nt, Human
ugcaggcccuggccu

SEQ ID NO: 1432079 - RNA, 12 nt, Human
ugcaggcccugg

SEQ ID NO: 1432080 - RNA, 19 nt, Human
ugcaggcccuggccucccc

SEQ ID NO: 1432081 - RNA, 17 nt, Human
ugcaggcccuggccucc

SEQ ID NO: 1432082 - RNA, 17 nt, Human
ugcagugcucgcuguug

SEQ ID NO: 1432083 - RNA, 19 nt, Human
ugcagugcucgcuguugcu

SEQ ID NO: 1432084 - RNA, 20 nt, Human
ugcagugcucgcuguugcug

SEQ ID NO: 1432085 - RNA, 22 nt, Human
ugcaguucugaagaagauggua

SEQ ID NO: 1432086 - RNA, 19 nt, Human
ugcaguucugaagaagaug

SEQ ID NO: 1432087 - RNA, 22 nt, Human
ugcaguggcaucaucucagcuc

SEQ ID NO: 1432088 - RNA, 23 nt, Human
ugcagugcucgcuguugcugaau

SEQ ID NO: 1432089 - RNA, 21 nt, Human
ugcagugcucgcuguugcuga

SEQ ID NO: 1432090 - RNA, 22 nt, Human
ugcagugcucgcuguugcugaa

SEQ ID NO: 1432091 - RNA, 22 nt, Human
ugcaguggcgcgaucucagcuc

SEQ ID NO: 1432092 - RNA, 22 nt, Human
ugcaguggcgugaucucagcuc

SEQ ID NO: 1432093 - RNA, 18 nt, Human
ugcaguucugaagaagau

SEQ ID NO: 1432094 - RNA, 17 nt, Human
ugcaguucugaagaaga

SEQ ID NO: 1432095 - RNA, 16 nt, Human
ugcaguucugaagaag

SEQ ID NO: 1432096 - RNA, 15 nt, Human
ugcaguucugaagaa

SEQ ID NO: 1432097 - RNA, 21 nt, Human
ugcacuuugcuuuaauauaaa

SEQ ID NO: 1432098 - RNA, 17 nt, Human
ugcagaggccagaggcc

SEQ ID NO: 1432099 - RNA, 15 nt, Human
ugcagaggccagagg

SEQ ID NO: 1432100 - RNA, 14 nt, Human
ugcagaggccagag

SEQ ID NO: 1432101 - RNA, 23 nt, Human
ugcagcacagcugagaggcuguc

SEQ ID NO: 1432102 - RNA, 23 nt, Human
ugcagcaauaaagcagcguuucu

SEQ ID NO: 1432103 - RNA, 22 nt, Human
ugcacuuugcuuuaauauaaau

SEQ ID NO: 1432104 - RNA, 20 nt, Human
ugcacuuugcuuuaauauaa

SEQ ID NO: 1432105 - RNA, 17 nt, Human
ugcacuuugcuuuaaua

SEQ ID NO: 1432106 - RNA, 16 nt, Human
ugcacuuugcuuuaau

SEQ ID NO: 1432107 - RNA, 12 nt, Human
ugcacuuugcuu

SEQ ID NO: 1432108 - RNA, 20 nt, Human
ugcacuuucuauccucugua

SEQ ID NO: 1432109 - RNA, 15 nt, Human
ugcacuguaaaaugu

SEQ ID NO: 1432110 - RNA, 17 nt, Human
ugcacuguaaaaugugg

SEQ ID NO: 1432111 - RNA, 14 nt, Human
ugcacuguaaaaug

SEQ ID NO: 1432112 - RNA, 13 nt, Human
ugcacuguaaaau

SEQ ID NO: 1432113 - RNA, 12 nt, Human
ugcacuguaaaa

SEQ ID NO: 1432114 - RNA, 21 nt, Human
ugcacugggaggcuccccuuc

SEQ ID NO: 1432115 - RNA, 20 nt, Human
ugcacuggggagcccgucuc

SEQ ID NO: 1432116 - RNA, 16 nt, Human
ugcacuggggagcccg

SEQ ID NO: 1432117 - RNA, 15 nt, Human
ugcacuggccccacc

SEQ ID NO: 1432118 - RNA, 16 nt, Human
ugcacuggccccaccc

SEQ ID NO: 1432119 - RNA, 20 nt, Human
ugcacugggaggcuccccuu

SEQ ID NO: 1432120 - RNA, 17 nt, Human
ugcacugggaggcuccc

SEQ ID NO: 1432121 - RNA, 12 nt, Human
ugcacugggagg

SEQ ID NO: 1432122 - RNA, 17 nt, Human
ugcacuggccccacccu

SEQ ID NO: 1432123 - RNA, 22 nt, Human
ugcaccggggccugggcaggag

SEQ ID NO: 1432124 - RNA, 16 nt, Human
ugcaccggggccuggg

SEQ ID NO: 1432125 - RNA, 12 nt, Human
ugcaccggggcc

SEQ ID NO: 1432126 - RNA, 21 nt, Human
ugcacugcccauggacaggcu

SEQ ID NO: 1432127 - RNA, 19 nt, Human
ugcacugcccauggacagg

SEQ ID NO: 1432128 - RNA, 21 nt, Human
ugcacugauguuguguuuuua

SEQ ID NO: 1432129 - RNA, 15 nt, Human
ugcacugauguugug

SEQ ID NO: 1432130 - RNA, 14 nt, Human
ugcacugauguugu

SEQ ID NO: 1432131 - RNA, 13 nt, Human
ugcacugauguug

SEQ ID NO: 1432132 - RNA, 22 nt, Human
ugcacugaugcugccccucauc

SEQ ID NO: 1432133 - RNA, 21 nt, Human
ugcacugaugcugccccucau

SEQ ID NO: 1432134 - RNA, 17 nt, Human
ugcacugaugcugcccc

SEQ ID NO: 1432135 - RNA, 16 nt, Human
ugcacugaugcugccc

SEQ ID NO: 1432136 - RNA, 14 nt, Human
ugcacugaugcugc

SEQ ID NO: 1432137 - RNA, 22 nt, Human
ugcacugauauaucaugaguga

SEQ ID NO: 1432138 - RNA, 19 nt, Human
ugcacgcacacugucugcc

SEQ ID NO: 1432139 - RNA, 22 nt, Human
ugcccaccucagccucccaaag

SEQ ID NO: 1432140 - RNA, 22 nt, Human
ugcccacccucuggagaaggug

SEQ ID NO: 1432141 - RNA, 13 nt, Human
ugccccaggacca

SEQ ID NO: 1432142 - RNA, 16 nt, Human
ugcccaugggagcugg

SEQ ID NO: 1432143 - RNA, 24 nt, Human
ugcccauggacaggcuggcuccag

SEQ ID NO: 1432144 - RNA, 20 nt, Human
ugcccaugcugggagcccac

SEQ ID NO: 1432145 - RNA, 22 nt, Human
ugcccaguuaaucuugcuuucu

SEQ ID NO: 1432146 - RNA, 23 nt, Human
ugcccaguuaaucuugcuuucuu

SEQ ID NO: 1432147 - RNA, 20 nt, Human
ugcccaguuaaucuugcuuu

SEQ ID NO: 1432148 - RNA, 14 nt, Human
ugcccaguuaaucu

SEQ ID NO: 1432149 - RNA, 17 nt, Human
ugccccaucccaugcug

SEQ ID NO: 1432150 - RNA, 20 nt, Human
ugccccaggaccagcucagg

SEQ ID NO: 1432151 - RNA, 19 nt, Human
ugccccaggaccagcucag

SEQ ID NO: 1432152 - RNA, 18 nt, Human
ugccccaggaccagcuca

SEQ ID NO: 1432153 - RNA, 14 nt, Human
ugccccaggaccag

SEQ ID NO: 1432154 - RNA, 14 nt, Human
ugccccaggccuga

SEQ ID NO: 1432155 - RNA, 21 nt, Human
ugccccaucagugcucccuca

SEQ ID NO: 1432156 - RNA, 20 nt, Human
ugccccaucagugcucccuc

SEQ ID NO: 1432157 - RNA, 18 nt, Human
ugccccaucagugcuccc

SEQ ID NO: 1432158 - RNA, 16 nt, Human
ugccccaucagugcuc

SEQ ID NO: 1432159 - RNA, 13 nt, Human
ugccaccaggcca

SEQ ID NO: 1432160 - RNA, 16 nt, Human
ugccaaauauguccug

SEQ ID NO: 1432161 - RNA, 19 nt, Human
ugccaaauauaaauaaaaa

SEQ ID NO: 1432162 - RNA, 22 nt, Human
ugccaaauauaaauaaaaauaa

SEQ ID NO: 1432163 - RNA, 17 nt, Human
ugccaaauauaaauaaa

SEQ ID NO: 1432164 - RNA, 18 nt, Human
ugccaaauauaaauaaaa

SEQ ID NO: 1432165 - RNA, 13 nt, Human
ugcauauguugaa

SEQ ID NO: 1432166 - RNA, 20 nt, Human
ugcauauuuauaaaaauaaa

SEQ ID NO: 1432167 - RNA, 15 nt, Human
ugcauauuuguuuau

SEQ ID NO: 1432168 - RNA, 17 nt, Human
ugcauauguugaauacu

SEQ ID NO: 1432169 - RNA, 15 nt, Human
ugcauauguugaaua

SEQ ID NO: 1432170 - RNA, 21 nt, Human
ugcauauuuauaaaaauaaaa

SEQ ID NO: 1432171 - RNA, 22 nt, Human
ugccaggagggacaaaggagcc

SEQ ID NO: 1432172 - RNA, 21 nt, Human
ugccaggagggacaaaggagc

SEQ ID NO: 1432173 - RNA, 13 nt, Human
ugccaggagggac

SEQ ID NO: 1432174 - RNA, 23 nt, Human
ugccaggaggacccagggcucug

SEQ ID NO: 1432175 - RNA, 22 nt, Human
ugccaggaggacccagggcucu

SEQ ID NO: 1432176 - RNA, 21 nt, Human
ugccaggaggacccagggcuc

SEQ ID NO: 1432177 - RNA, 20 nt, Human
ugccaggaggacccagggcu

SEQ ID NO: 1432178 - RNA, 24 nt, Human
ugccaggagggacaaaggagccug

SEQ ID NO: 1432179 - RNA, 23 nt, Human
ugccaggagggacaaaggagccu

SEQ ID NO: 1432180 - RNA, 18 nt, Human
ugccaccaggccaccucc

SEQ ID NO: 1432181 - RNA, 17 nt, Human
ugccaccaggccaccuc

SEQ ID NO: 1432182 - RNA, 14 nt, Human
ugccaccaggccac

SEQ ID NO: 1432183 - RNA, 16 nt, Human
ugccacccucaugcug

SEQ ID NO: 1432184 - RNA, 17 nt, Human
ugccacccucaugcugu

SEQ ID NO: 1432185 - RNA, 20 nt, Human
uggcaacagaucuggaaccu

SEQ ID NO: 1432186 - RNA, 18 nt, Human
uggcaacagaucuggaac

SEQ ID NO: 1432187 - RNA, 17 nt, Human
uggcaacagaucuggaa

SEQ ID NO: 1432188 - RNA, 16 nt, Human
uggcaacagaucugga

SEQ ID NO: 1432189 - RNA, 15 nt, Human
uggcaacagaucugg

SEQ ID NO: 1432190 - RNA, 13 nt, Human
uggcaacagaucu

SEQ ID NO: 1432191 - RNA, 13 nt, Human
uggcaacacagag

SEQ ID NO: 1432192 - RNA, 15 nt, Human
uggauuuuucuuuaa

SEQ ID NO: 1432193 - RNA, 14 nt, Human
uggauuugacauug

SEQ ID NO: 1432194 - RNA, 13 nt, Human
uggauuugacauu

SEQ ID NO: 1432195 - RNA, 18 nt, Human
uggauuucuuugaaaaaa

SEQ ID NO: 1432196 - RNA, 18 nt, Human
uggaucucauuggacccu

SEQ ID NO: 1432197 - RNA, 20 nt, Human
uggaucuauuucauguuuuu

SEQ ID NO: 1432198 - RNA, 18 nt, Human
uggaucuauuucauguuu

SEQ ID NO: 1432199 - RNA, 14 nt, Human
uggaucuauuucau

SEQ ID NO: 1432200 - RNA, 17 nt, Human
uggauccuguguggaga

SEQ ID NO: 1432201 - RNA, 16 nt, Human
uggauccuguguggag

SEQ ID NO: 1432202 - RNA, 17 nt, Human
uggaucagcguggccuu

SEQ ID NO: 1432203 - RNA, 18 nt, Human
uggaucagcguggccuug

SEQ ID NO: 1432204 - RNA, 17 nt, Human
uggaucacucaccauuc

SEQ ID NO: 1432205 - RNA, 15 nt, Human
uggaucacucaccau

SEQ ID NO: 1432206 - RNA, 19 nt, Human
uggauuucuuugaaaaaaa

SEQ ID NO: 1432207 - RNA, 15 nt, Human
uggauuucuuugaaa

SEQ ID NO: 1432208 - RNA, 21 nt, Human
uggauuuccuaauacugucau

SEQ ID NO: 1432209 - RNA, 15 nt, Human
uggauuuccuaauac

SEQ ID NO: 1432210 - RNA, 15 nt, Human
uggauuuaguuucag

SEQ ID NO: 1432211 - RNA, 16 nt, Human
uggauuuaguuucagu

SEQ ID NO: 1432212 - RNA, 20 nt, Human
uggauuuaacagaaauguac

SEQ ID NO: 1432213 - RNA, 24 nt, Human
uggauuuaacagaaauguacagca

SEQ ID NO: 1432214 - RNA, 22 nt, Human
uggacucucagucucugagcag

SEQ ID NO: 1432215 - RNA, 20 nt, Human
uggacucucagucucugagc

SEQ ID NO: 1432216 - RNA, 15 nt, Human
uggacucucagucuc

SEQ ID NO: 1432217 - RNA, 14 nt, Human
uggacucuaaaguc

SEQ ID NO: 1432218 - RNA, 16 nt, Human
uggacucgccuguaau

SEQ ID NO: 1432219 - RNA, 16 nt, Human
uggaggaccugagccu

SEQ ID NO: 1432220 - RNA, 18 nt, Human
uggaggaagagggacaga

SEQ ID NO: 1432221 - RNA, 23 nt, Human
uggaggagcccaggccaggacuc

SEQ ID NO: 1432222 - RNA, 22 nt, Human
uggaggagcccaggccaggacu

SEQ ID NO: 1432223 - RNA, 19 nt, Human
uggaggagcccaggccagg

SEQ ID NO: 1432224 - RNA, 14 nt, Human
uggaggagcccagg

SEQ ID NO: 1432225 - RNA, 13 nt, Human
uggaggagcccag

SEQ ID NO: 1432226 - RNA, 12 nt, Human
uggaggagccca

SEQ ID NO: 1432227 - RNA, 19 nt, Human
uggaggaccugagccugcc

SEQ ID NO: 1432228 - RNA, 20 nt, Human
uggaggaccugagccugccg

SEQ ID NO: 1432229 - RNA, 18 nt, Human
uggaggaccugagccugc

SEQ ID NO: 1432230 - RNA, 17 nt, Human
uggaggaccugagccug

SEQ ID NO: 1432231 - RNA, 22 nt, Human
uggagggacaaguggacucagg

SEQ ID NO: 1432232 - RNA, 11 nt, Human
uggagggaagc

SEQ ID NO: 1432233 - RNA, 22 nt, Human
uggccaggccgggaaaaagccc

SEQ ID NO: 1432234 - RNA, 15 nt, Human
uggccaggccgggaa

SEQ ID NO: 1432235 - RNA, 13 nt, Human
uggccaggccggg

SEQ ID NO: 1432236 - RNA, 12 nt, Human
uggccaggaggu

SEQ ID NO: 1432237 - RNA, 16 nt, Human
uggccaggaggugcca

SEQ ID NO: 1432238 - RNA, 11 nt, Human
uggccaggagg

SEQ ID NO: 1432239 - RNA, 23 nt, Human
uggcagugggaaaaauguaggag

SEQ ID NO: 1432240 - RNA, 22 nt, Human
uggcagugggaaaaauguagga

SEQ ID NO: 1432241 - RNA, 19 nt, Human
uggcagugggaaaaaugua

SEQ ID NO: 1432242 - RNA, 20 nt, Human
uggccagcagcaccugcccu

SEQ ID NO: 1432243 - RNA, 21 nt, Human
uggccagcagcaccugcccua

SEQ ID NO: 1432244 - RNA, 18 nt, Human
uggccagcagcaccugcc

SEQ ID NO: 1432245 - RNA, 16 nt, Human
uggccagcagcaccug

SEQ ID NO: 1432246 - RNA, 15 nt, Human
uggccagcagcaccu

SEQ ID NO: 1432247 - RNA, 13 nt, Human
uggccagcagcac

SEQ ID NO: 1432248 - RNA, 20 nt, Human
uggcaccuaauccaggcaga

SEQ ID NO: 1432249 - RNA, 24 nt, Human
uggcaccgaagcccagagggucug

SEQ ID NO: 1432250 - RNA, 18 nt, Human
uggcaccgaagcccagag

SEQ ID NO: 1432251 - RNA, 17 nt, Human
uggcaccgaagcccaga

SEQ ID NO: 1432252 - RNA, 16 nt, Human
uggcaccgaagcccag

SEQ ID NO: 1432253 - RNA, 22 nt, Human
uggcaacagaucuggaaccuca

SEQ ID NO: 1432254 - RNA, 15 nt, Human
uggcaggaaggcuug

SEQ ID NO: 1432255 - RNA, 17 nt, Human
uggcaggaaggcuuguu

SEQ ID NO: 1432256 - RNA, 12 nt, Human
uggcaggaaggc

SEQ ID NO: 1432257 - RNA, 18 nt, Human
uggcagcuuuuaaaagau

SEQ ID NO: 1432258 - RNA, 11 nt, Human
uggcagcuuuu

SEQ ID NO: 1432259 - RNA, 23 nt, Human
uggcagggggcugcugcugggcu

SEQ ID NO: 1432260 - RNA, 21 nt, Human
uggcagggggcugcugcuggg

SEQ ID NO: 1432261 - RNA, 19 nt, Human
uggcagggggcugcugcug

SEQ ID NO: 1432262 - RNA, 18 nt, Human
uggcagggggcugcugcu

SEQ ID NO: 1432263 - RNA, 17 nt, Human
uggcagggggcugcugc

SEQ ID NO: 1432264 - RNA, 16 nt, Human
uggcagggggcugcug

SEQ ID NO: 1432265 - RNA, 15 nt, Human
uggcagggggcugcu

SEQ ID NO: 1432266 - RNA, 13 nt, Human
uggcagggggcug

SEQ ID NO: 1432267 - RNA, 18 nt, Human
uggcaggggacaggaguc

SEQ ID NO: 1432268 - RNA, 15 nt, Human
uggcaggggacagga

SEQ ID NO: 1432269 - RNA, 22 nt, Human
uggcagucugaauuuuuaaaac

SEQ ID NO: 1432270 - RNA, 16 nt, Human
uggcagucugaauuuu

SEQ ID NO: 1432271 - RNA, 18 nt, Human
uggcaguccuggaagcca

SEQ ID NO: 1432272 - RNA, 18 nt, Human
uggcaguccgugggacgg

SEQ ID NO: 1432273 - RNA, 15 nt, Human
uggcaggugcagccc

SEQ ID NO: 1432274 - RNA, 21 nt, Human
ugcuuuaauauaaaugcaaau

SEQ ID NO: 1432275 - RNA, 22 nt, Human
ugcuuuaauauaaaugcaaaua

SEQ ID NO: 1432276 - RNA, 20 nt, Human
ugcuuuaauauaaaugcaaa

SEQ ID NO: 1432277 - RNA, 18 nt, Human
ugcuuuaauauaaaugca

SEQ ID NO: 1432278 - RNA, 14 nt, Human
ugcuuuaauauaaa

SEQ ID NO: 1432279 - RNA, 13 nt, Human
ugcuuuaauauaa

SEQ ID NO: 1432280 - RNA, 21 nt, Human
ugcuuuaaccaccccaucugc

SEQ ID NO: 1432281 - RNA, 22 nt, Human
ugcuggagaggccccagccgcu

SEQ ID NO: 1432282 - RNA, 20 nt, Human
ugcuggagaggccccagccg

SEQ ID NO: 1432283 - RNA, 19 nt, Human
ugcuggacugucauagaaa

SEQ ID NO: 1432284 - RNA, 15 nt, Human
ugcuggacugucaua

SEQ ID NO: 1432285 - RNA, 14 nt, Human
ugcuggacugucau

SEQ ID NO: 1432286 - RNA, 17 nt, Human
ugcuggaauucuaacaa

SEQ ID NO: 1432287 - RNA, 16 nt, Human
ugcuuugaaacagaaa

SEQ ID NO: 1432288 - RNA, 21 nt, Human
ugcuuugaaacagaaaaauau

SEQ ID NO: 1432289 - RNA, 18 nt, Human
ugcuuucuuuguuuggcu

SEQ ID NO: 1432290 - RNA, 22 nt, Human
ugcuuucuguuccaaauucagu

SEQ ID NO: 1432291 - RNA, 17 nt, Human
ugcuuucuguuccaaau

SEQ ID NO: 1432292 - RNA, 16 nt, Human
ugcuuucuguuccaaa

SEQ ID NO: 1432293 - RNA, 15 nt, Human
ugcuuucuguuccaa

SEQ ID NO: 1432294 - RNA, 14 nt, Human
ugcuuucuguucca

SEQ ID NO: 1432295 - RNA, 20 nt, Human
ugcuuugaaguagcucuuuu

SEQ ID NO: 1432296 - RNA, 16 nt, Human
ugcuuugaaguagcuc

SEQ ID NO: 1432297 - RNA, 23 nt, Human
ugcuuugaaauugaaccuuugug

SEQ ID NO: 1432298 - RNA, 12 nt, Human
uggaaccagacu

SEQ ID NO: 1432299 - RNA, 20 nt, Human
uggaacauuggaauguucuc

SEQ ID NO: 1432300 - RNA, 17 nt, Human
uggaacauuggaauguu

SEQ ID NO: 1432301 - RNA, 13 nt, Human
uggaacauuggaa

SEQ ID NO: 1432302 - RNA, 14 nt, Human
uggaacauccuugg

SEQ ID NO: 1432303 - RNA, 12 nt, Human
uggaaagcaggu

SEQ ID NO: 1432304 - RNA, 23 nt, Human
uggaaagauaacuaggaaaucca

SEQ ID NO: 1432305 - RNA, 18 nt, Human
uggaaagauaacuaggaa

SEQ ID NO: 1432306 - RNA, 22 nt, Human
uggaaacuuuucuuaaaaaguu

SEQ ID NO: 1432307 - RNA, 23 nt, Human
uggaaagacagcuucucauccug

SEQ ID NO: 1432308 - RNA, 14 nt, Human
uggaaagaguacuc

SEQ ID NO: 1432309 - RNA, 19 nt, Human
uggaaagacagcuucucau

SEQ ID NO: 1432310 - RNA, 14 nt, Human
uggaaacuuuucuu

SEQ ID NO: 1432311 - RNA, 23 nt, Human
uggaaacuucagcgguuuauaua

SEQ ID NO: 1432312 - RNA, 20 nt, Human
uggaaaacagaacacuuaug

SEQ ID NO: 1432313 - RNA, 18 nt, Human
uggaaaacagaacacuua

SEQ ID NO: 1432314 - RNA, 17 nt, Human
uggaaaacagaacacuu

SEQ ID NO: 1432315 - RNA, 16 nt, Human
uggaaaacagaacacu

SEQ ID NO: 1432316 - RNA, 17 nt, Human
uggaaaacaaggaaguc

SEQ ID NO: 1432317 - RNA, 15 nt, Human
uggaaaauucauuuu

SEQ ID NO: 1432318 - RNA, 19 nt, Human
uggaaaacagaacacuuau

SEQ ID NO: 1432319 - RNA, 17 nt, Human
uggaaacaagucaguca

SEQ ID NO: 1432320 - RNA, 17 nt, Human
uggaaugcccuucacug

SEQ ID NO: 1432321 - RNA, 18 nt, Human
uggaaugaauuaaauaaa

SEQ ID NO: 1432322 - RNA, 17 nt, Human
uggaaugaauuaaauaa

SEQ ID NO: 1432323 - RNA, 22 nt, Human
uggaauauaauuguuuuaucug

SEQ ID NO: 1432324 - RNA, 15 nt, Human
uggaauggauuuuuc

SEQ ID NO: 1432325 - RNA, 20 nt, Human
uggacuaucugucugguggc

SEQ ID NO: 1432326 - RNA, 17 nt, Human
uggacuaucugucuggu

SEQ ID NO: 1432327 - RNA, 15 nt, Human
uggacuaucugucug

SEQ ID NO: 1432328 - RNA, 14 nt, Human
uggacuaucugucu

SEQ ID NO: 1432329 - RNA, 22 nt, Human
uggacuauggagugcaccaaag

SEQ ID NO: 1432330 - RNA, 23 nt, Human
uggacuaucugucugguggcccc

SEQ ID NO: 1432331 - RNA, 22 nt, Human
uggacuaucugucugguggccc

SEQ ID NO: 1432332 - RNA, 22 nt, Human
uggacaugaagauucuuuccca

SEQ ID NO: 1432333 - RNA, 21 nt, Human
uggacaugaagauucuuuccc

SEQ ID NO: 1432334 - RNA, 18 nt, Human
uggacaugaagauucuuu

SEQ ID NO: 1432335 - RNA, 23 nt, Human
uggacauccuccucccacccggc

SEQ ID NO: 1432336 - RNA, 20 nt, Human
uggacauccuccucccaccc

SEQ ID NO: 1432337 - RNA, 14 nt, Human
uggacagccccacc

SEQ ID NO: 1432338 - RNA, 12 nt, Human
uggacagcccca

SEQ ID NO: 1432339 - RNA, 15 nt, Human
uggaauaaguucaaa

SEQ ID NO: 1432340 - RNA, 22 nt, Human
uggaauaauccuaaacauauga

SEQ ID NO: 1432341 - RNA, 14 nt, Human
uggaauauaauugu

SEQ ID NO: 1432342 - RNA, 16 nt, Human
uggaauaucuccguca

SEQ ID NO: 1432343 - RNA, 16 nt, Human
uggaauauauaaccag

SEQ ID NO: 1432344 - RNA, 15 nt, Human
uggaauauauaacca

SEQ ID NO: 1432345 - RNA, 20 nt, Human
uggaacuagguuuuaauaau

SEQ ID NO: 1432346 - RNA, 18 nt, Human
uggaacuagguuuuaaua

SEQ ID NO: 1432347 - RNA, 23 nt, Human
uggaacuacauuaguacacagca

SEQ ID NO: 1432348 - RNA, 17 nt, Human
uggaacuacauuacugu

SEQ ID NO: 1432349 - RNA, 13 nt, Human
uggaaccagacuc

SEQ ID NO: 1432350 - RNA, 18 nt, Human
uggaacucgugucuggca

SEQ ID NO: 1432351 - RNA, 19 nt, Human
uggaaccagacucuugccu

SEQ ID NO: 1432352 - RNA, 15 nt, Human
ugggagucacacagu

SEQ ID NO: 1432353 - RNA, 23 nt, Human
ugggagucacacaguguuggagg

SEQ ID NO: 1432354 - RNA, 21 nt, Human
ugggauuaugggucacaggaa

SEQ ID NO: 1432355 - RNA, 19 nt, Human
ugggauuaugggucacagg

SEQ ID NO: 1432356 - RNA, 18 nt, Human
ugggauuaugggucacag

SEQ ID NO: 1432357 - RNA, 15 nt, Human
ugggauuauggguca

SEQ ID NO: 1432358 - RNA, 20 nt, Human
ugggcagagcuggcucugag

SEQ ID NO: 1432359 - RNA, 18 nt, Human
ugggcagagcuggcucug

SEQ ID NO: 1432360 - RNA, 21 nt, Human
ugggauucaggaaaaggccug

SEQ ID NO: 1432361 - RNA, 20 nt, Human
ugggauucaggaaaaggccu

SEQ ID NO: 1432362 - RNA, 20 nt, Human
ugggauuaugggucacagga

SEQ ID NO: 1432363 - RNA, 21 nt, Human
ugggacaccccgacuuuuguu

SEQ ID NO: 1432364 - RNA, 15 nt, Human
ugggacaacugcucc

SEQ ID NO: 1432365 - RNA, 20 nt, Human
uggcuuuugcgguucaggaa

SEQ ID NO: 1432366 - RNA, 14 nt, Human
uggcuuuggucucu

SEQ ID NO: 1432367 - RNA, 15 nt, Human
uggcuuuugugcauu

SEQ ID NO: 1432368 - RNA, 15 nt, Human
ugggacguggcucag

SEQ ID NO: 1432369 - RNA, 23 nt, Human
ugggacggugcccaagccagagg

SEQ ID NO: 1432370 - RNA, 14 nt, Human
ugggacggugccca

SEQ ID NO: 1432371 - RNA, 23 nt, Human
ugggacgggaugguucuggcugu

SEQ ID NO: 1432372 - RNA, 23 nt, Human
ugggaccucaguuuuaucauuuu

SEQ ID NO: 1432373 - RNA, 22 nt, Human
ugggaccgcuacaccacucugg

SEQ ID NO: 1432374 - RNA, 16 nt, Human
ugggaccuagggaggc

SEQ ID NO: 1432375 - RNA, 21 nt, Human
ugggaccgcuacaccacucug

SEQ ID NO: 1432376 - RNA, 20 nt, Human
ugggaccgcuacaccacucu

SEQ ID NO: 1432377 - RNA, 15 nt, Human
ugggaccgcuacacc

SEQ ID NO: 1432378 - RNA, 20 nt, Human
ugggagagggcgcaggccgu

SEQ ID NO: 1432379 - RNA, 15 nt, Human
ugggagagggcgcag

SEQ ID NO: 1432380 - RNA, 14 nt, Human
ugggagagggcgca

SEQ ID NO: 1432381 - RNA, 13 nt, Human
ugggagagggcgc

SEQ ID NO: 1432382 - RNA, 12 nt, Human
ugggagagggcg

SEQ ID NO: 1432383 - RNA, 22 nt, Human
ugggagaggcagcccaggaagu

SEQ ID NO: 1432384 - RNA, 18 nt, Human
ugggagaggcagcccagg

SEQ ID NO: 1432385 - RNA, 15 nt, Human
ugggagaggcagccc

SEQ ID NO: 1432386 - RNA, 14 nt, Human
ugggagaggcagcc

SEQ ID NO: 1432387 - RNA, 20 nt, Human
ugggacguggcucagccagc

SEQ ID NO: 1432388 - RNA, 16 nt, Human
ugggacguggcucagc

SEQ ID NO: 1432389 - RNA, 22 nt, Human
ugggagcugaggccacacucag

SEQ ID NO: 1432390 - RNA, 20 nt, Human
ugggagcugaggccacacuc

SEQ ID NO: 1432391 - RNA, 18 nt, Human
ugggagcaaacugcaugc

SEQ ID NO: 1432392 - RNA, 23 nt, Human
ugggagauucaagggacccauga

SEQ ID NO: 1432393 - RNA, 21 nt, Human
uggcuuuggucucuugcuugu

SEQ ID NO: 1432394 - RNA, 13 nt, Human
uggcuuuggaagc

SEQ ID NO: 1432395 - RNA, 16 nt, Human
uggcuuugaugauaaa

SEQ ID NO: 1432396 - RNA, 14 nt, Human
uggcuuuugugcau

SEQ ID NO: 1432397 - RNA, 21 nt, Human
uggcuuucauuuucucucagg

SEQ ID NO: 1432398 - RNA, 14 nt, Human
uggcuuucagggag

SEQ ID NO: 1432399 - RNA, 11 nt, Human
uggcuuucagg

SEQ ID NO: 1432400 - RNA, 17 nt, Human
uggcuuucagagccucc

SEQ ID NO: 1432401 - RNA, 15 nt, Human
uggcuuucagagccu

SEQ ID NO: 1432402 - RNA, 21 nt, Human
uggcuuuauccucuuuagagu

SEQ ID NO: 1432403 - RNA, 20 nt, Human
uggcuuuaggagcaguggga

SEQ ID NO: 1432404 - RNA, 17 nt, Human
uggcuuuaggagcagug

SEQ ID NO: 1432405 - RNA, 16 nt, Human
uggcuuuauccucuuu

SEQ ID NO: 1432406 - RNA, 20 nt, Human
uggcuuuauccucuuuagag

SEQ ID NO: 1432407 - RNA, 21 nt, Human
uggcuugaguuuaaauuguaa

SEQ ID NO: 1432408 - RNA, 15 nt, Human
uggcuugagaaauau

SEQ ID NO: 1432409 - RNA, 21 nt, Human
uggcuucuggccaggaagcuu

SEQ ID NO: 1432410 - RNA, 19 nt, Human
uggcuucuggccaggaagc

SEQ ID NO: 1432411 - RNA, 18 nt, Human
uggcuucuggccaggaag

SEQ ID NO: 1432412 - RNA, 17 nt, Human
uggcuucuggccaggaa

SEQ ID NO: 1432413 - RNA, 16 nt, Human
uggcuucuggccagga

SEQ ID NO: 1432414 - RNA, 15 nt, Human
uggcuucuggccagg

SEQ ID NO: 1432415 - RNA, 13 nt, Human
uggcuucuggcca

SEQ ID NO: 1432416 - RNA, 16 nt, Human
uggcugguguuaacag

SEQ ID NO: 1432417 - RNA, 15 nt, Human
uggcugguguuaaca

SEQ ID NO: 1432418 - RNA, 12 nt, Human
uggcugguguua

SEQ ID NO: 1432419 - RNA, 23 nt, Human
uggcuggugugguacagagaagc

SEQ ID NO: 1432420 - RNA, 22 nt, Human
uggcuggugugguacagagaag

SEQ ID NO: 1432421 - RNA, 21 nt, Human
uggcuggugugguacagagaa

SEQ ID NO: 1432422 - RNA, 20 nt, Human
uggcuggugugguacagaga

SEQ ID NO: 1432423 - RNA, 19 nt, Human
uggcuggugugguacagag

SEQ ID NO: 1432424 - RNA, 17 nt, Human
uggcuggugugguacag

SEQ ID NO: 1432425 - RNA, 13 nt, Human
uggcugguguggu

SEQ ID NO: 1432426 - RNA, 11 nt, Human
uggcuggugug

SEQ ID NO: 1432427 - RNA, 22 nt, Human
uggcuggucaacuugagcaugu

SEQ ID NO: 1432428 - RNA, 18 nt, Human
uggcugguguuaacagaa

SEQ ID NO: 1432429 - RNA, 16 nt, Human
uggcuuccuggcaaua

SEQ ID NO: 1432430 - RNA, 19 nt, Human
uggcucugccaguccuguc

SEQ ID NO: 1432431 - RNA, 17 nt, Human
uggcucugccaguccug

SEQ ID NO: 1432432 - RNA, 13 nt, Human
uggcucugccagu

SEQ ID NO: 1432433 - RNA, 12 nt, Human
uggcucugccag

SEQ ID NO: 1432434 - RNA, 22 nt, Human
uggcucugaggugccuguccca

SEQ ID NO: 1432435 - RNA, 21 nt, Human
uggcuggaagauccugcgggu

SEQ ID NO: 1432436 - RNA, 20 nt, Human
uggcuggaagauccugcggg

SEQ ID NO: 1432437 - RNA, 19 nt, Human
uggcuggaagauccugcgg

SEQ ID NO: 1432438 - RNA, 16 nt, Human
uggcugguccagggcu

SEQ ID NO: 1432439 - RNA, 15 nt, Human
uggcugguccagggc

SEQ ID NO: 1432440 - RNA, 13 nt, Human
uggcugguccagg

SEQ ID NO: 1432441 - RNA, 14 nt, Human
uggcuggucaacuu

SEQ ID NO: 1432442 - RNA, 23 nt, Human
uggcuggacccagccaggcccag

SEQ ID NO: 1432443 - RNA, 22 nt, Human
uggcuggacccagccaggccca

SEQ ID NO: 1432444 - RNA, 21 nt, Human
uggcuggacccagccaggccc

SEQ ID NO: 1432445 - RNA, 16 nt, Human
uggcuggacccagcca

SEQ ID NO: 1432446 - RNA, 15 nt, Human
uggcuggacccagcc

SEQ ID NO: 1432447 - RNA, 14 nt, Human
uggcuggacccagc

SEQ ID NO: 1432448 - RNA, 13 nt, Human
uggcuggacccag

SEQ ID NO: 1432449 - RNA, 21 nt, Human
uggcucugaggugccuguccc

SEQ ID NO: 1432450 - RNA, 20 nt, Human
uggcucugaggugccugucc

SEQ ID NO: 1432451 - RNA, 19 nt, Human
uggcucugagcgccuccau

SEQ ID NO: 1432452 - RNA, 14 nt, Human
uggcucuccuggcc

SEQ ID NO: 1432453 - RNA, 17 nt, Human
uggcucuccuggcccug

SEQ ID NO: 1432454 - RNA, 13 nt, Human
uggcucuccuggc

SEQ ID NO: 1432455 - RNA, 12 nt, Human
uggccccagcac

SEQ ID NO: 1432456 - RNA, 22 nt, Human
uggccccacccugggcccuggg

SEQ ID NO: 1432457 - RNA, 16 nt, Human
uggcccagggcccaga

SEQ ID NO: 1432458 - RNA, 15 nt, Human
uggcccagggcccag

SEQ ID NO: 1432459 - RNA, 14 nt, Human
uggcccagggccca

SEQ ID NO: 1432460 - RNA, 18 nt, Human
uggccccacccugggccc

SEQ ID NO: 1432461 - RNA, 16 nt, Human
uggccccacccugggc

SEQ ID NO: 1432462 - RNA, 15 nt, Human
uggccccacccuggg

SEQ ID NO: 1432463 - RNA, 13 nt, Human
uggccccacccug

SEQ ID NO: 1432464 - RNA, 22 nt, Human
uggccccacccucguggacacc

SEQ ID NO: 1432465 - RNA, 19 nt, Human
ugguauauccaaaagcuuu

SEQ ID NO: 1432466 - RNA, 16 nt, Human
ugguauauccaaaagc

SEQ ID NO: 1432467 - RNA, 18 nt, Human
ugguaguuuuuucaucuu

SEQ ID NO: 1432468 - RNA, 17 nt, Human
ugguaguuuuuucaucu

SEQ ID NO: 1432469 - RNA, 16 nt, Human
ugguaguuuuuucauc

SEQ ID NO: 1432470 - RNA, 15 nt, Human
ugguaguuuuuucau

SEQ ID NO: 1432471 - RNA, 17 nt, Human
uggguuugguguauggu

SEQ ID NO: 1432472 - RNA, 19 nt, Human
uggguucugccugccagcu

SEQ ID NO: 1432473 - RNA, 16 nt, Human
uggguucugccugcca

SEQ ID NO: 1432474 - RNA, 16 nt, Human
ugguaucucagaaagu

SEQ ID NO: 1432475 - RNA, 22 nt, Human
ugguaucucagaaagugccuga

SEQ ID NO: 1432476 - RNA, 13 nt, Human
ugguaucucagaa

SEQ ID NO: 1432477 - RNA, 22 nt, Human
ugguauauccaaaagcuuuuua

SEQ ID NO: 1432478 - RNA, 19 nt, Human
ugguaugaacuugaggaca

SEQ ID NO: 1432479 - RNA, 21 nt, Human
ugguaugaacuugaggacaca

SEQ ID NO: 1432480 - RNA, 22 nt, Human
ugguaugaacuugaggacacau

SEQ ID NO: 1432481 - RNA, 23 nt, Human
ugguaugaacuugaggacacaug

SEQ ID NO: 1432482 - RNA, 23 nt, Human
ugguauuggcuagagguucaaag

SEQ ID NO: 1432483 - RNA, 12 nt, Human
ugguauuguauu

SEQ ID NO: 1432484 - RNA, 13 nt, Human
ugguauuguauuu

SEQ ID NO: 1432485 - RNA, 14 nt, Human
ugguauuguauuua

SEQ ID NO: 1432486 - RNA, 18 nt, Human
ugguauuguauuuauuca

SEQ ID NO: 1432487 - RNA, 22 nt, Human
ugggugguacccucuggagggg

SEQ ID NO: 1432488 - RNA, 18 nt, Human
ugggugguacccucugga

SEQ ID NO: 1432489 - RNA, 14 nt, Human
ugggugguacccuc

SEQ ID NO: 1432490 - RNA, 13 nt, Human
ugggugguacccu

SEQ ID NO: 1432491 - RNA, 16 nt, Human
uggguaaaauacuuuu

SEQ ID NO: 1432492 - RNA, 15 nt, Human
uggguaaaauacuuu

SEQ ID NO: 1432493 - RNA, 23 nt, Human
uggguaaaauacuuuuacucugc

SEQ ID NO: 1432494 - RNA, 14 nt, Human
ugggggugccagga

SEQ ID NO: 1432495 - RNA, 15 nt, Human
ugggggugagggucc

SEQ ID NO: 1432496 - RNA, 14 nt, Human
uggguucugccugc

SEQ ID NO: 1432497 - RNA, 14 nt, Human
uggguguuaauuuu

SEQ ID NO: 1432498 - RNA, 22 nt, Human
uggguguuaucaccuagcugaa

SEQ ID NO: 1432499 - RNA, 15 nt, Human
uggguuagaccuaca

SEQ ID NO: 1432500 - RNA, 14 nt, Human
uggguuaaguauua

SEQ ID NO: 1432501 - RNA, 16 nt, Human
uggguuagggaaaaca

SEQ ID NO: 1432502 - RNA, 18 nt, Human
uggguuagggaaaacauu

SEQ ID NO: 1432503 - RNA, 19 nt, Human
uggguuagggaaaacauuc

SEQ ID NO: 1432504 - RNA, 21 nt, Human
uggguuagggaaaacauucca

SEQ ID NO: 1432505 - RNA, 18 nt, Human
uggggaaacuggccaugg

SEQ ID NO: 1432506 - RNA, 16 nt, Human
uggggaaacuggccau

SEQ ID NO: 1432507 - RNA, 18 nt, Human
uggggaaacagcaucucc

SEQ ID NO: 1432508 - RNA, 16 nt, Human
uggggaaacagcaucu

SEQ ID NO: 1432509 - RNA, 22 nt, Human
ugggcuuguggggccugggagg

SEQ ID NO: 1432510 - RNA, 20 nt, Human
ugggcuuguggggccuggga

SEQ ID NO: 1432511 - RNA, 19 nt, Human
ugggcuuguggggccuggg

SEQ ID NO: 1432512 - RNA, 18 nt, Human
ugggcuuguggggccugg

SEQ ID NO: 1432513 - RNA, 17 nt, Human
ugggcuucagcugccag

SEQ ID NO: 1432514 - RNA, 18 nt, Human
ugggcuucagcugccagu

SEQ ID NO: 1432515 - RNA, 14 nt, Human
ugggcuucagcugc

SEQ ID NO: 1432516 - RNA, 23 nt, Human
ugggcugguaucucagaaagugc

SEQ ID NO: 1432517 - RNA, 21 nt, Human
ugggcugguaucucagaaagu

SEQ ID NO: 1432518 - RNA, 20 nt, Human
ugggcugguaucucagaaag

SEQ ID NO: 1432519 - RNA, 18 nt, Human
ugggcugguaucucagaa

SEQ ID NO: 1432520 - RNA, 14 nt, Human
ugggcugguaucuc

SEQ ID NO: 1432521 - RNA, 22 nt, Human
ugggcuuauaucuggccucugc

SEQ ID NO: 1432522 - RNA, 21 nt, Human
ugggcuuauaucuggccucug

SEQ ID NO: 1432523 - RNA, 20 nt, Human
ugggcuuauaucuggccucu

SEQ ID NO: 1432524 - RNA, 13 nt, Human
ugggcuuauaucu

SEQ ID NO: 1432525 - RNA, 15 nt, Human
ugggcagauuuucag

SEQ ID NO: 1432526 - RNA, 23 nt, Human
ugggcagaggaccaggcuguagg

SEQ ID NO: 1432527 - RNA, 17 nt, Human
ugggcagauuuucagca

SEQ ID NO: 1432528 - RNA, 12 nt, Human
ugggcagcaauu

SEQ ID NO: 1432529 - RNA, 17 nt, Human
ugggggcugaggagcag

SEQ ID NO: 1432530 - RNA, 13 nt, Human
ugggggcugcagu

SEQ ID NO: 1432531 - RNA, 12 nt, Human
ugggggugcauu

SEQ ID NO: 1432532 - RNA, 15 nt, Human
ugggggugcauuuga

SEQ ID NO: 1432533 - RNA, 17 nt, Human
uggggaagacaguggcc

SEQ ID NO: 1432534 - RNA, 14 nt, Human
uggggaagacagug

SEQ ID NO: 1432535 - RNA, 13 nt, Human
uggggaagacagu

SEQ ID NO: 1432536 - RNA, 23 nt, Human
uggggaaaggggucggcugacca

SEQ ID NO: 1432537 - RNA, 22 nt, Human
uggggaaaggggucggcugacc

SEQ ID NO: 1432538 - RNA, 21 nt, Human
uggggaaaggggucggcugac

SEQ ID NO: 1432539 - RNA, 20 nt, Human
ugucauuuaguucagcaucc

SEQ ID NO: 1432540 - RNA, 14 nt, Human
ugucauguguauaa

SEQ ID NO: 1432541 - RNA, 13 nt, Human
ugucauguguaua

SEQ ID NO: 1432542 - RNA, 11 nt, Human
ugucaugugua

SEQ ID NO: 1432543 - RNA, 15 nt, Human
ugucauguguauaaa

SEQ ID NO: 1432544 - RNA, 20 nt, Human
ugucaugcugggauuuccaa

SEQ ID NO: 1432545 - RNA, 16 nt, Human
ugucaugcugggauuu

SEQ ID NO: 1432546 - RNA, 15 nt, Human
ugucaugcugccuua

SEQ ID NO: 1432547 - RNA, 14 nt, Human
ugucaugcugccuu

SEQ ID NO: 1432548 - RNA, 13 nt, Human
ugucaugcugccu

SEQ ID NO: 1432549 - RNA, 14 nt, Human
ugucaccugugcuu

SEQ ID NO: 1432550 - RNA, 13 nt, Human
ugucaucugugca

SEQ ID NO: 1432551 - RNA, 14 nt, Human
ugucacgccagacu

SEQ ID NO: 1432552 - RNA, 20 nt, Human
uguccaugcgcucagggcca

SEQ ID NO: 1432553 - RNA, 17 nt, Human
ugucauuucauuuccua

SEQ ID NO: 1432554 - RNA, 16 nt, Human
ugucauuucauuuccu

SEQ ID NO: 1432555 - RNA, 14 nt, Human
ugucauuucauuuc

SEQ ID NO: 1432556 - RNA, 16 nt, Human
ugucauuucagaaguu

SEQ ID NO: 1432557 - RNA, 15 nt, Human
ugucauuucagaagu

SEQ ID NO: 1432558 - RNA, 23 nt, Human
ugucauuguuauauaaucauuau

SEQ ID NO: 1432559 - RNA, 16 nt, Human
uguccucagccuugcc

SEQ ID NO: 1432560 - RNA, 13 nt, Human
uguccucagccuu

SEQ ID NO: 1432561 - RNA, 12 nt, Human
uguccucagccu

SEQ ID NO: 1432562 - RNA, 15 nt, Human
uguccuagcacagau

SEQ ID NO: 1432563 - RNA, 14 nt, Human
uguccuagcacaga

SEQ ID NO: 1432564 - RNA, 22 nt, Human
ugucccccuuuagaucucugaa

SEQ ID NO: 1432565 - RNA, 21 nt, Human
ugucccccuuuagaucucuga

SEQ ID NO: 1432566 - RNA, 21 nt, Human
uguccucagccccgcguggaa

SEQ ID NO: 1432567 - RNA, 18 nt, Human
ugucccccucuguccagg

SEQ ID NO: 1432568 - RNA, 19 nt, Human
uguccccccacucccucac

SEQ ID NO: 1432569 - RNA, 15 nt, Human
uguccccccacuccc

SEQ ID NO: 1432570 - RNA, 14 nt, Human
uguccccccacucc

SEQ ID NO: 1432571 - RNA, 12 nt, Human
uguccccagcag

SEQ ID NO: 1432572 - RNA, 22 nt, Human
ugucccacccccacccccagcu

SEQ ID NO: 1432573 - RNA, 18 nt, Human
ugucccacccccaccccc

SEQ ID NO: 1432574 - RNA, 17 nt, Human
ugucccacccccacccc

SEQ ID NO: 1432575 - RNA, 18 nt, Human
uguccaugcgcucagggc

SEQ ID NO: 1432576 - RNA, 23 nt, Human
ugucccacccccacccccagcuc

SEQ ID NO: 1432577 - RNA, 21 nt, Human
uguauucucugagcugugcag

SEQ ID NO: 1432578 - RNA, 20 nt, Human
uguauucucugagcugugca

SEQ ID NO: 1432579 - RNA, 19 nt, Human
uguauucucugagcugugc

SEQ ID NO: 1432580 - RNA, 14 nt, Human
uguauucucugagc

SEQ ID NO: 1432581 - RNA, 13 nt, Human
uguauucucugag

SEQ ID NO: 1432582 - RNA, 22 nt, Human
uguaugauuacuggccuuuuuc

SEQ ID NO: 1432583 - RNA, 16 nt, Human
uguaugauucccagcc

SEQ ID NO: 1432584 - RNA, 22 nt, Human
uguauucucuccuguaccucuu

SEQ ID NO: 1432585 - RNA, 20 nt, Human
uguauuguugaaaaaguuug

SEQ ID NO: 1432586 - RNA, 18 nt, Human
uguauuguugaaaaaguu

SEQ ID NO: 1432587 - RNA, 20 nt, Human
uguauugugcaauguguaua

SEQ ID NO: 1432588 - RNA, 19 nt, Human
uguauugugcaauguguau

SEQ ID NO: 1432589 - RNA, 18 nt, Human
uguauugugcaaugugua

SEQ ID NO: 1432590 - RNA, 21 nt, Human
uguauuguauauuacaaugau

SEQ ID NO: 1432591 - RNA, 15 nt, Human
uguauugugcaaugu

SEQ ID NO: 1432592 - RNA, 22 nt, Human
uguauaaaaauaaaaaagaucc

SEQ ID NO: 1432593 - RNA, 14 nt, Human
uguauaaaaauaaa

SEQ ID NO: 1432594 - RNA, 20 nt, Human
uguaguuuuuauauguugua

SEQ ID NO: 1432595 - RNA, 19 nt, Human
uguaguuuuuauauguugu

SEQ ID NO: 1432596 - RNA, 20 nt, Human
uguaguucugcuccagacag

SEQ ID NO: 1432597 - RNA, 15 nt, Human
uguaguucuaagacu

SEQ ID NO: 1432598 - RNA, 13 nt, Human
uguaguucuaaga

SEQ ID NO: 1432599 - RNA, 13 nt, Human
uguaugauuacug

SEQ ID NO: 1432600 - RNA, 12 nt, Human
uguaugauuacu

SEQ ID NO: 1432601 - RNA, 15 nt, Human
uguaugauucccagc

SEQ ID NO: 1432602 - RNA, 22 nt, Human
uguauaaaagggacugagaaau

SEQ ID NO: 1432603 - RNA, 17 nt, Human
uguauuuuauguuauau

SEQ ID NO: 1432604 - RNA, 14 nt, Human
uguauuuuauguua

SEQ ID NO: 1432605 - RNA, 13 nt, Human
uguauuuuauguu

SEQ ID NO: 1432606 - RNA, 12 nt, Human
uguauuuuaugu

SEQ ID NO: 1432607 - RNA, 16 nt, Human
uguauuuuagcagaga

SEQ ID NO: 1432608 - RNA, 22 nt, Human
uguauuguugaaaaaguuuguu

SEQ ID NO: 1432609 - RNA, 23 nt, Human
uguauuguugaaaaaguuuguuu

SEQ ID NO: 1432610 - RNA, 13 nt, Human
uguauuuauucaa

SEQ ID NO: 1432611 - RNA, 14 nt, Human
uguauuuauucaau

SEQ ID NO: 1432612 - RNA, 17 nt, Human
uguauuuauucaauaaa

SEQ ID NO: 1432613 - RNA, 19 nt, Human
uguauuuauucaauaaagu

SEQ ID NO: 1432614 - RNA, 22 nt, Human
uguauuuauugguuuugcagaa

SEQ ID NO: 1432615 - RNA, 22 nt, Human
uguauuuauucaauaaaguauu

SEQ ID NO: 1432616 - RNA, 14 nt, Human
uguauuuuguauug

SEQ ID NO: 1432617 - RNA, 22 nt, Human
ugucaccacccugcucauccac

SEQ ID NO: 1432618 - RNA, 18 nt, Human
ugucaccacccugcucau

SEQ ID NO: 1432619 - RNA, 23 nt, Human
ugucaccaauguacccaccgggc

SEQ ID NO: 1432620 - RNA, 15 nt, Human
ugucaccagaucuga

SEQ ID NO: 1432621 - RNA, 22 nt, Human
ugucacccagguuggagugcag

SEQ ID NO: 1432622 - RNA, 12 nt, Human
uguacacaguca

SEQ ID NO: 1432623 - RNA, 21 nt, Human
uguacacaacucacuccuuuu

SEQ ID NO: 1432624 - RNA, 15 nt, Human
uguacacaacucacu

SEQ ID NO: 1432625 - RNA, 19 nt, Human
uguaauuaaaagcaaauca

SEQ ID NO: 1432626 - RNA, 20 nt, Human
uguaauuaaaagcaaaucau

SEQ ID NO: 1432627 - RNA, 16 nt, Human
uguaauuaaaagcaaa

SEQ ID NO: 1432628 - RNA, 14 nt, Human
uguaauuaaaagca

SEQ ID NO: 1432629 - RNA, 18 nt, Human
uguacaguuaucuaaguu

SEQ ID NO: 1432630 - RNA, 17 nt, Human
uguacaguuaucuaagu

SEQ ID NO: 1432631 - RNA, 14 nt, Human
uguacaguguuacc

SEQ ID NO: 1432632 - RNA, 13 nt, Human
uguacaguguuac

SEQ ID NO: 1432633 - RNA, 12 nt, Human
uguacaguguua

SEQ ID NO: 1432634 - RNA, 23 nt, Human
uguacagugucuuuuuuuguaua

SEQ ID NO: 1432635 - RNA, 22 nt, Human
uguacagugucuuuuuuuguau

SEQ ID NO: 1432636 - RNA, 15 nt, Human
uguacagugucuuuu

SEQ ID NO: 1432637 - RNA, 14 nt, Human
uguacagugucuuu

SEQ ID NO: 1432638 - RNA, 22 nt, Human
uguacaguuaucuaaguuaauu

SEQ ID NO: 1432639 - RNA, 21 nt, Human
uguacaguuaucuaaguuaau

SEQ ID NO: 1432640 - RNA, 17 nt, Human
uguacaguuauuuaugc

SEQ ID NO: 1432641 - RNA, 21 nt, Human
uguaccgcgucuacccuggga

SEQ ID NO: 1432642 - RNA, 20 nt, Human
uguaccgcgucuacccuggg

SEQ ID NO: 1432643 - RNA, 19 nt, Human
uguaccgcgucuacccugg

SEQ ID NO: 1432644 - RNA, 18 nt, Human
uguaccgcgucuacccug

SEQ ID NO: 1432645 - RNA, 22 nt, Human
uguaccguaggcuuuguauuca

SEQ ID NO: 1432646 - RNA, 18 nt, Human
uguaauagauguuugaua

SEQ ID NO: 1432647 - RNA, 17 nt, Human
uguaauaaacuuuaaua

SEQ ID NO: 1432648 - RNA, 18 nt, Human
uguaauacuucuugugug

SEQ ID NO: 1432649 - RNA, 15 nt, Human
uguaauaaacuuuaa

SEQ ID NO: 1432650 - RNA, 13 nt, Human
uguaauaaacuuu

SEQ ID NO: 1432651 - RNA, 14 nt, Human
uggucacagcugua

SEQ ID NO: 1432652 - RNA, 13 nt, Human
uggucacagcugu

SEQ ID NO: 1432653 - RNA, 20 nt, Human
uguaauaaacucauuucuag

SEQ ID NO: 1432654 - RNA, 16 nt, Human
uggucacacacugaug

SEQ ID NO: 1432655 - RNA, 15 nt, Human
uggucacacacugau

SEQ ID NO: 1432656 - RNA, 14 nt, Human
uggucacacacuga

SEQ ID NO: 1432657 - RNA, 19 nt, Human
ugguauuguauuuauucaa

SEQ ID NO: 1432658 - RNA, 22 nt, Human
ugguauuguauuuauucaauaa

SEQ ID NO: 1432659 - RNA, 21 nt, Human
uggucacagcggaggugugga

SEQ ID NO: 1432660 - RNA, 15 nt, Human
uggucacagcggagg

SEQ ID NO: 1432661 - RNA, 14 nt, Human
uguaaucaauguuu

SEQ ID NO: 1432662 - RNA, 17 nt, Human
uguaauauuucuucaaa

SEQ ID NO: 1432663 - RNA, 16 nt, Human
uguaauccgaaucucu

SEQ ID NO: 1432664 - RNA, 20 nt, Human
uguaaucaauguuucuucua

SEQ ID NO: 1432665 - RNA, 15 nt, Human
uguaaucuugaauug

SEQ ID NO: 1432666 - RNA, 20 nt, Human
uguaaucuuauuuaggaagu

SEQ ID NO: 1432667 - RNA, 17 nt, Human
uguaauguuaauauuga

SEQ ID NO: 1432668 - RNA, 18 nt, Human
uguaauguuaauauugau

SEQ ID NO: 1432669 - RNA, 15 nt, Human
uguaauguuaauauu

SEQ ID NO: 1432670 - RNA, 14 nt, Human
uguaauguuaauau

SEQ ID NO: 1432671 - RNA, 19 nt, Human
uguaaugucuugagcucua

SEQ ID NO: 1432672 - RNA, 15 nt, Human
uguaaugucuugagc

SEQ ID NO: 1432673 - RNA, 20 nt, Human
uguaaugucuugagcucuau

SEQ ID NO: 1432674 - RNA, 21 nt, Human
uguaaucuugaauuguaacug

SEQ ID NO: 1432675 - RNA, 21 nt, Human
uguaccuuuugaggagcccca

SEQ ID NO: 1432676 - RNA, 22 nt, Human
uguaccgcgucuacccugggau

SEQ ID NO: 1432677 - RNA, 22 nt, Human
uguaccuuuugaggagccccag

SEQ ID NO: 1432678 - RNA, 15 nt, Human
uguacuguucugugu

SEQ ID NO: 1432679 - RNA, 14 nt, Human
uguacugccugcuu

SEQ ID NO: 1432680 - RNA, 15 nt, Human
uguacugccugcuug

SEQ ID NO: 1432681 - RNA, 13 nt, Human
uguacugccugcu

SEQ ID NO: 1432682 - RNA, 12 nt, Human
uguacugccugc

SEQ ID NO: 1432683 - RNA, 18 nt, Human
uguacggauuuucaguua

SEQ ID NO: 1432684 - RNA, 21 nt, Human
uguacggauuuucaguuacuu

SEQ ID NO: 1432685 - RNA, 14 nt, Human
uguagauugauugu

SEQ ID NO: 1432686 - RNA, 16 nt, Human
uguagauucagguaau

SEQ ID NO: 1432687 - RNA, 19 nt, Human
uguacuguucugugucuuu

SEQ ID NO: 1432688 - RNA, 16 nt, Human
uguacuguucuguguc

SEQ ID NO: 1432689 - RNA, 13 nt, Human
uguagccacacca

SEQ ID NO: 1432690 - RNA, 18 nt, Human
uguagcauccuggaauau

SEQ ID NO: 1432691 - RNA, 17 nt, Human
uguagcauccuggaaua

SEQ ID NO: 1432692 - RNA, 22 nt, Human
uguagauugauuguauuguuga

SEQ ID NO: 1432693 - RNA, 18 nt, Human
uguagauugauuguauug

SEQ ID NO: 1432694 - RNA, 16 nt, Human
uguagcauccuggaau

SEQ ID NO: 1432695 - RNA, 14 nt, Human
uguagcauccugga

SEQ ID NO: 1432696 - RNA, 22 nt, Human
uguaguuccacuuauagccucu

SEQ ID NO: 1432697 - RNA, 20 nt, Human
uguaguucauguaaauaaua

SEQ ID NO: 1432698 - RNA, 14 nt, Human
uguaguucauguaa

SEQ ID NO: 1432699 - RNA, 13 nt, Human
uguaguucaugua

SEQ ID NO: 1432700 - RNA, 21 nt, Human
uguagcugugaccugcugagc

SEQ ID NO: 1432701 - RNA, 20 nt, Human
uguagcugugaccugcugag

SEQ ID NO: 1432702 - RNA, 19 nt, Human
uguagcugugaccugcuga

SEQ ID NO: 1432703 - RNA, 18 nt, Human
uguagcugugaccugcug

SEQ ID NO: 1432704 - RNA, 17 nt, Human
uguagcugugaccugcu

SEQ ID NO: 1432705 - RNA, 16 nt, Human
uguagcugugaccugc

SEQ ID NO: 1432706 - RNA, 15 nt, Human
uguagcugugaccug

SEQ ID NO: 1432707 - RNA, 14 nt, Human
uguagcugugaccu

SEQ ID NO: 1432708 - RNA, 13 nt, Human
uguagcugugacc

SEQ ID NO: 1432709 - RNA, 11 nt, Human
uguagcuguga

SEQ ID NO: 1432710 - RNA, 15 nt, Human
uguagcugaggaggc

SEQ ID NO: 1432711 - RNA, 20 nt, Human
uguagcucuuugucagggag

SEQ ID NO: 1432712 - RNA, 18 nt, Human
uguagcuccuccccugga

SEQ ID NO: 1432713 - RNA, 17 nt, Human
uguagcuccuccccugg

SEQ ID NO: 1432714 - RNA, 11 nt, Human
uguagcuccuc

SEQ ID NO: 1432715 - RNA, 23 nt, Human
uguagcuacagagaaaccagcuu

SEQ ID NO: 1432716 - RNA, 22 nt, Human
uguagcuacagagaaaccagcu

SEQ ID NO: 1432717 - RNA, 21 nt, Human
uguagcuacagagaaaccagc

SEQ ID NO: 1432718 - RNA, 19 nt, Human
uguagcuacagagaaacca

SEQ ID NO: 1432719 - RNA, 18 nt, Human
uguagcuacagagaaacc

SEQ ID NO: 1432720 - RNA, 17 nt, Human
uguagcuacagagaaac

SEQ ID NO: 1432721 - RNA, 16 nt, Human
uguagcuacagagaaa

SEQ ID NO: 1432722 - RNA, 15 nt, Human
uguagcuacagagaa

SEQ ID NO: 1432723 - RNA, 14 nt, Human
uguagcuacagaga

SEQ ID NO: 1432724 - RNA, 13 nt, Human
uguagcuacagag

SEQ ID NO: 1432725 - RNA, 15 nt, Human
uguagcgucuuucuu

SEQ ID NO: 1432726 - RNA, 16 nt, Human
uguagcgucuuucuuu

SEQ ID NO: 1432727 - RNA, 13 nt, Human
uguagccuuuuug

SEQ ID NO: 1432728 - RNA, 12 nt, Human
uguagccuuuuu

SEQ ID NO: 1432729 - RNA, 21 nt, Human
uguagccccagugacagcuag

SEQ ID NO: 1432730 - RNA, 16 nt, Human
uguagccccagugaca

SEQ ID NO: 1432731 - RNA, 14 nt, Human
uguagccagccggg

SEQ ID NO: 1432732 - RNA, 12 nt, Human
uguagccagccg

SEQ ID NO: 1432733 - RNA, 15 nt, Human
uguagccagccgggg

SEQ ID NO: 1432734 - RNA, 18 nt, Human
uguagccacaccaggaua

SEQ ID NO: 1432735 - RNA, 17 nt, Human
uguagccacaccaggau

SEQ ID NO: 1432736 - RNA, 16 nt, Human
uguagccacaccagga

SEQ ID NO: 1432737 - RNA, 23 nt, Human
uguagccucaaucgagugagaca

SEQ ID NO: 1432738 - RNA, 19 nt, Human
uguagcccuuuccaagcuu

SEQ ID NO: 1432739 - RNA, 18 nt, Human
uguagccccucuccugga

SEQ ID NO: 1432740 - RNA, 18 nt, Human
ugucugaacuugcauugu

SEQ ID NO: 1432741 - RNA, 13 nt, Human
ugucugaacuugc

SEQ ID NO: 1432742 - RNA, 15 nt, Human
uguccugaaggccug

SEQ ID NO: 1432743 - RNA, 18 nt, Human
uguccugaaggccugagg

SEQ ID NO: 1432744 - RNA, 12 nt, Human
uguccugaaggc

SEQ ID NO: 1432745 - RNA, 21 nt, Human
uguccucuuucagcuccugac

SEQ ID NO: 1432746 - RNA, 19 nt, Human
uguccucuuucagcuccug

SEQ ID NO: 1432747 - RNA, 18 nt, Human
uguccucuuucagcuccu

SEQ ID NO: 1432748 - RNA, 17 nt, Human
uguccucuuucagcucc

SEQ ID NO: 1432749 - RNA, 16 nt, Human
uguccucuuucagcuc

SEQ ID NO: 1432750 - RNA, 15 nt, Human
uguccucuuucagcu

SEQ ID NO: 1432751 - RNA, 14 nt, Human
uguccucuuucagc

SEQ ID NO: 1432752 - RNA, 13 nt, Human
uguccucuucccu

SEQ ID NO: 1432753 - RNA, 16 nt, Human
uguccucuucccucuc

SEQ ID NO: 1432754 - RNA, 23 nt, Human
uguccucccgagcuccucuucca

SEQ ID NO: 1432755 - RNA, 22 nt, Human
uguccucagccuugccagagau

SEQ ID NO: 1432756 - RNA, 21 nt, Human
uguccucagccuugccagaga

SEQ ID NO: 1432757 - RNA, 20 nt, Human
uguccucagccuugccagag

SEQ ID NO: 1432758 - RNA, 17 nt, Human
uguccucagccuugcca

SEQ ID NO: 1432759 - RNA, 16 nt, Human
ugucugaacuugcauu

SEQ ID NO: 1432760 - RNA, 14 nt, Human
ugucuggcaaggac

SEQ ID NO: 1432761 - RNA, 21 nt, Human
ugucuggagaccaccagggca

SEQ ID NO: 1432762 - RNA, 20 nt, Human
ugucuggagaccaccagggc

SEQ ID NO: 1432763 - RNA, 18 nt, Human
ugucuggagaccaccagg

SEQ ID NO: 1432764 - RNA, 17 nt, Human
ugucuggagaccaccag

SEQ ID NO: 1432765 - RNA, 13 nt, Human
ugucuggagacca

SEQ ID NO: 1432766 - RNA, 12 nt, Human
ugucuggagacc

SEQ ID NO: 1432767 - RNA, 11 nt, Human
ugucuggagac

SEQ ID NO: 1432768 - RNA, 17 nt, Human
ugucuggaagaugggga

SEQ ID NO: 1432769 - RNA, 15 nt, Human
ugucuggaagauggg

SEQ ID NO: 1432770 - RNA, 22 nt, Human
ugucuggcaaugccacagcccu

SEQ ID NO: 1432771 - RNA, 19 nt, Human
ugucuggcaaugccacagc

SEQ ID NO: 1432772 - RNA, 16 nt, Human
ugucuggcaaugccac

SEQ ID NO: 1432773 - RNA, 15 nt, Human
ugucuggcaaugcca

SEQ ID NO: 1432774 - RNA, 20 nt, Human
ugucuggcaaggacuuugua

SEQ ID NO: 1432775 - RNA, 23 nt, Human
ugucugguucucaauuccaacag

SEQ ID NO: 1432776 - RNA, 17 nt, Human
ugucuggcacagccugg

SEQ ID NO: 1432777 - RNA, 14 nt, Human
ugucuguccuuuau

SEQ ID NO: 1432778 - RNA, 13 nt, Human
ugucuuuuggagg

SEQ ID NO: 1432779 - RNA, 14 nt, Human
ugugaaggacccuu

SEQ ID NO: 1432780 - RNA, 13 nt, Human
ugugaaggacccu

SEQ ID NO: 1432781 - RNA, 12 nt, Human
ugugaagccuuc

SEQ ID NO: 1432782 - RNA, 13 nt, Human
ugugaagccuucc

SEQ ID NO: 1432783 - RNA, 22 nt, Human
ugugaaaaugguccaggagaag

SEQ ID NO: 1432784 - RNA, 18 nt, Human
ugugaaaaugguccagga

SEQ ID NO: 1432785 - RNA, 18 nt, Human
ugugacauuuauauauug

SEQ ID NO: 1432786 - RNA, 17 nt, Human
ugugacauuuauauauu

SEQ ID NO: 1432787 - RNA, 24 nt, Human
ugugaauuaggcuguaacuacuuu

SEQ ID NO: 1432788 - RNA, 23 nt, Human
ugugaauuaggcuguaacuacuu

SEQ ID NO: 1432789 - RNA, 22 nt, Human
ugugaauuaggcuguaacuacu

SEQ ID NO: 1432790 - RNA, 19 nt, Human
ugugaauuaggcuguaacu

SEQ ID NO: 1432791 - RNA, 16 nt, Human
ugugaauuaagcccaa

SEQ ID NO: 1432792 - RNA, 23 nt, Human
ugugaaggugauuuaagggccca

SEQ ID NO: 1432793 - RNA, 17 nt, Human
ugugaaggugauuuaag

SEQ ID NO: 1432794 - RNA, 13 nt, Human
ugugaggccaggg

SEQ ID NO: 1432795 - RNA, 16 nt, Human
ugugaccaaugucuug

SEQ ID NO: 1432796 - RNA, 15 nt, Human
ugugaccaaugucuu

SEQ ID NO: 1432797 - RNA, 17 nt, Human
ugugaccaaaaguuaca

SEQ ID NO: 1432798 - RNA, 18 nt, Human
ugugaccaaaaguuacau

SEQ ID NO: 1432799 - RNA, 15 nt, Human
ugugacauuuuacau

SEQ ID NO: 1432800 - RNA, 17 nt, Human
ugugacauuuuacauua

SEQ ID NO: 1432801 - RNA, 18 nt, Human
ugugacauuuuacauuaa

SEQ ID NO: 1432802 - RNA, 22 nt, Human
ugugagucuuugguucuaagga

SEQ ID NO: 1432803 - RNA, 21 nt, Human
ugugagucuuugguucuaagg

SEQ ID NO: 1432804 - RNA, 20 nt, Human
ugugagucuuugguucuaag

SEQ ID NO: 1432805 - RNA, 18 nt, Human
ugugagucuuugguucua

SEQ ID NO: 1432806 - RNA, 14 nt, Human
ugugaggcuguccu

SEQ ID NO: 1432807 - RNA, 22 nt, Human
ugugaggccagggcagagugag

SEQ ID NO: 1432808 - RNA, 17 nt, Human
ugugaggccagggcaga

SEQ ID NO: 1432809 - RNA, 16 nt, Human
ugugaggccagggcag

SEQ ID NO: 1432810 - RNA, 15 nt, Human
ugugaggccagggca

SEQ ID NO: 1432811 - RNA, 14 nt, Human
ugugaggccagggc

SEQ ID NO: 1432812 - RNA, 20 nt, Human
ugugcacaucugugucuugu

SEQ ID NO: 1432813 - RNA, 17 nt, Human
ugugcacaucugugucu

SEQ ID NO: 1432814 - RNA, 15 nt, Human
ugugaucagaccaua

SEQ ID NO: 1432815 - RNA, 19 nt, Human
ugugauauucuaagacuua

SEQ ID NO: 1432816 - RNA, 15 nt, Human
ugugauauucuaaga

SEQ ID NO: 1432817 - RNA, 14 nt, Human
ugugauauucuaag

SEQ ID NO: 1432818 - RNA, 22 nt, Human
ugugaguguuuuuaucuuuuua

SEQ ID NO: 1432819 - RNA, 21 nt, Human
ugugauaugcacaauguagau

SEQ ID NO: 1432820 - RNA, 16 nt, Human
ugugauauauaagugu

SEQ ID NO: 1432821 - RNA, 15 nt, Human
ugugauauauaagug

SEQ ID NO: 1432822 - RNA, 14 nt, Human
ugugauauauaagu

SEQ ID NO: 1432823 - RNA, 13 nt, Human
ugugauauauaag

SEQ ID NO: 1432824 - RNA, 19 nt, Human
ugugaguuuaccuuguaua

SEQ ID NO: 1432825 - RNA, 21 nt, Human
ugugaguuuaccuuguauacu

SEQ ID NO: 1432826 - RNA, 16 nt, Human
ugugaguucucccugu

SEQ ID NO: 1432827 - RNA, 17 nt, Human
ugugaguguuuuuaucu

SEQ ID NO: 1432828 - RNA, 16 nt, Human
ugugauauaagugugu

SEQ ID NO: 1432829 - RNA, 15 nt, Human
ugugccuuguuuuuu

SEQ ID NO: 1432830 - RNA, 18 nt, Human
ugugccuuguuuuuuguu

SEQ ID NO: 1432831 - RNA, 13 nt, Human
ugugccuuguuuu

SEQ ID NO: 1432832 - RNA, 21 nt, Human
ugugccuucucucucccuuuu

SEQ ID NO: 1432833 - RNA, 20 nt, Human
ugugccuugucacgccagac

SEQ ID NO: 1432834 - RNA, 19 nt, Human
ugugccuugucacgccaga

SEQ ID NO: 1432835 - RNA, 17 nt, Human
ugugccuugucacgcca

SEQ ID NO: 1432836 - RNA, 23 nt, Human
ugugccuucgucuuucccauggg

SEQ ID NO: 1432837 - RNA, 14 nt, Human
ugugccuucgucuu

SEQ ID NO: 1432838 - RNA, 23 nt, Human
ugugcauuuggugguuucagaaa

SEQ ID NO: 1432839 - RNA, 15 nt, Human
ugugcauucuggauu

SEQ ID NO: 1432840 - RNA, 23 nt, Human
ugugcauuaucuagauacuguau

SEQ ID NO: 1432841 - RNA, 20 nt, Human
ugugcauuaucuagauacug

SEQ ID NO: 1432842 - RNA, 21 nt, Human
ugugcauuaucuagauacugu

SEQ ID NO: 1432843 - RNA, 21 nt, Human
ugugcacaucugugucuuguu

SEQ ID NO: 1432844 - RNA, 17 nt, Human
ugugcacuuauuuauga

SEQ ID NO: 1432845 - RNA, 20 nt, Human
ugugcacuggcaccaagugc

SEQ ID NO: 1432846 - RNA, 21 nt, Human
ugugcacugcccauggacagg

SEQ ID NO: 1432847 - RNA, 13 nt, Human
ugugcacugccca

SEQ ID NO: 1432848 - RNA, 14 nt, Human
ugugcauuaucuag

SEQ ID NO: 1432849 - RNA, 16 nt, Human
ugugcauuaucuagau

SEQ ID NO: 1432850 - RNA, 19 nt, Human
ugugcauuaucuagauacu

SEQ ID NO: 1432851 - RNA, 15 nt, Human
ugugcucagcccuga

SEQ ID NO: 1432852 - RNA, 12 nt, Human
ugugcucagccc

SEQ ID NO: 1432853 - RNA, 18 nt, Human
ugugcuauggugcucugu

SEQ ID NO: 1432854 - RNA, 21 nt, Human
ugugcuauacugcauacuuuu

SEQ ID NO: 1432855 - RNA, 20 nt, Human
ugugcuauacugcauacuuu

SEQ ID NO: 1432856 - RNA, 18 nt, Human
ugugcuauacugcauacu

SEQ ID NO: 1432857 - RNA, 13 nt, Human
ugugcuauacugc

SEQ ID NO: 1432858 - RNA, 19 nt, Human
ugugcuaguaauuggaaag

SEQ ID NO: 1432859 - RNA, 20 nt, Human
ugugcucaggagcccuggga

SEQ ID NO: 1432860 - RNA, 17 nt, Human
ugugcucaggagcccug

SEQ ID NO: 1432861 - RNA, 15 nt, Human
ugugcucaggagccc

SEQ ID NO: 1432862 - RNA, 16 nt, Human
ugugcucaggagcccu

SEQ ID NO: 1432863 - RNA, 14 nt, Human
ugugcuuugagaag

SEQ ID NO: 1432864 - RNA, 16 nt, Human
uguggaacauaaaaag

SEQ ID NO: 1432865 - RNA, 23 nt, Human
ugugggauuaugggucacaggaa

SEQ ID NO: 1432866 - RNA, 18 nt, Human
ugugggauuaugggucac

SEQ ID NO: 1432867 - RNA, 16 nt, Human
ugugggauuauggguc

SEQ ID NO: 1432868 - RNA, 13 nt, Human
ugugggauuaugg

SEQ ID NO: 1432869 - RNA, 22 nt, Human
ugugggauguucagcacugucc

SEQ ID NO: 1432870 - RNA, 19 nt, Human
ugugggauguucagcacug

SEQ ID NO: 1432871 - RNA, 14 nt, Human
ugugggagccucgc

SEQ ID NO: 1432872 - RNA, 19 nt, Human
ugugggccugggcuccugg

SEQ ID NO: 1432873 - RNA, 17 nt, Human
ugugggccugggcuccu

SEQ ID NO: 1432874 - RNA, 15 nt, Human
ugugggccugggcuc

SEQ ID NO: 1432875 - RNA, 14 nt, Human
ugugggccugggcu

SEQ ID NO: 1432876 - RNA, 13 nt, Human
ugugggccugggc

SEQ ID NO: 1432877 - RNA, 11 nt, Human
ugugggccugg

SEQ ID NO: 1432878 - RNA, 21 nt, Human
uguguaauuagugccacuuaa

SEQ ID NO: 1432879 - RNA, 20 nt, Human
ugugggccugggcuccugga

SEQ ID NO: 1432880 - RNA, 19 nt, Human
uguguagcugugaccugcu

SEQ ID NO: 1432881 - RNA, 16 nt, Human
uguguagcugugaccu

SEQ ID NO: 1432882 - RNA, 20 nt, Human
uguguagccuuuuuguauaa

SEQ ID NO: 1432883 - RNA, 14 nt, Human
uguguagccuuuuu

SEQ ID NO: 1432884 - RNA, 13 nt, Human
uguguagccuuuu

SEQ ID NO: 1432885 - RNA, 12 nt, Human
uguguagccuuu

SEQ ID NO: 1432886 - RNA, 17 nt, Human
uguguacauaacugaaa

SEQ ID NO: 1432887 - RNA, 15 nt, Human
uguguacauaacuga

SEQ ID NO: 1432888 - RNA, 17 nt, Human
uguguagcuuugcucuu

SEQ ID NO: 1432889 - RNA, 14 nt, Human
uguguagcuuugcu

SEQ ID NO: 1432890 - RNA, 23 nt, Human
uguggcgccgucuccaggggcug

SEQ ID NO: 1432891 - RNA, 19 nt, Human
uguggcgccgucuccaggg

SEQ ID NO: 1432892 - RNA, 12 nt, Human
ugugggagccuc

SEQ ID NO: 1432893 - RNA, 17 nt, Human
ugugggagaccggccug

SEQ ID NO: 1432894 - RNA, 23 nt, Human
ugugggagaccggccugccagga

SEQ ID NO: 1432895 - RNA, 19 nt, Human
uguggccuaagaggcugcc

SEQ ID NO: 1432896 - RNA, 23 nt, Human
uguggccucagcucccacaagcc

SEQ ID NO: 1432897 - RNA, 18 nt, Human
uguggcgccgucuccagg

SEQ ID NO: 1432898 - RNA, 17 nt, Human
uguggccuuugcgcucc

SEQ ID NO: 1432899 - RNA, 23 nt, Human
uguggccuaagaggcugcccucc

SEQ ID NO: 1432900 - RNA, 17 nt, Human
uguggccuaagaggcug

SEQ ID NO: 1432901 - RNA, 21 nt, Human
uguggaccauggaguggcagc

SEQ ID NO: 1432902 - RNA, 19 nt, Human
uguggacuaaaagauauaa

SEQ ID NO: 1432903 - RNA, 22 nt, Human
uguggaccauggaguggcagcc

SEQ ID NO: 1432904 - RNA, 15 nt, Human
uguggacuaaaagau

SEQ ID NO: 1432905 - RNA, 16 nt, Human
uguggacuaaaagaua

SEQ ID NO: 1432906 - RNA, 15 nt, Human
uguggccuaaccugc

SEQ ID NO: 1432907 - RNA, 14 nt, Human
uguggacaggacua

SEQ ID NO: 1432908 - RNA, 18 nt, Human
uguggaacugcugccacu

SEQ ID NO: 1432909 - RNA, 22 nt, Human
uguggaacugcugccacugagg

SEQ ID NO: 1432910 - RNA, 21 nt, Human
uguggaacauaaaaaggacau

SEQ ID NO: 1432911 - RNA, 17 nt, Human
uguggaacugcugccac

SEQ ID NO: 1432912 - RNA, 15 nt, Human
uguggaacugcugcc

SEQ ID NO: 1432913 - RNA, 19 nt, Human
uguggaacauaaaaaggac

SEQ ID NO: 1432914 - RNA, 15 nt, Human
uuacacucuuuguaa

SEQ ID NO: 1432915 - RNA, 14 nt, Human
uuacacucuuugua

SEQ ID NO: 1432916 - RNA, 22 nt, Human
uuacacuacacacuguguacug

SEQ ID NO: 1432917 - RNA, 14 nt, Human
uuacacgcuuuugu

SEQ ID NO: 1432918 - RNA, 17 nt, Human
uuacacgcuuuugugau

SEQ ID NO: 1432919 - RNA, 16 nt, Human
uuacacuuuuuggaag

SEQ ID NO: 1432920 - RNA, 19 nt, Human
uuacagacgcugcugucac

SEQ ID NO: 1432921 - RNA, 23 nt, Human
uuacagaauugcuuguuugcuuc

SEQ ID NO: 1432922 - RNA, 20 nt, Human
uuacauuuacaaacugaaga

SEQ ID NO: 1432923 - RNA, 19 nt, Human
uuacauuuacaaacugaag

SEQ ID NO: 1432924 - RNA, 18 nt, Human
uuacauuuacaaacugaa

SEQ ID NO: 1432925 - RNA, 17 nt, Human
uuacauuuacaaacuga

SEQ ID NO: 1432926 - RNA, 14 nt, Human
uuacauuuccuaaa

SEQ ID NO: 1432927 - RNA, 12 nt, Human
uuacauuuuuaa

SEQ ID NO: 1432928 - RNA, 17 nt, Human
uuacauuuuuaagugcu

SEQ ID NO: 1432929 - RNA, 16 nt, Human
uuaauagcagccuuuc

SEQ ID NO: 1432930 - RNA, 23 nt, Human
uuaaugaaguuugaauguuaaau

SEQ ID NO: 1432931 - RNA, 18 nt, Human
uuaaugaaguuugaaugu

SEQ ID NO: 1432932 - RNA, 22 nt, Human
uuaaugaaguuugaauguuaaa

SEQ ID NO: 1432933 - RNA, 16 nt, Human
uuaaugaaguuugaau

SEQ ID NO: 1432934 - RNA, 17 nt, Human
uuaaugaaguuugaaug

SEQ ID NO: 1432935 - RNA, 21 nt, Human
uuacaaauguuaaaauguguu

SEQ ID NO: 1432936 - RNA, 18 nt, Human
uuacaaauguuaaaaugu

SEQ ID NO: 1432937 - RNA, 13 nt, Human
uuaauuagugcua

SEQ ID NO: 1432938 - RNA, 14 nt, Human
uuaauuagugcuaa

SEQ ID NO: 1432939 - RNA, 19 nt, Human
uuaauuagccagugaaaaa

SEQ ID NO: 1432940 - RNA, 16 nt, Human
uuaauuaccaaccugu

SEQ ID NO: 1432941 - RNA, 19 nt, Human
uuacaaauguuaaaaugug

SEQ ID NO: 1432942 - RNA, 16 nt, Human
uuacaacggagucaaa

SEQ ID NO: 1432943 - RNA, 23 nt, Human
uuacaacugccucgaaacacaga

SEQ ID NO: 1432944 - RNA, 22 nt, Human
uuacaacugccucgaaacacag

SEQ ID NO: 1432945 - RNA, 19 nt, Human
uuacaacggagucaaaaau

SEQ ID NO: 1432946 - RNA, 23 nt, Human
uuacaacggagucaaaaauuaaa

SEQ ID NO: 1432947 - RNA, 20 nt, Human
uuaaaugcaaccauuugaaa

SEQ ID NO: 1432948 - RNA, 12 nt, Human
uuaaauguauac

SEQ ID NO: 1432949 - RNA, 14 nt, Human
uuaaauguauacua

SEQ ID NO: 1432950 - RNA, 19 nt, Human
uuaaauguauacuauagua

SEQ ID NO: 1432951 - RNA, 13 nt, Human
uuaaauguuauua

SEQ ID NO: 1432952 - RNA, 16 nt, Human
uuaaauguuaugacua

SEQ ID NO: 1432953 - RNA, 20 nt, Human
uuaaauguuaugacuaugua

SEQ ID NO: 1432954 - RNA, 12 nt, Human
uuaacuuuuaua

SEQ ID NO: 1432955 - RNA, 13 nt, Human
uuaacuuuuauaa

SEQ ID NO: 1432956 - RNA, 18 nt, Human
uuaagaucacagugaacu

SEQ ID NO: 1432957 - RNA, 14 nt, Human
uuaagauaauuaua

SEQ ID NO: 1432958 - RNA, 16 nt, Human
uuaagauaauuauaau

SEQ ID NO: 1432959 - RNA, 11 nt, Human
uuaacuuuguu

SEQ ID NO: 1432960 - RNA, 14 nt, Human
uuaacuuuaauguu

SEQ ID NO: 1432961 - RNA, 14 nt, Human
uuaacuuuuauaaa

SEQ ID NO: 1432962 - RNA, 19 nt, Human
uuaagaguccaagaaucca

SEQ ID NO: 1432963 - RNA, 14 nt, Human
uuaagaguccaaga

SEQ ID NO: 1432964 - RNA, 13 nt, Human
uuaagaguccaag

SEQ ID NO: 1432965 - RNA, 14 nt, Human
uuaacuuuguuuua

SEQ ID NO: 1432966 - RNA, 12 nt, Human
uuaagaguaaaa

SEQ ID NO: 1432967 - RNA, 20 nt, Human
uuaagcccagugcacugaaa

SEQ ID NO: 1432968 - RNA, 21 nt, Human
uuaagccacuuaaaauguuca

SEQ ID NO: 1432969 - RNA, 16 nt, Human
uuaagccaaaacaaug

SEQ ID NO: 1432970 - RNA, 22 nt, Human
uuaagcaucuggcucuaauuca

SEQ ID NO: 1432971 - RNA, 21 nt, Human
uuaauacucaaaugaguaaca

SEQ ID NO: 1432972 - RNA, 22 nt, Human
uuaauacucaaaugaguaacau

SEQ ID NO: 1432973 - RNA, 17 nt, Human
uuaauacuaccuugaaa

SEQ ID NO: 1432974 - RNA, 15 nt, Human
uuaauacuaccuuga

SEQ ID NO: 1432975 - RNA, 16 nt, Human
uuaauaauguuucaaa

SEQ ID NO: 1432976 - RNA, 21 nt, Human
uuaauaauauacuuguggacu

SEQ ID NO: 1432977 - RNA, 14 nt, Human
uuaauaauauacuu

SEQ ID NO: 1432978 - RNA, 16 nt, Human
uuaauaauauacuugu

SEQ ID NO: 1432979 - RNA, 18 nt, Human
uuaauaauauacuugugg

SEQ ID NO: 1432980 - RNA, 20 nt, Human
uuaauagcaaagaauugacu

SEQ ID NO: 1432981 - RNA, 18 nt, Human
uuaauagcaaagaauuga

SEQ ID NO: 1432982 - RNA, 16 nt, Human
uuaauagcaaagaauu

SEQ ID NO: 1432983 - RNA, 15 nt, Human
uuaauagcaaagaau

SEQ ID NO: 1432984 - RNA, 22 nt, Human
uuaauagcagccuuucucucuu

SEQ ID NO: 1432985 - RNA, 15 nt, Human
uuaauagcagccuuu

SEQ ID NO: 1432986 - RNA, 14 nt, Human
uuaauagcagccuu

SEQ ID NO: 1432987 - RNA, 20 nt, Human
uuaaagaaaaaaauguauuu

SEQ ID NO: 1432988 - RNA, 19 nt, Human
uuaaagaaaaaaauguauu

SEQ ID NO: 1432989 - RNA, 18 nt, Human
uuaaagaaaaaaauguau

SEQ ID NO: 1432990 - RNA, 18 nt, Human
uuaaacuuuuaauucauu

SEQ ID NO: 1432991 - RNA, 17 nt, Human
uuaaacuuuuaauucau

SEQ ID NO: 1432992 - RNA, 17 nt, Human
uuaaacuugcaucacuu

SEQ ID NO: 1432993 - RNA, 22 nt, Human
uuaaacuaggagaaccaaaucu

SEQ ID NO: 1432994 - RNA, 21 nt, Human
uuaaacuagcauaucugccuu

SEQ ID NO: 1432995 - RNA, 22 nt, Human
uuaaacuagcauaucugccuuu

SEQ ID NO: 1432996 - RNA, 23 nt, Human
uuaaacuagcauaucugccuuua

SEQ ID NO: 1432997 - RNA, 14 nt, Human
uuaaacuaaaugug

SEQ ID NO: 1432998 - RNA, 20 nt, Human
uuaaacuaaggcccucuuga

SEQ ID NO: 1432999 - RNA, 17 nt, Human
uuaaacuagcauaucug

SEQ ID NO: 1433000 - RNA, 19 nt, Human
uuaaacuagcauaucugcc

SEQ ID NO: 1433001 - RNA, 15 nt, Human
uuaaaauacaagacu

SEQ ID NO: 1433002 - RNA, 13 nt, Human
uuaaaauacaaga

SEQ ID NO: 1433003 - RNA, 11 nt, Human
uuaaaauacaa

SEQ ID NO: 1433004 - RNA, 15 nt, Human
uuaaaauaauuauau

SEQ ID NO: 1433005 - RNA, 17 nt, Human
uuaaaauacaagacugc

SEQ ID NO: 1433006 - RNA, 15 nt, Human
uuaaaacuuugaagu

SEQ ID NO: 1433007 - RNA, 15 nt, Human
uuaaaacuuguaauu

SEQ ID NO: 1433008 - RNA, 12 nt, Human
uuaaaacuccug

SEQ ID NO: 1433009 - RNA, 18 nt, Human
uuaaaaaaaaagaucugu

SEQ ID NO: 1433010 - RNA, 22 nt, Human
uuaaaugaacaagagaagcauu

SEQ ID NO: 1433011 - RNA, 20 nt, Human
uuaaaugaacaagagaagca

SEQ ID NO: 1433012 - RNA, 22 nt, Human
uuaaaugacacucauauaauua

SEQ ID NO: 1433013 - RNA, 18 nt, Human
uuaaaugaacaagagaag

SEQ ID NO: 1433014 - RNA, 17 nt, Human
uuaaaugaacaagagaa

SEQ ID NO: 1433015 - RNA, 14 nt, Human
uuaaaugaacaaga

SEQ ID NO: 1433016 - RNA, 18 nt, Human
uuaaaucuguuuuucuaa

SEQ ID NO: 1433017 - RNA, 16 nt, Human
uuaaaucucauugcuu

SEQ ID NO: 1433018 - RNA, 21 nt, Human
uuaaaugacacucauauaauu

SEQ ID NO: 1433019 - RNA, 11 nt, Human
uuaaaugcacc

SEQ ID NO: 1433020 - RNA, 22 nt, Human
uuaaagaaaaaaauugaaaugu

SEQ ID NO: 1433021 - RNA, 20 nt, Human
uuaaagaaaaaaauugaaau

SEQ ID NO: 1433022 - RNA, 17 nt, Human
uuaaagaaaaaaauuga

SEQ ID NO: 1433023 - RNA, 21 nt, Human
uuaaagaaaaaaauguauuuu

SEQ ID NO: 1433024 - RNA, 20 nt, Human
uuaaagcagguucuuguugg

SEQ ID NO: 1433025 - RNA, 13 nt, Human
uuaaagccuccuc

SEQ ID NO: 1433026 - RNA, 23 nt, Human
uguuuuuaaacuguacagugucu

SEQ ID NO: 1433027 - RNA, 19 nt, Human
uguuuuuaacaugucaauc

SEQ ID NO: 1433028 - RNA, 19 nt, Human
uguuuuuaaacuguacagu

SEQ ID NO: 1433029 - RNA, 18 nt, Human
uguuuuuaaacuguacag

SEQ ID NO: 1433030 - RNA, 16 nt, Human
uguuuuuaaacuguac

SEQ ID NO: 1433031 - RNA, 15 nt, Human
uguuuuuaaacugua

SEQ ID NO: 1433032 - RNA, 14 nt, Human
uguuuuuaaacugu

SEQ ID NO: 1433033 - RNA, 23 nt, Human
uguuuuaauuuaaacaccuccuc

SEQ ID NO: 1433034 - RNA, 22 nt, Human
uguuuuaauuuaaacaccuccu

SEQ ID NO: 1433035 - RNA, 13 nt, Human
uguuuuaauugua

SEQ ID NO: 1433036 - RNA, 16 nt, Human
uguuuuaauaacuuau

SEQ ID NO: 1433037 - RNA, 22 nt, Human
uguuuuaaggaugcuuguacau

SEQ ID NO: 1433038 - RNA, 23 nt, Human
uguuuuaaggaugcuuguacaua

SEQ ID NO: 1433039 - RNA, 16 nt, Human
uguuuuugcacauguu

SEQ ID NO: 1433040 - RNA, 20 nt, Human
uguuuuuaaugcuuugauau

SEQ ID NO: 1433041 - RNA, 18 nt, Human
uguuuuuacaaauguuaa

SEQ ID NO: 1433042 - RNA, 16 nt, Human
uguuuuuggucuuuua

SEQ ID NO: 1433043 - RNA, 10 nt, Human
uguuuuuggg

SEQ ID NO: 1433044 - RNA, 23 nt, Human
uguuuuugcgugggagugugugc

SEQ ID NO: 1433045 - RNA, 13 nt, Human
uuaaaaaaaaaga

SEQ ID NO: 1433046 - RNA, 15 nt, Human
uguuuacugcaaggu

SEQ ID NO: 1433047 - RNA, 19 nt, Human
uguuuacuagggaucccuc

SEQ ID NO: 1433048 - RNA, 13 nt, Human
uguuuacuaggga

SEQ ID NO: 1433049 - RNA, 18 nt, Human
uguuuccagcauucccag

SEQ ID NO: 1433050 - RNA, 22 nt, Human
uguuucccaggcccacugugcc

SEQ ID NO: 1433051 - RNA, 20 nt, Human
uguuuccagcauucccaggu

SEQ ID NO: 1433052 - RNA, 15 nt, Human
uguuuccagcauucc

SEQ ID NO: 1433053 - RNA, 17 nt, Human
uguuucuggauuucaua

SEQ ID NO: 1433054 - RNA, 19 nt, Human
uguuucugacucugagcua

SEQ ID NO: 1433055 - RNA, 12 nt, Human
uguuucugacuc

SEQ ID NO: 1433056 - RNA, 14 nt, Human
uguuuccucuaguu

SEQ ID NO: 1433057 - RNA, 16 nt, Human
uguuuccuagcugugu

SEQ ID NO: 1433058 - RNA, 20 nt, Human
uguuucccuuucacuggcau

SEQ ID NO: 1433059 - RNA, 14 nt, Human
uguuuccucuguuc

SEQ ID NO: 1433060 - RNA, 15 nt, Human
uguuuguuguagauu

SEQ ID NO: 1433061 - RNA, 11 nt, Human
uguuuguuggu

SEQ ID NO: 1433062 - RNA, 14 nt, Human
uguuuguguauuua

SEQ ID NO: 1433063 - RNA, 12 nt, Human
uguuuguguauu

SEQ ID NO: 1433064 - RNA, 15 nt, Human
uguuugugcuguggu

SEQ ID NO: 1433065 - RNA, 16 nt, Human
uguuucuguaagaaac

SEQ ID NO: 1433066 - RNA, 11 nt, Human
uguuucuguaa

SEQ ID NO: 1433067 - RNA, 12 nt, Human
uguuggcaggcu

SEQ ID NO: 1433068 - RNA, 21 nt, Human
uguuggacaccuuuagguucu

SEQ ID NO: 1433069 - RNA, 22 nt, Human
uguuggacaagcuucugagacg

SEQ ID NO: 1433070 - RNA, 21 nt, Human
uguuggacaagcuucugagac

SEQ ID NO: 1433071 - RNA, 20 nt, Human
uguuggagaagaacugaaau

SEQ ID NO: 1433072 - RNA, 19 nt, Human
uguuggagaagaacugaaa

SEQ ID NO: 1433073 - RNA, 16 nt, Human
uguugauuaaagauga

SEQ ID NO: 1433074 - RNA, 15 nt, Human
uguugauuaaagaug

SEQ ID NO: 1433075 - RNA, 23 nt, Human
uguugauacuguugcacgugugu

SEQ ID NO: 1433076 - RNA, 17 nt, Human
uguuggagaagaacuga

SEQ ID NO: 1433077 - RNA, 16 nt, Human
uguuggagaagaacug

SEQ ID NO: 1433078 - RNA, 12 nt, Human
uguuggaaugaa

SEQ ID NO: 1433079 - RNA, 14 nt, Human
uguuggagaagaac

SEQ ID NO: 1433080 - RNA, 19 nt, Human
uguugggacugcuaaauaa

SEQ ID NO: 1433081 - RNA, 14 nt, Human
uguugggacugcua

SEQ ID NO: 1433082 - RNA, 19 nt, Human
uguugggaaacuuggcucg

SEQ ID NO: 1433083 - RNA, 14 nt, Human
uguuggcuagccuc

SEQ ID NO: 1433084 - RNA, 18 nt, Human
uguuggcguaggcuacag

SEQ ID NO: 1433085 - RNA, 23 nt, Human
uguuggccaggcuggucuaaaac

SEQ ID NO: 1433086 - RNA, 17 nt, Human
uguuggcauagcucugg

SEQ ID NO: 1433087 - RNA, 21 nt, Human
uguuggcaggcuggccagucc

SEQ ID NO: 1433088 - RNA, 18 nt, Human
uguuggcaggcuggccag

SEQ ID NO: 1433089 - RNA, 24 nt, Human
uguuggcguaggcuacagagaagc

SEQ ID NO: 1433090 - RNA, 23 nt, Human
uguuggcguggggccuuugucag

SEQ ID NO: 1433091 - RNA, 23 nt, Human
uguuggcguaggcuacagagaag

SEQ ID NO: 1433092 - RNA, 22 nt, Human
uguuggcguaggcuacagagaa

SEQ ID NO: 1433093 - RNA, 21 nt, Human
uguuggcguaggcuacagaga

SEQ ID NO: 1433094 - RNA, 20 nt, Human
uguuggcguaggcuacagag

SEQ ID NO: 1433095 - RNA, 22 nt, Human
uguuuacaugcuuauuccauga

SEQ ID NO: 1433096 - RNA, 21 nt, Human
uguuuacaugcuuauuccaug

SEQ ID NO: 1433097 - RNA, 16 nt, Human
uguuuacaugcuuauu

SEQ ID NO: 1433098 - RNA, 13 nt, Human
uguuuacaugcuu

SEQ ID NO: 1433099 - RNA, 23 nt, Human
uguuuaaaguucaacauguuauu

SEQ ID NO: 1433100 - RNA, 12 nt, Human
uguuuaaaguuc

SEQ ID NO: 1433101 - RNA, 14 nt, Human
uguuuaaaccuuuu

SEQ ID NO: 1433102 - RNA, 13 nt, Human
uguuuaaaguuca

SEQ ID NO: 1433103 - RNA, 12 nt, Human
uguuuaagagac

SEQ ID NO: 1433104 - RNA, 23 nt, Human
uguucuccugcugcucccucaga

SEQ ID NO: 1433105 - RNA, 21 nt, Human
uguucuccuuuuccucucucc

SEQ ID NO: 1433106 - RNA, 20 nt, Human
uguucaugaaagauucaaug

SEQ ID NO: 1433107 - RNA, 22 nt, Human
uguucuccugcugcucccucag

SEQ ID NO: 1433108 - RNA, 15 nt, Human
uguucucuaucauuu

SEQ ID NO: 1433109 - RNA, 18 nt, Human
uguucucuaucauuuaau

SEQ ID NO: 1433110 - RNA, 20 nt, Human
uguucucuaucauuuaauaa

SEQ ID NO: 1433111 - RNA, 20 nt, Human
uguucauagcccaguagacc

SEQ ID NO: 1433112 - RNA, 19 nt, Human
uguucauagcccaguagac

SEQ ID NO: 1433113 - RNA, 23 nt, Human
uguucauagcccaguagaccuug

SEQ ID NO: 1433114 - RNA, 14 nt, Human
uguucaugaaagau

SEQ ID NO: 1433115 - RNA, 13 nt, Human
uguucaugaaaga

SEQ ID NO: 1433116 - RNA, 20 nt, Human
uguucuuuggaaauacacag

SEQ ID NO: 1433117 - RNA, 18 nt, Human
uguucuuuggaaaguaca

SEQ ID NO: 1433118 - RNA, 23 nt, Human
uguucuuucuggcuaugcauuug

SEQ ID NO: 1433119 - RNA, 18 nt, Human
uguugaaaaaguuuguuu

SEQ ID NO: 1433120 - RNA, 13 nt, Human
uguucuuuuuaga

SEQ ID NO: 1433121 - RNA, 22 nt, Human
uguucuuuggaaaguacacucu

SEQ ID NO: 1433122 - RNA, 20 nt, Human
uguucuuuuaaaugauugaa

SEQ ID NO: 1433123 - RNA, 21 nt, Human
uguugauacuguugcacgugu

SEQ ID NO: 1433124 - RNA, 23 nt, Human
uguugagaaucccaaauuugauu

SEQ ID NO: 1433125 - RNA, 22 nt, Human
uguugagaaucccaaauuugau

SEQ ID NO: 1433126 - RNA, 18 nt, Human
uguugacauucugaaugc

SEQ ID NO: 1433127 - RNA, 23 nt, Human
uguugacauucugaaugcuucua

SEQ ID NO: 1433128 - RNA, 17 nt, Human
uguugacauucugaaug

SEQ ID NO: 1433129 - RNA, 16 nt, Human
uguugacauucugaau

SEQ ID NO: 1433130 - RNA, 15 nt, Human
uguugacauucugaa

SEQ ID NO: 1433131 - RNA, 14 nt, Human
uguugacauucuga

SEQ ID NO: 1433132 - RNA, 14 nt, Human
uguugacauuaguc

SEQ ID NO: 1433133 - RNA, 12 nt, Human
uguugacauuag

SEQ ID NO: 1433134 - RNA, 18 nt, Human
uguugaauacuuuuuaca

SEQ ID NO: 1433135 - RNA, 13 nt, Human
uguugaauacuuu

SEQ ID NO: 1433136 - RNA, 17 nt, Human
uguugacaguucauaug

SEQ ID NO: 1433137 - RNA, 20 nt, Human
uguugacaugggacauuugc

SEQ ID NO: 1433138 - RNA, 21 nt, Human
uguuagcaugcuggugagcca

SEQ ID NO: 1433139 - RNA, 14 nt, Human
uguuagcagacagg

SEQ ID NO: 1433140 - RNA, 14 nt, Human
uguuacuguaauuc

SEQ ID NO: 1433141 - RNA, 12 nt, Human
uguuacuguaau

SEQ ID NO: 1433142 - RNA, 21 nt, Human
uguuagccuuuuuuccccaga

SEQ ID NO: 1433143 - RNA, 20 nt, Human
uguuagccuuuuuuccccag

SEQ ID NO: 1433144 - RNA, 19 nt, Human
uguuagccuuuuuucccca

SEQ ID NO: 1433145 - RNA, 19 nt, Human
uguuagccucaauuucuga

SEQ ID NO: 1433146 - RNA, 20 nt, Human
uguuacuaaaaaaaagauga

SEQ ID NO: 1433147 - RNA, 16 nt, Human
uguuacguagccuaag

SEQ ID NO: 1433148 - RNA, 23 nt, Human
uguuaccugaaaacacugugcac

SEQ ID NO: 1433149 - RNA, 14 nt, Human
uguuacuaaguuuu

SEQ ID NO: 1433150 - RNA, 14 nt, Human
uguuaaaaauguca

SEQ ID NO: 1433151 - RNA, 23 nt, Human
uguuaaaaaaauaagaagaaugc

SEQ ID NO: 1433152 - RNA, 22 nt, Human
uguuaaaaaaauaagaagaaug

SEQ ID NO: 1433153 - RNA, 20 nt, Human
uguuaaaaaaauaagaagaa

SEQ ID NO: 1433154 - RNA, 19 nt, Human
uguuaaaaaaauaagaaga

SEQ ID NO: 1433155 - RNA, 22 nt, Human
uguguuuuucuauuaaaagacu

SEQ ID NO: 1433156 - RNA, 21 nt, Human
uguguuuuucuauuaaaagac

SEQ ID NO: 1433157 - RNA, 19 nt, Human
uguguuuuucuauuaaaag

SEQ ID NO: 1433158 - RNA, 17 nt, Human
uguguuuuucuauuaaa

SEQ ID NO: 1433159 - RNA, 16 nt, Human
uguguuuuucuauuaa

SEQ ID NO: 1433160 - RNA, 15 nt, Human
uguguuuuucuauua

SEQ ID NO: 1433161 - RNA, 14 nt, Human
uguuaccuguagau

SEQ ID NO: 1433162 - RNA, 22 nt, Human
uguuaccugaaaacacugugca

SEQ ID NO: 1433163 - RNA, 16 nt, Human
uguuaccugaaaacac

SEQ ID NO: 1433164 - RNA, 15 nt, Human
uguuaccugaaaaca

SEQ ID NO: 1433165 - RNA, 16 nt, Human
uguuaccuacuuugac

SEQ ID NO: 1433166 - RNA, 21 nt, Human
uguuacccaguaacucaucug

SEQ ID NO: 1433167 - RNA, 17 nt, Human
uguuaguaugaggcauu

SEQ ID NO: 1433168 - RNA, 19 nt, Human
uguuaguaugaggcauuug

SEQ ID NO: 1433169 - RNA, 20 nt, Human
uguuaguaugaggcauuugu

SEQ ID NO: 1433170 - RNA, 14 nt, Human
uguucagcacuguc

SEQ ID NO: 1433171 - RNA, 13 nt, Human
uguucagcacugu

SEQ ID NO: 1433172 - RNA, 22 nt, Human
uguucagaagguugcucuagau

SEQ ID NO: 1433173 - RNA, 18 nt, Human
uguucagaagguugcucu

SEQ ID NO: 1433174 - RNA, 17 nt, Human
uguucacuuuugacaaa

SEQ ID NO: 1433175 - RNA, 19 nt, Human
uguucacuuuuccucccuc

SEQ ID NO: 1433176 - RNA, 16 nt, Human
uguucacuuuuccucc

SEQ ID NO: 1433177 - RNA, 15 nt, Human
uguuagucauuugcu

SEQ ID NO: 1433178 - RNA, 14 nt, Human
uguuagugcaaauu

SEQ ID NO: 1433179 - RNA, 18 nt, Human
uguucagcacugucccuu

SEQ ID NO: 1433180 - RNA, 17 nt, Human
uguucagcacugucccu

SEQ ID NO: 1433181 - RNA, 15 nt, Human
uguucagcacugucc

SEQ ID NO: 1433182 - RNA, 15 nt, Human
uguucauagcccagu

SEQ ID NO: 1433183 - RNA, 14 nt, Human
uguucauagcccag

SEQ ID NO: 1433184 - RNA, 17 nt, Human
uguucauaaauaaaguu

SEQ ID NO: 1433185 - RNA, 16 nt, Human
ugugugucuuaauuau

SEQ ID NO: 1433186 - RNA, 20 nt, Human
ugugugugaaugaacacucu

SEQ ID NO: 1433187 - RNA, 16 nt, Human
ugugugugaaugaaca

SEQ ID NO: 1433188 - RNA, 17 nt, Human
uguguggcuuucagagc

SEQ ID NO: 1433189 - RNA, 22 nt, Human
ugugugugcccucugggcucug

SEQ ID NO: 1433190 - RNA, 14 nt, Human
ugugugugcccucu

SEQ ID NO: 1433191 - RNA, 12 nt, Human
uguguuuccaca

SEQ ID NO: 1433192 - RNA, 23 nt, Human
uguguuucacaguuugaaauaag

SEQ ID NO: 1433193 - RNA, 19 nt, Human
uguguuucacaguuugaaa

SEQ ID NO: 1433194 - RNA, 18 nt, Human
uguguuucacaguuugaa

SEQ ID NO: 1433195 - RNA, 21 nt, Human
uguguuucacaguuugaaaua

SEQ ID NO: 1433196 - RNA, 13 nt, Human
uguguuugaagca

SEQ ID NO: 1433197 - RNA, 19 nt, Human
uguguuuugcaagccagau

SEQ ID NO: 1433198 - RNA, 13 nt, Human
uguguuuugcaag

SEQ ID NO: 1433199 - RNA, 15 nt, Human
uguguuuuuaacaug

SEQ ID NO: 1433200 - RNA, 19 nt, Human
uguguuuugcuaaaggaaa

SEQ ID NO: 1433201 - RNA, 16 nt, Human
uguguuuugaaagaau

SEQ ID NO: 1433202 - RNA, 17 nt, Human
uguguuucuugccucau

SEQ ID NO: 1433203 - RNA, 15 nt, Human
uguguuuuucauaaa

SEQ ID NO: 1433204 - RNA, 14 nt, Human
uguguuuuucuauu

SEQ ID NO: 1433205 - RNA, 18 nt, Human
uguguuuuucauaaagca

SEQ ID NO: 1433206 - RNA, 14 nt, Human
uguguggauucuuu

SEQ ID NO: 1433207 - RNA, 22 nt, Human
uguguggagagggaaugugaaa

SEQ ID NO: 1433208 - RNA, 14 nt, Human
uguguggacaggac

SEQ ID NO: 1433209 - RNA, 20 nt, Human
ugugugcuuuuuuugugugu

SEQ ID NO: 1433210 - RNA, 20 nt, Human
uguguggcuuucagagccuc

SEQ ID NO: 1433211 - RNA, 21 nt, Human
uguguggagagggaaugugaa

SEQ ID NO: 1433212 - RNA, 21 nt, Human
ugugugcguguuuggguuuuu

SEQ ID NO: 1433213 - RNA, 22 nt, Human
ugugugcaacaggguauggacu

SEQ ID NO: 1433214 - RNA, 23 nt, Human
uguguaugcacaugaacuuagau

SEQ ID NO: 1433215 - RNA, 22 nt, Human
uguguagcugugaccugcugag

SEQ ID NO: 1433216 - RNA, 19 nt, Human
uguguaugcacaugaacuu

SEQ ID NO: 1433217 - RNA, 22 nt, Human
ugugugaaagguacuucaaauc

SEQ ID NO: 1433218 - RNA, 21 nt, Human
ugugugaaagguacuucaaau

SEQ ID NO: 1433219 - RNA, 12 nt, Human
uuuuuuguuauu

SEQ ID NO: 1433220 - RNA, 22 nt, Human
gccugccuuuccauccauggcc

SEQ ID NO: 1433221 - RNA, 21 nt, Human
gccugcgccaccgcccagaga

SEQ ID NO: 1433222 - RNA, 23 nt, Human
gccugccuuuccauccauggcca

SEQ ID NO: 1433223 - RNA, 14 nt, Human
gccugccuuuccau

SEQ ID NO: 1433224 - RNA, 22 nt, Human
gccugccuccccugccucacca

SEQ ID NO: 1433225 - RNA, 23 nt, Human
gccuguguccaugcgcucagggc

SEQ ID NO: 1433226 - RNA, 21 nt, Human
gccuguguccaugcgcucagg

SEQ ID NO: 1433227 - RNA, 20 nt, Human
gccuguguccaugcgcucag

SEQ ID NO: 1433228 - RNA, 10 nt, Human
gccugggagg

SEQ ID NO: 1433229 - RNA, 19 nt, Human
gccugggacaacugcuccc

SEQ ID NO: 1433230 - RNA, 22 nt, Human
gccugggacaacugcucccacc

SEQ ID NO: 1433231 - RNA, 16 nt, Human
gccugggacaacugcu

SEQ ID NO: 1433232 - RNA, 18 nt, Human
gccugggaaagccccugc

SEQ ID NO: 1433233 - RNA, 16 nt, Human
gccugggaaagccccu

SEQ ID NO: 1433234 - RNA, 22 nt, Human
gccuggccuccugccucuacug

SEQ ID NO: 1433235 - RNA, 19 nt, Human
gccuggccuccugccucua

SEQ ID NO: 1433236 - RNA, 16 nt, Human
gccuggccuccugccu

SEQ ID NO: 1433237 - RNA, 15 nt, Human
gccuggccuccugcc

SEQ ID NO: 1433238 - RNA, 14 nt, Human
gccuggccuccugc

SEQ ID NO: 1433239 - RNA, 17 nt, Human
gccuacuccaaaauguu

SEQ ID NO: 1433240 - RNA, 21 nt, Human
gccuaccccgcagacaccuug

SEQ ID NO: 1433241 - RNA, 17 nt, Human
gccuaccccgcagacac

SEQ ID NO: 1433242 - RNA, 14 nt, Human
gccuaccccgcaga

SEQ ID NO: 1433243 - RNA, 12 nt, Human
gccggccccagg

SEQ ID NO: 1433244 - RNA, 14 nt, Human
gccggccccaggcu

SEQ ID NO: 1433245 - RNA, 13 nt, Human
gccuccugccucu

SEQ ID NO: 1433246 - RNA, 12 nt, Human
gccuccugccuc

SEQ ID NO: 1433247 - RNA, 20 nt, Human
gccuccugccggcuccuugg

SEQ ID NO: 1433248 - RNA, 17 nt, Human
gccuccugccggcuccu

SEQ ID NO: 1433249 - RNA, 13 nt, Human
gccuccugccggc

SEQ ID NO: 1433250 - RNA, 21 nt, Human
gccuccucccucccucuccga

SEQ ID NO: 1433251 - RNA, 20 nt, Human
gccuccucccucccucuccg

SEQ ID NO: 1433252 - RNA, 19 nt, Human
gccuccucccucccucucc

SEQ ID NO: 1433253 - RNA, 17 nt, Human
gccuccucccucccucu

SEQ ID NO: 1433254 - RNA, 16 nt, Human
gccuccucccucccuc

SEQ ID NO: 1433255 - RNA, 14 nt, Human
gccuccucccuccc

SEQ ID NO: 1433256 - RNA, 13 nt, Human
gccuccucccucc

SEQ ID NO: 1433257 - RNA, 12 nt, Human
gccuccucccuc

SEQ ID NO: 1433258 - RNA, 11 nt, Human
gccuccucccu

SEQ ID NO: 1433259 - RNA, 22 nt, Human
gccuccucaucccguguucucc

SEQ ID NO: 1433260 - RNA, 17 nt, Human
gccuccucaucccgugu

SEQ ID NO: 1433261 - RNA, 15 nt, Human
gccuccucaucccgu

SEQ ID NO: 1433262 - RNA, 12 nt, Human
gccuccucaucc

SEQ ID NO: 1433263 - RNA, 19 nt, Human
gccucugucuucuggacug

SEQ ID NO: 1433264 - RNA, 23 nt, Human
gccucugucuggcaaugccacag

SEQ ID NO: 1433265 - RNA, 20 nt, Human
gccucugucuggcaaugcca

SEQ ID NO: 1433266 - RNA, 21 nt, Human
gccuccuggcugucugaggcu

SEQ ID NO: 1433267 - RNA, 12 nt, Human
gccugccucacc

SEQ ID NO: 1433268 - RNA, 19 nt, Human
gccugccgagcaaccgugg

SEQ ID NO: 1433269 - RNA, 20 nt, Human
gccugccgagcaaccguggc

SEQ ID NO: 1433270 - RNA, 16 nt, Human
gccugccgagcaaccg

SEQ ID NO: 1433271 - RNA, 14 nt, Human
gccugccgagcaac

SEQ ID NO: 1433272 - RNA, 12 nt, Human
gccugccgagca

SEQ ID NO: 1433273 - RNA, 22 nt, Human
gccucuugaccaggcugccucc

SEQ ID NO: 1433274 - RNA, 21 nt, Human
gccucuugagcaguggcuggu

SEQ ID NO: 1433275 - RNA, 20 nt, Human
gccucuugagcaguggcugg

SEQ ID NO: 1433276 - RNA, 19 nt, Human
gccucuugagcaguggcug

SEQ ID NO: 1433277 - RNA, 18 nt, Human
gccucuugagcaguggcu

SEQ ID NO: 1433278 - RNA, 20 nt, Human
gccucuugaccaggcugccu

SEQ ID NO: 1433279 - RNA, 17 nt, Human
gccucuugaccaggcug

SEQ ID NO: 1433280 - RNA, 16 nt, Human
gccucuugaccaggcu

SEQ ID NO: 1433281 - RNA, 15 nt, Human
gccucuugaccaggc

SEQ ID NO: 1433282 - RNA, 14 nt, Human
gccucuugaccagg

SEQ ID NO: 1433283 - RNA, 13 nt, Human
gccucuugaccag

SEQ ID NO: 1433284 - RNA, 18 nt, Human
gccucugucuucuggacu

SEQ ID NO: 1433285 - RNA, 18 nt, Human
gccucugugcugugugug

SEQ ID NO: 1433286 - RNA, 17 nt, Human
gccucugugcugugugu

SEQ ID NO: 1433287 - RNA, 14 nt, Human
gccucugugcugug

SEQ ID NO: 1433288 - RNA, 12 nt, Human
gccucugugcug

SEQ ID NO: 1433289 - RNA, 11 nt, Human
gccucugugcu

SEQ ID NO: 1433290 - RNA, 18 nt, Human
gccucuucugggagggca

SEQ ID NO: 1433291 - RNA, 15 nt, Human
gccucuucugggagg

SEQ ID NO: 1433292 - RNA, 14 nt, Human
gccucuucugggag

SEQ ID NO: 1433293 - RNA, 14 nt, Human
gccggccagccccu

SEQ ID NO: 1433294 - RNA, 12 nt, Human
gccggccagccc

SEQ ID NO: 1433295 - RNA, 19 nt, Human
gccgcuuggcgaugccagc

SEQ ID NO: 1433296 - RNA, 12 nt, Human
gccgcugccacg

SEQ ID NO: 1433297 - RNA, 16 nt, Human
gccgcugaguggcagg

SEQ ID NO: 1433298 - RNA, 17 nt, Human
gccgcugagcgaggaga

SEQ ID NO: 1433299 - RNA, 15 nt, Human
gccgcugagcgagga

SEQ ID NO: 1433300 - RNA, 18 nt, Human
gcccugcugcugccugcc

SEQ ID NO: 1433301 - RNA, 12 nt, Human
gcccuacuggga

SEQ ID NO: 1433302 - RNA, 18 nt, Human
gcccuaccugccccacuu

SEQ ID NO: 1433303 - RNA, 16 nt, Human
gcccuaccugccccac

SEQ ID NO: 1433304 - RNA, 21 nt, Human
gcccuaccugccccacuuguc

SEQ ID NO: 1433305 - RNA, 15 nt, Human
gcccuacagcacccu

SEQ ID NO: 1433306 - RNA, 23 nt, Human
gccccuggcagagaugccucccu

SEQ ID NO: 1433307 - RNA, 22 nt, Human
gccccuggcagagaugccuccc

SEQ ID NO: 1433308 - RNA, 21 nt, Human
gccccuggcagagaugccucc

SEQ ID NO: 1433309 - RNA, 17 nt, Human
gccccuggcagagaugc

SEQ ID NO: 1433310 - RNA, 13 nt, Human
gccccuggcagag

SEQ ID NO: 1433311 - RNA, 22 nt, Human
gcccuaaaguguauuuuuuuac

SEQ ID NO: 1433312 - RNA, 19 nt, Human
gcccccaucauccucuggc

SEQ ID NO: 1433313 - RNA, 21 nt, Human
gcccccuccucuagcuguggg

SEQ ID NO: 1433314 - RNA, 20 nt, Human
gcccccuccucuagcugugg

SEQ ID NO: 1433315 - RNA, 19 nt, Human
gcccccuccucuagcugug

SEQ ID NO: 1433316 - RNA, 16 nt, Human
gcccccuccucuagcu

SEQ ID NO: 1433317 - RNA, 22 nt, Human
gcccccuccgcccugccacuca

SEQ ID NO: 1433318 - RNA, 20 nt, Human
gcccccuccgcccugccacu

SEQ ID NO: 1433319 - RNA, 18 nt, Human
gcccccuccgcccugcca

SEQ ID NO: 1433320 - RNA, 18 nt, Human
gcccccaucucaugcccc

SEQ ID NO: 1433321 - RNA, 13 nt, Human
gcccccaucucau

SEQ ID NO: 1433322 - RNA, 18 nt, Human
gcccccaucauccucugg

SEQ ID NO: 1433323 - RNA, 17 nt, Human
gcccccaucauccucug

SEQ ID NO: 1433324 - RNA, 14 nt, Human
gcccccagguaggg

SEQ ID NO: 1433325 - RNA, 19 nt, Human
gcccccaggguccugggag

SEQ ID NO: 1433326 - RNA, 22 nt, Human
gcccccaguaucucuucagucu

SEQ ID NO: 1433327 - RNA, 19 nt, Human
gcccacuccaucugguaga

SEQ ID NO: 1433328 - RNA, 18 nt, Human
gcccacuccaucugguag

SEQ ID NO: 1433329 - RNA, 15 nt, Human
gcccacuccaucugg

SEQ ID NO: 1433330 - RNA, 20 nt, Human
gcccaugggagcugguuaga

SEQ ID NO: 1433331 - RNA, 23 nt, Human
gcccauggagauugaccuggaug

SEQ ID NO: 1433332 - RNA, 19 nt, Human
gccacauuuggaauacuuu

SEQ ID NO: 1433333 - RNA, 22 nt, Human
gccacauuuggaauacuuuuug

SEQ ID NO: 1433334 - RNA, 14 nt, Human
gccacauuuggaau

SEQ ID NO: 1433335 - RNA, 15 nt, Human
gccacaugggaggcu

SEQ ID NO: 1433336 - RNA, 13 nt, Human
gccaccaugcccg

SEQ ID NO: 1433337 - RNA, 19 nt, Human
gccaccaguucucaugggu

SEQ ID NO: 1433338 - RNA, 13 nt, Human
gccaccaguucuc

SEQ ID NO: 1433339 - RNA, 11 nt, Human
gccaccaguuc

SEQ ID NO: 1433340 - RNA, 20 nt, Human
gccaccaggccaccucccca

SEQ ID NO: 1433341 - RNA, 18 nt, Human
gccaccaggccaccuccc

SEQ ID NO: 1433342 - RNA, 15 nt, Human
gccaccaggccaccu

SEQ ID NO: 1433343 - RNA, 12 nt, Human
gccaccaggcca

SEQ ID NO: 1433344 - RNA, 22 nt, Human
gccaccaagagggacgccuggg

SEQ ID NO: 1433345 - RNA, 19 nt, Human
gccaccaagagggacgccu

SEQ ID NO: 1433346 - RNA, 14 nt, Human
gccaccaagaggga

SEQ ID NO: 1433347 - RNA, 16 nt, Human
gccacuguuguuuugg

SEQ ID NO: 1433348 - RNA, 19 nt, Human
gccacuuaauguauguuac

SEQ ID NO: 1433349 - RNA, 18 nt, Human
gccacuuaauguauguua

SEQ ID NO: 1433350 - RNA, 16 nt, Human
gccacuuaauguaugu

SEQ ID NO: 1433351 - RNA, 13 nt, Human
gccacuuaaugua

SEQ ID NO: 1433352 - RNA, 18 nt, Human
gccacuuaaaauguucac

SEQ ID NO: 1433353 - RNA, 20 nt, Human
gccacuguguuccuuccgcu

SEQ ID NO: 1433354 - RNA, 18 nt, Human
gccacuguguuccuuccg

SEQ ID NO: 1433355 - RNA, 23 nt, Human
gccacugcuuuucccuuugugag

SEQ ID NO: 1433356 - RNA, 22 nt, Human
gccacuggagugugcguggugg

SEQ ID NO: 1433357 - RNA, 22 nt, Human
gccacugccuucgcuucuugcc

SEQ ID NO: 1433358 - RNA, 23 nt, Human
gccacugccuucgcuucuugccu

SEQ ID NO: 1433359 - RNA, 18 nt, Human
gccacugccuucgcuucu

SEQ ID NO: 1433360 - RNA, 16 nt, Human
gccacuguguuccuuc

SEQ ID NO: 1433361 - RNA, 15 nt, Human
gccacuguguuccuu

SEQ ID NO: 1433362 - RNA, 19 nt, Human
gccacuggggcucagagcc

SEQ ID NO: 1433363 - RNA, 18 nt, Human
gccacuggggcucagagc

SEQ ID NO: 1433364 - RNA, 17 nt, Human
gccacuggggcucagag

SEQ ID NO: 1433365 - RNA, 16 nt, Human
gccacuggggcucaga

SEQ ID NO: 1433366 - RNA, 15 nt, Human
gccacuggggcucag

SEQ ID NO: 1433367 - RNA, 14 nt, Human
gccacuggggcuca

SEQ ID NO: 1433368 - RNA, 12 nt, Human
gccacuggggcu

SEQ ID NO: 1433369 - RNA, 19 nt, Human
gccacugccauuaaagaau

SEQ ID NO: 1433370 - RNA, 13 nt, Human
gccacccaggauc

SEQ ID NO: 1433371 - RNA, 12 nt, Human
gccacccaggau

SEQ ID NO: 1433372 - RNA, 23 nt, Human
gccacccagccccagccagggcu

SEQ ID NO: 1433373 - RNA, 15 nt, Human
gccacccagccccag

SEQ ID NO: 1433374 - RNA, 14 nt, Human
gccacccagcccca

SEQ ID NO: 1433375 - RNA, 13 nt, Human
gccacccucaugc

SEQ ID NO: 1433376 - RNA, 23 nt, Human
gccacccugaggagucugagguc

SEQ ID NO: 1433377 - RNA, 22 nt, Human
gccacccugaggagucugaggu

SEQ ID NO: 1433378 - RNA, 20 nt, Human
gccacccugaggagucugag

SEQ ID NO: 1433379 - RNA, 19 nt, Human
gccacccugaggagucuga

SEQ ID NO: 1433380 - RNA, 16 nt, Human
gccacccugaggaguc

SEQ ID NO: 1433381 - RNA, 14 nt, Human
gccacccugaggag

SEQ ID NO: 1433382 - RNA, 13 nt, Human
gccacccugagga

SEQ ID NO: 1433383 - RNA, 12 nt, Human
gccacccugagg

SEQ ID NO: 1433384 - RNA, 15 nt, Human
gccacccucaugcug

SEQ ID NO: 1433385 - RNA, 16 nt, Human
gccacccucaugcugu

SEQ ID NO: 1433386 - RNA, 21 nt, Human
gcacuuggggcaccuugcucc

SEQ ID NO: 1433387 - RNA, 17 nt, Human
gcacuuggggcaccuug

SEQ ID NO: 1433388 - RNA, 16 nt, Human
gcacuuggcagccuug

SEQ ID NO: 1433389 - RNA, 15 nt, Human
gcacuuggcugcaua

SEQ ID NO: 1433390 - RNA, 13 nt, Human
gcacuuggcccuu

SEQ ID NO: 1433391 - RNA, 13 nt, Human
gcacuuggcagcc

SEQ ID NO: 1433392 - RNA, 16 nt, Human
gccauucucaagcccu

SEQ ID NO: 1433393 - RNA, 18 nt, Human
gccauucucaagcccugc

SEQ ID NO: 1433394 - RNA, 21 nt, Human
gccaugucuucucccuggaau

SEQ ID NO: 1433395 - RNA, 22 nt, Human
gccauucacuucauaauccagu

SEQ ID NO: 1433396 - RNA, 21 nt, Human
gccauucacuucauaauccag

SEQ ID NO: 1433397 - RNA, 15 nt, Human
gcccacgacacugca

SEQ ID NO: 1433398 - RNA, 19 nt, Human
gcccacgacacugcagccc

SEQ ID NO: 1433399 - RNA, 17 nt, Human
gcccacgcucacccccu

SEQ ID NO: 1433400 - RNA, 17 nt, Human
gccauucuccacagcaa

SEQ ID NO: 1433401 - RNA, 20 nt, Human
gccauucuccugccucagcc

SEQ ID NO: 1433402 - RNA, 22 nt, Human
gccauguccaaagaggcugccc

SEQ ID NO: 1433403 - RNA, 19 nt, Human
gccauguccaaagaggcug

SEQ ID NO: 1433404 - RNA, 18 nt, Human
gccauguccaaagaggcu

SEQ ID NO: 1433405 - RNA, 15 nt, Human
gccauguccaaagag

SEQ ID NO: 1433406 - RNA, 14 nt, Human
gccauguccaaaga

SEQ ID NO: 1433407 - RNA, 17 nt, Human
gccaugucaaacaaaua

SEQ ID NO: 1433408 - RNA, 22 nt, Human
gccaugucuucucccuggaaug

SEQ ID NO: 1433409 - RNA, 14 nt, Human
gccaugucuucucc

SEQ ID NO: 1433410 - RNA, 23 nt, Human
gccauauuaaauuuuuuguugac

SEQ ID NO: 1433411 - RNA, 20 nt, Human
gccauauuaaauuuuuuguu

SEQ ID NO: 1433412 - RNA, 21 nt, Human
gccauauugcacaugucuuaa

SEQ ID NO: 1433413 - RNA, 22 nt, Human
gccauauugcacaugucuuaau

SEQ ID NO: 1433414 - RNA, 16 nt, Human
gccauauuaaauuuuu

SEQ ID NO: 1433415 - RNA, 14 nt, Human
gccauauuaaauuu

SEQ ID NO: 1433416 - RNA, 17 nt, Human
gccauaugauuuacauu

SEQ ID NO: 1433417 - RNA, 16 nt, Human
gccauaugauuuacau

SEQ ID NO: 1433418 - RNA, 14 nt, Human
gccagcaucugggc

SEQ ID NO: 1433419 - RNA, 15 nt, Human
gccagcaucugggcc

SEQ ID NO: 1433420 - RNA, 13 nt, Human
gccagcaucuggg

SEQ ID NO: 1433421 - RNA, 19 nt, Human
gccagcagcaccugcccua

SEQ ID NO: 1433422 - RNA, 16 nt, Human
gccagcagcaccugcc

SEQ ID NO: 1433423 - RNA, 14 nt, Human
gccagcagcaccug

SEQ ID NO: 1433424 - RNA, 13 nt, Human
gccagcagcaccu

SEQ ID NO: 1433425 - RNA, 20 nt, Human
gccagcacuuguccagcuga

SEQ ID NO: 1433426 - RNA, 19 nt, Human
gccagcacuuguccagcug

SEQ ID NO: 1433427 - RNA, 14 nt, Human
gccagcacuugucc

SEQ ID NO: 1433428 - RNA, 18 nt, Human
gccagcacucgcuagcag

SEQ ID NO: 1433429 - RNA, 23 nt, Human
gccagcacucgcuagcaguggca

SEQ ID NO: 1433430 - RNA, 14 nt, Human
gccagcaccuggca

SEQ ID NO: 1433431 - RNA, 22 nt, Human
gccagcaccggaccagccuggc

SEQ ID NO: 1433432 - RNA, 21 nt, Human
gccagcaccggaccagccugg

SEQ ID NO: 1433433 - RNA, 21 nt, Human
gccagaaguaccagacuagau

SEQ ID NO: 1433434 - RNA, 18 nt, Human
gccagaaguaccagacua

SEQ ID NO: 1433435 - RNA, 17 nt, Human
gccagaaguaccagacu

SEQ ID NO: 1433436 - RNA, 14 nt, Human
gccagaaguaccag

SEQ ID NO: 1433437 - RNA, 14 nt, Human
gccagaagcuacug

SEQ ID NO: 1433438 - RNA, 17 nt, Human
gccagacacaggcccuc

SEQ ID NO: 1433439 - RNA, 16 nt, Human
gccagacacaggcccu

SEQ ID NO: 1433440 - RNA, 18 nt, Human
gccagacaugccacaagg

SEQ ID NO: 1433441 - RNA, 20 nt, Human
gccagcaccggaccagccug

SEQ ID NO: 1433442 - RNA, 19 nt, Human
gccagcaccggaccagccu

SEQ ID NO: 1433443 - RNA, 18 nt, Human
gccagcaccggaccagcc

SEQ ID NO: 1433444 - RNA, 15 nt, Human
gccagcaccggacca

SEQ ID NO: 1433445 - RNA, 22 nt, Human
gccagcacacagggcagugagg

SEQ ID NO: 1433446 - RNA, 18 nt, Human
gccagcacacagggcagu

SEQ ID NO: 1433447 - RNA, 17 nt, Human
gccagcacacagggcag

SEQ ID NO: 1433448 - RNA, 16 nt, Human
gccagcacacagggca

SEQ ID NO: 1433449 - RNA, 15 nt, Human
gccagcacacagggc

SEQ ID NO: 1433450 - RNA, 13 nt, Human
gccagcacacagg

SEQ ID NO: 1433451 - RNA, 12 nt, Human
gccagcacacag

SEQ ID NO: 1433452 - RNA, 16 nt, Human
gccagauuuuuuaaaa

SEQ ID NO: 1433453 - RNA, 23 nt, Human
gccagauuuuuuaaaauuuauau

SEQ ID NO: 1433454 - RNA, 13 nt, Human
gccagauuuuuua

SEQ ID NO: 1433455 - RNA, 12 nt, Human
gccagauuuuuu

SEQ ID NO: 1433456 - RNA, 13 nt, Human
gccagaccaugga

SEQ ID NO: 1433457 - RNA, 16 nt, Human
gccagaccauggacac

SEQ ID NO: 1433458 - RNA, 17 nt, Human
gccagaccauggacacu

SEQ ID NO: 1433459 - RNA, 18 nt, Human
gccaggaggugccacugg

SEQ ID NO: 1433460 - RNA, 17 nt, Human
gccaggaggugccacug

SEQ ID NO: 1433461 - RNA, 23 nt, Human
gccaggagggacaaaggagccug

SEQ ID NO: 1433462 - RNA, 22 nt, Human
gccaggagggacaaaggagccu

SEQ ID NO: 1433463 - RNA, 21 nt, Human
gccaggagggacaaaggagcc

SEQ ID NO: 1433464 - RNA, 22 nt, Human
gccaggauggaacacggccaca

SEQ ID NO: 1433465 - RNA, 20 nt, Human
gccaggauggaacacggcca

SEQ ID NO: 1433466 - RNA, 19 nt, Human
gccaggagggacaaaggag

SEQ ID NO: 1433467 - RNA, 13 nt, Human
gccaggagggaca

SEQ ID NO: 1433468 - RNA, 22 nt, Human
gccaggaggacccagggcucug

SEQ ID NO: 1433469 - RNA, 19 nt, Human
gccaggaggacccagggcu

SEQ ID NO: 1433470 - RNA, 17 nt, Human
gccaggaggacccaggg

SEQ ID NO: 1433471 - RNA, 16 nt, Human
gccaggaggacccagg

SEQ ID NO: 1433472 - RNA, 15 nt, Human
gccaggaggacccag

SEQ ID NO: 1433473 - RNA, 13 nt, Human
gccaggagcuggg

SEQ ID NO: 1433474 - RNA, 22 nt, Human
gccaggagcugggcagaaggcc

SEQ ID NO: 1433475 - RNA, 23 nt, Human
gccaggagcugggcagaaggcca

SEQ ID NO: 1433476 - RNA, 19 nt, Human
gccagccaagcucugcagu

SEQ ID NO: 1433477 - RNA, 16 nt, Human
gccagccaagcucugc

SEQ ID NO: 1433478 - RNA, 15 nt, Human
gccagccaagcucug

SEQ ID NO: 1433479 - RNA, 21 nt, Human
gccagccaagcucugcagucc

SEQ ID NO: 1433480 - RNA, 20 nt, Human
gccagccaagcucugcaguc

SEQ ID NO: 1433481 - RNA, 21 nt, Human
gccagccacggggacucagcc

SEQ ID NO: 1433482 - RNA, 23 nt, Human
gccaggccucucccuccuccagg

SEQ ID NO: 1433483 - RNA, 14 nt, Human
gccaggccucuccc

SEQ ID NO: 1433484 - RNA, 13 nt, Human
gccaggccgggaa

SEQ ID NO: 1433485 - RNA, 16 nt, Human
gcucugagaggcccug

SEQ ID NO: 1433486 - RNA, 15 nt, Human
gcucugagaggcccu

SEQ ID NO: 1433487 - RNA, 10 nt, Human
gcucugagaa

SEQ ID NO: 1433488 - RNA, 11 nt, Human
gcucugagaac

SEQ ID NO: 1433489 - RNA, 23 nt, Human
gcucugcaauuccccucugcugc

SEQ ID NO: 1433490 - RNA, 18 nt, Human
gcucugcaauuccccucu

SEQ ID NO: 1433491 - RNA, 21 nt, Human
gcucugagagucuagauucuc

SEQ ID NO: 1433492 - RNA, 20 nt, Human
gcucugagagucuagauucu

SEQ ID NO: 1433493 - RNA, 18 nt, Human
gcucugagagucuagauu

SEQ ID NO: 1433494 - RNA, 14 nt, Human
gcucugagagucua

SEQ ID NO: 1433495 - RNA, 13 nt, Human
gcucugagagucu

SEQ ID NO: 1433496 - RNA, 23 nt, Human
gcucugagaggcccuggaucagc

SEQ ID NO: 1433497 - RNA, 20 nt, Human
gcucugagaggcccuggauc

SEQ ID NO: 1433498 - RNA, 18 nt, Human
gcucugagaggcccugga

SEQ ID NO: 1433499 - RNA, 17 nt, Human
gcucugagaggcccugg

SEQ ID NO: 1433500 - RNA, 16 nt, Human
gcucuggaggggaggg

SEQ ID NO: 1433501 - RNA, 15 nt, Human
gcucuggaggggagg

SEQ ID NO: 1433502 - RNA, 13 nt, Human
gcucuggagggga

SEQ ID NO: 1433503 - RNA, 23 nt, Human
gcucuggagcccacuguacuugc

SEQ ID NO: 1433504 - RNA, 18 nt, Human
gcugagcucugagaggcc

SEQ ID NO: 1433505 - RNA, 17 nt, Human
gcugagcucugagaggc

SEQ ID NO: 1433506 - RNA, 16 nt, Human
gcugagcucugagagg

SEQ ID NO: 1433507 - RNA, 15 nt, Human
gcugagcucugagag

SEQ ID NO: 1433508 - RNA, 14 nt, Human
gcugagcucugaga

SEQ ID NO: 1433509 - RNA, 13 nt, Human
gcugagcucugag

SEQ ID NO: 1433510 - RNA, 14 nt, Human
gcugagcucucugu

SEQ ID NO: 1433511 - RNA, 23 nt, Human
gcugagcucacaaggcagcaagg

SEQ ID NO: 1433512 - RNA, 22 nt, Human
gcugagcucacaaggcagcaag

SEQ ID NO: 1433513 - RNA, 21 nt, Human
gcugagcucacaaggcagcaa

SEQ ID NO: 1433514 - RNA, 20 nt, Human
gcugagcucacaaggcagca

SEQ ID NO: 1433515 - RNA, 19 nt, Human
gcugagcucacaaggcagc

SEQ ID NO: 1433516 - RNA, 16 nt, Human
gcugagcucacaaggc

SEQ ID NO: 1433517 - RNA, 14 nt, Human
gcugagcgccagga

SEQ ID NO: 1433518 - RNA, 15 nt, Human
gcugaauguuuuucu

SEQ ID NO: 1433519 - RNA, 17 nt, Human
gcugaauguuuuucuaa

SEQ ID NO: 1433520 - RNA, 13 nt, Human
gcugaauguuuuu

SEQ ID NO: 1433521 - RNA, 23 nt, Human
gcugaauguugggacugcuaaau

SEQ ID NO: 1433522 - RNA, 20 nt, Human
gcugaauguugggacugcua

SEQ ID NO: 1433523 - RNA, 17 nt, Human
gcugaauguugggacug

SEQ ID NO: 1433524 - RNA, 16 nt, Human
gcugaauagcuucucc

SEQ ID NO: 1433525 - RNA, 19 nt, Human
gcugaauaggcgaucacaa

SEQ ID NO: 1433526 - RNA, 17 nt, Human
gcugaaauuuuauaugc

SEQ ID NO: 1433527 - RNA, 15 nt, Human
gcugaaauuuuauau

SEQ ID NO: 1433528 - RNA, 18 nt, Human
gcugaaauucuccuggag

SEQ ID NO: 1433529 - RNA, 17 nt, Human
gcugaaauucuccugga

SEQ ID NO: 1433530 - RNA, 16 nt, Human
gcugaaauucuccugg

SEQ ID NO: 1433531 - RNA, 15 nt, Human
gcugaaauucuccug

SEQ ID NO: 1433532 - RNA, 14 nt, Human
gcugaaauucuccu

SEQ ID NO: 1433533 - RNA, 14 nt, Human
gcucuucauguuuc

SEQ ID NO: 1433534 - RNA, 16 nt, Human
gcucuuagcagcuucc

SEQ ID NO: 1433535 - RNA, 13 nt, Human
gcucuuaauugcc

SEQ ID NO: 1433536 - RNA, 14 nt, Human
gcucuuaauugcca

SEQ ID NO: 1433537 - RNA, 18 nt, Human
gcucuuagcagcuuccag

SEQ ID NO: 1433538 - RNA, 17 nt, Human
gcucuuagcagcuucca

SEQ ID NO: 1433539 - RNA, 19 nt, Human
gcucuuagcagcuuccaga

SEQ ID NO: 1433540 - RNA, 18 nt, Human
gcucuggauaacaagacu

SEQ ID NO: 1433541 - RNA, 23 nt, Human
gcucuguucuuccucagccagcc

SEQ ID NO: 1433542 - RNA, 22 nt, Human
gcucuguucuuccucagccagc

SEQ ID NO: 1433543 - RNA, 21 nt, Human
gcucuguucuuccucagccag

SEQ ID NO: 1433544 - RNA, 20 nt, Human
gcucuguucuuccucagcca

SEQ ID NO: 1433545 - RNA, 19 nt, Human
gcucuguucuuccucagcc

SEQ ID NO: 1433546 - RNA, 18 nt, Human
gcucuguucuuccucagc

SEQ ID NO: 1433547 - RNA, 14 nt, Human
gcucuguucuuccu

SEQ ID NO: 1433548 - RNA, 15 nt, Human
gcucggaggaagccc

SEQ ID NO: 1433549 - RNA, 21 nt, Human
gcucgcuguugcugaauaggc

SEQ ID NO: 1433550 - RNA, 14 nt, Human
gcucgcuguugcug

SEQ ID NO: 1433551 - RNA, 16 nt, Human
gcucgcuguugcugaa

SEQ ID NO: 1433552 - RNA, 13 nt, Human
gcucgcucccugc

SEQ ID NO: 1433553 - RNA, 13 nt, Human
gcucgcuguugcu

SEQ ID NO: 1433554 - RNA, 23 nt, Human
gcuccugcuaacggugcucaggg

SEQ ID NO: 1433555 - RNA, 22 nt, Human
gcuccugcuaacggugcucagg

SEQ ID NO: 1433556 - RNA, 21 nt, Human
gcucggccugcccccacccca

SEQ ID NO: 1433557 - RNA, 17 nt, Human
gcucggccugcccccac

SEQ ID NO: 1433558 - RNA, 15 nt, Human
gcucggccugccccc

SEQ ID NO: 1433559 - RNA, 14 nt, Human
gcucggccugcccc

SEQ ID NO: 1433560 - RNA, 21 nt, Human
gcucuaacgccugagcccagg

SEQ ID NO: 1433561 - RNA, 20 nt, Human
gcucuaacgccugagcccag

SEQ ID NO: 1433562 - RNA, 16 nt, Human
gcucggggugcacagg

SEQ ID NO: 1433563 - RNA, 18 nt, Human
gcucuaacgccugagccc

SEQ ID NO: 1433564 - RNA, 12 nt, Human
gcucuaauacau

SEQ ID NO: 1433565 - RNA, 22 nt, Human
gcucuaacgccugagcccaggg

SEQ ID NO: 1433566 - RNA, 23 nt, Human
gcucuaacgccugagcccaggga

SEQ ID NO: 1433567 - RNA, 17 nt, Human
gcuccucugucucgagc

SEQ ID NO: 1433568 - RNA, 13 nt, Human
gcuccucugucuc

SEQ ID NO: 1433569 - RNA, 12 nt, Human
gcuccucugcuu

SEQ ID NO: 1433570 - RNA, 21 nt, Human
gcuccccuccccaacugacca

SEQ ID NO: 1433571 - RNA, 20 nt, Human
gcuccugaccaguugcaguc

SEQ ID NO: 1433572 - RNA, 19 nt, Human
gcuccugaccaguugcagu

SEQ ID NO: 1433573 - RNA, 15 nt, Human
gcuccugaccaguug

SEQ ID NO: 1433574 - RNA, 19 nt, Human
gcuccugacacugcuggag

SEQ ID NO: 1433575 - RNA, 18 nt, Human
gcuccugacacugcugga

SEQ ID NO: 1433576 - RNA, 17 nt, Human
gcuccugacacugcugg

SEQ ID NO: 1433577 - RNA, 16 nt, Human
gcuccugacacugcug

SEQ ID NO: 1433578 - RNA, 23 nt, Human
gcuccucuuccccagacgccugg

SEQ ID NO: 1433579 - RNA, 16 nt, Human
gcuccucuuccccaga

SEQ ID NO: 1433580 - RNA, 15 nt, Human
gcuccucuuccccag

SEQ ID NO: 1433581 - RNA, 14 nt, Human
gcuccucuucccca

SEQ ID NO: 1433582 - RNA, 22 nt, Human
gcuccucuuccaugcugugcgc

SEQ ID NO: 1433583 - RNA, 23 nt, Human
gcuccucugucucgagcgcccug

SEQ ID NO: 1433584 - RNA, 22 nt, Human
gcuccucugucucgagcgcccu

SEQ ID NO: 1433585 - RNA, 21 nt, Human
gcuccucugucucgagcgccc

SEQ ID NO: 1433586 - RNA, 12 nt, Human
gcuccugcccac

SEQ ID NO: 1433587 - RNA, 21 nt, Human
gcuccugaccaguugcaguca

SEQ ID NO: 1433588 - RNA, 24 nt, Human
gcuccugaccaguugcagucacuc

SEQ ID NO: 1433589 - RNA, 14 nt, Human
gcuccccuccccaa

SEQ ID NO: 1433590 - RNA, 19 nt, Human
gcuccccuaaagccucaaa

SEQ ID NO: 1433591 - RNA, 20 nt, Human
gcuccccacucugcucugau

SEQ ID NO: 1433592 - RNA, 22 nt, Human
gcuccccacucugcucugaugc

SEQ ID NO: 1433593 - RNA, 19 nt, Human
gcuccccacucugcucuga

SEQ ID NO: 1433594 - RNA, 18 nt, Human
gcuccccacucugcucug

SEQ ID NO: 1433595 - RNA, 17 nt, Human
gcuccccacucugcucu

SEQ ID NO: 1433596 - RNA, 16 nt, Human
gcuccccacucugcuc

SEQ ID NO: 1433597 - RNA, 14 nt, Human
gcuccccacucugc

SEQ ID NO: 1433598 - RNA, 17 nt, Human
gcucuacaucuucugcc

SEQ ID NO: 1433599 - RNA, 16 nt, Human
gcucuacaucuucugc

SEQ ID NO: 1433600 - RNA, 19 nt, Human
gcucuaauucacagugcuc

SEQ ID NO: 1433601 - RNA, 18 nt, Human
gcucuaauucacagugcu

SEQ ID NO: 1433602 - RNA, 16 nt, Human
gcucuaauucacagug

SEQ ID NO: 1433603 - RNA, 15 nt, Human
gcucuaauucacagu

SEQ ID NO: 1433604 - RNA, 17 nt, Human
gcucaggugcuggggcc

SEQ ID NO: 1433605 - RNA, 21 nt, Human
gcucaggucacauaaaacuuu

SEQ ID NO: 1433606 - RNA, 19 nt, Human
gcucaggucccuggggcua

SEQ ID NO: 1433607 - RNA, 21 nt, Human
gcucaggugcuggggccuggu

SEQ ID NO: 1433608 - RNA, 20 nt, Human
gcucacguccugagaaagcu

SEQ ID NO: 1433609 - RNA, 18 nt, Human
gcucaccuugugcugggg

SEQ ID NO: 1433610 - RNA, 14 nt, Human
gcucaggagcccug

SEQ ID NO: 1433611 - RNA, 15 nt, Human
gcucaggucccuggg

SEQ ID NO: 1433612 - RNA, 16 nt, Human
gcucagguacuuguaa

SEQ ID NO: 1433613 - RNA, 17 nt, Human
gcucagggggcgccugu

SEQ ID NO: 1433614 - RNA, 23 nt, Human
gcucagggccaugcugaggccug

SEQ ID NO: 1433615 - RNA, 21 nt, Human
gcucaggagcccugggaggcu

SEQ ID NO: 1433616 - RNA, 15 nt, Human
gcucaggagcccugg

SEQ ID NO: 1433617 - RNA, 18 nt, Human
gcucaggagcccugggag

SEQ ID NO: 1433618 - RNA, 15 nt, Human
gcuauuucaucuauu

SEQ ID NO: 1433619 - RNA, 14 nt, Human
gcuauuucaucuau

SEQ ID NO: 1433620 - RNA, 13 nt, Human
gcuauuuaaaacu

SEQ ID NO: 1433621 - RNA, 14 nt, Human
gcuauuuaaaacuu

SEQ ID NO: 1433622 - RNA, 13 nt, Human
gcuaugguuuucu

SEQ ID NO: 1433623 - RNA, 18 nt, Human
gcuauggugcucugucua

SEQ ID NO: 1433624 - RNA, 18 nt, Human
gcuaugucccaggaauca

SEQ ID NO: 1433625 - RNA, 19 nt, Human
gcuaggccagagcccacuc

SEQ ID NO: 1433626 - RNA, 17 nt, Human
gcuaggccagagcccac

SEQ ID NO: 1433627 - RNA, 16 nt, Human
gcuaggccagagccca

SEQ ID NO: 1433628 - RNA, 19 nt, Human
gcuaggagcaaagccuguu

SEQ ID NO: 1433629 - RNA, 18 nt, Human
gcuaggagcaaagccugu

SEQ ID NO: 1433630 - RNA, 17 nt, Human
gcuaggagcaaagccug

SEQ ID NO: 1433631 - RNA, 16 nt, Human
gcuaggagcaaagccu

SEQ ID NO: 1433632 - RNA, 15 nt, Human
gcuaggagcaaagcc

SEQ ID NO: 1433633 - RNA, 12 nt, Human
gcuaggaagagg

SEQ ID NO: 1433634 - RNA, 17 nt, Human
gcuaggaagaggagugg

SEQ ID NO: 1433635 - RNA, 20 nt, Human
gcuaggaagagcaggacucc

SEQ ID NO: 1433636 - RNA, 16 nt, Human
gccuguucauggcaga

SEQ ID NO: 1433637 - RNA, 15 nt, Human
gccuguucauggcag

SEQ ID NO: 1433638 - RNA, 21 nt, Human
gccuguuagcaugcuggugag

SEQ ID NO: 1433639 - RNA, 20 nt, Human
gccuguguucuuccuggccg

SEQ ID NO: 1433640 - RNA, 18 nt, Human
gccuguguucuuccuggc

SEQ ID NO: 1433641 - RNA, 17 nt, Human
gccuguguucuuccugg

SEQ ID NO: 1433642 - RNA, 14 nt, Human
gcugagggagccug

SEQ ID NO: 1433643 - RNA, 18 nt, Human
gcugaggcuggcacagga

SEQ ID NO: 1433644 - RNA, 16 nt, Human
gcugaggcuggcacag

SEQ ID NO: 1433645 - RNA, 15 nt, Human
gcugaggcuggcaca

SEQ ID NO: 1433646 - RNA, 18 nt, Human
gcugaggaggcaccuaca

SEQ ID NO: 1433647 - RNA, 16 nt, Human
gcugaggagcagcagg

SEQ ID NO: 1433648 - RNA, 12 nt, Human
gcugaggagcag

SEQ ID NO: 1433649 - RNA, 23 nt, Human
gcugagcucugagaggcccugga

SEQ ID NO: 1433650 - RNA, 22 nt, Human
gcugagcugcccacagcaggcc

SEQ ID NO: 1433651 - RNA, 22 nt, Human
gcugagcucugagaggcccugg

SEQ ID NO: 1433652 - RNA, 21 nt, Human
gcugagcucugagaggcccug

SEQ ID NO: 1433653 - RNA, 20 nt, Human
gcugagcucugagaggcccu

SEQ ID NO: 1433654 - RNA, 19 nt, Human
gcugagcucugagaggccc

SEQ ID NO: 1433655 - RNA, 20 nt, Human
gcugagggcaguucgcagcc

SEQ ID NO: 1433656 - RNA, 12 nt, Human
gcugagggcagu

SEQ ID NO: 1433657 - RNA, 22 nt, Human
gcugagggcaguucgcagccac

SEQ ID NO: 1433658 - RNA, 21 nt, Human
gcugagggcaguucgcagcca

SEQ ID NO: 1433659 - RNA, 13 nt, Human
gcugccaggagca

SEQ ID NO: 1433660 - RNA, 18 nt, Human
gcugccagcucuguauca

SEQ ID NO: 1433661 - RNA, 17 nt, Human
gcugccagcucuguauc

SEQ ID NO: 1433662 - RNA, 12 nt, Human
gcugccacugag

SEQ ID NO: 1433663 - RNA, 13 nt, Human
gcugccacugagg

SEQ ID NO: 1433664 - RNA, 22 nt, Human
gcugccguggggccgccgccuc

SEQ ID NO: 1433665 - RNA, 13 nt, Human
gcugccguggggc

SEQ ID NO: 1433666 - RNA, 19 nt, Human
gcugccggggcagcccccu

SEQ ID NO: 1433667 - RNA, 19 nt, Human
gcugccggucgcccuuugc

SEQ ID NO: 1433668 - RNA, 17 nt, Human
gcugccggggcagcccc

SEQ ID NO: 1433669 - RNA, 16 nt, Human
gcugccgcgcagugug

SEQ ID NO: 1433670 - RNA, 18 nt, Human
gcugccccaucagugcuc

SEQ ID NO: 1433671 - RNA, 17 nt, Human
gcugcccacagcaggcc

SEQ ID NO: 1433672 - RNA, 20 nt, Human
gcugccuagauucagggaaa

SEQ ID NO: 1433673 - RNA, 14 nt, Human
gcugccuggacccg

SEQ ID NO: 1433674 - RNA, 12 nt, Human
gcugccuggacc

SEQ ID NO: 1433675 - RNA, 20 nt, Human
gcugccuggaagagcagccc

SEQ ID NO: 1433676 - RNA, 17 nt, Human
gcugcugaucgccuucc

SEQ ID NO: 1433677 - RNA, 22 nt, Human
gcugcucggggugcacaggagg

SEQ ID NO: 1433678 - RNA, 21 nt, Human
gcugcucggggugcacaggag

SEQ ID NO: 1433679 - RNA, 20 nt, Human
gcugcucggggugcacagga

SEQ ID NO: 1433680 - RNA, 19 nt, Human
gcugcucggggugcacagg

SEQ ID NO: 1433681 - RNA, 18 nt, Human
gcugcucggggugcacag

SEQ ID NO: 1433682 - RNA, 13 nt, Human
gcugccuggaccc

SEQ ID NO: 1433683 - RNA, 18 nt, Human
gcugcugcccauguuuca

SEQ ID NO: 1433684 - RNA, 20 nt, Human
gcugcugaucgccuucccca

SEQ ID NO: 1433685 - RNA, 12 nt, Human
gcugcugccugc

SEQ ID NO: 1433686 - RNA, 22 nt, Human
gcugcugcucuuggcuggaccc

SEQ ID NO: 1433687 - RNA, 16 nt, Human
gcugcugccugccugg

SEQ ID NO: 1433688 - RNA, 13 nt, Human
gcugggcagaagg

SEQ ID NO: 1433689 - RNA, 19 nt, Human
gcugggcagaaggccaaga

SEQ ID NO: 1433690 - RNA, 14 nt, Human
gcuggagugcagug

SEQ ID NO: 1433691 - RNA, 16 nt, Human
gcugggucgcccugga

SEQ ID NO: 1433692 - RNA, 17 nt, Human
gcugggucgcccuggac

SEQ ID NO: 1433693 - RNA, 18 nt, Human
gcugggucgcccuggacu

SEQ ID NO: 1433694 - RNA, 16 nt, Human
gcuggguucauuugug

SEQ ID NO: 1433695 - RNA, 17 nt, Human
gcugggugguacccucu

SEQ ID NO: 1433696 - RNA, 19 nt, Human
gcugggucgcccuggacug

SEQ ID NO: 1433697 - RNA, 22 nt, Human
gcuggacucucagucucugagc

SEQ ID NO: 1433698 - RNA, 21 nt, Human
gcuggacucucagucucugag

SEQ ID NO: 1433699 - RNA, 14 nt, Human
gcuggaggagccca

SEQ ID NO: 1433700 - RNA, 13 nt, Human
gcuggaggagccc

SEQ ID NO: 1433701 - RNA, 21 nt, Human
gcuggaggagcccaggccagg

SEQ ID NO: 1433702 - RNA, 22 nt, Human
gcuggaggagcccaggccagga

SEQ ID NO: 1433703 - RNA, 20 nt, Human
gcuggaggagcccaggccag

SEQ ID NO: 1433704 - RNA, 17 nt, Human
gcuggaggagcccaggc

SEQ ID NO: 1433705 - RNA, 16 nt, Human
gcuggaggagcccagg

SEQ ID NO: 1433706 - RNA, 15 nt, Human
gcuggaggagcccag

SEQ ID NO: 1433707 - RNA, 12 nt, Human
gcuggagugcag

SEQ ID NO: 1433708 - RNA, 14 nt, Human
gcuuggggggugau

SEQ ID NO: 1433709 - RNA, 22 nt, Human
gcuuggggggugaugagggcag

SEQ ID NO: 1433710 - RNA, 17 nt, Human
gcuuggggcuggagagg

SEQ ID NO: 1433711 - RNA, 14 nt, Human
gcuuguacauaaug

SEQ ID NO: 1433712 - RNA, 16 nt, Human
gcuuguacauaaugcg

SEQ ID NO: 1433713 - RNA, 15 nt, Human
gcuugggauuugcug

SEQ ID NO: 1433714 - RNA, 17 nt, Human
gcuugggcagcaucccc

SEQ ID NO: 1433715 - RNA, 17 nt, Human
gcuugggauuugcugug

SEQ ID NO: 1433716 - RNA, 14 nt, Human
gcuugggauuugcu

SEQ ID NO: 1433717 - RNA, 15 nt, Human
gcuugggaauuuuau

SEQ ID NO: 1433718 - RNA, 20 nt, Human
gcuuggggcucacacaccug

SEQ ID NO: 1433719 - RNA, 16 nt, Human
gcuuggggcucacaca

SEQ ID NO: 1433720 - RNA, 19 nt, Human
gcuugggccuaggcugcau

SEQ ID NO: 1433721 - RNA, 21 nt, Human
gcuugggccuaggcugcauug

SEQ ID NO: 1433722 - RNA, 18 nt, Human
gcuugggccuaggcugca

SEQ ID NO: 1433723 - RNA, 14 nt, Human
gcuugggccuaggc

SEQ ID NO: 1433724 - RNA, 20 nt, Human
gcuucuugccucugugcugu

SEQ ID NO: 1433725 - RNA, 21 nt, Human
gcuucuugccucugugcugug

SEQ ID NO: 1433726 - RNA, 20 nt, Human
gcuucgggcccuucccacag

SEQ ID NO: 1433727 - RNA, 18 nt, Human
gcuucgggcccuucccac

SEQ ID NO: 1433728 - RNA, 19 nt, Human
gcuucuugccucugugcug

SEQ ID NO: 1433729 - RNA, 21 nt, Human
gcuucuuucuagaaagagaaa

SEQ ID NO: 1433730 - RNA, 15 nt, Human
gcuucuuucuagaaa

SEQ ID NO: 1433731 - RNA, 12 nt, Human
gcuucuuucuag

SEQ ID NO: 1433732 - RNA, 12 nt, Human
gcuucuuucuuu

SEQ ID NO: 1433733 - RNA, 18 nt, Human
gcuucuuucuuugggaau

SEQ ID NO: 1433734 - RNA, 23 nt, Human
gcuucuuucuuugggaauauuug

SEQ ID NO: 1433735 - RNA, 21 nt, Human
gcuugggaagacuccuagcug

SEQ ID NO: 1433736 - RNA, 22 nt, Human
gcuugggaaaggugguguuucu

SEQ ID NO: 1433737 - RNA, 18 nt, Human
gcuuggcgaugccagcca

SEQ ID NO: 1433738 - RNA, 19 nt, Human
gcuuggcgaugccagccaa

SEQ ID NO: 1433739 - RNA, 19 nt, Human
gcuugaaacccguggcgcu

SEQ ID NO: 1433740 - RNA, 17 nt, Human
gcuucccauccccagcg

SEQ ID NO: 1433741 - RNA, 18 nt, Human
gcuucccauccccagcga

SEQ ID NO: 1433742 - RNA, 16 nt, Human
gcuucccauccccagc

SEQ ID NO: 1433743 - RNA, 13 nt, Human
gcuucccaucccc

SEQ ID NO: 1433744 - RNA, 18 nt, Human
gcuucccaagggcugccg

SEQ ID NO: 1433745 - RNA, 14 nt, Human
gcuucccuaaucua

SEQ ID NO: 1433746 - RNA, 13 nt, Human
gcuucccuaaucu

SEQ ID NO: 1433747 - RNA, 17 nt, Human
gcuuccuucauuuccuc

SEQ ID NO: 1433748 - RNA, 14 nt, Human
gcuuccuucauuuc

SEQ ID NO: 1433749 - RNA, 16 nt, Human
gcuucccugaagcucc

SEQ ID NO: 1433750 - RNA, 15 nt, Human
gcuucccugaagcuc

SEQ ID NO: 1433751 - RNA, 13 nt, Human
gcuucccugaagc

SEQ ID NO: 1433752 - RNA, 18 nt, Human
gcuucccugacucauucu

SEQ ID NO: 1433753 - RNA, 14 nt, Human
gcuucccugacuca

SEQ ID NO: 1433754 - RNA, 14 nt, Human
gcuucccuuuccug

SEQ ID NO: 1433755 - RNA, 14 nt, Human
gcuuaacuucacau

SEQ ID NO: 1433756 - RNA, 18 nt, Human
gcuuaaaauacaagacug

SEQ ID NO: 1433757 - RNA, 14 nt, Human
gcuuaaaauacaag

SEQ ID NO: 1433758 - RNA, 13 nt, Human
gcuuaaaauacaa

SEQ ID NO: 1433759 - RNA, 12 nt, Human
gcuuaaaauaca

SEQ ID NO: 1433760 - RNA, 21 nt, Human
gcuuaaaauaagcagguggau

SEQ ID NO: 1433761 - RNA, 17 nt, Human
gcuuaaaauaagcaggu

SEQ ID NO: 1433762 - RNA, 22 nt, Human
gcuuaaacccauauuguaaaac

SEQ ID NO: 1433763 - RNA, 14 nt, Human
gcuucagccaggag

SEQ ID NO: 1433764 - RNA, 18 nt, Human
gcuuaaaacuuugaaguu

SEQ ID NO: 1433765 - RNA, 13 nt, Human
gcuuaaaacuuug

SEQ ID NO: 1433766 - RNA, 12 nt, Human
gcuuaaaacuuu

SEQ ID NO: 1433767 - RNA, 14 nt, Human
gcuguggccaggag

SEQ ID NO: 1433768 - RNA, 13 nt, Human
gcuguggccagga

SEQ ID NO: 1433769 - RNA, 12 nt, Human
gcuguggccagg

SEQ ID NO: 1433770 - RNA, 21 nt, Human
gcuguggcaugggugaagagg

SEQ ID NO: 1433771 - RNA, 23 nt, Human
gcuguggcaggccagcugugguu

SEQ ID NO: 1433772 - RNA, 14 nt, Human
gcuguggcaggcca

SEQ ID NO: 1433773 - RNA, 22 nt, Human
gcuguggaccauggaguggcag

SEQ ID NO: 1433774 - RNA, 17 nt, Human
gcugugcuuaugguacc

SEQ ID NO: 1433775 - RNA, 22 nt, Human
gcugugaccugcugagcucuga

SEQ ID NO: 1433776 - RNA, 23 nt, Human
gcugugaccugcugagcucugag

SEQ ID NO: 1433777 - RNA, 20 nt, Human
gcugugaccugcugagcucu

SEQ ID NO: 1433778 - RNA, 19 nt, Human
gcugugaccugcugagcuc

SEQ ID NO: 1433779 - RNA, 18 nt, Human
gcugugaccugcugagcu

SEQ ID NO: 1433780 - RNA, 17 nt, Human
gcugugaccugcugagc

SEQ ID NO: 1433781 - RNA, 16 nt, Human
gcugugaccugcugag

SEQ ID NO: 1433782 - RNA, 15 nt, Human
gcugugaccugcuga

SEQ ID NO: 1433783 - RNA, 14 nt, Human
gcugugaccugcug

SEQ ID NO: 1433784 - RNA, 13 nt, Human
gcugugaccugcu

SEQ ID NO: 1433785 - RNA, 12 nt, Human
gcugugaccugc

SEQ ID NO: 1433786 - RNA, 15 nt, Human
gcuguaacugccagg

SEQ ID NO: 1433787 - RNA, 21 nt, Human
gcuguaacuacuuuauaacua

SEQ ID NO: 1433788 - RNA, 12 nt, Human
gcuguacacugc

SEQ ID NO: 1433789 - RNA, 16 nt, Human
gcuguacacugcacga

SEQ ID NO: 1433790 - RNA, 19 nt, Human
gcuguaauguuaauauuga

SEQ ID NO: 1433791 - RNA, 22 nt, Human
gcuguaaucuaugaauucuaag

SEQ ID NO: 1433792 - RNA, 23 nt, Human
gcuguaaggcucuagaucauaag

SEQ ID NO: 1433793 - RNA, 17 nt, Human
gcuguaaggcucuagau

SEQ ID NO: 1433794 - RNA, 16 nt, Human
gcuguaaggcucuaga

SEQ ID NO: 1433795 - RNA, 15 nt, Human
gcuguaaggcucuag

SEQ ID NO: 1433796 - RNA, 13 nt, Human
gcuguaaggcucu

SEQ ID NO: 1433797 - RNA, 23 nt, Human
gcuguaaggauccggaaagaaga

SEQ ID NO: 1433798 - RNA, 17 nt, Human
gcuguauuaagccacuu

SEQ ID NO: 1433799 - RNA, 13 nt, Human
ggcaggcugggcc

SEQ ID NO: 1433800 - RNA, 12 nt, Human
ggcaggcugggc

SEQ ID NO: 1433801 - RNA, 20 nt, Human
ggcaggcuggccaguccagg

SEQ ID NO: 1433802 - RNA, 17 nt, Human
ggcaggcuggccagucc

SEQ ID NO: 1433803 - RNA, 13 nt, Human
ggcaggcuggcca

SEQ ID NO: 1433804 - RNA, 12 nt, Human
ggcaggcuggcc

SEQ ID NO: 1433805 - RNA, 11 nt, Human
ggcaggcuggc

SEQ ID NO: 1433806 - RNA, 10 nt, Human
ggcaggcugg

SEQ ID NO: 1433807 - RNA, 15 nt, Human
ggcaggccagcugug

SEQ ID NO: 1433808 - RNA, 19 nt, Human
ggcaggccaccuggcucuc

SEQ ID NO: 1433809 - RNA, 18 nt, Human
ggcaggccaccuggcucu

SEQ ID NO: 1433810 - RNA, 15 nt, Human
ggcaggccaccuggc

SEQ ID NO: 1433811 - RNA, 22 nt, Human
ggcaggcagggcucuccuggcu

SEQ ID NO: 1433812 - RNA, 23 nt, Human
ggcaggcagggcucuccuggcuu

SEQ ID NO: 1433813 - RNA, 12 nt, Human
ggcagccucugg

SEQ ID NO: 1433814 - RNA, 22 nt, Human
ggcagccucccauccagggccc

SEQ ID NO: 1433815 - RNA, 21 nt, Human
ggcagccucccauccagggcc

SEQ ID NO: 1433816 - RNA, 14 nt, Human
ggcagccucccauc

SEQ ID NO: 1433817 - RNA, 22 nt, Human
ggcagccgugggccccacccuc

SEQ ID NO: 1433818 - RNA, 17 nt, Human
ggcaggcagaggcccag

SEQ ID NO: 1433819 - RNA, 23 nt, Human
ggcaggaccuucgggcugugccc

SEQ ID NO: 1433820 - RNA, 21 nt, Human
ggcaggaccuucgggcugugc

SEQ ID NO: 1433821 - RNA, 18 nt, Human
ggcaggcaggcucccagg

SEQ ID NO: 1433822 - RNA, 20 nt, Human
ggcaggcagaggcccaggcu

SEQ ID NO: 1433823 - RNA, 23 nt, Human
ggcaggcagaggcccaggcugcc

SEQ ID NO: 1433824 - RNA, 19 nt, Human
ggcaggcagggcucuccug

SEQ ID NO: 1433825 - RNA, 15 nt, Human
ggcaggcagggcucu

SEQ ID NO: 1433826 - RNA, 14 nt, Human
ggcaggcagggcuc

SEQ ID NO: 1433827 - RNA, 13 nt, Human
ggcaggcagggcu

SEQ ID NO: 1433828 - RNA, 23 nt, Human
ggcaggcaucggggagccgggag

SEQ ID NO: 1433829 - RNA, 13 nt, Human
ggcagccagggag

SEQ ID NO: 1433830 - RNA, 12 nt, Human
ggcagccaggga

SEQ ID NO: 1433831 - RNA, 18 nt, Human
ggcagagaugccucccug

SEQ ID NO: 1433832 - RNA, 22 nt, Human
ggcagagaugccucccugagcu

SEQ ID NO: 1433833 - RNA, 16 nt, Human
ggcagagaugccuccc

SEQ ID NO: 1433834 - RNA, 20 nt, Human
ggcagccagggagagcccag

SEQ ID NO: 1433835 - RNA, 19 nt, Human
ggcagccagggagagccca

SEQ ID NO: 1433836 - RNA, 18 nt, Human
ggcagccagggagagccc

SEQ ID NO: 1433837 - RNA, 17 nt, Human
ggcagccagggagagcc

SEQ ID NO: 1433838 - RNA, 17 nt, Human
ggcagaaguguuuuuua

SEQ ID NO: 1433839 - RNA, 16 nt, Human
ggcagaaggccaagag

SEQ ID NO: 1433840 - RNA, 17 nt, Human
ggcagaaggcaaaccca

SEQ ID NO: 1433841 - RNA, 22 nt, Human
ggcagacucuuuaugcuugcaa

SEQ ID NO: 1433842 - RNA, 20 nt, Human
ggcagacucuuuaugcuugc

SEQ ID NO: 1433843 - RNA, 19 nt, Human
ggcagacucuuuaugcuug

SEQ ID NO: 1433844 - RNA, 20 nt, Human
ggcagagaagaaagaacgga

SEQ ID NO: 1433845 - RNA, 14 nt, Human
ggcaacacagaggc

SEQ ID NO: 1433846 - RNA, 19 nt, Human
ggcaacaaaagaagcccgg

SEQ ID NO: 1433847 - RNA, 16 nt, Human
ggcaaauaucuugaaa

SEQ ID NO: 1433848 - RNA, 12 nt, Human
ggcaaauaaaag

SEQ ID NO: 1433849 - RNA, 19 nt, Human
ggcaaaggaagguggaugg

SEQ ID NO: 1433850 - RNA, 17 nt, Human
ggcaaaggaagguggau

SEQ ID NO: 1433851 - RNA, 16 nt, Human
ggcaaaggaaggugga

SEQ ID NO: 1433852 - RNA, 11 nt, Human
ggcaaagccag

SEQ ID NO: 1433853 - RNA, 14 nt, Human
ggcaaagccagguc

SEQ ID NO: 1433854 - RNA, 22 nt, Human
ggcaaagcacgaaauguuauuu

SEQ ID NO: 1433855 - RNA, 13 nt, Human
ggcaaacccauca

SEQ ID NO: 1433856 - RNA, 13 nt, Human
ggcaaaauugcaa

SEQ ID NO: 1433857 - RNA, 16 nt, Human
ggcaaaauccuugcuu

SEQ ID NO: 1433858 - RNA, 12 nt, Human
ggauuuucagcc

SEQ ID NO: 1433859 - RNA, 18 nt, Human
ggauuaaccucugcacua

SEQ ID NO: 1433860 - RNA, 17 nt, Human
ggauuaaccucugcacu

SEQ ID NO: 1433861 - RNA, 16 nt, Human
ggauuaaccucugcac

SEQ ID NO: 1433862 - RNA, 15 nt, Human
ggauuaaccucugca

SEQ ID NO: 1433863 - RNA, 20 nt, Human
ggauuaacccacuagcucuu

SEQ ID NO: 1433864 - RNA, 23 nt, Human
ggauuaaacuuaaucuaaaugga

SEQ ID NO: 1433865 - RNA, 23 nt, Human
ggaugagaauuugagugcucuga

SEQ ID NO: 1433866 - RNA, 21 nt, Human
ggaugagaauuugagugcucu

SEQ ID NO: 1433867 - RNA, 15 nt, Human
ggauguguccugaca

SEQ ID NO: 1433868 - RNA, 14 nt, Human
ggauguguccugac

SEQ ID NO: 1433869 - RNA, 19 nt, Human
ggauguggguuccacagac

SEQ ID NO: 1433870 - RNA, 16 nt, Human
ggaugugacaguggcg

SEQ ID NO: 1433871 - RNA, 18 nt, Human
ggaugugauuguggaaug

SEQ ID NO: 1433872 - RNA, 15 nt, Human
ggaugugacaguggc

SEQ ID NO: 1433873 - RNA, 23 nt, Human
ggauguucagcacugucccuugc

SEQ ID NO: 1433874 - RNA, 20 nt, Human
ggauguucagcacugucccu

SEQ ID NO: 1433875 - RNA, 16 nt, Human
ggauguguccugacac

SEQ ID NO: 1433876 - RNA, 23 nt, Human
ggaugguucccuugaugaagaag

SEQ ID NO: 1433877 - RNA, 22 nt, Human
ggaugguucccuugaugaagaa

SEQ ID NO: 1433878 - RNA, 20 nt, Human
ggcaacagaucaguaaagaa

SEQ ID NO: 1433879 - RNA, 14 nt, Human
ggcaacaucuuuau

SEQ ID NO: 1433880 - RNA, 19 nt, Human
ggcaacagaucuggaaccu

SEQ ID NO: 1433881 - RNA, 15 nt, Human
ggcaacagaucugga

SEQ ID NO: 1433882 - RNA, 14 nt, Human
ggcaacagaucugg

SEQ ID NO: 1433883 - RNA, 18 nt, Human
ggcaacagaucaguaaag

SEQ ID NO: 1433884 - RNA, 22 nt, Human
ggccccaggcauugccaagggc

SEQ ID NO: 1433885 - RNA, 21 nt, Human
ggccccaggaccuggcugcca

SEQ ID NO: 1433886 - RNA, 16 nt, Human
ggccccaggaccuggc

SEQ ID NO: 1433887 - RNA, 18 nt, Human
ggccccaggaaaggccca

SEQ ID NO: 1433888 - RNA, 18 nt, Human
ggccccaacccuguccuc

SEQ ID NO: 1433889 - RNA, 19 nt, Human
ggccccaacccuguccucc

SEQ ID NO: 1433890 - RNA, 21 nt, Human
ggcccaucaggguaggcugga

SEQ ID NO: 1433891 - RNA, 15 nt, Human
ggcccagggcccaga

SEQ ID NO: 1433892 - RNA, 22 nt, Human
ggcccucccuguuccccagaga

SEQ ID NO: 1433893 - RNA, 21 nt, Human
ggcccucccuguuccccagag

SEQ ID NO: 1433894 - RNA, 20 nt, Human
ggcccucccuguuccccaga

SEQ ID NO: 1433895 - RNA, 19 nt, Human
ggcccucccuguuccccag

SEQ ID NO: 1433896 - RNA, 19 nt, Human
ggcccuccacaccugcggc

SEQ ID NO: 1433897 - RNA, 21 nt, Human
ggcccuccacaccugcggccc

SEQ ID NO: 1433898 - RNA, 17 nt, Human
ggcccuccacaccugcg

SEQ ID NO: 1433899 - RNA, 16 nt, Human
ggcccuccacaccugc

SEQ ID NO: 1433900 - RNA, 15 nt, Human
ggcccuccacaccug

SEQ ID NO: 1433901 - RNA, 14 nt, Human
ggcccuccacaccu

SEQ ID NO: 1433902 - RNA, 21 nt, Human
ggcccucaguagucccugcac

SEQ ID NO: 1433903 - RNA, 23 nt, Human
ggcccgcgauguggaacugcugc

SEQ ID NO: 1433904 - RNA, 22 nt, Human
ggcccgagcagcugagcagggc

SEQ ID NO: 1433905 - RNA, 23 nt, Human
ggcccgagcagcugagcagggcc

SEQ ID NO: 1433906 - RNA, 20 nt, Human
ggcccgagcagcugagcagg

SEQ ID NO: 1433907 - RNA, 18 nt, Human
ggcccgagcagcugagca

SEQ ID NO: 1433908 - RNA, 16 nt, Human
ggcccgagcagcugag

SEQ ID NO: 1433909 - RNA, 15 nt, Human
ggcccgagcagcuga

SEQ ID NO: 1433910 - RNA, 14 nt, Human
ggcccgagcagcug

SEQ ID NO: 1433911 - RNA, 13 nt, Human
ggcccgagcagcu

SEQ ID NO: 1433912 - RNA, 18 nt, Human
ggccccaugaccuccagc

SEQ ID NO: 1433913 - RNA, 16 nt, Human
ggccccaugaccucca

SEQ ID NO: 1433914 - RNA, 14 nt, Human
ggccccaugaccuc

SEQ ID NO: 1433915 - RNA, 14 nt, Human
ggcccagggcccag

SEQ ID NO: 1433916 - RNA, 15 nt, Human
ggcccaggcugccgu

SEQ ID NO: 1433917 - RNA, 14 nt, Human
ggcccaggcuggga

SEQ ID NO: 1433918 - RNA, 13 nt, Human
ggcccaggcugcc

SEQ ID NO: 1433919 - RNA, 11 nt, Human
ggcccaggcug

SEQ ID NO: 1433920 - RNA, 19 nt, Human
ggcccagccuuuguucccc

SEQ ID NO: 1433921 - RNA, 23 nt, Human
ggcccagccuuuguuccccacug

SEQ ID NO: 1433922 - RNA, 12 nt, Human
ggcccagccuuu

SEQ ID NO: 1433923 - RNA, 11 nt, Human
ggcccagccuu

SEQ ID NO: 1433924 - RNA, 19 nt, Human
ggcccagccgacccccucu

SEQ ID NO: 1433925 - RNA, 18 nt, Human
ggcccagccgacccccuc

SEQ ID NO: 1433926 - RNA, 16 nt, Human
ggcccagccgaccccc

SEQ ID NO: 1433927 - RNA, 21 nt, Human
ggccuccguccaggagccugg

SEQ ID NO: 1433928 - RNA, 15 nt, Human
ggccucccccacuuu

SEQ ID NO: 1433929 - RNA, 22 nt, Human
ggccuccccugccaccaggcca

SEQ ID NO: 1433930 - RNA, 19 nt, Human
ggccuccccugccaccagg

SEQ ID NO: 1433931 - RNA, 17 nt, Human
ggccuccccugccacca

SEQ ID NO: 1433932 - RNA, 15 nt, Human
ggccuccccugccac

SEQ ID NO: 1433933 - RNA, 14 nt, Human
ggccucccccacuu

SEQ ID NO: 1433934 - RNA, 13 nt, Human
ggccucccccacu

SEQ ID NO: 1433935 - RNA, 12 nt, Human
ggccucccccac

SEQ ID NO: 1433936 - RNA, 11 nt, Human
ggccuccccca

SEQ ID NO: 1433937 - RNA, 18 nt, Human
ggccuccaugggccccag

SEQ ID NO: 1433938 - RNA, 23 nt, Human
ggcccuuccuggacagcugugcc

SEQ ID NO: 1433939 - RNA, 22 nt, Human
ggcccuuccuggacagcugugc

SEQ ID NO: 1433940 - RNA, 21 nt, Human
ggcccuuccuggacagcugug

SEQ ID NO: 1433941 - RNA, 20 nt, Human
ggcccuuccuggacagcugu

SEQ ID NO: 1433942 - RNA, 19 nt, Human
ggcccuuccuggacagcug

SEQ ID NO: 1433943 - RNA, 17 nt, Human
ggcccuuccuggacagc

SEQ ID NO: 1433944 - RNA, 16 nt, Human
ggcccuuccuggacag

SEQ ID NO: 1433945 - RNA, 15 nt, Human
ggcccuuccuggaca

SEQ ID NO: 1433946 - RNA, 14 nt, Human
ggcccuuccuggac

SEQ ID NO: 1433947 - RNA, 13 nt, Human
ggcccuuccugga

SEQ ID NO: 1433948 - RNA, 12 nt, Human
ggcccuuccugg

SEQ ID NO: 1433949 - RNA, 23 nt, Human
ggcccucccuguuccccagagaa

SEQ ID NO: 1433950 - RNA, 16 nt, Human
ggccucccaaagugcu

SEQ ID NO: 1433951 - RNA, 19 nt, Human
ggccuccaugggccccagg

SEQ ID NO: 1433952 - RNA, 19 nt, Human
ggcauucuggaccucuggg

SEQ ID NO: 1433953 - RNA, 20 nt, Human
ggcauucuggaccucugggu

SEQ ID NO: 1433954 - RNA, 18 nt, Human
ggcauucuggaccucugg

SEQ ID NO: 1433955 - RNA, 21 nt, Human
ggccaaaggggaccuggaagg

SEQ ID NO: 1433956 - RNA, 20 nt, Human
ggccaaaggggaccuggaag

SEQ ID NO: 1433957 - RNA, 19 nt, Human
ggccaaaggggaccuggaa

SEQ ID NO: 1433958 - RNA, 16 nt, Human
ggccaaagagucucca

SEQ ID NO: 1433959 - RNA, 17 nt, Human
ggccaaagaaccaaaga

SEQ ID NO: 1433960 - RNA, 22 nt, Human
ggccaaagaaccaaagaagaaa

SEQ ID NO: 1433961 - RNA, 11 nt, Human
ggccaaagaac

SEQ ID NO: 1433962 - RNA, 22 nt, Human
ggccagccgcgcaucagacugu

SEQ ID NO: 1433963 - RNA, 21 nt, Human
ggccagccccuuagacagagg

SEQ ID NO: 1433964 - RNA, 23 nt, Human
ggccagccccuuagacagaggcc

SEQ ID NO: 1433965 - RNA, 20 nt, Human
ggccagccccuuagacagag

SEQ ID NO: 1433966 - RNA, 19 nt, Human
ggccagccccuuagacaga

SEQ ID NO: 1433967 - RNA, 15 nt, Human
ggccagccccuuaga

SEQ ID NO: 1433968 - RNA, 16 nt, Human
ggccagauccagccug

SEQ ID NO: 1433969 - RNA, 13 nt, Human
ggccagauccagc

SEQ ID NO: 1433970 - RNA, 12 nt, Human
ggccagauccag

SEQ ID NO: 1433971 - RNA, 19 nt, Human
ggccaagguguccuacaga

SEQ ID NO: 1433972 - RNA, 15 nt, Human
ggccaagguguccua

SEQ ID NO: 1433973 - RNA, 14 nt, Human
ggccaacaaagaac

SEQ ID NO: 1433974 - RNA, 21 nt, Human
ggccaguccaggcugccgugg

SEQ ID NO: 1433975 - RNA, 21 nt, Human
ggccagccgcgcaucagacug

SEQ ID NO: 1433976 - RNA, 16 nt, Human
ggccaguccaggcugc

SEQ ID NO: 1433977 - RNA, 15 nt, Human
ggccaguccaggcug

SEQ ID NO: 1433978 - RNA, 14 nt, Human
ggccaguccaggcu

SEQ ID NO: 1433979 - RNA, 11 nt, Human
ggaggaagccc

SEQ ID NO: 1433980 - RNA, 16 nt, Human
ggaggcaucagugucc

SEQ ID NO: 1433981 - RNA, 21 nt, Human
ggaggcaggggcuuccuggug

SEQ ID NO: 1433982 - RNA, 19 nt, Human
ggaggcaggggcuuccugg

SEQ ID NO: 1433983 - RNA, 20 nt, Human
ggagcuuugacucaggagcc

SEQ ID NO: 1433984 - RNA, 22 nt, Human
ggagcuuugacucaggagccug

SEQ ID NO: 1433985 - RNA, 19 nt, Human
ggaggaaccagagugcuga

SEQ ID NO: 1433986 - RNA, 13 nt, Human
ggaggcccaguuc

SEQ ID NO: 1433987 - RNA, 20 nt, Human
ggaggcccaggcugggaacu

SEQ ID NO: 1433988 - RNA, 16 nt, Human
ggaggcccaggcuggg

SEQ ID NO: 1433989 - RNA, 14 nt, Human
ggaggcccaggcug

SEQ ID NO: 1433990 - RNA, 17 nt, Human
ggaggccauugugugag

SEQ ID NO: 1433991 - RNA, 17 nt, Human
ggaggcucuggagccca

SEQ ID NO: 1433992 - RNA, 20 nt, Human
ggaggcucuggagcccacug

SEQ ID NO: 1433993 - RNA, 19 nt, Human
ggagcuuugacucaggagc

SEQ ID NO: 1433994 - RNA, 16 nt, Human
ggagcuuugacucagg

SEQ ID NO: 1433995 - RNA, 15 nt, Human
ggagcuugggaaugg

SEQ ID NO: 1433996 - RNA, 17 nt, Human
ggagcuccccuccccaa

SEQ ID NO: 1433997 - RNA, 16 nt, Human
ggagcuccccucccca

SEQ ID NO: 1433998 - RNA, 13 nt, Human
ggagcuccccucc

SEQ ID NO: 1433999 - RNA, 20 nt, Human
ggagcuccaguguccugagc

SEQ ID NO: 1434000 - RNA, 19 nt, Human
ggagcuccaguguccugag

SEQ ID NO: 1434001 - RNA, 17 nt, Human
ggagcuccaguguccug

SEQ ID NO: 1434002 - RNA, 18 nt, Human
ggagcuccagccugacau

SEQ ID NO: 1434003 - RNA, 16 nt, Human
ggagcuccagccugac

SEQ ID NO: 1434004 - RNA, 15 nt, Human
ggagcuccagccuga

SEQ ID NO: 1434005 - RNA, 13 nt, Human
ggagcuccagccu

SEQ ID NO: 1434006 - RNA, 15 nt, Human
ggagcccccacccug

SEQ ID NO: 1434007 - RNA, 20 nt, Human
ggagcuccacucugcuucuc

SEQ ID NO: 1434008 - RNA, 14 nt, Human
ggagcccccacccu

SEQ ID NO: 1434009 - RNA, 17 nt, Human
ggagccccauuccuggg

SEQ ID NO: 1434010 - RNA, 16 nt, Human
ggagccccauuccugg

SEQ ID NO: 1434011 - RNA, 18 nt, Human
ggagccccagcuacccuu

SEQ ID NO: 1434012 - RNA, 17 nt, Human
ggagccccagcuacccu

SEQ ID NO: 1434013 - RNA, 20 nt, Human
ggagcccacgcucacccccu

SEQ ID NO: 1434014 - RNA, 12 nt, Human
ggagcccacugu

SEQ ID NO: 1434015 - RNA, 18 nt, Human
ggagcccacuguacuugc

SEQ ID NO: 1434016 - RNA, 21 nt, Human
ggagcccacgacacugcagcc

SEQ ID NO: 1434017 - RNA, 17 nt, Human
ggagcccacgacacugc

SEQ ID NO: 1434018 - RNA, 14 nt, Human
ggagccauuugaga

SEQ ID NO: 1434019 - RNA, 22 nt, Human
ggagcccacuguacuugcucuu

SEQ ID NO: 1434020 - RNA, 18 nt, Human
ggagguguggagccgagg

SEQ ID NO: 1434021 - RNA, 22 nt, Human
ggaggugucucaggcugccuga

SEQ ID NO: 1434022 - RNA, 20 nt, Human
ggaggugucucaggcugccu

SEQ ID NO: 1434023 - RNA, 18 nt, Human
ggaggugucucaggcugc

SEQ ID NO: 1434024 - RNA, 23 nt, Human
ggagguucuaaggccuaggauuc

SEQ ID NO: 1434025 - RNA, 12 nt, Human
ggagguucuaag

SEQ ID NO: 1434026 - RNA, 17 nt, Human
ggaggugucucaggcug

SEQ ID NO: 1434027 - RNA, 16 nt, Human
ggaggugucucaggcu

SEQ ID NO: 1434028 - RNA, 13 nt, Human
ggaggugucucag

SEQ ID NO: 1434029 - RNA, 18 nt, Human
ggaggucgguagguucag

SEQ ID NO: 1434030 - RNA, 22 nt, Human
ggaggcccaggcugggaacuca

SEQ ID NO: 1434031 - RNA, 19 nt, Human
ggaggcccaguucacccug

SEQ ID NO: 1434032 - RNA, 21 nt, Human
ggaggcucuggagcccacugu

SEQ ID NO: 1434033 - RNA, 21 nt, Human
ggagcagcaggaggggggagg

SEQ ID NO: 1434034 - RNA, 19 nt, Human
ggagcagcaggagggggga

SEQ ID NO: 1434035 - RNA, 12 nt, Human
ggagcagcagga

SEQ ID NO: 1434036 - RNA, 21 nt, Human
ggagcagaggggcagaggccc

SEQ ID NO: 1434037 - RNA, 19 nt, Human
ggagcagaggggcagaggc

SEQ ID NO: 1434038 - RNA, 12 nt, Human
ggagcagagggg

SEQ ID NO: 1434039 - RNA, 23 nt, Human
ggagcagagcugauggagaagga

SEQ ID NO: 1434040 - RNA, 13 nt, Human
ggagcaggcagcc

SEQ ID NO: 1434041 - RNA, 16 nt, Human
ggagcaggcagccagc

SEQ ID NO: 1434042 - RNA, 23 nt, Human
ggagccaugcgcccccuccgccc

SEQ ID NO: 1434043 - RNA, 22 nt, Human
ggagccaugcgcccccuccgcc

SEQ ID NO: 1434044 - RNA, 13 nt, Human
ggagccagggcug

SEQ ID NO: 1434045 - RNA, 15 nt, Human
ggagcccacuguacu

SEQ ID NO: 1434046 - RNA, 14 nt, Human
ggagcagaagcagc

SEQ ID NO: 1434047 - RNA, 23 nt, Human
ggagcagaaaacccuugggccag

SEQ ID NO: 1434048 - RNA, 15 nt, Human
ggagcagaccacccc

SEQ ID NO: 1434049 - RNA, 19 nt, Human
ggagcagagcugauggaga

SEQ ID NO: 1434050 - RNA, 22 nt, Human
ggagagccaccaagagggacgc

SEQ ID NO: 1434051 - RNA, 20 nt, Human
ggagagaguugaaccuaaac

SEQ ID NO: 1434052 - RNA, 17 nt, Human
ggagagaguugaaccua

SEQ ID NO: 1434053 - RNA, 12 nt, Human
ggagagacuugu

SEQ ID NO: 1434054 - RNA, 22 nt, Human
ggagacuuagggcaccaggggu

SEQ ID NO: 1434055 - RNA, 17 nt, Human
ggagagacgggcccugg

SEQ ID NO: 1434056 - RNA, 15 nt, Human
ggagagacgggcccu

SEQ ID NO: 1434057 - RNA, 13 nt, Human
ggagagcccuggg

SEQ ID NO: 1434058 - RNA, 14 nt, Human
ggagagcccuggga

SEQ ID NO: 1434059 - RNA, 12 nt, Human
ggagagcccugg

SEQ ID NO: 1434060 - RNA, 11 nt, Human
ggagagcccug

SEQ ID NO: 1434061 - RNA, 22 nt, Human
ggagagcccaggagcuccccuc

SEQ ID NO: 1434062 - RNA, 21 nt, Human
ggagagcccaggagcuccccu

SEQ ID NO: 1434063 - RNA, 20 nt, Human
ggagagcccaggagcucccc

SEQ ID NO: 1434064 - RNA, 15 nt, Human
ggagagcccaggagc

SEQ ID NO: 1434065 - RNA, 13 nt, Human
ggagagcccagga

SEQ ID NO: 1434066 - RNA, 12 nt, Human
ggagagcccagg

SEQ ID NO: 1434067 - RNA, 21 nt, Human
ggagagccagcuaaggggugg

SEQ ID NO: 1434068 - RNA, 13 nt, Human
ggaccucaccaag

SEQ ID NO: 1434069 - RNA, 23 nt, Human
ggaccuagggaggcauggucugc

SEQ ID NO: 1434070 - RNA, 22 nt, Human
ggaccuagggaggcauggucug

SEQ ID NO: 1434071 - RNA, 17 nt, Human
ggaccuagggaggcaug

SEQ ID NO: 1434072 - RNA, 18 nt, Human
ggaccggagagugggggu

SEQ ID NO: 1434073 - RNA, 20 nt, Human
ggacuauauuugggccugcu

SEQ ID NO: 1434074 - RNA, 21 nt, Human
ggacuuccuguccagcuccaa

SEQ ID NO: 1434075 - RNA, 20 nt, Human
ggacuuccuguccagcucca

SEQ ID NO: 1434076 - RNA, 19 nt, Human
ggacuuccuguccagcucc

SEQ ID NO: 1434077 - RNA, 18 nt, Human
ggacuuccuguccagcuc

SEQ ID NO: 1434078 - RNA, 11 nt, Human
ggacuuccugu

SEQ ID NO: 1434079 - RNA, 22 nt, Human
ggacuuagaaaaccagcucagc

SEQ ID NO: 1434080 - RNA, 19 nt, Human
ggacuuagaaaaccagcuc

SEQ ID NO: 1434081 - RNA, 23 nt, Human
ggacuuaagcaucuggcucuaau

SEQ ID NO: 1434082 - RNA, 23 nt, Human
ggacuuagaaaaccagcucagca

SEQ ID NO: 1434083 - RNA, 22 nt, Human
ggacugugugcucaggagcccu

SEQ ID NO: 1434084 - RNA, 15 nt, Human
ggacucagccuucag

SEQ ID NO: 1434085 - RNA, 23 nt, Human
ggacugugugcucaggagcccug

SEQ ID NO: 1434086 - RNA, 21 nt, Human
ggagacugugugugcccucug

SEQ ID NO: 1434087 - RNA, 20 nt, Human
ggagacugugugugcccucu

SEQ ID NO: 1434088 - RNA, 19 nt, Human
ggagacugugugugcccuc

SEQ ID NO: 1434089 - RNA, 18 nt, Human
ggagacugugugugcccu

SEQ ID NO: 1434090 - RNA, 20 nt, Human
ggagacugucuggccccccu

SEQ ID NO: 1434091 - RNA, 19 nt, Human
ggagacugucuggcccccc

SEQ ID NO: 1434092 - RNA, 23 nt, Human
ggagacugggcugagggagccug

SEQ ID NO: 1434093 - RNA, 20 nt, Human
ggagacugggcugagggagc

SEQ ID NO: 1434094 - RNA, 17 nt, Human
ggagacugggcugaggg

SEQ ID NO: 1434095 - RNA, 13 nt, Human
ggagacugggcug

SEQ ID NO: 1434096 - RNA, 20 nt, Human
ggagaaccaaaucuggaagc

SEQ ID NO: 1434097 - RNA, 13 nt, Human
ggacuuuucugca

SEQ ID NO: 1434098 - RNA, 12 nt, Human
ggacuuuguaca

SEQ ID NO: 1434099 - RNA, 16 nt, Human
ggacuugugucucugu

SEQ ID NO: 1434100 - RNA, 15 nt, Human
ggacuuggccucucu

SEQ ID NO: 1434101 - RNA, 17 nt, Human
ggacuuggccucucucu

SEQ ID NO: 1434102 - RNA, 13 nt, Human
ggacuuggccucu

SEQ ID NO: 1434103 - RNA, 22 nt, Human
ggacuucugggguaaguggucu

SEQ ID NO: 1434104 - RNA, 14 nt, Human
ggacuucuggggua

SEQ ID NO: 1434105 - RNA, 23 nt, Human
ggacuuccuguccagcuccaacc

SEQ ID NO: 1434106 - RNA, 22 nt, Human
ggaccuaaauggccucaugugg

SEQ ID NO: 1434107 - RNA, 17 nt, Human
ggaccuaaauggccuca

SEQ ID NO: 1434108 - RNA, 19 nt, Human
ggaccggagagugggggug

SEQ ID NO: 1434109 - RNA, 17 nt, Human
ggaccggagaguggggg

SEQ ID NO: 1434110 - RNA, 22 nt, Human
ggaccgcuacaccacucuggca

SEQ ID NO: 1434111 - RNA, 21 nt, Human
ggaccgcuacaccacucuggc

SEQ ID NO: 1434112 - RNA, 20 nt, Human
ggaccgcuacaccacucugg

SEQ ID NO: 1434113 - RNA, 19 nt, Human
ggaccgcuacaccacucug

SEQ ID NO: 1434114 - RNA, 18 nt, Human
ggaccgcccccugucucu

SEQ ID NO: 1434115 - RNA, 19 nt, Human
ggacccguucaugggggag

SEQ ID NO: 1434116 - RNA, 17 nt, Human
ggacccguucauggggg

SEQ ID NO: 1434117 - RNA, 21 nt, Human
ggaccccccuuucacaggcag

SEQ ID NO: 1434118 - RNA, 18 nt, Human
ggaccccccuuucacagg

SEQ ID NO: 1434119 - RNA, 12 nt, Human
ggaccccugcau

SEQ ID NO: 1434120 - RNA, 11 nt, Human
ggaccccugca

SEQ ID NO: 1434121 - RNA, 23 nt, Human
ggaccccugcauuggaacuggag

SEQ ID NO: 1434122 - RNA, 17 nt, Human
ggaccccagccauccag

SEQ ID NO: 1434123 - RNA, 13 nt, Human
gcuuguagccagc

SEQ ID NO: 1434124 - RNA, 19 nt, Human
gcuuguacauaaugcgugc

SEQ ID NO: 1434125 - RNA, 13 nt, Human
aaaggaaaagaca

SEQ ID NO: 1434126 - RNA, 16 nt, Human
aaagcuuuugucuaca

SEQ ID NO: 1434127 - RNA, 15 nt, Human
aaaggaaagaaaaca

SEQ ID NO: 1434128 - RNA, 17 nt, Human
aaaggaaucauuucuau

SEQ ID NO: 1434129 - RNA, 16 nt, Human
aaaggaaagaaaacau

SEQ ID NO: 1434130 - RNA, 13 nt, Human
aaaggaauuuaaa

SEQ ID NO: 1434131 - RNA, 12 nt, Human
aaaggaaaagac

SEQ ID NO: 1434132 - RNA, 14 nt, Human
aaaggacaucagca

SEQ ID NO: 1434133 - RNA, 16 nt, Human
aaaggacaucagcaaa

SEQ ID NO: 1434134 - RNA, 15 nt, Human
aaaggacgcacugag

SEQ ID NO: 1434135 - RNA, 15 nt, Human
aaaggacaucagcaa

SEQ ID NO: 1434136 - RNA, 19 nt, Human
aaagcuugcaacaaaauuc

SEQ ID NO: 1434137 - RNA, 15 nt, Human
aaaggaaaaacaaac

SEQ ID NO: 1434138 - RNA, 19 nt, Human
aaagcuuuuuauuccuccu

SEQ ID NO: 1434139 - RNA, 20 nt, Human
aaagcuuccaugauucuauu

SEQ ID NO: 1434140 - RNA, 18 nt, Human
aaagcuuccaugauucua

SEQ ID NO: 1434141 - RNA, 17 nt, Human
aaagcuuccaugauucu

SEQ ID NO: 1434142 - RNA, 20 nt, Human
aaagcuucagugcugccgau

SEQ ID NO: 1434143 - RNA, 17 nt, Human
aaagcuucagugcugcc

SEQ ID NO: 1434144 - RNA, 16 nt, Human
aaagcuucacaguacc

SEQ ID NO: 1434145 - RNA, 20 nt, Human
aaagcuauaaagcaguauuu

SEQ ID NO: 1434146 - RNA, 17 nt, Human
aaagcuauauaagacaa

SEQ ID NO: 1434147 - RNA, 23 nt, Human
ggugcccaagccagaggcugggu

SEQ ID NO: 1434148 - RNA, 22 nt, Human
ggugcccaagccagaggcuggg

SEQ ID NO: 1434149 - RNA, 21 nt, Human
ggugcccaagccagaggcugg

SEQ ID NO: 1434150 - RNA, 18 nt, Human
ggugcccaagccagaggc

SEQ ID NO: 1434151 - RNA, 17 nt, Human
ggugcccaagccagagg

SEQ ID NO: 1434152 - RNA, 14 nt, Human
ggugcccaagccag

SEQ ID NO: 1434153 - RNA, 23 nt, Human
ggugcccacagugucaggcacug

SEQ ID NO: 1434154 - RNA, 14 nt, Human
ggugcccacaggcc

SEQ ID NO: 1434155 - RNA, 13 nt, Human
ggugcccacaggc

SEQ ID NO: 1434156 - RNA, 23 nt, Human
ggugcccagaauaaguuauugca

SEQ ID NO: 1434157 - RNA, 22 nt, Human
aaagcgugagcuuaaaauacaa

SEQ ID NO: 1434158 - RNA, 21 nt, Human
aaagcgugagcuuaaaauaca

SEQ ID NO: 1434159 - RNA, 21 nt, Human
aaagcuaaaauaaagaaauag

SEQ ID NO: 1434160 - RNA, 16 nt, Human
aaagcuaaaauaaaga

SEQ ID NO: 1434161 - RNA, 14 nt, Human
aaagcuaaaauaaa

SEQ ID NO: 1434162 - RNA, 14 nt, Human
aaagcguuugcaca

SEQ ID NO: 1434163 - RNA, 23 nt, Human
aaagcgugagcuuaaaauacaag

SEQ ID NO: 1434164 - RNA, 17 nt, Human
aaagcuacuuauuguag

SEQ ID NO: 1434165 - RNA, 16 nt, Human
aaagcuacuuauugua

SEQ ID NO: 1434166 - RNA, 20 nt, Human
ggucuguagguugcacacuu

SEQ ID NO: 1434167 - RNA, 19 nt, Human
ggucuguagguugcacacu

SEQ ID NO: 1434168 - RNA, 18 nt, Human
ggucuguagguugcacac

SEQ ID NO: 1434169 - RNA, 15 nt, Human
ggucuguagguugca

SEQ ID NO: 1434170 - RNA, 14 nt, Human
ggucuguagggauu

SEQ ID NO: 1434171 - RNA, 20 nt, Human
ggucugggggcacaagacug

SEQ ID NO: 1434172 - RNA, 21 nt, Human
ggucugggggcacaagacuga

SEQ ID NO: 1434173 - RNA, 12 nt, Human
ggucuguaaaau

SEQ ID NO: 1434174 - RNA, 14 nt, Human
ggucuguaaaaucu

SEQ ID NO: 1434175 - RNA, 20 nt, Human
ggucugggagucacacagug

SEQ ID NO: 1434176 - RNA, 19 nt, Human
ggucugggagucacacagu

SEQ ID NO: 1434177 - RNA, 23 nt, Human
ggucuggcugguguuaacagaag

SEQ ID NO: 1434178 - RNA, 20 nt, Human
ggucuggcugguguuaacag

SEQ ID NO: 1434179 - RNA, 15 nt, Human
ggucuggcugguguu

SEQ ID NO: 1434180 - RNA, 14 nt, Human
ggucuggcuggugu

SEQ ID NO: 1434181 - RNA, 13 nt, Human
ggucuggcuggug

SEQ ID NO: 1434182 - RNA, 12 nt, Human
ggucuggcuggu

SEQ ID NO: 1434183 - RNA, 22 nt, Human
ggucuggcagccucccauccag

SEQ ID NO: 1434184 - RNA, 15 nt, Human
ggucuggcagccucc

SEQ ID NO: 1434185 - RNA, 16 nt, Human
aaagcaaaaaagaaaa

SEQ ID NO: 1434186 - RNA, 21 nt, Human
aaagcaaaaaagaaaaccuuu

SEQ ID NO: 1434187 - RNA, 15 nt, Human
aaagcaaaaaagaaa

SEQ ID NO: 1434188 - RNA, 14 nt, Human
aaagcaaaaaagaa

SEQ ID NO: 1434189 - RNA, 23 nt, Human
aaagauuuuuuuuuuuucucuca

SEQ ID NO: 1434190 - RNA, 21 nt, Human
aaagauuuuuuaauaauuuag

SEQ ID NO: 1434191 - RNA, 22 nt, Human
aaagauuuuuuaauaauuuaga

SEQ ID NO: 1434192 - RNA, 20 nt, Human
aaagauuuuuuaauaauuua

SEQ ID NO: 1434193 - RNA, 19 nt, Human
aaagauuuuuuaauaauuu

SEQ ID NO: 1434194 - RNA, 14 nt, Human
aaagauuuuuuaau

SEQ ID NO: 1434195 - RNA, 13 nt, Human
aaagauuuuuuaa

SEQ ID NO: 1434196 - RNA, 17 nt, Human
ggucuguucuguuucaa

SEQ ID NO: 1434197 - RNA, 12 nt, Human
ggucuguucuuu

SEQ ID NO: 1434198 - RNA, 17 nt, Human
ggucuguucuuuccaaa

SEQ ID NO: 1434199 - RNA, 19 nt, Human
ggucuguucuuuccaaagu

SEQ ID NO: 1434200 - RNA, 16 nt, Human
ggucuuuuauaauucu

SEQ ID NO: 1434201 - RNA, 17 nt, Human
ggugaugagggcagcag

SEQ ID NO: 1434202 - RNA, 16 nt, Human
ggugaugagggcagca

SEQ ID NO: 1434203 - RNA, 15 nt, Human
ggugaugagggcagc

SEQ ID NO: 1434204 - RNA, 13 nt, Human
ggugaugagggca

SEQ ID NO: 1434205 - RNA, 17 nt, Human
ggugaucugggauuagg

SEQ ID NO: 1434206 - RNA, 20 nt, Human
ggugauccauguaacugccu

SEQ ID NO: 1434207 - RNA, 21 nt, Human
ggugauccauguaacugccua

SEQ ID NO: 1434208 - RNA, 17 nt, Human
ggucuuggaacuugccu

SEQ ID NO: 1434209 - RNA, 23 nt, Human
ggucuuggaacuugccugccuuu

SEQ ID NO: 1434210 - RNA, 18 nt, Human
ggucuguuggcaggcugg

SEQ ID NO: 1434211 - RNA, 16 nt, Human
ggucuguuggcaggcu

SEQ ID NO: 1434212 - RNA, 18 nt, Human
ggugauuuaagggcccag

SEQ ID NO: 1434213 - RNA, 20 nt, Human
ggugauuuagcaggaagcug

SEQ ID NO: 1434214 - RNA, 19 nt, Human
ggugaugagggcagcagcc

SEQ ID NO: 1434215 - RNA, 22 nt, Human
ggugaugagggcagcagccagc

SEQ ID NO: 1434216 - RNA, 14 nt, Human
ggugcacugggagg

SEQ ID NO: 1434217 - RNA, 13 nt, Human
ggugcacugggag

SEQ ID NO: 1434218 - RNA, 22 nt, Human
ggugcacagcacaaauuaguua

SEQ ID NO: 1434219 - RNA, 15 nt, Human
ggugcacaggagggg

SEQ ID NO: 1434220 - RNA, 13 nt, Human
ggugcacaggagg

SEQ ID NO: 1434221 - RNA, 12 nt, Human
ggugcacaggag

SEQ ID NO: 1434222 - RNA, 14 nt, Human
ggugcacaggaggg

SEQ ID NO: 1434223 - RNA, 17 nt, Human
ggugcacuggccccacc

SEQ ID NO: 1434224 - RNA, 21 nt, Human
gguaguaccuuuuauauccca

SEQ ID NO: 1434225 - RNA, 18 nt, Human
aaacuguacagugucuuu

SEQ ID NO: 1434226 - RNA, 16 nt, Human
aaacuguacagugucu

SEQ ID NO: 1434227 - RNA, 13 nt, Human
aaacuguacagug

SEQ ID NO: 1434228 - RNA, 22 nt, Human
gguauaaaacuuuccucgccug

SEQ ID NO: 1434229 - RNA, 21 nt, Human
gguauaaaacuuuccucgccu

SEQ ID NO: 1434230 - RNA, 12 nt, Human
gguauaaaagau

SEQ ID NO: 1434231 - RNA, 13 nt, Human
gguauaaaagaug

SEQ ID NO: 1434232 - RNA, 23 nt, Human
gguauggcguaaguacagagaag

SEQ ID NO: 1434233 - RNA, 20 nt, Human
gguauggcguaaguacagag

SEQ ID NO: 1434234 - RNA, 20 nt, Human
gguaguuuuuucaucuucag

SEQ ID NO: 1434235 - RNA, 16 nt, Human
gguauaaaagaugggg

SEQ ID NO: 1434236 - RNA, 21 nt, Human
gguccaaugcucaggugcugg

SEQ ID NO: 1434237 - RNA, 18 nt, Human
gguccaaugagcuuucug

SEQ ID NO: 1434238 - RNA, 17 nt, Human
gguccaaugagcuuucu

SEQ ID NO: 1434239 - RNA, 16 nt, Human
gguccaaugagcuuuc

SEQ ID NO: 1434240 - RNA, 16 nt, Human
ggucaugggccacugc

SEQ ID NO: 1434241 - RNA, 22 nt, Human
gguauggcguaaguacagagaa

SEQ ID NO: 1434242 - RNA, 21 nt, Human
gguauggcguaaguacagaga

SEQ ID NO: 1434243 - RNA, 23 nt, Human
gguauuggcuagagguucaaaga

SEQ ID NO: 1434244 - RNA, 17 nt, Human
gguauucguuaucuaau

SEQ ID NO: 1434245 - RNA, 12 nt, Human
gguauuguauuu

SEQ ID NO: 1434246 - RNA, 17 nt, Human
gguauuguauuuauuca

SEQ ID NO: 1434247 - RNA, 19 nt, Human
gguauuguauuuauucaau

SEQ ID NO: 1434248 - RNA, 18 nt, Human
gguccaugggcagagccc

SEQ ID NO: 1434249 - RNA, 17 nt, Human
gguccaugggcagagcc

SEQ ID NO: 1434250 - RNA, 22 nt, Human
gguccaaugagcuuucugaaca

SEQ ID NO: 1434251 - RNA, 19 nt, Human
gguccaaugagcuuucuga

SEQ ID NO: 1434252 - RNA, 14 nt, Human
ggucccacagccac

SEQ ID NO: 1434253 - RNA, 20 nt, Human
ggucccacaucccugggccu

SEQ ID NO: 1434254 - RNA, 19 nt, Human
ggucccacaucccugggcc

SEQ ID NO: 1434255 - RNA, 17 nt, Human
ggucccacaucccuggg

SEQ ID NO: 1434256 - RNA, 16 nt, Human
ggucccacaucccugg

SEQ ID NO: 1434257 - RNA, 22 nt, Human
ggucccacaucccugggccugc

SEQ ID NO: 1434258 - RNA, 21 nt, Human
ggucccacaucccugggccug

SEQ ID NO: 1434259 - RNA, 23 nt, Human
ggucccacaucccugggccugcu

SEQ ID NO: 1434260 - RNA, 13 nt, Human
aaacuuuaauaua

SEQ ID NO: 1434261 - RNA, 17 nt, Human
aaacuuuaccuuuuuua

SEQ ID NO: 1434262 - RNA, 14 nt, Human
aaacuuuaccuuuu

SEQ ID NO: 1434263 - RNA, 22 nt, Human
aaacuuuuuuucuguaccaguu

SEQ ID NO: 1434264 - RNA, 19 nt, Human
aaacuuuuuuucuguacca

SEQ ID NO: 1434265 - RNA, 15 nt, Human
aaacuuuuuuucugu

SEQ ID NO: 1434266 - RNA, 19 nt, Human
aaacuuuuuuauuuaaaaa

SEQ ID NO: 1434267 - RNA, 17 nt, Human
aaacuuuuuuauuuaaa

SEQ ID NO: 1434268 - RNA, 12 nt, Human
aaacuuuuuuau

SEQ ID NO: 1434269 - RNA, 20 nt, Human
aaacuuuucuuaaaaaguua

SEQ ID NO: 1434270 - RNA, 22 nt, Human
aaacuuuaaagcguuugcacag

SEQ ID NO: 1434271 - RNA, 20 nt, Human
aaagauucuauaguucuaga

SEQ ID NO: 1434272 - RNA, 19 nt, Human
aaagauucuauaguucuag

SEQ ID NO: 1434273 - RNA, 18 nt, Human
aaagauucuauaguucua

SEQ ID NO: 1434274 - RNA, 12 nt, Human
aaagauucuaua

SEQ ID NO: 1434275 - RNA, 16 nt, Human
aaagauguucuggaua

SEQ ID NO: 1434276 - RNA, 22 nt, Human
aaagauuacuuuuucuuuaugu

SEQ ID NO: 1434277 - RNA, 20 nt, Human
aaagaugagcuuugucuacu

SEQ ID NO: 1434278 - RNA, 17 nt, Human
aaagaugcacuuugcuu

SEQ ID NO: 1434279 - RNA, 12 nt, Human
aaagaugcacuu

SEQ ID NO: 1434280 - RNA, 14 nt, Human
aaagaugccacauu

SEQ ID NO: 1434281 - RNA, 22 nt, Human
aaagaugcacuuugcuuuaaua

SEQ ID NO: 1434282 - RNA, 23 nt, Human
aaagaugcacuuugcuuuaauau

SEQ ID NO: 1434283 - RNA, 21 nt, Human
aaagaugcacuuugcuuuaau

SEQ ID NO: 1434284 - RNA, 19 nt, Human
aaagaugcacuuugcuuua

SEQ ID NO: 1434285 - RNA, 23 nt, Human
aaagauggggucuguaaaaucuu

SEQ ID NO: 1434286 - RNA, 15 nt, Human
aaagaugagugagca

SEQ ID NO: 1434287 - RNA, 20 nt, Human
aaagaauuguuggggguuuu

SEQ ID NO: 1434288 - RNA, 22 nt, Human
aaagaauuguuggggguuuuuu

SEQ ID NO: 1434289 - RNA, 15 nt, Human
aaagaauuauuuugu

SEQ ID NO: 1434290 - RNA, 19 nt, Human
aaagaauugugguuuauau

SEQ ID NO: 1434291 - RNA, 17 nt, Human
aaagaauggcagaaaag

SEQ ID NO: 1434292 - RNA, 15 nt, Human
aaagacucauccguc

SEQ ID NO: 1434293 - RNA, 14 nt, Human
aaagacucauccgu

SEQ ID NO: 1434294 - RNA, 10 nt, Human
aaagacucau

SEQ ID NO: 1434295 - RNA, 22 nt, Human
aaagagaaacaguugguaacuu

SEQ ID NO: 1434296 - RNA, 19 nt, Human
aaagagaaacaguugguaa

SEQ ID NO: 1434297 - RNA, 12 nt, Human
aaagagaaacac

SEQ ID NO: 1434298 - RNA, 20 nt, Human
aaagacuugguugguagggu

SEQ ID NO: 1434299 - RNA, 18 nt, Human
aaagacuugguugguagg

SEQ ID NO: 1434300 - RNA, 12 nt, Human
aaagacuuaagc

SEQ ID NO: 1434301 - RNA, 21 nt, Human
aaagagacagugauauuggaa

SEQ ID NO: 1434302 - RNA, 15 nt, Human
aaagagacagugaua

SEQ ID NO: 1434303 - RNA, 13 nt, Human
aaagagacaguga

SEQ ID NO: 1434304 - RNA, 13 nt, Human
aaagagaaacacg

SEQ ID NO: 1434305 - RNA, 18 nt, Human
aaagagaacuuccagauc

SEQ ID NO: 1434306 - RNA, 20 nt, Human
aaacuacuuugcugcuaaua

SEQ ID NO: 1434307 - RNA, 16 nt, Human
aaacucauuucuagca

SEQ ID NO: 1434308 - RNA, 19 nt, Human
aaacuagcauaucugccuu

SEQ ID NO: 1434309 - RNA, 20 nt, Human
aaacuagcauaucugccuuu

SEQ ID NO: 1434310 - RNA, 21 nt, Human
aaacuagcauaucugccuuua

SEQ ID NO: 1434311 - RNA, 22 nt, Human
aaacuagcauaucugccuuuau

SEQ ID NO: 1434312 - RNA, 14 nt, Human
aaacuagcauaucu

SEQ ID NO: 1434313 - RNA, 22 nt, Human
aaacuagaggugagaaauuuaa

SEQ ID NO: 1434314 - RNA, 16 nt, Human
aaacuacuuugcugcu

SEQ ID NO: 1434315 - RNA, 23 nt, Human
aaacucccacuugucaugugaca

SEQ ID NO: 1434316 - RNA, 22 nt, Human
aaacuccagaugccacaaugga

SEQ ID NO: 1434317 - RNA, 15 nt, Human
aaacuccagaugcca

SEQ ID NO: 1434318 - RNA, 15 nt, Human
aaacuccaccuuccc

SEQ ID NO: 1434319 - RNA, 14 nt, Human
aaacuccugugacc

SEQ ID NO: 1434320 - RNA, 12 nt, Human
aaacuguacagu

SEQ ID NO: 1434321 - RNA, 11 nt, Human
aaacuguacag

SEQ ID NO: 1434322 - RNA, 17 nt, Human
aaacuguaauacaauga

SEQ ID NO: 1434323 - RNA, 16 nt, Human
aaacuggggccucccu

SEQ ID NO: 1434324 - RNA, 18 nt, Human
aaacugggaaccccuuuc

SEQ ID NO: 1434325 - RNA, 18 nt, Human
aaacuggccauggccugc

SEQ ID NO: 1434326 - RNA, 12 nt, Human
aaacuggagacu

SEQ ID NO: 1434327 - RNA, 21 nt, Human
aaacuggagacugugugugcc

SEQ ID NO: 1434328 - RNA, 11 nt, Human
aaacuggagac

SEQ ID NO: 1434329 - RNA, 10 nt, Human
aaacuggaga

SEQ ID NO: 1434330 - RNA, 16 nt, Human
aaacuggauuaaacuu

SEQ ID NO: 1434331 - RNA, 11 nt, Human
aaacuaaucca

SEQ ID NO: 1434332 - RNA, 15 nt, Human
aaacuaauaauugca

SEQ ID NO: 1434333 - RNA, 18 nt, Human
aaacuaaggcccucuuga

SEQ ID NO: 1434334 - RNA, 21 nt, Human
aaacuacaaccaauggaaugu

SEQ ID NO: 1434335 - RNA, 15 nt, Human
aaacuacauauugua

SEQ ID NO: 1434336 - RNA, 21 nt, Human
aaaccacauuggagauguuua

SEQ ID NO: 1434337 - RNA, 18 nt, Human
gggucguggagagcuagg

SEQ ID NO: 1434338 - RNA, 13 nt, Human
gggucguggagag

SEQ ID NO: 1434339 - RNA, 19 nt, Human
gggucaggccuuugagcuc

SEQ ID NO: 1434340 - RNA, 12 nt, Human
gggucaggccuu

SEQ ID NO: 1434341 - RNA, 21 nt, Human
aaacauguuuauuuuucuugu

SEQ ID NO: 1434342 - RNA, 20 nt, Human
aaacauguuuauuuuucuug

SEQ ID NO: 1434343 - RNA, 12 nt, Human
aaacauguuucc

SEQ ID NO: 1434344 - RNA, 19 nt, Human
aaacauguuuccacuauug

SEQ ID NO: 1434345 - RNA, 19 nt, Human
aaacauguuucuuuguaau

SEQ ID NO: 1434346 - RNA, 22 nt, Human
aaacauguuucuuuguaaugaa

SEQ ID NO: 1434347 - RNA, 23 nt, Human
aaacauguuucuuuguaaugaaa

SEQ ID NO: 1434348 - RNA, 18 nt, Human
aaacauuuauuuugacau

SEQ ID NO: 1434349 - RNA, 17 nt, Human
aaacauuuauuuugaca

SEQ ID NO: 1434350 - RNA, 14 nt, Human
aaacauuuauuuug

SEQ ID NO: 1434351 - RNA, 14 nt, Human
aaacauuaaaauau

SEQ ID NO: 1434352 - RNA, 20 nt, Human
aaacauuuauuuugacauaa

SEQ ID NO: 1434353 - RNA, 21 nt, Human
aaacauuuauuuugacauaaa

SEQ ID NO: 1434354 - RNA, 18 nt, Human
aaaccaaaucacugaacu

SEQ ID NO: 1434355 - RNA, 19 nt, Human
gggucagacgccugaggaa

SEQ ID NO: 1434356 - RNA, 23 nt, Human
ggguauaaaacuuuccucgccug

SEQ ID NO: 1434357 - RNA, 20 nt, Human
ggguaggcaggauuggggaa

SEQ ID NO: 1434358 - RNA, 19 nt, Human
ggguaggagggugggaagg

SEQ ID NO: 1434359 - RNA, 15 nt, Human
ggggucuguaaaauc

SEQ ID NO: 1434360 - RNA, 22 nt, Human
ggguaggguaaaucaguaagag

SEQ ID NO: 1434361 - RNA, 15 nt, Human
ggguaggguaaauca

SEQ ID NO: 1434362 - RNA, 18 nt, Human
ggguagggggcuggagga

SEQ ID NO: 1434363 - RNA, 14 nt, Human
ggguaggcuggagu

SEQ ID NO: 1434364 - RNA, 13 nt, Human
ggguaggcaggau

SEQ ID NO: 1434365 - RNA, 12 nt, Human
ggguaggcagga

SEQ ID NO: 1434366 - RNA, 19 nt, Human
ggggccuguacugccugcu

SEQ ID NO: 1434367 - RNA, 18 nt, Human
ggggccuguacugccugc

SEQ ID NO: 1434368 - RNA, 17 nt, Human
ggggccuguacugccug

SEQ ID NO: 1434369 - RNA, 15 nt, Human
ggggccuguacugcc

SEQ ID NO: 1434370 - RNA, 14 nt, Human
ggggccuguacugc

SEQ ID NO: 1434371 - RNA, 12 nt, Human
ggggccugggag

SEQ ID NO: 1434372 - RNA, 19 nt, Human
ggggccuggcuggcugagg

SEQ ID NO: 1434373 - RNA, 15 nt, Human
ggggccugggcagga

SEQ ID NO: 1434374 - RNA, 16 nt, Human
ggggaagacaguggcc

SEQ ID NO: 1434375 - RNA, 12 nt, Human
ggggaagacagu

SEQ ID NO: 1434376 - RNA, 16 nt, Human
ggggcccuggagcagc

SEQ ID NO: 1434377 - RNA, 18 nt, Human
ggggcccuggagcagcca

SEQ ID NO: 1434378 - RNA, 13 nt, Human
ggggaacuggcca

SEQ ID NO: 1434379 - RNA, 21 nt, Human
ggggaacuggccaagcugagg

SEQ ID NO: 1434380 - RNA, 22 nt, Human
ggggccuggcuggcugagggca

SEQ ID NO: 1434381 - RNA, 11 nt, Human
ggggccuggcu

SEQ ID NO: 1434382 - RNA, 12 nt, Human
ggggccugggca

SEQ ID NO: 1434383 - RNA, 19 nt, Human
ggggucguggagagcuagg

SEQ ID NO: 1434384 - RNA, 18 nt, Human
ggggucguggagagcuag

SEQ ID NO: 1434385 - RNA, 21 nt, Human
ggggucuggcugguguuaaca

SEQ ID NO: 1434386 - RNA, 16 nt, Human
ggggucuggcuggugu

SEQ ID NO: 1434387 - RNA, 13 nt, Human
ggggucuggcugg

SEQ ID NO: 1434388 - RNA, 21 nt, Human
ggggucuggaguugaucugga

SEQ ID NO: 1434389 - RNA, 20 nt, Human
ggggucuggaguugaucugg

SEQ ID NO: 1434390 - RNA, 23 nt, Human
ggggucucuucugaauaaagcaa

SEQ ID NO: 1434391 - RNA, 21 nt, Human
ggggaacucagauccagggac

SEQ ID NO: 1434392 - RNA, 18 nt, Human
ggggaacucagauccagg

SEQ ID NO: 1434393 - RNA, 22 nt, Human
ggggaaaggcaagguccggccc

SEQ ID NO: 1434394 - RNA, 17 nt, Human
ggggaaaggcaaggucc

SEQ ID NO: 1434395 - RNA, 21 nt, Human
ggggaaagcaaagcacagaga

SEQ ID NO: 1434396 - RNA, 18 nt, Human
ggggaaagcaaagcacag

SEQ ID NO: 1434397 - RNA, 16 nt, Human
ggggccaggcuggguc

SEQ ID NO: 1434398 - RNA, 14 nt, Human
ggggccaggcuggg

SEQ ID NO: 1434399 - RNA, 21 nt, Human
aaacauauauaacaaugcugu

SEQ ID NO: 1434400 - RNA, 22 nt, Human
aaacaugcuacacacugcaugu

SEQ ID NO: 1434401 - RNA, 19 nt, Human
aaacauauauaacaaugcu

SEQ ID NO: 1434402 - RNA, 16 nt, Human
aaacauauauaacaau

SEQ ID NO: 1434403 - RNA, 20 nt, Human
aaacauaaucuucugccuuc

SEQ ID NO: 1434404 - RNA, 13 nt, Human
aaacauauauaac

SEQ ID NO: 1434405 - RNA, 22 nt, Human
aaacaguugguaacuuuuguga

SEQ ID NO: 1434406 - RNA, 24 nt, Human
aaacaguugcauguaguaacacua

SEQ ID NO: 1434407 - RNA, 19 nt, Human
aaacaguugguaacuuuug

SEQ ID NO: 1434408 - RNA, 18 nt, Human
aaacaguugguaacuuuu

SEQ ID NO: 1434409 - RNA, 16 nt, Human
aaacaguugguaacuu

SEQ ID NO: 1434410 - RNA, 15 nt, Human
aaacacaagauuggu

SEQ ID NO: 1434411 - RNA, 21 nt, Human
aaacacaagauugguguuuuu

SEQ ID NO: 1434412 - RNA, 22 nt, Human
aaacaaguauuuguuaauuuag

SEQ ID NO: 1434413 - RNA, 13 nt, Human
aaacaaguauuug

SEQ ID NO: 1434414 - RNA, 12 nt, Human
aaacaaguauuu

SEQ ID NO: 1434415 - RNA, 16 nt, Human
aaacaagguuuucagu

SEQ ID NO: 1434416 - RNA, 19 nt, Human
aaacaagucagucauucag

SEQ ID NO: 1434417 - RNA, 23 nt, Human
aaacaaguauuuguuaauuuaga

SEQ ID NO: 1434418 - RNA, 14 nt, Human
aaacacaacuauau

SEQ ID NO: 1434419 - RNA, 15 nt, Human
gggcuggaugagcuc

SEQ ID NO: 1434420 - RNA, 18 nt, Human
gggcuggaugagcuccca

SEQ ID NO: 1434421 - RNA, 19 nt, Human
gggcuggaggcccaggcug

SEQ ID NO: 1434422 - RNA, 16 nt, Human
gggcuggaggcccagg

SEQ ID NO: 1434423 - RNA, 15 nt, Human
gggcuggaggcccag

SEQ ID NO: 1434424 - RNA, 14 nt, Human
gggcuggaggccca

SEQ ID NO: 1434425 - RNA, 23 nt, Human
gggcuggaggagcccaggccagg

SEQ ID NO: 1434426 - RNA, 22 nt, Human
gggcuggaggagcccaggccag

SEQ ID NO: 1434427 - RNA, 18 nt, Human
gggcuggaggagcccagg

SEQ ID NO: 1434428 - RNA, 17 nt, Human
gggcuggaggagcccag

SEQ ID NO: 1434429 - RNA, 16 nt, Human
gggcuggaggagccca

SEQ ID NO: 1434430 - RNA, 15 nt, Human
gggcuggaggagccc

SEQ ID NO: 1434431 - RNA, 14 nt, Human
gggcuggaggagcc

SEQ ID NO: 1434432 - RNA, 13 nt, Human
gggcuggaggagc

SEQ ID NO: 1434433 - RNA, 20 nt, Human
gggcugcuuccuccuggaaa

SEQ ID NO: 1434434 - RNA, 19 nt, Human
gggcugcuuccuccuggaa

SEQ ID NO: 1434435 - RNA, 18 nt, Human
gggcugcuuccuccugga

SEQ ID NO: 1434436 - RNA, 14 nt, Human
aaaauguauaugca

SEQ ID NO: 1434437 - RNA, 21 nt, Human
aaaauguaggcuuaguuugug

SEQ ID NO: 1434438 - RNA, 17 nt, Human
aaaauguaggagacugu

SEQ ID NO: 1434439 - RNA, 12 nt, Human
aaaauguaggag

SEQ ID NO: 1434440 - RNA, 19 nt, Human
aaaauggccauuugcuuuu

SEQ ID NO: 1434441 - RNA, 23 nt, Human
aaaauguaagauuauagauucua

SEQ ID NO: 1434442 - RNA, 21 nt, Human
aaaauggcaggggguggaauu

SEQ ID NO: 1434443 - RNA, 22 nt, Human
aaaauggaggccauugugugag

SEQ ID NO: 1434444 - RNA, 12 nt, Human
aaaauggaauac

SEQ ID NO: 1434445 - RNA, 20 nt, Human
aaacaagaaaaauaaagaaa

SEQ ID NO: 1434446 - RNA, 19 nt, Human
aaacaagaaaaauaaagaa

SEQ ID NO: 1434447 - RNA, 18 nt, Human
aaacaagaaaaauaaaga

SEQ ID NO: 1434448 - RNA, 17 nt, Human
aaacaagaaaaauaaag

SEQ ID NO: 1434449 - RNA, 13 nt, Human
aaacaagaaaaau

SEQ ID NO: 1434450 - RNA, 17 nt, Human
aaacaaccaugucauuu

SEQ ID NO: 1434451 - RNA, 17 nt, Human
aaacaacucuuugagaa

SEQ ID NO: 1434452 - RNA, 15 nt, Human
aaacaaccaugucau

SEQ ID NO: 1434453 - RNA, 17 nt, Human
aaacaaggaugaauuaa

SEQ ID NO: 1434454 - RNA, 18 nt, Human
aaacaagaccacguuucu

SEQ ID NO: 1434455 - RNA, 12 nt, Human
aaacaacacugu

SEQ ID NO: 1434456 - RNA, 12 nt, Human
aaacaaagaugu

SEQ ID NO: 1434457 - RNA, 18 nt, Human
aaacaaagaguucaagaa

SEQ ID NO: 1434458 - RNA, 20 nt, Human
aaacaaacucguuuuuuaca

SEQ ID NO: 1434459 - RNA, 13 nt, Human
aaacaaagaaauu

SEQ ID NO: 1434460 - RNA, 17 nt, Human
aaaauguauaugcacuu

SEQ ID NO: 1434461 - RNA, 13 nt, Human
aaaauugugauca

SEQ ID NO: 1434462 - RNA, 20 nt, Human
aaaauuguuaauuuuuccua

SEQ ID NO: 1434463 - RNA, 16 nt, Human
aaaauuuuuaaucuuu

SEQ ID NO: 1434464 - RNA, 22 nt, Human
aaaauuuuuucucuaggaaaua

SEQ ID NO: 1434465 - RNA, 19 nt, Human
aaaauuuuuucucuaggaa

SEQ ID NO: 1434466 - RNA, 19 nt, Human
aaaauuuuuaaucuuuaau

SEQ ID NO: 1434467 - RNA, 21 nt, Human
aaaacuacaaaucaaguauuu

SEQ ID NO: 1434468 - RNA, 22 nt, Human
aaaacuacaaccaauggaaugu

SEQ ID NO: 1434469 - RNA, 16 nt, Human
aaaacuaaaaacuaga

SEQ ID NO: 1434470 - RNA, 13 nt, Human
aaaacuaaaaacu

SEQ ID NO: 1434471 - RNA, 14 nt, Human
aaaacugcauuuca

SEQ ID NO: 1434472 - RNA, 17 nt, Human
aaaacuacuucuuuuuu

SEQ ID NO: 1434473 - RNA, 19 nt, Human
aaaacugcucauaugaugu

SEQ ID NO: 1434474 - RNA, 19 nt, Human
aaaaauuaucuauagcuaa

SEQ ID NO: 1434475 - RNA, 15 nt, Human
gggaacacuggggac

SEQ ID NO: 1434476 - RNA, 19 nt, Human
aaaaaucucaaauuucuaa

SEQ ID NO: 1434477 - RNA, 20 nt, Human
aaaaaucucaaauuucuaaa

SEQ ID NO: 1434478 - RNA, 22 nt, Human
gggaaaucaaaagggccaaaga

SEQ ID NO: 1434479 - RNA, 16 nt, Human
gggaaagccccugccc

SEQ ID NO: 1434480 - RNA, 20 nt, Human
gggaaagcaaagcacagaga

SEQ ID NO: 1434481 - RNA, 22 nt, Human
gggaacacuggggacuuggccu

SEQ ID NO: 1434482 - RNA, 21 nt, Human
gggaacaauuuggcaauuuug

SEQ ID NO: 1434483 - RNA, 14 nt, Human
gggaacaauuuggc

SEQ ID NO: 1434484 - RNA, 21 nt, Human
gggaaaugguacuguacagcu

SEQ ID NO: 1434485 - RNA, 16 nt, Human
aaaaaugauuucagua

SEQ ID NO: 1434486 - RNA, 20 nt, Human
aaaaaugauuucaguagcac

SEQ ID NO: 1434487 - RNA, 14 nt, Human
aaaaaugaucuaaa

SEQ ID NO: 1434488 - RNA, 17 nt, Human
aaaaauguauuuuaugu

SEQ ID NO: 1434489 - RNA, 16 nt, Human
aaaaauguauuuuaug

SEQ ID NO: 1434490 - RNA, 20 nt, Human
aaaaauguucuauuuuaauu

SEQ ID NO: 1434491 - RNA, 23 nt, Human
aaaaauguuuuuggucuuuuaua

SEQ ID NO: 1434492 - RNA, 12 nt, Human
aaaaauuaaaau

SEQ ID NO: 1434493 - RNA, 21 nt, Human
aaaaauuaaaccggaccaucu

SEQ ID NO: 1434494 - RNA, 13 nt, Human
gggagggcagcag

SEQ ID NO: 1434495 - RNA, 11 nt, Human
gggagggcagc

SEQ ID NO: 1434496 - RNA, 20 nt, Human
gggagggcagagcuggugcg

SEQ ID NO: 1434497 - RNA, 18 nt, Human
gggagggcagagcuggug

SEQ ID NO: 1434498 - RNA, 15 nt, Human
gggagggcagagcug

SEQ ID NO: 1434499 - RNA, 22 nt, Human
gggagggcggcaggggccugga

SEQ ID NO: 1434500 - RNA, 21 nt, Human
gggagggcggcaggggccugg

SEQ ID NO: 1434501 - RNA, 20 nt, Human
gggagacugggcugagggag

SEQ ID NO: 1434502 - RNA, 19 nt, Human
gggagacugggcugaggga

SEQ ID NO: 1434503 - RNA, 16 nt, Human
gggagacugggcugag

SEQ ID NO: 1434504 - RNA, 14 nt, Human
gggagacugggcug

SEQ ID NO: 1434505 - RNA, 17 nt, Human
gggacugucgcugcuuc

SEQ ID NO: 1434506 - RNA, 15 nt, Human
gggacugucgcugcu

SEQ ID NO: 1434507 - RNA, 13 nt, Human
gggacuguaaguu

SEQ ID NO: 1434508 - RNA, 15 nt, Human
gggacugcuaaauaa

SEQ ID NO: 1434509 - RNA, 16 nt, Human
gggacugcuaaauaaa

SEQ ID NO: 1434510 - RNA, 17 nt, Human
gggacugcggaggaagg

SEQ ID NO: 1434511 - RNA, 14 nt, Human
aaaagcuuccauga

SEQ ID NO: 1434512 - RNA, 23 nt, Human
aaaagcuuagcuuuagaaacagu

SEQ ID NO: 1434513 - RNA, 21 nt, Human
aaaagcuuagcuuuagaaaca

SEQ ID NO: 1434514 - RNA, 15 nt, Human
aaaagcuuacaaaua

SEQ ID NO: 1434515 - RNA, 20 nt, Human
aaaagcuauuuaaagcaucu

SEQ ID NO: 1434516 - RNA, 21 nt, Human
aaaagcuauaaagcaguauuu

SEQ ID NO: 1434517 - RNA, 17 nt, Human
aaaagcuauaaagcagu

SEQ ID NO: 1434518 - RNA, 14 nt, Human
aaaagcuagaauug

SEQ ID NO: 1434519 - RNA, 16 nt, Human
aaaagcuaauaccagu

SEQ ID NO: 1434520 - RNA, 22 nt, Human
aaaagcuccauuuuuagugaaa

SEQ ID NO: 1434521 - RNA, 20 nt, Human
aaaacuuuccucgccugaca

SEQ ID NO: 1434522 - RNA, 16 nt, Human
aaaacuuuccucgccu

SEQ ID NO: 1434523 - RNA, 14 nt, Human
aaaacuuuccucgc

SEQ ID NO: 1434524 - RNA, 13 nt, Human
aaaacuuuaaagc

SEQ ID NO: 1434525 - RNA, 22 nt, Human
aaaacugcuccuccuccuguau

SEQ ID NO: 1434526 - RNA, 11 nt, Human
aaaacugcucc

SEQ ID NO: 1434527 - RNA, 23 nt, Human
aaaagcgugagcuuaaaauacaa

SEQ ID NO: 1434528 - RNA, 21 nt, Human
aaaagcgugagcuuaaaauac

SEQ ID NO: 1434529 - RNA, 19 nt, Human
aaaagcgugagcuuaaaau

SEQ ID NO: 1434530 - RNA, 17 nt, Human
aaaagcgugagcuuaaa

SEQ ID NO: 1434531 - RNA, 11 nt, Human
aaaagccugcu

SEQ ID NO: 1434532 - RNA, 16 nt, Human
aaaagccuguuuaaga

SEQ ID NO: 1434533 - RNA, 18 nt, Human
aaaagccuguuuaagaga

SEQ ID NO: 1434534 - RNA, 16 nt, Human
aaaauaaagaauggaa

SEQ ID NO: 1434535 - RNA, 15 nt, Human
aaaauaaagaaugga

SEQ ID NO: 1434536 - RNA, 13 nt, Human
aaaaguaauaaaa

SEQ ID NO: 1434537 - RNA, 23 nt, Human
aaaagguuuaugaaaaagaagaa

SEQ ID NO: 1434538 - RNA, 20 nt, Human
aaaagguuuaugaaaaagaa

SEQ ID NO: 1434539 - RNA, 19 nt, Human
aaaagguuuaugaaaaaga

SEQ ID NO: 1434540 - RNA, 14 nt, Human
aaaagguuuaugaa

SEQ ID NO: 1434541 - RNA, 18 nt, Human
aaaagguuuacagaauuu

SEQ ID NO: 1434542 - RNA, 17 nt, Human
aaaauaaauauaucuac

SEQ ID NO: 1434543 - RNA, 14 nt, Human
aaaauaaauauauc

SEQ ID NO: 1434544 - RNA, 17 nt, Human
aaaauagcaaaagaaga

SEQ ID NO: 1434545 - RNA, 16 nt, Human
aaaauacggugggggu

SEQ ID NO: 1434546 - RNA, 14 nt, Human
aaaauacaagacug

SEQ ID NO: 1434547 - RNA, 15 nt, Human
aaaauaccagccagu

SEQ ID NO: 1434548 - RNA, 23 nt, Human
aaaauaaaugucaccagguacuu

SEQ ID NO: 1434549 - RNA, 14 nt, Human
aaaauaccagccag

SEQ ID NO: 1434550 - RNA, 23 nt, Human
aaaauaauuuuuauauuugaaau

SEQ ID NO: 1434551 - RNA, 21 nt, Human
aaaauaauuuuuauauuugaa

SEQ ID NO: 1434552 - RNA, 10 nt, Human
aaaauauaac

SEQ ID NO: 1434553 - RNA, 13 nt, Human
aaaauauaaaaua

SEQ ID NO: 1434554 - RNA, 20 nt, Human
aaaauaguuuggauauguaa

SEQ ID NO: 1434555 - RNA, 22 nt, Human
aaaauaguuuggauauguaaaa

SEQ ID NO: 1434556 - RNA, 19 nt, Human
aaaauaguuuggauaugua

SEQ ID NO: 1434557 - RNA, 16 nt, Human
aaaauaguuuggauau

SEQ ID NO: 1434558 - RNA, 13 nt, Human
aaaauaguuugga

SEQ ID NO: 1434559 - RNA, 23 nt, Human
aaaauaguuaagacaugauuucc

SEQ ID NO: 1434560 - RNA, 18 nt, Human
aaaauaguggugugauuu

SEQ ID NO: 1434561 - RNA, 21 nt, Human
aaaauaggguauauuuuccua

SEQ ID NO: 1434562 - RNA, 20 nt, Human
aaaauaggguauauuuuccu

SEQ ID NO: 1434563 - RNA, 22 nt, Human
aaaauagggacuaucuaucuua

SEQ ID NO: 1434564 - RNA, 13 nt, Human
aaaauaggcagga

SEQ ID NO: 1434565 - RNA, 12 nt, Human
aaaauaggcagg

SEQ ID NO: 1434566 - RNA, 20 nt, Human
aaaauagcuaaauaccucaa

SEQ ID NO: 1434567 - RNA, 20 nt, Human
aaaauagcguucuuguaauu

SEQ ID NO: 1434568 - RNA, 19 nt, Human
aaaauagcguucuuguaau

SEQ ID NO: 1434569 - RNA, 18 nt, Human
aaaauagcguucuuguaa

SEQ ID NO: 1434570 - RNA, 17 nt, Human
aaaauagcguucuugua

SEQ ID NO: 1434571 - RNA, 16 nt, Human
aaaauagcguucuugu

SEQ ID NO: 1434572 - RNA, 15 nt, Human
aaaauagcguucuug

SEQ ID NO: 1434573 - RNA, 13 nt, Human
aaaauauagcuaa

SEQ ID NO: 1434574 - RNA, 13 nt, Human
aaaauauauacua

SEQ ID NO: 1434575 - RNA, 17 nt, Human
aaaauauauacuaaaca

SEQ ID NO: 1434576 - RNA, 18 nt, Human
aaaauauauaucaaauau

SEQ ID NO: 1434577 - RNA, 14 nt, Human
aaaauauguaccaa

SEQ ID NO: 1434578 - RNA, 14 nt, Human
aaaauauauacuaa

SEQ ID NO: 1434579 - RNA, 21 nt, Human
gggauuuucagcccucagaau

SEQ ID NO: 1434580 - RNA, 19 nt, Human
gggauucugguuccagggu

SEQ ID NO: 1434581 - RNA, 17 nt, Human
gggcagagcuggcucug

SEQ ID NO: 1434582 - RNA, 16 nt, Human
gggcagagcuggcucu

SEQ ID NO: 1434583 - RNA, 11 nt, Human
gggcagagcug

SEQ ID NO: 1434584 - RNA, 15 nt, Human
gggcagagcuggugc

SEQ ID NO: 1434585 - RNA, 13 nt, Human
gggcagagcuggu

SEQ ID NO: 1434586 - RNA, 19 nt, Human
gggcagagcuggcucugag

SEQ ID NO: 1434587 - RNA, 16 nt, Human
gggcagcaauuuaaau

SEQ ID NO: 1434588 - RNA, 14 nt, Human
gggcagagcccaag

SEQ ID NO: 1434589 - RNA, 12 nt, Human
gggcagagccca

SEQ ID NO: 1434590 - RNA, 13 nt, Human
gggcagagccagg

SEQ ID NO: 1434591 - RNA, 14 nt, Human
gggcagagccagga

SEQ ID NO: 1434592 - RNA, 16 nt, Human
gggcagagccaggaag

SEQ ID NO: 1434593 - RNA, 19 nt, Human
gggagggcucugaggcgcc

SEQ ID NO: 1434594 - RNA, 20 nt, Human
gggagggcucugaggcgccc

SEQ ID NO: 1434595 - RNA, 18 nt, Human
gggagggcucugaggcgc

SEQ ID NO: 1434596 - RNA, 16 nt, Human
gggagggcucugaggc

SEQ ID NO: 1434597 - RNA, 15 nt, Human
gggagggcucugagg

SEQ ID NO: 1434598 - RNA, 14 nt, Human
gggagggcucugag

SEQ ID NO: 1434599 - RNA, 12 nt, Human
gggagggcucug

SEQ ID NO: 1434600 - RNA, 14 nt, Human
gggagggggagagg

SEQ ID NO: 1434601 - RNA, 11 nt, Human
gggagggcaga

SEQ ID NO: 1434602 - RNA, 21 nt, Human
gggauucaggaaaaggccugg

SEQ ID NO: 1434603 - RNA, 22 nt, Human
gggauucaggaaaaggccuggg

SEQ ID NO: 1434604 - RNA, 23 nt, Human
gggauuauuagaaucaaacauuu

SEQ ID NO: 1434605 - RNA, 20 nt, Human
gggauuaugggucacaggaa

SEQ ID NO: 1434606 - RNA, 18 nt, Human
gggauuaugggucacagg

SEQ ID NO: 1434607 - RNA, 15 nt, Human
gggagggggauccga

SEQ ID NO: 1434608 - RNA, 15 nt, Human
gggaggggcuccuuu

SEQ ID NO: 1434609 - RNA, 14 nt, Human
gggaggggcuccuu

SEQ ID NO: 1434610 - RNA, 17 nt, Human
gggauugaaggaugcug

SEQ ID NO: 1434611 - RNA, 19 nt, Human
gggcagccagggagagccc

SEQ ID NO: 1434612 - RNA, 18 nt, Human
gggcagccagggagagcc

SEQ ID NO: 1434613 - RNA, 14 nt, Human
gggcagccagggag

SEQ ID NO: 1434614 - RNA, 11 nt, Human
gggcagccagg

SEQ ID NO: 1434615 - RNA, 14 nt, Human
gggcagcagggcua

SEQ ID NO: 1434616 - RNA, 23 nt, Human
gggcagcagccagcccugccugg

SEQ ID NO: 1434617 - RNA, 22 nt, Human
gggcagcagccagcccugccug

SEQ ID NO: 1434618 - RNA, 20 nt, Human
gggcagcagccagcccugcc

SEQ ID NO: 1434619 - RNA, 19 nt, Human
gggcagcagccagcccugc

SEQ ID NO: 1434620 - RNA, 18 nt, Human
gggcagcagccagcccug

SEQ ID NO: 1434621 - RNA, 17 nt, Human
gggcagcagccagcccu

SEQ ID NO: 1434622 - RNA, 15 nt, Human
gggcagcagccagcc

SEQ ID NO: 1434623 - RNA, 14 nt, Human
gggcagcagccagc

SEQ ID NO: 1434624 - RNA, 13 nt, Human
gggcagcagccag

SEQ ID NO: 1434625 - RNA, 12 nt, Human
gggcagcagcca

SEQ ID NO: 1434626 - RNA, 15 nt, Human
gggcagcacaggagg

SEQ ID NO: 1434627 - RNA, 16 nt, Human
gggcagagcuggugcg

SEQ ID NO: 1434628 - RNA, 13 nt, Human
aaaaggccugggg

SEQ ID NO: 1434629 - RNA, 14 nt, Human
aaaaggccuggggu

SEQ ID NO: 1434630 - RNA, 19 nt, Human
gggcaggaguagcugagcu

SEQ ID NO: 1434631 - RNA, 15 nt, Human
gggcaggaguagcug

SEQ ID NO: 1434632 - RNA, 14 nt, Human
gggcaggaguagcu

SEQ ID NO: 1434633 - RNA, 20 nt, Human
aaaaggcuagguacacagcu

SEQ ID NO: 1434634 - RNA, 16 nt, Human
aaaagggacugagaaa

SEQ ID NO: 1434635 - RNA, 16 nt, Human
aaaagguuuacagaau

SEQ ID NO: 1434636 - RNA, 14 nt, Human
aaaagguuuacaga

SEQ ID NO: 1434637 - RNA, 13 nt, Human
aaaagguuuacag

SEQ ID NO: 1434638 - RNA, 19 nt, Human
aaaagggacugagaaauuu

SEQ ID NO: 1434639 - RNA, 17 nt, Human
ggcugucaucugugcac

SEQ ID NO: 1434640 - RNA, 14 nt, Human
ggcugucaucugug

SEQ ID NO: 1434641 - RNA, 21 nt, Human
ggcugguguuaacagaaggga

SEQ ID NO: 1434642 - RNA, 16 nt, Human
ggcuucagcugccagu

SEQ ID NO: 1434643 - RNA, 22 nt, Human
aaaaaguugcagcuguuuuguu

SEQ ID NO: 1434644 - RNA, 20 nt, Human
aaaaaguugcagcuguuuug

SEQ ID NO: 1434645 - RNA, 15 nt, Human
aaaaaguugcagcug

SEQ ID NO: 1434646 - RNA, 23 nt, Human
aaaaaguggguuuuuuaguugaa

SEQ ID NO: 1434647 - RNA, 12 nt, Human
aaaaagugucaa

SEQ ID NO: 1434648 - RNA, 22 nt, Human
aaaaaguggguuuuuuaguuga

SEQ ID NO: 1434649 - RNA, 20 nt, Human
aaaaaguggguuuuuuaguu

SEQ ID NO: 1434650 - RNA, 14 nt, Human
aaaaagugaaauaa

SEQ ID NO: 1434651 - RNA, 17 nt, Human
ggcuggugugguacaga

SEQ ID NO: 1434652 - RNA, 16 nt, Human
ggcuggugugguacag

SEQ ID NO: 1434653 - RNA, 15 nt, Human
ggcuggugugguaca

SEQ ID NO: 1434654 - RNA, 23 nt, Human
ggcuggugggugccuaggccugg

SEQ ID NO: 1434655 - RNA, 17 nt, Human
ggcugguguuaacagaa

SEQ ID NO: 1434656 - RNA, 16 nt, Human
ggcugguguuaacaga

SEQ ID NO: 1434657 - RNA, 23 nt, Human
ggcuggugugguacagagaagcc

SEQ ID NO: 1434658 - RNA, 22 nt, Human
ggcuggugugguacagagaagc

SEQ ID NO: 1434659 - RNA, 21 nt, Human
ggcuggugugguacagagaag

SEQ ID NO: 1434660 - RNA, 20 nt, Human
ggcuggugugguacagagaa

SEQ ID NO: 1434661 - RNA, 19 nt, Human
ggcuggugugguacagaga

SEQ ID NO: 1434662 - RNA, 18 nt, Human
ggcuggugugguacagag

SEQ ID NO: 1434663 - RNA, 14 nt, Human
gggaaagcaaagca

SEQ ID NO: 1434664 - RNA, 14 nt, Human
gggaaacuuggcuc

SEQ ID NO: 1434665 - RNA, 21 nt, Human
gggaaacuggccauggccugc

SEQ ID NO: 1434666 - RNA, 14 nt, Human
gggaaacuggccau

SEQ ID NO: 1434667 - RNA, 22 nt, Human
gggaaacagcaucuccaagcag

SEQ ID NO: 1434668 - RNA, 18 nt, Human
gggaaaauuauuugcaua

SEQ ID NO: 1434669 - RNA, 17 nt, Human
gggaaaauuauuugcau

SEQ ID NO: 1434670 - RNA, 17 nt, Human
ggcuuccuggugcugga

SEQ ID NO: 1434671 - RNA, 20 nt, Human
gggaaaaacuuuggaaccag

SEQ ID NO: 1434672 - RNA, 18 nt, Human
ggcuuccuggugcuggag

SEQ ID NO: 1434673 - RNA, 14 nt, Human
ggcuuccuggugcu

SEQ ID NO: 1434674 - RNA, 13 nt, Human
ggcuuccuggugc

SEQ ID NO: 1434675 - RNA, 12 nt, Human
ggcuuccuggug

SEQ ID NO: 1434676 - RNA, 11 nt, Human
ggcuuccuggu

SEQ ID NO: 1434677 - RNA, 21 nt, Human
ggcuuccuggagcagaagcag

SEQ ID NO: 1434678 - RNA, 16 nt, Human
ggcuuccuggagcaga

SEQ ID NO: 1434679 - RNA, 15 nt, Human
ggcuuccuggagcag

SEQ ID NO: 1434680 - RNA, 14 nt, Human
ggcuuccuggagca

SEQ ID NO: 1434681 - RNA, 13 nt, Human
ggcuuccuggagc

SEQ ID NO: 1434682 - RNA, 12 nt, Human
ggcuuccuggag

SEQ ID NO: 1434683 - RNA, 20 nt, Human
ggcuucccaagggcugccgg

SEQ ID NO: 1434684 - RNA, 12 nt, Human
ggcuucccaagg

SEQ ID NO: 1434685 - RNA, 18 nt, Human
ggcuucccauccccagcg

SEQ ID NO: 1434686 - RNA, 17 nt, Human
ggcuucccauccccagc

SEQ ID NO: 1434687 - RNA, 13 nt, Human
ggcuucaggucca

SEQ ID NO: 1434688 - RNA, 16 nt, Human
ggcuucaugccagcua

SEQ ID NO: 1434689 - RNA, 16 nt, Human
ggcuucagguccaggc

SEQ ID NO: 1434690 - RNA, 15 nt, Human
ggcuucaugccagcu

SEQ ID NO: 1434691 - RNA, 12 nt, Human
aaaaaaaacagu

SEQ ID NO: 1434692 - RNA, 14 nt, Human
aaaaaaaaauguuc

SEQ ID NO: 1434693 - RNA, 17 nt, Human
aaaaagcuaauaccagu

SEQ ID NO: 1434694 - RNA, 20 nt, Human
aaaaaaguugcagcuguuuu

SEQ ID NO: 1434695 - RNA, 13 nt, Human
aaaaaaaauuacu

SEQ ID NO: 1434696 - RNA, 14 nt, Human
aaaaaaaaguugca

SEQ ID NO: 1434697 - RNA, 12 nt, Human
aaaaaaaauaca

SEQ ID NO: 1434698 - RNA, 13 nt, Human
aaaaaaaagcuuc

SEQ ID NO: 1434699 - RNA, 11 nt, Human
aaaaaagauga

SEQ ID NO: 1434700 - RNA, 17 nt, Human
aaaaagugaaauaaugu

SEQ ID NO: 1434701 - RNA, 18 nt, Human
aaaaagguuuacagaauu

SEQ ID NO: 1434702 - RNA, 13 nt, Human
aaaaagguuuaca

SEQ ID NO: 1434703 - RNA, 20 nt, Human
aaaaagcuuaaaacuuugaa

SEQ ID NO: 1434704 - RNA, 19 nt, Human
aaaaagcuuaaaacuuuga

SEQ ID NO: 1434705 - RNA, 17 nt, Human
aaaaagcuuaaaacuuu

SEQ ID NO: 1434706 - RNA, 15 nt, Human
aaaaagcuuaaaacu

SEQ ID NO: 1434707 - RNA, 12 nt, Human
aaaaagcuuaaa

SEQ ID NO: 1434708 - RNA, 18 nt, Human
aaaaagcgaaaaaaucag

SEQ ID NO: 1434709 - RNA, 19 nt, Human
aaaaagcuuccaugauucu

SEQ ID NO: 1434710 - RNA, 15 nt, Human
aaaaagggaggggga

SEQ ID NO: 1434711 - RNA, 16 nt, Human
aaaaaggacaucagca

SEQ ID NO: 1434712 - RNA, 22 nt, Human
ggcugaaauucuccuggagguc

SEQ ID NO: 1434713 - RNA, 21 nt, Human
ggcugaaauucuccuggaggu

SEQ ID NO: 1434714 - RNA, 19 nt, Human
ggcugaaauucuccuggag

SEQ ID NO: 1434715 - RNA, 18 nt, Human
ggcugaaauucuccugga

SEQ ID NO: 1434716 - RNA, 17 nt, Human
ggcugaaauucuccugg

SEQ ID NO: 1434717 - RNA, 16 nt, Human
ggcugaaauucuccug

SEQ ID NO: 1434718 - RNA, 14 nt, Human
ggcugaaauucucc

SEQ ID NO: 1434719 - RNA, 23 nt, Human
ggcugcaguucgacucugugcug

SEQ ID NO: 1434720 - RNA, 22 nt, Human
ggcugcaguucgacucugugcu

SEQ ID NO: 1434721 - RNA, 17 nt, Human
ggcucgaaucucugugc

SEQ ID NO: 1434722 - RNA, 15 nt, Human
ggcucgaaucucugu

SEQ ID NO: 1434723 - RNA, 13 nt, Human
ggcucgaaucucu

SEQ ID NO: 1434724 - RNA, 22 nt, Human
ggcuccuugugggccugggcuc

SEQ ID NO: 1434725 - RNA, 12 nt, Human
ggcuccuuucca

SEQ ID NO: 1434726 - RNA, 20 nt, Human
ggcuccuugugggccugggc

SEQ ID NO: 1434727 - RNA, 20 nt, Human
ggcucgaaucucugugccuu

SEQ ID NO: 1434728 - RNA, 19 nt, Human
ggcucgaaucucugugccu

SEQ ID NO: 1434729 - RNA, 18 nt, Human
ggcucgaaucucugugcc

SEQ ID NO: 1434730 - RNA, 16 nt, Human
ggcuccgugugggaga

SEQ ID NO: 1434731 - RNA, 15 nt, Human
ggcuccgugugggag

SEQ ID NO: 1434732 - RNA, 14 nt, Human
ggcuccguguggga

SEQ ID NO: 1434733 - RNA, 18 nt, Human
ggcuccgugugggagacc

SEQ ID NO: 1434734 - RNA, 17 nt, Human
ggcuccuauucaacaca

SEQ ID NO: 1434735 - RNA, 9 nt, Human
ggcuccugc

SEQ ID NO: 1434736 - RNA, 20 nt, Human
ggcuccucgagaucccaaca

SEQ ID NO: 1434737 - RNA, 17 nt, Human
ggcuccgugugggagac

SEQ ID NO: 1434738 - RNA, 23 nt, Human
ggcuccuccaggguggcagcaac

SEQ ID NO: 1434739 - RNA, 15 nt, Human
ggcuggcacaggaca

SEQ ID NO: 1434740 - RNA, 14 nt, Human
ggcuggcacaggac

SEQ ID NO: 1434741 - RNA, 13 nt, Human
ggcuggcacagga

SEQ ID NO: 1434742 - RNA, 19 nt, Human
ggcuggaugagcucccaca

SEQ ID NO: 1434743 - RNA, 23 nt, Human
ggcuggaugagcucccacaagcc

SEQ ID NO: 1434744 - RNA, 18 nt, Human
ggcuggaugagcucccac

SEQ ID NO: 1434745 - RNA, 16 nt, Human
ggcuggaugagcuccc

SEQ ID NO: 1434746 - RNA, 15 nt, Human
ggcuggaugagcucc

SEQ ID NO: 1434747 - RNA, 14 nt, Human
ggcuggaugagcuc

SEQ ID NO: 1434748 - RNA, 13 nt, Human
ggcuggaugagcu

SEQ ID NO: 1434749 - RNA, 13 nt, Human
ggcugccccucuc

SEQ ID NO: 1434750 - RNA, 15 nt, Human
ggcuggcuggccuca

SEQ ID NO: 1434751 - RNA, 13 nt, Human
ggcuggcuggccu

SEQ ID NO: 1434752 - RNA, 10 nt, Human
ggcuggcugg

SEQ ID NO: 1434753 - RNA, 15 nt, Human
ggcuggcugagggca

SEQ ID NO: 1434754 - RNA, 14 nt, Human
ggcuggcugagggc

SEQ ID NO: 1434755 - RNA, 12 nt, Human
ggcuggcugagg

SEQ ID NO: 1434756 - RNA, 22 nt, Human
ggcuggcuccagaugcagggca

SEQ ID NO: 1434757 - RNA, 24 nt, Human
ggcuggcuccagaugcagggcagu

SEQ ID NO: 1434758 - RNA, 23 nt, Human
ggcugggacguggcucagccagc

SEQ ID NO: 1434759 - RNA, 19 nt, Human
ggcugggacguggcucagc

SEQ ID NO: 1434760 - RNA, 18 nt, Human
ggcugggacguggcucag

SEQ ID NO: 1434761 - RNA, 17 nt, Human
ggcugggaacagugugc

SEQ ID NO: 1434762 - RNA, 21 nt, Human
ggcugggaauggaggggcaga

SEQ ID NO: 1434763 - RNA, 22 nt, Human
ggcugggaauggaggggcagag

SEQ ID NO: 1434764 - RNA, 20 nt, Human
gaacccuaaauaauaaaaau

SEQ ID NO: 1434765 - RNA, 16 nt, Human
gaacccugcccacucc

SEQ ID NO: 1434766 - RNA, 19 nt, Human
gaacccucuguuccuuccc

SEQ ID NO: 1434767 - RNA, 15 nt, Human
gaacuccuugauuuu

SEQ ID NO: 1434768 - RNA, 15 nt, Human
gaaccgaggcaggga

SEQ ID NO: 1434769 - RNA, 12 nt, Human
gaaccgaggcag

SEQ ID NO: 1434770 - RNA, 22 nt, Human
gaacuccuugauuuuagccuuc

SEQ ID NO: 1434771 - RNA, 14 nt, Human
gaacugaaaucaua

SEQ ID NO: 1434772 - RNA, 15 nt, Human
gaacugcugccacug

SEQ ID NO: 1434773 - RNA, 14 nt, Human
gaacugcugccacu

SEQ ID NO: 1434774 - RNA, 13 nt, Human
gaacugcugccac

SEQ ID NO: 1434775 - RNA, 22 nt, Human
gaacugcuagucaagugcgucc

SEQ ID NO: 1434776 - RNA, 21 nt, Human
gaacugccuuuggcagaguuc

SEQ ID NO: 1434777 - RNA, 19 nt, Human
gaacugaagggggcggccu

SEQ ID NO: 1434778 - RNA, 12 nt, Human
gaacugaacuca

SEQ ID NO: 1434779 - RNA, 23 nt, Human
gaacugaacaccauugaaggcuu

SEQ ID NO: 1434780 - RNA, 22 nt, Human
gaacugaacaccauugaaggcu

SEQ ID NO: 1434781 - RNA, 21 nt, Human
gaacugaacaccauugaaggc

SEQ ID NO: 1434782 - RNA, 12 nt, Human
gaacugaacacc

SEQ ID NO: 1434783 - RNA, 12 nt, Human
gaacucugaaau

SEQ ID NO: 1434784 - RNA, 15 nt, Human
gaacuggccaagcug

SEQ ID NO: 1434785 - RNA, 14 nt, Human
gaacuggccaagcu

SEQ ID NO: 1434786 - RNA, 16 nt, Human
gaacuggaggcaggga

SEQ ID NO: 1434787 - RNA, 11 nt, Human
gaacuggaggc

SEQ ID NO: 1434788 - RNA, 22 nt, Human
gaacuggacccuguugcuaagc

SEQ ID NO: 1434789 - RNA, 23 nt, Human
gaacuggacccuguugcuaagcc

SEQ ID NO: 1434790 - RNA, 17 nt, Human
gaacugcugccacugag

SEQ ID NO: 1434791 - RNA, 16 nt, Human
gaacugcugccacuga

SEQ ID NO: 1434792 - RNA, 18 nt, Human
gaacuggacccuguugcu

SEQ ID NO: 1434793 - RNA, 20 nt, Human
gaacuggacccuguugcuaa

SEQ ID NO: 1434794 - RNA, 13 nt, Human
gaagaauuauuuu

SEQ ID NO: 1434795 - RNA, 12 nt, Human
gaagaauuccag

SEQ ID NO: 1434796 - RNA, 22 nt, Human
gaagaauguuaagacuugacag

SEQ ID NO: 1434797 - RNA, 20 nt, Human
gaagaaugcacaagaaugga

SEQ ID NO: 1434798 - RNA, 24 nt, Human
gaagaaugcuuaaucagauagaua

SEQ ID NO: 1434799 - RNA, 23 nt, Human
gaagaaugcacaagaauggauca

SEQ ID NO: 1434800 - RNA, 21 nt, Human
gaagaaucucaucucagugaa

SEQ ID NO: 1434801 - RNA, 23 nt, Human
gaagaauacuucucauuuuuuaa

SEQ ID NO: 1434802 - RNA, 18 nt, Human
gaacuggccaagcugagg

SEQ ID NO: 1434803 - RNA, 16 nt, Human
gaacuggccaagcuga

SEQ ID NO: 1434804 - RNA, 16 nt, Human
gaagacaaugacuuac

SEQ ID NO: 1434805 - RNA, 22 nt, Human
gaagacaaugacuuacuguaca

SEQ ID NO: 1434806 - RNA, 21 nt, Human
gaagacacagacugcgauuug

SEQ ID NO: 1434807 - RNA, 12 nt, Human
gaagacacagac

SEQ ID NO: 1434808 - RNA, 18 nt, Human
gaagacaauugacaacag

SEQ ID NO: 1434809 - RNA, 14 nt, Human
gaagacaauugaca

SEQ ID NO: 1434810 - RNA, 12 nt, Human
gaagacaaacuu

SEQ ID NO: 1434811 - RNA, 14 nt, Human
gaagcaaaauuuuu

SEQ ID NO: 1434812 - RNA, 20 nt, Human
gaagcaaccucaguaauuua

SEQ ID NO: 1434813 - RNA, 23 nt, Human
gaagcaaaugucaugcugccuua

SEQ ID NO: 1434814 - RNA, 20 nt, Human
gaagcaaguaaaaaggcuaa

SEQ ID NO: 1434815 - RNA, 22 nt, Human
gaagcaaaugucaugcugccuu

SEQ ID NO: 1434816 - RNA, 21 nt, Human
gaagcaaaugucaugcugccu

SEQ ID NO: 1434817 - RNA, 17 nt, Human
gaagcaaaucgaaugaa

SEQ ID NO: 1434818 - RNA, 16 nt, Human
gaagcaagcuuaaugg

SEQ ID NO: 1434819 - RNA, 22 nt, Human
gaagcaaccucaguaauuuaga

SEQ ID NO: 1434820 - RNA, 20 nt, Human
gaagcaaugcuucaucccuu

SEQ ID NO: 1434821 - RNA, 22 nt, Human
gaagggcugcuucccugaagcu

SEQ ID NO: 1434822 - RNA, 21 nt, Human
gaagggcuuggacucaagcaa

SEQ ID NO: 1434823 - RNA, 22 nt, Human
gaagggccugcccaguugcacu

SEQ ID NO: 1434824 - RNA, 15 nt, Human
gaaggcuugggauuu

SEQ ID NO: 1434825 - RNA, 18 nt, Human
gaagggccagagccaggg

SEQ ID NO: 1434826 - RNA, 17 nt, Human
gaagggccagagccagg

SEQ ID NO: 1434827 - RNA, 16 nt, Human
gaagggccagagccag

SEQ ID NO: 1434828 - RNA, 15 nt, Human
gaagggccagagcca

SEQ ID NO: 1434829 - RNA, 14 nt, Human
gaagggccagagcc

SEQ ID NO: 1434830 - RNA, 16 nt, Human
gaaggcuucucucugu

SEQ ID NO: 1434831 - RNA, 20 nt, Human
gaagcucuuggagcugugag

SEQ ID NO: 1434832 - RNA, 23 nt, Human
gaagcuccucuccccagcccaga

SEQ ID NO: 1434833 - RNA, 22 nt, Human
gaagcuccucuccccagcccag

SEQ ID NO: 1434834 - RNA, 21 nt, Human
gaagcuccucuccccagccca

SEQ ID NO: 1434835 - RNA, 20 nt, Human
gaagcuccucuccccagccc

SEQ ID NO: 1434836 - RNA, 19 nt, Human
gaagcuccucuccccagcc

SEQ ID NO: 1434837 - RNA, 17 nt, Human
gaagcuccucuccccag

SEQ ID NO: 1434838 - RNA, 23 nt, Human
gaagcuagacacaugaagguaaa

SEQ ID NO: 1434839 - RNA, 21 nt, Human
gaagcuagacacaugaaggua

SEQ ID NO: 1434840 - RNA, 18 nt, Human
gaagcuagacacaugaag

SEQ ID NO: 1434841 - RNA, 20 nt, Human
gaagcuauuuuuuucaguuu

SEQ ID NO: 1434842 - RNA, 16 nt, Human
gaagcuagucuuuugc

SEQ ID NO: 1434843 - RNA, 14 nt, Human
gaagcuagucuuuu

SEQ ID NO: 1434844 - RNA, 22 nt, Human
gaagcuagacacaugaagguaa

SEQ ID NO: 1434845 - RNA, 20 nt, Human
gaagcuaucguaaaauuaag

SEQ ID NO: 1434846 - RNA, 13 nt, Human
gaauauuguccau

SEQ ID NO: 1434847 - RNA, 11 nt, Human
gaauauuugaa

SEQ ID NO: 1434848 - RNA, 12 nt, Human
gaauauuugaau

SEQ ID NO: 1434849 - RNA, 13 nt, Human
gaauauuugaauc

SEQ ID NO: 1434850 - RNA, 10 nt, Human
gaauauuuga

SEQ ID NO: 1434851 - RNA, 21 nt, Human
gaauaugucagugcugaugua

SEQ ID NO: 1434852 - RNA, 22 nt, Human
gaauauacagcaggugcucaau

SEQ ID NO: 1434853 - RNA, 20 nt, Human
gaauauaauuguuuuaucug

SEQ ID NO: 1434854 - RNA, 19 nt, Human
gaauauaauuguuuuaucu

SEQ ID NO: 1434855 - RNA, 15 nt, Human
gaaggggacccuccg

SEQ ID NO: 1434856 - RNA, 14 nt, Human
gaaguugcugcuuc

SEQ ID NO: 1434857 - RNA, 12 nt, Human
gaaguugcugcu

SEQ ID NO: 1434858 - RNA, 21 nt, Human
gaaguugcugcuucucccagg

SEQ ID NO: 1434859 - RNA, 17 nt, Human
gaaguuaguuuguauau

SEQ ID NO: 1434860 - RNA, 16 nt, Human
gaaguuaguuuguaua

SEQ ID NO: 1434861 - RNA, 15 nt, Human
gaaguuaguuuguau

SEQ ID NO: 1434862 - RNA, 17 nt, Human
gaaguuagcuuuaacuu

SEQ ID NO: 1434863 - RNA, 19 nt, Human
gaaguuagcuuuaacuuaa

SEQ ID NO: 1434864 - RNA, 21 nt, Human
gaaguugacuuauaguacaug

SEQ ID NO: 1434865 - RNA, 23 nt, Human
gaaguugacuuauaguacaugau

SEQ ID NO: 1434866 - RNA, 14 nt, Human
gacugucuggggag

SEQ ID NO: 1434867 - RNA, 15 nt, Human
gacugucuggggagc

SEQ ID NO: 1434868 - RNA, 19 nt, Human
gacugucuggccccccugg

SEQ ID NO: 1434869 - RNA, 23 nt, Human
gacuguagggagggcggcagggg

SEQ ID NO: 1434870 - RNA, 22 nt, Human
gacuguagggagggcggcaggg

SEQ ID NO: 1434871 - RNA, 13 nt, Human
gacuguagggagg

SEQ ID NO: 1434872 - RNA, 14 nt, Human
gacugaauuaugaa

SEQ ID NO: 1434873 - RNA, 14 nt, Human
gacugaauuucuuu

SEQ ID NO: 1434874 - RNA, 20 nt, Human
gacugaauuaugaaacuuuu

SEQ ID NO: 1434875 - RNA, 16 nt, Human
gacugaauuucuuuug

SEQ ID NO: 1434876 - RNA, 18 nt, Human
gacuuguuuuugcacaug

SEQ ID NO: 1434877 - RNA, 13 nt, Human
gacuguuuggaaa

SEQ ID NO: 1434878 - RNA, 18 nt, Human
gacuuuaacauaagcuau

SEQ ID NO: 1434879 - RNA, 14 nt, Human
gacuuuaacauaag

SEQ ID NO: 1434880 - RNA, 18 nt, Human
gacugugugugcccucug

SEQ ID NO: 1434881 - RNA, 21 nt, Human
gacugugugugcccucugggc

SEQ ID NO: 1434882 - RNA, 17 nt, Human
gacugugugugcccucu

SEQ ID NO: 1434883 - RNA, 15 nt, Human
gacugugugugcccu

SEQ ID NO: 1434884 - RNA, 21 nt, Human
gacuguugggguggguauaaa

SEQ ID NO: 1434885 - RNA, 15 nt, Human
gacugugauucagaa

SEQ ID NO: 1434886 - RNA, 22 nt, Human
gacugugugcucaggagcccug

SEQ ID NO: 1434887 - RNA, 18 nt, Human
gacucugcagccucagag

SEQ ID NO: 1434888 - RNA, 16 nt, Human
gacucugcagccucag

SEQ ID NO: 1434889 - RNA, 15 nt, Human
gacucugcagccuca

SEQ ID NO: 1434890 - RNA, 14 nt, Human
gacucugcagccuc

SEQ ID NO: 1434891 - RNA, 13 nt, Human
gacucugcagccu

SEQ ID NO: 1434892 - RNA, 19 nt, Human
gacugaaaauauuguuuua

SEQ ID NO: 1434893 - RNA, 21 nt, Human
gacucuugccuguuucccagg

SEQ ID NO: 1434894 - RNA, 11 nt, Human
gacucuugccu

SEQ ID NO: 1434895 - RNA, 17 nt, Human
gacucuucugagcaccu

SEQ ID NO: 1434896 - RNA, 21 nt, Human
gacucugugcuggccagcgag

SEQ ID NO: 1434897 - RNA, 21 nt, Human
gacucuuaagaagacugcauu

SEQ ID NO: 1434898 - RNA, 18 nt, Human
gacucugugcuggccagc

SEQ ID NO: 1434899 - RNA, 17 nt, Human
gacucugugcuggccag

SEQ ID NO: 1434900 - RNA, 16 nt, Human
gacucugugcuggcca

SEQ ID NO: 1434901 - RNA, 14 nt, Human
gacucugugcuggc

SEQ ID NO: 1434902 - RNA, 13 nt, Human
gacucugugcugg

SEQ ID NO: 1434903 - RNA, 15 nt, Human
gacucuuaagaagac

SEQ ID NO: 1434904 - RNA, 14 nt, Human
gacucuuaagaaga

SEQ ID NO: 1434905 - RNA, 17 nt, Human
gacuuuauguaguuuuu

SEQ ID NO: 1434906 - RNA, 19 nt, Human
gacuuuauagaucagccag

SEQ ID NO: 1434907 - RNA, 21 nt, Human
gacuuuacccauuuggguggg

SEQ ID NO: 1434908 - RNA, 19 nt, Human
gacuuuaacauaagcuauu

SEQ ID NO: 1434909 - RNA, 21 nt, Human
gacgccugggggugccaggac

SEQ ID NO: 1434910 - RNA, 19 nt, Human
gacgccugggggugccagg

SEQ ID NO: 1434911 - RNA, 18 nt, Human
gaccugagccugccgagc

SEQ ID NO: 1434912 - RNA, 17 nt, Human
gaccugagccugccgag

SEQ ID NO: 1434913 - RNA, 16 nt, Human
gaccugagccugccga

SEQ ID NO: 1434914 - RNA, 15 nt, Human
gaccugagccugccg

SEQ ID NO: 1434915 - RNA, 14 nt, Human
gaccugagccugcc

SEQ ID NO: 1434916 - RNA, 13 nt, Human
gaccugagccugc

SEQ ID NO: 1434917 - RNA, 12 nt, Human
gaccugagccug

SEQ ID NO: 1434918 - RNA, 11 nt, Human
gaccugagccu

SEQ ID NO: 1434919 - RNA, 16 nt, Human
gaccugagaccugaag

SEQ ID NO: 1434920 - RNA, 16 nt, Human
gaccugagaauguauc

SEQ ID NO: 1434921 - RNA, 23 nt, Human
gaccugaaauuccaaagucucua

SEQ ID NO: 1434922 - RNA, 24 nt, Human
gaccugaaggguugacuuuaccca

SEQ ID NO: 1434923 - RNA, 12 nt, Human
gaccugaagaau

SEQ ID NO: 1434924 - RNA, 19 nt, Human
gaccugaaauuccaaaguc

SEQ ID NO: 1434925 - RNA, 17 nt, Human
gaccugaaauuccaaag

SEQ ID NO: 1434926 - RNA, 15 nt, Human
gaccugaaauuccaa

SEQ ID NO: 1434927 - RNA, 15 nt, Human
gaccucuggguuggg

SEQ ID NO: 1434928 - RNA, 17 nt, Human
gaccucugacagcagca

SEQ ID NO: 1434929 - RNA, 16 nt, Human
gaccucugacagcagc

SEQ ID NO: 1434930 - RNA, 15 nt, Human
gaccucugacagcag

SEQ ID NO: 1434931 - RNA, 14 nt, Human
gaccucugacagca

SEQ ID NO: 1434932 - RNA, 22 nt, Human
gaccucuccccuggaacugucu

SEQ ID NO: 1434933 - RNA, 14 nt, Human
gaccucugcagcaa

SEQ ID NO: 1434934 - RNA, 16 nt, Human
gaccaucugauuaaaa

SEQ ID NO: 1434935 - RNA, 18 nt, Human
gacacagaaaauguugag

SEQ ID NO: 1434936 - RNA, 16 nt, Human
gacacagaaaauguug

SEQ ID NO: 1434937 - RNA, 11 nt, Human
gacacagaaaa

SEQ ID NO: 1434938 - RNA, 16 nt, Human
gacacacugaagaagc

SEQ ID NO: 1434939 - RNA, 15 nt, Human
gacacacugaagaag

SEQ ID NO: 1434940 - RNA, 20 nt, Human
gacagaaccccuacaugaaa

SEQ ID NO: 1434941 - RNA, 17 nt, Human
gacagaaccacagggcu

SEQ ID NO: 1434942 - RNA, 20 nt, Human
gaccauaauguuacauuauu

SEQ ID NO: 1434943 - RNA, 18 nt, Human
gaccagggcuccagcccc

SEQ ID NO: 1434944 - RNA, 11 nt, Human
gaccagggcuc

SEQ ID NO: 1434945 - RNA, 12 nt, Human
gaccagcucagg

SEQ ID NO: 1434946 - RNA, 15 nt, Human
gaccagccuggccca

SEQ ID NO: 1434947 - RNA, 16 nt, Human
gaccagccuggcccac

SEQ ID NO: 1434948 - RNA, 14 nt, Human
gaccagccuggccc

SEQ ID NO: 1434949 - RNA, 21 nt, Human
gaccagcugcuccgaggaccc

SEQ ID NO: 1434950 - RNA, 20 nt, Human
gaccagcugcuccgaggacc

SEQ ID NO: 1434951 - RNA, 19 nt, Human
gaccagcugcuccgaggac

SEQ ID NO: 1434952 - RNA, 15 nt, Human
gaccagcugcuccga

SEQ ID NO: 1434953 - RNA, 13 nt, Human
gaccagcugcucc

SEQ ID NO: 1434954 - RNA, 21 nt, Human
gaccagcucccccucccuccc

SEQ ID NO: 1434955 - RNA, 20 nt, Human
gaccagcucccccucccucc

SEQ ID NO: 1434956 - RNA, 19 nt, Human
gaccagcucccccucccuc

SEQ ID NO: 1434957 - RNA, 18 nt, Human
gaccagcucccccucccu

SEQ ID NO: 1434958 - RNA, 13 nt, Human
gaccagcuccccc

SEQ ID NO: 1434959 - RNA, 22 nt, Human
gaccagcucaggacagaugcca

SEQ ID NO: 1434960 - RNA, 14 nt, Human
gaccagcucaggac

SEQ ID NO: 1434961 - RNA, 13 nt, Human
gaccagcucagga

SEQ ID NO: 1434962 - RNA, 23 nt, Human
gaccagcugcuccgaggacccag

SEQ ID NO: 1434963 - RNA, 22 nt, Human
gaccagcuuuucccaaaagccc

SEQ ID NO: 1434964 - RNA, 21 nt, Human
gacauucaccugccccaacuc

SEQ ID NO: 1434965 - RNA, 18 nt, Human
gacauucaccugccccaa

SEQ ID NO: 1434966 - RNA, 19 nt, Human
gacagugauauuggaacuu

SEQ ID NO: 1434967 - RNA, 20 nt, Human
gacauucugaaugcuucuaa

SEQ ID NO: 1434968 - RNA, 19 nt, Human
gacauucugaaugcuucua

SEQ ID NO: 1434969 - RNA, 15 nt, Human
gacauucugaaugcu

SEQ ID NO: 1434970 - RNA, 14 nt, Human
gacauucugaaugc

SEQ ID NO: 1434971 - RNA, 12 nt, Human
gacauucugaau

SEQ ID NO: 1434972 - RNA, 22 nt, Human
gacauucugauucgaaugacac

SEQ ID NO: 1434973 - RNA, 23 nt, Human
gacauucugauucgaaugacacu

SEQ ID NO: 1434974 - RNA, 13 nt, Human
gacauucugauuc

SEQ ID NO: 1434975 - RNA, 22 nt, Human
gacauucugaaugcuucuaagu

SEQ ID NO: 1434976 - RNA, 23 nt, Human
gacauugaccuauuuccagaaau

SEQ ID NO: 1434977 - RNA, 16 nt, Human
gacauuucucuaagag

SEQ ID NO: 1434978 - RNA, 13 nt, Human
gacauuucucuaa

SEQ ID NO: 1434979 - RNA, 17 nt, Human
gacauuugcucauggaa

SEQ ID NO: 1434980 - RNA, 16 nt, Human
gacauuugcucaugga

SEQ ID NO: 1434981 - RNA, 18 nt, Human
gagggcuggcuggccuca

SEQ ID NO: 1434982 - RNA, 16 nt, Human
gagggcuggcuggccu

SEQ ID NO: 1434983 - RNA, 14 nt, Human
gagggcuggcuggc

SEQ ID NO: 1434984 - RNA, 13 nt, Human
gagggcuggcugg

SEQ ID NO: 1434985 - RNA, 10 nt, Human
gagggcuggc

SEQ ID NO: 1434986 - RNA, 23 nt, Human
gagggcuggaggcccaggcuggg

SEQ ID NO: 1434987 - RNA, 20 nt, Human
gagggcuggaggcccaggcu

SEQ ID NO: 1434988 - RNA, 19 nt, Human
gagggcuggaggcccaggc

SEQ ID NO: 1434989 - RNA, 17 nt, Human
gagggcuggaggcccag

SEQ ID NO: 1434990 - RNA, 16 nt, Human
gagggcuggaggccca

SEQ ID NO: 1434991 - RNA, 10 nt, Human
gagggcugga

SEQ ID NO: 1434992 - RNA, 12 nt, Human
gagggcucugag

SEQ ID NO: 1434993 - RNA, 19 nt, Human
gaggcugaggcuggcacag

SEQ ID NO: 1434994 - RNA, 16 nt, Human
gaggcugaggcuggca

SEQ ID NO: 1434995 - RNA, 15 nt, Human
gaggcugaggcuggc

SEQ ID NO: 1434996 - RNA, 20 nt, Human
gaggcugaggcuggcacagg

SEQ ID NO: 1434997 - RNA, 13 nt, Human
gagggcugcccug

SEQ ID NO: 1434998 - RNA, 16 nt, Human
gagggcugccuuugga

SEQ ID NO: 1434999 - RNA, 15 nt, Human
gagggcucugaggcg

SEQ ID NO: 1435000 - RNA, 14 nt, Human
gagggcucugaggc

SEQ ID NO: 1435001 - RNA, 13 nt, Human
gagggcucugagg

SEQ ID NO: 1435002 - RNA, 9 nt, Human
gagggcugc

SEQ ID NO: 1435003 - RNA, 19 nt, Human
gaggggccgaugcccagag

SEQ ID NO: 1435004 - RNA, 22 nt, Human
gaggaccugagccugccgagca

SEQ ID NO: 1435005 - RNA, 18 nt, Human
gaggaccugagccugccg

SEQ ID NO: 1435006 - RNA, 17 nt, Human
gaggaccugagccugcc

SEQ ID NO: 1435007 - RNA, 16 nt, Human
gaggaccugagccugc

SEQ ID NO: 1435008 - RNA, 15 nt, Human
gaggaccugagccug

SEQ ID NO: 1435009 - RNA, 14 nt, Human
gaggaccugagccu

SEQ ID NO: 1435010 - RNA, 13 nt, Human
gaggaccugagcc

SEQ ID NO: 1435011 - RNA, 12 nt, Human
gaggaccugagc

SEQ ID NO: 1435012 - RNA, 21 nt, Human
gaggaccugagccugccgagc

SEQ ID NO: 1435013 - RNA, 16 nt, Human
gaggcaggggcuuccu

SEQ ID NO: 1435014 - RNA, 21 nt, Human
gaggcaggggcuuccuggugc

SEQ ID NO: 1435015 - RNA, 20 nt, Human
gaggcaggggcuuccuggug

SEQ ID NO: 1435016 - RNA, 18 nt, Human
gaggcaggggcuuccugg

SEQ ID NO: 1435017 - RNA, 17 nt, Human
gaggcaggggcuuccug

SEQ ID NO: 1435018 - RNA, 23 nt, Human
gaggcaguaccugggcaagcugg

SEQ ID NO: 1435019 - RNA, 22 nt, Human
gaggcaguaccugggcaagcug

SEQ ID NO: 1435020 - RNA, 23 nt, Human
gaggcaggggcuuccuggugcug

SEQ ID NO: 1435021 - RNA, 10 nt, Human
gaggcucagg

SEQ ID NO: 1435022 - RNA, 14 nt, Human
gaggcucagauugu

SEQ ID NO: 1435023 - RNA, 20 nt, Human
gaggcuauuauuuucacugu

SEQ ID NO: 1435024 - RNA, 22 nt, Human
gaggcuagguggguugaaagcc

SEQ ID NO: 1435025 - RNA, 16 nt, Human
gaggcuaugcucaggg

SEQ ID NO: 1435026 - RNA, 17 nt, Human
gaggcuaugcucagggg

SEQ ID NO: 1435027 - RNA, 20 nt, Human
gaggcuaugcucaggggccc

SEQ ID NO: 1435028 - RNA, 19 nt, Human
gaggcugaggccuggacuu

SEQ ID NO: 1435029 - RNA, 18 nt, Human
gaggcugaggccuggacu

SEQ ID NO: 1435030 - RNA, 16 nt, Human
gaggcugaggccugga

SEQ ID NO: 1435031 - RNA, 14 nt, Human
gaggcugaggccug

SEQ ID NO: 1435032 - RNA, 14 nt, Human
gaggcuccagaggg

SEQ ID NO: 1435033 - RNA, 12 nt, Human
gaggcucagguc

SEQ ID NO: 1435034 - RNA, 21 nt, Human
gaggccacacucagcacaagg

SEQ ID NO: 1435035 - RNA, 18 nt, Human
gaggccacacucagcaca

SEQ ID NO: 1435036 - RNA, 12 nt, Human
gaggccagacca

SEQ ID NO: 1435037 - RNA, 18 nt, Human
gaggccagaccauggaca

SEQ ID NO: 1435038 - RNA, 23 nt, Human
gagcgccuccauccaaggccagg

SEQ ID NO: 1435039 - RNA, 19 nt, Human
gagcgccuccauccaaggc

SEQ ID NO: 1435040 - RNA, 22 nt, Human
gagcgcccugcagacccugccc

SEQ ID NO: 1435041 - RNA, 23 nt, Human
gagcgcccugcagacccugcccu

SEQ ID NO: 1435042 - RNA, 21 nt, Human
gagcgcccugcagacccugcc

SEQ ID NO: 1435043 - RNA, 20 nt, Human
gagcgcccugcagacccugc

SEQ ID NO: 1435044 - RNA, 19 nt, Human
gagcgcccugcagacccug

SEQ ID NO: 1435045 - RNA, 16 nt, Human
gagcgcccugcagacc

SEQ ID NO: 1435046 - RNA, 14 nt, Human
gagcgcccugcaga

SEQ ID NO: 1435047 - RNA, 13 nt, Human
gagcgcccugcag

SEQ ID NO: 1435048 - RNA, 12 nt, Human
gagcgcccugca

SEQ ID NO: 1435049 - RNA, 23 nt, Human
gagcgcccagcuccugacacugc

SEQ ID NO: 1435050 - RNA, 23 nt, Human
gagcgaguggagucugccaccca

SEQ ID NO: 1435051 - RNA, 20 nt, Human
gagcgaguggagucugccac

SEQ ID NO: 1435052 - RNA, 16 nt, Human
gagcgaguggagucug

SEQ ID NO: 1435053 - RNA, 19 nt, Human
gagccuugaacuuugaccu

SEQ ID NO: 1435054 - RNA, 13 nt, Human
gagccuugaacuu

SEQ ID NO: 1435055 - RNA, 17 nt, Human
gagcuggaccucaccaa

SEQ ID NO: 1435056 - RNA, 20 nt, Human
gagcuggagaugaggccaga

SEQ ID NO: 1435057 - RNA, 13 nt, Human
gaggucucagccc

SEQ ID NO: 1435058 - RNA, 21 nt, Human
gaggucucagccccuuucccu

SEQ ID NO: 1435059 - RNA, 16 nt, Human
gaggugaccccagggc

SEQ ID NO: 1435060 - RNA, 15 nt, Human
gaggugaccccaggg

SEQ ID NO: 1435061 - RNA, 13 nt, Human
gaggucuaaucua

SEQ ID NO: 1435062 - RNA, 23 nt, Human
gaggucgguagguucagccaagg

SEQ ID NO: 1435063 - RNA, 22 nt, Human
gaggucgguagguucagccaag

SEQ ID NO: 1435064 - RNA, 21 nt, Human
gaggucgguagguucagccaa

SEQ ID NO: 1435065 - RNA, 16 nt, Human
gaguugaucuggaacc

SEQ ID NO: 1435066 - RNA, 14 nt, Human
gaguugaucuggaa

SEQ ID NO: 1435067 - RNA, 23 nt, Human
gaguggcaggggacaggagucca

SEQ ID NO: 1435068 - RNA, 19 nt, Human
gaguggcaggggacaggag

SEQ ID NO: 1435069 - RNA, 16 nt, Human
gaguggcaggggacag

SEQ ID NO: 1435070 - RNA, 14 nt, Human
gaguggcaggggac

SEQ ID NO: 1435071 - RNA, 22 nt, Human
gaguggcagcccagccagcguc

SEQ ID NO: 1435072 - RNA, 21 nt, Human
gaguggcagcccagccagcgu

SEQ ID NO: 1435073 - RNA, 18 nt, Human
gaguggcagcccagccag

SEQ ID NO: 1435074 - RNA, 16 nt, Human
gaguggcagcccagcc

SEQ ID NO: 1435075 - RNA, 15 nt, Human
gaguggcagcccagc

SEQ ID NO: 1435076 - RNA, 14 nt, Human
gaguggcagcccag

SEQ ID NO: 1435077 - RNA, 20 nt, Human
gaguggagucugccacccag

SEQ ID NO: 1435078 - RNA, 19 nt, Human
gaguggagucugccaccca

SEQ ID NO: 1435079 - RNA, 21 nt, Human
gaguugaucuggaacccagac

SEQ ID NO: 1435080 - RNA, 20 nt, Human
gaguugaucuggaacccaga

SEQ ID NO: 1435081 - RNA, 19 nt, Human
gaguugaucuggaacccag

SEQ ID NO: 1435082 - RNA, 17 nt, Human
gaguugaucuggaaccc

SEQ ID NO: 1435083 - RNA, 21 nt, Human
gaguggagucugccacccagg

SEQ ID NO: 1435084 - RNA, 15 nt, Human
gagugcaccaaagag

SEQ ID NO: 1435085 - RNA, 17 nt, Human
gagugcaccaaagagaa

SEQ ID NO: 1435086 - RNA, 14 nt, Human
gagugcaccaaaga

SEQ ID NO: 1435087 - RNA, 23 nt, Human
gagugacucaagaagugaagaau

SEQ ID NO: 1435088 - RNA, 15 nt, Human
gagugacucaagaag

SEQ ID NO: 1435089 - RNA, 16 nt, Human
gagugacuacacacag

SEQ ID NO: 1435090 - RNA, 19 nt, Human
gagugauagucuuuugcuu

SEQ ID NO: 1435091 - RNA, 14 nt, Human
gagugaguggcccu

SEQ ID NO: 1435092 - RNA, 17 nt, Human
gaguccaucagccucca

SEQ ID NO: 1435093 - RNA, 23 nt, Human
gagucaggacuugaacccagguc

SEQ ID NO: 1435094 - RNA, 15 nt, Human
gagucagagccaugu

SEQ ID NO: 1435095 - RNA, 22 nt, Human
gagucagacauuuuaagauggu

SEQ ID NO: 1435096 - RNA, 17 nt, Human
gagucacuacgccuggc

SEQ ID NO: 1435097 - RNA, 23 nt, Human
gaggugcuucuaguucugccagg

SEQ ID NO: 1435098 - RNA, 22 nt, Human
gaggugcuucuaguucugccag

SEQ ID NO: 1435099 - RNA, 16 nt, Human
gaggugagaccaccuc

SEQ ID NO: 1435100 - RNA, 21 nt, Human
gaggugaccccagggcacagg

SEQ ID NO: 1435101 - RNA, 19 nt, Human
gaggugaccccagggcaca

SEQ ID NO: 1435102 - RNA, 18 nt, Human
gaggugaccccagggcac

SEQ ID NO: 1435103 - RNA, 17 nt, Human
gaggugaccccagggca

SEQ ID NO: 1435104 - RNA, 23 nt, Human
gaggugaccccagggcacaggag

SEQ ID NO: 1435105 - RNA, 22 nt, Human
gaggugaccccagggcacagga

SEQ ID NO: 1435106 - RNA, 15 nt, Human
gaggugagaccaccu

SEQ ID NO: 1435107 - RNA, 15 nt, Human
gaguuggaaucacug

SEQ ID NO: 1435108 - RNA, 22 nt, Human
gaguugcuuuucagcugagguu

SEQ ID NO: 1435109 - RNA, 18 nt, Human
gaguugcugcaaaccuga

SEQ ID NO: 1435110 - RNA, 20 nt, Human
gaguuuaaaaucaucagaaa

SEQ ID NO: 1435111 - RNA, 14 nt, Human
gaguuuaaaaucau

SEQ ID NO: 1435112 - RNA, 16 nt, Human
gaguuuaaauuguaau

SEQ ID NO: 1435113 - RNA, 14 nt, Human
gcaccuacuuacau

SEQ ID NO: 1435114 - RNA, 21 nt, Human
gcacaucucaacaggccucag

SEQ ID NO: 1435115 - RNA, 19 nt, Human
gcaccggggccugggcagg

SEQ ID NO: 1435116 - RNA, 16 nt, Human
gcaccggggccugggc

SEQ ID NO: 1435117 - RNA, 22 nt, Human
gcacaucucaacaggccucagg

SEQ ID NO: 1435118 - RNA, 19 nt, Human
gcacaucucaacaggccuc

SEQ ID NO: 1435119 - RNA, 18 nt, Human
gcacaucucaacaggccu

SEQ ID NO: 1435120 - RNA, 14 nt, Human
gcaccggggccugg

SEQ ID NO: 1435121 - RNA, 13 nt, Human
gcacaucccugga

SEQ ID NO: 1435122 - RNA, 22 nt, Human
gcacaucagcacgauuucuguu

SEQ ID NO: 1435123 - RNA, 23 nt, Human
gcacaucagcacgauuucuguuu

SEQ ID NO: 1435124 - RNA, 15 nt, Human
gcacuugcuggaaga

SEQ ID NO: 1435125 - RNA, 22 nt, Human
gcacuugcgguuccggcaugga

SEQ ID NO: 1435126 - RNA, 20 nt, Human
gcacucgcuagcaguggcag

SEQ ID NO: 1435127 - RNA, 17 nt, Human
gcacucgcuagcagugg

SEQ ID NO: 1435128 - RNA, 19 nt, Human
gcacaauaaauggcuguaa

SEQ ID NO: 1435129 - RNA, 18 nt, Human
gcacaauaaauggcugua

SEQ ID NO: 1435130 - RNA, 17 nt, Human
gcacaaguuauuuaaau

SEQ ID NO: 1435131 - RNA, 17 nt, Human
gcacaauaaaaauguuu

SEQ ID NO: 1435132 - RNA, 16 nt, Human
gcacaauaaaaauguu

SEQ ID NO: 1435133 - RNA, 22 nt, Human
gcacaauaacuccucccagggu

SEQ ID NO: 1435134 - RNA, 21 nt, Human
gcacaauaacuccucccaggg

SEQ ID NO: 1435135 - RNA, 20 nt, Human
gcacaauaacuccucccagg

SEQ ID NO: 1435136 - RNA, 19 nt, Human
gcacaauaacuccucccag

SEQ ID NO: 1435137 - RNA, 18 nt, Human
gcacaauaacuccuccca

SEQ ID NO: 1435138 - RNA, 23 nt, Human
gcacauauggaauuuugcaaaga

SEQ ID NO: 1435139 - RNA, 17 nt, Human
gcacauaguagaacgcu

SEQ ID NO: 1435140 - RNA, 14 nt, Human
gcacaccccacucc

SEQ ID NO: 1435141 - RNA, 20 nt, Human
gcaauauacuggaaagcuuu

SEQ ID NO: 1435142 - RNA, 13 nt, Human
gcaaguucccagu

SEQ ID NO: 1435143 - RNA, 15 nt, Human
gcaaguucccaguug

SEQ ID NO: 1435144 - RNA, 13 nt, Human
gcaagucaggguu

SEQ ID NO: 1435145 - RNA, 18 nt, Human
gcaagucagaauagaaau

SEQ ID NO: 1435146 - RNA, 20 nt, Human
gcaaguauuagaauaccaca

SEQ ID NO: 1435147 - RNA, 15 nt, Human
gauuuuuuuuucaua

SEQ ID NO: 1435148 - RNA, 21 nt, Human
gauuuuuuccuucaaaguuua

SEQ ID NO: 1435149 - RNA, 18 nt, Human
gauuuuuuccuucaaagu

SEQ ID NO: 1435150 - RNA, 14 nt, Human
gauuuuuuccaaaa

SEQ ID NO: 1435151 - RNA, 21 nt, Human
gauuuuuuucccaauugagaa

SEQ ID NO: 1435152 - RNA, 19 nt, Human
gaugauaaagagacaguga

SEQ ID NO: 1435153 - RNA, 16 nt, Human
gaugauaaacgacuuu

SEQ ID NO: 1435154 - RNA, 18 nt, Human
gaugagggcagcagccag

SEQ ID NO: 1435155 - RNA, 17 nt, Human
gaugagggcagcagcca

SEQ ID NO: 1435156 - RNA, 16 nt, Human
gaugagggcagcagcc

SEQ ID NO: 1435157 - RNA, 15 nt, Human
gaugagggcagcagc

SEQ ID NO: 1435158 - RNA, 14 nt, Human
gaugagggcagcag

SEQ ID NO: 1435159 - RNA, 13 nt, Human
gaugagggcagca

SEQ ID NO: 1435160 - RNA, 12 nt, Human
gaugagggcagc

SEQ ID NO: 1435161 - RNA, 20 nt, Human
gaugagggcagcagccagcc

SEQ ID NO: 1435162 - RNA, 21 nt, Human
gaugagggcagcagccagccc

SEQ ID NO: 1435163 - RNA, 16 nt, Human
gaugagugagcaugcc

SEQ ID NO: 1435164 - RNA, 20 nt, Human
gauguaaaaucuugucaugu

SEQ ID NO: 1435165 - RNA, 16 nt, Human
gauguaaaaucuuguc

SEQ ID NO: 1435166 - RNA, 15 nt, Human
gauguaaaaucuugu

SEQ ID NO: 1435167 - RNA, 14 nt, Human
gauguaaaaucuug

SEQ ID NO: 1435168 - RNA, 13 nt, Human
gauguaaaaucuu

SEQ ID NO: 1435169 - RNA, 20 nt, Human
gauggagccagcucugcauu

SEQ ID NO: 1435170 - RNA, 13 nt, Human
gauguaggaggga

SEQ ID NO: 1435171 - RNA, 12 nt, Human
gauguaaagaug

SEQ ID NO: 1435172 - RNA, 17 nt, Human
gauguaaaaucuuguca

SEQ ID NO: 1435173 - RNA, 13 nt, Human
gauguaaagaugu

SEQ ID NO: 1435174 - RNA, 13 nt, Human
gaugcugccccuc

SEQ ID NO: 1435175 - RNA, 12 nt, Human
gaugcugccccu

SEQ ID NO: 1435176 - RNA, 18 nt, Human
gaugauacauccaaagca

SEQ ID NO: 1435177 - RNA, 13 nt, Human
gauggacaucuug

SEQ ID NO: 1435178 - RNA, 12 nt, Human
gauggagaagga

SEQ ID NO: 1435179 - RNA, 13 nt, Human
gauggagaaggaa

SEQ ID NO: 1435180 - RNA, 14 nt, Human
gauggagaaggaag

SEQ ID NO: 1435181 - RNA, 16 nt, Human
gauggagaaggaaggc

SEQ ID NO: 1435182 - RNA, 15 nt, Human
gauggagaaggaagg

SEQ ID NO: 1435183 - RNA, 13 nt, Human
gauuaugggucac

SEQ ID NO: 1435184 - RNA, 15 nt, Human
gauuauucaguguca

SEQ ID NO: 1435185 - RNA, 14 nt, Human
gauuauucaguguc

SEQ ID NO: 1435186 - RNA, 13 nt, Human
gauuauucagugu

SEQ ID NO: 1435187 - RNA, 18 nt, Human
gaugucaauuucuguguu

SEQ ID NO: 1435188 - RNA, 15 nt, Human
gaugucaauuucugu

SEQ ID NO: 1435189 - RNA, 13 nt, Human
gauguaguauuuu

SEQ ID NO: 1435190 - RNA, 14 nt, Human
gauguaggagggac

SEQ ID NO: 1435191 - RNA, 16 nt, Human
gauguaggagggacug

SEQ ID NO: 1435192 - RNA, 20 nt, Human
gauuaucguuuucuuaaagu

SEQ ID NO: 1435193 - RNA, 21 nt, Human
gauuaucguuuucuuaaagug

SEQ ID NO: 1435194 - RNA, 13 nt, Human
gauuaucguuuuc

SEQ ID NO: 1435195 - RNA, 22 nt, Human
gauuauagauucuaaagauucu

SEQ ID NO: 1435196 - RNA, 18 nt, Human
gauuauagauucuaaaga

SEQ ID NO: 1435197 - RNA, 17 nt, Human
gauuauagauucuaaag

SEQ ID NO: 1435198 - RNA, 15 nt, Human
gauuauagauucuaa

SEQ ID NO: 1435199 - RNA, 14 nt, Human
gauuauagauucua

SEQ ID NO: 1435200 - RNA, 13 nt, Human
gauuauagauucu

SEQ ID NO: 1435201 - RNA, 14 nt, Human
gauuauauuaugaa

SEQ ID NO: 1435202 - RNA, 14 nt, Human
gauucuuccaucug

SEQ ID NO: 1435203 - RNA, 15 nt, Human
gauuuaccacuugug

SEQ ID NO: 1435204 - RNA, 22 nt, Human
gauucugcuggccucugcgagu

SEQ ID NO: 1435205 - RNA, 19 nt, Human
gauucugcuggccucugcg

SEQ ID NO: 1435206 - RNA, 17 nt, Human
gauucugcuggccucug

SEQ ID NO: 1435207 - RNA, 17 nt, Human
gauucugccuuugccag

SEQ ID NO: 1435208 - RNA, 15 nt, Human
gauucugccuuugcc

SEQ ID NO: 1435209 - RNA, 12 nt, Human
gauucugccuuu

SEQ ID NO: 1435210 - RNA, 21 nt, Human
gauucugcaguaaaucuuuua

SEQ ID NO: 1435211 - RNA, 19 nt, Human
gauucugcaguaaaucuuu

SEQ ID NO: 1435212 - RNA, 18 nt, Human
gauucugcaguaaaucuu

SEQ ID NO: 1435213 - RNA, 17 nt, Human
gauucugguuccagggu

SEQ ID NO: 1435214 - RNA, 22 nt, Human
gauucugguuccagggucccuc

SEQ ID NO: 1435215 - RNA, 14 nt, Human
gauuuauuaaagaa

SEQ ID NO: 1435216 - RNA, 13 nt, Human
gauuuauuaaaga

SEQ ID NO: 1435217 - RNA, 12 nt, Human
gauuuauuaaag

SEQ ID NO: 1435218 - RNA, 19 nt, Human
gauuuaucacacaaagcag

SEQ ID NO: 1435219 - RNA, 20 nt, Human
gauuuaucacacaaagcaga

SEQ ID NO: 1435220 - RNA, 17 nt, Human
gauuuaucacacaaagc

SEQ ID NO: 1435221 - RNA, 15 nt, Human
gauuuaucacacaaa

SEQ ID NO: 1435222 - RNA, 13 nt, Human
gauuuuuuccaaa

SEQ ID NO: 1435223 - RNA, 12 nt, Human
gauuuuuuccaa

SEQ ID NO: 1435224 - RNA, 11 nt, Human
gauuuuuucca

SEQ ID NO: 1435225 - RNA, 17 nt, Human
gauuuauuaaagaaaaa

SEQ ID NO: 1435226 - RNA, 19 nt, Human
gauuuuuuaauaauuuaga

SEQ ID NO: 1435227 - RNA, 19 nt, Human
gauuuauuaaagaaaaaaa

SEQ ID NO: 1435228 - RNA, 16 nt, Human
gauuuauuaaagaaaa

SEQ ID NO: 1435229 - RNA, 15 nt, Human
gauuuauuaaagaaa

SEQ ID NO: 1435230 - RNA, 16 nt, Human
gauuuaguuucaguag

SEQ ID NO: 1435231 - RNA, 15 nt, Human
gauuuaguuucagua

SEQ ID NO: 1435232 - RNA, 14 nt, Human
gauuuaguuucagu

SEQ ID NO: 1435233 - RNA, 13 nt, Human
gauuuaguuucag

SEQ ID NO: 1435234 - RNA, 20 nt, Human
gauuuaggagaagccaggaa

SEQ ID NO: 1435235 - RNA, 15 nt, Human
gauuuacgcucauug

SEQ ID NO: 1435236 - RNA, 16 nt, Human
gauuuaccacuugugu

SEQ ID NO: 1435237 - RNA, 16 nt, Human
gauucugcaguaaauc

SEQ ID NO: 1435238 - RNA, 15 nt, Human
gauucugcaguaaau

SEQ ID NO: 1435239 - RNA, 14 nt, Human
cugcauuuaaaaga

SEQ ID NO: 1435240 - RNA, 15 nt, Human
cugccccgcccucau

SEQ ID NO: 1435241 - RNA, 22 nt, Human
cugccccggccccucccccuga

SEQ ID NO: 1435242 - RNA, 14 nt, Human
cugccccgcccuca

SEQ ID NO: 1435243 - RNA, 12 nt, Human
cugccccccagc

SEQ ID NO: 1435244 - RNA, 21 nt, Human
cugccccccagccucuggcau

SEQ ID NO: 1435245 - RNA, 19 nt, Human
cugccccccagccucuggc

SEQ ID NO: 1435246 - RNA, 16 nt, Human
cugccccccagccucu

SEQ ID NO: 1435247 - RNA, 22 nt, Human
cugcccccaccccauucccgca

SEQ ID NO: 1435248 - RNA, 23 nt, Human
cugcccccaccccauucccgcag

SEQ ID NO: 1435249 - RNA, 14 nt, Human
cugccauauuaaau

SEQ ID NO: 1435250 - RNA, 18 nt, Human
cugccauaugauuuacau

SEQ ID NO: 1435251 - RNA, 23 nt, Human
cugccaguguccugagccccagg

SEQ ID NO: 1435252 - RNA, 17 nt, Human
cugccaguguccugagc

SEQ ID NO: 1435253 - RNA, 23 nt, Human
cugccagugacagacaggcucuu

SEQ ID NO: 1435254 - RNA, 21 nt, Human
cugccagugacagacaggcuc

SEQ ID NO: 1435255 - RNA, 19 nt, Human
cugccagugacagacaggc

SEQ ID NO: 1435256 - RNA, 16 nt, Human
cugccagugacagaca

SEQ ID NO: 1435257 - RNA, 12 nt, Human
cugccagugaca

SEQ ID NO: 1435258 - RNA, 16 nt, Human
cugccaguccuguccu

SEQ ID NO: 1435259 - RNA, 23 nt, Human
cugccagggccccucuccccagg

SEQ ID NO: 1435260 - RNA, 21 nt, Human
cugccagggccccucucccca

SEQ ID NO: 1435261 - RNA, 20 nt, Human
cugccagggccccucucccc

SEQ ID NO: 1435262 - RNA, 19 nt, Human
cugccagggccccucuccc

SEQ ID NO: 1435263 - RNA, 18 nt, Human
cugccagggccccucucc

SEQ ID NO: 1435264 - RNA, 17 nt, Human
cugccagggccccucuc

SEQ ID NO: 1435265 - RNA, 16 nt, Human
cugccagggccccucu

SEQ ID NO: 1435266 - RNA, 16 nt, Human
cugccagggcagggcc

SEQ ID NO: 1435267 - RNA, 15 nt, Human
cugccagggcagggc

SEQ ID NO: 1435268 - RNA, 13 nt, Human
cugccagggcagg

SEQ ID NO: 1435269 - RNA, 12 nt, Human
cugccagggcag

SEQ ID NO: 1435270 - RNA, 11 nt, Human
cugccagggca

SEQ ID NO: 1435271 - RNA, 17 nt, Human
cugcauuuaaaagauac

SEQ ID NO: 1435272 - RNA, 18 nt, Human
cugcauuuaaaagauaca

SEQ ID NO: 1435273 - RNA, 19 nt, Human
cugcaggcccuggccuccc

SEQ ID NO: 1435274 - RNA, 18 nt, Human
cugcaggcccuggccucc

SEQ ID NO: 1435275 - RNA, 17 nt, Human
cugcaggcccuggccuc

SEQ ID NO: 1435276 - RNA, 16 nt, Human
cugcaggcccuggccu

SEQ ID NO: 1435277 - RNA, 15 nt, Human
cugcaggcccuggcc

SEQ ID NO: 1435278 - RNA, 14 nt, Human
cugcaggcccuggc

SEQ ID NO: 1435279 - RNA, 13 nt, Human
cugcaggcccugg

SEQ ID NO: 1435280 - RNA, 21 nt, Human
cugcaggaucucaccaggcag

SEQ ID NO: 1435281 - RNA, 20 nt, Human
cugcaggaucucaccaggca

SEQ ID NO: 1435282 - RNA, 14 nt, Human
cugcaggaaucuuu

SEQ ID NO: 1435283 - RNA, 23 nt, Human
cugcaggaaggagcugccuggac

SEQ ID NO: 1435284 - RNA, 22 nt, Human
cugcaggaaggagcugccugga

SEQ ID NO: 1435285 - RNA, 21 nt, Human
cugcaggaaggagcugccugg

SEQ ID NO: 1435286 - RNA, 20 nt, Human
cugcaggaaggagcugccug

SEQ ID NO: 1435287 - RNA, 19 nt, Human
cugcaggaaggagcugccu

SEQ ID NO: 1435288 - RNA, 18 nt, Human
cugcaggaaggagcugcc

SEQ ID NO: 1435289 - RNA, 17 nt, Human
cugcaggaaggagcugc

SEQ ID NO: 1435290 - RNA, 16 nt, Human
cugcaggaaggagcug

SEQ ID NO: 1435291 - RNA, 15 nt, Human
cugcaggaaggagcu

SEQ ID NO: 1435292 - RNA, 14 nt, Human
cugcaggaaggagc

SEQ ID NO: 1435293 - RNA, 13 nt, Human
cugcaggaaggag

SEQ ID NO: 1435294 - RNA, 22 nt, Human
cugcagcuuguagccagccggg

SEQ ID NO: 1435295 - RNA, 21 nt, Human
cugcagcuuguagccagccgg

SEQ ID NO: 1435296 - RNA, 20 nt, Human
cugcagcuuguagccagccg

SEQ ID NO: 1435297 - RNA, 19 nt, Human
cugcagcuuguagccagcc

SEQ ID NO: 1435298 - RNA, 18 nt, Human
cugcagcuuguagccagc

SEQ ID NO: 1435299 - RNA, 17 nt, Human
cugcagcuuguagccag

SEQ ID NO: 1435300 - RNA, 16 nt, Human
cugcagcuuguagcca

SEQ ID NO: 1435301 - RNA, 11 nt, Human
cugcagcuugu

SEQ ID NO: 1435302 - RNA, 22 nt, Human
cugcagccucaggacugggagc

SEQ ID NO: 1435303 - RNA, 11 nt, Human
cugcagccucc

SEQ ID NO: 1435304 - RNA, 21 nt, Human
cugcagccucaggacugggag

SEQ ID NO: 1435305 - RNA, 20 nt, Human
cugcagccucaggacuggga

SEQ ID NO: 1435306 - RNA, 19 nt, Human
cugcagccucaggacuggg

SEQ ID NO: 1435307 - RNA, 18 nt, Human
cugcagccucaggacugg

SEQ ID NO: 1435308 - RNA, 17 nt, Human
cugcagccucaggacug

SEQ ID NO: 1435309 - RNA, 16 nt, Human
cugcagccucaggacu

SEQ ID NO: 1435310 - RNA, 14 nt, Human
cugcagccucagga

SEQ ID NO: 1435311 - RNA, 13 nt, Human
cugcagccucagg

SEQ ID NO: 1435312 - RNA, 14 nt, Human
cugcagccucagag

SEQ ID NO: 1435313 - RNA, 13 nt, Human
cugcagccucaga

SEQ ID NO: 1435314 - RNA, 12 nt, Human
cugcagccucag

SEQ ID NO: 1435315 - RNA, 17 nt, Human
cugcacucaaccuuaag

SEQ ID NO: 1435316 - RNA, 14 nt, Human
cugcacuacugaca

SEQ ID NO: 1435317 - RNA, 16 nt, Human
cugcacuacugacaug

SEQ ID NO: 1435318 - RNA, 17 nt, Human
cugcacuaacagagugg

SEQ ID NO: 1435319 - RNA, 15 nt, Human
cugcacgugcgggug

SEQ ID NO: 1435320 - RNA, 22 nt, Human
cugcacgaauggaagaggcacc

SEQ ID NO: 1435321 - RNA, 21 nt, Human
cugaugggguggaaggcaugg

SEQ ID NO: 1435322 - RNA, 23 nt, Human
cugaugggguggaaggcauggcg

SEQ ID NO: 1435323 - RNA, 13 nt, Human
cugauggagaagg

SEQ ID NO: 1435324 - RNA, 14 nt, Human
cugauggagaagga

SEQ ID NO: 1435325 - RNA, 15 nt, Human
cugauggagaaggaa

SEQ ID NO: 1435326 - RNA, 16 nt, Human
cugauggagaaggaag

SEQ ID NO: 1435327 - RNA, 17 nt, Human
cugauggagaaggaagg

SEQ ID NO: 1435328 - RNA, 23 nt, Human
cugaugcaucagaaagggagggc

SEQ ID NO: 1435329 - RNA, 22 nt, Human
cugaugcaucagaaagggaggg

SEQ ID NO: 1435330 - RNA, 21 nt, Human
cugaugcaucagaaagggagg

SEQ ID NO: 1435331 - RNA, 18 nt, Human
cugaugcaucagaaaggg

SEQ ID NO: 1435332 - RNA, 17 nt, Human
cugaugcaucagaaagg

SEQ ID NO: 1435333 - RNA, 14 nt, Human
cugaugcaucagaa

SEQ ID NO: 1435334 - RNA, 16 nt, Human
cugaugcagcuuauac

SEQ ID NO: 1435335 - RNA, 12 nt, Human
cugaugcagcuu

SEQ ID NO: 1435336 - RNA, 21 nt, Human
cugaugauuuagagugcuguc

SEQ ID NO: 1435337 - RNA, 14 nt, Human
cugaugcugccccu

SEQ ID NO: 1435338 - RNA, 12 nt, Human
cugaugcugaca

SEQ ID NO: 1435339 - RNA, 22 nt, Human
cucuuauggauguccccagcag

SEQ ID NO: 1435340 - RNA, 21 nt, Human
cucuuauggauguccccagca

SEQ ID NO: 1435341 - RNA, 19 nt, Human
cucuuauggauguccccag

SEQ ID NO: 1435342 - RNA, 20 nt, Human
cucuuaugcuguacccaguu

SEQ ID NO: 1435343 - RNA, 19 nt, Human
cucuuaugcuguacccagu

SEQ ID NO: 1435344 - RNA, 17 nt, Human
cucuuaugcuguaccca

SEQ ID NO: 1435345 - RNA, 13 nt, Human
cucuuaugcugua

SEQ ID NO: 1435346 - RNA, 18 nt, Human
cucuuauaucuauauuuu

SEQ ID NO: 1435347 - RNA, 15 nt, Human
cucuuauaucuauau

SEQ ID NO: 1435348 - RNA, 19 nt, Human
cugcaccggggccugggca

SEQ ID NO: 1435349 - RNA, 18 nt, Human
cugcaccggggccugggc

SEQ ID NO: 1435350 - RNA, 19 nt, Human
cugcaagucaguccaggau

SEQ ID NO: 1435351 - RNA, 16 nt, Human
cugcaccggggccugg

SEQ ID NO: 1435352 - RNA, 14 nt, Human
cugcaccggggccu

SEQ ID NO: 1435353 - RNA, 17 nt, Human
cugcaaggucuuugguu

SEQ ID NO: 1435354 - RNA, 19 nt, Human
cugcaagguacucugguga

SEQ ID NO: 1435355 - RNA, 18 nt, Human
cugcaagguacucuggug

SEQ ID NO: 1435356 - RNA, 17 nt, Human
cugcaagguacucuggu

SEQ ID NO: 1435357 - RNA, 16 nt, Human
cugcaagguacucugg

SEQ ID NO: 1435358 - RNA, 17 nt, Human
cugcaagcacagcccuu

SEQ ID NO: 1435359 - RNA, 14 nt, Human
cugcaagcacagcc

SEQ ID NO: 1435360 - RNA, 15 nt, Human
cugcaaaucaggcuu

SEQ ID NO: 1435361 - RNA, 19 nt, Human
cugcaaauacuguauauuc

SEQ ID NO: 1435362 - RNA, 13 nt, Human
cugcaaccuccac

SEQ ID NO: 1435363 - RNA, 20 nt, Human
cugcaaaucaggcuuuuguu

SEQ ID NO: 1435364 - RNA, 18 nt, Human
cugcaaaucaggcuuuug

SEQ ID NO: 1435365 - RNA, 23 nt, Human
cugcaacucaaggacuuugcagc

SEQ ID NO: 1435366 - RNA, 15 nt, Human
cugcaacucaaggac

SEQ ID NO: 1435367 - RNA, 17 nt, Human
cugcaaccuccaccucc

SEQ ID NO: 1435368 - RNA, 14 nt, Human
cugcaaccuccacc

SEQ ID NO: 1435369 - RNA, 16 nt, Human
cugcaaccuccaccuc

SEQ ID NO: 1435370 - RNA, 16 nt, Human
cuggccgaguccaagc

SEQ ID NO: 1435371 - RNA, 21 nt, Human
cuggcccuugcuuaccucuca

SEQ ID NO: 1435372 - RNA, 23 nt, Human
cuggcccugcuuccugcuugcca

SEQ ID NO: 1435373 - RNA, 21 nt, Human
cuggcccugggagaaucgcuc

SEQ ID NO: 1435374 - RNA, 22 nt, Human
cuggcccugcuuccugcuugcc

SEQ ID NO: 1435375 - RNA, 21 nt, Human
cuggcccugcuuccugcuugc

SEQ ID NO: 1435376 - RNA, 17 nt, Human
cuggcccugcuuccugc

SEQ ID NO: 1435377 - RNA, 13 nt, Human
cuggcccugcuuc

SEQ ID NO: 1435378 - RNA, 23 nt, Human
cuggcuauagaugucuuuuccca

SEQ ID NO: 1435379 - RNA, 19 nt, Human
cuggcuauagaugucuuuu

SEQ ID NO: 1435380 - RNA, 22 nt, Human
cuggcuaugcauuugaaaauuu

SEQ ID NO: 1435381 - RNA, 15 nt, Human
cuggcuaugcauuug

SEQ ID NO: 1435382 - RNA, 16 nt, Human
cuggcuaugcauuuga

SEQ ID NO: 1435383 - RNA, 18 nt, Human
cuggcuauagaugucuuu

SEQ ID NO: 1435384 - RNA, 13 nt, Human
cuggcuaugcauu

SEQ ID NO: 1435385 - RNA, 14 nt, Human
cuggcuaugcauuu

SEQ ID NO: 1435386 - RNA, 23 nt, Human
cuggcucuaauucacagugcucu

SEQ ID NO: 1435387 - RNA, 22 nt, Human
cuggcucuaauucacagugcuc

SEQ ID NO: 1435388 - RNA, 20 nt, Human
cuggcucuaauucacagugc

SEQ ID NO: 1435389 - RNA, 19 nt, Human
cuggcucuaauucacagug

SEQ ID NO: 1435390 - RNA, 15 nt, Human
cuggcucuaauucac

SEQ ID NO: 1435391 - RNA, 21 nt, Human
cuggcuccuugugccagagaa

SEQ ID NO: 1435392 - RNA, 18 nt, Human
cuggcuccuugugccaga

SEQ ID NO: 1435393 - RNA, 20 nt, Human
cuggcuccguccaggagccu

SEQ ID NO: 1435394 - RNA, 22 nt, Human
cuggcucucaccucuagguccc

SEQ ID NO: 1435395 - RNA, 19 nt, Human
cuggcucucaccucuaggu

SEQ ID NO: 1435396 - RNA, 16 nt, Human
cuggcucucaccucua

SEQ ID NO: 1435397 - RNA, 14 nt, Human
cuggcucucaccuc

SEQ ID NO: 1435398 - RNA, 13 nt, Human
cuggcucucaccu

SEQ ID NO: 1435399 - RNA, 20 nt, Human
cugggacguggcucagccag

SEQ ID NO: 1435400 - RNA, 17 nt, Human
cugggagaaaugaaaaa

SEQ ID NO: 1435401 - RNA, 23 nt, Human
cugggacguggcucagccagcac

SEQ ID NO: 1435402 - RNA, 21 nt, Human
cugggacguggcucagccagc

SEQ ID NO: 1435403 - RNA, 16 nt, Human
cugggagaaaugaaaa

SEQ ID NO: 1435404 - RNA, 21 nt, Human
cugggagaaaucuggcuucug

SEQ ID NO: 1435405 - RNA, 20 nt, Human
cugggagaaaucuggcuucu

SEQ ID NO: 1435406 - RNA, 19 nt, Human
cugggagaaaucuggcuuc

SEQ ID NO: 1435407 - RNA, 18 nt, Human
cugggagaaaucuggcuu

SEQ ID NO: 1435408 - RNA, 13 nt, Human
cugggagaaaucu

SEQ ID NO: 1435409 - RNA, 22 nt, Human
cugggccauucuccacagcaac

SEQ ID NO: 1435410 - RNA, 21 nt, Human
cugggccauucuccacagcaa

SEQ ID NO: 1435411 - RNA, 20 nt, Human
cugggccauucuccacagca

SEQ ID NO: 1435412 - RNA, 19 nt, Human
cugggccauucuccacagc

SEQ ID NO: 1435413 - RNA, 23 nt, Human
cugggccauguccaaagaggcug

SEQ ID NO: 1435414 - RNA, 22 nt, Human
cugggccauguccaaagaggcu

SEQ ID NO: 1435415 - RNA, 19 nt, Human
cugggccauguccaaagag

SEQ ID NO: 1435416 - RNA, 18 nt, Human
cugggccauguccaaaga

SEQ ID NO: 1435417 - RNA, 17 nt, Human
cugggccauguccaaag

SEQ ID NO: 1435418 - RNA, 22 nt, Human
cugggcaugagggguuccuccc

SEQ ID NO: 1435419 - RNA, 23 nt, Human
cugggcaugagggguuccucccc

SEQ ID NO: 1435420 - RNA, 13 nt, Human
cugggcaggaggg

SEQ ID NO: 1435421 - RNA, 14 nt, Human
cugggugacauuug

SEQ ID NO: 1435422 - RNA, 23 nt, Human
cuggggccuguacugccugcuug

SEQ ID NO: 1435423 - RNA, 22 nt, Human
cuggggccuguacugccugcuu

SEQ ID NO: 1435424 - RNA, 21 nt, Human
cuggggccuguacugccugcu

SEQ ID NO: 1435425 - RNA, 20 nt, Human
cuggggccuguacugccugc

SEQ ID NO: 1435426 - RNA, 19 nt, Human
cuggggccuguacugccug

SEQ ID NO: 1435427 - RNA, 18 nt, Human
cuggggccuguacugccu

SEQ ID NO: 1435428 - RNA, 21 nt, Human
cugggugcuacuggggaaacu

SEQ ID NO: 1435429 - RNA, 18 nt, Human
cugggugcuacuggggaa

SEQ ID NO: 1435430 - RNA, 17 nt, Human
cugggugcuacugggga

SEQ ID NO: 1435431 - RNA, 14 nt, Human
cugggugcuacugg

SEQ ID NO: 1435432 - RNA, 19 nt, Human
cuggggacuuggccucucu

SEQ ID NO: 1435433 - RNA, 18 nt, Human
cuggggacuuggccucuc

SEQ ID NO: 1435434 - RNA, 17 nt, Human
cuggggacuuggccucu

SEQ ID NO: 1435435 - RNA, 15 nt, Human
cuggggacuuggccu

SEQ ID NO: 1435436 - RNA, 14 nt, Human
cuggggacuuggcc

SEQ ID NO: 1435437 - RNA, 22 nt, Human
cuggggaccugguacccuccug

SEQ ID NO: 1435438 - RNA, 20 nt, Human
cuggggaccugguacccucc

SEQ ID NO: 1435439 - RNA, 12 nt, Human
cuggggacaggu

SEQ ID NO: 1435440 - RNA, 19 nt, Human
cuggggacagguccucagu

SEQ ID NO: 1435441 - RNA, 17 nt, Human
cuggggccuguacugcc

SEQ ID NO: 1435442 - RNA, 16 nt, Human
cuggggccuguacugc

SEQ ID NO: 1435443 - RNA, 14 nt, Human
cuggggccuguacu

SEQ ID NO: 1435444 - RNA, 16 nt, Human
cuggggccugggacaa

SEQ ID NO: 1435445 - RNA, 15 nt, Human
cuggggccugggaca

SEQ ID NO: 1435446 - RNA, 13 nt, Human
cuggggccuggga

SEQ ID NO: 1435447 - RNA, 12 nt, Human
cuggggccuggg

SEQ ID NO: 1435448 - RNA, 21 nt, Human
cuggugcggcuggccauggag

SEQ ID NO: 1435449 - RNA, 20 nt, Human
cuggugcggcuggccaugga

SEQ ID NO: 1435450 - RNA, 19 nt, Human
cuggugcggcuggccaugg

SEQ ID NO: 1435451 - RNA, 12 nt, Human
cuggugccaccu

SEQ ID NO: 1435452 - RNA, 18 nt, Human
cuggugcggcuggccaug

SEQ ID NO: 1435453 - RNA, 15 nt, Human
cuggugcggcuggcc

SEQ ID NO: 1435454 - RNA, 14 nt, Human
cuggugcggcuggc

SEQ ID NO: 1435455 - RNA, 15 nt, Human
cuggugccuccagag

SEQ ID NO: 1435456 - RNA, 16 nt, Human
cuggugccuccagagg

SEQ ID NO: 1435457 - RNA, 14 nt, Human
cuggugccuccaga

SEQ ID NO: 1435458 - RNA, 20 nt, Human
cuggugccaauuucaaguuc

SEQ ID NO: 1435459 - RNA, 18 nt, Human
cuggugccaauuucaagu

SEQ ID NO: 1435460 - RNA, 16 nt, Human
cuggugccaauuucaa

SEQ ID NO: 1435461 - RNA, 15 nt, Human
cuggugccaauuuca

SEQ ID NO: 1435462 - RNA, 14 nt, Human
cugggugguggccu

SEQ ID NO: 1435463 - RNA, 17 nt, Human
cugggugguggccuggu

SEQ ID NO: 1435464 - RNA, 19 nt, Human
cugggugguacccucugga

SEQ ID NO: 1435465 - RNA, 16 nt, Human
cugggugguacccucu

SEQ ID NO: 1435466 - RNA, 19 nt, Human
cugcugaucgccuucccca

SEQ ID NO: 1435467 - RNA, 18 nt, Human
cugcugaucgccuucccc

SEQ ID NO: 1435468 - RNA, 17 nt, Human
cugcugaucgccuuccc

SEQ ID NO: 1435469 - RNA, 16 nt, Human
cugcugaucgccuucc

SEQ ID NO: 1435470 - RNA, 19 nt, Human
cugcugauauuuucucuag

SEQ ID NO: 1435471 - RNA, 18 nt, Human
cugcugauauuuucucua

SEQ ID NO: 1435472 - RNA, 17 nt, Human
cugcugauauuuucucu

SEQ ID NO: 1435473 - RNA, 14 nt, Human
cugcugauauuuuc

SEQ ID NO: 1435474 - RNA, 18 nt, Human
cugcucacgucaaaugca

SEQ ID NO: 1435475 - RNA, 18 nt, Human
cugcuguggccaggaggu

SEQ ID NO: 1435476 - RNA, 21 nt, Human
cugcuguggccaggaggugcc

SEQ ID NO: 1435477 - RNA, 17 nt, Human
cugcuguggccaggagg

SEQ ID NO: 1435478 - RNA, 16 nt, Human
cugcuguggccaggag

SEQ ID NO: 1435479 - RNA, 15 nt, Human
cugcuguggccagga

SEQ ID NO: 1435480 - RNA, 14 nt, Human
cugcuguggccagg

SEQ ID NO: 1435481 - RNA, 12 nt, Human
cugcuguggcca

SEQ ID NO: 1435482 - RNA, 21 nt, Human
cugcugugauacgaugcuuca

SEQ ID NO: 1435483 - RNA, 21 nt, Human
cugcugucuggguggcucacu

SEQ ID NO: 1435484 - RNA, 19 nt, Human
cugcugucuggguggcuca

SEQ ID NO: 1435485 - RNA, 15 nt, Human
cugcugugaaagaag

SEQ ID NO: 1435486 - RNA, 21 nt, Human
cugcugucugggugcuacugg

SEQ ID NO: 1435487 - RNA, 16 nt, Human
cugcugucugggugcu

SEQ ID NO: 1435488 - RNA, 15 nt, Human
cugcugucugggugc

SEQ ID NO: 1435489 - RNA, 14 nt, Human
cugcugucugggug

SEQ ID NO: 1435490 - RNA, 13 nt, Human
cugcugucugggu

SEQ ID NO: 1435491 - RNA, 12 nt, Human
cugcugucuggg

SEQ ID NO: 1435492 - RNA, 18 nt, Human
cugcugucgcucucaguu

SEQ ID NO: 1435493 - RNA, 22 nt, Human
cuggaugauacuaauaaacuaa

SEQ ID NO: 1435494 - RNA, 23 nt, Human
cuggaugauacuaauaaacuaau

SEQ ID NO: 1435495 - RNA, 15 nt, Human
cuggaugauacuaau

SEQ ID NO: 1435496 - RNA, 14 nt, Human
cuggaugauacuaa

SEQ ID NO: 1435497 - RNA, 20 nt, Human
cuggaugagcucccacaagc

SEQ ID NO: 1435498 - RNA, 15 nt, Human
cuggaugagcuccca

SEQ ID NO: 1435499 - RNA, 14 nt, Human
cuggaugagcuccc

SEQ ID NO: 1435500 - RNA, 15 nt, Human
cuggaugacauuaaa

SEQ ID NO: 1435501 - RNA, 18 nt, Human
cuggaugauacuaauaaa

SEQ ID NO: 1435502 - RNA, 16 nt, Human
cuggaugauacuaaua

SEQ ID NO: 1435503 - RNA, 18 nt, Human
cuggaguugaucuggaac

SEQ ID NO: 1435504 - RNA, 17 nt, Human
cuggaguugaucuggaa

SEQ ID NO: 1435505 - RNA, 16 nt, Human
cuggaguugaucugga

SEQ ID NO: 1435506 - RNA, 15 nt, Human
cuggaguugaucugg

SEQ ID NO: 1435507 - RNA, 13 nt, Human
cuggaucucccug

SEQ ID NO: 1435508 - RNA, 12 nt, Human
cugcuuaauuca

SEQ ID NO: 1435509 - RNA, 13 nt, Human
cugcuuaauucaa

SEQ ID NO: 1435510 - RNA, 19 nt, Human
cuggacugugugcucagga

SEQ ID NO: 1435511 - RNA, 22 nt, Human
cuggacugugugcucaggagcc

SEQ ID NO: 1435512 - RNA, 23 nt, Human
cuggacuuaagcaucuggcucua

SEQ ID NO: 1435513 - RNA, 22 nt, Human
cuggacuuaagcaucuggcucu

SEQ ID NO: 1435514 - RNA, 18 nt, Human
cuggacuuaagcaucugg

SEQ ID NO: 1435515 - RNA, 20 nt, Human
cugcuuauccguuagccgug

SEQ ID NO: 1435516 - RNA, 23 nt, Human
cuggacugugugcucaggagccc

SEQ ID NO: 1435517 - RNA, 19 nt, Human
cuucuuaaaguauucuucu

SEQ ID NO: 1435518 - RNA, 14 nt, Human
cuucuuaaaguauu

SEQ ID NO: 1435519 - RNA, 12 nt, Human
cuucugagcucc

SEQ ID NO: 1435520 - RNA, 20 nt, Human
cuucugagcuauuucaucua

SEQ ID NO: 1435521 - RNA, 18 nt, Human
cuucugagcuauuucauc

SEQ ID NO: 1435522 - RNA, 17 nt, Human
cuucugagcuauuucau

SEQ ID NO: 1435523 - RNA, 16 nt, Human
cuucugagcuauuuca

SEQ ID NO: 1435524 - RNA, 22 nt, Human
cuucugagcccgguaagagcaa

SEQ ID NO: 1435525 - RNA, 22 nt, Human
cuucugagcagcgagccugcua

SEQ ID NO: 1435526 - RNA, 21 nt, Human
cuucugagcagcgagccugcu

SEQ ID NO: 1435527 - RNA, 20 nt, Human
cuucugagcagcgagccugc

SEQ ID NO: 1435528 - RNA, 18 nt, Human
cuucugagcagcgagccu

SEQ ID NO: 1435529 - RNA, 23 nt, Human
cuucugagcacuguuuauacacu

SEQ ID NO: 1435530 - RNA, 15 nt, Human
cuucugagcacuguu

SEQ ID NO: 1435531 - RNA, 11 nt, Human
cuucugagacg

SEQ ID NO: 1435532 - RNA, 22 nt, Human
cuucugagacgucaugaggaga

SEQ ID NO: 1435533 - RNA, 20 nt, Human
cuucuguuuuauaauuuugu

SEQ ID NO: 1435534 - RNA, 15 nt, Human
cuucuguuuuauaau

SEQ ID NO: 1435535 - RNA, 18 nt, Human
cuugccucuuccuugaag

SEQ ID NO: 1435536 - RNA, 16 nt, Human
cuugccucuuccuuga

SEQ ID NO: 1435537 - RNA, 13 nt, Human
cuugccucuuccu

SEQ ID NO: 1435538 - RNA, 12 nt, Human
cuugccucuucc

SEQ ID NO: 1435539 - RNA, 20 nt, Human
cuugccucugugcugugugu

SEQ ID NO: 1435540 - RNA, 19 nt, Human
cuugccucugugcugugug

SEQ ID NO: 1435541 - RNA, 16 nt, Human
cuugccucugugcugu

SEQ ID NO: 1435542 - RNA, 15 nt, Human
cuugccucugugcug

SEQ ID NO: 1435543 - RNA, 14 nt, Human
cuugccucugugcu

SEQ ID NO: 1435544 - RNA, 13 nt, Human
cuugccucugugc

SEQ ID NO: 1435545 - RNA, 15 nt, Human
cuugccucaaugcca

SEQ ID NO: 1435546 - RNA, 18 nt, Human
cuugccucaaccucccaa

SEQ ID NO: 1435547 - RNA, 17 nt, Human
cuugccucaaccuccca

SEQ ID NO: 1435548 - RNA, 18 nt, Human
cuugcuccuccuucugcu

SEQ ID NO: 1435549 - RNA, 15 nt, Human
cuugcuccuccuucu

SEQ ID NO: 1435550 - RNA, 12 nt, Human
cuugccugcagg

SEQ ID NO: 1435551 - RNA, 17 nt, Human
cuugccucaaugccagu

SEQ ID NO: 1435552 - RNA, 22 nt, Human
cuugacaccugcugagaaaaca

SEQ ID NO: 1435553 - RNA, 15 nt, Human
cuugacaccugcuga

SEQ ID NO: 1435554 - RNA, 13 nt, Human
cuugacaccugcu

SEQ ID NO: 1435555 - RNA, 16 nt, Human
cuugacaacuggcagg

SEQ ID NO: 1435556 - RNA, 20 nt, Human
cuugacaacuggcaggcagg

SEQ ID NO: 1435557 - RNA, 14 nt, Human
cuugacaacuggca

SEQ ID NO: 1435558 - RNA, 12 nt, Human
cuugaaugaaaa

SEQ ID NO: 1435559 - RNA, 18 nt, Human
cuuggccacagccagggg

SEQ ID NO: 1435560 - RNA, 16 nt, Human
cuuggccacagccagg

SEQ ID NO: 1435561 - RNA, 15 nt, Human
cuuggccaugcagaa

SEQ ID NO: 1435562 - RNA, 18 nt, Human
cuuggccaugcagaaagc

SEQ ID NO: 1435563 - RNA, 22 nt, Human
cuuuucaaauagggucuaacuc

SEQ ID NO: 1435564 - RNA, 19 nt, Human
cuuuggugagaaccugggu

SEQ ID NO: 1435565 - RNA, 17 nt, Human
cuuuggucucuugcuug

SEQ ID NO: 1435566 - RNA, 16 nt, Human
cuuuggucucuugcuu

SEQ ID NO: 1435567 - RNA, 15 nt, Human
cuuuggucucuugcu

SEQ ID NO: 1435568 - RNA, 14 nt, Human
cuuugguccuucaa

SEQ ID NO: 1435569 - RNA, 14 nt, Human
cuuugguagaaaag

SEQ ID NO: 1435570 - RNA, 18 nt, Human
cuuuggggcuaauuuaac

SEQ ID NO: 1435571 - RNA, 16 nt, Human
cuuugggcuugggccu

SEQ ID NO: 1435572 - RNA, 21 nt, Human
cuuugggcuucagcugccagu

SEQ ID NO: 1435573 - RNA, 18 nt, Human
cuuugggcuucagcugcc

SEQ ID NO: 1435574 - RNA, 20 nt, Human
cuuugguaccagauaacuuu

SEQ ID NO: 1435575 - RNA, 15 nt, Human
cuuugguaccagaua

SEQ ID NO: 1435576 - RNA, 15 nt, Human
cuuuuauaaacuuua

SEQ ID NO: 1435577 - RNA, 17 nt, Human
cuuuuaggacccuuccc

SEQ ID NO: 1435578 - RNA, 21 nt, Human
cuuuuaguaaagucaaggaga

SEQ ID NO: 1435579 - RNA, 19 nt, Human
cuuuuauaaacuuuaccuu

SEQ ID NO: 1435580 - RNA, 16 nt, Human
cuuuuauaaacuuuac

SEQ ID NO: 1435581 - RNA, 18 nt, Human
cuuuuauaaacuuuaccu

SEQ ID NO: 1435582 - RNA, 18 nt, Human
cuuucuccuuuaauugua

SEQ ID NO: 1435583 - RNA, 17 nt, Human
cuuucuauccucuguaa

SEQ ID NO: 1435584 - RNA, 16 nt, Human
cuuucuauccucugua

SEQ ID NO: 1435585 - RNA, 21 nt, Human
cuuucuaguugaaaauaaagu

SEQ ID NO: 1435586 - RNA, 18 nt, Human
cuuucuaguugaaaauaa

SEQ ID NO: 1435587 - RNA, 16 nt, Human
cuuucuaguugaaaau

SEQ ID NO: 1435588 - RNA, 14 nt, Human
cuuucuaguugaaa

SEQ ID NO: 1435589 - RNA, 20 nt, Human
cuuucgggccauguugcccc

SEQ ID NO: 1435590 - RNA, 14 nt, Human
cuuucgggccaugu

SEQ ID NO: 1435591 - RNA, 17 nt, Human
cuuucggauccagggag

SEQ ID NO: 1435592 - RNA, 21 nt, Human
cuuugauucauaguaacuucu

SEQ ID NO: 1435593 - RNA, 19 nt, Human
cuuugauucauaguaacuu

SEQ ID NO: 1435594 - RNA, 12 nt, Human
cuuugauucaua

SEQ ID NO: 1435595 - RNA, 16 nt, Human
cuuugauguuccuucc

SEQ ID NO: 1435596 - RNA, 20 nt, Human
cuuugauuaaagacuccagu

SEQ ID NO: 1435597 - RNA, 14 nt, Human
cuuugauguuccuu

SEQ ID NO: 1435598 - RNA, 21 nt, Human
cuuugagugcaguccugauca

SEQ ID NO: 1435599 - RNA, 22 nt, Human
cuuugagcuacugccgucagug

SEQ ID NO: 1435600 - RNA, 21 nt, Human
cuuugagcuuaaucuuugaaa

SEQ ID NO: 1435601 - RNA, 14 nt, Human
cuuucagagccucc

SEQ ID NO: 1435602 - RNA, 13 nt, Human
cuuucagagccuc

SEQ ID NO: 1435603 - RNA, 12 nt, Human
cuuucagagccu

SEQ ID NO: 1435604 - RNA, 11 nt, Human
cuuucagagcc

SEQ ID NO: 1435605 - RNA, 21 nt, Human
cuuucagaauaugucagugcu

SEQ ID NO: 1435606 - RNA, 16 nt, Human
cuuucagaauauguca

SEQ ID NO: 1435607 - RNA, 14 nt, Human
cuuucagaauaugu

SEQ ID NO: 1435608 - RNA, 19 nt, Human
cuuuaauauaaaugcaaau

SEQ ID NO: 1435609 - RNA, 18 nt, Human
cuuuaauauaaaugcaaa

SEQ ID NO: 1435610 - RNA, 20 nt, Human
cuuuaauauaaaugcaaaua

SEQ ID NO: 1435611 - RNA, 16 nt, Human
cuuuaauauaaaugca

SEQ ID NO: 1435612 - RNA, 15 nt, Human
cuuuaauauaaaugc

SEQ ID NO: 1435613 - RNA, 14 nt, Human
cuuuaauauaaaug

SEQ ID NO: 1435614 - RNA, 12 nt, Human
cuuuaauauaaa

SEQ ID NO: 1435615 - RNA, 18 nt, Human
cuuuaacugacaagccau

SEQ ID NO: 1435616 - RNA, 21 nt, Human
cuuuaacucccauuaccaugu

SEQ ID NO: 1435617 - RNA, 17 nt, Human
cuuuaacucccauuacc

SEQ ID NO: 1435618 - RNA, 22 nt, Human
cuuuaacucccauuaccaugua

SEQ ID NO: 1435619 - RNA, 20 nt, Human
cuuuaaggggaggaaccaga

SEQ ID NO: 1435620 - RNA, 20 nt, Human
cuuuacacaauagaauuaua

SEQ ID NO: 1435621 - RNA, 23 nt, Human
cuuuacaaaacaaacucauucau

SEQ ID NO: 1435622 - RNA, 18 nt, Human
cuuuacaaaacaaacuca

SEQ ID NO: 1435623 - RNA, 16 nt, Human
cuuuacaaaacaaacu

SEQ ID NO: 1435624 - RNA, 22 nt, Human
cuuuaacaacauguuuccagca

SEQ ID NO: 1435625 - RNA, 19 nt, Human
cuuuaacaacauguuucca

SEQ ID NO: 1435626 - RNA, 16 nt, Human
cuuuaacaacauguuu

SEQ ID NO: 1435627 - RNA, 15 nt, Human
cuuuaacaacauguu

SEQ ID NO: 1435628 - RNA, 13 nt, Human
cuuuaaauugugu

SEQ ID NO: 1435629 - RNA, 13 nt, Human
cuuuaaaguucuu

SEQ ID NO: 1435630 - RNA, 23 nt, Human
cuuuaaagugacuaauggcauga

SEQ ID NO: 1435631 - RNA, 24 nt, Human
cuugugaugucauacagagaaguc

SEQ ID NO: 1435632 - RNA, 22 nt, Human
cuugugaugucauacagagaag

SEQ ID NO: 1435633 - RNA, 21 nt, Human
cuugugaugucauacagagaa

SEQ ID NO: 1435634 - RNA, 20 nt, Human
cuugugaugucauacagaga

SEQ ID NO: 1435635 - RNA, 23 nt, Human
cuugugauccacucgccucagcc

SEQ ID NO: 1435636 - RNA, 23 nt, Human
cuugugaggaaagucauuggcuu

SEQ ID NO: 1435637 - RNA, 17 nt, Human
cuugugaggaaagucau

SEQ ID NO: 1435638 - RNA, 19 nt, Human
cuugugaggaaagucauug

SEQ ID NO: 1435639 - RNA, 13 nt, Human
cuugugaggaaag

SEQ ID NO: 1435640 - RNA, 16 nt, Human
cuugugaggaaaguca

SEQ ID NO: 1435641 - RNA, 20 nt, Human
cuuagauuuuacaugaagua

SEQ ID NO: 1435642 - RNA, 19 nt, Human
cuuagauuuuacaugaagu

SEQ ID NO: 1435643 - RNA, 16 nt, Human
cuuagauuuuacauga

SEQ ID NO: 1435644 - RNA, 15 nt, Human
cuuagauuuuacaug

SEQ ID NO: 1435645 - RNA, 13 nt, Human
cuuagauuuuaca

SEQ ID NO: 1435646 - RNA, 12 nt, Human
cuuagauuuuac

SEQ ID NO: 1435647 - RNA, 21 nt, Human
cuuagauuucauaguucagaa

SEQ ID NO: 1435648 - RNA, 14 nt, Human
cuuagauuucauag

SEQ ID NO: 1435649 - RNA, 13 nt, Human
cuuagauuucaua

SEQ ID NO: 1435650 - RNA, 24 nt, Human
cuuagauucucugugucuaagauu

SEQ ID NO: 1435651 - RNA, 22 nt, Human
cuuagauucucugugucuaaga

SEQ ID NO: 1435652 - RNA, 20 nt, Human
cuuagauucucugugucuaa

SEQ ID NO: 1435653 - RNA, 11 nt, Human
cuuagauucuc

SEQ ID NO: 1435654 - RNA, 18 nt, Human
cuuagauguucuaagucu

SEQ ID NO: 1435655 - RNA, 14 nt, Human
cuuagauguucuaa

SEQ ID NO: 1435656 - RNA, 20 nt, Human
cuuagauguuccaguaaucu

SEQ ID NO: 1435657 - RNA, 13 nt, Human
cuuacagcaggca

SEQ ID NO: 1435658 - RNA, 12 nt, Human
cuuacagcaggc

SEQ ID NO: 1435659 - RNA, 17 nt, Human
cuuacccucauguucuu

SEQ ID NO: 1435660 - RNA, 18 nt, Human
cuuacccucauguucuua

SEQ ID NO: 1435661 - RNA, 19 nt, Human
cuuacccucauguucuuaa

SEQ ID NO: 1435662 - RNA, 24 nt, Human
cuuaaaauguucacuuuugacaaa

SEQ ID NO: 1435663 - RNA, 22 nt, Human
cuguugggagagggcgcaggcc

SEQ ID NO: 1435664 - RNA, 20 nt, Human
cuguugggguggguauaaaa

SEQ ID NO: 1435665 - RNA, 20 nt, Human
cuguugggagagggcgcagg

SEQ ID NO: 1435666 - RNA, 17 nt, Human
cuguugggguggguaua

SEQ ID NO: 1435667 - RNA, 18 nt, Human
cuguugggguggguauaa

SEQ ID NO: 1435668 - RNA, 23 nt, Human
cuguuggaauggauuuuucuuua

SEQ ID NO: 1435669 - RNA, 22 nt, Human
cuuaaagugccaguauuuuaaa

SEQ ID NO: 1435670 - RNA, 16 nt, Human
cuuaaagugccaguau

SEQ ID NO: 1435671 - RNA, 13 nt, Human
cuuaaaggggaga

SEQ ID NO: 1435672 - RNA, 15 nt, Human
cuuaaagcuuucaga

SEQ ID NO: 1435673 - RNA, 19 nt, Human
cuuaaacaaaaauuaaaau

SEQ ID NO: 1435674 - RNA, 13 nt, Human
cuuaaacaaaaau

SEQ ID NO: 1435675 - RNA, 20 nt, Human
cuuacacccacaguggaaag

SEQ ID NO: 1435676 - RNA, 11 nt, Human
cuuacacccac

SEQ ID NO: 1435677 - RNA, 21 nt, Human
cugugucuaagauucuagauc

SEQ ID NO: 1435678 - RNA, 20 nt, Human
cugugucuaagauucuagau

SEQ ID NO: 1435679 - RNA, 19 nt, Human
cugugucuaagauucuaga

SEQ ID NO: 1435680 - RNA, 18 nt, Human
cugugucuaagauucuag

SEQ ID NO: 1435681 - RNA, 17 nt, Human
cugugucuaagauucua

SEQ ID NO: 1435682 - RNA, 16 nt, Human
cugugucuaagauucu

SEQ ID NO: 1435683 - RNA, 15 nt, Human
cuguguacugcaguu

SEQ ID NO: 1435684 - RNA, 22 nt, Human
cuguguacauaacugaaaaugu

SEQ ID NO: 1435685 - RNA, 20 nt, Human
cuguguacauaacugaaaau

SEQ ID NO: 1435686 - RNA, 19 nt, Human
cuguguacauaacugaaaa

SEQ ID NO: 1435687 - RNA, 17 nt, Human
cuguguacauaacugaa

SEQ ID NO: 1435688 - RNA, 18 nt, Human
cuguguaagauuuguuuu

SEQ ID NO: 1435689 - RNA, 18 nt, Human
cuguguaauuagugccac

SEQ ID NO: 1435690 - RNA, 23 nt, Human
cuguguaagggccagaaauaucu

SEQ ID NO: 1435691 - RNA, 13 nt, Human
cuguguaagauuu

SEQ ID NO: 1435692 - RNA, 16 nt, Human
cuguguaacugcccaa

SEQ ID NO: 1435693 - RNA, 15 nt, Human
cuguguaacugccca

SEQ ID NO: 1435694 - RNA, 13 nt, Human
cuguguaacugcc

SEQ ID NO: 1435695 - RNA, 11 nt, Human
cuguguaacug

SEQ ID NO: 1435696 - RNA, 16 nt, Human
cugugcucagcccuga

SEQ ID NO: 1435697 - RNA, 19 nt, Human
cugugcucagcccugagga

SEQ ID NO: 1435698 - RNA, 15 nt, Human
cugugcucagcccug

SEQ ID NO: 1435699 - RNA, 13 nt, Human
cugugcucagccc

SEQ ID NO: 1435700 - RNA, 21 nt, Human
cugugcuauggugcucugucu

SEQ ID NO: 1435701 - RNA, 19 nt, Human
cugugcuauggugcucugu

SEQ ID NO: 1435702 - RNA, 23 nt, Human
cugugaccugcugagcucugaga

SEQ ID NO: 1435703 - RNA, 17 nt, Human
cugugaccacaacauga

SEQ ID NO: 1435704 - RNA, 16 nt, Human
cugugaccacaacaug

SEQ ID NO: 1435705 - RNA, 14 nt, Human
cugugaccacaaca

SEQ ID NO: 1435706 - RNA, 17 nt, Human
cugugaccaaugucuug

SEQ ID NO: 1435707 - RNA, 16 nt, Human
cugugaccaaugucuu

SEQ ID NO: 1435708 - RNA, 15 nt, Human
cugugaccaaugucu

SEQ ID NO: 1435709 - RNA, 18 nt, Human
cuguucacuuuuccuccc

SEQ ID NO: 1435710 - RNA, 17 nt, Human
cuguucacuuuuccucc

SEQ ID NO: 1435711 - RNA, 16 nt, Human
cuguucacuuuuccuc

SEQ ID NO: 1435712 - RNA, 11 nt, Human
cuucagaaaga

SEQ ID NO: 1435713 - RNA, 19 nt, Human
cuucagacagagaggacug

SEQ ID NO: 1435714 - RNA, 12 nt, Human
cuucagaaagac

SEQ ID NO: 1435715 - RNA, 20 nt, Human
cuucagacagagaggacugu

SEQ ID NO: 1435716 - RNA, 19 nt, Human
cuuauugccucacuucagg

SEQ ID NO: 1435717 - RNA, 14 nt, Human
cuuauugccucacu

SEQ ID NO: 1435718 - RNA, 13 nt, Human
cuuauugccucac

SEQ ID NO: 1435719 - RNA, 17 nt, Human
cuucaccuucaccuuca

SEQ ID NO: 1435720 - RNA, 19 nt, Human
cuucaucccacuccaacuc

SEQ ID NO: 1435721 - RNA, 17 nt, Human
cuucaguuaugauuuuu

SEQ ID NO: 1435722 - RNA, 20 nt, Human
cuucaguguauggaaauaaa

SEQ ID NO: 1435723 - RNA, 17 nt, Human
cuucaguguauggaaau

SEQ ID NO: 1435724 - RNA, 20 nt, Human
cuucaucucccaccuagcag

SEQ ID NO: 1435725 - RNA, 19 nt, Human
cuucaucucccaccuagca

SEQ ID NO: 1435726 - RNA, 13 nt, Human
cuucaucucccac

SEQ ID NO: 1435727 - RNA, 17 nt, Human
cuucaucgaaucuacua

SEQ ID NO: 1435728 - RNA, 15 nt, Human
cuucaucgaaucuac

SEQ ID NO: 1435729 - RNA, 11 nt, Human
cuucauccucu

SEQ ID NO: 1435730 - RNA, 13 nt, Human
cuucauggauggg

SEQ ID NO: 1435731 - RNA, 23 nt, Human
cuucaugcugucuacacuaagag

SEQ ID NO: 1435732 - RNA, 16 nt, Human
cuucaugccagcuacu

SEQ ID NO: 1435733 - RNA, 15 nt, Human
cuucaugccagcuac

SEQ ID NO: 1435734 - RNA, 14 nt, Human
cuucaugccagcua

SEQ ID NO: 1435735 - RNA, 21 nt, Human
cuucaugcauggaaauucccu

SEQ ID NO: 1435736 - RNA, 23 nt, Human
cuucaugcauggaaauucccuuc

SEQ ID NO: 1435737 - RNA, 15 nt, Human
cuuccaugcugugcg

SEQ ID NO: 1435738 - RNA, 14 nt, Human
cuuccaugcugugc

SEQ ID NO: 1435739 - RNA, 17 nt, Human
cuuccaugauucuauuu

SEQ ID NO: 1435740 - RNA, 14 nt, Human
cuuccaugauucua

SEQ ID NO: 1435741 - RNA, 21 nt, Human
cuuauuaacaauuaggcagac

SEQ ID NO: 1435742 - RNA, 17 nt, Human
cuuauuagagugucuuu

SEQ ID NO: 1435743 - RNA, 13 nt, Human
cuuaugguaccag

SEQ ID NO: 1435744 - RNA, 19 nt, Human
cuuaugguaccagaugcag

SEQ ID NO: 1435745 - RNA, 20 nt, Human
cuuauggauguccccagcag

SEQ ID NO: 1435746 - RNA, 21 nt, Human
cuuauggauguccccagcaga

SEQ ID NO: 1435747 - RNA, 14 nt, Human
cuuauggaauugau

SEQ ID NO: 1435748 - RNA, 18 nt, Human
cuuauggauguccccagc

SEQ ID NO: 1435749 - RNA, 17 nt, Human
cuuauggauguccccag

SEQ ID NO: 1435750 - RNA, 16 nt, Human
cuuauggaugucccca

SEQ ID NO: 1435751 - RNA, 14 nt, Human
cuuauggauguccc

SEQ ID NO: 1435752 - RNA, 23 nt, Human
cuuauggaauugauuugcauuga

SEQ ID NO: 1435753 - RNA, 21 nt, Human
cuuauggaauugauuugcauu

SEQ ID NO: 1435754 - RNA, 20 nt, Human
cuuauggaauugauuugcau

SEQ ID NO: 1435755 - RNA, 19 nt, Human
cuuauggaauugauuugca

SEQ ID NO: 1435756 - RNA, 17 nt, Human
cuuauggaauugauuug

SEQ ID NO: 1435757 - RNA, 16 nt, Human
cuuauggaauugauuu

SEQ ID NO: 1435758 - RNA, 18 nt, Human
cuuagcagcuuccagauu

SEQ ID NO: 1435759 - RNA, 17 nt, Human
cuuagcagcuuccagau

SEQ ID NO: 1435760 - RNA, 16 nt, Human
cuuagcagcuuccaga

SEQ ID NO: 1435761 - RNA, 15 nt, Human
cuuagcagcuuccag

SEQ ID NO: 1435762 - RNA, 23 nt, Human
auuagagugucuuuccacggagc

SEQ ID NO: 1435763 - RNA, 17 nt, Human
auuagagugucuuucca

SEQ ID NO: 1435764 - RNA, 16 nt, Human
auuagagugucuuucc

SEQ ID NO: 1435765 - RNA, 21 nt, Human
auuagagggaggagaaugagc

SEQ ID NO: 1435766 - RNA, 13 nt, Human
auuagauguucuc

SEQ ID NO: 1435767 - RNA, 14 nt, Human
auuagauguucucu

SEQ ID NO: 1435768 - RNA, 16 nt, Human
auuagauguucucuau

SEQ ID NO: 1435769 - RNA, 16 nt, Human
auuauguagcucuuug

SEQ ID NO: 1435770 - RNA, 19 nt, Human
auuauguagcucuuuguca

SEQ ID NO: 1435771 - RNA, 15 nt, Human
auuauguagcucuuu

SEQ ID NO: 1435772 - RNA, 14 nt, Human
auuauguagcucuu

SEQ ID NO: 1435773 - RNA, 12 nt, Human
auuauguagcuc

SEQ ID NO: 1435774 - RNA, 12 nt, Human
auuauguaaauu

SEQ ID NO: 1435775 - RNA, 13 nt, Human
auuaugugacauu

SEQ ID NO: 1435776 - RNA, 19 nt, Human
auuaugugacauuuuacau

SEQ ID NO: 1435777 - RNA, 13 nt, Human
auuaugugccaga

SEQ ID NO: 1435778 - RNA, 21 nt, Human
auuaugugccagauuuaugca

SEQ ID NO: 1435779 - RNA, 23 nt, Human
auuaugugccagauuuaugcaua

SEQ ID NO: 1435780 - RNA, 22 nt, Human
auucaaggaauuucuuaacuuc

SEQ ID NO: 1435781 - RNA, 20 nt, Human
auuaugugacauuuuacauu

SEQ ID NO: 1435782 - RNA, 21 nt, Human
auucaaguguaaaauauuuug

SEQ ID NO: 1435783 - RNA, 20 nt, Human
auucaaguguaaaauauuuu

SEQ ID NO: 1435784 - RNA, 12 nt, Human
auucaauaaagc

SEQ ID NO: 1435785 - RNA, 13 nt, Human
auucaauaaagcu

SEQ ID NO: 1435786 - RNA, 12 nt, Human
auucaauaaagu

SEQ ID NO: 1435787 - RNA, 13 nt, Human
auucaauaaagua

SEQ ID NO: 1435788 - RNA, 14 nt, Human
auucaauaaaguau

SEQ ID NO: 1435789 - RNA, 17 nt, Human
auucaauaaaguauuua

SEQ ID NO: 1435790 - RNA, 19 nt, Human
auucauaguaacuucuuau

SEQ ID NO: 1435791 - RNA, 20 nt, Human
auucauagucuuuggagaaa

SEQ ID NO: 1435792 - RNA, 16 nt, Human
auucauuagucauguu

SEQ ID NO: 1435793 - RNA, 15 nt, Human
auucauuagucaugu

SEQ ID NO: 1435794 - RNA, 12 nt, Human
auucauuccauu

SEQ ID NO: 1435795 - RNA, 17 nt, Human
auucauuccauucugga

SEQ ID NO: 1435796 - RNA, 19 nt, Human
auucauuccauucuggaag

SEQ ID NO: 1435797 - RNA, 18 nt, Human
auucauuccauucuggaa

SEQ ID NO: 1435798 - RNA, 21 nt, Human
auucuuucaauacagauauau

SEQ ID NO: 1435799 - RNA, 22 nt, Human
auucuuucaauacagauauauu

SEQ ID NO: 1435800 - RNA, 20 nt, Human
auucuuucaauacagauaua

SEQ ID NO: 1435801 - RNA, 19 nt, Human
auucuuucaauacagauau

SEQ ID NO: 1435802 - RNA, 18 nt, Human
auucuuucaauacagaua

SEQ ID NO: 1435803 - RNA, 16 nt, Human
auucuuucaauacaga

SEQ ID NO: 1435804 - RNA, 13 nt, Human
auucuuucaauac

SEQ ID NO: 1435805 - RNA, 19 nt, Human
auucuuuccauuugcauuu

SEQ ID NO: 1435806 - RNA, 17 nt, Human
auucuuuccauuugcau

SEQ ID NO: 1435807 - RNA, 16 nt, Human
auucuuuccauuugca

SEQ ID NO: 1435808 - RNA, 15 nt, Human
auucuuuccauuugc

SEQ ID NO: 1435809 - RNA, 22 nt, Human
auucuuuccauuugcauuuguu

SEQ ID NO: 1435810 - RNA, 20 nt, Human
auucuuuccauuugcauuug

SEQ ID NO: 1435811 - RNA, 13 nt, Human
auucuuucccaac

SEQ ID NO: 1435812 - RNA, 18 nt, Human
auucucuuguauaagauc

SEQ ID NO: 1435813 - RNA, 15 nt, Human
auucucuuguauaag

SEQ ID NO: 1435814 - RNA, 23 nt, Human
auucucugugucuaagauucuag

SEQ ID NO: 1435815 - RNA, 22 nt, Human
auucucugugucuaagauucua

SEQ ID NO: 1435816 - RNA, 16 nt, Human
auucucuccuguaccu

SEQ ID NO: 1435817 - RNA, 21 nt, Human
auucgcuacuaugauuuaauu

SEQ ID NO: 1435818 - RNA, 19 nt, Human
auucgccacacaguauuuu

SEQ ID NO: 1435819 - RNA, 18 nt, Human
auucgccacacaguauuu

SEQ ID NO: 1435820 - RNA, 17 nt, Human
auucgccacacaguauu

SEQ ID NO: 1435821 - RNA, 16 nt, Human
auucgaaugacacugu

SEQ ID NO: 1435822 - RNA, 14 nt, Human
auucauuguguuac

SEQ ID NO: 1435823 - RNA, 16 nt, Human
auucguguguuuuuuu

SEQ ID NO: 1435824 - RNA, 19 nt, Human
auucgugaaaacacauuug

SEQ ID NO: 1435825 - RNA, 12 nt, Human
auucgugaaaac

SEQ ID NO: 1435826 - RNA, 22 nt, Human
auucguagauauuggacaaaga

SEQ ID NO: 1435827 - RNA, 21 nt, Human
auucggugugcaccaggguug

SEQ ID NO: 1435828 - RNA, 21 nt, Human
auucgguauccccccaucuug

SEQ ID NO: 1435829 - RNA, 13 nt, Human
auucguucugugg

SEQ ID NO: 1435830 - RNA, 20 nt, Human
auucucuaguuugauuaaau

SEQ ID NO: 1435831 - RNA, 17 nt, Human
auucguuaucuaauagg

SEQ ID NO: 1435832 - RNA, 23 nt, Human
auucucuaguuugauuaaauucu

SEQ ID NO: 1435833 - RNA, 21 nt, Human
auugagcuggaccucaccaag

SEQ ID NO: 1435834 - RNA, 22 nt, Human
auugaggacacugauauggguc

SEQ ID NO: 1435835 - RNA, 14 nt, Human
auuacacccaaaga

SEQ ID NO: 1435836 - RNA, 14 nt, Human
auuacaaguauuuu

SEQ ID NO: 1435837 - RNA, 19 nt, Human
auuacaaguauuuuuaauu

SEQ ID NO: 1435838 - RNA, 18 nt, Human
auuaauuuuaguuuuuca

SEQ ID NO: 1435839 - RNA, 15 nt, Human
auuacaggcuugagc

SEQ ID NO: 1435840 - RNA, 19 nt, Human
auuacacuugguaauugua

SEQ ID NO: 1435841 - RNA, 13 nt, Human
auuacagaaauuu

SEQ ID NO: 1435842 - RNA, 14 nt, Human
auuacacuugguaa

SEQ ID NO: 1435843 - RNA, 17 nt, Human
auuaauuuaugcagaau

SEQ ID NO: 1435844 - RNA, 14 nt, Human
auuaauuucuucac

SEQ ID NO: 1435845 - RNA, 16 nt, Human
auuaauuuaugcagaa

SEQ ID NO: 1435846 - RNA, 20 nt, Human
auuaauuguaaucugaauaa

SEQ ID NO: 1435847 - RNA, 13 nt, Human
auuaauuguaauc

SEQ ID NO: 1435848 - RNA, 22 nt, Human
auuaauugggccagcuuuucaa

SEQ ID NO: 1435849 - RNA, 19 nt, Human
auuaauugggccagcuuuu

SEQ ID NO: 1435850 - RNA, 16 nt, Human
auuaaugcacuuucua

SEQ ID NO: 1435851 - RNA, 15 nt, Human
auuaaugcacuuucu

SEQ ID NO: 1435852 - RNA, 14 nt, Human
auuaaugcacuuuc

SEQ ID NO: 1435853 - RNA, 13 nt, Human
auuaaugcacuuu

SEQ ID NO: 1435854 - RNA, 13 nt, Human
auuaaugcccaga

SEQ ID NO: 1435855 - RNA, 14 nt, Human
auuaaugcccagac

SEQ ID NO: 1435856 - RNA, 19 nt, Human
auuaacaauuaggcagacu

SEQ ID NO: 1435857 - RNA, 18 nt, Human
auuaacauaggugaaagu

SEQ ID NO: 1435858 - RNA, 24 nt, Human
auuaacauaccuaagaaguacauu

SEQ ID NO: 1435859 - RNA, 23 nt, Human
auuaacauaccuaagaaguacau

SEQ ID NO: 1435860 - RNA, 12 nt, Human
auuaacauaccu

SEQ ID NO: 1435861 - RNA, 21 nt, Human
auuaacaugaauauuuagugu

SEQ ID NO: 1435862 - RNA, 19 nt, Human
auuaaauuuuuuguugaca

SEQ ID NO: 1435863 - RNA, 18 nt, Human
auuaaauuuuuuguugac

SEQ ID NO: 1435864 - RNA, 17 nt, Human
auuaaauuuuuuguuga

SEQ ID NO: 1435865 - RNA, 20 nt, Human
auuaaauuuuuuaaaaagca

SEQ ID NO: 1435866 - RNA, 17 nt, Human
auuaaauuuuuuuuaca

SEQ ID NO: 1435867 - RNA, 18 nt, Human
auuaaauuuuuuuuacau

SEQ ID NO: 1435868 - RNA, 19 nt, Human
auuaaauuuuuuuuacauu

SEQ ID NO: 1435869 - RNA, 19 nt, Human
auuaacaaaauguaugucu

SEQ ID NO: 1435870 - RNA, 18 nt, Human
auuaacaaaauguauguc

SEQ ID NO: 1435871 - RNA, 20 nt, Human
auuaaauuuuuuuuacauuu

SEQ ID NO: 1435872 - RNA, 21 nt, Human
auuucugaggugcacugggag

SEQ ID NO: 1435873 - RNA, 20 nt, Human
auuucuguuuagauaauaca

SEQ ID NO: 1435874 - RNA, 14 nt, Human
auuucuuaaacacu

SEQ ID NO: 1435875 - RNA, 13 nt, Human
auuucugcauaug

SEQ ID NO: 1435876 - RNA, 21 nt, Human
auuucuguuuagauaauacac

SEQ ID NO: 1435877 - RNA, 19 nt, Human
auuucacaacagccugaca

SEQ ID NO: 1435878 - RNA, 15 nt, Human
auuuaucuaaauaug

SEQ ID NO: 1435879 - RNA, 15 nt, Human
auuuaucuauaauuu

SEQ ID NO: 1435880 - RNA, 11 nt, Human
auuuaucuaua

SEQ ID NO: 1435881 - RNA, 10 nt, Human
auuuaucuau

SEQ ID NO: 1435882 - RNA, 17 nt, Human
auuuaucuaaauaugga

SEQ ID NO: 1435883 - RNA, 21 nt, Human
auuuaucgcugggaaaugaga

SEQ ID NO: 1435884 - RNA, 19 nt, Human
auuuaucgcugggaaauga

SEQ ID NO: 1435885 - RNA, 17 nt, Human
auuuaucgcagaccuuu

SEQ ID NO: 1435886 - RNA, 21 nt, Human
auuuauccugaaauuucagau

SEQ ID NO: 1435887 - RNA, 20 nt, Human
auuuauccugaaauuucaga

SEQ ID NO: 1435888 - RNA, 19 nt, Human
auuuauccugaaauuucag

SEQ ID NO: 1435889 - RNA, 18 nt, Human
auuuauccugaaauuuca

SEQ ID NO: 1435890 - RNA, 19 nt, Human
auuucaggcauuggauauu

SEQ ID NO: 1435891 - RNA, 22 nt, Human
auuucaggaggaauacugaaca

SEQ ID NO: 1435892 - RNA, 20 nt, Human
auuucaggaggaauacugaa

SEQ ID NO: 1435893 - RNA, 19 nt, Human
auuucaggaggaauacuga

SEQ ID NO: 1435894 - RNA, 14 nt, Human
auuucaccuguaaa

SEQ ID NO: 1435895 - RNA, 19 nt, Human
auuucaccuguaaaccuga

SEQ ID NO: 1435896 - RNA, 18 nt, Human
auuucaccuguaaaccug

SEQ ID NO: 1435897 - RNA, 16 nt, Human
auuucaccuguaaacc

SEQ ID NO: 1435898 - RNA, 15 nt, Human
auuucaccuguaaac

SEQ ID NO: 1435899 - RNA, 14 nt, Human
auuuauauauugaa

SEQ ID NO: 1435900 - RNA, 15 nt, Human
auuuauauauguauu

SEQ ID NO: 1435901 - RNA, 14 nt, Human
auuuauauauguau

SEQ ID NO: 1435902 - RNA, 18 nt, Human
auuuaauuugaaauaugg

SEQ ID NO: 1435903 - RNA, 23 nt, Human
auuuaauauaaaguuuuauauau

SEQ ID NO: 1435904 - RNA, 12 nt, Human
auuuaauucaga

SEQ ID NO: 1435905 - RNA, 23 nt, Human
auuuaauuagugcuaagugugaa

SEQ ID NO: 1435906 - RNA, 20 nt, Human
auuuaauagcaaagaauuga

SEQ ID NO: 1435907 - RNA, 20 nt, Human
auuuaauuagugcuaagugu

SEQ ID NO: 1435908 - RNA, 21 nt, Human
auuuaauuagugcuaagugug

SEQ ID NO: 1435909 - RNA, 22 nt, Human
auuuaauuagugcuaaguguga

SEQ ID NO: 1435910 - RNA, 23 nt, Human
auuuaagggggaaaaagugucaa

SEQ ID NO: 1435911 - RNA, 21 nt, Human
auuuaacuuuuaguaaaguca

SEQ ID NO: 1435912 - RNA, 15 nt, Human
auuuaagauaauuau

SEQ ID NO: 1435913 - RNA, 18 nt, Human
auuuaauagcaaagaauu

SEQ ID NO: 1435914 - RNA, 17 nt, Human
auuuaauagcaaagaau

SEQ ID NO: 1435915 - RNA, 22 nt, Human
auuuaauagguuuggacaaaau

SEQ ID NO: 1435916 - RNA, 16 nt, Human
auuuaagacacugaaa

SEQ ID NO: 1435917 - RNA, 15 nt, Human
auuuaagacacugaa

SEQ ID NO: 1435918 - RNA, 23 nt, Human
auuuaacuuuuaguaaagucaag

SEQ ID NO: 1435919 - RNA, 17 nt, Human
auuuaacuuuuaguaaa

SEQ ID NO: 1435920 - RNA, 17 nt, Human
auugauaagaucuuuua

SEQ ID NO: 1435921 - RNA, 21 nt, Human
auugaggcuugguuccuuccc

SEQ ID NO: 1435922 - RNA, 14 nt, Human
auugagguaaguuu

SEQ ID NO: 1435923 - RNA, 16 nt, Human
auugagguaaguuuuu

SEQ ID NO: 1435924 - RNA, 19 nt, Human
auuuugaaagucuguccuu

SEQ ID NO: 1435925 - RNA, 15 nt, Human
auuuugaaagucugu

SEQ ID NO: 1435926 - RNA, 20 nt, Human
auuuugaaagucuguccuug

SEQ ID NO: 1435927 - RNA, 21 nt, Human
auuuguguuuuaauuuaaaca

SEQ ID NO: 1435928 - RNA, 20 nt, Human
auuuguguuuuaauuuaaac

SEQ ID NO: 1435929 - RNA, 13 nt, Human
auuuguguuuuaa

SEQ ID NO: 1435930 - RNA, 22 nt, Human
auuuguguugaagagguuuuaa

SEQ ID NO: 1435931 - RNA, 18 nt, Human
auuuguguugaagagguu

SEQ ID NO: 1435932 - RNA, 15 nt, Human
auuuguguugaagag

SEQ ID NO: 1435933 - RNA, 14 nt, Human
auuuguguugaaga

SEQ ID NO: 1435934 - RNA, 16 nt, Human
auuuguucuuguauuu

SEQ ID NO: 1435935 - RNA, 17 nt, Human
auuuguucuuguauuua

SEQ ID NO: 1435936 - RNA, 13 nt, Human
auuuguucuugua

SEQ ID NO: 1435937 - RNA, 17 nt, Human
auuuguucccaagagca

SEQ ID NO: 1435938 - RNA, 14 nt, Human
auuuguucccaaga

SEQ ID NO: 1435939 - RNA, 17 nt, Human
auuuguuauuuugcaac

SEQ ID NO: 1435940 - RNA, 19 nt, Human
auuuguuaauuuagaaaac

SEQ ID NO: 1435941 - RNA, 23 nt, Human
auuuguuaauuuagaaaacuuua

SEQ ID NO: 1435942 - RNA, 18 nt, Human
auuuguuaauaguuccug

SEQ ID NO: 1435943 - RNA, 16 nt, Human
auuuguuauuuugcaa

SEQ ID NO: 1435944 - RNA, 19 nt, Human
auuuguucuauagcuuuuc

SEQ ID NO: 1435945 - RNA, 17 nt, Human
auuuucuauaauuuaaa

SEQ ID NO: 1435946 - RNA, 18 nt, Human
auuuucuauaauuuaaau

SEQ ID NO: 1435947 - RNA, 20 nt, Human
auuuuaguuuuucauuaaau

SEQ ID NO: 1435948 - RNA, 19 nt, Human
auuuuaguuuuucauuaaa

SEQ ID NO: 1435949 - RNA, 23 nt, Human
auuuuaguuuuucauuaaauaaa

SEQ ID NO: 1435950 - RNA, 19 nt, Human
auuuucuauaauuuaaaua

SEQ ID NO: 1435951 - RNA, 17 nt, Human
auuuucucucaggugaa

SEQ ID NO: 1435952 - RNA, 16 nt, Human
auuuucucucagguga

SEQ ID NO: 1435953 - RNA, 15 nt, Human
auuuucugcuacuuu

SEQ ID NO: 1435954 - RNA, 18 nt, Human
auuuucuggccaguguuu

SEQ ID NO: 1435955 - RNA, 22 nt, Human
auuuucuggaauacaugaaaua

SEQ ID NO: 1435956 - RNA, 19 nt, Human
auuuucuggaauacaugaa

SEQ ID NO: 1435957 - RNA, 18 nt, Human
auuuucuggaauacauga

SEQ ID NO: 1435958 - RNA, 13 nt, Human
auuuugaaaaacu

SEQ ID NO: 1435959 - RNA, 22 nt, Human
auuuucuggauuccccaucuca

SEQ ID NO: 1435960 - RNA, 15 nt, Human
auuuugaaaaacugc

SEQ ID NO: 1435961 - RNA, 21 nt, Human
caaacaugacccuaaaucuug

SEQ ID NO: 1435962 - RNA, 20 nt, Human
caaaccacuuuuugcagcuu

SEQ ID NO: 1435963 - RNA, 17 nt, Human
caaaccaguaucgcuca

SEQ ID NO: 1435964 - RNA, 23 nt, Human
caaaccagauacggacagagacc

SEQ ID NO: 1435965 - RNA, 21 nt, Human
caaacauauauauacuauuaa

SEQ ID NO: 1435966 - RNA, 15 nt, Human
caaaagcccauucau

SEQ ID NO: 1435967 - RNA, 19 nt, Human
caaaagcccauucauucca

SEQ ID NO: 1435968 - RNA, 13 nt, Human
caaaagcauguga

SEQ ID NO: 1435969 - RNA, 16 nt, Human
auuuuuuuuucauaca

SEQ ID NO: 1435970 - RNA, 14 nt, Human
auuuuuuuuucaua

SEQ ID NO: 1435971 - RNA, 21 nt, Human
auuuuuuuuuaagcucugagc

SEQ ID NO: 1435972 - RNA, 20 nt, Human
auuuuuuuuuaagcucugag

SEQ ID NO: 1435973 - RNA, 19 nt, Human
auuuuuuuuuaagcucuga

SEQ ID NO: 1435974 - RNA, 15 nt, Human
auuuuuuuucuuuua

SEQ ID NO: 1435975 - RNA, 21 nt, Human
auuuuuuuucuuugaauaaau

SEQ ID NO: 1435976 - RNA, 20 nt, Human
auuuuuuuucuuugaauaaa

SEQ ID NO: 1435977 - RNA, 22 nt, Human
caaaagauugcugaaauuuuau

SEQ ID NO: 1435978 - RNA, 20 nt, Human
auuuuuuuuucauacacuua

SEQ ID NO: 1435979 - RNA, 19 nt, Human
auuuuuuuuucauacacuu

SEQ ID NO: 1435980 - RNA, 21 nt, Human
auuuuuuuuucauacacuuau

SEQ ID NO: 1435981 - RNA, 16 nt, Human
auuuuuuuucuuugaa

SEQ ID NO: 1435982 - RNA, 18 nt, Human
auuuuuuuuaacauuccu

SEQ ID NO: 1435983 - RNA, 18 nt, Human
auuuuuuuuaaguauuua

SEQ ID NO: 1435984 - RNA, 14 nt, Human
auuuuuuuuaacau

SEQ ID NO: 1435985 - RNA, 20 nt, Human
auuuuuuuuauuaguauugu

SEQ ID NO: 1435986 - RNA, 16 nt, Human
auuuuuuuuauuagua

SEQ ID NO: 1435987 - RNA, 14 nt, Human
auuuuuuuuacauu

SEQ ID NO: 1435988 - RNA, 17 nt, Human
auuuuuauuaauuuuag

SEQ ID NO: 1435989 - RNA, 22 nt, Human
auuuuuauuaauuuuaguuuuu

SEQ ID NO: 1435990 - RNA, 17 nt, Human
auuuuuauuucuuccua

SEQ ID NO: 1435991 - RNA, 13 nt, Human
auuuuuauuucuu

SEQ ID NO: 1435992 - RNA, 18 nt, Human
auuuuuauuuuugcugag

SEQ ID NO: 1435993 - RNA, 19 nt, Human
auuuuuuucccaauugaga

SEQ ID NO: 1435994 - RNA, 16 nt, Human
auuuuuuuccuugcaa

SEQ ID NO: 1435995 - RNA, 17 nt, Human
auuuuuuucugaaauuu

SEQ ID NO: 1435996 - RNA, 16 nt, Human
auuuuuuucugaaauu

SEQ ID NO: 1435997 - RNA, 15 nt, Human
auuuuuuucugaauu

SEQ ID NO: 1435998 - RNA, 14 nt, Human
auuuuuaaaaugua

SEQ ID NO: 1435999 - RNA, 17 nt, Human
auuuuuaaaacccauuu

SEQ ID NO: 1436000 - RNA, 16 nt, Human
auuuuuaaaacccauu

SEQ ID NO: 1436001 - RNA, 17 nt, Human
auuuuuaugccaccuga

SEQ ID NO: 1436002 - RNA, 14 nt, Human
auuuuuaaacaagu

SEQ ID NO: 1436003 - RNA, 13 nt, Human
auuuuuaaacaag

SEQ ID NO: 1436004 - RNA, 16 nt, Human
auuuuuaaaauguaca

SEQ ID NO: 1436005 - RNA, 15 nt, Human
auuuuuaaacaagua

SEQ ID NO: 1436006 - RNA, 19 nt, Human
auuuuuauauuugaaauau

SEQ ID NO: 1436007 - RNA, 14 nt, Human
caagcacagcccuu

SEQ ID NO: 1436008 - RNA, 17 nt, Human
caagcacagcagccugg

SEQ ID NO: 1436009 - RNA, 14 nt, Human
caagcacagcagcc

SEQ ID NO: 1436010 - RNA, 13 nt, Human
caagcacagcagc

SEQ ID NO: 1436011 - RNA, 12 nt, Human
caagcacagcag

SEQ ID NO: 1436012 - RNA, 22 nt, Human
caagcaccaccaaacacagugu

SEQ ID NO: 1436013 - RNA, 18 nt, Human
caagaugaaggagaggca

SEQ ID NO: 1436014 - RNA, 23 nt, Human
caagauauuuuaaaaucugucac

SEQ ID NO: 1436015 - RNA, 21 nt, Human
caagauauuuuaaaaucuguc

SEQ ID NO: 1436016 - RNA, 14 nt, Human
caagaccacguuuc

SEQ ID NO: 1436017 - RNA, 16 nt, Human
caagaccacguuucua

SEQ ID NO: 1436018 - RNA, 14 nt, Human
caagcaaguauuag

SEQ ID NO: 1436019 - RNA, 14 nt, Human
caagcaauccuccc

SEQ ID NO: 1436020 - RNA, 15 nt, Human
caagcaaaugugaau

SEQ ID NO: 1436021 - RNA, 17 nt, Human
caagcaaaugugaauca

SEQ ID NO: 1436022 - RNA, 19 nt, Human
caagcaaaugugaaucauu

SEQ ID NO: 1436023 - RNA, 17 nt, Human
caagacaugucuguucu

SEQ ID NO: 1436024 - RNA, 15 nt, Human
caagacaugucuguu

SEQ ID NO: 1436025 - RNA, 14 nt, Human
caagacaugucugu

SEQ ID NO: 1436026 - RNA, 22 nt, Human
caagaauccacauuucuaaaau

SEQ ID NO: 1436027 - RNA, 21 nt, Human
caagaauccacauuucuaaaa

SEQ ID NO: 1436028 - RNA, 19 nt, Human
caagaauccacauuucuaa

SEQ ID NO: 1436029 - RNA, 18 nt, Human
caagaauccacauuucua

SEQ ID NO: 1436030 - RNA, 14 nt, Human
caagaauccacauu

SEQ ID NO: 1436031 - RNA, 15 nt, Human
caagaaucagagaag

SEQ ID NO: 1436032 - RNA, 19 nt, Human
caagaauagcauuguaaaa

SEQ ID NO: 1436033 - RNA, 21 nt, Human
caagaauaaucacgcuuuccu

SEQ ID NO: 1436034 - RNA, 16 nt, Human
caagaaggcaaaaaua

SEQ ID NO: 1436035 - RNA, 12 nt, Human
caagaaggauuu

SEQ ID NO: 1436036 - RNA, 23 nt, Human
caagaauaaucacgcuuuccuga

SEQ ID NO: 1436037 - RNA, 22 nt, Human
caagaauaaucacgcuuuccug

SEQ ID NO: 1436038 - RNA, 17 nt, Human
caacuauuuucagaugu

SEQ ID NO: 1436039 - RNA, 21 nt, Human
caacuauuuucagaugugaac

SEQ ID NO: 1436040 - RNA, 12 nt, Human
caacuccagaaa

SEQ ID NO: 1436041 - RNA, 14 nt, Human
caacuauuuucaga

SEQ ID NO: 1436042 - RNA, 17 nt, Human
caacuauggaucagaau

SEQ ID NO: 1436043 - RNA, 16 nt, Human
caacuauggaucagaa

SEQ ID NO: 1436044 - RNA, 14 nt, Human
caacuauggccugu

SEQ ID NO: 1436045 - RNA, 13 nt, Human
caaccccaggcug

SEQ ID NO: 1436046 - RNA, 21 nt, Human
caacuaucagacuaagccagc

SEQ ID NO: 1436047 - RNA, 21 nt, Human
caacuaucucauuuccaagca

SEQ ID NO: 1436048 - RNA, 13 nt, Human
caacuauggccug

SEQ ID NO: 1436049 - RNA, 19 nt, Human
caacuaucucauuuccaag

SEQ ID NO: 1436050 - RNA, 19 nt, Human
caacuauauuguuugcuaa

SEQ ID NO: 1436051 - RNA, 15 nt, Human
caacuaggaucagaa

SEQ ID NO: 1436052 - RNA, 22 nt, Human
cacaaggcagcaaggcccgagc

SEQ ID NO: 1436053 - RNA, 18 nt, Human
cacaaggcagcaaggccc

SEQ ID NO: 1436054 - RNA, 17 nt, Human
cacaaggcagcaaggcc

SEQ ID NO: 1436055 - RNA, 16 nt, Human
cacaaggcagcaaggc

SEQ ID NO: 1436056 - RNA, 15 nt, Human
cacaaggcagcaagg

SEQ ID NO: 1436057 - RNA, 14 nt, Human
cacaaggcagcaag

SEQ ID NO: 1436058 - RNA, 11 nt, Human
cacaaggcagc

SEQ ID NO: 1436059 - RNA, 15 nt, Human
cacaaggccaucugg

SEQ ID NO: 1436060 - RNA, 22 nt, Human
cacaaggauagaugcuggccca

SEQ ID NO: 1436061 - RNA, 21 nt, Human
cacaaggauagaugcuggccc

SEQ ID NO: 1436062 - RNA, 18 nt, Human
cacaaggauagaugcugg

SEQ ID NO: 1436063 - RNA, 17 nt, Human
cacaaggauagaugcug

SEQ ID NO: 1436064 - RNA, 22 nt, Human
cacaaggacuuccuguccagcu

SEQ ID NO: 1436065 - RNA, 16 nt, Human
cacaaggacuuccugu

SEQ ID NO: 1436066 - RNA, 14 nt, Human
cacaaggacuuccu

SEQ ID NO: 1436067 - RNA, 12 nt, Human
cacaaggacuuc

SEQ ID NO: 1436068 - RNA, 14 nt, Human
caauuucagacucc

SEQ ID NO: 1436069 - RNA, 19 nt, Human
caauuucaagguucuaacc

SEQ ID NO: 1436070 - RNA, 11 nt, Human
caauuucaagu

SEQ ID NO: 1436071 - RNA, 16 nt, Human
caauuucaagguucua

SEQ ID NO: 1436072 - RNA, 15 nt, Human
caauuucaagguucu

SEQ ID NO: 1436073 - RNA, 23 nt, Human
caauuuauuugaaugauuuuucu

SEQ ID NO: 1436074 - RNA, 15 nt, Human
caauuuauuugaaug

SEQ ID NO: 1436075 - RNA, 13 nt, Human
caauuuauuugaa

SEQ ID NO: 1436076 - RNA, 20 nt, Human
caauuuauuauggcacauca

SEQ ID NO: 1436077 - RNA, 14 nt, Human
caauauuuuuagau

SEQ ID NO: 1436078 - RNA, 21 nt, Human
caauuggcaccgaagcccaga

SEQ ID NO: 1436079 - RNA, 20 nt, Human
caauuggcaccgaagcccag

SEQ ID NO: 1436080 - RNA, 19 nt, Human
caauuggcaccgaagccca

SEQ ID NO: 1436081 - RNA, 15 nt, Human
caauuggcaccgaag

SEQ ID NO: 1436082 - RNA, 16 nt, Human
caaucaaucuugcaug

SEQ ID NO: 1436083 - RNA, 19 nt, Human
caaucaaucuugcauguaa

SEQ ID NO: 1436084 - RNA, 18 nt, Human
caaucaagucuguuuacu

SEQ ID NO: 1436085 - RNA, 15 nt, Human
caaucaagucuguuu

SEQ ID NO: 1436086 - RNA, 17 nt, Human
caauauuuucuuuuccc

SEQ ID NO: 1436087 - RNA, 17 nt, Human
caaugcucaggugcugg

SEQ ID NO: 1436088 - RNA, 14 nt, Human
caaugccaucaucu

SEQ ID NO: 1436089 - RNA, 13 nt, Human
caaugccaucauc

SEQ ID NO: 1436090 - RNA, 22 nt, Human
caaugccacagcccugucagca

SEQ ID NO: 1436091 - RNA, 18 nt, Human
caaucagcuccuuccugg

SEQ ID NO: 1436092 - RNA, 16 nt, Human
caaucagcuccuuccu

SEQ ID NO: 1436093 - RNA, 15 nt, Human
caaucagcuccuucc

SEQ ID NO: 1436094 - RNA, 17 nt, Human
caaucagccuaguugau

SEQ ID NO: 1436095 - RNA, 13 nt, Human
caagcucuuccuu

SEQ ID NO: 1436096 - RNA, 19 nt, Human
caagcugauuaaaugacac

SEQ ID NO: 1436097 - RNA, 15 nt, Human
caagcugauuaaaug

SEQ ID NO: 1436098 - RNA, 23 nt, Human
caagcugaguuuccuaugggaac

SEQ ID NO: 1436099 - RNA, 22 nt, Human
caagcugaguuuccuaugggaa

SEQ ID NO: 1436100 - RNA, 16 nt, Human
caagcugaguuuccua

SEQ ID NO: 1436101 - RNA, 15 nt, Human
caagcugaguuuccu

SEQ ID NO: 1436102 - RNA, 14 nt, Human
caagcugaguuucc

SEQ ID NO: 1436103 - RNA, 20 nt, Human
caagcugaguauuaaaaugu

SEQ ID NO: 1436104 - RNA, 21 nt, Human
caagcugaggugcccaggaga

SEQ ID NO: 1436105 - RNA, 20 nt, Human
caagcugaggugcccaggag

SEQ ID NO: 1436106 - RNA, 19 nt, Human
caagcugaggugcccagga

SEQ ID NO: 1436107 - RNA, 18 nt, Human
caagcugaggugcccagg

SEQ ID NO: 1436108 - RNA, 17 nt, Human
caagcugaggugcccag

SEQ ID NO: 1436109 - RNA, 15 nt, Human
caagcugaggugccc

SEQ ID NO: 1436110 - RNA, 15 nt, Human
caaguaauacaaacu

SEQ ID NO: 1436111 - RNA, 17 nt, Human
caaguaacaaaaauaaa

SEQ ID NO: 1436112 - RNA, 14 nt, Human
caaguaacaaaaau

SEQ ID NO: 1436113 - RNA, 17 nt, Human
caaguauuauaccuuuu

SEQ ID NO: 1436114 - RNA, 22 nt, Human
caaguauuauaccuuuuuuaga

SEQ ID NO: 1436115 - RNA, 17 nt, Human
caaggccaucugggcuc

SEQ ID NO: 1436116 - RNA, 14 nt, Human
caaggccaucuggg

SEQ ID NO: 1436117 - RNA, 20 nt, Human
caagguuuuagguucuaaag

SEQ ID NO: 1436118 - RNA, 18 nt, Human
caagguuuuagguucuaa

SEQ ID NO: 1436119 - RNA, 13 nt, Human
caagguuuuaggu

SEQ ID NO: 1436120 - RNA, 19 nt, Human
caagguuuuauaaggcuga

SEQ ID NO: 1436121 - RNA, 23 nt, Human
caagguuuuagguucuaaaguuc

SEQ ID NO: 1436122 - RNA, 21 nt, Human
caagguuuuagguucuaaagu

SEQ ID NO: 1436123 - RNA, 10 nt, Human
caaguaaaaa

SEQ ID NO: 1436124 - RNA, 15 nt, Human
caaguaaaaaggcua

SEQ ID NO: 1436125 - RNA, 21 nt, Human
caaguuauuaauuucuucaca

SEQ ID NO: 1436126 - RNA, 15 nt, Human
caaguuauuaauuuc

SEQ ID NO: 1436127 - RNA, 19 nt, Human
caaguauuuguuaauuuag

SEQ ID NO: 1436128 - RNA, 16 nt, Human
caaguauuuguuaauu

SEQ ID NO: 1436129 - RNA, 22 nt, Human
caaguauuugggaagugaagac

SEQ ID NO: 1436130 - RNA, 19 nt, Human
caaguauuugggaagugaa

SEQ ID NO: 1436131 - RNA, 21 nt, Human
caaguuccucuaacuuggcuc

SEQ ID NO: 1436132 - RNA, 19 nt, Human
caaguucccaguuggagcu

SEQ ID NO: 1436133 - RNA, 18 nt, Human
caaguuccaaguugcuaa

SEQ ID NO: 1436134 - RNA, 17 nt, Human
caaguucaugcagcugu

SEQ ID NO: 1436135 - RNA, 20 nt, Human
caaguuauuuuuaauuuggu

SEQ ID NO: 1436136 - RNA, 15 nt, Human
caaguucuaagauuc

SEQ ID NO: 1436137 - RNA, 14 nt, Human
caaguucuaagauu

SEQ ID NO: 1436138 - RNA, 13 nt, Human
caaguucuaagau

SEQ ID NO: 1436139 - RNA, 12 nt, Human
caaguucuaaga

SEQ ID NO: 1436140 - RNA, 16 nt, Human
caaguucgucuguugu

SEQ ID NO: 1436141 - RNA, 15 nt, Human
caaguucgucuguug

SEQ ID NO: 1436142 - RNA, 20 nt, Human
caaguuccucuaacuuggcu

SEQ ID NO: 1436143 - RNA, 21 nt, Human
caaguuccuuggccaugcaga

SEQ ID NO: 1436144 - RNA, 18 nt, Human
cacccaucugucugccaa

SEQ ID NO: 1436145 - RNA, 11 nt, Human
cacccaucugu

SEQ ID NO: 1436146 - RNA, 22 nt, Human
cacccaguuuccuugggaguug

SEQ ID NO: 1436147 - RNA, 23 nt, Human
cacccagugcccucuccccucag

SEQ ID NO: 1436148 - RNA, 16 nt, Human
cacccagugcccucuc

SEQ ID NO: 1436149 - RNA, 17 nt, Human
cacccagucuguucccc

SEQ ID NO: 1436150 - RNA, 16 nt, Human
cacccagcaauagaga

SEQ ID NO: 1436151 - RNA, 20 nt, Human
cacccaggcuggagugcagu

SEQ ID NO: 1436152 - RNA, 12 nt, Human
cacccaggccag

SEQ ID NO: 1436153 - RNA, 20 nt, Human
cacccaggcuggacugcaau

SEQ ID NO: 1436154 - RNA, 16 nt, Human
cacccaggggcagccc

SEQ ID NO: 1436155 - RNA, 14 nt, Human
cacccaggggcagc

SEQ ID NO: 1436156 - RNA, 13 nt, Human
cacccaggggcag

SEQ ID NO: 1436157 - RNA, 20 nt, Human
cacccagguuggagugcagu

SEQ ID NO: 1436158 - RNA, 13 nt, Human
caccaggcagccu

SEQ ID NO: 1436159 - RNA, 22 nt, Human
caccaggauagagacuggaaca

SEQ ID NO: 1436160 - RNA, 15 nt, Human
cacccacuucugcac

SEQ ID NO: 1436161 - RNA, 16 nt, Human
cacccacuucugcacu

SEQ ID NO: 1436162 - RNA, 14 nt, Human
cacccacuucugca

SEQ ID NO: 1436163 - RNA, 23 nt, Human
cacccagacauaaaggaaaagac

SEQ ID NO: 1436164 - RNA, 21 nt, Human
cacccagacauaaaggaaaag

SEQ ID NO: 1436165 - RNA, 20 nt, Human
cacccagacauaaaggaaaa

SEQ ID NO: 1436166 - RNA, 15 nt, Human
cacccagacauaaag

SEQ ID NO: 1436167 - RNA, 20 nt, Human
cacccagaugccccuuucug

SEQ ID NO: 1436168 - RNA, 13 nt, Human
cacccagcaauag

SEQ ID NO: 1436169 - RNA, 13 nt, Human
caccaggaagccg

SEQ ID NO: 1436170 - RNA, 23 nt, Human
cacaugaacuuagauuuuacaug

SEQ ID NO: 1436171 - RNA, 21 nt, Human
cacaugaacuuagauuuuaca

SEQ ID NO: 1436172 - RNA, 15 nt, Human
cacaugaacuuagau

SEQ ID NO: 1436173 - RNA, 16 nt, Human
cacaugaaguccaagc

SEQ ID NO: 1436174 - RNA, 14 nt, Human
cacgcuuuccugaa

SEQ ID NO: 1436175 - RNA, 23 nt, Human
cacggagccacuccucugacuca

SEQ ID NO: 1436176 - RNA, 21 nt, Human
cacggagccacuccucugacu

SEQ ID NO: 1436177 - RNA, 19 nt, Human
cacggagccacuccucuga

SEQ ID NO: 1436178 - RNA, 18 nt, Human
cacggagccacuccucug

SEQ ID NO: 1436179 - RNA, 17 nt, Human
cacggagccacuccucu

SEQ ID NO: 1436180 - RNA, 16 nt, Human
cacggagccacuccuc

SEQ ID NO: 1436181 - RNA, 13 nt, Human
cacuacauucugu

SEQ ID NO: 1436182 - RNA, 14 nt, Human
cacuacauucuguu

SEQ ID NO: 1436183 - RNA, 15 nt, Human
cacggagccacuccu

SEQ ID NO: 1436184 - RNA, 23 nt, Human
cacggaccaaagggagucugcca

SEQ ID NO: 1436185 - RNA, 21 nt, Human
cacggaccaaagggagucugc

SEQ ID NO: 1436186 - RNA, 20 nt, Human
cacggaccaaagggagucug

SEQ ID NO: 1436187 - RNA, 13 nt, Human
cacgcuuuuguga

SEQ ID NO: 1436188 - RNA, 23 nt, Human
cacuagcccaaugaaaugaauua

SEQ ID NO: 1436189 - RNA, 16 nt, Human
cacuagcccaaugaaa

SEQ ID NO: 1436190 - RNA, 19 nt, Human
cacuagccaaaccucacca

SEQ ID NO: 1436191 - RNA, 22 nt, Human
cacuagccaaaccucaccaacu

SEQ ID NO: 1436192 - RNA, 16 nt, Human
cacuagccaaaccuca

SEQ ID NO: 1436193 - RNA, 14 nt, Human
cacuagccaaaccu

SEQ ID NO: 1436194 - RNA, 19 nt, Human
cacuagcccaaugaaauga

SEQ ID NO: 1436195 - RNA, 12 nt, Human
cacuagccaaac

SEQ ID NO: 1436196 - RNA, 21 nt, Human
cacuagacaagccagaacuug

SEQ ID NO: 1436197 - RNA, 19 nt, Human
cacuagacaagccagaacu

SEQ ID NO: 1436198 - RNA, 17 nt, Human
cacuagacaagccagaa

SEQ ID NO: 1436199 - RNA, 16 nt, Human
cacuagacaagccaga

SEQ ID NO: 1436200 - RNA, 14 nt, Human
cacuagacaagcca

SEQ ID NO: 1436201 - RNA, 15 nt, Human
cacuacauucauuua

SEQ ID NO: 1436202 - RNA, 15 nt, Human
cacuacauucuguua

SEQ ID NO: 1436203 - RNA, 17 nt, Human
cacugaagcuuuuuagu

SEQ ID NO: 1436204 - RNA, 17 nt, Human
cacucccacaugggccc

SEQ ID NO: 1436205 - RNA, 17 nt, Human
cacucccaccugacaca

SEQ ID NO: 1436206 - RNA, 23 nt, Human
cacugaagaagcaccaaucauga

SEQ ID NO: 1436207 - RNA, 20 nt, Human
caccugcccuaccugcccca

SEQ ID NO: 1436208 - RNA, 14 nt, Human
caccugcccugccc

SEQ ID NO: 1436209 - RNA, 16 nt, Human
caccugcccugcccug

SEQ ID NO: 1436210 - RNA, 21 nt, Human
cacccucggggauguguccug

SEQ ID NO: 1436211 - RNA, 11 nt, Human
cacccuggagg

SEQ ID NO: 1436212 - RNA, 21 nt, Human
cacccuggauugaucggagcc

SEQ ID NO: 1436213 - RNA, 22 nt, Human
cacccuggccgaguccaagcug

SEQ ID NO: 1436214 - RNA, 21 nt, Human
cacccuggccgaguccaagcu

SEQ ID NO: 1436215 - RNA, 23 nt, Human
cacccuggccuagaccagcagac

SEQ ID NO: 1436216 - RNA, 11 nt, Human
cacccuggccu

SEQ ID NO: 1436217 - RNA, 19 nt, Human
cacccugccuuaucuugca

SEQ ID NO: 1436218 - RNA, 18 nt, Human
cacccugccuuaucuugc

SEQ ID NO: 1436219 - RNA, 13 nt, Human
cacccugccuuau

SEQ ID NO: 1436220 - RNA, 12 nt, Human
cacccugccuua

SEQ ID NO: 1436221 - RNA, 22 nt, Human
cacccugauuuaggagaagcca

SEQ ID NO: 1436222 - RNA, 17 nt, Human
cacccugauaggaagag

SEQ ID NO: 1436223 - RNA, 22 nt, Human
cacccugaggagucugaggucc

SEQ ID NO: 1436224 - RNA, 21 nt, Human
cacccugaggagucugagguc

SEQ ID NO: 1436225 - RNA, 18 nt, Human
cacccugaggagucugag

SEQ ID NO: 1436226 - RNA, 16 nt, Human
cacccugaggagucug

SEQ ID NO: 1436227 - RNA, 15 nt, Human
cacccugaggagucu

SEQ ID NO: 1436228 - RNA, 14 nt, Human
cacccugagccggc

SEQ ID NO: 1436229 - RNA, 12 nt, Human
cacccugagccg

SEQ ID NO: 1436230 - RNA, 22 nt, Human
cacccucggggauguguccuga

SEQ ID NO: 1436231 - RNA, 17 nt, Human
cacccucguggacaccu

SEQ ID NO: 1436232 - RNA, 18 nt, Human
cacccucguggacaccug

SEQ ID NO: 1436233 - RNA, 19 nt, Human
cacccucguggacaccugc

SEQ ID NO: 1436234 - RNA, 20 nt, Human
cacccucguggacaccugcc

SEQ ID NO: 1436235 - RNA, 21 nt, Human
cacccuguacuguucuguguc

SEQ ID NO: 1436236 - RNA, 17 nt, Human
cacccuguacuguucug

SEQ ID NO: 1436237 - RNA, 16 nt, Human
cacccuguacuguucu

SEQ ID NO: 1436238 - RNA, 16 nt, Human
cacccuggugggccaa

SEQ ID NO: 1436239 - RNA, 15 nt, Human
cacccuggugggcca

SEQ ID NO: 1436240 - RNA, 19 nt, Human
cacccuggccuagaccagc

SEQ ID NO: 1436241 - RNA, 22 nt, Human
cacccugggcccugggcuggaa

SEQ ID NO: 1436242 - RNA, 21 nt, Human
cacccugggcccugggcugga

SEQ ID NO: 1436243 - RNA, 17 nt, Human
cacccugggcccugggc

SEQ ID NO: 1436244 - RNA, 14 nt, Human
cacccugggcccug

SEQ ID NO: 1436245 - RNA, 12 nt, Human
cacccugggccc

SEQ ID NO: 1436246 - RNA, 23 nt, Human
cacccuguacuguucugugucuu

SEQ ID NO: 1436247 - RNA, 20 nt, Human
cacccuguccaaacugccua

SEQ ID NO: 1436248 - RNA, 19 nt, Human
caccuaggcuagggugggg

SEQ ID NO: 1436249 - RNA, 18 nt, Human
caccuaggcuaggguggg

SEQ ID NO: 1436250 - RNA, 23 nt, Human
cacccuguccaaacugccuaagc

SEQ ID NO: 1436251 - RNA, 14 nt, Human
caccugcccuaccu

SEQ ID NO: 1436252 - RNA, 13 nt, Human
caccugcccuacc

SEQ ID NO: 1436253 - RNA, 12 nt, Human
caccugcccugc

SEQ ID NO: 1436254 - RNA, 13 nt, Human
caccugcccugcc

SEQ ID NO: 1436255 - RNA, 23 nt, Human
cagcgcuccugcuaacggugcuc

SEQ ID NO: 1436256 - RNA, 12 nt, Human
cagcuaaagcaa

SEQ ID NO: 1436257 - RNA, 21 nt, Human
cagcgcugucaggauugcgag

SEQ ID NO: 1436258 - RNA, 16 nt, Human
cagcgcuugaagccug

SEQ ID NO: 1436259 - RNA, 20 nt, Human
cagcgcugucaggauugcga

SEQ ID NO: 1436260 - RNA, 14 nt, Human
cagcggcaucaggc

SEQ ID NO: 1436261 - RNA, 22 nt, Human
cagcggagguguggagccgagg

SEQ ID NO: 1436262 - RNA, 19 nt, Human
cagcuaaagcaauaugcau

SEQ ID NO: 1436263 - RNA, 22 nt, Human
cagcugccggucgcccuuugcu

SEQ ID NO: 1436264 - RNA, 16 nt, Human
cagcugagcgccagga

SEQ ID NO: 1436265 - RNA, 14 nt, Human
cagcugagcgccag

SEQ ID NO: 1436266 - RNA, 16 nt, Human
cagcugagcagggccg

SEQ ID NO: 1436267 - RNA, 18 nt, Human
cagcugagcgccaggaug

SEQ ID NO: 1436268 - RNA, 20 nt, Human
cagcugagcagggccgggga

SEQ ID NO: 1436269 - RNA, 15 nt, Human
cagcugagcagggcc

SEQ ID NO: 1436270 - RNA, 14 nt, Human
cagcugagcagggc

SEQ ID NO: 1436271 - RNA, 13 nt, Human
cagcugagcaggg

SEQ ID NO: 1436272 - RNA, 14 nt, Human
cagcugagaggcug

SEQ ID NO: 1436273 - RNA, 20 nt, Human
caggaaagagaacuuccaga

SEQ ID NO: 1436274 - RNA, 16 nt, Human
caggaaagagaacuuc

SEQ ID NO: 1436275 - RNA, 21 nt, Human
caggaaacuccugugaccaca

SEQ ID NO: 1436276 - RNA, 19 nt, Human
caggaaacuccugugacca

SEQ ID NO: 1436277 - RNA, 18 nt, Human
caggaaacuccugugacc

SEQ ID NO: 1436278 - RNA, 23 nt, Human
caggaaacaguugcauguaguaa

SEQ ID NO: 1436279 - RNA, 20 nt, Human
cagcuuauugucuagugaaa

SEQ ID NO: 1436280 - RNA, 17 nt, Human
cagcuguccccccacuc

SEQ ID NO: 1436281 - RNA, 19 nt, Human
cagcuguccccccacuccc

SEQ ID NO: 1436282 - RNA, 14 nt, Human
cagcuuauugucua

SEQ ID NO: 1436283 - RNA, 16 nt, Human
cagcuguccccccacu

SEQ ID NO: 1436284 - RNA, 15 nt, Human
cagcuguccccccac

SEQ ID NO: 1436285 - RNA, 14 nt, Human
cagcugucccccca

SEQ ID NO: 1436286 - RNA, 18 nt, Human
cagcugucaucaauuaaa

SEQ ID NO: 1436287 - RNA, 16 nt, Human
cagcugucaaggcuca

SEQ ID NO: 1436288 - RNA, 20 nt, Human
cagcuguaugauucccagcc

SEQ ID NO: 1436289 - RNA, 14 nt, Human
caggaggccuagga

SEQ ID NO: 1436290 - RNA, 20 nt, Human
caggaggacccagggcucug

SEQ ID NO: 1436291 - RNA, 18 nt, Human
caggaggacccagggcuc

SEQ ID NO: 1436292 - RNA, 17 nt, Human
caggaggacccagggcu

SEQ ID NO: 1436293 - RNA, 16 nt, Human
caggaggacccagggc

SEQ ID NO: 1436294 - RNA, 15 nt, Human
caggaggacccaggg

SEQ ID NO: 1436295 - RNA, 16 nt, Human
caggaggaauacugaa

SEQ ID NO: 1436296 - RNA, 19 nt, Human
caggaggacccagggcucu

SEQ ID NO: 1436297 - RNA, 15 nt, Human
caggaggaauacuga

SEQ ID NO: 1436298 - RNA, 13 nt, Human
caggaccagaagc

SEQ ID NO: 1436299 - RNA, 15 nt, Human
caggaccagaagcuc

SEQ ID NO: 1436300 - RNA, 23 nt, Human
caggaccacaggcucaggcaggg

SEQ ID NO: 1436301 - RNA, 21 nt, Human
caggaccacaggcucaggcag

SEQ ID NO: 1436302 - RNA, 19 nt, Human
caggaccacaggcucaggc

SEQ ID NO: 1436303 - RNA, 18 nt, Human
caggaccacaggcucagg

SEQ ID NO: 1436304 - RNA, 17 nt, Human
caggaccacaggcucag

SEQ ID NO: 1436305 - RNA, 16 nt, Human
caggaccacaggcuca

SEQ ID NO: 1436306 - RNA, 15 nt, Human
caggaccacaggcuc

SEQ ID NO: 1436307 - RNA, 14 nt, Human
caggaccacaggcu

SEQ ID NO: 1436308 - RNA, 12 nt, Human
caggaccacagg

SEQ ID NO: 1436309 - RNA, 18 nt, Human
caggacauuucucuaaga

SEQ ID NO: 1436310 - RNA, 14 nt, Human
caggacauuucucu

SEQ ID NO: 1436311 - RNA, 12 nt, Human
caggacauuucu

SEQ ID NO: 1436312 - RNA, 16 nt, Human
caggacccagaggaag

SEQ ID NO: 1436313 - RNA, 15 nt, Human
caggacccagaggaa

SEQ ID NO: 1436314 - RNA, 14 nt, Human
caggacccagagga

SEQ ID NO: 1436315 - RNA, 13 nt, Human
caggacccagagg

SEQ ID NO: 1436316 - RNA, 20 nt, Human
caggaccagucccagagcag

SEQ ID NO: 1436317 - RNA, 19 nt, Human
caggaccagucccagagca

SEQ ID NO: 1436318 - RNA, 18 nt, Human
caggaccagucccagagc

SEQ ID NO: 1436319 - RNA, 21 nt, Human
caggaccagucaaccugggca

SEQ ID NO: 1436320 - RNA, 13 nt, Human
caggaccagcuca

SEQ ID NO: 1436321 - RNA, 14 nt, Human
caggaccagcucag

SEQ ID NO: 1436322 - RNA, 12 nt, Human
caggaccagcuc

SEQ ID NO: 1436323 - RNA, 12 nt, Human
caggccaggcau

SEQ ID NO: 1436324 - RNA, 16 nt, Human
caggagggacaaagga

SEQ ID NO: 1436325 - RNA, 23 nt, Human
caggccaggacucugcagccuca

SEQ ID NO: 1436326 - RNA, 21 nt, Human
caggccaggacucugcagccu

SEQ ID NO: 1436327 - RNA, 20 nt, Human
caggccaggacucugcagcc

SEQ ID NO: 1436328 - RNA, 19 nt, Human
caggccaggacucugcagc

SEQ ID NO: 1436329 - RNA, 18 nt, Human
caggccaggacucugcag

SEQ ID NO: 1436330 - RNA, 17 nt, Human
caggccaggacucugca

SEQ ID NO: 1436331 - RNA, 16 nt, Human
caggccaggacucugc

SEQ ID NO: 1436332 - RNA, 15 nt, Human
caggccaggacucug

SEQ ID NO: 1436333 - RNA, 14 nt, Human
caggccaggacucu

SEQ ID NO: 1436334 - RNA, 13 nt, Human
caggccaggacuc

SEQ ID NO: 1436335 - RNA, 13 nt, Human
caggccagcugug

SEQ ID NO: 1436336 - RNA, 12 nt, Human
caggccagcugu

SEQ ID NO: 1436337 - RNA, 22 nt, Human
caggcacugagauaccagcgag

SEQ ID NO: 1436338 - RNA, 20 nt, Human
caggccgugacgucugggug

SEQ ID NO: 1436339 - RNA, 19 nt, Human
caggccgugacgucugggu

SEQ ID NO: 1436340 - RNA, 18 nt, Human
caggccgugacgucuggg

SEQ ID NO: 1436341 - RNA, 17 nt, Human
caggccgugacgucugg

SEQ ID NO: 1436342 - RNA, 15 nt, Human
caggccuguccaaca

SEQ ID NO: 1436343 - RNA, 20 nt, Human
caggccugaaagaggcugag

SEQ ID NO: 1436344 - RNA, 15 nt, Human
caggccugaaagagg

SEQ ID NO: 1436345 - RNA, 22 nt, Human
caggccucucccuccuccagga

SEQ ID NO: 1436346 - RNA, 23 nt, Human
caggccuguguagcugugaccug

SEQ ID NO: 1436347 - RNA, 22 nt, Human
caggccuguguagcugugaccu

SEQ ID NO: 1436348 - RNA, 21 nt, Human
caggccuguguagcugugacc

SEQ ID NO: 1436349 - RNA, 20 nt, Human
caggccuguguagcugugac

SEQ ID NO: 1436350 - RNA, 19 nt, Human
caggccuguguagcuguga

SEQ ID NO: 1436351 - RNA, 18 nt, Human
caggccuguguagcugug

SEQ ID NO: 1436352 - RNA, 16 nt, Human
caggccuguguagcug

SEQ ID NO: 1436353 - RNA, 16 nt, Human
caggccuuugagcuca

SEQ ID NO: 1436354 - RNA, 17 nt, Human
caggccuuugagcucag

SEQ ID NO: 1436355 - RNA, 18 nt, Human
caggccuuugagaaaggg

SEQ ID NO: 1436356 - RNA, 18 nt, Human
caggcgugagccaccucg

SEQ ID NO: 1436357 - RNA, 22 nt, Human
caggcuaauuuuuuuguauuuu

SEQ ID NO: 1436358 - RNA, 13 nt, Human
caggcuaauuuuu

SEQ ID NO: 1436359 - RNA, 13 nt, Human
caggccgggaaaa

SEQ ID NO: 1436360 - RNA, 20 nt, Human
caggccggcuugccacaccc

SEQ ID NO: 1436361 - RNA, 22 nt, Human
cagggcuuuacuccguaacaga

SEQ ID NO: 1436362 - RNA, 18 nt, Human
cagggcucuccuggcuuc

SEQ ID NO: 1436363 - RNA, 19 nt, Human
cagggcucuccuggcuucc

SEQ ID NO: 1436364 - RNA, 17 nt, Human
cagggcucuccuggcuu

SEQ ID NO: 1436365 - RNA, 16 nt, Human
cagggcucuccuggcu

SEQ ID NO: 1436366 - RNA, 15 nt, Human
cagggcucuccuggc

SEQ ID NO: 1436367 - RNA, 14 nt, Human
cagggcucuccugg

SEQ ID NO: 1436368 - RNA, 23 nt, Human
cagggcuccuugugggccugggc

SEQ ID NO: 1436369 - RNA, 21 nt, Human
cagggcuccuugugggccugg

SEQ ID NO: 1436370 - RNA, 14 nt, Human
cagggcuccuugug

SEQ ID NO: 1436371 - RNA, 13 nt, Human
cagggcuccuggg

SEQ ID NO: 1436372 - RNA, 12 nt, Human
cagggcuccugg

SEQ ID NO: 1436373 - RNA, 14 nt, Human
cagggcuccugcac

SEQ ID NO: 1436374 - RNA, 12 nt, Human
cagggcuccugc

SEQ ID NO: 1436375 - RNA, 11 nt, Human
cagggcuccug

SEQ ID NO: 1436376 - RNA, 18 nt, Human
cagggcuagugacuugug

SEQ ID NO: 1436377 - RNA, 15 nt, Human
cagggcuagugacuu

SEQ ID NO: 1436378 - RNA, 14 nt, Human
cagggcuagugacu

SEQ ID NO: 1436379 - RNA, 24 nt, Human
cagggcuacccugagcugaggcag

SEQ ID NO: 1436380 - RNA, 23 nt, Human
cagggcuacccugagcugaggca

SEQ ID NO: 1436381 - RNA, 22 nt, Human
cagggcuacccugagcugaggc

SEQ ID NO: 1436382 - RNA, 19 nt, Human
cagggcuacccugagcuga

SEQ ID NO: 1436383 - RNA, 18 nt, Human
cagggcuacccugagcug

SEQ ID NO: 1436384 - RNA, 16 nt, Human
cagggcuacccugagc

SEQ ID NO: 1436385 - RNA, 14 nt, Human
cagggcuacccuga

SEQ ID NO: 1436386 - RNA, 18 nt, Human
cagggagcaugagaggag

SEQ ID NO: 1436387 - RNA, 21 nt, Human
cagggagcaugagaggaggca

SEQ ID NO: 1436388 - RNA, 22 nt, Human
cagggagcaugagaggaggcag

SEQ ID NO: 1436389 - RNA, 23 nt, Human
cagggagcaugagaggaggcagc

SEQ ID NO: 1436390 - RNA, 17 nt, Human
cagggagagggggcugg

SEQ ID NO: 1436391 - RNA, 19 nt, Human
cagggagagcccaggagcu

SEQ ID NO: 1436392 - RNA, 20 nt, Human
cagggagagcccaggagcuc

SEQ ID NO: 1436393 - RNA, 16 nt, Human
cagggagagcccagga

SEQ ID NO: 1436394 - RNA, 15 nt, Human
cagggagagcccagg

SEQ ID NO: 1436395 - RNA, 14 nt, Human
cagggagagcccag

SEQ ID NO: 1436396 - RNA, 13 nt, Human
cagggagagccca

SEQ ID NO: 1436397 - RNA, 10 nt, Human
caggcugggc

SEQ ID NO: 1436398 - RNA, 22 nt, Human
cagggagacuggguaggaaaga

SEQ ID NO: 1436399 - RNA, 18 nt, Human
cagacugcgauuuguccc

SEQ ID NO: 1436400 - RNA, 20 nt, Human
cagacugcuuccaauuuucu

SEQ ID NO: 1436401 - RNA, 14 nt, Human
cagacugcuuccaa

SEQ ID NO: 1436402 - RNA, 19 nt, Human
cagacuggauaguccgucu

SEQ ID NO: 1436403 - RNA, 23 nt, Human
cagacugacaguuuacagacgcu

SEQ ID NO: 1436404 - RNA, 18 nt, Human
cagacucuuuaugcuugc

SEQ ID NO: 1436405 - RNA, 19 nt, Human
cagacucuuuaugcuugca

SEQ ID NO: 1436406 - RNA, 15 nt, Human
cagacucuuuaugcu

SEQ ID NO: 1436407 - RNA, 18 nt, Human
cagacucuugccuguuuc

SEQ ID NO: 1436408 - RNA, 13 nt, Human
cagacucuugccu

SEQ ID NO: 1436409 - RNA, 18 nt, Human
cagacucuaagaaagaac

SEQ ID NO: 1436410 - RNA, 17 nt, Human
cagacucuaagaaagaa

SEQ ID NO: 1436411 - RNA, 14 nt, Human
cagacucuaagaaa

SEQ ID NO: 1436412 - RNA, 18 nt, Human
cagacuccuucaacaauu

SEQ ID NO: 1436413 - RNA, 20 nt, Human
cagacucccauuccugaaga

SEQ ID NO: 1436414 - RNA, 19 nt, Human
cagacucccauuccugaag

SEQ ID NO: 1436415 - RNA, 19 nt, Human
cagacaguguuuucuggga

SEQ ID NO: 1436416 - RNA, 16 nt, Human
cagacaggucccuccc

SEQ ID NO: 1436417 - RNA, 23 nt, Human
cagacuccuucaacaauucuaaa

SEQ ID NO: 1436418 - RNA, 22 nt, Human
cagacagggaauuaggccccca

SEQ ID NO: 1436419 - RNA, 22 nt, Human
cagacaggcucuuagcagcuuc

SEQ ID NO: 1436420 - RNA, 20 nt, Human
cagacaggcucuuagcagcu

SEQ ID NO: 1436421 - RNA, 18 nt, Human
cagacaggcucuuagcag

SEQ ID NO: 1436422 - RNA, 14 nt, Human
cagacaggcucuua

SEQ ID NO: 1436423 - RNA, 20 nt, Human
cagacaggccccgugaggca

SEQ ID NO: 1436424 - RNA, 15 nt, Human
cagacaggccccgug

SEQ ID NO: 1436425 - RNA, 18 nt, Human
cagacaggcaaauaaaag

SEQ ID NO: 1436426 - RNA, 21 nt, Human
cagacagcuccacccuggccg

SEQ ID NO: 1436427 - RNA, 18 nt, Human
cagacagaugaggcuuuc

SEQ ID NO: 1436428 - RNA, 17 nt, Human
cagacagaugaggcuuu

SEQ ID NO: 1436429 - RNA, 11 nt, Human
cagacagauga

SEQ ID NO: 1436430 - RNA, 21 nt, Human
cagacagauggaaaagggaga

SEQ ID NO: 1436431 - RNA, 23 nt, Human
cagacagagccaggagaagcuca

SEQ ID NO: 1436432 - RNA, 14 nt, Human
cagacagagcccug

SEQ ID NO: 1436433 - RNA, 20 nt, Human
cagacagagccaggagaagc

SEQ ID NO: 1436434 - RNA, 18 nt, Human
cagacagagccaggagaa

SEQ ID NO: 1436435 - RNA, 17 nt, Human
cagacagagccaggaga

SEQ ID NO: 1436436 - RNA, 16 nt, Human
cagacagagccaggag

SEQ ID NO: 1436437 - RNA, 15 nt, Human
cagacagagccagga

SEQ ID NO: 1436438 - RNA, 14 nt, Human
cagacagagccagg

SEQ ID NO: 1436439 - RNA, 13 nt, Human
cagacagagccag

SEQ ID NO: 1436440 - RNA, 16 nt, Human
cagagagaauggcuuu

SEQ ID NO: 1436441 - RNA, 12 nt, Human
cagagagaccga

SEQ ID NO: 1436442 - RNA, 14 nt, Human
cagagagaccgagg

SEQ ID NO: 1436443 - RNA, 20 nt, Human
cagagagaaauaagugcccu

SEQ ID NO: 1436444 - RNA, 17 nt, Human
cagagacuuuagggggu

SEQ ID NO: 1436445 - RNA, 20 nt, Human
cagagagguuugcaguccca

SEQ ID NO: 1436446 - RNA, 23 nt, Human
cagagagguuugcagucccaagc

SEQ ID NO: 1436447 - RNA, 18 nt, Human
cagagagguuugcagucc

SEQ ID NO: 1436448 - RNA, 20 nt, Human
cagagcugauggagaaggaa

SEQ ID NO: 1436449 - RNA, 21 nt, Human
cagagcugauggagaaggaag

SEQ ID NO: 1436450 - RNA, 19 nt, Human
cagagcugauggagaagga

SEQ ID NO: 1436451 - RNA, 23 nt, Human
cagaggggccugccaccuggacc

SEQ ID NO: 1436452 - RNA, 22 nt, Human
cagagcugauggagaaggaagg

SEQ ID NO: 1436453 - RNA, 15 nt, Human
cagauauauauucau

SEQ ID NO: 1436454 - RNA, 20 nt, Human
cagauaguguagcugaggag

SEQ ID NO: 1436455 - RNA, 18 nt, Human
cagauaguguagcugagg

SEQ ID NO: 1436456 - RNA, 22 nt, Human
cagaggggccugccaccuggac

SEQ ID NO: 1436457 - RNA, 20 nt, Human
cagauccaggagcuccagug

SEQ ID NO: 1436458 - RNA, 23 nt, Human
cagauccagggacagaggcccca

SEQ ID NO: 1436459 - RNA, 15 nt, Human
cagauccagggacag

SEQ ID NO: 1436460 - RNA, 14 nt, Human
cagauccagggaca

SEQ ID NO: 1436461 - RNA, 13 nt, Human
cagauccagggac

SEQ ID NO: 1436462 - RNA, 19 nt, Human
cagauccaggagcuccagu

SEQ ID NO: 1436463 - RNA, 18 nt, Human
cagauccaggagcuccag

SEQ ID NO: 1436464 - RNA, 17 nt, Human
cagauccaggagcucca

SEQ ID NO: 1436465 - RNA, 14 nt, Human
cagauccaggagcu

SEQ ID NO: 1436466 - RNA, 13 nt, Human
cagauccaggacu

SEQ ID NO: 1436467 - RNA, 12 nt, Human
cagauccaggac

SEQ ID NO: 1436468 - RNA, 20 nt, Human
cagauaucuuggacaaauca

SEQ ID NO: 1436469 - RNA, 18 nt, Human
cagauauauuuucuuucu

SEQ ID NO: 1436470 - RNA, 15 nt, Human
cagauaugauucaaa

SEQ ID NO: 1436471 - RNA, 14 nt, Human
cagauaugauucaa

SEQ ID NO: 1436472 - RNA, 17 nt, Human
cagccagcaucugggcc

SEQ ID NO: 1436473 - RNA, 16 nt, Human
cagccagcaucugggc

SEQ ID NO: 1436474 - RNA, 15 nt, Human
cagccagcaucuggg

SEQ ID NO: 1436475 - RNA, 14 nt, Human
cagccagcaucugg

SEQ ID NO: 1436476 - RNA, 13 nt, Human
cagccagcaucug

SEQ ID NO: 1436477 - RNA, 20 nt, Human
cagccagcccugccuggagg

SEQ ID NO: 1436478 - RNA, 19 nt, Human
cagccagcccugccuggag

SEQ ID NO: 1436479 - RNA, 18 nt, Human
cagccagcccugccugga

SEQ ID NO: 1436480 - RNA, 17 nt, Human
cagccagcccugccugg

SEQ ID NO: 1436481 - RNA, 16 nt, Human
cagccagcccugccug

SEQ ID NO: 1436482 - RNA, 15 nt, Human
cagccagcccugccu

SEQ ID NO: 1436483 - RNA, 14 nt, Human
cagccagcccugcc

SEQ ID NO: 1436484 - RNA, 13 nt, Human
cagccagcccugc

SEQ ID NO: 1436485 - RNA, 12 nt, Human
cagccagcccug

SEQ ID NO: 1436486 - RNA, 17 nt, Human
cagccaggcccagccga

SEQ ID NO: 1436487 - RNA, 15 nt, Human
cagccaggcccagcc

SEQ ID NO: 1436488 - RNA, 21 nt, Human
cagccaggcccagccgacccc

SEQ ID NO: 1436489 - RNA, 13 nt, Human
cagccaggcccag

SEQ ID NO: 1436490 - RNA, 21 nt, Human
cagccagcccugccuggagga

SEQ ID NO: 1436491 - RNA, 21 nt, Human
cagcacuagccaaaccucacc

SEQ ID NO: 1436492 - RNA, 17 nt, Human
cagcacuagccaaaccu

SEQ ID NO: 1436493 - RNA, 15 nt, Human
cagcacuagccaaac

SEQ ID NO: 1436494 - RNA, 12 nt, Human
cagcaccugccc

SEQ ID NO: 1436495 - RNA, 12 nt, Human
cagcaccuggca

SEQ ID NO: 1436496 - RNA, 14 nt, Human
cagcacgauuucug

SEQ ID NO: 1436497 - RNA, 15 nt, Human
cagcacgauuucugu

SEQ ID NO: 1436498 - RNA, 13 nt, Human
cagauuguuugca

SEQ ID NO: 1436499 - RNA, 14 nt, Human
cagauugucagcuc

SEQ ID NO: 1436500 - RNA, 13 nt, Human
cagauuuaugcau

SEQ ID NO: 1436501 - RNA, 13 nt, Human
cagcaccugcccu

SEQ ID NO: 1436502 - RNA, 19 nt, Human
cagcaccuccucagccuga

SEQ ID NO: 1436503 - RNA, 18 nt, Human
cagcaccuccucagccug

SEQ ID NO: 1436504 - RNA, 17 nt, Human
cagcaccuccucagccu

SEQ ID NO: 1436505 - RNA, 16 nt, Human
cagcaccuccucagcc

SEQ ID NO: 1436506 - RNA, 15 nt, Human
cagcaccuccucagc

SEQ ID NO: 1436507 - RNA, 14 nt, Human
cagcaccuccucag

SEQ ID NO: 1436508 - RNA, 12 nt, Human
cagcaccuccuc

SEQ ID NO: 1436509 - RNA, 14 nt, Human
cagcaccagaaugu

SEQ ID NO: 1436510 - RNA, 14 nt, Human
cagauuuccagccu

SEQ ID NO: 1436511 - RNA, 14 nt, Human
cagauuucugagga

SEQ ID NO: 1436512 - RNA, 15 nt, Human
cagauuucugaggaa

SEQ ID NO: 1436513 - RNA, 17 nt, Human
cagauuucugaggaaau

SEQ ID NO: 1436514 - RNA, 20 nt, Human
cauguccaaagaggcugccc

SEQ ID NO: 1436515 - RNA, 19 nt, Human
cauguccaaagaggcugcc

SEQ ID NO: 1436516 - RNA, 18 nt, Human
cauguccaaagaggcugc

SEQ ID NO: 1436517 - RNA, 17 nt, Human
cauguccaaagaggcug

SEQ ID NO: 1436518 - RNA, 16 nt, Human
cauguccaaagaggcu

SEQ ID NO: 1436519 - RNA, 15 nt, Human
cauguccaaagaggc

SEQ ID NO: 1436520 - RNA, 14 nt, Human
cauguccaaagagg

SEQ ID NO: 1436521 - RNA, 13 nt, Human
cauguccaaagag

SEQ ID NO: 1436522 - RNA, 12 nt, Human
cauguccaaaga

SEQ ID NO: 1436523 - RNA, 18 nt, Human
caugucauuucagaaguu

SEQ ID NO: 1436524 - RNA, 21 nt, Human
cauguauugcacauuguaaaa

SEQ ID NO: 1436525 - RNA, 18 nt, Human
cauguauugcacauugua

SEQ ID NO: 1436526 - RNA, 17 nt, Human
cauguauugcacauugu

SEQ ID NO: 1436527 - RNA, 21 nt, Human
cauguccaaagaggcugcccc

SEQ ID NO: 1436528 - RNA, 13 nt, Human
cauguucuuaauu

SEQ ID NO: 1436529 - RNA, 16 nt, Human
cauguucuuaauucuu

SEQ ID NO: 1436530 - RNA, 19 nt, Human
cauuauauuucuauuuuau

SEQ ID NO: 1436531 - RNA, 22 nt, Human
cauguugaagccacugccuuca

SEQ ID NO: 1436532 - RNA, 19 nt, Human
cauguugaagccacugccu

SEQ ID NO: 1436533 - RNA, 18 nt, Human
cauguucugucccuugcc

SEQ ID NO: 1436534 - RNA, 14 nt, Human
cauguucugucccu

SEQ ID NO: 1436535 - RNA, 18 nt, Human
cauguucuuaauucuuag

SEQ ID NO: 1436536 - RNA, 21 nt, Human
cauuaucgagcagcauuuuau

SEQ ID NO: 1436537 - RNA, 16 nt, Human
cauuauuacuuuugcu

SEQ ID NO: 1436538 - RNA, 12 nt, Human
cauuauuacuuu

SEQ ID NO: 1436539 - RNA, 13 nt, Human
cauuauuaucaac

SEQ ID NO: 1436540 - RNA, 23 nt, Human
cauuauuacuuuugcuguaaugu

SEQ ID NO: 1436541 - RNA, 16 nt, Human
cauucugaaggagccc

SEQ ID NO: 1436542 - RNA, 23 nt, Human
cauucucugucucauccaucauc

SEQ ID NO: 1436543 - RNA, 19 nt, Human
cauucucugucucauccau

SEQ ID NO: 1436544 - RNA, 14 nt, Human
cauucucugucuca

SEQ ID NO: 1436545 - RNA, 11 nt, Human
cauucugaaug

SEQ ID NO: 1436546 - RNA, 18 nt, Human
cauuauuacuuuugcugu

SEQ ID NO: 1436547 - RNA, 21 nt, Human
cauggccucuucagaucucua

SEQ ID NO: 1436548 - RNA, 22 nt, Human
cauggccucuucagaucucuaa

SEQ ID NO: 1436549 - RNA, 18 nt, Human
cauggccccucugaccug

SEQ ID NO: 1436550 - RNA, 17 nt, Human
cauggccccucugaccu

SEQ ID NO: 1436551 - RNA, 16 nt, Human
cauggccccucugacc

SEQ ID NO: 1436552 - RNA, 13 nt, Human
cauggccccucug

SEQ ID NO: 1436553 - RNA, 12 nt, Human
cauggccccucu

SEQ ID NO: 1436554 - RNA, 17 nt, Human
cauggcccugagcgagu

SEQ ID NO: 1436555 - RNA, 15 nt, Human
cauggcccugagcga

SEQ ID NO: 1436556 - RNA, 16 nt, Human
cauggcccugccaugc

SEQ ID NO: 1436557 - RNA, 19 nt, Human
caugauggcaacagaucug

SEQ ID NO: 1436558 - RNA, 15 nt, Human
caugauggcaacaga

SEQ ID NO: 1436559 - RNA, 20 nt, Human
caugaugccucugucuucug

SEQ ID NO: 1436560 - RNA, 17 nt, Human
caugaugccucugucuu

SEQ ID NO: 1436561 - RNA, 16 nt, Human
caugaugccucugucu

SEQ ID NO: 1436562 - RNA, 23 nt, Human
caugaugccucugucuucuggac

SEQ ID NO: 1436563 - RNA, 22 nt, Human
caugaugccucugucuucugga

SEQ ID NO: 1436564 - RNA, 20 nt, Human
caugauggcaacagaucugg

SEQ ID NO: 1436565 - RNA, 14 nt, Human
caugcaaacucuuu

SEQ ID NO: 1436566 - RNA, 12 nt, Human
caugcaagguca

SEQ ID NO: 1436567 - RNA, 15 nt, Human
caugcaaggucauuu

SEQ ID NO: 1436568 - RNA, 18 nt, Human
caugaauuuuagcuuuug

SEQ ID NO: 1436569 - RNA, 17 nt, Human
caugaauuuuagcuuuu

SEQ ID NO: 1436570 - RNA, 16 nt, Human
caugaauuuuagcuuu

SEQ ID NO: 1436571 - RNA, 15 nt, Human
caugaauuuuagcuu

SEQ ID NO: 1436572 - RNA, 19 nt, Human
caugaauguaaauuuguac

SEQ ID NO: 1436573 - RNA, 22 nt, Human
caugaauguaaauuuguacuau

SEQ ID NO: 1436574 - RNA, 17 nt, Human
caugaauguaaauuugu

SEQ ID NO: 1436575 - RNA, 16 nt, Human
caugaauguaaauuug

SEQ ID NO: 1436576 - RNA, 19 nt, Human
caugaauuuuagcuuuugu

SEQ ID NO: 1436577 - RNA, 16 nt, Human
caugacaacuucuaau

SEQ ID NO: 1436578 - RNA, 20 nt, Human
caugaauuuuagcuuuugug

SEQ ID NO: 1436579 - RNA, 13 nt, Human
caugacaaagacu

SEQ ID NO: 1436580 - RNA, 14 nt, Human
caugaauguaaauu

SEQ ID NO: 1436581 - RNA, 13 nt, Human
caugaauguaaau

SEQ ID NO: 1436582 - RNA, 19 nt, Human
caugaaucugcacaucugu

SEQ ID NO: 1436583 - RNA, 15 nt, Human
caucugucccccuuu

SEQ ID NO: 1436584 - RNA, 13 nt, Human
caucugucccccu

SEQ ID NO: 1436585 - RNA, 12 nt, Human
caucuguccccc

SEQ ID NO: 1436586 - RNA, 21 nt, Human
caugaauauuuaguguucaua

SEQ ID NO: 1436587 - RNA, 23 nt, Human
cauuuaugagcucuucauguuuc

SEQ ID NO: 1436588 - RNA, 20 nt, Human
cauuuaugagcucuucaugu

SEQ ID NO: 1436589 - RNA, 17 nt, Human
cauuuaugagcucuuca

SEQ ID NO: 1436590 - RNA, 16 nt, Human
cauuuaugaagcaagc

SEQ ID NO: 1436591 - RNA, 20 nt, Human
cauuuaucuaaauauggacu

SEQ ID NO: 1436592 - RNA, 22 nt, Human
cauuuaucuauaauuuaccuaa

SEQ ID NO: 1436593 - RNA, 21 nt, Human
cauuuaucuauaauuuaccua

SEQ ID NO: 1436594 - RNA, 16 nt, Human
cauuuaucuauaauuu

SEQ ID NO: 1436595 - RNA, 14 nt, Human
cauuuaucuauaau

SEQ ID NO: 1436596 - RNA, 23 nt, Human
cauuugggaguuuuuaugagaaa

SEQ ID NO: 1436597 - RNA, 18 nt, Human
cauuuggcaucccugggc

SEQ ID NO: 1436598 - RNA, 20 nt, Human
cauuugggagacaugugaca

SEQ ID NO: 1436599 - RNA, 18 nt, Human
cauuugggagacauguga

SEQ ID NO: 1436600 - RNA, 20 nt, Human
cauuuggcaucccugggccu

SEQ ID NO: 1436601 - RNA, 16 nt, Human
cauuuggcaucccugg

SEQ ID NO: 1436602 - RNA, 18 nt, Human
cauuuggguccaggagga

SEQ ID NO: 1436603 - RNA, 17 nt, Human
cauuuggguccaggagg

SEQ ID NO: 1436604 - RNA, 16 nt, Human
cauuuggguccaggag

SEQ ID NO: 1436605 - RNA, 15 nt, Human
cauuuggguccagga

SEQ ID NO: 1436606 - RNA, 14 nt, Human
cauuuggguccagg

SEQ ID NO: 1436607 - RNA, 21 nt, Human
cauuuggugguuucagaaaug

SEQ ID NO: 1436608 - RNA, 22 nt, Human
cauuuguuucuuucucugagga

SEQ ID NO: 1436609 - RNA, 21 nt, Human
cauuuguuucuuucucugagg

SEQ ID NO: 1436610 - RNA, 20 nt, Human
cauuuguuuauguaauuuca

SEQ ID NO: 1436611 - RNA, 19 nt, Human
cauuuguuuauguaauuuc

SEQ ID NO: 1436612 - RNA, 18 nt, Human
cauuuguuuauguaauuu

SEQ ID NO: 1436613 - RNA, 17 nt, Human
cauuuguuuauguaauu

SEQ ID NO: 1436614 - RNA, 16 nt, Human
cauuuguuggaaugaa

SEQ ID NO: 1436615 - RNA, 15 nt, Human
cauuuguuucuacuu

SEQ ID NO: 1436616 - RNA, 23 nt, Human
cauuuguuucuuucucugaggac

SEQ ID NO: 1436617 - RNA, 17 nt, Human
cauuuguuugaacugau

SEQ ID NO: 1436618 - RNA, 23 nt, Human
cauuuuuuuuaagaaaaaggaug

SEQ ID NO: 1436619 - RNA, 16 nt, Human
cauuuguauaaaauaa

SEQ ID NO: 1436620 - RNA, 14 nt, Human
cauuuguauaaaau

SEQ ID NO: 1436621 - RNA, 17 nt, Human
cauuuguauaaaauaau

SEQ ID NO: 1436622 - RNA, 19 nt, Human
ccaaaagguuuaagaaaua

SEQ ID NO: 1436623 - RNA, 15 nt, Human
ccaaaagcuuuuuau

SEQ ID NO: 1436624 - RNA, 23 nt, Human
ccaaaagguuuaagaaauagaau

SEQ ID NO: 1436625 - RNA, 17 nt, Human
ccaaaaguuacauguuu

SEQ ID NO: 1436626 - RNA, 19 nt, Human
ccaaaaaaaaauacaugcu

SEQ ID NO: 1436627 - RNA, 22 nt, Human
cauuuuuuuucuuugaauaaau

SEQ ID NO: 1436628 - RNA, 21 nt, Human
cauuuuuuuucuuugaauaaa

SEQ ID NO: 1436629 - RNA, 17 nt, Human
cauuuuuuuucuuugaa

SEQ ID NO: 1436630 - RNA, 15 nt, Human
cauuuuuuuucuuug

SEQ ID NO: 1436631 - RNA, 23 nt, Human
cauuuuuuuucuuugaauaaaug

SEQ ID NO: 1436632 - RNA, 12 nt, Human
ccaaaaaacuac

SEQ ID NO: 1436633 - RNA, 21 nt, Human
cauuuauauugauaagaucuu

SEQ ID NO: 1436634 - RNA, 20 nt, Human
cauuuauauugauaagaucu

SEQ ID NO: 1436635 - RNA, 14 nt, Human
cauuuauauugaua

SEQ ID NO: 1436636 - RNA, 17 nt, Human
cauuuaguuugauuauu

SEQ ID NO: 1436637 - RNA, 17 nt, Human
cauuuagucaugugacc

SEQ ID NO: 1436638 - RNA, 15 nt, Human
cauuuagucauguga

SEQ ID NO: 1436639 - RNA, 15 nt, Human
cauuuagguuucuga

SEQ ID NO: 1436640 - RNA, 23 nt, Human
cauugggguaguuguguuucaac

SEQ ID NO: 1436641 - RNA, 14 nt, Human
cauugguccaagau

SEQ ID NO: 1436642 - RNA, 13 nt, Human
cauugguccaaga

SEQ ID NO: 1436643 - RNA, 20 nt, Human
cauuggaagagcagcaccuc

SEQ ID NO: 1436644 - RNA, 11 nt, Human
cauuggauauu

SEQ ID NO: 1436645 - RNA, 18 nt, Human
cauuggauauuuuuuacu

SEQ ID NO: 1436646 - RNA, 18 nt, Human
cauuggaauguucucaga

SEQ ID NO: 1436647 - RNA, 17 nt, Human
cauuggacccuuccaug

SEQ ID NO: 1436648 - RNA, 16 nt, Human
cauuggacccuuccau

SEQ ID NO: 1436649 - RNA, 19 nt, Human
cauuggaauguucucagau

SEQ ID NO: 1436650 - RNA, 16 nt, Human
cauuggaauguucuca

SEQ ID NO: 1436651 - RNA, 19 nt, Human
cauuggaagagcagcaccu

SEQ ID NO: 1436652 - RNA, 16 nt, Human
cauuggagauguuuag

SEQ ID NO: 1436653 - RNA, 17 nt, Human
ccaaagucauaauugca

SEQ ID NO: 1436654 - RNA, 13 nt, Human
ccaaagucauaau

SEQ ID NO: 1436655 - RNA, 22 nt, Human
ccaaaguacacuguuucaaacu

SEQ ID NO: 1436656 - RNA, 18 nt, Human
ccaaagucucuaauucua

SEQ ID NO: 1436657 - RNA, 16 nt, Human
ccaaagucucuaauuc

SEQ ID NO: 1436658 - RNA, 15 nt, Human
ccaaagucucuaauu

SEQ ID NO: 1436659 - RNA, 14 nt, Human
ccaaagucucuaau

SEQ ID NO: 1436660 - RNA, 19 nt, Human
ccaaagucauaauugcauu

SEQ ID NO: 1436661 - RNA, 19 nt, Human
ccaaaguccugggauuaca

SEQ ID NO: 1436662 - RNA, 22 nt, Human
ccaaggagucacugagaccaag

SEQ ID NO: 1436663 - RNA, 19 nt, Human
ccaaggagucacugagacc

SEQ ID NO: 1436664 - RNA, 17 nt, Human
ccaaggagucacugaga

SEQ ID NO: 1436665 - RNA, 14 nt, Human
ccaaggaccugaga

SEQ ID NO: 1436666 - RNA, 14 nt, Human
ccaaggaaaggcac

SEQ ID NO: 1436667 - RNA, 16 nt, Human
ccaauucagacaggca

SEQ ID NO: 1436668 - RNA, 14 nt, Human
ccaauucagacagg

SEQ ID NO: 1436669 - RNA, 22 nt, Human
ccaauuauuuucauccuugucu

SEQ ID NO: 1436670 - RNA, 15 nt, Human
ccaauuauguuaaac

SEQ ID NO: 1436671 - RNA, 17 nt, Human
ccaauuauguuaaacua

SEQ ID NO: 1436672 - RNA, 22 nt, Human
ccaauggaaugugauguucaug

SEQ ID NO: 1436673 - RNA, 20 nt, Human
ccaauggaaugugauguuca

SEQ ID NO: 1436674 - RNA, 14 nt, Human
ccaauuauguuaaa

SEQ ID NO: 1436675 - RNA, 20 nt, Human
ccaaaucaaaaucucuccac

SEQ ID NO: 1436676 - RNA, 19 nt, Human
ccaaaucaaaaucucucca

SEQ ID NO: 1436677 - RNA, 16 nt, Human
ccaaaucaaaaucucu

SEQ ID NO: 1436678 - RNA, 15 nt, Human
ccaaagugcugagau

SEQ ID NO: 1436679 - RNA, 22 nt, Human
ccaaaucaaaagacuuuuuccu

SEQ ID NO: 1436680 - RNA, 16 nt, Human
ccaacuauggccugug

SEQ ID NO: 1436681 - RNA, 14 nt, Human
ccaacuauggccug

SEQ ID NO: 1436682 - RNA, 15 nt, Human
ccaacuauggccugu

SEQ ID NO: 1436683 - RNA, 14 nt, Human
ccaacucaccugag

SEQ ID NO: 1436684 - RNA, 20 nt, Human
ccaaaucacugaacuuugcu

SEQ ID NO: 1436685 - RNA, 21 nt, Human
ccaacuccagaaagugacaag

SEQ ID NO: 1436686 - RNA, 13 nt, Human
cagugguaagcua

SEQ ID NO: 1436687 - RNA, 15 nt, Human
cagugguaaaaaggc

SEQ ID NO: 1436688 - RNA, 15 nt, Human
cagugcaacacuggu

SEQ ID NO: 1436689 - RNA, 14 nt, Human
cagugcaacacugg

SEQ ID NO: 1436690 - RNA, 20 nt, Human
cagugauugucuuaauauug

SEQ ID NO: 1436691 - RNA, 16 nt, Human
cagugauugucuuaau

SEQ ID NO: 1436692 - RNA, 22 nt, Human
cagucucucuucucuccagcug

SEQ ID NO: 1436693 - RNA, 16 nt, Human
caguuaucuaaguuaa

SEQ ID NO: 1436694 - RNA, 18 nt, Human
caguuauauuuugcaguu

SEQ ID NO: 1436695 - RNA, 16 nt, Human
caguuauauuuugcag

SEQ ID NO: 1436696 - RNA, 15 nt, Human
caguuauauuuugca

SEQ ID NO: 1436697 - RNA, 21 nt, Human
caguuauaaguagcaggccaa

SEQ ID NO: 1436698 - RNA, 17 nt, Human
caguuauuauauuuaca

SEQ ID NO: 1436699 - RNA, 21 nt, Human
caguuauuauauuuacaaaug

SEQ ID NO: 1436700 - RNA, 20 nt, Human
caguuacucagaauucucua

SEQ ID NO: 1436701 - RNA, 22 nt, Human
cagucuaaagcugguuuaaugu

SEQ ID NO: 1436702 - RNA, 16 nt, Human
cagucguucccagugu

SEQ ID NO: 1436703 - RNA, 14 nt, Human
cagucguucccagu

SEQ ID NO: 1436704 - RNA, 17 nt, Human
cagucgugccugugucc

SEQ ID NO: 1436705 - RNA, 15 nt, Human
cagucgugccugugu

SEQ ID NO: 1436706 - RNA, 19 nt, Human
cagucucuauaccaauaaa

SEQ ID NO: 1436707 - RNA, 20 nt, Human
cagucucuauaccaauaaag

SEQ ID NO: 1436708 - RNA, 21 nt, Human
cagucucuauaccaauaaagu

SEQ ID NO: 1436709 - RNA, 22 nt, Human
cagucucuauaccaauaaagug

SEQ ID NO: 1436710 - RNA, 17 nt, Human
cagucucucuucucucc

SEQ ID NO: 1436711 - RNA, 14 nt, Human
cagucucucuucuc

SEQ ID NO: 1436712 - RNA, 23 nt, Human
cagucucuauaccaauaaaguga

SEQ ID NO: 1436713 - RNA, 17 nt, Human
cagucuauucacagaag

SEQ ID NO: 1436714 - RNA, 13 nt, Human
cagucucgucucu

SEQ ID NO: 1436715 - RNA, 17 nt, Human
cagucucuauaccaaua

SEQ ID NO: 1436716 - RNA, 19 nt, Human
caguucccacauuaaagaa

SEQ ID NO: 1436717 - RNA, 18 nt, Human
caguucccacauuaaaga

SEQ ID NO: 1436718 - RNA, 15 nt, Human
caguucauugcacuu

SEQ ID NO: 1436719 - RNA, 18 nt, Human
caguucauugcacuuuga

SEQ ID NO: 1436720 - RNA, 20 nt, Human
caguucauuagaaauauuuu

SEQ ID NO: 1436721 - RNA, 17 nt, Human
caguucauuagaaauau

SEQ ID NO: 1436722 - RNA, 23 nt, Human
caguucauauguaccauguacau

SEQ ID NO: 1436723 - RNA, 22 nt, Human
caguuaugauuuuuuuuucaua

SEQ ID NO: 1436724 - RNA, 22 nt, Human
caguuaucuaaguuaauuuaaa

SEQ ID NO: 1436725 - RNA, 22 nt, Human
caguuauuauauuuacaaaugg

SEQ ID NO: 1436726 - RNA, 13 nt, Human
caguucacccuga

SEQ ID NO: 1436727 - RNA, 14 nt, Human
caguucaagaaagc

SEQ ID NO: 1436728 - RNA, 15 nt, Human
caguucaaagcagga

SEQ ID NO: 1436729 - RNA, 20 nt, Human
caguuugaaauaagcuauuu

SEQ ID NO: 1436730 - RNA, 13 nt, Human
caguuugaaauaa

SEQ ID NO: 1436731 - RNA, 20 nt, Human
caguuucuaaacuggagacu

SEQ ID NO: 1436732 - RNA, 19 nt, Human
caguuucuaaacuggagac

SEQ ID NO: 1436733 - RNA, 18 nt, Human
caguuucuaaacuggaga

SEQ ID NO: 1436734 - RNA, 17 nt, Human
caguuucuaaacuggag

SEQ ID NO: 1436735 - RNA, 14 nt, Human
caguuuccuuggga

SEQ ID NO: 1436736 - RNA, 23 nt, Human
caguuucauaaaaggagaaccag

SEQ ID NO: 1436737 - RNA, 21 nt, Human
caguuucacagaaaauaaggc

SEQ ID NO: 1436738 - RNA, 17 nt, Human
caguuucacagaaaaua

SEQ ID NO: 1436739 - RNA, 15 nt, Human
caguuucacagaaaa

SEQ ID NO: 1436740 - RNA, 14 nt, Human
caguuucacagaaa

SEQ ID NO: 1436741 - RNA, 13 nt, Human
caguuuuaacugu

SEQ ID NO: 1436742 - RNA, 12 nt, Human
caguuuuaacug

SEQ ID NO: 1436743 - RNA, 23 nt, Human
caguuuguuaguaugaggcauuu

SEQ ID NO: 1436744 - RNA, 18 nt, Human
caguuuaucauucaagug

SEQ ID NO: 1436745 - RNA, 16 nt, Human
caguuuaucauucaag

SEQ ID NO: 1436746 - RNA, 15 nt, Human
caguuuaucauucaa

SEQ ID NO: 1436747 - RNA, 14 nt, Human
caguuuaucauuca

SEQ ID NO: 1436748 - RNA, 13 nt, Human
caguuguucuuuu

SEQ ID NO: 1436749 - RNA, 12 nt, Human
caguuguucuuu

SEQ ID NO: 1436750 - RNA, 19 nt, Human
caguuuaucauucaagugu

SEQ ID NO: 1436751 - RNA, 14 nt, Human
caguuuauuuguug

SEQ ID NO: 1436752 - RNA, 18 nt, Human
caguuuauuugaaccaau

SEQ ID NO: 1436753 - RNA, 19 nt, Human
caguuuauuugaaccaaua

SEQ ID NO: 1436754 - RNA, 17 nt, Human
cauaauguuacauuauu

SEQ ID NO: 1436755 - RNA, 23 nt, Human
cauaaugcgugcauaccacuuuu

SEQ ID NO: 1436756 - RNA, 19 nt, Human
caguuuuccuaugcuuuga

SEQ ID NO: 1436757 - RNA, 12 nt, Human
caguuuucauaa

SEQ ID NO: 1436758 - RNA, 15 nt, Human
caguuuuaucauuuu

SEQ ID NO: 1436759 - RNA, 23 nt, Human
caguuuuaacuguggauauuguu

SEQ ID NO: 1436760 - RNA, 22 nt, Human
caguuuuaacuguggauauugu

SEQ ID NO: 1436761 - RNA, 20 nt, Human
caguuuuaacuguggauauu

SEQ ID NO: 1436762 - RNA, 18 nt, Human
caguuuuaacuguggaua

SEQ ID NO: 1436763 - RNA, 17 nt, Human
caguuuuaacuguggau

SEQ ID NO: 1436764 - RNA, 16 nt, Human
caguuuuaacugugga

SEQ ID NO: 1436765 - RNA, 15 nt, Human
caguuuuaacugugg

SEQ ID NO: 1436766 - RNA, 14 nt, Human
caguuuuaacugug

SEQ ID NO: 1436767 - RNA, 22 nt, Human
cauacagagaagucacagggca

SEQ ID NO: 1436768 - RNA, 21 nt, Human
cauaauuauccaggaagggaa

SEQ ID NO: 1436769 - RNA, 23 nt, Human
cauaauguuucuggauuucauac

SEQ ID NO: 1436770 - RNA, 22 nt, Human
cauaauguuucuggauuucaua

SEQ ID NO: 1436771 - RNA, 21 nt, Human
cauaauguuucuggauuucau

SEQ ID NO: 1436772 - RNA, 18 nt, Human
cauaauguuucuggauuu

SEQ ID NO: 1436773 - RNA, 18 nt, Human
cauaauguuacauuauua

SEQ ID NO: 1436774 - RNA, 23 nt, Human
cauaauucacucugaguguuuua

SEQ ID NO: 1436775 - RNA, 21 nt, Human
cauaauucacucugaguguuu

SEQ ID NO: 1436776 - RNA, 17 nt, Human
cauaauucacucugagu

SEQ ID NO: 1436777 - RNA, 14 nt, Human
cauaauucacucug

SEQ ID NO: 1436778 - RNA, 18 nt, Human
cauaauuauuauuuggcc

SEQ ID NO: 1436779 - RNA, 23 nt, Human
cauagguagaauguaaagcuugu

SEQ ID NO: 1436780 - RNA, 17 nt, Human
cauagguagaauguaaa

SEQ ID NO: 1436781 - RNA, 21 nt, Human
cauaggugauccauguaacug

SEQ ID NO: 1436782 - RNA, 23 nt, Human
cauaggugauccauguaacugcc

SEQ ID NO: 1436783 - RNA, 20 nt, Human
cauaggugauccauguaacu

SEQ ID NO: 1436784 - RNA, 18 nt, Human
cauaggugauccauguaa

SEQ ID NO: 1436785 - RNA, 21 nt, Human
cauaggucugaaauuuuucuu

SEQ ID NO: 1436786 - RNA, 16 nt, Human
cauagguuuaauaauu

SEQ ID NO: 1436787 - RNA, 19 nt, Human
cauauguugaauacuuuuu

SEQ ID NO: 1436788 - RNA, 18 nt, Human
cauauguugaauacuuuu

SEQ ID NO: 1436789 - RNA, 17 nt, Human
cauauguugaauacuuu

SEQ ID NO: 1436790 - RNA, 16 nt, Human
cauauguugaauacuu

SEQ ID NO: 1436791 - RNA, 15 nt, Human
cauauguaccaugua

SEQ ID NO: 1436792 - RNA, 21 nt, Human
cauauguaccauguacaugaa

SEQ ID NO: 1436793 - RNA, 21 nt, Human
cauauuauuuuauguugcaua

SEQ ID NO: 1436794 - RNA, 23 nt, Human
caucagaaagggagggcucugag

SEQ ID NO: 1436795 - RNA, 24 nt, Human
caucagaaagggagggcucugagg

SEQ ID NO: 1436796 - RNA, 22 nt, Human
caucagaaagggagggcucuga

SEQ ID NO: 1436797 - RNA, 21 nt, Human
caucagaaagggagggcucug

SEQ ID NO: 1436798 - RNA, 21 nt, Human
caucagcacgauuucuguuua

SEQ ID NO: 1436799 - RNA, 21 nt, Human
cauccauucucacagguccca

SEQ ID NO: 1436800 - RNA, 16 nt, Human
cauccauucuccugag

SEQ ID NO: 1436801 - RNA, 14 nt, Human
caucagcuccagcu

SEQ ID NO: 1436802 - RNA, 13 nt, Human
caucccacugcca

SEQ ID NO: 1436803 - RNA, 23 nt, Human
caucccacucacaacagcugccu

SEQ ID NO: 1436804 - RNA, 19 nt, Human
cauccugaccagcugcucc

SEQ ID NO: 1436805 - RNA, 15 nt, Human
cauccucuuuuucca

SEQ ID NO: 1436806 - RNA, 23 nt, Human
caucccagacaggucccuccccu

SEQ ID NO: 1436807 - RNA, 21 nt, Human
caucccagacaggucccuccc

SEQ ID NO: 1436808 - RNA, 17 nt, Human
caucccagacagguccc

SEQ ID NO: 1436809 - RNA, 23 nt, Human
caucuaaaaauagacuuaaaucu

SEQ ID NO: 1436810 - RNA, 15 nt, Human
caucguugcccccau

SEQ ID NO: 1436811 - RNA, 15 nt, Human
caucuaaccucaucu

SEQ ID NO: 1436812 - RNA, 12 nt, Human
cauccugcaggc

SEQ ID NO: 1436813 - RNA, 21 nt, Human
caucuguauacccucuguuuc

SEQ ID NO: 1436814 - RNA, 20 nt, Human
caucuguauacccucuguuu

SEQ ID NO: 1436815 - RNA, 19 nt, Human
caucuguauacccucuguu

SEQ ID NO: 1436816 - RNA, 18 nt, Human
caucuguauacccucugu

SEQ ID NO: 1436817 - RNA, 22 nt, Human
caucugguugaacucugguggc

SEQ ID NO: 1436818 - RNA, 23 nt, Human
caucugguagaagggaaagccca

SEQ ID NO: 1436819 - RNA, 18 nt, Human
caucuggcucuaauucac

SEQ ID NO: 1436820 - RNA, 22 nt, Human
caucuguaaaucuacacacggu

SEQ ID NO: 1436821 - RNA, 20 nt, Human
caucugguagaagggaaagc

SEQ ID NO: 1436822 - RNA, 14 nt, Human
caucuggcucuaau

SEQ ID NO: 1436823 - RNA, 18 nt, Human
caucuggccuggccagug

SEQ ID NO: 1436824 - RNA, 17 nt, Human
caucuggccuggccagu

SEQ ID NO: 1436825 - RNA, 15 nt, Human
caucuggccuggcca

SEQ ID NO: 1436826 - RNA, 14 nt, Human
caucuggccuggcc

SEQ ID NO: 1436827 - RNA, 13 nt, Human
caucuggccuggc

SEQ ID NO: 1436828 - RNA, 12 nt, Human
caucuggccugg

SEQ ID NO: 1436829 - RNA, 19 nt, Human
caucuaaccucaucuucuu

SEQ ID NO: 1436830 - RNA, 18 nt, Human
caucuaaccucaucuucu

SEQ ID NO: 1436831 - RNA, 20 nt, Human
caucuggcaacaucuuuauc

SEQ ID NO: 1436832 - RNA, 16 nt, Human
caucuggauuccagag

SEQ ID NO: 1436833 - RNA, 15 nt, Human
caucacuuugaccua

SEQ ID NO: 1436834 - RNA, 19 nt, Human
caucacuuguacaaaauaa

SEQ ID NO: 1436835 - RNA, 20 nt, Human
caucagaaagggagggcucu

SEQ ID NO: 1436836 - RNA, 18 nt, Human
caucagaaagggagggcu

SEQ ID NO: 1436837 - RNA, 17 nt, Human
caucagaaagggagggc

SEQ ID NO: 1436838 - RNA, 16 nt, Human
caucagaaagggaggg

SEQ ID NO: 1436839 - RNA, 12 nt, Human
caucagaaaggg

SEQ ID NO: 1436840 - RNA, 18 nt, Human
caucagaaaggaaaaaca

SEQ ID NO: 1436841 - RNA, 20 nt, Human
caucagaaaggaaaaacaaa

SEQ ID NO: 1436842 - RNA, 19 nt, Human
caucagaaacacccucaca

SEQ ID NO: 1436843 - RNA, 17 nt, Human
caucagaaacacccuca

SEQ ID NO: 1436844 - RNA, 22 nt, Human
cccugugcaaccucuuggccug

SEQ ID NO: 1436845 - RNA, 17 nt, Human
cccuguccuuagccuag

SEQ ID NO: 1436846 - RNA, 14 nt, Human
cccuguccuggugg

SEQ ID NO: 1436847 - RNA, 13 nt, Human
cccuguccuggug

SEQ ID NO: 1436848 - RNA, 23 nt, Human
cccuguccuggugguauuuucaa

SEQ ID NO: 1436849 - RNA, 23 nt, Human
ccgcccagcggcuugccugccug

SEQ ID NO: 1436850 - RNA, 22 nt, Human
ccgcccagagacccaagcugcc

SEQ ID NO: 1436851 - RNA, 23 nt, Human
ccgcccacaggaagccugcaguc

SEQ ID NO: 1436852 - RNA, 15 nt, Human
ccgaaaaucauauaa

SEQ ID NO: 1436853 - RNA, 23 nt, Human
cccuuccuggacagcugugccuc

SEQ ID NO: 1436854 - RNA, 22 nt, Human
cccuuccuggacagcugugccu

SEQ ID NO: 1436855 - RNA, 20 nt, Human
cccuuccuggacagcugugc

SEQ ID NO: 1436856 - RNA, 19 nt, Human
cccuuccuggacagcugug

SEQ ID NO: 1436857 - RNA, 18 nt, Human
cccuuccuggacagcugu

SEQ ID NO: 1436858 - RNA, 17 nt, Human
cccuuccuggacagcug

SEQ ID NO: 1436859 - RNA, 16 nt, Human
cccuuccuggacagcu

SEQ ID NO: 1436860 - RNA, 14 nt, Human
cccuuccuggacag

SEQ ID NO: 1436861 - RNA, 13 nt, Human
cccuuccuggaca

SEQ ID NO: 1436862 - RNA, 22 nt, Human
cccugugcagccgcugagcgag

SEQ ID NO: 1436863 - RNA, 11 nt, Human
cccuuccugga

SEQ ID NO: 1436864 - RNA, 13 nt, Human
ccgaagucuuuug

SEQ ID NO: 1436865 - RNA, 23 nt, Human
ccgaaggugaggagcuugaaacc

SEQ ID NO: 1436866 - RNA, 22 nt, Human
ccggcauggacaauggaccgga

SEQ ID NO: 1436867 - RNA, 18 nt, Human
ccggcauggacaauggac

SEQ ID NO: 1436868 - RNA, 17 nt, Human
ccggcauggacaaugga

SEQ ID NO: 1436869 - RNA, 13 nt, Human
ccggcauggacaa

SEQ ID NO: 1436870 - RNA, 17 nt, Human
ccuaagaaucuuuagag

SEQ ID NO: 1436871 - RNA, 17 nt, Human
ccuaacucuucuuucau

SEQ ID NO: 1436872 - RNA, 15 nt, Human
ccuaacucuucuuuc

SEQ ID NO: 1436873 - RNA, 14 nt, Human
ccuaacucuucuuu

SEQ ID NO: 1436874 - RNA, 16 nt, Human
ccguccugccuguggc

SEQ ID NO: 1436875 - RNA, 20 nt, Human
ccuagcccucucacauuuau

SEQ ID NO: 1436876 - RNA, 21 nt, Human
ccuagcauacguacacauuuu

SEQ ID NO: 1436877 - RNA, 12 nt, Human
ccuagcagcacc

SEQ ID NO: 1436878 - RNA, 23 nt, Human
ccuagcagcaccguucugugcac

SEQ ID NO: 1436879 - RNA, 21 nt, Human
ccuagcagcaccguucugugc

SEQ ID NO: 1436880 - RNA, 20 nt, Human
ccuagcagcaccguucugug

SEQ ID NO: 1436881 - RNA, 19 nt, Human
ccuagcauacguacacauu

SEQ ID NO: 1436882 - RNA, 18 nt, Human
ccuaauccccuucucccc

SEQ ID NO: 1436883 - RNA, 21 nt, Human
ccuaauccaggcagauccagg

SEQ ID NO: 1436884 - RNA, 20 nt, Human
ccuaauccaggcagauccag

SEQ ID NO: 1436885 - RNA, 19 nt, Human
ccuaauccaggcagaucca

SEQ ID NO: 1436886 - RNA, 18 nt, Human
ccuaauccaggcagaucc

SEQ ID NO: 1436887 - RNA, 16 nt, Human
ccuaauccccuucucc

SEQ ID NO: 1436888 - RNA, 20 nt, Human
ccuaaucuauggucgggaga

SEQ ID NO: 1436889 - RNA, 15 nt, Human
ccuaagaggcugccc

SEQ ID NO: 1436890 - RNA, 14 nt, Human
ccuaagaggcugcc

SEQ ID NO: 1436891 - RNA, 13 nt, Human
ccuaagaggcugc

SEQ ID NO: 1436892 - RNA, 12 nt, Human
ccuaagaggcug

SEQ ID NO: 1436893 - RNA, 15 nt, Human
ccuaagagagcaccu

SEQ ID NO: 1436894 - RNA, 19 nt, Human
cccuccgcccugccacuca

SEQ ID NO: 1436895 - RNA, 16 nt, Human
cccuccgcccugccac

SEQ ID NO: 1436896 - RNA, 15 nt, Human
cccuccgcccugcca

SEQ ID NO: 1436897 - RNA, 14 nt, Human
cccuccgcccugcc

SEQ ID NO: 1436898 - RNA, 19 nt, Human
cccuccucuagcugugggg

SEQ ID NO: 1436899 - RNA, 18 nt, Human
cccuccucuagcuguggg

SEQ ID NO: 1436900 - RNA, 13 nt, Human
cccuccuaaccua

SEQ ID NO: 1436901 - RNA, 17 nt, Human
cccuccgcucuguagug

SEQ ID NO: 1436902 - RNA, 14 nt, Human
cccucgcugccagc

SEQ ID NO: 1436903 - RNA, 20 nt, Human
cccucggggauguguccuga

SEQ ID NO: 1436904 - RNA, 18 nt, Human
cccucggggauguguccu

SEQ ID NO: 1436905 - RNA, 17 nt, Human
cccucggggaugugucc

SEQ ID NO: 1436906 - RNA, 14 nt, Human
cccugaacaagaau

SEQ ID NO: 1436907 - RNA, 20 nt, Human
cccugaagugagcacagccu

SEQ ID NO: 1436908 - RNA, 17 nt, Human
cccugaaggggccauga

SEQ ID NO: 1436909 - RNA, 17 nt, Human
cccugaccacucagaga

SEQ ID NO: 1436910 - RNA, 16 nt, Human
cccugaccacucagag

SEQ ID NO: 1436911 - RNA, 15 nt, Human
cccugaccacucaga

SEQ ID NO: 1436912 - RNA, 14 nt, Human
cccugaccacucag

SEQ ID NO: 1436913 - RNA, 20 nt, Human
cccugaauuuaaauagcuuu

SEQ ID NO: 1436914 - RNA, 16 nt, Human
cccugaccugugagcc

SEQ ID NO: 1436915 - RNA, 19 nt, Human
cccugaccuggcccccuca

SEQ ID NO: 1436916 - RNA, 16 nt, Human
cccugaccuggccccc

SEQ ID NO: 1436917 - RNA, 16 nt, Human
cccugaccagcucccc

SEQ ID NO: 1436918 - RNA, 20 nt, Human
cccugaccagcucccccucc

SEQ ID NO: 1436919 - RNA, 15 nt, Human
cccugaccagcuccc

SEQ ID NO: 1436920 - RNA, 23 nt, Human
cccugaccacucagagacaugca

SEQ ID NO: 1436921 - RNA, 22 nt, Human
cccugaccacucagagacaugc

SEQ ID NO: 1436922 - RNA, 19 nt, Human
cccugaccacucagagaca

SEQ ID NO: 1436923 - RNA, 13 nt, Human
cccugacugggag

SEQ ID NO: 1436924 - RNA, 21 nt, Human
cccugacucauucugaaggag

SEQ ID NO: 1436925 - RNA, 19 nt, Human
cccugacucauucugaagg

SEQ ID NO: 1436926 - RNA, 15 nt, Human
cccugacucauucug

SEQ ID NO: 1436927 - RNA, 20 nt, Human
cccugaccugugagcccagc

SEQ ID NO: 1436928 - RNA, 20 nt, Human
cccugagacaaauggaggcc

SEQ ID NO: 1436929 - RNA, 23 nt, Human
cccugagacaaauggaggccugu

SEQ ID NO: 1436930 - RNA, 16 nt, Human
cccugagacaaaugga

SEQ ID NO: 1436931 - RNA, 17 nt, Human
cccugagacaaauggag

SEQ ID NO: 1436932 - RNA, 20 nt, Human
cccugagcuagaacccucug

SEQ ID NO: 1436933 - RNA, 19 nt, Human
cccugagcgaguggagucu

SEQ ID NO: 1436934 - RNA, 12 nt, Human
cccugagccggc

SEQ ID NO: 1436935 - RNA, 20 nt, Human
cccugagccagggucuccag

SEQ ID NO: 1436936 - RNA, 21 nt, Human
cccugagccagggucuccaga

SEQ ID NO: 1436937 - RNA, 19 nt, Human
cccugagccagggucucca

SEQ ID NO: 1436938 - RNA, 18 nt, Human
cccugagccagggucucc

SEQ ID NO: 1436939 - RNA, 21 nt, Human
cccugagcugaggcagcagug

SEQ ID NO: 1436940 - RNA, 19 nt, Human
cccugagcugaggcagcag

SEQ ID NO: 1436941 - RNA, 17 nt, Human
cccugagcugaggcagc

SEQ ID NO: 1436942 - RNA, 16 nt, Human
cccugagcugaggcag

SEQ ID NO: 1436943 - RNA, 14 nt, Human
cccugagcugaggc

SEQ ID NO: 1436944 - RNA, 13 nt, Human
cccugagcugagg

SEQ ID NO: 1436945 - RNA, 14 nt, Human
cccugagcugacca

SEQ ID NO: 1436946 - RNA, 11 nt, Human
cccugagcuga

SEQ ID NO: 1436947 - RNA, 19 nt, Human
cccugccccuccucucccu

SEQ ID NO: 1436948 - RNA, 18 nt, Human
cccugcccccugcaggaa

SEQ ID NO: 1436949 - RNA, 15 nt, Human
cccugcccccugcag

SEQ ID NO: 1436950 - RNA, 14 nt, Human
cccugcccccugca

SEQ ID NO: 1436951 - RNA, 21 nt, Human
cccugccccccagccucuggc

SEQ ID NO: 1436952 - RNA, 19 nt, Human
cccugccccccagccucug

SEQ ID NO: 1436953 - RNA, 16 nt, Human
cccugccccccagccu

SEQ ID NO: 1436954 - RNA, 19 nt, Human
cccugcccccugcaggaag

SEQ ID NO: 1436955 - RNA, 17 nt, Human
cccugcccccugcagga

SEQ ID NO: 1436956 - RNA, 16 nt, Human
cccugcccccugcagg

SEQ ID NO: 1436957 - RNA, 15 nt, Human
cccugccccccagcc

SEQ ID NO: 1436958 - RNA, 12 nt, Human
cccugcccccca

SEQ ID NO: 1436959 - RNA, 13 nt, Human
cccugcccaugcu

SEQ ID NO: 1436960 - RNA, 22 nt, Human
cccuggcuccuugugccagaga

SEQ ID NO: 1436961 - RNA, 15 nt, Human
cccuggccuccccca

SEQ ID NO: 1436962 - RNA, 20 nt, Human
cccuggccuccccugccacc

SEQ ID NO: 1436963 - RNA, 19 nt, Human
cccuggccuccccugccac

SEQ ID NO: 1436964 - RNA, 20 nt, Human
cccuggcuccuugugccaga

SEQ ID NO: 1436965 - RNA, 14 nt, Human
cccuggccuccccu

SEQ ID NO: 1436966 - RNA, 13 nt, Human
cccuggccucccc

SEQ ID NO: 1436967 - RNA, 11 nt, Human
cccuggccucc

SEQ ID NO: 1436968 - RNA, 16 nt, Human
cccuggccuagaccag

SEQ ID NO: 1436969 - RNA, 15 nt, Human
cccuggccgcccccu

SEQ ID NO: 1436970 - RNA, 20 nt, Human
cccuggccgaguccaagcug

SEQ ID NO: 1436971 - RNA, 21 nt, Human
cccuggaucagcguggccuug

SEQ ID NO: 1436972 - RNA, 20 nt, Human
cccuggaucagcguggccuu

SEQ ID NO: 1436973 - RNA, 19 nt, Human
cccuggaucagcguggccu

SEQ ID NO: 1436974 - RNA, 16 nt, Human
cccuggaucagcgugg

SEQ ID NO: 1436975 - RNA, 17 nt, Human
cccuggaucagaacagg

SEQ ID NO: 1436976 - RNA, 15 nt, Human
cccuggaucagaaca

SEQ ID NO: 1436977 - RNA, 15 nt, Human
cccugcccugccacc

SEQ ID NO: 1436978 - RNA, 17 nt, Human
cccugcccugccaccug

SEQ ID NO: 1436979 - RNA, 18 nt, Human
cccugcccugccaccugu

SEQ ID NO: 1436980 - RNA, 13 nt, Human
ccuaggaagccuc

SEQ ID NO: 1436981 - RNA, 22 nt, Human
ccuagcugugugaauaccugcu

SEQ ID NO: 1436982 - RNA, 16 nt, Human
ccuagcugugugaaua

SEQ ID NO: 1436983 - RNA, 22 nt, Human
ccuagcuguccuuuuuccucuc

SEQ ID NO: 1436984 - RNA, 21 nt, Human
ccuagcugugaccucuccccu

SEQ ID NO: 1436985 - RNA, 20 nt, Human
ccuagcuguccuuuuuccuc

SEQ ID NO: 1436986 - RNA, 19 nt, Human
ccuagcuguccuuuuuccu

SEQ ID NO: 1436987 - RNA, 18 nt, Human
ccuagcuguccuuuuucc

SEQ ID NO: 1436988 - RNA, 13 nt, Human
ccuagcuguccuu

SEQ ID NO: 1436989 - RNA, 22 nt, Human
ccuagcugaauguuuuucuaaa

SEQ ID NO: 1436990 - RNA, 21 nt, Human
ccuagcugaauguuuuucuaa

SEQ ID NO: 1436991 - RNA, 20 nt, Human
ccuagcugaauguuuuucua

SEQ ID NO: 1436992 - RNA, 19 nt, Human
ccuagcugaauguuuuucu

SEQ ID NO: 1436993 - RNA, 14 nt, Human
ccuagcugaauguu

SEQ ID NO: 1436994 - RNA, 20 nt, Human
ccuagcgggauggggcuccc

SEQ ID NO: 1436995 - RNA, 17 nt, Human
ccuagcgggauggggcu

SEQ ID NO: 1436996 - RNA, 21 nt, Human
ccuagcgcuaucucccugccu

SEQ ID NO: 1436997 - RNA, 15 nt, Human
ccuagccuugcuugu

SEQ ID NO: 1436998 - RNA, 14 nt, Human
ccuagccuugcuug

SEQ ID NO: 1436999 - RNA, 10 nt, Human
ccuagccuug

SEQ ID NO: 1437000 - RNA, 15 nt, Human
ccucaggcagcucaa

SEQ ID NO: 1437001 - RNA, 14 nt, Human
ccucaggcagcuca

SEQ ID NO: 1437002 - RNA, 13 nt, Human
ccucaggcagcuc

SEQ ID NO: 1437003 - RNA, 17 nt, Human
ccucaggcacacagcua

SEQ ID NO: 1437004 - RNA, 20 nt, Human
ccucaggcacacagcuacuc

SEQ ID NO: 1437005 - RNA, 16 nt, Human
ccucaggcacacagcu

SEQ ID NO: 1437006 - RNA, 15 nt, Human
ccucaggcacacagc

SEQ ID NO: 1437007 - RNA, 22 nt, Human
ccucaggcaaucugcccgccug

SEQ ID NO: 1437008 - RNA, 19 nt, Human
ccucagccuggccagacac

SEQ ID NO: 1437009 - RNA, 19 nt, Human
ccucaggaggcaggaccuu

SEQ ID NO: 1437010 - RNA, 18 nt, Human
ccucagccuggccagaca

SEQ ID NO: 1437011 - RNA, 17 nt, Human
ccucagccuggccagac

SEQ ID NO: 1437012 - RNA, 16 nt, Human
ccucagccuggccaga

SEQ ID NO: 1437013 - RNA, 15 nt, Human
ccucagccuggccag

SEQ ID NO: 1437014 - RNA, 14 nt, Human
ccucagccuggcca

SEQ ID NO: 1437015 - RNA, 13 nt, Human
ccucagccuggcc

SEQ ID NO: 1437016 - RNA, 12 nt, Human
ccucagccuggc

SEQ ID NO: 1437017 - RNA, 11 nt, Human
ccucagccugg

SEQ ID NO: 1437018 - RNA, 21 nt, Human
ccucagccugaaccccagggc

SEQ ID NO: 1437019 - RNA, 22 nt, Human
ccucagccugaaccccagggcu

SEQ ID NO: 1437020 - RNA, 19 nt, Human
ccucagccugaaccccagg

SEQ ID NO: 1437021 - RNA, 12 nt, Human
ccucagccucuc

SEQ ID NO: 1437022 - RNA, 22 nt, Human
ccuaggaagccucagauuccuu

SEQ ID NO: 1437023 - RNA, 17 nt, Human
ccuaggaagccucagau

SEQ ID NO: 1437024 - RNA, 15 nt, Human
ccuaggaagccucag

SEQ ID NO: 1437025 - RNA, 22 nt, Human
ccuccccagcauuccagccccu

SEQ ID NO: 1437026 - RNA, 20 nt, Human
ccucccagagcaccugcugu

SEQ ID NO: 1437027 - RNA, 23 nt, Human
ccucccagaggagccaccaguuc

SEQ ID NO: 1437028 - RNA, 21 nt, Human
ccucccagaggagccaccagu

SEQ ID NO: 1437029 - RNA, 20 nt, Human
ccucccagaggagccaccag

SEQ ID NO: 1437030 - RNA, 21 nt, Human
ccucccagagcaccugcuguc

SEQ ID NO: 1437031 - RNA, 17 nt, Human
ccucccagagcaccugc

SEQ ID NO: 1437032 - RNA, 16 nt, Human
ccucccagagcaccug

SEQ ID NO: 1437033 - RNA, 19 nt, Human
ccucccagaaagcaaaccu

SEQ ID NO: 1437034 - RNA, 11 nt, Human
ccucccagaaa

SEQ ID NO: 1437035 - RNA, 22 nt, Human
ccucaugaauguaaauuuguac

SEQ ID NO: 1437036 - RNA, 23 nt, Human
ccucaugaauguaaauuuguacu

SEQ ID NO: 1437037 - RNA, 20 nt, Human
ccucaugaauguaaauuugu

SEQ ID NO: 1437038 - RNA, 19 nt, Human
ccucaugaauguaaauuug

SEQ ID NO: 1437039 - RNA, 17 nt, Human
ccucaugaauguaaauu

SEQ ID NO: 1437040 - RNA, 16 nt, Human
ccucaugaauguaaau

SEQ ID NO: 1437041 - RNA, 15 nt, Human
ccucaugaauguaaa

SEQ ID NO: 1437042 - RNA, 20 nt, Human
ccucccuguuccccagagaa

SEQ ID NO: 1437043 - RNA, 19 nt, Human
ccucccuguuccccagaga

SEQ ID NO: 1437044 - RNA, 18 nt, Human
ccucccuguuccccagag

SEQ ID NO: 1437045 - RNA, 11 nt, Human
ccucccuguaa

SEQ ID NO: 1437046 - RNA, 14 nt, Human
ccucccuguaacuu

SEQ ID NO: 1437047 - RNA, 12 nt, Human
ccucccuggaug

SEQ ID NO: 1437048 - RNA, 15 nt, Human
ccuccuuucuggcuu

SEQ ID NO: 1437049 - RNA, 15 nt, Human
ccuccguccccugcc

SEQ ID NO: 1437050 - RNA, 18 nt, Human
ccuccguccaggagccug

SEQ ID NO: 1437051 - RNA, 18 nt, Human
ccuccgcccugccacuca

SEQ ID NO: 1437052 - RNA, 16 nt, Human
ccuccgcccugccacu

SEQ ID NO: 1437053 - RNA, 15 nt, Human
ccuccgcccugccac

SEQ ID NO: 1437054 - RNA, 14 nt, Human
ccuccgcccugcca

SEQ ID NO: 1437055 - RNA, 13 nt, Human
ccuccgcccugcc

SEQ ID NO: 1437056 - RNA, 12 nt, Human
ccuccgcccugc

SEQ ID NO: 1437057 - RNA, 15 nt, Human
ccuccgccauccacc

SEQ ID NO: 1437058 - RNA, 23 nt, Human
ccuccgccauucucaagcccugc

SEQ ID NO: 1437059 - RNA, 18 nt, Human
ccuccgggaccuggugcu

SEQ ID NO: 1437060 - RNA, 14 nt, Human
ccuccgccauccac

SEQ ID NO: 1437061 - RNA, 21 nt, Human
ccucucuauccucucuuccuc

SEQ ID NO: 1437062 - RNA, 20 nt, Human
ccucucuauccucucuuccu

SEQ ID NO: 1437063 - RNA, 22 nt, Human
ccucugcccgggagcucaggaa

SEQ ID NO: 1437064 - RNA, 21 nt, Human
ccucugcccgggagcucagga

SEQ ID NO: 1437065 - RNA, 20 nt, Human
ccucucugcaggucccuaau

SEQ ID NO: 1437066 - RNA, 18 nt, Human
ccucucugcaggucccua

SEQ ID NO: 1437067 - RNA, 19 nt, Human
ccucucugcaggucccuaa

SEQ ID NO: 1437068 - RNA, 19 nt, Human
ccucucuauccucucuucc

SEQ ID NO: 1437069 - RNA, 17 nt, Human
ccucucuauccucucuu

SEQ ID NO: 1437070 - RNA, 20 nt, Human
ccucucuacagucucgucuc

SEQ ID NO: 1437071 - RNA, 15 nt, Human
ccucucuacagucuc

SEQ ID NO: 1437072 - RNA, 22 nt, Human
ccucucguaagauuuccuucuu

SEQ ID NO: 1437073 - RNA, 19 nt, Human
ccucucguaagauuuccuu

SEQ ID NO: 1437074 - RNA, 22 nt, Human
ccucucgcuccucaaccccucc

SEQ ID NO: 1437075 - RNA, 23 nt, Human
ccucucguaagauuuccuucuuu

SEQ ID NO: 1437076 - RNA, 16 nt, Human
ccucucugcagguccc

SEQ ID NO: 1437077 - RNA, 17 nt, Human
ccucucugcaggucccu

SEQ ID NO: 1437078 - RNA, 23 nt, Human
ccucucgcuccucaaccccuccc

SEQ ID NO: 1437079 - RNA, 20 nt, Human
ccucucgcuccucaaccccu

SEQ ID NO: 1437080 - RNA, 14 nt, Human
ccucucgcggcccu

SEQ ID NO: 1437081 - RNA, 16 nt, Human
ccucucgagggcaggg

SEQ ID NO: 1437082 - RNA, 23 nt, Human
ccucuccuucaugacagccucca

SEQ ID NO: 1437083 - RNA, 15 nt, Human
ccucuccuuccugug

SEQ ID NO: 1437084 - RNA, 13 nt, Human
ccucuccuuccug

SEQ ID NO: 1437085 - RNA, 13 nt, Human
ccucgggccugcu

SEQ ID NO: 1437086 - RNA, 20 nt, Human
ccucgcugccagcucuguau

SEQ ID NO: 1437087 - RNA, 19 nt, Human
ccucgcugccagcucugua

SEQ ID NO: 1437088 - RNA, 14 nt, Human
ccucgcugccagcu

SEQ ID NO: 1437089 - RNA, 13 nt, Human
ccucgcugccagc

SEQ ID NO: 1437090 - RNA, 23 nt, Human
ccucgcuccccacucugcucuga

SEQ ID NO: 1437091 - RNA, 22 nt, Human
ccucgcuccccacucugcucug

SEQ ID NO: 1437092 - RNA, 21 nt, Human
ccucgcuccccacucugcucu

SEQ ID NO: 1437093 - RNA, 19 nt, Human
ccucgcuccccacucugcu

SEQ ID NO: 1437094 - RNA, 18 nt, Human
ccucgcuccccacucugc

SEQ ID NO: 1437095 - RNA, 17 nt, Human
ccucgcuccccacucug

SEQ ID NO: 1437096 - RNA, 18 nt, Human
ccucgccggaucugaggg

SEQ ID NO: 1437097 - RNA, 13 nt, Human
ccucgccugacaa

SEQ ID NO: 1437098 - RNA, 19 nt, Human
ccucgccggaucugaggga

SEQ ID NO: 1437099 - RNA, 21 nt, Human
ccucuucugggagggcagcag

SEQ ID NO: 1437100 - RNA, 18 nt, Human
ccucuucugggagggcag

SEQ ID NO: 1437101 - RNA, 17 nt, Human
ccucuucugggagggca

SEQ ID NO: 1437102 - RNA, 13 nt, Human
ccucuucugggag

SEQ ID NO: 1437103 - RNA, 14 nt, Human
ccucuugaccaggc

SEQ ID NO: 1437104 - RNA, 15 nt, Human
ccucuugaccaggcu

SEQ ID NO: 1437105 - RNA, 13 nt, Human
ccucuugaccagg

SEQ ID NO: 1437106 - RNA, 16 nt, Human
ccucuucugggccuga

SEQ ID NO: 1437107 - RNA, 13 nt, Human
ccucuuggccuga

SEQ ID NO: 1437108 - RNA, 22 nt, Human
ccucuuggagaagucucagcua

SEQ ID NO: 1437109 - RNA, 21 nt, Human
ccucuuggagaagucucagcu

SEQ ID NO: 1437110 - RNA, 20 nt, Human
ccucuuggagaagucucagc

SEQ ID NO: 1437111 - RNA, 19 nt, Human
ccucuuggagaagucucag

SEQ ID NO: 1437112 - RNA, 18 nt, Human
ccucuuggagaagucuca

SEQ ID NO: 1437113 - RNA, 14 nt, Human
ccucuuggagaagu

SEQ ID NO: 1437114 - RNA, 22 nt, Human
ccucuuggggaguuuagggugg

SEQ ID NO: 1437115 - RNA, 23 nt, Human
ccucuuggggaguuuaggguggg

SEQ ID NO: 1437116 - RNA, 18 nt, Human
ccucuuuggcuccccugu

SEQ ID NO: 1437117 - RNA, 14 nt, Human
ccucuuuggcuccc

SEQ ID NO: 1437118 - RNA, 16 nt, Human
ccugaguggugccaaa

SEQ ID NO: 1437119 - RNA, 16 nt, Human
ccugcagacucacugu

SEQ ID NO: 1437120 - RNA, 14 nt, Human
ccugaguggugcca

SEQ ID NO: 1437121 - RNA, 19 nt, Human
ccugagugcuugcuuuuca

SEQ ID NO: 1437122 - RNA, 17 nt, Human
ccugagugcuugcuuuu

SEQ ID NO: 1437123 - RNA, 15 nt, Human
ccugagugcuugcuu

SEQ ID NO: 1437124 - RNA, 14 nt, Human
ccugagugcuugcu

SEQ ID NO: 1437125 - RNA, 15 nt, Human
ccugaggcugugguc

SEQ ID NO: 1437126 - RNA, 14 nt, Human
ccugaggcuguggu

SEQ ID NO: 1437127 - RNA, 13 nt, Human
ccugacucauucu

SEQ ID NO: 1437128 - RNA, 19 nt, Human
ccugacuagggagccaugu

SEQ ID NO: 1437129 - RNA, 22 nt, Human
ccugaccugugagcccagcugg

SEQ ID NO: 1437130 - RNA, 21 nt, Human
ccugaccugugagcccagcug

SEQ ID NO: 1437131 - RNA, 20 nt, Human
ccugaccugugagcccagcu

SEQ ID NO: 1437132 - RNA, 19 nt, Human
ccugaccugugagcccagc

SEQ ID NO: 1437133 - RNA, 18 nt, Human
ccugaccugugagcccag

SEQ ID NO: 1437134 - RNA, 14 nt, Human
ccugaccugugagc

SEQ ID NO: 1437135 - RNA, 16 nt, Human
ccugaccugucucacc

SEQ ID NO: 1437136 - RNA, 20 nt, Human
ccucuuuggcuccccuguac

SEQ ID NO: 1437137 - RNA, 19 nt, Human
ccucuuuggcuccccugua

SEQ ID NO: 1437138 - RNA, 17 nt, Human
ccugccucucugcaggu

SEQ ID NO: 1437139 - RNA, 22 nt, Human
ccugcugccauguggacuggug

SEQ ID NO: 1437140 - RNA, 23 nt, Human
ccugccuccugccggcuccuugg

SEQ ID NO: 1437141 - RNA, 20 nt, Human
ccugccucucugcagguccc

SEQ ID NO: 1437142 - RNA, 21 nt, Human
ccugccucucugcaggucccu

SEQ ID NO: 1437143 - RNA, 16 nt, Human
ccugccugcccuggug

SEQ ID NO: 1437144 - RNA, 21 nt, Human
ccugccucuuaaauaaaccuu

SEQ ID NO: 1437145 - RNA, 14 nt, Human
ccugccucuuaaau

SEQ ID NO: 1437146 - RNA, 18 nt, Human
ccugccugcucgcucccu

SEQ ID NO: 1437147 - RNA, 12 nt, Human
ccugccuggacc

SEQ ID NO: 1437148 - RNA, 19 nt, Human
ccugccuggaccagccucu

SEQ ID NO: 1437149 - RNA, 11 nt, Human
ccugccuggag

SEQ ID NO: 1437150 - RNA, 23 nt, Human
ccugccuggacuuggccccugcc

SEQ ID NO: 1437151 - RNA, 20 nt, Human
ccauggggagggauucuggu

SEQ ID NO: 1437152 - RNA, 18 nt, Human
ccauggggagggauucug

SEQ ID NO: 1437153 - RNA, 12 nt, Human
ccauggggaggg

SEQ ID NO: 1437154 - RNA, 14 nt, Human
ccaugggcagagga

SEQ ID NO: 1437155 - RNA, 17 nt, Human
ccaugggcagagcccaa

SEQ ID NO: 1437156 - RNA, 13 nt, Human
ccaugucuuucuc

SEQ ID NO: 1437157 - RNA, 20 nt, Human
ccaugucuucucccuggaau

SEQ ID NO: 1437158 - RNA, 19 nt, Human
ccaugucuucucccuggaa

SEQ ID NO: 1437159 - RNA, 16 nt, Human
ccaugucuucucccug

SEQ ID NO: 1437160 - RNA, 15 nt, Human
ccaugucuucucccu

SEQ ID NO: 1437161 - RNA, 13 nt, Human
ccaugucuucucc

SEQ ID NO: 1437162 - RNA, 23 nt, Human
ccaugagaugauacauccaaagc

SEQ ID NO: 1437163 - RNA, 21 nt, Human
ccaugacugcuugcccuaagc

SEQ ID NO: 1437164 - RNA, 22 nt, Human
ccaugacugcuugcccuaagca

SEQ ID NO: 1437165 - RNA, 19 nt, Human
ccaugacugcuugcccuaa

SEQ ID NO: 1437166 - RNA, 13 nt, Human
ccaugacugcuug

SEQ ID NO: 1437167 - RNA, 12 nt, Human
ccaugacugcuu

SEQ ID NO: 1437168 - RNA, 21 nt, Human
ccaugaccuccagcuuuccug

SEQ ID NO: 1437169 - RNA, 22 nt, Human
ccaugaccuccagcuuuccugu

SEQ ID NO: 1437170 - RNA, 20 nt, Human
ccaugaccuccagcuuuccu

SEQ ID NO: 1437171 - RNA, 15 nt, Human
ccaugaccuccagcu

SEQ ID NO: 1437172 - RNA, 14 nt, Human
ccaugaccuccagc

SEQ ID NO: 1437173 - RNA, 23 nt, Human
ccaugacccugccucucccaggc

SEQ ID NO: 1437174 - RNA, 21 nt, Human
ccaugacccugccucucccag

SEQ ID NO: 1437175 - RNA, 21 nt, Human
ccaugagcuccuuaaggcucu

SEQ ID NO: 1437176 - RNA, 16 nt, Human
ccaugggcagagccca

SEQ ID NO: 1437177 - RNA, 14 nt, Human
ccaugggcagagcc

SEQ ID NO: 1437178 - RNA, 18 nt, Human
ccaugggcacugugggua

SEQ ID NO: 1437179 - RNA, 16 nt, Human
cccacuguccugggcc

SEQ ID NO: 1437180 - RNA, 15 nt, Human
cccacuguccugggc

SEQ ID NO: 1437181 - RNA, 22 nt, Human
cccacuguccugggccugcaga

SEQ ID NO: 1437182 - RNA, 17 nt, Human
cccacccuguuccugcu

SEQ ID NO: 1437183 - RNA, 16 nt, Human
cccacccuguuccugc

SEQ ID NO: 1437184 - RNA, 15 nt, Human
cccacccuguuccug

SEQ ID NO: 1437185 - RNA, 14 nt, Human
cccacccuguuccu

SEQ ID NO: 1437186 - RNA, 12 nt, Human
cccacccuguuc

SEQ ID NO: 1437187 - RNA, 18 nt, Human
cccacccuggugggccaa

SEQ ID NO: 1437188 - RNA, 14 nt, Human
cccacccugggccc

SEQ ID NO: 1437189 - RNA, 13 nt, Human
cccacccugggcc

SEQ ID NO: 1437190 - RNA, 13 nt, Human
cccaccccuagga

SEQ ID NO: 1437191 - RNA, 18 nt, Human
cccacuguacuugcucuu

SEQ ID NO: 1437192 - RNA, 19 nt, Human
cccacuguacuugcucuug

SEQ ID NO: 1437193 - RNA, 19 nt, Human
cccacuguaucuaggcaac

SEQ ID NO: 1437194 - RNA, 20 nt, Human
cccacccuguuccugcugcu

SEQ ID NO: 1437195 - RNA, 19 nt, Human
cccacccuguuccugcugc

SEQ ID NO: 1437196 - RNA, 18 nt, Human
cccacccuguuccugcug

SEQ ID NO: 1437197 - RNA, 23 nt, Human
cccacuguacuugcucuugaugc

SEQ ID NO: 1437198 - RNA, 20 nt, Human
cccaccauuuggcaucccug

SEQ ID NO: 1437199 - RNA, 23 nt, Human
cccaccauuuggcaucccugggc

SEQ ID NO: 1437200 - RNA, 18 nt, Human
cccaccauuuggcauccc

SEQ ID NO: 1437201 - RNA, 16 nt, Human
cccaagccagaggcug

SEQ ID NO: 1437202 - RNA, 15 nt, Human
cccaagccagaggcu

SEQ ID NO: 1437203 - RNA, 14 nt, Human
cccaagccagaggc

SEQ ID NO: 1437204 - RNA, 19 nt, Human
cccaagcuguuuucuucua

SEQ ID NO: 1437205 - RNA, 12 nt, Human
cccaagcucaga

SEQ ID NO: 1437206 - RNA, 17 nt, Human
cccaagcggugucucuc

SEQ ID NO: 1437207 - RNA, 16 nt, Human
cccaagcggugucucu

SEQ ID NO: 1437208 - RNA, 12 nt, Human
cccaacugacca

SEQ ID NO: 1437209 - RNA, 23 nt, Human
cccaacucuugcacagucacugc

SEQ ID NO: 1437210 - RNA, 12 nt, Human
cccaacgcucca

SEQ ID NO: 1437211 - RNA, 20 nt, Human
cccaacucuccccugaccug

SEQ ID NO: 1437212 - RNA, 21 nt, Human
cccaaccugcucuccucuucu

SEQ ID NO: 1437213 - RNA, 19 nt, Human
cccaaccugcucuccucuu

SEQ ID NO: 1437214 - RNA, 17 nt, Human
cccaaccugcucuccuc

SEQ ID NO: 1437215 - RNA, 16 nt, Human
cccaaccugcucuccu

SEQ ID NO: 1437216 - RNA, 14 nt, Human
cccaaccugcucuc

SEQ ID NO: 1437217 - RNA, 14 nt, Human
ccauugguccaaga

SEQ ID NO: 1437218 - RNA, 15 nt, Human
ccauugucucagagc

SEQ ID NO: 1437219 - RNA, 20 nt, Human
ccauuguagcgucuuucuuu

SEQ ID NO: 1437220 - RNA, 19 nt, Human
ccauuguccaauccuaugu

SEQ ID NO: 1437221 - RNA, 19 nt, Human
ccauuguagcgucuuucuu

SEQ ID NO: 1437222 - RNA, 20 nt, Human
ccauuguggccuaagaggcu

SEQ ID NO: 1437223 - RNA, 20 nt, Human
ccauugugccuaaguccagu

SEQ ID NO: 1437224 - RNA, 22 nt, Human
cccagcauuccagccccucugg

SEQ ID NO: 1437225 - RNA, 20 nt, Human
cccagcauuccagccccucu

SEQ ID NO: 1437226 - RNA, 19 nt, Human
cccagcauuccagccccuc

SEQ ID NO: 1437227 - RNA, 18 nt, Human
cccagcauuccagccccu

SEQ ID NO: 1437228 - RNA, 15 nt, Human
cccagcccauggaga

SEQ ID NO: 1437229 - RNA, 18 nt, Human
cccagcccagggcuccug

SEQ ID NO: 1437230 - RNA, 11 nt, Human
cccagcccagg

SEQ ID NO: 1437231 - RNA, 16 nt, Human
cccagcccagagacau

SEQ ID NO: 1437232 - RNA, 15 nt, Human
cccagcccagagaca

SEQ ID NO: 1437233 - RNA, 14 nt, Human
cccagcccagagac

SEQ ID NO: 1437234 - RNA, 13 nt, Human
cccagcccagaga

SEQ ID NO: 1437235 - RNA, 12 nt, Human
cccagcccagag

SEQ ID NO: 1437236 - RNA, 11 nt, Human
cccagcccaga

SEQ ID NO: 1437237 - RNA, 18 nt, Human
cccauccccagcgauucc

SEQ ID NO: 1437238 - RNA, 13 nt, Human
cccauccccagcg

SEQ ID NO: 1437239 - RNA, 14 nt, Human
cccaucccaugcug

SEQ ID NO: 1437240 - RNA, 14 nt, Human
cccauccccagcga

SEQ ID NO: 1437241 - RNA, 16 nt, Human
cccaucauccucuggc

SEQ ID NO: 1437242 - RNA, 14 nt, Human
cccaucauccucug

SEQ ID NO: 1437243 - RNA, 15 nt, Human
cccagggcagccagg

SEQ ID NO: 1437244 - RNA, 18 nt, Human
cccagggcagccagggag

SEQ ID NO: 1437245 - RNA, 13 nt, Human
cccagggcagcca

SEQ ID NO: 1437246 - RNA, 22 nt, Human
cccagggcacaggagcuaccug

SEQ ID NO: 1437247 - RNA, 18 nt, Human
cccagggcacaggagcua

SEQ ID NO: 1437248 - RNA, 17 nt, Human
cccagggcacaggagcu

SEQ ID NO: 1437249 - RNA, 16 nt, Human
cccagggcacaggagc

SEQ ID NO: 1437250 - RNA, 15 nt, Human
cccagggcacaggag

SEQ ID NO: 1437251 - RNA, 14 nt, Human
cccagggcacagga

SEQ ID NO: 1437252 - RNA, 13 nt, Human
cccagggcacagg

SEQ ID NO: 1437253 - RNA, 21 nt, Human
cccauccaguucaugagaauc

SEQ ID NO: 1437254 - RNA, 14 nt, Human
cccauccaguucau

SEQ ID NO: 1437255 - RNA, 13 nt, Human
cccauccagggcc

SEQ ID NO: 1437256 - RNA, 19 nt, Human
cccaucauccucuggcuug

SEQ ID NO: 1437257 - RNA, 18 nt, Human
cccagggaggccgaagcu

SEQ ID NO: 1437258 - RNA, 11 nt, Human
cccagggcaca

SEQ ID NO: 1437259 - RNA, 19 nt, Human
cccagcugggucaggcagg

SEQ ID NO: 1437260 - RNA, 17 nt, Human
cccagcugggucaggca

SEQ ID NO: 1437261 - RNA, 22 nt, Human
cccagcuggggccaggcugggu

SEQ ID NO: 1437262 - RNA, 23 nt, Human
cccagcuggggccaggcuggguc

SEQ ID NO: 1437263 - RNA, 21 nt, Human
cccauucuuccuaguuuucuc

SEQ ID NO: 1437264 - RNA, 12 nt, Human
cccauucuuccu

SEQ ID NO: 1437265 - RNA, 21 nt, Human
ccccgcguggaacucgugucu

SEQ ID NO: 1437266 - RNA, 18 nt, Human
ccccgccugcccucaugg

SEQ ID NO: 1437267 - RNA, 22 nt, Human
cccccugugccuugucacgcca

SEQ ID NO: 1437268 - RNA, 16 nt, Human
cccccuucaagccugu

SEQ ID NO: 1437269 - RNA, 19 nt, Human
ccccagcauuccagccccu

SEQ ID NO: 1437270 - RNA, 18 nt, Human
ccccagcaggugcugacu

SEQ ID NO: 1437271 - RNA, 11 nt, Human
ccccagcacuu

SEQ ID NO: 1437272 - RNA, 20 nt, Human
cccauucuuccuaguuuucu

SEQ ID NO: 1437273 - RNA, 23 nt, Human
ccccauucuuccuaguuuucucc

SEQ ID NO: 1437274 - RNA, 21 nt, Human
ccccauucuuccuaguuuucu

SEQ ID NO: 1437275 - RNA, 16 nt, Human
ccccauucuuccuagu

SEQ ID NO: 1437276 - RNA, 16 nt, Human
ccccagccagggcuca

SEQ ID NO: 1437277 - RNA, 17 nt, Human
ccccagccauccagggg

SEQ ID NO: 1437278 - RNA, 17 nt, Human
ccagcguccuccucugu

SEQ ID NO: 1437279 - RNA, 19 nt, Human
ccagcguccuccucuguga

SEQ ID NO: 1437280 - RNA, 13 nt, Human
ccagcguccuccu

SEQ ID NO: 1437281 - RNA, 15 nt, Human
ccagcggugggaccu

SEQ ID NO: 1437282 - RNA, 21 nt, Human
ccagcgcuugaagccugaacc

SEQ ID NO: 1437283 - RNA, 15 nt, Human
ccagcggcccuguca

SEQ ID NO: 1437284 - RNA, 14 nt, Human
ccagcggacacacg

SEQ ID NO: 1437285 - RNA, 13 nt, Human
ccagcggacacac

SEQ ID NO: 1437286 - RNA, 19 nt, Human
ccagcuuguuuacaugcuu

SEQ ID NO: 1437287 - RNA, 14 nt, Human
ccagcuuguuuaca

SEQ ID NO: 1437288 - RNA, 23 nt, Human
ccagcgauucccucucccaggcc

SEQ ID NO: 1437289 - RNA, 22 nt, Human
ccagcgauucccucucccaggc

SEQ ID NO: 1437290 - RNA, 21 nt, Human
ccagcgauucccucucccagg

SEQ ID NO: 1437291 - RNA, 19 nt, Human
ccagcgauucccucuccca

SEQ ID NO: 1437292 - RNA, 18 nt, Human
ccagcgauucccucuccc

SEQ ID NO: 1437293 - RNA, 17 nt, Human
ccagcgagggcgugucu

SEQ ID NO: 1437294 - RNA, 16 nt, Human
ccagcgaggaggcucc

SEQ ID NO: 1437295 - RNA, 22 nt, Human
ccagcgagcgcccagcuccuga

SEQ ID NO: 1437296 - RNA, 20 nt, Human
ccagcgagcgcccagcuccu

SEQ ID NO: 1437297 - RNA, 13 nt, Human
ccagcgagcgccc

SEQ ID NO: 1437298 - RNA, 22 nt, Human
ccagcccccugaccacucagag

SEQ ID NO: 1437299 - RNA, 23 nt, Human
ccagcccccugaccacucagaga

SEQ ID NO: 1437300 - RNA, 19 nt, Human
ccagcccccugaccacuca

SEQ ID NO: 1437301 - RNA, 14 nt, Human
ccagcccccugacc

SEQ ID NO: 1437302 - RNA, 22 nt, Human
ccagcccccuccuggugccacc

SEQ ID NO: 1437303 - RNA, 18 nt, Human
ccagcccccuccuggugc

SEQ ID NO: 1437304 - RNA, 15 nt, Human
ccagcccccuccugg

SEQ ID NO: 1437305 - RNA, 22 nt, Human
ccagcccccuaagagagcaccu

SEQ ID NO: 1437306 - RNA, 16 nt, Human
ccagcagacagagcca

SEQ ID NO: 1437307 - RNA, 21 nt, Human
ccagcagccccacaccagggc

SEQ ID NO: 1437308 - RNA, 13 nt, Human
ccagcagacagag

SEQ ID NO: 1437309 - RNA, 12 nt, Human
ccagcagacaga

SEQ ID NO: 1437310 - RNA, 16 nt, Human
ccagcagaaaugccuu

SEQ ID NO: 1437311 - RNA, 17 nt, Human
ccagcagaaaugccuua

SEQ ID NO: 1437312 - RNA, 22 nt, Human
ccagcagaaaugccuuacccuc

SEQ ID NO: 1437313 - RNA, 15 nt, Human
ccaggcugagguccu

SEQ ID NO: 1437314 - RNA, 23 nt, Human
ccaggcugaccacagcacagcca

SEQ ID NO: 1437315 - RNA, 21 nt, Human
ccaggcugaccacagcacagc

SEQ ID NO: 1437316 - RNA, 23 nt, Human
ccaggggcagccccaggccaaag

SEQ ID NO: 1437317 - RNA, 19 nt, Human
ccaggggcagccccaggcc

SEQ ID NO: 1437318 - RNA, 16 nt, Human
ccaggggcagccccag

SEQ ID NO: 1437319 - RNA, 15 nt, Human
ccaggggccaugaau

SEQ ID NO: 1437320 - RNA, 13 nt, Human
ccaguccuguccu

SEQ ID NO: 1437321 - RNA, 20 nt, Human
ccaggcugaccacagcacag

SEQ ID NO: 1437322 - RNA, 19 nt, Human
ccaggcugaccacagcaca

SEQ ID NO: 1437323 - RNA, 18 nt, Human
ccaggcugaccacagcac

SEQ ID NO: 1437324 - RNA, 17 nt, Human
ccaggcugaccacagca

SEQ ID NO: 1437325 - RNA, 16 nt, Human
ccaggcugaccacagc

SEQ ID NO: 1437326 - RNA, 15 nt, Human
ccaggcugaccacag

SEQ ID NO: 1437327 - RNA, 20 nt, Human
ccaggcugaagcagguuccc

SEQ ID NO: 1437328 - RNA, 13 nt, Human
ccaggcugaagca

SEQ ID NO: 1437329 - RNA, 20 nt, Human
ccaggcucucuuugcccagu

SEQ ID NO: 1437330 - RNA, 23 nt, Human
ccaggcucucgcacaccucugca

SEQ ID NO: 1437331 - RNA, 14 nt, Human
ccaggcagccucug

SEQ ID NO: 1437332 - RNA, 17 nt, Human
ccaggcagccucugggg

SEQ ID NO: 1437333 - RNA, 16 nt, Human
ccaggcagccucuggg

SEQ ID NO: 1437334 - RNA, 12 nt, Human
ccaggcagccuc

SEQ ID NO: 1437335 - RNA, 18 nt, Human
ccaggcaggagcccuucu

SEQ ID NO: 1437336 - RNA, 17 nt, Human
ccagacgccuggcugcu

SEQ ID NO: 1437337 - RNA, 23 nt, Human
ccagaccuguuagcagacaggcc

SEQ ID NO: 1437338 - RNA, 21 nt, Human
ccagaccuguuagcagacagg

SEQ ID NO: 1437339 - RNA, 20 nt, Human
ccagaccuguuagcagacag

SEQ ID NO: 1437340 - RNA, 14 nt, Human
ccagaccugaggcg

SEQ ID NO: 1437341 - RNA, 24 nt, Human
ccagaccugauccuggaggcccag

SEQ ID NO: 1437342 - RNA, 14 nt, Human
ccagacgccuggcu

SEQ ID NO: 1437343 - RNA, 22 nt, Human
ccagacuagauguaguauuuuu

SEQ ID NO: 1437344 - RNA, 18 nt, Human
ccagacuagauguaguau

SEQ ID NO: 1437345 - RNA, 16 nt, Human
ccagacuacuugggag

SEQ ID NO: 1437346 - RNA, 23 nt, Human
ccagaccugauccuggaggccca

SEQ ID NO: 1437347 - RNA, 21 nt, Human
ccagaccugauccuggaggcc

SEQ ID NO: 1437348 - RNA, 20 nt, Human
ccagaccugauccuggaggc

SEQ ID NO: 1437349 - RNA, 19 nt, Human
ccagaccugauccuggagg

SEQ ID NO: 1437350 - RNA, 18 nt, Human
ccagaccugauccuggag

SEQ ID NO: 1437351 - RNA, 17 nt, Human
ccagaccugauccugga

SEQ ID NO: 1437352 - RNA, 16 nt, Human
ccagaccugauccugg

SEQ ID NO: 1437353 - RNA, 15 nt, Human
ccagaccugauccug

SEQ ID NO: 1437354 - RNA, 13 nt, Human
ccagaccugaggc

SEQ ID NO: 1437355 - RNA, 14 nt, Human
ccacuuuuguucuu

SEQ ID NO: 1437356 - RNA, 15 nt, Human
ccacuuuuguucuug

SEQ ID NO: 1437357 - RNA, 21 nt, Human
ccacuuuuguucuugguuugu

SEQ ID NO: 1437358 - RNA, 22 nt, Human
ccacuuuuguucuugguuugua

SEQ ID NO: 1437359 - RNA, 22 nt, Human
ccacuuguccuuagccuggacc

SEQ ID NO: 1437360 - RNA, 21 nt, Human
ccacuuguccuuagccuggac

SEQ ID NO: 1437361 - RNA, 18 nt, Human
ccacuuguccuuagccug

SEQ ID NO: 1437362 - RNA, 21 nt, Human
ccacuuguccgcuggguggua

SEQ ID NO: 1437363 - RNA, 15 nt, Human
ccacuuguccgcugg

SEQ ID NO: 1437364 - RNA, 17 nt, Human
ccacuugggucuucccu

SEQ ID NO: 1437365 - RNA, 22 nt, Human
ccacuuuguuucguggggaggu

SEQ ID NO: 1437366 - RNA, 16 nt, Human
ccacuuucuuucuuuc

SEQ ID NO: 1437367 - RNA, 13 nt, Human
ccacuuucuuucu

SEQ ID NO: 1437368 - RNA, 20 nt, Human
ccacuuugcacagcucuccg

SEQ ID NO: 1437369 - RNA, 17 nt, Human
ccacuuucagcugucuu

SEQ ID NO: 1437370 - RNA, 16 nt, Human
ccacuuucagcugucu

SEQ ID NO: 1437371 - RNA, 15 nt, Human
ccacuuucagcuguc

SEQ ID NO: 1437372 - RNA, 20 nt, Human
ccacuuuaaaauaucuacau

SEQ ID NO: 1437373 - RNA, 14 nt, Human
ccacuuucagcugu

SEQ ID NO: 1437374 - RNA, 13 nt, Human
ccacuuucagcug

SEQ ID NO: 1437375 - RNA, 12 nt, Human
ccacuuucagcu

SEQ ID NO: 1437376 - RNA, 12 nt, Human
ccacuucugcac

SEQ ID NO: 1437377 - RNA, 13 nt, Human
ccacuucugcacu

SEQ ID NO: 1437378 - RNA, 19 nt, Human
ccacuucugacagccucag

SEQ ID NO: 1437379 - RNA, 18 nt, Human
ccacuucugacagccuca

SEQ ID NO: 1437380 - RNA, 16 nt, Human
ccacuucugacagccu

SEQ ID NO: 1437381 - RNA, 14 nt, Human
ccacuucugacagc

SEQ ID NO: 1437382 - RNA, 22 nt, Human
ccacuugccucuuccuugaaga

SEQ ID NO: 1437383 - RNA, 19 nt, Human
ccacuugccucuuccuuga

SEQ ID NO: 1437384 - RNA, 17 nt, Human
ccacuugccucuuccuu

SEQ ID NO: 1437385 - RNA, 16 nt, Human
ccacuugccucuuccu

SEQ ID NO: 1437386 - RNA, 13 nt, Human
ccacuugccucuu

SEQ ID NO: 1437387 - RNA, 12 nt, Human
ccacuugccucu

SEQ ID NO: 1437388 - RNA, 16 nt, Human
ccacuugggucuuccc

SEQ ID NO: 1437389 - RNA, 19 nt, Human
ccacucuggcagccacacu

SEQ ID NO: 1437390 - RNA, 18 nt, Human
ccacucuggcagccacac

SEQ ID NO: 1437391 - RNA, 17 nt, Human
ccacucuggcagccaca

SEQ ID NO: 1437392 - RNA, 16 nt, Human
ccacucuggcagccac

SEQ ID NO: 1437393 - RNA, 15 nt, Human
ccacucuggcagcca

SEQ ID NO: 1437394 - RNA, 14 nt, Human
ccacucuggcagcc

SEQ ID NO: 1437395 - RNA, 13 nt, Human
ccacucuggcagc

SEQ ID NO: 1437396 - RNA, 12 nt, Human
ccacucuggcag

SEQ ID NO: 1437397 - RNA, 13 nt, Human
ccacugagggcag

SEQ ID NO: 1437398 - RNA, 18 nt, Human
ccacugagaggacagaga

SEQ ID NO: 1437399 - RNA, 17 nt, Human
ccacugagaggacagag

SEQ ID NO: 1437400 - RNA, 13 nt, Human
ccacugaccagaa

SEQ ID NO: 1437401 - RNA, 19 nt, Human
ccacucuguaauugcaaaa

SEQ ID NO: 1437402 - RNA, 14 nt, Human
ccacucuguaauug

SEQ ID NO: 1437403 - RNA, 13 nt, Human
ccacucuguaauu

SEQ ID NO: 1437404 - RNA, 12 nt, Human
ccacucuguaau

SEQ ID NO: 1437405 - RNA, 11 nt, Human
ccacucuguaa

SEQ ID NO: 1437406 - RNA, 22 nt, Human
ccacucuggcagccacacuucu

SEQ ID NO: 1437407 - RNA, 21 nt, Human
ccacucuggcagccacacuuc

SEQ ID NO: 1437408 - RNA, 19 nt, Human
ccacugaaaaaauauaugu

SEQ ID NO: 1437409 - RNA, 17 nt, Human
ccacugaaaaaauauau

SEQ ID NO: 1437410 - RNA, 15 nt, Human
ccacugaaaaaauau

SEQ ID NO: 1437411 - RNA, 15 nt, Human
ccacucuuucuuuca

SEQ ID NO: 1437412 - RNA, 18 nt, Human
ccagagggucugggggca

SEQ ID NO: 1437413 - RNA, 17 nt, Human
ccagagggucugggggc

SEQ ID NO: 1437414 - RNA, 14 nt, Human
ccagagggucuggg

SEQ ID NO: 1437415 - RNA, 23 nt, Human
ccagaggggccugccaccuggac

SEQ ID NO: 1437416 - RNA, 22 nt, Human
ccagaggggccugccaccugga

SEQ ID NO: 1437417 - RNA, 20 nt, Human
ccagaggggccugccaccug

SEQ ID NO: 1437418 - RNA, 19 nt, Human
ccagagagcccgaggaggu

SEQ ID NO: 1437419 - RNA, 15 nt, Human
ccagagagcccgagg

SEQ ID NO: 1437420 - RNA, 20 nt, Human
ccagagagcccgaggaggug

SEQ ID NO: 1437421 - RNA, 13 nt, Human
ccagagagcccga

SEQ ID NO: 1437422 - RNA, 12 nt, Human
ccagagagcccg

SEQ ID NO: 1437423 - RNA, 18 nt, Human
ccagaggggccugccacc

SEQ ID NO: 1437424 - RNA, 17 nt, Human
ccagaggggccugccac

SEQ ID NO: 1437425 - RNA, 15 nt, Human
ccagaggggccugcc

SEQ ID NO: 1437426 - RNA, 13 nt, Human
ccagaggggccug

SEQ ID NO: 1437427 - RNA, 23 nt, Human
ccagaucugauuuguaacccacu

SEQ ID NO: 1437428 - RNA, 20 nt, Human
ccagauaguguagcugagga

SEQ ID NO: 1437429 - RNA, 18 nt, Human
ccagauaucaucuaccua

SEQ ID NO: 1437430 - RNA, 17 nt, Human
ccagauaguguagcuga

SEQ ID NO: 1437431 - RNA, 22 nt, Human
ccagauacggacagagaccaag

SEQ ID NO: 1437432 - RNA, 13 nt, Human
ccagauaacuuuu

SEQ ID NO: 1437433 - RNA, 18 nt, Human
ccagaugcacaucccugg

SEQ ID NO: 1437434 - RNA, 23 nt, Human
ccagagaacccagcccacccccg

SEQ ID NO: 1437435 - RNA, 13 nt, Human
ccagagaacccag

SEQ ID NO: 1437436 - RNA, 23 nt, Human
ccagagaaaggggagcccacugu

SEQ ID NO: 1437437 - RNA, 20 nt, Human
ccagagaaaggggagcccac

SEQ ID NO: 1437438 - RNA, 19 nt, Human
ccagagaaaggggagccca

SEQ ID NO: 1437439 - RNA, 16 nt, Human
ccagagaaaggggagc

SEQ ID NO: 1437440 - RNA, 22 nt, Human
ccagacuuguuggcguaggcua

SEQ ID NO: 1437441 - RNA, 18 nt, Human
ccagagaaaaagggaggg

SEQ ID NO: 1437442 - RNA, 15 nt, Human
ccagacucuugccug

SEQ ID NO: 1437443 - RNA, 22 nt, Human
ccagacugcuuccaauuuucug

SEQ ID NO: 1437444 - RNA, 18 nt, Human
ccagacucuugccuguuu

SEQ ID NO: 1437445 - RNA, 13 nt, Human
ccagacucuugcc

SEQ ID NO: 1437446 - RNA, 21 nt, Human
ccagacucguucuucugggaa

SEQ ID NO: 1437447 - RNA, 22 nt, Human
ccagacuagauggaccugccug

SEQ ID NO: 1437448 - RNA, 23 nt, Human
ccagacuucccacggcuccucga

SEQ ID NO: 1437449 - RNA, 18 nt, Human
ccagagacauacuugaag

SEQ ID NO: 1437450 - RNA, 17 nt, Human
ccagagacauacuugaa

SEQ ID NO: 1437451 - RNA, 19 nt, Human
ccagagacacagcccccac

SEQ ID NO: 1437452 - RNA, 16 nt, Human
ccagagacccagcgga

SEQ ID NO: 1437453 - RNA, 21 nt, Human
ccagagacccagcggacacac

SEQ ID NO: 1437454 - RNA, 14 nt, Human
ccagagacccagcg

SEQ ID NO: 1437455 - RNA, 13 nt, Human
ccagagacccagc

SEQ ID NO: 1437456 - RNA, 12 nt, Human
ccagagacccag

SEQ ID NO: 1437457 - RNA, 23 nt, Human
ccagagacauacuugaagggcca

SEQ ID NO: 1437458 - RNA, 22 nt, Human
ccagagacauacuugaagggcc

SEQ ID NO: 1437459 - RNA, 20 nt, Human
ccagagacauacuugaaggg

SEQ ID NO: 1437460 - RNA, 14 nt, Human
ccagagacuuuagg

SEQ ID NO: 1437461 - RNA, 21 nt, Human
ccuuauuagagugucuuucca

SEQ ID NO: 1437462 - RNA, 16 nt, Human
ccuuauuagagugucu

SEQ ID NO: 1437463 - RNA, 24 nt, Human
ccuucccagaggggccugccaccu

SEQ ID NO: 1437464 - RNA, 22 nt, Human
ccuucccagaggggccugccac

SEQ ID NO: 1437465 - RNA, 20 nt, Human
ccuucccagaggggccugcc

SEQ ID NO: 1437466 - RNA, 19 nt, Human
ccuucccagaggggccugc

SEQ ID NO: 1437467 - RNA, 17 nt, Human
ccuucccagaggggccu

SEQ ID NO: 1437468 - RNA, 12 nt, Human
ccuucccagagg

SEQ ID NO: 1437469 - RNA, 15 nt, Human
ccuucccaucgcugu

SEQ ID NO: 1437470 - RNA, 14 nt, Human
ccuucccaucgcug

SEQ ID NO: 1437471 - RNA, 17 nt, Human
ccuucccaauccagugg

SEQ ID NO: 1437472 - RNA, 23 nt, Human
ccuucccaagugagucucucugg

SEQ ID NO: 1437473 - RNA, 14 nt, Human
ccuuauucagggaa

SEQ ID NO: 1437474 - RNA, 20 nt, Human
ccuuagucucaguuugugug

SEQ ID NO: 1437475 - RNA, 14 nt, Human
ccuuagucucaguu

SEQ ID NO: 1437476 - RNA, 14 nt, Human
ccuuauaguuacug

SEQ ID NO: 1437477 - RNA, 21 nt, Human
ccuuauaguuacuguguaauu

SEQ ID NO: 1437478 - RNA, 15 nt, Human
ccuuaggaagagccu

SEQ ID NO: 1437479 - RNA, 23 nt, Human
ccuuaggaagagccuuccaccca

SEQ ID NO: 1437480 - RNA, 20 nt, Human
ccuuauccucccuguaacuu

SEQ ID NO: 1437481 - RNA, 17 nt, Human
ccuuauccucccuguaa

SEQ ID NO: 1437482 - RNA, 16 nt, Human
ccuuauccucccugua

SEQ ID NO: 1437483 - RNA, 13 nt, Human
ccuuauccucccu

SEQ ID NO: 1437484 - RNA, 14 nt, Human
ccuuauccccacuu

SEQ ID NO: 1437485 - RNA, 16 nt, Human
ccuuaucgaaacucau

SEQ ID NO: 1437486 - RNA, 19 nt, Human
ccuuauccucccuguaacu

SEQ ID NO: 1437487 - RNA, 17 nt, Human
ccuuaugacugccaaga

SEQ ID NO: 1437488 - RNA, 13 nt, Human
ccuuaucuugcac

SEQ ID NO: 1437489 - RNA, 22 nt, Human
ccuuagcuggcauuacagcugg

SEQ ID NO: 1437490 - RNA, 19 nt, Human
ccuuagcuggcauuacagc

SEQ ID NO: 1437491 - RNA, 21 nt, Human
ccuuagccuggaccucugaca

SEQ ID NO: 1437492 - RNA, 19 nt, Human
ccuuagccuggaccucuga

SEQ ID NO: 1437493 - RNA, 17 nt, Human
ccuuagccuggaccucu

SEQ ID NO: 1437494 - RNA, 15 nt, Human
ccuuagccuggaccu

SEQ ID NO: 1437495 - RNA, 14 nt, Human
ccuuagccuggacc

SEQ ID NO: 1437496 - RNA, 13 nt, Human
ccuuagccuggac

SEQ ID NO: 1437497 - RNA, 12 nt, Human
ccuguugggaga

SEQ ID NO: 1437498 - RNA, 17 nt, Human
ccuguugagcaucacag

SEQ ID NO: 1437499 - RNA, 12 nt, Human
ccuguugcuaag

SEQ ID NO: 1437500 - RNA, 13 nt, Human
ccuguugcuaagc

SEQ ID NO: 1437501 - RNA, 14 nt, Human
ccuguugcuaagcc

SEQ ID NO: 1437502 - RNA, 22 nt, Human
ccuguugcuaagccccagcaag

SEQ ID NO: 1437503 - RNA, 14 nt, Human
ccuguucacaccag

SEQ ID NO: 1437504 - RNA, 15 nt, Human
ccuguuccugcugcu

SEQ ID NO: 1437505 - RNA, 14 nt, Human
ccuguuccugcugc

SEQ ID NO: 1437506 - RNA, 23 nt, Human
ccuguuccccagagaaaggggag

SEQ ID NO: 1437507 - RNA, 16 nt, Human
ccuguuccccagagaa

SEQ ID NO: 1437508 - RNA, 15 nt, Human
ccuguuccccagaga

SEQ ID NO: 1437509 - RNA, 13 nt, Human
ccuguuccccaga

SEQ ID NO: 1437510 - RNA, 18 nt, Human
ccuguucauggcagaugu

SEQ ID NO: 1437511 - RNA, 22 nt, Human
ccuguucaugccgacgcuugca

SEQ ID NO: 1437512 - RNA, 19 nt, Human
ccuguuaccuacuuugacu

SEQ ID NO: 1437513 - RNA, 18 nt, Human
ccuguuaccuacuuugac

SEQ ID NO: 1437514 - RNA, 17 nt, Human
ccuguuaccuacuuuga

SEQ ID NO: 1437515 - RNA, 16 nt, Human
ccuguuagcagacagg

SEQ ID NO: 1437516 - RNA, 15 nt, Human
ccuguuagcagacag

SEQ ID NO: 1437517 - RNA, 20 nt, Human
ccugcugcugucugggugcu

SEQ ID NO: 1437518 - RNA, 24 nt, Human
ccugcugcugagaaccuggccuuc

SEQ ID NO: 1437519 - RNA, 15 nt, Human
ccugcugcugccugc

SEQ ID NO: 1437520 - RNA, 16 nt, Human
ccugcugcugccugcc

SEQ ID NO: 1437521 - RNA, 17 nt, Human
ccugcugcugccugccu

SEQ ID NO: 1437522 - RNA, 23 nt, Human
ccugcugcugucugggugcuacu

SEQ ID NO: 1437523 - RNA, 19 nt, Human
ccugcugcugucugggugc

SEQ ID NO: 1437524 - RNA, 17 nt, Human
ccugcugcugucugggu

SEQ ID NO: 1437525 - RNA, 18 nt, Human
ccugcugcugccugccug

SEQ ID NO: 1437526 - RNA, 18 nt, Human
ccuucucuguucauuucc

SEQ ID NO: 1437527 - RNA, 17 nt, Human
ccuucucuguucauuuc

SEQ ID NO: 1437528 - RNA, 13 nt, Human
ccuucucuguuca

SEQ ID NO: 1437529 - RNA, 21 nt, Human
ccuucucuguucauuuccuca

SEQ ID NO: 1437530 - RNA, 19 nt, Human
ccuucucuguucauuuccu

SEQ ID NO: 1437531 - RNA, 14 nt, Human
ccuucucucucccu

SEQ ID NO: 1437532 - RNA, 21 nt, Human
ccuuccucauccaccccaucc

SEQ ID NO: 1437533 - RNA, 20 nt, Human
ccuuccucauccaccccauc

SEQ ID NO: 1437534 - RNA, 19 nt, Human
ccuuccucauccaccccau

SEQ ID NO: 1437535 - RNA, 18 nt, Human
ccuuccucauccacccca

SEQ ID NO: 1437536 - RNA, 17 nt, Human
ccuuccucauccacccc

SEQ ID NO: 1437537 - RNA, 16 nt, Human
ccuuccucauccaccc

SEQ ID NO: 1437538 - RNA, 23 nt, Human
ccuuccuaaauuuuccuguccuc

SEQ ID NO: 1437539 - RNA, 13 nt, Human
ccuuccuccuggg

SEQ ID NO: 1437540 - RNA, 12 nt, Human
ccuuccuccugg

SEQ ID NO: 1437541 - RNA, 23 nt, Human
ccuucccucaccuuggcaccaga

SEQ ID NO: 1437542 - RNA, 20 nt, Human
ccuuccccuuauccucccug

SEQ ID NO: 1437543 - RNA, 21 nt, Human
ccuuccccuuauccucccugu

SEQ ID NO: 1437544 - RNA, 16 nt, Human
ccuucccauggaggga

SEQ ID NO: 1437545 - RNA, 13 nt, Human
ccuucccauggag

SEQ ID NO: 1437546 - RNA, 18 nt, Human
ccuuccgccacuggggcu

SEQ ID NO: 1437547 - RNA, 16 nt, Human
ccuuccgccacugggg

SEQ ID NO: 1437548 - RNA, 14 nt, Human
ccuuccgccacugg

SEQ ID NO: 1437549 - RNA, 13 nt, Human
ccuuccgccacug

SEQ ID NO: 1437550 - RNA, 18 nt, Human
ccuucccuuuucuguucu

SEQ ID NO: 1437551 - RNA, 22 nt, Human
ccuucccuuuucuguucuaguu

SEQ ID NO: 1437552 - RNA, 16 nt, Human
ccuucccuugagcccu

SEQ ID NO: 1437553 - RNA, 16 nt, Human
ccuuccgcuuggagcu

SEQ ID NO: 1437554 - RNA, 22 nt, Human
ccuuccgccacuggggcucaga

SEQ ID NO: 1437555 - RNA, 22 nt, Human
ccuucccuguuuuccccccaag

SEQ ID NO: 1437556 - RNA, 20 nt, Human
ccuucccugugccuccuccc

SEQ ID NO: 1437557 - RNA, 17 nt, Human
ccuucccugugccuccu

SEQ ID NO: 1437558 - RNA, 13 nt, Human
ccuucccugugcc

SEQ ID NO: 1437559 - RNA, 14 nt, Human
ccuucccucucugg

SEQ ID NO: 1437560 - RNA, 24 nt, Human
ccuucccucaccuuggcaccagac

SEQ ID NO: 1437561 - RNA, 13 nt, Human
ccuucccuccaag

SEQ ID NO: 1437562 - RNA, 15 nt, Human
ccuucccucucugga

SEQ ID NO: 1437563 - RNA, 18 nt, Human
ccuucccucucuggagaa

SEQ ID NO: 1437564 - RNA, 13 nt, Human
ccuucccugcugu

SEQ ID NO: 1437565 - RNA, 21 nt, Human
ccuugcuccuccuucugcugc

SEQ ID NO: 1437566 - RNA, 20 nt, Human
ccuugcggcuccucagggac

SEQ ID NO: 1437567 - RNA, 19 nt, Human
ccuugcggcuccucaggga

SEQ ID NO: 1437568 - RNA, 18 nt, Human
ccuugcggcuccucaggg

SEQ ID NO: 1437569 - RNA, 17 nt, Human
ccuugcggcuccucagg

SEQ ID NO: 1437570 - RNA, 16 nt, Human
ccuugcggcuccucag

SEQ ID NO: 1437571 - RNA, 15 nt, Human
ccuugcggcuccuca

SEQ ID NO: 1437572 - RNA, 17 nt, Human
ccuugccugguacagua

SEQ ID NO: 1437573 - RNA, 14 nt, Human
ccuugccugugcca

SEQ ID NO: 1437574 - RNA, 15 nt, Human
ccuugccugguacag

SEQ ID NO: 1437575 - RNA, 12 nt, Human
ccuugccuggua

SEQ ID NO: 1437576 - RNA, 11 nt, Human
ccuugccuggu

SEQ ID NO: 1437577 - RNA, 16 nt, Human
ccuugccagagaucca

SEQ ID NO: 1437578 - RNA, 13 nt, Human
ccuugccagagau

SEQ ID NO: 1437579 - RNA, 12 nt, Human
ccuugccagaga

SEQ ID NO: 1437580 - RNA, 19 nt, Human
ccuuucccuuguagcuccu

SEQ ID NO: 1437581 - RNA, 21 nt, Human
ccuuuauuuuuggcguggcug

SEQ ID NO: 1437582 - RNA, 19 nt, Human
ccuuuauuuccacugugca

SEQ ID NO: 1437583 - RNA, 12 nt, Human
ccuuuauugugu

SEQ ID NO: 1437584 - RNA, 15 nt, Human
ccuuuauuguguuug

SEQ ID NO: 1437585 - RNA, 20 nt, Human
ccuuuauuguguuugucauu

SEQ ID NO: 1437586 - RNA, 23 nt, Human
ccuuuauuuguuaauaguuccug

SEQ ID NO: 1437587 - RNA, 21 nt, Human
ccuuuauuguguuugucauua

SEQ ID NO: 1437588 - RNA, 14 nt, Human
ccuugcauaauggu

SEQ ID NO: 1437589 - RNA, 13 nt, Human
ccuugccacacuc

SEQ ID NO: 1437590 - RNA, 17 nt, Human
cggaggcggugggccug

SEQ ID NO: 1437591 - RNA, 14 nt, Human
cggaggcggugggc

SEQ ID NO: 1437592 - RNA, 14 nt, Human
cggagagugggggu

SEQ ID NO: 1437593 - RNA, 13 nt, Human
cggagagccagcu

SEQ ID NO: 1437594 - RNA, 15 nt, Human
cggagucguggggug

SEQ ID NO: 1437595 - RNA, 23 nt, Human
cggaguccuguguuugugagucg

SEQ ID NO: 1437596 - RNA, 15 nt, Human
cguaaguacagagaa

SEQ ID NO: 1437597 - RNA, 14 nt, Human
cguaaguacagaga

SEQ ID NO: 1437598 - RNA, 13 nt, Human
cguaaguacagag

SEQ ID NO: 1437599 - RNA, 14 nt, Human
cguaagauuuccuu

SEQ ID NO: 1437600 - RNA, 16 nt, Human
cguaaaguacuuguag

SEQ ID NO: 1437601 - RNA, 18 nt, Human
cguaaaguacuuguaguu

SEQ ID NO: 1437602 - RNA, 14 nt, Human
cguaaaguacuugu

SEQ ID NO: 1437603 - RNA, 12 nt, Human
cgggcugugccc

SEQ ID NO: 1437604 - RNA, 20 nt, Human
cgguggcucacgccuguaau

SEQ ID NO: 1437605 - RNA, 15 nt, Human
cguacugcagccucc

SEQ ID NO: 1437606 - RNA, 14 nt, Human
cguacugcagccuc

SEQ ID NO: 1437607 - RNA, 20 nt, Human
cguacguaauaagguuuuaa

SEQ ID NO: 1437608 - RNA, 17 nt, Human
cguacguaauaagguuu

SEQ ID NO: 1437609 - RNA, 20 nt, Human
cguaaguacagagaagccau

SEQ ID NO: 1437610 - RNA, 21 nt, Human
cguaaguacagagaagccauc

SEQ ID NO: 1437611 - RNA, 19 nt, Human
cguaaguacagagaagcca

SEQ ID NO: 1437612 - RNA, 18 nt, Human
cguaaguacagagaagcc

SEQ ID NO: 1437613 - RNA, 17 nt, Human
cguaaguacagagaagc

SEQ ID NO: 1437614 - RNA, 16 nt, Human
cguaaguacagagaag

SEQ ID NO: 1437615 - RNA, 22 nt, Human
cguacacauuuuauuuuauuau

SEQ ID NO: 1437616 - RNA, 21 nt, Human
cgggcccuucccacaggacau

SEQ ID NO: 1437617 - RNA, 21 nt, Human
cgggccacuccuuccugcccc

SEQ ID NO: 1437618 - RNA, 22 nt, Human
cgggccacuccuuccugcccca

SEQ ID NO: 1437619 - RNA, 20 nt, Human
cgggccacuccuuccugccc

SEQ ID NO: 1437620 - RNA, 19 nt, Human
cgggccacuccuuccugcc

SEQ ID NO: 1437621 - RNA, 19 nt, Human
cggcuaauuuuuauauuuu

SEQ ID NO: 1437622 - RNA, 18 nt, Human
cgggccacuccuuccugc

SEQ ID NO: 1437623 - RNA, 15 nt, Human
cgggccuguccacag

SEQ ID NO: 1437624 - RNA, 16 nt, Human
cgggccuguccacagg

SEQ ID NO: 1437625 - RNA, 23 nt, Human
ccuuuucccaaaauguugaaaua

SEQ ID NO: 1437626 - RNA, 12 nt, Human
ccuuuuccaugc

SEQ ID NO: 1437627 - RNA, 16 nt, Human
ccuuuucaugauuuua

SEQ ID NO: 1437628 - RNA, 22 nt, Human
ccuuuccuggacacucagaccu

SEQ ID NO: 1437629 - RNA, 20 nt, Human
ccuuucccuuguagcuccuc

SEQ ID NO: 1437630 - RNA, 22 nt, Human
ccuuuucauaggucugaaauuu

SEQ ID NO: 1437631 - RNA, 19 nt, Human
ccuuuucauaggucugaaa

SEQ ID NO: 1437632 - RNA, 18 nt, Human
ccuuuucauaggucugaa

SEQ ID NO: 1437633 - RNA, 11 nt, Human
ccuuuucauag

SEQ ID NO: 1437634 - RNA, 12 nt, Human
ccuuuucccaac

SEQ ID NO: 1437635 - RNA, 23 nt, Human
cgagggcuggcuggccucaccca

SEQ ID NO: 1437636 - RNA, 19 nt, Human
cgagggcuggcuggccuca

SEQ ID NO: 1437637 - RNA, 17 nt, Human
cgagggcuggcuggccu

SEQ ID NO: 1437638 - RNA, 15 nt, Human
cgagggcuggcuggc

SEQ ID NO: 1437639 - RNA, 14 nt, Human
cgagggcuggcugg

SEQ ID NO: 1437640 - RNA, 21 nt, Human
cgagggcagggaccacacccu

SEQ ID NO: 1437641 - RNA, 11 nt, Human
cgagggcuggc

SEQ ID NO: 1437642 - RNA, 19 nt, Human
cgaggggugucuugggcag

SEQ ID NO: 1437643 - RNA, 18 nt, Human
cgaggggugucuugggca

SEQ ID NO: 1437644 - RNA, 16 nt, Human
cgcaguguggaggcca

SEQ ID NO: 1437645 - RNA, 23 nt, Human
cgcagugggagcaaacugcaugc

SEQ ID NO: 1437646 - RNA, 22 nt, Human
cgcagugggagcaaacugcaug

SEQ ID NO: 1437647 - RNA, 22 nt, Human
cgcaguccacuucugacagccu

SEQ ID NO: 1437648 - RNA, 23 nt, Human
cgcaguccacuucugacagccuc

SEQ ID NO: 1437649 - RNA, 20 nt, Human
cgcaguccacuucugacagc

SEQ ID NO: 1437650 - RNA, 19 nt, Human
cgcaguccacuucugacag

SEQ ID NO: 1437651 - RNA, 20 nt, Human
cgcugaguggcaggggacag

SEQ ID NO: 1437652 - RNA, 22 nt, Human
cgccugcccucauggccccucu

SEQ ID NO: 1437653 - RNA, 20 nt, Human
cgccugcccucauggccccu

SEQ ID NO: 1437654 - RNA, 17 nt, Human
cgccugcccucauggcc

SEQ ID NO: 1437655 - RNA, 13 nt, Human
cgcucuuugagaa

SEQ ID NO: 1437656 - RNA, 13 nt, Human
cgcugaguggcag

SEQ ID NO: 1437657 - RNA, 16 nt, Human
cgcugaguggcagggg

SEQ ID NO: 1437658 - RNA, 14 nt, Human
cgcugaguggcagg

SEQ ID NO: 1437659 - RNA, 19 nt, Human
cuaagagaaguagaaauca

SEQ ID NO: 1437660 - RNA, 17 nt, Human
cuaagagaaguagaaau

SEQ ID NO: 1437661 - RNA, 15 nt, Human
cuaagagaaguagaa

SEQ ID NO: 1437662 - RNA, 13 nt, Human
cuaagagaaguag

SEQ ID NO: 1437663 - RNA, 23 nt, Human
cuaagacuuacucuaagaucuua

SEQ ID NO: 1437664 - RNA, 22 nt, Human
cuaagacuuacucuaagaucuu

SEQ ID NO: 1437665 - RNA, 19 nt, Human
cuaagacuuacucuaagau

SEQ ID NO: 1437666 - RNA, 18 nt, Human
cuaagacuuacucuaaga

SEQ ID NO: 1437667 - RNA, 17 nt, Human
cuaagacuuacucuaag

SEQ ID NO: 1437668 - RNA, 22 nt, Human
cuaagacucaaauguucuaagu

SEQ ID NO: 1437669 - RNA, 21 nt, Human
cuaagacucaaauguucuaag

SEQ ID NO: 1437670 - RNA, 20 nt, Human
cuaagacucaaauguucuaa

SEQ ID NO: 1437671 - RNA, 19 nt, Human
cuaagacucaaauguucua

SEQ ID NO: 1437672 - RNA, 17 nt, Human
cuaagacucaaauguuc

SEQ ID NO: 1437673 - RNA, 16 nt, Human
cuaagacucaaauguu

SEQ ID NO: 1437674 - RNA, 13 nt, Human
cuaagacucaaau

SEQ ID NO: 1437675 - RNA, 22 nt, Human
cuaagaaguacauuguuaccuc

SEQ ID NO: 1437676 - RNA, 12 nt, Human
cuaauuuuuaag

SEQ ID NO: 1437677 - RNA, 19 nt, Human
cuaauuuguuuuggauaua

SEQ ID NO: 1437678 - RNA, 22 nt, Human
cuaauuuguaggaaaaagcaag

SEQ ID NO: 1437679 - RNA, 22 nt, Human
cuaauuugcauuaaauucacaa

SEQ ID NO: 1437680 - RNA, 21 nt, Human
cuaauuugcauuaaauucaca

SEQ ID NO: 1437681 - RNA, 19 nt, Human
cuaauuugcauuaaauuca

SEQ ID NO: 1437682 - RNA, 14 nt, Human
cuaauuugcauuaa

SEQ ID NO: 1437683 - RNA, 13 nt, Human
cuaauuugcauua

SEQ ID NO: 1437684 - RNA, 12 nt, Human
cuaauuugcauu

SEQ ID NO: 1437685 - RNA, 23 nt, Human
cuaaguuucuaagauucuaaagg

SEQ ID NO: 1437686 - RNA, 22 nt, Human
cuaaguuucuaagauucuaaag

SEQ ID NO: 1437687 - RNA, 21 nt, Human
cuaaguuucuaagauucuaaa

SEQ ID NO: 1437688 - RNA, 19 nt, Human
cuaaguuucuaagauucua

SEQ ID NO: 1437689 - RNA, 20 nt, Human
cuaaguuuuuauggcuuuug

SEQ ID NO: 1437690 - RNA, 18 nt, Human
cuaaguuucuaagauucu

SEQ ID NO: 1437691 - RNA, 17 nt, Human
cuaaguuucuaagauuc

SEQ ID NO: 1437692 - RNA, 15 nt, Human
cuaaguuucuaagau

SEQ ID NO: 1437693 - RNA, 14 nt, Human
cuaaguuucuaaga

SEQ ID NO: 1437694 - RNA, 13 nt, Human
cuaaguuucuaag

SEQ ID NO: 1437695 - RNA, 12 nt, Human
cuaaguuucuaa

SEQ ID NO: 1437696 - RNA, 14 nt, Human
cuaaguuuuuaugg

SEQ ID NO: 1437697 - RNA, 23 nt, Human
cuaaguccaguccaguccuaucu

SEQ ID NO: 1437698 - RNA, 21 nt, Human
cuaaguccaguccaguccuau

SEQ ID NO: 1437699 - RNA, 19 nt, Human
cuaaguccaguguuucuuu

SEQ ID NO: 1437700 - RNA, 20 nt, Human
cuaaguacacaauaagcaaa

SEQ ID NO: 1437701 - RNA, 19 nt, Human
cuaaguacacaauaagcaa

SEQ ID NO: 1437702 - RNA, 22 nt, Human
cgugagcuuaaaauacaagacu

SEQ ID NO: 1437703 - RNA, 17 nt, Human
cgugagcugagcaggcc

SEQ ID NO: 1437704 - RNA, 14 nt, Human
cgugagcugagcag

SEQ ID NO: 1437705 - RNA, 15 nt, Human
cgugagcucuuguga

SEQ ID NO: 1437706 - RNA, 14 nt, Human
cgugagccaccucg

SEQ ID NO: 1437707 - RNA, 19 nt, Human
cgugacaauaaaacauuaa

SEQ ID NO: 1437708 - RNA, 17 nt, Human
cgugacaauaaaacauu

SEQ ID NO: 1437709 - RNA, 13 nt, Human
cgugacacaaaca

SEQ ID NO: 1437710 - RNA, 16 nt, Human
cuaagaaccuggaacu

SEQ ID NO: 1437711 - RNA, 15 nt, Human
cuaagaaccuggaac

SEQ ID NO: 1437712 - RNA, 14 nt, Human
cuaagaaccuggaa

SEQ ID NO: 1437713 - RNA, 21 nt, Human
cuaagaaauugaauacuuuga

SEQ ID NO: 1437714 - RNA, 16 nt, Human
cuaagaaauugaauac

SEQ ID NO: 1437715 - RNA, 20 nt, Human
cuaagaaauaugcacaauag

SEQ ID NO: 1437716 - RNA, 22 nt, Human
cuaagaaagcccuuaggaagaa

SEQ ID NO: 1437717 - RNA, 15 nt, Human
cuaacuuggcucaca

SEQ ID NO: 1437718 - RNA, 22 nt, Human
cuaacguugagccccuggaggc

SEQ ID NO: 1437719 - RNA, 17 nt, Human
cuaacggugcucagggg

SEQ ID NO: 1437720 - RNA, 17 nt, Human
cuaacguugagccccug

SEQ ID NO: 1437721 - RNA, 19 nt, Human
cuaacggugcucagggggc

SEQ ID NO: 1437722 - RNA, 16 nt, Human
cuaacggugcucaggg

SEQ ID NO: 1437723 - RNA, 22 nt, Human
cuaacggucuguucuguuucaa

SEQ ID NO: 1437724 - RNA, 22 nt, Human
cuaacgccugagcccagggagg

SEQ ID NO: 1437725 - RNA, 21 nt, Human
cuaacgccugagcccagggag

SEQ ID NO: 1437726 - RNA, 20 nt, Human
cuaacgccugagcccaggga

SEQ ID NO: 1437727 - RNA, 19 nt, Human
cuaacgccugagcccaggg

SEQ ID NO: 1437728 - RNA, 18 nt, Human
cuaacgccugagcccagg

SEQ ID NO: 1437729 - RNA, 17 nt, Human
cuaacgccugagcccag

SEQ ID NO: 1437730 - RNA, 15 nt, Human
cuaacgccugagccc

SEQ ID NO: 1437731 - RNA, 14 nt, Human
cuaacgccugagcc

SEQ ID NO: 1437732 - RNA, 13 nt, Human
cuaacgccugagc

SEQ ID NO: 1437733 - RNA, 12 nt, Human
cuaacgccugag

SEQ ID NO: 1437734 - RNA, 19 nt, Human
cuaaaguguauuuuuuuac

SEQ ID NO: 1437735 - RNA, 14 nt, Human
cuaaagcucugaca

SEQ ID NO: 1437736 - RNA, 23 nt, Human
cuaaagguccacaggucuagacu

SEQ ID NO: 1437737 - RNA, 12 nt, Human
cuaaagcucuga

SEQ ID NO: 1437738 - RNA, 14 nt, Human
cuaaagccuuuauu

SEQ ID NO: 1437739 - RNA, 12 nt, Human
cuaaagccuuua

SEQ ID NO: 1437740 - RNA, 16 nt, Human
cuaaagccucaaaaca

SEQ ID NO: 1437741 - RNA, 23 nt, Human
cuaaaguaaaaacaaagaaauua

SEQ ID NO: 1437742 - RNA, 16 nt, Human
cguguucuccuuuucc

SEQ ID NO: 1437743 - RNA, 15 nt, Human
cguguucaauauuuu

SEQ ID NO: 1437744 - RNA, 23 nt, Human
cguguguuuuucuauuaaaagac

SEQ ID NO: 1437745 - RNA, 21 nt, Human
cguguguuuuucuauuaaaag

SEQ ID NO: 1437746 - RNA, 18 nt, Human
cguguguuuuucuauuaa

SEQ ID NO: 1437747 - RNA, 17 nt, Human
cguguguuuuucuauua

SEQ ID NO: 1437748 - RNA, 20 nt, Human
cgugagcugagcaggccaca

SEQ ID NO: 1437749 - RNA, 18 nt, Human
cuaaagccaaacauauau

SEQ ID NO: 1437750 - RNA, 11 nt, Human
cuaaagccaaa

SEQ ID NO: 1437751 - RNA, 13 nt, Human
cuaaagcaggccu

SEQ ID NO: 1437752 - RNA, 23 nt, Human
cuaaagauucuauaguucuagac

SEQ ID NO: 1437753 - RNA, 22 nt, Human
cuaaagauucuauaguucuaga

SEQ ID NO: 1437754 - RNA, 20 nt, Human
cuaaagauucuauaguucua

SEQ ID NO: 1437755 - RNA, 17 nt, Human
cguuagcuccuguggcc

SEQ ID NO: 1437756 - RNA, 16 nt, Human
cguuagcuccuguggc

SEQ ID NO: 1437757 - RNA, 15 nt, Human
cguuagcuccugugg

SEQ ID NO: 1437758 - RNA, 14 nt, Human
cguuagcuccugug

SEQ ID NO: 1437759 - RNA, 13 nt, Human
cguuagcuccugu

SEQ ID NO: 1437760 - RNA, 20 nt, Human
cguguuucugacucugagcu

SEQ ID NO: 1437761 - RNA, 15 nt, Human
cguguuucugacucu

SEQ ID NO: 1437762 - RNA, 14 nt, Human
cguguuucugacuc

SEQ ID NO: 1437763 - RNA, 19 nt, Human
cguucaacuuuuccuuuga

SEQ ID NO: 1437764 - RNA, 23 nt, Human
cguuaucuaauagggcaauuaau

SEQ ID NO: 1437765 - RNA, 20 nt, Human
cguuagucgugagcucuugu

SEQ ID NO: 1437766 - RNA, 18 nt, Human
cuaucagacuaagccagc

SEQ ID NO: 1437767 - RNA, 19 nt, Human
cuaucagaguugcugcaaa

SEQ ID NO: 1437768 - RNA, 17 nt, Human
cuaucaccuauuuccau

SEQ ID NO: 1437769 - RNA, 16 nt, Human
cuaucaccuauuucca

SEQ ID NO: 1437770 - RNA, 20 nt, Human
cuauccucucuuccucuucc

SEQ ID NO: 1437771 - RNA, 13 nt, Human
cuauccucuguaa

SEQ ID NO: 1437772 - RNA, 12 nt, Human
cuauccucugua

SEQ ID NO: 1437773 - RNA, 16 nt, Human
cuauccucucuuccuc

SEQ ID NO: 1437774 - RNA, 15 nt, Human
cuauccucucuuccu

SEQ ID NO: 1437775 - RNA, 20 nt, Human
cuauccggacagagcacguu

SEQ ID NO: 1437776 - RNA, 18 nt, Human
cuaucccuaggcacuuaa

SEQ ID NO: 1437777 - RNA, 21 nt, Human
cuaucuccagcggcccuguca

SEQ ID NO: 1437778 - RNA, 15 nt, Human
cuaugucccaggaau

SEQ ID NO: 1437779 - RNA, 19 nt, Human
cuaucuccagcggcccugu

SEQ ID NO: 1437780 - RNA, 16 nt, Human
cuauguccuaauaaua

SEQ ID NO: 1437781 - RNA, 18 nt, Human
cuaucucauuuccaagca

SEQ ID NO: 1437782 - RNA, 17 nt, Human
cuaucguaaaauuaaga

SEQ ID NO: 1437783 - RNA, 15 nt, Human
cuauuaaaagacuca

SEQ ID NO: 1437784 - RNA, 14 nt, Human
cuauuaaaagacuc

SEQ ID NO: 1437785 - RNA, 13 nt, Human
cuauuaaaagacu

SEQ ID NO: 1437786 - RNA, 12 nt, Human
cuauuaaaagac

SEQ ID NO: 1437787 - RNA, 11 nt, Human
cuauuaaaaga

SEQ ID NO: 1437788 - RNA, 15 nt, Human
cuauguuuuuaaugu

SEQ ID NO: 1437789 - RNA, 22 nt, Human
cuauguuuuuguucaaagccag

SEQ ID NO: 1437790 - RNA, 20 nt, Human
cuauguuuuuguucaaagcc

SEQ ID NO: 1437791 - RNA, 14 nt, Human
cuauguuuuuaaug

SEQ ID NO: 1437792 - RNA, 16 nt, Human
cuauguuuuuaaugua

SEQ ID NO: 1437793 - RNA, 20 nt, Human
cucaaguucuaagauucuaa

SEQ ID NO: 1437794 - RNA, 19 nt, Human
cucaaguucuaagauucua

SEQ ID NO: 1437795 - RNA, 18 nt, Human
cucaaguucuaagauucu

SEQ ID NO: 1437796 - RNA, 15 nt, Human
cucaaguucuaagau

SEQ ID NO: 1437797 - RNA, 14 nt, Human
cucaaguucuaaga

SEQ ID NO: 1437798 - RNA, 13 nt, Human
cucaaguucuaag

SEQ ID NO: 1437799 - RNA, 17 nt, Human
cuauuaaaagacucauc

SEQ ID NO: 1437800 - RNA, 16 nt, Human
cuauuaaaagacucau

SEQ ID NO: 1437801 - RNA, 22 nt, Human
cucaaguugauuagaaagacca

SEQ ID NO: 1437802 - RNA, 20 nt, Human
cucaauggacuggaagggga

SEQ ID NO: 1437803 - RNA, 17 nt, Human
cucaauggacuggaagg

SEQ ID NO: 1437804 - RNA, 14 nt, Human
cucaauggacugga

SEQ ID NO: 1437805 - RNA, 15 nt, Human
cucaaugagcauguu

SEQ ID NO: 1437806 - RNA, 14 nt, Human
cucaaugagcaugu

SEQ ID NO: 1437807 - RNA, 13 nt, Human
cucaaugagcaug

SEQ ID NO: 1437808 - RNA, 12 nt, Human
cucaaugagcau

SEQ ID NO: 1437809 - RNA, 15 nt, Human
cucaaucccugagga

SEQ ID NO: 1437810 - RNA, 16 nt, Human
cucaaucagucucaga

SEQ ID NO: 1437811 - RNA, 19 nt, Human
cucaaugagcauguuuaga

SEQ ID NO: 1437812 - RNA, 21 nt, Human
cucaauuccaacaguuuaaug

SEQ ID NO: 1437813 - RNA, 16 nt, Human
cucaauuccaacaguu

SEQ ID NO: 1437814 - RNA, 12 nt, Human
cucaauuccaac

SEQ ID NO: 1437815 - RNA, 14 nt, Human
cucaauuagugugg

SEQ ID NO: 1437816 - RNA, 19 nt, Human
cucauggccccucugaccu

SEQ ID NO: 1437817 - RNA, 17 nt, Human
cucauggccccucugac

SEQ ID NO: 1437818 - RNA, 15 nt, Human
cucauggccccucug

SEQ ID NO: 1437819 - RNA, 14 nt, Human
cucauggccccucu

SEQ ID NO: 1437820 - RNA, 20 nt, Human
cucaugcaaaucaauuacug

SEQ ID NO: 1437821 - RNA, 19 nt, Human
cucaugcaaaucaauuacu

SEQ ID NO: 1437822 - RNA, 16 nt, Human
cucaugcaaaucaauu

SEQ ID NO: 1437823 - RNA, 21 nt, Human
cucaugaauguaaauuuguac

SEQ ID NO: 1437824 - RNA, 22 nt, Human
cucaugaauguaaauuuguacu

SEQ ID NO: 1437825 - RNA, 16 nt, Human
cucaugaauguaaauu

SEQ ID NO: 1437826 - RNA, 15 nt, Human
cucaugaauguaaau

SEQ ID NO: 1437827 - RNA, 19 nt, Human
cucagugacccuggcuccu

SEQ ID NO: 1437828 - RNA, 20 nt, Human
cucagugacccuggcuccuu

SEQ ID NO: 1437829 - RNA, 21 nt, Human
cucagugaaguugcugcuucu

SEQ ID NO: 1437830 - RNA, 20 nt, Human
cucagugaaguugcugcuuc

SEQ ID NO: 1437831 - RNA, 19 nt, Human
cucagugaaguugcugcuu

SEQ ID NO: 1437832 - RNA, 18 nt, Human
cucagugaaguugcugcu

SEQ ID NO: 1437833 - RNA, 16 nt, Human
cucagugaaguugcug

SEQ ID NO: 1437834 - RNA, 15 nt, Human
cucagugaaguugcu

SEQ ID NO: 1437835 - RNA, 14 nt, Human
cucagugaagacua

SEQ ID NO: 1437836 - RNA, 18 nt, Human
cucagugaagaauacuuc

SEQ ID NO: 1437837 - RNA, 15 nt, Human
cucagugaagaauac

SEQ ID NO: 1437838 - RNA, 17 nt, Human
cucaguaugaauuauuc

SEQ ID NO: 1437839 - RNA, 13 nt, Human
cucaguagucccu

SEQ ID NO: 1437840 - RNA, 16 nt, Human
cucaguagucccugca

SEQ ID NO: 1437841 - RNA, 15 nt, Human
cucagguguugccaa

SEQ ID NO: 1437842 - RNA, 14 nt, Human
cucagguguugcca

SEQ ID NO: 1437843 - RNA, 16 nt, Human
cucagcccugcaccau

SEQ ID NO: 1437844 - RNA, 20 nt, Human
cucagcccugcaccaugcug

SEQ ID NO: 1437845 - RNA, 15 nt, Human
cucagcccugcacca

SEQ ID NO: 1437846 - RNA, 16 nt, Human
cucagcccugaggaca

SEQ ID NO: 1437847 - RNA, 17 nt, Human
cucagcccugaggacag

SEQ ID NO: 1437848 - RNA, 13 nt, Human
cucagcccugagg

SEQ ID NO: 1437849 - RNA, 12 nt, Human
cucagcccugag

SEQ ID NO: 1437850 - RNA, 14 nt, Human
cucagacuggggca

SEQ ID NO: 1437851 - RNA, 18 nt, Human
cucagacucuaagaaaga

SEQ ID NO: 1437852 - RNA, 14 nt, Human
cucagacucuaaga

SEQ ID NO: 1437853 - RNA, 19 nt, Human
cucagacucuaagaaagaa

SEQ ID NO: 1437854 - RNA, 14 nt, Human
cucagacccuuucu

SEQ ID NO: 1437855 - RNA, 15 nt, Human
cucagacccuuucuu

SEQ ID NO: 1437856 - RNA, 23 nt, Human
cucagaagccugggggccuggcu

SEQ ID NO: 1437857 - RNA, 22 nt, Human
cucagaagccugggggccuggc

SEQ ID NO: 1437858 - RNA, 21 nt, Human
cucagaagccugggggccugg

SEQ ID NO: 1437859 - RNA, 20 nt, Human
cucagaagccugggggccug

SEQ ID NO: 1437860 - RNA, 17 nt, Human
cucagaagccugggggc

SEQ ID NO: 1437861 - RNA, 16 nt, Human
cucagaagccuggggg

SEQ ID NO: 1437862 - RNA, 15 nt, Human
cucagaagccugggg

SEQ ID NO: 1437863 - RNA, 18 nt, Human
cucagaccacaugcccca

SEQ ID NO: 1437864 - RNA, 14 nt, Human
cucagaagccuggg

SEQ ID NO: 1437865 - RNA, 13 nt, Human
cucagaagccugg

SEQ ID NO: 1437866 - RNA, 22 nt, Human
cucagaaagugccugacacacu

SEQ ID NO: 1437867 - RNA, 22 nt, Human
cucacuaggcccccacuugccu

SEQ ID NO: 1437868 - RNA, 18 nt, Human
cucacuaggcccccacuu

SEQ ID NO: 1437869 - RNA, 15 nt, Human
cucacuaggccccca

SEQ ID NO: 1437870 - RNA, 15 nt, Human
cucacuaauucauua

SEQ ID NO: 1437871 - RNA, 15 nt, Human
cucacguccugagaa

SEQ ID NO: 1437872 - RNA, 14 nt, Human
cucacguccugaga

SEQ ID NO: 1437873 - RNA, 14 nt, Human
cucacgucaaaugc

SEQ ID NO: 1437874 - RNA, 19 nt, Human
cucacggccacacagcugc

SEQ ID NO: 1437875 - RNA, 21 nt, Human
cucacggccacacagcugccg

SEQ ID NO: 1437876 - RNA, 18 nt, Human
cucacggccacacagcug

SEQ ID NO: 1437877 - RNA, 22 nt, Human
cucacgccuguaaucccagcau

SEQ ID NO: 1437878 - RNA, 22 nt, Human
cucaccuugugcuggggacagg

SEQ ID NO: 1437879 - RNA, 21 nt, Human
cucaccuugugcuggggacag

SEQ ID NO: 1437880 - RNA, 16 nt, Human
cucaggcugccugagu

SEQ ID NO: 1437881 - RNA, 21 nt, Human
cucaggcugccugagucguga

SEQ ID NO: 1437882 - RNA, 15 nt, Human
cucaggcugccugag

SEQ ID NO: 1437883 - RNA, 14 nt, Human
cucaggcugccuga

SEQ ID NO: 1437884 - RNA, 13 nt, Human
cucaggcugccug

SEQ ID NO: 1437885 - RNA, 12 nt, Human
cucaggcugccu

SEQ ID NO: 1437886 - RNA, 17 nt, Human
cucaggcugaccacuuu

SEQ ID NO: 1437887 - RNA, 22 nt, Human
cucaggcccccaccuggcucac

SEQ ID NO: 1437888 - RNA, 20 nt, Human
cucaggccaagaaacgucuu

SEQ ID NO: 1437889 - RNA, 21 nt, Human
cucagccugggcgcugguccu

SEQ ID NO: 1437890 - RNA, 16 nt, Human
cucagccugggcgcug

SEQ ID NO: 1437891 - RNA, 15 nt, Human
cucagccugggcgcu

SEQ ID NO: 1437892 - RNA, 14 nt, Human
cucagccugggcgc

SEQ ID NO: 1437893 - RNA, 12 nt, Human
cucagccugggc

SEQ ID NO: 1437894 - RNA, 11 nt, Human
cucagccuggg

SEQ ID NO: 1437895 - RNA, 16 nt, Human
cucagccugaacccca

SEQ ID NO: 1437896 - RNA, 20 nt, Human
cucagccuggccagacacag

SEQ ID NO: 1437897 - RNA, 19 nt, Human
cucagccuggccagacaca

SEQ ID NO: 1437898 - RNA, 17 nt, Human
cucagccuggccagaca

SEQ ID NO: 1437899 - RNA, 16 nt, Human
cucagccuggccagac

SEQ ID NO: 1437900 - RNA, 15 nt, Human
cucagccuggccaga

SEQ ID NO: 1437901 - RNA, 14 nt, Human
cucagccuggccag

SEQ ID NO: 1437902 - RNA, 13 nt, Human
cucagccuggcca

SEQ ID NO: 1437903 - RNA, 19 nt, Human
cucagccugaaccccaggg

SEQ ID NO: 1437904 - RNA, 21 nt, Human
cucagccucuccccugccugc

SEQ ID NO: 1437905 - RNA, 15 nt, Human
cucagccucuccccu

SEQ ID NO: 1437906 - RNA, 16 nt, Human
cucagccucucgaagu

SEQ ID NO: 1437907 - RNA, 17 nt, Human
cuccggaggacucacca

SEQ ID NO: 1437908 - RNA, 23 nt, Human
cuccggaggacucaccacugccc

SEQ ID NO: 1437909 - RNA, 14 nt, Human
cuccuaccucugcu

SEQ ID NO: 1437910 - RNA, 13 nt, Human
cuccucugcacuc

SEQ ID NO: 1437911 - RNA, 12 nt, Human
cuccucugcacu

SEQ ID NO: 1437912 - RNA, 22 nt, Human
cuccucugacucagggcuccug

SEQ ID NO: 1437913 - RNA, 20 nt, Human
cuccucugacucagggcucc

SEQ ID NO: 1437914 - RNA, 19 nt, Human
cuccucugacucagggcuc

SEQ ID NO: 1437915 - RNA, 18 nt, Human
cuccucugacucagggcu

SEQ ID NO: 1437916 - RNA, 13 nt, Human
cuccucugacuca

SEQ ID NO: 1437917 - RNA, 24 nt, Human
cuccucugcccgggagcucaggaa

SEQ ID NO: 1437918 - RNA, 22 nt, Human
cuccucugcccgggagcucagg

SEQ ID NO: 1437919 - RNA, 16 nt, Human
cuccugucucccuccu

SEQ ID NO: 1437920 - RNA, 16 nt, Human
cuccuugugggccugg

SEQ ID NO: 1437921 - RNA, 14 nt, Human
cuccuugugccaga

SEQ ID NO: 1437922 - RNA, 14 nt, Human
cuccuuguguuacu

SEQ ID NO: 1437923 - RNA, 21 nt, Human
cuccuugugggccugggcucc

SEQ ID NO: 1437924 - RNA, 19 nt, Human
cuccuugugggccugggcu

SEQ ID NO: 1437925 - RNA, 18 nt, Human
cuccuugugggccugggc

SEQ ID NO: 1437926 - RNA, 15 nt, Human
cuccuuuaauuguaa

SEQ ID NO: 1437927 - RNA, 15 nt, Human
cuccuggugccaccu

SEQ ID NO: 1437928 - RNA, 18 nt, Human
cuccuggucaccuaggaa

SEQ ID NO: 1437929 - RNA, 17 nt, Human
cuccuggucaccuagga

SEQ ID NO: 1437930 - RNA, 23 nt, Human
cuccuggguuuuguauucucuga

SEQ ID NO: 1437931 - RNA, 16 nt, Human
cuccuggcccagccuu

SEQ ID NO: 1437932 - RNA, 22 nt, Human
cuccugggcccucucugcucug

SEQ ID NO: 1437933 - RNA, 21 nt, Human
cuccugggcccucucugcucu

SEQ ID NO: 1437934 - RNA, 18 nt, Human
cuccuguccccugcuaca

SEQ ID NO: 1437935 - RNA, 21 nt, Human
cuccuguccccugcuacaccu

SEQ ID NO: 1437936 - RNA, 15 nt, Human
cuccuguccccugcu

SEQ ID NO: 1437937 - RNA, 14 nt, Human
cuccuguccccugc

SEQ ID NO: 1437938 - RNA, 13 nt, Human
cuccuguccccug

SEQ ID NO: 1437939 - RNA, 23 nt, Human
cuccuguaacauacuggccugga

SEQ ID NO: 1437940 - RNA, 22 nt, Human
cuccuguaacauacuggccugg

SEQ ID NO: 1437941 - RNA, 20 nt, Human
cuccuguaacauacuggccu

SEQ ID NO: 1437942 - RNA, 16 nt, Human
cuccuguaccucuuga

SEQ ID NO: 1437943 - RNA, 20 nt, Human
cuccugggcccucucugcuc

SEQ ID NO: 1437944 - RNA, 19 nt, Human
cuccugggcccucucugcu

SEQ ID NO: 1437945 - RNA, 17 nt, Human
cuccugggcccucucug

SEQ ID NO: 1437946 - RNA, 15 nt, Human
cuccugggcccucuc

SEQ ID NO: 1437947 - RNA, 22 nt, Human
cuccuggcucuugauacccccc

SEQ ID NO: 1437948 - RNA, 18 nt, Human
cuccuggcccagccuuug

SEQ ID NO: 1437949 - RNA, 23 nt, Human
cuccucuucuacucacuuuuccc

SEQ ID NO: 1437950 - RNA, 15 nt, Human
cuccuggcccagccu

SEQ ID NO: 1437951 - RNA, 14 nt, Human
cuccuggcccagcc

SEQ ID NO: 1437952 - RNA, 17 nt, Human
cuccucuucuacucacu

SEQ ID NO: 1437953 - RNA, 17 nt, Human
cuccucuuccccagacg

SEQ ID NO: 1437954 - RNA, 15 nt, Human
cuccucuuccccaga

SEQ ID NO: 1437955 - RNA, 14 nt, Human
cuccucuuccccag

SEQ ID NO: 1437956 - RNA, 13 nt, Human
cuccucuucccca

SEQ ID NO: 1437957 - RNA, 20 nt, Human
cuccucuuccaugcugugcg

SEQ ID NO: 1437958 - RNA, 18 nt, Human
cuccucuuccaugcugug

SEQ ID NO: 1437959 - RNA, 16 nt, Human
cuccucuuccaugcug

SEQ ID NO: 1437960 - RNA, 21 nt, Human
cuccucugcugaccugcugac

SEQ ID NO: 1437961 - RNA, 20 nt, Human
cuccucugcugaccugcuga

SEQ ID NO: 1437962 - RNA, 19 nt, Human
cuccucugcugaccugcug

SEQ ID NO: 1437963 - RNA, 16 nt, Human
cuccucugcugaccug

SEQ ID NO: 1437964 - RNA, 14 nt, Human
cuccucugcugacc

SEQ ID NO: 1437965 - RNA, 12 nt, Human
cuccucugcuga

SEQ ID NO: 1437966 - RNA, 11 nt, Human
cuccucugcug

SEQ ID NO: 1437967 - RNA, 23 nt, Human
cucauggguggcacucagucucu

SEQ ID NO: 1437968 - RNA, 19 nt, Human
cucauggguggcacucagu

SEQ ID NO: 1437969 - RNA, 15 nt, Human
cucauggguggcacu

SEQ ID NO: 1437970 - RNA, 14 nt, Human
cucauggguggcac

SEQ ID NO: 1437971 - RNA, 20 nt, Human
cucauggccccucugaccug

SEQ ID NO: 1437972 - RNA, 16 nt, Human
cucauguacauacccu

SEQ ID NO: 1437973 - RNA, 14 nt, Human
cucaugugacucuu

SEQ ID NO: 1437974 - RNA, 15 nt, Human
cucccagaggagcca

SEQ ID NO: 1437975 - RNA, 19 nt, Human
cucccagagcaccugcugu

SEQ ID NO: 1437976 - RNA, 20 nt, Human
cucccagagcaccugcuguc

SEQ ID NO: 1437977 - RNA, 18 nt, Human
cucccagagcaccugcug

SEQ ID NO: 1437978 - RNA, 15 nt, Human
cucccagagcaccug

SEQ ID NO: 1437979 - RNA, 21 nt, Human
cucccacucuccuaggcauuc

SEQ ID NO: 1437980 - RNA, 17 nt, Human
cucccacucuccuaggc

SEQ ID NO: 1437981 - RNA, 16 nt, Human
cucccacucuccuagg

SEQ ID NO: 1437982 - RNA, 20 nt, Human
cucccacagucccaucugcu

SEQ ID NO: 1437983 - RNA, 21 nt, Human
cucccacagucccaucugcuu

SEQ ID NO: 1437984 - RNA, 17 nt, Human
cuccagguggcucugag

SEQ ID NO: 1437985 - RNA, 14 nt, Human
cuccagguggcucu

SEQ ID NO: 1437986 - RNA, 18 nt, Human
cucccugaagccuuugca

SEQ ID NO: 1437987 - RNA, 11 nt, Human
cucccucuccg

SEQ ID NO: 1437988 - RNA, 19 nt, Human
cucccucucaacacccagu

SEQ ID NO: 1437989 - RNA, 18 nt, Human
cucccucucaacacccag

SEQ ID NO: 1437990 - RNA, 19 nt, Human
cucccucuccgacucacac

SEQ ID NO: 1437991 - RNA, 17 nt, Human
cucccucucaggaucca

SEQ ID NO: 1437992 - RNA, 23 nt, Human
cuccccuaaagccucaaaacaaa

SEQ ID NO: 1437993 - RNA, 16 nt, Human
cuccccuaaagccuca

SEQ ID NO: 1437994 - RNA, 21 nt, Human
cucccucccagagcaccugcu

SEQ ID NO: 1437995 - RNA, 20 nt, Human
cucccucccagagcaccugc

SEQ ID NO: 1437996 - RNA, 18 nt, Human
cucccucccagagcaccu

SEQ ID NO: 1437997 - RNA, 17 nt, Human
cuccccccgccugccac

SEQ ID NO: 1437998 - RNA, 17 nt, Human
cucccaggcacugucuu

SEQ ID NO: 1437999 - RNA, 21 nt, Human
cucccccccaugcacugugaa

SEQ ID NO: 1438000 - RNA, 20 nt, Human
cucccccccaugcacuguga

SEQ ID NO: 1438001 - RNA, 11 nt, Human
cucccccugcc

SEQ ID NO: 1438002 - RNA, 16 nt, Human
cucccaggagacaguu

SEQ ID NO: 1438003 - RNA, 21 nt, Human
cucccaggaccacaggcucag

SEQ ID NO: 1438004 - RNA, 18 nt, Human
cucccaggaacugggcca

SEQ ID NO: 1438005 - RNA, 15 nt, Human
cucccaggcaaggcu

SEQ ID NO: 1438006 - RNA, 15 nt, Human
cucccaggaccacag

SEQ ID NO: 1438007 - RNA, 19 nt, Human
cucccaggagacaguucaa

SEQ ID NO: 1438008 - RNA, 16 nt, Human
cucccaggcacugucu

SEQ ID NO: 1438009 - RNA, 22 nt, Human
cucccaggcaaggcuguggacc

SEQ ID NO: 1438010 - RNA, 18 nt, Human
cucccaggcaaggcugug

SEQ ID NO: 1438011 - RNA, 17 nt, Human
cucccaggcaaggcugu

SEQ ID NO: 1438012 - RNA, 18 nt, Human
cucccccccaugcacugu

SEQ ID NO: 1438013 - RNA, 13 nt, Human
cuccuuuaauugu

SEQ ID NO: 1438014 - RNA, 23 nt, Human
cucgucucuuuuacccuggcccc

SEQ ID NO: 1438015 - RNA, 19 nt, Human
cucguccucguuuguguuc

SEQ ID NO: 1438016 - RNA, 14 nt, Human
cucguccucguuug

SEQ ID NO: 1438017 - RNA, 17 nt, Human
cucgucucuuuuacccu

SEQ ID NO: 1438018 - RNA, 12 nt, Human
cucguggacacc

SEQ ID NO: 1438019 - RNA, 14 nt, Human
cucguggacaccug

SEQ ID NO: 1438020 - RNA, 19 nt, Human
cucuaugagucuagauguu

SEQ ID NO: 1438021 - RNA, 17 nt, Human
cucuaugagucuagaug

SEQ ID NO: 1438022 - RNA, 16 nt, Human
cucuaugagucuagau

SEQ ID NO: 1438023 - RNA, 15 nt, Human
cucuaugagucuaga

SEQ ID NO: 1438024 - RNA, 14 nt, Human
cucuaugagucuag

SEQ ID NO: 1438025 - RNA, 13 nt, Human
cucuaugagucua

SEQ ID NO: 1438026 - RNA, 15 nt, Human
cucguggacaccugc

SEQ ID NO: 1438027 - RNA, 16 nt, Human
cucguggacaccugcc

SEQ ID NO: 1438028 - RNA, 16 nt, Human
cucucuucucuccagc

SEQ ID NO: 1438029 - RNA, 23 nt, Human
cucucuuauugccucacuucagg

SEQ ID NO: 1438030 - RNA, 19 nt, Human
cucucuuagggacagucaa

SEQ ID NO: 1438031 - RNA, 19 nt, Human
cucucugugggcuggcagu

SEQ ID NO: 1438032 - RNA, 16 nt, Human
cucucuguaauaaacu

SEQ ID NO: 1438033 - RNA, 21 nt, Human
cucucuguaauaaacucauuu

SEQ ID NO: 1438034 - RNA, 14 nt, Human
cucucccugcaugg

SEQ ID NO: 1438035 - RNA, 19 nt, Human
cucuccccccgccugccac

SEQ ID NO: 1438036 - RNA, 19 nt, Human
cucuauggggcauccucuu

SEQ ID NO: 1438037 - RNA, 16 nt, Human
cucuccccaugauguu

SEQ ID NO: 1438038 - RNA, 18 nt, Human
cucuuagucuagguccuu

SEQ ID NO: 1438039 - RNA, 22 nt, Human
cucuuagggacagucaaaacca

SEQ ID NO: 1438040 - RNA, 13 nt, Human
cucuuagcugucu

SEQ ID NO: 1438041 - RNA, 22 nt, Human
cucuguccugaaggccugaggu

SEQ ID NO: 1438042 - RNA, 17 nt, Human
cucuguccugaaggccu

SEQ ID NO: 1438043 - RNA, 13 nt, Human
cucuguccugaag

SEQ ID NO: 1438044 - RNA, 12 nt, Human
cucuguccugaa

SEQ ID NO: 1438045 - RNA, 19 nt, Human
cucuguccugaaggccuga

SEQ ID NO: 1438046 - RNA, 17 nt, Human
cucuguccccagccugg

SEQ ID NO: 1438047 - RNA, 16 nt, Human
cucuguccccagccug

SEQ ID NO: 1438048 - RNA, 14 nt, Human
cucuguccccagcc

SEQ ID NO: 1438049 - RNA, 13 nt, Human
cucuguccccagc

SEQ ID NO: 1438050 - RNA, 12 nt, Human
cucuguccccag

SEQ ID NO: 1438051 - RNA, 22 nt, Human
cucugcugcugucccucccccu

SEQ ID NO: 1438052 - RNA, 21 nt, Human
cucugcugcugucccuccccc

SEQ ID NO: 1438053 - RNA, 16 nt, Human
cucugcugcugucccu

SEQ ID NO: 1438054 - RNA, 16 nt, Human
cucugcugaccugcug

SEQ ID NO: 1438055 - RNA, 17 nt, Human
cucugcugaccugcuga

SEQ ID NO: 1438056 - RNA, 13 nt, Human
cucugcugaccug

SEQ ID NO: 1438057 - RNA, 14 nt, Human
cucugcucugaugc

SEQ ID NO: 1438058 - RNA, 15 nt, Human
cucugcucugaugca

SEQ ID NO: 1438059 - RNA, 12 nt, Human
cucugcucugau

SEQ ID NO: 1438060 - RNA, 19 nt, Human
cucugcagccucagagaca

SEQ ID NO: 1438061 - RNA, 16 nt, Human
cucugcagccucagag

SEQ ID NO: 1438062 - RNA, 15 nt, Human
cucugcagccucaga

SEQ ID NO: 1438063 - RNA, 14 nt, Human
cucugcagccucag

SEQ ID NO: 1438064 - RNA, 13 nt, Human
cucugcagccuca

SEQ ID NO: 1438065 - RNA, 12 nt, Human
cucugcagccuc

SEQ ID NO: 1438066 - RNA, 13 nt, Human
cucugcagguccc

SEQ ID NO: 1438067 - RNA, 17 nt, Human
aacauaccuaagaagua

SEQ ID NO: 1438068 - RNA, 21 nt, Human
aacauaccccuuacaaaugaa

SEQ ID NO: 1438069 - RNA, 20 nt, Human
aacauaccccuuacaaauga

SEQ ID NO: 1438070 - RNA, 12 nt, Human
aacaguuuuccu

SEQ ID NO: 1438071 - RNA, 17 nt, Human
aacauuuauuuugacau

SEQ ID NO: 1438072 - RNA, 15 nt, Human
aacauuuauuuugac

SEQ ID NO: 1438073 - RNA, 23 nt, Human
aacauuguguucccauuucagcu

SEQ ID NO: 1438074 - RNA, 13 nt, Human
aacauuguguucc

SEQ ID NO: 1438075 - RNA, 16 nt, Human
aacauuguagccucaa

SEQ ID NO: 1438076 - RNA, 22 nt, Human
aacauuucuauagccaaaaaua

SEQ ID NO: 1438077 - RNA, 19 nt, Human
aacauuuauuuugacauaa

SEQ ID NO: 1438078 - RNA, 16 nt, Human
aacauuucucaauaau

SEQ ID NO: 1438079 - RNA, 18 nt, Human
aacauuugguaaggggaa

SEQ ID NO: 1438080 - RNA, 20 nt, Human
aacauuuguucuauagcuuu

SEQ ID NO: 1438081 - RNA, 13 nt, Human
guccuucaaaggc

SEQ ID NO: 1438082 - RNA, 23 nt, Human
guccuuagccuggaccucugaca

SEQ ID NO: 1438083 - RNA, 20 nt, Human
guccuuagccuggaccucug

SEQ ID NO: 1438084 - RNA, 19 nt, Human
guccuuagccuggaccucu

SEQ ID NO: 1438085 - RNA, 16 nt, Human
guccuuagccuggacc

SEQ ID NO: 1438086 - RNA, 15 nt, Human
guccugccuguggcg

SEQ ID NO: 1438087 - RNA, 14 nt, Human
guccugccuguggc

SEQ ID NO: 1438088 - RNA, 13 nt, Human
guccugccugugg

SEQ ID NO: 1438089 - RNA, 11 nt, Human
guccugccugu

SEQ ID NO: 1438090 - RNA, 20 nt, Human
guccugccacccagccccag

SEQ ID NO: 1438091 - RNA, 17 nt, Human
guccugccacccagccc

SEQ ID NO: 1438092 - RNA, 15 nt, Human
guccugaucagagcc

SEQ ID NO: 1438093 - RNA, 18 nt, Human
guccugagcucagcgugg

SEQ ID NO: 1438094 - RNA, 19 nt, Human
guccugagcucagcgugga

SEQ ID NO: 1438095 - RNA, 16 nt, Human
guccugagcucagcgu

SEQ ID NO: 1438096 - RNA, 15 nt, Human
guccugagcucagcg

SEQ ID NO: 1438097 - RNA, 14 nt, Human
guccugagcucagc

SEQ ID NO: 1438098 - RNA, 13 nt, Human
guccugagcucag

SEQ ID NO: 1438099 - RNA, 18 nt, Human
guccugagccccagggag

SEQ ID NO: 1438100 - RNA, 23 nt, Human
guccugagcacugccaggaggga

SEQ ID NO: 1438101 - RNA, 22 nt, Human
guccugagcacugccaggaggg

SEQ ID NO: 1438102 - RNA, 21 nt, Human
guccugagcacugccaggagg

SEQ ID NO: 1438103 - RNA, 20 nt, Human
guccugagcacugccaggag

SEQ ID NO: 1438104 - RNA, 19 nt, Human
guccugagcacugccagga

SEQ ID NO: 1438105 - RNA, 18 nt, Human
guccugagcacugccagg

SEQ ID NO: 1438106 - RNA, 17 nt, Human
guccugagcacugccag

SEQ ID NO: 1438107 - RNA, 16 nt, Human
guccugagcacugcca

SEQ ID NO: 1438108 - RNA, 14 nt, Human
guccugagcacugc

SEQ ID NO: 1438109 - RNA, 13 nt, Human
guccugagcacug

SEQ ID NO: 1438110 - RNA, 16 nt, Human
guccugagaaagcuca

SEQ ID NO: 1438111 - RNA, 13 nt, Human
guccucuucuggg

SEQ ID NO: 1438112 - RNA, 20 nt, Human
guccucuucccucucugcag

SEQ ID NO: 1438113 - RNA, 19 nt, Human
guccucuucccucucugca

SEQ ID NO: 1438114 - RNA, 18 nt, Human
guccucuucccucucugc

SEQ ID NO: 1438115 - RNA, 18 nt, Human
guccucuuccaccacaga

SEQ ID NO: 1438116 - RNA, 15 nt, Human
guccugaccugucuc

SEQ ID NO: 1438117 - RNA, 16 nt, Human
guccugaccugucuca

SEQ ID NO: 1438118 - RNA, 23 nt, Human
guccucugucagucacagccacc

SEQ ID NO: 1438119 - RNA, 20 nt, Human
guccucugucagucacagcc

SEQ ID NO: 1438120 - RNA, 19 nt, Human
guccucugucagucacagc

SEQ ID NO: 1438121 - RNA, 18 nt, Human
guccucugucagucacag

SEQ ID NO: 1438122 - RNA, 19 nt, Human
guccucugagacuccagac

SEQ ID NO: 1438123 - RNA, 15 nt, Human
guccucugagacucc

SEQ ID NO: 1438124 - RNA, 16 nt, Human
aacauuugcuguuuua

SEQ ID NO: 1438125 - RNA, 15 nt, Human
aacauuugcuguuuu

SEQ ID NO: 1438126 - RNA, 14 nt, Human
aacauuugcuguuu

SEQ ID NO: 1438127 - RNA, 22 nt, Human
aacauuuguucuauagcuuuuc

SEQ ID NO: 1438128 - RNA, 18 nt, Human
aacagaacauagacagaa

SEQ ID NO: 1438129 - RNA, 13 nt, Human
aacagaacacuua

SEQ ID NO: 1438130 - RNA, 12 nt, Human
aacagaacacuu

SEQ ID NO: 1438131 - RNA, 21 nt, Human
aacagaaauuguauauuguaa

SEQ ID NO: 1438132 - RNA, 19 nt, Human
aacagaaauuguauauugu

SEQ ID NO: 1438133 - RNA, 18 nt, Human
aacagaaauuguauauug

SEQ ID NO: 1438134 - RNA, 17 nt, Human
aacagaaauuguauauu

SEQ ID NO: 1438135 - RNA, 15 nt, Human
aacagaaauuguaua

SEQ ID NO: 1438136 - RNA, 22 nt, Human
aacagaaagccugggugacauu

SEQ ID NO: 1438137 - RNA, 16 nt, Human
aacagaaacaaaaaca

SEQ ID NO: 1438138 - RNA, 21 nt, Human
aacagaaauguacagcaagga

SEQ ID NO: 1438139 - RNA, 10 nt, Human
aacagaaaug

SEQ ID NO: 1438140 - RNA, 11 nt, Human
aacagaaaugu

SEQ ID NO: 1438141 - RNA, 15 nt, Human
guccgaucuuugacu

SEQ ID NO: 1438142 - RNA, 13 nt, Human
aacagaaacaaaa

SEQ ID NO: 1438143 - RNA, 23 nt, Human
aacagaaaaauauguaccaagaa

SEQ ID NO: 1438144 - RNA, 18 nt, Human
guccggcagcuucugccc

SEQ ID NO: 1438145 - RNA, 15 nt, Human
guccggcagcuucug

SEQ ID NO: 1438146 - RNA, 22 nt, Human
guccgcugggugguacccucug

SEQ ID NO: 1438147 - RNA, 23 nt, Human
aacaguaaaccacugaaaaaaua

SEQ ID NO: 1438148 - RNA, 17 nt, Human
aacaguaaaccacugaa

SEQ ID NO: 1438149 - RNA, 16 nt, Human
aacaguaaaccacuga

SEQ ID NO: 1438150 - RNA, 15 nt, Human
aacaguaaaccacug

SEQ ID NO: 1438151 - RNA, 13 nt, Human
aacaguaaaccac

SEQ ID NO: 1438152 - RNA, 18 nt, Human
aacagugugcaaggcagc

SEQ ID NO: 1438153 - RNA, 19 nt, Human
aacagugugcaaggcagcc

SEQ ID NO: 1438154 - RNA, 16 nt, Human
aacagugugcaaggca

SEQ ID NO: 1438155 - RNA, 14 nt, Human
aacaguggaucaca

SEQ ID NO: 1438156 - RNA, 19 nt, Human
aacaguaaaccacugaaaa

SEQ ID NO: 1438157 - RNA, 18 nt, Human
aacaguaaaccacugaaa

SEQ ID NO: 1438158 - RNA, 20 nt, Human
aacaguuuaaugaagaucua

SEQ ID NO: 1438159 - RNA, 21 nt, Human
aacaguuuaaugaagaucuaa

SEQ ID NO: 1438160 - RNA, 18 nt, Human
aacaguuuaaugaagauc

SEQ ID NO: 1438161 - RNA, 15 nt, Human
aacaguuuaaugaag

SEQ ID NO: 1438162 - RNA, 13 nt, Human
aacaguuuaauga

SEQ ID NO: 1438163 - RNA, 20 nt, Human
aacaguuguauuuaacagaa

SEQ ID NO: 1438164 - RNA, 23 nt, Human
aacaguuguauuuaacagaaauu

SEQ ID NO: 1438165 - RNA, 21 nt, Human
aacaguugguaacuuuuguga

SEQ ID NO: 1438166 - RNA, 13 nt, Human
aacaguguuuaaa

SEQ ID NO: 1438167 - RNA, 13 nt, Human
aacaguuguauuu

SEQ ID NO: 1438168 - RNA, 22 nt, Human
aacaguugguaacuuuugugaa

SEQ ID NO: 1438169 - RNA, 19 nt, Human
aacaguuguguuugaagca

SEQ ID NO: 1438170 - RNA, 13 nt, Human
gucacagggcagu

SEQ ID NO: 1438171 - RNA, 12 nt, Human
gucacagggcag

SEQ ID NO: 1438172 - RNA, 11 nt, Human
gucacagggca

SEQ ID NO: 1438173 - RNA, 17 nt, Human
aaauuuuucuucuugag

SEQ ID NO: 1438174 - RNA, 23 nt, Human
aaauuuuuaaucuuuaauuuuac

SEQ ID NO: 1438175 - RNA, 17 nt, Human
aaauuuuuguaguagcg

SEQ ID NO: 1438176 - RNA, 20 nt, Human
aacaagaccacguuucuaaa

SEQ ID NO: 1438177 - RNA, 19 nt, Human
aacaagaccacguuucuaa

SEQ ID NO: 1438178 - RNA, 16 nt, Human
aacaagaccacguuuc

SEQ ID NO: 1438179 - RNA, 17 nt, Human
aacaagaccacguuucu

SEQ ID NO: 1438180 - RNA, 21 nt, Human
aacaagccuccuuuuaaagua

SEQ ID NO: 1438181 - RNA, 14 nt, Human
aacaaggaagucaa

SEQ ID NO: 1438182 - RNA, 15 nt, Human
aacaaggaugaauua

SEQ ID NO: 1438183 - RNA, 16 nt, Human
aacaauacaaauggau

SEQ ID NO: 1438184 - RNA, 15 nt, Human
aacaauacaaaugga

SEQ ID NO: 1438185 - RNA, 14 nt, Human
aacaauacaaaugg

SEQ ID NO: 1438186 - RNA, 13 nt, Human
aacaauacaaaug

SEQ ID NO: 1438187 - RNA, 17 nt, Human
aacaauacaaauggauu

SEQ ID NO: 1438188 - RNA, 18 nt, Human
aacaagucagucauucag

SEQ ID NO: 1438189 - RNA, 23 nt, Human
aacaaguauuuguuaauuuagaa

SEQ ID NO: 1438190 - RNA, 20 nt, Human
aacaaguauuuguuaauuua

SEQ ID NO: 1438191 - RNA, 12 nt, Human
aacaaguauuug

SEQ ID NO: 1438192 - RNA, 15 nt, Human
aacaagucagucauu

SEQ ID NO: 1438193 - RNA, 23 nt, Human
aacaauuuuaggaggaccagagc

SEQ ID NO: 1438194 - RNA, 19 nt, Human
aacaauuuggcaauuuugu

SEQ ID NO: 1438195 - RNA, 18 nt, Human
aacaauuuggcaauuuug

SEQ ID NO: 1438196 - RNA, 14 nt, Human
aacaauuuggcaau

SEQ ID NO: 1438197 - RNA, 22 nt, Human
aacaauuguguagccuuuuugu

SEQ ID NO: 1438198 - RNA, 16 nt, Human
aacaauuuaugaauug

SEQ ID NO: 1438199 - RNA, 13 nt, Human
aacaauuuaugaa

SEQ ID NO: 1438200 - RNA, 23 nt, Human
aacaauuguguagccuuuuugua

SEQ ID NO: 1438201 - RNA, 20 nt, Human
aacaauuguguagccuuuuu

SEQ ID NO: 1438202 - RNA, 18 nt, Human
aacaauuguguagccuuu

SEQ ID NO: 1438203 - RNA, 14 nt, Human
aacaaucuuccugu

SEQ ID NO: 1438204 - RNA, 18 nt, Human
aacaaugaaaacucuuug

SEQ ID NO: 1438205 - RNA, 15 nt, Human
aacaaugacauuuau

SEQ ID NO: 1438206 - RNA, 18 nt, Human
aacaaugacaaagcagau

SEQ ID NO: 1438207 - RNA, 17 nt, Human
aacaaugacaaagcaga

SEQ ID NO: 1438208 - RNA, 24 nt, Human
aacaaugaauaaaaacucaaggag

SEQ ID NO: 1438209 - RNA, 22 nt, Human
aacaaugaauaaaaacucaagg

SEQ ID NO: 1438210 - RNA, 17 nt, Human
aacaaucuuccuguuua

SEQ ID NO: 1438211 - RNA, 14 nt, Human
aacaaugcuguauu

SEQ ID NO: 1438212 - RNA, 19 nt, Human
aacacuguaguaaauaaug

SEQ ID NO: 1438213 - RNA, 19 nt, Human
aacacucuuuugcuuuauu

SEQ ID NO: 1438214 - RNA, 16 nt, Human
aacacucuuuugcuuu

SEQ ID NO: 1438215 - RNA, 22 nt, Human
aacacugccagcauuucccuuc

SEQ ID NO: 1438216 - RNA, 12 nt, Human
aacacugccagc

SEQ ID NO: 1438217 - RNA, 22 nt, Human
aacacugugcacaucugugucu

SEQ ID NO: 1438218 - RNA, 20 nt, Human
aacacugugcacaucugugu

SEQ ID NO: 1438219 - RNA, 22 nt, Human
aacacuguaguaaauaaugcuu

SEQ ID NO: 1438220 - RNA, 12 nt, Human
aacacucuuuug

SEQ ID NO: 1438221 - RNA, 22 nt, Human
gucauuugcugagcauguacug

SEQ ID NO: 1438222 - RNA, 22 nt, Human
guccaagauuccggauccuaag

SEQ ID NO: 1438223 - RNA, 21 nt, Human
gucauuugcugagcauguacu

SEQ ID NO: 1438224 - RNA, 12 nt, Human
aacacuuguaau

SEQ ID NO: 1438225 - RNA, 16 nt, Human
guccauuuacacguau

SEQ ID NO: 1438226 - RNA, 21 nt, Human
guccauuguccaauccuaugu

SEQ ID NO: 1438227 - RNA, 16 nt, Human
guccauuguccaaucc

SEQ ID NO: 1438228 - RNA, 20 nt, Human
guccacaaaauaaccaaucc

SEQ ID NO: 1438229 - RNA, 17 nt, Human
guccaauuaguuuccuu

SEQ ID NO: 1438230 - RNA, 16 nt, Human
guccaauuaguuuccu

SEQ ID NO: 1438231 - RNA, 23 nt, Human
guccaaugagcuuucugaacagc

SEQ ID NO: 1438232 - RNA, 12 nt, Human
guccaauguggc

SEQ ID NO: 1438233 - RNA, 21 nt, Human
guccaaugagcuuucugaaca

SEQ ID NO: 1438234 - RNA, 19 nt, Human
guccaaugagcuuucugaa

SEQ ID NO: 1438235 - RNA, 18 nt, Human
guccaaugagcuuucuga

SEQ ID NO: 1438236 - RNA, 17 nt, Human
guccaaugagcuuucug

SEQ ID NO: 1438237 - RNA, 16 nt, Human
guccaaugagcuuucu

SEQ ID NO: 1438238 - RNA, 15 nt, Human
guccaaugagcuuuc

SEQ ID NO: 1438239 - RNA, 17 nt, Human
guccaauccuauguuuu

SEQ ID NO: 1438240 - RNA, 12 nt, Human
guccaauccuau

SEQ ID NO: 1438241 - RNA, 21 nt, Human
guccaagguuuaaagagucua

SEQ ID NO: 1438242 - RNA, 20 nt, Human
guccaagguuuaaagagucu

SEQ ID NO: 1438243 - RNA, 15 nt, Human
guccaagcugggaga

SEQ ID NO: 1438244 - RNA, 21 nt, Human
guccaagcauuuagauguaua

SEQ ID NO: 1438245 - RNA, 16 nt, Human
gucuuuucccauuuau

SEQ ID NO: 1438246 - RNA, 19 nt, Human
gucuuaauuauuauuugug

SEQ ID NO: 1438247 - RNA, 19 nt, Human
gucuuauauauuguagaua

SEQ ID NO: 1438248 - RNA, 12 nt, Human
gucuuccugagu

SEQ ID NO: 1438249 - RNA, 19 nt, Human
gucuuccugacacuuuaau

SEQ ID NO: 1438250 - RNA, 18 nt, Human
gucuuccugacacuuuaa

SEQ ID NO: 1438251 - RNA, 14 nt, Human
gucuuccugacacu

SEQ ID NO: 1438252 - RNA, 14 nt, Human
gucuuccucugucu

SEQ ID NO: 1438253 - RNA, 21 nt, Human
gucuuaauuauuauuuguguu

SEQ ID NO: 1438254 - RNA, 18 nt, Human
gucuuaauuauuauuugu

SEQ ID NO: 1438255 - RNA, 13 nt, Human
gucuuaauuauua

SEQ ID NO: 1438256 - RNA, 21 nt, Human
gucuggcugguguuaacagaa

SEQ ID NO: 1438257 - RNA, 16 nt, Human
gucuggcugguguuaa

SEQ ID NO: 1438258 - RNA, 15 nt, Human
gucuggcugguguua

SEQ ID NO: 1438259 - RNA, 14 nt, Human
gucuggcugguguu

SEQ ID NO: 1438260 - RNA, 13 nt, Human
gucuggcuggugu

SEQ ID NO: 1438261 - RNA, 14 nt, Human
gucugcuguagaaa

SEQ ID NO: 1438262 - RNA, 16 nt, Human
gucugcuguuccagug

SEQ ID NO: 1438263 - RNA, 13 nt, Human
gucugcuguagaa

SEQ ID NO: 1438264 - RNA, 22 nt, Human
gucugcucuuucucugccagug

SEQ ID NO: 1438265 - RNA, 20 nt, Human
gucugcucuuucucugccag

SEQ ID NO: 1438266 - RNA, 19 nt, Human
gucugcucuuucucugcca

SEQ ID NO: 1438267 - RNA, 17 nt, Human
gucugcucuuucucugc

SEQ ID NO: 1438268 - RNA, 15 nt, Human
gucugcucuuucucu

SEQ ID NO: 1438269 - RNA, 21 nt, Human
gucugcucccaaggggccuga

SEQ ID NO: 1438270 - RNA, 19 nt, Human
gucugcucccaaggggccu

SEQ ID NO: 1438271 - RNA, 18 nt, Human
aaccucuucagaggcccu

SEQ ID NO: 1438272 - RNA, 12 nt, Human
gucugcucccaa

SEQ ID NO: 1438273 - RNA, 13 nt, Human
aacuacaguggcu

SEQ ID NO: 1438274 - RNA, 22 nt, Human
aacuacaugagaacaaacagau

SEQ ID NO: 1438275 - RNA, 13 nt, Human
aacuacaugagaa

SEQ ID NO: 1438276 - RNA, 14 nt, Human
aacuacagucuaaa

SEQ ID NO: 1438277 - RNA, 20 nt, Human
aacuacaaccaauggaaugu

SEQ ID NO: 1438278 - RNA, 13 nt, Human
aacuacaaaucaa

SEQ ID NO: 1438279 - RNA, 21 nt, Human
aacuacaaagguuuaaaugaa

SEQ ID NO: 1438280 - RNA, 20 nt, Human
aacuacaaagguuuaaauga

SEQ ID NO: 1438281 - RNA, 18 nt, Human
aacuacaaagguuuaaau

SEQ ID NO: 1438282 - RNA, 17 nt, Human
aacuacaaagguuuaaa

SEQ ID NO: 1438283 - RNA, 16 nt, Human
aacuacaaagguuuaa

SEQ ID NO: 1438284 - RNA, 15 nt, Human
aacuaauuuaguaau

SEQ ID NO: 1438285 - RNA, 23 nt, Human
aacuaauuuuuauuuuugcugag

SEQ ID NO: 1438286 - RNA, 15 nt, Human
aacuaaugccuuacu

SEQ ID NO: 1438287 - RNA, 12 nt, Human
aacuaaugccuu

SEQ ID NO: 1438288 - RNA, 14 nt, Human
aacuaauaauugca

SEQ ID NO: 1438289 - RNA, 21 nt, Human
aacuaaaugugcaauagaagg

SEQ ID NO: 1438290 - RNA, 20 nt, Human
aacuaaagugcugcacucaa

SEQ ID NO: 1438291 - RNA, 23 nt, Human
aacuaaacucuuaccauauguuu

SEQ ID NO: 1438292 - RNA, 18 nt, Human
aacuaaacucuuaccaua

SEQ ID NO: 1438293 - RNA, 17 nt, Human
aaccugcucuccucuuc

SEQ ID NO: 1438294 - RNA, 16 nt, Human
aaccugcucuccucuu

SEQ ID NO: 1438295 - RNA, 14 nt, Human
aaccugcucuccuc

SEQ ID NO: 1438296 - RNA, 13 nt, Human
aaccugcucuccu

SEQ ID NO: 1438297 - RNA, 19 nt, Human
aaccugccugacauuugga

SEQ ID NO: 1438298 - RNA, 23 nt, Human
aacucuauauuguucagcaugca

SEQ ID NO: 1438299 - RNA, 22 nt, Human
aacucuauauuguucagcaugc

SEQ ID NO: 1438300 - RNA, 15 nt, Human
aacucguuuuuuaca

SEQ ID NO: 1438301 - RNA, 19 nt, Human
aacucgugucuggcacagc

SEQ ID NO: 1438302 - RNA, 18 nt, Human
aacucguuaauuuguagu

SEQ ID NO: 1438303 - RNA, 15 nt, Human
aacucccauuaccau

SEQ ID NO: 1438304 - RNA, 21 nt, Human
aacucccauuaccauguaaug

SEQ ID NO: 1438305 - RNA, 14 nt, Human
aacuaggaucagaa

SEQ ID NO: 1438306 - RNA, 23 nt, Human
aacuaggagcuuugacucaggag

SEQ ID NO: 1438307 - RNA, 22 nt, Human
aacuaggagcuuugacucagga

SEQ ID NO: 1438308 - RNA, 15 nt, Human
aacuaggaaguggcu

SEQ ID NO: 1438309 - RNA, 21 nt, Human
aacuccagaaagugacaagcu

SEQ ID NO: 1438310 - RNA, 15 nt, Human
aacuagcauuguaaa

SEQ ID NO: 1438311 - RNA, 19 nt, Human
aacuagcauaucugccuuu

SEQ ID NO: 1438312 - RNA, 14 nt, Human
aacuagcauaucug

SEQ ID NO: 1438313 - RNA, 17 nt, Human
aacuagcauaucugccu

SEQ ID NO: 1438314 - RNA, 18 nt, Human
aacuagcauaucugccuu

SEQ ID NO: 1438315 - RNA, 13 nt, Human
aacuagccccugg

SEQ ID NO: 1438316 - RNA, 16 nt, Human
aacuagccccuggggu

SEQ ID NO: 1438317 - RNA, 14 nt, Human
aacuccagaaagug

SEQ ID NO: 1438318 - RNA, 19 nt, Human
aaccccaacuacuguguua

SEQ ID NO: 1438319 - RNA, 20 nt, Human
aacccaucaacaaaaauugu

SEQ ID NO: 1438320 - RNA, 21 nt, Human
aacccauauuguaaaacaggu

SEQ ID NO: 1438321 - RNA, 17 nt, Human
aacccauauuguaaaac

SEQ ID NO: 1438322 - RNA, 15 nt, Human
aacccaguugccauc

SEQ ID NO: 1438323 - RNA, 20 nt, Human
aacccagguuggcgacugca

SEQ ID NO: 1438324 - RNA, 20 nt, Human
aacccagcucccuucuuccc

SEQ ID NO: 1438325 - RNA, 17 nt, Human
aaccaugucauuucaga

SEQ ID NO: 1438326 - RNA, 17 nt, Human
aaccauguagaaaauuu

SEQ ID NO: 1438327 - RNA, 14 nt, Human
aaccacauggcaca

SEQ ID NO: 1438328 - RNA, 16 nt, Human
aaccucagccuggcca

SEQ ID NO: 1438329 - RNA, 14 nt, Human
aaccucagccuggc

SEQ ID NO: 1438330 - RNA, 13 nt, Human
aaccucagccugg

SEQ ID NO: 1438331 - RNA, 12 nt, Human
aaccucagccug

SEQ ID NO: 1438332 - RNA, 11 nt, Human
aaccucagccu

SEQ ID NO: 1438333 - RNA, 17 nt, Human
aaccucaccaacuccua

SEQ ID NO: 1438334 - RNA, 20 nt, Human
aaccucaccaacuccuaguu

SEQ ID NO: 1438335 - RNA, 18 nt, Human
aaccucaacugccuacuc

SEQ ID NO: 1438336 - RNA, 17 nt, Human
aaccucaacugccuacu

SEQ ID NO: 1438337 - RNA, 16 nt, Human
aaccucaacugccuac

SEQ ID NO: 1438338 - RNA, 15 nt, Human
aaccccagacacugg

SEQ ID NO: 1438339 - RNA, 22 nt, Human
aaccuauuucuuaaacacuugc

SEQ ID NO: 1438340 - RNA, 14 nt, Human
aaccccccagauau

SEQ ID NO: 1438341 - RNA, 22 nt, Human
aaccuaugauauuuucugugcc

SEQ ID NO: 1438342 - RNA, 16 nt, Human
aaccccccagauauca

SEQ ID NO: 1438343 - RNA, 20 nt, Human
aaccuagggugauauuaacc

SEQ ID NO: 1438344 - RNA, 17 nt, Human
aaccacauggcacagag

SEQ ID NO: 1438345 - RNA, 20 nt, Human
aaccacauuggagauguuua

SEQ ID NO: 1438346 - RNA, 14 nt, Human
aaccaauuauuuuc

SEQ ID NO: 1438347 - RNA, 17 nt, Human
aaccacacccacacuca

SEQ ID NO: 1438348 - RNA, 13 nt, Human
aaccaauuauuuu

SEQ ID NO: 1438349 - RNA, 16 nt, Human
aaccaaagaagaaagu

SEQ ID NO: 1438350 - RNA, 20 nt, Human
aaccaauccuaugcaugguu

SEQ ID NO: 1438351 - RNA, 13 nt, Human
aaccaauccugga

SEQ ID NO: 1438352 - RNA, 19 nt, Human
aaccaauccuaugcauggu

SEQ ID NO: 1438353 - RNA, 10 nt, Human
aaccaaguuc

SEQ ID NO: 1438354 - RNA, 20 nt, Human
gucucccccaacagcuggac

SEQ ID NO: 1438355 - RNA, 23 nt, Human
gucucccccaacagcuggacccu

SEQ ID NO: 1438356 - RNA, 18 nt, Human
gucucccccaacagcugg

SEQ ID NO: 1438357 - RNA, 23 nt, Human
gucucaugccaguaacaggcuca

SEQ ID NO: 1438358 - RNA, 22 nt, Human
gucucaugccaguaacaggcuc

SEQ ID NO: 1438359 - RNA, 22 nt, Human
gucucaucuggggagcaggcag

SEQ ID NO: 1438360 - RNA, 15 nt, Human
gucucaucuggggag

SEQ ID NO: 1438361 - RNA, 13 nt, Human
gucucaucugggg

SEQ ID NO: 1438362 - RNA, 16 nt, Human
gucucauccaucauca

SEQ ID NO: 1438363 - RNA, 15 nt, Human
gucucauccaucauc

SEQ ID NO: 1438364 - RNA, 14 nt, Human
gucucaguuucuug

SEQ ID NO: 1438365 - RNA, 21 nt, Human
gucucaguuugugugucuuaa

SEQ ID NO: 1438366 - RNA, 19 nt, Human
gucucaguuugugugucuu

SEQ ID NO: 1438367 - RNA, 18 nt, Human
gucucaguuugugugucu

SEQ ID NO: 1438368 - RNA, 15 nt, Human
gucucagugaagacu

SEQ ID NO: 1438369 - RNA, 16 nt, Human
gucucagugaagacua

SEQ ID NO: 1438370 - RNA, 19 nt, Human
aacauuuuugauaaagccu

SEQ ID NO: 1438371 - RNA, 16 nt, Human
gucucccuccucugcc

SEQ ID NO: 1438372 - RNA, 12 nt, Human
gucucccuccuc

SEQ ID NO: 1438373 - RNA, 17 nt, Human
gucuccuaagcaccugu

SEQ ID NO: 1438374 - RNA, 16 nt, Human
gucuccuaagcaccug

SEQ ID NO: 1438375 - RNA, 20 nt, Human
gucuccuaagcuggagugca

SEQ ID NO: 1438376 - RNA, 19 nt, Human
gucaaaaagaaccacuugu

SEQ ID NO: 1438377 - RNA, 17 nt, Human
guauuuuuuuacuaaua

SEQ ID NO: 1438378 - RNA, 21 nt, Human
guauuuuuuuacuaauagaca

SEQ ID NO: 1438379 - RNA, 14 nt, Human
gucaaaaauuaaac

SEQ ID NO: 1438380 - RNA, 14 nt, Human
gucaaaaagaacca

SEQ ID NO: 1438381 - RNA, 13 nt, Human
gucaaaaauuaaa

SEQ ID NO: 1438382 - RNA, 23 nt, Human
gucaaaaauuaaaccggaccauc

SEQ ID NO: 1438383 - RNA, 13 nt, Human
gucacacacugau

SEQ ID NO: 1438384 - RNA, 20 nt, Human
gucacaaugagauugaauuu

SEQ ID NO: 1438385 - RNA, 14 nt, Human
gucacaaccaagaa

SEQ ID NO: 1438386 - RNA, 17 nt, Human
gucaacucuuuguuauu

SEQ ID NO: 1438387 - RNA, 19 nt, Human
gucaacucauauuuucaug

SEQ ID NO: 1438388 - RNA, 21 nt, Human
gucaacgagacguuuccuacc

SEQ ID NO: 1438389 - RNA, 19 nt, Human
gucaaccugggcaaagccu

SEQ ID NO: 1438390 - RNA, 14 nt, Human
gucaaccugggcaa

SEQ ID NO: 1438391 - RNA, 22 nt, Human
gucaacaguuuuccuaugcuuu

SEQ ID NO: 1438392 - RNA, 21 nt, Human
gucaacaguuuuccuaugcuu

SEQ ID NO: 1438393 - RNA, 14 nt, Human
gucaacaguuuucc

SEQ ID NO: 1438394 - RNA, 14 nt, Human
gucaacaguaaacc

SEQ ID NO: 1438395 - RNA, 22 nt, Human
gucaaaugguaggcauuuccua

SEQ ID NO: 1438396 - RNA, 22 nt, Human
gucaaaugcauacaaguuucau

SEQ ID NO: 1438397 - RNA, 16 nt, Human
gucaaauugugugaaa

SEQ ID NO: 1438398 - RNA, 12 nt, Human
aaauuucagauu

SEQ ID NO: 1438399 - RNA, 16 nt, Human
aaauuuauauuguaaa

SEQ ID NO: 1438400 - RNA, 10 nt, Human
aaauuuauaa

SEQ ID NO: 1438401 - RNA, 22 nt, Human
aaauuuagcauuguagugcuuu

SEQ ID NO: 1438402 - RNA, 21 nt, Human
aaauuuagcauuguagugcuu

SEQ ID NO: 1438403 - RNA, 22 nt, Human
aaauuuccugggagcuuuugua

SEQ ID NO: 1438404 - RNA, 12 nt, Human
aaauuucuaaau

SEQ ID NO: 1438405 - RNA, 14 nt, Human
guauuuuuuuacua

SEQ ID NO: 1438406 - RNA, 15 nt, Human
guauuuuuuuacuaa

SEQ ID NO: 1438407 - RNA, 17 nt, Human
aaauuuacaucauuucu

SEQ ID NO: 1438408 - RNA, 16 nt, Human
aaauuuagcauuguag

SEQ ID NO: 1438409 - RNA, 13 nt, Human
aaauuuagcauug

SEQ ID NO: 1438410 - RNA, 20 nt, Human
aaauuuaguauuuuguuuca

SEQ ID NO: 1438411 - RNA, 18 nt, Human
aaauucccuucaucugga

SEQ ID NO: 1438412 - RNA, 17 nt, Human
aaauuucagcagcugca

SEQ ID NO: 1438413 - RNA, 18 nt, Human
aaauuucagcagcugcag

SEQ ID NO: 1438414 - RNA, 20 nt, Human
aaauuagacugugauucaga

SEQ ID NO: 1438415 - RNA, 17 nt, Human
aaauuacuuugugaaua

SEQ ID NO: 1438416 - RNA, 14 nt, Human
aaauuacuuuguga

SEQ ID NO: 1438417 - RNA, 14 nt, Human
aaauuagaugaacu

SEQ ID NO: 1438418 - RNA, 22 nt, Human
aaauuaucaggcaaauuugcau

SEQ ID NO: 1438419 - RNA, 23 nt, Human
aaauuaucaggcaaauuugcauu

SEQ ID NO: 1438420 - RNA, 22 nt, Human
aaauucacccccuuuccuggac

SEQ ID NO: 1438421 - RNA, 15 nt, Human
aaauucagcauuuga

SEQ ID NO: 1438422 - RNA, 13 nt, Human
aaauucagcauuu

SEQ ID NO: 1438423 - RNA, 12 nt, Human
aaauucagcaaa

SEQ ID NO: 1438424 - RNA, 19 nt, Human
aaauucauuuuuuaaauuc

SEQ ID NO: 1438425 - RNA, 13 nt, Human
aaauucauuuuuu

SEQ ID NO: 1438426 - RNA, 14 nt, Human
aaauucaguuucau

SEQ ID NO: 1438427 - RNA, 13 nt, Human
aaauucaguuuca

SEQ ID NO: 1438428 - RNA, 17 nt, Human
aaauucccguuuuguca

SEQ ID NO: 1438429 - RNA, 16 nt, Human
aaauucccuucaucug

SEQ ID NO: 1438430 - RNA, 19 nt, Human
aaauucccuucaucuggaa

SEQ ID NO: 1438431 - RNA, 20 nt, Human
aaauguuauuuuuuaauuau

SEQ ID NO: 1438432 - RNA, 16 nt, Human
aaauguuauuaucugg

SEQ ID NO: 1438433 - RNA, 21 nt, Human
aaauuaacuuuuauaaacuuu

SEQ ID NO: 1438434 - RNA, 17 nt, Human
aaauguuaucuucucaa

SEQ ID NO: 1438435 - RNA, 23 nt, Human
aaauguuaucuucucaaguucua

SEQ ID NO: 1438436 - RNA, 18 nt, Human
aaauguuaucuucucaag

SEQ ID NO: 1438437 - RNA, 22 nt, Human
aaauguuaugacuauguaaacu

SEQ ID NO: 1438438 - RNA, 23 nt, Human
aaauuacuguuuauuaaaguaca

SEQ ID NO: 1438439 - RNA, 13 nt, Human
aaauuacuguuua

SEQ ID NO: 1438440 - RNA, 18 nt, Human
aaauuaccuguggauauu

SEQ ID NO: 1438441 - RNA, 15 nt, Human
aaauuaccuguggau

SEQ ID NO: 1438442 - RNA, 22 nt, Human
aaauuaacuuuuauaaacuuua

SEQ ID NO: 1438443 - RNA, 23 nt, Human
aaauuaacuuuuauaaacuuuac

SEQ ID NO: 1438444 - RNA, 20 nt, Human
guauuuaacagaaauuguau

SEQ ID NO: 1438445 - RNA, 21 nt, Human
guauuuaacagaaauuguaua

SEQ ID NO: 1438446 - RNA, 19 nt, Human
guauuuaacagaaauugua

SEQ ID NO: 1438447 - RNA, 20 nt, Human
guauugggguuauuuucugg

SEQ ID NO: 1438448 - RNA, 20 nt, Human
guauuuaauagguuuggaca

SEQ ID NO: 1438449 - RNA, 12 nt, Human
guauuuaauuag

SEQ ID NO: 1438450 - RNA, 22 nt, Human
guauuggcuagagguucaaaga

SEQ ID NO: 1438451 - RNA, 16 nt, Human
guauuuaauucauguu

SEQ ID NO: 1438452 - RNA, 18 nt, Human
guauuuaauuagugcuaa

SEQ ID NO: 1438453 - RNA, 19 nt, Human
guauuuaauuagugcuaag

SEQ ID NO: 1438454 - RNA, 20 nt, Human
guauuuaauuagugcuaagu

SEQ ID NO: 1438455 - RNA, 21 nt, Human
guauuuaauuagugcuaagug

SEQ ID NO: 1438456 - RNA, 14 nt, Human
aaauguuaaaaugu

SEQ ID NO: 1438457 - RNA, 22 nt, Human
aaauggggccagauccagccug

SEQ ID NO: 1438458 - RNA, 21 nt, Human
aaauggggccagauccagccu

SEQ ID NO: 1438459 - RNA, 17 nt, Human
aaauggggccagaucca

SEQ ID NO: 1438460 - RNA, 16 nt, Human
aaauggggccagaucc

SEQ ID NO: 1438461 - RNA, 13 nt, Human
aaauggggccaga

SEQ ID NO: 1438462 - RNA, 20 nt, Human
aaaugggcacuuaaagcuuu

SEQ ID NO: 1438463 - RNA, 15 nt, Human
aaaugggcacuuaaa

SEQ ID NO: 1438464 - RNA, 15 nt, Human
aaaugggggugcauu

SEQ ID NO: 1438465 - RNA, 16 nt, Human
aaaugggggugcauuu

SEQ ID NO: 1438466 - RNA, 17 nt, Human
aaaugggggugcauuug

SEQ ID NO: 1438467 - RNA, 18 nt, Human
aaaugggggugcauuuga

SEQ ID NO: 1438468 - RNA, 19 nt, Human
aaaugggggugcauuugag

SEQ ID NO: 1438469 - RNA, 19 nt, Human
aaauguagaguuuuuaaac

SEQ ID NO: 1438470 - RNA, 20 nt, Human
aaauguaggcuuaguuugug

SEQ ID NO: 1438471 - RNA, 20 nt, Human
guaguucugcuccagacagg

SEQ ID NO: 1438472 - RNA, 16 nt, Human
guaguucugcuccaga

SEQ ID NO: 1438473 - RNA, 13 nt, Human
guaguucuaagac

SEQ ID NO: 1438474 - RNA, 23 nt, Human
guaguuccacuuauagccucugu

SEQ ID NO: 1438475 - RNA, 22 nt, Human
guaguuccacuuauagccucug

SEQ ID NO: 1438476 - RNA, 15 nt, Human
guaguucauguaaau

SEQ ID NO: 1438477 - RNA, 17 nt, Human
guauaaaagccuguuua

SEQ ID NO: 1438478 - RNA, 12 nt, Human
guauaaaagaug

SEQ ID NO: 1438479 - RNA, 16 nt, Human
guauaaaugucuuuaa

SEQ ID NO: 1438480 - RNA, 17 nt, Human
guauaaagaauuguggu

SEQ ID NO: 1438481 - RNA, 16 nt, Human
guauaaacugauggau

SEQ ID NO: 1438482 - RNA, 23 nt, Human
guauaaacaagaaaaauaaagaa

SEQ ID NO: 1438483 - RNA, 22 nt, Human
guauaaacaagaaaaauaaaga

SEQ ID NO: 1438484 - RNA, 17 nt, Human
guauaaacaagaaaaau

SEQ ID NO: 1438485 - RNA, 16 nt, Human
guauaaacaagaaaaa

SEQ ID NO: 1438486 - RNA, 15 nt, Human
guauaaacaagaaaa

SEQ ID NO: 1438487 - RNA, 18 nt, Human
guauaaaagccuguuuaa

SEQ ID NO: 1438488 - RNA, 21 nt, Human
guauaaaagccuguuuaagag

SEQ ID NO: 1438489 - RNA, 18 nt, Human
guauaaaagggacugaga

SEQ ID NO: 1438490 - RNA, 13 nt, Human
guauaaaagaugg

SEQ ID NO: 1438491 - RNA, 23 nt, Human
guauaaaagauggggucuguaaa

SEQ ID NO: 1438492 - RNA, 15 nt, Human
guauaaaaucagcca

SEQ ID NO: 1438493 - RNA, 17 nt, Human
guauaaaaucagccaau

SEQ ID NO: 1438494 - RNA, 23 nt, Human
guauaaaaucagccaauuauguu

SEQ ID NO: 1438495 - RNA, 18 nt, Human
guauaaaugucuuuaaug

SEQ ID NO: 1438496 - RNA, 18 nt, Human
guauaagauccuagaucc

SEQ ID NO: 1438497 - RNA, 22 nt, Human
guauaagauccuagauccuaag

SEQ ID NO: 1438498 - RNA, 14 nt, Human
guauaagauccuag

SEQ ID NO: 1438499 - RNA, 17 nt, Human
guauauuacaaugauca

SEQ ID NO: 1438500 - RNA, 15 nt, Human
guauauuacaaugau

SEQ ID NO: 1438501 - RNA, 18 nt, Human
guauauuacaaugaucac

SEQ ID NO: 1438502 - RNA, 23 nt, Human
guauauucaggacuugaaagaaa

SEQ ID NO: 1438503 - RNA, 12 nt, Human
guauauucagga

SEQ ID NO: 1438504 - RNA, 12 nt, Human
guauauucacuu

SEQ ID NO: 1438505 - RNA, 22 nt, Human
guauauugauccagaaagaaaa

SEQ ID NO: 1438506 - RNA, 14 nt, Human
guauccccccaucu

SEQ ID NO: 1438507 - RNA, 22 nt, Human
guaucaggacccagaggaaggg

SEQ ID NO: 1438508 - RNA, 21 nt, Human
guaucaggacccagaggaagg

SEQ ID NO: 1438509 - RNA, 18 nt, Human
guaucaggacccagagga

SEQ ID NO: 1438510 - RNA, 14 nt, Human
guaucaggacccag

SEQ ID NO: 1438511 - RNA, 13 nt, Human
guauccccugcag

SEQ ID NO: 1438512 - RNA, 18 nt, Human
guauccccccaucuugcu

SEQ ID NO: 1438513 - RNA, 17 nt, Human
guauccccccaucuugc

SEQ ID NO: 1438514 - RNA, 15 nt, Human
guaucccuacuguaa

SEQ ID NO: 1438515 - RNA, 19 nt, Human
guauggcguaaguacagag

SEQ ID NO: 1438516 - RNA, 18 nt, Human
guauggcguaaguacaga

SEQ ID NO: 1438517 - RNA, 15 nt, Human
guauggccuguguca

SEQ ID NO: 1438518 - RNA, 14 nt, Human
guauggccuguguc

SEQ ID NO: 1438519 - RNA, 18 nt, Human
guauggacuaucugucug

SEQ ID NO: 1438520 - RNA, 24 nt, Human
guauggcguaaguacagagaagcc

SEQ ID NO: 1438521 - RNA, 23 nt, Human
guauggcguaaguacagagaagc

SEQ ID NO: 1438522 - RNA, 22 nt, Human
guauggcguaaguacagagaag

SEQ ID NO: 1438523 - RNA, 21 nt, Human
guauggcguaaguacagagaa

SEQ ID NO: 1438524 - RNA, 20 nt, Human
guauggcguaaguacagaga

SEQ ID NO: 1438525 - RNA, 13 nt, Human
guauggaaauaaa

SEQ ID NO: 1438526 - RNA, 19 nt, Human
guaugcacaugaacuuaga

SEQ ID NO: 1438527 - RNA, 15 nt, Human
guaugcagggagcug

SEQ ID NO: 1438528 - RNA, 21 nt, Human
guaugauuacuggccuuuuuc

SEQ ID NO: 1438529 - RNA, 19 nt, Human
guaugaucggcaggacacc

SEQ ID NO: 1438530 - RNA, 14 nt, Human
guaugauucccagc

SEQ ID NO: 1438531 - RNA, 21 nt, Human
guauugcacauuguaaaaagu

SEQ ID NO: 1438532 - RNA, 18 nt, Human
guauugcacauuguaaaa

SEQ ID NO: 1438533 - RNA, 16 nt, Human
guauugcacauuguaa

SEQ ID NO: 1438534 - RNA, 14 nt, Human
guauugcacauugu

SEQ ID NO: 1438535 - RNA, 13 nt, Human
guauugcacauug

SEQ ID NO: 1438536 - RNA, 16 nt, Human
guauucuucucuuccu

SEQ ID NO: 1438537 - RNA, 22 nt, Human
guauucuucucuuccuuuuauc

SEQ ID NO: 1438538 - RNA, 18 nt, Human
guauucugggguauggcg

SEQ ID NO: 1438539 - RNA, 19 nt, Human
guauucucugagcugugca

SEQ ID NO: 1438540 - RNA, 13 nt, Human
guauucucugagc

SEQ ID NO: 1438541 - RNA, 12 nt, Human
guauucucugag

SEQ ID NO: 1438542 - RNA, 11 nt, Human
guauucucuga

SEQ ID NO: 1438543 - RNA, 17 nt, Human
guaugucugguucucaa

SEQ ID NO: 1438544 - RNA, 22 nt, Human
guaugucugguucucaauucca

SEQ ID NO: 1438545 - RNA, 14 nt, Human
guaugucugguucu

SEQ ID NO: 1438546 - RNA, 15 nt, Human
guauggugcaaugug

SEQ ID NO: 1438547 - RNA, 19 nt, Human
guauggguaggguaaauca

SEQ ID NO: 1438548 - RNA, 21 nt, Human
guauggguuagggaaaacauu

SEQ ID NO: 1438549 - RNA, 22 nt, Human
aaaugccaaauuaaaaaagaua

SEQ ID NO: 1438550 - RNA, 17 nt, Human
aaaugccaaauuaaaaa

SEQ ID NO: 1438551 - RNA, 16 nt, Human
aaaugccaaauuaaaa

SEQ ID NO: 1438552 - RNA, 14 nt, Human
aaaugcauuucuaa

SEQ ID NO: 1438553 - RNA, 22 nt, Human
aaaugccaugaugccucugucu

SEQ ID NO: 1438554 - RNA, 18 nt, Human
aaaugccaaauuaaaaaa

SEQ ID NO: 1438555 - RNA, 19 nt, Human
aaauggcuuccuggcaaua

SEQ ID NO: 1438556 - RNA, 23 nt, Human
aaaugccuuacccucauguucuu

SEQ ID NO: 1438557 - RNA, 14 nt, Human
aaaugauuguagua

SEQ ID NO: 1438558 - RNA, 17 nt, Human
aaaugauuacuaaggaa

SEQ ID NO: 1438559 - RNA, 15 nt, Human
aaaugauucuuagug

SEQ ID NO: 1438560 - RNA, 13 nt, Human
aaaugaucuaaac

SEQ ID NO: 1438561 - RNA, 14 nt, Human
aaaugcaaauaaca

SEQ ID NO: 1438562 - RNA, 19 nt, Human
aaaugcaaaaacucuuuga

SEQ ID NO: 1438563 - RNA, 14 nt, Human
aaaugcaccuggaa

SEQ ID NO: 1438564 - RNA, 15 nt, Human
aaaugcauaaaugca

SEQ ID NO: 1438565 - RNA, 18 nt, Human
aaaugcaccuggaauaua

SEQ ID NO: 1438566 - RNA, 22 nt, Human
aaaugcaccuggaauauauaac

SEQ ID NO: 1438567 - RNA, 20 nt, Human
aaaugcauuauaggaucauu

SEQ ID NO: 1438568 - RNA, 13 nt, Human
aaaugcauguugc

SEQ ID NO: 1438569 - RNA, 15 nt, Human
aaaugaguaacauuu

SEQ ID NO: 1438570 - RNA, 18 nt, Human
aaaugaguaacauuugcu

SEQ ID NO: 1438571 - RNA, 14 nt, Human
aaaugaguaacauu

SEQ ID NO: 1438572 - RNA, 13 nt, Human
aaaugaguaacau

SEQ ID NO: 1438573 - RNA, 12 nt, Human
aaaugaguaaca

SEQ ID NO: 1438574 - RNA, 20 nt, Human
aaaugaggccauggacucug

SEQ ID NO: 1438575 - RNA, 19 nt, Human
aaaugaggccauggacucu

SEQ ID NO: 1438576 - RNA, 13 nt, Human
aaaugagccauga

SEQ ID NO: 1438577 - RNA, 13 nt, Human
aaaugagaaaucu

SEQ ID NO: 1438578 - RNA, 14 nt, Human
aaaugagaaaucua

SEQ ID NO: 1438579 - RNA, 16 nt, Human
aaaugagaaaucuaaa

SEQ ID NO: 1438580 - RNA, 11 nt, Human
aaaugaagaaa

SEQ ID NO: 1438581 - RNA, 13 nt, Human
aaaugaacaagag

SEQ ID NO: 1438582 - RNA, 21 nt, Human
aaaugaacaagagaagcauuc

SEQ ID NO: 1438583 - RNA, 14 nt, Human
aaaugaaagcuacu

SEQ ID NO: 1438584 - RNA, 13 nt, Human
aaaugaaagcuac

SEQ ID NO: 1438585 - RNA, 21 nt, Human
aaaugacaaucauguguguua

SEQ ID NO: 1438586 - RNA, 19 nt, Human
aaaugacaaucaugugugu

SEQ ID NO: 1438587 - RNA, 17 nt, Human
aaaugacaaucaugugu

SEQ ID NO: 1438588 - RNA, 16 nt, Human
aaaugacaaucaugug

SEQ ID NO: 1438589 - RNA, 23 nt, Human
aaaugaauggaggaacuuuccaa

SEQ ID NO: 1438590 - RNA, 23 nt, Human
aaaugacacucauauaauuauau

SEQ ID NO: 1438591 - RNA, 20 nt, Human
aaaugacacucauauaauua

SEQ ID NO: 1438592 - RNA, 11 nt, Human
aaaugagaaau

SEQ ID NO: 1438593 - RNA, 17 nt, Human
aaaucuaccacuguaug

SEQ ID NO: 1438594 - RNA, 14 nt, Human
aaaucuacaguaca

SEQ ID NO: 1438595 - RNA, 13 nt, Human
aaaucuaccacug

SEQ ID NO: 1438596 - RNA, 17 nt, Human
aaaugaaaaugucuugu

SEQ ID NO: 1438597 - RNA, 16 nt, Human
aaaugaaaaugucuug

SEQ ID NO: 1438598 - RNA, 15 nt, Human
aaaugaaaaugucuu

SEQ ID NO: 1438599 - RNA, 15 nt, Human
aaaucucaaauuucu

SEQ ID NO: 1438600 - RNA, 16 nt, Human
aaaucucaaauuucua

SEQ ID NO: 1438601 - RNA, 17 nt, Human
aaaucucaaauuucuaa

SEQ ID NO: 1438602 - RNA, 19 nt, Human
aaaucucaaauuucuaaau

SEQ ID NO: 1438603 - RNA, 21 nt, Human
aaauccuuagaucuggcaugu

SEQ ID NO: 1438604 - RNA, 22 nt, Human
guaggccaagguguccuacaga

SEQ ID NO: 1438605 - RNA, 20 nt, Human
aaaucgaaugaaauuaacug

SEQ ID NO: 1438606 - RNA, 13 nt, Human
aaaucgaaugaaa

SEQ ID NO: 1438607 - RNA, 19 nt, Human
aaauccuuagaucuggcau

SEQ ID NO: 1438608 - RNA, 16 nt, Human
aaauccuuuacuguua

SEQ ID NO: 1438609 - RNA, 14 nt, Human
aaauccuugaagau

SEQ ID NO: 1438610 - RNA, 17 nt, Human
guagcugggacuacagg

SEQ ID NO: 1438611 - RNA, 21 nt, Human
guagcugugaccugcugagcu

SEQ ID NO: 1438612 - RNA, 20 nt, Human
guagcugugaccugcugagc

SEQ ID NO: 1438613 - RNA, 19 nt, Human
guagcugugaccugcugag

SEQ ID NO: 1438614 - RNA, 18 nt, Human
guagcugugaccugcuga

SEQ ID NO: 1438615 - RNA, 17 nt, Human
guagcugugaccugcug

SEQ ID NO: 1438616 - RNA, 16 nt, Human
guagcugugaccugcu

SEQ ID NO: 1438617 - RNA, 15 nt, Human
guagcugugaccugc

SEQ ID NO: 1438618 - RNA, 14 nt, Human
guagcugugaccug

SEQ ID NO: 1438619 - RNA, 13 nt, Human
guagcugugaccu

SEQ ID NO: 1438620 - RNA, 23 nt, Human
guagcuggggcuuugauguuccu

SEQ ID NO: 1438621 - RNA, 12 nt, Human
guagcuggggcu

SEQ ID NO: 1438622 - RNA, 15 nt, Human
aaaggaguuuauguu

SEQ ID NO: 1438623 - RNA, 22 nt, Human
guagcugagcucacaaggcagc

SEQ ID NO: 1438624 - RNA, 21 nt, Human
guagcugagcucacaaggcag

SEQ ID NO: 1438625 - RNA, 13 nt, Human
guagcugagcuca

SEQ ID NO: 1438626 - RNA, 12 nt, Human
guagcugagcuc

SEQ ID NO: 1438627 - RNA, 11 nt, Human
guagcugagcu

SEQ ID NO: 1438628 - RNA, 21 nt, Human
guagcucuuugucagggagug

SEQ ID NO: 1438629 - RNA, 20 nt, Human
guagcucuuugucagggagu

SEQ ID NO: 1438630 - RNA, 19 nt, Human
guagcucuuugucagggag

SEQ ID NO: 1438631 - RNA, 14 nt, Human
aaaggaugcacaga

SEQ ID NO: 1438632 - RNA, 21 nt, Human
aaaggaguuuauguuccauua

SEQ ID NO: 1438633 - RNA, 11 nt, Human
aaaggaguuua

SEQ ID NO: 1438634 - RNA, 16 nt, Human
aaaggagucaaaacua

SEQ ID NO: 1438635 - RNA, 23 nt, Human
aaaggagccugugaacccaggac

SEQ ID NO: 1438636 - RNA, 21 nt, Human
aaaggacuccugaaaaaaaac

SEQ ID NO: 1438637 - RNA, 13 nt, Human
aaaggacuguaau

SEQ ID NO: 1438638 - RNA, 19 nt, Human
guaggaccaagcaucuugg

SEQ ID NO: 1438639 - RNA, 15 nt, Human
guaggaaguaggaag

SEQ ID NO: 1438640 - RNA, 13 nt, Human
guaggaaaugugg

SEQ ID NO: 1438641 - RNA, 12 nt, Human
guagcuuugcuc

SEQ ID NO: 1438642 - RNA, 16 nt, Human
guaggaaagaggaagc

SEQ ID NO: 1438643 - RNA, 17 nt, Human
guaggagggugggaagg

SEQ ID NO: 1438644 - RNA, 16 nt, Human
guaggagggugggaag

SEQ ID NO: 1438645 - RNA, 21 nt, Human
guaggagggacugucgcugcu

SEQ ID NO: 1438646 - RNA, 18 nt, Human
guaggagcccagcucuga

SEQ ID NO: 1438647 - RNA, 20 nt, Human
guaggagacuguuuggaaau

SEQ ID NO: 1438648 - RNA, 19 nt, Human
guaggagacuguuuggaaa

SEQ ID NO: 1438649 - RNA, 14 nt, Human
guaggauuuuuguu

SEQ ID NO: 1438650 - RNA, 23 nt, Human
guaggccaagguguccuacagaa

SEQ ID NO: 1438651 - RNA, 20 nt, Human
guaggccaagguguccuaca

SEQ ID NO: 1438652 - RNA, 18 nt, Human
guaggccaagguguccua

SEQ ID NO: 1438653 - RNA, 12 nt, Human
guaggccaaggu

SEQ ID NO: 1438654 - RNA, 14 nt, Human
guaggcauuuccua

SEQ ID NO: 1438655 - RNA, 18 nt, Human
guaggcaggauuggggaa

SEQ ID NO: 1438656 - RNA, 13 nt, Human
guaggcaggauug

SEQ ID NO: 1438657 - RNA, 17 nt, Human
aagaauggcagaaaagu

SEQ ID NO: 1438658 - RNA, 20 nt, Human
aagaauggcagaaaaguuua

SEQ ID NO: 1438659 - RNA, 17 nt, Human
aagaaugcuuaaucaga

SEQ ID NO: 1438660 - RNA, 13 nt, Human
aagaaugcuuaau

SEQ ID NO: 1438661 - RNA, 22 nt, Human
aagaaugcacaagaauggauca

SEQ ID NO: 1438662 - RNA, 21 nt, Human
aagaaugcacaagaauggauc

SEQ ID NO: 1438663 - RNA, 20 nt, Human
aagaaugcacaagaauggau

SEQ ID NO: 1438664 - RNA, 19 nt, Human
aagaaugcacaagaaugga

SEQ ID NO: 1438665 - RNA, 18 nt, Human
aagaaugcacaagaaugg

SEQ ID NO: 1438666 - RNA, 17 nt, Human
aagaaugcacaagaaug

SEQ ID NO: 1438667 - RNA, 18 nt, Human
aagaaugauuaugaauua

SEQ ID NO: 1438668 - RNA, 14 nt, Human
aagacccuggcuuu

SEQ ID NO: 1438669 - RNA, 18 nt, Human
aagacccuaaacauccau

SEQ ID NO: 1438670 - RNA, 13 nt, Human
aagacccuccccg

SEQ ID NO: 1438671 - RNA, 17 nt, Human
aagacaaagguuuuccu

SEQ ID NO: 1438672 - RNA, 18 nt, Human
aagacaaacuuugcaucu

SEQ ID NO: 1438673 - RNA, 15 nt, Human
aagacaaacuuugca

SEQ ID NO: 1438674 - RNA, 17 nt, Human
aagaauugaguaauggu

SEQ ID NO: 1438675 - RNA, 15 nt, Human
aagaauugaguaaug

SEQ ID NO: 1438676 - RNA, 23 nt, Human
aagaauugugguuuauauauuua

SEQ ID NO: 1438677 - RNA, 22 nt, Human
aagaauugugguuuauauauuu

SEQ ID NO: 1438678 - RNA, 20 nt, Human
aagaauugugguuuauauau

SEQ ID NO: 1438679 - RNA, 16 nt, Human
aagaauugaguaaugg

SEQ ID NO: 1438680 - RNA, 22 nt, Human
aagaauuguuggggguuuuuuu

SEQ ID NO: 1438681 - RNA, 21 nt, Human
aagaauuguuggggguuuuuu

SEQ ID NO: 1438682 - RNA, 12 nt, Human
aagaauuguugg

SEQ ID NO: 1438683 - RNA, 23 nt, Human
aagacaaaaagcuacuuauugua

SEQ ID NO: 1438684 - RNA, 20 nt, Human
aagacaaaaagcuacuuauu

SEQ ID NO: 1438685 - RNA, 22 nt, Human
guggcacucagucucucuucuc

SEQ ID NO: 1438686 - RNA, 19 nt, Human
guggauugcacguggccuc

SEQ ID NO: 1438687 - RNA, 18 nt, Human
guggcagcccagccagcg

SEQ ID NO: 1438688 - RNA, 17 nt, Human
guggcagcccagccagc

SEQ ID NO: 1438689 - RNA, 16 nt, Human
guggcagcccagccag

SEQ ID NO: 1438690 - RNA, 15 nt, Human
guggcagcccagcca

SEQ ID NO: 1438691 - RNA, 14 nt, Human
guggcagcccagcc

SEQ ID NO: 1438692 - RNA, 14 nt, Human
guggcacuggggca

SEQ ID NO: 1438693 - RNA, 13 nt, Human
guggauucuuuaa

SEQ ID NO: 1438694 - RNA, 20 nt, Human
guggauuuaacagaaaugua

SEQ ID NO: 1438695 - RNA, 18 nt, Human
guggauuuaacagaaaug

SEQ ID NO: 1438696 - RNA, 19 nt, Human
guggauuuaacagaaaugu

SEQ ID NO: 1438697 - RNA, 19 nt, Human
aagaauccacauuucuaaa

SEQ ID NO: 1438698 - RNA, 18 nt, Human
aagaauccacauuucuaa

SEQ ID NO: 1438699 - RNA, 17 nt, Human
aagaauccacauuucua

SEQ ID NO: 1438700 - RNA, 15 nt, Human
aagaaucuuuagaga

SEQ ID NO: 1438701 - RNA, 21 nt, Human
aagaaucuugguuugccuucc

SEQ ID NO: 1438702 - RNA, 20 nt, Human
aagaaucuugguuugccuuc

SEQ ID NO: 1438703 - RNA, 20 nt, Human
aagaaucucaucucagugaa

SEQ ID NO: 1438704 - RNA, 12 nt, Human
aagaaucucauc

SEQ ID NO: 1438705 - RNA, 21 nt, Human
aagaauccacauuucuaaaau

SEQ ID NO: 1438706 - RNA, 16 nt, Human
aagaaugauuaugaau

SEQ ID NO: 1438707 - RNA, 20 nt, Human
gugcugggauuacaggugua

SEQ ID NO: 1438708 - RNA, 12 nt, Human
guggacaggacu

SEQ ID NO: 1438709 - RNA, 21 nt, Human
guggaccauggaguggcagcc

SEQ ID NO: 1438710 - RNA, 14 nt, Human
guggacuaaaagau

SEQ ID NO: 1438711 - RNA, 16 nt, Human
guggaccauggagugg

SEQ ID NO: 1438712 - RNA, 22 nt, Human
guggauggccccagcacagcuu

SEQ ID NO: 1438713 - RNA, 19 nt, Human
guggauggccccagcacag

SEQ ID NO: 1438714 - RNA, 16 nt, Human
guggauggccccagca

SEQ ID NO: 1438715 - RNA, 15 nt, Human
guggauggccccagc

SEQ ID NO: 1438716 - RNA, 13 nt, Human
guggauggcccca

SEQ ID NO: 1438717 - RNA, 23 nt, Human
gugcugggagcuccacucugcuu

SEQ ID NO: 1438718 - RNA, 22 nt, Human
gugcugggagcuccacucugcu

SEQ ID NO: 1438719 - RNA, 16 nt, Human
gugcugggagcuccac

SEQ ID NO: 1438720 - RNA, 18 nt, Human
gugcugggagaggcagcc

SEQ ID NO: 1438721 - RNA, 17 nt, Human
gugcugggagaggcagc

SEQ ID NO: 1438722 - RNA, 16 nt, Human
gugcuauggugcucug

SEQ ID NO: 1438723 - RNA, 14 nt, Human
gugcuauggugcuc

SEQ ID NO: 1438724 - RNA, 14 nt, Human
gugcuaggaagagg

SEQ ID NO: 1438725 - RNA, 16 nt, Human
gugcucagcccugagg

SEQ ID NO: 1438726 - RNA, 12 nt, Human
gugcucagcccu

SEQ ID NO: 1438727 - RNA, 13 nt, Human
gugcucaaggcca

SEQ ID NO: 1438728 - RNA, 16 nt, Human
gugcuauuugucaucu

SEQ ID NO: 1438729 - RNA, 15 nt, Human
gugcucaggagcccu

SEQ ID NO: 1438730 - RNA, 18 nt, Human
gugcucagcccugaggac

SEQ ID NO: 1438731 - RNA, 15 nt, Human
gugcuggccagcgag

SEQ ID NO: 1438732 - RNA, 16 nt, Human
gugcucaggagcccug

SEQ ID NO: 1438733 - RNA, 14 nt, Human
gugccuaggccugg

SEQ ID NO: 1438734 - RNA, 18 nt, Human
gugccuaggccugggcag

SEQ ID NO: 1438735 - RNA, 15 nt, Human
gugccuaggccuggg

SEQ ID NO: 1438736 - RNA, 20 nt, Human
gugccuaggccugggcagug

SEQ ID NO: 1438737 - RNA, 21 nt, Human
gugccuauugcuagagcuccu

SEQ ID NO: 1438738 - RNA, 20 nt, Human
gugccuauugcuagagcucc

SEQ ID NO: 1438739 - RNA, 19 nt, Human
gugccuauugcuagagcuc

SEQ ID NO: 1438740 - RNA, 18 nt, Human
gugccuauugcuagagcu

SEQ ID NO: 1438741 - RNA, 20 nt, Human
gugccucagagaccagggcu

SEQ ID NO: 1438742 - RNA, 19 nt, Human
gugccucagagaccagggc

SEQ ID NO: 1438743 - RNA, 15 nt, Human
gugccucagagacca

SEQ ID NO: 1438744 - RNA, 13 nt, Human
gugccucagagac

SEQ ID NO: 1438745 - RNA, 19 nt, Human
aagaaaaaaauugaaaugu

SEQ ID NO: 1438746 - RNA, 18 nt, Human
aagaaaaaaauugaaaug

SEQ ID NO: 1438747 - RNA, 17 nt, Human
aagaaaaaaauugaaau

SEQ ID NO: 1438748 - RNA, 22 nt, Human
aagaaaaaaauguauuuuaugu

SEQ ID NO: 1438749 - RNA, 23 nt, Human
aagaaaaaaauguauuuuauguu

SEQ ID NO: 1438750 - RNA, 21 nt, Human
aagaaaaaaauguauuuuaug

SEQ ID NO: 1438751 - RNA, 17 nt, Human
aagaaaaaaauguauuu

SEQ ID NO: 1438752 - RNA, 16 nt, Human
aagaaaaaaauguauu

SEQ ID NO: 1438753 - RNA, 15 nt, Human
aagaaaaaaauguau

SEQ ID NO: 1438754 - RNA, 14 nt, Human
aacuuuaauguuuu

SEQ ID NO: 1438755 - RNA, 19 nt, Human
aacuuuaaagcguuugcac

SEQ ID NO: 1438756 - RNA, 19 nt, Human
aacuuuaauguuuuuugcc

SEQ ID NO: 1438757 - RNA, 13 nt, Human
aacuuuaccuuuu

SEQ ID NO: 1438758 - RNA, 23 nt, Human
aacuuggcucgaaucucugugcc

SEQ ID NO: 1438759 - RNA, 22 nt, Human
aacuuggcucgaaucucugugc

SEQ ID NO: 1438760 - RNA, 21 nt, Human
aacuuggcucgaaucucugug

SEQ ID NO: 1438761 - RNA, 22 nt, Human
aacuuggggaguuaagaccugg

SEQ ID NO: 1438762 - RNA, 21 nt, Human
aacuuggggaguuaagaccug

SEQ ID NO: 1438763 - RNA, 19 nt, Human
aacuuggcugcaggaaucu

SEQ ID NO: 1438764 - RNA, 18 nt, Human
aacuuggcugcaggaauc

SEQ ID NO: 1438765 - RNA, 11 nt, Human
aacuuggcuca

SEQ ID NO: 1438766 - RNA, 19 nt, Human
aacuuguccuagcacagau

SEQ ID NO: 1438767 - RNA, 23 nt, Human
aacuuggggaguuaagaccuggc

SEQ ID NO: 1438768 - RNA, 16 nt, Human
aacuuguauuaugugu

SEQ ID NO: 1438769 - RNA, 15 nt, Human
aagaaaaagaagcaa

SEQ ID NO: 1438770 - RNA, 20 nt, Human
aagaaaaaaauugaaaugua

SEQ ID NO: 1438771 - RNA, 21 nt, Human
aagaaaaaaauugaaauguaa

SEQ ID NO: 1438772 - RNA, 15 nt, Human
aagaaaaaggaugca

SEQ ID NO: 1438773 - RNA, 17 nt, Human
aagaaaaaggaugcaca

SEQ ID NO: 1438774 - RNA, 21 nt, Human
aagaaaccuacugcccaggca

SEQ ID NO: 1438775 - RNA, 16 nt, Human
aagaaaccuacugccc

SEQ ID NO: 1438776 - RNA, 19 nt, Human
aagaaaaaggaugcacaga

SEQ ID NO: 1438777 - RNA, 15 nt, Human
aagaaaccuacugcc

SEQ ID NO: 1438778 - RNA, 18 nt, Human
aagaaaaaggaugcacag

SEQ ID NO: 1438779 - RNA, 20 nt, Human
aagaaacugaggaauuuucu

SEQ ID NO: 1438780 - RNA, 19 nt, Human
aagaaacugaggaauuuuc

SEQ ID NO: 1438781 - RNA, 16 nt, Human
aagaaacugaggaauu

SEQ ID NO: 1438782 - RNA, 21 nt, Human
aagaaacugaggaauuuucuu

SEQ ID NO: 1438783 - RNA, 21 nt, Human
aagaaacuggggcuccuccag

SEQ ID NO: 1438784 - RNA, 11 nt, Human
aagaaacuuuc

SEQ ID NO: 1438785 - RNA, 17 nt, Human
aagaaacuuguccuucc

SEQ ID NO: 1438786 - RNA, 23 nt, Human
aagaaacuuucuuucucacuaaa

SEQ ID NO: 1438787 - RNA, 14 nt, Human
aagaaacuuuuuua

SEQ ID NO: 1438788 - RNA, 16 nt, Human
aagaaagaacggaaga

SEQ ID NO: 1438789 - RNA, 14 nt, Human
aagaaauagaacaa

SEQ ID NO: 1438790 - RNA, 20 nt, Human
aagaaagacgcacuuuggcu

SEQ ID NO: 1438791 - RNA, 16 nt, Human
aagaaagacgcacuuu

SEQ ID NO: 1438792 - RNA, 12 nt, Human
aagaaauagaau

SEQ ID NO: 1438793 - RNA, 20 nt, Human
aagaaauagaacaaggcuga

SEQ ID NO: 1438794 - RNA, 15 nt, Human
aagaaauagaacaag

SEQ ID NO: 1438795 - RNA, 13 nt, Human
aagaaauauaccu

SEQ ID NO: 1438796 - RNA, 19 nt, Human
aagaaggcaaaaauaguuu

SEQ ID NO: 1438797 - RNA, 15 nt, Human
aagaaggcaaaaaua

SEQ ID NO: 1438798 - RNA, 14 nt, Human
aagaaggcaaaaau

SEQ ID NO: 1438799 - RNA, 16 nt, Human
aagaaggcaaaaaugu

SEQ ID NO: 1438800 - RNA, 23 nt, Human
aagaauagcauuguaaaagcauu

SEQ ID NO: 1438801 - RNA, 18 nt, Human
aagaauagcauuguaaaa

SEQ ID NO: 1438802 - RNA, 17 nt, Human
aagaauagcauuguaaa

SEQ ID NO: 1438803 - RNA, 11 nt, Human
aagaauagaac

SEQ ID NO: 1438804 - RNA, 22 nt, Human
aagaauacuucucauuuuuuaa

SEQ ID NO: 1438805 - RNA, 17 nt, Human
aagaauacuucucauuu

SEQ ID NO: 1438806 - RNA, 16 nt, Human
aagaauacuucucauu

SEQ ID NO: 1438807 - RNA, 12 nt, Human
aagaauacuucu

SEQ ID NO: 1438808 - RNA, 17 nt, Human
aagaauagcuuuaauga

SEQ ID NO: 1438809 - RNA, 19 nt, Human
gugcuaggaagaggagugg

SEQ ID NO: 1438810 - RNA, 18 nt, Human
gugcuaguaauuggaaag

SEQ ID NO: 1438811 - RNA, 21 nt, Human
aagacucuagaguccaagguu

SEQ ID NO: 1438812 - RNA, 19 nt, Human
aagacucuagaguccaagg

SEQ ID NO: 1438813 - RNA, 15 nt, Human
aagacucuagagucc

SEQ ID NO: 1438814 - RNA, 13 nt, Human
aagacucuagagu

SEQ ID NO: 1438815 - RNA, 12 nt, Human
aagacucuagag

SEQ ID NO: 1438816 - RNA, 15 nt, Human
aagacuaugaaaaug

SEQ ID NO: 1438817 - RNA, 17 nt, Human
aagacugaguacguugu

SEQ ID NO: 1438818 - RNA, 17 nt, Human
aagacuaugaaaaugcu

SEQ ID NO: 1438819 - RNA, 22 nt, Human
aagacuaucuuacuauuucaca

SEQ ID NO: 1438820 - RNA, 21 nt, Human
aagacugaguacguugugcau

SEQ ID NO: 1438821 - RNA, 22 nt, Human
aagacugaguacguugugcauu

SEQ ID NO: 1438822 - RNA, 17 nt, Human
aagaccuggcagcucug

SEQ ID NO: 1438823 - RNA, 21 nt, Human
aagaccuacuguucuaaagcu

SEQ ID NO: 1438824 - RNA, 15 nt, Human
aagaccugagaaugu

SEQ ID NO: 1438825 - RNA, 22 nt, Human
aagaccuacuguucuaaagcuc

SEQ ID NO: 1438826 - RNA, 20 nt, Human
aagaccuacuguucuaaagc

SEQ ID NO: 1438827 - RNA, 18 nt, Human
aagaccuacuguucuaaa

SEQ ID NO: 1438828 - RNA, 17 nt, Human
aagaccuacuguucuaa

SEQ ID NO: 1438829 - RNA, 17 nt, Human
aagacccuuuuggguuu

SEQ ID NO: 1438830 - RNA, 20 nt, Human
aagacccuuuuggguuucug

SEQ ID NO: 1438831 - RNA, 17 nt, Human
aagagcagcaccuccuc

SEQ ID NO: 1438832 - RNA, 20 nt, Human
aagagcaaaagaauggcaga

SEQ ID NO: 1438833 - RNA, 15 nt, Human
aagagcaaaagaaug

SEQ ID NO: 1438834 - RNA, 20 nt, Human
aagacuuacucuaagaucuu

SEQ ID NO: 1438835 - RNA, 17 nt, Human
aagacuuacucuaagau

SEQ ID NO: 1438836 - RNA, 16 nt, Human
aagacuuacucuaaga

SEQ ID NO: 1438837 - RNA, 15 nt, Human
aagacuuacucuaag

SEQ ID NO: 1438838 - RNA, 14 nt, Human
aagacuuacucuaa

SEQ ID NO: 1438839 - RNA, 18 nt, Human
aagagcuacguauuuaau

SEQ ID NO: 1438840 - RNA, 21 nt, Human
aagagcgagagaucaaagaug

SEQ ID NO: 1438841 - RNA, 18 nt, Human
aagagcgagagaucaaag

SEQ ID NO: 1438842 - RNA, 18 nt, Human
aagagccuuccacccagg

SEQ ID NO: 1438843 - RNA, 16 nt, Human
aagagccuuccaccca

SEQ ID NO: 1438844 - RNA, 16 nt, Human
aagagcuacauaauuu

SEQ ID NO: 1438845 - RNA, 14 nt, Human
aagagcuacauaau

SEQ ID NO: 1438846 - RNA, 23 nt, Human
aagagcgagagaucaaagaugaa

SEQ ID NO: 1438847 - RNA, 19 nt, Human
guggcccucuccccugccc

SEQ ID NO: 1438848 - RNA, 18 nt, Human
guggcccucuccccugcc

SEQ ID NO: 1438849 - RNA, 17 nt, Human
guggcccucuccccugc

SEQ ID NO: 1438850 - RNA, 15 nt, Human
guggcccucuccccu

SEQ ID NO: 1438851 - RNA, 14 nt, Human
guggcccucucccc

SEQ ID NO: 1438852 - RNA, 13 nt, Human
aagaggaagcaaa

SEQ ID NO: 1438853 - RNA, 14 nt, Human
aagaggaagcaaau

SEQ ID NO: 1438854 - RNA, 23 nt, Human
guggggggggggcgcggcuggga

SEQ ID NO: 1438855 - RNA, 14 nt, Human
gugggagugugugc

SEQ ID NO: 1438856 - RNA, 17 nt, Human
gugggagugugugccug

SEQ ID NO: 1438857 - RNA, 19 nt, Human
guggggugugcugggagcu

SEQ ID NO: 1438858 - RNA, 16 nt, Human
guggggugugcuggga

SEQ ID NO: 1438859 - RNA, 13 nt, Human
guggggugugcug

SEQ ID NO: 1438860 - RNA, 16 nt, Human
gugggguggugucaga

SEQ ID NO: 1438861 - RNA, 19 nt, Human
gugggguggcugcagccuc

SEQ ID NO: 1438862 - RNA, 18 nt, Human
gugggguggcugcagccu

SEQ ID NO: 1438863 - RNA, 15 nt, Human
gugggguggcugcag

SEQ ID NO: 1438864 - RNA, 13 nt, Human
gugggguggcugc

SEQ ID NO: 1438865 - RNA, 20 nt, Human
guggguacccccaggaccag

SEQ ID NO: 1438866 - RNA, 16 nt, Human
gugguggucccugggu

SEQ ID NO: 1438867 - RNA, 15 nt, Human
gugguggucccuggg

SEQ ID NO: 1438868 - RNA, 14 nt, Human
gugguggcucggga

SEQ ID NO: 1438869 - RNA, 16 nt, Human
gugguuucagaaaugu

SEQ ID NO: 1438870 - RNA, 14 nt, Human
guggugguuuucug

SEQ ID NO: 1438871 - RNA, 13 nt, Human
gugggugccuagg

SEQ ID NO: 1438872 - RNA, 13 nt, Human
gugggucugggag

SEQ ID NO: 1438873 - RNA, 14 nt, Human
guggguagacacac

SEQ ID NO: 1438874 - RNA, 21 nt, Human
guggcgccgucuccaggggcu

SEQ ID NO: 1438875 - RNA, 17 nt, Human
guggcgccgucuccagg

SEQ ID NO: 1438876 - RNA, 22 nt, Human
guggcgccgucuccaggggcug

SEQ ID NO: 1438877 - RNA, 19 nt, Human
guggcgcgaucucagcuca

SEQ ID NO: 1438878 - RNA, 16 nt, Human
guggcguuuguaauga

SEQ ID NO: 1438879 - RNA, 21 nt, Human
gugggacagucaccucaugga

SEQ ID NO: 1438880 - RNA, 17 nt, Human
gugggaccuagggaggc

SEQ ID NO: 1438881 - RNA, 22 nt, Human
gugggacagcuuguaggggagg

SEQ ID NO: 1438882 - RNA, 19 nt, Human
guggcgugaucucagcuca

SEQ ID NO: 1438883 - RNA, 20 nt, Human
gugggacgggaugguucugg

SEQ ID NO: 1438884 - RNA, 20 nt, Human
gugggacggugcccaagcca

SEQ ID NO: 1438885 - RNA, 19 nt, Human
gugggacggugcccaagcc

SEQ ID NO: 1438886 - RNA, 20 nt, Human
gugggaggguaccagcagaa

SEQ ID NO: 1438887 - RNA, 16 nt, Human
gugggaggguaccagc

SEQ ID NO: 1438888 - RNA, 15 nt, Human
gugggaggguaccag

SEQ ID NO: 1438889 - RNA, 17 nt, Human
gugggaggugagaccac

SEQ ID NO: 1438890 - RNA, 19 nt, Human
aagcaaguucgucuguugu

SEQ ID NO: 1438891 - RNA, 22 nt, Human
aagcaagaggccguggcugcug

SEQ ID NO: 1438892 - RNA, 15 nt, Human
aagcaagauuucaga

SEQ ID NO: 1438893 - RNA, 17 nt, Human
aagcaagaaucagagaa

SEQ ID NO: 1438894 - RNA, 23 nt, Human
aagcaagaaucagagaaggaaca

SEQ ID NO: 1438895 - RNA, 19 nt, Human
aagcaacuaggccuucagu

SEQ ID NO: 1438896 - RNA, 22 nt, Human
aagcaaccucaguaauuuagaa

SEQ ID NO: 1438897 - RNA, 21 nt, Human
aagcaaccucaguaauuuaga

SEQ ID NO: 1438898 - RNA, 20 nt, Human
aagcaaccucaguaauuuag

SEQ ID NO: 1438899 - RNA, 19 nt, Human
aagcaaccucaguaauuua

SEQ ID NO: 1438900 - RNA, 18 nt, Human
aagcaaccucaguaauuu

SEQ ID NO: 1438901 - RNA, 16 nt, Human
aagcaaagcacagaga

SEQ ID NO: 1438902 - RNA, 22 nt, Human
aagaugccacauucaaaauagg

SEQ ID NO: 1438903 - RNA, 16 nt, Human
aagaugccacauucaa

SEQ ID NO: 1438904 - RNA, 15 nt, Human
aagaugccacauuca

SEQ ID NO: 1438905 - RNA, 23 nt, Human
aagaugcacuuugcuuuaauaua

SEQ ID NO: 1438906 - RNA, 18 nt, Human
aagaucuuuuauuuugcc

SEQ ID NO: 1438907 - RNA, 19 nt, Human
aagaugugauauucuaaga

SEQ ID NO: 1438908 - RNA, 18 nt, Human
aagaugugauauucuaag

SEQ ID NO: 1438909 - RNA, 17 nt, Human
aagaugugauauucuaa

SEQ ID NO: 1438910 - RNA, 16 nt, Human
aagaugugauauucua

SEQ ID NO: 1438911 - RNA, 14 nt, Human
aagaugugauauuc

SEQ ID NO: 1438912 - RNA, 17 nt, Human
aagcaaagcacagagag

SEQ ID NO: 1438913 - RNA, 15 nt, Human
aagcaaagcacagag

SEQ ID NO: 1438914 - RNA, 12 nt, Human
aagcaaagcaca

SEQ ID NO: 1438915 - RNA, 17 nt, Human
aagaucuuagauucucu

SEQ ID NO: 1438916 - RNA, 16 nt, Human
aagaucuuagauucuc

SEQ ID NO: 1438917 - RNA, 15 nt, Human
aagaucuuagauucu

SEQ ID NO: 1438918 - RNA, 14 nt, Human
aagaucuuagauuc

SEQ ID NO: 1438919 - RNA, 13 nt, Human
aagaucuuagauu

SEQ ID NO: 1438920 - RNA, 22 nt, Human
aagaucuguuuugaaggcaaaa

SEQ ID NO: 1438921 - RNA, 21 nt, Human
aagaucuguuuugaaggcaaa

SEQ ID NO: 1438922 - RNA, 20 nt, Human
aagaucuguuuugaaggcaa

SEQ ID NO: 1438923 - RNA, 17 nt, Human
aagaucuuuuauuuugc

SEQ ID NO: 1438924 - RNA, 15 nt, Human
aagaucuuuuauuuu

SEQ ID NO: 1438925 - RNA, 11 nt, Human
aagaucuuuua

SEQ ID NO: 1438926 - RNA, 23 nt, Human
aagaucuuagauucucugugucu

SEQ ID NO: 1438927 - RNA, 19 nt, Human
aagauauuuuaaaaucugu

SEQ ID NO: 1438928 - RNA, 20 nt, Human
aagaucuguccucagccuug

SEQ ID NO: 1438929 - RNA, 19 nt, Human
aagaucuguccucagccuu

SEQ ID NO: 1438930 - RNA, 15 nt, Human
aagauauuuugcuuu

SEQ ID NO: 1438931 - RNA, 17 nt, Human
aagagguguuauuugga

SEQ ID NO: 1438932 - RNA, 17 nt, Human
aagagguguuuuuucua

SEQ ID NO: 1438933 - RNA, 17 nt, Human
gugguuuucuguucuuu

SEQ ID NO: 1438934 - RNA, 23 nt, Human
gugguuuuagauuuucugguucu

SEQ ID NO: 1438935 - RNA, 14 nt, Human
gugguuucauguua

SEQ ID NO: 1438936 - RNA, 20 nt, Human
guggugguuuucuguucuuu

SEQ ID NO: 1438937 - RNA, 13 nt, Human
aagaguaaucaau

SEQ ID NO: 1438938 - RNA, 20 nt, Human
aagauauaagugcuguauaa

SEQ ID NO: 1438939 - RNA, 21 nt, Human
aagauauaagugcuguauaaa

SEQ ID NO: 1438940 - RNA, 19 nt, Human
aagauauaagugcuguaua

SEQ ID NO: 1438941 - RNA, 13 nt, Human
aagaguagaaacu

SEQ ID NO: 1438942 - RNA, 18 nt, Human
aagagguuuuaaagcuuc

SEQ ID NO: 1438943 - RNA, 14 nt, Human
aagagguuuuaaag

SEQ ID NO: 1438944 - RNA, 12 nt, Human
gugugagacugg

SEQ ID NO: 1438945 - RNA, 22 nt, Human
gugugagaagugaaugcuggga

SEQ ID NO: 1438946 - RNA, 21 nt, Human
gugugagaagugaaugcuggg

SEQ ID NO: 1438947 - RNA, 20 nt, Human
gugugaaacuuucauuccuu

SEQ ID NO: 1438948 - RNA, 16 nt, Human
gugucuuuuuuuguau

SEQ ID NO: 1438949 - RNA, 19 nt, Human
aagcaauaugcauuuaaau

SEQ ID NO: 1438950 - RNA, 13 nt, Human
aagcaauaugcau

SEQ ID NO: 1438951 - RNA, 18 nt, Human
aagaugcacuuugcuuua

SEQ ID NO: 1438952 - RNA, 15 nt, Human
aagcaauccuaggua

SEQ ID NO: 1438953 - RNA, 19 nt, Human
gugucuuuagauagcccug

SEQ ID NO: 1438954 - RNA, 18 nt, Human
gugucuuucacagcuccu

SEQ ID NO: 1438955 - RNA, 17 nt, Human
gugucuuuagauagccc

SEQ ID NO: 1438956 - RNA, 18 nt, Human
guguugccaagcuccaag

SEQ ID NO: 1438957 - RNA, 14 nt, Human
guguugccaagcuc

SEQ ID NO: 1438958 - RNA, 20 nt, Human
guguugccaaauauguccug

SEQ ID NO: 1438959 - RNA, 19 nt, Human
guguugccaaauauguccu

SEQ ID NO: 1438960 - RNA, 17 nt, Human
guguugccaaauauguc

SEQ ID NO: 1438961 - RNA, 23 nt, Human
guguugauacuguugcacgugug

SEQ ID NO: 1438962 - RNA, 21 nt, Human
guguugauacuguugcacgug

SEQ ID NO: 1438963 - RNA, 20 nt, Human
guguugauacuguugcacgu

SEQ ID NO: 1438964 - RNA, 18 nt, Human
guguugauacuguugcac

SEQ ID NO: 1438965 - RNA, 17 nt, Human
guguugauacuguugca

SEQ ID NO: 1438966 - RNA, 16 nt, Human
guguugauacuguugc

SEQ ID NO: 1438967 - RNA, 15 nt, Human
guguugauacuguug

SEQ ID NO: 1438968 - RNA, 21 nt, Human
gugugucuuaauuauuauuug

SEQ ID NO: 1438969 - RNA, 14 nt, Human
gugugucuuaauua

SEQ ID NO: 1438970 - RNA, 22 nt, Human
gugugucuguucacuuuuccuc

SEQ ID NO: 1438971 - RNA, 15 nt, Human
gugugucuguucacu

SEQ ID NO: 1438972 - RNA, 16 nt, Human
gugugucugcucagua

SEQ ID NO: 1438973 - RNA, 15 nt, Human
gugugucugcucagu

SEQ ID NO: 1438974 - RNA, 18 nt, Human
gugugucccccucugucc

SEQ ID NO: 1438975 - RNA, 17 nt, Human
gugugucccccucuguc

SEQ ID NO: 1438976 - RNA, 16 nt, Human
gugugucccccucugu

SEQ ID NO: 1438977 - RNA, 20 nt, Human
guguguccacgacugucucc

SEQ ID NO: 1438978 - RNA, 19 nt, Human
guguguccacgacugucuc

SEQ ID NO: 1438979 - RNA, 14 nt, Human
guguguauauggac

SEQ ID NO: 1438980 - RNA, 15 nt, Human
guguugucucuugag

SEQ ID NO: 1438981 - RNA, 12 nt, Human
guguugucucua

SEQ ID NO: 1438982 - RNA, 21 nt, Human
guguuucacaguuugaaauaa

SEQ ID NO: 1438983 - RNA, 13 nt, Human
guguuucacaguu

SEQ ID NO: 1438984 - RNA, 20 nt, Human
guguuggacaagcuucugag

SEQ ID NO: 1438985 - RNA, 16 nt, Human
aagcuuucagaauaug

SEQ ID NO: 1438986 - RNA, 12 nt, Human
aagcuuuccugc

SEQ ID NO: 1438987 - RNA, 23 nt, Human
aagcuuucauguaaacugugcac

SEQ ID NO: 1438988 - RNA, 22 nt, Human
aagcuuucauguaaacugugca

SEQ ID NO: 1438989 - RNA, 21 nt, Human
aagcuuucagaauaugucagu

SEQ ID NO: 1438990 - RNA, 16 nt, Human
aagcuuccaugauucu

SEQ ID NO: 1438991 - RNA, 20 nt, Human
guucccaguuggagcuccag

SEQ ID NO: 1438992 - RNA, 18 nt, Human
guucccacauuaaagaag

SEQ ID NO: 1438993 - RNA, 21 nt, Human
guucccacauuaaagaagacc

SEQ ID NO: 1438994 - RNA, 19 nt, Human
guucccaccaggcugcuca

SEQ ID NO: 1438995 - RNA, 17 nt, Human
guucccacauuaaagaa

SEQ ID NO: 1438996 - RNA, 23 nt, Human
guucccaagagcaucaugccucu

SEQ ID NO: 1438997 - RNA, 19 nt, Human
guucccaagcucagaggcg

SEQ ID NO: 1438998 - RNA, 21 nt, Human
guucccaagagcaucaugccu

SEQ ID NO: 1438999 - RNA, 17 nt, Human
guuccauuaaacgauuu

SEQ ID NO: 1439000 - RNA, 20 nt, Human
guuccauggccucuucagau

SEQ ID NO: 1439001 - RNA, 13 nt, Human
guucccucccaga

SEQ ID NO: 1439002 - RNA, 18 nt, Human
guucccguuucuccaccu

SEQ ID NO: 1439003 - RNA, 16 nt, Human
guucccguuucuccac

SEQ ID NO: 1439004 - RNA, 14 nt, Human
guucccguuucucc

SEQ ID NO: 1439005 - RNA, 19 nt, Human
guucccguuucuccaccua

SEQ ID NO: 1439006 - RNA, 16 nt, Human
guucccauuucagcug

SEQ ID NO: 1439007 - RNA, 17 nt, Human
guuccccuuugcuucau

SEQ ID NO: 1439008 - RNA, 22 nt, Human
guuccccuuccacugagggcag

SEQ ID NO: 1439009 - RNA, 15 nt, Human
guuccccuuccacug

SEQ ID NO: 1439010 - RNA, 20 nt, Human
aagcuuccaugauucuauuu

SEQ ID NO: 1439011 - RNA, 15 nt, Human
aagcuuccaugauuc

SEQ ID NO: 1439012 - RNA, 19 nt, Human
aagcuucagugcugccgau

SEQ ID NO: 1439013 - RNA, 18 nt, Human
aagcuucaaacugcauga

SEQ ID NO: 1439014 - RNA, 20 nt, Human
aagcugaggugcccaggaga

SEQ ID NO: 1439015 - RNA, 19 nt, Human
aagcugaggugcccaggag

SEQ ID NO: 1439016 - RNA, 18 nt, Human
aagcugaggugcccagga

SEQ ID NO: 1439017 - RNA, 17 nt, Human
aagcugaggugcccagg

SEQ ID NO: 1439018 - RNA, 13 nt, Human
aagcugaggugcc

SEQ ID NO: 1439019 - RNA, 19 nt, Human
aagcugacuuggcuggugu

SEQ ID NO: 1439020 - RNA, 20 nt, Human
aagcugacuuggcuggugug

SEQ ID NO: 1439021 - RNA, 18 nt, Human
aagcugacuuggcuggug

SEQ ID NO: 1439022 - RNA, 17 nt, Human
aagcugacuuggcuggu

SEQ ID NO: 1439023 - RNA, 16 nt, Human
aagcugacuuggcugg

SEQ ID NO: 1439024 - RNA, 15 nt, Human
aagcugacuuggcug

SEQ ID NO: 1439025 - RNA, 14 nt, Human
aagcugacuuggcu

SEQ ID NO: 1439026 - RNA, 23 nt, Human
aagcuccucuccccagcccagag

SEQ ID NO: 1439027 - RNA, 22 nt, Human
aagcuccucuccccagcccaga

SEQ ID NO: 1439028 - RNA, 21 nt, Human
aagcuccucuccccagcccag

SEQ ID NO: 1439029 - RNA, 20 nt, Human
aagcuccucuccccagccca

SEQ ID NO: 1439030 - RNA, 19 nt, Human
aagcuccucuccccagccc

SEQ ID NO: 1439031 - RNA, 23 nt, Human
aagcucgauguggucacagcugu

SEQ ID NO: 1439032 - RNA, 22 nt, Human
aagcucgauguggucacagcug

SEQ ID NO: 1439033 - RNA, 18 nt, Human
aagcuccucuccccagcc

SEQ ID NO: 1439034 - RNA, 17 nt, Human
aagcuaucguaaaauua

SEQ ID NO: 1439035 - RNA, 23 nt, Human
guucuccguuagcuccuguggcc

SEQ ID NO: 1439036 - RNA, 22 nt, Human
guucuccguuagcuccuguggc

SEQ ID NO: 1439037 - RNA, 23 nt, Human
guucuagacauggagguucuaag

SEQ ID NO: 1439038 - RNA, 22 nt, Human
guucuagacauggagguucuaa

SEQ ID NO: 1439039 - RNA, 21 nt, Human
guucuagacauggagguucua

SEQ ID NO: 1439040 - RNA, 20 nt, Human
guucuagacauggagguucu

SEQ ID NO: 1439041 - RNA, 21 nt, Human
guucuagaaaaacaggcacuu

SEQ ID NO: 1439042 - RNA, 18 nt, Human
guucuagaaaaacaggca

SEQ ID NO: 1439043 - RNA, 14 nt, Human
guucuagaaaaaca

SEQ ID NO: 1439044 - RNA, 13 nt, Human
guucuagaaaaac

SEQ ID NO: 1439045 - RNA, 12 nt, Human
guucuagaaaaa

SEQ ID NO: 1439046 - RNA, 21 nt, Human
guucuaccucaggcagcucaa

SEQ ID NO: 1439047 - RNA, 20 nt, Human
guucuaccucaggcagcuca

SEQ ID NO: 1439048 - RNA, 22 nt, Human
guucuccuuuuccucucucccg

SEQ ID NO: 1439049 - RNA, 18 nt, Human
guucuccuuuuccucucu

SEQ ID NO: 1439050 - RNA, 13 nt, Human
guucuccuuuucc

SEQ ID NO: 1439051 - RNA, 22 nt, Human
guucuccugcugcucccucaga

SEQ ID NO: 1439052 - RNA, 21 nt, Human
guucuccugcugcucccucag

SEQ ID NO: 1439053 - RNA, 18 nt, Human
guucuccugcugcucccu

SEQ ID NO: 1439054 - RNA, 17 nt, Human
guucuccugcugcuccc

SEQ ID NO: 1439055 - RNA, 17 nt, Human
guucucuaucauuuaau

SEQ ID NO: 1439056 - RNA, 18 nt, Human
guucucuaucauuuaaua

SEQ ID NO: 1439057 - RNA, 22 nt, Human
guucucuaucauuuaauaauau

SEQ ID NO: 1439058 - RNA, 22 nt, Human
guucuuaccuguaugucuccag

SEQ ID NO: 1439059 - RNA, 22 nt, Human
guucuguagaaaugguuguauu

SEQ ID NO: 1439060 - RNA, 14 nt, Human
guucuguagaaaug

SEQ ID NO: 1439061 - RNA, 17 nt, Human
guucugguccuuuuugg

SEQ ID NO: 1439062 - RNA, 23 nt, Human
guucugguaugaacuugaggaca

SEQ ID NO: 1439063 - RNA, 23 nt, Human
guucuuuaaaauguaaagccaug

SEQ ID NO: 1439064 - RNA, 15 nt, Human
guucuuguuggugca

SEQ ID NO: 1439065 - RNA, 14 nt, Human
guucuuguuggugc

SEQ ID NO: 1439066 - RNA, 13 nt, Human
guucuuguuggug

SEQ ID NO: 1439067 - RNA, 13 nt, Human
guucuuguaauuu

SEQ ID NO: 1439068 - RNA, 12 nt, Human
guucuuguauuu

SEQ ID NO: 1439069 - RNA, 18 nt, Human
guucuuguaauuuuacac

SEQ ID NO: 1439070 - RNA, 14 nt, Human
guucuucaucuaag

SEQ ID NO: 1439071 - RNA, 17 nt, Human
guucuuagcucaaugag

SEQ ID NO: 1439072 - RNA, 21 nt, Human
guucuugguuuguaaauuaac

SEQ ID NO: 1439073 - RNA, 19 nt, Human
guucuuagcucaaugagca

SEQ ID NO: 1439074 - RNA, 16 nt, Human
guucuuagcucaauga

SEQ ID NO: 1439075 - RNA, 14 nt, Human
guucuuacugcuug

SEQ ID NO: 1439076 - RNA, 16 nt, Human
guucuuacugcuuaau

SEQ ID NO: 1439077 - RNA, 19 nt, Human
guugaggccacuguguucc

SEQ ID NO: 1439078 - RNA, 21 nt, Human
guugaggccacuguguuccuu

SEQ ID NO: 1439079 - RNA, 14 nt, Human
guugaggccacugu

SEQ ID NO: 1439080 - RNA, 19 nt, Human
guugacauucugaaugcuu

SEQ ID NO: 1439081 - RNA, 18 nt, Human
guugacauucugaaugcu

SEQ ID NO: 1439082 - RNA, 17 nt, Human
guugacauucugaaugc

SEQ ID NO: 1439083 - RNA, 15 nt, Human
guugacauucugaau

SEQ ID NO: 1439084 - RNA, 14 nt, Human
guugacauucugaa

SEQ ID NO: 1439085 - RNA, 13 nt, Human
guugacauucuga

SEQ ID NO: 1439086 - RNA, 18 nt, Human
guugacaugggacauuug

SEQ ID NO: 1439087 - RNA, 14 nt, Human
guugacaugggaca

SEQ ID NO: 1439088 - RNA, 12 nt, Human
guuaagcucugc

SEQ ID NO: 1439089 - RNA, 21 nt, Human
guuaaucuugcuuucuuuguu

SEQ ID NO: 1439090 - RNA, 13 nt, Human
guuaaucuugcuu

SEQ ID NO: 1439091 - RNA, 23 nt, Human
guuaaguugagauaguuuucauc

SEQ ID NO: 1439092 - RNA, 16 nt, Human
guuaaucuugcuuucu

SEQ ID NO: 1439093 - RNA, 13 nt, Human
guguuuuaauuua

SEQ ID NO: 1439094 - RNA, 14 nt, Human
guguuuuaauugua

SEQ ID NO: 1439095 - RNA, 15 nt, Human
guuaagcucugcuau

SEQ ID NO: 1439096 - RNA, 16 nt, Human
guguuuuaauuguaaa

SEQ ID NO: 1439097 - RNA, 14 nt, Human
guguuuggcuuuca

SEQ ID NO: 1439098 - RNA, 14 nt, Human
guguuuccaucuca

SEQ ID NO: 1439099 - RNA, 18 nt, Human
guguuuccacagccugca

SEQ ID NO: 1439100 - RNA, 18 nt, Human
guguuuuaaaaugagaaa

SEQ ID NO: 1439101 - RNA, 12 nt, Human
guguuugucauu

SEQ ID NO: 1439102 - RNA, 13 nt, Human
guguuugucauua

SEQ ID NO: 1439103 - RNA, 15 nt, Human
guguuugucauuagc

SEQ ID NO: 1439104 - RNA, 23 nt, Human
guuaguuaccuuauaguuacugu

SEQ ID NO: 1439105 - RNA, 22 nt, Human
guuaguuaccuuauaguuacug

SEQ ID NO: 1439106 - RNA, 17 nt, Human
guuaguuaccuuauagu

SEQ ID NO: 1439107 - RNA, 18 nt, Human
guuaguaucuuuugauau

SEQ ID NO: 1439108 - RNA, 20 nt, Human
guuagucgugagcucuugug

SEQ ID NO: 1439109 - RNA, 22 nt, Human
guuagucgugagcucuugugag

SEQ ID NO: 1439110 - RNA, 22 nt, Human
guuagucauuugcugagcaugu

SEQ ID NO: 1439111 - RNA, 18 nt, Human
guuagucgugagcucuug

SEQ ID NO: 1439112 - RNA, 12 nt, Human
guuagucauuug

SEQ ID NO: 1439113 - RNA, 17 nt, Human
guuaguaucuuuugaua

SEQ ID NO: 1439114 - RNA, 14 nt, Human
guuaguaucuuuug

SEQ ID NO: 1439115 - RNA, 20 nt, Human
guuaguaugaggcauuuguu

SEQ ID NO: 1439116 - RNA, 23 nt, Human
guuagccuuuuuuccccagacuu

SEQ ID NO: 1439117 - RNA, 15 nt, Human
guuagcuccuguggc

SEQ ID NO: 1439118 - RNA, 14 nt, Human
guuagcuccugugg

SEQ ID NO: 1439119 - RNA, 17 nt, Human
guuaguaugaggcauuu

SEQ ID NO: 1439120 - RNA, 12 nt, Human
guuagcuccugu

SEQ ID NO: 1439121 - RNA, 18 nt, Human
guuagccuuuuuucccca

SEQ ID NO: 1439122 - RNA, 21 nt, Human
guuagcuaauaaaaagcuuuu

SEQ ID NO: 1439123 - RNA, 18 nt, Human
guuagcagacaggccccg

SEQ ID NO: 1439124 - RNA, 13 nt, Human
guuagcagacagg

SEQ ID NO: 1439125 - RNA, 16 nt, Human
guuagauuaagaaaua

SEQ ID NO: 1439126 - RNA, 13 nt, Human
guuagauuaagaa

SEQ ID NO: 1439127 - RNA, 11 nt, Human
guuauuuaaau

SEQ ID NO: 1439128 - RNA, 17 nt, Human
guuauuuguaauagaug

SEQ ID NO: 1439129 - RNA, 22 nt, Human
guuauuugaaaacauguuuauu

SEQ ID NO: 1439130 - RNA, 16 nt, Human
guuauuuguaauagau

SEQ ID NO: 1439131 - RNA, 21 nt, Human
aagccuggccuacaugguuga

SEQ ID NO: 1439132 - RNA, 19 nt, Human
aagccugggggccuggcug

SEQ ID NO: 1439133 - RNA, 18 nt, Human
aagccugggggccuggcu

SEQ ID NO: 1439134 - RNA, 17 nt, Human
aagccugggggccuggc

SEQ ID NO: 1439135 - RNA, 16 nt, Human
aagccugggggccugg

SEQ ID NO: 1439136 - RNA, 15 nt, Human
aagccugggggccug

SEQ ID NO: 1439137 - RNA, 22 nt, Human
aagccuggguuugguguauggu

SEQ ID NO: 1439138 - RNA, 23 nt, Human
aagccugggggccuggcuggcug

SEQ ID NO: 1439139 - RNA, 21 nt, Human
aagccugggggccuggcuggc

SEQ ID NO: 1439140 - RNA, 20 nt, Human
aagccugggggccuggcugg

SEQ ID NO: 1439141 - RNA, 19 nt, Human
guucauauguaccauguac

SEQ ID NO: 1439142 - RNA, 14 nt, Human
guucauagcccagu

SEQ ID NO: 1439143 - RNA, 13 nt, Human
guucauagcccag

SEQ ID NO: 1439144 - RNA, 15 nt, Human
aagccucugcccagg

SEQ ID NO: 1439145 - RNA, 22 nt, Human
guucauauguaccauguacaug

SEQ ID NO: 1439146 - RNA, 19 nt, Human
aagccuccuuagaaaaaaa

SEQ ID NO: 1439147 - RNA, 22 nt, Human
aagguaaaaugccaugaugccu

SEQ ID NO: 1439148 - RNA, 14 nt, Human
aagguaaaaugcca

SEQ ID NO: 1439149 - RNA, 15 nt, Human
aaggguaaacaauau

SEQ ID NO: 1439150 - RNA, 16 nt, Human
aaggguaaacaauaua

SEQ ID NO: 1439151 - RNA, 13 nt, Human
aaggguaaacaau

SEQ ID NO: 1439152 - RNA, 12 nt, Human
aaggguaaacaa

SEQ ID NO: 1439153 - RNA, 20 nt, Human
aagguuuuccucuucuauuu

SEQ ID NO: 1439154 - RNA, 19 nt, Human
aagguacaagaagcauuuu

SEQ ID NO: 1439155 - RNA, 18 nt, Human
aagguacaagaagcauuu

SEQ ID NO: 1439156 - RNA, 19 nt, Human
aagguaaauaaaaagaaag

SEQ ID NO: 1439157 - RNA, 16 nt, Human
aagguaaauaaaaaga

SEQ ID NO: 1439158 - RNA, 18 nt, Human
aagguaaaaugccaugau

SEQ ID NO: 1439159 - RNA, 13 nt, Human
aagguacuucaaa

SEQ ID NO: 1439160 - RNA, 14 nt, Human
aaguaauaaaauuc

SEQ ID NO: 1439161 - RNA, 17 nt, Human
aagguuuuuuuucaguu

SEQ ID NO: 1439162 - RNA, 17 nt, Human
aaguaauaugcacacau

SEQ ID NO: 1439163 - RNA, 19 nt, Human
guuucuaaaggcuaccuuu

SEQ ID NO: 1439164 - RNA, 15 nt, Human
aaguaauaugcacac

SEQ ID NO: 1439165 - RNA, 16 nt, Human
aaguaauaugcacaca

SEQ ID NO: 1439166 - RNA, 11 nt, Human
aagguuuuuuu

SEQ ID NO: 1439167 - RNA, 22 nt, Human
aaguaaaaacaaagaaauuaug

SEQ ID NO: 1439168 - RNA, 12 nt, Human
aaguaauaugca

SEQ ID NO: 1439169 - RNA, 13 nt, Human
aaguaaaaacaaa

SEQ ID NO: 1439170 - RNA, 20 nt, Human
aaguaaaaacaaagaaauua

SEQ ID NO: 1439171 - RNA, 18 nt, Human
aagggcuuuguuuugcac

SEQ ID NO: 1439172 - RNA, 16 nt, Human
aagggguuggauugca

SEQ ID NO: 1439173 - RNA, 17 nt, Human
aaggggaauugaggaca

SEQ ID NO: 1439174 - RNA, 14 nt, Human
aaggcuuucucuac

SEQ ID NO: 1439175 - RNA, 20 nt, Human
aaggcuuguugugcuuuuag

SEQ ID NO: 1439176 - RNA, 19 nt, Human
aaggcuuguugugcuuuua

SEQ ID NO: 1439177 - RNA, 17 nt, Human
aaggcuuguugugcuuu

SEQ ID NO: 1439178 - RNA, 19 nt, Human
aaggcuugggauuugcugu

SEQ ID NO: 1439179 - RNA, 14 nt, Human
aaggcuugggauuu

SEQ ID NO: 1439180 - RNA, 18 nt, Human
aaggcuucucucuguggg

SEQ ID NO: 1439181 - RNA, 17 nt, Human
aaggcuucucucugugg

SEQ ID NO: 1439182 - RNA, 21 nt, Human
guuucaaacauauauaacaau

SEQ ID NO: 1439183 - RNA, 22 nt, Human
guuugccuccguccccugccca

SEQ ID NO: 1439184 - RNA, 17 nt, Human
guuugcaccuuucuagu

SEQ ID NO: 1439185 - RNA, 18 nt, Human
guuugcaaaaaauguuuu

SEQ ID NO: 1439186 - RNA, 18 nt, Human
guuuggcuuucagggagg

SEQ ID NO: 1439187 - RNA, 13 nt, Human
guuuggcuuucag

SEQ ID NO: 1439188 - RNA, 14 nt, Human
guuucuguuccaaa

SEQ ID NO: 1439189 - RNA, 15 nt, Human
guuucuguuccaaau

SEQ ID NO: 1439190 - RNA, 13 nt, Human
guuucuguuccaa

SEQ ID NO: 1439191 - RNA, 12 nt, Human
guuucuguucca

SEQ ID NO: 1439192 - RNA, 22 nt, Human
guuucugucguuaaaaacagau

SEQ ID NO: 1439193 - RNA, 15 nt, Human
guuugauuucauuaa

SEQ ID NO: 1439194 - RNA, 17 nt, Human
guuucugucguuaaaaa

SEQ ID NO: 1439195 - RNA, 15 nt, Human
guuucuaagauucua

SEQ ID NO: 1439196 - RNA, 14 nt, Human
guuucuaagauucu

SEQ ID NO: 1439197 - RNA, 20 nt, Human
aaguaauaaaauucaacaaa

SEQ ID NO: 1439198 - RNA, 16 nt, Human
aaguaauacaaacuaa

SEQ ID NO: 1439199 - RNA, 22 nt, Human
guuucuaaaggcuaccuuugua

SEQ ID NO: 1439200 - RNA, 23 nt, Human
guuucuaaaggcuaccuuuguau

SEQ ID NO: 1439201 - RNA, 12 nt, Human
guuuuagguucu

SEQ ID NO: 1439202 - RNA, 21 nt, Human
guuuuagauuuucugguucua

SEQ ID NO: 1439203 - RNA, 20 nt, Human
guuuuagauuuucugguucu

SEQ ID NO: 1439204 - RNA, 21 nt, Human
guuuuacauuguugagcuauu

SEQ ID NO: 1439205 - RNA, 12 nt, Human
guuuuacauugu

SEQ ID NO: 1439206 - RNA, 20 nt, Human
guuuuacaaguuggagucac

SEQ ID NO: 1439207 - RNA, 16 nt, Human
guuuuacaaguuggag

SEQ ID NO: 1439208 - RNA, 11 nt, Human
guuuuacaaua

SEQ ID NO: 1439209 - RNA, 13 nt, Human
guuuuacaauagu

SEQ ID NO: 1439210 - RNA, 16 nt, Human
guuuuacaauaguucu

SEQ ID NO: 1439211 - RNA, 20 nt, Human
guuuuacaauaguucugugg

SEQ ID NO: 1439212 - RNA, 23 nt, Human
guuuuauaagcaucauuauuuau

SEQ ID NO: 1439213 - RNA, 21 nt, Human
guuuuagguucuaaaguucua

SEQ ID NO: 1439214 - RNA, 17 nt, Human
guuuuagguucuaaagu

SEQ ID NO: 1439215 - RNA, 16 nt, Human
guuuuagguucuaaag

SEQ ID NO: 1439216 - RNA, 15 nt, Human
guuuuagguucuaaa

SEQ ID NO: 1439217 - RNA, 13 nt, Human
guuuuagguucua

SEQ ID NO: 1439218 - RNA, 22 nt, Human
guuuuauaagcaucauuauuua

SEQ ID NO: 1439219 - RNA, 20 nt, Human
guuuuauaagcaucauuauu

SEQ ID NO: 1439220 - RNA, 12 nt, Human
guuuuauaagca

SEQ ID NO: 1439221 - RNA, 11 nt, Human
guuuucuguuc

SEQ ID NO: 1439222 - RNA, 20 nt, Human
guuuucuuaaccagaucauu

SEQ ID NO: 1439223 - RNA, 12 nt, Human
guuuucuguucu

SEQ ID NO: 1439224 - RNA, 13 nt, Human
guuuaaagaaagu

SEQ ID NO: 1439225 - RNA, 23 nt, Human
guuuaaaagacacacuuguccac

SEQ ID NO: 1439226 - RNA, 19 nt, Human
guuuaaaagacacacuugu

SEQ ID NO: 1439227 - RNA, 11 nt, Human
guuuaaaacuu

SEQ ID NO: 1439228 - RNA, 20 nt, Human
guuuaagccaaaacaauguu

SEQ ID NO: 1439229 - RNA, 17 nt, Human
guuuaagccaaaacaau

SEQ ID NO: 1439230 - RNA, 23 nt, Human
guuuaaaugaacaagagaagcau

SEQ ID NO: 1439231 - RNA, 15 nt, Human
guuuauguaauuuca

SEQ ID NO: 1439232 - RNA, 16 nt, Human
guuuacacucuuugua

SEQ ID NO: 1439233 - RNA, 20 nt, Human
guuuacaaaaauuucuguaa

SEQ ID NO: 1439234 - RNA, 19 nt, Human
guuuacaaaaucagguaac

SEQ ID NO: 1439235 - RNA, 20 nt, Human
guuuaauuuuuauuucuucc

SEQ ID NO: 1439236 - RNA, 18 nt, Human
guuuaauuuuuauuucuu

SEQ ID NO: 1439237 - RNA, 13 nt, Human
guuuaauguuuug

SEQ ID NO: 1439238 - RNA, 22 nt, Human
guuuauuaaucuuaguguauga

SEQ ID NO: 1439239 - RNA, 18 nt, Human
guuuauuaagcaucagaa

SEQ ID NO: 1439240 - RNA, 21 nt, Human
guuuauuaaucuuaguguaug

SEQ ID NO: 1439241 - RNA, 20 nt, Human
guuuauuaaucuuaguguau

SEQ ID NO: 1439242 - RNA, 18 nt, Human
guuuauuaaucuuagugu

SEQ ID NO: 1439243 - RNA, 14 nt, Human
guuuauuaaucuua

SEQ ID NO: 1439244 - RNA, 22 nt, Human
guuuauguuccauuaaacgauu

SEQ ID NO: 1439245 - RNA, 21 nt, Human
guuuauguuccauuaaacgau

SEQ ID NO: 1439246 - RNA, 17 nt, Human
guuggugcacagcacaa

SEQ ID NO: 1439247 - RNA, 18 nt, Human
guuguacuuuggaauucu

SEQ ID NO: 1439248 - RNA, 17 nt, Human
guuguaauauuucuuca

SEQ ID NO: 1439249 - RNA, 16 nt, Human
guuguauuuaacagaa

SEQ ID NO: 1439250 - RNA, 12 nt, Human
guuguauucauu

SEQ ID NO: 1439251 - RNA, 15 nt, Human
guuguauuagauguu

SEQ ID NO: 1439252 - RNA, 14 nt, Human
guuguauuagaugu

SEQ ID NO: 1439253 - RNA, 23 nt, Human
guugcugcuucucccaggcaagg

SEQ ID NO: 1439254 - RNA, 22 nt, Human
guugcugcuucucccaggcaag

SEQ ID NO: 1439255 - RNA, 18 nt, Human
guugcugcuucucccagg

SEQ ID NO: 1439256 - RNA, 19 nt, Human
aaggaugaagggcccgaga

SEQ ID NO: 1439257 - RNA, 22 nt, Human
aaggaugcacagaguuguuaca

SEQ ID NO: 1439258 - RNA, 18 nt, Human
aaggaugcacagaguugu

SEQ ID NO: 1439259 - RNA, 15 nt, Human
aaggaugcuuguaca

SEQ ID NO: 1439260 - RNA, 16 nt, Human
aaggaugcuuguacau

SEQ ID NO: 1439261 - RNA, 17 nt, Human
aaggaugcuuguacaua

SEQ ID NO: 1439262 - RNA, 19 nt, Human
aaggaugcuuguacauaau

SEQ ID NO: 1439263 - RNA, 20 nt, Human
aaggcuacuucggggcuggg

SEQ ID NO: 1439264 - RNA, 23 nt, Human
aaggcuacuucggggcugggaag

SEQ ID NO: 1439265 - RNA, 19 nt, Human
aaggcuaccuuuguauucu

SEQ ID NO: 1439266 - RNA, 21 nt, Human
aaggccaauuccuauacgcag

SEQ ID NO: 1439267 - RNA, 19 nt, Human
aaggccaagaggcuguucc

SEQ ID NO: 1439268 - RNA, 22 nt, Human
aaggaugugauuguggaaugga

SEQ ID NO: 1439269 - RNA, 17 nt, Human
aaggaugugauugugga

SEQ ID NO: 1439270 - RNA, 15 nt, Human
aaggaugugauugug

SEQ ID NO: 1439271 - RNA, 15 nt, Human
guugcccccauuucu

SEQ ID NO: 1439272 - RNA, 23 nt, Human
acaagauugguguuuuuuucuau

SEQ ID NO: 1439273 - RNA, 24 nt, Human
acaagauugguguuuuuuucuaug

SEQ ID NO: 1439274 - RNA, 22 nt, Human
acaagauugguguuuuuuucua

SEQ ID NO: 1439275 - RNA, 19 nt, Human
acaagauugguguuuuuuu

SEQ ID NO: 1439276 - RNA, 18 nt, Human
acaagauugguguuuuuu

SEQ ID NO: 1439277 - RNA, 17 nt, Human
acaagauugguguuuuu

SEQ ID NO: 1439278 - RNA, 22 nt, Human
acaagccugagggaaaggccag

SEQ ID NO: 1439279 - RNA, 12 nt, Human
acaagccugagg

SEQ ID NO: 1439280 - RNA, 23 nt, Human
acaagccucugcccaggcacugc

SEQ ID NO: 1439281 - RNA, 20 nt, Human
acaagccucugcccaggcac

SEQ ID NO: 1439282 - RNA, 18 nt, Human
acaagccucugcccaggc

SEQ ID NO: 1439283 - RNA, 13 nt, Human
acaagccucugcc

SEQ ID NO: 1439284 - RNA, 11 nt, Human
acaagccucug

SEQ ID NO: 1439285 - RNA, 18 nt, Human
acaagauggaauuuauca

SEQ ID NO: 1439286 - RNA, 16 nt, Human
acaagaccacguuucu

SEQ ID NO: 1439287 - RNA, 17 nt, Human
acaagaccacguuucua

SEQ ID NO: 1439288 - RNA, 18 nt, Human
acaagaccacguuucuaa

SEQ ID NO: 1439289 - RNA, 14 nt, Human
acaaauggccuuua

SEQ ID NO: 1439290 - RNA, 21 nt, Human
acaacaugaggccacuggaga

SEQ ID NO: 1439291 - RNA, 23 nt, Human
acaacaguuacauaauucacucu

SEQ ID NO: 1439292 - RNA, 14 nt, Human
acaacagcugccug

SEQ ID NO: 1439293 - RNA, 21 nt, Human
uagcaacuacagucuaaagcu

SEQ ID NO: 1439294 - RNA, 22 nt, Human
uagcaacuacagucuaaagcug

SEQ ID NO: 1439295 - RNA, 22 nt, Human
acaaaugccaaauuaaaaaaga

SEQ ID NO: 1439296 - RNA, 18 nt, Human
acaaaugccaaauuaaaa

SEQ ID NO: 1439297 - RNA, 21 nt, Human
acaaauucugucucuggauua

SEQ ID NO: 1439298 - RNA, 16 nt, Human
acaaauggaggccugu

SEQ ID NO: 1439299 - RNA, 16 nt, Human
acaauaaaacauuaau

SEQ ID NO: 1439300 - RNA, 12 nt, Human
acaauaaaacau

SEQ ID NO: 1439301 - RNA, 16 nt, Human
acaauaaaaauguuua

SEQ ID NO: 1439302 - RNA, 14 nt, Human
acaauaaaaauguu

SEQ ID NO: 1439303 - RNA, 18 nt, Human
acaaguuggagucacucu

SEQ ID NO: 1439304 - RNA, 17 nt, Human
acaaguuggagucacuc

SEQ ID NO: 1439305 - RNA, 16 nt, Human
acaaguuggagucacu

SEQ ID NO: 1439306 - RNA, 22 nt, Human
acaaguuauuuaaaucuguuuu

SEQ ID NO: 1439307 - RNA, 17 nt, Human
acaaguuauuuaaaucu

SEQ ID NO: 1439308 - RNA, 23 nt, Human
acaagccugagggaaaggccagc

SEQ ID NO: 1439309 - RNA, 15 nt, Human
uagcucaauuagugu

SEQ ID NO: 1439310 - RNA, 18 nt, Human
uagcucaaugagcauguu

SEQ ID NO: 1439311 - RNA, 17 nt, Human
uagcucaaugagcaugu

SEQ ID NO: 1439312 - RNA, 16 nt, Human
uagcucaaugagcaug

SEQ ID NO: 1439313 - RNA, 15 nt, Human
uagcucaaugagcau

SEQ ID NO: 1439314 - RNA, 13 nt, Human
uagcucaaugagc

SEQ ID NO: 1439315 - RNA, 12 nt, Human
uagcucaaugag

SEQ ID NO: 1439316 - RNA, 23 nt, Human
uagccuuuuuuccccagacuugu

SEQ ID NO: 1439317 - RNA, 22 nt, Human
uagccuuuuuuccccagacuug

SEQ ID NO: 1439318 - RNA, 20 nt, Human
uagccuuuuuuccccagacu

SEQ ID NO: 1439319 - RNA, 19 nt, Human
uagccuuuuuuccccagac

SEQ ID NO: 1439320 - RNA, 22 nt, Human
uagccuuuuuguauaaaauaga

SEQ ID NO: 1439321 - RNA, 17 nt, Human
uagccuuuuuguauaaa

SEQ ID NO: 1439322 - RNA, 15 nt, Human
uagccuuuuuguaua

SEQ ID NO: 1439323 - RNA, 15 nt, Human
uagccuucucuguuc

SEQ ID NO: 1439324 - RNA, 14 nt, Human
uagccuucucuguu

SEQ ID NO: 1439325 - RNA, 13 nt, Human
uagccuucucugu

SEQ ID NO: 1439326 - RNA, 15 nt, Human
acaaugacaaagcag

SEQ ID NO: 1439327 - RNA, 23 nt, Human
acaaugaauaaaaacucaaggag

SEQ ID NO: 1439328 - RNA, 18 nt, Human
acaaugaaaacucuuugc

SEQ ID NO: 1439329 - RNA, 21 nt, Human
acaaugaaaacucuuugcugc

SEQ ID NO: 1439330 - RNA, 24 nt, Human
acaaugaacaucccuuuuucaaug

SEQ ID NO: 1439331 - RNA, 14 nt, Human
uagccuugcuuguu

SEQ ID NO: 1439332 - RNA, 15 nt, Human
uagccuugcuuguua

SEQ ID NO: 1439333 - RNA, 13 nt, Human
uagccuugcuugu

SEQ ID NO: 1439334 - RNA, 12 nt, Human
uagccuugcuug

SEQ ID NO: 1439335 - RNA, 22 nt, Human
uagccuucucuguucauuuccu

SEQ ID NO: 1439336 - RNA, 20 nt, Human
uagccuucucuguucauuuc

SEQ ID NO: 1439337 - RNA, 16 nt, Human
uagccuucucuguuca

SEQ ID NO: 1439338 - RNA, 16 nt, Human
uagcuacuaauuuuaa

SEQ ID NO: 1439339 - RNA, 16 nt, Human
acaaaacuagagacuc

SEQ ID NO: 1439340 - RNA, 23 nt, Human
acaaaacuacaugagaacaaaca

SEQ ID NO: 1439341 - RNA, 17 nt, Human
acaaaacuacaugagaa

SEQ ID NO: 1439342 - RNA, 19 nt, Human
aauuuuuuuuuccuagccc

SEQ ID NO: 1439343 - RNA, 16 nt, Human
acaaaacugcauuuca

SEQ ID NO: 1439344 - RNA, 23 nt, Human
acaaaagaagcccggcuccuggu

SEQ ID NO: 1439345 - RNA, 20 nt, Human
acaaaagaagcccggcuccu

SEQ ID NO: 1439346 - RNA, 14 nt, Human
acaaaacugcauuu

SEQ ID NO: 1439347 - RNA, 16 nt, Human
acaaagcccuuuuaua

SEQ ID NO: 1439348 - RNA, 15 nt, Human
acaaagcccuuuuau

SEQ ID NO: 1439349 - RNA, 15 nt, Human
acaaaggagccugug

SEQ ID NO: 1439350 - RNA, 14 nt, Human
acaaaggagccugu

SEQ ID NO: 1439351 - RNA, 23 nt, Human
acaaaggagccugugaacccagg

SEQ ID NO: 1439352 - RNA, 13 nt, Human
acaaaggagccug

SEQ ID NO: 1439353 - RNA, 19 nt, Human
acaaaguuuaccagaaagc

SEQ ID NO: 1439354 - RNA, 16 nt, Human
acaaaggagccuguga

SEQ ID NO: 1439355 - RNA, 19 nt, Human
uagcaaagauaucucaucu

SEQ ID NO: 1439356 - RNA, 17 nt, Human
uagcaaagauaucucau

SEQ ID NO: 1439357 - RNA, 22 nt, Human
uagaugcauuuggguccaggag

SEQ ID NO: 1439358 - RNA, 23 nt, Human
uagaugcauuuggguccaggagg

SEQ ID NO: 1439359 - RNA, 21 nt, Human
uagaugcauuuggguccagga

SEQ ID NO: 1439360 - RNA, 20 nt, Human
uagaugcauuuggguccagg

SEQ ID NO: 1439361 - RNA, 19 nt, Human
uagaugcauuuggguccag

SEQ ID NO: 1439362 - RNA, 15 nt, Human
uagaugcauuugggu

SEQ ID NO: 1439363 - RNA, 21 nt, Human
uagaugcaguucugaagaaga

SEQ ID NO: 1439364 - RNA, 16 nt, Human
uagaugaaguuuuaca

SEQ ID NO: 1439365 - RNA, 15 nt, Human
uagaugaacucaacu

SEQ ID NO: 1439366 - RNA, 15 nt, Human
uagaucuggcauguu

SEQ ID NO: 1439367 - RNA, 13 nt, Human
uagaucucugaag

SEQ ID NO: 1439368 - RNA, 16 nt, Human
uagaucuggcauguua

SEQ ID NO: 1439369 - RNA, 23 nt, Human
acaaauauuuauuuucuuucugu

SEQ ID NO: 1439370 - RNA, 22 nt, Human
acaaauauuuauuuucuuucug

SEQ ID NO: 1439371 - RNA, 18 nt, Human
acaaauauuuauuuucuu

SEQ ID NO: 1439372 - RNA, 12 nt, Human
acaaauauuuau

SEQ ID NO: 1439373 - RNA, 21 nt, Human
acaaauagucggauuagaaau

SEQ ID NO: 1439374 - RNA, 17 nt, Human
uagauaguuagaaccug

SEQ ID NO: 1439375 - RNA, 17 nt, Human
uagauaggccaugggca

SEQ ID NO: 1439376 - RNA, 22 nt, Human
uagauaggucagugcaaauacu

SEQ ID NO: 1439377 - RNA, 14 nt, Human
aauuuuuuuuaaca

SEQ ID NO: 1439378 - RNA, 18 nt, Human
aauuuuuuuguauuuuag

SEQ ID NO: 1439379 - RNA, 22 nt, Human
aauuuuuuuaucgucacugcuu

SEQ ID NO: 1439380 - RNA, 18 nt, Human
aauuuuuuuagaaagcau

SEQ ID NO: 1439381 - RNA, 20 nt, Human
aauuuuuuuagaaagcauuu

SEQ ID NO: 1439382 - RNA, 23 nt, Human
aauuuuuuuuauuaguauuguug

SEQ ID NO: 1439383 - RNA, 22 nt, Human
aauuuuuuuuauuaguauuguu

SEQ ID NO: 1439384 - RNA, 20 nt, Human
aauuuuuuuuauuaguauug

SEQ ID NO: 1439385 - RNA, 19 nt, Human
aauuuuuuuuaacauuccu

SEQ ID NO: 1439386 - RNA, 18 nt, Human
aauuuuuuuuaacauucc

SEQ ID NO: 1439387 - RNA, 17 nt, Human
aauuuuuuuuaacauuc

SEQ ID NO: 1439388 - RNA, 15 nt, Human
aauuuuuuuuaacau

SEQ ID NO: 1439389 - RNA, 12 nt, Human
aauuuuuuuuac

SEQ ID NO: 1439390 - RNA, 16 nt, Human
aauuuuuuuuacauuu

SEQ ID NO: 1439391 - RNA, 19 nt, Human
aauuuuuuuaauuuacaaa

SEQ ID NO: 1439392 - RNA, 15 nt, Human
aauuuuuuuagaaag

SEQ ID NO: 1439393 - RNA, 17 nt, Human
aauuuuuuguugacauu

SEQ ID NO: 1439394 - RNA, 22 nt, Human
aauuuuuuguugacauuagucu

SEQ ID NO: 1439395 - RNA, 14 nt, Human
aauuuuuguaauuu

SEQ ID NO: 1439396 - RNA, 16 nt, Human
aauuuuucuucuugag

SEQ ID NO: 1439397 - RNA, 14 nt, Human
aauuuuucuucuug

SEQ ID NO: 1439398 - RNA, 13 nt, Human
aauuuuucuucuu

SEQ ID NO: 1439399 - RNA, 13 nt, Human
aauuuuugauacu

SEQ ID NO: 1439400 - RNA, 16 nt, Human
aauuuuuacagaauug

SEQ ID NO: 1439401 - RNA, 14 nt, Human
aauuuuuacagaau

SEQ ID NO: 1439402 - RNA, 12 nt, Human
aauuuguugcau

SEQ ID NO: 1439403 - RNA, 21 nt, Human
aauuuguucuuguauuuauug

SEQ ID NO: 1439404 - RNA, 16 nt, Human
aauuuguucuuguauu

SEQ ID NO: 1439405 - RNA, 15 nt, Human
aauuuguucuuguau

SEQ ID NO: 1439406 - RNA, 19 nt, Human
aauuuuuaaacaaguauuu

SEQ ID NO: 1439407 - RNA, 15 nt, Human
aauuuuuaaacaagu

SEQ ID NO: 1439408 - RNA, 13 nt, Human
aauuuuuaaacaa

SEQ ID NO: 1439409 - RNA, 22 nt, Human
aauuuuuaaucuuuaauuuuac

SEQ ID NO: 1439410 - RNA, 14 nt, Human
aauuuguucuugua

SEQ ID NO: 1439411 - RNA, 18 nt, Human
aauuuguuauuuugcaac

SEQ ID NO: 1439412 - RNA, 21 nt, Human
aauuugguuuucacauuggaa

SEQ ID NO: 1439413 - RNA, 15 nt, Human
aauuugguuuucaca

SEQ ID NO: 1439414 - RNA, 22 nt, Human
aauuugccuguaacaagccaga

SEQ ID NO: 1439415 - RNA, 16 nt, Human
aauuugccuguaacaa

SEQ ID NO: 1439416 - RNA, 15 nt, Human
aauuugccugcuggg

SEQ ID NO: 1439417 - RNA, 13 nt, Human
aauuugccugcug

SEQ ID NO: 1439418 - RNA, 20 nt, Human
aauuugcauuaaauuacaga

SEQ ID NO: 1439419 - RNA, 23 nt, Human
aauuugcauuaaauucacaaacu

SEQ ID NO: 1439420 - RNA, 21 nt, Human
aauuugggggacuuacaugau

SEQ ID NO: 1439421 - RNA, 18 nt, Human
aauuugggggacuuacau

SEQ ID NO: 1439422 - RNA, 13 nt, Human
aauuugguuuuca

SEQ ID NO: 1439423 - RNA, 21 nt, Human
uacuuuuaaacagugagccug

SEQ ID NO: 1439424 - RNA, 15 nt, Human
uacuuuuaaacugug

SEQ ID NO: 1439425 - RNA, 14 nt, Human
uacuuuuaaacugu

SEQ ID NO: 1439426 - RNA, 21 nt, Human
aauuugcauuaaauucacaaa

SEQ ID NO: 1439427 - RNA, 18 nt, Human
aauuugcauuaaauucac

SEQ ID NO: 1439428 - RNA, 17 nt, Human
aauuugcauuaaauuca

SEQ ID NO: 1439429 - RNA, 17 nt, Human
aauuugcauuaaauuac

SEQ ID NO: 1439430 - RNA, 15 nt, Human
aauuugcauuaaauu

SEQ ID NO: 1439431 - RNA, 13 nt, Human
uacuuuuuguuau

SEQ ID NO: 1439432 - RNA, 17 nt, Human
uacuuccccauggcccu

SEQ ID NO: 1439433 - RNA, 14 nt, Human
uacuuccaaacuaa

SEQ ID NO: 1439434 - RNA, 19 nt, Human
uacuuauuuuugacagugu

SEQ ID NO: 1439435 - RNA, 17 nt, Human
uacuuauuuuugacagu

SEQ ID NO: 1439436 - RNA, 18 nt, Human
uacuuauuuguauauggu

SEQ ID NO: 1439437 - RNA, 18 nt, Human
uacuucgacacuguucuu

SEQ ID NO: 1439438 - RNA, 20 nt, Human
uacuucggggcugggaaguc

SEQ ID NO: 1439439 - RNA, 16 nt, Human
uacuuccuccucccca

SEQ ID NO: 1439440 - RNA, 14 nt, Human
uacuuccuccuccc

SEQ ID NO: 1439441 - RNA, 20 nt, Human
aauuugauugauuugaagaa

SEQ ID NO: 1439442 - RNA, 17 nt, Human
aauuugauugauuugaa

SEQ ID NO: 1439443 - RNA, 16 nt, Human
uacuuauauggaaauu

SEQ ID NO: 1439444 - RNA, 17 nt, Human
uacuuauauaauugcca

SEQ ID NO: 1439445 - RNA, 16 nt, Human
aauuugauugauuuga

SEQ ID NO: 1439446 - RNA, 15 nt, Human
aauuugauugauuug

SEQ ID NO: 1439447 - RNA, 14 nt, Human
aauuugauugauuu

SEQ ID NO: 1439448 - RNA, 13 nt, Human
aauuugauugauu

SEQ ID NO: 1439449 - RNA, 12 nt, Human
aauuugauugau

SEQ ID NO: 1439450 - RNA, 17 nt, Human
aauuugauuauuaacau

SEQ ID NO: 1439451 - RNA, 15 nt, Human
aauuugaaacacuuu

SEQ ID NO: 1439452 - RNA, 14 nt, Human
uacuucuugaaggu

SEQ ID NO: 1439453 - RNA, 20 nt, Human
uacuucuguaauugugugga

SEQ ID NO: 1439454 - RNA, 17 nt, Human
uacuucuguaauugugu

SEQ ID NO: 1439455 - RNA, 16 nt, Human
uacuucuguaauugug

SEQ ID NO: 1439456 - RNA, 13 nt, Human
uacuucugaggua

SEQ ID NO: 1439457 - RNA, 20 nt, Human
uacuucucauuuuuuaaaaa

SEQ ID NO: 1439458 - RNA, 22 nt, Human
uacuucguguccgacucuucug

SEQ ID NO: 1439459 - RNA, 19 nt, Human
uacuucuuaggguuaugau

SEQ ID NO: 1439460 - RNA, 14 nt, Human
uacuuugacuuuuu

SEQ ID NO: 1439461 - RNA, 15 nt, Human
uacuuugacaguguu

SEQ ID NO: 1439462 - RNA, 22 nt, Human
uacuuugaauguguuucacagu

SEQ ID NO: 1439463 - RNA, 20 nt, Human
uacuuugaauguguuucaca

SEQ ID NO: 1439464 - RNA, 18 nt, Human
uacuuugaauguguuuca

SEQ ID NO: 1439465 - RNA, 14 nt, Human
uacuuugaaugugu

SEQ ID NO: 1439466 - RNA, 13 nt, Human
uacuuugaaugug

SEQ ID NO: 1439467 - RNA, 18 nt, Human
uacuuugaagucauacca

SEQ ID NO: 1439468 - RNA, 14 nt, Human
uacuuugaagucau

SEQ ID NO: 1439469 - RNA, 15 nt, Human
uacuuugugcauucu

SEQ ID NO: 1439470 - RNA, 20 nt, Human
uacuuugacaguguuuuuag

SEQ ID NO: 1439471 - RNA, 19 nt, Human
uacuuucccuacccucuag

SEQ ID NO: 1439472 - RNA, 21 nt, Human
uacuuucccuacccucuagag

SEQ ID NO: 1439473 - RNA, 18 nt, Human
uacuuucccuacccucua

SEQ ID NO: 1439474 - RNA, 15 nt, Human
uacuuucccuacccu

SEQ ID NO: 1439475 - RNA, 22 nt, Human
uacuucuguaauuguguggauu

SEQ ID NO: 1439476 - RNA, 19 nt, Human
uacuucuuguguguaugca

SEQ ID NO: 1439477 - RNA, 20 nt, Human
uacuucuuuuuucaaaagaa

SEQ ID NO: 1439478 - RNA, 22 nt, Human
uacuucuuuuuucaaaagaaag

SEQ ID NO: 1439479 - RNA, 15 nt, Human
uacuugaaaauuaac

SEQ ID NO: 1439480 - RNA, 16 nt, Human
aauuuaguguauccau

SEQ ID NO: 1439481 - RNA, 17 nt, Human
aauuuaguguauccaua

SEQ ID NO: 1439482 - RNA, 13 nt, Human
aauuuaguauuuu

SEQ ID NO: 1439483 - RNA, 19 nt, Human
aauugcuuguuugcuucaa

SEQ ID NO: 1439484 - RNA, 16 nt, Human
aauugcuuguuugcuu

SEQ ID NO: 1439485 - RNA, 19 nt, Human
aauugcuuauuuauuguau

SEQ ID NO: 1439486 - RNA, 22 nt, Human
aauugcuuauuuauuguauucu

SEQ ID NO: 1439487 - RNA, 13 nt, Human
aauugcuuauuua

SEQ ID NO: 1439488 - RNA, 23 nt, Human
aauugcauugacuuuccccacca

SEQ ID NO: 1439489 - RNA, 20 nt, Human
aauuggaagcugcccugccc

SEQ ID NO: 1439490 - RNA, 15 nt, Human
aauuggaaagcaggu

SEQ ID NO: 1439491 - RNA, 15 nt, Human
aauuggagcucgugg

SEQ ID NO: 1439492 - RNA, 13 nt, Human
aauuuaaauguua

SEQ ID NO: 1439493 - RNA, 11 nt, Human
aauuuaaaugu

SEQ ID NO: 1439494 - RNA, 17 nt, Human
aauuucuaggacugaau

SEQ ID NO: 1439495 - RNA, 17 nt, Human
aauuuauuauggcacau

SEQ ID NO: 1439496 - RNA, 22 nt, Human
aauuucuaggacugaauuauga

SEQ ID NO: 1439497 - RNA, 18 nt, Human
aauuucuaggacugaauu

SEQ ID NO: 1439498 - RNA, 13 nt, Human
aauuuauuauggc

SEQ ID NO: 1439499 - RNA, 14 nt, Human
aauuuauuauggca

SEQ ID NO: 1439500 - RNA, 20 nt, Human
aauuucuuaacuucuugcuu

SEQ ID NO: 1439501 - RNA, 16 nt, Human
aauuucuuaacuucuu

SEQ ID NO: 1439502 - RNA, 15 nt, Human
aauuucuuaacuucu

SEQ ID NO: 1439503 - RNA, 23 nt, Human
aauuucuaggacugaauuaugaa

SEQ ID NO: 1439504 - RNA, 16 nt, Human
aauuuauauuguaaau

SEQ ID NO: 1439505 - RNA, 22 nt, Human
aauuuauaaaaagguguuuuga

SEQ ID NO: 1439506 - RNA, 16 nt, Human
aauuuauaaaaaggug

SEQ ID NO: 1439507 - RNA, 21 nt, Human
aauuuaguuucauauaaagua

SEQ ID NO: 1439508 - RNA, 22 nt, Human
aauuuaguuucauauaaaguau

SEQ ID NO: 1439509 - RNA, 14 nt, Human
aauuuaguuucaua

SEQ ID NO: 1439510 - RNA, 12 nt, Human
aauuuaguuuca

SEQ ID NO: 1439511 - RNA, 23 nt, Human
aauuuauaacguguucaauauuu

SEQ ID NO: 1439512 - RNA, 22 nt, Human
aauuuauaaacuuuuuucuuac

SEQ ID NO: 1439513 - RNA, 19 nt, Human
aauugaauacuuugaaugu

SEQ ID NO: 1439514 - RNA, 18 nt, Human
aauugaauacuuugaaug

SEQ ID NO: 1439515 - RNA, 16 nt, Human
aauugaauacuuugaa

SEQ ID NO: 1439516 - RNA, 16 nt, Human
aauguguguauaugga

SEQ ID NO: 1439517 - RNA, 17 nt, Human
aauguguguauauggac

SEQ ID NO: 1439518 - RNA, 15 nt, Human
aauguguguauaugg

SEQ ID NO: 1439519 - RNA, 13 nt, Human
aauguguguauau

SEQ ID NO: 1439520 - RNA, 17 nt, Human
aaugugucuuuagauag

SEQ ID NO: 1439521 - RNA, 23 nt, Human
aaugugucuuuagauagcccugu

SEQ ID NO: 1439522 - RNA, 15 nt, Human
aaugugucuuuagau

SEQ ID NO: 1439523 - RNA, 14 nt, Human
aaugugucuuuaga

SEQ ID NO: 1439524 - RNA, 13 nt, Human
aaugugucuuuag

SEQ ID NO: 1439525 - RNA, 12 nt, Human
aaugugucuuua

SEQ ID NO: 1439526 - RNA, 11 nt, Human
aaugugucuuu

SEQ ID NO: 1439527 - RNA, 14 nt, Human
aauguguauaaaca

SEQ ID NO: 1439528 - RNA, 15 nt, Human
aauguguauaaacaa

SEQ ID NO: 1439529 - RNA, 22 nt, Human
aauguguaguucauguaaauaa

SEQ ID NO: 1439530 - RNA, 21 nt, Human
aauguguaguucauguaaaua

SEQ ID NO: 1439531 - RNA, 16 nt, Human
aauguguaguucaugu

SEQ ID NO: 1439532 - RNA, 16 nt, Human
aaugugguagccucac

SEQ ID NO: 1439533 - RNA, 14 nt, Human
aaugugauguucua

SEQ ID NO: 1439534 - RNA, 14 nt, Human
aaugugggauuaug

SEQ ID NO: 1439535 - RNA, 18 nt, Human
aauugaaugcaaaccaua

SEQ ID NO: 1439536 - RNA, 15 nt, Human
aauugaauauuauuc

SEQ ID NO: 1439537 - RNA, 22 nt, Human
aauugaaucacugcucacacug

SEQ ID NO: 1439538 - RNA, 15 nt, Human
aauugaaucacugcu

SEQ ID NO: 1439539 - RNA, 14 nt, Human
aauugaauauuauu

SEQ ID NO: 1439540 - RNA, 21 nt, Human
aauugaauacuuugaaugugu

SEQ ID NO: 1439541 - RNA, 15 nt, Human
uacgcuuugauucau

SEQ ID NO: 1439542 - RNA, 14 nt, Human
uacgcuuugauuca

SEQ ID NO: 1439543 - RNA, 14 nt, Human
uacgcuguccagaa

SEQ ID NO: 1439544 - RNA, 17 nt, Human
uacggacagagaccaag

SEQ ID NO: 1439545 - RNA, 17 nt, Human
uacggauuuucaguuac

SEQ ID NO: 1439546 - RNA, 15 nt, Human
uacggauuuucaguu

SEQ ID NO: 1439547 - RNA, 19 nt, Human
uacuagagucugaacagcu

SEQ ID NO: 1439548 - RNA, 12 nt, Human
uacuauuucaca

SEQ ID NO: 1439549 - RNA, 13 nt, Human
uacuauuucacaa

SEQ ID NO: 1439550 - RNA, 16 nt, Human
uacuauuuaacugacu

SEQ ID NO: 1439551 - RNA, 19 nt, Human
uacuauuuaacugacuauu

SEQ ID NO: 1439552 - RNA, 14 nt, Human
uacuauuuaacuga

SEQ ID NO: 1439553 - RNA, 13 nt, Human
uacuauuuaacug

SEQ ID NO: 1439554 - RNA, 12 nt, Human
uacuauuuaacu

SEQ ID NO: 1439555 - RNA, 22 nt, Human
uacuauuuaaagccuccucauc

SEQ ID NO: 1439556 - RNA, 21 nt, Human
uacuauuuaaagccuccucau

SEQ ID NO: 1439557 - RNA, 19 nt, Human
uacuauuuaaagccuccuc

SEQ ID NO: 1439558 - RNA, 12 nt, Human
uacuauuuaaag

SEQ ID NO: 1439559 - RNA, 21 nt, Human
uacuagggaucccucaucugu

SEQ ID NO: 1439560 - RNA, 20 nt, Human
uacuagggagccauuugaga

SEQ ID NO: 1439561 - RNA, 19 nt, Human
uacuagggagccauuugag

SEQ ID NO: 1439562 - RNA, 18 nt, Human
uacuagggaaaugccuuu

SEQ ID NO: 1439563 - RNA, 22 nt, Human
aauugauuugcauugaacacaa

SEQ ID NO: 1439564 - RNA, 20 nt, Human
aauugauuugcauugaacac

SEQ ID NO: 1439565 - RNA, 16 nt, Human
aauugauuugcauuga

SEQ ID NO: 1439566 - RNA, 14 nt, Human
aauugauuugcauu

SEQ ID NO: 1439567 - RNA, 13 nt, Human
aauugauuugcau

SEQ ID NO: 1439568 - RNA, 22 nt, Human
aauugcacgcggagugaguuuu

SEQ ID NO: 1439569 - RNA, 20 nt, Human
aauugcacaccuuggaauuc

SEQ ID NO: 1439570 - RNA, 20 nt, Human
aauugauuuuuauaaauacu

SEQ ID NO: 1439571 - RNA, 18 nt, Human
aauugcaaaucuugaaau

SEQ ID NO: 1439572 - RNA, 14 nt, Human
aauugcaaaucuug

SEQ ID NO: 1439573 - RNA, 14 nt, Human
aauugauuuugaac

SEQ ID NO: 1439574 - RNA, 13 nt, Human
aauugauuuugaa

SEQ ID NO: 1439575 - RNA, 23 nt, Human
aauugauuugcauugaacacaaa

SEQ ID NO: 1439576 - RNA, 18 nt, Human
aauugcauugacuuuccc

SEQ ID NO: 1439577 - RNA, 11 nt, Human
aauugcauuga

SEQ ID NO: 1439578 - RNA, 21 nt, Human
aauugcauugacuuuccccac

SEQ ID NO: 1439579 - RNA, 20 nt, Human
aauugcauugacuuucccca

SEQ ID NO: 1439580 - RNA, 19 nt, Human
uacuguacagcuggcucua

SEQ ID NO: 1439581 - RNA, 19 nt, Human
aauugagaaaaauauauac

SEQ ID NO: 1439582 - RNA, 23 nt, Human
aauugagaaaaauauauacuaaa

SEQ ID NO: 1439583 - RNA, 18 nt, Human
uacuguacaugaaaacac

SEQ ID NO: 1439584 - RNA, 15 nt, Human
aauugagaaggaaaa

SEQ ID NO: 1439585 - RNA, 18 nt, Human
aauugaggacacugauau

SEQ ID NO: 1439586 - RNA, 16 nt, Human
uacuguaauuccucaa

SEQ ID NO: 1439587 - RNA, 15 nt, Human
uacuguaauuccuca

SEQ ID NO: 1439588 - RNA, 13 nt, Human
uacuguaauuccu

SEQ ID NO: 1439589 - RNA, 19 nt, Human
uacuguacagacagaaaaa

SEQ ID NO: 1439590 - RNA, 14 nt, Human
uacuguacagcugg

SEQ ID NO: 1439591 - RNA, 23 nt, Human
uacuguacagacagaaaaaacug

SEQ ID NO: 1439592 - RNA, 18 nt, Human
uacugguccaaaagauug

SEQ ID NO: 1439593 - RNA, 13 nt, Human
uacugguccaaaa

SEQ ID NO: 1439594 - RNA, 24 nt, Human
uacuggggaaacuggccauggccu

SEQ ID NO: 1439595 - RNA, 21 nt, Human
uacuggggaaacuggccaugg

SEQ ID NO: 1439596 - RNA, 19 nt, Human
uacuggggaaacuggccau

SEQ ID NO: 1439597 - RNA, 16 nt, Human
uacuggggaaacuggc

SEQ ID NO: 1439598 - RNA, 17 nt, Human
uacugggaaggcuacuu

SEQ ID NO: 1439599 - RNA, 13 nt, Human
uacugggaaggcu

SEQ ID NO: 1439600 - RNA, 22 nt, Human
uacugacuuugcuugcuuugaa

SEQ ID NO: 1439601 - RNA, 20 nt, Human
uacugacuuugcuugcuuug

SEQ ID NO: 1439602 - RNA, 18 nt, Human
uacugacuuugcuugcuu

SEQ ID NO: 1439603 - RNA, 18 nt, Human
uacuggucuuguggaauu

SEQ ID NO: 1439604 - RNA, 19 nt, Human
uacuggucucucuaugccu

SEQ ID NO: 1439605 - RNA, 13 nt, Human
uacuggucucucu

SEQ ID NO: 1439606 - RNA, 12 nt, Human
uacuggucucuc

SEQ ID NO: 1439607 - RNA, 22 nt, Human
uacuggggaaacuggccauggc

SEQ ID NO: 1439608 - RNA, 23 nt, Human
uacugguccaaaagauugcugaa

SEQ ID NO: 1439609 - RNA, 15 nt, Human
uacuguaauuuguga

SEQ ID NO: 1439610 - RNA, 16 nt, Human
uacuguaauuugugau

SEQ ID NO: 1439611 - RNA, 17 nt, Human
uacuguaauuugugaua

SEQ ID NO: 1439612 - RNA, 16 nt, Human
uacucuuucuguauau

SEQ ID NO: 1439613 - RNA, 15 nt, Human
uacucuuucuguaua

SEQ ID NO: 1439614 - RNA, 14 nt, Human
uacucuuucuguau

SEQ ID NO: 1439615 - RNA, 22 nt, Human
uacucuccccacgagggcuggc

SEQ ID NO: 1439616 - RNA, 13 nt, Human
uacucuuucugua

SEQ ID NO: 1439617 - RNA, 20 nt, Human
uacucuccccacgagggcug

SEQ ID NO: 1439618 - RNA, 15 nt, Human
uacucuccccacgag

SEQ ID NO: 1439619 - RNA, 14 nt, Human
uacucuagaugaag

SEQ ID NO: 1439620 - RNA, 17 nt, Human
uacugacuuugcuugcu

SEQ ID NO: 1439621 - RNA, 16 nt, Human
uacugacuuugcuugc

SEQ ID NO: 1439622 - RNA, 22 nt, Human
uacugacauguggggccagguc

SEQ ID NO: 1439623 - RNA, 22 nt, Human
uacugaaauaaacgucuuaaau

SEQ ID NO: 1439624 - RNA, 19 nt, Human
uacugaaauaaacgucuua

SEQ ID NO: 1439625 - RNA, 15 nt, Human
uauccuccaccgucu

SEQ ID NO: 1439626 - RNA, 16 nt, Human
uauccuaucucuccaa

SEQ ID NO: 1439627 - RNA, 20 nt, Human
uaucucagaaagugccugac

SEQ ID NO: 1439628 - RNA, 19 nt, Human
uaucucagaaagugccuga

SEQ ID NO: 1439629 - RNA, 13 nt, Human
uaucucagaaagu

SEQ ID NO: 1439630 - RNA, 12 nt, Human
uaucucagaaag

SEQ ID NO: 1439631 - RNA, 10 nt, Human
uaucucagaa

SEQ ID NO: 1439632 - RNA, 19 nt, Human
uaucccuccuguugggaga

SEQ ID NO: 1439633 - RNA, 20 nt, Human
uaucccuccuguugggagag

SEQ ID NO: 1439634 - RNA, 14 nt, Human
uaucccuccuguug

SEQ ID NO: 1439635 - RNA, 15 nt, Human
uaucccucaccugua

SEQ ID NO: 1439636 - RNA, 15 nt, Human
uaucccuacauguau

SEQ ID NO: 1439637 - RNA, 19 nt, Human
uaucccuacuguaauuugu

SEQ ID NO: 1439638 - RNA, 20 nt, Human
uaucccuacuguaauuugug

SEQ ID NO: 1439639 - RNA, 20 nt, Human
uauauuuauuacuguaagaa

SEQ ID NO: 1439640 - RNA, 19 nt, Human
uauauuuauuacuguaaga

SEQ ID NO: 1439641 - RNA, 15 nt, Human
uauauuuauuacugu

SEQ ID NO: 1439642 - RNA, 14 nt, Human
acagagagucugga

SEQ ID NO: 1439643 - RNA, 12 nt, Human
uaucucuguguu

SEQ ID NO: 1439644 - RNA, 23 nt, Human
uaucucugugugcacaaauauuu

SEQ ID NO: 1439645 - RNA, 18 nt, Human
uaucucugugugcacaaa

SEQ ID NO: 1439646 - RNA, 17 nt, Human
uaucucugugugcacaa

SEQ ID NO: 1439647 - RNA, 16 nt, Human
uaucucugugugcaca

SEQ ID NO: 1439648 - RNA, 11 nt, Human
uaucucugugu

SEQ ID NO: 1439649 - RNA, 20 nt, Human
uaucucuacugaaugucauu

SEQ ID NO: 1439650 - RNA, 14 nt, Human
acagagccaggaga

SEQ ID NO: 1439651 - RNA, 13 nt, Human
acagagccaggag

SEQ ID NO: 1439652 - RNA, 11 nt, Human
acagagccagg

SEQ ID NO: 1439653 - RNA, 22 nt, Human
acagagccaggagaagcucagc

SEQ ID NO: 1439654 - RNA, 17 nt, Human
acagagccaggagaagc

SEQ ID NO: 1439655 - RNA, 16 nt, Human
acagagccaggagaag

SEQ ID NO: 1439656 - RNA, 16 nt, Human
acagagauucugaacu

SEQ ID NO: 1439657 - RNA, 16 nt, Human
acagagcuucccugac

SEQ ID NO: 1439658 - RNA, 15 nt, Human
acagagcuucccuga

SEQ ID NO: 1439659 - RNA, 14 nt, Human
acagagcuucccug

SEQ ID NO: 1439660 - RNA, 16 nt, Human
acagaguuguuacauu

SEQ ID NO: 1439661 - RNA, 20 nt, Human
acagagccaggagaagcuca

SEQ ID NO: 1439662 - RNA, 23 nt, Human
acagagcuggagaugaggccaga

SEQ ID NO: 1439663 - RNA, 17 nt, Human
acagaguuguuacauuu

SEQ ID NO: 1439664 - RNA, 18 nt, Human
acagaguuguuacauuuu

SEQ ID NO: 1439665 - RNA, 19 nt, Human
acagaguuguuacauuuuu

SEQ ID NO: 1439666 - RNA, 20 nt, Human
acagaguuguuacauuuuua

SEQ ID NO: 1439667 - RNA, 16 nt, Human
acagcaaaugcaaaaa

SEQ ID NO: 1439668 - RNA, 15 nt, Human
acagcaaacaggugc

SEQ ID NO: 1439669 - RNA, 22 nt, Human
acagcaaacaggugcuaauuug

SEQ ID NO: 1439670 - RNA, 14 nt, Human
acagauggccagcc

SEQ ID NO: 1439671 - RNA, 22 nt, Human
acagaugccuccuuccucuuuu

SEQ ID NO: 1439672 - RNA, 18 nt, Human
acagaugccuccuuccuc

SEQ ID NO: 1439673 - RNA, 17 nt, Human
acagaugccuccuuccu

SEQ ID NO: 1439674 - RNA, 13 nt, Human
acagaugccuccu

SEQ ID NO: 1439675 - RNA, 16 nt, Human
acagaugggcaaauua

SEQ ID NO: 1439676 - RNA, 22 nt, Human
acagauggcacuuugaaggggc

SEQ ID NO: 1439677 - RNA, 21 nt, Human
acagaguuguuacauuuuuaa

SEQ ID NO: 1439678 - RNA, 22 nt, Human
acagaguuguuacauuuuuaag

SEQ ID NO: 1439679 - RNA, 23 nt, Human
uaucuuggugaauuuuuuuuucc

SEQ ID NO: 1439680 - RNA, 20 nt, Human
acagcaacaauuuaugaauu

SEQ ID NO: 1439681 - RNA, 17 nt, Human
acagcaacaauuuauga

SEQ ID NO: 1439682 - RNA, 16 nt, Human
acagcaaggagauuua

SEQ ID NO: 1439683 - RNA, 14 nt, Human
acagcaaccccagg

SEQ ID NO: 1439684 - RNA, 21 nt, Human
acagcccuucuuuccacagaa

SEQ ID NO: 1439685 - RNA, 20 nt, Human
acagcccuucuuuccacaga

SEQ ID NO: 1439686 - RNA, 23 nt, Human
acagaaacuaaacucuuaccaua

SEQ ID NO: 1439687 - RNA, 20 nt, Human
acagaaaccuuuuuaaaaau

SEQ ID NO: 1439688 - RNA, 15 nt, Human
acagaaaccuuuuua

SEQ ID NO: 1439689 - RNA, 17 nt, Human
acagaaacaaaaacacu

SEQ ID NO: 1439690 - RNA, 12 nt, Human
acagaaacaaaa

SEQ ID NO: 1439691 - RNA, 16 nt, Human
acacuuugguaccaga

SEQ ID NO: 1439692 - RNA, 19 nt, Human
acacuuugccauauuuuca

SEQ ID NO: 1439693 - RNA, 22 nt, Human
acacuuugcacugauauaucau

SEQ ID NO: 1439694 - RNA, 19 nt, Human
acacuuugcacugauauau

SEQ ID NO: 1439695 - RNA, 17 nt, Human
acacuuugcacugauau

SEQ ID NO: 1439696 - RNA, 22 nt, Human
acacuuuaauuaccaaccuguu

SEQ ID NO: 1439697 - RNA, 17 nt, Human
acacuuguccacauagg

SEQ ID NO: 1439698 - RNA, 23 nt, Human
acacuguucuuagcucaaugagc

SEQ ID NO: 1439699 - RNA, 16 nt, Human
acacuguuucaaacuu

SEQ ID NO: 1439700 - RNA, 15 nt, Human
acacuguuucaaacu

SEQ ID NO: 1439701 - RNA, 22 nt, Human
uauauucaggacuugaaagaaa

SEQ ID NO: 1439702 - RNA, 12 nt, Human
uauauuauuaua

SEQ ID NO: 1439703 - RNA, 20 nt, Human
uauauuauuacuuguaaaua

SEQ ID NO: 1439704 - RNA, 19 nt, Human
uauauuauuacuuguaaau

SEQ ID NO: 1439705 - RNA, 16 nt, Human
uauauuauuacuugua

SEQ ID NO: 1439706 - RNA, 12 nt, Human
uauauuauuacu

SEQ ID NO: 1439707 - RNA, 13 nt, Human
uauauuaucuuuu

SEQ ID NO: 1439708 - RNA, 19 nt, Human
uauauuuaacucucuuuau

SEQ ID NO: 1439709 - RNA, 15 nt, Human
uauauuuaacaagau

SEQ ID NO: 1439710 - RNA, 15 nt, Human
uauauuuaaaaauaa

SEQ ID NO: 1439711 - RNA, 18 nt, Human
uauauuuaaaagugucaa

SEQ ID NO: 1439712 - RNA, 17 nt, Human
uauauuuaaaaauaagu

SEQ ID NO: 1439713 - RNA, 14 nt, Human
uauauuuaaaaaua

SEQ ID NO: 1439714 - RNA, 12 nt, Human
uauauuuacaaa

SEQ ID NO: 1439715 - RNA, 16 nt, Human
acacucagcacaaggc

SEQ ID NO: 1439716 - RNA, 13 nt, Human
acacucagcacaa

SEQ ID NO: 1439717 - RNA, 19 nt, Human
acacucagauccuccucau

SEQ ID NO: 1439718 - RNA, 20 nt, Human
acacucagaagccugggggc

SEQ ID NO: 1439719 - RNA, 19 nt, Human
acacucagaccugaauucu

SEQ ID NO: 1439720 - RNA, 14 nt, Human
acacucagaccuga

SEQ ID NO: 1439721 - RNA, 19 nt, Human
acacucagaagccuggggg

SEQ ID NO: 1439722 - RNA, 17 nt, Human
acacucagaagccuggg

SEQ ID NO: 1439723 - RNA, 16 nt, Human
acacucagaagccugg

SEQ ID NO: 1439724 - RNA, 15 nt, Human
acacucagaagccug

SEQ ID NO: 1439725 - RNA, 14 nt, Human
acacucagaagccu

SEQ ID NO: 1439726 - RNA, 13 nt, Human
acacucagaagcc

SEQ ID NO: 1439727 - RNA, 16 nt, Human
uauaaguagcaggcca

SEQ ID NO: 1439728 - RNA, 21 nt, Human
uauaaggugcucucuuucugu

SEQ ID NO: 1439729 - RNA, 22 nt, Human
uauaaggugcucucuuucuguc

SEQ ID NO: 1439730 - RNA, 16 nt, Human
uauaaggugcucucuu

SEQ ID NO: 1439731 - RNA, 22 nt, Human
acacucaguggcccauggcauu

SEQ ID NO: 1439732 - RNA, 17 nt, Human
acacucguaugauacuu

SEQ ID NO: 1439733 - RNA, 20 nt, Human
acacucucaaagcaaauaau

SEQ ID NO: 1439734 - RNA, 22 nt, Human
acacuguucuuagcucaaugag

SEQ ID NO: 1439735 - RNA, 21 nt, Human
acacuguucuuagcucaauga

SEQ ID NO: 1439736 - RNA, 18 nt, Human
acacuguucuuagcucaa

SEQ ID NO: 1439737 - RNA, 15 nt, Human
acacuguucuuagcu

SEQ ID NO: 1439738 - RNA, 12 nt, Human
acacuguucuua

SEQ ID NO: 1439739 - RNA, 21 nt, Human
acacucuuuugcuuuauucca

SEQ ID NO: 1439740 - RNA, 23 nt, Human
acacugaaaaaucuaagugauau

SEQ ID NO: 1439741 - RNA, 16 nt, Human
acacucuuuguaagag

SEQ ID NO: 1439742 - RNA, 12 nt, Human
acacucuuugua

SEQ ID NO: 1439743 - RNA, 16 nt, Human
acacucugcuguuuga

SEQ ID NO: 1439744 - RNA, 17 nt, Human
acacucuuucuccugcu

SEQ ID NO: 1439745 - RNA, 13 nt, Human
acacucuguaauu

SEQ ID NO: 1439746 - RNA, 17 nt, Human
acacucugcuguuugac

SEQ ID NO: 1439747 - RNA, 12 nt, Human
acacucugcugu

SEQ ID NO: 1439748 - RNA, 14 nt, Human
acacugaagaagca

SEQ ID NO: 1439749 - RNA, 12 nt, Human
acacugaagaag

SEQ ID NO: 1439750 - RNA, 21 nt, Human
uagcucaaugagcauguuuag

SEQ ID NO: 1439751 - RNA, 16 nt, Human
uagcuuaugaaaagaa

SEQ ID NO: 1439752 - RNA, 19 nt, Human
uagcuuaucuacuuccaaa

SEQ ID NO: 1439753 - RNA, 15 nt, Human
uagcuuaucuacuuc

SEQ ID NO: 1439754 - RNA, 12 nt, Human
uagcuuaugaaa

SEQ ID NO: 1439755 - RNA, 22 nt, Human
uagcuuaucuacuuccaaacua

SEQ ID NO: 1439756 - RNA, 18 nt, Human
acaaugcuguauuuuaaa

SEQ ID NO: 1439757 - RNA, 17 nt, Human
acaaugcuguauuuuaa

SEQ ID NO: 1439758 - RNA, 14 nt, Human
acaaugcuguauuu

SEQ ID NO: 1439759 - RNA, 20 nt, Human
acacaagauugguguuuuuu

SEQ ID NO: 1439760 - RNA, 19 nt, Human
acacaagauugguguuuuu

SEQ ID NO: 1439761 - RNA, 18 nt, Human
acacaagauugguguuuu

SEQ ID NO: 1439762 - RNA, 17 nt, Human
acacaagauugguguuu

SEQ ID NO: 1439763 - RNA, 16 nt, Human
acacaagauugguguu

SEQ ID NO: 1439764 - RNA, 22 nt, Human
acacaagaagaagggcacccua

SEQ ID NO: 1439765 - RNA, 13 nt, Human
acacaacucacuc

SEQ ID NO: 1439766 - RNA, 21 nt, Human
acaauguagauaaguguucug

SEQ ID NO: 1439767 - RNA, 20 nt, Human
acaauguagauaaguguucu

SEQ ID NO: 1439768 - RNA, 17 nt, Human
acaauguagauaagugu

SEQ ID NO: 1439769 - RNA, 18 nt, Human
acaauguaauuauuuaug

SEQ ID NO: 1439770 - RNA, 15 nt, Human
acaauguaauuauuu

SEQ ID NO: 1439771 - RNA, 13 nt, Human
acaauguaauuau

SEQ ID NO: 1439772 - RNA, 12 nt, Human
acaauguaauua

SEQ ID NO: 1439773 - RNA, 17 nt, Human
acacaacuauauuguuu

SEQ ID NO: 1439774 - RNA, 12 nt, Human
acacacaguacg

SEQ ID NO: 1439775 - RNA, 17 nt, Human
acacaccaggcgcuaau

SEQ ID NO: 1439776 - RNA, 14 nt, Human
acacaccaggcgcu

SEQ ID NO: 1439777 - RNA, 23 nt, Human
acacacauugcugugaacaggaa

SEQ ID NO: 1439778 - RNA, 20 nt, Human
acacaccuguagcacuuacu

SEQ ID NO: 1439779 - RNA, 11 nt, Human
acacaccugua

SEQ ID NO: 1439780 - RNA, 13 nt, Human
acacacugaagaa

SEQ ID NO: 1439781 - RNA, 14 nt, Human
uaguaauagccugg

SEQ ID NO: 1439782 - RNA, 12 nt, Human
uaguccugugaa

SEQ ID NO: 1439783 - RNA, 12 nt, Human
uagucgugagcu

SEQ ID NO: 1439784 - RNA, 22 nt, Human
uaguccugugaaugccacugcc

SEQ ID NO: 1439785 - RNA, 11 nt, Human
uaguccuguga

SEQ ID NO: 1439786 - RNA, 21 nt, Human
uagucgugagcucuugugagg

SEQ ID NO: 1439787 - RNA, 17 nt, Human
uaguguuggagaagaac

SEQ ID NO: 1439788 - RNA, 16 nt, Human
uaguguuggagaagaa

SEQ ID NO: 1439789 - RNA, 21 nt, Human
uagucuuuugcuuuuggcaaa

SEQ ID NO: 1439790 - RNA, 16 nt, Human
uagucuuuugcuuuug

SEQ ID NO: 1439791 - RNA, 15 nt, Human
uagucuuuugcuuuu

SEQ ID NO: 1439792 - RNA, 12 nt, Human
uaguguuggaga

SEQ ID NO: 1439793 - RNA, 17 nt, Human
uagucucagugaagacu

SEQ ID NO: 1439794 - RNA, 15 nt, Human
uagucucagugaaga

SEQ ID NO: 1439795 - RNA, 14 nt, Human
uagucuuuugcuuu

SEQ ID NO: 1439796 - RNA, 13 nt, Human
uagucuuuugcuu

SEQ ID NO: 1439797 - RNA, 12 nt, Human
uagucuuuugcu

SEQ ID NO: 1439798 - RNA, 15 nt, Human
uagucuuuggagaaa

SEQ ID NO: 1439799 - RNA, 12 nt, Human
acacaguauuuu

SEQ ID NO: 1439800 - RNA, 12 nt, Human
acacagcugccg

SEQ ID NO: 1439801 - RNA, 11 nt, Human
acacagcugcc

SEQ ID NO: 1439802 - RNA, 14 nt, Human
acacacugaagaag

SEQ ID NO: 1439803 - RNA, 19 nt, Human
uagguugcacacuuuggua

SEQ ID NO: 1439804 - RNA, 14 nt, Human
uagguuucaaagau

SEQ ID NO: 1439805 - RNA, 11 nt, Human
uagguuucaaa

SEQ ID NO: 1439806 - RNA, 22 nt, Human
uagguuuggacaaaauggaaua

SEQ ID NO: 1439807 - RNA, 22 nt, Human
uaguucagcauccgcaggugcu

SEQ ID NO: 1439808 - RNA, 22 nt, Human
uaguuuugauuuaauguuuuca

SEQ ID NO: 1439809 - RNA, 23 nt, Human
uaguucagaauuuaguguaucca

SEQ ID NO: 1439810 - RNA, 16 nt, Human
uaguucagaauuuagu

SEQ ID NO: 1439811 - RNA, 21 nt, Human
uaguuuuucauuaaauaaauu

SEQ ID NO: 1439812 - RNA, 14 nt, Human
uaguuuuucauuaa

SEQ ID NO: 1439813 - RNA, 15 nt, Human
uaguuuuuauauguu

SEQ ID NO: 1439814 - RNA, 17 nt, Human
uagucuuuugcuuuugc

SEQ ID NO: 1439815 - RNA, 23 nt, Human
uauaaaauaugaagacauaaacc

SEQ ID NO: 1439816 - RNA, 14 nt, Human
uauaaaaucagcca

SEQ ID NO: 1439817 - RNA, 21 nt, Human
uauaaaauaugaagacauaaa

SEQ ID NO: 1439818 - RNA, 16 nt, Human
uauaaaaucagccaau

SEQ ID NO: 1439819 - RNA, 17 nt, Human
uauaaaaucagccaauu

SEQ ID NO: 1439820 - RNA, 19 nt, Human
uauaaaaucagccaauuau

SEQ ID NO: 1439821 - RNA, 20 nt, Human
uauaaaaucagccaauuaug

SEQ ID NO: 1439822 - RNA, 19 nt, Human
uauaaaauagacaaauaga

SEQ ID NO: 1439823 - RNA, 12 nt, Human
uauaaaauagac

SEQ ID NO: 1439824 - RNA, 12 nt, Human
uauaaaauacag

SEQ ID NO: 1439825 - RNA, 15 nt, Human
uauaaaacuuuccuc

SEQ ID NO: 1439826 - RNA, 19 nt, Human
uauaaaaauaaaaaagauc

SEQ ID NO: 1439827 - RNA, 22 nt, Human
uauaaaaauaaaaaagauccca

SEQ ID NO: 1439828 - RNA, 17 nt, Human
uaguuuuuucaucuuca

SEQ ID NO: 1439829 - RNA, 15 nt, Human
uaguuuuuucaucuu

SEQ ID NO: 1439830 - RNA, 14 nt, Human
uaguuuuuucaucu

SEQ ID NO: 1439831 - RNA, 13 nt, Human
uaguuuuuucauc

SEQ ID NO: 1439832 - RNA, 21 nt, Human
uaguuuuuucaucuucaguug

SEQ ID NO: 1439833 - RNA, 21 nt, Human
uauaaaaauaaaaaacacugg

SEQ ID NO: 1439834 - RNA, 15 nt, Human
acacccacacucaga

SEQ ID NO: 1439835 - RNA, 17 nt, Human
acacauuugcuuuuugu

SEQ ID NO: 1439836 - RNA, 14 nt, Human
acacauuugcuuuu

SEQ ID NO: 1439837 - RNA, 13 nt, Human
acacauuuuauuu

SEQ ID NO: 1439838 - RNA, 22 nt, Human
acacauugaguuggaaucacug

SEQ ID NO: 1439839 - RNA, 21 nt, Human
acacauugcugugaacaggaa

SEQ ID NO: 1439840 - RNA, 15 nt, Human
acacauguauuuggu

SEQ ID NO: 1439841 - RNA, 16 nt, Human
acacauuaggaaaagu

SEQ ID NO: 1439842 - RNA, 19 nt, Human
acacaugcuucccuuuccu

SEQ ID NO: 1439843 - RNA, 21 nt, Human
acacaugcuucccuuuccuga

SEQ ID NO: 1439844 - RNA, 23 nt, Human
acacaugcuucccuuuccugagu

SEQ ID NO: 1439845 - RNA, 18 nt, Human
acacaugcugaacaucac

SEQ ID NO: 1439846 - RNA, 21 nt, Human
uauaaaaucagccaauuaugu

SEQ ID NO: 1439847 - RNA, 20 nt, Human
uauaacguguucaauauuuu

SEQ ID NO: 1439848 - RNA, 14 nt, Human
uauaacuaacaugu

SEQ ID NO: 1439849 - RNA, 19 nt, Human
uauaacguguucaauauuu

SEQ ID NO: 1439850 - RNA, 14 nt, Human
uauaacguguucaa

SEQ ID NO: 1439851 - RNA, 20 nt, Human
uauaaccuuaauuuauuauu

SEQ ID NO: 1439852 - RNA, 15 nt, Human
uauaaccuuaauuua

SEQ ID NO: 1439853 - RNA, 14 nt, Human
uauaagcuuuucuu

SEQ ID NO: 1439854 - RNA, 23 nt, Human
acacuagccuuggccucuuuccu

SEQ ID NO: 1439855 - RNA, 20 nt, Human
acacuagcccaaugaaauga

SEQ ID NO: 1439856 - RNA, 17 nt, Human
acacuagcccaaugaaa

SEQ ID NO: 1439857 - RNA, 22 nt, Human
uauaaccaguguuguggauuua

SEQ ID NO: 1439858 - RNA, 23 nt, Human
acacuaccgaaugugucuuuaga

SEQ ID NO: 1439859 - RNA, 16 nt, Human
acacuagacaagccag

SEQ ID NO: 1439860 - RNA, 21 nt, Human
acacuaccgaaugugucuuua

SEQ ID NO: 1439861 - RNA, 20 nt, Human
acacuaccgaaugugucuuu

SEQ ID NO: 1439862 - RNA, 19 nt, Human
acacuaccgaaugugucuu

SEQ ID NO: 1439863 - RNA, 18 nt, Human
acacuaccgaaugugucu

SEQ ID NO: 1439864 - RNA, 23 nt, Human
acacuacacccagcaauagagac

SEQ ID NO: 1439865 - RNA, 16 nt, Human
acacuaccgaaugugu

SEQ ID NO: 1439866 - RNA, 17 nt, Human
acacuacacccagcaau

SEQ ID NO: 1439867 - RNA, 17 nt, Human
acacuaagagagaauga

SEQ ID NO: 1439868 - RNA, 17 nt, Human
acacuacacacugugua

SEQ ID NO: 1439869 - RNA, 20 nt, Human
acaccuuggacauccuccuc

SEQ ID NO: 1439870 - RNA, 13 nt, Human
acacuacacccag

SEQ ID NO: 1439871 - RNA, 14 nt, Human
acacuacacccagc

SEQ ID NO: 1439872 - RNA, 15 nt, Human
acacuacacccagca

SEQ ID NO: 1439873 - RNA, 19 nt, Human
acacuaagagagaaugaga

SEQ ID NO: 1439874 - RNA, 18 nt, Human
acacuaagagagaaugag

SEQ ID NO: 1439875 - RNA, 19 nt, Human
acaccuccuucccucucug

SEQ ID NO: 1439876 - RNA, 13 nt, Human
acaccugcccugc

SEQ ID NO: 1439877 - RNA, 14 nt, Human
acaccugcccugcc

SEQ ID NO: 1439878 - RNA, 12 nt, Human
acaccugcccug

SEQ ID NO: 1439879 - RNA, 15 nt, Human
acaccugcccugccc

SEQ ID NO: 1439880 - RNA, 17 nt, Human
acaccugcccugcccug

SEQ ID NO: 1439881 - RNA, 18 nt, Human
acaccugcccugcccugc

SEQ ID NO: 1439882 - RNA, 20 nt, Human
acaccugcccugcccugcca

SEQ ID NO: 1439883 - RNA, 22 nt, Human
acaccugcccugcccugccacc

SEQ ID NO: 1439884 - RNA, 19 nt, Human
acaccucccaggagacagu

SEQ ID NO: 1439885 - RNA, 13 nt, Human
acaccucccagga

SEQ ID NO: 1439886 - RNA, 22 nt, Human
acaccuccuucccucucuggag

SEQ ID NO: 1439887 - RNA, 18 nt, Human
acaccuccuucccucucu

SEQ ID NO: 1439888 - RNA, 11 nt, Human
acaccuccuuc

SEQ ID NO: 1439889 - RNA, 16 nt, Human
acacccauuuuuccuu

SEQ ID NO: 1439890 - RNA, 17 nt, Human
acaccccgacuuuuguu

SEQ ID NO: 1439891 - RNA, 23 nt, Human
acacccagcaauagagacgggac

SEQ ID NO: 1439892 - RNA, 13 nt, Human
acacccagcaaua

SEQ ID NO: 1439893 - RNA, 13 nt, Human
aauaaaguauuua

SEQ ID NO: 1439894 - RNA, 14 nt, Human
aauaaaguauuuaa

SEQ ID NO: 1439895 - RNA, 15 nt, Human
aauaaaguauuuaau

SEQ ID NO: 1439896 - RNA, 16 nt, Human
aauaaaguauuuaauu

SEQ ID NO: 1439897 - RNA, 19 nt, Human
aauaaaguauuuaauuagu

SEQ ID NO: 1439898 - RNA, 13 nt, Human
aauaaaagaaaau

SEQ ID NO: 1439899 - RNA, 20 nt, Human
aauaaaacccguugauuacu

SEQ ID NO: 1439900 - RNA, 18 nt, Human
aauaaaacuuuuuaaaau

SEQ ID NO: 1439901 - RNA, 12 nt, Human
aauaaaacuuuu

SEQ ID NO: 1439902 - RNA, 14 nt, Human
aauaaaacuuuuua

SEQ ID NO: 1439903 - RNA, 15 nt, Human
aauaaaacuuuuuaa

SEQ ID NO: 1439904 - RNA, 14 nt, Human
aauaaaucuuccua

SEQ ID NO: 1439905 - RNA, 20 nt, Human
aauaaaucugacccagugcc

SEQ ID NO: 1439906 - RNA, 17 nt, Human
aauaaaucugacccagu

SEQ ID NO: 1439907 - RNA, 16 nt, Human
aauaaaucugacccag

SEQ ID NO: 1439908 - RNA, 15 nt, Human
aauaaaucugaccca

SEQ ID NO: 1439909 - RNA, 18 nt, Human
aauaaaguguaacaauug

SEQ ID NO: 1439910 - RNA, 15 nt, Human
aauaaaguguaacaa

SEQ ID NO: 1439911 - RNA, 12 nt, Human
aauaaaguguau

SEQ ID NO: 1439912 - RNA, 17 nt, Human
aauaaagucagauggaa

SEQ ID NO: 1439913 - RNA, 12 nt, Human
aauaaagugacc

SEQ ID NO: 1439914 - RNA, 20 nt, Human
aauaaaguauuuaauuagug

SEQ ID NO: 1439915 - RNA, 21 nt, Human
aauaaaguauuuaauuagugc

SEQ ID NO: 1439916 - RNA, 22 nt, Human
aauaaaguauuuaauuagugcu

SEQ ID NO: 1439917 - RNA, 23 nt, Human
aauaaaguauuuaauuagugcua

SEQ ID NO: 1439918 - RNA, 21 nt, Human
aauaaauuugacuuuucugua

SEQ ID NO: 1439919 - RNA, 19 nt, Human
aauaacaaugugcucucgg

SEQ ID NO: 1439920 - RNA, 13 nt, Human
aauaacaaugugc

SEQ ID NO: 1439921 - RNA, 20 nt, Human
aauaaauuugacuuuucugu

SEQ ID NO: 1439922 - RNA, 13 nt, Human
aauaaauuugacu

SEQ ID NO: 1439923 - RNA, 20 nt, Human
aauaaauuuauuuucuugga

SEQ ID NO: 1439924 - RNA, 21 nt, Human
aauaacuggaaaacagaacac

SEQ ID NO: 1439925 - RNA, 18 nt, Human
aauaacuggaaaacagaa

SEQ ID NO: 1439926 - RNA, 15 nt, Human
aauaacgauaaaaga

SEQ ID NO: 1439927 - RNA, 15 nt, Human
aauaaaugucacuuu

SEQ ID NO: 1439928 - RNA, 19 nt, Human
aauaaaugucacuuuuuga

SEQ ID NO: 1439929 - RNA, 14 nt, Human
aauaaaugucacuu

SEQ ID NO: 1439930 - RNA, 13 nt, Human
aauaaaugucacu

SEQ ID NO: 1439931 - RNA, 21 nt, Human
aauaaaugucaccagguacuu

SEQ ID NO: 1439932 - RNA, 11 nt, Human
aauaaauguca

SEQ ID NO: 1439933 - RNA, 22 nt, Human
aauaaauugauuuuuauaaaua

SEQ ID NO: 1439934 - RNA, 14 nt, Human
aauaaaugucuugc

SEQ ID NO: 1439935 - RNA, 12 nt, Human
aauaaaugucuu

SEQ ID NO: 1439936 - RNA, 18 nt, Human
aauaaauuguacagccgg

SEQ ID NO: 1439937 - RNA, 12 nt, Human
aauaaauuguau

SEQ ID NO: 1439938 - RNA, 13 nt, Human
aauaaauuguaua

SEQ ID NO: 1439939 - RNA, 15 nt, Human
aauaaauuguauauu

SEQ ID NO: 1439940 - RNA, 16 nt, Human
aauaaauuguauauuc

SEQ ID NO: 1439941 - RNA, 17 nt, Human
aauaaauuguauauuca

SEQ ID NO: 1439942 - RNA, 18 nt, Human
aauaaauuguauauucac

SEQ ID NO: 1439943 - RNA, 21 nt, Human
aauaacaaugaaaguugauaa

SEQ ID NO: 1439944 - RNA, 16 nt, Human
aauaaaaagcuuuugu

SEQ ID NO: 1439945 - RNA, 18 nt, Human
aauaaaaagcuuuugucu

SEQ ID NO: 1439946 - RNA, 13 nt, Human
aauaaaaagcuuu

SEQ ID NO: 1439947 - RNA, 23 nt, Human
aauaaaaagaucacuuucucagu

SEQ ID NO: 1439948 - RNA, 19 nt, Human
aauaaaaagaucacuuucu

SEQ ID NO: 1439949 - RNA, 17 nt, Human
aauaaaaagaucacuuu

SEQ ID NO: 1439950 - RNA, 13 nt, Human
aauaaaaccagcu

SEQ ID NO: 1439951 - RNA, 18 nt, Human
uaaaguauucuucucuuc

SEQ ID NO: 1439952 - RNA, 14 nt, Human
uaaaguauucuucu

SEQ ID NO: 1439953 - RNA, 13 nt, Human
uaaaguauucuuc

SEQ ID NO: 1439954 - RNA, 12 nt, Human
uaaaguauuuaa

SEQ ID NO: 1439955 - RNA, 14 nt, Human
uaaaguauuuaauu

SEQ ID NO: 1439956 - RNA, 16 nt, Human
uaaaguauuuaauuag

SEQ ID NO: 1439957 - RNA, 17 nt, Human
uaaaguauuuaauuagu

SEQ ID NO: 1439958 - RNA, 21 nt, Human
uaaaguauguauuauuuacau

SEQ ID NO: 1439959 - RNA, 19 nt, Human
uaaaguauguauuauuuac

SEQ ID NO: 1439960 - RNA, 19 nt, Human
uaaaguauuuaauuagugc

SEQ ID NO: 1439961 - RNA, 21 nt, Human
uaaaguauuuaauuagugcua

SEQ ID NO: 1439962 - RNA, 22 nt, Human
uaaaguauuuaauuagugcuaa

SEQ ID NO: 1439963 - RNA, 20 nt, Human
aaguuuuuauggcuuuugug

SEQ ID NO: 1439964 - RNA, 22 nt, Human
uaaagguuacaagccugcacaa

SEQ ID NO: 1439965 - RNA, 22 nt, Human
uaaaggugacaucggaaaaaua

SEQ ID NO: 1439966 - RNA, 21 nt, Human
uaaaggugacaucggaaaaau

SEQ ID NO: 1439967 - RNA, 22 nt, Human
uaaagguccacaggucuagacu

SEQ ID NO: 1439968 - RNA, 21 nt, Human
uaaagguccacaggucuagac

SEQ ID NO: 1439969 - RNA, 20 nt, Human
uaaagguccacaggucuaga

SEQ ID NO: 1439970 - RNA, 19 nt, Human
uaaagguccacaggucuag

SEQ ID NO: 1439971 - RNA, 22 nt, Human
uaaaggggagaccucagaagua

SEQ ID NO: 1439972 - RNA, 15 nt, Human
guuuugaaggcaaaa

SEQ ID NO: 1439973 - RNA, 19 nt, Human
guuuugaagcuacugugug

SEQ ID NO: 1439974 - RNA, 18 nt, Human
guuuugaagcuacugugu

SEQ ID NO: 1439975 - RNA, 17 nt, Human
guuuucuuuugccauga

SEQ ID NO: 1439976 - RNA, 17 nt, Human
uaaaguaguccugugaa

SEQ ID NO: 1439977 - RNA, 16 nt, Human
uaaaguacuuguaguu

SEQ ID NO: 1439978 - RNA, 15 nt, Human
uaaaguacuuguagu

SEQ ID NO: 1439979 - RNA, 22 nt, Human
uaaagguucaugcaaacuuuau

SEQ ID NO: 1439980 - RNA, 19 nt, Human
uaaaguaaaaacaaagaaa

SEQ ID NO: 1439981 - RNA, 21 nt, Human
uaaaguaaaaacaaagaaauu

SEQ ID NO: 1439982 - RNA, 22 nt, Human
uaaaguaaaaacaaagaaauua

SEQ ID NO: 1439983 - RNA, 22 nt, Human
uaaauacugcaaaucaggcuuu

SEQ ID NO: 1439984 - RNA, 16 nt, Human
uaaauacugcaaauca

SEQ ID NO: 1439985 - RNA, 13 nt, Human
uaaauacugcaaa

SEQ ID NO: 1439986 - RNA, 17 nt, Human
uaaauacugcaaaucag

SEQ ID NO: 1439987 - RNA, 17 nt, Human
uaaauagaccauuaauc

SEQ ID NO: 1439988 - RNA, 15 nt, Human
uaaauagacacgcac

SEQ ID NO: 1439989 - RNA, 14 nt, Human
uaaaucuccaaaau

SEQ ID NO: 1439990 - RNA, 15 nt, Human
uaaaucuccaaaaua

SEQ ID NO: 1439991 - RNA, 18 nt, Human
uaaaucuccaaaauaaaa

SEQ ID NO: 1439992 - RNA, 14 nt, Human
uaaaucugacccag

SEQ ID NO: 1439993 - RNA, 20 nt, Human
uaaaucugcuggaguuucau

SEQ ID NO: 1439994 - RNA, 17 nt, Human
uaaaucugacccagugc

SEQ ID NO: 1439995 - RNA, 16 nt, Human
uaaaucugacccagug

SEQ ID NO: 1439996 - RNA, 15 nt, Human
uaaaucugacccagu

SEQ ID NO: 1439997 - RNA, 12 nt, Human
uaaaucugccac

SEQ ID NO: 1439998 - RNA, 14 nt, Human
uaaaugcauuauag

SEQ ID NO: 1439999 - RNA, 16 nt, Human
uaaaugcauaaaugca

SEQ ID NO: 1440000 - RNA, 13 nt, Human
uaaaucuuuuaua

SEQ ID NO: 1440001 - RNA, 14 nt, Human
uaaaucuuuuacaa

SEQ ID NO: 1440002 - RNA, 23 nt, Human
uaaaugcaccuggaauauauaac

SEQ ID NO: 1440003 - RNA, 22 nt, Human
uaaauguuaugacuauguaaac

SEQ ID NO: 1440004 - RNA, 23 nt, Human
uaaauguuaugacuauguaaacu

SEQ ID NO: 1440005 - RNA, 15 nt, Human
uaaauguugacaugg

SEQ ID NO: 1440006 - RNA, 13 nt, Human
uaaauguuauuau

SEQ ID NO: 1440007 - RNA, 24 nt, Human
uaaauguuuuuuuuuaaagacuuu

SEQ ID NO: 1440008 - RNA, 12 nt, Human
uaaauuaacuuu

SEQ ID NO: 1440009 - RNA, 14 nt, Human
uaaauuaacuuuua

SEQ ID NO: 1440010 - RNA, 15 nt, Human
uaaauuaacuuuuau

SEQ ID NO: 1440011 - RNA, 16 nt, Human
uaaauuaacuuuuaua

SEQ ID NO: 1440012 - RNA, 17 nt, Human
uaaauuaacuuuuauaa

SEQ ID NO: 1440013 - RNA, 18 nt, Human
uaaauuaacuuuuauaaa

SEQ ID NO: 1440014 - RNA, 23 nt, Human
uaaauacagucuuccauuugcaa

SEQ ID NO: 1440015 - RNA, 22 nt, Human
uaaauacagucuuccauuugca

SEQ ID NO: 1440016 - RNA, 20 nt, Human
uaaauacagucuuccauuug

SEQ ID NO: 1440017 - RNA, 17 nt, Human
uaaauacagucuuccau

SEQ ID NO: 1440018 - RNA, 13 nt, Human
uaaauacagucuu

SEQ ID NO: 1440019 - RNA, 18 nt, Human
uaaauacaggaaacaguu

SEQ ID NO: 1440020 - RNA, 17 nt, Human
uaaauacaggaaacagu

SEQ ID NO: 1440021 - RNA, 16 nt, Human
uaaauacaggaaacag

SEQ ID NO: 1440022 - RNA, 15 nt, Human
uaaauacaggaaaca

SEQ ID NO: 1440023 - RNA, 14 nt, Human
uaaauacaggaaac

SEQ ID NO: 1440024 - RNA, 13 nt, Human
uaaauacaggaaa

SEQ ID NO: 1440025 - RNA, 15 nt, Human
uaaauaagauucuaa

SEQ ID NO: 1440026 - RNA, 14 nt, Human
uaaauaagauucua

SEQ ID NO: 1440027 - RNA, 13 nt, Human
uaaauaagauucu

SEQ ID NO: 1440028 - RNA, 15 nt, Human
uaaauaagaaacuuu

SEQ ID NO: 1440029 - RNA, 16 nt, Human
uaaauaagaaacuuuu

SEQ ID NO: 1440030 - RNA, 13 nt, Human
uaaauaagaaacu

SEQ ID NO: 1440031 - RNA, 11 nt, Human
uaaauaagaaa

SEQ ID NO: 1440032 - RNA, 22 nt, Human
uaaauaagaaacaacucuuuga

SEQ ID NO: 1440033 - RNA, 21 nt, Human
uaaauaagaaacaacucuuug

SEQ ID NO: 1440034 - RNA, 16 nt, Human
uaaauaaugcuuugaa

SEQ ID NO: 1440035 - RNA, 13 nt, Human
uaaauaaugcuuu

SEQ ID NO: 1440036 - RNA, 14 nt, Human
uaaauaauacauua

SEQ ID NO: 1440037 - RNA, 18 nt, Human
uaaauaagauucuaacgg

SEQ ID NO: 1440038 - RNA, 17 nt, Human
uaaauaaggaaaagcuu

SEQ ID NO: 1440039 - RNA, 19 nt, Human
uaaauaaugugaaacugga

SEQ ID NO: 1440040 - RNA, 22 nt, Human
aauacaagacugccauauuaaa

SEQ ID NO: 1440041 - RNA, 18 nt, Human
aauacaaauggauuuugg

SEQ ID NO: 1440042 - RNA, 13 nt, Human
aauacaaauggau

SEQ ID NO: 1440043 - RNA, 12 nt, Human
aauacaaaugga

SEQ ID NO: 1440044 - RNA, 22 nt, Human
aauaauuuuucacuucaaaaca

SEQ ID NO: 1440045 - RNA, 20 nt, Human
aauaauuuuuauauuugaaa

SEQ ID NO: 1440046 - RNA, 12 nt, Human
uaaauaaaguuu

SEQ ID NO: 1440047 - RNA, 21 nt, Human
uaaauaaaguuuguugaaaca

SEQ ID NO: 1440048 - RNA, 21 nt, Human
aauaauucugaguuuuguguu

SEQ ID NO: 1440049 - RNA, 22 nt, Human
aauaauucugaguuuuguguuu

SEQ ID NO: 1440050 - RNA, 19 nt, Human
aauaauucugaguuuugug

SEQ ID NO: 1440051 - RNA, 17 nt, Human
aauaauucugaguuuug

SEQ ID NO: 1440052 - RNA, 18 nt, Human
aauaagaauagaaauaaa

SEQ ID NO: 1440053 - RNA, 13 nt, Human
aauaagaauagaa

SEQ ID NO: 1440054 - RNA, 22 nt, Human
aauaagaaacaacucuuugaga

SEQ ID NO: 1440055 - RNA, 13 nt, Human
aauaagaaacuuu

SEQ ID NO: 1440056 - RNA, 20 nt, Human
aauaacuggaaaacagaaca

SEQ ID NO: 1440057 - RNA, 19 nt, Human
aauaauuuuuauauuugaa

SEQ ID NO: 1440058 - RNA, 17 nt, Human
aauaauuuuuauauuug

SEQ ID NO: 1440059 - RNA, 15 nt, Human
aauaauuuuguaaug

SEQ ID NO: 1440060 - RNA, 14 nt, Human
aauaauuuuguaau

SEQ ID NO: 1440061 - RNA, 13 nt, Human
aauaauuuuguaa

SEQ ID NO: 1440062 - RNA, 16 nt, Human
aauaauuuuuauauuu

SEQ ID NO: 1440063 - RNA, 15 nt, Human
aauaauuucuaaugu

SEQ ID NO: 1440064 - RNA, 13 nt, Human
aauaauuucuaau

SEQ ID NO: 1440065 - RNA, 21 nt, Human
aauaauuuagacuucaagcau

SEQ ID NO: 1440066 - RNA, 12 nt, Human
aauaauuuagac

SEQ ID NO: 1440067 - RNA, 18 nt, Human
aauaauuguuguucuguu

SEQ ID NO: 1440068 - RNA, 22 nt, Human
aauaauuguuguucuguuaacu

SEQ ID NO: 1440069 - RNA, 17 nt, Human
aauaauuguuguucugu

SEQ ID NO: 1440070 - RNA, 16 nt, Human
aauaauuguuguucug

SEQ ID NO: 1440071 - RNA, 14 nt, Human
aauaauuguuguuc

SEQ ID NO: 1440072 - RNA, 12 nt, Human
aauaauuguugu

SEQ ID NO: 1440073 - RNA, 16 nt, Human
aauaauuucuaauguu

SEQ ID NO: 1440074 - RNA, 16 nt, Human
aauaauuuuaaacaaa

SEQ ID NO: 1440075 - RNA, 11 nt, Human
aauaauuuuau

SEQ ID NO: 1440076 - RNA, 14 nt, Human
aauaauuuuaucuc

SEQ ID NO: 1440077 - RNA, 16 nt, Human
aauaugauguuaaaaa

SEQ ID NO: 1440078 - RNA, 15 nt, Human
aauaugcacacauuu

SEQ ID NO: 1440079 - RNA, 12 nt, Human
aauauuucuuca

SEQ ID NO: 1440080 - RNA, 11 nt, Human
aauauuugaau

SEQ ID NO: 1440081 - RNA, 15 nt, Human
aauauuucagauaau

SEQ ID NO: 1440082 - RNA, 18 nt, Human
aauauuguuuuacaauag

SEQ ID NO: 1440083 - RNA, 17 nt, Human
aauauuguuuuacaaua

SEQ ID NO: 1440084 - RNA, 24 nt, Human
aaucagaagucaucuugcuaccag

SEQ ID NO: 1440085 - RNA, 20 nt, Human
aaucagaagucaucuugcua

SEQ ID NO: 1440086 - RNA, 23 nt, Human
aaucagaacucaaauggggccag

SEQ ID NO: 1440087 - RNA, 12 nt, Human
aaucagaacuca

SEQ ID NO: 1440088 - RNA, 11 nt, Human
aaucagaacuc

SEQ ID NO: 1440089 - RNA, 16 nt, Human
aaucacuuaggaaaug

SEQ ID NO: 1440090 - RNA, 21 nt, Human
aaucacuguuuagaacacaca

SEQ ID NO: 1440091 - RNA, 19 nt, Human
aaucacuguuuagaacaca

SEQ ID NO: 1440092 - RNA, 12 nt, Human
aauauuuuccuc

SEQ ID NO: 1440093 - RNA, 12 nt, Human
aauauuugaauc

SEQ ID NO: 1440094 - RNA, 13 nt, Human
aauauuugaaucu

SEQ ID NO: 1440095 - RNA, 16 nt, Human
aauauuugaaucuugu

SEQ ID NO: 1440096 - RNA, 16 nt, Human
aauauuuuaaagaauu

SEQ ID NO: 1440097 - RNA, 14 nt, Human
aauauuugaaucuu

SEQ ID NO: 1440098 - RNA, 22 nt, Human
uaagaccuacuguucuaaagcu

SEQ ID NO: 1440099 - RNA, 21 nt, Human
uaagaccuacuguucuaaagc

SEQ ID NO: 1440100 - RNA, 20 nt, Human
uaagaccuacuguucuaaag

SEQ ID NO: 1440101 - RNA, 19 nt, Human
uaagaccuacuguucuaaa

SEQ ID NO: 1440102 - RNA, 18 nt, Human
uaagaccuacuguucuaa

SEQ ID NO: 1440103 - RNA, 17 nt, Human
uaagaccuacuguucua

SEQ ID NO: 1440104 - RNA, 16 nt, Human
uaagaccuacuguucu

SEQ ID NO: 1440105 - RNA, 14 nt, Human
uaagaccuacuguu

SEQ ID NO: 1440106 - RNA, 21 nt, Human
uaagacaugauuuccuugaau

SEQ ID NO: 1440107 - RNA, 20 nt, Human
uaagacaugauuuccuugaa

SEQ ID NO: 1440108 - RNA, 14 nt, Human
uaagaaucuuuaga

SEQ ID NO: 1440109 - RNA, 21 nt, Human
uaagaaucuagcaagaauuga

SEQ ID NO: 1440110 - RNA, 17 nt, Human
uaagaaucuagcaagaa

SEQ ID NO: 1440111 - RNA, 21 nt, Human
uaacuuuguuuuauuuucaaa

SEQ ID NO: 1440112 - RNA, 18 nt, Human
uaacuuuguuuuauuuuc

SEQ ID NO: 1440113 - RNA, 14 nt, Human
uaacuuuguuuuau

SEQ ID NO: 1440114 - RNA, 12 nt, Human
uaacuuuguuuu

SEQ ID NO: 1440115 - RNA, 14 nt, Human
uaacuacuuuauaa

SEQ ID NO: 1440116 - RNA, 13 nt, Human
uaacuacuuuaua

SEQ ID NO: 1440117 - RNA, 19 nt, Human
uaacuuuuauaaacuuuac

SEQ ID NO: 1440118 - RNA, 16 nt, Human
uaacuaacauguccug

SEQ ID NO: 1440119 - RNA, 20 nt, Human
uaacuaaaauaauuuuguaa

SEQ ID NO: 1440120 - RNA, 21 nt, Human
uaacuaaaauaauuuuguaau

SEQ ID NO: 1440121 - RNA, 23 nt, Human
uaacuacaaagguuuaaaugaac

SEQ ID NO: 1440122 - RNA, 22 nt, Human
uaacuacaaagguuuaaaugaa

SEQ ID NO: 1440123 - RNA, 21 nt, Human
uaacuacaaagguuuaaauga

SEQ ID NO: 1440124 - RNA, 18 nt, Human
uaacuaacugcauacacu

SEQ ID NO: 1440125 - RNA, 15 nt, Human
uaacuuuuauaaacu

SEQ ID NO: 1440126 - RNA, 17 nt, Human
uaacuuuuauaaacuuu

SEQ ID NO: 1440127 - RNA, 18 nt, Human
uaacuuuuauaaacuuua

SEQ ID NO: 1440128 - RNA, 17 nt, Human
aauaucuucacuuguca

SEQ ID NO: 1440129 - RNA, 17 nt, Human
aauaucuguaaugguac

SEQ ID NO: 1440130 - RNA, 12 nt, Human
aauaucugaagc

SEQ ID NO: 1440131 - RNA, 13 nt, Human
aauauccugcuug

SEQ ID NO: 1440132 - RNA, 11 nt, Human
uaagaccuggc

SEQ ID NO: 1440133 - RNA, 13 nt, Human
uaagaccuggcag

SEQ ID NO: 1440134 - RNA, 21 nt, Human
aauaucuccgucaacucauau

SEQ ID NO: 1440135 - RNA, 16 nt, Human
aauaucuccgucaacu

SEQ ID NO: 1440136 - RNA, 22 nt, Human
uaacauaccuaagaaguacauu

SEQ ID NO: 1440137 - RNA, 19 nt, Human
uaacauaagcuauuuuucu

SEQ ID NO: 1440138 - RNA, 15 nt, Human
uaacauaagcuauuu

SEQ ID NO: 1440139 - RNA, 14 nt, Human
uaacauaagcuauu

SEQ ID NO: 1440140 - RNA, 14 nt, Human
uaacaugauuuggg

SEQ ID NO: 1440141 - RNA, 17 nt, Human
aauauccuaaacaucau

SEQ ID NO: 1440142 - RNA, 16 nt, Human
aauauccuaaacauca

SEQ ID NO: 1440143 - RNA, 15 nt, Human
aauauccuaaacauc

SEQ ID NO: 1440144 - RNA, 19 nt, Human
uaacuaaaauaauuuugua

SEQ ID NO: 1440145 - RNA, 18 nt, Human
uaacuaaaauaauuuugu

SEQ ID NO: 1440146 - RNA, 12 nt, Human
uaacuaaaauaa

SEQ ID NO: 1440147 - RNA, 18 nt, Human
uaaccugucucaccugga

SEQ ID NO: 1440148 - RNA, 17 nt, Human
uaaccucuucagaggcc

SEQ ID NO: 1440149 - RNA, 14 nt, Human
uaaccucugcacua

SEQ ID NO: 1440150 - RNA, 16 nt, Human
uaaccucgggccugcu

SEQ ID NO: 1440151 - RNA, 16 nt, Human
uaaccucuaaauucuu

SEQ ID NO: 1440152 - RNA, 18 nt, Human
aauauccuaaacaucauu

SEQ ID NO: 1440153 - RNA, 14 nt, Human
aauauccuaaacau

SEQ ID NO: 1440154 - RNA, 22 nt, Human
aauaucccuccuguugggagag

SEQ ID NO: 1440155 - RNA, 19 nt, Human
aauaucccuccuguuggga

SEQ ID NO: 1440156 - RNA, 12 nt, Human
aauaucccuccu

SEQ ID NO: 1440157 - RNA, 23 nt, Human
aauaucccuccuguugggagagg

SEQ ID NO: 1440158 - RNA, 19 nt, Human
aauaucccuacauguauug

SEQ ID NO: 1440159 - RNA, 18 nt, Human
aauaucccuacauguauu

SEQ ID NO: 1440160 - RNA, 17 nt, Human
aauaucccuacauguau

SEQ ID NO: 1440161 - RNA, 16 nt, Human
aauaucccuacaugua

SEQ ID NO: 1440162 - RNA, 20 nt, Human
aauaucacuugucaauaaaa

SEQ ID NO: 1440163 - RNA, 15 nt, Human
aauaucacuugucaa

SEQ ID NO: 1440164 - RNA, 16 nt, Human
aauauauguauauaca

SEQ ID NO: 1440165 - RNA, 15 nt, Human
aauaguauuucccau

SEQ ID NO: 1440166 - RNA, 16 nt, Human
aauaguauuucccauu

SEQ ID NO: 1440167 - RNA, 20 nt, Human
aauauauuauuacuuguaaa

SEQ ID NO: 1440168 - RNA, 18 nt, Human
aauauauuauuacuugua

SEQ ID NO: 1440169 - RNA, 15 nt, Human
aauauauuauuacuu

SEQ ID NO: 1440170 - RNA, 13 nt, Human
aauauauuauuac

SEQ ID NO: 1440171 - RNA, 14 nt, Human
aauauauguauaua

SEQ ID NO: 1440172 - RNA, 21 nt, Human
aauauauuauuacuuguaaau

SEQ ID NO: 1440173 - RNA, 12 nt, Human
aauaucacuugu

SEQ ID NO: 1440174 - RNA, 23 nt, Human
aauagccacauuuggaauacuuu

SEQ ID NO: 1440175 - RNA, 22 nt, Human
aauagccacauuuggaauacuu

SEQ ID NO: 1440176 - RNA, 20 nt, Human
aauagccacauuuggaauac

SEQ ID NO: 1440177 - RNA, 20 nt, Human
aauagcaugucacuaaagca

SEQ ID NO: 1440178 - RNA, 12 nt, Human
aauagauucucu

SEQ ID NO: 1440179 - RNA, 11 nt, Human
aauagauucuc

SEQ ID NO: 1440180 - RNA, 19 nt, Human
aauagauguuugauagauu

SEQ ID NO: 1440181 - RNA, 19 nt, Human
aauagauaugaaagcugau

SEQ ID NO: 1440182 - RNA, 22 nt, Human
aauagauguuugauagauuuuc

SEQ ID NO: 1440183 - RNA, 11 nt, Human
aauagauguuu

SEQ ID NO: 1440184 - RNA, 21 nt, Human
aauagccacuaaccuugccug

SEQ ID NO: 1440185 - RNA, 20 nt, Human
aauagccacuaaccuugccu

SEQ ID NO: 1440186 - RNA, 23 nt, Human
aauagccacuaaccuugccuggu

SEQ ID NO: 1440187 - RNA, 21 nt, Human
aauagccauauuuguaaaaug

SEQ ID NO: 1440188 - RNA, 18 nt, Human
aauagccauauuuguaaa

SEQ ID NO: 1440189 - RNA, 15 nt, Human
aauagccauauuugu

SEQ ID NO: 1440190 - RNA, 18 nt, Human
aauagauaugaaagcuga

SEQ ID NO: 1440191 - RNA, 20 nt, Human
aauagauaagaguagaaacu

SEQ ID NO: 1440192 - RNA, 16 nt, Human
aauagacagcaugaga

SEQ ID NO: 1440193 - RNA, 23 nt, Human
aauagacacuccccgaagucuuu

SEQ ID NO: 1440194 - RNA, 22 nt, Human
aauagacacuccccgaagucuu

SEQ ID NO: 1440195 - RNA, 14 nt, Human
uaaauuuuuuuccu

SEQ ID NO: 1440196 - RNA, 23 nt, Human
aauagacaauuuauuauggcaca

SEQ ID NO: 1440197 - RNA, 20 nt, Human
uaaauuuuuuguugacauua

SEQ ID NO: 1440198 - RNA, 18 nt, Human
uaaauuuuuuguugacau

SEQ ID NO: 1440199 - RNA, 16 nt, Human
uaaauuuuuuguugac

SEQ ID NO: 1440200 - RNA, 18 nt, Human
aauagacaauuuauuaug

SEQ ID NO: 1440201 - RNA, 16 nt, Human
aauagcuuuaaugaua

SEQ ID NO: 1440202 - RNA, 15 nt, Human
aauagcuuuaaugau

SEQ ID NO: 1440203 - RNA, 18 nt, Human
aauagcuuaugaaaagaa

SEQ ID NO: 1440204 - RNA, 19 nt, Human
aauagcuuaugaaaagaau

SEQ ID NO: 1440205 - RNA, 17 nt, Human
aauagcuuaugaaaaga

SEQ ID NO: 1440206 - RNA, 16 nt, Human
aauagcuuaugaaaag

SEQ ID NO: 1440207 - RNA, 18 nt, Human
aauagcuguaaacuucca

SEQ ID NO: 1440208 - RNA, 22 nt, Human
aauagccauauuuguaaaauga

SEQ ID NO: 1440209 - RNA, 24 nt, Human
aauagcuuuuuucucugauacaga

SEQ ID NO: 1440210 - RNA, 20 nt, Human
aauaggguauauuuuccuau

SEQ ID NO: 1440211 - RNA, 19 nt, Human
aauaggguauauuuuccua

SEQ ID NO: 1440212 - RNA, 21 nt, Human
aauagggcugagcucucugug

SEQ ID NO: 1440213 - RNA, 18 nt, Human
aauagggacuaucuaucu

SEQ ID NO: 1440214 - RNA, 19 nt, Human
aauaggcggggcuugccuu

SEQ ID NO: 1440215 - RNA, 18 nt, Human
aauaggcggggcuugccu

SEQ ID NO: 1440216 - RNA, 14 nt, Human
aauaggcaggaagc

SEQ ID NO: 1440217 - RNA, 22 nt, Human
aauaggcgaucacaacgugcau

SEQ ID NO: 1440218 - RNA, 16 nt, Human
aauaggaauugguuuc

SEQ ID NO: 1440219 - RNA, 18 nt, Human
aauaggcguaacuaauuu

SEQ ID NO: 1440220 - RNA, 20 nt, Human
uaaguucaaauucuucugaa

SEQ ID NO: 1440221 - RNA, 19 nt, Human
uaaguucaaauucuucuga

SEQ ID NO: 1440222 - RNA, 20 nt, Human
uaaguuauugcaguuuauca

SEQ ID NO: 1440223 - RNA, 16 nt, Human
uaaguuauugcaguuu

SEQ ID NO: 1440224 - RNA, 15 nt, Human
uaaguuauugcaguu

SEQ ID NO: 1440225 - RNA, 14 nt, Human
uaaguuauugcagu

SEQ ID NO: 1440226 - RNA, 12 nt, Human
uaaguuauugca

SEQ ID NO: 1440227 - RNA, 16 nt, Human
uaaguuugauuucauu

SEQ ID NO: 1440228 - RNA, 17 nt, Human
uaaguuucucugcagaa

SEQ ID NO: 1440229 - RNA, 14 nt, Human
uaaguuucugggac

SEQ ID NO: 1440230 - RNA, 18 nt, Human
uaaguuuuuuuuuaaaaa

SEQ ID NO: 1440231 - RNA, 20 nt, Human
uaaguuuuuauggcuuuugu

SEQ ID NO: 1440232 - RNA, 21 nt, Human
aaucagauagauauuccuauu

SEQ ID NO: 1440233 - RNA, 16 nt, Human
aaucagauagauauuc

SEQ ID NO: 1440234 - RNA, 14 nt, Human
aaucagauagauau

SEQ ID NO: 1440235 - RNA, 20 nt, Human
aaucagagaccuuccagaaa

SEQ ID NO: 1440236 - RNA, 16 nt, Human
aaucagagaaggaaca

SEQ ID NO: 1440237 - RNA, 12 nt, Human
aaucagacugac

SEQ ID NO: 1440238 - RNA, 13 nt, Human
aaucagaauuaga

SEQ ID NO: 1440239 - RNA, 14 nt, Human
aaucagacuaugaa

SEQ ID NO: 1440240 - RNA, 17 nt, Human
aaucagacuaugaaguu

SEQ ID NO: 1440241 - RNA, 23 nt, Human
aaucaugaauuaguuuuauaugc

SEQ ID NO: 1440242 - RNA, 17 nt, Human
aaucaugaauuaguuuu

SEQ ID NO: 1440243 - RNA, 19 nt, Human
aaucaugaauuaguuuuau

SEQ ID NO: 1440244 - RNA, 15 nt, Human
aaucauguguguuaa

SEQ ID NO: 1440245 - RNA, 13 nt, Human
aaucauguguguu

SEQ ID NO: 1440246 - RNA, 12 nt, Human
aaucaugugugu

SEQ ID NO: 1440247 - RNA, 17 nt, Human
aaucauggugcucagag

SEQ ID NO: 1440248 - RNA, 13 nt, Human
uaauaaaagaaaa

SEQ ID NO: 1440249 - RNA, 14 nt, Human
uaauaaaagaaaau

SEQ ID NO: 1440250 - RNA, 12 nt, Human
uaauaaaagaaa

SEQ ID NO: 1440251 - RNA, 11 nt, Human
uaauaaaagaa

SEQ ID NO: 1440252 - RNA, 15 nt, Human
uaauaaaaauaauuu

SEQ ID NO: 1440253 - RNA, 20 nt, Human
aaucauccauccuugccaau

SEQ ID NO: 1440254 - RNA, 22 nt, Human
aaucaucagaaaggaaaaacaa

SEQ ID NO: 1440255 - RNA, 12 nt, Human
aaucaucaagua

SEQ ID NO: 1440256 - RNA, 23 nt, Human
aaucaucaagagaauuuggggcu

SEQ ID NO: 1440257 - RNA, 21 nt, Human
aaucaucaagagaauuugggg

SEQ ID NO: 1440258 - RNA, 15 nt, Human
aaucaucaagagaau

SEQ ID NO: 1440259 - RNA, 15 nt, Human
aaucaucaagucuuu

SEQ ID NO: 1440260 - RNA, 22 nt, Human
aaucuagauaucgacuuguuuu

SEQ ID NO: 1440261 - RNA, 16 nt, Human
aaucuacucaaagcau

SEQ ID NO: 1440262 - RNA, 17 nt, Human
aaucuacucaaagcaug

SEQ ID NO: 1440263 - RNA, 17 nt, Human
aaucuacuaauuccaca

SEQ ID NO: 1440264 - RNA, 22 nt, Human
aaucugucacguagaacuugga

SEQ ID NO: 1440265 - RNA, 15 nt, Human
aaucucaaauuucua

SEQ ID NO: 1440266 - RNA, 14 nt, Human
aaucucaaauuucu

SEQ ID NO: 1440267 - RNA, 12 nt, Human
aaucucaaauuu

SEQ ID NO: 1440268 - RNA, 14 nt, Human
aaucuuauaauuua

SEQ ID NO: 1440269 - RNA, 16 nt, Human
aaucuuauaauuuaaa

SEQ ID NO: 1440270 - RNA, 15 nt, Human
aaucuuauaauuguu

SEQ ID NO: 1440271 - RNA, 14 nt, Human
aaucuuauaauugu

SEQ ID NO: 1440272 - RNA, 23 nt, Human
aaucuuaguguaugauuacuggc

SEQ ID NO: 1440273 - RNA, 16 nt, Human
aaucuacuaauuccac

SEQ ID NO: 1440274 - RNA, 15 nt, Human
aaucuacuaauucca

SEQ ID NO: 1440275 - RNA, 17 nt, Human
aauccuugaugauugac

SEQ ID NO: 1440276 - RNA, 18 nt, Human
aaucuaaauggaaccacu

SEQ ID NO: 1440277 - RNA, 13 nt, Human
aaucuaaauggaa

SEQ ID NO: 1440278 - RNA, 15 nt, Human
aaucuaaauggaacc

SEQ ID NO: 1440279 - RNA, 18 nt, Human
aauccuugcuuaugacau

SEQ ID NO: 1440280 - RNA, 17 nt, Human
aauccuugcuuaugaca

SEQ ID NO: 1440281 - RNA, 13 nt, Human
aauccuugcuuau

SEQ ID NO: 1440282 - RNA, 20 nt, Human
aauccuuagaucuggcaugu

SEQ ID NO: 1440283 - RNA, 19 nt, Human
aauccuuagaucuggcaug

SEQ ID NO: 1440284 - RNA, 13 nt, Human
aauccuugaagau

SEQ ID NO: 1440285 - RNA, 20 nt, Human
aaucauuucuauuucuccuc

SEQ ID NO: 1440286 - RNA, 19 nt, Human
aaucauuucuauuucuccu

SEQ ID NO: 1440287 - RNA, 12 nt, Human
aaucauuucuau

SEQ ID NO: 1440288 - RNA, 14 nt, Human
aaucauuguaugug

SEQ ID NO: 1440289 - RNA, 18 nt, Human
aauccuaugcaugguuuc

SEQ ID NO: 1440290 - RNA, 15 nt, Human
aauccuaugcauggu

SEQ ID NO: 1440291 - RNA, 15 nt, Human
aauccuaccucaaaa

SEQ ID NO: 1440292 - RNA, 17 nt, Human
aauccuaccucaaaauu

SEQ ID NO: 1440293 - RNA, 21 nt, Human
aauccuaugcaugguuucagc

SEQ ID NO: 1440294 - RNA, 22 nt, Human
aauccuaugcaugguuucagca

SEQ ID NO: 1440295 - RNA, 20 nt, Human
aauccucaguuuuugugaaa

SEQ ID NO: 1440296 - RNA, 19 nt, Human
aaucuugucauguguauaa

SEQ ID NO: 1440297 - RNA, 18 nt, Human
aaucuugucauguguaua

SEQ ID NO: 1440298 - RNA, 13 nt, Human
aaucuugucucaa

SEQ ID NO: 1440299 - RNA, 15 nt, Human
aaucuugucucaaug

SEQ ID NO: 1440300 - RNA, 17 nt, Human
aaucuugucucaaugcu

SEQ ID NO: 1440301 - RNA, 13 nt, Human
uaaugguguagaa

SEQ ID NO: 1440302 - RNA, 18 nt, Human
uaauggugccuucauuug

SEQ ID NO: 1440303 - RNA, 16 nt, Human
uaauggugccuucauu

SEQ ID NO: 1440304 - RNA, 19 nt, Human
uaaugguguagaacacuaa

SEQ ID NO: 1440305 - RNA, 16 nt, Human
uaaugauaacuggaaa

SEQ ID NO: 1440306 - RNA, 23 nt, Human
aaucuuuuacaacugccucgaaa

SEQ ID NO: 1440307 - RNA, 21 nt, Human
aaucuuuuacaacugccucga

SEQ ID NO: 1440308 - RNA, 12 nt, Human
aaucuuuuacaa

SEQ ID NO: 1440309 - RNA, 21 nt, Human
aaucuuugaaagguuagagaa

SEQ ID NO: 1440310 - RNA, 14 nt, Human
aaucuuucuuucuu

SEQ ID NO: 1440311 - RNA, 16 nt, Human
aaucuuucuuucuuag

SEQ ID NO: 1440312 - RNA, 17 nt, Human
aaucuuucuuucuuaga

SEQ ID NO: 1440313 - RNA, 18 nt, Human
aaucuuucuuucuuagaa

SEQ ID NO: 1440314 - RNA, 19 nt, Human
aaucuuucuuucuuagaaa

SEQ ID NO: 1440315 - RNA, 20 nt, Human
aaucuuucuuucuuagaaau

SEQ ID NO: 1440316 - RNA, 21 nt, Human
aaucuuucuuucuuagaaauu

SEQ ID NO: 1440317 - RNA, 22 nt, Human
aaucuuucuuucuuagaaauuu

SEQ ID NO: 1440318 - RNA, 17 nt, Human
aaucuuuaaaagaugcu

SEQ ID NO: 1440319 - RNA, 21 nt, Human
aaucuuuaaaagaugcuuuua

SEQ ID NO: 1440320 - RNA, 18 nt, Human
aaucuugucucaaugcuc

SEQ ID NO: 1440321 - RNA, 20 nt, Human
aaucuugucucaaugcucau

SEQ ID NO: 1440322 - RNA, 21 nt, Human
aaucuugucucaaugcucaua

SEQ ID NO: 1440323 - RNA, 13 nt, Human
aaugagaaucuac

SEQ ID NO: 1440324 - RNA, 18 nt, Human
aaugacuuacuguacaug

SEQ ID NO: 1440325 - RNA, 14 nt, Human
aaugacuuacugua

SEQ ID NO: 1440326 - RNA, 17 nt, Human
aaugacuuacuguacau

SEQ ID NO: 1440327 - RNA, 21 nt, Human
aaugagagacacacugaagaa

SEQ ID NO: 1440328 - RNA, 13 nt, Human
aaugagacaucca

SEQ ID NO: 1440329 - RNA, 14 nt, Human
aaugagacauccag

SEQ ID NO: 1440330 - RNA, 15 nt, Human
aaugagacauccagc

SEQ ID NO: 1440331 - RNA, 18 nt, Human
aaugacauuuauaucaca

SEQ ID NO: 1440332 - RNA, 19 nt, Human
aaugacaugaauuuuagcu

SEQ ID NO: 1440333 - RNA, 13 nt, Human
aaugacaugaauu

SEQ ID NO: 1440334 - RNA, 22 nt, Human
aaugacaguccgucaaaacaga

SEQ ID NO: 1440335 - RNA, 15 nt, Human
aaugacaggccuguc

SEQ ID NO: 1440336 - RNA, 19 nt, Human
aaugacacucauauaauua

SEQ ID NO: 1440337 - RNA, 11 nt, Human
aaugacacugu

SEQ ID NO: 1440338 - RNA, 17 nt, Human
aaugacacucauauaau

SEQ ID NO: 1440339 - RNA, 14 nt, Human
aaugacacucauau

SEQ ID NO: 1440340 - RNA, 15 nt, Human
aaugaaaaugucuug

SEQ ID NO: 1440341 - RNA, 15 nt, Human
aaugaaaauguccau

SEQ ID NO: 1440342 - RNA, 14 nt, Human
aaugaaaauaagaa

SEQ ID NO: 1440343 - RNA, 18 nt, Human
aaugaaaacucuuugcug

SEQ ID NO: 1440344 - RNA, 18 nt, Human
aaugaaaacagaaugucu

SEQ ID NO: 1440345 - RNA, 16 nt, Human
aaugaaaacagaaugu

SEQ ID NO: 1440346 - RNA, 15 nt, Human
aaugaaaaccacauu

SEQ ID NO: 1440347 - RNA, 23 nt, Human
uaaucaguucauuagaaauauuu

SEQ ID NO: 1440348 - RNA, 17 nt, Human
uaaucacgcuuuccuga

SEQ ID NO: 1440349 - RNA, 22 nt, Human
uaaucauauaauaaauguacau

SEQ ID NO: 1440350 - RNA, 20 nt, Human
uaaucauauaauaaauguac

SEQ ID NO: 1440351 - RNA, 15 nt, Human
uaaucauauaauaaa

SEQ ID NO: 1440352 - RNA, 18 nt, Human
uaaucaucaaguaauaca

SEQ ID NO: 1440353 - RNA, 22 nt, Human
uaaucaucaagagaauuugggg

SEQ ID NO: 1440354 - RNA, 23 nt, Human
uaaugaaacaaagaguucaagaa

SEQ ID NO: 1440355 - RNA, 20 nt, Human
uaaugacaggccuguccaac

SEQ ID NO: 1440356 - RNA, 15 nt, Human
uaaugacaggccugu

SEQ ID NO: 1440357 - RNA, 15 nt, Human
uaaugaauuuaguga

SEQ ID NO: 1440358 - RNA, 17 nt, Human
uaaugaaacaaagaguu

SEQ ID NO: 1440359 - RNA, 23 nt, Human
uaauacugcugagauacauacag

SEQ ID NO: 1440360 - RNA, 14 nt, Human
uaauacugcugaga

SEQ ID NO: 1440361 - RNA, 21 nt, Human
uaauacucaaaugaguaacau

SEQ ID NO: 1440362 - RNA, 20 nt, Human
uaauacucaaaugaguaaca

SEQ ID NO: 1440363 - RNA, 18 nt, Human
uaauacucaaaugaguaa

SEQ ID NO: 1440364 - RNA, 16 nt, Human
uaauacucaaaugagu

SEQ ID NO: 1440365 - RNA, 15 nt, Human
uaauacuaccuugaa

SEQ ID NO: 1440366 - RNA, 14 nt, Human
uaauacuaccuuga

SEQ ID NO: 1440367 - RNA, 17 nt, Human
aaucuuauaauuguucu

SEQ ID NO: 1440368 - RNA, 14 nt, Human
aaucuuccuguuua

SEQ ID NO: 1440369 - RNA, 15 nt, Human
uaaucacgcuuuccu

SEQ ID NO: 1440370 - RNA, 18 nt, Human
uaaucaauguuucuucua

SEQ ID NO: 1440371 - RNA, 11 nt, Human
uaauagcugua

SEQ ID NO: 1440372 - RNA, 19 nt, Human
uaauacugcugagauacau

SEQ ID NO: 1440373 - RNA, 14 nt, Human
uaauagguuuggac

SEQ ID NO: 1440374 - RNA, 19 nt, Human
uaauagguuuggacaaaau

SEQ ID NO: 1440375 - RNA, 20 nt, Human
uaauagggcaauuaauuccu

SEQ ID NO: 1440376 - RNA, 19 nt, Human
aauguauuuuauguuauau

SEQ ID NO: 1440377 - RNA, 20 nt, Human
aauguauuuuauguuauaua

SEQ ID NO: 1440378 - RNA, 18 nt, Human
aauguauuuuauguuaua

SEQ ID NO: 1440379 - RNA, 15 nt, Human
aauguauuuuauguu

SEQ ID NO: 1440380 - RNA, 13 nt, Human
aauguauuuuaug

SEQ ID NO: 1440381 - RNA, 21 nt, Human
aauguggcuugagaaauaugg

SEQ ID NO: 1440382 - RNA, 16 nt, Human
aauguggcuugagaaa

SEQ ID NO: 1440383 - RNA, 12 nt, Human
aauguggcuuga

SEQ ID NO: 1440384 - RNA, 13 nt, Human
aaugugauguucu

SEQ ID NO: 1440385 - RNA, 16 nt, Human
aaugugaugaauacug

SEQ ID NO: 1440386 - RNA, 20 nt, Human
aaugugaugaauacuguauu

SEQ ID NO: 1440387 - RNA, 12 nt, Human
aaugugaugaau

SEQ ID NO: 1440388 - RNA, 13 nt, Human
aauguaugucugg

SEQ ID NO: 1440389 - RNA, 21 nt, Human
uacauagugcugcugugugcu

SEQ ID NO: 1440390 - RNA, 19 nt, Human
uacauagugcugcugugug

SEQ ID NO: 1440391 - RNA, 17 nt, Human
uacauagugcugcugug

SEQ ID NO: 1440392 - RNA, 19 nt, Human
uacauauaagugauugcug

SEQ ID NO: 1440393 - RNA, 21 nt, Human
uacauaugugcuggaauucua

SEQ ID NO: 1440394 - RNA, 22 nt, Human
uacauagugcugcugugugcuu

SEQ ID NO: 1440395 - RNA, 22 nt, Human
uacauauaagugauugcugguu

SEQ ID NO: 1440396 - RNA, 21 nt, Human
uacauagggauaugcguauua

SEQ ID NO: 1440397 - RNA, 17 nt, Human
uacauagaugcuuaguc

SEQ ID NO: 1440398 - RNA, 21 nt, Human
uacauaaugcgugcauaccac

SEQ ID NO: 1440399 - RNA, 19 nt, Human
uacauaaugcgugcauacc

SEQ ID NO: 1440400 - RNA, 20 nt, Human
uacauaaugcgugcauacca

SEQ ID NO: 1440401 - RNA, 17 nt, Human
uacauaaugcgugcaua

SEQ ID NO: 1440402 - RNA, 20 nt, Human
uacaccacucuggcagccac

SEQ ID NO: 1440403 - RNA, 21 nt, Human
uacaccacucuggcagccaca

SEQ ID NO: 1440404 - RNA, 19 nt, Human
uacaccacucuggcagcca

SEQ ID NO: 1440405 - RNA, 17 nt, Human
uacaccacucuggcagc

SEQ ID NO: 1440406 - RNA, 16 nt, Human
uacaccacucuggcag

SEQ ID NO: 1440407 - RNA, 14 nt, Human
uacaccacucuggc

SEQ ID NO: 1440408 - RNA, 12 nt, Human
uacaccacucug

SEQ ID NO: 1440409 - RNA, 19 nt, Human
uacaccacuacauucuguu

SEQ ID NO: 1440410 - RNA, 20 nt, Human
uacaccacuacauucuguua

SEQ ID NO: 1440411 - RNA, 15 nt, Human
uacaccacuacauuc

SEQ ID NO: 1440412 - RNA, 16 nt, Human
uacaccacuacauucu

SEQ ID NO: 1440413 - RNA, 17 nt, Human
uacaccacuacauucug

SEQ ID NO: 1440414 - RNA, 18 nt, Human
uacaccacuacauucugu

SEQ ID NO: 1440415 - RNA, 21 nt, Human
aauggaggaacuuuccaaaca

SEQ ID NO: 1440416 - RNA, 20 nt, Human
aauggagauucaguuuucau

SEQ ID NO: 1440417 - RNA, 21 nt, Human
aauggaccggagagugggggu

SEQ ID NO: 1440418 - RNA, 19 nt, Human
aauggacuuuuguacauag

SEQ ID NO: 1440419 - RNA, 15 nt, Human
uacagagcuucccug

SEQ ID NO: 1440420 - RNA, 16 nt, Human
uacagagcuucccuga

SEQ ID NO: 1440421 - RNA, 19 nt, Human
uacacuaagagagaaugag

SEQ ID NO: 1440422 - RNA, 15 nt, Human
uacaggccucacaca

SEQ ID NO: 1440423 - RNA, 18 nt, Human
uacaguaggagcccagcu

SEQ ID NO: 1440424 - RNA, 15 nt, Human
uacaguaggagccca

SEQ ID NO: 1440425 - RNA, 14 nt, Human
uacaguaggagccc

SEQ ID NO: 1440426 - RNA, 13 nt, Human
uacaguaggagcc

SEQ ID NO: 1440427 - RNA, 21 nt, Human
uacaguagauuuuccaaaugu

SEQ ID NO: 1440428 - RNA, 17 nt, Human
uacaguagauuuuccaa

SEQ ID NO: 1440429 - RNA, 22 nt, Human
uacaguaggagcccagcucuga

SEQ ID NO: 1440430 - RNA, 20 nt, Human
uacaguaggagcccagcucu

SEQ ID NO: 1440431 - RNA, 16 nt, Human
uaauucaauucaaagc

SEQ ID NO: 1440432 - RNA, 22 nt, Human
uaauucaaggaauuucuuaacu

SEQ ID NO: 1440433 - RNA, 20 nt, Human
uaauucaaggaauuucuuaa

SEQ ID NO: 1440434 - RNA, 18 nt, Human
uaauucaaggaauuucuu

SEQ ID NO: 1440435 - RNA, 18 nt, Human
uaauuauuuauguauggu

SEQ ID NO: 1440436 - RNA, 16 nt, Human
uaauuauuuauguaug

SEQ ID NO: 1440437 - RNA, 14 nt, Human
uaauuauuuaugua

SEQ ID NO: 1440438 - RNA, 14 nt, Human
aaugaggagacaca

SEQ ID NO: 1440439 - RNA, 23 nt, Human
aaugagcuuucugaacagcuggu

SEQ ID NO: 1440440 - RNA, 22 nt, Human
aaugagcuuucugaacagcugg

SEQ ID NO: 1440441 - RNA, 21 nt, Human
aaugagcuuucugaacagcug

SEQ ID NO: 1440442 - RNA, 20 nt, Human
aaugagcuuucugaacagcu

SEQ ID NO: 1440443 - RNA, 16 nt, Human
aaugagcuuucugaac

SEQ ID NO: 1440444 - RNA, 15 nt, Human
aaugagcuuucugaa

SEQ ID NO: 1440445 - RNA, 14 nt, Human
aaugagcuuucuga

SEQ ID NO: 1440446 - RNA, 13 nt, Human
aaugagcuuucug

SEQ ID NO: 1440447 - RNA, 12 nt, Human
aaugagcuuucu

SEQ ID NO: 1440448 - RNA, 17 nt, Human
uaauuccacaccuuuua

SEQ ID NO: 1440449 - RNA, 15 nt, Human
uaauuccacaccuuu

SEQ ID NO: 1440450 - RNA, 22 nt, Human
uaauuucaggaggaauacugaa

SEQ ID NO: 1440451 - RNA, 23 nt, Human
uaauuucaggaggaauacugaac

SEQ ID NO: 1440452 - RNA, 21 nt, Human
uaauuucaggaggaauacuga

SEQ ID NO: 1440453 - RNA, 20 nt, Human
uaauuucaaaaugcuuuuua

SEQ ID NO: 1440454 - RNA, 16 nt, Human
uaauuucaaaaugcuu

SEQ ID NO: 1440455 - RNA, 15 nt, Human
uaauuucaaaaugcu

SEQ ID NO: 1440456 - RNA, 12 nt, Human
uaauuucaaaau

SEQ ID NO: 1440457 - RNA, 14 nt, Human
uaauuuauuauuaa

SEQ ID NO: 1440458 - RNA, 14 nt, Human
uaauuuaugcagaa

SEQ ID NO: 1440459 - RNA, 22 nt, Human
uacaaaacaaacucauucauua

SEQ ID NO: 1440460 - RNA, 17 nt, Human
uacaaaacaaacucauu

SEQ ID NO: 1440461 - RNA, 14 nt, Human
uacaaaacaaacuc

SEQ ID NO: 1440462 - RNA, 13 nt, Human
uacaaaaauuccu

SEQ ID NO: 1440463 - RNA, 20 nt, Human
uacaaaaauauaaaauauga

SEQ ID NO: 1440464 - RNA, 19 nt, Human
uacaaaauaaacaaauaac

SEQ ID NO: 1440465 - RNA, 21 nt, Human
uacaaaagaagggcugguauu

SEQ ID NO: 1440466 - RNA, 15 nt, Human
uacaaaagcauguga

SEQ ID NO: 1440467 - RNA, 18 nt, Human
uacaaaaauauaaaauau

SEQ ID NO: 1440468 - RNA, 17 nt, Human
uacaaaaauauaaaaua

SEQ ID NO: 1440469 - RNA, 14 nt, Human
uacaaaaauauaaa

SEQ ID NO: 1440470 - RNA, 18 nt, Human
uacaaguauuuuuaauua

SEQ ID NO: 1440471 - RNA, 17 nt, Human
uacaaguauuuuuaauu

SEQ ID NO: 1440472 - RNA, 15 nt, Human
aaugcaguugucucu

SEQ ID NO: 1440473 - RNA, 10 nt, Human
uacaaaauca

SEQ ID NO: 1440474 - RNA, 20 nt, Human
uacaaaauaaacaaauaaca

SEQ ID NO: 1440475 - RNA, 19 nt, Human
uacaaguaacaaaaauaaa

SEQ ID NO: 1440476 - RNA, 15 nt, Human
uacaaguaacaaaaa

SEQ ID NO: 1440477 - RNA, 14 nt, Human
aaugcauucuucuc

SEQ ID NO: 1440478 - RNA, 19 nt, Human
aaugcauucuucucuguug

SEQ ID NO: 1440479 - RNA, 12 nt, Human
aaugcauuuugu

SEQ ID NO: 1440480 - RNA, 18 nt, Human
aaugcauuuuguuuggua

SEQ ID NO: 1440481 - RNA, 20 nt, Human
aaugcauuuuguuugguauu

SEQ ID NO: 1440482 - RNA, 21 nt, Human
aaugcauuuuguuugguauug

SEQ ID NO: 1440483 - RNA, 23 nt, Human
aaugcauuauaggaucauuuguu

SEQ ID NO: 1440484 - RNA, 14 nt, Human
aaugcauacaaguu

SEQ ID NO: 1440485 - RNA, 22 nt, Human
aaugcauuauaggaucauuugu

SEQ ID NO: 1440486 - RNA, 14 nt, Human
aaugcauaaaugca

SEQ ID NO: 1440487 - RNA, 19 nt, Human
aaugcaguugucucuguuu

SEQ ID NO: 1440488 - RNA, 16 nt, Human
aaugcaguugucucug

SEQ ID NO: 1440489 - RNA, 19 nt, Human
aaugccaagcacuucuuuu

SEQ ID NO: 1440490 - RNA, 14 nt, Human
aaugccaagcacuu

SEQ ID NO: 1440491 - RNA, 21 nt, Human
aaugccaaauuaaaaaagaua

SEQ ID NO: 1440492 - RNA, 17 nt, Human
aaugccaaauuaaaaaa

SEQ ID NO: 1440493 - RNA, 16 nt, Human
aaugccaaauuaaaaa

SEQ ID NO: 1440494 - RNA, 22 nt, Human
aaugccaaauuaaaaaagauaa

SEQ ID NO: 1440495 - RNA, 15 nt, Human
aaugccaaauuaaaa

SEQ ID NO: 1440496 - RNA, 23 nt, Human
aaugcauuuuguuugguauugua

SEQ ID NO: 1440497 - RNA, 20 nt, Human
aaugcuuuuuauuucugcau

SEQ ID NO: 1440498 - RNA, 19 nt, Human
aaugcuuuuuauuucugca

SEQ ID NO: 1440499 - RNA, 18 nt, Human
aaugcuuugauauuucaa

SEQ ID NO: 1440500 - RNA, 12 nt, Human
aaugcuuugaua

SEQ ID NO: 1440501 - RNA, 22 nt, Human
aaugcuuugaaauugaaccuuu

SEQ ID NO: 1440502 - RNA, 14 nt, Human
aaugcuuugaaauu

SEQ ID NO: 1440503 - RNA, 21 nt, Human
aauggaaugugauguucaugg

SEQ ID NO: 1440504 - RNA, 21 nt, Human
aaugccccugaauuuaaauag

SEQ ID NO: 1440505 - RNA, 13 nt, Human
aaugcugugcccu

SEQ ID NO: 1440506 - RNA, 20 nt, Human
aaugcugugcccuaaagugu

SEQ ID NO: 1440507 - RNA, 21 nt, Human
aaugcugugcccuaaagugua

SEQ ID NO: 1440508 - RNA, 21 nt, Human
ucagcgcugucaggauugcga

SEQ ID NO: 1440509 - RNA, 20 nt, Human
ucagcgcugucaggauugcg

SEQ ID NO: 1440510 - RNA, 23 nt, Human
ucagcgacuccguuggccacucc

SEQ ID NO: 1440511 - RNA, 20 nt, Human
ucagcgacuccguuggccac

SEQ ID NO: 1440512 - RNA, 19 nt, Human
ucagcgacuccguuggcca

SEQ ID NO: 1440513 - RNA, 17 nt, Human
ucagccuugccagagau

SEQ ID NO: 1440514 - RNA, 16 nt, Human
ucagccuugccagaga

SEQ ID NO: 1440515 - RNA, 15 nt, Human
ucagccuugccagag

SEQ ID NO: 1440516 - RNA, 14 nt, Human
ucagccuugccaga

SEQ ID NO: 1440517 - RNA, 17 nt, Human
accccuguaggccucag

SEQ ID NO: 1440518 - RNA, 16 nt, Human
accccuguaggccuca

SEQ ID NO: 1440519 - RNA, 15 nt, Human
accccuguaggccuc

SEQ ID NO: 1440520 - RNA, 20 nt, Human
accccccuuucacaggcagc

SEQ ID NO: 1440521 - RNA, 21 nt, Human
accccccuuucacaggcagcc

SEQ ID NO: 1440522 - RNA, 18 nt, Human
accccccuuucacaggca

SEQ ID NO: 1440523 - RNA, 14 nt, Human
accccccuguacac

SEQ ID NO: 1440524 - RNA, 22 nt, Human
accccccuguacacaacucacu

SEQ ID NO: 1440525 - RNA, 11 nt, Human
accccccucug

SEQ ID NO: 1440526 - RNA, 21 nt, Human
ucagcuucguuuauuuucaag

SEQ ID NO: 1440527 - RNA, 19 nt, Human
ucagcuucguuuauuuuca

SEQ ID NO: 1440528 - RNA, 15 nt, Human
ucagcucauccaugc

SEQ ID NO: 1440529 - RNA, 12 nt, Human
ucagcucaugga

SEQ ID NO: 1440530 - RNA, 15 nt, Human
ucaggaaaggaauca

SEQ ID NO: 1440531 - RNA, 21 nt, Human
ucaggaaacgagacuuuccau

SEQ ID NO: 1440532 - RNA, 22 nt, Human
ucaggaaacgagacuuuccauu

SEQ ID NO: 1440533 - RNA, 18 nt, Human
ucaggaaaauugaaugca

SEQ ID NO: 1440534 - RNA, 19 nt, Human
ucaggaaagagaacuucca

SEQ ID NO: 1440535 - RNA, 12 nt, Human
ucaggaaaauug

SEQ ID NO: 1440536 - RNA, 18 nt, Human
ucaggaaaaggccugggg

SEQ ID NO: 1440537 - RNA, 19 nt, Human
ucaggaaaaggccuggggu

SEQ ID NO: 1440538 - RNA, 17 nt, Human
ucaggaaaaggccuggg

SEQ ID NO: 1440539 - RNA, 16 nt, Human
ucaggaaaaggccugg

SEQ ID NO: 1440540 - RNA, 15 nt, Human
ucaggaaaaggccug

SEQ ID NO: 1440541 - RNA, 14 nt, Human
ucaggaaaaggccu

SEQ ID NO: 1440542 - RNA, 13 nt, Human
ucaggaaagagaa

SEQ ID NO: 1440543 - RNA, 19 nt, Human
ucagccuacaggccucaca

SEQ ID NO: 1440544 - RNA, 12 nt, Human
ucagcauuugac

SEQ ID NO: 1440545 - RNA, 11 nt, Human
ucagcauuuga

SEQ ID NO: 1440546 - RNA, 21 nt, Human
ucagagccuccuuucuggcuu

SEQ ID NO: 1440547 - RNA, 22 nt, Human
ucagagaggccuuuuggaaugu

SEQ ID NO: 1440548 - RNA, 21 nt, Human
ucagagaggccuuuuggaaug

SEQ ID NO: 1440549 - RNA, 20 nt, Human
ucagccagugaccaaccuuu

SEQ ID NO: 1440550 - RNA, 19 nt, Human
ucagccaggagcugggcag

SEQ ID NO: 1440551 - RNA, 23 nt, Human
ucagccaagguuuuauaaggcug

SEQ ID NO: 1440552 - RNA, 22 nt, Human
ucagccaagguuuuauaaggcu

SEQ ID NO: 1440553 - RNA, 16 nt, Human
accccacgccuuaucc

SEQ ID NO: 1440554 - RNA, 21 nt, Human
accccaccuuuauuccuucau

SEQ ID NO: 1440555 - RNA, 14 nt, Human
accccaccucuucc

SEQ ID NO: 1440556 - RNA, 20 nt, Human
acccaggcuggagugcagug

SEQ ID NO: 1440557 - RNA, 19 nt, Human
acccaggcuggagugcagu

SEQ ID NO: 1440558 - RNA, 18 nt, Human
acccaggcuggagugcag

SEQ ID NO: 1440559 - RNA, 19 nt, Human
acccaggccaggcaugugg

SEQ ID NO: 1440560 - RNA, 14 nt, Human
acccaggaucccca

SEQ ID NO: 1440561 - RNA, 15 nt, Human
acccagcggacacac

SEQ ID NO: 1440562 - RNA, 16 nt, Human
accccagggcacagga

SEQ ID NO: 1440563 - RNA, 15 nt, Human
accccagggcacagg

SEQ ID NO: 1440564 - RNA, 12 nt, Human
accccagggcac

SEQ ID NO: 1440565 - RNA, 11 nt, Human
accccagggca

SEQ ID NO: 1440566 - RNA, 10 nt, Human
accccagggc

SEQ ID NO: 1440567 - RNA, 20 nt, Human
accccaggcugaagcagguu

SEQ ID NO: 1440568 - RNA, 14 nt, Human
accccagacacugg

SEQ ID NO: 1440569 - RNA, 14 nt, Human
accccacucccaca

SEQ ID NO: 1440570 - RNA, 13 nt, Human
accccacucccac

SEQ ID NO: 1440571 - RNA, 12 nt, Human
accccacuccca

SEQ ID NO: 1440572 - RNA, 23 nt, Human
accccagcuggggccaggcuggg

SEQ ID NO: 1440573 - RNA, 23 nt, Human
ucagaauuaaacuuuuaauucau

SEQ ID NO: 1440574 - RNA, 20 nt, Human
ucagaauuaaacuuuuaauu

SEQ ID NO: 1440575 - RNA, 18 nt, Human
ucagaauuaaacuuuuaa

SEQ ID NO: 1440576 - RNA, 16 nt, Human
ucagaauuaaacuuuu

SEQ ID NO: 1440577 - RNA, 14 nt, Human
ucagaaugucauuu

SEQ ID NO: 1440578 - RNA, 17 nt, Human
ucagaaucucucuucuu

SEQ ID NO: 1440579 - RNA, 21 nt, Human
ucagaagccugggggccuggc

SEQ ID NO: 1440580 - RNA, 20 nt, Human
ucagaagccugggggccugg

SEQ ID NO: 1440581 - RNA, 19 nt, Human
ucagaagccugggggccug

SEQ ID NO: 1440582 - RNA, 16 nt, Human
ucagaagccugggggc

SEQ ID NO: 1440583 - RNA, 15 nt, Human
ucagaagccuggggg

SEQ ID NO: 1440584 - RNA, 14 nt, Human
ucagaagccugggg

SEQ ID NO: 1440585 - RNA, 13 nt, Human
ucagaagccuggg

SEQ ID NO: 1440586 - RNA, 12 nt, Human
ucagaagccugg

SEQ ID NO: 1440587 - RNA, 16 nt, Human
acccagcccucauccc

SEQ ID NO: 1440588 - RNA, 15 nt, Human
acccagcccucaucc

SEQ ID NO: 1440589 - RNA, 17 nt, Human
acccagccccagccagg

SEQ ID NO: 1440590 - RNA, 22 nt, Human
acccagaggaaggggccagagg

SEQ ID NO: 1440591 - RNA, 15 nt, Human
ucagaagucaucuug

SEQ ID NO: 1440592 - RNA, 22 nt, Human
ucagaagccugggggccuggcu

SEQ ID NO: 1440593 - RNA, 23 nt, Human
ucagaagccugggggccuggcug

SEQ ID NO: 1440594 - RNA, 22 nt, Human
ucagaagucaucuugcuaccag

SEQ ID NO: 1440595 - RNA, 18 nt, Human
ucagaagucaucuugcua

SEQ ID NO: 1440596 - RNA, 17 nt, Human
ucagaaguuaguuugua

SEQ ID NO: 1440597 - RNA, 13 nt, Human
accauuuucuggu

SEQ ID NO: 1440598 - RNA, 15 nt, Human
accauuuuaaaguua

SEQ ID NO: 1440599 - RNA, 20 nt, Human
accauuuggcaucccugggc

SEQ ID NO: 1440600 - RNA, 19 nt, Human
accauuuggcaucccuggg

SEQ ID NO: 1440601 - RNA, 22 nt, Human
accauuuggcaucccugggccu

SEQ ID NO: 1440602 - RNA, 23 nt, Human
accauuuggauccuguguggaga

SEQ ID NO: 1440603 - RNA, 19 nt, Human
accauugucucagagcagg

SEQ ID NO: 1440604 - RNA, 18 nt, Human
accauugucucagagcag

SEQ ID NO: 1440605 - RNA, 15 nt, Human
accauugucucagag

SEQ ID NO: 1440606 - RNA, 14 nt, Human
accauugucucaga

SEQ ID NO: 1440607 - RNA, 23 nt, Human
accauuucuugagguaaaagcau

SEQ ID NO: 1440608 - RNA, 22 nt, Human
acccagaccuguuagcagacag

SEQ ID NO: 1440609 - RNA, 19 nt, Human
acccagacauaaaggaaaa

SEQ ID NO: 1440610 - RNA, 20 nt, Human
acccagacauaaaggaaaag

SEQ ID NO: 1440611 - RNA, 18 nt, Human
acccagacauaaaggaaa

SEQ ID NO: 1440612 - RNA, 15 nt, Human
acccagacucagaca

SEQ ID NO: 1440613 - RNA, 21 nt, Human
acccagauaaagguucaugca

SEQ ID NO: 1440614 - RNA, 16 nt, Human
accauuauaaugaauu

SEQ ID NO: 1440615 - RNA, 21 nt, Human
accauuauaaccuuaauuuau

SEQ ID NO: 1440616 - RNA, 17 nt, Human
accauuauaaugaauuu

SEQ ID NO: 1440617 - RNA, 19 nt, Human
accauuauaaccuuaauuu

SEQ ID NO: 1440618 - RNA, 14 nt, Human
accauuaaaccauc

SEQ ID NO: 1440619 - RNA, 13 nt, Human
accauuaaccaga

SEQ ID NO: 1440620 - RNA, 19 nt, Human
accauuaaaccaucucccu

SEQ ID NO: 1440621 - RNA, 13 nt, Human
accauuaaaccau

SEQ ID NO: 1440622 - RNA, 18 nt, Human
accauugaauucuugguu

SEQ ID NO: 1440623 - RNA, 16 nt, Human
accauugaaggcuuaa

SEQ ID NO: 1440624 - RNA, 13 nt, Human
accauugaaggcu

SEQ ID NO: 1440625 - RNA, 24 nt, Human
accauucugacucgguuucuccaa

SEQ ID NO: 1440626 - RNA, 21 nt, Human
accauuccaagucuccacccc

SEQ ID NO: 1440627 - RNA, 17 nt, Human
accauguagaaaauuug

SEQ ID NO: 1440628 - RNA, 17 nt, Human
accauguacaugaagaa

SEQ ID NO: 1440629 - RNA, 11 nt, Human
accauguacau

SEQ ID NO: 1440630 - RNA, 14 nt, Human
accauguacauagc

SEQ ID NO: 1440631 - RNA, 12 nt, Human
accauguaaugg

SEQ ID NO: 1440632 - RNA, 21 nt, Human
accaugguuaagaguccaaga

SEQ ID NO: 1440633 - RNA, 19 nt, Human
accaugguuaagaguccaa

SEQ ID NO: 1440634 - RNA, 17 nt, Human
accaugguuaagagucc

SEQ ID NO: 1440635 - RNA, 22 nt, Human
accauggucggaaaacaugcua

SEQ ID NO: 1440636 - RNA, 16 nt, Human
ucacacucgacaugaa

SEQ ID NO: 1440637 - RNA, 12 nt, Human
ucacacucgaca

SEQ ID NO: 1440638 - RNA, 21 nt, Human
ucacacucaguugugacuaac

SEQ ID NO: 1440639 - RNA, 20 nt, Human
ucaccaggcagccucugggg

SEQ ID NO: 1440640 - RNA, 22 nt, Human
ucaccaggcagccucugggggg

SEQ ID NO: 1440641 - RNA, 19 nt, Human
ucaccaggcagccucuggg

SEQ ID NO: 1440642 - RNA, 17 nt, Human
ucaccaggcagccucug

SEQ ID NO: 1440643 - RNA, 21 nt, Human
ucacaugaauuauuacagugu

SEQ ID NO: 1440644 - RNA, 22 nt, Human
ucacaugaauuauuacaguguu

SEQ ID NO: 1440645 - RNA, 18 nt, Human
ucacaugaauuauuacag

SEQ ID NO: 1440646 - RNA, 17 nt, Human
ucacaugaauuauuaca

SEQ ID NO: 1440647 - RNA, 16 nt, Human
ucacaugaauuauuac

SEQ ID NO: 1440648 - RNA, 15 nt, Human
ucacaugaauuauua

SEQ ID NO: 1440649 - RNA, 23 nt, Human
ucaccaguguguggcuuucagag

SEQ ID NO: 1440650 - RNA, 18 nt, Human
ucaccaguguguggcuuu

SEQ ID NO: 1440651 - RNA, 19 nt, Human
ucacccaggcuggagugca

SEQ ID NO: 1440652 - RNA, 19 nt, Human
ucacccaggcuggacugca

SEQ ID NO: 1440653 - RNA, 22 nt, Human
ucacccagacauaaaggaaaag

SEQ ID NO: 1440654 - RNA, 19 nt, Human
ucacccagguuggagugca

SEQ ID NO: 1440655 - RNA, 14 nt, Human
ucaagucagcucuu

SEQ ID NO: 1440656 - RNA, 20 nt, Human
ucaagugaucugcccaccuc

SEQ ID NO: 1440657 - RNA, 15 nt, Human
accaaucaugaauua

SEQ ID NO: 1440658 - RNA, 13 nt, Human
accaaucaugaau

SEQ ID NO: 1440659 - RNA, 18 nt, Human
accacaaacuguaauaca

SEQ ID NO: 1440660 - RNA, 14 nt, Human
accacaaacuguaa

SEQ ID NO: 1440661 - RNA, 22 nt, Human
accaauugcugcuacuuauaua

SEQ ID NO: 1440662 - RNA, 16 nt, Human
accaauuauuuucauc

SEQ ID NO: 1440663 - RNA, 20 nt, Human
accaaucauuuuaauuauua

SEQ ID NO: 1440664 - RNA, 13 nt, Human
accaaucauuuua

SEQ ID NO: 1440665 - RNA, 14 nt, Human
accaauuauuuuca

SEQ ID NO: 1440666 - RNA, 17 nt, Human
accacacccuguacugu

SEQ ID NO: 1440667 - RNA, 13 nt, Human
accacacccugua

SEQ ID NO: 1440668 - RNA, 18 nt, Human
accacacccggcuaauuu

SEQ ID NO: 1440669 - RNA, 17 nt, Human
ucacaaaguggaacgaa

SEQ ID NO: 1440670 - RNA, 15 nt, Human
ucaauucuugccaaa

SEQ ID NO: 1440671 - RNA, 17 nt, Human
ucaauucuucccuaucu

SEQ ID NO: 1440672 - RNA, 19 nt, Human
ucaauucuucccuaucuuu

SEQ ID NO: 1440673 - RNA, 22 nt, Human
ucaauuuuaucccucaccugua

SEQ ID NO: 1440674 - RNA, 21 nt, Human
ucaauuuuaucccucaccugu

SEQ ID NO: 1440675 - RNA, 16 nt, Human
ucaauuuuaucccuca

SEQ ID NO: 1440676 - RNA, 23 nt, Human
ucaauucuucccuaucuuugcca

SEQ ID NO: 1440677 - RNA, 18 nt, Human
ucaccuucaccuucaucc

SEQ ID NO: 1440678 - RNA, 21 nt, Human
ucaccugugcuucgggcccuu

SEQ ID NO: 1440679 - RNA, 20 nt, Human
ucaccugugcuucgggcccu

SEQ ID NO: 1440680 - RNA, 21 nt, Human
ucacuaggcccccacuugccu

SEQ ID NO: 1440681 - RNA, 19 nt, Human
ucacuaggcccccacuugc

SEQ ID NO: 1440682 - RNA, 21 nt, Human
ucacuagcccuccuuuuucca

SEQ ID NO: 1440683 - RNA, 18 nt, Human
ucacuagcccuccuuuuu

SEQ ID NO: 1440684 - RNA, 20 nt, Human
ucacuccccaacccccaacu

SEQ ID NO: 1440685 - RNA, 22 nt, Human
ucacuaggcccccacuugccuc

SEQ ID NO: 1440686 - RNA, 13 nt, Human
ucaccugcacuaa

SEQ ID NO: 1440687 - RNA, 16 nt, Human
ucaccugccccaacuc

SEQ ID NO: 1440688 - RNA, 19 nt, Human
ucaccugagucacccuacc

SEQ ID NO: 1440689 - RNA, 23 nt, Human
ucaccucuagguccccauacucc

SEQ ID NO: 1440690 - RNA, 22 nt, Human
ucaccucuagguccccauacuc

SEQ ID NO: 1440691 - RNA, 19 nt, Human
accaggcuugccugcaggc

SEQ ID NO: 1440692 - RNA, 17 nt, Human
accaggcugccucccuu

SEQ ID NO: 1440693 - RNA, 19 nt, Human
accaggcugcucagggcug

SEQ ID NO: 1440694 - RNA, 22 nt, Human
accagccgugagcauguuugga

SEQ ID NO: 1440695 - RNA, 14 nt, Human
accagccucaccag

SEQ ID NO: 1440696 - RNA, 18 nt, Human
accaggcuugccugcagg

SEQ ID NO: 1440697 - RNA, 19 nt, Human
accagccgugagcauguuu

SEQ ID NO: 1440698 - RNA, 14 nt, Human
accagccgugagca

SEQ ID NO: 1440699 - RNA, 15 nt, Human
accagacucuugccu

SEQ ID NO: 1440700 - RNA, 21 nt, Human
accacugcugauauuuucucu

SEQ ID NO: 1440701 - RNA, 15 nt, Human
accacuucagggcuu

SEQ ID NO: 1440702 - RNA, 16 nt, Human
accacuguguauuuaa

SEQ ID NO: 1440703 - RNA, 16 nt, Human
accacuggucuguagg

SEQ ID NO: 1440704 - RNA, 18 nt, Human
accacuuguguuuugcaa

SEQ ID NO: 1440705 - RNA, 15 nt, Human
accacuuuuguucuu

SEQ ID NO: 1440706 - RNA, 16 nt, Human
accacuuuuguucuug

SEQ ID NO: 1440707 - RNA, 21 nt, Human
accacuuuuguucuugguuug

SEQ ID NO: 1440708 - RNA, 16 nt, Human
accagacucuugccug

SEQ ID NO: 1440709 - RNA, 22 nt, Human
accagacuagauggaccugccu

SEQ ID NO: 1440710 - RNA, 23 nt, Human
accagacuacuugggagcaccgc

SEQ ID NO: 1440711 - RNA, 21 nt, Human
accagacuacuugggagcacc

SEQ ID NO: 1440712 - RNA, 17 nt, Human
accagacacccaggacu

SEQ ID NO: 1440713 - RNA, 16 nt, Human
accagacacccaggac

SEQ ID NO: 1440714 - RNA, 15 nt, Human
accagacacccagga

SEQ ID NO: 1440715 - RNA, 14 nt, Human
accagacacccagg

SEQ ID NO: 1440716 - RNA, 20 nt, Human
accagaagcucccccagcaa

SEQ ID NO: 1440717 - RNA, 19 nt, Human
accagaagcucccccagca

SEQ ID NO: 1440718 - RNA, 17 nt, Human
accagaagcucccccag

SEQ ID NO: 1440719 - RNA, 19 nt, Human
accagaaccaauuauuuuc

SEQ ID NO: 1440720 - RNA, 21 nt, Human
accagaaccaauuauuuucau

SEQ ID NO: 1440721 - RNA, 23 nt, Human
accagaaagcaguugagacaaga

SEQ ID NO: 1440722 - RNA, 12 nt, Human
accacuuuuuag

SEQ ID NO: 1440723 - RNA, 13 nt, Human
accacuuuuugca

SEQ ID NO: 1440724 - RNA, 22 nt, Human
accacuuuuguucuugguuugu

SEQ ID NO: 1440725 - RNA, 14 nt, Human
accacuuuuugcag

SEQ ID NO: 1440726 - RNA, 15 nt, Human
accacuuuuugcagc

SEQ ID NO: 1440727 - RNA, 16 nt, Human
accacuuuuugcagcu

SEQ ID NO: 1440728 - RNA, 17 nt, Human
accacuuuuugcagcuu

SEQ ID NO: 1440729 - RNA, 24 nt, Human
accagaaagcaguugagacaagaa

SEQ ID NO: 1440730 - RNA, 17 nt, Human
accagaaaagcccaagu

SEQ ID NO: 1440731 - RNA, 18 nt, Human
accacuuuuugcagcuuu

SEQ ID NO: 1440732 - RNA, 20 nt, Human
accacuuuuugcagcuuucu

SEQ ID NO: 1440733 - RNA, 17 nt, Human
acauauggaauuuugca

SEQ ID NO: 1440734 - RNA, 13 nt, Human
acauauggaauuu

SEQ ID NO: 1440735 - RNA, 19 nt, Human
acauaugaucugucugugg

SEQ ID NO: 1440736 - RNA, 18 nt, Human
acauaugaucugucugug

SEQ ID NO: 1440737 - RNA, 17 nt, Human
acauaugaucugucugu

SEQ ID NO: 1440738 - RNA, 16 nt, Human
acauaugaucugucug

SEQ ID NO: 1440739 - RNA, 15 nt, Human
acauaucuuagaugg

SEQ ID NO: 1440740 - RNA, 21 nt, Human
acauaugugcuggaauucuaa

SEQ ID NO: 1440741 - RNA, 20 nt, Human
acauauggaauuuugcaaag

SEQ ID NO: 1440742 - RNA, 14 nt, Human
acauauugauuucc

SEQ ID NO: 1440743 - RNA, 16 nt, Human
acauauugauuuccgu

SEQ ID NO: 1440744 - RNA, 18 nt, Human
acauauugauuuccguua

SEQ ID NO: 1440745 - RNA, 22 nt, Human
acauauugauuuccguuaaaau

SEQ ID NO: 1440746 - RNA, 23 nt, Human
acauauugauuuccguuaaaaua

SEQ ID NO: 1440747 - RNA, 21 nt, Human
acauagcccacuuacauuuac

SEQ ID NO: 1440748 - RNA, 19 nt, Human
acauagcccacuuacauuu

SEQ ID NO: 1440749 - RNA, 16 nt, Human
acauagcccacuuaca

SEQ ID NO: 1440750 - RNA, 21 nt, Human
acauagagccgggugucccca

SEQ ID NO: 1440751 - RNA, 16 nt, Human
acauagauaaaacauc

SEQ ID NO: 1440752 - RNA, 22 nt, Human
acauagagccggguguccccaa

SEQ ID NO: 1440753 - RNA, 19 nt, Human
acauagagccggguguccc

SEQ ID NO: 1440754 - RNA, 17 nt, Human
acauagacagaagaaac

SEQ ID NO: 1440755 - RNA, 18 nt, Human
acauagacagaagaaaca

SEQ ID NO: 1440756 - RNA, 16 nt, Human
acauagacagaagaaa

SEQ ID NO: 1440757 - RNA, 23 nt, Human
acauauaauguuguuauuuaaag

SEQ ID NO: 1440758 - RNA, 19 nt, Human
acauauauaacaaugcugu

SEQ ID NO: 1440759 - RNA, 15 nt, Human
acauaguuauuuauu

SEQ ID NO: 1440760 - RNA, 20 nt, Human
acauagugggacccugucuc

SEQ ID NO: 1440761 - RNA, 14 nt, Human
acauaguauucaug

SEQ ID NO: 1440762 - RNA, 19 nt, Human
acauaguauucaugacuau

SEQ ID NO: 1440763 - RNA, 22 nt, Human
acauagcuugauaaagggccaa

SEQ ID NO: 1440764 - RNA, 23 nt, Human
uauuuguaaaaugacaaucaugu

SEQ ID NO: 1440765 - RNA, 15 nt, Human
uauuuguaaaaugac

SEQ ID NO: 1440766 - RNA, 14 nt, Human
uauuuguaaaauga

SEQ ID NO: 1440767 - RNA, 17 nt, Human
uauuuggugauuacauu

SEQ ID NO: 1440768 - RNA, 22 nt, Human
uauuuggugauuacauuuuaaa

SEQ ID NO: 1440769 - RNA, 22 nt, Human
acaugaaaacacauuuuucuua

SEQ ID NO: 1440770 - RNA, 18 nt, Human
acaugaaaacacauuuuu

SEQ ID NO: 1440771 - RNA, 19 nt, Human
acaugaaaacacauuuuuc

SEQ ID NO: 1440772 - RNA, 17 nt, Human
acaugaaaacacauuuu

SEQ ID NO: 1440773 - RNA, 16 nt, Human
acaucugugucuuguu

SEQ ID NO: 1440774 - RNA, 15 nt, Human
acaucugugucuugu

SEQ ID NO: 1440775 - RNA, 19 nt, Human
acaucuguaaaucuacaca

SEQ ID NO: 1440776 - RNA, 23 nt, Human
acaucugagguuuuauuucauuu

SEQ ID NO: 1440777 - RNA, 21 nt, Human
acaucugagguuuuauuucau

SEQ ID NO: 1440778 - RNA, 14 nt, Human
acauauuuuaaaau

SEQ ID NO: 1440779 - RNA, 12 nt, Human
acaucaaagagg

SEQ ID NO: 1440780 - RNA, 14 nt, Human
acaucacaagacua

SEQ ID NO: 1440781 - RNA, 14 nt, Human
acaucaaucuuuaa

SEQ ID NO: 1440782 - RNA, 18 nt, Human
acaucaacccgagucauu

SEQ ID NO: 1440783 - RNA, 19 nt, Human
acaucacuuguacaaaaua

SEQ ID NO: 1440784 - RNA, 16 nt, Human
acaucacuuguacaaa

SEQ ID NO: 1440785 - RNA, 15 nt, Human
acaucacuuguacaa

SEQ ID NO: 1440786 - RNA, 14 nt, Human
acaucacagcccag

SEQ ID NO: 1440787 - RNA, 16 nt, Human
acaucacagcccagcc

SEQ ID NO: 1440788 - RNA, 23 nt, Human
acaucucccuuuuccaugacugu

SEQ ID NO: 1440789 - RNA, 12 nt, Human
acaucucauuuu

SEQ ID NO: 1440790 - RNA, 22 nt, Human
acaucucaacaggccucagggc

SEQ ID NO: 1440791 - RNA, 21 nt, Human
acaucucaacaggccucaggg

SEQ ID NO: 1440792 - RNA, 20 nt, Human
acaucucaacaggccucagg

SEQ ID NO: 1440793 - RNA, 17 nt, Human
acaucucaacaggccuc

SEQ ID NO: 1440794 - RNA, 23 nt, Human
acaucuauuuuggauuguauauu

SEQ ID NO: 1440795 - RNA, 19 nt, Human
acaucuauuuuggauugua

SEQ ID NO: 1440796 - RNA, 18 nt, Human
acaucuauuuuggauugu

SEQ ID NO: 1440797 - RNA, 22 nt, Human
acaucagagugacauccaggag

SEQ ID NO: 1440798 - RNA, 12 nt, Human
acaucagcaaac

SEQ ID NO: 1440799 - RNA, 20 nt, Human
acaguuuuccuaugcuuuga

SEQ ID NO: 1440800 - RNA, 19 nt, Human
acaguuuuaacuguggaua

SEQ ID NO: 1440801 - RNA, 17 nt, Human
acaguuuuaacugugga

SEQ ID NO: 1440802 - RNA, 21 nt, Human
acaguuuuaacuguggauauu

SEQ ID NO: 1440803 - RNA, 13 nt, Human
acaguuuuaacug

SEQ ID NO: 1440804 - RNA, 16 nt, Human
acaguuuguuaguaug

SEQ ID NO: 1440805 - RNA, 20 nt, Human
acaguuuguuaguaugaggc

SEQ ID NO: 1440806 - RNA, 21 nt, Human
acauagaaauugccugacgaa

SEQ ID NO: 1440807 - RNA, 16 nt, Human
acauagaaauugccug

SEQ ID NO: 1440808 - RNA, 23 nt, Human
acauacuugaagggccagagcca

SEQ ID NO: 1440809 - RNA, 22 nt, Human
acauacuugaagggccagagcc

SEQ ID NO: 1440810 - RNA, 21 nt, Human
acauacuugaagggccagagc

SEQ ID NO: 1440811 - RNA, 20 nt, Human
acauacuugaagggccagag

SEQ ID NO: 1440812 - RNA, 19 nt, Human
acauacuugaagggccaga

SEQ ID NO: 1440813 - RNA, 18 nt, Human
acauacuugaagggccag

SEQ ID NO: 1440814 - RNA, 17 nt, Human
acauacuugaagggcca

SEQ ID NO: 1440815 - RNA, 16 nt, Human
acauacuugaagggcc

SEQ ID NO: 1440816 - RNA, 15 nt, Human
acauacuugaagggc

SEQ ID NO: 1440817 - RNA, 19 nt, Human
acauacuggccuggacugu

SEQ ID NO: 1440818 - RNA, 18 nt, Human
acauacuggccuggacug

SEQ ID NO: 1440819 - RNA, 17 nt, Human
acauacucauuuuucau

SEQ ID NO: 1440820 - RNA, 16 nt, Human
acauacucauuuuuca

SEQ ID NO: 1440821 - RNA, 14 nt, Human
acauacucauuuuu

SEQ ID NO: 1440822 - RNA, 13 nt, Human
acauacucauuuu

SEQ ID NO: 1440823 - RNA, 12 nt, Human
acauacucauuu

SEQ ID NO: 1440824 - RNA, 21 nt, Human
acauacuaaccagcagaaaug

SEQ ID NO: 1440825 - RNA, 22 nt, Human
acauacuaaccagcagaaaugc

SEQ ID NO: 1440826 - RNA, 21 nt, Human
acauacccuggccgcccccug

SEQ ID NO: 1440827 - RNA, 14 nt, Human
acauaccuaagaag

SEQ ID NO: 1440828 - RNA, 13 nt, Human
acauacuaaccag

SEQ ID NO: 1440829 - RNA, 20 nt, Human
acauacccuggccgcccccu

SEQ ID NO: 1440830 - RNA, 22 nt, Human
acauacccugaccuggcccccu

SEQ ID NO: 1440831 - RNA, 16 nt, Human
acauacccugaccugg

SEQ ID NO: 1440832 - RNA, 20 nt, Human
acauacccccucccccaccg

SEQ ID NO: 1440833 - RNA, 18 nt, Human
acauaccccuuacaaaug

SEQ ID NO: 1440834 - RNA, 14 nt, Human
acauacccccuccc

SEQ ID NO: 1440835 - RNA, 14 nt, Human
acauaaaaaggaca

SEQ ID NO: 1440836 - RNA, 22 nt, Human
acaguuugaaauaagcuauuug

SEQ ID NO: 1440837 - RNA, 20 nt, Human
acaguuugaaauaagcuauu

SEQ ID NO: 1440838 - RNA, 18 nt, Human
acaguuugaaauaagcua

SEQ ID NO: 1440839 - RNA, 15 nt, Human
acaguuugaaauaag

SEQ ID NO: 1440840 - RNA, 14 nt, Human
acaguuugaaauaa

SEQ ID NO: 1440841 - RNA, 13 nt, Human
acaguuugaaaua

SEQ ID NO: 1440842 - RNA, 19 nt, Human
acaguuuaccaguugccuu

SEQ ID NO: 1440843 - RNA, 15 nt, Human
acaguuuauuuguug

SEQ ID NO: 1440844 - RNA, 22 nt, Human
acaguuuaccaguugccuuuua

SEQ ID NO: 1440845 - RNA, 19 nt, Human
acaguuuaaugaagaucua

SEQ ID NO: 1440846 - RNA, 22 nt, Human
acaguuguauuuaacagaaauu

SEQ ID NO: 1440847 - RNA, 18 nt, Human
acaguuguauuuaacaga

SEQ ID NO: 1440848 - RNA, 13 nt, Human
acaguuguauuua

SEQ ID NO: 1440849 - RNA, 12 nt, Human
acaguuguauuu

SEQ ID NO: 1440850 - RNA, 24 nt, Human
acaguugguaacuuuugugaauua

SEQ ID NO: 1440851 - RNA, 16 nt, Human
acaguugguaacuuuu

SEQ ID NO: 1440852 - RNA, 15 nt, Human
acaguugguaacuuu

SEQ ID NO: 1440853 - RNA, 14 nt, Human
acaguugguaacuu

SEQ ID NO: 1440854 - RNA, 23 nt, Human
acaguugcauguaguaacacuaa

SEQ ID NO: 1440855 - RNA, 13 nt, Human
acaguugcaugua

SEQ ID NO: 1440856 - RNA, 22 nt, Human
acaguugaagggaggggcugug

SEQ ID NO: 1440857 - RNA, 22 nt, Human
acaguucuuugggccagacaug

SEQ ID NO: 1440858 - RNA, 21 nt, Human
acaguucuuugggccagacau

SEQ ID NO: 1440859 - RNA, 13 nt, Human
uauuuccucccuc

SEQ ID NO: 1440860 - RNA, 21 nt, Human
uaugaagaaggugaauagcca

SEQ ID NO: 1440861 - RNA, 17 nt, Human
uaugaagaacugaggag

SEQ ID NO: 1440862 - RNA, 16 nt, Human
uaugaagaacugagga

SEQ ID NO: 1440863 - RNA, 14 nt, Human
uaugaagacauaaa

SEQ ID NO: 1440864 - RNA, 18 nt, Human
uauuuccauucaacaaga

SEQ ID NO: 1440865 - RNA, 21 nt, Human
uaugaaauauuauguuaaaac

SEQ ID NO: 1440866 - RNA, 20 nt, Human
uaugaacuugaggacacaug

SEQ ID NO: 1440867 - RNA, 21 nt, Human
uaugaacuugaggacacaugu

SEQ ID NO: 1440868 - RNA, 14 nt, Human
uaugaagaacugag

SEQ ID NO: 1440869 - RNA, 23 nt, Human
uaugaacuugaggacacaugucc

SEQ ID NO: 1440870 - RNA, 22 nt, Human
uaugaacuugaggacacauguc

SEQ ID NO: 1440871 - RNA, 22 nt, Human
acauucauagucuuuggagaaa

SEQ ID NO: 1440872 - RNA, 20 nt, Human
acauucaccugccccaacuc

SEQ ID NO: 1440873 - RNA, 14 nt, Human
acauucaccugccc

SEQ ID NO: 1440874 - RNA, 13 nt, Human
acauucaccugcc

SEQ ID NO: 1440875 - RNA, 14 nt, Human
acauuagucucagu

SEQ ID NO: 1440876 - RNA, 22 nt, Human
acauuaacucauuagacuggaa

SEQ ID NO: 1440877 - RNA, 15 nt, Human
acauuaacucauuag

SEQ ID NO: 1440878 - RNA, 14 nt, Human
acauuaacucauua

SEQ ID NO: 1440879 - RNA, 13 nt, Human
acauuaacucauu

SEQ ID NO: 1440880 - RNA, 19 nt, Human
acauuaggaaaaguugcua

SEQ ID NO: 1440881 - RNA, 16 nt, Human
acaugcuccagauuag

SEQ ID NO: 1440882 - RNA, 14 nt, Human
acaugcugaacauc

SEQ ID NO: 1440883 - RNA, 21 nt, Human
acaugcugaacaucacagcuu

SEQ ID NO: 1440884 - RNA, 17 nt, Human
acaugucuguucuacau

SEQ ID NO: 1440885 - RNA, 19 nt, Human
acauguccuucugagcccg

SEQ ID NO: 1440886 - RNA, 23 nt, Human
acauguccugccuauuaucuguc

SEQ ID NO: 1440887 - RNA, 21 nt, Human
acauguccagugggaggugag

SEQ ID NO: 1440888 - RNA, 18 nt, Human
acaugucuguucuacaua

SEQ ID NO: 1440889 - RNA, 12 nt, Human
acaugucuuaau

SEQ ID NO: 1440890 - RNA, 22 nt, Human
acauuaaauuuuuuuuacauuu

SEQ ID NO: 1440891 - RNA, 22 nt, Human
ucaacagcguuccuagagaaga

SEQ ID NO: 1440892 - RNA, 19 nt, Human
ucaacagcagggugggcuu

SEQ ID NO: 1440893 - RNA, 16 nt, Human
ucaacagagacugaau

SEQ ID NO: 1440894 - RNA, 22 nt, Human
ucaacacccaguuuccuuggga

SEQ ID NO: 1440895 - RNA, 14 nt, Human
ucaacacccaguuu

SEQ ID NO: 1440896 - RNA, 23 nt, Human
ucaacaggccucagggcuccuug

SEQ ID NO: 1440897 - RNA, 21 nt, Human
ucaacaggccucagggcuccu

SEQ ID NO: 1440898 - RNA, 17 nt, Human
ucaacaggccucagggc

SEQ ID NO: 1440899 - RNA, 16 nt, Human
ucaacaggccucaggg

SEQ ID NO: 1440900 - RNA, 22 nt, Human
ucaacaccaugauuccuuuaac

SEQ ID NO: 1440901 - RNA, 14 nt, Human
ucaacaccaugauu

SEQ ID NO: 1440902 - RNA, 17 nt, Human
ucaacaauucuaaaaug

SEQ ID NO: 1440903 - RNA, 15 nt, Human
ucaacaauucuaaaa

SEQ ID NO: 1440904 - RNA, 14 nt, Human
ucaacaauucuaaa

SEQ ID NO: 1440905 - RNA, 20 nt, Human
ucaaauuuguaggguuucua

SEQ ID NO: 1440906 - RNA, 23 nt, Human
ucaaauuuguaggguuucuaggu

SEQ ID NO: 1440907 - RNA, 17 nt, Human
ucaaauuucuaaaucuc

SEQ ID NO: 1440908 - RNA, 22 nt, Human
acauuccaacucguauagcaug

SEQ ID NO: 1440909 - RNA, 15 nt, Human
acauuccaacucgua

SEQ ID NO: 1440910 - RNA, 17 nt, Human
acauuccaaagaacagc

SEQ ID NO: 1440911 - RNA, 19 nt, Human
acauucaggaauucuugga

SEQ ID NO: 1440912 - RNA, 16 nt, Human
acauuccaagacucua

SEQ ID NO: 1440913 - RNA, 13 nt, Human
acauuccauccuu

SEQ ID NO: 1440914 - RNA, 12 nt, Human
acauucuguuaa

SEQ ID NO: 1440915 - RNA, 15 nt, Human
acauucuguuaauca

SEQ ID NO: 1440916 - RNA, 15 nt, Human
ucaaauuucuaaauc

SEQ ID NO: 1440917 - RNA, 16 nt, Human
ucaaauuucuaaaucu

SEQ ID NO: 1440918 - RNA, 15 nt, Human
ucaagggucaggccu

SEQ ID NO: 1440919 - RNA, 13 nt, Human
ucaagggucaggc

SEQ ID NO: 1440920 - RNA, 12 nt, Human
ucaaguauuugg

SEQ ID NO: 1440921 - RNA, 23 nt, Human
ucaaguauuauaccuuuuuuaga

SEQ ID NO: 1440922 - RNA, 16 nt, Human
ucaaguauuauaccuu

SEQ ID NO: 1440923 - RNA, 21 nt, Human
ucaaguauuauaccuuuuuua

SEQ ID NO: 1440924 - RNA, 15 nt, Human
ucaaggucguuuuuu

SEQ ID NO: 1440925 - RNA, 16 nt, Human
ucaagggucaggccuu

SEQ ID NO: 1440926 - RNA, 11 nt, Human
ucaaguauuau

SEQ ID NO: 1440927 - RNA, 15 nt, Human
ucaaguauuauaccu

SEQ ID NO: 1440928 - RNA, 23 nt, Human
ucaagaaacugaggaauuuucuu

SEQ ID NO: 1440929 - RNA, 22 nt, Human
ucaagaaacugaggaauuuucu

SEQ ID NO: 1440930 - RNA, 20 nt, Human
ucaagaaacugaggaauuuu

SEQ ID NO: 1440931 - RNA, 18 nt, Human
ucaagaaacugaggaauu

SEQ ID NO: 1440932 - RNA, 17 nt, Human
ucaagaaacugaggaau

SEQ ID NO: 1440933 - RNA, 13 nt, Human
ucaagaaacugag

SEQ ID NO: 1440934 - RNA, 12 nt, Human
ucaagaaacuga

SEQ ID NO: 1440935 - RNA, 19 nt, Human
ucaagaaaacaggcacugc

SEQ ID NO: 1440936 - RNA, 15 nt, Human
ucaagaaaacaggca

SEQ ID NO: 1440937 - RNA, 23 nt, Human
ucaagaaaacaggcacugcccug

SEQ ID NO: 1440938 - RNA, 23 nt, Human
ucaacaguuuuccuaugcuuuga

SEQ ID NO: 1440939 - RNA, 22 nt, Human
ucaacaguuuuccuaugcuuug

SEQ ID NO: 1440940 - RNA, 20 nt, Human
ucaacaguuuuccuaugcuu

SEQ ID NO: 1440941 - RNA, 17 nt, Human
ucaacaguuuuccuaug

SEQ ID NO: 1440942 - RNA, 15 nt, Human
ucaacaguuuuccua

SEQ ID NO: 1440943 - RNA, 14 nt, Human
ucaacaguuuuccu

SEQ ID NO: 1440944 - RNA, 18 nt, Human
ucaacagugaagacagaa

SEQ ID NO: 1440945 - RNA, 22 nt, Human
ucaacagugaagacagaaguuu

SEQ ID NO: 1440946 - RNA, 17 nt, Human
ucaacagugaagacaga

SEQ ID NO: 1440947 - RNA, 15 nt, Human
ucaacagugaagaca

SEQ ID NO: 1440948 - RNA, 22 nt, Human
ucaacaguaaaccacugaaaaa

SEQ ID NO: 1440949 - RNA, 20 nt, Human
ucaacaguaaaccacugaaa

SEQ ID NO: 1440950 - RNA, 18 nt, Human
ucaacaguaaaccacuga

SEQ ID NO: 1440951 - RNA, 14 nt, Human
ucaacaguaaacca

SEQ ID NO: 1440952 - RNA, 13 nt, Human
ucaacaguaaacc

SEQ ID NO: 1440953 - RNA, 22 nt, Human
ucaacaggccucagggcuccuu

SEQ ID NO: 1440954 - RNA, 22 nt, Human
ucaagagcccugucaguagagu

SEQ ID NO: 1440955 - RNA, 15 nt, Human
ucaagagacugaguc

SEQ ID NO: 1440956 - RNA, 22 nt, Human
ucaagacccuuuuggguuucug

SEQ ID NO: 1440957 - RNA, 19 nt, Human
ucaagaauagcauuguaaa

SEQ ID NO: 1440958 - RNA, 21 nt, Human
ucaagaauaaucacgcuuucc

SEQ ID NO: 1440959 - RNA, 14 nt, Human
ucaagaaauaaguu

SEQ ID NO: 1440960 - RNA, 17 nt, Human
ucaagaaauaaguuuuu

SEQ ID NO: 1440961 - RNA, 22 nt, Human
ucaagaaauaaaaggaagccaa

SEQ ID NO: 1440962 - RNA, 21 nt, Human
ucaagaaauaaaaggaagcca

SEQ ID NO: 1440963 - RNA, 20 nt, Human
ucaagaaauaaaaggaagcc

SEQ ID NO: 1440964 - RNA, 21 nt, Human
ucaagaaagcuucaaacugca

SEQ ID NO: 1440965 - RNA, 22 nt, Human
ucaagaaaacaggcacugcccu

SEQ ID NO: 1440966 - RNA, 22 nt, Human
ucaagaagugaagaaugcacaa

SEQ ID NO: 1440967 - RNA, 22 nt, Human
ucaagaacacagcccugcuucu

SEQ ID NO: 1440968 - RNA, 14 nt, Human
acaugaaguauuuu

SEQ ID NO: 1440969 - RNA, 13 nt, Human
acaugaaguauuu

SEQ ID NO: 1440970 - RNA, 22 nt, Human
ucaaauacauuuaaaacauuaa

SEQ ID NO: 1440971 - RNA, 21 nt, Human
ucaaauacauuuaaaacauua

SEQ ID NO: 1440972 - RNA, 18 nt, Human
acaugaagauucuuuccc

SEQ ID NO: 1440973 - RNA, 17 nt, Human
acaugaagauucuuucc

SEQ ID NO: 1440974 - RNA, 15 nt, Human
acaugaagauucuuu

SEQ ID NO: 1440975 - RNA, 16 nt, Human
acaugaagaagcuaaa

SEQ ID NO: 1440976 - RNA, 20 nt, Human
ucaaauacgugggcauucaa

SEQ ID NO: 1440977 - RNA, 16 nt, Human
acaugaagguaaauaa

SEQ ID NO: 1440978 - RNA, 15 nt, Human
acaugaagguaaaua

SEQ ID NO: 1440979 - RNA, 13 nt, Human
acaugaagguaaa

SEQ ID NO: 1440980 - RNA, 13 nt, Human
acaugaagcuguu

SEQ ID NO: 1440981 - RNA, 19 nt, Human
acaugaagcuguuguguga

SEQ ID NO: 1440982 - RNA, 22 nt, Human
acaugaagauucuuucccaauu

SEQ ID NO: 1440983 - RNA, 12 nt, Human
acaugaaguauu

SEQ ID NO: 1440984 - RNA, 23 nt, Human
acaugaagguaaauaaaaagaaa

SEQ ID NO: 1440985 - RNA, 22 nt, Human
acaugaagguaaauaaaaagaa

SEQ ID NO: 1440986 - RNA, 21 nt, Human
acaugaagguaaauaaaaaga

SEQ ID NO: 1440987 - RNA, 16 nt, Human
acaugaaguccaagca

SEQ ID NO: 1440988 - RNA, 21 nt, Human
ucaaacaccaacauaaaaaug

SEQ ID NO: 1440989 - RNA, 20 nt, Human
ucaaacaaugacaaagcaga

SEQ ID NO: 1440990 - RNA, 21 nt, Human
ucaaacaaugacaaagcagau

SEQ ID NO: 1440991 - RNA, 19 nt, Human
ucaaacaaugacaaagcag

SEQ ID NO: 1440992 - RNA, 14 nt, Human
ucaaacaaugacaa

SEQ ID NO: 1440993 - RNA, 21 nt, Human
ucaaaauuuaacaguuaccug

SEQ ID NO: 1440994 - RNA, 22 nt, Human
ucaaaauguuaucuucucaagu

SEQ ID NO: 1440995 - RNA, 20 nt, Human
ucaaagcaugggauuauuag

SEQ ID NO: 1440996 - RNA, 19 nt, Human
ucaaagcaucuugcauuau

SEQ ID NO: 1440997 - RNA, 14 nt, Human
ucaaagcugaaaug

SEQ ID NO: 1440998 - RNA, 20 nt, Human
ucaaaggagcgagcaugucg

SEQ ID NO: 1440999 - RNA, 16 nt, Human
ucaaagcuuuuuccag

SEQ ID NO: 1441000 - RNA, 15 nt, Human
ucaaagcuuuuucca

SEQ ID NO: 1441001 - RNA, 19 nt, Human
ucaaagcuguguguuugga

SEQ ID NO: 1441002 - RNA, 18 nt, Human
ucaaagcugccugucccu

SEQ ID NO: 1441003 - RNA, 11 nt, Human
ucaaagcugcc

SEQ ID NO: 1441004 - RNA, 21 nt, Human
ucaaagcaugggauuauuaga

SEQ ID NO: 1441005 - RNA, 23 nt, Human
ucaaagccagcguccuccucugu

SEQ ID NO: 1441006 - RNA, 22 nt, Human
ucaaagccagcguccuccucug

SEQ ID NO: 1441007 - RNA, 12 nt, Human
ucaaagccagcg

SEQ ID NO: 1441008 - RNA, 13 nt, Human
ucaaaguuuaaua

SEQ ID NO: 1441009 - RNA, 14 nt, Human
ucaaaguuuaauaa

SEQ ID NO: 1441010 - RNA, 17 nt, Human
ucaaaagcuauuuaaag

SEQ ID NO: 1441011 - RNA, 14 nt, Human
ucaaaaguuuguuu

SEQ ID NO: 1441012 - RNA, 13 nt, Human
ucaaaaguuuguu

SEQ ID NO: 1441013 - RNA, 22 nt, Human
ucaaaagcuauuuaaagcaucu

SEQ ID NO: 1441014 - RNA, 22 nt, Human
ucaaaaguuccaagagucuaaa

SEQ ID NO: 1441015 - RNA, 17 nt, Human
ucaaaauagugccacua

SEQ ID NO: 1441016 - RNA, 22 nt, Human
ucaaaauagggacuaucuaucu

SEQ ID NO: 1441017 - RNA, 21 nt, Human
ucaaaauaugccccauucaac

SEQ ID NO: 1441018 - RNA, 18 nt, Human
ucaaaauauuuguacaua

SEQ ID NO: 1441019 - RNA, 19 nt, Human
ucaaaauauuuguacauag

SEQ ID NO: 1441020 - RNA, 17 nt, Human
ucaaaauauuuguacau

SEQ ID NO: 1441021 - RNA, 16 nt, Human
ucaaaauauuuguaca

SEQ ID NO: 1441022 - RNA, 23 nt, Human
ucaaaaucucuccacuuucagcu

SEQ ID NO: 1441023 - RNA, 22 nt, Human
ucaaaaucucuccacuuucagc

SEQ ID NO: 1441024 - RNA, 21 nt, Human
ucaaaaucucuccacuuucag

SEQ ID NO: 1441025 - RNA, 16 nt, Human
ucaaaaucucuccacu

SEQ ID NO: 1441026 - RNA, 14 nt, Human
ucaaaaucucucca

SEQ ID NO: 1441027 - RNA, 19 nt, Human
ucaaaaugcuuuuuauuuc

SEQ ID NO: 1441028 - RNA, 17 nt, Human
ucaaaaugcuuuuuauu

SEQ ID NO: 1441029 - RNA, 12 nt, Human
ucaaaaugcuuu

SEQ ID NO: 1441030 - RNA, 21 nt, Human
ucaaaauguuaucuucucaag

SEQ ID NO: 1441031 - RNA, 20 nt, Human
ucaaaauguuaucuucucaa

SEQ ID NO: 1441032 - RNA, 16 nt, Human
ucaaaauuguuacaaa

SEQ ID NO: 1441033 - RNA, 19 nt, Human
ucaaaauuguuacaaauug

SEQ ID NO: 1441034 - RNA, 14 nt, Human
uauuuuuaauuaau

SEQ ID NO: 1441035 - RNA, 21 nt, Human
uauuuuuaauuaauugggcca

SEQ ID NO: 1441036 - RNA, 17 nt, Human
uauuuguaaaucugcca

SEQ ID NO: 1441037 - RNA, 13 nt, Human
uauuuguaaaucu

SEQ ID NO: 1441038 - RNA, 16 nt, Human
uauuuguaaaaugaca

SEQ ID NO: 1441039 - RNA, 13 nt, Human
uauuuuucuaacu

SEQ ID NO: 1441040 - RNA, 12 nt, Human
uauuuuucuuga

SEQ ID NO: 1441041 - RNA, 16 nt, Human
uauuuuucuaacuaca

SEQ ID NO: 1441042 - RNA, 12 nt, Human
uauuuuuaucuu

SEQ ID NO: 1441043 - RNA, 16 nt, Human
ucauucugcaaguaua

SEQ ID NO: 1441044 - RNA, 18 nt, Human
ucauucugaaggagcccc

SEQ ID NO: 1441045 - RNA, 19 nt, Human
ucauucucugucucaucca

SEQ ID NO: 1441046 - RNA, 18 nt, Human
ucauucucugucucaucc

SEQ ID NO: 1441047 - RNA, 16 nt, Human
ucauucucugucucau

SEQ ID NO: 1441048 - RNA, 15 nt, Human
ucauucucugucuca

SEQ ID NO: 1441049 - RNA, 14 nt, Human
ucauucucugucuc

SEQ ID NO: 1441050 - RNA, 12 nt, Human
ucauuacuauaa

SEQ ID NO: 1441051 - RNA, 14 nt, Human
ucauuaauucuaua

SEQ ID NO: 1441052 - RNA, 13 nt, Human
ucauuaauucuau

SEQ ID NO: 1441053 - RNA, 17 nt, Human
ucauuaaucugccuccc

SEQ ID NO: 1441054 - RNA, 18 nt, Human
ucauuaaucugccucccu

SEQ ID NO: 1441055 - RNA, 23 nt, Human
ucaugauuagaaauuaccugugg

SEQ ID NO: 1441056 - RNA, 16 nt, Human
ucaugauccaacuaau

SEQ ID NO: 1441057 - RNA, 21 nt, Human
ucaugaauguaaauuuguacu

SEQ ID NO: 1441058 - RNA, 20 nt, Human
ucaugaauguaaauuuguac

SEQ ID NO: 1441059 - RNA, 19 nt, Human
ucaugaauguaaauuugua

SEQ ID NO: 1441060 - RNA, 14 nt, Human
ucaugaauguaaau

SEQ ID NO: 1441061 - RNA, 13 nt, Human
ucaugaauguaaa

SEQ ID NO: 1441062 - RNA, 21 nt, Human
ucaugaauuaguuuuauaugc

SEQ ID NO: 1441063 - RNA, 18 nt, Human
accuccuucccucucugg

SEQ ID NO: 1441064 - RNA, 17 nt, Human
accuccuucccucucug

SEQ ID NO: 1441065 - RNA, 16 nt, Human
accuccuucccucucu

SEQ ID NO: 1441066 - RNA, 15 nt, Human
accuccuucccucuc

SEQ ID NO: 1441067 - RNA, 14 nt, Human
accuccuucccucu

SEQ ID NO: 1441068 - RNA, 13 nt, Human
accuccuucccuc

SEQ ID NO: 1441069 - RNA, 22 nt, Human
accuccuucccucucuggagaa

SEQ ID NO: 1441070 - RNA, 21 nt, Human
accuccuucccucucuggaga

SEQ ID NO: 1441071 - RNA, 19 nt, Human
accuccuucccucucugga

SEQ ID NO: 1441072 - RNA, 17 nt, Human
accucgugauccacccg

SEQ ID NO: 1441073 - RNA, 17 nt, Human
ucauugccuuaacugga

SEQ ID NO: 1441074 - RNA, 20 nt, Human
ucauugccuuaacuggagcc

SEQ ID NO: 1441075 - RNA, 23 nt, Human
ucauugccuuaacuggagcccca

SEQ ID NO: 1441076 - RNA, 23 nt, Human
accugcacuggggagcccgucuc

SEQ ID NO: 1441077 - RNA, 18 nt, Human
accugcacuaacagagug

SEQ ID NO: 1441078 - RNA, 17 nt, Human
accugcacuaacagagu

SEQ ID NO: 1441079 - RNA, 16 nt, Human
accugauacggcuccc

SEQ ID NO: 1441080 - RNA, 19 nt, Human
accugauacggcuccccag

SEQ ID NO: 1441081 - RNA, 21 nt, Human
accugagucguacagaaagcu

SEQ ID NO: 1441082 - RNA, 23 nt, Human
accugagucacccuaccugugcc

SEQ ID NO: 1441083 - RNA, 22 nt, Human
accugagucacccuaccugugc

SEQ ID NO: 1441084 - RNA, 19 nt, Human
accugagggucuguagguu

SEQ ID NO: 1441085 - RNA, 18 nt, Human
accugagggucuguaggu

SEQ ID NO: 1441086 - RNA, 17 nt, Human
accugagggucuguagg

SEQ ID NO: 1441087 - RNA, 15 nt, Human
accugagggucugua

SEQ ID NO: 1441088 - RNA, 14 nt, Human
accugagggucugu

SEQ ID NO: 1441089 - RNA, 23 nt, Human
accugaccccugcucaguaaagc

SEQ ID NO: 1441090 - RNA, 17 nt, Human
accugaccccugcucag

SEQ ID NO: 1441091 - RNA, 16 nt, Human
accugaccccugcuca

SEQ ID NO: 1441092 - RNA, 16 nt, Human
accugaaauuccaaag

SEQ ID NO: 1441093 - RNA, 15 nt, Human
accugaaauuccaaa

SEQ ID NO: 1441094 - RNA, 14 nt, Human
accugaaauuccaa

SEQ ID NO: 1441095 - RNA, 21 nt, Human
accugaaaacacugugcacau

SEQ ID NO: 1441096 - RNA, 21 nt, Human
accugagccugccgagcaacc

SEQ ID NO: 1441097 - RNA, 17 nt, Human
accugagccugccgagc

SEQ ID NO: 1441098 - RNA, 19 nt, Human
accugagauuuauuaaaga

SEQ ID NO: 1441099 - RNA, 18 nt, Human
accugagauuuauuaaag

SEQ ID NO: 1441100 - RNA, 17 nt, Human
accugagauuuauuaaa

SEQ ID NO: 1441101 - RNA, 15 nt, Human
accugagauuuauua

SEQ ID NO: 1441102 - RNA, 15 nt, Human
accugagaccugaag

SEQ ID NO: 1441103 - RNA, 17 nt, Human
accugaggaacugucuc

SEQ ID NO: 1441104 - RNA, 20 nt, Human
accugaaaacacugugcaca

SEQ ID NO: 1441105 - RNA, 19 nt, Human
accugaaaacacugugcac

SEQ ID NO: 1441106 - RNA, 18 nt, Human
accugaaaacacugugca

SEQ ID NO: 1441107 - RNA, 11 nt, Human
accugaaaaca

SEQ ID NO: 1441108 - RNA, 17 nt, Human
accucuccccuggaacu

SEQ ID NO: 1441109 - RNA, 14 nt, Human
accucuaaauucuu

SEQ ID NO: 1441110 - RNA, 19 nt, Human
accucucaauauucaauaa

SEQ ID NO: 1441111 - RNA, 20 nt, Human
accucucaauauucaauaaa

SEQ ID NO: 1441112 - RNA, 21 nt, Human
accucucaauauucaauaaag

SEQ ID NO: 1441113 - RNA, 23 nt, Human
accucucaauauucaauaaagcu

SEQ ID NO: 1441114 - RNA, 16 nt, Human
accucuccagccucag

SEQ ID NO: 1441115 - RNA, 18 nt, Human
accucuccagccucagcu

SEQ ID NO: 1441116 - RNA, 20 nt, Human
accucuccagccucagcucu

SEQ ID NO: 1441117 - RNA, 22 nt, Human
accucuccagccucagcucuca

SEQ ID NO: 1441118 - RNA, 23 nt, Human
ucaucccgagcaccuccacaucc

SEQ ID NO: 1441119 - RNA, 21 nt, Human
ucaucccgagcaccuccacau

SEQ ID NO: 1441120 - RNA, 14 nt, Human
ucauccucaaagaa

SEQ ID NO: 1441121 - RNA, 22 nt, Human
accucaacugccuacuccaaaa

SEQ ID NO: 1441122 - RNA, 16 nt, Human
accucaacugccuacu

SEQ ID NO: 1441123 - RNA, 19 nt, Human
accucccucaaccucaucc

SEQ ID NO: 1441124 - RNA, 22 nt, Human
ucauccucaaagaaaguguauu

SEQ ID NO: 1441125 - RNA, 21 nt, Human
ucauccucaaagaaaguguau

SEQ ID NO: 1441126 - RNA, 18 nt, Human
ucauccucaaagaaagug

SEQ ID NO: 1441127 - RNA, 17 nt, Human
ucauccucaaagaaagu

SEQ ID NO: 1441128 - RNA, 13 nt, Human
ucauccugcaggc

SEQ ID NO: 1441129 - RNA, 12 nt, Human
ucauccugcagg

SEQ ID NO: 1441130 - RNA, 23 nt, Human
ucauccucacagugaacacucag

SEQ ID NO: 1441131 - RNA, 23 nt, Human
ucauccucaaagaaaguguauug

SEQ ID NO: 1441132 - RNA, 11 nt, Human
ucauccucugg

SEQ ID NO: 1441133 - RNA, 12 nt, Human
ucauccucuggc

SEQ ID NO: 1441134 - RNA, 22 nt, Human
ucauccucuccacagcugccuc

SEQ ID NO: 1441135 - RNA, 14 nt, Human
ucauccuugucuua

SEQ ID NO: 1441136 - RNA, 13 nt, Human
ucauccuugucuu

SEQ ID NO: 1441137 - RNA, 18 nt, Human
ucaucuagguaaauuaca

SEQ ID NO: 1441138 - RNA, 14 nt, Human
ucaucuaggauuuu

SEQ ID NO: 1441139 - RNA, 12 nt, Human
ucaugaauguaa

SEQ ID NO: 1441140 - RNA, 16 nt, Human
ucaugaauuaguuuua

SEQ ID NO: 1441141 - RNA, 13 nt, Human
ucaucucagcuca

SEQ ID NO: 1441142 - RNA, 18 nt, Human
ucaucucagcucacugca

SEQ ID NO: 1441143 - RNA, 20 nt, Human
accuaacaacauuguagccu

SEQ ID NO: 1441144 - RNA, 15 nt, Human
accuaaauggccuca

SEQ ID NO: 1441145 - RNA, 17 nt, Human
accuaaagaaaaacaaa

SEQ ID NO: 1441146 - RNA, 13 nt, Human
accuaaagaaaaa

SEQ ID NO: 1441147 - RNA, 12 nt, Human
accuaaagaaaa

SEQ ID NO: 1441148 - RNA, 23 nt, Human
accuaaacauagaaauugccuga

SEQ ID NO: 1441149 - RNA, 20 nt, Human
accgcuacaccacucuggca

SEQ ID NO: 1441150 - RNA, 21 nt, Human
accgcuacaccacucuggcag

SEQ ID NO: 1441151 - RNA, 19 nt, Human
accgcuacaccacucuggc

SEQ ID NO: 1441152 - RNA, 17 nt, Human
accgcuacaccacucug

SEQ ID NO: 1441153 - RNA, 14 nt, Human
accgcuacaccacu

SEQ ID NO: 1441154 - RNA, 16 nt, Human
accgcuaaaagaaacu

SEQ ID NO: 1441155 - RNA, 15 nt, Human
accgcuaaaagaaac

SEQ ID NO: 1441156 - RNA, 13 nt, Human
accgcuaaaagaa

SEQ ID NO: 1441157 - RNA, 17 nt, Human
accgcgacuaauuucaa

SEQ ID NO: 1441158 - RNA, 16 nt, Human
accgcgacuaauuuca

SEQ ID NO: 1441159 - RNA, 20 nt, Human
accgcgacuaauuucaaaau

SEQ ID NO: 1441160 - RNA, 19 nt, Human
accgcgucuacccugggau

SEQ ID NO: 1441161 - RNA, 18 nt, Human
accgcgucuacccuggga

SEQ ID NO: 1441162 - RNA, 17 nt, Human
accgcgucuacccuggg

SEQ ID NO: 1441163 - RNA, 22 nt, Human
ucaggaaaggaaucauuucuau

SEQ ID NO: 1441164 - RNA, 17 nt, Human
ucaggaaccgaggcagg

SEQ ID NO: 1441165 - RNA, 18 nt, Human
accuacaguuuuaacugu

SEQ ID NO: 1441166 - RNA, 19 nt, Human
accuacaguuuuaacugug

SEQ ID NO: 1441167 - RNA, 17 nt, Human
accuacaguuuuaacug

SEQ ID NO: 1441168 - RNA, 16 nt, Human
accuacaguuuuaacu

SEQ ID NO: 1441169 - RNA, 11 nt, Human
accuacaguuu

SEQ ID NO: 1441170 - RNA, 22 nt, Human
accuacagggggucuggcuggu

SEQ ID NO: 1441171 - RNA, 23 nt, Human
accuacagggggucuggcuggug

SEQ ID NO: 1441172 - RNA, 21 nt, Human
accuacagggggucuggcugg

SEQ ID NO: 1441173 - RNA, 19 nt, Human
accuacagggggucuggcu

SEQ ID NO: 1441174 - RNA, 17 nt, Human
accuacagggggucugg

SEQ ID NO: 1441175 - RNA, 21 nt, Human
accuaaucucuguaaagcuaa

SEQ ID NO: 1441176 - RNA, 17 nt, Human
accuaaucucuguaaag

SEQ ID NO: 1441177 - RNA, 22 nt, Human
accuaauccaggcagauccagg

SEQ ID NO: 1441178 - RNA, 15 nt, Human
accucaaaauuuaac

SEQ ID NO: 1441179 - RNA, 14 nt, Human
accuaguuuuccau

SEQ ID NO: 1441180 - RNA, 21 nt, Human
accuagggugauauuaaccag

SEQ ID NO: 1441181 - RNA, 21 nt, Human
accuggcaucgcaccauucug

SEQ ID NO: 1441182 - RNA, 17 nt, Human
accuggcagcucuggac

SEQ ID NO: 1441183 - RNA, 14 nt, Human
accuggcagcucug

SEQ ID NO: 1441184 - RNA, 19 nt, Human
accuggauggggcaggcca

SEQ ID NO: 1441185 - RNA, 14 nt, Human
accuggauggggca

SEQ ID NO: 1441186 - RNA, 19 nt, Human
uccaaugagcuuucugaac

SEQ ID NO: 1441187 - RNA, 18 nt, Human
uccaaugagcuuucugaa

SEQ ID NO: 1441188 - RNA, 17 nt, Human
uccaaugagcuuucuga

SEQ ID NO: 1441189 - RNA, 16 nt, Human
uccaaugagcuuucug

SEQ ID NO: 1441190 - RNA, 15 nt, Human
uccaaugagcuuucu

SEQ ID NO: 1441191 - RNA, 14 nt, Human
uccaaugagcuuuc

SEQ ID NO: 1441192 - RNA, 13 nt, Human
uccaaugagcuuu

SEQ ID NO: 1441193 - RNA, 12 nt, Human
uccaaugagcuu

SEQ ID NO: 1441194 - RNA, 21 nt, Human
accugguacucccucucagga

SEQ ID NO: 1441195 - RNA, 17 nt, Human
accugguacucccucuc

SEQ ID NO: 1441196 - RNA, 19 nt, Human
accugguacccuccuggcu

SEQ ID NO: 1441197 - RNA, 18 nt, Human
accugguacccuccuggc

SEQ ID NO: 1441198 - RNA, 16 nt, Human
accugguacccuccug

SEQ ID NO: 1441199 - RNA, 20 nt, Human
accuggguugcagacaggaa

SEQ ID NO: 1441200 - RNA, 18 nt, Human
accuggguugcagacagg

SEQ ID NO: 1441201 - RNA, 16 nt, Human
accuggguugcagaca

SEQ ID NO: 1441202 - RNA, 17 nt, Human
accuggcucucaccucu

SEQ ID NO: 1441203 - RNA, 20 nt, Human
accuggcucucaccucuagg

SEQ ID NO: 1441204 - RNA, 16 nt, Human
accuggcucucaccuc

SEQ ID NO: 1441205 - RNA, 15 nt, Human
accuggcucucaccu

SEQ ID NO: 1441206 - RNA, 11 nt, Human
accuggccuuc

SEQ ID NO: 1441207 - RNA, 24 nt, Human
uccaacucuucccccucucccagu

SEQ ID NO: 1441208 - RNA, 19 nt, Human
uccaacucgaaucugugug

SEQ ID NO: 1441209 - RNA, 18 nt, Human
uccaacucgaaucugugu

SEQ ID NO: 1441210 - RNA, 21 nt, Human
uccaaccugcaaagaucuguc

SEQ ID NO: 1441211 - RNA, 23 nt, Human
uccaacuuggcugcaggaaucuu

SEQ ID NO: 1441212 - RNA, 23 nt, Human
uccaacuggcccuauuuagauga

SEQ ID NO: 1441213 - RNA, 16 nt, Human
uccaauccuauguuuu

SEQ ID NO: 1441214 - RNA, 14 nt, Human
uccaagucuccacc

SEQ ID NO: 1441215 - RNA, 22 nt, Human
uccaagguuuaaagagucuaga

SEQ ID NO: 1441216 - RNA, 20 nt, Human
uccaagguuuaaagagucua

SEQ ID NO: 1441217 - RNA, 19 nt, Human
uccaagguuuaaagagucu

SEQ ID NO: 1441218 - RNA, 16 nt, Human
uccaagguuuaaagag

SEQ ID NO: 1441219 - RNA, 15 nt, Human
uccaagguuuaaaga

SEQ ID NO: 1441220 - RNA, 14 nt, Human
uccaagguuuaaag

SEQ ID NO: 1441221 - RNA, 13 nt, Human
uccaagguuuaaa

SEQ ID NO: 1441222 - RNA, 16 nt, Human
uccaagguggggugga

SEQ ID NO: 1441223 - RNA, 15 nt, Human
uccaacuuggcugca

SEQ ID NO: 1441224 - RNA, 23 nt, Human
uccaacccgucuggcccaccagg

SEQ ID NO: 1441225 - RNA, 22 nt, Human
uccaacccgucuggcccaccag

SEQ ID NO: 1441226 - RNA, 13 nt, Human
uccaacccuagca

SEQ ID NO: 1441227 - RNA, 14 nt, Human
uccaacccuagcaa

SEQ ID NO: 1441228 - RNA, 16 nt, Human
uccaacccgaggcccg

SEQ ID NO: 1441229 - RNA, 21 nt, Human
uccaaccggcuuuguggcacu

SEQ ID NO: 1441230 - RNA, 15 nt, Human
uccaacccuagcaaa

SEQ ID NO: 1441231 - RNA, 21 nt, Human
uccaggcagauccaggacuau

SEQ ID NO: 1441232 - RNA, 20 nt, Human
uccaggcagauccaggacua

SEQ ID NO: 1441233 - RNA, 19 nt, Human
uccaggcagauccaggacu

SEQ ID NO: 1441234 - RNA, 18 nt, Human
uccaggcagauccaggac

SEQ ID NO: 1441235 - RNA, 17 nt, Human
uccaggcagauccagga

SEQ ID NO: 1441236 - RNA, 16 nt, Human
uccaggcagauccagg

SEQ ID NO: 1441237 - RNA, 15 nt, Human
uccaggcagauccag

SEQ ID NO: 1441238 - RNA, 14 nt, Human
uccaggcagaucca

SEQ ID NO: 1441239 - RNA, 21 nt, Human
uccaggcaggucugaagcuca

SEQ ID NO: 1441240 - RNA, 20 nt, Human
uccaggcccaaggcucccgg

SEQ ID NO: 1441241 - RNA, 19 nt, Human
uccaggcccaaggcucccg

SEQ ID NO: 1441242 - RNA, 18 nt, Human
uccaggcccaaggcuccc

SEQ ID NO: 1441243 - RNA, 17 nt, Human
uccaggcccaaggcucc

SEQ ID NO: 1441244 - RNA, 15 nt, Human
uccaggcccaaggcu

SEQ ID NO: 1441245 - RNA, 11 nt, Human
uccaggcccaa

SEQ ID NO: 1441246 - RNA, 13 nt, Human
uccaggcagaucc

SEQ ID NO: 1441247 - RNA, 16 nt, Human
uccaggcacugagaua

SEQ ID NO: 1441248 - RNA, 14 nt, Human
uccaggcacugaga

SEQ ID NO: 1441249 - RNA, 21 nt, Human
uccagccccucuuggagaagu

SEQ ID NO: 1441250 - RNA, 20 nt, Human
uccagccccucuuggagaag

SEQ ID NO: 1441251 - RNA, 18 nt, Human
uccagccccucuuggaga

SEQ ID NO: 1441252 - RNA, 23 nt, Human
uccagccccucuggucgcuccug

SEQ ID NO: 1441253 - RNA, 18 nt, Human
uccagccccucuggucgc

SEQ ID NO: 1441254 - RNA, 16 nt, Human
uccagccccucugguc

SEQ ID NO: 1441255 - RNA, 15 nt, Human
uccagccccucuggu

SEQ ID NO: 1441256 - RNA, 14 nt, Human
uccagccccucugg

SEQ ID NO: 1441257 - RNA, 17 nt, Human
acgagagcagaggucuc

SEQ ID NO: 1441258 - RNA, 14 nt, Human
acgagacuuuccau

SEQ ID NO: 1441259 - RNA, 16 nt, Human
acgagacguuuccuac

SEQ ID NO: 1441260 - RNA, 22 nt, Human
acgaggaaucugugggucuggg

SEQ ID NO: 1441261 - RNA, 20 nt, Human
acgaggaaucugugggucug

SEQ ID NO: 1441262 - RNA, 19 nt, Human
acgagcuguuuacuaggga

SEQ ID NO: 1441263 - RNA, 17 nt, Human
uccaggcuucugcuggg

SEQ ID NO: 1441264 - RNA, 23 nt, Human
uccaggcuucugcuggggccugg

SEQ ID NO: 1441265 - RNA, 15 nt, Human
uccaggcuguguuug

SEQ ID NO: 1441266 - RNA, 19 nt, Human
accuuuuuuauacauaaac

SEQ ID NO: 1441267 - RNA, 20 nt, Human
accuuuuuuauacauaaaca

SEQ ID NO: 1441268 - RNA, 14 nt, Human
acgagaaaacaaua

SEQ ID NO: 1441269 - RNA, 21 nt, Human
accuuuuuuauacauaaacaa

SEQ ID NO: 1441270 - RNA, 22 nt, Human
accuuuuuuauacauaaacaag

SEQ ID NO: 1441271 - RNA, 14 nt, Human
uccagagagaccga

SEQ ID NO: 1441272 - RNA, 14 nt, Human
uccagagacuggga

SEQ ID NO: 1441273 - RNA, 23 nt, Human
uccagacugcuuccaauuuucug

SEQ ID NO: 1441274 - RNA, 22 nt, Human
uccagacugcuuccaauuuucu

SEQ ID NO: 1441275 - RNA, 15 nt, Human
uccagaccugaggcg

SEQ ID NO: 1441276 - RNA, 22 nt, Human
uccagaccugauccuggaggcc

SEQ ID NO: 1441277 - RNA, 19 nt, Human
uccagaccugauccuggag

SEQ ID NO: 1441278 - RNA, 18 nt, Human
uccagaccugauccugga

SEQ ID NO: 1441279 - RNA, 13 nt, Human
uccagaccugauc

SEQ ID NO: 1441280 - RNA, 16 nt, Human
uccagaccugaagaau

SEQ ID NO: 1441281 - RNA, 15 nt, Human
uccagaccugaagaa

SEQ ID NO: 1441282 - RNA, 11 nt, Human
uccagaccuga

SEQ ID NO: 1441283 - RNA, 19 nt, Human
accuucaaacuagggccaa

SEQ ID NO: 1441284 - RNA, 22 nt, Human
accuuagauguucuaagucuuu

SEQ ID NO: 1441285 - RNA, 19 nt, Human
uccacgacugucuccaugg

SEQ ID NO: 1441286 - RNA, 18 nt, Human
uccacgacugucuccaug

SEQ ID NO: 1441287 - RNA, 17 nt, Human
uccacgacugucuccau

SEQ ID NO: 1441288 - RNA, 21 nt, Human
uccacucaugugacucuuucc

SEQ ID NO: 1441289 - RNA, 14 nt, Human
uccacucaugugac

SEQ ID NO: 1441290 - RNA, 16 nt, Human
uccacgacugucucca

SEQ ID NO: 1441291 - RNA, 15 nt, Human
uccacgacugucucc

SEQ ID NO: 1441292 - RNA, 14 nt, Human
uccacgacugucuc

SEQ ID NO: 1441293 - RNA, 14 nt, Human
uccaccuuucccaa

SEQ ID NO: 1441294 - RNA, 19 nt, Human
acuaccgaaugugucuuua

SEQ ID NO: 1441295 - RNA, 23 nt, Human
acuaccgaaugugucuuuagaua

SEQ ID NO: 1441296 - RNA, 18 nt, Human
acuaccgaaugugucuuu

SEQ ID NO: 1441297 - RNA, 17 nt, Human
acuaccgaaugugucuu

SEQ ID NO: 1441298 - RNA, 16 nt, Human
acuaccgaaugugucu

SEQ ID NO: 1441299 - RNA, 19 nt, Human
acuacccagguuaagaaaa

SEQ ID NO: 1441300 - RNA, 22 nt, Human
acuacccagguuaagaaaauaa

SEQ ID NO: 1441301 - RNA, 19 nt, Human
uccccauuuagguuucuga

SEQ ID NO: 1441302 - RNA, 22 nt, Human
uccccauucuuccuaguuuucu

SEQ ID NO: 1441303 - RNA, 17 nt, Human
uccccauucuuccuagu

SEQ ID NO: 1441304 - RNA, 14 nt, Human
uccccauucuuccu

SEQ ID NO: 1441305 - RNA, 17 nt, Human
uccccauggcccugagc

SEQ ID NO: 1441306 - RNA, 19 nt, Human
uccccaucuucuaaaccca

SEQ ID NO: 1441307 - RNA, 23 nt, Human
ucccaguccaccugaggaacugu

SEQ ID NO: 1441308 - RNA, 16 nt, Human
ucccagguuggcucug

SEQ ID NO: 1441309 - RNA, 23 nt, Human
ucccagguuggcucugccagucc

SEQ ID NO: 1441310 - RNA, 21 nt, Human
ucccagguuggcucugccagu

SEQ ID NO: 1441311 - RNA, 20 nt, Human
ucccagguuggcucugccag

SEQ ID NO: 1441312 - RNA, 19 nt, Human
ucccagguuggcucugcca

SEQ ID NO: 1441313 - RNA, 17 nt, Human
ucccagguuggcucugc

SEQ ID NO: 1441314 - RNA, 14 nt, Human
ucccagcugccuag

SEQ ID NO: 1441315 - RNA, 12 nt, Human
ucccagcugccu

SEQ ID NO: 1441316 - RNA, 15 nt, Human
ucccauccccagcga

SEQ ID NO: 1441317 - RNA, 14 nt, Human
ucccauccccagcg

SEQ ID NO: 1441318 - RNA, 14 nt, Human
ucccauccagggcc

SEQ ID NO: 1441319 - RNA, 13 nt, Human
ucccauccagggc

SEQ ID NO: 1441320 - RNA, 23 nt, Human
uccccacccaccaacccucaggg

SEQ ID NO: 1441321 - RNA, 22 nt, Human
uccccacccaccaacccucagg

SEQ ID NO: 1441322 - RNA, 21 nt, Human
uccccacccaccaacccucag

SEQ ID NO: 1441323 - RNA, 13 nt, Human
uccccacccacca

SEQ ID NO: 1441324 - RNA, 17 nt, Human
uccccaccagaugcuga

SEQ ID NO: 1441325 - RNA, 20 nt, Human
uccccaccagaugcugaaaa

SEQ ID NO: 1441326 - RNA, 16 nt, Human
uccccaccagaugcug

SEQ ID NO: 1441327 - RNA, 15 nt, Human
uccccaccagaugcu

SEQ ID NO: 1441328 - RNA, 16 nt, Human
ucccauccuguguguu

SEQ ID NO: 1441329 - RNA, 15 nt, Human
ucccauccugugugu

SEQ ID NO: 1441330 - RNA, 14 nt, Human
ucccauccugugug

SEQ ID NO: 1441331 - RNA, 12 nt, Human
ucccaucccugc

SEQ ID NO: 1441332 - RNA, 14 nt, Human
ucccaucccugcgu

SEQ ID NO: 1441333 - RNA, 17 nt, Human
acuaacauguccugccu

SEQ ID NO: 1441334 - RNA, 17 nt, Human
acuaacauauaauguug

SEQ ID NO: 1441335 - RNA, 15 nt, Human
acuaacauauaaugu

SEQ ID NO: 1441336 - RNA, 18 nt, Human
acuaacaggccaaagagu

SEQ ID NO: 1441337 - RNA, 18 nt, Human
acguuggagaagcccgug

SEQ ID NO: 1441338 - RNA, 16 nt, Human
acguugagccccugga

SEQ ID NO: 1441339 - RNA, 13 nt, Human
acguugcucccca

SEQ ID NO: 1441340 - RNA, 19 nt, Human
acuacaaaucaaguauuug

SEQ ID NO: 1441341 - RNA, 13 nt, Human
acuacaaaucaag

SEQ ID NO: 1441342 - RNA, 11 nt, Human
acuacaaauca

SEQ ID NO: 1441343 - RNA, 23 nt, Human
acuacaaagguuuaaaugaacaa

SEQ ID NO: 1441344 - RNA, 22 nt, Human
acuacaaagguuuaaaugaaca

SEQ ID NO: 1441345 - RNA, 21 nt, Human
acuacaaagguuuaaaugaac

SEQ ID NO: 1441346 - RNA, 20 nt, Human
acuacaaagguuuaaaugaa

SEQ ID NO: 1441347 - RNA, 19 nt, Human
acuacaaagguuuaaauga

SEQ ID NO: 1441348 - RNA, 18 nt, Human
acuacaaagguuuaaaug

SEQ ID NO: 1441349 - RNA, 17 nt, Human
acuacaaagguuuaaau

SEQ ID NO: 1441350 - RNA, 22 nt, Human
acuaaccaagcugaguuuccua

SEQ ID NO: 1441351 - RNA, 21 nt, Human
acuaaccaagcugaguuuccu

SEQ ID NO: 1441352 - RNA, 18 nt, Human
acuaaccaagcugaguuu

SEQ ID NO: 1441353 - RNA, 15 nt, Human
acuaaccaagcugag

SEQ ID NO: 1441354 - RNA, 13 nt, Human
acuacacacagua

SEQ ID NO: 1441355 - RNA, 16 nt, Human
acuacaaccaauggaa

SEQ ID NO: 1441356 - RNA, 23 nt, Human
acuacagcuggggugcagggaug

SEQ ID NO: 1441357 - RNA, 21 nt, Human
acuacagcuggggugcaggga

SEQ ID NO: 1441358 - RNA, 19 nt, Human
acuacagcuggggugcagg

SEQ ID NO: 1441359 - RNA, 18 nt, Human
acuacagcuggggugcag

SEQ ID NO: 1441360 - RNA, 17 nt, Human
acuacagcuggggugca

SEQ ID NO: 1441361 - RNA, 22 nt, Human
acuacacacuguguacugcagu

SEQ ID NO: 1441362 - RNA, 17 nt, Human
acuacaggcgugagcca

SEQ ID NO: 1441363 - RNA, 20 nt, Human
acuacaggcacacaccacca

SEQ ID NO: 1441364 - RNA, 13 nt, Human
acuacaguuuguu

SEQ ID NO: 1441365 - RNA, 14 nt, Human
acuacaguuuguua

SEQ ID NO: 1441366 - RNA, 20 nt, Human
ucccagcaugcugagauuac

SEQ ID NO: 1441367 - RNA, 17 nt, Human
acuacagucuaaagcug

SEQ ID NO: 1441368 - RNA, 16 nt, Human
acuacagucuaaagcu

SEQ ID NO: 1441369 - RNA, 17 nt, Human
acuacagcuucagugau

SEQ ID NO: 1441370 - RNA, 15 nt, Human
acuacaguuagggcu

SEQ ID NO: 1441371 - RNA, 15 nt, Human
acuacauucuguuaa

SEQ ID NO: 1441372 - RNA, 14 nt, Human
acuacauucuguua

SEQ ID NO: 1441373 - RNA, 15 nt, Human
acuacaguuuguuag

SEQ ID NO: 1441374 - RNA, 12 nt, Human
acuacauucugu

SEQ ID NO: 1441375 - RNA, 13 nt, Human
acuacauucuguu

SEQ ID NO: 1441376 - RNA, 20 nt, Human
uccauccuugagucaaaaaa

SEQ ID NO: 1441377 - RNA, 20 nt, Human
uccaucucuuguuuaaauuc

SEQ ID NO: 1441378 - RNA, 18 nt, Human
uccauucucacagguccc

SEQ ID NO: 1441379 - RNA, 14 nt, Human
uccauucuccugag

SEQ ID NO: 1441380 - RNA, 12 nt, Human
uccauucuggaa

SEQ ID NO: 1441381 - RNA, 20 nt, Human
uccauucugcuccuucccca

SEQ ID NO: 1441382 - RNA, 13 nt, Human
uccauucuggaag

SEQ ID NO: 1441383 - RNA, 14 nt, Human
uccauucuggaagu

SEQ ID NO: 1441384 - RNA, 23 nt, Human
uccauuuaauggggugcaccugu

SEQ ID NO: 1441385 - RNA, 22 nt, Human
ucccaaacgcccuuuccuccuc

SEQ ID NO: 1441386 - RNA, 20 nt, Human
ucccaaaccacgccucuuga

SEQ ID NO: 1441387 - RNA, 20 nt, Human
ucccaaaauguugaaauaug

SEQ ID NO: 1441388 - RNA, 24 nt, Human
ucccaaacgcccuuuccuccucag

SEQ ID NO: 1441389 - RNA, 21 nt, Human
ucccaaagaaguucugguaug

SEQ ID NO: 1441390 - RNA, 12 nt, Human
uccauuucuaau

SEQ ID NO: 1441391 - RNA, 18 nt, Human
uccauuuccccuccuucc

SEQ ID NO: 1441392 - RNA, 13 nt, Human
uccauuucuaauu

SEQ ID NO: 1441393 - RNA, 14 nt, Human
uccauuucuaauua

SEQ ID NO: 1441394 - RNA, 12 nt, Human
uccauuugcaag

SEQ ID NO: 1441395 - RNA, 14 nt, Human
ucccaaaaaacuac

SEQ ID NO: 1441396 - RNA, 20 nt, Human
ucccaaaagcccauucauuc

SEQ ID NO: 1441397 - RNA, 20 nt, Human
ucccaaagcaagcaagaggc

SEQ ID NO: 1441398 - RNA, 14 nt, Human
ucccaaagcaagca

SEQ ID NO: 1441399 - RNA, 21 nt, Human
ucccaaaguccugggauuaca

SEQ ID NO: 1441400 - RNA, 13 nt, Human
ucccaaagugcug

SEQ ID NO: 1441401 - RNA, 19 nt, Human
ucccaaguagaaucucagu

SEQ ID NO: 1441402 - RNA, 17 nt, Human
ucccaaguagaaucuca

SEQ ID NO: 1441403 - RNA, 23 nt, Human
ucccaaagugcugagauuacagg

SEQ ID NO: 1441404 - RNA, 16 nt, Human
ucccaaguagaaucuc

SEQ ID NO: 1441405 - RNA, 20 nt, Human
ucccaaagugcugagauuac

SEQ ID NO: 1441406 - RNA, 19 nt, Human
ucccaaagugcugagauua

SEQ ID NO: 1441407 - RNA, 18 nt, Human
ucccaaagugcugagauu

SEQ ID NO: 1441408 - RNA, 23 nt, Human
ucccaaguagcugggauuacagg

SEQ ID NO: 1441409 - RNA, 21 nt, Human
ucccaaguagcugggauuaca

SEQ ID NO: 1441410 - RNA, 20 nt, Human
ucccaaguagcugggauuac

SEQ ID NO: 1441411 - RNA, 20 nt, Human
ucccaaguagcugagacuac

SEQ ID NO: 1441412 - RNA, 21 nt, Human
ucccacaagccugagggaaag

SEQ ID NO: 1441413 - RNA, 17 nt, Human
ucccaagugagucucuc

SEQ ID NO: 1441414 - RNA, 21 nt, Human
ucccaagugagucucucuggg

SEQ ID NO: 1441415 - RNA, 16 nt, Human
ucccacaagccugagg

SEQ ID NO: 1441416 - RNA, 15 nt, Human
ucccacaagccugag

SEQ ID NO: 1441417 - RNA, 14 nt, Human
ucccacaagccuga

SEQ ID NO: 1441418 - RNA, 14 nt, Human
ucccacaagccucu

SEQ ID NO: 1441419 - RNA, 16 nt, Human
ucccacagccacgugu

SEQ ID NO: 1441420 - RNA, 20 nt, Human
ucccacccccacccccagcu

SEQ ID NO: 1441421 - RNA, 18 nt, Human
ucccacccccacccccag

SEQ ID NO: 1441422 - RNA, 22 nt, Human
acgggaugguucuggcuguuug

SEQ ID NO: 1441423 - RNA, 18 nt, Human
acgggacugcggaggaag

SEQ ID NO: 1441424 - RNA, 21 nt, Human
acgguggggguagggggcugg

SEQ ID NO: 1441425 - RNA, 17 nt, Human
acgggccuguccacagg

SEQ ID NO: 1441426 - RNA, 15 nt, Human
acggggacucagccc

SEQ ID NO: 1441427 - RNA, 15 nt, Human
acguauuuaauagca

SEQ ID NO: 1441428 - RNA, 13 nt, Human
acguauuuaauag

SEQ ID NO: 1441429 - RNA, 17 nt, Human
acguaugucugguucuc

SEQ ID NO: 1441430 - RNA, 18 nt, Human
acguaugucugguucuca

SEQ ID NO: 1441431 - RNA, 14 nt, Human
acguacucugguua

SEQ ID NO: 1441432 - RNA, 20 nt, Human
acguacugcagccuccagag

SEQ ID NO: 1441433 - RNA, 22 nt, Human
acguauaaaagccuguuuaaga

SEQ ID NO: 1441434 - RNA, 20 nt, Human
acgugggcauucaaauguau

SEQ ID NO: 1441435 - RNA, 17 nt, Human
acgugggcauucaaaug

SEQ ID NO: 1441436 - RNA, 14 nt, Human
ucccuccccuugcc

SEQ ID NO: 1441437 - RNA, 13 nt, Human
ucccuccccuugc

SEQ ID NO: 1441438 - RNA, 15 nt, Human
ucccuccccuucucu

SEQ ID NO: 1441439 - RNA, 14 nt, Human
ucccuccccuucuc

SEQ ID NO: 1441440 - RNA, 22 nt, Human
ucccucccagaggagccaccag

SEQ ID NO: 1441441 - RNA, 23 nt, Human
ucccucccagagcaccugcuguc

SEQ ID NO: 1441442 - RNA, 21 nt, Human
ucccgggacaccuaggcuagg

SEQ ID NO: 1441443 - RNA, 15 nt, Human
ucccuccccuugccu

SEQ ID NO: 1441444 - RNA, 19 nt, Human
acucacuccuuuuaaagaa

SEQ ID NO: 1441445 - RNA, 18 nt, Human
acucacuccuuuuaaaga

SEQ ID NO: 1441446 - RNA, 16 nt, Human
acucacuccuuuuaaa

SEQ ID NO: 1441447 - RNA, 22 nt, Human
acucacuaggcccccacuugcc

SEQ ID NO: 1441448 - RNA, 21 nt, Human
acucacuaggcccccacuugc

SEQ ID NO: 1441449 - RNA, 17 nt, Human
acucacuaggcccccac

SEQ ID NO: 1441450 - RNA, 15 nt, Human
acucacuaggccccc

SEQ ID NO: 1441451 - RNA, 14 nt, Human
acucacuaggcccc

SEQ ID NO: 1441452 - RNA, 20 nt, Human
acucacuaauucauuaaucu

SEQ ID NO: 1441453 - RNA, 18 nt, Human
acucacuaauucauuaau

SEQ ID NO: 1441454 - RNA, 15 nt, Human
ucccugaggacugau

SEQ ID NO: 1441455 - RNA, 23 nt, Human
ucccugagcuagaacccucuguu

SEQ ID NO: 1441456 - RNA, 13 nt, Human
ucccugagauggg

SEQ ID NO: 1441457 - RNA, 15 nt, Human
ucccugacugggagu

SEQ ID NO: 1441458 - RNA, 21 nt, Human
ucccugaggacugauuucaga

SEQ ID NO: 1441459 - RNA, 20 nt, Human
ucccugaggacugauuucag

SEQ ID NO: 1441460 - RNA, 23 nt, Human
ucccugagaugggcuucccaagg

SEQ ID NO: 1441461 - RNA, 14 nt, Human
ucccugacugggag

SEQ ID NO: 1441462 - RNA, 22 nt, Human
uccccuugggcccacaccuccu

SEQ ID NO: 1441463 - RNA, 19 nt, Human
uccccuugggcccacaccu

SEQ ID NO: 1441464 - RNA, 18 nt, Human
uccccuugggcccacacc

SEQ ID NO: 1441465 - RNA, 16 nt, Human
uccccuugggcccaca

SEQ ID NO: 1441466 - RNA, 23 nt, Human
uccccuugccugugccaggugag

SEQ ID NO: 1441467 - RNA, 16 nt, Human
uccccuugccugugcc

SEQ ID NO: 1441468 - RNA, 12 nt, Human
uccccuugccug

SEQ ID NO: 1441469 - RNA, 16 nt, Human
uccccucuccuuccug

SEQ ID NO: 1441470 - RNA, 15 nt, Human
uccccucuccuuccu

SEQ ID NO: 1441471 - RNA, 15 nt, Human
ucccgagcuccucuu

SEQ ID NO: 1441472 - RNA, 22 nt, Human
ucccgagcaccuccacauccuc

SEQ ID NO: 1441473 - RNA, 24 nt, Human
uccccuuugcuucauucaagucag

SEQ ID NO: 1441474 - RNA, 14 nt, Human
uccccuccccaacu

SEQ ID NO: 1441475 - RNA, 18 nt, Human
uccccuccaucccuggcc

SEQ ID NO: 1441476 - RNA, 20 nt, Human
uccccuccaucccuggcccc

SEQ ID NO: 1441477 - RNA, 16 nt, Human
uccccuccaucccugg

SEQ ID NO: 1441478 - RNA, 15 nt, Human
uccccuccaucccug

SEQ ID NO: 1441479 - RNA, 14 nt, Human
uccccuccaucccu

SEQ ID NO: 1441480 - RNA, 15 nt, Human
uccccuagaguccca

SEQ ID NO: 1441481 - RNA, 16 nt, Human
uccccuagagucccag

SEQ ID NO: 1441482 - RNA, 20 nt, Human
uccccuaagcagaccacuga

SEQ ID NO: 1441483 - RNA, 13 nt, Human
acucaccacugcc

SEQ ID NO: 1441484 - RNA, 21 nt, Human
acuacuagggaaaugccuuug

SEQ ID NO: 1441485 - RNA, 17 nt, Human
acucacuuuucccacuc

SEQ ID NO: 1441486 - RNA, 18 nt, Human
acucacuuuucccacucc

SEQ ID NO: 1441487 - RNA, 16 nt, Human
acucacuuuucccacu

SEQ ID NO: 1441488 - RNA, 15 nt, Human
acucacuuuucccac

SEQ ID NO: 1441489 - RNA, 14 nt, Human
acucacuuuuccca

SEQ ID NO: 1441490 - RNA, 19 nt, Human
acucaugugacucuuucca

SEQ ID NO: 1441491 - RNA, 18 nt, Human
acucaugugacucuuucc

SEQ ID NO: 1441492 - RNA, 19 nt, Human
acucauucugaaggagccc

SEQ ID NO: 1441493 - RNA, 15 nt, Human
acucauucugaagga

SEQ ID NO: 1441494 - RNA, 16 nt, Human
acucauucauuaguca

SEQ ID NO: 1441495 - RNA, 13 nt, Human
acucauucauuag

SEQ ID NO: 1441496 - RNA, 21 nt, Human
acucauuagacuggaacuuga

SEQ ID NO: 1441497 - RNA, 15 nt, Human
acucauuagacugga

SEQ ID NO: 1441498 - RNA, 14 nt, Human
acucauuagacugg

SEQ ID NO: 1441499 - RNA, 13 nt, Human
acucauuagacug

SEQ ID NO: 1441500 - RNA, 20 nt, Human
acuccucugacucagggcuc

SEQ ID NO: 1441501 - RNA, 14 nt, Human
acuccucugacuca

SEQ ID NO: 1441502 - RNA, 16 nt, Human
acuccuccuuuuucca

SEQ ID NO: 1441503 - RNA, 13 nt, Human
acuccugaaaaaa

SEQ ID NO: 1441504 - RNA, 21 nt, Human
acuccucugcugaccugcuga

SEQ ID NO: 1441505 - RNA, 16 nt, Human
acuccucugcugaccu

SEQ ID NO: 1441506 - RNA, 13 nt, Human
acuccucugcuga

SEQ ID NO: 1441507 - RNA, 15 nt, Human
acuccugaccucaag

SEQ ID NO: 1441508 - RNA, 19 nt, Human
acuccugaaaaaaaaccug

SEQ ID NO: 1441509 - RNA, 16 nt, Human
acuccugaaaaaaaac

SEQ ID NO: 1441510 - RNA, 14 nt, Human
acuccugaaaaaaa

SEQ ID NO: 1441511 - RNA, 14 nt, Human
ucccuuaauauccu

SEQ ID NO: 1441512 - RNA, 22 nt, Human
ucccuuaacaguuguauuuaac

SEQ ID NO: 1441513 - RNA, 20 nt, Human
ucccuuaacaguuguauuua

SEQ ID NO: 1441514 - RNA, 17 nt, Human
ucccuuaacaguuguau

SEQ ID NO: 1441515 - RNA, 16 nt, Human
ucccuuaacaguugua

SEQ ID NO: 1441516 - RNA, 22 nt, Human
ucccuuaaacaaaaauuaaaau

SEQ ID NO: 1441517 - RNA, 15 nt, Human
ucccuuaaacaaaaa

SEQ ID NO: 1441518 - RNA, 19 nt, Human
ucccuguuuucccacgagg

SEQ ID NO: 1441519 - RNA, 19 nt, Human
ucccuguuuuccccccaag

SEQ ID NO: 1441520 - RNA, 16 nt, Human
ucccugugccuccucc

SEQ ID NO: 1441521 - RNA, 19 nt, Human
ucccugugccuccucccuc

SEQ ID NO: 1441522 - RNA, 17 nt, Human
ucccuuaauauccuaaa

SEQ ID NO: 1441523 - RNA, 21 nt, Human
ucccuuaauauccuaaacauc

SEQ ID NO: 1441524 - RNA, 14 nt, Human
ucccugugccuccu

SEQ ID NO: 1441525 - RNA, 14 nt, Human
ucccugugccccca

SEQ ID NO: 1441526 - RNA, 15 nt, Human
ucccuggugcuuaug

SEQ ID NO: 1441527 - RNA, 11 nt, Human
ucccuggugcu

SEQ ID NO: 1441528 - RNA, 14 nt, Human
ucccuggucccuug

SEQ ID NO: 1441529 - RNA, 19 nt, Human
ucccuggucccuuggagac

SEQ ID NO: 1441530 - RNA, 12 nt, Human
ucccuggucccu

SEQ ID NO: 1441531 - RNA, 13 nt, Human
ucccuggucccuu

SEQ ID NO: 1441532 - RNA, 20 nt, Human
ucccuggguagcgggggagg

SEQ ID NO: 1441533 - RNA, 21 nt, Human
uccgggaccuggugcugccuc

SEQ ID NO: 1441534 - RNA, 20 nt, Human
ucccuuuucuguucuaguuu

SEQ ID NO: 1441535 - RNA, 16 nt, Human
ucccuuuucuguucua

SEQ ID NO: 1441536 - RNA, 14 nt, Human
ucccuuuucuguuc

SEQ ID NO: 1441537 - RNA, 13 nt, Human
ucccuuuucuguu

SEQ ID NO: 1441538 - RNA, 14 nt, Human
ucccuuuuccauga

SEQ ID NO: 1441539 - RNA, 16 nt, Human
uccuaagagugcuggg

SEQ ID NO: 1441540 - RNA, 20 nt, Human
uccuaaauuuuccuguccuc

SEQ ID NO: 1441541 - RNA, 19 nt, Human
uccuaaauuuuccuguccu

SEQ ID NO: 1441542 - RNA, 18 nt, Human
uccuaaauuuuccugucc

SEQ ID NO: 1441543 - RNA, 21 nt, Human
uccuaaauauuaugagaugcu

SEQ ID NO: 1441544 - RNA, 14 nt, Human
uccuaaauauuaug

SEQ ID NO: 1441545 - RNA, 19 nt, Human
uccuaaauauauuuuaaga

SEQ ID NO: 1441546 - RNA, 22 nt, Human
ucggggugcacaggaggggguc

SEQ ID NO: 1441547 - RNA, 19 nt, Human
ucggggugcacaggagggg

SEQ ID NO: 1441548 - RNA, 17 nt, Human
ucggggugcacaggagg

SEQ ID NO: 1441549 - RNA, 16 nt, Human
ucggggugcacaggag

SEQ ID NO: 1441550 - RNA, 15 nt, Human
ucggggugcacagga

SEQ ID NO: 1441551 - RNA, 14 nt, Human
ucggggugcacagg

SEQ ID NO: 1441552 - RNA, 13 nt, Human
ucgggcccuuccc

SEQ ID NO: 1441553 - RNA, 15 nt, Human
ucggcugaccaugcu

SEQ ID NO: 1441554 - RNA, 19 nt, Human
ucggcuccccauguguccu

SEQ ID NO: 1441555 - RNA, 19 nt, Human
ucggccugcccccacccca

SEQ ID NO: 1441556 - RNA, 16 nt, Human
ucggccugcccccacc

SEQ ID NO: 1441557 - RNA, 21 nt, Human
ucgggaaaagguagaggaguc

SEQ ID NO: 1441558 - RNA, 16 nt, Human
ucggcugaccaugcuc

SEQ ID NO: 1441559 - RNA, 11 nt, Human
ucuaaagcaaa

SEQ ID NO: 1441560 - RNA, 23 nt, Human
ucuaaagauucuauaguucuaga

SEQ ID NO: 1441561 - RNA, 22 nt, Human
ucuaaagauucuauaguucuag

SEQ ID NO: 1441562 - RNA, 20 nt, Human
ucuaaagauucuauaguucu

SEQ ID NO: 1441563 - RNA, 16 nt, Human
ucuaaagauucuauag

SEQ ID NO: 1441564 - RNA, 15 nt, Human
ucuaaagauucuaua

SEQ ID NO: 1441565 - RNA, 13 nt, Human
ucuaaagauucua

SEQ ID NO: 1441566 - RNA, 23 nt, Human
ucuaaagauggaguuucuaaggu

SEQ ID NO: 1441567 - RNA, 22 nt, Human
ucuaaagauggaguuucuaagg

SEQ ID NO: 1441568 - RNA, 21 nt, Human
ucuaaagauggaguuucuaag

SEQ ID NO: 1441569 - RNA, 20 nt, Human
ucuaaagauggaguuucuaa

SEQ ID NO: 1441570 - RNA, 19 nt, Human
ucuaaagauggaguuucua

SEQ ID NO: 1441571 - RNA, 23 nt, Human
ucuaaaaucuuauaguucuaggc

SEQ ID NO: 1441572 - RNA, 18 nt, Human
ucuaaagauggaguuucu

SEQ ID NO: 1441573 - RNA, 22 nt, Human
ucuaaaaucuuauaguucuagg

SEQ ID NO: 1441574 - RNA, 19 nt, Human
ucuaaaaucuuauaguucu

SEQ ID NO: 1441575 - RNA, 18 nt, Human
ucuaaaaucuuauaguuc

SEQ ID NO: 1441576 - RNA, 15 nt, Human
ucuaaaaucuuauag

SEQ ID NO: 1441577 - RNA, 11 nt, Human
ucuaaaacucc

SEQ ID NO: 1441578 - RNA, 17 nt, Human
ucguuuuuuucauucca

SEQ ID NO: 1441579 - RNA, 20 nt, Human
ucguuuuuuuuuuguuuguu

SEQ ID NO: 1441580 - RNA, 14 nt, Human
ucguuuuuuacaaa

SEQ ID NO: 1441581 - RNA, 21 nt, Human
ucguuuucuuaaagugccagu

SEQ ID NO: 1441582 - RNA, 13 nt, Human
ucguuuucuuaaa

SEQ ID NO: 1441583 - RNA, 20 nt, Human
ucguuuguuuguuuguuuaa

SEQ ID NO: 1441584 - RNA, 13 nt, Human
ucguuuguuuguu

SEQ ID NO: 1441585 - RNA, 15 nt, Human
ucguuuguguucugu

SEQ ID NO: 1441586 - RNA, 14 nt, Human
ucguuuguguucug

SEQ ID NO: 1441587 - RNA, 13 nt, Human
ucguaaagauuug

SEQ ID NO: 1441588 - RNA, 22 nt, Human
ucguuuucaaaauuguuacaaa

SEQ ID NO: 1441589 - RNA, 15 nt, Human
ucguaaagauuuggg

SEQ ID NO: 1441590 - RNA, 13 nt, Human
ucgguuucuccaa

SEQ ID NO: 1441591 - RNA, 16 nt, Human
ucguaaaauuaagaaa

SEQ ID NO: 1441592 - RNA, 12 nt, Human
ucggugaagaaa

SEQ ID NO: 1441593 - RNA, 14 nt, Human
ucggucugugcccc

SEQ ID NO: 1441594 - RNA, 20 nt, Human
ucgguauccccccaucuugc

SEQ ID NO: 1441595 - RNA, 16 nt, Human
ucgguagguucagcca

SEQ ID NO: 1441596 - RNA, 13 nt, Human
ucguaaaauuaag

SEQ ID NO: 1441597 - RNA, 16 nt, Human
acugucccuugccuca

SEQ ID NO: 1441598 - RNA, 22 nt, Human
acugucagcagggacuguaaac

SEQ ID NO: 1441599 - RNA, 19 nt, Human
acugucagcagggacugua

SEQ ID NO: 1441600 - RNA, 12 nt, Human
acugggaaggcu

SEQ ID NO: 1441601 - RNA, 11 nt, Human
acugggaaggc

SEQ ID NO: 1441602 - RNA, 20 nt, Human
acugggaaccccuuucccac

SEQ ID NO: 1441603 - RNA, 19 nt, Human
acugggaaccccuuuccca

SEQ ID NO: 1441604 - RNA, 17 nt, Human
acugggaaccccuuucc

SEQ ID NO: 1441605 - RNA, 16 nt, Human
acugggaaccccuuuc

SEQ ID NO: 1441606 - RNA, 23 nt, Human
acuggcuuuuauuaaugcacuuu

SEQ ID NO: 1441607 - RNA, 21 nt, Human
acuggcuuuuauuaaugcacu

SEQ ID NO: 1441608 - RNA, 20 nt, Human
acuggcuuuuauuaaugcac

SEQ ID NO: 1441609 - RNA, 18 nt, Human
acugggacaggggagaac

SEQ ID NO: 1441610 - RNA, 16 nt, Human
acugggagaaaugaaa

SEQ ID NO: 1441611 - RNA, 15 nt, Human
acugucacuguuccu

SEQ ID NO: 1441612 - RNA, 15 nt, Human
acugggaccaggcac

SEQ ID NO: 1441613 - RNA, 17 nt, Human
acugggaaggcuacuuc

SEQ ID NO: 1441614 - RNA, 20 nt, Human
acugggaaggcuugggauuu

SEQ ID NO: 1441615 - RNA, 17 nt, Human
acugggagaaaugaaaa

SEQ ID NO: 1441616 - RNA, 18 nt, Human
acuguggguagacacaca

SEQ ID NO: 1441617 - RNA, 18 nt, Human
acuguguacauaacugaa

SEQ ID NO: 1441618 - RNA, 16 nt, Human
acuguguacauaacug

SEQ ID NO: 1441619 - RNA, 12 nt, Human
acuguguacaua

SEQ ID NO: 1441620 - RNA, 13 nt, Human
acuguguaauuag

SEQ ID NO: 1441621 - RNA, 21 nt, Human
acuguguaagggccagaaaua

SEQ ID NO: 1441622 - RNA, 19 nt, Human
acuguguaagggccagaaa

SEQ ID NO: 1441623 - RNA, 17 nt, Human
acuguguaacugcccaa

SEQ ID NO: 1441624 - RNA, 15 nt, Human
acuguguaacugccc

SEQ ID NO: 1441625 - RNA, 14 nt, Human
acuguguaacugcc

SEQ ID NO: 1441626 - RNA, 13 nt, Human
acuguguaacugc

SEQ ID NO: 1441627 - RNA, 12 nt, Human
acuguguaacug

SEQ ID NO: 1441628 - RNA, 16 nt, Human
acuguguauuccaaga

SEQ ID NO: 1441629 - RNA, 15 nt, Human
acuguguauuccaag

SEQ ID NO: 1441630 - RNA, 17 nt, Human
acuguguacauaacuga

SEQ ID NO: 1441631 - RNA, 21 nt, Human
acuguguauuccaagacaugu

SEQ ID NO: 1441632 - RNA, 12 nt, Human
acugugugcuca

SEQ ID NO: 1441633 - RNA, 15 nt, Human
acugugugcucagga

SEQ ID NO: 1441634 - RNA, 19 nt, Human
acugugugcucaggagccc

SEQ ID NO: 1441635 - RNA, 20 nt, Human
acugugugcucaggagcccu

SEQ ID NO: 1441636 - RNA, 21 nt, Human
acugugugcucaggagcccug

SEQ ID NO: 1441637 - RNA, 15 nt, Human
acuuacuugcuuauu

SEQ ID NO: 1441638 - RNA, 18 nt, Human
acuuaccaggcaccaaaa

SEQ ID NO: 1441639 - RNA, 19 nt, Human
acuuacauuuacaaacuga

SEQ ID NO: 1441640 - RNA, 15 nt, Human
acuuacauuuacaaa

SEQ ID NO: 1441641 - RNA, 14 nt, Human
acuuacauuuacaa

SEQ ID NO: 1441642 - RNA, 22 nt, Human
acuuaccaggcaccaaaagaag

SEQ ID NO: 1441643 - RNA, 21 nt, Human
acuuaccaggcaccaaaagaa

SEQ ID NO: 1441644 - RNA, 18 nt, Human
acuuacaugauucauuuu

SEQ ID NO: 1441645 - RNA, 17 nt, Human
acuuacaugauucauuu

SEQ ID NO: 1441646 - RNA, 19 nt, Human
acuuacaugauucauuuua

SEQ ID NO: 1441647 - RNA, 16 nt, Human
acuuaaucaaaacuca

SEQ ID NO: 1441648 - RNA, 19 nt, Human
acuuaauacucaaaugagu

SEQ ID NO: 1441649 - RNA, 13 nt, Human
acuuaaucuaaau

SEQ ID NO: 1441650 - RNA, 15 nt, Human
acuuaaucuaaaugg

SEQ ID NO: 1441651 - RNA, 16 nt, Human
acuuaaucuaaaugga

SEQ ID NO: 1441652 - RNA, 21 nt, Human
acuuagaaaaccagcucagca

SEQ ID NO: 1441653 - RNA, 20 nt, Human
acuuagaaaaccagcucagc

SEQ ID NO: 1441654 - RNA, 21 nt, Human
acuuacuuuuucuggucucua

SEQ ID NO: 1441655 - RNA, 13 nt, Human
acuuacuuuuucu

SEQ ID NO: 1441656 - RNA, 16 nt, Human
acuuacuugcuuauuu

SEQ ID NO: 1441657 - RNA, 21 nt, Human
acuuauagccucugucuggca

SEQ ID NO: 1441658 - RNA, 15 nt, Human
acuuauagccucugu

SEQ ID NO: 1441659 - RNA, 14 nt, Human
acuuauagccucug

SEQ ID NO: 1441660 - RNA, 13 nt, Human
acuuauagccucu

SEQ ID NO: 1441661 - RNA, 17 nt, Human
acuuauaauuuuccuaa

SEQ ID NO: 1441662 - RNA, 18 nt, Human
acuuauauggaaauucug

SEQ ID NO: 1441663 - RNA, 14 nt, Human
acuuauaguacaug

SEQ ID NO: 1441664 - RNA, 15 nt, Human
acuuauaguacauga

SEQ ID NO: 1441665 - RNA, 17 nt, Human
acuuauaguacaugaua

SEQ ID NO: 1441666 - RNA, 18 nt, Human
acuuauaguacaugauaa

SEQ ID NO: 1441667 - RNA, 21 nt, Human
acuguuggaauggauuuuucu

SEQ ID NO: 1441668 - RNA, 12 nt, Human
acuguuggaaug

SEQ ID NO: 1441669 - RNA, 18 nt, Human
acuguugggguggguaua

SEQ ID NO: 1441670 - RNA, 13 nt, Human
acuguucuuagcu

SEQ ID NO: 1441671 - RNA, 20 nt, Human
acuguugggguggguauaaa

SEQ ID NO: 1441672 - RNA, 21 nt, Human
acuguugggguggguauaaaa

SEQ ID NO: 1441673 - RNA, 22 nt, Human
acuguugggguggguauaaaag

SEQ ID NO: 1441674 - RNA, 19 nt, Human
acuguucuuagcucaauga

SEQ ID NO: 1441675 - RNA, 17 nt, Human
acuguucugugucuuuc

SEQ ID NO: 1441676 - RNA, 16 nt, Human
acuguucugugucuuu

SEQ ID NO: 1441677 - RNA, 15 nt, Human
acuguucugugucuu

SEQ ID NO: 1441678 - RNA, 13 nt, Human
acuguucuguguc

SEQ ID NO: 1441679 - RNA, 21 nt, Human
acuuaauacuaccuugaaaau

SEQ ID NO: 1441680 - RNA, 19 nt, Human
acuuaauacuaccuugaaa

SEQ ID NO: 1441681 - RNA, 18 nt, Human
acuuaauacuaccuugaa

SEQ ID NO: 1441682 - RNA, 17 nt, Human
acuuaauacuaccuuga

SEQ ID NO: 1441683 - RNA, 21 nt, Human
acuuaagcccagugcacugaa

SEQ ID NO: 1441684 - RNA, 21 nt, Human
acuuaagcaucuggcucuaau

SEQ ID NO: 1441685 - RNA, 20 nt, Human
acuuaagcaucuggcucuaa

SEQ ID NO: 1441686 - RNA, 20 nt, Human
acuuaaauaaugugaaacug

SEQ ID NO: 1441687 - RNA, 19 nt, Human
acuguuguagaagacaaaa

SEQ ID NO: 1441688 - RNA, 16 nt, Human
acuuaaauaaugugaa

SEQ ID NO: 1441689 - RNA, 17 nt, Human
acuuaaauaaugugaaa

SEQ ID NO: 1441690 - RNA, 18 nt, Human
acuuaaauaaugugaaac

SEQ ID NO: 1441691 - RNA, 20 nt, Human
ucuaccauuuucugguucuu

SEQ ID NO: 1441692 - RNA, 17 nt, Human
ucuaccauuuucugguu

SEQ ID NO: 1441693 - RNA, 18 nt, Human
ucuaccauuucagagagg

SEQ ID NO: 1441694 - RNA, 15 nt, Human
ucuaccauuucagag

SEQ ID NO: 1441695 - RNA, 14 nt, Human
ucuaccauuucaga

SEQ ID NO: 1441696 - RNA, 18 nt, Human
acuguucuaaagcucuga

SEQ ID NO: 1441697 - RNA, 17 nt, Human
acuguucuaaagcucug

SEQ ID NO: 1441698 - RNA, 16 nt, Human
acuguucuaaagcucu

SEQ ID NO: 1441699 - RNA, 14 nt, Human
acuguucuaaagcu

SEQ ID NO: 1441700 - RNA, 13 nt, Human
acuguucuaaagc

SEQ ID NO: 1441701 - RNA, 21 nt, Human
acuguucuaaagcucugacau

SEQ ID NO: 1441702 - RNA, 18 nt, Human
ucuacagucucgucucuu

SEQ ID NO: 1441703 - RNA, 15 nt, Human
ucuaaguaaauacaa

SEQ ID NO: 1441704 - RNA, 14 nt, Human
ucuaaguaaauaca

SEQ ID NO: 1441705 - RNA, 23 nt, Human
ucuaagguccgguguucuaagau

SEQ ID NO: 1441706 - RNA, 22 nt, Human
ucuaagguccgguguucuaaga

SEQ ID NO: 1441707 - RNA, 20 nt, Human
ucuaagguccgguguucuaa

SEQ ID NO: 1441708 - RNA, 22 nt, Human
ucuaaggcucugagagucuaga

SEQ ID NO: 1441709 - RNA, 23 nt, Human
ucuaaggcucugagagucuagau

SEQ ID NO: 1441710 - RNA, 20 nt, Human
ucuaaggcucugagagucua

SEQ ID NO: 1441711 - RNA, 17 nt, Human
ucuaaggcucugagagu

SEQ ID NO: 1441712 - RNA, 16 nt, Human
ucuaaggcucugagag

SEQ ID NO: 1441713 - RNA, 15 nt, Human
ucuaaggcucugaga

SEQ ID NO: 1441714 - RNA, 14 nt, Human
ucuaaggcucugag

SEQ ID NO: 1441715 - RNA, 13 nt, Human
ucuaaggcucuga

SEQ ID NO: 1441716 - RNA, 22 nt, Human
ucuaaggccuaggauucuaaaa

SEQ ID NO: 1441717 - RNA, 21 nt, Human
ucuaaggccuaggauucuaaa

SEQ ID NO: 1441718 - RNA, 20 nt, Human
ucuaaggccuaggauucuaa

SEQ ID NO: 1441719 - RNA, 19 nt, Human
ucuaaggccuaggauucua

SEQ ID NO: 1441720 - RNA, 18 nt, Human
ucuaaggccuaggauucu

SEQ ID NO: 1441721 - RNA, 23 nt, Human
ucuaaggaccugaaauuccaaag

SEQ ID NO: 1441722 - RNA, 21 nt, Human
ucuaaggaccugaaauuccaa

SEQ ID NO: 1441723 - RNA, 17 nt, Human
ucuaaggaccugaaauu

SEQ ID NO: 1441724 - RNA, 14 nt, Human
ucuaaagcucugac

SEQ ID NO: 1441725 - RNA, 12 nt, Human
ucuaaagcucug

SEQ ID NO: 1441726 - RNA, 12 nt, Human
ucuaaagcaaau

SEQ ID NO: 1441727 - RNA, 20 nt, Human
ucuaaagccauuguaguccu

SEQ ID NO: 1441728 - RNA, 19 nt, Human
uccuagagaagacaggcug

SEQ ID NO: 1441729 - RNA, 20 nt, Human
uccuagagaagacaggcugg

SEQ ID NO: 1441730 - RNA, 18 nt, Human
acugcauacuuuuuaaau

SEQ ID NO: 1441731 - RNA, 17 nt, Human
acugcauacuuuuuaaa

SEQ ID NO: 1441732 - RNA, 16 nt, Human
acugcauacuuuuuaa

SEQ ID NO: 1441733 - RNA, 13 nt, Human
acugcauacuuuu

SEQ ID NO: 1441734 - RNA, 18 nt, Human
uccuagagaagacaggcu

SEQ ID NO: 1441735 - RNA, 19 nt, Human
uccuacuggucucucuaug

SEQ ID NO: 1441736 - RNA, 17 nt, Human
uccuacuggucucucua

SEQ ID NO: 1441737 - RNA, 16 nt, Human
uccuacuggucucucu

SEQ ID NO: 1441738 - RNA, 22 nt, Human
acugcaugcccagagacccagc

SEQ ID NO: 1441739 - RNA, 17 nt, Human
acugcaugcccagagac

SEQ ID NO: 1441740 - RNA, 14 nt, Human
acugcaugcccaga

SEQ ID NO: 1441741 - RNA, 18 nt, Human
acugcaugcacuucuuac

SEQ ID NO: 1441742 - RNA, 14 nt, Human
acugcaugcacuuc

SEQ ID NO: 1441743 - RNA, 12 nt, Human
acugcaugcacu

SEQ ID NO: 1441744 - RNA, 15 nt, Human
acugcauguuuguga

SEQ ID NO: 1441745 - RNA, 16 nt, Human
acugcauguuugugau

SEQ ID NO: 1441746 - RNA, 23 nt, Human
acugcauacuuuuuaaauguaaa

SEQ ID NO: 1441747 - RNA, 20 nt, Human
acugcauacuuuuuaaaugu

SEQ ID NO: 1441748 - RNA, 14 nt, Human
acugcauccagccu

SEQ ID NO: 1441749 - RNA, 15 nt, Human
acugcauccagccug

SEQ ID NO: 1441750 - RNA, 22 nt, Human
acugccuucgcuucuugccucu

SEQ ID NO: 1441751 - RNA, 21 nt, Human
acugccuucgcuucuugccuc

SEQ ID NO: 1441752 - RNA, 17 nt, Human
acugccuucgcuucuug

SEQ ID NO: 1441753 - RNA, 16 nt, Human
acugccuucgcuucuu

SEQ ID NO: 1441754 - RNA, 15 nt, Human
acugccuucgcuucu

SEQ ID NO: 1441755 - RNA, 14 nt, Human
acugccugcuuggg

SEQ ID NO: 1441756 - RNA, 19 nt, Human
acugccugcucccauccug

SEQ ID NO: 1441757 - RNA, 15 nt, Human
acugccugcucccau

SEQ ID NO: 1441758 - RNA, 13 nt, Human
acugccugcuccc

SEQ ID NO: 1441759 - RNA, 11 nt, Human
acugccugcuc

SEQ ID NO: 1441760 - RNA, 9 nt, Human
acugccugc

SEQ ID NO: 1441761 - RNA, 14 nt, Human
acugcauuauauuu

SEQ ID NO: 1441762 - RNA, 23 nt, Human
acugcauucuucugagcacuguu

SEQ ID NO: 1441763 - RNA, 15 nt, Human
acugcauuauauuua

SEQ ID NO: 1441764 - RNA, 19 nt, Human
acugccucgaaacacagaa

SEQ ID NO: 1441765 - RNA, 17 nt, Human
acugccucgaaacacag

SEQ ID NO: 1441766 - RNA, 16 nt, Human
acugccuauuuuaaua

SEQ ID NO: 1441767 - RNA, 21 nt, Human
acugccuauuuuaauaaacac

SEQ ID NO: 1441768 - RNA, 21 nt, Human
acuggccaagcugaggugccc

SEQ ID NO: 1441769 - RNA, 19 nt, Human
acuggccaagcugaggugc

SEQ ID NO: 1441770 - RNA, 18 nt, Human
acuggccaagcugaggug

SEQ ID NO: 1441771 - RNA, 17 nt, Human
acuggccaagcugaggu

SEQ ID NO: 1441772 - RNA, 16 nt, Human
acuggccaagcugagg

SEQ ID NO: 1441773 - RNA, 14 nt, Human
acuggccaagcuga

SEQ ID NO: 1441774 - RNA, 22 nt, Human
acuggauuaaacuuaaucuaaa

SEQ ID NO: 1441775 - RNA, 15 nt, Human
acuggauuaaacuua

SEQ ID NO: 1441776 - RNA, 19 nt, Human
acugcuuucuguuccaaau

SEQ ID NO: 1441777 - RNA, 18 nt, Human
acugcuuucuguuccaaa

SEQ ID NO: 1441778 - RNA, 17 nt, Human
acugcuuucuguuccaa

SEQ ID NO: 1441779 - RNA, 16 nt, Human
acugcuuucuguucca

SEQ ID NO: 1441780 - RNA, 14 nt, Human
acugcuuucuguuc

SEQ ID NO: 1441781 - RNA, 12 nt, Human
acugcuuucugu

SEQ ID NO: 1441782 - RNA, 22 nt, Human
acuggagugugcgugguggucc

SEQ ID NO: 1441783 - RNA, 17 nt, Human
acuggagugugcguggu

SEQ ID NO: 1441784 - RNA, 20 nt, Human
acugcuguggccaggaggug

SEQ ID NO: 1441785 - RNA, 19 nt, Human
acugcuguggccaggaggu

SEQ ID NO: 1441786 - RNA, 18 nt, Human
acugcuguggccaggagg

SEQ ID NO: 1441787 - RNA, 16 nt, Human
acugcuuaauucaaau

SEQ ID NO: 1441788 - RNA, 20 nt, Human
acugcuuaacuucacauauu

SEQ ID NO: 1441789 - RNA, 13 nt, Human
acugcuuaauuca

SEQ ID NO: 1441790 - RNA, 17 nt, Human
acugcuguggccaggag

SEQ ID NO: 1441791 - RNA, 16 nt, Human
acugcuguggccagga

SEQ ID NO: 1441792 - RNA, 15 nt, Human
acugcuguggccagg

SEQ ID NO: 1441793 - RNA, 14 nt, Human
acugcuguggccag

SEQ ID NO: 1441794 - RNA, 18 nt, Human
acugcuuaacuucacaua

SEQ ID NO: 1441795 - RNA, 13 nt, Human
acugcuccuccuc

SEQ ID NO: 1441796 - RNA, 18 nt, Human
acugcucuaacagcccuc

SEQ ID NO: 1441797 - RNA, 16 nt, Human
acugcuacagcaauuu

SEQ ID NO: 1441798 - RNA, 14 nt, Human
acugcuacagcaau

SEQ ID NO: 1441799 - RNA, 20 nt, Human
acugcuaaauaaaauuuguu

SEQ ID NO: 1441800 - RNA, 19 nt, Human
acugcuaaauaaaauuugu

SEQ ID NO: 1441801 - RNA, 17 nt, Human
acugcuaaauaaaauuu

SEQ ID NO: 1441802 - RNA, 16 nt, Human
acugcuaaauaaaauu

SEQ ID NO: 1441803 - RNA, 15 nt, Human
acugcuaaauaaaau

SEQ ID NO: 1441804 - RNA, 14 nt, Human
acugcuaaauaaaa

SEQ ID NO: 1441805 - RNA, 13 nt, Human
acugcuaaauaaa

SEQ ID NO: 1441806 - RNA, 23 nt, Human
acugccuucgcuucuugccucug

SEQ ID NO: 1441807 - RNA, 20 nt, Human
acugccuucucaacuccaaa

SEQ ID NO: 1441808 - RNA, 19 nt, Human
acugccuucucaacuccaa

SEQ ID NO: 1441809 - RNA, 13 nt, Human
acugccuucucaa

SEQ ID NO: 1441810 - RNA, 19 nt, Human
acuggcuuuuauuaaugca

SEQ ID NO: 1441811 - RNA, 18 nt, Human
acuggcuuuuauuaaugc

SEQ ID NO: 1441812 - RNA, 14 nt, Human
acuggcuuuuauua

SEQ ID NO: 1441813 - RNA, 18 nt, Human
ucgcuccccacucugcuc

SEQ ID NO: 1441814 - RNA, 15 nt, Human
ucgcuccccacucug

SEQ ID NO: 1441815 - RNA, 14 nt, Human
ucgcuccccacucu

SEQ ID NO: 1441816 - RNA, 18 nt, Human
ucgcuccaccuugcagcu

SEQ ID NO: 1441817 - RNA, 22 nt, Human
ucgcggcccucaguagucccug

SEQ ID NO: 1441818 - RNA, 17 nt, Human
ucgcggcccucaguagu

SEQ ID NO: 1441819 - RNA, 23 nt, Human
ucgcuagcauuucccaacacaaa

SEQ ID NO: 1441820 - RNA, 21 nt, Human
ucgcuagcaguggcaggcaga

SEQ ID NO: 1441821 - RNA, 22 nt, Human
ucgcuagcaguggcaggcagag

SEQ ID NO: 1441822 - RNA, 21 nt, Human
ucgagaucccaacacugccag

SEQ ID NO: 1441823 - RNA, 18 nt, Human
ucgagaucccaacacugc

SEQ ID NO: 1441824 - RNA, 14 nt, Human
ucgagcgcccugca

SEQ ID NO: 1441825 - RNA, 23 nt, Human
ucgagaggggccgaugcccagag

SEQ ID NO: 1441826 - RNA, 19 nt, Human
ucgagcgcccugcagaccc

SEQ ID NO: 1441827 - RNA, 18 nt, Human
ucgagcgcccugcagacc

SEQ ID NO: 1441828 - RNA, 17 nt, Human
ucgagcgcccugcagac

SEQ ID NO: 1441829 - RNA, 16 nt, Human
ucgagcgcccugcaga

SEQ ID NO: 1441830 - RNA, 15 nt, Human
ucgagcgcccugcag

SEQ ID NO: 1441831 - RNA, 14 nt, Human
ucgaaugacacugu

SEQ ID NO: 1441832 - RNA, 15 nt, Human
ucgaaugacacuguu

SEQ ID NO: 1441833 - RNA, 17 nt, Human
ucgaaugaaauuaacug

SEQ ID NO: 1441834 - RNA, 12 nt, Human
ucgaaugaaauu

SEQ ID NO: 1441835 - RNA, 22 nt, Human
ucgaaucucugugccuucgucu

SEQ ID NO: 1441836 - RNA, 17 nt, Human
ucgaaucucugugccuu

SEQ ID NO: 1441837 - RNA, 16 nt, Human
ucgaaucucugugccu

SEQ ID NO: 1441838 - RNA, 14 nt, Human
ucgaaucucugugc

SEQ ID NO: 1441839 - RNA, 20 nt, Human
ucgaaucuacuaauuccaca

SEQ ID NO: 1441840 - RNA, 20 nt, Human
ucgagaaagaggcaccagga

SEQ ID NO: 1441841 - RNA, 19 nt, Human
ucgagaaagaggcaccagg

SEQ ID NO: 1441842 - RNA, 21 nt, Human
ucgagaaagaggcaccaggaa

SEQ ID NO: 1441843 - RNA, 17 nt, Human
ucgagaucccaacacug

SEQ ID NO: 1441844 - RNA, 19 nt, Human
uccuuucuagagcacugcc

SEQ ID NO: 1441845 - RNA, 20 nt, Human
uccuuucuagagcacugcca

SEQ ID NO: 1441846 - RNA, 12 nt, Human
uccuuucuuuuc

SEQ ID NO: 1441847 - RNA, 12 nt, Human
uccuuucuuccg

SEQ ID NO: 1441848 - RNA, 20 nt, Human
uccuuucuuccggccccucc

SEQ ID NO: 1441849 - RNA, 13 nt, Human
uccuuucuggcuu

SEQ ID NO: 1441850 - RNA, 13 nt, Human
uccuuucuuuucc

SEQ ID NO: 1441851 - RNA, 12 nt, Human
ucgaagugcuga

SEQ ID NO: 1441852 - RNA, 13 nt, Human
ucgaagugcugag

SEQ ID NO: 1441853 - RNA, 23 nt, Human
uccuugugggccugggcuccugg

SEQ ID NO: 1441854 - RNA, 19 nt, Human
uccuugugggccugggcuc

SEQ ID NO: 1441855 - RNA, 18 nt, Human
uccuugugggccugggcu

SEQ ID NO: 1441856 - RNA, 16 nt, Human
uccuugugggccuggg

SEQ ID NO: 1441857 - RNA, 15 nt, Human
uccuugugccagaga

SEQ ID NO: 1441858 - RNA, 16 nt, Human
uccuugugccagagaa

SEQ ID NO: 1441859 - RNA, 19 nt, Human
uccuugugaugugcacgua

SEQ ID NO: 1441860 - RNA, 20 nt, Human
uccuugugaugugcacguaa

SEQ ID NO: 1441861 - RNA, 17 nt, Human
uccuugugaugugcacg

SEQ ID NO: 1441862 - RNA, 13 nt, Human
uccuugucacugg

SEQ ID NO: 1441863 - RNA, 16 nt, Human
uccuucugagcuccug

SEQ ID NO: 1441864 - RNA, 24 nt, Human
uccuucugagcccgguaagagcaa

SEQ ID NO: 1441865 - RNA, 18 nt, Human
uccuucugagcuccuguc

SEQ ID NO: 1441866 - RNA, 15 nt, Human
uccuuuaauuguaaa

SEQ ID NO: 1441867 - RNA, 13 nt, Human
uccuuuaauugua

SEQ ID NO: 1441868 - RNA, 11 nt, Human
uccuuuaacaa

SEQ ID NO: 1441869 - RNA, 21 nt, Human
uccuuguuguuucuugccuga

SEQ ID NO: 1441870 - RNA, 14 nt, Human
uccuuguguuacua

SEQ ID NO: 1441871 - RNA, 23 nt, Human
uccuuguguuacuaaguuuuuau

SEQ ID NO: 1441872 - RNA, 22 nt, Human
uccuucccagaggggccugcca

SEQ ID NO: 1441873 - RNA, 12 nt, Human
uccuucccagag

SEQ ID NO: 1441874 - RNA, 10 nt, Human
uccuucccaa

SEQ ID NO: 1441875 - RNA, 24 nt, Human
uccuuccagugucauuucucaucc

SEQ ID NO: 1441876 - RNA, 22 nt, Human
uccuuccagcuagugacccaca

SEQ ID NO: 1441877 - RNA, 16 nt, Human
uccuuccagcuaguga

SEQ ID NO: 1441878 - RNA, 20 nt, Human
uccuuccaaugucuggagac

SEQ ID NO: 1441879 - RNA, 15 nt, Human
uccuuccaccaaguu

SEQ ID NO: 1441880 - RNA, 22 nt, Human
acuggccucaaagcaagcauuc

SEQ ID NO: 1441881 - RNA, 15 nt, Human
acuggccucaaagca

SEQ ID NO: 1441882 - RNA, 17 nt, Human
acuggccucaaagcaag

SEQ ID NO: 1441883 - RNA, 11 nt, Human
acuggccaggg

SEQ ID NO: 1441884 - RNA, 15 nt, Human
acuggccauggccug

SEQ ID NO: 1441885 - RNA, 22 nt, Human
acuggccagggccacgcuccag

SEQ ID NO: 1441886 - RNA, 16 nt, Human
acuggccauggccugc

SEQ ID NO: 1441887 - RNA, 21 nt, Human
acuggccauggccugcaaacu

SEQ ID NO: 1441888 - RNA, 12 nt, Human
acuggccccacc

SEQ ID NO: 1441889 - RNA, 13 nt, Human
acuggccccaccc

SEQ ID NO: 1441890 - RNA, 17 nt, Human
acuucggggcugggaag

SEQ ID NO: 1441891 - RNA, 21 nt, Human
acuucuauuuuaaagacaaug

SEQ ID NO: 1441892 - RNA, 14 nt, Human
acuucuaauugcca

SEQ ID NO: 1441893 - RNA, 17 nt, Human
acuucuaauugccaugu

SEQ ID NO: 1441894 - RNA, 19 nt, Human
acuucucauuuuuuaaaaa

SEQ ID NO: 1441895 - RNA, 21 nt, Human
acuucucaggacacaggccug

SEQ ID NO: 1441896 - RNA, 22 nt, Human
acuucucaggacacaggccugu

SEQ ID NO: 1441897 - RNA, 20 nt, Human
acuucucaggacacaggccu

SEQ ID NO: 1441898 - RNA, 18 nt, Human
acuucucaggacacaggc

SEQ ID NO: 1441899 - RNA, 17 nt, Human
acuucucaggacacagg

SEQ ID NO: 1441900 - RNA, 17 nt, Human
acuucucacuaauuugu

SEQ ID NO: 1441901 - RNA, 21 nt, Human
acuucgacacuguucuuagcu

SEQ ID NO: 1441902 - RNA, 23 nt, Human
acuucgacacuguucuuagcuca

SEQ ID NO: 1441903 - RNA, 16 nt, Human
acuucgacacuguucu

SEQ ID NO: 1441904 - RNA, 14 nt, Human
acuucgacacuguu

SEQ ID NO: 1441905 - RNA, 23 nt, Human
acuuccuguccagcuccaaccug

SEQ ID NO: 1441906 - RNA, 22 nt, Human
acuuccuguccagcuccaaccu

SEQ ID NO: 1441907 - RNA, 18 nt, Human
acuuccuguccagcucca

SEQ ID NO: 1441908 - RNA, 16 nt, Human
ucucacuauaccagua

SEQ ID NO: 1441909 - RNA, 16 nt, Human
ucuauuucugccuccc

SEQ ID NO: 1441910 - RNA, 20 nt, Human
ucuauuucuccuccauggga

SEQ ID NO: 1441911 - RNA, 16 nt, Human
ucuauuucuccuccau

SEQ ID NO: 1441912 - RNA, 15 nt, Human
ucuauuucuccucca

SEQ ID NO: 1441913 - RNA, 14 nt, Human
ucuauuucuccucc

SEQ ID NO: 1441914 - RNA, 14 nt, Human
ucuauuucauguuu

SEQ ID NO: 1441915 - RNA, 16 nt, Human
ucuauuucauguuuuu

SEQ ID NO: 1441916 - RNA, 14 nt, Human
ucuauuucacugga

SEQ ID NO: 1441917 - RNA, 17 nt, Human
ucuauuucacuggagca

SEQ ID NO: 1441918 - RNA, 22 nt, Human
ucucacggccacacagcugccg

SEQ ID NO: 1441919 - RNA, 21 nt, Human
ucucacggccacacagcugcc

SEQ ID NO: 1441920 - RNA, 20 nt, Human
ucucacggccacacagcugc

SEQ ID NO: 1441921 - RNA, 21 nt, Human
ucucaccuggcccugcuuccu

SEQ ID NO: 1441922 - RNA, 19 nt, Human
ucucaccuggcccugcuuc

SEQ ID NO: 1441923 - RNA, 16 nt, Human
ucucaccuggcccugc

SEQ ID NO: 1441924 - RNA, 14 nt, Human
ucucaccuggcccu

SEQ ID NO: 1441925 - RNA, 12 nt, Human
ucucaccuggcc

SEQ ID NO: 1441926 - RNA, 24 nt, Human
ucucaccuggacuuaagcaucugg

SEQ ID NO: 1441927 - RNA, 13 nt, Human
ucucaccuggacu

SEQ ID NO: 1441928 - RNA, 14 nt, Human
ucucacuaaaucuu

SEQ ID NO: 1441929 - RNA, 19 nt, Human
ucucacacuggucugcugu

SEQ ID NO: 1441930 - RNA, 21 nt, Human
ucucaccucuagguccccaua

SEQ ID NO: 1441931 - RNA, 14 nt, Human
ucucaccucuaggu

SEQ ID NO: 1441932 - RNA, 21 nt, Human
ucucacagcuccaagaauuuc

SEQ ID NO: 1441933 - RNA, 20 nt, Human
acuucucauuuuuuaaaaaa

SEQ ID NO: 1441934 - RNA, 22 nt, Human
acuugaagggccagagccaggg

SEQ ID NO: 1441935 - RNA, 21 nt, Human
acuugaagggccagagccagg

SEQ ID NO: 1441936 - RNA, 20 nt, Human
acuugaagggccagagccag

SEQ ID NO: 1441937 - RNA, 19 nt, Human
acuugaagggccagagcca

SEQ ID NO: 1441938 - RNA, 18 nt, Human
acuugaagggccagagcc

SEQ ID NO: 1441939 - RNA, 17 nt, Human
acuugaagggccagagc

SEQ ID NO: 1441940 - RNA, 15 nt, Human
acuugaagggccaga

SEQ ID NO: 1441941 - RNA, 21 nt, Human
acuugagaccuaaucucugua

SEQ ID NO: 1441942 - RNA, 24 nt, Human
acuugaaugcuaguuauacuuauu

SEQ ID NO: 1441943 - RNA, 20 nt, Human
acuugaaugaaaauguccau

SEQ ID NO: 1441944 - RNA, 13 nt, Human
acuugaaugaaaa

SEQ ID NO: 1441945 - RNA, 12 nt, Human
acuugagcaugu

SEQ ID NO: 1441946 - RNA, 14 nt, Human
acuugagaccuaau

SEQ ID NO: 1441947 - RNA, 11 nt, Human
acuugaggaca

SEQ ID NO: 1441948 - RNA, 12 nt, Human
acuugaggacac

SEQ ID NO: 1441949 - RNA, 13 nt, Human
acuugaggacaca

SEQ ID NO: 1441950 - RNA, 14 nt, Human
acuugaggacacau

SEQ ID NO: 1441951 - RNA, 23 nt, Human
acuugucauuguuauauaaucau

SEQ ID NO: 1441952 - RNA, 21 nt, Human
acuugucaggaguguguguga

SEQ ID NO: 1441953 - RNA, 13 nt, Human
acuugucauguga

SEQ ID NO: 1441954 - RNA, 19 nt, Human
acuugucaggagugugugu

SEQ ID NO: 1441955 - RNA, 21 nt, Human
acuuggcucgaaucucugugc

SEQ ID NO: 1441956 - RNA, 20 nt, Human
acuuggcucgaaucucugug

SEQ ID NO: 1441957 - RNA, 19 nt, Human
acuuggcucgaaucucugu

SEQ ID NO: 1441958 - RNA, 18 nt, Human
acuuggcucgaaucucug

SEQ ID NO: 1441959 - RNA, 19 nt, Human
acuuggcucacacucgaca

SEQ ID NO: 1441960 - RNA, 16 nt, Human
acuugucaauaaaauc

SEQ ID NO: 1441961 - RNA, 24 nt, Human
acuugucauuguuauauaaucauu

SEQ ID NO: 1441962 - RNA, 23 nt, Human
acuugucccgggacaccuaggcu

SEQ ID NO: 1441963 - RNA, 20 nt, Human
acuugcucagguacuuguaa

SEQ ID NO: 1441964 - RNA, 22 nt, Human
acuugcucagguacuuguaaau

SEQ ID NO: 1441965 - RNA, 20 nt, Human
acuugcgguuccggcaugga

SEQ ID NO: 1441966 - RNA, 22 nt, Human
acuugcgagaaauucguguguu

SEQ ID NO: 1441967 - RNA, 17 nt, Human
acuugcgagaaauucgu

SEQ ID NO: 1441968 - RNA, 21 nt, Human
acuugccugccuuuccaucca

SEQ ID NO: 1441969 - RNA, 18 nt, Human
acuugccugccuuuccau

SEQ ID NO: 1441970 - RNA, 14 nt, Human
acuugccugccuuu

SEQ ID NO: 1441971 - RNA, 13 nt, Human
acuugccugccuu

SEQ ID NO: 1441972 - RNA, 17 nt, Human
acuugccucuuccuuga

SEQ ID NO: 1441973 - RNA, 13 nt, Human
acuugccucuucc

SEQ ID NO: 1441974 - RNA, 15 nt, Human
acuugaggacacaug

SEQ ID NO: 1441975 - RNA, 16 nt, Human
acuugaggacacaugu

SEQ ID NO: 1441976 - RNA, 15 nt, Human
acuuggccucucucu

SEQ ID NO: 1441977 - RNA, 17 nt, Human
acuuggcagccuuguga

SEQ ID NO: 1441978 - RNA, 15 nt, Human
acuuggcagccuugu

SEQ ID NO: 1441979 - RNA, 14 nt, Human
acuuggcagccuug

SEQ ID NO: 1441980 - RNA, 13 nt, Human
acuuggcagccuu

SEQ ID NO: 1441981 - RNA, 20 nt, Human
acuuggauuuaguuucagua

SEQ ID NO: 1441982 - RNA, 22 nt, Human
acuuggauucuuuccauuugca

SEQ ID NO: 1441983 - RNA, 18 nt, Human
acuuggauucuuuccauu

SEQ ID NO: 1441984 - RNA, 17 nt, Human
acuuggauucuuuccau

SEQ ID NO: 1441985 - RNA, 16 nt, Human
acuuggauucuuucca

SEQ ID NO: 1441986 - RNA, 18 nt, Human
acuuggauacuuggauuu

SEQ ID NO: 1441987 - RNA, 17 nt, Human
acuuggaguggagagga

SEQ ID NO: 1441988 - RNA, 14 nt, Human
acuugcucuugaug

SEQ ID NO: 1441989 - RNA, 23 nt, Human
ucucccagauaaugugaaaaugg

SEQ ID NO: 1441990 - RNA, 21 nt, Human
ucucccagauaaugugaaaau

SEQ ID NO: 1441991 - RNA, 18 nt, Human
ucucccagauaaugugaa

SEQ ID NO: 1441992 - RNA, 16 nt, Human
ucucccagauaaugug

SEQ ID NO: 1441993 - RNA, 16 nt, Human
ucucccacucuccuag

SEQ ID NO: 1441994 - RNA, 15 nt, Human
ucucccacucuccua

SEQ ID NO: 1441995 - RNA, 14 nt, Human
ucucccacucuccu

SEQ ID NO: 1441996 - RNA, 19 nt, Human
ucucccacuagacaagucc

SEQ ID NO: 1441997 - RNA, 19 nt, Human
ucucccacccucuuccuac

SEQ ID NO: 1441998 - RNA, 14 nt, Human
ucucccaccuagca

SEQ ID NO: 1441999 - RNA, 20 nt, Human
ucucccacccucuuccuacu

SEQ ID NO: 1442000 - RNA, 17 nt, Human
ucucccacccucuuccu

SEQ ID NO: 1442001 - RNA, 16 nt, Human
ucucccacccucuucc

SEQ ID NO: 1442002 - RNA, 15 nt, Human
ucucccacccucuuc

SEQ ID NO: 1442003 - RNA, 14 nt, Human
ucucccacccucuu

SEQ ID NO: 1442004 - RNA, 13 nt, Human
ucucccacccucu

SEQ ID NO: 1442005 - RNA, 12 nt, Human
ucucccacccuc

SEQ ID NO: 1442006 - RNA, 16 nt, Human
ucuccauucugcuccu

SEQ ID NO: 1442007 - RNA, 15 nt, Human
ucuccauucugcucc

SEQ ID NO: 1442008 - RNA, 20 nt, Human
ucuccauggcccugccaugc

SEQ ID NO: 1442009 - RNA, 24 nt, Human
ucuccauggcccugccaugcucuc

SEQ ID NO: 1442010 - RNA, 14 nt, Human
ucuccauggcccug

SEQ ID NO: 1442011 - RNA, 18 nt, Human
ucuccauggcccugcaaa

SEQ ID NO: 1442012 - RNA, 15 nt, Human
ucuccauggcccugc

SEQ ID NO: 1442013 - RNA, 16 nt, Human
ucuccauggcccugcc

SEQ ID NO: 1442014 - RNA, 17 nt, Human
ucuccauggcccugcca

SEQ ID NO: 1442015 - RNA, 23 nt, Human
ucucccauuuuggaauuugccug

SEQ ID NO: 1442016 - RNA, 13 nt, Human
ucucccaguuguc

SEQ ID NO: 1442017 - RNA, 21 nt, Human
ucuccuaggcauucuggaccu

SEQ ID NO: 1442018 - RNA, 23 nt, Human
ucuccuaggcauucuggaccucu

SEQ ID NO: 1442019 - RNA, 19 nt, Human
ucuccuaggcauucuggac

SEQ ID NO: 1442020 - RNA, 15 nt, Human
ucuccuaggcauucu

SEQ ID NO: 1442021 - RNA, 14 nt, Human
ucuccuagccccug

SEQ ID NO: 1442022 - RNA, 23 nt, Human
ucuccuaagcaccuguaaugugc

SEQ ID NO: 1442023 - RNA, 21 nt, Human
ucuccguuagcuccuguggcc

SEQ ID NO: 1442024 - RNA, 23 nt, Human
ucuccguuagcuccuguggcccc

SEQ ID NO: 1442025 - RNA, 22 nt, Human
ucuccguuagcuccuguggccc

SEQ ID NO: 1442026 - RNA, 19 nt, Human
ucuccuaagcuggagugca

SEQ ID NO: 1442027 - RNA, 19 nt, Human
acuuuaauuaccaaccugu

SEQ ID NO: 1442028 - RNA, 23 nt, Human
acuuuaacauaagcuauuuuucu

SEQ ID NO: 1442029 - RNA, 19 nt, Human
acuuuaacauaagcuauuu

SEQ ID NO: 1442030 - RNA, 18 nt, Human
acuuuaacauaagcuauu

SEQ ID NO: 1442031 - RNA, 16 nt, Human
acuuuaacauaagcua

SEQ ID NO: 1442032 - RNA, 14 nt, Human
acuuuaacauaagc

SEQ ID NO: 1442033 - RNA, 13 nt, Human
acuuuaaauugug

SEQ ID NO: 1442034 - RNA, 12 nt, Human
acuuuaaagcgu

SEQ ID NO: 1442035 - RNA, 17 nt, Human
acuuucucaguuuucau

SEQ ID NO: 1442036 - RNA, 14 nt, Human
acuuucucaguuuu

SEQ ID NO: 1442037 - RNA, 13 nt, Human
acuuucucaguuu

SEQ ID NO: 1442038 - RNA, 17 nt, Human
acuuucuauccucugua

SEQ ID NO: 1442039 - RNA, 12 nt, Human
ucuccucccagg

SEQ ID NO: 1442040 - RNA, 20 nt, Human
ucuccuccaugggagaaaau

SEQ ID NO: 1442041 - RNA, 16 nt, Human
acuuguguuuugcaag

SEQ ID NO: 1442042 - RNA, 19 nt, Human
ucuccauccacaugggagc

SEQ ID NO: 1442043 - RNA, 13 nt, Human
ucuccauccacau

SEQ ID NO: 1442044 - RNA, 18 nt, Human
ucuccaguggauucccag

SEQ ID NO: 1442045 - RNA, 15 nt, Human
ucuccagugcaccug

SEQ ID NO: 1442046 - RNA, 19 nt, Human
ucuccaguauccacuuugc

SEQ ID NO: 1442047 - RNA, 23 nt, Human
ucuccaggggcugcuuccuccug

SEQ ID NO: 1442048 - RNA, 22 nt, Human
ucuccaggggcugcuuccuccu

SEQ ID NO: 1442049 - RNA, 20 nt, Human
ucuccaggggcugcuuccuc

SEQ ID NO: 1442050 - RNA, 18 nt, Human
ucuccaggggcugcuucc

SEQ ID NO: 1442051 - RNA, 17 nt, Human
ucuccaggggcugcuuc

SEQ ID NO: 1442052 - RNA, 19 nt, Human
ucuccaagcagcuuagagu

SEQ ID NO: 1442053 - RNA, 13 nt, Human
ucuccaagcagcu

SEQ ID NO: 1442054 - RNA, 21 nt, Human
ucuccaacaucacagcccagc

SEQ ID NO: 1442055 - RNA, 19 nt, Human
ucuccaacaucacagccca

SEQ ID NO: 1442056 - RNA, 17 nt, Human
ucuccaacaucacagcc

SEQ ID NO: 1442057 - RNA, 24 nt, Human
ucucauuggaaauuuagcauugua

SEQ ID NO: 1442058 - RNA, 23 nt, Human
ucuccaaacugaagcagccucuc

SEQ ID NO: 1442059 - RNA, 20 nt, Human
ucuccaacaucacagcccag

SEQ ID NO: 1442060 - RNA, 20 nt, Human
ucucauuggacccuuccaug

SEQ ID NO: 1442061 - RNA, 22 nt, Human
ucuccaaacugaagcagccucu

SEQ ID NO: 1442062 - RNA, 14 nt, Human
ucuccaaaccacuu

SEQ ID NO: 1442063 - RNA, 22 nt, Human
ucuccaaaauaaaacuuuuuaa

SEQ ID NO: 1442064 - RNA, 17 nt, Human
ucuccaaaauaaaacuu

SEQ ID NO: 1442065 - RNA, 19 nt, Human
ucuccaaaauaaaacuuuu

SEQ ID NO: 1442066 - RNA, 19 nt, Human
ucucauuggacccuuccau

SEQ ID NO: 1442067 - RNA, 23 nt, Human
ucucauuggaaauuuagcauugu

SEQ ID NO: 1442068 - RNA, 21 nt, Human
ucucauuggaaauuuagcauu

SEQ ID NO: 1442069 - RNA, 20 nt, Human
ucucauuggaaauuuagcau

SEQ ID NO: 1442070 - RNA, 19 nt, Human
ucucauuggaaauuuagca

SEQ ID NO: 1442071 - RNA, 17 nt, Human
ucucauuggaaauuuag

SEQ ID NO: 1442072 - RNA, 14 nt, Human
ucucauuggaaauu

SEQ ID NO: 1442073 - RNA, 15 nt, Human
ucucauugcuuacaa

SEQ ID NO: 1442074 - RNA, 20 nt, Human
ucucauuaaaagaauaucug

SEQ ID NO: 1442075 - RNA, 16 nt, Human
ucucauuaaaagaaua

SEQ ID NO: 1442076 - RNA, 15 nt, Human
ucucauuaaaagaau

SEQ ID NO: 1442077 - RNA, 17 nt, Human
ucucagggccaggccuc

SEQ ID NO: 1442078 - RNA, 14 nt, Human
ucucagggccaggc

SEQ ID NO: 1442079 - RNA, 17 nt, Human
ucucaggcugccugagu

SEQ ID NO: 1442080 - RNA, 16 nt, Human
ucucaggcugccugag

SEQ ID NO: 1442081 - RNA, 15 nt, Human
ucucaggcugccuga

SEQ ID NO: 1442082 - RNA, 14 nt, Human
ucucaggcugccug

SEQ ID NO: 1442083 - RNA, 13 nt, Human
ucucaggcugccu

SEQ ID NO: 1442084 - RNA, 21 nt, Human
ucucagcuccagguggcucug

SEQ ID NO: 1442085 - RNA, 16 nt, Human
ucucagcuccaggugg

SEQ ID NO: 1442086 - RNA, 15 nt, Human
ucucagcuaagcuca

SEQ ID NO: 1442087 - RNA, 18 nt, Human
ucucagcucacugcaacc

SEQ ID NO: 1442088 - RNA, 15 nt, Human
ucucagcucacugca

SEQ ID NO: 1442089 - RNA, 16 nt, Human
ucucagcucacugcaa

SEQ ID NO: 1442090 - RNA, 12 nt, Human
ucucuugccuca

SEQ ID NO: 1442091 - RNA, 15 nt, Human
ucucuugaguuuguc

SEQ ID NO: 1442092 - RNA, 14 nt, Human
ucucuugaguuugu

SEQ ID NO: 1442093 - RNA, 23 nt, Human
ucucuugggaacugaacucacuu

SEQ ID NO: 1442094 - RNA, 16 nt, Human
ucucuugggaacugaa

SEQ ID NO: 1442095 - RNA, 13 nt, Human
ucucuugccucaa

SEQ ID NO: 1442096 - RNA, 21 nt, Human
ucucuugccucaaccucccaa

SEQ ID NO: 1442097 - RNA, 18 nt, Human
ucucuuuaaaaggaaaga

SEQ ID NO: 1442098 - RNA, 19 nt, Human
ucucuuuaaaaggaaagaa

SEQ ID NO: 1442099 - RNA, 21 nt, Human
ucucuuuaaaaggaaagaaaa

SEQ ID NO: 1442100 - RNA, 15 nt, Human
agaaaaacaggcacu

SEQ ID NO: 1442101 - RNA, 14 nt, Human
agaaacuuccaaau

SEQ ID NO: 1442102 - RNA, 21 nt, Human
agaaacgucuucuaaacuucc

SEQ ID NO: 1442103 - RNA, 18 nt, Human
agaaacgucuucuaaacu

SEQ ID NO: 1442104 - RNA, 16 nt, Human
agaaacgucuucuaaa

SEQ ID NO: 1442105 - RNA, 15 nt, Human
agaaacgucuucuaa

SEQ ID NO: 1442106 - RNA, 18 nt, Human
agaaaccuuuuuaaaaau

SEQ ID NO: 1442107 - RNA, 19 nt, Human
agaaacaguugguaacuuu

SEQ ID NO: 1442108 - RNA, 18 nt, Human
agaaacaguugguaacuu

SEQ ID NO: 1442109 - RNA, 17 nt, Human
agaaacaguugguaacu

SEQ ID NO: 1442110 - RNA, 13 nt, Human
agaaacacucaag

SEQ ID NO: 1442111 - RNA, 23 nt, Human
agaaacacguaucccaccugaca

SEQ ID NO: 1442112 - RNA, 14 nt, Human
agaaaaagaagcaa

SEQ ID NO: 1442113 - RNA, 17 nt, Human
agaaaaaggaugcacag

SEQ ID NO: 1442114 - RNA, 21 nt, Human
agaaaacuuguauuaugugug

SEQ ID NO: 1442115 - RNA, 18 nt, Human
agaaaaaggaugcacaga

SEQ ID NO: 1442116 - RNA, 15 nt, Human
ucucuccagcugacu

SEQ ID NO: 1442117 - RNA, 19 nt, Human
ucucuccacuuucagcugu

SEQ ID NO: 1442118 - RNA, 18 nt, Human
ucucuccacuuucagcug

SEQ ID NO: 1442119 - RNA, 14 nt, Human
ucucuccuguaccu

SEQ ID NO: 1442120 - RNA, 16 nt, Human
ucucuccuguaccucu

SEQ ID NO: 1442121 - RNA, 17 nt, Human
ucucuccuguaccucuu

SEQ ID NO: 1442122 - RNA, 19 nt, Human
ucucuggaauuugaaacac

SEQ ID NO: 1442123 - RNA, 15 nt, Human
ucucuggaauuugaa

SEQ ID NO: 1442124 - RNA, 17 nt, Human
ucucuccacuuucagcu

SEQ ID NO: 1442125 - RNA, 16 nt, Human
ucucuccacuuucagc

SEQ ID NO: 1442126 - RNA, 16 nt, Human
ucucucauugucugug

SEQ ID NO: 1442127 - RNA, 22 nt, Human
ucucucaugaaccucaagcugc

SEQ ID NO: 1442128 - RNA, 17 nt, Human
ucucucaugaaccucaa

SEQ ID NO: 1442129 - RNA, 15 nt, Human
ucucucaugaaccuc

SEQ ID NO: 1442130 - RNA, 12 nt, Human
ucucucaugaac

SEQ ID NO: 1442131 - RNA, 16 nt, Human
ucucucagggccaggc

SEQ ID NO: 1442132 - RNA, 23 nt, Human
ucucucacucccucccuuucuau

SEQ ID NO: 1442133 - RNA, 13 nt, Human
ucucucaggugaa

SEQ ID NO: 1442134 - RNA, 12 nt, Human
ucucucagguga

SEQ ID NO: 1442135 - RNA, 15 nt, Human
ucucucauacccucc

SEQ ID NO: 1442136 - RNA, 18 nt, Human
acuuucucaguuuucaua

SEQ ID NO: 1442137 - RNA, 22 nt, Human
ucucucaacaccaugauuccuu

SEQ ID NO: 1442138 - RNA, 18 nt, Human
acuuugaccucugcagca

SEQ ID NO: 1442139 - RNA, 15 nt, Human
acuuugaccucugca

SEQ ID NO: 1442140 - RNA, 16 nt, Human
acuuugaccucugcag

SEQ ID NO: 1442141 - RNA, 21 nt, Human
ucucucacuuguuuuauuuaa

SEQ ID NO: 1442142 - RNA, 17 nt, Human
ucucucacuuguuuuau

SEQ ID NO: 1442143 - RNA, 19 nt, Human
ucugaauuuuuaaacaagu

SEQ ID NO: 1442144 - RNA, 17 nt, Human
ucugaauuuuuaaacaa

SEQ ID NO: 1442145 - RNA, 16 nt, Human
ucugaauuuuuaaaca

SEQ ID NO: 1442146 - RNA, 15 nt, Human
ucugaauuuuuaaac

SEQ ID NO: 1442147 - RNA, 17 nt, Human
ucugaagcccucccagg

SEQ ID NO: 1442148 - RNA, 16 nt, Human
ucugaagcccucccag

SEQ ID NO: 1442149 - RNA, 17 nt, Human
agaaaucauuuugcaau

SEQ ID NO: 1442150 - RNA, 12 nt, Human
ucugaagaagau

SEQ ID NO: 1442151 - RNA, 18 nt, Human
agaaaugaaaaaauauau

SEQ ID NO: 1442152 - RNA, 23 nt, Human
agaaaugaaaaaauauauaucaa

SEQ ID NO: 1442153 - RNA, 18 nt, Human
agaaaggaagcauuguaa

SEQ ID NO: 1442154 - RNA, 17 nt, Human
agaaaggaagcauugua

SEQ ID NO: 1442155 - RNA, 15 nt, Human
agaaaggaagcauug

SEQ ID NO: 1442156 - RNA, 18 nt, Human
agaaaggaaaaacaaacu

SEQ ID NO: 1442157 - RNA, 13 nt, Human
agaaagcugccug

SEQ ID NO: 1442158 - RNA, 23 nt, Human
agaaagcugacuuggcuggugug

SEQ ID NO: 1442159 - RNA, 22 nt, Human
agaaagcugacuuggcuggugu

SEQ ID NO: 1442160 - RNA, 21 nt, Human
agaaagcugacuuggcuggug

SEQ ID NO: 1442161 - RNA, 20 nt, Human
agaaagcugacuuggcuggu

SEQ ID NO: 1442162 - RNA, 17 nt, Human
agaaagcugacuuggcu

SEQ ID NO: 1442163 - RNA, 16 nt, Human
agaaagcugacuuggc

SEQ ID NO: 1442164 - RNA, 15 nt, Human
agaaagcugacuugg

SEQ ID NO: 1442165 - RNA, 13 nt, Human
agaaagcugacuu

SEQ ID NO: 1442166 - RNA, 11 nt, Human
agaaagcucaa

SEQ ID NO: 1442167 - RNA, 15 nt, Human
agaaagccuucuuuu

SEQ ID NO: 1442168 - RNA, 13 nt, Human
agaaagccuucuu

SEQ ID NO: 1442169 - RNA, 19 nt, Human
agaaacuuccaaauccccu

SEQ ID NO: 1442170 - RNA, 21 nt, Human
agaaagccugggugacauuug

SEQ ID NO: 1442171 - RNA, 20 nt, Human
agaaagccugggugacauuu

SEQ ID NO: 1442172 - RNA, 19 nt, Human
agaaagccugggugacauu

SEQ ID NO: 1442173 - RNA, 19 nt, Human
agaaacuuuuuuauuuaaa

SEQ ID NO: 1442174 - RNA, 15 nt, Human
agaaacuuuuuuauu

SEQ ID NO: 1442175 - RNA, 15 nt, Human
agaaacuuucuuucu

SEQ ID NO: 1442176 - RNA, 14 nt, Human
agaaaucauagcug

SEQ ID NO: 1442177 - RNA, 12 nt, Human
agaaaucuaaaa

SEQ ID NO: 1442178 - RNA, 22 nt, Human
agaaaucauuuugcaaucccuu

SEQ ID NO: 1442179 - RNA, 15 nt, Human
agaaaucuaaaaaac

SEQ ID NO: 1442180 - RNA, 17 nt, Human
agaaaugaaaaaauaua

SEQ ID NO: 1442181 - RNA, 14 nt, Human
ucugcagccucaga

SEQ ID NO: 1442182 - RNA, 13 nt, Human
ucugcagccucag

SEQ ID NO: 1442183 - RNA, 11 nt, Human
ucugcagccuc

SEQ ID NO: 1442184 - RNA, 15 nt, Human
ucugcaggucccuaa

SEQ ID NO: 1442185 - RNA, 16 nt, Human
ucugcaggucccuaau

SEQ ID NO: 1442186 - RNA, 17 nt, Human
ucugcaggucccuaaua

SEQ ID NO: 1442187 - RNA, 18 nt, Human
ucugcaggucccuaauaa

SEQ ID NO: 1442188 - RNA, 13 nt, Human
agaaauuaugugc

SEQ ID NO: 1442189 - RNA, 21 nt, Human
agaaauuaugugccagauuua

SEQ ID NO: 1442190 - RNA, 22 nt, Human
agaaauuaugugccagauuuau

SEQ ID NO: 1442191 - RNA, 16 nt, Human
agaaauuuauaaacuu

SEQ ID NO: 1442192 - RNA, 17 nt, Human
agaaauuuauaaacuuu

SEQ ID NO: 1442193 - RNA, 17 nt, Human
ucugaguuccugcaugc

SEQ ID NO: 1442194 - RNA, 23 nt, Human
ucugaguguuuuaugagaaagcc

SEQ ID NO: 1442195 - RNA, 20 nt, Human
ucugagagaggccauucuuu

SEQ ID NO: 1442196 - RNA, 14 nt, Human
ucugagagaggcca

SEQ ID NO: 1442197 - RNA, 14 nt, Human
ucugaccuuaaaug

SEQ ID NO: 1442198 - RNA, 19 nt, Human
ucugauuaaaaugcuuccu

SEQ ID NO: 1442199 - RNA, 16 nt, Human
ucugaugcagcuuaua

SEQ ID NO: 1442200 - RNA, 17 nt, Human
ucugaugcagcuuauac

SEQ ID NO: 1442201 - RNA, 13 nt, Human
ucugaugcagcuu

SEQ ID NO: 1442202 - RNA, 20 nt, Human
ucugaguuuuguguuuguug

SEQ ID NO: 1442203 - RNA, 14 nt, Human
ucugaguuuugugu

SEQ ID NO: 1442204 - RNA, 15 nt, Human
ucugauaaugaaaau

SEQ ID NO: 1442205 - RNA, 19 nt, Human
ucugauaagagaaucaaca

SEQ ID NO: 1442206 - RNA, 13 nt, Human
ucugauacagaaa

SEQ ID NO: 1442207 - RNA, 13 nt, Human
ucuuucuuccaaa

SEQ ID NO: 1442208 - RNA, 19 nt, Human
ucuuucuggcuaugcauuu

SEQ ID NO: 1442209 - RNA, 15 nt, Human
ucuuucuuagaaauu

SEQ ID NO: 1442210 - RNA, 16 nt, Human
ucuuucuuagaaauuu

SEQ ID NO: 1442211 - RNA, 18 nt, Human
ucuuucuggcuaugcauu

SEQ ID NO: 1442212 - RNA, 16 nt, Human
ucuuuauacagcugua

SEQ ID NO: 1442213 - RNA, 15 nt, Human
ucuuuauacagcugu

SEQ ID NO: 1442214 - RNA, 14 nt, Human
ucuuuauacagcug

SEQ ID NO: 1442215 - RNA, 19 nt, Human
ucuuuauaagaaagccuga

SEQ ID NO: 1442216 - RNA, 17 nt, Human
ucuuuauaagaaagccu

SEQ ID NO: 1442217 - RNA, 16 nt, Human
ucuuuauaagaaagcc

SEQ ID NO: 1442218 - RNA, 15 nt, Human
ucuuuauaagaaagc

SEQ ID NO: 1442219 - RNA, 14 nt, Human
ucuuuauaagaaag

SEQ ID NO: 1442220 - RNA, 21 nt, Human
agacuccuucaacaauucuaa

SEQ ID NO: 1442221 - RNA, 17 nt, Human
agacuccuucaacaauu

SEQ ID NO: 1442222 - RNA, 19 nt, Human
ucuuucuuagaaauuuauu

SEQ ID NO: 1442223 - RNA, 22 nt, Human
ucuugauaccccccucugucuu

SEQ ID NO: 1442224 - RNA, 21 nt, Human
ucuugauaccccccucugucu

SEQ ID NO: 1442225 - RNA, 20 nt, Human
ucuugauaccccccucuguc

SEQ ID NO: 1442226 - RNA, 17 nt, Human
ucuugauaccccccucu

SEQ ID NO: 1442227 - RNA, 17 nt, Human
ucuugaucaguuaagaa

SEQ ID NO: 1442228 - RNA, 16 nt, Human
ucuugaucaguuaaga

SEQ ID NO: 1442229 - RNA, 19 nt, Human
ucuugguugaaaauaaaaa

SEQ ID NO: 1442230 - RNA, 15 nt, Human
ucuugguugaggaaa

SEQ ID NO: 1442231 - RNA, 13 nt, Human
ucuugguugagga

SEQ ID NO: 1442232 - RNA, 23 nt, Human
ucuugguugaaaauaaaaagauc

SEQ ID NO: 1442233 - RNA, 14 nt, Human
ucuugguuuguaaa

SEQ ID NO: 1442234 - RNA, 20 nt, Human
ucuugguuuucccuuugccu

SEQ ID NO: 1442235 - RNA, 16 nt, Human
ucuugguuuguaaauu

SEQ ID NO: 1442236 - RNA, 14 nt, Human
ucuuuaauuuuaca

SEQ ID NO: 1442237 - RNA, 13 nt, Human
ucuuuauaagaaa

SEQ ID NO: 1442238 - RNA, 12 nt, Human
ucuuuauaagaa

SEQ ID NO: 1442239 - RNA, 19 nt, Human
ucuuguaauccgaaucucu

SEQ ID NO: 1442240 - RNA, 13 nt, Human
ucuuuaauucugu

SEQ ID NO: 1442241 - RNA, 21 nt, Human
agagacaaacaccucccagga

SEQ ID NO: 1442242 - RNA, 19 nt, Human
agagacaaacaccucccag

SEQ ID NO: 1442243 - RNA, 23 nt, Human
agagaauuucuaccauuucagag

SEQ ID NO: 1442244 - RNA, 22 nt, Human
agagaauuucuaccauuucaga

SEQ ID NO: 1442245 - RNA, 14 nt, Human
agagaaaaaagcca

SEQ ID NO: 1442246 - RNA, 20 nt, Human
agagacaaacaccucccagg

SEQ ID NO: 1442247 - RNA, 22 nt, Human
agacuugguugguaggguggga

SEQ ID NO: 1442248 - RNA, 21 nt, Human
agacuugguugguaggguggg

SEQ ID NO: 1442249 - RNA, 19 nt, Human
agacuucucuuugccucaa

SEQ ID NO: 1442250 - RNA, 20 nt, Human
agacuucucuuugccucaaa

SEQ ID NO: 1442251 - RNA, 18 nt, Human
agacuucucuuugccuca

SEQ ID NO: 1442252 - RNA, 17 nt, Human
agacuucucuuugccuc

SEQ ID NO: 1442253 - RNA, 16 nt, Human
agacuucucuuugccu

SEQ ID NO: 1442254 - RNA, 17 nt, Human
agacuuuaacauaagcu

SEQ ID NO: 1442255 - RNA, 21 nt, Human
agacuuuaacauaagcuauuu

SEQ ID NO: 1442256 - RNA, 12 nt, Human
agacuuuaacau

SEQ ID NO: 1442257 - RNA, 21 nt, Human
agacuuguuggcguaggcuac

SEQ ID NO: 1442258 - RNA, 16 nt, Human
agacuuguuggcguag

SEQ ID NO: 1442259 - RNA, 11 nt, Human
agacuuguugg

SEQ ID NO: 1442260 - RNA, 15 nt, Human
agacuuuccauuaca

SEQ ID NO: 1442261 - RNA, 17 nt, Human
agacuuuauguaguuuu

SEQ ID NO: 1442262 - RNA, 22 nt, Human
agacuuuccauuacaaguauuu

SEQ ID NO: 1442263 - RNA, 16 nt, Human
agacuuuauguaguuu

SEQ ID NO: 1442264 - RNA, 16 nt, Human
agacuuagggcaccag

SEQ ID NO: 1442265 - RNA, 18 nt, Human
agacuuacucuaagaucu

SEQ ID NO: 1442266 - RNA, 16 nt, Human
agacuuacucuaagau

SEQ ID NO: 1442267 - RNA, 15 nt, Human
agacuuacucuaaga

SEQ ID NO: 1442268 - RNA, 14 nt, Human
agacuuacucuaag

SEQ ID NO: 1442269 - RNA, 23 nt, Human
agacuuacagggauaaggccugu

SEQ ID NO: 1442270 - RNA, 18 nt, Human
agacuuaagcccagugca

SEQ ID NO: 1442271 - RNA, 23 nt, Human
agacuguuuuucagggagguggc

SEQ ID NO: 1442272 - RNA, 14 nt, Human
agacuucccagcua

SEQ ID NO: 1442273 - RNA, 19 nt, Human
agacuucccacggcuccuc

SEQ ID NO: 1442274 - RNA, 17 nt, Human
agacuuagggcaccagg

SEQ ID NO: 1442275 - RNA, 18 nt, Human
agacuggguaggaaagag

SEQ ID NO: 1442276 - RNA, 22 nt, Human
agacuggguaggaaagaggaag

SEQ ID NO: 1442277 - RNA, 23 nt, Human
agacucaaauguucuaaguuucu

SEQ ID NO: 1442278 - RNA, 20 nt, Human
agacucaaauguucuaaguu

SEQ ID NO: 1442279 - RNA, 17 nt, Human
agacucaaauguucuaa

SEQ ID NO: 1442280 - RNA, 16 nt, Human
agacucaaauguucua

SEQ ID NO: 1442281 - RNA, 15 nt, Human
agacucaaauguucu

SEQ ID NO: 1442282 - RNA, 21 nt, Human
agacuauuuuuagauuuucuu

SEQ ID NO: 1442283 - RNA, 14 nt, Human
agacuauuuuuaga

SEQ ID NO: 1442284 - RNA, 15 nt, Human
agaccugaauucuuu

SEQ ID NO: 1442285 - RNA, 22 nt, Human
ucuugaguuugucgcucaugug

SEQ ID NO: 1442286 - RNA, 21 nt, Human
ucuugaguuugucgcucaugu

SEQ ID NO: 1442287 - RNA, 20 nt, Human
ucuugagccuugaacuuuga

SEQ ID NO: 1442288 - RNA, 18 nt, Human
ucuugagccuugaacuuu

SEQ ID NO: 1442289 - RNA, 19 nt, Human
ucuugagccuugaacuuug

SEQ ID NO: 1442290 - RNA, 17 nt, Human
ucuugagccuugaacuu

SEQ ID NO: 1442291 - RNA, 13 nt, Human
agaccugaagaau

SEQ ID NO: 1442292 - RNA, 18 nt, Human
agaccucugugcacuuau

SEQ ID NO: 1442293 - RNA, 19 nt, Human
agaccucuacugccuugga

SEQ ID NO: 1442294 - RNA, 20 nt, Human
agaccucagugccuuccugu

SEQ ID NO: 1442295 - RNA, 18 nt, Human
agaccucagugccuuccu

SEQ ID NO: 1442296 - RNA, 15 nt, Human
agaccucagaaguaa

SEQ ID NO: 1442297 - RNA, 14 nt, Human
agaccucagaagua

SEQ ID NO: 1442298 - RNA, 22 nt, Human
agaccuacuguucuaaagcucu

SEQ ID NO: 1442299 - RNA, 21 nt, Human
agaccuacuguucuaaagcuc

SEQ ID NO: 1442300 - RNA, 20 nt, Human
agaccuacuguucuaaagcu

SEQ ID NO: 1442301 - RNA, 17 nt, Human
agacccuaaacauccau

SEQ ID NO: 1442302 - RNA, 13 nt, Human
agaccaaaauaaa

SEQ ID NO: 1442303 - RNA, 20 nt, Human
agacauuuuaaaaaaugguc

SEQ ID NO: 1442304 - RNA, 23 nt, Human
agaccggccugccaggaggaccc

SEQ ID NO: 1442305 - RNA, 20 nt, Human
agaccggccugccaggagga

SEQ ID NO: 1442306 - RNA, 19 nt, Human
agaccggccugccaggagg

SEQ ID NO: 1442307 - RNA, 18 nt, Human
agaccggccugccaggag

SEQ ID NO: 1442308 - RNA, 17 nt, Human
agaccggccugccagga

SEQ ID NO: 1442309 - RNA, 15 nt, Human
agaccggccugccag

SEQ ID NO: 1442310 - RNA, 19 nt, Human
agacccuuuuggguuucug

SEQ ID NO: 1442311 - RNA, 17 nt, Human
agacccuuuuggguuuc

SEQ ID NO: 1442312 - RNA, 15 nt, Human
agaccgaucggcggc

SEQ ID NO: 1442313 - RNA, 20 nt, Human
ucuucugggagggcagcagg

SEQ ID NO: 1442314 - RNA, 17 nt, Human
ucuucugggagggcagc

SEQ ID NO: 1442315 - RNA, 18 nt, Human
ucuucuggacugguuuuc

SEQ ID NO: 1442316 - RNA, 20 nt, Human
ucuuauucccuuccugccag

SEQ ID NO: 1442317 - RNA, 16 nt, Human
ucuuauucauuuucuc

SEQ ID NO: 1442318 - RNA, 15 nt, Human
ucuuauucauuuucu

SEQ ID NO: 1442319 - RNA, 17 nt, Human
ucuucugaauaaagcaa

SEQ ID NO: 1442320 - RNA, 16 nt, Human
ucuucugagcacuguu

SEQ ID NO: 1442321 - RNA, 21 nt, Human
ucuucugagcuauuucaucua

SEQ ID NO: 1442322 - RNA, 19 nt, Human
ucuucugagcuauuucauc

SEQ ID NO: 1442323 - RNA, 15 nt, Human
ucuucugagcacugu

SEQ ID NO: 1442324 - RNA, 18 nt, Human
ucuucugaauaaagcaau

SEQ ID NO: 1442325 - RNA, 19 nt, Human
agacauacuugaagggcca

SEQ ID NO: 1442326 - RNA, 17 nt, Human
agacauacuugaagggc

SEQ ID NO: 1442327 - RNA, 16 nt, Human
agacauacuugaaggg

SEQ ID NO: 1442328 - RNA, 14 nt, Human
agacauacuugaag

SEQ ID NO: 1442329 - RNA, 13 nt, Human
agacauacuugaa

SEQ ID NO: 1442330 - RNA, 17 nt, Human
ucuucuugaaauuuuaa

SEQ ID NO: 1442331 - RNA, 13 nt, Human
ucuucuugaaauu

SEQ ID NO: 1442332 - RNA, 22 nt, Human
ucuucuucucguccucguuugu

SEQ ID NO: 1442333 - RNA, 14 nt, Human
ucuucuuccaggua

SEQ ID NO: 1442334 - RNA, 15 nt, Human
ucuucuucaccauuu

SEQ ID NO: 1442335 - RNA, 14 nt, Human
ucuucuucaccauu

SEQ ID NO: 1442336 - RNA, 13 nt, Human
ucuucuucaccau

SEQ ID NO: 1442337 - RNA, 12 nt, Human
ucuucuuaugca

SEQ ID NO: 1442338 - RNA, 23 nt, Human
agacaugccacaaggacuuccug

SEQ ID NO: 1442339 - RNA, 15 nt, Human
agacaugcagagauu

SEQ ID NO: 1442340 - RNA, 14 nt, Human
agacaugcagagau

SEQ ID NO: 1442341 - RNA, 22 nt, Human
agacaugauuuccuugaaugug

SEQ ID NO: 1442342 - RNA, 15 nt, Human
agacaugauuuccuu

SEQ ID NO: 1442343 - RNA, 13 nt, Human
agacaugaagcca

SEQ ID NO: 1442344 - RNA, 23 nt, Human
agacauacuugaagggccagagc

SEQ ID NO: 1442345 - RNA, 21 nt, Human
agacauacuugaagggccaga

SEQ ID NO: 1442346 - RNA, 20 nt, Human
agacauacuugaagggccag

SEQ ID NO: 1442347 - RNA, 21 nt, Human
agacauggagguucuaaggcc

SEQ ID NO: 1442348 - RNA, 20 nt, Human
agacauggagguucuaaggc

SEQ ID NO: 1442349 - RNA, 19 nt, Human
agacauggagguucuaagg

SEQ ID NO: 1442350 - RNA, 17 nt, Human
agacauggagguucuaa

SEQ ID NO: 1442351 - RNA, 16 nt, Human
agacauggagguucua

SEQ ID NO: 1442352 - RNA, 15 nt, Human
agacauggagguucu

SEQ ID NO: 1442353 - RNA, 19 nt, Human
agacauuuuaaaaaauggu

SEQ ID NO: 1442354 - RNA, 22 nt, Human
agacauuuuaaaaaauggucac

SEQ ID NO: 1442355 - RNA, 15 nt, Human
agacaguucaagaaa

SEQ ID NO: 1442356 - RNA, 14 nt, Human
agacaguucaagaa

SEQ ID NO: 1442357 - RNA, 15 nt, Human
ucuuaaugaaguuug

SEQ ID NO: 1442358 - RNA, 16 nt, Human
ucuuaaugaaguuuga

SEQ ID NO: 1442359 - RNA, 17 nt, Human
ucuuaaugaaguuugaa

SEQ ID NO: 1442360 - RNA, 18 nt, Human
ucuuaaugaaguuugaau

SEQ ID NO: 1442361 - RNA, 19 nt, Human
ucuuaaugaaguuugaaug

SEQ ID NO: 1442362 - RNA, 20 nt, Human
ucuuaaugaaguuugaaugu

SEQ ID NO: 1442363 - RNA, 19 nt, Human
ucuuacaauaauucuauga

SEQ ID NO: 1442364 - RNA, 19 nt, Human
ucuuaauugccaccucuaa

SEQ ID NO: 1442365 - RNA, 11 nt, Human
ucuuaauugcc

SEQ ID NO: 1442366 - RNA, 21 nt, Human
ucuuaaugaaguuugaauguu

SEQ ID NO: 1442367 - RNA, 22 nt, Human
ucuuaaugaaguuugaauguua

SEQ ID NO: 1442368 - RNA, 23 nt, Human
ucuuaaugaaguuugaauguuaa

SEQ ID NO: 1442369 - RNA, 19 nt, Human
agacagugauauuggaacu

SEQ ID NO: 1442370 - RNA, 13 nt, Human
agacagugauauu

SEQ ID NO: 1442371 - RNA, 23 nt, Human
ucuuagaugcaguucugaagaag

SEQ ID NO: 1442372 - RNA, 23 nt, Human
ucuuaccuguaugucuccaguau

SEQ ID NO: 1442373 - RNA, 21 nt, Human
ucuuaccuguaugucuccagu

SEQ ID NO: 1442374 - RNA, 22 nt, Human
ucuuaccagaugcuuuccuguu

SEQ ID NO: 1442375 - RNA, 13 nt, Human
ucuuacagcaggc

SEQ ID NO: 1442376 - RNA, 15 nt, Human
ucuuacuauuucaca

SEQ ID NO: 1442377 - RNA, 22 nt, Human
ucuuacugcuuaauucaaauaa

SEQ ID NO: 1442378 - RNA, 15 nt, Human
ucuuacuuggaacug

SEQ ID NO: 1442379 - RNA, 20 nt, Human
ucuuacuuauuaucuucagg

SEQ ID NO: 1442380 - RNA, 12 nt, Human
ucuuacugcuug

SEQ ID NO: 1442381 - RNA, 19 nt, Human
ucuuacugucuuuuuucua

SEQ ID NO: 1442382 - RNA, 23 nt, Human
ucuguuucaaggcacucuagauu

SEQ ID NO: 1442383 - RNA, 12 nt, Human
ucuguuucaagg

SEQ ID NO: 1442384 - RNA, 19 nt, Human
agaauucucuaguuugauu

SEQ ID NO: 1442385 - RNA, 17 nt, Human
agacacacugaagaagc

SEQ ID NO: 1442386 - RNA, 14 nt, Human
agacacaccugagg

SEQ ID NO: 1442387 - RNA, 13 nt, Human
agacacaccugag

SEQ ID NO: 1442388 - RNA, 16 nt, Human
agacacacugaagaag

SEQ ID NO: 1442389 - RNA, 22 nt, Human
agacaccuuggacauccuccuc

SEQ ID NO: 1442390 - RNA, 20 nt, Human
agacacauuuuuuaggaaau

SEQ ID NO: 1442391 - RNA, 17 nt, Human
agacacauuuuuuagga

SEQ ID NO: 1442392 - RNA, 13 nt, Human
agacacaggcccu

SEQ ID NO: 1442393 - RNA, 13 nt, Human
agacacacuuguc

SEQ ID NO: 1442394 - RNA, 17 nt, Human
agacagaagaaacaagg

SEQ ID NO: 1442395 - RNA, 16 nt, Human
agacagaagaaacaag

SEQ ID NO: 1442396 - RNA, 15 nt, Human
agacagaagaaacaa

SEQ ID NO: 1442397 - RNA, 14 nt, Human
agacagaagaaaca

SEQ ID NO: 1442398 - RNA, 12 nt, Human
agacagaagaaa

SEQ ID NO: 1442399 - RNA, 17 nt, Human
agacagaaccccuacau

SEQ ID NO: 1442400 - RNA, 13 nt, Human
agacacgcacggc

SEQ ID NO: 1442401 - RNA, 15 nt, Human
agacacgcacggcag

SEQ ID NO: 1442402 - RNA, 20 nt, Human
agacacgcacggcagccaca

SEQ ID NO: 1442403 - RNA, 21 nt, Human
agacacgcacggcagccacag

SEQ ID NO: 1442404 - RNA, 13 nt, Human
agacacuuuggaa

SEQ ID NO: 1442405 - RNA, 12 nt, Human
agacaccaaagu

SEQ ID NO: 1442406 - RNA, 22 nt, Human
agacacgcacggcagccacagc

SEQ ID NO: 1442407 - RNA, 19 nt, Human
agacagaaccacagggcua

SEQ ID NO: 1442408 - RNA, 15 nt, Human
agacagaaccacagg

SEQ ID NO: 1442409 - RNA, 18 nt, Human
agacagaacaccuaugca

SEQ ID NO: 1442410 - RNA, 14 nt, Human
agacagaacaccua

SEQ ID NO: 1442411 - RNA, 12 nt, Human
agacagaacacc

SEQ ID NO: 1442412 - RNA, 12 nt, Human
agacagaaaaaa

SEQ ID NO: 1442413 - RNA, 18 nt, Human
agaacccagcccaccccc

SEQ ID NO: 1442414 - RNA, 19 nt, Human
agaaccccuacaugaaaca

SEQ ID NO: 1442415 - RNA, 17 nt, Human
agaaccccuacaugaaa

SEQ ID NO: 1442416 - RNA, 17 nt, Human
agaacccagcccacccc

SEQ ID NO: 1442417 - RNA, 22 nt, Human
agaaauucaauuuggauuuaaa

SEQ ID NO: 1442418 - RNA, 19 nt, Human
agaaauucaauuuggauuu

SEQ ID NO: 1442419 - RNA, 13 nt, Human
agaaauuuauuuc

SEQ ID NO: 1442420 - RNA, 15 nt, Human
agaaauuuauuuccu

SEQ ID NO: 1442421 - RNA, 23 nt, Human
agaaauuuauuuccuaguucugu

SEQ ID NO: 1442422 - RNA, 19 nt, Human
agaacccagcccacccccg

SEQ ID NO: 1442423 - RNA, 14 nt, Human
agaaauuucacaua

SEQ ID NO: 1442424 - RNA, 21 nt, Human
agaauguuaagacuugacagu

SEQ ID NO: 1442425 - RNA, 19 nt, Human
agaauguuaagacuugaca

SEQ ID NO: 1442426 - RNA, 14 nt, Human
agaauguuaagacu

SEQ ID NO: 1442427 - RNA, 23 nt, Human
agaaugucauuuugguacuuugg

SEQ ID NO: 1442428 - RNA, 20 nt, Human
agaaugucauuuugguacuu

SEQ ID NO: 1442429 - RNA, 16 nt, Human
agaaugucauuuuggu

SEQ ID NO: 1442430 - RNA, 20 nt, Human
agaauuacuguaacugauua

SEQ ID NO: 1442431 - RNA, 13 nt, Human
agaauuacuguaa

SEQ ID NO: 1442432 - RNA, 17 nt, Human
ucuggggugggcaguuu

SEQ ID NO: 1442433 - RNA, 21 nt, Human
ucugggguauggcguaaguac

SEQ ID NO: 1442434 - RNA, 20 nt, Human
ucugggggguggccaggccg

SEQ ID NO: 1442435 - RNA, 19 nt, Human
ucugggggguggccaggcc

SEQ ID NO: 1442436 - RNA, 18 nt, Human
ucugggggguggccaggc

SEQ ID NO: 1442437 - RNA, 17 nt, Human
ucugggggguggccagg

SEQ ID NO: 1442438 - RNA, 13 nt, Human
ucugggggguggc

SEQ ID NO: 1442439 - RNA, 15 nt, Human
ucugggggcugcagu

SEQ ID NO: 1442440 - RNA, 19 nt, Human
ucugggggcugaggagcag

SEQ ID NO: 1442441 - RNA, 15 nt, Human
ucugggggcugagga

SEQ ID NO: 1442442 - RNA, 19 nt, Human
ucugggggcacaagacuga

SEQ ID NO: 1442443 - RNA, 18 nt, Human
ucugggggcacaagacug

SEQ ID NO: 1442444 - RNA, 18 nt, Human
ucugggcuuccuggagca

SEQ ID NO: 1442445 - RNA, 19 nt, Human
ucugggcuuccuggagcag

SEQ ID NO: 1442446 - RNA, 17 nt, Human
ucugggcuuccuggagc

SEQ ID NO: 1442447 - RNA, 16 nt, Human
ucugggcuuccuggag

SEQ ID NO: 1442448 - RNA, 21 nt, Human
ucugguagaagggaaagccca

SEQ ID NO: 1442449 - RNA, 18 nt, Human
ucugguagaagggaaagc

SEQ ID NO: 1442450 - RNA, 22 nt, Human
ucugguaauauugacuuguaua

SEQ ID NO: 1442451 - RNA, 21 nt, Human
ucugguaauauugacuuguau

SEQ ID NO: 1442452 - RNA, 15 nt, Human
ucuggguugccuuua

SEQ ID NO: 1442453 - RNA, 15 nt, Human
ucugggcuuccugga

SEQ ID NO: 1442454 - RNA, 14 nt, Human
ucugggcuuccugg

SEQ ID NO: 1442455 - RNA, 13 nt, Human
ucugggcuuccug

SEQ ID NO: 1442456 - RNA, 21 nt, Human
ucugggcuuauaucuggccuc

SEQ ID NO: 1442457 - RNA, 20 nt, Human
ucugggcuuauaucuggccu

SEQ ID NO: 1442458 - RNA, 20 nt, Human
ucugggcuggaugagcuccc

SEQ ID NO: 1442459 - RNA, 19 nt, Human
ucugggcuggaugagcucc

SEQ ID NO: 1442460 - RNA, 11 nt, Human
ucugggcugga

SEQ ID NO: 1442461 - RNA, 14 nt, Human
ucugggcucugagu

SEQ ID NO: 1442462 - RNA, 12 nt, Human
ucugggcucuga

SEQ ID NO: 1442463 - RNA, 18 nt, Human
agaauucucuaguuugau

SEQ ID NO: 1442464 - RNA, 14 nt, Human
agaauucucuaguu

SEQ ID NO: 1442465 - RNA, 20 nt, Human
agaauuccaggguauggcca

SEQ ID NO: 1442466 - RNA, 14 nt, Human
agaauuacuguaac

SEQ ID NO: 1442467 - RNA, 23 nt, Human
ucugugggaugggaugguggagg

SEQ ID NO: 1442468 - RNA, 19 nt, Human
ucuguggagguggaaaagc

SEQ ID NO: 1442469 - RNA, 22 nt, Human
ucugugccagagccuggggcuc

SEQ ID NO: 1442470 - RNA, 23 nt, Human
ucugugccagagccuggggcucu

SEQ ID NO: 1442471 - RNA, 20 nt, Human
ucugugccagagccuggggc

SEQ ID NO: 1442472 - RNA, 19 nt, Human
ucugugccagagccugggg

SEQ ID NO: 1442473 - RNA, 18 nt, Human
ucugugccagagccuggg

SEQ ID NO: 1442474 - RNA, 17 nt, Human
ucugugccagagccugg

SEQ ID NO: 1442475 - RNA, 16 nt, Human
ucugugccagagccug

SEQ ID NO: 1442476 - RNA, 15 nt, Human
ucugugccagagccu

SEQ ID NO: 1442477 - RNA, 13 nt, Human
ucugugccagagc

SEQ ID NO: 1442478 - RNA, 19 nt, Human
ucugugaccaaugucuuga

SEQ ID NO: 1442479 - RNA, 17 nt, Human
ucuguucuuccucagcc

SEQ ID NO: 1442480 - RNA, 15 nt, Human
ucuguucuuccucag

SEQ ID NO: 1442481 - RNA, 16 nt, Human
ucuguucuguuucaag

SEQ ID NO: 1442482 - RNA, 18 nt, Human
ucuguucuuccucagcca

SEQ ID NO: 1442483 - RNA, 19 nt, Human
ucuguucuuccucagccag

SEQ ID NO: 1442484 - RNA, 23 nt, Human
ucuguuuagauaauacaccacua

SEQ ID NO: 1442485 - RNA, 16 nt, Human
ucuguuuagauaauac

SEQ ID NO: 1442486 - RNA, 19 nt, Human
ucuguuuagauaauacacc

SEQ ID NO: 1442487 - RNA, 20 nt, Human
ucuguaucaggacccagagg

SEQ ID NO: 1442488 - RNA, 15 nt, Human
ucuguauauacuuuu

SEQ ID NO: 1442489 - RNA, 22 nt, Human
ucuguagaaaugguuguauuag

SEQ ID NO: 1442490 - RNA, 12 nt, Human
ucuguagaaaug

SEQ ID NO: 1442491 - RNA, 17 nt, Human
ucuguagaaaugguugu

SEQ ID NO: 1442492 - RNA, 21 nt, Human
ucuguagaaaugguuguauua

SEQ ID NO: 1442493 - RNA, 23 nt, Human
ucugguagaagggaaagcccaua

SEQ ID NO: 1442494 - RNA, 20 nt, Human
ucugguaggaauagcauguc

SEQ ID NO: 1442495 - RNA, 22 nt, Human
ucugguaugaacuugaggacac

SEQ ID NO: 1442496 - RNA, 23 nt, Human
ucugguaugaacuugaggacaca

SEQ ID NO: 1442497 - RNA, 23 nt, Human
ucugucccccuuuagaucucuga

SEQ ID NO: 1442498 - RNA, 16 nt, Human
ucuguccccagccugg

SEQ ID NO: 1442499 - RNA, 15 nt, Human
ucuguccccagccug

SEQ ID NO: 1442500 - RNA, 18 nt, Human
ucugugaccaaugucuug

SEQ ID NO: 1442501 - RNA, 16 nt, Human
ucugugaccaaugucu

SEQ ID NO: 1442502 - RNA, 22 nt, Human
ucugucccccuuuagaucucug

SEQ ID NO: 1442503 - RNA, 19 nt, Human
ugaaagugggcaaaagcuu

SEQ ID NO: 1442504 - RNA, 15 nt, Human
ugaaaguuaauccac

SEQ ID NO: 1442505 - RNA, 20 nt, Human
agagcgugagcugagcaggc

SEQ ID NO: 1442506 - RNA, 16 nt, Human
agagcgugagcugagc

SEQ ID NO: 1442507 - RNA, 19 nt, Human
agagcgagagaucaaagau

SEQ ID NO: 1442508 - RNA, 18 nt, Human
agagcgugagcugagcag

SEQ ID NO: 1442509 - RNA, 23 nt, Human
ugaaagucuguccuugaaggacu

SEQ ID NO: 1442510 - RNA, 17 nt, Human
ugaaauauccugcuuga

SEQ ID NO: 1442511 - RNA, 15 nt, Human
ugaaauauccugcuu

SEQ ID NO: 1442512 - RNA, 22 nt, Human
ugaaauaauguguaguucaugu

SEQ ID NO: 1442513 - RNA, 23 nt, Human
ugaaauaauguguaguucaugua

SEQ ID NO: 1442514 - RNA, 16 nt, Human
ugaaauaauguguagu

SEQ ID NO: 1442515 - RNA, 14 nt, Human
ugaaauaaugugua

SEQ ID NO: 1442516 - RNA, 13 nt, Human
ugaaauaaugugu

SEQ ID NO: 1442517 - RNA, 16 nt, Human
ugaaauaagcuauuug

SEQ ID NO: 1442518 - RNA, 14 nt, Human
ugaaauaagcuauu

SEQ ID NO: 1442519 - RNA, 13 nt, Human
ugaaauaagcuau

SEQ ID NO: 1442520 - RNA, 22 nt, Human
ugaaauaagcuauuugauguaa

SEQ ID NO: 1442521 - RNA, 16 nt, Human
ugaaauaugauguuaa

SEQ ID NO: 1442522 - RNA, 20 nt, Human
ugaaauaugauguuaaaaaa

SEQ ID NO: 1442523 - RNA, 18 nt, Human
ugaaauauuauguuaaaa

SEQ ID NO: 1442524 - RNA, 15 nt, Human
ugaaauuguauuaca

SEQ ID NO: 1442525 - RNA, 22 nt, Human
ugaaauuuuauaugcuuacuga

SEQ ID NO: 1442526 - RNA, 18 nt, Human
ugaaauuuuauaugcuua

SEQ ID NO: 1442527 - RNA, 16 nt, Human
ugaaauuuuauaugcu

SEQ ID NO: 1442528 - RNA, 22 nt, Human
ugaaauuuuaaccuaugauauu

SEQ ID NO: 1442529 - RNA, 20 nt, Human
ugaaauuuuaaccuaugaua

SEQ ID NO: 1442530 - RNA, 14 nt, Human
ugaaauuuuaaccu

SEQ ID NO: 1442531 - RNA, 19 nt, Human
ugaaauuuuaaaaauuguu

SEQ ID NO: 1442532 - RNA, 23 nt, Human
ugaaauuuccugggagcuuuugu

SEQ ID NO: 1442533 - RNA, 19 nt, Human
agagccaccaagagggacg

SEQ ID NO: 1442534 - RNA, 15 nt, Human
agagccaccaagagg

SEQ ID NO: 1442535 - RNA, 15 nt, Human
agagcagugcuuuug

SEQ ID NO: 1442536 - RNA, 13 nt, Human
agagcagugcuuu

SEQ ID NO: 1442537 - RNA, 12 nt, Human
agagcagugcuu

SEQ ID NO: 1442538 - RNA, 15 nt, Human
agagccacugccauu

SEQ ID NO: 1442539 - RNA, 20 nt, Human
agagcagugaagacuagaaa

SEQ ID NO: 1442540 - RNA, 17 nt, Human
agagcaggugagauggg

SEQ ID NO: 1442541 - RNA, 18 nt, Human
agagcaggugcuggcucu

SEQ ID NO: 1442542 - RNA, 24 nt, Human
agagcagggauuaaccucugcacu

SEQ ID NO: 1442543 - RNA, 22 nt, Human
agagcagggauuaaccucugca

SEQ ID NO: 1442544 - RNA, 17 nt, Human
agagcagacuacagcug

SEQ ID NO: 1442545 - RNA, 22 nt, Human
agagcaggacugaugucuccua

SEQ ID NO: 1442546 - RNA, 12 nt, Human
agagcagagguc

SEQ ID NO: 1442547 - RNA, 22 nt, Human
ucuuuggcuccccuguaccuuu

SEQ ID NO: 1442548 - RNA, 15 nt, Human
ucuuugggaauauuu

SEQ ID NO: 1442549 - RNA, 14 nt, Human
ucuuuggcuccccu

SEQ ID NO: 1442550 - RNA, 22 nt, Human
ucuuuggagaaaugcuuagaaa

SEQ ID NO: 1442551 - RNA, 18 nt, Human
agagcaaaauaauuuuaa

SEQ ID NO: 1442552 - RNA, 16 nt, Human
ucuuugggaauauuug

SEQ ID NO: 1442553 - RNA, 18 nt, Human
ucuuugggaauauuugaa

SEQ ID NO: 1442554 - RNA, 20 nt, Human
ucuuugggaauauuugaauc

SEQ ID NO: 1442555 - RNA, 17 nt, Human
agagcaccugcugucug

SEQ ID NO: 1442556 - RNA, 14 nt, Human
agagcacugccacc

SEQ ID NO: 1442557 - RNA, 18 nt, Human
agagcacugccaccagua

SEQ ID NO: 1442558 - RNA, 15 nt, Human
agagcacugccacca

SEQ ID NO: 1442559 - RNA, 12 nt, Human
agagcacugcuc

SEQ ID NO: 1442560 - RNA, 16 nt, Human
agagcacugcuccagu

SEQ ID NO: 1442561 - RNA, 12 nt, Human
ugaaccugcccu

SEQ ID NO: 1442562 - RNA, 23 nt, Human
ugaaccugaugaaaauaaagaau

SEQ ID NO: 1442563 - RNA, 18 nt, Human
ugaaccugaugaaaauaa

SEQ ID NO: 1442564 - RNA, 12 nt, Human
ugaaccugaaua

SEQ ID NO: 1442565 - RNA, 18 nt, Human
ugaacucacuuuccuccu

SEQ ID NO: 1442566 - RNA, 17 nt, Human
ugaacucaacuuugaca

SEQ ID NO: 1442567 - RNA, 18 nt, Human
ugaacucaaacugaggaa

SEQ ID NO: 1442568 - RNA, 17 nt, Human
ugaacucaaacugagga

SEQ ID NO: 1442569 - RNA, 16 nt, Human
ugaacucaaacugagg

SEQ ID NO: 1442570 - RNA, 14 nt, Human
ugaacucaaacuga

SEQ ID NO: 1442571 - RNA, 18 nt, Human
ugaaccuuugugcccuau

SEQ ID NO: 1442572 - RNA, 21 nt, Human
ugaaccuuugugcccuaucac

SEQ ID NO: 1442573 - RNA, 17 nt, Human
ugaaccuuugugcccua

SEQ ID NO: 1442574 - RNA, 21 nt, Human
ugaacuaggauuguaguccca

SEQ ID NO: 1442575 - RNA, 11 nt, Human
ugaacuuugcu

SEQ ID NO: 1442576 - RNA, 15 nt, Human
ugaacuuugcugagc

SEQ ID NO: 1442577 - RNA, 22 nt, Human
ugaacuuugaccucugcagcaa

SEQ ID NO: 1442578 - RNA, 19 nt, Human
ugaacuuugaccucugcag

SEQ ID NO: 1442579 - RNA, 20 nt, Human
ugaacuuugaccucugcagc

SEQ ID NO: 1442580 - RNA, 21 nt, Human
ugaagaaaaucacuuaggaaa

SEQ ID NO: 1442581 - RNA, 15 nt, Human
ugaagaaaaucacuu

SEQ ID NO: 1442582 - RNA, 17 nt, Human
ugaacuuuuuauugauu

SEQ ID NO: 1442583 - RNA, 16 nt, Human
ugaacuuugcugagcc

SEQ ID NO: 1442584 - RNA, 12 nt, Human
agagcuucccug

SEQ ID NO: 1442585 - RNA, 21 nt, Human
agagcuggagaugaggccaga

SEQ ID NO: 1442586 - RNA, 12 nt, Human
agagcuggcucu

SEQ ID NO: 1442587 - RNA, 23 nt, Human
agagcuggagaugaggccagacc

SEQ ID NO: 1442588 - RNA, 22 nt, Human
agagcuggagaugaggccagac

SEQ ID NO: 1442589 - RNA, 22 nt, Human
agaggcucguugacuggcugug

SEQ ID NO: 1442590 - RNA, 18 nt, Human
agaggcucagauuguaau

SEQ ID NO: 1442591 - RNA, 10 nt, Human
agaggcucag

SEQ ID NO: 1442592 - RNA, 19 nt, Human
agaggcuauuauuuucacu

SEQ ID NO: 1442593 - RNA, 19 nt, Human
agaggcccaggcugccguc

SEQ ID NO: 1442594 - RNA, 18 nt, Human
agaggcccaggcugccgu

SEQ ID NO: 1442595 - RNA, 17 nt, Human
agaggcccaggcugccg

SEQ ID NO: 1442596 - RNA, 16 nt, Human
agaggcccaggcugcc

SEQ ID NO: 1442597 - RNA, 15 nt, Human
agaggcccaggcugc

SEQ ID NO: 1442598 - RNA, 21 nt, Human
agaggccauucuuucccaaca

SEQ ID NO: 1442599 - RNA, 19 nt, Human
agaggcagcccaggaaguc

SEQ ID NO: 1442600 - RNA, 16 nt, Human
agaggcagcccgcaca

SEQ ID NO: 1442601 - RNA, 14 nt, Human
agaggcagcccagg

SEQ ID NO: 1442602 - RNA, 13 nt, Human
agaggcagcccag

SEQ ID NO: 1442603 - RNA, 11 nt, Human
agaggcagccc

SEQ ID NO: 1442604 - RNA, 17 nt, Human
agagguauuuaucuuua

SEQ ID NO: 1442605 - RNA, 16 nt, Human
agaggcugaggcuggc

SEQ ID NO: 1442606 - RNA, 19 nt, Human
agaggcugaggccuggacu

SEQ ID NO: 1442607 - RNA, 18 nt, Human
agaggcugaggccuggac

SEQ ID NO: 1442608 - RNA, 17 nt, Human
agaggcugaggccugga

SEQ ID NO: 1442609 - RNA, 14 nt, Human
agaggcugaggccu

SEQ ID NO: 1442610 - RNA, 14 nt, Human
agagguugucugug

SEQ ID NO: 1442611 - RNA, 22 nt, Human
ugaagcaaacucuaaaauuaua

SEQ ID NO: 1442612 - RNA, 18 nt, Human
agaguagaauugcauuga

SEQ ID NO: 1442613 - RNA, 17 nt, Human
agaguagaauugcauug

SEQ ID NO: 1442614 - RNA, 20 nt, Human
ugaagcaaaugucaugcugc

SEQ ID NO: 1442615 - RNA, 20 nt, Human
ugaagcaaaucgaaugaaau

SEQ ID NO: 1442616 - RNA, 23 nt, Human
ugaagcaaaugucaugcugccuu

SEQ ID NO: 1442617 - RNA, 22 nt, Human
ugaagcacagugaucaaguuau

SEQ ID NO: 1442618 - RNA, 16 nt, Human
agaguagaauugcauu

SEQ ID NO: 1442619 - RNA, 15 nt, Human
agaguagaauugcau

SEQ ID NO: 1442620 - RNA, 20 nt, Human
agagguuugcagucccaagc

SEQ ID NO: 1442621 - RNA, 17 nt, Human
agagguuugcaguccca

SEQ ID NO: 1442622 - RNA, 15 nt, Human
agagguuugcagucc

SEQ ID NO: 1442623 - RNA, 22 nt, Human
agagguuugacuagaugaugga

SEQ ID NO: 1442624 - RNA, 12 nt, Human
agagguuuuaaa

SEQ ID NO: 1442625 - RNA, 19 nt, Human
ugacaaaaaauuaaagcau

SEQ ID NO: 1442626 - RNA, 22 nt, Human
ugaauuuuuuuuaacauuccuc

SEQ ID NO: 1442627 - RNA, 20 nt, Human
ugaauuuuuuuuuccuagcc

SEQ ID NO: 1442628 - RNA, 19 nt, Human
ugaauuuuuuuuuccuagc

SEQ ID NO: 1442629 - RNA, 16 nt, Human
ugaauuuuuuuuuccu

SEQ ID NO: 1442630 - RNA, 21 nt, Human
ugaauuuuuuuuaacauuccu

SEQ ID NO: 1442631 - RNA, 20 nt, Human
ugaauuuuuuuuaacauucc

SEQ ID NO: 1442632 - RNA, 19 nt, Human
ugaauuuuuuuuaacauuc

SEQ ID NO: 1442633 - RNA, 18 nt, Human
ugaauuuuuuuuaacauu

SEQ ID NO: 1442634 - RNA, 17 nt, Human
ugaauuuuuuuuaacau

SEQ ID NO: 1442635 - RNA, 16 nt, Human
ugaauuuuuuuuaaca

SEQ ID NO: 1442636 - RNA, 15 nt, Human
ugaauuuuuuuuaac

SEQ ID NO: 1442637 - RNA, 16 nt, Human
ugaauuuuagcuuuug

SEQ ID NO: 1442638 - RNA, 19 nt, Human
ugaauuuuagcuuuugugg

SEQ ID NO: 1442639 - RNA, 15 nt, Human
ugaauuuuagcuuuu

SEQ ID NO: 1442640 - RNA, 14 nt, Human
ugaauuuuagcuuu

SEQ ID NO: 1442641 - RNA, 21 nt, Human
agaucaccaguguguggcuuu

SEQ ID NO: 1442642 - RNA, 13 nt, Human
ugaauuuuagcuu

SEQ ID NO: 1442643 - RNA, 13 nt, Human
ugaauuucacugu

SEQ ID NO: 1442644 - RNA, 16 nt, Human
ugaauuuuacauggcu

SEQ ID NO: 1442645 - RNA, 15 nt, Human
ugaauuucuuuugcc

SEQ ID NO: 1442646 - RNA, 11 nt, Human
ugaauuucauc

SEQ ID NO: 1442647 - RNA, 16 nt, Human
agauauuggacaaaga

SEQ ID NO: 1442648 - RNA, 23 nt, Human
agauauuuacaugaauugcauuu

SEQ ID NO: 1442649 - RNA, 17 nt, Human
agauauuggacaaagaa

SEQ ID NO: 1442650 - RNA, 14 nt, Human
agauauuggacaaa

SEQ ID NO: 1442651 - RNA, 18 nt, Human
agauauuccuauugugca

SEQ ID NO: 1442652 - RNA, 18 nt, Human
agauauuaaugcccagac

SEQ ID NO: 1442653 - RNA, 17 nt, Human
agauauuaaugcccaga

SEQ ID NO: 1442654 - RNA, 11 nt, Human
agauauuaaug

SEQ ID NO: 1442655 - RNA, 17 nt, Human
agauaaagguucaugca

SEQ ID NO: 1442656 - RNA, 15 nt, Human
agauacugaaauaaa

SEQ ID NO: 1442657 - RNA, 13 nt, Human
agauacugaaaua

SEQ ID NO: 1442658 - RNA, 18 nt, Human
agauacuaaggacguugu

SEQ ID NO: 1442659 - RNA, 12 nt, Human
agauacugaaau

SEQ ID NO: 1442660 - RNA, 17 nt, Human
ugaauguguuucacagu

SEQ ID NO: 1442661 - RNA, 20 nt, Human
ugaauguguuucacaguuug

SEQ ID NO: 1442662 - RNA, 16 nt, Human
ugaauguguuucacag

SEQ ID NO: 1442663 - RNA, 18 nt, Human
ugaauguggcuugagaaa

SEQ ID NO: 1442664 - RNA, 20 nt, Human
agagucccagguuggcucug

SEQ ID NO: 1442665 - RNA, 19 nt, Human
agagucccagguuggcucu

SEQ ID NO: 1442666 - RNA, 17 nt, Human
agagucccugccuggac

SEQ ID NO: 1442667 - RNA, 14 nt, Human
agagucccugccug

SEQ ID NO: 1442668 - RNA, 21 nt, Human
agaguccaagguuuaaagagu

SEQ ID NO: 1442669 - RNA, 19 nt, Human
agaguccaagguuuaaaga

SEQ ID NO: 1442670 - RNA, 23 nt, Human
agaguccaucagccuccauccua

SEQ ID NO: 1442671 - RNA, 17 nt, Human
ugaaugugaagccuucc

SEQ ID NO: 1442672 - RNA, 16 nt, Human
ugaaugugaagccuuc

SEQ ID NO: 1442673 - RNA, 15 nt, Human
ugaaugugaagccuu

SEQ ID NO: 1442674 - RNA, 14 nt, Human
ugaaugugaagccu

SEQ ID NO: 1442675 - RNA, 13 nt, Human
ugaaugugaagcc

SEQ ID NO: 1442676 - RNA, 19 nt, Human
ugaauguaaauuuguacua

SEQ ID NO: 1442677 - RNA, 18 nt, Human
ugaauguaaauuuguacu

SEQ ID NO: 1442678 - RNA, 16 nt, Human
ugaauguaaauuugua

SEQ ID NO: 1442679 - RNA, 15 nt, Human
ugaauguaaauuugu

SEQ ID NO: 1442680 - RNA, 22 nt, Human
ugaagcaaaugucaugcugccu

SEQ ID NO: 1442681 - RNA, 21 nt, Human
ugaagcaaaugucaugcugcc

SEQ ID NO: 1442682 - RNA, 18 nt, Human
agagucuggugaagcuca

SEQ ID NO: 1442683 - RNA, 23 nt, Human
agagucuggauaacuuccacagg

SEQ ID NO: 1442684 - RNA, 16 nt, Human
agagucugaaccuauu

SEQ ID NO: 1442685 - RNA, 17 nt, Human
agagucugaacagcugu

SEQ ID NO: 1442686 - RNA, 16 nt, Human
agagucugaacagcug

SEQ ID NO: 1442687 - RNA, 13 nt, Human
agagucugaacag

SEQ ID NO: 1442688 - RNA, 12 nt, Human
agagucugaaca

SEQ ID NO: 1442689 - RNA, 13 nt, Human
agagucucccagg

SEQ ID NO: 1442690 - RNA, 15 nt, Human
agagucucccaggga

SEQ ID NO: 1442691 - RNA, 17 nt, Human
agagucucccagggagc

SEQ ID NO: 1442692 - RNA, 23 nt, Human
agagucuggugaagcucacuucu

SEQ ID NO: 1442693 - RNA, 17 nt, Human
agaguugauacuacagu

SEQ ID NO: 1442694 - RNA, 20 nt, Human
agaguugauacuacaguuug

SEQ ID NO: 1442695 - RNA, 22 nt, Human
agaguugauacuacaguuuguu

SEQ ID NO: 1442696 - RNA, 15 nt, Human
agaguuggccauauu

SEQ ID NO: 1442697 - RNA, 13 nt, Human
agaguuggccaua

SEQ ID NO: 1442698 - RNA, 21 nt, Human
agaguugcugagagggcucga

SEQ ID NO: 1442699 - RNA, 20 nt, Human
agaguugaugguuguacaua

SEQ ID NO: 1442700 - RNA, 12 nt, Human
agaguuguuaca

SEQ ID NO: 1442701 - RNA, 14 nt, Human
agaguuuaaaauca

SEQ ID NO: 1442702 - RNA, 16 nt, Human
agaguuguuacauuuu

SEQ ID NO: 1442703 - RNA, 17 nt, Human
agaguuuagcuggaaaa

SEQ ID NO: 1442704 - RNA, 16 nt, Human
agaguuuagcuggaaa

SEQ ID NO: 1442705 - RNA, 18 nt, Human
ugacaguggcguuuguaa

SEQ ID NO: 1442706 - RNA, 14 nt, Human
ugacaguguuuuua

SEQ ID NO: 1442707 - RNA, 19 nt, Human
ugacaguguugaaaauguu

SEQ ID NO: 1442708 - RNA, 16 nt, Human
ugacaguguugaaaau

SEQ ID NO: 1442709 - RNA, 16 nt, Human
ugacaguggaacuaca

SEQ ID NO: 1442710 - RNA, 18 nt, Human
ugacaguggaacuacauu

SEQ ID NO: 1442711 - RNA, 14 nt, Human
ugacaggccugucc

SEQ ID NO: 1442712 - RNA, 20 nt, Human
ugacagcuaggaugugcauu

SEQ ID NO: 1442713 - RNA, 22 nt, Human
ugacagcuaggaugugcauucu

SEQ ID NO: 1442714 - RNA, 23 nt, Human
ugacacagaaaauguugagaauc

SEQ ID NO: 1442715 - RNA, 19 nt, Human
ugacacagaaaauguugag

SEQ ID NO: 1442716 - RNA, 18 nt, Human
ugacacagaaaauguuga

SEQ ID NO: 1442717 - RNA, 20 nt, Human
ugacacacuaaccaagcuga

SEQ ID NO: 1442718 - RNA, 12 nt, Human
ugacacacuaac

SEQ ID NO: 1442719 - RNA, 23 nt, Human
ugacacaccaggcgcuaauucaa

SEQ ID NO: 1442720 - RNA, 22 nt, Human
ugacacaccaggcgcuaauuca

SEQ ID NO: 1442721 - RNA, 16 nt, Human
ugacacaccaggcgcu

SEQ ID NO: 1442722 - RNA, 19 nt, Human
ugacauuuauauauugaau

SEQ ID NO: 1442723 - RNA, 16 nt, Human
ugacauuuauauauug

SEQ ID NO: 1442724 - RNA, 15 nt, Human
ugacauuuauauauu

SEQ ID NO: 1442725 - RNA, 14 nt, Human
ugacauaaaguuga

SEQ ID NO: 1442726 - RNA, 16 nt, Human
ugacauaaaguugaua

SEQ ID NO: 1442727 - RNA, 14 nt, Human
ugaccaaugucuug

SEQ ID NO: 1442728 - RNA, 13 nt, Human
ugaccaaugucuu

SEQ ID NO: 1442729 - RNA, 13 nt, Human
agaucaggaagag

SEQ ID NO: 1442730 - RNA, 17 nt, Human
agaucaggaagagaagg

SEQ ID NO: 1442731 - RNA, 15 nt, Human
agaucaguguaccau

SEQ ID NO: 1442732 - RNA, 13 nt, Human
agaucaguaaaga

SEQ ID NO: 1442733 - RNA, 15 nt, Human
ugaccaaugucuuga

SEQ ID NO: 1442734 - RNA, 18 nt, Human
agaucaggaagagaagga

SEQ ID NO: 1442735 - RNA, 19 nt, Human
agaucaggaagagaaggag

SEQ ID NO: 1442736 - RNA, 16 nt, Human
agaucauaaggcuuca

SEQ ID NO: 1442737 - RNA, 13 nt, Human
agaucauaaggcu

SEQ ID NO: 1442738 - RNA, 15 nt, Human
agaucaguaaagaac

SEQ ID NO: 1442739 - RNA, 21 nt, Human
agaucaguguaccauuugccu

SEQ ID NO: 1442740 - RNA, 18 nt, Human
agaucaguguaccauuug

SEQ ID NO: 1442741 - RNA, 12 nt, Human
agaucauuguga

SEQ ID NO: 1442742 - RNA, 17 nt, Human
agauguucuaagucuuu

SEQ ID NO: 1442743 - RNA, 15 nt, Human
agauguucacccaac

SEQ ID NO: 1442744 - RNA, 20 nt, Human
agaugugauauucuaagacu

SEQ ID NO: 1442745 - RNA, 19 nt, Human
agaugugauauucuaagac

SEQ ID NO: 1442746 - RNA, 18 nt, Human
agaugugauauucuaaga

SEQ ID NO: 1442747 - RNA, 17 nt, Human
agaugugauauucuaag

SEQ ID NO: 1442748 - RNA, 16 nt, Human
agaugugauauucuaa

SEQ ID NO: 1442749 - RNA, 15 nt, Human
agaugugauauucua

SEQ ID NO: 1442750 - RNA, 20 nt, Human
agaugcugugagucuuuggu

SEQ ID NO: 1442751 - RNA, 16 nt, Human
agaugcugugagucuu

SEQ ID NO: 1442752 - RNA, 22 nt, Human
agauguucuaagucuuuccauu

SEQ ID NO: 1442753 - RNA, 21 nt, Human
agauguucuaagucuuuccau

SEQ ID NO: 1442754 - RNA, 20 nt, Human
agauguucuaagucuuucca

SEQ ID NO: 1442755 - RNA, 12 nt, Human
agauguucucua

SEQ ID NO: 1442756 - RNA, 15 nt, Human
agauguucucuauca

SEQ ID NO: 1442757 - RNA, 17 nt, Human
agauguucucuaucauu

SEQ ID NO: 1442758 - RNA, 18 nt, Human
agauguucucuaucauuu

SEQ ID NO: 1442759 - RNA, 19 nt, Human
agauguucucuaucauuua

SEQ ID NO: 1442760 - RNA, 20 nt, Human
agauguucucuaucauuuaa

SEQ ID NO: 1442761 - RNA, 14 nt, Human
ugacccacaugcca

SEQ ID NO: 1442762 - RNA, 15 nt, Human
ugacccacaugccau

SEQ ID NO: 1442763 - RNA, 23 nt, Human
agaugcaccaccaagccaaggga

SEQ ID NO: 1442764 - RNA, 21 nt, Human
agaugcaccaccaagccaagg

SEQ ID NO: 1442765 - RNA, 22 nt, Human
agaucccaaguagaaucucagu

SEQ ID NO: 1442766 - RNA, 10 nt, Human
agaucccaaa

SEQ ID NO: 1442767 - RNA, 20 nt, Human
agaucccaacacugccagca

SEQ ID NO: 1442768 - RNA, 19 nt, Human
agaucccaacacugccagc

SEQ ID NO: 1442769 - RNA, 22 nt, Human
agauccagggacagaggcccca

SEQ ID NO: 1442770 - RNA, 19 nt, Human
agauccagggacagaggcc

SEQ ID NO: 1442771 - RNA, 16 nt, Human
agauccaggagcucca

SEQ ID NO: 1442772 - RNA, 15 nt, Human
agauccaggagcucc

SEQ ID NO: 1442773 - RNA, 14 nt, Human
agauccaggagcuc

SEQ ID NO: 1442774 - RNA, 17 nt, Human
agauccaggagcuccag

SEQ ID NO: 1442775 - RNA, 18 nt, Human
agaucccaacacugccag

SEQ ID NO: 1442776 - RNA, 19 nt, Human
agaugcacuuugcuuuaau

SEQ ID NO: 1442777 - RNA, 22 nt, Human
agaugcacuuugcuuuaauaua

SEQ ID NO: 1442778 - RNA, 15 nt, Human
agaugcacuuugcuu

SEQ ID NO: 1442779 - RNA, 18 nt, Human
agaugcuggcuugggcag

SEQ ID NO: 1442780 - RNA, 19 nt, Human
agaugcuggcuugggcagc

SEQ ID NO: 1442781 - RNA, 17 nt, Human
agaugcuggcuugggca

SEQ ID NO: 1442782 - RNA, 23 nt, Human
agaugcuggcccagggcccagag

SEQ ID NO: 1442783 - RNA, 22 nt, Human
agaugcuggcccagggcccaga

SEQ ID NO: 1442784 - RNA, 21 nt, Human
agaugcuggcccagggcccag

SEQ ID NO: 1442785 - RNA, 20 nt, Human
agaugcuggcccagggccca

SEQ ID NO: 1442786 - RNA, 16 nt, Human
agaugccuccuuccuc

SEQ ID NO: 1442787 - RNA, 13 nt, Human
agaugccuccuuc

SEQ ID NO: 1442788 - RNA, 13 nt, Human
agaugccucccug

SEQ ID NO: 1442789 - RNA, 20 nt, Human
agaugcaguucugaagaaga

SEQ ID NO: 1442790 - RNA, 19 nt, Human
agaugcaguucugaagaag

SEQ ID NO: 1442791 - RNA, 18 nt, Human
agaugcaguucugaagaa

SEQ ID NO: 1442792 - RNA, 12 nt, Human
ugcaaagaucug

SEQ ID NO: 1442793 - RNA, 23 nt, Human
ugcaaagaucuguccucagccuu

SEQ ID NO: 1442794 - RNA, 23 nt, Human
ugcaaagaaagaaaaaaaaccau

SEQ ID NO: 1442795 - RNA, 22 nt, Human
ugcaaagaaagaaaaaaaacca

SEQ ID NO: 1442796 - RNA, 16 nt, Human
ugcaaagaaagaaaaa

SEQ ID NO: 1442797 - RNA, 23 nt, Human
ugcaaauaaauauccuuuaauug

SEQ ID NO: 1442798 - RNA, 13 nt, Human
ugcaaauaaauau

SEQ ID NO: 1442799 - RNA, 20 nt, Human
ugcaaaguaucccuacugua

SEQ ID NO: 1442800 - RNA, 18 nt, Human
ugauuugcauugaacaca

SEQ ID NO: 1442801 - RNA, 14 nt, Human
ugauuugcauugaa

SEQ ID NO: 1442802 - RNA, 13 nt, Human
ugauuugcauuga

SEQ ID NO: 1442803 - RNA, 15 nt, Human
ugauuugcauugaac

SEQ ID NO: 1442804 - RNA, 12 nt, Human
ugauuugcauug

SEQ ID NO: 1442805 - RNA, 18 nt, Human
ugauuuccguuaaaauac

SEQ ID NO: 1442806 - RNA, 17 nt, Human
ugauuucauuucaacug

SEQ ID NO: 1442807 - RNA, 13 nt, Human
ugauuucauuuca

SEQ ID NO: 1442808 - RNA, 23 nt, Human
ugauuuauuaauauauauuaucu

SEQ ID NO: 1442809 - RNA, 22 nt, Human
ugauuuaucugagucaacuccu

SEQ ID NO: 1442810 - RNA, 18 nt, Human
ugauuuaucacacaaagc

SEQ ID NO: 1442811 - RNA, 16 nt, Human
ugauuuaucacacaaa

SEQ ID NO: 1442812 - RNA, 18 nt, Human
agccacgggugccagaag

SEQ ID NO: 1442813 - RNA, 19 nt, Human
agccacggggacucagccc

SEQ ID NO: 1442814 - RNA, 15 nt, Human
agccacgguguucug

SEQ ID NO: 1442815 - RNA, 21 nt, Human
ugcaaaugcuaugagaugcau

SEQ ID NO: 1442816 - RNA, 14 nt, Human
ugcaaaucuugaaa

SEQ ID NO: 1442817 - RNA, 20 nt, Human
ugcaaaucaggcuuuuguuu

SEQ ID NO: 1442818 - RNA, 23 nt, Human
ugcaaauacuguauauucaggac

SEQ ID NO: 1442819 - RNA, 13 nt, Human
ugcaaauaacaaa

SEQ ID NO: 1442820 - RNA, 17 nt, Human
ugcaaauaacaaaugcc

SEQ ID NO: 1442821 - RNA, 16 nt, Human
ugcaacagacuugaau

SEQ ID NO: 1442822 - RNA, 22 nt, Human
ugcaacacuggucugcuguucc

SEQ ID NO: 1442823 - RNA, 12 nt, Human
ugcaacacuggu

SEQ ID NO: 1442824 - RNA, 13 nt, Human
ugcaacaaaauuc

SEQ ID NO: 1442825 - RNA, 12 nt, Human
ugcaaauuucau

SEQ ID NO: 1442826 - RNA, 16 nt, Human
ugcaagcacagcccuu

SEQ ID NO: 1442827 - RNA, 15 nt, Human
ugcaagcacagcccu

SEQ ID NO: 1442828 - RNA, 21 nt, Human
ugcaagccagauuuuccugaa

SEQ ID NO: 1442829 - RNA, 15 nt, Human
ugcaagccagauuuu

SEQ ID NO: 1442830 - RNA, 19 nt, Human
ugcaauaaaucugacccag

SEQ ID NO: 1442831 - RNA, 19 nt, Human
ugcaaguugaggacuucuu

SEQ ID NO: 1442832 - RNA, 16 nt, Human
ugcaaguuuaucagua

SEQ ID NO: 1442833 - RNA, 18 nt, Human
ugcaaguugaggacuucu

SEQ ID NO: 1442834 - RNA, 13 nt, Human
ugcaaguugagga

SEQ ID NO: 1442835 - RNA, 15 nt, Human
ugcaaucccuuaaua

SEQ ID NO: 1442836 - RNA, 14 nt, Human
ugcaauaucugaag

SEQ ID NO: 1442837 - RNA, 15 nt, Human
ugcaauaucugaagc

SEQ ID NO: 1442838 - RNA, 23 nt, Human
agcccaggccaggacucugcagc

SEQ ID NO: 1442839 - RNA, 20 nt, Human
ugcaaguauacuagggagcc

SEQ ID NO: 1442840 - RNA, 17 nt, Human
ugcaaguauacuaggga

SEQ ID NO: 1442841 - RNA, 16 nt, Human
ugcaaggucuuugguu

SEQ ID NO: 1442842 - RNA, 22 nt, Human
ugcaagguauuacacucuguaa

SEQ ID NO: 1442843 - RNA, 21 nt, Human
ugcaagguauuacacucugua

SEQ ID NO: 1442844 - RNA, 18 nt, Human
ugcaagguacucugguga

SEQ ID NO: 1442845 - RNA, 16 nt, Human
ugcaagguacucuggu

SEQ ID NO: 1442846 - RNA, 15 nt, Human
ugcaaggucauuuuu

SEQ ID NO: 1442847 - RNA, 18 nt, Human
ugcaaggcagccgugggc

SEQ ID NO: 1442848 - RNA, 16 nt, Human
ugcaaggcagccgugg

SEQ ID NO: 1442849 - RNA, 15 nt, Human
ugcaaggcagccgug

SEQ ID NO: 1442850 - RNA, 14 nt, Human
ugcaaggcagccgu

SEQ ID NO: 1442851 - RNA, 17 nt, Human
ugcaaggaccuaaaaca

SEQ ID NO: 1442852 - RNA, 13 nt, Human
ugcaaggcaaaga

SEQ ID NO: 1442853 - RNA, 11 nt, Human
ugcaagggaaa

SEQ ID NO: 1442854 - RNA, 21 nt, Human
ugcaaggccugguguuucuug

SEQ ID NO: 1442855 - RNA, 23 nt, Human
ugcaaggccugguguuucuugau

SEQ ID NO: 1442856 - RNA, 15 nt, Human
agccccugucauggu

SEQ ID NO: 1442857 - RNA, 22 nt, Human
agccccugggguggccaccagu

SEQ ID NO: 1442858 - RNA, 21 nt, Human
agccccugggguggccaccag

SEQ ID NO: 1442859 - RNA, 20 nt, Human
agccccucuggucgcuccug

SEQ ID NO: 1442860 - RNA, 16 nt, Human
agccccucuggucgcu

SEQ ID NO: 1442861 - RNA, 13 nt, Human
agccccucugguc

SEQ ID NO: 1442862 - RNA, 12 nt, Human
agccccucuggu

SEQ ID NO: 1442863 - RNA, 23 nt, Human
agccccgcguggaacucgugucu

SEQ ID NO: 1442864 - RNA, 20 nt, Human
agcccugcaccaugcugcug

SEQ ID NO: 1442865 - RNA, 14 nt, Human
agcccugcaccaug

SEQ ID NO: 1442866 - RNA, 13 nt, Human
agcccugcaccau

SEQ ID NO: 1442867 - RNA, 12 nt, Human
agcccugcacca

SEQ ID NO: 1442868 - RNA, 16 nt, Human
agccccuuagacagag

SEQ ID NO: 1442869 - RNA, 23 nt, Human
ugcaccccaaagcuuuccugccc

SEQ ID NO: 1442870 - RNA, 22 nt, Human
ugcaccccaaagcuuuccugcc

SEQ ID NO: 1442871 - RNA, 21 nt, Human
ugcaccccaaagcuuuccugc

SEQ ID NO: 1442872 - RNA, 20 nt, Human
ugcaccccaaagcuuuccug

SEQ ID NO: 1442873 - RNA, 19 nt, Human
ugcaccccaaagcuuuccu

SEQ ID NO: 1442874 - RNA, 18 nt, Human
ugcaccccaaagcuuucc

SEQ ID NO: 1442875 - RNA, 23 nt, Human
ugcaccaggguugaccccagagg

SEQ ID NO: 1442876 - RNA, 16 nt, Human
ugcaccaaagagaaug

SEQ ID NO: 1442877 - RNA, 22 nt, Human
ugcacauuuauuuccucccucu

SEQ ID NO: 1442878 - RNA, 13 nt, Human
ugcacauuuauuu

SEQ ID NO: 1442879 - RNA, 18 nt, Human
ugcacauguuuccucuag

SEQ ID NO: 1442880 - RNA, 17 nt, Human
ugcacauguuuccucua

SEQ ID NO: 1442881 - RNA, 16 nt, Human
ugcacauguuuccucu

SEQ ID NO: 1442882 - RNA, 14 nt, Human
ugcacauguuuccu

SEQ ID NO: 1442883 - RNA, 13 nt, Human
ugcacauguuucc

SEQ ID NO: 1442884 - RNA, 17 nt, Human
agcccugccuggaggac

SEQ ID NO: 1442885 - RNA, 16 nt, Human
agcccugccuggagga

SEQ ID NO: 1442886 - RNA, 15 nt, Human
agcccugccuggagg

SEQ ID NO: 1442887 - RNA, 14 nt, Human
agcccugccuggag

SEQ ID NO: 1442888 - RNA, 13 nt, Human
agcccugccugga

SEQ ID NO: 1442889 - RNA, 12 nt, Human
agcccugccugg

SEQ ID NO: 1442890 - RNA, 22 nt, Human
agcccugcaccaugcugcuggg

SEQ ID NO: 1442891 - RNA, 18 nt, Human
agcccugggaggcucugg

SEQ ID NO: 1442892 - RNA, 20 nt, Human
agcccugggaggcucuggag

SEQ ID NO: 1442893 - RNA, 22 nt, Human
ugccagcucuguaucaggaccc

SEQ ID NO: 1442894 - RNA, 19 nt, Human
ugccagcuacuuccuccuc

SEQ ID NO: 1442895 - RNA, 16 nt, Human
ugccaguguccugagc

SEQ ID NO: 1442896 - RNA, 23 nt, Human
ugccaguguccugagccccaggg

SEQ ID NO: 1442897 - RNA, 16 nt, Human
ugccacagcuuuugca

SEQ ID NO: 1442898 - RNA, 17 nt, Human
ugccacagcuuuugcaa

SEQ ID NO: 1442899 - RNA, 11 nt, Human
ugccacagcuu

SEQ ID NO: 1442900 - RNA, 22 nt, Human
ugccacagcccugucagcauga

SEQ ID NO: 1442901 - RNA, 22 nt, Human
ugccacagccuccccugccagg

SEQ ID NO: 1442902 - RNA, 21 nt, Human
ugccacagccuccccugccag

SEQ ID NO: 1442903 - RNA, 17 nt, Human
ugccacagccuccccug

SEQ ID NO: 1442904 - RNA, 13 nt, Human
ugccacagccucc

SEQ ID NO: 1442905 - RNA, 21 nt, Human
ugccacagcccugucagcaug

SEQ ID NO: 1442906 - RNA, 17 nt, Human
ugccacagcccugucag

SEQ ID NO: 1442907 - RNA, 19 nt, Human
ugccagccccugccauugu

SEQ ID NO: 1442908 - RNA, 11 nt, Human
ugccagccccu

SEQ ID NO: 1442909 - RNA, 21 nt, Human
ugccaauauuaaaucugcugg

SEQ ID NO: 1442910 - RNA, 22 nt, Human
ugccaaggcagaggccugggcu

SEQ ID NO: 1442911 - RNA, 19 nt, Human
ugccaaggcagaggccugg

SEQ ID NO: 1442912 - RNA, 18 nt, Human
ugccaaggcagaggccug

SEQ ID NO: 1442913 - RNA, 17 nt, Human
ugccaaggcagaggccu

SEQ ID NO: 1442914 - RNA, 16 nt, Human
ugccaaggcagaggcc

SEQ ID NO: 1442915 - RNA, 23 nt, Human
ugccaagcuccaagccccaucuu

SEQ ID NO: 1442916 - RNA, 16 nt, Human
ugccaagcuccaagcc

SEQ ID NO: 1442917 - RNA, 15 nt, Human
ugccaagcuccaagc

SEQ ID NO: 1442918 - RNA, 13 nt, Human
ugccaagcuccaa

SEQ ID NO: 1442919 - RNA, 16 nt, Human
ugccacagcccuguca

SEQ ID NO: 1442920 - RNA, 14 nt, Human
ugccacagcccugu

SEQ ID NO: 1442921 - RNA, 12 nt, Human
ugccacagcccu

SEQ ID NO: 1442922 - RNA, 23 nt, Human
agcgcccugcagacccugcccuu

SEQ ID NO: 1442923 - RNA, 21 nt, Human
agcgcccugcagacccugccc

SEQ ID NO: 1442924 - RNA, 20 nt, Human
agcgcccugcagacccugcc

SEQ ID NO: 1442925 - RNA, 19 nt, Human
agcgcccugcagacccugc

SEQ ID NO: 1442926 - RNA, 18 nt, Human
agcgcccugcagacccug

SEQ ID NO: 1442927 - RNA, 17 nt, Human
agcgcccugcagacccu

SEQ ID NO: 1442928 - RNA, 16 nt, Human
agcgcccugcagaccc

SEQ ID NO: 1442929 - RNA, 19 nt, Human
ugcauuuaaaacagacacu

SEQ ID NO: 1442930 - RNA, 17 nt, Human
ugcauuuaaaacagaca

SEQ ID NO: 1442931 - RNA, 15 nt, Human
ugcauuuaaaacaga

SEQ ID NO: 1442932 - RNA, 13 nt, Human
ugcauugugcuuc

SEQ ID NO: 1442933 - RNA, 19 nt, Human
ugcauugugauuggccugu

SEQ ID NO: 1442934 - RNA, 12 nt, Human
ugcauugugcuu

SEQ ID NO: 1442935 - RNA, 17 nt, Human
ugcauugugauuggccu

SEQ ID NO: 1442936 - RNA, 15 nt, Human
ugcauugugcuucuu

SEQ ID NO: 1442937 - RNA, 22 nt, Human
ugcauuuaaaacagacacuggc

SEQ ID NO: 1442938 - RNA, 20 nt, Human
ugcauuuaaaacagacacug

SEQ ID NO: 1442939 - RNA, 16 nt, Human
ugcauuuaaaagauac

SEQ ID NO: 1442940 - RNA, 23 nt, Human
agccuucucuguucauuuccuca

SEQ ID NO: 1442941 - RNA, 22 nt, Human
agccuucucuguucauuuccuc

SEQ ID NO: 1442942 - RNA, 21 nt, Human
agccuucucuguucauuuccu

SEQ ID NO: 1442943 - RNA, 20 nt, Human
agccuucucuguucauuucc

SEQ ID NO: 1442944 - RNA, 19 nt, Human
agccuucucuguucauuuc

SEQ ID NO: 1442945 - RNA, 15 nt, Human
agccuucucuguuca

SEQ ID NO: 1442946 - RNA, 13 nt, Human
agccuugaacuuu

SEQ ID NO: 1442947 - RNA, 18 nt, Human
agccuuaaucagguccuc

SEQ ID NO: 1442948 - RNA, 19 nt, Human
agccugugacauacccccu

SEQ ID NO: 1442949 - RNA, 12 nt, Human
agccugugccuc

SEQ ID NO: 1442950 - RNA, 14 nt, Human
agcgcccugcagac

SEQ ID NO: 1442951 - RNA, 13 nt, Human
agcgcccugcaga

SEQ ID NO: 1442952 - RNA, 12 nt, Human
agcgcccugcag

SEQ ID NO: 1442953 - RNA, 23 nt, Human
agccuuggggauucuuccaucug

SEQ ID NO: 1442954 - RNA, 16 nt, Human
agccuuggggauucuu

SEQ ID NO: 1442955 - RNA, 19 nt, Human
agccuuggccucuuuccuc

SEQ ID NO: 1442956 - RNA, 12 nt, Human
agccuugcuugu

SEQ ID NO: 1442957 - RNA, 17 nt, Human
agccugugaacccagga

SEQ ID NO: 1442958 - RNA, 15 nt, Human
agccugugaacccag

SEQ ID NO: 1442959 - RNA, 18 nt, Human
agccuguccugucaucau

SEQ ID NO: 1442960 - RNA, 14 nt, Human
agccuguccuguca

SEQ ID NO: 1442961 - RNA, 13 nt, Human
agccuguccuguc

SEQ ID NO: 1442962 - RNA, 12 nt, Human
agccuguccugu

SEQ ID NO: 1442963 - RNA, 20 nt, Human
agccuguccugccuguggcc

SEQ ID NO: 1442964 - RNA, 24 nt, Human
agccuguccugccuguggccauga

SEQ ID NO: 1442965 - RNA, 17 nt, Human
agccuguccugccugug

SEQ ID NO: 1442966 - RNA, 16 nt, Human
agccuguccugccugu

SEQ ID NO: 1442967 - RNA, 15 nt, Human
agccuguccugccug

SEQ ID NO: 1442968 - RNA, 14 nt, Human
agccuguccugccu

SEQ ID NO: 1442969 - RNA, 22 nt, Human
agccugucagauccaggagcuc

SEQ ID NO: 1442970 - RNA, 21 nt, Human
agccugucagauccaggagcu

SEQ ID NO: 1442971 - RNA, 20 nt, Human
agccugucagauccaggagc

SEQ ID NO: 1442972 - RNA, 22 nt, Human
agccuguaaacuuuaucacuua

SEQ ID NO: 1442973 - RNA, 22 nt, Human
agccugugacauacccccuccc

SEQ ID NO: 1442974 - RNA, 22 nt, Human
agccugugaacccaggacaagc

SEQ ID NO: 1442975 - RNA, 20 nt, Human
agccugugaacccaggacaa

SEQ ID NO: 1442976 - RNA, 19 nt, Human
agccugugaacccaggaca

SEQ ID NO: 1442977 - RNA, 18 nt, Human
agccugugaacccaggac

SEQ ID NO: 1442978 - RNA, 19 nt, Human
agccugaguacuccacacu

SEQ ID NO: 1442979 - RNA, 23 nt, Human
agccugaguagaaaggccuuuaa

SEQ ID NO: 1442980 - RNA, 19 nt, Human
agccugagucaccugcaga

SEQ ID NO: 1442981 - RNA, 16 nt, Human
agccugagucaccugc

SEQ ID NO: 1442982 - RNA, 17 nt, Human
agccugaguagaaaggc

SEQ ID NO: 1442983 - RNA, 22 nt, Human
agccugaguagaaaggccuuua

SEQ ID NO: 1442984 - RNA, 22 nt, Human
agccugaguacuccacacugca

SEQ ID NO: 1442985 - RNA, 13 nt, Human
agccugaguagaa

SEQ ID NO: 1442986 - RNA, 23 nt, Human
agccugagggaaaggccagcacu

SEQ ID NO: 1442987 - RNA, 22 nt, Human
agccugagggaaaggccagcac

SEQ ID NO: 1442988 - RNA, 21 nt, Human
agccugagggaaaggccagca

SEQ ID NO: 1442989 - RNA, 20 nt, Human
agccugagggaaaggccagc

SEQ ID NO: 1442990 - RNA, 19 nt, Human
agccugagggaaaggccag

SEQ ID NO: 1442991 - RNA, 15 nt, Human
agccugagggaaagg

SEQ ID NO: 1442992 - RNA, 14 nt, Human
agccugagggaaag

SEQ ID NO: 1442993 - RNA, 21 nt, Human
ugcauggcauccuccagcccc

SEQ ID NO: 1442994 - RNA, 20 nt, Human
ugcauggcauccuccagccc

SEQ ID NO: 1442995 - RNA, 18 nt, Human
ugcauggcauccuccagc

SEQ ID NO: 1442996 - RNA, 11 nt, Human
ugcauggcauc

SEQ ID NO: 1442997 - RNA, 23 nt, Human
ugcauggcagggggcugcugcug

SEQ ID NO: 1442998 - RNA, 22 nt, Human
ugcauggcagggggcugcugcu

SEQ ID NO: 1442999 - RNA, 21 nt, Human
ugcauggcagggggcugcugc

SEQ ID NO: 1443000 - RNA, 20 nt, Human
ugcauggcagggggcugcug

SEQ ID NO: 1443001 - RNA, 19 nt, Human
ugcauggcagggggcugcu

SEQ ID NO: 1443002 - RNA, 20 nt, Human
ugcauggauuucuuugaaaa

SEQ ID NO: 1443003 - RNA, 16 nt, Human
ugcauggauuucuuug

SEQ ID NO: 1443004 - RNA, 14 nt, Human
ugcauggauuucuu

SEQ ID NO: 1443005 - RNA, 19 nt, Human
ugcauggaaauucccuuca

SEQ ID NO: 1443006 - RNA, 23 nt, Human
ugcauggaaauucccuucaucug

SEQ ID NO: 1443007 - RNA, 21 nt, Human
ugcaucuagaggcuuccuuca

SEQ ID NO: 1443008 - RNA, 20 nt, Human
ugcaugaaguaauaugcaca

SEQ ID NO: 1443009 - RNA, 20 nt, Human
ugcaugcccagagacccagc

SEQ ID NO: 1443010 - RNA, 23 nt, Human
ugcaugcccagagacccagcgga

SEQ ID NO: 1443011 - RNA, 18 nt, Human
ugcaugcccagagaccca

SEQ ID NO: 1443012 - RNA, 14 nt, Human
ugcaugcccagaga

SEQ ID NO: 1443013 - RNA, 22 nt, Human
ugcaugcacuguucccccugug

SEQ ID NO: 1443014 - RNA, 19 nt, Human
ugcaugcacuguucccccu

SEQ ID NO: 1443015 - RNA, 11 nt, Human
ugcauggaaau

SEQ ID NO: 1443016 - RNA, 13 nt, Human
ugcaguaaaucuu

SEQ ID NO: 1443017 - RNA, 12 nt, Human
ugcagguuccca

SEQ ID NO: 1443018 - RNA, 20 nt, Human
ugcagguggccaaguuccuc

SEQ ID NO: 1443019 - RNA, 21 nt, Human
ugcaguaucaugcccugugca

SEQ ID NO: 1443020 - RNA, 16 nt, Human
ugcaguaucaugcccu

SEQ ID NO: 1443021 - RNA, 16 nt, Human
ugcauaccacuuuugu

SEQ ID NO: 1443022 - RNA, 18 nt, Human
ugcauaccacuuuuguuc

SEQ ID NO: 1443023 - RNA, 20 nt, Human
ugcauaccacuuuuguucuu

SEQ ID NO: 1443024 - RNA, 21 nt, Human
ugcauaccacuuuuguucuug

SEQ ID NO: 1443025 - RNA, 23 nt, Human
ugcauacuuuuuaaauguaaaga

SEQ ID NO: 1443026 - RNA, 22 nt, Human
ugcauacuuuuuaaauguaaag

SEQ ID NO: 1443027 - RNA, 19 nt, Human
ugcauacuuuuuaaaugua

SEQ ID NO: 1443028 - RNA, 18 nt, Human
ugcauacuuuuuaaaugu

SEQ ID NO: 1443029 - RNA, 17 nt, Human
ugcauagaauaaaauuu

SEQ ID NO: 1443030 - RNA, 17 nt, Human
agccucugucuggcaau

SEQ ID NO: 1443031 - RNA, 14 nt, Human
agccucugucuggc

SEQ ID NO: 1443032 - RNA, 20 nt, Human
agccucuccccugccugccc

SEQ ID NO: 1443033 - RNA, 21 nt, Human
agccucuccccugccugcccu

SEQ ID NO: 1443034 - RNA, 19 nt, Human
agccucuccccugccugcc

SEQ ID NO: 1443035 - RNA, 14 nt, Human
agccucuccccugc

SEQ ID NO: 1443036 - RNA, 20 nt, Human
ugcagccucagagacaucag

SEQ ID NO: 1443037 - RNA, 14 nt, Human
ugcagccucagaga

SEQ ID NO: 1443038 - RNA, 12 nt, Human
ugcagccucaga

SEQ ID NO: 1443039 - RNA, 22 nt, Human
ugcaggguccucuucugggccu

SEQ ID NO: 1443040 - RNA, 19 nt, Human
ugcaggguccucuucuggg

SEQ ID NO: 1443041 - RNA, 15 nt, Human
ugcaggguccucuuc

SEQ ID NO: 1443042 - RNA, 22 nt, Human
ugcagggggugugucugcucag

SEQ ID NO: 1443043 - RNA, 19 nt, Human
ugcagggggugugucugcu

SEQ ID NO: 1443044 - RNA, 21 nt, Human
ugcagccucaggacugggagc

SEQ ID NO: 1443045 - RNA, 22 nt, Human
ugcagccucaggacugggagcc

SEQ ID NO: 1443046 - RNA, 20 nt, Human
ugcagccucaggacugggag

SEQ ID NO: 1443047 - RNA, 19 nt, Human
ugcagccucaggacuggga

SEQ ID NO: 1443048 - RNA, 18 nt, Human
ugcagccucaggacuggg

SEQ ID NO: 1443049 - RNA, 17 nt, Human
ugcagccucaggacugg

SEQ ID NO: 1443050 - RNA, 16 nt, Human
ugcagccucaggacug

SEQ ID NO: 1443051 - RNA, 13 nt, Human
ugcagccucagga

SEQ ID NO: 1443052 - RNA, 13 nt, Human
ugcagguggggag

SEQ ID NO: 1443053 - RNA, 19 nt, Human
ugcagguggccaaguuccu

SEQ ID NO: 1443054 - RNA, 11 nt, Human
ugcaggucccu

SEQ ID NO: 1443055 - RNA, 22 nt, Human
ugcaggucccuaauaaagcugu

SEQ ID NO: 1443056 - RNA, 20 nt, Human
ugcagacaggaaucuuaagg

SEQ ID NO: 1443057 - RNA, 18 nt, Human
ugcagacaggaaucuuaa

SEQ ID NO: 1443058 - RNA, 16 nt, Human
ugcagacaggaaucuu

SEQ ID NO: 1443059 - RNA, 15 nt, Human
ugcagacaggaaucu

SEQ ID NO: 1443060 - RNA, 13 nt, Human
ugcagacaggaau

SEQ ID NO: 1443061 - RNA, 23 nt, Human
agccucuccccagguccagcucu

SEQ ID NO: 1443062 - RNA, 22 nt, Human
agccucuccccagguccagcuc

SEQ ID NO: 1443063 - RNA, 18 nt, Human
agccucuccccaggucca

SEQ ID NO: 1443064 - RNA, 16 nt, Human
agccucuccccagguc

SEQ ID NO: 1443065 - RNA, 23 nt, Human
agccucuagagcagacuacagcu

SEQ ID NO: 1443066 - RNA, 19 nt, Human
agccucuagagcagacuac

SEQ ID NO: 1443067 - RNA, 19 nt, Human
agccucgccccuggcagag

SEQ ID NO: 1443068 - RNA, 18 nt, Human
agccucgccccuggcaga

SEQ ID NO: 1443069 - RNA, 22 nt, Human
agccucuagagcagacuacagc

SEQ ID NO: 1443070 - RNA, 16 nt, Human
agccucuccacucaug

SEQ ID NO: 1443071 - RNA, 20 nt, Human
agccucgccccuggcagaga

SEQ ID NO: 1443072 - RNA, 16 nt, Human
agccucgccccuggca

SEQ ID NO: 1443073 - RNA, 15 nt, Human
agccucgccccuggc

SEQ ID NO: 1443074 - RNA, 14 nt, Human
agccucgccccugg

SEQ ID NO: 1443075 - RNA, 20 nt, Human
agccucgcccauccccuuga

SEQ ID NO: 1443076 - RNA, 23 nt, Human
agccucgcaacccgugccaaguc

SEQ ID NO: 1443077 - RNA, 21 nt, Human
agccucgcaacccgugccaag

SEQ ID NO: 1443078 - RNA, 19 nt, Human
agccucgcaacccgugcca

SEQ ID NO: 1443079 - RNA, 18 nt, Human
agccucgcaacccgugcc

SEQ ID NO: 1443080 - RNA, 16 nt, Human
agccuccuuucuggcu

SEQ ID NO: 1443081 - RNA, 17 nt, Human
agccuccuuagaaaaaa

SEQ ID NO: 1443082 - RNA, 13 nt, Human
agcaggugcugac

SEQ ID NO: 1443083 - RNA, 19 nt, Human
agcagggugggcuuguggg

SEQ ID NO: 1443084 - RNA, 23 nt, Human
agcagggcuacccugagcugagg

SEQ ID NO: 1443085 - RNA, 23 nt, Human
agcagggccggggaacuggccaa

SEQ ID NO: 1443086 - RNA, 22 nt, Human
agcagggccggggaacuggcca

SEQ ID NO: 1443087 - RNA, 14 nt, Human
agcagggccgggga

SEQ ID NO: 1443088 - RNA, 22 nt, Human
agcagggauuaaccucugcacu

SEQ ID NO: 1443089 - RNA, 21 nt, Human
agcagggauuaaccucugcac

SEQ ID NO: 1443090 - RNA, 20 nt, Human
agcagggauuaaccucugca

SEQ ID NO: 1443091 - RNA, 19 nt, Human
agcagggauuaaccucugc

SEQ ID NO: 1443092 - RNA, 16 nt, Human
agcagggacuguaaac

SEQ ID NO: 1443093 - RNA, 21 nt, Human
agcaggccuuuugauauuaaa

SEQ ID NO: 1443094 - RNA, 24 nt, Human
agcaggccacacuucaaacuacuu

SEQ ID NO: 1443095 - RNA, 18 nt, Human
agcaggccagguccagag

SEQ ID NO: 1443096 - RNA, 19 nt, Human
agcaggccagguccagaga

SEQ ID NO: 1443097 - RNA, 23 nt, Human
agcaggccagguccagagagacc

SEQ ID NO: 1443098 - RNA, 23 nt, Human
agcaggccacacuucaaacuacu

SEQ ID NO: 1443099 - RNA, 13 nt, Human
agcaggccacacu

SEQ ID NO: 1443100 - RNA, 19 nt, Human
agcaggcagccagcaucug

SEQ ID NO: 1443101 - RNA, 17 nt, Human
agcaggcagccagcauc

SEQ ID NO: 1443102 - RNA, 16 nt, Human
agcaggcagccagcau

SEQ ID NO: 1443103 - RNA, 15 nt, Human
agcaggcagccagca

SEQ ID NO: 1443104 - RNA, 14 nt, Human
agcaggcagccagc

SEQ ID NO: 1443105 - RNA, 12 nt, Human
agcaggcagcca

SEQ ID NO: 1443106 - RNA, 11 nt, Human
agcaggcagcc

SEQ ID NO: 1443107 - RNA, 21 nt, Human
agcaggaggggggagggaagg

SEQ ID NO: 1443108 - RNA, 16 nt, Human
agcaggaggggggagg

SEQ ID NO: 1443109 - RNA, 14 nt, Human
agcaggagggggga

SEQ ID NO: 1443110 - RNA, 16 nt, Human
agcaggaggccuagga

SEQ ID NO: 1443111 - RNA, 19 nt, Human
agcaggacugaugucuccu

SEQ ID NO: 1443112 - RNA, 22 nt, Human
agcaggacugaugucuccuaag

SEQ ID NO: 1443113 - RNA, 16 nt, Human
agcaggacugaugucu

SEQ ID NO: 1443114 - RNA, 22 nt, Human
agcaggacuccaggcccaaggc

SEQ ID NO: 1443115 - RNA, 23 nt, Human
agcaggacuccaggcccaaggcu

SEQ ID NO: 1443116 - RNA, 19 nt, Human
agcaggacuccaggcccaa

SEQ ID NO: 1443117 - RNA, 18 nt, Human
agcaggacuccaggccca

SEQ ID NO: 1443118 - RNA, 15 nt, Human
agcaggacuccaggc

SEQ ID NO: 1443119 - RNA, 14 nt, Human
agcaggacuccagg

SEQ ID NO: 1443120 - RNA, 17 nt, Human
agcaggaaugggaagga

SEQ ID NO: 1443121 - RNA, 19 nt, Human
agcagcaucucuaccuucu

SEQ ID NO: 1443122 - RNA, 20 nt, Human
agcaggaagcugugagagca

SEQ ID NO: 1443123 - RNA, 20 nt, Human
agcagcaucucuaccuucuc

SEQ ID NO: 1443124 - RNA, 11 nt, Human
agcagcaucuc

SEQ ID NO: 1443125 - RNA, 22 nt, Human
agcagcaggaggggggagggaa

SEQ ID NO: 1443126 - RNA, 21 nt, Human
agcagcaggaggggggaggga

SEQ ID NO: 1443127 - RNA, 18 nt, Human
agcagcaggaggggggag

SEQ ID NO: 1443128 - RNA, 17 nt, Human
agcagcaggagggggga

SEQ ID NO: 1443129 - RNA, 15 nt, Human
agcagcaggaggggg

SEQ ID NO: 1443130 - RNA, 13 nt, Human
agcagcagccucg

SEQ ID NO: 1443131 - RNA, 18 nt, Human
agcagcacuuauaaauca

SEQ ID NO: 1443132 - RNA, 15 nt, Human
agcagcacuuauaaa

SEQ ID NO: 1443133 - RNA, 14 nt, Human
agcagcacuuauaa

SEQ ID NO: 1443134 - RNA, 22 nt, Human
agcagcaccugcccuaccugcc

SEQ ID NO: 1443135 - RNA, 20 nt, Human
agcagcaccugcccuaccug

SEQ ID NO: 1443136 - RNA, 19 nt, Human
agcagcaccugcccuaccu

SEQ ID NO: 1443137 - RNA, 17 nt, Human
agcagcaccugcccuac

SEQ ID NO: 1443138 - RNA, 16 nt, Human
agcagcaccugcccua

SEQ ID NO: 1443139 - RNA, 14 nt, Human
agcagcaccugccc

SEQ ID NO: 1443140 - RNA, 21 nt, Human
agcagcaccuccucagccuga

SEQ ID NO: 1443141 - RNA, 20 nt, Human
agcagcaccuccucagccug

SEQ ID NO: 1443142 - RNA, 17 nt, Human
agcagcaccuccucagc

SEQ ID NO: 1443143 - RNA, 14 nt, Human
agcagcaccuccuc

SEQ ID NO: 1443144 - RNA, 13 nt, Human
agcagcaccuccu

SEQ ID NO: 1443145 - RNA, 20 nt, Human
agcagcaccguucugugcac

SEQ ID NO: 1443146 - RNA, 19 nt, Human
agcagcaccguucugugca

SEQ ID NO: 1443147 - RNA, 14 nt, Human
ugaguuacagaaau

SEQ ID NO: 1443148 - RNA, 19 nt, Human
ugaguguuuuaugagaaag

SEQ ID NO: 1443149 - RNA, 21 nt, Human
ugaguguuuuaugagaaagcc

SEQ ID NO: 1443150 - RNA, 17 nt, Human
ugaguuccagaaaguaa

SEQ ID NO: 1443151 - RNA, 18 nt, Human
ugaguuccagaaaguaaa

SEQ ID NO: 1443152 - RNA, 22 nt, Human
ugagugugcggcugugugugca

SEQ ID NO: 1443153 - RNA, 19 nt, Human
ugagugugcggcugugugu

SEQ ID NO: 1443154 - RNA, 13 nt, Human
ugauaauuuuaaa

SEQ ID NO: 1443155 - RNA, 14 nt, Human
ugauaauuuuaaau

SEQ ID NO: 1443156 - RNA, 14 nt, Human
ugauaauagauucu

SEQ ID NO: 1443157 - RNA, 15 nt, Human
ugauaauagauucuc

SEQ ID NO: 1443158 - RNA, 14 nt, Human
ugauacaaugcugu

SEQ ID NO: 1443159 - RNA, 15 nt, Human
ugauacaaugcugug

SEQ ID NO: 1443160 - RNA, 14 nt, Human
ugagugggaagccc

SEQ ID NO: 1443161 - RNA, 13 nt, Human
ugagugggaagcc

SEQ ID NO: 1443162 - RNA, 12 nt, Human
ugagugggaagc

SEQ ID NO: 1443163 - RNA, 12 nt, Human
ugaguggcccuu

SEQ ID NO: 1443164 - RNA, 21 nt, Human
ugaguggcaggggacaggagu

SEQ ID NO: 1443165 - RNA, 13 nt, Human
ugaguggcagggg

SEQ ID NO: 1443166 - RNA, 15 nt, Human
ugagugcaguccuga

SEQ ID NO: 1443167 - RNA, 21 nt, Human
ugagucagagccaugucuucu

SEQ ID NO: 1443168 - RNA, 21 nt, Human
ugaguaccccugcuuugggcu

SEQ ID NO: 1443169 - RNA, 19 nt, Human
ugaguaccccugcuuuggg

SEQ ID NO: 1443170 - RNA, 20 nt, Human
ugaguacguugugcauuugg

SEQ ID NO: 1443171 - RNA, 22 nt, Human
ugagucacccuaccugugccug

SEQ ID NO: 1443172 - RNA, 20 nt, Human
ugagucacccuaccugugcc

SEQ ID NO: 1443173 - RNA, 15 nt, Human
agcaguuugaaauug

SEQ ID NO: 1443174 - RNA, 20 nt, Human
agcaguuugguuucuagcau

SEQ ID NO: 1443175 - RNA, 22 nt, Human
agcaguuugguuucuagcauga

SEQ ID NO: 1443176 - RNA, 23 nt, Human
agcaguuugguuucuagcaugaa

SEQ ID NO: 1443177 - RNA, 22 nt, Human
agcaguccuuggccugcuaagg

SEQ ID NO: 1443178 - RNA, 17 nt, Human
agcagucgugccugugu

SEQ ID NO: 1443179 - RNA, 16 nt, Human
agcagucgugccugug

SEQ ID NO: 1443180 - RNA, 14 nt, Human
agcagucgugccug

SEQ ID NO: 1443181 - RNA, 18 nt, Human
agcaguccuuggccugcu

SEQ ID NO: 1443182 - RNA, 16 nt, Human
agcaguccuuggccug

SEQ ID NO: 1443183 - RNA, 15 nt, Human
agcaguccuuggccu

SEQ ID NO: 1443184 - RNA, 13 nt, Human
agcaguccuuggc

SEQ ID NO: 1443185 - RNA, 12 nt, Human
agcaguccuugg

SEQ ID NO: 1443186 - RNA, 22 nt, Human
agcaguccccuucccuccaaga

SEQ ID NO: 1443187 - RNA, 18 nt, Human
agcaguccccuucccucc

SEQ ID NO: 1443188 - RNA, 16 nt, Human
agcaguccccuucccu

SEQ ID NO: 1443189 - RNA, 15 nt, Human
agcaguccccuuccc

SEQ ID NO: 1443190 - RNA, 19 nt, Human
agcagucaggaaagagaac

SEQ ID NO: 1443191 - RNA, 18 nt, Human
agcagguucccaagcuca

SEQ ID NO: 1443192 - RNA, 17 nt, Human
agcagguucccaagcuc

SEQ ID NO: 1443193 - RNA, 16 nt, Human
agcagguucccaagcu

SEQ ID NO: 1443194 - RNA, 14 nt, Human
agcagguucuuguu

SEQ ID NO: 1443195 - RNA, 23 nt, Human
agcagguucccaagcucagaggc

SEQ ID NO: 1443196 - RNA, 14 nt, Human
agcagguuucaagg

SEQ ID NO: 1443197 - RNA, 12 nt, Human
agcaguauuuuu

SEQ ID NO: 1443198 - RNA, 18 nt, Human
agcagucaggaaagagaa

SEQ ID NO: 1443199 - RNA, 17 nt, Human
agcagucaggaaagaga

SEQ ID NO: 1443200 - RNA, 17 nt, Human
agcauaaaagaugaaag

SEQ ID NO: 1443201 - RNA, 23 nt, Human
agcauaaaagaugaaagagcagu

SEQ ID NO: 1443202 - RNA, 15 nt, Human
agcauaaaagaugaa

SEQ ID NO: 1443203 - RNA, 23 nt, Human
agcauaggugauccauguaacug

SEQ ID NO: 1443204 - RNA, 20 nt, Human
agcauaggugauccauguaa

SEQ ID NO: 1443205 - RNA, 23 nt, Human
ugaguacagaguguggacucugg

SEQ ID NO: 1443206 - RNA, 19 nt, Human
ugaguaaugguguagaaca

SEQ ID NO: 1443207 - RNA, 17 nt, Human
ugaguaauuuuggauuu

SEQ ID NO: 1443208 - RNA, 18 nt, Human
ugaguaaugguguagaac

SEQ ID NO: 1443209 - RNA, 17 nt, Human
ugaguaaugguguagaa

SEQ ID NO: 1443210 - RNA, 15 nt, Human
ugaguaaugguguag

SEQ ID NO: 1443211 - RNA, 15 nt, Human
agcauaucugccuuu

SEQ ID NO: 1443212 - RNA, 16 nt, Human
agcauaucugccuuua

SEQ ID NO: 1443213 - RNA, 15 nt, Human
agcauauagauuguc

SEQ ID NO: 1443214 - RNA, 13 nt, Human
agcauaucugccu

SEQ ID NO: 1443215 - RNA, 16 nt, Human
ugaguacguugugcau

SEQ ID NO: 1443216 - RNA, 17 nt, Human
ugaguacguugugcauu

SEQ ID NO: 1443217 - RNA, 18 nt, Human
ugaguacguugugcauuu

SEQ ID NO: 1443218 - RNA, 19 nt, Human
ugaguacguugugcauuug

SEQ ID NO: 1443219 - RNA, 21 nt, Human
agcauucagaagaaaaagaag

SEQ ID NO: 1443220 - RNA, 19 nt, Human
agcauucagaagaaaaaga

SEQ ID NO: 1443221 - RNA, 17 nt, Human
agcauucagaagaaaaa

SEQ ID NO: 1443222 - RNA, 15 nt, Human
agcauucagaagaaa

SEQ ID NO: 1443223 - RNA, 14 nt, Human
agcauucagaagaa

SEQ ID NO: 1443224 - RNA, 18 nt, Human
agcauucacaacuuguuu

SEQ ID NO: 1443225 - RNA, 22 nt, Human
agcauggucccacaucccuggg

SEQ ID NO: 1443226 - RNA, 23 nt, Human
agcauggucccacaucccugggc

SEQ ID NO: 1443227 - RNA, 21 nt, Human
agcauggucccacaucccugg

SEQ ID NO: 1443228 - RNA, 19 nt, Human
agcauucccagguaggcca

SEQ ID NO: 1443229 - RNA, 13 nt, Human
agcauucccaggu

SEQ ID NO: 1443230 - RNA, 12 nt, Human
agcauucccagg

SEQ ID NO: 1443231 - RNA, 20 nt, Human
agcauuccagccccucuggu

SEQ ID NO: 1443232 - RNA, 19 nt, Human
agcauuccagccccucugg

SEQ ID NO: 1443233 - RNA, 16 nt, Human
agcauuccagccccuc

SEQ ID NO: 1443234 - RNA, 12 nt, Human
agcauucugucu

SEQ ID NO: 1443235 - RNA, 22 nt, Human
agcauucucauuggaaauuuag

SEQ ID NO: 1443236 - RNA, 14 nt, Human
agcauucucauugg

SEQ ID NO: 1443237 - RNA, 23 nt, Human
agcauuuaaccccccuguacaca

SEQ ID NO: 1443238 - RNA, 22 nt, Human
agcauuuaaccccccuguacac

SEQ ID NO: 1443239 - RNA, 21 nt, Human
agcauuuaaccccccuguaca

SEQ ID NO: 1443240 - RNA, 22 nt, Human
agcauuuagauguauagguuga

SEQ ID NO: 1443241 - RNA, 22 nt, Human
agccaaaauguaggcuuaguuu

SEQ ID NO: 1443242 - RNA, 17 nt, Human
agccaaaauguaggcuu

SEQ ID NO: 1443243 - RNA, 22 nt, Human
agccaaaaauagcuaaauaccu

SEQ ID NO: 1443244 - RNA, 18 nt, Human
agccaaaaauagcuaaau

SEQ ID NO: 1443245 - RNA, 15 nt, Human
agccaaaaauagcua

SEQ ID NO: 1443246 - RNA, 14 nt, Human
agccaaaaauagcu

SEQ ID NO: 1443247 - RNA, 17 nt, Human
agcauuuuguaaguuga

SEQ ID NO: 1443248 - RNA, 13 nt, Human
agcauuuuguaau

SEQ ID NO: 1443249 - RNA, 21 nt, Human
agcauuugacccuugcuguga

SEQ ID NO: 1443250 - RNA, 16 nt, Human
agcauuugucaacaaa

SEQ ID NO: 1443251 - RNA, 15 nt, Human
agcauuuagaaaacu

SEQ ID NO: 1443252 - RNA, 17 nt, Human
agcauuugaaugcauuu

SEQ ID NO: 1443253 - RNA, 17 nt, Human
agcauuuguuucuacuu

SEQ ID NO: 1443254 - RNA, 19 nt, Human
agcauuuguuucuacuuug

SEQ ID NO: 1443255 - RNA, 14 nt, Human
agcauuuguuucua

SEQ ID NO: 1443256 - RNA, 18 nt, Human
agcauuuguguugaagag

SEQ ID NO: 1443257 - RNA, 17 nt, Human
agcauuuguguugaaga

SEQ ID NO: 1443258 - RNA, 15 nt, Human
ugauaccccccucug

SEQ ID NO: 1443259 - RNA, 14 nt, Human
ugauaccagcugga

SEQ ID NO: 1443260 - RNA, 14 nt, Human
ugauacauuuuugu

SEQ ID NO: 1443261 - RNA, 22 nt, Human
ugauacauccaaagcagacagc

SEQ ID NO: 1443262 - RNA, 16 nt, Human
ugauacauccaaagca

SEQ ID NO: 1443263 - RNA, 18 nt, Human
ugauacaaugcugugccc

SEQ ID NO: 1443264 - RNA, 15 nt, Human
ugauacgaugcuuca

SEQ ID NO: 1443265 - RNA, 19 nt, Human
ugauaccccccucugucuu

SEQ ID NO: 1443266 - RNA, 18 nt, Human
ugauaccccccucugucu

SEQ ID NO: 1443267 - RNA, 17 nt, Human
ugauaccccccucuguc

SEQ ID NO: 1443268 - RNA, 22 nt, Human
ugaucaauuauaguuucugagg

SEQ ID NO: 1443269 - RNA, 20 nt, Human
ugaucaauuauaguuucuga

SEQ ID NO: 1443270 - RNA, 18 nt, Human
ugaucaauuauaguuucu

SEQ ID NO: 1443271 - RNA, 21 nt, Human
ugaucaauuauaguuucugag

SEQ ID NO: 1443272 - RNA, 17 nt, Human
ugaucaccgacugaaaa

SEQ ID NO: 1443273 - RNA, 19 nt, Human
ugaucaccgacugaaaaua

SEQ ID NO: 1443274 - RNA, 13 nt, Human
agcaucaugccuc

SEQ ID NO: 1443275 - RNA, 22 nt, Human
agcaucaggguuaagaagacuu

SEQ ID NO: 1443276 - RNA, 21 nt, Human
agcauccgcaggugcuggucc

SEQ ID NO: 1443277 - RNA, 18 nt, Human
agcauccccuugaacucu

SEQ ID NO: 1443278 - RNA, 16 nt, Human
agcauccgcaggugcu

SEQ ID NO: 1443279 - RNA, 13 nt, Human
agcauccuggaau

SEQ ID NO: 1443280 - RNA, 15 nt, Human
agcauccuggaauau

SEQ ID NO: 1443281 - RNA, 14 nt, Human
agcauccuggaaua

SEQ ID NO: 1443282 - RNA, 22 nt, Human
agcaucauuauuuauguauugu

SEQ ID NO: 1443283 - RNA, 21 nt, Human
agcaucauuauuuauguauug

SEQ ID NO: 1443284 - RNA, 19 nt, Human
agcaucauuauuuauguau

SEQ ID NO: 1443285 - RNA, 18 nt, Human
agcaucauuauuuaugua

SEQ ID NO: 1443286 - RNA, 23 nt, Human
agcaucaugccucugaggccagc

SEQ ID NO: 1443287 - RNA, 22 nt, Human
agcaucaugccucugaggccag

SEQ ID NO: 1443288 - RNA, 21 nt, Human
agcaucaugccucugaggcca

SEQ ID NO: 1443289 - RNA, 19 nt, Human
agcaucaugccucugaggc

SEQ ID NO: 1443290 - RNA, 18 nt, Human
agcaucaugccucugagg

SEQ ID NO: 1443291 - RNA, 16 nt, Human
agcaucaugccucuga

SEQ ID NO: 1443292 - RNA, 15 nt, Human
agcaucaugccucug

SEQ ID NO: 1443293 - RNA, 20 nt, Human
agcauccccuugaacucuuc

SEQ ID NO: 1443294 - RNA, 17 nt, Human
agcauccccuugaacuc

SEQ ID NO: 1443295 - RNA, 15 nt, Human
agcaucccucaccca

SEQ ID NO: 1443296 - RNA, 14 nt, Human
agccaccaguucuc

SEQ ID NO: 1443297 - RNA, 12 nt, Human
agccaccaguuc

SEQ ID NO: 1443298 - RNA, 20 nt, Human
agccacacuucucaggacac

SEQ ID NO: 1443299 - RNA, 23 nt, Human
agccacacuucucaggacacagg

SEQ ID NO: 1443300 - RNA, 19 nt, Human
agccacacuucucaggaca

SEQ ID NO: 1443301 - RNA, 18 nt, Human
agccacacuucucaggac

SEQ ID NO: 1443302 - RNA, 17 nt, Human
agccacacuucucagga

SEQ ID NO: 1443303 - RNA, 17 nt, Human
agccacaccaggauaga

SEQ ID NO: 1443304 - RNA, 24 nt, Human
agccacaccaggauagagacugga

SEQ ID NO: 1443305 - RNA, 14 nt, Human
agccacaccaggau

SEQ ID NO: 1443306 - RNA, 13 nt, Human
agccacaccagga

SEQ ID NO: 1443307 - RNA, 18 nt, Human
agccaauucagacaggca

SEQ ID NO: 1443308 - RNA, 17 nt, Human
agccaauucagacaggc

SEQ ID NO: 1443309 - RNA, 16 nt, Human
agccaauucagacagg

SEQ ID NO: 1443310 - RNA, 20 nt, Human
agccaauuauguuaaacuag

SEQ ID NO: 1443311 - RNA, 16 nt, Human
agccaauuauguuaaa

SEQ ID NO: 1443312 - RNA, 17 nt, Human
agccaauuauguuaaac

SEQ ID NO: 1443313 - RNA, 23 nt, Human
agccaaucccucaccuucugagu

SEQ ID NO: 1443314 - RNA, 15 nt, Human
agccaauuauguuaa

SEQ ID NO: 1443315 - RNA, 17 nt, Human
agccaaaccucaccaac

SEQ ID NO: 1443316 - RNA, 15 nt, Human
agccaaaccucacca

SEQ ID NO: 1443317 - RNA, 21 nt, Human
agccaaacauauauauacuau

SEQ ID NO: 1443318 - RNA, 19 nt, Human
ugaucccuguguugucucu

SEQ ID NO: 1443319 - RNA, 19 nt, Human
ugaucccagagagcccgag

SEQ ID NO: 1443320 - RNA, 20 nt, Human
ugaucccuguguugucucua

SEQ ID NO: 1443321 - RNA, 15 nt, Human
ugauccauguaacug

SEQ ID NO: 1443322 - RNA, 13 nt, Human
ugauccagaaaga

SEQ ID NO: 1443323 - RNA, 16 nt, Human
agccaccccaugcugg

SEQ ID NO: 1443324 - RNA, 19 nt, Human
agccaccccaugcuggccu

SEQ ID NO: 1443325 - RNA, 23 nt, Human
ugauccagaaagaaaacuuguau

SEQ ID NO: 1443326 - RNA, 13 nt, Human
agccaccccugag

SEQ ID NO: 1443327 - RNA, 21 nt, Human
ugauccauuucuaauuaugua

SEQ ID NO: 1443328 - RNA, 18 nt, Human
ugauccauuucuaauuau

SEQ ID NO: 1443329 - RNA, 17 nt, Human
ugauccauuucuaauua

SEQ ID NO: 1443330 - RNA, 16 nt, Human
ugauccauuucuaauu

SEQ ID NO: 1443331 - RNA, 15 nt, Human
ugauccauuucuaau

SEQ ID NO: 1443332 - RNA, 14 nt, Human
ugauccauuucuaa

SEQ ID NO: 1443333 - RNA, 20 nt, Human
ugauccauguaacugccuag

SEQ ID NO: 1443334 - RNA, 19 nt, Human
ugauccauguaacugccua

SEQ ID NO: 1443335 - RNA, 18 nt, Human
ugauccauguaacugccu

SEQ ID NO: 1443336 - RNA, 17 nt, Human
ugauccauguaacugcc

SEQ ID NO: 1443337 - RNA, 20 nt, Human
ugaucuacuucuguaauugu

SEQ ID NO: 1443338 - RNA, 18 nt, Human
ugaucuacuucuguaauu

SEQ ID NO: 1443339 - RNA, 17 nt, Human
ugauggcuuaugauagc

SEQ ID NO: 1443340 - RNA, 17 nt, Human
ugauggcaauuuuguaa

SEQ ID NO: 1443341 - RNA, 15 nt, Human
ugauggcaauuuugu

SEQ ID NO: 1443342 - RNA, 23 nt, Human
ugauggcaacagaucuggaaccu

SEQ ID NO: 1443343 - RNA, 20 nt, Human
ugauggcagccauagugcau

SEQ ID NO: 1443344 - RNA, 19 nt, Human
ugauggcaacagaucugga

SEQ ID NO: 1443345 - RNA, 18 nt, Human
ugauggcaacagaucugg

SEQ ID NO: 1443346 - RNA, 21 nt, Human
ugaucuacuucuguaauugug

SEQ ID NO: 1443347 - RNA, 16 nt, Human
ugauggcaacagaucu

SEQ ID NO: 1443348 - RNA, 17 nt, Human
ugauuaaauaagauucu

SEQ ID NO: 1443349 - RNA, 21 nt, Human
ugauguuuuaaggaugcuugu

SEQ ID NO: 1443350 - RNA, 22 nt, Human
ugauuaaauaagauucuaacgg

SEQ ID NO: 1443351 - RNA, 20 nt, Human
ugauuaaauaagauucuaac

SEQ ID NO: 1443352 - RNA, 19 nt, Human
ugauuaaauaagauucuaa

SEQ ID NO: 1443353 - RNA, 18 nt, Human
ugauuaaauaagauucua

SEQ ID NO: 1443354 - RNA, 17 nt, Human
ugauuaaauucuugcaa

SEQ ID NO: 1443355 - RNA, 13 nt, Human
ugauuaaauucuu

SEQ ID NO: 1443356 - RNA, 16 nt, Human
ugauuaaauucuugca

SEQ ID NO: 1443357 - RNA, 16 nt, Human
ugauuaaguaaugaua

SEQ ID NO: 1443358 - RNA, 14 nt, Human
ugauuaaaugacac

SEQ ID NO: 1443359 - RNA, 13 nt, Human
ugauuaaaugaca

SEQ ID NO: 1443360 - RNA, 15 nt, Human
ugauuaaguaaugau

SEQ ID NO: 1443361 - RNA, 18 nt, Human
aggacugauuucagagug

SEQ ID NO: 1443362 - RNA, 20 nt, Human
aggacugaugucuccuaagc

SEQ ID NO: 1443363 - RNA, 17 nt, Human
aggacugaugucuccua

SEQ ID NO: 1443364 - RNA, 16 nt, Human
aggacugaugucuccu

SEQ ID NO: 1443365 - RNA, 22 nt, Human
aggacugggagcccccagccug

SEQ ID NO: 1443366 - RNA, 21 nt, Human
aggacugggagcccccagccu

SEQ ID NO: 1443367 - RNA, 20 nt, Human
aggacugggagcccccagcc

SEQ ID NO: 1443368 - RNA, 19 nt, Human
aggacugggagcccccagc

SEQ ID NO: 1443369 - RNA, 18 nt, Human
aggacugggagcccccag

SEQ ID NO: 1443370 - RNA, 16 nt, Human
aggacugggagccccc

SEQ ID NO: 1443371 - RNA, 20 nt, Human
aggacugcugguuuguaguu

SEQ ID NO: 1443372 - RNA, 23 nt, Human
aggacugggagcccccagccugu

SEQ ID NO: 1443373 - RNA, 22 nt, Human
aggacuuccuguccagcuccaa

SEQ ID NO: 1443374 - RNA, 16 nt, Human
aggagaugcuccuugg

SEQ ID NO: 1443375 - RNA, 15 nt, Human
aggacugaugucucc

SEQ ID NO: 1443376 - RNA, 22 nt, Human
aggagauccagggcaaggccau

SEQ ID NO: 1443377 - RNA, 13 nt, Human
aggacuugcccuc

SEQ ID NO: 1443378 - RNA, 16 nt, Human
aggacuugaaagaaau

SEQ ID NO: 1443379 - RNA, 13 nt, Human
aggacuugaaaga

SEQ ID NO: 1443380 - RNA, 22 nt, Human
aggagaugcuccuugggcccuu

SEQ ID NO: 1443381 - RNA, 18 nt, Human
aggagaugcuccuugggc

SEQ ID NO: 1443382 - RNA, 17 nt, Human
aggagaugcuccuuggg

SEQ ID NO: 1443383 - RNA, 12 nt, Human
aggagcccccac

SEQ ID NO: 1443384 - RNA, 21 nt, Human
aggagccccauuccugggaaa

SEQ ID NO: 1443385 - RNA, 19 nt, Human
aggagccccauuccuggga

SEQ ID NO: 1443386 - RNA, 18 nt, Human
aggagccccauuccuggg

SEQ ID NO: 1443387 - RNA, 16 nt, Human
aggagccccauuccug

SEQ ID NO: 1443388 - RNA, 15 nt, Human
aggagccccauuccu

SEQ ID NO: 1443389 - RNA, 14 nt, Human
aggagccccagcua

SEQ ID NO: 1443390 - RNA, 22 nt, Human
aggagcccaggccaggacucug

SEQ ID NO: 1443391 - RNA, 20 nt, Human
aggagcccaggccaggacuc

SEQ ID NO: 1443392 - RNA, 19 nt, Human
aggagcccaggccaggacu

SEQ ID NO: 1443393 - RNA, 18 nt, Human
aggagcccaggccaggac

SEQ ID NO: 1443394 - RNA, 17 nt, Human
aggagcccaggccagga

SEQ ID NO: 1443395 - RNA, 16 nt, Human
aggagcccaggccagg

SEQ ID NO: 1443396 - RNA, 15 nt, Human
aggagcccaggccag

SEQ ID NO: 1443397 - RNA, 14 nt, Human
aggagcccaggcca

SEQ ID NO: 1443398 - RNA, 13 nt, Human
aggagcccaggcc

SEQ ID NO: 1443399 - RNA, 10 nt, Human
aggagcccag

SEQ ID NO: 1443400 - RNA, 23 nt, Human
aggagcacggcucuguccccagc

SEQ ID NO: 1443401 - RNA, 15 nt, Human
aggagcacggcucug

SEQ ID NO: 1443402 - RNA, 20 nt, Human
aggagcagcaggagggggga

SEQ ID NO: 1443403 - RNA, 16 nt, Human
aggagcacggcucugu

SEQ ID NO: 1443404 - RNA, 22 nt, Human
aggagcccccacccuguuccug

SEQ ID NO: 1443405 - RNA, 19 nt, Human
aggagcccccacccuguuc

SEQ ID NO: 1443406 - RNA, 23 nt, Human
aggagcccuucuauacccaccca

SEQ ID NO: 1443407 - RNA, 17 nt, Human
aggacucugcagccuca

SEQ ID NO: 1443408 - RNA, 19 nt, Human
aggacucugcagccucaga

SEQ ID NO: 1443409 - RNA, 16 nt, Human
aggacucugcagccuc

SEQ ID NO: 1443410 - RNA, 15 nt, Human
aggacucugcagccu

SEQ ID NO: 1443411 - RNA, 14 nt, Human
aggacucugcagcc

SEQ ID NO: 1443412 - RNA, 13 nt, Human
aggacucugcagc

SEQ ID NO: 1443413 - RNA, 12 nt, Human
aggacucucagg

SEQ ID NO: 1443414 - RNA, 17 nt, Human
aggacuccugaaaaaaa

SEQ ID NO: 1443415 - RNA, 14 nt, Human
aggacuccugaaaa

SEQ ID NO: 1443416 - RNA, 21 nt, Human
aggacuccuccuuuuuccaug

SEQ ID NO: 1443417 - RNA, 17 nt, Human
aggacuccuuaaauuug

SEQ ID NO: 1443418 - RNA, 19 nt, Human
aggacuccuccuuuuucca

SEQ ID NO: 1443419 - RNA, 20 nt, Human
aggacuccaggcccaaggcu

SEQ ID NO: 1443420 - RNA, 23 nt, Human
aggacuccaggcccaaggcuccc

SEQ ID NO: 1443421 - RNA, 16 nt, Human
aggacuccaggcccaa

SEQ ID NO: 1443422 - RNA, 15 nt, Human
aggacuccaggccca

SEQ ID NO: 1443423 - RNA, 13 nt, Human
aggacuaauagaa

SEQ ID NO: 1443424 - RNA, 14 nt, Human
aggacuaaccaugu

SEQ ID NO: 1443425 - RNA, 23 nt, Human
aggacuaacacucagaagccugg

SEQ ID NO: 1443426 - RNA, 22 nt, Human
aggacuaacacucagaagccug

SEQ ID NO: 1443427 - RNA, 21 nt, Human
aggacuaacacucagaagccu

SEQ ID NO: 1443428 - RNA, 20 nt, Human
aggacuaacacucagaagcc

SEQ ID NO: 1443429 - RNA, 18 nt, Human
aggacuaacacucagaag

SEQ ID NO: 1443430 - RNA, 17 nt, Human
aggacuaacacucagaa

SEQ ID NO: 1443431 - RNA, 14 nt, Human
aggacguacguaau

SEQ ID NO: 1443432 - RNA, 17 nt, Human
aggacucaccacugccc

SEQ ID NO: 1443433 - RNA, 20 nt, Human
aggacuauauuugggccugc

SEQ ID NO: 1443434 - RNA, 17 nt, Human
aggacuaauagaaaagu

SEQ ID NO: 1443435 - RNA, 14 nt, Human
aggacgcacugagc

SEQ ID NO: 1443436 - RNA, 22 nt, Human
aggaccuuuccaccacagccag

SEQ ID NO: 1443437 - RNA, 21 nt, Human
aggaccuuuccaccacagcca

SEQ ID NO: 1443438 - RNA, 20 nt, Human
aggaccuucgggcugugccc

SEQ ID NO: 1443439 - RNA, 19 nt, Human
aggaccuucgggcugugcc

SEQ ID NO: 1443440 - RNA, 18 nt, Human
aggaccuucgggcugugc

SEQ ID NO: 1443441 - RNA, 16 nt, Human
aggacacaggccugug

SEQ ID NO: 1443442 - RNA, 15 nt, Human
aggacacaggccugu

SEQ ID NO: 1443443 - RNA, 14 nt, Human
aggacacaggccug

SEQ ID NO: 1443444 - RNA, 13 nt, Human
aggacacaggccu

SEQ ID NO: 1443445 - RNA, 12 nt, Human
aggacacaggcc

SEQ ID NO: 1443446 - RNA, 11 nt, Human
aggacacaggc

SEQ ID NO: 1443447 - RNA, 13 nt, Human
aggacaagcaugg

SEQ ID NO: 1443448 - RNA, 20 nt, Human
aggauugcgagagaugugug

SEQ ID NO: 1443449 - RNA, 19 nt, Human
aggauugcgagagaugugu

SEQ ID NO: 1443450 - RNA, 18 nt, Human
aggauugcgagagaugug

SEQ ID NO: 1443451 - RNA, 17 nt, Human
aggauugcgagagaugu

SEQ ID NO: 1443452 - RNA, 16 nt, Human
aggauugcgagagaug

SEQ ID NO: 1443453 - RNA, 15 nt, Human
aggauugcgagagau

SEQ ID NO: 1443454 - RNA, 24 nt, Human
aggauugaaaauguccaggaaagu

SEQ ID NO: 1443455 - RNA, 21 nt, Human
aggauugaaaauguccaggaa

SEQ ID NO: 1443456 - RNA, 22 nt, Human
aggaugcacagaguuguuacau

SEQ ID NO: 1443457 - RNA, 21 nt, Human
aggauaucggcauuuguuucu

SEQ ID NO: 1443458 - RNA, 17 nt, Human
aggauaucggcauuugu

SEQ ID NO: 1443459 - RNA, 15 nt, Human
aggaucaguuaacua

SEQ ID NO: 1443460 - RNA, 23 nt, Human
aggaucaguuaacuauugcauuu

SEQ ID NO: 1443461 - RNA, 20 nt, Human
aggaucauuuguuggaauga

SEQ ID NO: 1443462 - RNA, 17 nt, Human
aggaucaguuaacuauu

SEQ ID NO: 1443463 - RNA, 18 nt, Human
aggaugaagggcccgaga

SEQ ID NO: 1443464 - RNA, 21 nt, Human
aggaucauuuguuggaaugaa

SEQ ID NO: 1443465 - RNA, 11 nt, Human
aggauccaggc

SEQ ID NO: 1443466 - RNA, 22 nt, Human
aggauagaugcuggcccagggc

SEQ ID NO: 1443467 - RNA, 21 nt, Human
aggauagaugcuggcccaggg

SEQ ID NO: 1443468 - RNA, 20 nt, Human
aggauagaugcuggcccagg

SEQ ID NO: 1443469 - RNA, 19 nt, Human
aggauagaugcuggcccag

SEQ ID NO: 1443470 - RNA, 18 nt, Human
aggauagaugcuggccca

SEQ ID NO: 1443471 - RNA, 15 nt, Human
aggauagaugcuggc

SEQ ID NO: 1443472 - RNA, 19 nt, Human
aggaggcuccagagggcac

SEQ ID NO: 1443473 - RNA, 18 nt, Human
aggaggcuccagagggca

SEQ ID NO: 1443474 - RNA, 17 nt, Human
aggaggcuccagagggc

SEQ ID NO: 1443475 - RNA, 16 nt, Human
aggaggcuccagaggg

SEQ ID NO: 1443476 - RNA, 13 nt, Human
aggaggcuccaga

SEQ ID NO: 1443477 - RNA, 20 nt, Human
aggaggcuaugcucaggggc

SEQ ID NO: 1443478 - RNA, 21 nt, Human
aggaggcuaugcucaggggcc

SEQ ID NO: 1443479 - RNA, 23 nt, Human
aggaggcuaugcucaggggcccu

SEQ ID NO: 1443480 - RNA, 20 nt, Human
aggaggagccuguccugccu

SEQ ID NO: 1443481 - RNA, 14 nt, Human
aggaggagccuguc

SEQ ID NO: 1443482 - RNA, 13 nt, Human
aggaggagccugu

SEQ ID NO: 1443483 - RNA, 18 nt, Human
aggaggacccagggcucu

SEQ ID NO: 1443484 - RNA, 18 nt, Human
uggaagccagcuuucccu

SEQ ID NO: 1443485 - RNA, 16 nt, Human
uggaagccagcuuucc

SEQ ID NO: 1443486 - RNA, 15 nt, Human
uggaagccagcuuuc

SEQ ID NO: 1443487 - RNA, 15 nt, Human
aggaggaauacugaa

SEQ ID NO: 1443488 - RNA, 18 nt, Human
aggaggaauacugaacau

SEQ ID NO: 1443489 - RNA, 14 nt, Human
aggaggaauacuga

SEQ ID NO: 1443490 - RNA, 21 nt, Human
aggaggaauaagcucccaggg

SEQ ID NO: 1443491 - RNA, 17 nt, Human
aggaggaaaucccuuca

SEQ ID NO: 1443492 - RNA, 12 nt, Human
aggaggacccag

SEQ ID NO: 1443493 - RNA, 13 nt, Human
aggaggacccagg

SEQ ID NO: 1443494 - RNA, 14 nt, Human
aggaggacccagga

SEQ ID NO: 1443495 - RNA, 15 nt, Human
aggaggacccaggac

SEQ ID NO: 1443496 - RNA, 16 nt, Human
aggaggacccaggaca

SEQ ID NO: 1443497 - RNA, 17 nt, Human
aggaggacccaggacag

SEQ ID NO: 1443498 - RNA, 17 nt, Human
aggaggacccagggcuc

SEQ ID NO: 1443499 - RNA, 16 nt, Human
aggaggacccagggcu

SEQ ID NO: 1443500 - RNA, 18 nt, Human
aggaggacccaggacagg

SEQ ID NO: 1443501 - RNA, 22 nt, Human
ugcuuugugauuuuuguaauuu

SEQ ID NO: 1443502 - RNA, 18 nt, Human
ugcuuuggaccuaaaugg

SEQ ID NO: 1443503 - RNA, 13 nt, Human
ugcuugaggaaaa

SEQ ID NO: 1443504 - RNA, 16 nt, Human
ugcuugaggaaaacaa

SEQ ID NO: 1443505 - RNA, 12 nt, Human
ugcuugaggaaa

SEQ ID NO: 1443506 - RNA, 15 nt, Human
ugcuuugggaagccg

SEQ ID NO: 1443507 - RNA, 23 nt, Human
ugcuuuggaccuaaauggccuca

SEQ ID NO: 1443508 - RNA, 22 nt, Human
ugcuuuggaccuaaauggccuc

SEQ ID NO: 1443509 - RNA, 21 nt, Human
ugcuuuggaccuaaauggccu

SEQ ID NO: 1443510 - RNA, 20 nt, Human
uggaagagcagcaccuccuc

SEQ ID NO: 1443511 - RNA, 16 nt, Human
uggaagagcagcaccu

SEQ ID NO: 1443512 - RNA, 17 nt, Human
uggaagacgcaagggcc

SEQ ID NO: 1443513 - RNA, 23 nt, Human
uggaagacgcaagggccugaugg

SEQ ID NO: 1443514 - RNA, 22 nt, Human
uggaagagcagcaccuccucag

SEQ ID NO: 1443515 - RNA, 17 nt, Human
uggaaauuuagcauugu

SEQ ID NO: 1443516 - RNA, 18 nt, Human
uggaaauuuagcauugua

SEQ ID NO: 1443517 - RNA, 15 nt, Human
uggaaauuuagcauu

SEQ ID NO: 1443518 - RNA, 22 nt, Human
uggaaauuuaaagcagguucuu

SEQ ID NO: 1443519 - RNA, 21 nt, Human
uggaaauuuaaagcagguucu

SEQ ID NO: 1443520 - RNA, 16 nt, Human
uggaaauuuaaagcag

SEQ ID NO: 1443521 - RNA, 14 nt, Human
uggaaauuuaaagc

SEQ ID NO: 1443522 - RNA, 13 nt, Human
uggaaauuuaaag

SEQ ID NO: 1443523 - RNA, 12 nt, Human
uggaaauuuaaa

SEQ ID NO: 1443524 - RNA, 18 nt, Human
uggaaauaaaucuuccua

SEQ ID NO: 1443525 - RNA, 17 nt, Human
uggaaauuggaagagca

SEQ ID NO: 1443526 - RNA, 16 nt, Human
uggaaauuggaagagc

SEQ ID NO: 1443527 - RNA, 23 nt, Human
uggaaauaaauguaucauagaaa

SEQ ID NO: 1443528 - RNA, 15 nt, Human
uggaaauaaauguau

SEQ ID NO: 1443529 - RNA, 13 nt, Human
uggaaauaaaugu

SEQ ID NO: 1443530 - RNA, 16 nt, Human
uggaaauaaagucaga

SEQ ID NO: 1443531 - RNA, 14 nt, Human
uggaaauaaaguca

SEQ ID NO: 1443532 - RNA, 12 nt, Human
uggaaauaaagu

SEQ ID NO: 1443533 - RNA, 21 nt, Human
ugcuuuuuccaacucagaaau

SEQ ID NO: 1443534 - RNA, 14 nt, Human
ugcuuuuuccaacu

SEQ ID NO: 1443535 - RNA, 15 nt, Human
ugcuuuuucaccaga

SEQ ID NO: 1443536 - RNA, 19 nt, Human
ugcuuuuuauuucugcaua

SEQ ID NO: 1443537 - RNA, 18 nt, Human
ugcuuuuuauuucugcau

SEQ ID NO: 1443538 - RNA, 15 nt, Human
ugcuuuuuauuucug

SEQ ID NO: 1443539 - RNA, 16 nt, Human
ugcuuuuuauggccug

SEQ ID NO: 1443540 - RNA, 17 nt, Human
aggccaccuccccagca

SEQ ID NO: 1443541 - RNA, 13 nt, Human
aggccagccuggc

SEQ ID NO: 1443542 - RNA, 23 nt, Human
aggccagccuggccuccugccuc

SEQ ID NO: 1443543 - RNA, 22 nt, Human
aggccagccuggccuccugccu

SEQ ID NO: 1443544 - RNA, 21 nt, Human
aggccagccuggccuccugcc

SEQ ID NO: 1443545 - RNA, 20 nt, Human
aggccagccuggccuccugc

SEQ ID NO: 1443546 - RNA, 19 nt, Human
aggccagccuggccuccug

SEQ ID NO: 1443547 - RNA, 18 nt, Human
aggccagccuggccuccu

SEQ ID NO: 1443548 - RNA, 17 nt, Human
aggccagccuggccucc

SEQ ID NO: 1443549 - RNA, 16 nt, Human
aggccagccuggccuc

SEQ ID NO: 1443550 - RNA, 15 nt, Human
aggccagccuggccu

SEQ ID NO: 1443551 - RNA, 14 nt, Human
aggccagccuggcc

SEQ ID NO: 1443552 - RNA, 15 nt, Human
aggccaccuccccag

SEQ ID NO: 1443553 - RNA, 14 nt, Human
aggccaccucccca

SEQ ID NO: 1443554 - RNA, 17 nt, Human
uggcaccagacacccag

SEQ ID NO: 1443555 - RNA, 16 nt, Human
uggcaccagacaccca

SEQ ID NO: 1443556 - RNA, 14 nt, Human
uggcaccagacacc

SEQ ID NO: 1443557 - RNA, 22 nt, Human
aggcccccagcccagggcuccu

SEQ ID NO: 1443558 - RNA, 19 nt, Human
aggcccccagcccagggcu

SEQ ID NO: 1443559 - RNA, 18 nt, Human
aggcccccagcccagggc

SEQ ID NO: 1443560 - RNA, 17 nt, Human
aggcccccagcccaggg

SEQ ID NO: 1443561 - RNA, 14 nt, Human
aggcccccagccca

SEQ ID NO: 1443562 - RNA, 20 nt, Human
aggcccccacuugccucuuc

SEQ ID NO: 1443563 - RNA, 18 nt, Human
aggcccccacuugccucu

SEQ ID NO: 1443564 - RNA, 17 nt, Human
aggcccccacuugccuc

SEQ ID NO: 1443565 - RNA, 13 nt, Human
aggcccccacuug

SEQ ID NO: 1443566 - RNA, 18 nt, Human
aggcccccaccuggcuca

SEQ ID NO: 1443567 - RNA, 17 nt, Human
aggcccccaccuggcuc

SEQ ID NO: 1443568 - RNA, 20 nt, Human
aggccccaugaccuccagcu

SEQ ID NO: 1443569 - RNA, 17 nt, Human
aggccccaugaccucca

SEQ ID NO: 1443570 - RNA, 16 nt, Human
aggccccaugaccucc

SEQ ID NO: 1443571 - RNA, 17 nt, Human
aggcccacauuggaaga

SEQ ID NO: 1443572 - RNA, 19 nt, Human
aggcccacauuggaagagc

SEQ ID NO: 1443573 - RNA, 17 nt, Human
aggcccaaggcucccgg

SEQ ID NO: 1443574 - RNA, 15 nt, Human
aggcccaaggcuccc

SEQ ID NO: 1443575 - RNA, 16 nt, Human
aggcccacugugccuc

SEQ ID NO: 1443576 - RNA, 18 nt, Human
aggcccccgccuuggccu

SEQ ID NO: 1443577 - RNA, 21 nt, Human
aggcccccaucauccucuggc

SEQ ID NO: 1443578 - RNA, 20 nt, Human
aggcccccaucauccucugg

SEQ ID NO: 1443579 - RNA, 19 nt, Human
aggcccccaucauccucug

SEQ ID NO: 1443580 - RNA, 18 nt, Human
aggcccccaucauccucu

SEQ ID NO: 1443581 - RNA, 19 nt, Human
aggcccccaccuggcucac

SEQ ID NO: 1443582 - RNA, 23 nt, Human
aggcccccagcccagggcuccug

SEQ ID NO: 1443583 - RNA, 19 nt, Human
aggcccccgccuuggccug

SEQ ID NO: 1443584 - RNA, 22 nt, Human
aggcccgagcagcugagcaggg

SEQ ID NO: 1443585 - RNA, 19 nt, Human
aggcccgcaugcggcccag

SEQ ID NO: 1443586 - RNA, 21 nt, Human
aggcccgagcagcugagcagg

SEQ ID NO: 1443587 - RNA, 19 nt, Human
aggcccgagcagcugagca

SEQ ID NO: 1443588 - RNA, 18 nt, Human
aggcccgagcagcugagc

SEQ ID NO: 1443589 - RNA, 15 nt, Human
aggcccgagcagcug

SEQ ID NO: 1443590 - RNA, 17 nt, Human
uggagucugccacccag

SEQ ID NO: 1443591 - RNA, 16 nt, Human
uggagguuaaggcaua

SEQ ID NO: 1443592 - RNA, 18 nt, Human
uggagucugccacccagg

SEQ ID NO: 1443593 - RNA, 22 nt, Human
uggagucugccacccaggaucc

SEQ ID NO: 1443594 - RNA, 23 nt, Human
uggagguggaaaagcaacauuca

SEQ ID NO: 1443595 - RNA, 20 nt, Human
uggaggucgguagguucagc

SEQ ID NO: 1443596 - RNA, 22 nt, Human
uggaguguuccccuuccacuga

SEQ ID NO: 1443597 - RNA, 19 nt, Human
uggaguguuccccuuccac

SEQ ID NO: 1443598 - RNA, 14 nt, Human
uggaguugaaaauc

SEQ ID NO: 1443599 - RNA, 19 nt, Human
uggaguguaugacugcaca

SEQ ID NO: 1443600 - RNA, 17 nt, Human
uggaguguaugacugca

SEQ ID NO: 1443601 - RNA, 14 nt, Human
uggaguguaugacu

SEQ ID NO: 1443602 - RNA, 20 nt, Human
uggaguggcagcccagccag

SEQ ID NO: 1443603 - RNA, 19 nt, Human
uggaguggcagcccagcca

SEQ ID NO: 1443604 - RNA, 18 nt, Human
uggaguggcagcccagcc

SEQ ID NO: 1443605 - RNA, 17 nt, Human
uggaguggcagcccagc

SEQ ID NO: 1443606 - RNA, 16 nt, Human
uggaguggcagcccag

SEQ ID NO: 1443607 - RNA, 13 nt, Human
uggaguggcagcc

SEQ ID NO: 1443608 - RNA, 17 nt, Human
uggagugcuguuuuguu

SEQ ID NO: 1443609 - RNA, 16 nt, Human
uggagugcuguuuugu

SEQ ID NO: 1443610 - RNA, 18 nt, Human
uggagugcaccaaagaga

SEQ ID NO: 1443611 - RNA, 16 nt, Human
uggagugcaccaaaga

SEQ ID NO: 1443612 - RNA, 13 nt, Human
uggagugcagugg

SEQ ID NO: 1443613 - RNA, 22 nt, Human
uggaguugaucuggaacccaga

SEQ ID NO: 1443614 - RNA, 19 nt, Human
uggaguugaucuggaaccc

SEQ ID NO: 1443615 - RNA, 17 nt, Human
uggaguugaucuggaac

SEQ ID NO: 1443616 - RNA, 15 nt, Human
uggaguugaucugga

SEQ ID NO: 1443617 - RNA, 21 nt, Human
uggauugcacguggccucuug

SEQ ID NO: 1443618 - RNA, 17 nt, Human
uggauugcacguggccu

SEQ ID NO: 1443619 - RNA, 23 nt, Human
uggcacaucagcacgauuucugu

SEQ ID NO: 1443620 - RNA, 19 nt, Human
uggauugcaauaucugaag

SEQ ID NO: 1443621 - RNA, 14 nt, Human
uggauucuuuccau

SEQ ID NO: 1443622 - RNA, 13 nt, Human
uggauucuaaaau

SEQ ID NO: 1443623 - RNA, 15 nt, Human
uggauucuaaaaugc

SEQ ID NO: 1443624 - RNA, 19 nt, Human
uggauuccccaucucaggc

SEQ ID NO: 1443625 - RNA, 22 nt, Human
uggauuccccaucucaggccag

SEQ ID NO: 1443626 - RNA, 18 nt, Human
uggauuccccaucucagg

SEQ ID NO: 1443627 - RNA, 12 nt, Human
uggauuccagag

SEQ ID NO: 1443628 - RNA, 23 nt, Human
aggcagggggaaggugggguccu

SEQ ID NO: 1443629 - RNA, 18 nt, Human
aggcaggggcuuccuggu

SEQ ID NO: 1443630 - RNA, 17 nt, Human
aggcaggggcuuccugg

SEQ ID NO: 1443631 - RNA, 16 nt, Human
aggcaggggcuuccug

SEQ ID NO: 1443632 - RNA, 15 nt, Human
aggcaggggcuuccu

SEQ ID NO: 1443633 - RNA, 14 nt, Human
aggcaggggcuucc

SEQ ID NO: 1443634 - RNA, 15 nt, Human
aggcaggggccucca

SEQ ID NO: 1443635 - RNA, 16 nt, Human
aggcaggggccuccau

SEQ ID NO: 1443636 - RNA, 23 nt, Human
aggcagggcucuccuggcuuccc

SEQ ID NO: 1443637 - RNA, 22 nt, Human
aggcagggcucuccuggcuucc

SEQ ID NO: 1443638 - RNA, 21 nt, Human
aggcagggcucuccuggcuuc

SEQ ID NO: 1443639 - RNA, 19 nt, Human
aggcagggcucuccuggcu

SEQ ID NO: 1443640 - RNA, 18 nt, Human
aggcagggcucuccuggc

SEQ ID NO: 1443641 - RNA, 17 nt, Human
aggcagggcucuccugg

SEQ ID NO: 1443642 - RNA, 15 nt, Human
aggcagggcucuccu

SEQ ID NO: 1443643 - RNA, 14 nt, Human
aggcagggcucucc

SEQ ID NO: 1443644 - RNA, 13 nt, Human
aggcagggcucuc

SEQ ID NO: 1443645 - RNA, 12 nt, Human
aggcagggcucu

SEQ ID NO: 1443646 - RNA, 16 nt, Human
aggcaggcucccaggg

SEQ ID NO: 1443647 - RNA, 15 nt, Human
aggcaggcucccagg

SEQ ID NO: 1443648 - RNA, 20 nt, Human
aggcaggcagggcucuccug

SEQ ID NO: 1443649 - RNA, 18 nt, Human
aggcaggcagggcucucc

SEQ ID NO: 1443650 - RNA, 16 nt, Human
aggcaggcagggcucu

SEQ ID NO: 1443651 - RNA, 15 nt, Human
aggcaggcagggcuc

SEQ ID NO: 1443652 - RNA, 14 nt, Human
aggcaggcagggcu

SEQ ID NO: 1443653 - RNA, 13 nt, Human
aggcaggcagggc

SEQ ID NO: 1443654 - RNA, 20 nt, Human
aggcaggauuggggaagaga

SEQ ID NO: 1443655 - RNA, 23 nt, Human
aggcaggauuggggaagagagcc

SEQ ID NO: 1443656 - RNA, 19 nt, Human
aggcaggauuggggaagag

SEQ ID NO: 1443657 - RNA, 16 nt, Human
aggcaggauuggggaa

SEQ ID NO: 1443658 - RNA, 22 nt, Human
aggcaggauugaaaauguccag

SEQ ID NO: 1443659 - RNA, 18 nt, Human
aggcaggauugaaaaugu

SEQ ID NO: 1443660 - RNA, 16 nt, Human
aggcaggauugaaaau

SEQ ID NO: 1443661 - RNA, 14 nt, Human
aggcaggauugaaa

SEQ ID NO: 1443662 - RNA, 13 nt, Human
aggcaggaagccc

SEQ ID NO: 1443663 - RNA, 20 nt, Human
aggcagcuuuuucucuccca

SEQ ID NO: 1443664 - RNA, 13 nt, Human
aggcacacagcua

SEQ ID NO: 1443665 - RNA, 15 nt, Human
aggcacacagcuacu

SEQ ID NO: 1443666 - RNA, 11 nt, Human
aggcacacagc

SEQ ID NO: 1443667 - RNA, 21 nt, Human
aggcauuugcaggguccucuu

SEQ ID NO: 1443668 - RNA, 18 nt, Human
aggcauuugcaggguccu

SEQ ID NO: 1443669 - RNA, 20 nt, Human
aggcauuuccuggguggcua

SEQ ID NO: 1443670 - RNA, 17 nt, Human
aggcauuuccugggugg

SEQ ID NO: 1443671 - RNA, 16 nt, Human
aggcauuuccugggug

SEQ ID NO: 1443672 - RNA, 15 nt, Human
aggcauuuccugggu

SEQ ID NO: 1443673 - RNA, 14 nt, Human
aggcauuuccuggg

SEQ ID NO: 1443674 - RNA, 13 nt, Human
aggcauuuccugg

SEQ ID NO: 1443675 - RNA, 12 nt, Human
aggcauuuccua

SEQ ID NO: 1443676 - RNA, 14 nt, Human
aggcauuggauauu

SEQ ID NO: 1443677 - RNA, 13 nt, Human
aggcauuggauau

SEQ ID NO: 1443678 - RNA, 21 nt, Human
aggcauugccaagggcuuugu

SEQ ID NO: 1443679 - RNA, 20 nt, Human
aggcauugccaagggcuuug

SEQ ID NO: 1443680 - RNA, 18 nt, Human
aggcauugccaagggcuu

SEQ ID NO: 1443681 - RNA, 16 nt, Human
aggcauugccaagggc

SEQ ID NO: 1443682 - RNA, 14 nt, Human
aggcauugccaagg

SEQ ID NO: 1443683 - RNA, 13 nt, Human
aggcauugccaag

SEQ ID NO: 1443684 - RNA, 21 nt, Human
aggcauacgagagcagagguc

SEQ ID NO: 1443685 - RNA, 20 nt, Human
aggcauacgagagcagaggu

SEQ ID NO: 1443686 - RNA, 14 nt, Human
aggcaguuugcaaa

SEQ ID NO: 1443687 - RNA, 14 nt, Human
aggcaguuuucuaa

SEQ ID NO: 1443688 - RNA, 13 nt, Human
aggcaguuuucua

SEQ ID NO: 1443689 - RNA, 12 nt, Human
aggcaguuuucu

SEQ ID NO: 1443690 - RNA, 19 nt, Human
aggcaguaauaaaaagauu

SEQ ID NO: 1443691 - RNA, 16 nt, Human
uggagcagaggggcug

SEQ ID NO: 1443692 - RNA, 13 nt, Human
uggagcagagggg

SEQ ID NO: 1443693 - RNA, 12 nt, Human
uggagcagaggg

SEQ ID NO: 1443694 - RNA, 17 nt, Human
uggagcagaccaccccg

SEQ ID NO: 1443695 - RNA, 13 nt, Human
uggagcagaccac

SEQ ID NO: 1443696 - RNA, 14 nt, Human
uggagcagaagcag

SEQ ID NO: 1443697 - RNA, 15 nt, Human
uggagcagaagcagc

SEQ ID NO: 1443698 - RNA, 22 nt, Human
uggagcacaauaaauggcugua

SEQ ID NO: 1443699 - RNA, 20 nt, Human
uggagcacaauaaauggcug

SEQ ID NO: 1443700 - RNA, 19 nt, Human
uggagcacaaagacccugg

SEQ ID NO: 1443701 - RNA, 22 nt, Human
uggagaaagggcccugggccug

SEQ ID NO: 1443702 - RNA, 21 nt, Human
uggagaaagggcccugggccu

SEQ ID NO: 1443703 - RNA, 13 nt, Human
uggagaaagggcc

SEQ ID NO: 1443704 - RNA, 23 nt, Human
uggagaaagcugacuuggcuggu

SEQ ID NO: 1443705 - RNA, 18 nt, Human
uggagaaagcugacuugg

SEQ ID NO: 1443706 - RNA, 15 nt, Human
uggagaaagcugacu

SEQ ID NO: 1443707 - RNA, 13 nt, Human
uggagaaagcuga

SEQ ID NO: 1443708 - RNA, 22 nt, Human
uggagaaaauggguuuauucac

SEQ ID NO: 1443709 - RNA, 13 nt, Human
uggagaaaauggg

SEQ ID NO: 1443710 - RNA, 15 nt, Human
uggacuucuggggua

SEQ ID NO: 1443711 - RNA, 19 nt, Human
uggacuuaagcaucuggcu

SEQ ID NO: 1443712 - RNA, 22 nt, Human
uggacuguuuucucucggcucc

SEQ ID NO: 1443713 - RNA, 20 nt, Human
uggacuguuuucucucggcu

SEQ ID NO: 1443714 - RNA, 17 nt, Human
uggacuguuuucucucg

SEQ ID NO: 1443715 - RNA, 23 nt, Human
aggauugcgagagauguguguug

SEQ ID NO: 1443716 - RNA, 21 nt, Human
aggauugcgagagaugugugu

SEQ ID NO: 1443717 - RNA, 21 nt, Human
uggagccagccgagcaggagg

SEQ ID NO: 1443718 - RNA, 23 nt, Human
aggcacacaccaccacgccuggc

SEQ ID NO: 1443719 - RNA, 21 nt, Human
uggagcauuucucaucaguag

SEQ ID NO: 1443720 - RNA, 17 nt, Human
uggagcauuucucauca

SEQ ID NO: 1443721 - RNA, 17 nt, Human
uggagcagaggggcuga

SEQ ID NO: 1443722 - RNA, 13 nt, Human
uggagcagccacc

SEQ ID NO: 1443723 - RNA, 16 nt, Human
uggagcagccacccca

SEQ ID NO: 1443724 - RNA, 22 nt, Human
uggagccagccgagcaggaggc

SEQ ID NO: 1443725 - RNA, 21 nt, Human
uggagcucgugggacagucac

SEQ ID NO: 1443726 - RNA, 21 nt, Human
uggagcucguggaacaguuac

SEQ ID NO: 1443727 - RNA, 17 nt, Human
uggagcucguggaacag

SEQ ID NO: 1443728 - RNA, 22 nt, Human
agcugugguuuucuuuugccau

SEQ ID NO: 1443729 - RNA, 21 nt, Human
agcuguguccaaaaccgccag

SEQ ID NO: 1443730 - RNA, 15 nt, Human
agcugugguuuucuu

SEQ ID NO: 1443731 - RNA, 19 nt, Human
agcugugcuuaugguacca

SEQ ID NO: 1443732 - RNA, 22 nt, Human
agcuguggcagaguuacaguuc

SEQ ID NO: 1443733 - RNA, 21 nt, Human
agcuguggcagaguuacaguu

SEQ ID NO: 1443734 - RNA, 18 nt, Human
agcuguggcagaguuaca

SEQ ID NO: 1443735 - RNA, 22 nt, Human
agcugugcuuaugguaccagau

SEQ ID NO: 1443736 - RNA, 14 nt, Human
agcugggucaggca

SEQ ID NO: 1443737 - RNA, 23 nt, Human
agcuggggugcagggaugugggu

SEQ ID NO: 1443738 - RNA, 19 nt, Human
ugccuguguccaugcgcuc

SEQ ID NO: 1443739 - RNA, 15 nt, Human
ugccuguguccaugc

SEQ ID NO: 1443740 - RNA, 23 nt, Human
ugccuguggcgccgucuccaggg

SEQ ID NO: 1443741 - RNA, 22 nt, Human
ugccuguggcgccgucuccagg

SEQ ID NO: 1443742 - RNA, 21 nt, Human
ugccuguggcgccgucuccag

SEQ ID NO: 1443743 - RNA, 11 nt, Human
ugccuguggcg

SEQ ID NO: 1443744 - RNA, 14 nt, Human
ugccuguggccaug

SEQ ID NO: 1443745 - RNA, 22 nt, Human
ugccuguguccaugcgcucagg

SEQ ID NO: 1443746 - RNA, 21 nt, Human
ugccuguguccaugcgcucag

SEQ ID NO: 1443747 - RNA, 19 nt, Human
ugccugugcuacaauucau

SEQ ID NO: 1443748 - RNA, 23 nt, Human
ugccugugccaggugaggucagc

SEQ ID NO: 1443749 - RNA, 16 nt, Human
ugccugugccagguga

SEQ ID NO: 1443750 - RNA, 12 nt, Human
ugccugugccag

SEQ ID NO: 1443751 - RNA, 21 nt, Human
agcugugugaauaccugcuca

SEQ ID NO: 1443752 - RNA, 22 nt, Human
agcuggggugcagggauguggg

SEQ ID NO: 1443753 - RNA, 16 nt, Human
ugccuuaacuggagcc

SEQ ID NO: 1443754 - RNA, 20 nt, Human
ugccuuacccucauguucuu

SEQ ID NO: 1443755 - RNA, 21 nt, Human
ugccuuacccucauguucuua

SEQ ID NO: 1443756 - RNA, 20 nt, Human
ugccuggaagagcagcccua

SEQ ID NO: 1443757 - RNA, 19 nt, Human
ugccuggaagagcagcccu

SEQ ID NO: 1443758 - RNA, 22 nt, Human
agcuggcggcuggggucccagc

SEQ ID NO: 1443759 - RNA, 23 nt, Human
agcuggcggcuggggucccagca

SEQ ID NO: 1443760 - RNA, 14 nt, Human
agcugcuuccagug

SEQ ID NO: 1443761 - RNA, 15 nt, Human
agcugcuuccagugu

SEQ ID NO: 1443762 - RNA, 18 nt, Human
ugccuggaagagcagccc

SEQ ID NO: 1443763 - RNA, 22 nt, Human
ugccugcuuuuuauggccugug

SEQ ID NO: 1443764 - RNA, 20 nt, Human
ugccugcuuuuuauggccug

SEQ ID NO: 1443765 - RNA, 21 nt, Human
ugccugcuuuuuauggccugu

SEQ ID NO: 1443766 - RNA, 21 nt, Human
ugccgauauacucuagaugaa

SEQ ID NO: 1443767 - RNA, 20 nt, Human
ugccgagcaaccguggcccu

SEQ ID NO: 1443768 - RNA, 21 nt, Human
ugccgagcaaccguggcccuu

SEQ ID NO: 1443769 - RNA, 19 nt, Human
ugccgagcaaccguggccc

SEQ ID NO: 1443770 - RNA, 17 nt, Human
ugccgagcaaccguggc

SEQ ID NO: 1443771 - RNA, 15 nt, Human
ugccgagcaaccgug

SEQ ID NO: 1443772 - RNA, 22 nt, Human
ugccgagaguccaucagccucc

SEQ ID NO: 1443773 - RNA, 19 nt, Human
agcugccccggccccuccc

SEQ ID NO: 1443774 - RNA, 17 nt, Human
agcugccccggccccuc

SEQ ID NO: 1443775 - RNA, 16 nt, Human
agcugccccggccccu

SEQ ID NO: 1443776 - RNA, 17 nt, Human
agcugcccacagcaggc

SEQ ID NO: 1443777 - RNA, 24 nt, Human
agcugccaguguccugagccccag

SEQ ID NO: 1443778 - RNA, 15 nt, Human
agcugccaguguccu

SEQ ID NO: 1443779 - RNA, 23 nt, Human
agcugccaggagcacggcucugu

SEQ ID NO: 1443780 - RNA, 22 nt, Human
agcugcacugaugcugccccuc

SEQ ID NO: 1443781 - RNA, 20 nt, Human
agcugcacugaugcugcccc

SEQ ID NO: 1443782 - RNA, 19 nt, Human
agcugcacugaugcugccc

SEQ ID NO: 1443783 - RNA, 17 nt, Human
agcugcacugaugcugc

SEQ ID NO: 1443784 - RNA, 11 nt, Human
agcugcacuga

SEQ ID NO: 1443785 - RNA, 23 nt, Human
agcugcaagguacucuggugagu

SEQ ID NO: 1443786 - RNA, 21 nt, Human
agcugcaagguacucugguga

SEQ ID NO: 1443787 - RNA, 14 nt, Human
agcucugggguggg

SEQ ID NO: 1443788 - RNA, 21 nt, Human
agcucugagaggcccuggauc

SEQ ID NO: 1443789 - RNA, 20 nt, Human
agcucugagaggcccuggau

SEQ ID NO: 1443790 - RNA, 19 nt, Human
agcucugagaggcccugga

SEQ ID NO: 1443791 - RNA, 18 nt, Human
agcucugagaggcccugg

SEQ ID NO: 1443792 - RNA, 17 nt, Human
agcucugagaggcccug

SEQ ID NO: 1443793 - RNA, 16 nt, Human
agcucugagaggcccu

SEQ ID NO: 1443794 - RNA, 15 nt, Human
agcucugagaggccc

SEQ ID NO: 1443795 - RNA, 13 nt, Human
agcucugagaggc

SEQ ID NO: 1443796 - RNA, 10 nt, Human
agcucugaga

SEQ ID NO: 1443797 - RNA, 20 nt, Human
agcucugacauucugauucg

SEQ ID NO: 1443798 - RNA, 16 nt, Human
agcucugaaagagaaa

SEQ ID NO: 1443799 - RNA, 22 nt, Human
agcucugaaagagaaacacgua

SEQ ID NO: 1443800 - RNA, 15 nt, Human
agcucugaaagagaa

SEQ ID NO: 1443801 - RNA, 19 nt, Human
agcucugaaaccaguguua

SEQ ID NO: 1443802 - RNA, 22 nt, Human
agcucuggggugggcaguuuuu

SEQ ID NO: 1443803 - RNA, 21 nt, Human
agcucuggggugggcaguuuu

SEQ ID NO: 1443804 - RNA, 20 nt, Human
agcucuggggugggcaguuu

SEQ ID NO: 1443805 - RNA, 19 nt, Human
agcucuggggugggcaguu

SEQ ID NO: 1443806 - RNA, 18 nt, Human
agcucugaaaccaguguu

SEQ ID NO: 1443807 - RNA, 13 nt, Human
agcucucugcccu

SEQ ID NO: 1443808 - RNA, 22 nt, Human
agcucgauguggucacagcugu

SEQ ID NO: 1443809 - RNA, 23 nt, Human
agcucgauguggucacagcugua

SEQ ID NO: 1443810 - RNA, 22 nt, Human
agcuccuuugggcuucagcugc

SEQ ID NO: 1443811 - RNA, 23 nt, Human
agcucccaggaccacaggcucag

SEQ ID NO: 1443812 - RNA, 23 nt, Human
agcuccaguguccugagcucagc

SEQ ID NO: 1443813 - RNA, 17 nt, Human
ugccauauuuucaccau

SEQ ID NO: 1443814 - RNA, 14 nt, Human
ugccauauuuucac

SEQ ID NO: 1443815 - RNA, 13 nt, Human
ugccauauuuuca

SEQ ID NO: 1443816 - RNA, 21 nt, Human
ugccauauugcacaugucuua

SEQ ID NO: 1443817 - RNA, 22 nt, Human
agcuccaguguccugagcucag

SEQ ID NO: 1443818 - RNA, 21 nt, Human
agcuccaguguccugagcuca

SEQ ID NO: 1443819 - RNA, 20 nt, Human
agcuccaguguccugagcuc

SEQ ID NO: 1443820 - RNA, 19 nt, Human
agcuccaguguccugagcu

SEQ ID NO: 1443821 - RNA, 18 nt, Human
agcuccaguguccugagc

SEQ ID NO: 1443822 - RNA, 16 nt, Human
agcuccaguguccuga

SEQ ID NO: 1443823 - RNA, 15 nt, Human
agcuccaguguccug

SEQ ID NO: 1443824 - RNA, 14 nt, Human
agcuccaguguccu

SEQ ID NO: 1443825 - RNA, 23 nt, Human
ugccaucaucuccugccuuccuc

SEQ ID NO: 1443826 - RNA, 16 nt, Human
ugccaucaucuccugc

SEQ ID NO: 1443827 - RNA, 15 nt, Human
ugccaucaucuccug

SEQ ID NO: 1443828 - RNA, 13 nt, Human
ugccaucaucucc

SEQ ID NO: 1443829 - RNA, 15 nt, Human
agcuuuccccagccc

SEQ ID NO: 1443830 - RNA, 22 nt, Human
agcuuucauguaaacugugcac

SEQ ID NO: 1443831 - RNA, 17 nt, Human
agcuuucagaauauguc

SEQ ID NO: 1443832 - RNA, 16 nt, Human
agcuuucagaauaugu

SEQ ID NO: 1443833 - RNA, 23 nt, Human
agcuuguuuacaugcuuauucca

SEQ ID NO: 1443834 - RNA, 19 nt, Human
agcuuguuuacaugcuuau

SEQ ID NO: 1443835 - RNA, 18 nt, Human
agcuuguuuacaugcuua

SEQ ID NO: 1443836 - RNA, 16 nt, Human
agcuuguuuacaugcu

SEQ ID NO: 1443837 - RNA, 13 nt, Human
agcuuguuuacau

SEQ ID NO: 1443838 - RNA, 15 nt, Human
agcuuuccugcccca

SEQ ID NO: 1443839 - RNA, 14 nt, Human
agcuuuccugcccc

SEQ ID NO: 1443840 - RNA, 13 nt, Human
agcuuuccugccc

SEQ ID NO: 1443841 - RNA, 12 nt, Human
agcuuuccugcc

SEQ ID NO: 1443842 - RNA, 16 nt, Human
agcuuucccugccucu

SEQ ID NO: 1443843 - RNA, 12 nt, Human
agcuuucccugc

SEQ ID NO: 1443844 - RNA, 10 nt, Human
agcuuugcuc

SEQ ID NO: 1443845 - RNA, 21 nt, Human
agcuuugcuaccaaagcaccu

SEQ ID NO: 1443846 - RNA, 16 nt, Human
agcuuugcuaccaaag

SEQ ID NO: 1443847 - RNA, 10 nt, Human
agcuuugcua

SEQ ID NO: 1443848 - RNA, 23 nt, Human
agcuuuccugccccaggccugaa

SEQ ID NO: 1443849 - RNA, 22 nt, Human
agcuuuccugccccaggccuga

SEQ ID NO: 1443850 - RNA, 21 nt, Human
agcuuuccugccccaggccug

SEQ ID NO: 1443851 - RNA, 20 nt, Human
agcuuuccugccccaggccu

SEQ ID NO: 1443852 - RNA, 23 nt, Human
agcuuugcucuuugguagaaaag

SEQ ID NO: 1443853 - RNA, 21 nt, Human
agcuuugcucuuugguagaaa

SEQ ID NO: 1443854 - RNA, 18 nt, Human
agcuuugcucuuugguag

SEQ ID NO: 1443855 - RNA, 18 nt, Human
agcuuuggaccuaaucca

SEQ ID NO: 1443856 - RNA, 18 nt, Human
agcuuuggaaguuuagcu

SEQ ID NO: 1443857 - RNA, 23 nt, Human
agcuuuggaaguuuagcucugag

SEQ ID NO: 1443858 - RNA, 19 nt, Human
agcuuuggaccuaauccaa

SEQ ID NO: 1443859 - RNA, 22 nt, Human
agcuuuggaaguuuagcucuga

SEQ ID NO: 1443860 - RNA, 14 nt, Human
aggaaaagacacau

SEQ ID NO: 1443861 - RNA, 17 nt, Human
agcuuguggcaagugaa

SEQ ID NO: 1443862 - RNA, 18 nt, Human
agcuuguggcaagugaau

SEQ ID NO: 1443863 - RNA, 23 nt, Human
agcuuguccaacccgaggcccgc

SEQ ID NO: 1443864 - RNA, 16 nt, Human
agcuuguagccagccg

SEQ ID NO: 1443865 - RNA, 22 nt, Human
agcuuguccaacccgaggcccg

SEQ ID NO: 1443866 - RNA, 15 nt, Human
agcuuguagccagcc

SEQ ID NO: 1443867 - RNA, 14 nt, Human
agcuuguagccagc

SEQ ID NO: 1443868 - RNA, 22 nt, Human
agcuugauguuggaucucaaga

SEQ ID NO: 1443869 - RNA, 18 nt, Human
agcuugauaaagggccaa

SEQ ID NO: 1443870 - RNA, 16 nt, Human
agcuugaccugaggcu

SEQ ID NO: 1443871 - RNA, 14 nt, Human
agcuugaccugagg

SEQ ID NO: 1443872 - RNA, 22 nt, Human
agcuuacaaauacuaaaaagaa

SEQ ID NO: 1443873 - RNA, 22 nt, Human
agcuuaauggcugauaauuuua

SEQ ID NO: 1443874 - RNA, 19 nt, Human
agcuuaauggcugauaauu

SEQ ID NO: 1443875 - RNA, 13 nt, Human
ugcuaauuuguuu

SEQ ID NO: 1443876 - RNA, 18 nt, Human
ugcuaauuuauccugaaa

SEQ ID NO: 1443877 - RNA, 22 nt, Human
ugcuaaucuucuuaugcaauuu

SEQ ID NO: 1443878 - RNA, 20 nt, Human
ugcuaaucuucuuaugcaau

SEQ ID NO: 1443879 - RNA, 13 nt, Human
ugcuaaucuucuu

SEQ ID NO: 1443880 - RNA, 23 nt, Human
ugcuaaucagggaggucauuuug

SEQ ID NO: 1443881 - RNA, 22 nt, Human
ugcuaaucagggaggucauuuu

SEQ ID NO: 1443882 - RNA, 20 nt, Human
ugcuaauauuuuccuccuga

SEQ ID NO: 1443883 - RNA, 18 nt, Human
ugcuaauauuuuccuccu

SEQ ID NO: 1443884 - RNA, 17 nt, Human
ugcuaagugugaacugg

SEQ ID NO: 1443885 - RNA, 19 nt, Human
ugcuaagugugaacuggac

SEQ ID NO: 1443886 - RNA, 18 nt, Human
ugcgguagccagcacaca

SEQ ID NO: 1443887 - RNA, 13 nt, Human
ugcuaagugugaa

SEQ ID NO: 1443888 - RNA, 14 nt, Human
ugcuaagugugaac

SEQ ID NO: 1443889 - RNA, 15 nt, Human
ugcuaagugugaacu

SEQ ID NO: 1443890 - RNA, 16 nt, Human
ugcuaagugugaacug

SEQ ID NO: 1443891 - RNA, 17 nt, Human
ugcgguagccagcacac

SEQ ID NO: 1443892 - RNA, 16 nt, Human
ugcgguagccagcaca

SEQ ID NO: 1443893 - RNA, 15 nt, Human
ugcgguagccagcac

SEQ ID NO: 1443894 - RNA, 23 nt, Human
ugccuugguuuuuacugcucuga

SEQ ID NO: 1443895 - RNA, 13 nt, Human
ugccuugguuuuu

SEQ ID NO: 1443896 - RNA, 19 nt, Human
ugccuuuugcaaccaggaa

SEQ ID NO: 1443897 - RNA, 15 nt, Human
ugccuugucacgcca

SEQ ID NO: 1443898 - RNA, 19 nt, Human
ugccuuuucccaacuccag

SEQ ID NO: 1443899 - RNA, 22 nt, Human
agcuguuuacuagggaucccuc

SEQ ID NO: 1443900 - RNA, 16 nt, Human
agcuguuuacuaggga

SEQ ID NO: 1443901 - RNA, 22 nt, Human
ugcuaccaguauuuagaagcca

SEQ ID NO: 1443902 - RNA, 18 nt, Human
ugcuaccaguauuuagaa

SEQ ID NO: 1443903 - RNA, 15 nt, Human
ugcuaccaguauuua

SEQ ID NO: 1443904 - RNA, 22 nt, Human
ugcuaccaccagcuguguccaa

SEQ ID NO: 1443905 - RNA, 21 nt, Human
ugcuaccaccagcugugucca

SEQ ID NO: 1443906 - RNA, 20 nt, Human
ugcuaccaccagcugugucc

SEQ ID NO: 1443907 - RNA, 18 nt, Human
ugcuaccaccagcugugu

SEQ ID NO: 1443908 - RNA, 17 nt, Human
ugcuaccaccagcugug

SEQ ID NO: 1443909 - RNA, 16 nt, Human
ugcuaccaccagcugu

SEQ ID NO: 1443910 - RNA, 15 nt, Human
ugcuaccaccagcug

SEQ ID NO: 1443911 - RNA, 14 nt, Human
ugcuaccaccagcu

SEQ ID NO: 1443912 - RNA, 13 nt, Human
ugcuaccaccagc

SEQ ID NO: 1443913 - RNA, 13 nt, Human
ugcuaccaaagca

SEQ ID NO: 1443914 - RNA, 18 nt, Human
ugcuacaggguccaacau

SEQ ID NO: 1443915 - RNA, 20 nt, Human
ugcuacaggguccaacauag

SEQ ID NO: 1443916 - RNA, 22 nt, Human
ugcuacaccuauuaucccagcu

SEQ ID NO: 1443917 - RNA, 16 nt, Human
ugcuaauuuugaaaaa

SEQ ID NO: 1443918 - RNA, 18 nt, Human
ugcuaauuuugaaaaacu

SEQ ID NO: 1443919 - RNA, 19 nt, Human
ugcuaauuuugaaaaacug

SEQ ID NO: 1443920 - RNA, 20 nt, Human
ugcuaauuuugaaaaacugc

SEQ ID NO: 1443921 - RNA, 15 nt, Human
aggaagccaaagagu

SEQ ID NO: 1443922 - RNA, 22 nt, Human
aggaagcauuguaaaauaauuc

SEQ ID NO: 1443923 - RNA, 21 nt, Human
aggaagcauuguaaaauaauu

SEQ ID NO: 1443924 - RNA, 19 nt, Human
aggaagcauuguaaaauaa

SEQ ID NO: 1443925 - RNA, 17 nt, Human
aggaagcauuguaaaau

SEQ ID NO: 1443926 - RNA, 16 nt, Human
aggaagcauuguaaaa

SEQ ID NO: 1443927 - RNA, 15 nt, Human
aggaagcauuguaaa

SEQ ID NO: 1443928 - RNA, 14 nt, Human
aggaagcagccaag

SEQ ID NO: 1443929 - RNA, 19 nt, Human
aggaagcaaauagaagaga

SEQ ID NO: 1443930 - RNA, 17 nt, Human
aggaagauuacucagua

SEQ ID NO: 1443931 - RNA, 18 nt, Human
aggaagaucccccagaaa

SEQ ID NO: 1443932 - RNA, 17 nt, Human
aggaagaucccccagaa

SEQ ID NO: 1443933 - RNA, 22 nt, Human
aggaaggaggacccaggacagg

SEQ ID NO: 1443934 - RNA, 16 nt, Human
aggaaggcagggagga

SEQ ID NO: 1443935 - RNA, 18 nt, Human
aggaaggcagggaggagg

SEQ ID NO: 1443936 - RNA, 20 nt, Human
aggaaggcagggaggaggca

SEQ ID NO: 1443937 - RNA, 22 nt, Human
aggaaggcagggaggaggcaga

SEQ ID NO: 1443938 - RNA, 16 nt, Human
aggaauuacgugcucu

SEQ ID NO: 1443939 - RNA, 23 nt, Human
aggaaugggaaggaugaagggcc

SEQ ID NO: 1443940 - RNA, 17 nt, Human
ugcugaggccugggccg

SEQ ID NO: 1443941 - RNA, 13 nt, Human
aggaaagucauug

SEQ ID NO: 1443942 - RNA, 16 nt, Human
ugcugaggccugggcc

SEQ ID NO: 1443943 - RNA, 15 nt, Human
ugcugaggccugggc

SEQ ID NO: 1443944 - RNA, 14 nt, Human
ugcugaggccuggg

SEQ ID NO: 1443945 - RNA, 13 nt, Human
ugcugaggccugg

SEQ ID NO: 1443946 - RNA, 23 nt, Human
ugcugagcucugagaggcccugg

SEQ ID NO: 1443947 - RNA, 22 nt, Human
ugcugagcucugagaggcccug

SEQ ID NO: 1443948 - RNA, 21 nt, Human
ugcugagcucugagaggcccu

SEQ ID NO: 1443949 - RNA, 17 nt, Human
ugcugagcucugagagg

SEQ ID NO: 1443950 - RNA, 15 nt, Human
ugcugagcucugaga

SEQ ID NO: 1443951 - RNA, 14 nt, Human
ugcugagcucugag

SEQ ID NO: 1443952 - RNA, 13 nt, Human
ugcugagcucuga

SEQ ID NO: 1443953 - RNA, 20 nt, Human
ugcugagauuacagguguga

SEQ ID NO: 1443954 - RNA, 19 nt, Human
ugcugagauacauacagaa

SEQ ID NO: 1443955 - RNA, 18 nt, Human
ugcugagauacauacaga

SEQ ID NO: 1443956 - RNA, 22 nt, Human
ugcugagagggcucgaggggug

SEQ ID NO: 1443957 - RNA, 10 nt, Human
ugcugagacu

SEQ ID NO: 1443958 - RNA, 20 nt, Human
ugcugagauacauacagaau

SEQ ID NO: 1443959 - RNA, 23 nt, Human
ugcugagccuguaaaauaaaagg

SEQ ID NO: 1443960 - RNA, 21 nt, Human
aggaagagccuuccacccagg

SEQ ID NO: 1443961 - RNA, 19 nt, Human
aggaagagccuuccaccca

SEQ ID NO: 1443962 - RNA, 17 nt, Human
aggaagagccuuccacc

SEQ ID NO: 1443963 - RNA, 15 nt, Human
aggaagagccuucca

SEQ ID NO: 1443964 - RNA, 20 nt, Human
aggaagaggggaagcagaaa

SEQ ID NO: 1443965 - RNA, 14 nt, Human
aggaagagggacag

SEQ ID NO: 1443966 - RNA, 16 nt, Human
aggaagaucccccaga

SEQ ID NO: 1443967 - RNA, 16 nt, Human
aggaaagucauuggcu

SEQ ID NO: 1443968 - RNA, 17 nt, Human
aggaaagucauuggcuu

SEQ ID NO: 1443969 - RNA, 19 nt, Human
aggaaagucauuggcuuua

SEQ ID NO: 1443970 - RNA, 20 nt, Human
aggaaagucauuggcuuuau

SEQ ID NO: 1443971 - RNA, 22 nt, Human
aggaaagucauuggcuuuaucc

SEQ ID NO: 1443972 - RNA, 23 nt, Human
aggaaagucauuggcuuuauccu

SEQ ID NO: 1443973 - RNA, 18 nt, Human
ugcucugaacacgaagcu

SEQ ID NO: 1443974 - RNA, 15 nt, Human
ugcucucuuucuguc

SEQ ID NO: 1443975 - RNA, 20 nt, Human
ugcucugagaauuguugaga

SEQ ID NO: 1443976 - RNA, 11 nt, Human
ugcucugagaa

SEQ ID NO: 1443977 - RNA, 23 nt, Human
ugcucccaccuccugacacccuu

SEQ ID NO: 1443978 - RNA, 18 nt, Human
ugcucccaccuccugaca

SEQ ID NO: 1443979 - RNA, 15 nt, Human
ugcucccaccuccug

SEQ ID NO: 1443980 - RNA, 14 nt, Human
ugcucccaccuccu

SEQ ID NO: 1443981 - RNA, 12 nt, Human
ugcucccaccuc

SEQ ID NO: 1443982 - RNA, 22 nt, Human
ugcucccaaggggccugagcag

SEQ ID NO: 1443983 - RNA, 21 nt, Human
ugcucccaaggggccugagca

SEQ ID NO: 1443984 - RNA, 18 nt, Human
ugcucuuagcugucugcu

SEQ ID NO: 1443985 - RNA, 14 nt, Human
ugcucuucaagaaa

SEQ ID NO: 1443986 - RNA, 23 nt, Human
ugcucugcgugucaccugugcuu

SEQ ID NO: 1443987 - RNA, 22 nt, Human
ugcucugcgugucaccugugcu

SEQ ID NO: 1443988 - RNA, 21 nt, Human
ugcugagaaccuggccuucag

SEQ ID NO: 1443989 - RNA, 20 nt, Human
ugcugagaaccuggccuuca

SEQ ID NO: 1443990 - RNA, 19 nt, Human
ugcugagaaccuggccuuc

SEQ ID NO: 1443991 - RNA, 18 nt, Human
ugcugagaaccuggccuu

SEQ ID NO: 1443992 - RNA, 17 nt, Human
ugcugagaaccuggccu

SEQ ID NO: 1443993 - RNA, 15 nt, Human
ugcugagaaaacaug

SEQ ID NO: 1443994 - RNA, 17 nt, Human
ugcucuugaugccuggc

SEQ ID NO: 1443995 - RNA, 22 nt, Human
aggaaacaguugcauguaguaa

SEQ ID NO: 1443996 - RNA, 21 nt, Human
aggaaacaguugcauguagua

SEQ ID NO: 1443997 - RNA, 20 nt, Human
aggaaacaguugcauguagu

SEQ ID NO: 1443998 - RNA, 19 nt, Human
aggaaacaguugcauguag

SEQ ID NO: 1443999 - RNA, 17 nt, Human
aggaaacaguugcaugu

SEQ ID NO: 1444000 - RNA, 14 nt, Human
aggaaaauugaaug

SEQ ID NO: 1444001 - RNA, 19 nt, Human
aggaaacaaccaugucauu

SEQ ID NO: 1444002 - RNA, 21 nt, Human
aggaaaauuuuagcgugcuca

SEQ ID NO: 1444003 - RNA, 16 nt, Human
aggaaaauugaaugca

SEQ ID NO: 1444004 - RNA, 23 nt, Human
aggaaaccaguuaggucucaaua

SEQ ID NO: 1444005 - RNA, 22 nt, Human
ugcuaucgcaccacuguguauu

SEQ ID NO: 1444006 - RNA, 13 nt, Human
ugcuauuugaagu

SEQ ID NO: 1444007 - RNA, 23 nt, Human
agggccaugcugaggccugggcc

SEQ ID NO: 1444008 - RNA, 22 nt, Human
agggccaugcugaggccugggc

SEQ ID NO: 1444009 - RNA, 21 nt, Human
agggccaugcugaggccuggg

SEQ ID NO: 1444010 - RNA, 20 nt, Human
agggccaugcugaggccugg

SEQ ID NO: 1444011 - RNA, 19 nt, Human
agggccaugcugaggccug

SEQ ID NO: 1444012 - RNA, 16 nt, Human
agggccagagccaggg

SEQ ID NO: 1444013 - RNA, 15 nt, Human
agggccagagccagg

SEQ ID NO: 1444014 - RNA, 14 nt, Human
agggccagagccag

SEQ ID NO: 1444015 - RNA, 13 nt, Human
agggccagagcca

SEQ ID NO: 1444016 - RNA, 12 nt, Human
agggccagagcc

SEQ ID NO: 1444017 - RNA, 11 nt, Human
agggccagagc

SEQ ID NO: 1444018 - RNA, 19 nt, Human
agggccgacuaagagaagu

SEQ ID NO: 1444019 - RNA, 20 nt, Human
agggccgacuaagagaaguu

SEQ ID NO: 1444020 - RNA, 13 nt, Human
agggcucacucag

SEQ ID NO: 1444021 - RNA, 15 nt, Human
agggcccugugucug

SEQ ID NO: 1444022 - RNA, 16 nt, Human
agggcccugggccugc

SEQ ID NO: 1444023 - RNA, 18 nt, Human
agggcccugggccugccu

SEQ ID NO: 1444024 - RNA, 15 nt, Human
agggcccuccuuccu

SEQ ID NO: 1444025 - RNA, 15 nt, Human
agggcaucucugggc

SEQ ID NO: 1444026 - RNA, 14 nt, Human
agggcaucucuggg

SEQ ID NO: 1444027 - RNA, 22 nt, Human
agggcaugccacgugggcucau

SEQ ID NO: 1444028 - RNA, 18 nt, Human
agggcaucucugggcugg

SEQ ID NO: 1444029 - RNA, 17 nt, Human
agggcaucucugggcug

SEQ ID NO: 1444030 - RNA, 16 nt, Human
agggcaucucugggcu

SEQ ID NO: 1444031 - RNA, 17 nt, Human
agggccacgcuccagcu

SEQ ID NO: 1444032 - RNA, 20 nt, Human
agggccacgcuccagcugcc

SEQ ID NO: 1444033 - RNA, 16 nt, Human
agggccacgcuccagc

SEQ ID NO: 1444034 - RNA, 15 nt, Human
agggccacgcuccag

SEQ ID NO: 1444035 - RNA, 21 nt, Human
agggccacaugggaggcucac

SEQ ID NO: 1444036 - RNA, 20 nt, Human
agggccacaugggaggcuca

SEQ ID NO: 1444037 - RNA, 17 nt, Human
agggcagcgccaggcug

SEQ ID NO: 1444038 - RNA, 18 nt, Human
agggcacugacggacuca

SEQ ID NO: 1444039 - RNA, 21 nt, Human
agggcacccuaguucuaccuc

SEQ ID NO: 1444040 - RNA, 21 nt, Human
agggcaccagggguuucucgc

SEQ ID NO: 1444041 - RNA, 19 nt, Human
agggcaccagggguuucuc

SEQ ID NO: 1444042 - RNA, 14 nt, Human
agggcaccaggggu

SEQ ID NO: 1444043 - RNA, 16 nt, Human
ugggcacuggauuagu

SEQ ID NO: 1444044 - RNA, 15 nt, Human
ugggcagaaggccaa

SEQ ID NO: 1444045 - RNA, 16 nt, Human
ugggcagaaggccaag

SEQ ID NO: 1444046 - RNA, 17 nt, Human
ugggcagaaggccaaga

SEQ ID NO: 1444047 - RNA, 18 nt, Human
ugggcagaaggccaagag

SEQ ID NO: 1444048 - RNA, 14 nt, Human
ugggccauguccaa

SEQ ID NO: 1444049 - RNA, 20 nt, Human
ugggccagucuguggaucag

SEQ ID NO: 1444050 - RNA, 16 nt, Human
ugggccagucugugga

SEQ ID NO: 1444051 - RNA, 23 nt, Human
ugggccauguccaaagaggcugc

SEQ ID NO: 1444052 - RNA, 19 nt, Human
ugggccauguccaaagagg

SEQ ID NO: 1444053 - RNA, 18 nt, Human
ugggccauguccaaagag

SEQ ID NO: 1444054 - RNA, 17 nt, Human
ugggccauguccaaaga

SEQ ID NO: 1444055 - RNA, 21 nt, Human
ugggccccaggggaacacugg

SEQ ID NO: 1444056 - RNA, 19 nt, Human
ugggccccauguuaacccc

SEQ ID NO: 1444057 - RNA, 15 nt, Human
agggaggcugguccu

SEQ ID NO: 1444058 - RNA, 14 nt, Human
agggaggcuggucc

SEQ ID NO: 1444059 - RNA, 22 nt, Human
agggaggcugcugcugcucuug

SEQ ID NO: 1444060 - RNA, 15 nt, Human
agggaggcugcugcu

SEQ ID NO: 1444061 - RNA, 23 nt, Human
agggaggccgaagcuaacaggga

SEQ ID NO: 1444062 - RNA, 16 nt, Human
agggaggccgaagcua

SEQ ID NO: 1444063 - RNA, 14 nt, Human
agggaggccgaagc

SEQ ID NO: 1444064 - RNA, 17 nt, Human
agggaggcauggucugc

SEQ ID NO: 1444065 - RNA, 20 nt, Human
ugggccccugccucucugca

SEQ ID NO: 1444066 - RNA, 15 nt, Human
ugggccccugccucu

SEQ ID NO: 1444067 - RNA, 19 nt, Human
ugggccccugccucucugc

SEQ ID NO: 1444068 - RNA, 19 nt, Human
agggaauaagguacaagaa

SEQ ID NO: 1444069 - RNA, 22 nt, Human
agggacaaguggacucagggca

SEQ ID NO: 1444070 - RNA, 21 nt, Human
agggacaaaggagccugugaa

SEQ ID NO: 1444071 - RNA, 20 nt, Human
agggacaaaggagccuguga

SEQ ID NO: 1444072 - RNA, 19 nt, Human
agggacaaaggagccugug

SEQ ID NO: 1444073 - RNA, 18 nt, Human
agggacaaaggagccugu

SEQ ID NO: 1444074 - RNA, 17 nt, Human
agggacaaaggagccug

SEQ ID NO: 1444075 - RNA, 16 nt, Human
agggacaaaggagccu

SEQ ID NO: 1444076 - RNA, 15 nt, Human
agggacaaaggagcc

SEQ ID NO: 1444077 - RNA, 14 nt, Human
agggacaaaggagc

SEQ ID NO: 1444078 - RNA, 13 nt, Human
agggaaugugaaa

SEQ ID NO: 1444079 - RNA, 16 nt, Human
agggaauugcagagua

SEQ ID NO: 1444080 - RNA, 14 nt, Human
agggaaugugaaau

SEQ ID NO: 1444081 - RNA, 16 nt, Human
agggaagggccugcca

SEQ ID NO: 1444082 - RNA, 14 nt, Human
agggaagggccugc

SEQ ID NO: 1444083 - RNA, 13 nt, Human
agggaagggccug

SEQ ID NO: 1444084 - RNA, 19 nt, Human
agggaagggagccaaggga

SEQ ID NO: 1444085 - RNA, 16 nt, Human
agggaagggagccaag

SEQ ID NO: 1444086 - RNA, 15 nt, Human
agggaagggagccaa

SEQ ID NO: 1444087 - RNA, 14 nt, Human
agggaagggagcca

SEQ ID NO: 1444088 - RNA, 13 nt, Human
agggaagggagcc

SEQ ID NO: 1444089 - RNA, 12 nt, Human
agggaagggagc

SEQ ID NO: 1444090 - RNA, 19 nt, Human
agggaaggcuggacuaggc

SEQ ID NO: 1444091 - RNA, 20 nt, Human
agggaagggagccaagggau

SEQ ID NO: 1444092 - RNA, 18 nt, Human
agggaagggccugccaca

SEQ ID NO: 1444093 - RNA, 18 nt, Human
agggaaggcaggcagggc

SEQ ID NO: 1444094 - RNA, 20 nt, Human
agggaaggcaggcagggcuc

SEQ ID NO: 1444095 - RNA, 16 nt, Human
agggaaggcaggcagg

SEQ ID NO: 1444096 - RNA, 15 nt, Human
agggaaggcaggcag

SEQ ID NO: 1444097 - RNA, 14 nt, Human
agggaaggcaggca

SEQ ID NO: 1444098 - RNA, 12 nt, Human
agggaaggcagg

SEQ ID NO: 1444099 - RNA, 19 nt, Human
agggaaggaggagccuguc

SEQ ID NO: 1444100 - RNA, 17 nt, Human
agggaaggaggagccug

SEQ ID NO: 1444101 - RNA, 23 nt, Human
agggaaggaucccaugagcuccu

SEQ ID NO: 1444102 - RNA, 22 nt, Human
agggaaggaucccaugagcucc

SEQ ID NO: 1444103 - RNA, 15 nt, Human
agggaaggaucccau

SEQ ID NO: 1444104 - RNA, 22 nt, Human
agggaaggauacaaaagcaugu

SEQ ID NO: 1444105 - RNA, 14 nt, Human
agggaagcucuugg

SEQ ID NO: 1444106 - RNA, 17 nt, Human
agggaagcagcagccuc

SEQ ID NO: 1444107 - RNA, 18 nt, Human
agggaagcagcagccucg

SEQ ID NO: 1444108 - RNA, 17 nt, Human
agggaaccacuuucuua

SEQ ID NO: 1444109 - RNA, 23 nt, Human
agggaacaauuuggcaauuuugu

SEQ ID NO: 1444110 - RNA, 21 nt, Human
agggaacaauuuggcaauuuu

SEQ ID NO: 1444111 - RNA, 14 nt, Human
agggaaccuguguc

SEQ ID NO: 1444112 - RNA, 22 nt, Human
agggaacccagcucuaauacau

SEQ ID NO: 1444113 - RNA, 23 nt, Human
agggaacccagcucuaauacauu

SEQ ID NO: 1444114 - RNA, 15 nt, Human
aggcccucgcugcca

SEQ ID NO: 1444115 - RNA, 23 nt, Human
aggcccucccuguuccccagaga

SEQ ID NO: 1444116 - RNA, 22 nt, Human
aggcccucccuguuccccagag

SEQ ID NO: 1444117 - RNA, 20 nt, Human
aggcccucccuguuccccag

SEQ ID NO: 1444118 - RNA, 23 nt, Human
aggcccuccacaccugcggccca

SEQ ID NO: 1444119 - RNA, 21 nt, Human
aggcccuccacaccugcggcc

SEQ ID NO: 1444120 - RNA, 20 nt, Human
aggcccuccacaccugcggc

SEQ ID NO: 1444121 - RNA, 19 nt, Human
aggcccuccacaccugcgg

SEQ ID NO: 1444122 - RNA, 18 nt, Human
aggcccuccacaccugcg

SEQ ID NO: 1444123 - RNA, 17 nt, Human
aggcccuccacaccugc

SEQ ID NO: 1444124 - RNA, 16 nt, Human
aggcccuccacaccug

SEQ ID NO: 1444125 - RNA, 23 nt, Human
aggcccucaagucuuucucuuuc

SEQ ID NO: 1444126 - RNA, 18 nt, Human
aggcccucaagucuuucu

SEQ ID NO: 1444127 - RNA, 20 nt, Human
aggcccgcucuacaucuucu

SEQ ID NO: 1444128 - RNA, 23 nt, Human
ugggagaaucgcuccugcagccc

SEQ ID NO: 1444129 - RNA, 18 nt, Human
ugggacugcuaaauaaaa

SEQ ID NO: 1444130 - RNA, 17 nt, Human
ugggacugcuaaauaaa

SEQ ID NO: 1444131 - RNA, 18 nt, Human
ugggacuaaaugcccugc

SEQ ID NO: 1444132 - RNA, 23 nt, Human
ugggacucagccuucagacagag

SEQ ID NO: 1444133 - RNA, 17 nt, Human
ugggacucagccuucag

SEQ ID NO: 1444134 - RNA, 13 nt, Human
ugggacucagccu

SEQ ID NO: 1444135 - RNA, 15 nt, Human
ugggacuaaaugccc

SEQ ID NO: 1444136 - RNA, 21 nt, Human
ugggacguggcucagccagca

SEQ ID NO: 1444137 - RNA, 18 nt, Human
ugggagaccuguaaucau

SEQ ID NO: 1444138 - RNA, 22 nt, Human
ugggagaccggccugccaggag

SEQ ID NO: 1444139 - RNA, 21 nt, Human
ugggagaccggccugccagga

SEQ ID NO: 1444140 - RNA, 20 nt, Human
ugggagaccggccugccagg

SEQ ID NO: 1444141 - RNA, 16 nt, Human
ugggagacaugugaca

SEQ ID NO: 1444142 - RNA, 15 nt, Human
ugggagacaugugac

SEQ ID NO: 1444143 - RNA, 14 nt, Human
ugggagacauguga

SEQ ID NO: 1444144 - RNA, 21 nt, Human
ugggagagacuuguuuuggau

SEQ ID NO: 1444145 - RNA, 15 nt, Human
ugggagagacuuguu

SEQ ID NO: 1444146 - RNA, 14 nt, Human
ugggagagacuugu

SEQ ID NO: 1444147 - RNA, 12 nt, Human
ugggagagacuu

SEQ ID NO: 1444148 - RNA, 23 nt, Human
ugggagaccggccugccaggagg

SEQ ID NO: 1444149 - RNA, 16 nt, Human
agggagagggggcugg

SEQ ID NO: 1444150 - RNA, 19 nt, Human
agggagagucucccaggga

SEQ ID NO: 1444151 - RNA, 20 nt, Human
agggagagucucccagggag

SEQ ID NO: 1444152 - RNA, 22 nt, Human
agggagagucucccagggagca

SEQ ID NO: 1444153 - RNA, 13 nt, Human
agggagagggggc

SEQ ID NO: 1444154 - RNA, 19 nt, Human
agggagcaaguccuucccu

SEQ ID NO: 1444155 - RNA, 21 nt, Human
agggagcaaguccuucccuuu

SEQ ID NO: 1444156 - RNA, 19 nt, Human
agggagagcccaggagcuc

SEQ ID NO: 1444157 - RNA, 21 nt, Human
agggagagcccaggagcuccc

SEQ ID NO: 1444158 - RNA, 18 nt, Human
agggagagcccaggagcu

SEQ ID NO: 1444159 - RNA, 14 nt, Human
agggagagcccagg

SEQ ID NO: 1444160 - RNA, 13 nt, Human
agggagagcccag

SEQ ID NO: 1444161 - RNA, 12 nt, Human
agggagagccca

SEQ ID NO: 1444162 - RNA, 16 nt, Human
agggacagaggcccca

SEQ ID NO: 1444163 - RNA, 14 nt, Human
agggacaccuggga

SEQ ID NO: 1444164 - RNA, 21 nt, Human
agggacaccugggagaaaucu

SEQ ID NO: 1444165 - RNA, 19 nt, Human
agggacaaguggacucagg

SEQ ID NO: 1444166 - RNA, 20 nt, Human
agggaggaggcagagaagaa

SEQ ID NO: 1444167 - RNA, 20 nt, Human
ugggguccuggagcagacca

SEQ ID NO: 1444168 - RNA, 21 nt, Human
uggggucccagcagcugccag

SEQ ID NO: 1444169 - RNA, 15 nt, Human
uggggucccagcagc

SEQ ID NO: 1444170 - RNA, 14 nt, Human
uggggucccagcag

SEQ ID NO: 1444171 - RNA, 14 nt, Human
uggggcuggccucc

SEQ ID NO: 1444172 - RNA, 17 nt, Human
uggggcuggagaggaca

SEQ ID NO: 1444173 - RNA, 20 nt, Human
uggggcucuaacgccugagc

SEQ ID NO: 1444174 - RNA, 19 nt, Human
uggggcucuaacgccugag

SEQ ID NO: 1444175 - RNA, 18 nt, Human
uggggcucuaacgccuga

SEQ ID NO: 1444176 - RNA, 17 nt, Human
uggggcucuaacgccug

SEQ ID NO: 1444177 - RNA, 19 nt, Human
uggggugcagggauguggg

SEQ ID NO: 1444178 - RNA, 18 nt, Human
uggggugcagggaugugg

SEQ ID NO: 1444179 - RNA, 15 nt, Human
uggggugcagggaug

SEQ ID NO: 1444180 - RNA, 11 nt, Human
uggggugcagg

SEQ ID NO: 1444181 - RNA, 23 nt, Human
uggggugacccggcacccccugc

SEQ ID NO: 1444182 - RNA, 22 nt, Human
uggggugacccggcacccccug

SEQ ID NO: 1444183 - RNA, 16 nt, Human
uggggucuguaaaauc

SEQ ID NO: 1444184 - RNA, 18 nt, Human
uggggucuggcagccucc

SEQ ID NO: 1444185 - RNA, 13 nt, Human
uggggucuguaaa

SEQ ID NO: 1444186 - RNA, 17 nt, Human
uggggucuggcagccuc

SEQ ID NO: 1444187 - RNA, 14 nt, Human
uggggucuggcagc

SEQ ID NO: 1444188 - RNA, 21 nt, Human
uggggucuggaguugaucugg

SEQ ID NO: 1444189 - RNA, 14 nt, Human
uggggucugacccc

SEQ ID NO: 1444190 - RNA, 20 nt, Human
ugggguggcugcagccucag

SEQ ID NO: 1444191 - RNA, 19 nt, Human
ugggguggcugcagccuca

SEQ ID NO: 1444192 - RNA, 18 nt, Human
ugggguggcugcagccuc

SEQ ID NO: 1444193 - RNA, 16 nt, Human
ugggguggcugcagcc

SEQ ID NO: 1444194 - RNA, 14 nt, Human
ugggguggcugcag

SEQ ID NO: 1444195 - RNA, 13 nt, Human
ugggguggcugca

SEQ ID NO: 1444196 - RNA, 12 nt, Human
ugggguggcugc

SEQ ID NO: 1444197 - RNA, 18 nt, Human
agggcuuuguuuugcaca

SEQ ID NO: 1444198 - RNA, 14 nt, Human
aggggaagaggccu

SEQ ID NO: 1444199 - RNA, 15 nt, Human
aggggaagaggccug

SEQ ID NO: 1444200 - RNA, 21 nt, Human
aggggaagcagaaauccaagc

SEQ ID NO: 1444201 - RNA, 17 nt, Human
uggggagcgggucugcu

SEQ ID NO: 1444202 - RNA, 16 nt, Human
uggggagcaggcagcc

SEQ ID NO: 1444203 - RNA, 21 nt, Human
uggggagcccgucucaguguu

SEQ ID NO: 1444204 - RNA, 19 nt, Human
uggggagcccgucucagug

SEQ ID NO: 1444205 - RNA, 18 nt, Human
uggggagcccgucucagu

SEQ ID NO: 1444206 - RNA, 17 nt, Human
uggggagcaggcagcca

SEQ ID NO: 1444207 - RNA, 23 nt, Human
uggggagacauaaccacugcuuc

SEQ ID NO: 1444208 - RNA, 13 nt, Human
uggggaggaggag

SEQ ID NO: 1444209 - RNA, 12 nt, Human
uggggaggacaa

SEQ ID NO: 1444210 - RNA, 20 nt, Human
uggggagcgggucugcuccc

SEQ ID NO: 1444211 - RNA, 19 nt, Human
uggggagcgggucugcucc

SEQ ID NO: 1444212 - RNA, 18 nt, Human
uggggagggauucugguu

SEQ ID NO: 1444213 - RNA, 12 nt, Human
uggggaggagga

SEQ ID NO: 1444214 - RNA, 17 nt, Human
uggggagacugggcuga

SEQ ID NO: 1444215 - RNA, 14 nt, Human
agggcucugaggcg

SEQ ID NO: 1444216 - RNA, 21 nt, Human
uggggagacugggcugaggga

SEQ ID NO: 1444217 - RNA, 13 nt, Human
uggggagagacgg

SEQ ID NO: 1444218 - RNA, 16 nt, Human
agggcucugaggcgcc

SEQ ID NO: 1444219 - RNA, 13 nt, Human
agggcucugaggc

SEQ ID NO: 1444220 - RNA, 12 nt, Human
agggcucugagg

SEQ ID NO: 1444221 - RNA, 11 nt, Human
agggcucugag

SEQ ID NO: 1444222 - RNA, 17 nt, Human
agggcucuccuggcuuc

SEQ ID NO: 1444223 - RNA, 16 nt, Human
agggcucuccuggcuu

SEQ ID NO: 1444224 - RNA, 15 nt, Human
agggcucuccuggcu

SEQ ID NO: 1444225 - RNA, 14 nt, Human
agggcucuccuggc

SEQ ID NO: 1444226 - RNA, 12 nt, Human
agggcucuccug

SEQ ID NO: 1444227 - RNA, 18 nt, Human
agggcucgaggggugggc

SEQ ID NO: 1444228 - RNA, 20 nt, Human
agggcucgaggggugggcug

SEQ ID NO: 1444229 - RNA, 23 nt, Human
agggcuccuugugggccugggcu

SEQ ID NO: 1444230 - RNA, 22 nt, Human
agggcuccuugugggccugggc

SEQ ID NO: 1444231 - RNA, 21 nt, Human
agggcuccuugugggccuggg

SEQ ID NO: 1444232 - RNA, 20 nt, Human
agggcuccuugugggccugg

SEQ ID NO: 1444233 - RNA, 19 nt, Human
agggcuccuugugggccug

SEQ ID NO: 1444234 - RNA, 22 nt, Human
uggggagggauucugguuccag

SEQ ID NO: 1444235 - RNA, 11 nt, Human
uggggccugua

SEQ ID NO: 1444236 - RNA, 14 nt, Human
uggggccugguucc

SEQ ID NO: 1444237 - RNA, 14 nt, Human
uggggccugggagg

SEQ ID NO: 1444238 - RNA, 13 nt, Human
uggggccugggag

SEQ ID NO: 1444239 - RNA, 22 nt, Human
uggggccugggacaacugcucc

SEQ ID NO: 1444240 - RNA, 14 nt, Human
uggggccugggaca

SEQ ID NO: 1444241 - RNA, 13 nt, Human
uggggccugggac

SEQ ID NO: 1444242 - RNA, 12 nt, Human
uggggccuggga

SEQ ID NO: 1444243 - RNA, 17 nt, Human
uggggcucagagccggg

SEQ ID NO: 1444244 - RNA, 13 nt, Human
uggggcucagagc

SEQ ID NO: 1444245 - RNA, 17 nt, Human
uggggcucacacaccug

SEQ ID NO: 1444246 - RNA, 20 nt, Human
uggggccuguacugccugcu

SEQ ID NO: 1444247 - RNA, 19 nt, Human
uggggccuguacugccugc

SEQ ID NO: 1444248 - RNA, 18 nt, Human
uggggccuguacugccug

SEQ ID NO: 1444249 - RNA, 23 nt, Human
uggggcuccuccaggguggcagc

SEQ ID NO: 1444250 - RNA, 15 nt, Human
aggggucaaguuauu

SEQ ID NO: 1444251 - RNA, 21 nt, Human
aggggucaaguuauuaauuuc

SEQ ID NO: 1444252 - RNA, 19 nt, Human
agggguaggggcugggaac

SEQ ID NO: 1444253 - RNA, 18 nt, Human
agggguaggggcugggaa

SEQ ID NO: 1444254 - RNA, 16 nt, Human
agggguaggggcuggg

SEQ ID NO: 1444255 - RNA, 15 nt, Human
agggguaggggcugg

SEQ ID NO: 1444256 - RNA, 14 nt, Human
agggguaggggcug

SEQ ID NO: 1444257 - RNA, 18 nt, Human
agggggcuggaggagccc

SEQ ID NO: 1444258 - RNA, 17 nt, Human
agggggcuggaggagcc

SEQ ID NO: 1444259 - RNA, 16 nt, Human
agggggcuggaggagc

SEQ ID NO: 1444260 - RNA, 14 nt, Human
agggggcuggagga

SEQ ID NO: 1444261 - RNA, 19 nt, Human
agggggcuggaggagccca

SEQ ID NO: 1444262 - RNA, 21 nt, Human
agggguugcuccgccuggccu

SEQ ID NO: 1444263 - RNA, 16 nt, Human
agggguuggggaaaca

SEQ ID NO: 1444264 - RNA, 23 nt, Human
aggguaaaucaguaagagguguu

SEQ ID NO: 1444265 - RNA, 14 nt, Human
aggguaaacaauau

SEQ ID NO: 1444266 - RNA, 13 nt, Human
aggguaaacaaua

SEQ ID NO: 1444267 - RNA, 11 nt, Human
aggguaaauca

SEQ ID NO: 1444268 - RNA, 13 nt, Human
agggggcuggagg

SEQ ID NO: 1444269 - RNA, 12 nt, Human
agggggcuggag

SEQ ID NO: 1444270 - RNA, 20 nt, Human
agggggcugcugcugggcuc

SEQ ID NO: 1444271 - RNA, 19 nt, Human
agggggcugcugcugggcu

SEQ ID NO: 1444272 - RNA, 14 nt, Human
agggggcugcugcu

SEQ ID NO: 1444273 - RNA, 13 nt, Human
agggggcugcugc

SEQ ID NO: 1444274 - RNA, 15 nt, Human
agggggcggccuaug

SEQ ID NO: 1444275 - RNA, 12 nt, Human
agggggcggccu

SEQ ID NO: 1444276 - RNA, 20 nt, Human
agggggcgccugugguucug

SEQ ID NO: 1444277 - RNA, 15 nt, Human
agggggcgccugugg

SEQ ID NO: 1444278 - RNA, 21 nt, Human
aggggcugcuuccuccuggaa

SEQ ID NO: 1444279 - RNA, 16 nt, Human
agggggcaagaggaau

SEQ ID NO: 1444280 - RNA, 20 nt, Human
aggggcugcuuccuccugga

SEQ ID NO: 1444281 - RNA, 18 nt, Human
aggggcugcuuccuccug

SEQ ID NO: 1444282 - RNA, 16 nt, Human
aggggcugcuuccucc

SEQ ID NO: 1444283 - RNA, 15 nt, Human
aggggcugcuuccuc

SEQ ID NO: 1444284 - RNA, 16 nt, Human
aggggcuccuuuccau

SEQ ID NO: 1444285 - RNA, 24 nt, Human
aggggagcccacuguccugggccu

SEQ ID NO: 1444286 - RNA, 21 nt, Human
aggggagcccacuguccuggg

SEQ ID NO: 1444287 - RNA, 17 nt, Human
aggggagcccacugucc

SEQ ID NO: 1444288 - RNA, 13 nt, Human
aggggagcccacu

SEQ ID NO: 1444289 - RNA, 12 nt, Human
aggggagcccac

SEQ ID NO: 1444290 - RNA, 22 nt, Human
aggggagcagaggggcagaggc

SEQ ID NO: 1444291 - RNA, 20 nt, Human
aggggagcagaggggcagag

SEQ ID NO: 1444292 - RNA, 16 nt, Human
aggggagcagaggggc

SEQ ID NO: 1444293 - RNA, 13 nt, Human
aggggagcagagg

SEQ ID NO: 1444294 - RNA, 16 nt, Human
aggggaaucagaacuc

SEQ ID NO: 1444295 - RNA, 15 nt, Human
aggggaaucagaacu

SEQ ID NO: 1444296 - RNA, 16 nt, Human
aggggaauugaggaca

SEQ ID NO: 1444297 - RNA, 24 nt, Human
ugguaacuuuugugaauuaggcug

SEQ ID NO: 1444298 - RNA, 16 nt, Human
ugguaacuuuugugaa

SEQ ID NO: 1444299 - RNA, 14 nt, Human
ugguaacuuuugug

SEQ ID NO: 1444300 - RNA, 22 nt, Human
ugguaacugcuuucuguuccaa

SEQ ID NO: 1444301 - RNA, 14 nt, Human
ugguaacugcuuuc

SEQ ID NO: 1444302 - RNA, 14 nt, Human
ugguacccucugga

SEQ ID NO: 1444303 - RNA, 21 nt, Human
ugguacccuccuggcucuuga

SEQ ID NO: 1444304 - RNA, 16 nt, Human
ugguacccuccuggcu

SEQ ID NO: 1444305 - RNA, 15 nt, Human
ugguacccuccuggc

SEQ ID NO: 1444306 - RNA, 13 nt, Human
ugguaccagaugc

SEQ ID NO: 1444307 - RNA, 18 nt, Human
ugguaccagauaacuuuu

SEQ ID NO: 1444308 - RNA, 14 nt, Human
ugguaccagauaac

SEQ ID NO: 1444309 - RNA, 13 nt, Human
ugguaccagauaa

SEQ ID NO: 1444310 - RNA, 17 nt, Human
ugguagaccacugccau

SEQ ID NO: 1444311 - RNA, 23 nt, Human
ugguagaccacugccauaugauu

SEQ ID NO: 1444312 - RNA, 17 nt, Human
ugguagaccaaaauaaa

SEQ ID NO: 1444313 - RNA, 20 nt, Human
uggucacguuuggugcuucu

SEQ ID NO: 1444314 - RNA, 21 nt, Human
agggucuguagguugcacacu

SEQ ID NO: 1444315 - RNA, 22 nt, Human
agggucuguagguugcacacuu

SEQ ID NO: 1444316 - RNA, 20 nt, Human
agggucuguagguugcacac

SEQ ID NO: 1444317 - RNA, 19 nt, Human
agggucuguagguugcaca

SEQ ID NO: 1444318 - RNA, 23 nt, Human
agggucugggggcacaagacuga

SEQ ID NO: 1444319 - RNA, 22 nt, Human
agggucugggggcacaagacug

SEQ ID NO: 1444320 - RNA, 23 nt, Human
agggucugcucuuucucugccag

SEQ ID NO: 1444321 - RNA, 22 nt, Human
agggucugcucuuucucugcca

SEQ ID NO: 1444322 - RNA, 21 nt, Human
agggucugcucuuucucugcc

SEQ ID NO: 1444323 - RNA, 20 nt, Human
agggucugcucuuucucugc

SEQ ID NO: 1444324 - RNA, 17 nt, Human
agggucugcucuuucuc

SEQ ID NO: 1444325 - RNA, 14 nt, Human
agggucugcucuuu

SEQ ID NO: 1444326 - RNA, 13 nt, Human
agggucugcucuu

SEQ ID NO: 1444327 - RNA, 23 nt, Human
agggugggcuuguggggccuggg

SEQ ID NO: 1444328 - RNA, 21 nt, Human
aggguggggggggggcgcggc

SEQ ID NO: 1444329 - RNA, 18 nt, Human
uggguccaugggcagagc

SEQ ID NO: 1444330 - RNA, 22 nt, Human
agggugggcuuguggggccugg

SEQ ID NO: 1444331 - RNA, 17 nt, Human
agggugggcuugugggg

SEQ ID NO: 1444332 - RNA, 13 nt, Human
ugggucccaggac

SEQ ID NO: 1444333 - RNA, 16 nt, Human
ugggucgcccuggacu

SEQ ID NO: 1444334 - RNA, 18 nt, Human
ugggucgcccuggacugu

SEQ ID NO: 1444335 - RNA, 23 nt, Human
ugggugccuaggccugggcagug

SEQ ID NO: 1444336 - RNA, 21 nt, Human
ugggugccuaggccugggcag

SEQ ID NO: 1444337 - RNA, 17 nt, Human
ugggugccuaggccugg

SEQ ID NO: 1444338 - RNA, 16 nt, Human
ugggugccuaggccug

SEQ ID NO: 1444339 - RNA, 22 nt, Human
ugggugaggaucccugaaggcc

SEQ ID NO: 1444340 - RNA, 12 nt, Human
ugggugacauuu

SEQ ID NO: 1444341 - RNA, 21 nt, Human
ugggucgcccuggacugugug

SEQ ID NO: 1444342 - RNA, 17 nt, Human
uggugcggcuggccaug

SEQ ID NO: 1444343 - RNA, 22 nt, Human
uggugcggcuggccauggagaa

SEQ ID NO: 1444344 - RNA, 16 nt, Human
uggugcggcuggccau

SEQ ID NO: 1444345 - RNA, 14 nt, Human
uggugcggcuggcc

SEQ ID NO: 1444346 - RNA, 14 nt, Human
uggugccuucauuu

SEQ ID NO: 1444347 - RNA, 12 nt, Human
uggugccuucau

SEQ ID NO: 1444348 - RNA, 13 nt, Human
uggugccuccaga

SEQ ID NO: 1444349 - RNA, 17 nt, Human
aggugaggucuguuccu

SEQ ID NO: 1444350 - RNA, 17 nt, Human
aggugaggucagcacau

SEQ ID NO: 1444351 - RNA, 23 nt, Human
uggugucucuucuuuagaacagg

SEQ ID NO: 1444352 - RNA, 17 nt, Human
uggugucucuucuuuag

SEQ ID NO: 1444353 - RNA, 15 nt, Human
ugguggcacaggccc

SEQ ID NO: 1444354 - RNA, 14 nt, Human
ugguuagaaaugca

SEQ ID NO: 1444355 - RNA, 13 nt, Human
ugguuagaaaugc

SEQ ID NO: 1444356 - RNA, 13 nt, Human
ugguuagaaaagu

SEQ ID NO: 1444357 - RNA, 15 nt, Human
ugguuaccaugucuu

SEQ ID NO: 1444358 - RNA, 13 nt, Human
ugguggagggcca

SEQ ID NO: 1444359 - RNA, 20 nt, Human
uggugcugggagaggcagcc

SEQ ID NO: 1444360 - RNA, 13 nt, Human
uggugcugggaga

SEQ ID NO: 1444361 - RNA, 23 nt, Human
uggugcuucucagauuucugagg

SEQ ID NO: 1444362 - RNA, 20 nt, Human
agguccacaggucuagacua

SEQ ID NO: 1444363 - RNA, 19 nt, Human
agguccacaggucuagacu

SEQ ID NO: 1444364 - RNA, 18 nt, Human
agguccacaggucuagac

SEQ ID NO: 1444365 - RNA, 15 nt, Human
agguccacaggucua

SEQ ID NO: 1444366 - RNA, 14 nt, Human
agguccacaggucu

SEQ ID NO: 1444367 - RNA, 15 nt, Human
aggucagccacuguu

SEQ ID NO: 1444368 - RNA, 16 nt, Human
aggucagcaugucuau

SEQ ID NO: 1444369 - RNA, 15 nt, Human
aggucagcaugucua

SEQ ID NO: 1444370 - RNA, 21 nt, Human
aggucagcacaucucaacagg

SEQ ID NO: 1444371 - RNA, 14 nt, Human
agguccagcucugg

SEQ ID NO: 1444372 - RNA, 13 nt, Human
agguccagcucug

SEQ ID NO: 1444373 - RNA, 19 nt, Human
agguccagagagaccgagg

SEQ ID NO: 1444374 - RNA, 20 nt, Human
agguccagagagaccgagga

SEQ ID NO: 1444375 - RNA, 18 nt, Human
agguccagcucuggaggg

SEQ ID NO: 1444376 - RNA, 17 nt, Human
agguccagcucuggagg

SEQ ID NO: 1444377 - RNA, 16 nt, Human
agguccagcucuggag

SEQ ID NO: 1444378 - RNA, 15 nt, Human
agguccagcucugga

SEQ ID NO: 1444379 - RNA, 21 nt, Human
aggucuucaucgaaucuacua

SEQ ID NO: 1444380 - RNA, 20 nt, Human
aggucuucaucgaaucuacu

SEQ ID NO: 1444381 - RNA, 19 nt, Human
aggugacaucggaaaaaua

SEQ ID NO: 1444382 - RNA, 13 nt, Human
aggugaccccagg

SEQ ID NO: 1444383 - RNA, 21 nt, Human
aggugaauagccauauuugua

SEQ ID NO: 1444384 - RNA, 22 nt, Human
aggugaauagccauauuuguaa

SEQ ID NO: 1444385 - RNA, 19 nt, Human
aggugaauagccauauuug

SEQ ID NO: 1444386 - RNA, 19 nt, Human
aggucuucuuaauauguuc

SEQ ID NO: 1444387 - RNA, 21 nt, Human
aggugaccccagggcacagga

SEQ ID NO: 1444388 - RNA, 24 nt, Human
aggugaccccagggcacaggagcu

SEQ ID NO: 1444389 - RNA, 19 nt, Human
aggugaccccagggcacag

SEQ ID NO: 1444390 - RNA, 18 nt, Human
aggugaccccagggcaca

SEQ ID NO: 1444391 - RNA, 17 nt, Human
aggugaccccagggcac

SEQ ID NO: 1444392 - RNA, 16 nt, Human
aggugaccccagggca

SEQ ID NO: 1444393 - RNA, 15 nt, Human
aggugaccccagggc

SEQ ID NO: 1444394 - RNA, 14 nt, Human
aggugaccccaggg

SEQ ID NO: 1444395 - RNA, 19 nt, Human
aggugaccaaaucagugug

SEQ ID NO: 1444396 - RNA, 21 nt, Human
aggugacugucuggggagcgg

SEQ ID NO: 1444397 - RNA, 18 nt, Human
aggugacugucuggggag

SEQ ID NO: 1444398 - RNA, 17 nt, Human
aggugacugucugggga

SEQ ID NO: 1444399 - RNA, 15 nt, Human
aggugacugucuggg

SEQ ID NO: 1444400 - RNA, 14 nt, Human
aggugacugucugg

SEQ ID NO: 1444401 - RNA, 14 nt, Human
aggugagaccaccu

SEQ ID NO: 1444402 - RNA, 15 nt, Human
aggugagaccaccuc

SEQ ID NO: 1444403 - RNA, 13 nt, Human
aggugagaaauuu

SEQ ID NO: 1444404 - RNA, 16 nt, Human
aggugagaccaccucu

SEQ ID NO: 1444405 - RNA, 21 nt, Human
aggugcccagaauaaguuauu

SEQ ID NO: 1444406 - RNA, 18 nt, Human
aggugccacuggagugug

SEQ ID NO: 1444407 - RNA, 14 nt, Human
aggugcccaggaga

SEQ ID NO: 1444408 - RNA, 15 nt, Human
aggugcccaggagaa

SEQ ID NO: 1444409 - RNA, 13 nt, Human
aggugcccaggag

SEQ ID NO: 1444410 - RNA, 12 nt, Human
aggugcccagga

SEQ ID NO: 1444411 - RNA, 13 nt, Human
aggugccacugga

SEQ ID NO: 1444412 - RNA, 15 nt, Human
aggugcauuuuuacu

SEQ ID NO: 1444413 - RNA, 18 nt, Human
aggugccugucccacccc

SEQ ID NO: 1444414 - RNA, 17 nt, Human
aggugccugucccaccc

SEQ ID NO: 1444415 - RNA, 22 nt, Human
agguucuccguuagcuccugug

SEQ ID NO: 1444416 - RNA, 21 nt, Human
agguucuccguuagcuccugu

SEQ ID NO: 1444417 - RNA, 20 nt, Human
agguucuccguuagcuccug

SEQ ID NO: 1444418 - RNA, 19 nt, Human
agguucuccguuagcuccu

SEQ ID NO: 1444419 - RNA, 21 nt, Human
agguucuccaacaucacagcc

SEQ ID NO: 1444420 - RNA, 13 nt, Human
agguucuccaaca

SEQ ID NO: 1444421 - RNA, 19 nt, Human
agguucuagguuucaaaga

SEQ ID NO: 1444422 - RNA, 17 nt, Human
agguucuagguuucaaa

SEQ ID NO: 1444423 - RNA, 17 nt, Human
agguguuaacauuccaa

SEQ ID NO: 1444424 - RNA, 23 nt, Human
agguguggcuuuaggagcagugg

SEQ ID NO: 1444425 - RNA, 20 nt, Human
agguguggagccgaggccua

SEQ ID NO: 1444426 - RNA, 14 nt, Human
agguucuuacugcu

SEQ ID NO: 1444427 - RNA, 16 nt, Human
agguucuuacugcuug

SEQ ID NO: 1444428 - RNA, 22 nt, Human
agguucuccaacaucacagccc

SEQ ID NO: 1444429 - RNA, 22 nt, Human
aggugucucaggcugccugagu

SEQ ID NO: 1444430 - RNA, 20 nt, Human
aggugucucaggcugccuga

SEQ ID NO: 1444431 - RNA, 19 nt, Human
aggugucucaggcugccug

SEQ ID NO: 1444432 - RNA, 18 nt, Human
aggugucucaggcugccu

SEQ ID NO: 1444433 - RNA, 17 nt, Human
aggugucucaggcugcc

SEQ ID NO: 1444434 - RNA, 16 nt, Human
aggugucucaggcugc

SEQ ID NO: 1444435 - RNA, 14 nt, Human
aggugucucaggcu

SEQ ID NO: 1444436 - RNA, 13 nt, Human
aggugucucaggc

SEQ ID NO: 1444437 - RNA, 20 nt, Human
agguguccuacagaaaaacc

SEQ ID NO: 1444438 - RNA, 19 nt, Human
agguguccuacagaaaaac

SEQ ID NO: 1444439 - RNA, 18 nt, Human
agguguccuacagaaaaa

SEQ ID NO: 1444440 - RNA, 17 nt, Human
agguguccuacagaaaa

SEQ ID NO: 1444441 - RNA, 16 nt, Human
agguguccuacagaaa

SEQ ID NO: 1444442 - RNA, 15 nt, Human
agguguccuacagaa

SEQ ID NO: 1444443 - RNA, 14 nt, Human
agguguccuacaga

SEQ ID NO: 1444444 - RNA, 17 nt, Human
ugguuugccuuccagaa

SEQ ID NO: 1444445 - RNA, 16 nt, Human
ugguuugccuuccaga

SEQ ID NO: 1444446 - RNA, 19 nt, Human
ugguuugcagcgacuggca

SEQ ID NO: 1444447 - RNA, 15 nt, Human
ugguuugcagguggc

SEQ ID NO: 1444448 - RNA, 15 nt, Human
ugguuuguaaauuaa

SEQ ID NO: 1444449 - RNA, 21 nt, Human
ugguuuguaaauuaacuuuua

SEQ ID NO: 1444450 - RNA, 19 nt, Human
uguaaacuguguauuccaa

SEQ ID NO: 1444451 - RNA, 18 nt, Human
ugguuugcagcgacuggc

SEQ ID NO: 1444452 - RNA, 18 nt, Human
ugguuucccaagagcuac

SEQ ID NO: 1444453 - RNA, 17 nt, Human
ugguuucccaagagcua

SEQ ID NO: 1444454 - RNA, 13 nt, Human
ugguuucccaaga

SEQ ID NO: 1444455 - RNA, 17 nt, Human
ugguuaugaauacuuug

SEQ ID NO: 1444456 - RNA, 13 nt, Human
uguaaacuuuuug

SEQ ID NO: 1444457 - RNA, 18 nt, Human
uguaaacuuuaucacuua

SEQ ID NO: 1444458 - RNA, 19 nt, Human
uguaaacuuuaucacuuaa

SEQ ID NO: 1444459 - RNA, 17 nt, Human
uguaaacuuuaucacuu

SEQ ID NO: 1444460 - RNA, 22 nt, Human
uguaaacuguguauuccaagac

SEQ ID NO: 1444461 - RNA, 19 nt, Human
uguaaaguauguauuauuu

SEQ ID NO: 1444462 - RNA, 21 nt, Human
uguaaaggagucaaaacuaca

SEQ ID NO: 1444463 - RNA, 19 nt, Human
uguaaaggagucaaaacua

SEQ ID NO: 1444464 - RNA, 16 nt, Human
uguaaaggagucaaaa

SEQ ID NO: 1444465 - RNA, 12 nt, Human
uguaaauauaaa

SEQ ID NO: 1444466 - RNA, 13 nt, Human
uguaaauauaaag

SEQ ID NO: 1444467 - RNA, 14 nt, Human
uguaaauaaaaaga

SEQ ID NO: 1444468 - RNA, 22 nt, Human
uguaaauaauacauuauauuuc

SEQ ID NO: 1444469 - RNA, 23 nt, Human
uguaaauaauacauuauauuucu

SEQ ID NO: 1444470 - RNA, 21 nt, Human
aguagaccuuguuacuucuga

SEQ ID NO: 1444471 - RNA, 20 nt, Human
aguagaccuuguuacuucug

SEQ ID NO: 1444472 - RNA, 14 nt, Human
aguagaaucucagu

SEQ ID NO: 1444473 - RNA, 14 nt, Human
aguagaauugcauu

SEQ ID NO: 1444474 - RNA, 15 nt, Human
aguagaauugcauug

SEQ ID NO: 1444475 - RNA, 23 nt, Human
aguagaccuuguuacuucugagg

SEQ ID NO: 1444476 - RNA, 18 nt, Human
aguagcguuuuuuaaaug

SEQ ID NO: 1444477 - RNA, 14 nt, Human
uguaggagggacug

SEQ ID NO: 1444478 - RNA, 19 nt, Human
uguaggagggacugucgcu

SEQ ID NO: 1444479 - RNA, 19 nt, Human
aguagcguuuuuuaaaugu

SEQ ID NO: 1444480 - RNA, 20 nt, Human
aguagcguuuuuuaaaugua

SEQ ID NO: 1444481 - RNA, 19 nt, Human
uguaguaauugacaugugc

SEQ ID NO: 1444482 - RNA, 13 nt, Human
uguagggagggcg

SEQ ID NO: 1444483 - RNA, 17 nt, Human
uguaggcuuaguuugug

SEQ ID NO: 1444484 - RNA, 20 nt, Human
uguaguauuuuuuguauaau

SEQ ID NO: 1444485 - RNA, 19 nt, Human
uguaguauuuuuuguauaa

SEQ ID NO: 1444486 - RNA, 18 nt, Human
uguaguauuuuuuguaua

SEQ ID NO: 1444487 - RNA, 16 nt, Human
uguaguagcguuuuuu

SEQ ID NO: 1444488 - RNA, 21 nt, Human
uguaguagcguuuuuuaaaug

SEQ ID NO: 1444489 - RNA, 22 nt, Human
uguaguagcguuuuuuaaaugu

SEQ ID NO: 1444490 - RNA, 20 nt, Human
uguaguaggcauuuuuacca

SEQ ID NO: 1444491 - RNA, 23 nt, Human
uguaguagcguuuuuuaaaugua

SEQ ID NO: 1444492 - RNA, 19 nt, Human
aguacccucucagcuccag

SEQ ID NO: 1444493 - RNA, 18 nt, Human
aguacccucucagcucca

SEQ ID NO: 1444494 - RNA, 16 nt, Human
aguacccucucagcuc

SEQ ID NO: 1444495 - RNA, 23 nt, Human
aguacccacucuggagcauuucu

SEQ ID NO: 1444496 - RNA, 23 nt, Human
aguaccauuuaauggggaggaca

SEQ ID NO: 1444497 - RNA, 12 nt, Human
aguaccauuuaa

SEQ ID NO: 1444498 - RNA, 21 nt, Human
aguagaaucucaguugauuuu

SEQ ID NO: 1444499 - RNA, 23 nt, Human
aguaaugguguagaacacuaauu

SEQ ID NO: 1444500 - RNA, 22 nt, Human
aguaaugguguagaacacuaau

SEQ ID NO: 1444501 - RNA, 19 nt, Human
aguaaugguguagaacacu

SEQ ID NO: 1444502 - RNA, 18 nt, Human
aguaaugguguagaacac

SEQ ID NO: 1444503 - RNA, 16 nt, Human
aguaaugguguagaac

SEQ ID NO: 1444504 - RNA, 15 nt, Human
aguaaugguguagaa

SEQ ID NO: 1444505 - RNA, 14 nt, Human
aguaaugguguaga

SEQ ID NO: 1444506 - RNA, 14 nt, Human
aguacauuguuacc

SEQ ID NO: 1444507 - RNA, 19 nt, Human
aguacauuguuaccucuau

SEQ ID NO: 1444508 - RNA, 22 nt, Human
aguacaugauaaaugauagaca

SEQ ID NO: 1444509 - RNA, 14 nt, Human
aguaauagccuggg

SEQ ID NO: 1444510 - RNA, 12 nt, Human
aguaaaagcaaa

SEQ ID NO: 1444511 - RNA, 17 nt, Human
aguaaaauaauaauuuu

SEQ ID NO: 1444512 - RNA, 14 nt, Human
aguaauaugcacac

SEQ ID NO: 1444513 - RNA, 15 nt, Human
aguaauaugcacaca

SEQ ID NO: 1444514 - RNA, 17 nt, Human
aguaaugauaacuggaa

SEQ ID NO: 1444515 - RNA, 17 nt, Human
aguaauaugcacacauu

SEQ ID NO: 1444516 - RNA, 20 nt, Human
aguaaugauaacuggaaacu

SEQ ID NO: 1444517 - RNA, 18 nt, Human
aguaaugauaacuggaaa

SEQ ID NO: 1444518 - RNA, 12 nt, Human
agguuuuuccuu

SEQ ID NO: 1444519 - RNA, 20 nt, Human
agguuuuauuucauuuuuca

SEQ ID NO: 1444520 - RNA, 23 nt, Human
agguuuuagguucuaaaguucua

SEQ ID NO: 1444521 - RNA, 17 nt, Human
agguuuuauaaggcuga

SEQ ID NO: 1444522 - RNA, 19 nt, Human
agguuuuagguucuaaagu

SEQ ID NO: 1444523 - RNA, 18 nt, Human
agguuuuagguucuaaag

SEQ ID NO: 1444524 - RNA, 17 nt, Human
agguuuuagguucuaaa

SEQ ID NO: 1444525 - RNA, 16 nt, Human
agguuuuagguucuaa

SEQ ID NO: 1444526 - RNA, 16 nt, Human
aguaaaagcaaaaaag

SEQ ID NO: 1444527 - RNA, 19 nt, Human
agguuuuuguuuguuuccu

SEQ ID NO: 1444528 - RNA, 19 nt, Human
agguuuuuguagugauuuu

SEQ ID NO: 1444529 - RNA, 13 nt, Human
aguaaaauccaca

SEQ ID NO: 1444530 - RNA, 15 nt, Human
agguuuuagguucua

SEQ ID NO: 1444531 - RNA, 22 nt, Human
agguuuuaauuuaguaaaccaa

SEQ ID NO: 1444532 - RNA, 14 nt, Human
agguuuuagguucu

SEQ ID NO: 1444533 - RNA, 20 nt, Human
agguuuuaauuuaguaaacc

SEQ ID NO: 1444534 - RNA, 17 nt, Human
agguuuuaauuuaguaa

SEQ ID NO: 1444535 - RNA, 16 nt, Human
agguuuuaauuuagua

SEQ ID NO: 1444536 - RNA, 17 nt, Human
uguagaacacuaauuca

SEQ ID NO: 1444537 - RNA, 15 nt, Human
uguagaacacuaauu

SEQ ID NO: 1444538 - RNA, 14 nt, Human
uguagaacacuaau

SEQ ID NO: 1444539 - RNA, 13 nt, Human
uguagaaaugguu

SEQ ID NO: 1444540 - RNA, 21 nt, Human
uguagaaaugguuguauuaga

SEQ ID NO: 1444541 - RNA, 23 nt, Human
uguagaaaauuuguuauuuugca

SEQ ID NO: 1444542 - RNA, 22 nt, Human
uguacuuggaguauuggggucu

SEQ ID NO: 1444543 - RNA, 14 nt, Human
agguuuacagaauu

SEQ ID NO: 1444544 - RNA, 16 nt, Human
agguuuaugaaaaaga

SEQ ID NO: 1444545 - RNA, 14 nt, Human
agguuuaugaaaaa

SEQ ID NO: 1444546 - RNA, 21 nt, Human
agguuuaugaaaaagaagaau

SEQ ID NO: 1444547 - RNA, 22 nt, Human
uguacuugcucuugaugccugg

SEQ ID NO: 1444548 - RNA, 23 nt, Human
uguacuugcucuugaugccuggc

SEQ ID NO: 1444549 - RNA, 19 nt, Human
agucacccuaccugugccu

SEQ ID NO: 1444550 - RNA, 17 nt, Human
agucacacaguguugga

SEQ ID NO: 1444551 - RNA, 20 nt, Human
agucacccuaccugugccug

SEQ ID NO: 1444552 - RNA, 17 nt, Human
agucaccucauggaauu

SEQ ID NO: 1444553 - RNA, 15 nt, Human
agucaccucauggaa

SEQ ID NO: 1444554 - RNA, 14 nt, Human
agucaccucaugga

SEQ ID NO: 1444555 - RNA, 14 nt, Human
aguauucuucucuu

SEQ ID NO: 1444556 - RNA, 12 nt, Human
aguauucuucuc

SEQ ID NO: 1444557 - RNA, 21 nt, Human
aguauuagaauaccacaggaa

SEQ ID NO: 1444558 - RNA, 22 nt, Human
aguauuucuaugaaauauuaug

SEQ ID NO: 1444559 - RNA, 18 nt, Human
aguauuucuaugaaauau

SEQ ID NO: 1444560 - RNA, 17 nt, Human
aguauuucuaugaaaua

SEQ ID NO: 1444561 - RNA, 20 nt, Human
ugucaaugcaguugucucug

SEQ ID NO: 1444562 - RNA, 23 nt, Human
ugucaaugcaguugucucuguuu

SEQ ID NO: 1444563 - RNA, 21 nt, Human
ugucaauaaaauccauacauu

SEQ ID NO: 1444564 - RNA, 18 nt, Human
aguauuagaauaccacag

SEQ ID NO: 1444565 - RNA, 13 nt, Human
aguagucagacug

SEQ ID NO: 1444566 - RNA, 21 nt, Human
ugucaaacaaauagucuauca

SEQ ID NO: 1444567 - RNA, 13 nt, Human
ugucaaacaaaua

SEQ ID NO: 1444568 - RNA, 21 nt, Human
ugucaaggguucaagauuguu

SEQ ID NO: 1444569 - RNA, 19 nt, Human
uguauucucuccuguaccu

SEQ ID NO: 1444570 - RNA, 20 nt, Human
uguauucucuccuguaccuc

SEQ ID NO: 1444571 - RNA, 13 nt, Human
uguauuacaaauc

SEQ ID NO: 1444572 - RNA, 22 nt, Human
uguauuacaaauccaaugaaau

SEQ ID NO: 1444573 - RNA, 17 nt, Human
uguaucauagaaaugua

SEQ ID NO: 1444574 - RNA, 16 nt, Human
uguaucauagaaaugu

SEQ ID NO: 1444575 - RNA, 15 nt, Human
uguaucauagaaaug

SEQ ID NO: 1444576 - RNA, 23 nt, Human
uguaucaaauacauuuaaaacau

SEQ ID NO: 1444577 - RNA, 21 nt, Human
uguaucaaauacauuuaaaac

SEQ ID NO: 1444578 - RNA, 14 nt, Human
uguaucaaauacau

SEQ ID NO: 1444579 - RNA, 22 nt, Human
uguauauuuuaagaaauaacag

SEQ ID NO: 1444580 - RNA, 16 nt, Human
uguaguguuggagaag

SEQ ID NO: 1444581 - RNA, 15 nt, Human
uguaguguuggagaa

SEQ ID NO: 1444582 - RNA, 15 nt, Human
uguagugcuuugaga

SEQ ID NO: 1444583 - RNA, 22 nt, Human
uguagugcuuugagagagaaag

SEQ ID NO: 1444584 - RNA, 15 nt, Human
uguagugcuacaggg

SEQ ID NO: 1444585 - RNA, 18 nt, Human
uguaguauggccuguguc

SEQ ID NO: 1444586 - RNA, 14 nt, Human
uguaguguuggaga

SEQ ID NO: 1444587 - RNA, 23 nt, Human
agucuuucucuuucccugguccc

SEQ ID NO: 1444588 - RNA, 19 nt, Human
agucuuucucuuucccugg

SEQ ID NO: 1444589 - RNA, 17 nt, Human
agucuuucucuuucccu

SEQ ID NO: 1444590 - RNA, 15 nt, Human
agucuuucucuuucc

SEQ ID NO: 1444591 - RNA, 14 nt, Human
agucuuucucuuuc

SEQ ID NO: 1444592 - RNA, 18 nt, Human
agucuuugguucuaagga

SEQ ID NO: 1444593 - RNA, 17 nt, Human
agucuuugguucuaagg

SEQ ID NO: 1444594 - RNA, 20 nt, Human
agucuuucucuuucccuggu

SEQ ID NO: 1444595 - RNA, 16 nt, Human
agucuuugguucuaag

SEQ ID NO: 1444596 - RNA, 15 nt, Human
agucuuugguucuaa

SEQ ID NO: 1444597 - RNA, 17 nt, Human
agucuuuggaacccuaa

SEQ ID NO: 1444598 - RNA, 17 nt, Human
ugugacucuuuccaacc

SEQ ID NO: 1444599 - RNA, 15 nt, Human
ugugacucuuuccaa

SEQ ID NO: 1444600 - RNA, 15 nt, Human
ugugacugaauuucu

SEQ ID NO: 1444601 - RNA, 16 nt, Human
ugugagagguuugacu

SEQ ID NO: 1444602 - RNA, 15 nt, Human
ugugagagguuugac

SEQ ID NO: 1444603 - RNA, 16 nt, Human
ugugacugaauuucuu

SEQ ID NO: 1444604 - RNA, 14 nt, Human
agucucucuucucu

SEQ ID NO: 1444605 - RNA, 18 nt, Human
agucucucuucucuccag

SEQ ID NO: 1444606 - RNA, 16 nt, Human
agucucucuucucucc

SEQ ID NO: 1444607 - RNA, 15 nt, Human
agucucucuucucuc

SEQ ID NO: 1444608 - RNA, 21 nt, Human
agucucaguuugugugucuua

SEQ ID NO: 1444609 - RNA, 20 nt, Human
agucucaguuugugugucuu

SEQ ID NO: 1444610 - RNA, 18 nt, Human
agucucaguuuguguguc

SEQ ID NO: 1444611 - RNA, 10 nt, Human
agucucaguu

SEQ ID NO: 1444612 - RNA, 19 nt, Human
agucucagugaagacuaug

SEQ ID NO: 1444613 - RNA, 15 nt, Human
agucucuauaccaau

SEQ ID NO: 1444614 - RNA, 17 nt, Human
agucucuauaccaauaa

SEQ ID NO: 1444615 - RNA, 19 nt, Human
agucucuauaccaauaaag

SEQ ID NO: 1444616 - RNA, 20 nt, Human
agucucuauaccaauaaagu

SEQ ID NO: 1444617 - RNA, 21 nt, Human
agucucuauaccaauaaagug

SEQ ID NO: 1444618 - RNA, 22 nt, Human
agucucuauaccaauaaaguga

SEQ ID NO: 1444619 - RNA, 22 nt, Human
ugucuugggcagagcuggcucu

SEQ ID NO: 1444620 - RNA, 21 nt, Human
ugucuugggcagagcuggcuc

SEQ ID NO: 1444621 - RNA, 16 nt, Human
ugucuugggcagagcu

SEQ ID NO: 1444622 - RNA, 13 nt, Human
ugucuugggcaga

SEQ ID NO: 1444623 - RNA, 12 nt, Human
ugucuugggcag

SEQ ID NO: 1444624 - RNA, 16 nt, Human
ugucagacccuggagg

SEQ ID NO: 1444625 - RNA, 17 nt, Human
ugucagacccuggaggc

SEQ ID NO: 1444626 - RNA, 15 nt, Human
ugucagacccuggag

SEQ ID NO: 1444627 - RNA, 21 nt, Human
ugucagaacuagaauuugauu

SEQ ID NO: 1444628 - RNA, 21 nt, Human
ugucacuuuuugaggcaaaag

SEQ ID NO: 1444629 - RNA, 19 nt, Human
ugucacuuuuugaggcaaa

SEQ ID NO: 1444630 - RNA, 18 nt, Human
ugucacuuuuugaggcaa

SEQ ID NO: 1444631 - RNA, 17 nt, Human
ugucacuuuuugaggca

SEQ ID NO: 1444632 - RNA, 15 nt, Human
ugucacuuuuugagg

SEQ ID NO: 1444633 - RNA, 12 nt, Human
ugucacuuuuug

SEQ ID NO: 1444634 - RNA, 20 nt, Human
agucacggcugcgcacugug

SEQ ID NO: 1444635 - RNA, 16 nt, Human
ugucacuuuuucugau

SEQ ID NO: 1444636 - RNA, 21 nt, Human
agucacggcugcgcacugugu

SEQ ID NO: 1444637 - RNA, 18 nt, Human
agucacgcaugcaguguu

SEQ ID NO: 1444638 - RNA, 20 nt, Human
ugugaaagggagaagugaca

SEQ ID NO: 1444639 - RNA, 14 nt, Human
ugugaaauuuacau

SEQ ID NO: 1444640 - RNA, 12 nt, Human
ugugaaauuauu

SEQ ID NO: 1444641 - RNA, 14 nt, Human
ugugacucuuucca

SEQ ID NO: 1444642 - RNA, 12 nt, Human
ugugacucuuuc

SEQ ID NO: 1444643 - RNA, 22 nt, Human
ugugaccugcugagcucugaga

SEQ ID NO: 1444644 - RNA, 18 nt, Human
ugugaccugcugagcucu

SEQ ID NO: 1444645 - RNA, 17 nt, Human
ugugaccugcugagcuc

SEQ ID NO: 1444646 - RNA, 16 nt, Human
ugugaccugcugagcu

SEQ ID NO: 1444647 - RNA, 15 nt, Human
ugugaccugcugagc

SEQ ID NO: 1444648 - RNA, 14 nt, Human
ugugaccugcugag

SEQ ID NO: 1444649 - RNA, 13 nt, Human
ugugaccugcuga

SEQ ID NO: 1444650 - RNA, 20 nt, Human
ugugaacaguuguguuugaa

SEQ ID NO: 1444651 - RNA, 21 nt, Human
ugugaacuggacccuguugcu

SEQ ID NO: 1444652 - RNA, 22 nt, Human
ugugaacuggacccuguugcua

SEQ ID NO: 1444653 - RNA, 17 nt, Human
ugugauuguggaaugga

SEQ ID NO: 1444654 - RNA, 14 nt, Human
ugugauuguggaau

SEQ ID NO: 1444655 - RNA, 18 nt, Human
ugugaugaauacuguauu

SEQ ID NO: 1444656 - RNA, 16 nt, Human
ugugaugaauacugua

SEQ ID NO: 1444657 - RNA, 14 nt, Human
ugugaugaauacug

SEQ ID NO: 1444658 - RNA, 13 nt, Human
ugugaucgucuga

SEQ ID NO: 1444659 - RNA, 18 nt, Human
ugugaucauguguggaag

SEQ ID NO: 1444660 - RNA, 15 nt, Human
agugaaagaaaauaa

SEQ ID NO: 1444661 - RNA, 16 nt, Human
agugaaauaaugugua

SEQ ID NO: 1444662 - RNA, 19 nt, Human
agugaaauaauguguaguu

SEQ ID NO: 1444663 - RNA, 15 nt, Human
agugaaauaaugugu

SEQ ID NO: 1444664 - RNA, 13 nt, Human
agugaaauaaugu

SEQ ID NO: 1444665 - RNA, 17 nt, Human
agugaaagaaaauaaca

SEQ ID NO: 1444666 - RNA, 21 nt, Human
ugugccaugucaaacaaauag

SEQ ID NO: 1444667 - RNA, 16 nt, Human
ugugccaugucaaaca

SEQ ID NO: 1444668 - RNA, 21 nt, Human
ugugccagggcaaugaugaau

SEQ ID NO: 1444669 - RNA, 18 nt, Human
ugugccagggcaaugaug

SEQ ID NO: 1444670 - RNA, 20 nt, Human
ugugccagauuuaugcauau

SEQ ID NO: 1444671 - RNA, 17 nt, Human
ugugccagagccugggg

SEQ ID NO: 1444672 - RNA, 16 nt, Human
ugugccagagccuggg

SEQ ID NO: 1444673 - RNA, 15 nt, Human
ugugccagagccugg

SEQ ID NO: 1444674 - RNA, 14 nt, Human
ugugccagagccug

SEQ ID NO: 1444675 - RNA, 13 nt, Human
ugugccagagccu

SEQ ID NO: 1444676 - RNA, 12 nt, Human
ugugccagagcc

SEQ ID NO: 1444677 - RNA, 23 nt, Human
ugugccagagaacccagcccacc

SEQ ID NO: 1444678 - RNA, 20 nt, Human
ugugccagagaacccagccc

SEQ ID NO: 1444679 - RNA, 21 nt, Human
ugugccagagccuggggcucu

SEQ ID NO: 1444680 - RNA, 22 nt, Human
ugugccagagccuggggcucua

SEQ ID NO: 1444681 - RNA, 20 nt, Human
ugugccagagccuggggcuc

SEQ ID NO: 1444682 - RNA, 18 nt, Human
ugugccagagccuggggc

SEQ ID NO: 1444683 - RNA, 18 nt, Human
ugugccagauuuaugcau

SEQ ID NO: 1444684 - RNA, 13 nt, Human
uguggccaggagg

SEQ ID NO: 1444685 - RNA, 14 nt, Human
uguggccaggaggu

SEQ ID NO: 1444686 - RNA, 12 nt, Human
uguggccaggag

SEQ ID NO: 1444687 - RNA, 11 nt, Human
uguggccagga

SEQ ID NO: 1444688 - RNA, 17 nt, Human
uguggcaugggugaaga

SEQ ID NO: 1444689 - RNA, 21 nt, Human
uguggcauccagagucccugc

SEQ ID NO: 1444690 - RNA, 19 nt, Human
uguggcauccagagucccu

SEQ ID NO: 1444691 - RNA, 19 nt, Human
agugagggagggcugucau

SEQ ID NO: 1444692 - RNA, 21 nt, Human
uguggccaugacccugccucu

SEQ ID NO: 1444693 - RNA, 22 nt, Human
ugugcccccaggguccugggag

SEQ ID NO: 1444694 - RNA, 16 nt, Human
ugugcccccagggucc

SEQ ID NO: 1444695 - RNA, 23 nt, Human
ugugcccccaaccauuuccucag

SEQ ID NO: 1444696 - RNA, 18 nt, Human
ugugcccccaaccauuuc

SEQ ID NO: 1444697 - RNA, 22 nt, Human
ugugcccaguuaaucuugcuuu

SEQ ID NO: 1444698 - RNA, 21 nt, Human
ugugcccaguuaaucuugcuu

SEQ ID NO: 1444699 - RNA, 12 nt, Human
ugugcccaguua

SEQ ID NO: 1444700 - RNA, 17 nt, Human
ugugcugggagcuccac

SEQ ID NO: 1444701 - RNA, 12 nt, Human
ugugcugggagc

SEQ ID NO: 1444702 - RNA, 10 nt, Human
ugugcuggga

SEQ ID NO: 1444703 - RNA, 13 nt, Human
ugugcuggccagc

SEQ ID NO: 1444704 - RNA, 18 nt, Human
ugugcuggaauucuaaca

SEQ ID NO: 1444705 - RNA, 21 nt, Human
uguggcagggguuagagcagg

SEQ ID NO: 1444706 - RNA, 20 nt, Human
uguggcagggguuagagcag

SEQ ID NO: 1444707 - RNA, 16 nt, Human
uguggcauccagaguc

SEQ ID NO: 1444708 - RNA, 23 nt, Human
uguggcagggguuagagcaggac

SEQ ID NO: 1444709 - RNA, 21 nt, Human
uguggcagaguuacaguucug

SEQ ID NO: 1444710 - RNA, 21 nt, Human
ugugcugggagcuccacucug

SEQ ID NO: 1444711 - RNA, 20 nt, Human
aguguagaaccuaauucaau

SEQ ID NO: 1444712 - RNA, 15 nt, Human
aguguagaaccuaau

SEQ ID NO: 1444713 - RNA, 23 nt, Human
aguguaccgcgucuacccuggga

SEQ ID NO: 1444714 - RNA, 22 nt, Human
aguguaacaauuguguagccuu

SEQ ID NO: 1444715 - RNA, 23 nt, Human
aguguaacaauuguguagccuuu

SEQ ID NO: 1444716 - RNA, 18 nt, Human
aguguaacaauuguguag

SEQ ID NO: 1444717 - RNA, 15 nt, Human
aguguaacaauugug

SEQ ID NO: 1444718 - RNA, 21 nt, Human
aguguaaaauauuuugaauca

SEQ ID NO: 1444719 - RNA, 18 nt, Human
aguguaaaauauuuugaa

SEQ ID NO: 1444720 - RNA, 14 nt, Human
aguguaaaauauuu

SEQ ID NO: 1444721 - RNA, 15 nt, Human
aguggugugaucuca

SEQ ID NO: 1444722 - RNA, 15 nt, Human
agugugcaaggcagc

SEQ ID NO: 1444723 - RNA, 13 nt, Human
agugugcaaggca

SEQ ID NO: 1444724 - RNA, 14 nt, Human
uguuacaaauugua

SEQ ID NO: 1444725 - RNA, 19 nt, Human
aguggacaaauuuugaguu

SEQ ID NO: 1444726 - RNA, 13 nt, Human
aguggacaggagu

SEQ ID NO: 1444727 - RNA, 17 nt, Human
aguggugguuuucuguu

SEQ ID NO: 1444728 - RNA, 18 nt, Human
aguggugguuuucuguuc

SEQ ID NO: 1444729 - RNA, 19 nt, Human
aguggugguuuucuguucu

SEQ ID NO: 1444730 - RNA, 20 nt, Human
aguggugguuuucuguucuu

SEQ ID NO: 1444731 - RNA, 21 nt, Human
aguggugguuuucuguucuuu

SEQ ID NO: 1444732 - RNA, 23 nt, Human
aguggugguuuucuguucuuucu

SEQ ID NO: 1444733 - RNA, 17 nt, Human
uguugcaagugcaauaa

SEQ ID NO: 1444734 - RNA, 16 nt, Human
uguucuguuuuguuuc

SEQ ID NO: 1444735 - RNA, 13 nt, Human
uguucuguuuugu

SEQ ID NO: 1444736 - RNA, 14 nt, Human
uguucuguuucaag

SEQ ID NO: 1444737 - RNA, 22 nt, Human
uguucuguuaacugaauaccac

SEQ ID NO: 1444738 - RNA, 23 nt, Human
uguucuguuaacugaauaccacu

SEQ ID NO: 1444739 - RNA, 21 nt, Human
uguucuguuaacugaauacca

SEQ ID NO: 1444740 - RNA, 19 nt, Human
uguucuguuaacugaauac

SEQ ID NO: 1444741 - RNA, 18 nt, Human
uguucuguuaacugaaua

SEQ ID NO: 1444742 - RNA, 17 nt, Human
uguucuguuaacugaau

SEQ ID NO: 1444743 - RNA, 16 nt, Human
uguucuguuaacugaa

SEQ ID NO: 1444744 - RNA, 14 nt, Human
uguucugugucuuu

SEQ ID NO: 1444745 - RNA, 13 nt, Human
uguucugugucuu

SEQ ID NO: 1444746 - RNA, 18 nt, Human
uguucugucccuugcccc

SEQ ID NO: 1444747 - RNA, 16 nt, Human
uguucugucccuugcc

SEQ ID NO: 1444748 - RNA, 15 nt, Human
uguucugugauauaa

SEQ ID NO: 1444749 - RNA, 18 nt, Human
uguucugugauauaagug

SEQ ID NO: 1444750 - RNA, 22 nt, Human
uguucccaagagcaucaugccu

SEQ ID NO: 1444751 - RNA, 16 nt, Human
uguucccaagagcauc

SEQ ID NO: 1444752 - RNA, 20 nt, Human
uguucccaccaggcugcuca

SEQ ID NO: 1444753 - RNA, 21 nt, Human
uguucccaccaggcugcucag

SEQ ID NO: 1444754 - RNA, 15 nt, Human
uguuccauuaaacga

SEQ ID NO: 1444755 - RNA, 18 nt, Human
uguuccaguaaucuaaua

SEQ ID NO: 1444756 - RNA, 23 nt, Human
uguucccaagagcaucaugccuc

SEQ ID NO: 1444757 - RNA, 13 nt, Human
uguucugucacca

SEQ ID NO: 1444758 - RNA, 15 nt, Human
uguuauauauaaaua

SEQ ID NO: 1444759 - RNA, 13 nt, Human
uguuauauauaaa

SEQ ID NO: 1444760 - RNA, 15 nt, Human
uguuauauaauuuag

SEQ ID NO: 1444761 - RNA, 12 nt, Human
uguuauauaauu

SEQ ID NO: 1444762 - RNA, 16 nt, Human
uguuauauaaucauua

SEQ ID NO: 1444763 - RNA, 15 nt, Human
uguuauauaaucauu

SEQ ID NO: 1444764 - RNA, 16 nt, Human
uguuauacaauacaga

SEQ ID NO: 1444765 - RNA, 18 nt, Human
uguuauauauaaauauau

SEQ ID NO: 1444766 - RNA, 17 nt, Human
uguuauauauaaauaua

SEQ ID NO: 1444767 - RNA, 16 nt, Human
uguuauauauaaauau

SEQ ID NO: 1444768 - RNA, 15 nt, Human
uguuauaaucuuuca

SEQ ID NO: 1444769 - RNA, 21 nt, Human
agugcugagauuacaggcaug

SEQ ID NO: 1444770 - RNA, 20 nt, Human
agugcugagauuacaggcau

SEQ ID NO: 1444771 - RNA, 12 nt, Human
agugcuguauaa

SEQ ID NO: 1444772 - RNA, 13 nt, Human
agugcuguauaaa

SEQ ID NO: 1444773 - RNA, 14 nt, Human
agugcuguauaaaa

SEQ ID NO: 1444774 - RNA, 15 nt, Human
agugcuguauaaaau

SEQ ID NO: 1444775 - RNA, 16 nt, Human
agugcuguauaaaauc

SEQ ID NO: 1444776 - RNA, 17 nt, Human
agugcuguauaaaauca

SEQ ID NO: 1444777 - RNA, 19 nt, Human
agugcuguauaaaaucagc

SEQ ID NO: 1444778 - RNA, 22 nt, Human
agugcuguauaaaaucagccaa

SEQ ID NO: 1444779 - RNA, 16 nt, Human
agugcugcauuuaaaa

SEQ ID NO: 1444780 - RNA, 17 nt, Human
agugcugcauuuaaaag

SEQ ID NO: 1444781 - RNA, 19 nt, Human
agugcugcauuuaaaagau

SEQ ID NO: 1444782 - RNA, 22 nt, Human
agugaggugugucacaaugaga

SEQ ID NO: 1444783 - RNA, 16 nt, Human
agugaggugugucaca

SEQ ID NO: 1444784 - RNA, 17 nt, Human
agugaguaauuuuggau

SEQ ID NO: 1444785 - RNA, 16 nt, Human
agugcugaacagugga

SEQ ID NO: 1444786 - RNA, 20 nt, Human
agugaguaauuuuggauuuu

SEQ ID NO: 1444787 - RNA, 15 nt, Human
agugcugaauuuccc

SEQ ID NO: 1444788 - RNA, 15 nt, Human
agugcugcacucaaa

SEQ ID NO: 1444789 - RNA, 15 nt, Human
agugcugagauuaca

SEQ ID NO: 1444790 - RNA, 19 nt, Human
agugcugaauuucccucuc

SEQ ID NO: 1444791 - RNA, 12 nt, Human
agugcugcauuu

SEQ ID NO: 1444792 - RNA, 13 nt, Human
agugcugcauuua

SEQ ID NO: 1444793 - RNA, 19 nt, Human
agugcuguuuuguuauaua

SEQ ID NO: 1444794 - RNA, 15 nt, Human
agugcuguuuuguua

SEQ ID NO: 1444795 - RNA, 12 nt, Human
agugcugugcug

SEQ ID NO: 1444796 - RNA, 22 nt, Human
agugcuguuuauuaaucuuagu

SEQ ID NO: 1444797 - RNA, 21 nt, Human
agugcuguuuauuaaucuuag

SEQ ID NO: 1444798 - RNA, 20 nt, Human
agugcuguuuauuaaucuua

SEQ ID NO: 1444799 - RNA, 17 nt, Human
agugcugugcugugcua

SEQ ID NO: 1444800 - RNA, 18 nt, Human
agugcugugcaagguauu

SEQ ID NO: 1444801 - RNA, 23 nt, Human
agugcugucuuaaacuaaaugug

SEQ ID NO: 1444802 - RNA, 16 nt, Human
agugcuguuuuguuau

SEQ ID NO: 1444803 - RNA, 23 nt, Human
uguggugugucccccucugucca

SEQ ID NO: 1444804 - RNA, 16 nt, Human
uguggguuccacagac

SEQ ID NO: 1444805 - RNA, 15 nt, Human
uguggguuccacaga

SEQ ID NO: 1444806 - RNA, 22 nt, Human
uguggguguuaauuuuugauac

SEQ ID NO: 1444807 - RNA, 14 nt, Human
uguggguguuaauu

SEQ ID NO: 1444808 - RNA, 21 nt, Human
uguguaacugcccaaagcagc

SEQ ID NO: 1444809 - RNA, 18 nt, Human
uguguaacugcccaaagc

SEQ ID NO: 1444810 - RNA, 18 nt, Human
uguguaagacaaaaagcu

SEQ ID NO: 1444811 - RNA, 14 nt, Human
ugugucuuuagaua

SEQ ID NO: 1444812 - RNA, 13 nt, Human
uguguaagauuug

SEQ ID NO: 1444813 - RNA, 12 nt, Human
uguguaagauuu

SEQ ID NO: 1444814 - RNA, 17 nt, Human
uguguaagaaauacaga

SEQ ID NO: 1444815 - RNA, 13 nt, Human
uguguaaguagau

SEQ ID NO: 1444816 - RNA, 13 nt, Human
ugugugugugaau

SEQ ID NO: 1444817 - RNA, 17 nt, Human
ugugugaaacuuucauu

SEQ ID NO: 1444818 - RNA, 22 nt, Human
ugugucuuucacagcuccuccc

SEQ ID NO: 1444819 - RNA, 18 nt, Human
ugugucuuucacagcucc

SEQ ID NO: 1444820 - RNA, 20 nt, Human
ugugugaaagguacuucaaa

SEQ ID NO: 1444821 - RNA, 16 nt, Human
uguuaauuuuugauac

SEQ ID NO: 1444822 - RNA, 15 nt, Human
uguuaauuuuugaua

SEQ ID NO: 1444823 - RNA, 13 nt, Human
uguuaauuuuuga

SEQ ID NO: 1444824 - RNA, 22 nt, Human
uguuaauuuagaaaacuuuaaa

SEQ ID NO: 1444825 - RNA, 20 nt, Human
uguuaauuuagaaaacuuua

SEQ ID NO: 1444826 - RNA, 18 nt, Human
uguuaauuuagaaaacuu

SEQ ID NO: 1444827 - RNA, 17 nt, Human
uguuaauuuagaaaacu

SEQ ID NO: 1444828 - RNA, 15 nt, Human
uguuaauuuagaaaa

SEQ ID NO: 1444829 - RNA, 17 nt, Human
uguuaaguauuuucaua

SEQ ID NO: 1444830 - RNA, 15 nt, Human
uguuaaguauuuuca

SEQ ID NO: 1444831 - RNA, 20 nt, Human
uguuaagggaagaauuccag

SEQ ID NO: 1444832 - RNA, 14 nt, Human
uguuaagcucugcu

SEQ ID NO: 1444833 - RNA, 13 nt, Human
uguuaagcucugc

SEQ ID NO: 1444834 - RNA, 18 nt, Human
uguuaaauacaggaaaca

SEQ ID NO: 1444835 - RNA, 19 nt, Human
uguguucccauuucagcug

SEQ ID NO: 1444836 - RNA, 19 nt, Human
uguguuaagcucugcuauu

SEQ ID NO: 1444837 - RNA, 13 nt, Human
uguguguuuggaa

SEQ ID NO: 1444838 - RNA, 21 nt, Human
uguguuaagcucugcuauuag

SEQ ID NO: 1444839 - RNA, 16 nt, Human
uguuaaauacaggaaa

SEQ ID NO: 1444840 - RNA, 18 nt, Human
uguuaaauaaauuguaua

SEQ ID NO: 1444841 - RNA, 20 nt, Human
uguuaaauaaauuguauauu

SEQ ID NO: 1444842 - RNA, 13 nt, Human
uguuaaauaaauu

SEQ ID NO: 1444843 - RNA, 14 nt, Human
uguuaaauaaauug

SEQ ID NO: 1444844 - RNA, 16 nt, Human
uguuaaauaaauugua

SEQ ID NO: 1444845 - RNA, 22 nt, Human
uguguugauacuguugcacgug

SEQ ID NO: 1444846 - RNA, 21 nt, Human
uguguugauacuguugcacgu

SEQ ID NO: 1444847 - RNA, 20 nt, Human
uguguugauacuguugcacg

SEQ ID NO: 1444848 - RNA, 19 nt, Human
uguguugauacuguugcac

SEQ ID NO: 1444849 - RNA, 18 nt, Human
uguguugauacuguugca

SEQ ID NO: 1444850 - RNA, 17 nt, Human
uguguugauacuguugc

SEQ ID NO: 1444851 - RNA, 16 nt, Human
uguguugauacuguug

SEQ ID NO: 1444852 - RNA, 15 nt, Human
uguguugauacuguu

SEQ ID NO: 1444853 - RNA, 13 nt, Human
uguguugaagagg

SEQ ID NO: 1444854 - RNA, 17 nt, Human
uguuuugaaggcaaaau

SEQ ID NO: 1444855 - RNA, 17 nt, Human
uguuuucuuuugguaaa

SEQ ID NO: 1444856 - RNA, 11 nt, Human
uguuuucuucu

SEQ ID NO: 1444857 - RNA, 16 nt, Human
uguuuuaugagaaagc

SEQ ID NO: 1444858 - RNA, 16 nt, Human
uguuuucccacgagga

SEQ ID NO: 1444859 - RNA, 18 nt, Human
uguuuggaauauugucca

SEQ ID NO: 1444860 - RNA, 13 nt, Human
uguuugcuuucug

SEQ ID NO: 1444861 - RNA, 22 nt, Human
uguuugcuuucugaucaaggcc

SEQ ID NO: 1444862 - RNA, 12 nt, Human
uguuugcuuucu

SEQ ID NO: 1444863 - RNA, 23 nt, Human
uguuugcuucaugugucccagaa

SEQ ID NO: 1444864 - RNA, 22 nt, Human
uguuugcuucaugugucccaga

SEQ ID NO: 1444865 - RNA, 21 nt, Human
uguuugcuucaugugucccag

SEQ ID NO: 1444866 - RNA, 15 nt, Human
uguuugcuucaacug

SEQ ID NO: 1444867 - RNA, 22 nt, Human
uguuugcaccuuucuaguugaa

SEQ ID NO: 1444868 - RNA, 23 nt, Human
uguuugcaccuuucuaguugaaa

SEQ ID NO: 1444869 - RNA, 20 nt, Human
uguuugcaccuuucuaguug

SEQ ID NO: 1444870 - RNA, 18 nt, Human
uguuugcaccuuucuagu

SEQ ID NO: 1444871 - RNA, 19 nt, Human
uguuuuaugagaaagccuu

SEQ ID NO: 1444872 - RNA, 15 nt, Human
uguuuuaugagaaag

SEQ ID NO: 1444873 - RNA, 14 nt, Human
uguuuuaugagaaa

SEQ ID NO: 1444874 - RNA, 21 nt, Human
uguuuuauuuaaccucuaaau

SEQ ID NO: 1444875 - RNA, 12 nt, Human
uguuuggaaaua

SEQ ID NO: 1444876 - RNA, 16 nt, Human
aguucugcucugguug

SEQ ID NO: 1444877 - RNA, 19 nt, Human
aguucugcuccagacaggg

SEQ ID NO: 1444878 - RNA, 18 nt, Human
aguucugcuccagacagg

SEQ ID NO: 1444879 - RNA, 17 nt, Human
aguucugcuccagacag

SEQ ID NO: 1444880 - RNA, 15 nt, Human
aguucugcuccagac

SEQ ID NO: 1444881 - RNA, 14 nt, Human
aguucugcuccaga

SEQ ID NO: 1444882 - RNA, 12 nt, Human
aguucugcucca

SEQ ID NO: 1444883 - RNA, 20 nt, Human
aguucugccaggagacaggu

SEQ ID NO: 1444884 - RNA, 14 nt, Human
aguucugccaggag

SEQ ID NO: 1444885 - RNA, 13 nt, Human
aguucugccagga

SEQ ID NO: 1444886 - RNA, 23 nt, Human
aguucuguacucaaauguagcca

SEQ ID NO: 1444887 - RNA, 12 nt, Human
aguucuguagaa

SEQ ID NO: 1444888 - RNA, 19 nt, Human
aguucuuacugcuuaauuc

SEQ ID NO: 1444889 - RNA, 23 nt, Human
aguucuuacugcuuaauucaaau

SEQ ID NO: 1444890 - RNA, 12 nt, Human
aguucugccagg

SEQ ID NO: 1444891 - RNA, 18 nt, Human
uguuuugcacagccaaau

SEQ ID NO: 1444892 - RNA, 14 nt, Human
uguuuugcaagcca

SEQ ID NO: 1444893 - RNA, 18 nt, Human
uguuugagauucucaaag

SEQ ID NO: 1444894 - RNA, 14 nt, Human
uguuugacaccucu

SEQ ID NO: 1444895 - RNA, 21 nt, Human
uguuugacgggaaacaaaacu

SEQ ID NO: 1444896 - RNA, 13 nt, Human
uguuugauagauu

SEQ ID NO: 1444897 - RNA, 15 nt, Human
uguuugaggaaagca

SEQ ID NO: 1444898 - RNA, 15 nt, Human
uguuucuugccucau

SEQ ID NO: 1444899 - RNA, 15 nt, Human
uguuucuguuccaaa

SEQ ID NO: 1444900 - RNA, 16 nt, Human
uguuucuguuccaaau

SEQ ID NO: 1444901 - RNA, 13 nt, Human
uguuucuguucca

SEQ ID NO: 1444902 - RNA, 13 nt, Human
uguuuauuucagg

SEQ ID NO: 1444903 - RNA, 14 nt, Human
uguuucuugccuca

SEQ ID NO: 1444904 - RNA, 21 nt, Human
uguuucuuucucugaggacaa

SEQ ID NO: 1444905 - RNA, 20 nt, Human
uguuucuuucucugaggaca

SEQ ID NO: 1444906 - RNA, 12 nt, Human
uguuucuugccu

SEQ ID NO: 1444907 - RNA, 18 nt, Human
uguuucuuuguaaugaaa

SEQ ID NO: 1444908 - RNA, 19 nt, Human
uguuucuuuguaaugaaaa

SEQ ID NO: 1444909 - RNA, 14 nt, Human
uguugcguuccuuu

SEQ ID NO: 1444910 - RNA, 11 nt, Human
uguugcuaagc

SEQ ID NO: 1444911 - RNA, 19 nt, Human
uguugccuugcauaauggu

SEQ ID NO: 1444912 - RNA, 13 nt, Human
uguugcugaauag

SEQ ID NO: 1444913 - RNA, 14 nt, Human
uguugcugaauagg

SEQ ID NO: 1444914 - RNA, 12 nt, Human
uguugcuaagcc

SEQ ID NO: 1444915 - RNA, 21 nt, Human
uguugcuaagccccagcaagc

SEQ ID NO: 1444916 - RNA, 22 nt, Human
uguugcuaagccccagcaagca

SEQ ID NO: 1444917 - RNA, 11 nt, Human
uguugcugaau

SEQ ID NO: 1444918 - RNA, 17 nt, Human
uguuuauguaauuucag

SEQ ID NO: 1444919 - RNA, 17 nt, Human
uguuuauuaaucuuagu

SEQ ID NO: 1444920 - RNA, 16 nt, Human
uguuuauguaauuuca

SEQ ID NO: 1444921 - RNA, 15 nt, Human
uguuuauuaaucuua

SEQ ID NO: 1444922 - RNA, 14 nt, Human
uguuuauuaaucuu

SEQ ID NO: 1444923 - RNA, 17 nt, Human
aguugcugcaaaccuga

SEQ ID NO: 1444924 - RNA, 16 nt, Human
aguugcugcaaaccug

SEQ ID NO: 1444925 - RNA, 12 nt, Human
aguugcugagag

SEQ ID NO: 1444926 - RNA, 15 nt, Human
aguugcuauuugaac

SEQ ID NO: 1444927 - RNA, 15 nt, Human
aguuggcuuaccugg

SEQ ID NO: 1444928 - RNA, 23 nt, Human
aguuggccauauuuaccucagcc

SEQ ID NO: 1444929 - RNA, 22 nt, Human
aguuggccauauuuaccucagc

SEQ ID NO: 1444930 - RNA, 18 nt, Human
aguuggcuuaccuggccc

SEQ ID NO: 1444931 - RNA, 17 nt, Human
aguuggcuuaccuggcc

SEQ ID NO: 1444932 - RNA, 18 nt, Human
aguugggacuacaggcgu

SEQ ID NO: 1444933 - RNA, 15 nt, Human
aguugcacucaggug

SEQ ID NO: 1444934 - RNA, 22 nt, Human
aguugcauagguuuaauaauuu

SEQ ID NO: 1444935 - RNA, 22 nt, Human
aguugcagcuguuuuguugaca

SEQ ID NO: 1444936 - RNA, 21 nt, Human
aguugcagcuguuuuguugac

SEQ ID NO: 1444937 - RNA, 17 nt, Human
aguugcagcuguuuugu

SEQ ID NO: 1444938 - RNA, 15 nt, Human
aguugcagcuguuuu

SEQ ID NO: 1444939 - RNA, 14 nt, Human
aguugcagcuguuu

SEQ ID NO: 1444940 - RNA, 10 nt, Human
aguugcagcc

SEQ ID NO: 1444941 - RNA, 13 nt, Human
aguugccuuuuau

SEQ ID NO: 1444942 - RNA, 17 nt, Human
aguugcagucacucuag

SEQ ID NO: 1444943 - RNA, 18 nt, Human
aguuguaaaguauguauu

SEQ ID NO: 1444944 - RNA, 13 nt, Human
aguuguaaaguau

SEQ ID NO: 1444945 - RNA, 12 nt, Human
aguuguaaagua

SEQ ID NO: 1444946 - RNA, 13 nt, Human
aguugguaacuuu

SEQ ID NO: 1444947 - RNA, 14 nt, Human
aguuuagggugggg

SEQ ID NO: 1444948 - RNA, 13 nt, Human
aguuuaggguggg

SEQ ID NO: 1444949 - RNA, 23 nt, Human
aguuuagggaacaauuuggcaau

SEQ ID NO: 1444950 - RNA, 21 nt, Human
aguuuagggaacaauuuggca

SEQ ID NO: 1444951 - RNA, 18 nt, Human
aguuuagggaacaauuug

SEQ ID NO: 1444952 - RNA, 12 nt, Human
aguuuaaugaag

SEQ ID NO: 1444953 - RNA, 12 nt, Human
aguuuagggugg

SEQ ID NO: 1444954 - RNA, 16 nt, Human
aguuuaggauaaaaua

SEQ ID NO: 1444955 - RNA, 20 nt, Human
aguuuaauggugccuucauu

SEQ ID NO: 1444956 - RNA, 22 nt, Human
aguuuaauggugccuucauuug

SEQ ID NO: 1444957 - RNA, 16 nt, Human
aguuuaaucagaggaa

SEQ ID NO: 1444958 - RNA, 17 nt, Human
aguuuaauaaauuuauu

SEQ ID NO: 1444959 - RNA, 15 nt, Human
aguuguuugugccuu

SEQ ID NO: 1444960 - RNA, 17 nt, Human
uuaaauuggaaagcagg

SEQ ID NO: 1444961 - RNA, 16 nt, Human
uuaaauuggaaagcag

SEQ ID NO: 1444962 - RNA, 18 nt, Human
uuaaauaagauucuaacg

SEQ ID NO: 1444963 - RNA, 17 nt, Human
uuaaauaagauucuaac

SEQ ID NO: 1444964 - RNA, 16 nt, Human
uuaaauaagauucuaa

SEQ ID NO: 1444965 - RNA, 15 nt, Human
uuaaauaagauucua

SEQ ID NO: 1444966 - RNA, 14 nt, Human
uuaaauaagauucu

SEQ ID NO: 1444967 - RNA, 13 nt, Human
uuaaauaagauuc

SEQ ID NO: 1444968 - RNA, 17 nt, Human
uuaaauaagaaacuuuu

SEQ ID NO: 1444969 - RNA, 15 nt, Human
uuaaauaagaaacuu

SEQ ID NO: 1444970 - RNA, 22 nt, Human
uuaaauaaauuugacuuuucug

SEQ ID NO: 1444971 - RNA, 13 nt, Human
uuaaauaauguga

SEQ ID NO: 1444972 - RNA, 15 nt, Human
uuaaauuguguuuua

SEQ ID NO: 1444973 - RNA, 17 nt, Human
uuaaauuuuuuuuacau

SEQ ID NO: 1444974 - RNA, 18 nt, Human
uuaacaaauguaucacua

SEQ ID NO: 1444975 - RNA, 18 nt, Human
uuaaauuuuuuuuacauu

SEQ ID NO: 1444976 - RNA, 19 nt, Human
uuaaauuuuuuuuacauuu

SEQ ID NO: 1444977 - RNA, 20 nt, Human
uuaaauuuuuuuuacauuuu

SEQ ID NO: 1444978 - RNA, 17 nt, Human
aguuucacagaaaauaa

SEQ ID NO: 1444979 - RNA, 22 nt, Human
aguuucacagaaaauaaggcac

SEQ ID NO: 1444980 - RNA, 17 nt, Human
uuaacauaccuaagaag

SEQ ID NO: 1444981 - RNA, 22 nt, Human
uuaacauaccuaagaaguacau

SEQ ID NO: 1444982 - RNA, 12 nt, Human
uuaacauaccua

SEQ ID NO: 1444983 - RNA, 21 nt, Human
uuaacauaagcuauuuuucua

SEQ ID NO: 1444984 - RNA, 18 nt, Human
uuaacauaagcuauuuuu

SEQ ID NO: 1444985 - RNA, 16 nt, Human
uuaacauaagcuauuu

SEQ ID NO: 1444986 - RNA, 15 nt, Human
uuaacauaagcuauu

SEQ ID NO: 1444987 - RNA, 14 nt, Human
uuaacauaagcuau

SEQ ID NO: 1444988 - RNA, 13 nt, Human
uuaacauaagcua

SEQ ID NO: 1444989 - RNA, 15 nt, Human
uuaacaguuguauuu

SEQ ID NO: 1444990 - RNA, 13 nt, Human
uuaacaguuguau

SEQ ID NO: 1444991 - RNA, 19 nt, Human
uuaacagagucugaaccua

SEQ ID NO: 1444992 - RNA, 22 nt, Human
uuaacaacauguuuccagcauu

SEQ ID NO: 1444993 - RNA, 14 nt, Human
uuaacaagaacuuu

SEQ ID NO: 1444994 - RNA, 14 nt, Human
uuaacaacuugucu

SEQ ID NO: 1444995 - RNA, 19 nt, Human
uuaacaacauguuuccagc

SEQ ID NO: 1444996 - RNA, 14 nt, Human
uuaacaacauguuu

SEQ ID NO: 1444997 - RNA, 17 nt, Human
uuaaauaaauuugacuu

SEQ ID NO: 1444998 - RNA, 16 nt, Human
uuaaauaaauuugacu

SEQ ID NO: 1444999 - RNA, 13 nt, Human
uuaaauaaauuug

SEQ ID NO: 1445000 - RNA, 18 nt, Human
uuaaauaaauuguauauu

SEQ ID NO: 1445001 - RNA, 20 nt, Human
uuaaauaaauuguauauuca

SEQ ID NO: 1445002 - RNA, 13 nt, Human
uuaaauaaauugu

SEQ ID NO: 1445003 - RNA, 15 nt, Human
uuaaauaaauuguau

SEQ ID NO: 1445004 - RNA, 17 nt, Human
uuaaauaaauuguauau

SEQ ID NO: 1445005 - RNA, 23 nt, Human
uuaaaggggagaccucagaagua

SEQ ID NO: 1445006 - RNA, 21 nt, Human
uuaaaggggagaccucagaag

SEQ ID NO: 1445007 - RNA, 12 nt, Human
uuaaaauuuguu

SEQ ID NO: 1445008 - RNA, 19 nt, Human
uuaaaauuuguucuuguau

SEQ ID NO: 1445009 - RNA, 24 nt, Human
aguuuagggaacaauuuggcaauu

SEQ ID NO: 1445010 - RNA, 13 nt, Human
uuaaaaagccagu

SEQ ID NO: 1445011 - RNA, 14 nt, Human
uuaaaaacugagug

SEQ ID NO: 1445012 - RNA, 20 nt, Human
uuaaaaaguaauaaaauuca

SEQ ID NO: 1445013 - RNA, 16 nt, Human
uuaaaaagguuuacag

SEQ ID NO: 1445014 - RNA, 22 nt, Human
uuaaaaaggcaguuugcaaaaa

SEQ ID NO: 1445015 - RNA, 20 nt, Human
uuaaaaaggcaguuugcaaa

SEQ ID NO: 1445016 - RNA, 13 nt, Human
uuaaaauguucac

SEQ ID NO: 1445017 - RNA, 16 nt, Human
uuaaaauuacaacuaa

SEQ ID NO: 1445018 - RNA, 20 nt, Human
uuacaaaacuacaugagaac

SEQ ID NO: 1445019 - RNA, 18 nt, Human
uuacaaaacuacaugaga

SEQ ID NO: 1445020 - RNA, 17 nt, Human
uuacaaaacuacaugag

SEQ ID NO: 1445021 - RNA, 18 nt, Human
uuacaaaacaaacucauu

SEQ ID NO: 1445022 - RNA, 17 nt, Human
uuacaaaacaaacucau

SEQ ID NO: 1445023 - RNA, 17 nt, Human
uuaauuuaguaaaccaa

SEQ ID NO: 1445024 - RNA, 16 nt, Human
uuaauuuagaaaacuu

SEQ ID NO: 1445025 - RNA, 15 nt, Human
uuaauuuagaaaacu

SEQ ID NO: 1445026 - RNA, 23 nt, Human
uuaauuuacaaaaauauaaaaua

SEQ ID NO: 1445027 - RNA, 22 nt, Human
uuaauuuacaaaaauauaaaau

SEQ ID NO: 1445028 - RNA, 14 nt, Human
uuaauuuacaaaaa

SEQ ID NO: 1445029 - RNA, 18 nt, Human
uuacaaaaauauaaaaua

SEQ ID NO: 1445030 - RNA, 22 nt, Human
auaaacaagaaaaauaaagaaa

SEQ ID NO: 1445031 - RNA, 21 nt, Human
auaaacaagaaaaauaaagaa

SEQ ID NO: 1445032 - RNA, 20 nt, Human
auaaacaagaaaaauaaaga

SEQ ID NO: 1445033 - RNA, 19 nt, Human
auaaacaagaaaaauaaag

SEQ ID NO: 1445034 - RNA, 17 nt, Human
auaaacaagaaaaauaa

SEQ ID NO: 1445035 - RNA, 23 nt, Human
auaaacaagaccacguuucuaaa

SEQ ID NO: 1445036 - RNA, 15 nt, Human
auaaacaagaccacg

SEQ ID NO: 1445037 - RNA, 22 nt, Human
auaaacaagaccacguuucuaa

SEQ ID NO: 1445038 - RNA, 16 nt, Human
auaaacaagaaaaaua

SEQ ID NO: 1445039 - RNA, 13 nt, Human
auaaacaagaaaa

SEQ ID NO: 1445040 - RNA, 16 nt, Human
auaaaauuuguugcau

SEQ ID NO: 1445041 - RNA, 13 nt, Human
auaaaauuuguug

SEQ ID NO: 1445042 - RNA, 20 nt, Human
auaaaauuuuuaaucuuuaa

SEQ ID NO: 1445043 - RNA, 21 nt, Human
uuaaguugagauaguuuucau

SEQ ID NO: 1445044 - RNA, 11 nt, Human
uuaaguugaga

SEQ ID NO: 1445045 - RNA, 22 nt, Human
uuaaguuauagugaauacugcu

SEQ ID NO: 1445046 - RNA, 20 nt, Human
uuaaguuaguuccacugaga

SEQ ID NO: 1445047 - RNA, 13 nt, Human
uuaauaaacacuc

SEQ ID NO: 1445048 - RNA, 18 nt, Human
uuaaguugcugaugaacu

SEQ ID NO: 1445049 - RNA, 23 nt, Human
uuaaguugagauaguuuucaucc

SEQ ID NO: 1445050 - RNA, 22 nt, Human
uuaaguugagauaguuuucauc

SEQ ID NO: 1445051 - RNA, 17 nt, Human
uuaauaaacacucuuga

SEQ ID NO: 1445052 - RNA, 18 nt, Human
uuaauuuaaacaccuccu

SEQ ID NO: 1445053 - RNA, 15 nt, Human
uuaauucuuagcuca

SEQ ID NO: 1445054 - RNA, 18 nt, Human
uuaaugaagaucuaaaua

SEQ ID NO: 1445055 - RNA, 14 nt, Human
uuaaugaaguuuga

SEQ ID NO: 1445056 - RNA, 15 nt, Human
uuaaugaaguuugaa

SEQ ID NO: 1445057 - RNA, 17 nt, Human
uuaaugaagaucuaaau

SEQ ID NO: 1445058 - RNA, 15 nt, Human
uuaaugaagaucuaa

SEQ ID NO: 1445059 - RNA, 23 nt, Human
uuaaugaagaaaguggaaaacaa

SEQ ID NO: 1445060 - RNA, 18 nt, Human
uuaaugaagaaaguggaa

SEQ ID NO: 1445061 - RNA, 14 nt, Human
uuaaugaagaaagu

SEQ ID NO: 1445062 - RNA, 14 nt, Human
uuaaugaacaaaug

SEQ ID NO: 1445063 - RNA, 17 nt, Human
uuaauuccuucagcacu

SEQ ID NO: 1445064 - RNA, 19 nt, Human
uuaauuccuucagcacuuu

SEQ ID NO: 1445065 - RNA, 20 nt, Human
uuaauuccuucagcacuuua

SEQ ID NO: 1445066 - RNA, 14 nt, Human
uuaagaaggcaaaa

SEQ ID NO: 1445067 - RNA, 12 nt, Human
uuaagaaggcaa

SEQ ID NO: 1445068 - RNA, 22 nt, Human
uuaagaagacugcauuauauuu

SEQ ID NO: 1445069 - RNA, 18 nt, Human
uuaaguaaggaauuuuau

SEQ ID NO: 1445070 - RNA, 17 nt, Human
uuaagugaaaauauagc

SEQ ID NO: 1445071 - RNA, 18 nt, Human
uuaaguaaugauaacugg

SEQ ID NO: 1445072 - RNA, 14 nt, Human
uuaagugcugcauu

SEQ ID NO: 1445073 - RNA, 11 nt, Human
auaaaauguac

SEQ ID NO: 1445074 - RNA, 18 nt, Human
auaaaaugcuagguucua

SEQ ID NO: 1445075 - RNA, 19 nt, Human
auaaaaugcuagguucuac

SEQ ID NO: 1445076 - RNA, 17 nt, Human
auaaaaugcuagguucu

SEQ ID NO: 1445077 - RNA, 19 nt, Human
auaaaauccauacauuugu

SEQ ID NO: 1445078 - RNA, 18 nt, Human
auaaaauccauacauuug

SEQ ID NO: 1445079 - RNA, 18 nt, Human
auaaaaucagccaauuau

SEQ ID NO: 1445080 - RNA, 22 nt, Human
auaaaaucagccaauuauguua

SEQ ID NO: 1445081 - RNA, 23 nt, Human
auaaaaucagccaauuauguuaa

SEQ ID NO: 1445082 - RNA, 22 nt, Human
auaaaauaauuuuuauauuuga

SEQ ID NO: 1445083 - RNA, 21 nt, Human
auaaaauaauuuuuauauuug

SEQ ID NO: 1445084 - RNA, 16 nt, Human
auaaaauaauuuuuau

SEQ ID NO: 1445085 - RNA, 20 nt, Human
auaaaaggucggaccagcuu

SEQ ID NO: 1445086 - RNA, 15 nt, Human
auaacuaacaugucc

SEQ ID NO: 1445087 - RNA, 21 nt, Human
auaacuaacaaccaaagacua

SEQ ID NO: 1445088 - RNA, 23 nt, Human
auaaaugucacuuuuugaggcaa

SEQ ID NO: 1445089 - RNA, 14 nt, Human
auaacuaaauaaag

SEQ ID NO: 1445090 - RNA, 19 nt, Human
auaaaugucacuuuuugag

SEQ ID NO: 1445091 - RNA, 12 nt, Human
auaaaugucacu

SEQ ID NO: 1445092 - RNA, 21 nt, Human
auaaauguaucauagaaaugu

SEQ ID NO: 1445093 - RNA, 17 nt, Human
auaaauguaucauagaa

SEQ ID NO: 1445094 - RNA, 13 nt, Human
auaaauguaucau

SEQ ID NO: 1445095 - RNA, 15 nt, Human
auaaauguacauuaa

SEQ ID NO: 1445096 - RNA, 18 nt, Human
auaaauguaccagagaga

SEQ ID NO: 1445097 - RNA, 15 nt, Human
uuacaggaacuucau

SEQ ID NO: 1445098 - RNA, 19 nt, Human
uuacaguaggagcccagcu

SEQ ID NO: 1445099 - RNA, 14 nt, Human
auaaauauccuuua

SEQ ID NO: 1445100 - RNA, 21 nt, Human
auaaauauccuuuaauugauc

SEQ ID NO: 1445101 - RNA, 23 nt, Human
auaaauauauuauuacuuguaaa

SEQ ID NO: 1445102 - RNA, 22 nt, Human
auaaauauauuauuacuuguaa

SEQ ID NO: 1445103 - RNA, 18 nt, Human
auaaauauauuauuacuu

SEQ ID NO: 1445104 - RNA, 14 nt, Human
auaaauauauuauu

SEQ ID NO: 1445105 - RNA, 12 nt, Human
auaaauauauua

SEQ ID NO: 1445106 - RNA, 21 nt, Human
auaaauauaucuaccccagac

SEQ ID NO: 1445107 - RNA, 13 nt, Human
auaaauauaucua

SEQ ID NO: 1445108 - RNA, 18 nt, Human
auaaauacugcaaaucag

SEQ ID NO: 1445109 - RNA, 20 nt, Human
auaaaguugauaaagauuuu

SEQ ID NO: 1445110 - RNA, 17 nt, Human
auaaaguugauaaagau

SEQ ID NO: 1445111 - RNA, 21 nt, Human
auaaaguugauaaagauuuuu

SEQ ID NO: 1445112 - RNA, 16 nt, Human
auaaaguugauaaaga

SEQ ID NO: 1445113 - RNA, 15 nt, Human
auaaaguucuguacu

SEQ ID NO: 1445114 - RNA, 14 nt, Human
auaaaguguaacaa

SEQ ID NO: 1445115 - RNA, 19 nt, Human
auaaaguguaacaauugug

SEQ ID NO: 1445116 - RNA, 18 nt, Human
auaaacacucuugaaaaa

SEQ ID NO: 1445117 - RNA, 20 nt, Human
uuaccuguggauauuuguau

SEQ ID NO: 1445118 - RNA, 13 nt, Human
uuaccuguggaua

SEQ ID NO: 1445119 - RNA, 12 nt, Human
uuaccuguggau

SEQ ID NO: 1445120 - RNA, 18 nt, Human
uuaccugggcauucuugu

SEQ ID NO: 1445121 - RNA, 14 nt, Human
uuacaucauuucuu

SEQ ID NO: 1445122 - RNA, 13 nt, Human
uuacaucauuucu

SEQ ID NO: 1445123 - RNA, 20 nt, Human
uuacauaauucacucugagu

SEQ ID NO: 1445124 - RNA, 23 nt, Human
uuacugauauauuuuacaauuuu

SEQ ID NO: 1445125 - RNA, 14 nt, Human
uuacugauauauuu

SEQ ID NO: 1445126 - RNA, 12 nt, Human
uuacucacugcu

SEQ ID NO: 1445127 - RNA, 18 nt, Human
uuacucagaauucucuag

SEQ ID NO: 1445128 - RNA, 23 nt, Human
uuacucagaauucucuaguuuga

SEQ ID NO: 1445129 - RNA, 23 nt, Human
uuagaagccugcauaauguuucu

SEQ ID NO: 1445130 - RNA, 13 nt, Human
uuagaagccugca

SEQ ID NO: 1445131 - RNA, 17 nt, Human
uuagaagacaauugaca

SEQ ID NO: 1445132 - RNA, 22 nt, Human
uuagacagaacaccuaugcaaa

SEQ ID NO: 1445133 - RNA, 14 nt, Human
uuagacagaacacc

SEQ ID NO: 1445134 - RNA, 22 nt, Human
uuagaaauaaagcaucucauuu

SEQ ID NO: 1445135 - RNA, 17 nt, Human
uuagaaauaaagcaucu

SEQ ID NO: 1445136 - RNA, 15 nt, Human
uuacuguaacugauu

SEQ ID NO: 1445137 - RNA, 17 nt, Human
uuacugguccaaaagau

SEQ ID NO: 1445138 - RNA, 15 nt, Human
uuacugguccaaaag

SEQ ID NO: 1445139 - RNA, 14 nt, Human
uuacugguccaaaa

SEQ ID NO: 1445140 - RNA, 18 nt, Human
uuacugguccaaaagauu

SEQ ID NO: 1445141 - RNA, 15 nt, Human
uuacuguaagaaaau

SEQ ID NO: 1445142 - RNA, 22 nt, Human
uucacuguagaaugauuucaug

SEQ ID NO: 1445143 - RNA, 15 nt, Human
uucacuguagaauga

SEQ ID NO: 1445144 - RNA, 21 nt, Human
uucagaauaugucagugcuga

SEQ ID NO: 1445145 - RNA, 20 nt, Human
uucagaaguuaguuuguaua

SEQ ID NO: 1445146 - RNA, 15 nt, Human
uucagaaguuaguuu

SEQ ID NO: 1445147 - RNA, 19 nt, Human
uucagaaaauguucuguuu

SEQ ID NO: 1445148 - RNA, 15 nt, Human
uucagaaaauguucu

SEQ ID NO: 1445149 - RNA, 16 nt, Human
uucagaaagacuuggu

SEQ ID NO: 1445150 - RNA, 14 nt, Human
auauauacuauuaa

SEQ ID NO: 1445151 - RNA, 17 nt, Human
uucacuggagcacaaua

SEQ ID NO: 1445152 - RNA, 15 nt, Human
uucacuggagcacaa

SEQ ID NO: 1445153 - RNA, 14 nt, Human
uucacuggagcaca

SEQ ID NO: 1445154 - RNA, 13 nt, Human
uucagcccaucuc

SEQ ID NO: 1445155 - RNA, 17 nt, Human
uucagccaggagcuggg

SEQ ID NO: 1445156 - RNA, 11 nt, Human
uucagccaagg

SEQ ID NO: 1445157 - RNA, 12 nt, Human
uucagccaggag

SEQ ID NO: 1445158 - RNA, 13 nt, Human
uucagccaggagc

SEQ ID NO: 1445159 - RNA, 15 nt, Human
uucagcccucagaau

SEQ ID NO: 1445160 - RNA, 19 nt, Human
uucagcacuagccaaaccu

SEQ ID NO: 1445161 - RNA, 17 nt, Human
uucagcacuagccaaac

SEQ ID NO: 1445162 - RNA, 16 nt, Human
uucagcacuagccaaa

SEQ ID NO: 1445163 - RNA, 13 nt, Human
uucagcacugucc

SEQ ID NO: 1445164 - RNA, 23 nt, Human
uucagcacuagccaaaccucacc

SEQ ID NO: 1445165 - RNA, 21 nt, Human
uucagcacuagccaaaccuca

SEQ ID NO: 1445166 - RNA, 21 nt, Human
uucagaauuuaguguauccau

SEQ ID NO: 1445167 - RNA, 23 nt, Human
uucagaauuuuauacuuucccua

SEQ ID NO: 1445168 - RNA, 15 nt, Human
uucagaauuuagugu

SEQ ID NO: 1445169 - RNA, 13 nt, Human
uucagaauuuagu

SEQ ID NO: 1445170 - RNA, 17 nt, Human
uucagaauuaaacuuuu

SEQ ID NO: 1445171 - RNA, 16 nt, Human
uucagaauuaaacuuu

SEQ ID NO: 1445172 - RNA, 17 nt, Human
uucagaucucuaacuuc

SEQ ID NO: 1445173 - RNA, 16 nt, Human
uucagaugugaaccau

SEQ ID NO: 1445174 - RNA, 15 nt, Human
uucagaugugaacca

SEQ ID NO: 1445175 - RNA, 18 nt, Human
uucagcaagacuucucuu

SEQ ID NO: 1445176 - RNA, 19 nt, Human
uucagcaaagugguucccu

SEQ ID NO: 1445177 - RNA, 20 nt, Human
uucagcaaacucuuuuccca

SEQ ID NO: 1445178 - RNA, 18 nt, Human
uucagaugugaaccauua

SEQ ID NO: 1445179 - RNA, 23 nt, Human
auauaaaugcaaauaacaaaugc

SEQ ID NO: 1445180 - RNA, 18 nt, Human
auauaaaugcaaauaaca

SEQ ID NO: 1445181 - RNA, 17 nt, Human
auauaaaugcaaauaac

SEQ ID NO: 1445182 - RNA, 15 nt, Human
auauaaaugcaaaua

SEQ ID NO: 1445183 - RNA, 14 nt, Human
auauaaaugcaaau

SEQ ID NO: 1445184 - RNA, 12 nt, Human
auauaaaugcaa

SEQ ID NO: 1445185 - RNA, 16 nt, Human
auauaaauauauuauu

SEQ ID NO: 1445186 - RNA, 16 nt, Human
auauaaauauauauuc

SEQ ID NO: 1445187 - RNA, 20 nt, Human
auauaaagacguuuuauaag

SEQ ID NO: 1445188 - RNA, 22 nt, Human
auauaaagacguuuuauaagca

SEQ ID NO: 1445189 - RNA, 16 nt, Human
auauaaagacguuuua

SEQ ID NO: 1445190 - RNA, 14 nt, Human
auauaaaauaugaa

SEQ ID NO: 1445191 - RNA, 23 nt, Human
auaguuuuacuuuuaaacugugu

SEQ ID NO: 1445192 - RNA, 22 nt, Human
auaguuuuacuuuuaaacugug

SEQ ID NO: 1445193 - RNA, 21 nt, Human
auaguuuuacuuuuaaacugu

SEQ ID NO: 1445194 - RNA, 15 nt, Human
auaguuuuacuuuua

SEQ ID NO: 1445195 - RNA, 19 nt, Human
auaguuuggauauguaaaa

SEQ ID NO: 1445196 - RNA, 23 nt, Human
auaguuuggauauguaaaacauu

SEQ ID NO: 1445197 - RNA, 18 nt, Human
auaguuuggauauguaaa

SEQ ID NO: 1445198 - RNA, 19 nt, Human
auaguuucugaggcuuuau

SEQ ID NO: 1445199 - RNA, 14 nt, Human
auaguuucugaggc

SEQ ID NO: 1445200 - RNA, 13 nt, Human
auaguuucugagg

SEQ ID NO: 1445201 - RNA, 20 nt, Human
auagguagaauguaaagcuu

SEQ ID NO: 1445202 - RNA, 18 nt, Human
auagguagaauguaaagc

SEQ ID NO: 1445203 - RNA, 20 nt, Human
auaggguuugugacagggcg

SEQ ID NO: 1445204 - RNA, 18 nt, Human
auagucaaauugugugaa

SEQ ID NO: 1445205 - RNA, 23 nt, Human
auauaguuuuacuuuuaaacugu

SEQ ID NO: 1445206 - RNA, 18 nt, Human
auauaguuuuacuuuuaa

SEQ ID NO: 1445207 - RNA, 16 nt, Human
auauaguuuuacuuuu

SEQ ID NO: 1445208 - RNA, 13 nt, Human
auauaguuuuacu

SEQ ID NO: 1445209 - RNA, 12 nt, Human
auauaguuuuac

SEQ ID NO: 1445210 - RNA, 17 nt, Human
auauaguuagcuaauaa

SEQ ID NO: 1445211 - RNA, 22 nt, Human
auauaguuagcuaauaaaaagc

SEQ ID NO: 1445212 - RNA, 19 nt, Human
auauauaacaaugcuguau

SEQ ID NO: 1445213 - RNA, 18 nt, Human
auauauaacaaugcugua

SEQ ID NO: 1445214 - RNA, 17 nt, Human
auauauaacaaugcugu

SEQ ID NO: 1445215 - RNA, 15 nt, Human
auauaacaaugcugu

SEQ ID NO: 1445216 - RNA, 12 nt, Human
auauaacaaugc

SEQ ID NO: 1445217 - RNA, 12 nt, Human
auauaagcuuuu

SEQ ID NO: 1445218 - RNA, 19 nt, Human
auauaagcuuguauuccuu

SEQ ID NO: 1445219 - RNA, 17 nt, Human
auauaacaaugcuguau

SEQ ID NO: 1445220 - RNA, 15 nt, Human
auaugcacaauagca

SEQ ID NO: 1445221 - RNA, 14 nt, Human
auauguaugguuuu

SEQ ID NO: 1445222 - RNA, 23 nt, Human
auauguauggguaggguaaauca

SEQ ID NO: 1445223 - RNA, 17 nt, Human
auauguauggguagggu

SEQ ID NO: 1445224 - RNA, 12 nt, Human
auauguaugggu

SEQ ID NO: 1445225 - RNA, 13 nt, Human
auaugcacacauu

SEQ ID NO: 1445226 - RNA, 17 nt, Human
uucauguacaagaugaa

SEQ ID NO: 1445227 - RNA, 21 nt, Human
uucauguacaagaugaaggag

SEQ ID NO: 1445228 - RNA, 18 nt, Human
uucauguaauccucaaga

SEQ ID NO: 1445229 - RNA, 19 nt, Human
uucauguaaacugugcacc

SEQ ID NO: 1445230 - RNA, 18 nt, Human
uucauguaaacugugcac

SEQ ID NO: 1445231 - RNA, 17 nt, Human
uucauguaaacugugca

SEQ ID NO: 1445232 - RNA, 14 nt, Human
uucauguaaacugu

SEQ ID NO: 1445233 - RNA, 23 nt, Human
uucauggcagauguaggagggac

SEQ ID NO: 1445234 - RNA, 17 nt, Human
uucauggcagaaggcaa

SEQ ID NO: 1445235 - RNA, 18 nt, Human
auaugucagugcugaugu

SEQ ID NO: 1445236 - RNA, 14 nt, Human
auaugucagugcug

SEQ ID NO: 1445237 - RNA, 22 nt, Human
auaugucaagugcugugcaagg

SEQ ID NO: 1445238 - RNA, 11 nt, Human
auauguccugg

SEQ ID NO: 1445239 - RNA, 13 nt, Human
auaugugaacagu

SEQ ID NO: 1445240 - RNA, 15 nt, Human
auaucuguaauggua

SEQ ID NO: 1445241 - RNA, 16 nt, Human
auaucuguaaugguac

SEQ ID NO: 1445242 - RNA, 19 nt, Human
auaucuggccucugcuuuc

SEQ ID NO: 1445243 - RNA, 13 nt, Human
auaucuggccucu

SEQ ID NO: 1445244 - RNA, 15 nt, Human
auaucugaagcccuc

SEQ ID NO: 1445245 - RNA, 23 nt, Human
auaucugccuuuauuguguuugu

SEQ ID NO: 1445246 - RNA, 20 nt, Human
auaucuuggacaaaucacau

SEQ ID NO: 1445247 - RNA, 19 nt, Human
auaucuuggacaaaucaca

SEQ ID NO: 1445248 - RNA, 22 nt, Human
auaugauucaaaugucuauaaa

SEQ ID NO: 1445249 - RNA, 13 nt, Human
auaugauucaaau

SEQ ID NO: 1445250 - RNA, 14 nt, Human
auaucugccuuuau

SEQ ID NO: 1445251 - RNA, 16 nt, Human
auaucugccuuuauug

SEQ ID NO: 1445252 - RNA, 18 nt, Human
auaucugccuuuauugug

SEQ ID NO: 1445253 - RNA, 20 nt, Human
auaucugccuuuauuguguu

SEQ ID NO: 1445254 - RNA, 15 nt, Human
uucauacuugaacgu

SEQ ID NO: 1445255 - RNA, 22 nt, Human
uucauacuguaacauucaggaa

SEQ ID NO: 1445256 - RNA, 17 nt, Human
uucaguauuauauguac

SEQ ID NO: 1445257 - RNA, 13 nt, Human
uucauagcccagu

SEQ ID NO: 1445258 - RNA, 13 nt, Human
uucauacuugaac

SEQ ID NO: 1445259 - RNA, 22 nt, Human
uucaguacccucucagcuccag

SEQ ID NO: 1445260 - RNA, 21 nt, Human
uucaguacccucucagcucca

SEQ ID NO: 1445261 - RNA, 15 nt, Human
auauauuaucuuuuc

SEQ ID NO: 1445262 - RNA, 14 nt, Human
auauauuaucuuuu

SEQ ID NO: 1445263 - RNA, 13 nt, Human
auauauuaucuuu

SEQ ID NO: 1445264 - RNA, 20 nt, Human
auauauuauauggaaauaua

SEQ ID NO: 1445265 - RNA, 16 nt, Human
auauauuauauggaaa

SEQ ID NO: 1445266 - RNA, 15 nt, Human
auauauuauauggaa

SEQ ID NO: 1445267 - RNA, 14 nt, Human
auauauuauaugga

SEQ ID NO: 1445268 - RNA, 22 nt, Human
auauauuauacuuguaauuaug

SEQ ID NO: 1445269 - RNA, 19 nt, Human
auauauuauacuuguaauu

SEQ ID NO: 1445270 - RNA, 17 nt, Human
auauauuauacuuguaa

SEQ ID NO: 1445271 - RNA, 14 nt, Human
auauauuauacuug

SEQ ID NO: 1445272 - RNA, 14 nt, Human
uucaucauuuuuua

SEQ ID NO: 1445273 - RNA, 21 nt, Human
uucauauuuuaaacagaggau

SEQ ID NO: 1445274 - RNA, 20 nt, Human
uucauccaaguuaaauguag

SEQ ID NO: 1445275 - RNA, 17 nt, Human
uucauccaaguuaaaug

SEQ ID NO: 1445276 - RNA, 17 nt, Human
uucauauuuuaaacaga

SEQ ID NO: 1445277 - RNA, 21 nt, Human
auaucuaccccagacuagaug

SEQ ID NO: 1445278 - RNA, 23 nt, Human
auaucuaccccagacuagaugua

SEQ ID NO: 1445279 - RNA, 22 nt, Human
auaucuauauuuuacauaaauu

SEQ ID NO: 1445280 - RNA, 20 nt, Human
auaucuauauuuuacauaaa

SEQ ID NO: 1445281 - RNA, 16 nt, Human
auaucuauauuuuaca

SEQ ID NO: 1445282 - RNA, 17 nt, Human
auaucuauauuuuacau

SEQ ID NO: 1445283 - RNA, 17 nt, Human
auaucgacuuguuuuug

SEQ ID NO: 1445284 - RNA, 18 nt, Human
auauauuauuauaaucuu

SEQ ID NO: 1445285 - RNA, 16 nt, Human
auauauuauuauaauc

SEQ ID NO: 1445286 - RNA, 14 nt, Human
auauauuauuauaa

SEQ ID NO: 1445287 - RNA, 13 nt, Human
auauauuauuaua

SEQ ID NO: 1445288 - RNA, 18 nt, Human
auauauuauuacuuguaa

SEQ ID NO: 1445289 - RNA, 14 nt, Human
auauauuauuacuu

SEQ ID NO: 1445290 - RNA, 16 nt, Human
auauauuaucuuuuca

SEQ ID NO: 1445291 - RNA, 18 nt, Human
auauauucagccuggcuu

SEQ ID NO: 1445292 - RNA, 14 nt, Human
uuauuuaaaucugu

SEQ ID NO: 1445293 - RNA, 16 nt, Human
uuauuuaaaauagcaa

SEQ ID NO: 1445294 - RNA, 15 nt, Human
uuauuuaaaauagca

SEQ ID NO: 1445295 - RNA, 17 nt, Human
uuauuuaaaaaacuaaa

SEQ ID NO: 1445296 - RNA, 20 nt, Human
uuauuuaaacucuguugcaa

SEQ ID NO: 1445297 - RNA, 23 nt, Human
uuauuuaaaccgcuaaaagaaac

SEQ ID NO: 1445298 - RNA, 21 nt, Human
uuauuuaaaauagcaaaagaa

SEQ ID NO: 1445299 - RNA, 22 nt, Human
uuauuuaaaauagcaaaagaag

SEQ ID NO: 1445300 - RNA, 12 nt, Human
auagcugugacu

SEQ ID NO: 1445301 - RNA, 19 nt, Human
uuauuguguuugucauuag

SEQ ID NO: 1445302 - RNA, 20 nt, Human
uuauuguguuugucauuagc

SEQ ID NO: 1445303 - RNA, 22 nt, Human
uuauuguguuugucauuagccu

SEQ ID NO: 1445304 - RNA, 15 nt, Human
auagcugcuuccagu

SEQ ID NO: 1445305 - RNA, 15 nt, Human
auagcuguaaacuuc

SEQ ID NO: 1445306 - RNA, 17 nt, Human
auagcugcuuccagugu

SEQ ID NO: 1445307 - RNA, 14 nt, Human
auagcugaucaguu

SEQ ID NO: 1445308 - RNA, 17 nt, Human
uuauuuaccccuccccu

SEQ ID NO: 1445309 - RNA, 15 nt, Human
uuauuuacauuuaau

SEQ ID NO: 1445310 - RNA, 13 nt, Human
uuauuuacauuua

SEQ ID NO: 1445311 - RNA, 16 nt, Human
uuauuuacauuuaaua

SEQ ID NO: 1445312 - RNA, 15 nt, Human
uuauuuauuggagau

SEQ ID NO: 1445313 - RNA, 21 nt, Human
uuauuuauguauugugcaaug

SEQ ID NO: 1445314 - RNA, 15 nt, Human
uuauuuauguauugu

SEQ ID NO: 1445315 - RNA, 14 nt, Human
uuauuuauguauug

SEQ ID NO: 1445316 - RNA, 13 nt, Human
uuauuuauguauu

SEQ ID NO: 1445317 - RNA, 21 nt, Human
uuauuuauguauggugcaaug

SEQ ID NO: 1445318 - RNA, 15 nt, Human
uuauuuauguauggu

SEQ ID NO: 1445319 - RNA, 12 nt, Human
uuauuuauguau

SEQ ID NO: 1445320 - RNA, 20 nt, Human
uuauuuaugccucuguauuu

SEQ ID NO: 1445321 - RNA, 14 nt, Human
uuauuuaugccucu

SEQ ID NO: 1445322 - RNA, 19 nt, Human
uuauuucaugauuagaaau

SEQ ID NO: 1445323 - RNA, 18 nt, Human
uuauuuccuaguucugua

SEQ ID NO: 1445324 - RNA, 19 nt, Human
uuauuuccuaguucuguag

SEQ ID NO: 1445325 - RNA, 12 nt, Human
uuauuucaauau

SEQ ID NO: 1445326 - RNA, 13 nt, Human
auagcucuggggu

SEQ ID NO: 1445327 - RNA, 12 nt, Human
auagcucugggg

SEQ ID NO: 1445328 - RNA, 22 nt, Human
auagcucuggggugggcaguuu

SEQ ID NO: 1445329 - RNA, 19 nt, Human
auagcucuggggugggcag

SEQ ID NO: 1445330 - RNA, 18 nt, Human
auagcuacuaauuuuaaa

SEQ ID NO: 1445331 - RNA, 15 nt, Human
auaagagcucaggau

SEQ ID NO: 1445332 - RNA, 21 nt, Human
auaacuugagaccuaaucucu

SEQ ID NO: 1445333 - RNA, 19 nt, Human
auaacuugagaccuaaucu

SEQ ID NO: 1445334 - RNA, 18 nt, Human
auaacuuccacagggucc

SEQ ID NO: 1445335 - RNA, 14 nt, Human
auaacuuccacagg

SEQ ID NO: 1445336 - RNA, 12 nt, Human
uuagacagaggc

SEQ ID NO: 1445337 - RNA, 16 nt, Human
auaagaguuggcuggu

SEQ ID NO: 1445338 - RNA, 16 nt, Human
auaagaguagaaacug

SEQ ID NO: 1445339 - RNA, 14 nt, Human
auagcuacuaauuu

SEQ ID NO: 1445340 - RNA, 17 nt, Human
auagcuacuaauuuuaa

SEQ ID NO: 1445341 - RNA, 17 nt, Human
auagcguucuuguaauu

SEQ ID NO: 1445342 - RNA, 15 nt, Human
auagcguucuuguaa

SEQ ID NO: 1445343 - RNA, 14 nt, Human
auagcguucuugua

SEQ ID NO: 1445344 - RNA, 13 nt, Human
auagcguucuugu

SEQ ID NO: 1445345 - RNA, 13 nt, Human
auagcuaaauacc

SEQ ID NO: 1445346 - RNA, 18 nt, Human
auagcguucuuguaauuu

SEQ ID NO: 1445347 - RNA, 13 nt, Human
auagcuaaguaca

SEQ ID NO: 1445348 - RNA, 14 nt, Human
auagcuaaguacac

SEQ ID NO: 1445349 - RNA, 15 nt, Human
auagcuaaguacaca

SEQ ID NO: 1445350 - RNA, 18 nt, Human
auagcuaaguacacaaua

SEQ ID NO: 1445351 - RNA, 15 nt, Human
uucacagugcucuuu

SEQ ID NO: 1445352 - RNA, 23 nt, Human
uucacaguacccaaacugcuuuu

SEQ ID NO: 1445353 - RNA, 19 nt, Human
uucacaguacccaaacugc

SEQ ID NO: 1445354 - RNA, 19 nt, Human
uucacaggcagccagugcc

SEQ ID NO: 1445355 - RNA, 16 nt, Human
uucacaggcagccagu

SEQ ID NO: 1445356 - RNA, 14 nt, Human
uucacaggcagcca

SEQ ID NO: 1445357 - RNA, 13 nt, Human
uucacaggcagcc

SEQ ID NO: 1445358 - RNA, 12 nt, Human
uucacaggcagc

SEQ ID NO: 1445359 - RNA, 17 nt, Human
uucacagcuccucccac

SEQ ID NO: 1445360 - RNA, 15 nt, Human
uucacagcuccuccc

SEQ ID NO: 1445361 - RNA, 13 nt, Human
uucacagcuccuc

SEQ ID NO: 1445362 - RNA, 21 nt, Human
uucaauaaaguauuuaauuag

SEQ ID NO: 1445363 - RNA, 13 nt, Human
uucaauaaagcug

SEQ ID NO: 1445364 - RNA, 12 nt, Human
uucaauaaagcu

SEQ ID NO: 1445365 - RNA, 14 nt, Human
uucaauaaaguauu

SEQ ID NO: 1445366 - RNA, 18 nt, Human
uucaauaaaguauuuaau

SEQ ID NO: 1445367 - RNA, 19 nt, Human
uucaauaaaguauuuaauu

SEQ ID NO: 1445368 - RNA, 13 nt, Human
uucacauuggaaa

SEQ ID NO: 1445369 - RNA, 23 nt, Human
uucacauagcccacuuacauuua

SEQ ID NO: 1445370 - RNA, 19 nt, Human
uucacauuguauucagagu

SEQ ID NO: 1445371 - RNA, 17 nt, Human
uucacauauugauuucc

SEQ ID NO: 1445372 - RNA, 18 nt, Human
uucaccagauuugcuaau

SEQ ID NO: 1445373 - RNA, 14 nt, Human
uucaccaaaucuug

SEQ ID NO: 1445374 - RNA, 19 nt, Human
uucacauuuuccuuuucaa

SEQ ID NO: 1445375 - RNA, 14 nt, Human
uucacauuggaaac

SEQ ID NO: 1445376 - RNA, 18 nt, Human
auagcuuaugaaaagaau

SEQ ID NO: 1445377 - RNA, 18 nt, Human
uucaccauuauaaugaau

SEQ ID NO: 1445378 - RNA, 24 nt, Human
uucaccauuuggcaaugccaucau

SEQ ID NO: 1445379 - RNA, 20 nt, Human
uucaccauuauaaugaauuu

SEQ ID NO: 1445380 - RNA, 15 nt, Human
uucaccauuauaaug

SEQ ID NO: 1445381 - RNA, 19 nt, Human
auaggaacuuaaauaaugu

SEQ ID NO: 1445382 - RNA, 21 nt, Human
auaggauuuauuuaaaauagc

SEQ ID NO: 1445383 - RNA, 16 nt, Human
auaggauuuauuuaaa

SEQ ID NO: 1445384 - RNA, 23 nt, Human
auaggaucauuuguuggaaugaa

SEQ ID NO: 1445385 - RNA, 23 nt, Human
auaggauuuauuuaaaauagcaa

SEQ ID NO: 1445386 - RNA, 17 nt, Human
auaggcacaggaaacca

SEQ ID NO: 1445387 - RNA, 12 nt, Human
auaggccagccg

SEQ ID NO: 1445388 - RNA, 20 nt, Human
auaggcaggaagcccaauug

SEQ ID NO: 1445389 - RNA, 13 nt, Human
auaggcaggaagc

SEQ ID NO: 1445390 - RNA, 22 nt, Human
auaggauuuauuuaaaauagca

SEQ ID NO: 1445391 - RNA, 14 nt, Human
auagggucuaacuc

SEQ ID NO: 1445392 - RNA, 14 nt, Human
auagggcugagcuc

SEQ ID NO: 1445393 - RNA, 17 nt, Human
auagggcugagcucucu

SEQ ID NO: 1445394 - RNA, 21 nt, Human
auagggcaauuaauuccuuca

SEQ ID NO: 1445395 - RNA, 22 nt, Human
auagggcaauuaauuccuucag

SEQ ID NO: 1445396 - RNA, 23 nt, Human
auagggcaauuaauuccuucagc

SEQ ID NO: 1445397 - RNA, 20 nt, Human
uucaagaaacugaggaauuu

SEQ ID NO: 1445398 - RNA, 13 nt, Human
uucaagaaacuga

SEQ ID NO: 1445399 - RNA, 12 nt, Human
uucaagaaacug

SEQ ID NO: 1445400 - RNA, 12 nt, Human
uucaacuuuucc

SEQ ID NO: 1445401 - RNA, 22 nt, Human
uucaagaaagcuucaaacugca

SEQ ID NO: 1445402 - RNA, 23 nt, Human
uucaagaaacugaggaauuuucu

SEQ ID NO: 1445403 - RNA, 22 nt, Human
uucaaggcacucuagauuccau

SEQ ID NO: 1445404 - RNA, 21 nt, Human
uucaaggcacucuagauucca

SEQ ID NO: 1445405 - RNA, 19 nt, Human
uucaaggcacucuagauuc

SEQ ID NO: 1445406 - RNA, 18 nt, Human
uucaaggcacucuagauu

SEQ ID NO: 1445407 - RNA, 17 nt, Human
uucaaggcacucuagau

SEQ ID NO: 1445408 - RNA, 16 nt, Human
uucaaggcacucuaga

SEQ ID NO: 1445409 - RNA, 14 nt, Human
uucaaggcacucua

SEQ ID NO: 1445410 - RNA, 19 nt, Human
uucaaggaguaugcaggga

SEQ ID NO: 1445411 - RNA, 19 nt, Human
uucaaggaauuucuuaacu

SEQ ID NO: 1445412 - RNA, 17 nt, Human
uucaaggaauuucuuaa

SEQ ID NO: 1445413 - RNA, 23 nt, Human
uucaaguuccaaguugcuaauac

SEQ ID NO: 1445414 - RNA, 19 nt, Human
uucaaguguaaaauauuuu

SEQ ID NO: 1445415 - RNA, 18 nt, Human
uucaagugcuucuccagc

SEQ ID NO: 1445416 - RNA, 22 nt, Human
uuauuucugcauauguugaaua

SEQ ID NO: 1445417 - RNA, 20 nt, Human
uuauuucugcauauguugaa

SEQ ID NO: 1445418 - RNA, 15 nt, Human
uuauuucugcauaug

SEQ ID NO: 1445419 - RNA, 13 nt, Human
uuauuucugcaua

SEQ ID NO: 1445420 - RNA, 12 nt, Human
uuauuucugcau

SEQ ID NO: 1445421 - RNA, 21 nt, Human
uuauuuccuaguucuguagaa

SEQ ID NO: 1445422 - RNA, 19 nt, Human
uucaacuuauuaacaauua

SEQ ID NO: 1445423 - RNA, 22 nt, Human
uucaaacuacuuugcugcuaau

SEQ ID NO: 1445424 - RNA, 13 nt, Human
uucaaacuacuuu

SEQ ID NO: 1445425 - RNA, 12 nt, Human
uucaaacuacuu

SEQ ID NO: 1445426 - RNA, 15 nt, Human
uucaaacauauauaa

SEQ ID NO: 1445427 - RNA, 20 nt, Human
uucaaaaugcuuuuuauuau

SEQ ID NO: 1445428 - RNA, 17 nt, Human
uucaaaaugcuuuuuau

SEQ ID NO: 1445429 - RNA, 20 nt, Human
uucaaaauaggguauauuuu

SEQ ID NO: 1445430 - RNA, 23 nt, Human
uucaaaauguuaucuucucaagu

SEQ ID NO: 1445431 - RNA, 15 nt, Human
uucaaaauguuaucu

SEQ ID NO: 1445432 - RNA, 19 nt, Human
uucaaaauaggguauauuu

SEQ ID NO: 1445433 - RNA, 16 nt, Human
uucaaaauggagggaa

SEQ ID NO: 1445434 - RNA, 16 nt, Human
uucaaaauuguuacaa

SEQ ID NO: 1445435 - RNA, 18 nt, Human
aucccuguguugucucua

SEQ ID NO: 1445436 - RNA, 15 nt, Human
aucccugggccuugg

SEQ ID NO: 1445437 - RNA, 20 nt, Human
aucccugggccuugggcucc

SEQ ID NO: 1445438 - RNA, 22 nt, Human
aucccugggccugcugcugaga

SEQ ID NO: 1445439 - RNA, 21 nt, Human
aucccugggccugcugcugag

SEQ ID NO: 1445440 - RNA, 20 nt, Human
aucccugggccugcugcuga

SEQ ID NO: 1445441 - RNA, 18 nt, Human
aucccugggccugcugcu

SEQ ID NO: 1445442 - RNA, 17 nt, Human
aucccugggccugcugc

SEQ ID NO: 1445443 - RNA, 16 nt, Human
aucccugggccugcug

SEQ ID NO: 1445444 - RNA, 15 nt, Human
aucccugggccugcu

SEQ ID NO: 1445445 - RNA, 14 nt, Human
aucccugggccugc

SEQ ID NO: 1445446 - RNA, 14 nt, Human
aucccucuccuccc

SEQ ID NO: 1445447 - RNA, 23 nt, Human
aucccucuacagagcuucccuga

SEQ ID NO: 1445448 - RNA, 22 nt, Human
aucccucuacagagcuucccug

SEQ ID NO: 1445449 - RNA, 21 nt, Human
aucccucuacagagcuucccu

SEQ ID NO: 1445450 - RNA, 20 nt, Human
aucccucuacagagcuuccc

SEQ ID NO: 1445451 - RNA, 11 nt, Human
aucccuggccc

SEQ ID NO: 1445452 - RNA, 10 nt, Human
aucccuggcc

SEQ ID NO: 1445453 - RNA, 13 nt, Human
aucccugggccug

SEQ ID NO: 1445454 - RNA, 22 nt, Human
aucccuggcccccucccuggau

SEQ ID NO: 1445455 - RNA, 16 nt, Human
aucccuggcccccucc

SEQ ID NO: 1445456 - RNA, 12 nt, Human
aucccuggcccc

SEQ ID NO: 1445457 - RNA, 17 nt, Human
aucccucuacagagcuu

SEQ ID NO: 1445458 - RNA, 13 nt, Human
aucccuccuguug

SEQ ID NO: 1445459 - RNA, 15 nt, Human
aucccuccuguuggg

SEQ ID NO: 1445460 - RNA, 12 nt, Human
aucccuccuguu

SEQ ID NO: 1445461 - RNA, 22 nt, Human
aucccucccccccaugcacugu

SEQ ID NO: 1445462 - RNA, 21 nt, Human
aucccucccccccaugcacug

SEQ ID NO: 1445463 - RNA, 19 nt, Human
aucccucccccccaugcac

SEQ ID NO: 1445464 - RNA, 18 nt, Human
aucccucccccccaugca

SEQ ID NO: 1445465 - RNA, 16 nt, Human
aucccuccccaguuca

SEQ ID NO: 1445466 - RNA, 15 nt, Human
aucccuccccaguuc

SEQ ID NO: 1445467 - RNA, 17 nt, Human
aucccucaucugucccu

SEQ ID NO: 1445468 - RNA, 13 nt, Human
aucccucaucugu

SEQ ID NO: 1445469 - RNA, 14 nt, Human
auccagguaaucca

SEQ ID NO: 1445470 - RNA, 15 nt, Human
aucauuuuaauuauu

SEQ ID NO: 1445471 - RNA, 14 nt, Human
aucauuuuaauuau

SEQ ID NO: 1445472 - RNA, 15 nt, Human
aucauuuguuuaaaa

SEQ ID NO: 1445473 - RNA, 14 nt, Human
aucauuuguuuaaa

SEQ ID NO: 1445474 - RNA, 13 nt, Human
aucauuuguuuaa

SEQ ID NO: 1445475 - RNA, 18 nt, Human
aucauuuguuggaaugaa

SEQ ID NO: 1445476 - RNA, 23 nt, Human
aucauuucuuuuugggagagacu

SEQ ID NO: 1445477 - RNA, 18 nt, Human
uucuguacucaaauguag

SEQ ID NO: 1445478 - RNA, 21 nt, Human
uucuguaccaguuaauuuuuc

SEQ ID NO: 1445479 - RNA, 17 nt, Human
aucccaacacugccagc

SEQ ID NO: 1445480 - RNA, 16 nt, Human
aucccaacacugccag

SEQ ID NO: 1445481 - RNA, 15 nt, Human
aucccaacacugcca

SEQ ID NO: 1445482 - RNA, 11 nt, Human
aucccaacacu

SEQ ID NO: 1445483 - RNA, 15 nt, Human
auccauucuccugag

SEQ ID NO: 1445484 - RNA, 13 nt, Human
auccauguaacug

SEQ ID NO: 1445485 - RNA, 16 nt, Human
auccauguaacugccu

SEQ ID NO: 1445486 - RNA, 18 nt, Human
aucauuuguuuaaaaagg

SEQ ID NO: 1445487 - RNA, 20 nt, Human
aucauuuuaccuuugacaaa

SEQ ID NO: 1445488 - RNA, 23 nt, Human
uucucuguugucguaaagauuug

SEQ ID NO: 1445489 - RNA, 22 nt, Human
uucucuguugucguaaagauuu

SEQ ID NO: 1445490 - RNA, 15 nt, Human
uucugaaaauauaac

SEQ ID NO: 1445491 - RNA, 20 nt, Human
uucucuguugucguaaagau

SEQ ID NO: 1445492 - RNA, 23 nt, Human
uucucugugucuaagauucuaga

SEQ ID NO: 1445493 - RNA, 22 nt, Human
uucucugugucuaagauucuag

SEQ ID NO: 1445494 - RNA, 21 nt, Human
uucucugugucuaagauucua

SEQ ID NO: 1445495 - RNA, 20 nt, Human
uucucugugucuaagauucu

SEQ ID NO: 1445496 - RNA, 18 nt, Human
uucucugugucuaagauu

SEQ ID NO: 1445497 - RNA, 17 nt, Human
uucucugugucuaagau

SEQ ID NO: 1445498 - RNA, 16 nt, Human
uucucugugucuaaga

SEQ ID NO: 1445499 - RNA, 17 nt, Human
uucucugucucauccau

SEQ ID NO: 1445500 - RNA, 22 nt, Human
uucugaacagcugguguagcua

SEQ ID NO: 1445501 - RNA, 18 nt, Human
uucugaacagcuggugua

SEQ ID NO: 1445502 - RNA, 16 nt, Human
uucugaacagcuggug

SEQ ID NO: 1445503 - RNA, 15 nt, Human
uucugaacagcuggu

SEQ ID NO: 1445504 - RNA, 14 nt, Human
uucugaacagcugg

SEQ ID NO: 1445505 - RNA, 13 nt, Human
uucugaacagcug

SEQ ID NO: 1445506 - RNA, 12 nt, Human
uucugaacagcu

SEQ ID NO: 1445507 - RNA, 21 nt, Human
uucugaaauuuccugggagcu

SEQ ID NO: 1445508 - RNA, 13 nt, Human
uucugaagaagau

SEQ ID NO: 1445509 - RNA, 12 nt, Human
uucugaagaaga

SEQ ID NO: 1445510 - RNA, 13 nt, Human
uucugaacuaaag

SEQ ID NO: 1445511 - RNA, 23 nt, Human
uucugaacagcugguguagcuac

SEQ ID NO: 1445512 - RNA, 14 nt, Human
uucugaagaagaug

SEQ ID NO: 1445513 - RNA, 14 nt, Human
uucugccuccccuu

SEQ ID NO: 1445514 - RNA, 12 nt, Human
uucugccaggag

SEQ ID NO: 1445515 - RNA, 18 nt, Human
uucugccucucuaggacc

SEQ ID NO: 1445516 - RNA, 17 nt, Human
uucugccucucuaggac

SEQ ID NO: 1445517 - RNA, 14 nt, Human
uucuguaccaguua

SEQ ID NO: 1445518 - RNA, 13 nt, Human
uucuguaccaguu

SEQ ID NO: 1445519 - RNA, 12 nt, Human
uucuguaccagu

SEQ ID NO: 1445520 - RNA, 11 nt, Human
uucuguaccag

SEQ ID NO: 1445521 - RNA, 22 nt, Human
uucuguacaugcauugagcucu

SEQ ID NO: 1445522 - RNA, 13 nt, Human
uucuguaauugug

SEQ ID NO: 1445523 - RNA, 22 nt, Human
uucuguaauucagguuuuuccu

SEQ ID NO: 1445524 - RNA, 21 nt, Human
uucuguaauucagguuuuucc

SEQ ID NO: 1445525 - RNA, 16 nt, Human
uucuguaauucagguu

SEQ ID NO: 1445526 - RNA, 11 nt, Human
uucuguaauuc

SEQ ID NO: 1445527 - RNA, 15 nt, Human
uucuguaagaaaccu

SEQ ID NO: 1445528 - RNA, 22 nt, Human
uucuguaaauaaugugcacuga

SEQ ID NO: 1445529 - RNA, 19 nt, Human
uucuguaagaaaccuacug

SEQ ID NO: 1445530 - RNA, 12 nt, Human
uucugccugcca

SEQ ID NO: 1445531 - RNA, 20 nt, Human
uucugguaggaauagcaugu

SEQ ID NO: 1445532 - RNA, 21 nt, Human
uucugguaugaacuugaggac

SEQ ID NO: 1445533 - RNA, 16 nt, Human
uucugguccuuuuugg

SEQ ID NO: 1445534 - RNA, 14 nt, Human
uucugguccuuuuu

SEQ ID NO: 1445535 - RNA, 22 nt, Human
uucugguaggaauagcauguca

SEQ ID NO: 1445536 - RNA, 22 nt, Human
uucugguaugaacuugaggaca

SEQ ID NO: 1445537 - RNA, 22 nt, Human
aucagagaugcaccaccaagcc

SEQ ID NO: 1445538 - RNA, 18 nt, Human
aucagaagucaucuugcu

SEQ ID NO: 1445539 - RNA, 14 nt, Human
aucagagaaggaac

SEQ ID NO: 1445540 - RNA, 23 nt, Human
aucagaacucaaauggggccaga

SEQ ID NO: 1445541 - RNA, 22 nt, Human
aucagaacucaaauggggccag

SEQ ID NO: 1445542 - RNA, 12 nt, Human
aucagaacagga

SEQ ID NO: 1445543 - RNA, 22 nt, Human
aucagaaagggagggcucugag

SEQ ID NO: 1445544 - RNA, 23 nt, Human
aucagaaagggagggcucugagg

SEQ ID NO: 1445545 - RNA, 21 nt, Human
aucagaaagggagggcucuga

SEQ ID NO: 1445546 - RNA, 20 nt, Human
aucagaaagggagggcucug

SEQ ID NO: 1445547 - RNA, 19 nt, Human
aucagaaagggagggcucu

SEQ ID NO: 1445548 - RNA, 12 nt, Human
uucucaucagua

SEQ ID NO: 1445549 - RNA, 14 nt, Human
aucagaaauacaga

SEQ ID NO: 1445550 - RNA, 15 nt, Human
aucagaaauacagau

SEQ ID NO: 1445551 - RNA, 19 nt, Human
aucagaaauacagauuuug

SEQ ID NO: 1445552 - RNA, 23 nt, Human
aucagaaauacagauuuugauag

SEQ ID NO: 1445553 - RNA, 13 nt, Human
uucucaucaguag

SEQ ID NO: 1445554 - RNA, 12 nt, Human
uucucauaacuu

SEQ ID NO: 1445555 - RNA, 15 nt, Human
uucucaguuuucaua

SEQ ID NO: 1445556 - RNA, 14 nt, Human
uucucaguuuucau

SEQ ID NO: 1445557 - RNA, 21 nt, Human
uucucacacuggucugcuguc

SEQ ID NO: 1445558 - RNA, 20 nt, Human
uucucaauuccaacaguuua

SEQ ID NO: 1445559 - RNA, 18 nt, Human
uucucaauuccaacaguu

SEQ ID NO: 1445560 - RNA, 17 nt, Human
uucucaauuccaacagu

SEQ ID NO: 1445561 - RNA, 20 nt, Human
uucucacagcuccaagaauu

SEQ ID NO: 1445562 - RNA, 18 nt, Human
uucuagguaggaaaugug

SEQ ID NO: 1445563 - RNA, 14 nt, Human
uucuagguaggaaa

SEQ ID NO: 1445564 - RNA, 21 nt, Human
uucuaggcacuguaguucuaa

SEQ ID NO: 1445565 - RNA, 23 nt, Human
uucuaggcacuguaguucuaaga

SEQ ID NO: 1445566 - RNA, 20 nt, Human
uucuagguuucaaagaugcu

SEQ ID NO: 1445567 - RNA, 13 nt, Human
uucuagguuucaa

SEQ ID NO: 1445568 - RNA, 15 nt, Human
uucuagguucuaaaa

SEQ ID NO: 1445569 - RNA, 17 nt, Human
uucuagguuucaaagau

SEQ ID NO: 1445570 - RNA, 14 nt, Human
uucuaguugaaaau

SEQ ID NO: 1445571 - RNA, 17 nt, Human
uucuaguucugccagga

SEQ ID NO: 1445572 - RNA, 14 nt, Human
uuccuuuuucagau

SEQ ID NO: 1445573 - RNA, 20 nt, Human
uuccuuuuuaauaugcuuaa

SEQ ID NO: 1445574 - RNA, 17 nt, Human
uuccuuuugccgacccc

SEQ ID NO: 1445575 - RNA, 14 nt, Human
uucucaauuccaac

SEQ ID NO: 1445576 - RNA, 13 nt, Human
uucucaauuccaa

SEQ ID NO: 1445577 - RNA, 23 nt, Human
uucucaaguucuaagauucuaau

SEQ ID NO: 1445578 - RNA, 22 nt, Human
uucucaaguucuaagauucuaa

SEQ ID NO: 1445579 - RNA, 20 nt, Human
uucucaaguucuaagauucu

SEQ ID NO: 1445580 - RNA, 18 nt, Human
uucucaaguucuaagauu

SEQ ID NO: 1445581 - RNA, 17 nt, Human
uucucaaguucuaagau

SEQ ID NO: 1445582 - RNA, 16 nt, Human
uucucaaguucuaaga

SEQ ID NO: 1445583 - RNA, 14 nt, Human
uucucaaguucuaa

SEQ ID NO: 1445584 - RNA, 13 nt, Human
uucucaaguucua

SEQ ID NO: 1445585 - RNA, 23 nt, Human
uucuauaaggccauaaaacaggu

SEQ ID NO: 1445586 - RNA, 14 nt, Human
uucucaagcccugc

SEQ ID NO: 1445587 - RNA, 15 nt, Human
uucucaagcccugca

SEQ ID NO: 1445588 - RNA, 21 nt, Human
uucuauaaggccauaaaacag

SEQ ID NO: 1445589 - RNA, 14 nt, Human
uucuauaaggccau

SEQ ID NO: 1445590 - RNA, 13 nt, Human
uucuauaaggcca

SEQ ID NO: 1445591 - RNA, 18 nt, Human
uucucaacuccaaacuga

SEQ ID NO: 1445592 - RNA, 14 nt, Human
uucucaacuccaaa

SEQ ID NO: 1445593 - RNA, 15 nt, Human
aucauagaaauguaa

SEQ ID NO: 1445594 - RNA, 12 nt, Human
aucauagaaaug

SEQ ID NO: 1445595 - RNA, 13 nt, Human
aucauaaggcuuc

SEQ ID NO: 1445596 - RNA, 19 nt, Human
aucaguguaccauuugccu

SEQ ID NO: 1445597 - RNA, 19 nt, Human
aucagucauaacuaaauaa

SEQ ID NO: 1445598 - RNA, 13 nt, Human
aucagucaauauu

SEQ ID NO: 1445599 - RNA, 20 nt, Human
aucagaugcuccaagauucu

SEQ ID NO: 1445600 - RNA, 17 nt, Human
aucagcacgauuucugu

SEQ ID NO: 1445601 - RNA, 18 nt, Human
aucagcacgauuucuguu

SEQ ID NO: 1445602 - RNA, 15 nt, Human
aucagauagcaucuu

SEQ ID NO: 1445603 - RNA, 16 nt, Human
aucagagugacaucca

SEQ ID NO: 1445604 - RNA, 17 nt, Human
aucagaguugcugcaaa

SEQ ID NO: 1445605 - RNA, 20 nt, Human
aucagagugacauccaggag

SEQ ID NO: 1445606 - RNA, 15 nt, Human
aucagcacgauuucu

SEQ ID NO: 1445607 - RNA, 16 nt, Human
aucagcacgauuucug

SEQ ID NO: 1445608 - RNA, 18 nt, Human
aucaucaaguaauacaaa

SEQ ID NO: 1445609 - RNA, 20 nt, Human
aucaucagaaaggaaaaaca

SEQ ID NO: 1445610 - RNA, 21 nt, Human
aucaucaaguaauacaaacua

SEQ ID NO: 1445611 - RNA, 16 nt, Human
aucaucaaguaauaca

SEQ ID NO: 1445612 - RNA, 14 nt, Human
aucaucaggacccu

SEQ ID NO: 1445613 - RNA, 15 nt, Human
aucaucaagagaauu

SEQ ID NO: 1445614 - RNA, 15 nt, Human
aucauucauuuuugu

SEQ ID NO: 1445615 - RNA, 14 nt, Human
aucauuauuuaugu

SEQ ID NO: 1445616 - RNA, 12 nt, Human
aucauucaagug

SEQ ID NO: 1445617 - RNA, 17 nt, Human
aucauuauuuauguauu

SEQ ID NO: 1445618 - RNA, 15 nt, Human
aucauuauuuaugua

SEQ ID NO: 1445619 - RNA, 14 nt, Human
aucauucauuuucu

SEQ ID NO: 1445620 - RNA, 18 nt, Human
aucacuguuuagaacaca

SEQ ID NO: 1445621 - RNA, 20 nt, Human
aucacuguuuagaacacaca

SEQ ID NO: 1445622 - RNA, 22 nt, Human
aucacuagcccuccuuuuucca

SEQ ID NO: 1445623 - RNA, 12 nt, Human
uuccuuuuauca

SEQ ID NO: 1445624 - RNA, 12 nt, Human
uuccuuuuaauu

SEQ ID NO: 1445625 - RNA, 13 nt, Human
uuccuuugugcuu

SEQ ID NO: 1445626 - RNA, 15 nt, Human
aucacaaaguggaac

SEQ ID NO: 1445627 - RNA, 24 nt, Human
aucacaaaguggaacgaaaaugaa

SEQ ID NO: 1445628 - RNA, 14 nt, Human
aucacaaaguggaa

SEQ ID NO: 1445629 - RNA, 15 nt, Human
aucacaacgugcauu

SEQ ID NO: 1445630 - RNA, 17 nt, Human
aucacaacgugcauugu

SEQ ID NO: 1445631 - RNA, 18 nt, Human
aucacaacgugcauugug

SEQ ID NO: 1445632 - RNA, 21 nt, Human
aucacaacgugcauugugcuu

SEQ ID NO: 1445633 - RNA, 17 nt, Human
aucacuagcccuccuuu

SEQ ID NO: 1445634 - RNA, 13 nt, Human
aucacacaaagca

SEQ ID NO: 1445635 - RNA, 22 nt, Human
aucacaacgugcauugugcuuc

SEQ ID NO: 1445636 - RNA, 16 nt, Human
aucacaagauggaauu

SEQ ID NO: 1445637 - RNA, 21 nt, Human
aucaauaauauauuuucuguu

SEQ ID NO: 1445638 - RNA, 20 nt, Human
aucaauaauauauuuucugu

SEQ ID NO: 1445639 - RNA, 18 nt, Human
aucaauaauauauuuucu

SEQ ID NO: 1445640 - RNA, 16 nt, Human
aucaaguauuugggaa

SEQ ID NO: 1445641 - RNA, 16 nt, Human
aucaauaauauauuuu

SEQ ID NO: 1445642 - RNA, 13 nt, Human
aucaaguauuaua

SEQ ID NO: 1445643 - RNA, 14 nt, Human
aucaaguauuauac

SEQ ID NO: 1445644 - RNA, 18 nt, Human
aucaaguauuauaccuuu

SEQ ID NO: 1445645 - RNA, 13 nt, Human
aucaagagacuga

SEQ ID NO: 1445646 - RNA, 12 nt, Human
auauuuugcagu

SEQ ID NO: 1445647 - RNA, 13 nt, Human
auauuuucuuuuc

SEQ ID NO: 1445648 - RNA, 14 nt, Human
auauuuugaaucaa

SEQ ID NO: 1445649 - RNA, 19 nt, Human
auauuuugaaucaauaaua

SEQ ID NO: 1445650 - RNA, 13 nt, Human
auauuuugaauca

SEQ ID NO: 1445651 - RNA, 12 nt, Human
auauuuugaauc

SEQ ID NO: 1445652 - RNA, 13 nt, Human
auauuuucuuucu

SEQ ID NO: 1445653 - RNA, 12 nt, Human
auauuuucuuuc

SEQ ID NO: 1445654 - RNA, 19 nt, Human
uuccuaauaaaguucugua

SEQ ID NO: 1445655 - RNA, 16 nt, Human
uuccuaauaaaguucu

SEQ ID NO: 1445656 - RNA, 15 nt, Human
uuccuaauaaaguuc

SEQ ID NO: 1445657 - RNA, 14 nt, Human
auauuuuaagacga

SEQ ID NO: 1445658 - RNA, 22 nt, Human
uuccucuaacuuggcucacacu

SEQ ID NO: 1445659 - RNA, 23 nt, Human
uuccuccugggcccucucugcuc

SEQ ID NO: 1445660 - RNA, 21 nt, Human
uuccuccugggcccucucugc

SEQ ID NO: 1445661 - RNA, 15 nt, Human
uuccuccugggcccu

SEQ ID NO: 1445662 - RNA, 14 nt, Human
uuccuccugggccc

SEQ ID NO: 1445663 - RNA, 11 nt, Human
uuccuccuggg

SEQ ID NO: 1445664 - RNA, 22 nt, Human
uuccuaauaaaguucuguacuc

SEQ ID NO: 1445665 - RNA, 17 nt, Human
uuccucuaguucuuugu

SEQ ID NO: 1445666 - RNA, 20 nt, Human
uuccucuucuauuuuguaaa

SEQ ID NO: 1445667 - RNA, 22 nt, Human
uuccucuguucaaagcugccug

SEQ ID NO: 1445668 - RNA, 18 nt, Human
uuccucugucuccuaagc

SEQ ID NO: 1445669 - RNA, 21 nt, Human
uuccuguguguccaaaacugc

SEQ ID NO: 1445670 - RNA, 20 nt, Human
uuccuggugccaauuucaag

SEQ ID NO: 1445671 - RNA, 19 nt, Human
uuccuggugccaauuucaa

SEQ ID NO: 1445672 - RNA, 22 nt, Human
uuccugguagaccacugccaua

SEQ ID NO: 1445673 - RNA, 22 nt, Human
uuccuggguggcuacucugugc

SEQ ID NO: 1445674 - RNA, 22 nt, Human
uuccuguguguccaaaacugcc

SEQ ID NO: 1445675 - RNA, 15 nt, Human
uuccugggagcuuuu

SEQ ID NO: 1445676 - RNA, 23 nt, Human
uuccuggguggcuacucugugcc

SEQ ID NO: 1445677 - RNA, 17 nt, Human
uuccuggguggcuacuc

SEQ ID NO: 1445678 - RNA, 16 nt, Human
uuccuggguggcuacu

SEQ ID NO: 1445679 - RNA, 16 nt, Human
uuccugggagcuuuug

SEQ ID NO: 1445680 - RNA, 17 nt, Human
uuccuguugucaagaau

SEQ ID NO: 1445681 - RNA, 19 nt, Human
uuccuucagcacuuuagaa

SEQ ID NO: 1445682 - RNA, 16 nt, Human
uuccuucagcacuuua

SEQ ID NO: 1445683 - RNA, 21 nt, Human
auauuuucaccauuugauuau

SEQ ID NO: 1445684 - RNA, 21 nt, Human
auauuuucaugcuguucauga

SEQ ID NO: 1445685 - RNA, 18 nt, Human
auauuuucaugcuguuca

SEQ ID NO: 1445686 - RNA, 18 nt, Human
uucaugugucccagaaga

SEQ ID NO: 1445687 - RNA, 22 nt, Human
uucauguuaguuaccuuauagu

SEQ ID NO: 1445688 - RNA, 18 nt, Human
uucauguuaguuaccuua

SEQ ID NO: 1445689 - RNA, 16 nt, Human
uucauguuaguuaccu

SEQ ID NO: 1445690 - RNA, 13 nt, Human
uucauguuaguua

SEQ ID NO: 1445691 - RNA, 16 nt, Human
uucaugugucccagaa

SEQ ID NO: 1445692 - RNA, 15 nt, Human
uucaugugucccaga

SEQ ID NO: 1445693 - RNA, 16 nt, Human
uucaugucugcuauca

SEQ ID NO: 1445694 - RNA, 16 nt, Human
auauuaaugcccagac

SEQ ID NO: 1445695 - RNA, 19 nt, Human
auauuaaccagauauauau

SEQ ID NO: 1445696 - RNA, 18 nt, Human
auauuaaccagauauaua

SEQ ID NO: 1445697 - RNA, 18 nt, Human
auauuaaauuuuuuguug

SEQ ID NO: 1445698 - RNA, 16 nt, Human
auauuaaauuuuuugu

SEQ ID NO: 1445699 - RNA, 13 nt, Human
auauuaaaucugc

SEQ ID NO: 1445700 - RNA, 12 nt, Human
auauuaaaucug

SEQ ID NO: 1445701 - RNA, 16 nt, Human
auauugaaaaaauaga

SEQ ID NO: 1445702 - RNA, 15 nt, Human
auauugauccagaaa

SEQ ID NO: 1445703 - RNA, 22 nt, Human
auauugauccagaaagaaaacu

SEQ ID NO: 1445704 - RNA, 19 nt, Human
auauugauuuccguuaaaa

SEQ ID NO: 1445705 - RNA, 21 nt, Human
auauugauuuccguuaaaaua

SEQ ID NO: 1445706 - RNA, 22 nt, Human
auauugauuuccguuaaaauac

SEQ ID NO: 1445707 - RNA, 23 nt, Human
auauucccuagaaacuuccaaau

SEQ ID NO: 1445708 - RNA, 17 nt, Human
auauucccuagaaacuu

SEQ ID NO: 1445709 - RNA, 23 nt, Human
auauuccuauugugcaauguaaa

SEQ ID NO: 1445710 - RNA, 22 nt, Human
auauuccuauugugcaauguaa

SEQ ID NO: 1445711 - RNA, 17 nt, Human
auauuccuauugugcaa

SEQ ID NO: 1445712 - RNA, 23 nt, Human
auauucucacagcuccaagaauu

SEQ ID NO: 1445713 - RNA, 22 nt, Human
auauucucacagcuccaagaau

SEQ ID NO: 1445714 - RNA, 17 nt, Human
auauugccauuaugcuu

SEQ ID NO: 1445715 - RNA, 19 nt, Human
auauugcacaugucuuaau

SEQ ID NO: 1445716 - RNA, 20 nt, Human
auauugcacaugucuuaaug

SEQ ID NO: 1445717 - RNA, 21 nt, Human
auauugcacaugucuuaauga

SEQ ID NO: 1445718 - RNA, 15 nt, Human
auauugauuuauuaa

SEQ ID NO: 1445719 - RNA, 13 nt, Human
auauugauuuauu

SEQ ID NO: 1445720 - RNA, 13 nt, Human
auauugcacaugu

SEQ ID NO: 1445721 - RNA, 15 nt, Human
auauugcacaugucu

SEQ ID NO: 1445722 - RNA, 16 nt, Human
auauugcacaugucuu

SEQ ID NO: 1445723 - RNA, 17 nt, Human
auauugcacaugucuua

SEQ ID NO: 1445724 - RNA, 13 nt, Human
auauuguguuugu

SEQ ID NO: 1445725 - RNA, 21 nt, Human
auauuguggguguuaauuuuu

SEQ ID NO: 1445726 - RNA, 20 nt, Human
auauuguugcauugcuuuuu

SEQ ID NO: 1445727 - RNA, 21 nt, Human
auauuguguuuguguauuuac

SEQ ID NO: 1445728 - RNA, 17 nt, Human
auauuguguuuguguau

SEQ ID NO: 1445729 - RNA, 14 nt, Human
auauuuaaaaauaa

SEQ ID NO: 1445730 - RNA, 13 nt, Human
auauuuaaaaaua

SEQ ID NO: 1445731 - RNA, 16 nt, Human
auauuguugcauugcu

SEQ ID NO: 1445732 - RNA, 16 nt, Human
auauuuaaaaguguca

SEQ ID NO: 1445733 - RNA, 16 nt, Human
auauuuaaaaauaagu

SEQ ID NO: 1445734 - RNA, 23 nt, Human
auauuucuauuuuauuaugaaga

SEQ ID NO: 1445735 - RNA, 21 nt, Human
auauuucuauuuuauuaugaa

SEQ ID NO: 1445736 - RNA, 15 nt, Human
auauuucuauuuuau

SEQ ID NO: 1445737 - RNA, 13 nt, Human
auauuucuauuuu

SEQ ID NO: 1445738 - RNA, 13 nt, Human
auauuugaaauau

SEQ ID NO: 1445739 - RNA, 20 nt, Human
auauuuuaaagaauuguguc

SEQ ID NO: 1445740 - RNA, 16 nt, Human
auauuuuaaagaauug

SEQ ID NO: 1445741 - RNA, 15 nt, Human
auauuuuaaagaauu

SEQ ID NO: 1445742 - RNA, 14 nt, Human
auauuuuaaagaau

SEQ ID NO: 1445743 - RNA, 14 nt, Human
auauuuuaaacaga

SEQ ID NO: 1445744 - RNA, 18 nt, Human
auauuuuaaaauuuguuc

SEQ ID NO: 1445745 - RNA, 17 nt, Human
auauuuuaaaauuuguu

SEQ ID NO: 1445746 - RNA, 15 nt, Human
auauuuuaaaauuug

SEQ ID NO: 1445747 - RNA, 13 nt, Human
auauuuuaaaauu

SEQ ID NO: 1445748 - RNA, 16 nt, Human
auauuuguuuauggua

SEQ ID NO: 1445749 - RNA, 15 nt, Human
auauuuguuauguag

SEQ ID NO: 1445750 - RNA, 18 nt, Human
auauuugugacaaaaaau

SEQ ID NO: 1445751 - RNA, 21 nt, Human
auauuugucaugcugggauuu

SEQ ID NO: 1445752 - RNA, 12 nt, Human
auauuuguacau

SEQ ID NO: 1445753 - RNA, 13 nt, Human
auauuuguacaua

SEQ ID NO: 1445754 - RNA, 15 nt, Human
auauuuguaaaauga

SEQ ID NO: 1445755 - RNA, 13 nt, Human
auauuuguaaaau

SEQ ID NO: 1445756 - RNA, 15 nt, Human
auauuugaaucuugu

SEQ ID NO: 1445757 - RNA, 16 nt, Human
auauuugaaucuuguc

SEQ ID NO: 1445758 - RNA, 19 nt, Human
auauuuguaaaaugacaau

SEQ ID NO: 1445759 - RNA, 17 nt, Human
auauuuguaaaaugaca

SEQ ID NO: 1445760 - RNA, 16 nt, Human
auauuuguaaaaugac

SEQ ID NO: 1445761 - RNA, 11 nt, Human
auauuugaauc

SEQ ID NO: 1445762 - RNA, 13 nt, Human
auauuugaaucuu

SEQ ID NO: 1445763 - RNA, 14 nt, Human
auauuugaaucuug

SEQ ID NO: 1445764 - RNA, 23 nt, Human
auauuugaaauauugacuuuuua

SEQ ID NO: 1445765 - RNA, 19 nt, Human
auauuugaaauauugacuu

SEQ ID NO: 1445766 - RNA, 14 nt, Human
auauuugaaauauu

SEQ ID NO: 1445767 - RNA, 21 nt, Human
aucuauuuuuggagguuuauu

SEQ ID NO: 1445768 - RNA, 23 nt, Human
aucuauuuuuggcagucugaauu

SEQ ID NO: 1445769 - RNA, 19 nt, Human
aucuauuuuuggcagucug

SEQ ID NO: 1445770 - RNA, 15 nt, Human
aucuauuuuuggagg

SEQ ID NO: 1445771 - RNA, 13 nt, Human
aucuauuuuugga

SEQ ID NO: 1445772 - RNA, 14 nt, Human
aucucaaauuucua

SEQ ID NO: 1445773 - RNA, 16 nt, Human
aucuagauaucgacuu

SEQ ID NO: 1445774 - RNA, 15 nt, Human
aucuacucaaagcau

SEQ ID NO: 1445775 - RNA, 19 nt, Human
aucuagauacuguaucaug

SEQ ID NO: 1445776 - RNA, 21 nt, Human
aucuaccuagauuuaauauaa

SEQ ID NO: 1445777 - RNA, 15 nt, Human
aucuaccuagauuua

SEQ ID NO: 1445778 - RNA, 22 nt, Human
aucuaccccagacuagauguag

SEQ ID NO: 1445779 - RNA, 21 nt, Human
aucuaccccagacuagaugua

SEQ ID NO: 1445780 - RNA, 20 nt, Human
aucuaccccagacuagaugu

SEQ ID NO: 1445781 - RNA, 14 nt, Human
aucuaccccagacu

SEQ ID NO: 1445782 - RNA, 19 nt, Human
aucuacuaauuccacaccu

SEQ ID NO: 1445783 - RNA, 15 nt, Human
aucuacuaauuccac

SEQ ID NO: 1445784 - RNA, 18 nt, Human
aucuagauacuguaucau

SEQ ID NO: 1445785 - RNA, 23 nt, Human
aucuaauuuauaaaaagguguuu

SEQ ID NO: 1445786 - RNA, 19 nt, Human
aucuaauuuauaaaaaggu

SEQ ID NO: 1445787 - RNA, 15 nt, Human
aucuaauuuauaaaa

SEQ ID NO: 1445788 - RNA, 14 nt, Human
aucuaauuuauaaa

SEQ ID NO: 1445789 - RNA, 13 nt, Human
aucuaauuuauaa

SEQ ID NO: 1445790 - RNA, 20 nt, Human
uugauacuguugcacgugug

SEQ ID NO: 1445791 - RNA, 18 nt, Human
uugauacuguugcacgug

SEQ ID NO: 1445792 - RNA, 17 nt, Human
uugauacuguugcacgu

SEQ ID NO: 1445793 - RNA, 16 nt, Human
uugauacuguugcacg

SEQ ID NO: 1445794 - RNA, 15 nt, Human
uugauacuguugcac

SEQ ID NO: 1445795 - RNA, 13 nt, Human
uugauagaaccau

SEQ ID NO: 1445796 - RNA, 13 nt, Human
uugauagcaaagc

SEQ ID NO: 1445797 - RNA, 15 nt, Human
uugauagaaaugcca

SEQ ID NO: 1445798 - RNA, 14 nt, Human
uugauacuguugca

SEQ ID NO: 1445799 - RNA, 13 nt, Human
uugauacuguugc

SEQ ID NO: 1445800 - RNA, 17 nt, Human
uugauacuacaguuugu

SEQ ID NO: 1445801 - RNA, 13 nt, Human
uugaguguuuaaa

SEQ ID NO: 1445802 - RNA, 23 nt, Human
uugagugggguuaucucuguguu

SEQ ID NO: 1445803 - RNA, 15 nt, Human
uugagugcucugauc

SEQ ID NO: 1445804 - RNA, 14 nt, Human
uugagugcucugau

SEQ ID NO: 1445805 - RNA, 16 nt, Human
uugagcaucacagaau

SEQ ID NO: 1445806 - RNA, 15 nt, Human
uugagcaucuguccc

SEQ ID NO: 1445807 - RNA, 15 nt, Human
uugagcaucacagaa

SEQ ID NO: 1445808 - RNA, 19 nt, Human
uugagcaguggcuggucca

SEQ ID NO: 1445809 - RNA, 23 nt, Human
uugagaaucccaaauuugauuga

SEQ ID NO: 1445810 - RNA, 18 nt, Human
uugacauugcguuugacc

SEQ ID NO: 1445811 - RNA, 14 nt, Human
uugacauugcguuu

SEQ ID NO: 1445812 - RNA, 20 nt, Human
uugacauucugaaugcuucu

SEQ ID NO: 1445813 - RNA, 18 nt, Human
uugacauucugaaugcuu

SEQ ID NO: 1445814 - RNA, 16 nt, Human
uugacauucugaaugc

SEQ ID NO: 1445815 - RNA, 15 nt, Human
uugacauucugaaug

SEQ ID NO: 1445816 - RNA, 14 nt, Human
uugacauucugaau

SEQ ID NO: 1445817 - RNA, 13 nt, Human
uugacauucugaa

SEQ ID NO: 1445818 - RNA, 18 nt, Human
uugacuuuucuguaauuc

SEQ ID NO: 1445819 - RNA, 13 nt, Human
uugacuuuucugu

SEQ ID NO: 1445820 - RNA, 12 nt, Human
uugacuuuuuau

SEQ ID NO: 1445821 - RNA, 16 nt, Human
uugacuuuuugcauuu

SEQ ID NO: 1445822 - RNA, 19 nt, Human
uugacuuuucuguaauuca

SEQ ID NO: 1445823 - RNA, 17 nt, Human
uugacuuuuugcauuua

SEQ ID NO: 1445824 - RNA, 11 nt, Human
uugagaaaaau

SEQ ID NO: 1445825 - RNA, 19 nt, Human
uugagaaaaauauauacua

SEQ ID NO: 1445826 - RNA, 12 nt, Human
uugacaccugcu

SEQ ID NO: 1445827 - RNA, 16 nt, Human
uugacacagaaaaugu

SEQ ID NO: 1445828 - RNA, 14 nt, Human
auccgaaucucuuu

SEQ ID NO: 1445829 - RNA, 15 nt, Human
aucccuuuuucaaug

SEQ ID NO: 1445830 - RNA, 20 nt, Human
aucccuucauacuugaacgu

SEQ ID NO: 1445831 - RNA, 16 nt, Human
aucccuucauacuuga

SEQ ID NO: 1445832 - RNA, 21 nt, Human
aucccuuaauauccuaaacau

SEQ ID NO: 1445833 - RNA, 20 nt, Human
aucccuuaauauccuaaaca

SEQ ID NO: 1445834 - RNA, 23 nt, Human
uugacacuagcccaaugaaauga

SEQ ID NO: 1445835 - RNA, 13 nt, Human
uugacaugggaca

SEQ ID NO: 1445836 - RNA, 14 nt, Human
uugccacagcuuuu

SEQ ID NO: 1445837 - RNA, 18 nt, Human
uugccacagcuuuugcaa

SEQ ID NO: 1445838 - RNA, 13 nt, Human
uugccacagcuuu

SEQ ID NO: 1445839 - RNA, 12 nt, Human
uugccacagcuu

SEQ ID NO: 1445840 - RNA, 18 nt, Human
uugccaauagugucaucc

SEQ ID NO: 1445841 - RNA, 21 nt, Human
uugccaagggcauaaauuauu

SEQ ID NO: 1445842 - RNA, 16 nt, Human
uugccaaggcagaggc

SEQ ID NO: 1445843 - RNA, 22 nt, Human
uugccaagcuccaagccccauc

SEQ ID NO: 1445844 - RNA, 18 nt, Human
uugccaaauauguccugg

SEQ ID NO: 1445845 - RNA, 17 nt, Human
uugccaaauauguccug

SEQ ID NO: 1445846 - RNA, 16 nt, Human
uugccaaauauguccu

SEQ ID NO: 1445847 - RNA, 19 nt, Human
uugcauguaguaacacuaa

SEQ ID NO: 1445848 - RNA, 17 nt, Human
uugcauguaguaacacu

SEQ ID NO: 1445849 - RNA, 13 nt, Human
uugcauguaguaa

SEQ ID NO: 1445850 - RNA, 22 nt, Human
uugcaccccaaagcuuuccugc

SEQ ID NO: 1445851 - RNA, 21 nt, Human
uugcaccccaaagcuuuccug

SEQ ID NO: 1445852 - RNA, 18 nt, Human
uugcaaucccuuaauauc

SEQ ID NO: 1445853 - RNA, 22 nt, Human
uugcaauaucugaagcccuccc

SEQ ID NO: 1445854 - RNA, 15 nt, Human
uugcaauaucugaag

SEQ ID NO: 1445855 - RNA, 22 nt, Human
aucucaccaggcagccucuggg

SEQ ID NO: 1445856 - RNA, 15 nt, Human
aucucaccaggcagc

SEQ ID NO: 1445857 - RNA, 22 nt, Human
aucucaacaggccucagggcuc

SEQ ID NO: 1445858 - RNA, 20 nt, Human
aucucaacaggccucagggc

SEQ ID NO: 1445859 - RNA, 19 nt, Human
aucucaacaggccucaggg

SEQ ID NO: 1445860 - RNA, 15 nt, Human
aucucaacaggccuc

SEQ ID NO: 1445861 - RNA, 16 nt, Human
aucucaaauuucuaaa

SEQ ID NO: 1445862 - RNA, 17 nt, Human
aucucaaauuucuaaau

SEQ ID NO: 1445863 - RNA, 19 nt, Human
aucucuuuuugcuuucgaa

SEQ ID NO: 1445864 - RNA, 18 nt, Human
aucucaccaggcagccuc

SEQ ID NO: 1445865 - RNA, 16 nt, Human
aucucuuguuuaaauu

SEQ ID NO: 1445866 - RNA, 18 nt, Human
aucugaagcccucccagg

SEQ ID NO: 1445867 - RNA, 15 nt, Human
aucugaagcccuccc

SEQ ID NO: 1445868 - RNA, 18 nt, Human
aucugacccagugccccc

SEQ ID NO: 1445869 - RNA, 14 nt, Human
aucugacccagugc

SEQ ID NO: 1445870 - RNA, 21 nt, Human
aucugaauaaaguguaacaau

SEQ ID NO: 1445871 - RNA, 18 nt, Human
aucugagaaaagcuuuga

SEQ ID NO: 1445872 - RNA, 21 nt, Human
aucugacccagugcccccacu

SEQ ID NO: 1445873 - RNA, 20 nt, Human
aucugacccagugcccccac

SEQ ID NO: 1445874 - RNA, 22 nt, Human
aucugagaaaagcuuugaaccc

SEQ ID NO: 1445875 - RNA, 19 nt, Human
uugauguuccuuccagugu

SEQ ID NO: 1445876 - RNA, 14 nt, Human
uugauguuccuucc

SEQ ID NO: 1445877 - RNA, 22 nt, Human
uugcaagccagauuuuccugaa

SEQ ID NO: 1445878 - RNA, 18 nt, Human
uugcaacuuuguauaaaa

SEQ ID NO: 1445879 - RNA, 16 nt, Human
uugcaacuuuguauaa

SEQ ID NO: 1445880 - RNA, 17 nt, Human
uugcaacuuuguauaaa

SEQ ID NO: 1445881 - RNA, 15 nt, Human
uugauuaaauucuug

SEQ ID NO: 1445882 - RNA, 16 nt, Human
uugauuaaauucuugc

SEQ ID NO: 1445883 - RNA, 20 nt, Human
uugauuaaauucuugcaaag

SEQ ID NO: 1445884 - RNA, 21 nt, Human
uugauuaaauucuugcaaagu

SEQ ID NO: 1445885 - RNA, 15 nt, Human
uugcuuuauuccaga

SEQ ID NO: 1445886 - RNA, 17 nt, Human
uugcuuccuccucccca

SEQ ID NO: 1445887 - RNA, 15 nt, Human
uugcuuccuccuccc

SEQ ID NO: 1445888 - RNA, 14 nt, Human
uugcuuccuccucc

SEQ ID NO: 1445889 - RNA, 19 nt, Human
uugcuucaugugucccaga

SEQ ID NO: 1445890 - RNA, 20 nt, Human
uugcuucaugugucccagaa

SEQ ID NO: 1445891 - RNA, 18 nt, Human
uugcuucaugugucccag

SEQ ID NO: 1445892 - RNA, 13 nt, Human
uugcuucaugugu

SEQ ID NO: 1445893 - RNA, 20 nt, Human
uugcuuauuuauuguauucu

SEQ ID NO: 1445894 - RNA, 13 nt, Human
uugcuuaugacau

SEQ ID NO: 1445895 - RNA, 19 nt, Human
uugcuuaucaacuuccuaa

SEQ ID NO: 1445896 - RNA, 21 nt, Human
uugcuuugaaguagcucuuuu

SEQ ID NO: 1445897 - RNA, 17 nt, Human
uugcuuuggaaguuuua

SEQ ID NO: 1445898 - RNA, 15 nt, Human
uugcuuugugauuuu

SEQ ID NO: 1445899 - RNA, 20 nt, Human
aucuuuaaaagaugcuuuua

SEQ ID NO: 1445900 - RNA, 14 nt, Human
aucuuuaaaccaau

SEQ ID NO: 1445901 - RNA, 21 nt, Human
aucuuuaaaagaugcuuuuaa

SEQ ID NO: 1445902 - RNA, 14 nt, Human
uugcucuugaugcc

SEQ ID NO: 1445903 - RNA, 17 nt, Human
uugcucuugaugccugg

SEQ ID NO: 1445904 - RNA, 13 nt, Human
uugcugaaaaaug

SEQ ID NO: 1445905 - RNA, 17 nt, Human
uugcugaaaaaugggca

SEQ ID NO: 1445906 - RNA, 18 nt, Human
uugcucuugaugccuggc

SEQ ID NO: 1445907 - RNA, 13 nt, Human
uuggacuucuggg

SEQ ID NO: 1445908 - RNA, 13 nt, Human
uugcuuugcccuu

SEQ ID NO: 1445909 - RNA, 20 nt, Human
uugcuuuguauuguauauua

SEQ ID NO: 1445910 - RNA, 20 nt, Human
uugcuuugugauuuuuguaa

SEQ ID NO: 1445911 - RNA, 16 nt, Human
uugcuuuuaaaaucca

SEQ ID NO: 1445912 - RNA, 21 nt, Human
uuggagaguuuccugaaacaa

SEQ ID NO: 1445913 - RNA, 16 nt, Human
uuggagaagucucagc

SEQ ID NO: 1445914 - RNA, 18 nt, Human
uuggagaagucucagcua

SEQ ID NO: 1445915 - RNA, 20 nt, Human
uuggagaagcccgugugaga

SEQ ID NO: 1445916 - RNA, 20 nt, Human
uuggagauaaucuagaacac

SEQ ID NO: 1445917 - RNA, 16 nt, Human
uuggacuugucccggg

SEQ ID NO: 1445918 - RNA, 15 nt, Human
uuggagaagaacuga

SEQ ID NO: 1445919 - RNA, 22 nt, Human
uuggagaagaacugaaaucaua

SEQ ID NO: 1445920 - RNA, 17 nt, Human
uuggagaagaacugaaa

SEQ ID NO: 1445921 - RNA, 19 nt, Human
aucuuaaaccuuaagauac

SEQ ID NO: 1445922 - RNA, 14 nt, Human
aucuguuuuucuaa

SEQ ID NO: 1445923 - RNA, 14 nt, Human
aucugugucuuguu

SEQ ID NO: 1445924 - RNA, 13 nt, Human
aucugugucuugu

SEQ ID NO: 1445925 - RNA, 12 nt, Human
aucugugucuug

SEQ ID NO: 1445926 - RNA, 23 nt, Human
aucugugggucugggagucacac

SEQ ID NO: 1445927 - RNA, 16 nt, Human
aucugugcacugccca

SEQ ID NO: 1445928 - RNA, 12 nt, Human
aucugucaguuc

SEQ ID NO: 1445929 - RNA, 19 nt, Human
uugcccuaagcagaaagug

SEQ ID NO: 1445930 - RNA, 18 nt, Human
uugcccuaagcagaaagu

SEQ ID NO: 1445931 - RNA, 16 nt, Human
uugcccuaagcagaaa

SEQ ID NO: 1445932 - RNA, 15 nt, Human
uugcccuaagcagaa

SEQ ID NO: 1445933 - RNA, 14 nt, Human
uugcccuaagcaga

SEQ ID NO: 1445934 - RNA, 21 nt, Human
uugcccccgugagccaauccc

SEQ ID NO: 1445935 - RNA, 13 nt, Human
uugccccugagac

SEQ ID NO: 1445936 - RNA, 16 nt, Human
uugccccccuggccuc

SEQ ID NO: 1445937 - RNA, 15 nt, Human
uugccccccuggccu

SEQ ID NO: 1445938 - RNA, 14 nt, Human
uugccccccuggcc

SEQ ID NO: 1445939 - RNA, 13 nt, Human
uugcccccauuuc

SEQ ID NO: 1445940 - RNA, 23 nt, Human
aucuuggggggguggccgcugag

SEQ ID NO: 1445941 - RNA, 20 nt, Human
aucuuggggggguggccgcu

SEQ ID NO: 1445942 - RNA, 16 nt, Human
aucuuggggggguggc

SEQ ID NO: 1445943 - RNA, 16 nt, Human
aucuuggacaaaucac

SEQ ID NO: 1445944 - RNA, 22 nt, Human
aucuuggacaaaucacauauuu

SEQ ID NO: 1445945 - RNA, 16 nt, Human
aucuuauaauuuaaaa

SEQ ID NO: 1445946 - RNA, 15 nt, Human
aucuuauaauuuaaa

SEQ ID NO: 1445947 - RNA, 18 nt, Human
augaaucugcacaucugu

SEQ ID NO: 1445948 - RNA, 22 nt, Human
augaagcaaaugucaugcugcc

SEQ ID NO: 1445949 - RNA, 21 nt, Human
augaagcaaaugucaugcugc

SEQ ID NO: 1445950 - RNA, 15 nt, Human
augaagcaaugcuuc

SEQ ID NO: 1445951 - RNA, 23 nt, Human
augaaccucaagcugcaucuaga

SEQ ID NO: 1445952 - RNA, 18 nt, Human
augaacccgaggcugaga

SEQ ID NO: 1445953 - RNA, 16 nt, Human
augaacagaacauaga

SEQ ID NO: 1445954 - RNA, 16 nt, Human
augaacacuuaauaaa

SEQ ID NO: 1445955 - RNA, 14 nt, Human
augaagaacugagg

SEQ ID NO: 1445956 - RNA, 14 nt, Human
augaagaaagugga

SEQ ID NO: 1445957 - RNA, 19 nt, Human
augaagaaaaucacuuagg

SEQ ID NO: 1445958 - RNA, 15 nt, Human
augaagaacugagga

SEQ ID NO: 1445959 - RNA, 14 nt, Human
augaagcaaugcuu

SEQ ID NO: 1445960 - RNA, 18 nt, Human
augaacaagagaagcauu

SEQ ID NO: 1445961 - RNA, 14 nt, Human
augaacaagagaag

SEQ ID NO: 1445962 - RNA, 12 nt, Human
augaacaaaugg

SEQ ID NO: 1445963 - RNA, 17 nt, Human
augaaauacuauuuaaa

SEQ ID NO: 1445964 - RNA, 13 nt, Human
augaaauauuaug

SEQ ID NO: 1445965 - RNA, 14 nt, Human
uuggaggaaguugg

SEQ ID NO: 1445966 - RNA, 14 nt, Human
uuggagcuucaugg

SEQ ID NO: 1445967 - RNA, 12 nt, Human
uuggccaucugc

SEQ ID NO: 1445968 - RNA, 21 nt, Human
uuggccauauuuaccucagcc

SEQ ID NO: 1445969 - RNA, 22 nt, Human
uuggccauauuuaccucagccu

SEQ ID NO: 1445970 - RNA, 13 nt, Human
uuggccaugcaga

SEQ ID NO: 1445971 - RNA, 19 nt, Human
uuggccaugcagaaagcau

SEQ ID NO: 1445972 - RNA, 12 nt, Human
uugguguuuuuu

SEQ ID NO: 1445973 - RNA, 14 nt, Human
uugguuugccuucc

SEQ ID NO: 1445974 - RNA, 14 nt, Human
uugguuuguaaauu

SEQ ID NO: 1445975 - RNA, 14 nt, Human
uugguggccacaua

SEQ ID NO: 1445976 - RNA, 13 nt, Human
uuggguccaggag

SEQ ID NO: 1445977 - RNA, 12 nt, Human
uuggguccagga

SEQ ID NO: 1445978 - RNA, 14 nt, Human
uuggguccaggagg

SEQ ID NO: 1445979 - RNA, 18 nt, Human
uuggugguuucagaaaug

SEQ ID NO: 1445980 - RNA, 19 nt, Human
uuggugguuucagaaaugu

SEQ ID NO: 1445981 - RNA, 23 nt, Human
uuggguagaaagagauacagagg

SEQ ID NO: 1445982 - RNA, 17 nt, Human
uuggguaaaauacuuuu

SEQ ID NO: 1445983 - RNA, 22 nt, Human
uuggggugccccucuccuucuu

SEQ ID NO: 1445984 - RNA, 18 nt, Human
uugggguggguauaaaag

SEQ ID NO: 1445985 - RNA, 20 nt, Human
uugggguggguauaaaagau

SEQ ID NO: 1445986 - RNA, 20 nt, Human
uuguaagaguggaaccaaca

SEQ ID NO: 1445987 - RNA, 22 nt, Human
uuguaagacaaagguuuuccuc

SEQ ID NO: 1445988 - RNA, 21 nt, Human
uuguaagacaaagguuuuccu

SEQ ID NO: 1445989 - RNA, 18 nt, Human
uuguaagacaaagguuuu

SEQ ID NO: 1445990 - RNA, 12 nt, Human
uuguaaccugcu

SEQ ID NO: 1445991 - RNA, 14 nt, Human
uuguaacccacuga

SEQ ID NO: 1445992 - RNA, 16 nt, Human
uugguuuugcuacaua

SEQ ID NO: 1445993 - RNA, 14 nt, Human
uugguuuucuucuu

SEQ ID NO: 1445994 - RNA, 13 nt, Human
uugguuuucuucu

SEQ ID NO: 1445995 - RNA, 20 nt, Human
uugguuuucacauuggaaac

SEQ ID NO: 1445996 - RNA, 15 nt, Human
uuguaauauguaaau

SEQ ID NO: 1445997 - RNA, 14 nt, Human
uuguaauauguaaa

SEQ ID NO: 1445998 - RNA, 21 nt, Human
uuguaauagauguuugauaga

SEQ ID NO: 1445999 - RNA, 15 nt, Human
uuguaauaauaaaga

SEQ ID NO: 1446000 - RNA, 22 nt, Human
uuguaagcaugcacaaauucug

SEQ ID NO: 1446001 - RNA, 22 nt, Human
uuguaauuuuacacgcuuuugu

SEQ ID NO: 1446002 - RNA, 16 nt, Human
uuguaauuuaaaauaa

SEQ ID NO: 1446003 - RNA, 23 nt, Human
uuguaauucuaaaugaauguuua

SEQ ID NO: 1446004 - RNA, 17 nt, Human
uuguaauucuaaaugaa

SEQ ID NO: 1446005 - RNA, 14 nt, Human
uuguaauucuaaau

SEQ ID NO: 1446006 - RNA, 17 nt, Human
uuguaaucugaauaaag

SEQ ID NO: 1446007 - RNA, 15 nt, Human
uuguaaucugaauaa

SEQ ID NO: 1446008 - RNA, 14 nt, Human
uuguaaucacuguu

SEQ ID NO: 1446009 - RNA, 12 nt, Human
uuguaaugaaaa

SEQ ID NO: 1446010 - RNA, 23 nt, Human
augcuccucuuccccagacgccu

SEQ ID NO: 1446011 - RNA, 20 nt, Human
augcuccucuuccccagacg

SEQ ID NO: 1446012 - RNA, 19 nt, Human
augcuccucuuccccagac

SEQ ID NO: 1446013 - RNA, 18 nt, Human
augcuccucuuccccaga

SEQ ID NO: 1446014 - RNA, 16 nt, Human
augcuccucuucccca

SEQ ID NO: 1446015 - RNA, 14 nt, Human
augcuccucuuccc

SEQ ID NO: 1446016 - RNA, 13 nt, Human
augcuccucuucc

SEQ ID NO: 1446017 - RNA, 15 nt, Human
augcuccaagauucu

SEQ ID NO: 1446018 - RNA, 16 nt, Human
augcucaucugcuggu

SEQ ID NO: 1446019 - RNA, 14 nt, Human
augcucaucugcug

SEQ ID NO: 1446020 - RNA, 13 nt, Human
augcucaucugcu

SEQ ID NO: 1446021 - RNA, 21 nt, Human
augcucauaacggaucagaaa

SEQ ID NO: 1446022 - RNA, 19 nt, Human
augcucaggugcuggggcc

SEQ ID NO: 1446023 - RNA, 16 nt, Human
augcucauaacggauc

SEQ ID NO: 1446024 - RNA, 18 nt, Human
augcucaggugcuggggc

SEQ ID NO: 1446025 - RNA, 12 nt, Human
augcucaggggc

SEQ ID NO: 1446026 - RNA, 21 nt, Human
augcucaggggcccuggagca

SEQ ID NO: 1446027 - RNA, 22 nt, Human
augcucaggggcccuggagcag

SEQ ID NO: 1446028 - RNA, 21 nt, Human
augcuucuguuuuauaauuuu

SEQ ID NO: 1446029 - RNA, 22 nt, Human
augcuguauuuuaaaagaauga

SEQ ID NO: 1446030 - RNA, 17 nt, Human
augcuuaaaauaagcag

SEQ ID NO: 1446031 - RNA, 16 nt, Human
augcuuaaaauaagca

SEQ ID NO: 1446032 - RNA, 23 nt, Human
augcuguauuuuaaaagaaugau

SEQ ID NO: 1446033 - RNA, 18 nt, Human
uuucauguacaagaugaa

SEQ ID NO: 1446034 - RNA, 12 nt, Human
uuucauguacaa

SEQ ID NO: 1446035 - RNA, 19 nt, Human
uuucauguaaacugugcac

SEQ ID NO: 1446036 - RNA, 18 nt, Human
uuucauguaaacugugca

SEQ ID NO: 1446037 - RNA, 18 nt, Human
uuuccauuacaaguauuu

SEQ ID NO: 1446038 - RNA, 15 nt, Human
uuuccauuacaagua

SEQ ID NO: 1446039 - RNA, 22 nt, Human
uuuccaugggaccacaacuauu

SEQ ID NO: 1446040 - RNA, 19 nt, Human
uuuccaugggaccacaacu

SEQ ID NO: 1446041 - RNA, 21 nt, Human
uuuccauggcaggaaggcuug

SEQ ID NO: 1446042 - RNA, 20 nt, Human
uuuccauggcaggaaggcuu

SEQ ID NO: 1446043 - RNA, 22 nt, Human
uuucccaaagcaucccucuuag

SEQ ID NO: 1446044 - RNA, 14 nt, Human
uuuccauuugcauu

SEQ ID NO: 1446045 - RNA, 21 nt, Human
uuuccauuugcauuuguuuau

SEQ ID NO: 1446046 - RNA, 22 nt, Human
uuuccauucgugaaaacacauu

SEQ ID NO: 1446047 - RNA, 15 nt, Human
uuucccaauucacau

SEQ ID NO: 1446048 - RNA, 12 nt, Human
uuucccaauuca

SEQ ID NO: 1446049 - RNA, 20 nt, Human
uuucauccauaacugaacau

SEQ ID NO: 1446050 - RNA, 19 nt, Human
uuucauccauaacugaaca

SEQ ID NO: 1446051 - RNA, 17 nt, Human
uuucauccauaacugaa

SEQ ID NO: 1446052 - RNA, 16 nt, Human
uuucauccauaacuga

SEQ ID NO: 1446053 - RNA, 13 nt, Human
uuucaucauuuuu

SEQ ID NO: 1446054 - RNA, 13 nt, Human
uuucagaaaugug

SEQ ID NO: 1446055 - RNA, 11 nt, Human
uuucagaaaug

SEQ ID NO: 1446056 - RNA, 12 nt, Human
uuucagaaaugu

SEQ ID NO: 1446057 - RNA, 15 nt, Human
uuucauccuugucuu

SEQ ID NO: 1446058 - RNA, 21 nt, Human
uuucaugcuguucaugaaaga

SEQ ID NO: 1446059 - RNA, 17 nt, Human
auggaauugauuugcau

SEQ ID NO: 1446060 - RNA, 16 nt, Human
auggaauugauuugca

SEQ ID NO: 1446061 - RNA, 15 nt, Human
auggaauugauuugc

SEQ ID NO: 1446062 - RNA, 14 nt, Human
auggaauugauuug

SEQ ID NO: 1446063 - RNA, 13 nt, Human
auggaauugauuu

SEQ ID NO: 1446064 - RNA, 19 nt, Human
uuucaaacauauauaacaa

SEQ ID NO: 1446065 - RNA, 12 nt, Human
uuucaaacuuua

SEQ ID NO: 1446066 - RNA, 15 nt, Human
uuucaaacuuuacua

SEQ ID NO: 1446067 - RNA, 20 nt, Human
uuucacgccugaggcaauua

SEQ ID NO: 1446068 - RNA, 18 nt, Human
uuucaccuguaaaccuga

SEQ ID NO: 1446069 - RNA, 17 nt, Human
uuucaccuguaaaccug

SEQ ID NO: 1446070 - RNA, 14 nt, Human
uuucaccuguaaac

SEQ ID NO: 1446071 - RNA, 13 nt, Human
uuucaccuguaaa

SEQ ID NO: 1446072 - RNA, 22 nt, Human
uuucaccuggaagcauuuguuu

SEQ ID NO: 1446073 - RNA, 18 nt, Human
uuucaccuggaagcauuu

SEQ ID NO: 1446074 - RNA, 19 nt, Human
uuucacauuggaaacaagu

SEQ ID NO: 1446075 - RNA, 14 nt, Human
uuucacauuggaaa

SEQ ID NO: 1446076 - RNA, 19 nt, Human
uuucacauuagaagacaau

SEQ ID NO: 1446077 - RNA, 18 nt, Human
uuucacauuagaagacaa

SEQ ID NO: 1446078 - RNA, 17 nt, Human
uuucacauuagaagaca

SEQ ID NO: 1446079 - RNA, 13 nt, Human
uuucacauuggaa

SEQ ID NO: 1446080 - RNA, 17 nt, Human
uuuacugcucugagaau

SEQ ID NO: 1446081 - RNA, 15 nt, Human
uuuacugcucugaga

SEQ ID NO: 1446082 - RNA, 13 nt, Human
uuuacucugccua

SEQ ID NO: 1446083 - RNA, 12 nt, Human
uuuacucugccu

SEQ ID NO: 1446084 - RNA, 17 nt, Human
uuuacuccguaacagau

SEQ ID NO: 1446085 - RNA, 15 nt, Human
uuuaccucagccugg

SEQ ID NO: 1446086 - RNA, 17 nt, Human
augcuaccaccagcugu

SEQ ID NO: 1446087 - RNA, 22 nt, Human
augcuaccaccagcugugucca

SEQ ID NO: 1446088 - RNA, 16 nt, Human
augcuaccaccagcug

SEQ ID NO: 1446089 - RNA, 15 nt, Human
augcuaccaccagcu

SEQ ID NO: 1446090 - RNA, 14 nt, Human
augcuaccaccagc

SEQ ID NO: 1446091 - RNA, 13 nt, Human
augcuaccaccag

SEQ ID NO: 1446092 - RNA, 17 nt, Human
augcguguuucugacuc

SEQ ID NO: 1446093 - RNA, 16 nt, Human
augcguguuucugacu

SEQ ID NO: 1446094 - RNA, 15 nt, Human
uuuaccuaagauuac

SEQ ID NO: 1446095 - RNA, 13 nt, Human
uuuacccuucagg

SEQ ID NO: 1446096 - RNA, 20 nt, Human
uuuacccuggccccucuccc

SEQ ID NO: 1446097 - RNA, 20 nt, Human
uuuacccuucuuuucugacu

SEQ ID NO: 1446098 - RNA, 13 nt, Human
uuuaccucagccu

SEQ ID NO: 1446099 - RNA, 12 nt, Human
uuuaccucagcc

SEQ ID NO: 1446100 - RNA, 13 nt, Human
uuuaggagcagug

SEQ ID NO: 1446101 - RNA, 17 nt, Human
uuuagggaacaauuugg

SEQ ID NO: 1446102 - RNA, 18 nt, Human
uuuaggcuauuuguaaau

SEQ ID NO: 1446103 - RNA, 17 nt, Human
uuuaggauaaaauaaug

SEQ ID NO: 1446104 - RNA, 23 nt, Human
uuuaggagcuaaggcucuaugag

SEQ ID NO: 1446105 - RNA, 16 nt, Human
uuuagggaacaauuug

SEQ ID NO: 1446106 - RNA, 17 nt, Human
uuuagggguagcauuug

SEQ ID NO: 1446107 - RNA, 14 nt, Human
uuuauauguacaug

SEQ ID NO: 1446108 - RNA, 13 nt, Human
uuuauauguacau

SEQ ID NO: 1446109 - RNA, 21 nt, Human
uuuauaugcuucuguuuuaua

SEQ ID NO: 1446110 - RNA, 13 nt, Human
uuuaucacuuaaa

SEQ ID NO: 1446111 - RNA, 17 nt, Human
uuuauauguacaugaga

SEQ ID NO: 1446112 - RNA, 21 nt, Human
uuuauauguaccguaggcuuu

SEQ ID NO: 1446113 - RNA, 24 nt, Human
uuuagugguagcauauagauuguc

SEQ ID NO: 1446114 - RNA, 16 nt, Human
uuuagugaacuugaaa

SEQ ID NO: 1446115 - RNA, 22 nt, Human
augcgugcauaccacuuuuguu

SEQ ID NO: 1446116 - RNA, 23 nt, Human
augccuuuucccaaaauguugaa

SEQ ID NO: 1446117 - RNA, 21 nt, Human
augccuuuucccaaaauguug

SEQ ID NO: 1446118 - RNA, 19 nt, Human
augcgagugcucauuucag

SEQ ID NO: 1446119 - RNA, 16 nt, Human
augccuccuuccucuu

SEQ ID NO: 1446120 - RNA, 14 nt, Human
augccuccuuccuc

SEQ ID NO: 1446121 - RNA, 17 nt, Human
augcccggcuaauuuuu

SEQ ID NO: 1446122 - RNA, 14 nt, Human
augccccuuucugg

SEQ ID NO: 1446123 - RNA, 16 nt, Human
augccccuggcuggga

SEQ ID NO: 1446124 - RNA, 22 nt, Human
augccuuuucccaacuccagaa

SEQ ID NO: 1446125 - RNA, 20 nt, Human
augccuuuucccaacuccag

SEQ ID NO: 1446126 - RNA, 22 nt, Human
augccagccaagcucugcaguc

SEQ ID NO: 1446127 - RNA, 21 nt, Human
augccagccaagcucugcagu

SEQ ID NO: 1446128 - RNA, 18 nt, Human
augccagccaagcucugc

SEQ ID NO: 1446129 - RNA, 17 nt, Human
augccagccaagcucug

SEQ ID NO: 1446130 - RNA, 17 nt, Human
augccacugccuucgcu

SEQ ID NO: 1446131 - RNA, 18 nt, Human
augccacugccuucgcuu

SEQ ID NO: 1446132 - RNA, 16 nt, Human
augccaggaccagucc

SEQ ID NO: 1446133 - RNA, 16 nt, Human
augccagcuacuuccu

SEQ ID NO: 1446134 - RNA, 23 nt, Human
augccaguaacgcgucuuccuga

SEQ ID NO: 1446135 - RNA, 22 nt, Human
augccaguaacgcgucuuccug

SEQ ID NO: 1446136 - RNA, 17 nt, Human
augccaguaacaggcuc

SEQ ID NO: 1446137 - RNA, 16 nt, Human
augccaucaucuccug

SEQ ID NO: 1446138 - RNA, 15 nt, Human
augccaucaucuccu

SEQ ID NO: 1446139 - RNA, 14 nt, Human
augccaucaucucc

SEQ ID NO: 1446140 - RNA, 20 nt, Human
augccccugaauuuaaauag

SEQ ID NO: 1446141 - RNA, 15 nt, Human
augccccugaauuua

SEQ ID NO: 1446142 - RNA, 13 nt, Human
augcaaaagcaag

SEQ ID NO: 1446143 - RNA, 23 nt, Human
augcaaaaacucuuugagagggu

SEQ ID NO: 1446144 - RNA, 17 nt, Human
augcaaaaacucuuuga

SEQ ID NO: 1446145 - RNA, 17 nt, Human
augauuuuucuuuacaa

SEQ ID NO: 1446146 - RNA, 21 nt, Human
augauuuuuuuuucauacacu

SEQ ID NO: 1446147 - RNA, 17 nt, Human
augauuuuuuuuucaua

SEQ ID NO: 1446148 - RNA, 15 nt, Human
augauuuuucuuuac

SEQ ID NO: 1446149 - RNA, 19 nt, Human
augauuuuucuuuacaaaa

SEQ ID NO: 1446150 - RNA, 20 nt, Human
augauuuccuugaauguggc

SEQ ID NO: 1446151 - RNA, 19 nt, Human
augauuuccuugaaugugg

SEQ ID NO: 1446152 - RNA, 18 nt, Human
augauuuccuugaaugug

SEQ ID NO: 1446153 - RNA, 17 nt, Human
augauuuccuugaaugu

SEQ ID NO: 1446154 - RNA, 16 nt, Human
augauuuccuugaaug

SEQ ID NO: 1446155 - RNA, 15 nt, Human
augauuuccuugaau

SEQ ID NO: 1446156 - RNA, 13 nt, Human
augauuuccuuga

SEQ ID NO: 1446157 - RNA, 14 nt, Human
augauuucauuuca

SEQ ID NO: 1446158 - RNA, 18 nt, Human
augauuuagagugcuguc

SEQ ID NO: 1446159 - RNA, 14 nt, Human
augauuuauaccua

SEQ ID NO: 1446160 - RNA, 13 nt, Human
augauuuacauuu

SEQ ID NO: 1446161 - RNA, 17 nt, Human
augauuuaauuugaaau

SEQ ID NO: 1446162 - RNA, 20 nt, Human
uuguucuugguuuguaaauu

SEQ ID NO: 1446163 - RNA, 17 nt, Human
uuguucuguuaacugaa

SEQ ID NO: 1446164 - RNA, 18 nt, Human
uuguucuguuaacugaau

SEQ ID NO: 1446165 - RNA, 16 nt, Human
uuguucuguuaacuga

SEQ ID NO: 1446166 - RNA, 16 nt, Human
uuguucagcaugcaau

SEQ ID NO: 1446167 - RNA, 17 nt, Human
uuguucuugguuuguaa

SEQ ID NO: 1446168 - RNA, 19 nt, Human
uuguucuugguuuguaaau

SEQ ID NO: 1446169 - RNA, 21 nt, Human
augcacuguucccccugugca

SEQ ID NO: 1446170 - RNA, 20 nt, Human
augcacugugaaggacccuu

SEQ ID NO: 1446171 - RNA, 19 nt, Human
augcacugugaaggacccu

SEQ ID NO: 1446172 - RNA, 18 nt, Human
augcacugugaaggaccc

SEQ ID NO: 1446173 - RNA, 13 nt, Human
augcacugugaag

SEQ ID NO: 1446174 - RNA, 12 nt, Human
augcacugugaa

SEQ ID NO: 1446175 - RNA, 22 nt, Human
augcacuguucccccugugcag

SEQ ID NO: 1446176 - RNA, 16 nt, Human
augcagaaagcauccc

SEQ ID NO: 1446177 - RNA, 19 nt, Human
augcagaauguugauuaca

SEQ ID NO: 1446178 - RNA, 21 nt, Human
augcagaauguugauuacagu

SEQ ID NO: 1446179 - RNA, 12 nt, Human
augcagaauguu

SEQ ID NO: 1446180 - RNA, 16 nt, Human
augcacugauguugug

SEQ ID NO: 1446181 - RNA, 15 nt, Human
augcagaaagcaucc

SEQ ID NO: 1446182 - RNA, 18 nt, Human
uuuaaaaaaauuccaagu

SEQ ID NO: 1446183 - RNA, 20 nt, Human
uuuaaggaugcuuguacaua

SEQ ID NO: 1446184 - RNA, 21 nt, Human
uuuaaggaugcuuguacauaa

SEQ ID NO: 1446185 - RNA, 22 nt, Human
uuuaaggaugcuuguacauaau

SEQ ID NO: 1446186 - RNA, 23 nt, Human
uuuaaaugaacaagagaagcauu

SEQ ID NO: 1446187 - RNA, 14 nt, Human
uuuaagagacagcc

SEQ ID NO: 1446188 - RNA, 19 nt, Human
uuuaaggaugcuuguacau

SEQ ID NO: 1446189 - RNA, 18 nt, Human
uuuaaaugcauaaaugca

SEQ ID NO: 1446190 - RNA, 14 nt, Human
uuuaaaugaagaaa

SEQ ID NO: 1446191 - RNA, 21 nt, Human
uuuaaaugaacaagagaagca

SEQ ID NO: 1446192 - RNA, 12 nt, Human
uuuaaaucuguu

SEQ ID NO: 1446193 - RNA, 11 nt, Human
uuuaaaugcac

SEQ ID NO: 1446194 - RNA, 18 nt, Human
uuuaaauguaaagauauu

SEQ ID NO: 1446195 - RNA, 15 nt, Human
uuuaaauguaaagau

SEQ ID NO: 1446196 - RNA, 12 nt, Human
uuuaaauguaua

SEQ ID NO: 1446197 - RNA, 13 nt, Human
uuuaaauguauac

SEQ ID NO: 1446198 - RNA, 20 nt, Human
uuuaaaucuguuuuucuaac

SEQ ID NO: 1446199 - RNA, 23 nt, Human
uuuaaaaauaagucaacaguaaa

SEQ ID NO: 1446200 - RNA, 21 nt, Human
uuuaaauauaugcuaagucuu

SEQ ID NO: 1446201 - RNA, 12 nt, Human
uuuaaaaaguaa

SEQ ID NO: 1446202 - RNA, 14 nt, Human
uuuaaaaagccagu

SEQ ID NO: 1446203 - RNA, 22 nt, Human
uuuaaaaauaagucaacaguaa

SEQ ID NO: 1446204 - RNA, 21 nt, Human
uuuaaaaauaagucaacagua

SEQ ID NO: 1446205 - RNA, 20 nt, Human
uuuaaaaauaagucaacagu

SEQ ID NO: 1446206 - RNA, 18 nt, Human
uuuaaaaauaagucaaca

SEQ ID NO: 1446207 - RNA, 11 nt, Human
uuuaaaaauaa

SEQ ID NO: 1446208 - RNA, 14 nt, Human
uuuaaaaaacuaaa

SEQ ID NO: 1446209 - RNA, 23 nt, Human
uuuaaaaaaccacauggcacaga

SEQ ID NO: 1446210 - RNA, 15 nt, Human
uuuaaaaaacuaaaa

SEQ ID NO: 1446211 - RNA, 21 nt, Human
uuuaaaaaacuaaaaacuaga

SEQ ID NO: 1446212 - RNA, 20 nt, Human
uuuaaaaaagaaacauuugg

SEQ ID NO: 1446213 - RNA, 15 nt, Human
uuguucagcaugcaa

SEQ ID NO: 1446214 - RNA, 19 nt, Human
uuguucaccauuauaauga

SEQ ID NO: 1446215 - RNA, 19 nt, Human
uugugucuggcaguuuaua

SEQ ID NO: 1446216 - RNA, 15 nt, Human
uugugucucuuaugg

SEQ ID NO: 1446217 - RNA, 16 nt, Human
uugugucccuaaugug

SEQ ID NO: 1446218 - RNA, 18 nt, Human
uugugucccaugaucccu

SEQ ID NO: 1446219 - RNA, 23 nt, Human
uuguguauuuacgcuuugauuca

SEQ ID NO: 1446220 - RNA, 22 nt, Human
uuguguauuuacgcuuugauuc

SEQ ID NO: 1446221 - RNA, 20 nt, Human
uuguguauuuacgcuuugau

SEQ ID NO: 1446222 - RNA, 19 nt, Human
uuguguauuuacgcuuuga

SEQ ID NO: 1446223 - RNA, 15 nt, Human
uuguguagccuuuuu

SEQ ID NO: 1446224 - RNA, 14 nt, Human
uuguguagccuuuu

SEQ ID NO: 1446225 - RNA, 13 nt, Human
uuguguagccuuu

SEQ ID NO: 1446226 - RNA, 15 nt, Human
uuguguacaguuauu

SEQ ID NO: 1446227 - RNA, 16 nt, Human
uugugauuggccugua

SEQ ID NO: 1446228 - RNA, 15 nt, Human
uugugauuggccugu

SEQ ID NO: 1446229 - RNA, 14 nt, Human
uugugauucugccu

SEQ ID NO: 1446230 - RNA, 23 nt, Human
uugugauucaaucuguaaacugu

SEQ ID NO: 1446231 - RNA, 19 nt, Human
uugugauucaaucuguaaa

SEQ ID NO: 1446232 - RNA, 18 nt, Human
uugugauuagacagaaca

SEQ ID NO: 1446233 - RNA, 19 nt, Human
uugugauuagacagaacac

SEQ ID NO: 1446234 - RNA, 17 nt, Human
uugugaugugcacguaa

SEQ ID NO: 1446235 - RNA, 21 nt, Human
uugugaugucauacagagaag

SEQ ID NO: 1446236 - RNA, 17 nt, Human
uugugauggagugcugu

SEQ ID NO: 1446237 - RNA, 16 nt, Human
uugugauggagugcug

SEQ ID NO: 1446238 - RNA, 23 nt, Human
uugugaucagaccauaauguuac

SEQ ID NO: 1446239 - RNA, 16 nt, Human
uugugauaugcacaau

SEQ ID NO: 1446240 - RNA, 21 nt, Human
uugugauaugcacaauguaga

SEQ ID NO: 1446241 - RNA, 13 nt, Human
uugugauaugcac

SEQ ID NO: 1446242 - RNA, 18 nt, Human
uugugaugugaguugcac

SEQ ID NO: 1446243 - RNA, 20 nt, Human
uugugaugucauacagagaa

SEQ ID NO: 1446244 - RNA, 18 nt, Human
uugugaugucauacagag

SEQ ID NO: 1446245 - RNA, 22 nt, Human
uugugacaaaaaauuaaagcau

SEQ ID NO: 1446246 - RNA, 16 nt, Human
uugugacaaaaaauua

SEQ ID NO: 1446247 - RNA, 14 nt, Human
uugugacaaaaaau

SEQ ID NO: 1446248 - RNA, 13 nt, Human
uugugacaaaaaa

SEQ ID NO: 1446249 - RNA, 23 nt, Human
uugugaauuaggcuguaacuacu

SEQ ID NO: 1446250 - RNA, 19 nt, Human
uugugaauuaggcuguaac

SEQ ID NO: 1446251 - RNA, 18 nt, Human
uugugaauuaggcuguaa

SEQ ID NO: 1446252 - RNA, 21 nt, Human
uugugacagggcggggguggc

SEQ ID NO: 1446253 - RNA, 16 nt, Human
uugugaggaaagucau

SEQ ID NO: 1446254 - RNA, 17 nt, Human
uugugaggaaagucauu

SEQ ID NO: 1446255 - RNA, 20 nt, Human
uugugauacaaugcugugcc

SEQ ID NO: 1446256 - RNA, 22 nt, Human
uugugaggaaagucauuggcuu

SEQ ID NO: 1446257 - RNA, 21 nt, Human
uugugaaucaagggucaggcc

SEQ ID NO: 1446258 - RNA, 20 nt, Human
uugugaaucaagggucaggc

SEQ ID NO: 1446259 - RNA, 23 nt, Human
uugugaaucaagggucaggccuu

SEQ ID NO: 1446260 - RNA, 19 nt, Human
uuguccagcugagcgccag

SEQ ID NO: 1446261 - RNA, 13 nt, Human
uuguccauugucc

SEQ ID NO: 1446262 - RNA, 16 nt, Human
augaguaacauuugcu

SEQ ID NO: 1446263 - RNA, 17 nt, Human
augaguaacauuugcug

SEQ ID NO: 1446264 - RNA, 19 nt, Human
uuguagcuggggcuuugau

SEQ ID NO: 1446265 - RNA, 18 nt, Human
uuguagcuggggcuuuga

SEQ ID NO: 1446266 - RNA, 14 nt, Human
uuguagcuggggcu

SEQ ID NO: 1446267 - RNA, 15 nt, Human
uuguagcuccucccc

SEQ ID NO: 1446268 - RNA, 12 nt, Human
uuguagcuccuc

SEQ ID NO: 1446269 - RNA, 21 nt, Human
uuguagcgucuuucuuuuuug

SEQ ID NO: 1446270 - RNA, 15 nt, Human
uuguagccagccggg

SEQ ID NO: 1446271 - RNA, 12 nt, Human
uuguagccagcc

SEQ ID NO: 1446272 - RNA, 14 nt, Human
uuguacaaaauaaa

SEQ ID NO: 1446273 - RNA, 12 nt, Human
uuguacaaaaua

SEQ ID NO: 1446274 - RNA, 23 nt, Human
uuguaauuuuuuuaauuuacaaa

SEQ ID NO: 1446275 - RNA, 15 nt, Human
uuguaauuuuacacg

SEQ ID NO: 1446276 - RNA, 13 nt, Human
uuguaauuuuaca

SEQ ID NO: 1446277 - RNA, 18 nt, Human
uuguagcauccuggaaua

SEQ ID NO: 1446278 - RNA, 16 nt, Human
uuguagcauccuggaa

SEQ ID NO: 1446279 - RNA, 19 nt, Human
uugucauuuuuuuucuuug

SEQ ID NO: 1446280 - RNA, 21 nt, Human
uuguccaacccgaggcccgca

SEQ ID NO: 1446281 - RNA, 17 nt, Human
uugucaggagugugugu

SEQ ID NO: 1446282 - RNA, 23 nt, Human
uugucagggaguguucccuaucc

SEQ ID NO: 1446283 - RNA, 16 nt, Human
uugucacuuuuucuga

SEQ ID NO: 1446284 - RNA, 14 nt, Human
uugucacuuuuucu

SEQ ID NO: 1446285 - RNA, 22 nt, Human
uugucaaugcaguugucucugu

SEQ ID NO: 1446286 - RNA, 18 nt, Human
augaguuccagaaaguaa

SEQ ID NO: 1446287 - RNA, 20 nt, Human
uugucaauaaaauccauaca

SEQ ID NO: 1446288 - RNA, 18 nt, Human
uuuuuguauaguuaacac

SEQ ID NO: 1446289 - RNA, 20 nt, Human
uuuuuggcguggcugacuua

SEQ ID NO: 1446290 - RNA, 21 nt, Human
uuuuugggggguuuucuugcc

SEQ ID NO: 1446291 - RNA, 22 nt, Human
uuuuugggggguuuucuugccu

SEQ ID NO: 1446292 - RNA, 20 nt, Human
uuuuugggcagcaauuuaaa

SEQ ID NO: 1446293 - RNA, 21 nt, Human
uuuuugggcagcaauuuaaau

SEQ ID NO: 1446294 - RNA, 23 nt, Human
uuuuugggcagcaauuuaaaugu

SEQ ID NO: 1446295 - RNA, 22 nt, Human
uuuuuggucgaggaguaacaau

SEQ ID NO: 1446296 - RNA, 21 nt, Human
uuuuuguauaguuaacacacu

SEQ ID NO: 1446297 - RNA, 18 nt, Human
uuuuuguauaaaauagac

SEQ ID NO: 1446298 - RNA, 11 nt, Human
uuuuuguagua

SEQ ID NO: 1446299 - RNA, 12 nt, Human
uuuuuauuucuu

SEQ ID NO: 1446300 - RNA, 17 nt, Human
uuuuuauauuugaaaua

SEQ ID NO: 1446301 - RNA, 12 nt, Human
uuuuuauuucug

SEQ ID NO: 1446302 - RNA, 15 nt, Human
uuuuuauuucuuccu

SEQ ID NO: 1446303 - RNA, 13 nt, Human
uuuuucaaaagaa

SEQ ID NO: 1446304 - RNA, 19 nt, Human
uuuuuggaagugaaaacuu

SEQ ID NO: 1446305 - RNA, 15 nt, Human
uuuuuggaagugaaa

SEQ ID NO: 1446306 - RNA, 22 nt, Human
uuuuuggaagaggacuccuuaa

SEQ ID NO: 1446307 - RNA, 16 nt, Human
uuuuugccacagcuuu

SEQ ID NO: 1446308 - RNA, 17 nt, Human
uuuuugcauuuaaaaca

SEQ ID NO: 1446309 - RNA, 16 nt, Human
uuuuugcaguaacugu

SEQ ID NO: 1446310 - RNA, 14 nt, Human
uuuuugcaguaacu

SEQ ID NO: 1446311 - RNA, 9 nt, Human
uuuuugcag

SEQ ID NO: 1446312 - RNA, 20 nt, Human
uuuuugcacauguuuccucu

SEQ ID NO: 1446313 - RNA, 16 nt, Human
uuuuugaucaaaaacu

SEQ ID NO: 1446314 - RNA, 12 nt, Human
uuuuugauauag

SEQ ID NO: 1446315 - RNA, 15 nt, Human
uuuuugauacuaagc

SEQ ID NO: 1446316 - RNA, 13 nt, Human
uuuuugauacuaa

SEQ ID NO: 1446317 - RNA, 15 nt, Human
uuuuugauaaagccu

SEQ ID NO: 1446318 - RNA, 13 nt, Human
uuuuugaggcaaa

SEQ ID NO: 1446319 - RNA, 16 nt, Human
uuuuugagacagaguc

SEQ ID NO: 1446320 - RNA, 17 nt, Human
auuaaaauguaugcaug

SEQ ID NO: 1446321 - RNA, 15 nt, Human
auuaaaauguaugca

SEQ ID NO: 1446322 - RNA, 23 nt, Human
auuaaaauguaugcauguugucu

SEQ ID NO: 1446323 - RNA, 11 nt, Human
auuaaaaugua

SEQ ID NO: 1446324 - RNA, 14 nt, Human
auuaaaaugcuucc

SEQ ID NO: 1446325 - RNA, 16 nt, Human
auuaaaauccucaauc

SEQ ID NO: 1446326 - RNA, 14 nt, Human
auuaaaauccucaa

SEQ ID NO: 1446327 - RNA, 21 nt, Human
uuuugcuuuuggcaaaacucu

SEQ ID NO: 1446328 - RNA, 21 nt, Human
uuuugcuuucgaacugcuagu

SEQ ID NO: 1446329 - RNA, 15 nt, Human
uuuuggacuucuggg

SEQ ID NO: 1446330 - RNA, 13 nt, Human
uuuuggaauuugc

SEQ ID NO: 1446331 - RNA, 16 nt, Human
uuuuguguuuguugua

SEQ ID NO: 1446332 - RNA, 17 nt, Human
uuuuguguguauuugcu

SEQ ID NO: 1446333 - RNA, 20 nt, Human
uuuuguguguauuugcuaau

SEQ ID NO: 1446334 - RNA, 21 nt, Human
uuuugugucucuuauggaugu

SEQ ID NO: 1446335 - RNA, 21 nt, Human
uuuugugggggacuguaaguu

SEQ ID NO: 1446336 - RNA, 14 nt, Human
uuuugugaauuagg

SEQ ID NO: 1446337 - RNA, 14 nt, Human
uuuugugaagcaaa

SEQ ID NO: 1446338 - RNA, 16 nt, Human
uuuuggaugcagugcu

SEQ ID NO: 1446339 - RNA, 13 nt, Human
uuuuguuggcaua

SEQ ID NO: 1446340 - RNA, 19 nt, Human
uuuuguugacauucugaau

SEQ ID NO: 1446341 - RNA, 20 nt, Human
uuuuguugacauucugaaug

SEQ ID NO: 1446342 - RNA, 18 nt, Human
uuuuguugacauucugaa

SEQ ID NO: 1446343 - RNA, 13 nt, Human
uuuuguugacauu

SEQ ID NO: 1446344 - RNA, 12 nt, Human
uuuuguugacau

SEQ ID NO: 1446345 - RNA, 23 nt, Human
uuuuguucgcauggucacacacu

SEQ ID NO: 1446346 - RNA, 21 nt, Human
uuuuguuguuucuuaaauaag

SEQ ID NO: 1446347 - RNA, 21 nt, Human
uuuuguuggcauagcucuggg

SEQ ID NO: 1446348 - RNA, 15 nt, Human
uuuuguuuuggcuga

SEQ ID NO: 1446349 - RNA, 19 nt, Human
uuuuguuguuucuuaaaua

SEQ ID NO: 1446350 - RNA, 23 nt, Human
uuuuuacaaauguuaaaaugugu

SEQ ID NO: 1446351 - RNA, 22 nt, Human
uuuuuacaaauguuaaaaugug

SEQ ID NO: 1446352 - RNA, 15 nt, Human
uuuuuacaaagcccu

SEQ ID NO: 1446353 - RNA, 23 nt, Human
uuuuuaauuuacaaaaauauaaa

SEQ ID NO: 1446354 - RNA, 14 nt, Human
uuuuuaauuaauug

SEQ ID NO: 1446355 - RNA, 12 nt, Human
uuuuuaauuauu

SEQ ID NO: 1446356 - RNA, 17 nt, Human
uuuuguuuuucauucag

SEQ ID NO: 1446357 - RNA, 17 nt, Human
uuuuuacaauguaauua

SEQ ID NO: 1446358 - RNA, 12 nt, Human
uuuuuacauuuu

SEQ ID NO: 1446359 - RNA, 11 nt, Human
uuuuuacauuu

SEQ ID NO: 1446360 - RNA, 15 nt, Human
uuuuuauauaugugu

SEQ ID NO: 1446361 - RNA, 16 nt, Human
auuagacuggacagcu

SEQ ID NO: 1446362 - RNA, 15 nt, Human
auuagacuggacagc

SEQ ID NO: 1446363 - RNA, 14 nt, Human
auuagacuggacag

SEQ ID NO: 1446364 - RNA, 22 nt, Human
auuagacuggaacuugaacuga

SEQ ID NO: 1446365 - RNA, 15 nt, Human
auuagacuggaacuu

SEQ ID NO: 1446366 - RNA, 15 nt, Human
auuagacagaacacc

SEQ ID NO: 1446367 - RNA, 17 nt, Human
auuagacagaacaccua

SEQ ID NO: 1446368 - RNA, 14 nt, Human
auuagacagaacac

SEQ ID NO: 1446369 - RNA, 13 nt, Human
auuagacagaaca

SEQ ID NO: 1446370 - RNA, 18 nt, Human
auuagacacuuuggaaga

SEQ ID NO: 1446371 - RNA, 18 nt, Human
auuagacugugauucaga

SEQ ID NO: 1446372 - RNA, 14 nt, Human
auuagacugugauu

SEQ ID NO: 1446373 - RNA, 19 nt, Human
auuagacuggacagcuugu

SEQ ID NO: 1446374 - RNA, 20 nt, Human
auuagacuggacagcuugug

SEQ ID NO: 1446375 - RNA, 21 nt, Human
auuacuuguaaauauaaagac

SEQ ID NO: 1446376 - RNA, 20 nt, Human
auuacuuguaaauauaaaga

SEQ ID NO: 1446377 - RNA, 18 nt, Human
auuacuuguaaauauaaa

SEQ ID NO: 1446378 - RNA, 17 nt, Human
auuacuuguaaauauaa

SEQ ID NO: 1446379 - RNA, 16 nt, Human
auuacuuguaaauaua

SEQ ID NO: 1446380 - RNA, 15 nt, Human
auuacuuguaaauau

SEQ ID NO: 1446381 - RNA, 13 nt, Human
auuacuuguaaau

SEQ ID NO: 1446382 - RNA, 13 nt, Human
auuaaguucuuua

SEQ ID NO: 1446383 - RNA, 15 nt, Human
auuacugguccaaaa

SEQ ID NO: 1446384 - RNA, 16 nt, Human
auuaaucaguucauua

SEQ ID NO: 1446385 - RNA, 16 nt, Human
auuacuguaagaaaau

SEQ ID NO: 1446386 - RNA, 15 nt, Human
auuacuguaagaaaa

SEQ ID NO: 1446387 - RNA, 15 nt, Human
auuccccauucuucc

SEQ ID NO: 1446388 - RNA, 14 nt, Human
auuccccauucuuc

SEQ ID NO: 1446389 - RNA, 18 nt, Human
auuccccaucucaggcca

SEQ ID NO: 1446390 - RNA, 16 nt, Human
auuccccaucucaggc

SEQ ID NO: 1446391 - RNA, 22 nt, Human
auucccacccaauucaaaacau

SEQ ID NO: 1446392 - RNA, 17 nt, Human
auuccagaccugaagaa

SEQ ID NO: 1446393 - RNA, 23 nt, Human
auuccagaaugcuguacaucuau

SEQ ID NO: 1446394 - RNA, 20 nt, Human
auuccagaaugcuguacauc

SEQ ID NO: 1446395 - RNA, 19 nt, Human
auuccagaaugcuguacau

SEQ ID NO: 1446396 - RNA, 15 nt, Human
auuccagaaugcugu

SEQ ID NO: 1446397 - RNA, 14 nt, Human
auuccagaaugcug

SEQ ID NO: 1446398 - RNA, 23 nt, Human
auuccagacugcuuccaauuuuc

SEQ ID NO: 1446399 - RNA, 18 nt, Human
auuccagaccugaagaau

SEQ ID NO: 1446400 - RNA, 14 nt, Human
auuccaagucucca

SEQ ID NO: 1446401 - RNA, 17 nt, Human
auuccaagugauugaaa

SEQ ID NO: 1446402 - RNA, 17 nt, Human
auucagguaauacaaac

SEQ ID NO: 1446403 - RNA, 16 nt, Human
auucagguaauacaaa

SEQ ID NO: 1446404 - RNA, 15 nt, Human
auucagguaauacaa

SEQ ID NO: 1446405 - RNA, 23 nt, Human
auucagggaaggaggagccuguc

SEQ ID NO: 1446406 - RNA, 20 nt, Human
auucagggaaggaggagccu

SEQ ID NO: 1446407 - RNA, 14 nt, Human
auucagggaaggag

SEQ ID NO: 1446408 - RNA, 20 nt, Human
auucagggaaagugggacag

SEQ ID NO: 1446409 - RNA, 19 nt, Human
auucaggacuugaaagaaa

SEQ ID NO: 1446410 - RNA, 18 nt, Human
auucaggacuugaaagaa

SEQ ID NO: 1446411 - RNA, 19 nt, Human
auucaguguuaaaugugau

SEQ ID NO: 1446412 - RNA, 14 nt, Human
auucagugucacug

SEQ ID NO: 1446413 - RNA, 18 nt, Human
auuccaagacucuagagu

SEQ ID NO: 1446414 - RNA, 17 nt, Human
auuccaagacucuagag

SEQ ID NO: 1446415 - RNA, 16 nt, Human
auuccaagacucuaga

SEQ ID NO: 1446416 - RNA, 22 nt, Human
auucagaaaauguucuguuugc

SEQ ID NO: 1446417 - RNA, 19 nt, Human
auucagaaaauguucuguu

SEQ ID NO: 1446418 - RNA, 18 nt, Human
auucagaaaauguucugu

SEQ ID NO: 1446419 - RNA, 20 nt, Human
auucagaaaauguucuguuu

SEQ ID NO: 1446420 - RNA, 14 nt, Human
auucagccuggcuu

SEQ ID NO: 1446421 - RNA, 20 nt, Human
auuauauggcuugaguuuaa

SEQ ID NO: 1446422 - RNA, 17 nt, Human
auuauauggaaauauau

SEQ ID NO: 1446423 - RNA, 16 nt, Human
auuauauggaaauaua

SEQ ID NO: 1446424 - RNA, 21 nt, Human
auuauauggaaauauauauua

SEQ ID NO: 1446425 - RNA, 20 nt, Human
auuauauggaaauauauauu

SEQ ID NO: 1446426 - RNA, 18 nt, Human
auuauauggaaauauaua

SEQ ID NO: 1446427 - RNA, 14 nt, Human
auuauucaguguca

SEQ ID NO: 1446428 - RNA, 13 nt, Human
auuauucaguguc

SEQ ID NO: 1446429 - RNA, 14 nt, Human
auuauucacuagua

SEQ ID NO: 1446430 - RNA, 12 nt, Human
auuauaacugua

SEQ ID NO: 1446431 - RNA, 17 nt, Human
auuauaacuggaaagaa

SEQ ID NO: 1446432 - RNA, 14 nt, Human
auuauaaccuuaau

SEQ ID NO: 1446433 - RNA, 22 nt, Human
auuauaaccuuaauuuauuauu

SEQ ID NO: 1446434 - RNA, 15 nt, Human
auuauaaaugacaac

SEQ ID NO: 1446435 - RNA, 13 nt, Human
auuaguuuugauu

SEQ ID NO: 1446436 - RNA, 21 nt, Human
auucacucugaguguuuuaug

SEQ ID NO: 1446437 - RNA, 19 nt, Human
auucaccugccccaacucu

SEQ ID NO: 1446438 - RNA, 16 nt, Human
auucacccccuuuccu

SEQ ID NO: 1446439 - RNA, 22 nt, Human
auucacccccuuuccuggacac

SEQ ID NO: 1446440 - RNA, 21 nt, Human
auucaaagguucuagguuuca

SEQ ID NO: 1446441 - RNA, 18 nt, Human
auucaaagguucuagguu

SEQ ID NO: 1446442 - RNA, 17 nt, Human
auucaaagguucuaggu

SEQ ID NO: 1446443 - RNA, 16 nt, Human
auucaaagguucuagg

SEQ ID NO: 1446444 - RNA, 15 nt, Human
auucaaagguucuag

SEQ ID NO: 1446445 - RNA, 14 nt, Human
auucaaagguucua

SEQ ID NO: 1446446 - RNA, 13 nt, Human
auucaaagguucu

SEQ ID NO: 1446447 - RNA, 17 nt, Human
auucaaaaguuccaaga

SEQ ID NO: 1446448 - RNA, 22 nt, Human
auuauuuaaaccgcuaaaagaa

SEQ ID NO: 1446449 - RNA, 12 nt, Human
auuauuuaaaca

SEQ ID NO: 1446450 - RNA, 11 nt, Human
auuauuuaaac

SEQ ID NO: 1446451 - RNA, 18 nt, Human
auuauuguugcauuaaaa

SEQ ID NO: 1446452 - RNA, 20 nt, Human
auuauuggaauauaauuguu

SEQ ID NO: 1446453 - RNA, 15 nt, Human
auuauucagugucac

SEQ ID NO: 1446454 - RNA, 16 nt, Human
auucaaaaguuccaag

SEQ ID NO: 1446455 - RNA, 14 nt, Human
auucaaaaguucca

SEQ ID NO: 1446456 - RNA, 13 nt, Human
auucaaaaguucc

SEQ ID NO: 1446457 - RNA, 11 nt, Human
auucaaaacau

SEQ ID NO: 1446458 - RNA, 16 nt, Human
auucaaaaauuaucua

SEQ ID NO: 1446459 - RNA, 23 nt, Human
auucaaaaauuaucuauagcuaa

SEQ ID NO: 1446460 - RNA, 15 nt, Human
auucagccuggcuuc

SEQ ID NO: 1446461 - RNA, 15 nt, Human
uuugacacugcucua

SEQ ID NO: 1446462 - RNA, 20 nt, Human
uuugacaccucuuuuuucgu

SEQ ID NO: 1446463 - RNA, 20 nt, Human
uuugacaacguuucagcgac

SEQ ID NO: 1446464 - RNA, 18 nt, Human
uuugacaaagguaaauca

SEQ ID NO: 1446465 - RNA, 14 nt, Human
uuugacaaggggca

SEQ ID NO: 1446466 - RNA, 19 nt, Human
uuugaccucugcagcaaua

SEQ ID NO: 1446467 - RNA, 21 nt, Human
uuugaccucugcagcaauaaa

SEQ ID NO: 1446468 - RNA, 16 nt, Human
uuucccuucaguaccc

SEQ ID NO: 1446469 - RNA, 12 nt, Human
uuucccuggucc

SEQ ID NO: 1446470 - RNA, 16 nt, Human
uuucccugccucucau

SEQ ID NO: 1446471 - RNA, 23 nt, Human
uuucccuacugaagcccuuguga

SEQ ID NO: 1446472 - RNA, 17 nt, Human
uuucccuacugaagccc

SEQ ID NO: 1446473 - RNA, 16 nt, Human
uuucccuacccucuag

SEQ ID NO: 1446474 - RNA, 20 nt, Human
uuucccuucaguacccucuc

SEQ ID NO: 1446475 - RNA, 19 nt, Human
uuucccuucaguacccucu

SEQ ID NO: 1446476 - RNA, 19 nt, Human
uuucccuuccuuccucucc

SEQ ID NO: 1446477 - RNA, 18 nt, Human
uuugaugaggcccuccac

SEQ ID NO: 1446478 - RNA, 12 nt, Human
uuugaugauaaa

SEQ ID NO: 1446479 - RNA, 15 nt, Human
uuugaugaguuguga

SEQ ID NO: 1446480 - RNA, 15 nt, Human
uuugacuuuucugua

SEQ ID NO: 1446481 - RNA, 14 nt, Human
uuugacuuuucugu

SEQ ID NO: 1446482 - RNA, 13 nt, Human
uuugacuuuucug

SEQ ID NO: 1446483 - RNA, 12 nt, Human
uuugacuuuucu

SEQ ID NO: 1446484 - RNA, 21 nt, Human
uuugagaaacaacaauuucua

SEQ ID NO: 1446485 - RNA, 17 nt, Human
uuugacuuuucuguaau

SEQ ID NO: 1446486 - RNA, 16 nt, Human
uuugacuuuucuguaa

SEQ ID NO: 1446487 - RNA, 13 nt, Human
uuugaccuuuuau

SEQ ID NO: 1446488 - RNA, 21 nt, Human
uuugagagaaauaugaagaac

SEQ ID NO: 1446489 - RNA, 20 nt, Human
uuugagacagagucuuccuc

SEQ ID NO: 1446490 - RNA, 21 nt, Human
uuugcgcuccuggcccagccu

SEQ ID NO: 1446491 - RNA, 15 nt, Human
uuugcgcuccuggcc

SEQ ID NO: 1446492 - RNA, 19 nt, Human
uuugcaaagaaagaaaaaa

SEQ ID NO: 1446493 - RNA, 18 nt, Human
uuugcaaaaaauguuuuu

SEQ ID NO: 1446494 - RNA, 20 nt, Human
uuugcaaaaaauguuuuugg

SEQ ID NO: 1446495 - RNA, 14 nt, Human
uuugauuucauuaa

SEQ ID NO: 1446496 - RNA, 14 nt, Human
uuugauuuaauguu

SEQ ID NO: 1446497 - RNA, 15 nt, Human
uuugauugauuugaa

SEQ ID NO: 1446498 - RNA, 22 nt, Human
uuugcuguaauguuaauauuga

SEQ ID NO: 1446499 - RNA, 14 nt, Human
uuugcuaaagacau

SEQ ID NO: 1446500 - RNA, 19 nt, Human
uuugcgugggagugugugc

SEQ ID NO: 1446501 - RNA, 15 nt, Human
uuugcuaaagacaug

SEQ ID NO: 1446502 - RNA, 16 nt, Human
uuuggauuugacauug

SEQ ID NO: 1446503 - RNA, 14 nt, Human
uuuggauuguauau

SEQ ID NO: 1446504 - RNA, 19 nt, Human
uuugcuaagcauuccaacu

SEQ ID NO: 1446505 - RNA, 20 nt, Human
uuuggauuuaaaagccugcu

SEQ ID NO: 1446506 - RNA, 14 nt, Human
uuuggauuugacau

SEQ ID NO: 1446507 - RNA, 21 nt, Human
uuuggcugaaauucuccugga

SEQ ID NO: 1446508 - RNA, 20 nt, Human
uuuggcugaaauucuccugg

SEQ ID NO: 1446509 - RNA, 15 nt, Human
uuugggaguuuuuau

SEQ ID NO: 1446510 - RNA, 13 nt, Human
uuuggcuuucagg

SEQ ID NO: 1446511 - RNA, 22 nt, Human
uuuggcugaaauucuccuggag

SEQ ID NO: 1446512 - RNA, 23 nt, Human
uuugggaguuuuuaugagaaacu

SEQ ID NO: 1446513 - RNA, 21 nt, Human
uuugggcagcaauuuaaaugu

SEQ ID NO: 1446514 - RNA, 20 nt, Human
uuugggggguuuucuugccu

SEQ ID NO: 1446515 - RNA, 20 nt, Human
uuugggcuucagcugccagu

SEQ ID NO: 1446516 - RNA, 15 nt, Human
uuugggcuugggccu

SEQ ID NO: 1446517 - RNA, 16 nt, Human
uuugggcuucagcugc

SEQ ID NO: 1446518 - RNA, 16 nt, Human
auguauaguaaaucac

SEQ ID NO: 1446519 - RNA, 15 nt, Human
auguauaguaaauca

SEQ ID NO: 1446520 - RNA, 12 nt, Human
auguauaguaaa

SEQ ID NO: 1446521 - RNA, 15 nt, Human
uuuggguccaggagg

SEQ ID NO: 1446522 - RNA, 13 nt, Human
uuuggguccagga

SEQ ID NO: 1446523 - RNA, 18 nt, Human
uuuggggugccccucucc

SEQ ID NO: 1446524 - RNA, 14 nt, Human
uuuggguccaggag

SEQ ID NO: 1446525 - RNA, 19 nt, Human
auguauacuauaguaccag

SEQ ID NO: 1446526 - RNA, 16 nt, Human
auguccaacccgucug

SEQ ID NO: 1446527 - RNA, 22 nt, Human
auguccaaagaggcugccccuc

SEQ ID NO: 1446528 - RNA, 21 nt, Human
auguccaaagaggcugccccu

SEQ ID NO: 1446529 - RNA, 20 nt, Human
auguccaaagaggcugcccc

SEQ ID NO: 1446530 - RNA, 19 nt, Human
auguccaaagaggcugccc

SEQ ID NO: 1446531 - RNA, 18 nt, Human
auguccaaagaggcugcc

SEQ ID NO: 1446532 - RNA, 16 nt, Human
auguccaaagaggcug

SEQ ID NO: 1446533 - RNA, 15 nt, Human
auguccaaagaggcu

SEQ ID NO: 1446534 - RNA, 12 nt, Human
auguccaaagag

SEQ ID NO: 1446535 - RNA, 18 nt, Human
augucauuucauuuccua

SEQ ID NO: 1446536 - RNA, 15 nt, Human
augucauuucauuuc

SEQ ID NO: 1446537 - RNA, 17 nt, Human
augucauuucagaaguu

SEQ ID NO: 1446538 - RNA, 16 nt, Human
augucauuucagaagu

SEQ ID NO: 1446539 - RNA, 16 nt, Human
augucaugcugccuua

SEQ ID NO: 1446540 - RNA, 13 nt, Human
augucauuaaaug

SEQ ID NO: 1446541 - RNA, 15 nt, Human
augucaugcugccuu

SEQ ID NO: 1446542 - RNA, 14 nt, Human
augucaugcugccu

SEQ ID NO: 1446543 - RNA, 13 nt, Human
augucaugcugcc

SEQ ID NO: 1446544 - RNA, 20 nt, Human
augucauacagagaagucac

SEQ ID NO: 1446545 - RNA, 18 nt, Human
augucauacagagaaguc

SEQ ID NO: 1446546 - RNA, 17 nt, Human
augucauacagagaagu

SEQ ID NO: 1446547 - RNA, 16 nt, Human
augucauacagagaag

SEQ ID NO: 1446548 - RNA, 15 nt, Human
augucauacagagaa

SEQ ID NO: 1446549 - RNA, 14 nt, Human
augucauacagaga

SEQ ID NO: 1446550 - RNA, 17 nt, Human
auguaucaaauacauuu

SEQ ID NO: 1446551 - RNA, 13 nt, Human
augucauacagag

SEQ ID NO: 1446552 - RNA, 15 nt, Human
augugauauauaagu

SEQ ID NO: 1446553 - RNA, 13 nt, Human
augugauauauaa

SEQ ID NO: 1446554 - RNA, 18 nt, Human
augugauaaggaaaucaa

SEQ ID NO: 1446555 - RNA, 20 nt, Human
augugauaaggaaaucaacu

SEQ ID NO: 1446556 - RNA, 17 nt, Human
augugauaaggaaauca

SEQ ID NO: 1446557 - RNA, 17 nt, Human
augugagagguuugacu

SEQ ID NO: 1446558 - RNA, 16 nt, Human
augugagagguuugac

SEQ ID NO: 1446559 - RNA, 14 nt, Human
augugagacugguu

SEQ ID NO: 1446560 - RNA, 19 nt, Human
augugacauuuauauauug

SEQ ID NO: 1446561 - RNA, 14 nt, Human
augugacauuuaua

SEQ ID NO: 1446562 - RNA, 13 nt, Human
augugacauuuau

SEQ ID NO: 1446563 - RNA, 14 nt, Human
augugacaguggcg

SEQ ID NO: 1446564 - RNA, 16 nt, Human
augugacagguaaacu

SEQ ID NO: 1446565 - RNA, 20 nt, Human
augucguggacacacacaga

SEQ ID NO: 1446566 - RNA, 19 nt, Human
augucguggacacacacag

SEQ ID NO: 1446567 - RNA, 23 nt, Human
augucgucaaagcugaaauggac

SEQ ID NO: 1446568 - RNA, 15 nt, Human
uuuguuuguuuaauu

SEQ ID NO: 1446569 - RNA, 11 nt, Human
uuuguuuguuu

SEQ ID NO: 1446570 - RNA, 15 nt, Human
uuuguuuccuuuguu

SEQ ID NO: 1446571 - RNA, 14 nt, Human
uuuguuuccuuugu

SEQ ID NO: 1446572 - RNA, 17 nt, Human
uuuguuuccucuguuca

SEQ ID NO: 1446573 - RNA, 12 nt, Human
uuuguuuccucu

SEQ ID NO: 1446574 - RNA, 17 nt, Human
uuuguuucaaugaggug

SEQ ID NO: 1446575 - RNA, 12 nt, Human
uuugugcccuau

SEQ ID NO: 1446576 - RNA, 22 nt, Human
uuuguuucaaugagguguccaa

SEQ ID NO: 1446577 - RNA, 22 nt, Human
uuugugcugaauguugggacug

SEQ ID NO: 1446578 - RNA, 19 nt, Human
uuugugauggagugcuguu

SEQ ID NO: 1446579 - RNA, 13 nt, Human
uuugugcauucug

SEQ ID NO: 1446580 - RNA, 20 nt, Human
uuugugauucaaucuguaaa

SEQ ID NO: 1446581 - RNA, 22 nt, Human
uuugugcauuaucuagauacug

SEQ ID NO: 1446582 - RNA, 15 nt, Human
uuugugauucaaucu

SEQ ID NO: 1446583 - RNA, 21 nt, Human
uuugugauggagugcuguuuu

SEQ ID NO: 1446584 - RNA, 18 nt, Human
uuugugauggagugcugu

SEQ ID NO: 1446585 - RNA, 22 nt, Human
uuugugauaugcacaauguaga

SEQ ID NO: 1446586 - RNA, 19 nt, Human
uuugugcauuaucuagaua

SEQ ID NO: 1446587 - RNA, 20 nt, Human
uuugugauaugcacaaugua

SEQ ID NO: 1446588 - RNA, 22 nt, Human
uuugugauacaaugcugugccc

SEQ ID NO: 1446589 - RNA, 16 nt, Human
uuugugauacaaugcu

SEQ ID NO: 1446590 - RNA, 18 nt, Human
augugauauucuaagacu

SEQ ID NO: 1446591 - RNA, 15 nt, Human
augugauauucuaag

SEQ ID NO: 1446592 - RNA, 14 nt, Human
augugauauucuaa

SEQ ID NO: 1446593 - RNA, 23 nt, Human
augugauauauaaguguacauau

SEQ ID NO: 1446594 - RNA, 22 nt, Human
augugauauauaaguguacaua

SEQ ID NO: 1446595 - RNA, 21 nt, Human
augugauauauaaguguacau

SEQ ID NO: 1446596 - RNA, 19 nt, Human
augugauauauaaguguac

SEQ ID NO: 1446597 - RNA, 17 nt, Human
augugauauauaagugu

SEQ ID NO: 1446598 - RNA, 16 nt, Human
augugauauauaagug

SEQ ID NO: 1446599 - RNA, 20 nt, Human
augugaucauguguggaagu

SEQ ID NO: 1446600 - RNA, 19 nt, Human
augugaucauguguggaag

SEQ ID NO: 1446601 - RNA, 16 nt, Human
augugauauucuaaga

SEQ ID NO: 1446602 - RNA, 20 nt, Human
uuuguaaguugaagcaaauc

SEQ ID NO: 1446603 - RNA, 16 nt, Human
uuuguaaguugaagca

SEQ ID NO: 1446604 - RNA, 18 nt, Human
uuuguaagguuuuuguag

SEQ ID NO: 1446605 - RNA, 19 nt, Human
augugaugaauacuguauu

SEQ ID NO: 1446606 - RNA, 17 nt, Human
augugaugaauacugua

SEQ ID NO: 1446607 - RNA, 22 nt, Human
uuuguagugauuuuuaugccac

SEQ ID NO: 1446608 - RNA, 17 nt, Human
uuuguaguagcguuuuu

SEQ ID NO: 1446609 - RNA, 17 nt, Human
uuuguaguguuggagaa

SEQ ID NO: 1446610 - RNA, 15 nt, Human
uuuguagugauuuuu

SEQ ID NO: 1446611 - RNA, 19 nt, Human
uuuguaguagcguuuuuua

SEQ ID NO: 1446612 - RNA, 15 nt, Human
uuuguaggguuucua

SEQ ID NO: 1446613 - RNA, 19 nt, Human
uuuguacauaguuauuuau

SEQ ID NO: 1446614 - RNA, 16 nt, Human
uuuguaggguuucuag

SEQ ID NO: 1446615 - RNA, 15 nt, Human
uuuguaguagcguuu

SEQ ID NO: 1446616 - RNA, 16 nt, Human
uuuguaauuuuuuuau

SEQ ID NO: 1446617 - RNA, 18 nt, Human
auguuggucauuuuaugu

SEQ ID NO: 1446618 - RNA, 14 nt, Human
auguuuaaaacauc

SEQ ID NO: 1446619 - RNA, 12 nt, Human
auguugggacug

SEQ ID NO: 1446620 - RNA, 20 nt, Human
auguugggaaacuuggcucg

SEQ ID NO: 1446621 - RNA, 19 nt, Human
auguugggaaacuuggcuc

SEQ ID NO: 1446622 - RNA, 21 nt, Human
auguuggccaggcuggucuaa

SEQ ID NO: 1446623 - RNA, 19 nt, Human
auguuggccaggcuggucu

SEQ ID NO: 1446624 - RNA, 14 nt, Human
auguuuaaaccuuu

SEQ ID NO: 1446625 - RNA, 18 nt, Human
auguuuacacucuuugua

SEQ ID NO: 1446626 - RNA, 16 nt, Human
auguuuacacucuuug

SEQ ID NO: 1446627 - RNA, 21 nt, Human
auguuuacacucuuuguaaga

SEQ ID NO: 1446628 - RNA, 19 nt, Human
auguuuacacucuuuguaa

SEQ ID NO: 1446629 - RNA, 18 nt, Human
uuuucuggaauguaauca

SEQ ID NO: 1446630 - RNA, 21 nt, Human
uuuucuggaauacaugaaaua

SEQ ID NO: 1446631 - RNA, 17 nt, Human
uuuucuggaauacauga

SEQ ID NO: 1446632 - RNA, 16 nt, Human
uuuucuuaaagugcca

SEQ ID NO: 1446633 - RNA, 13 nt, Human
uuuucuuaaagug

SEQ ID NO: 1446634 - RNA, 18 nt, Human
uuuucuuaaagugccagu

SEQ ID NO: 1446635 - RNA, 21 nt, Human
uuuucuuaaccagaucauugu

SEQ ID NO: 1446636 - RNA, 13 nt, Human
uuuucuguucuuu

SEQ ID NO: 1446637 - RNA, 16 nt, Human
auguuuuuaauguaua

SEQ ID NO: 1446638 - RNA, 19 nt, Human
auguuuuuaauguauagua

SEQ ID NO: 1446639 - RNA, 14 nt, Human
auguuuuuaaugua

SEQ ID NO: 1446640 - RNA, 13 nt, Human
auguuuuuaaugu

SEQ ID NO: 1446641 - RNA, 12 nt, Human
auguuuuuaaug

SEQ ID NO: 1446642 - RNA, 19 nt, Human
auguuuuuaauaaaagaaa

SEQ ID NO: 1446643 - RNA, 16 nt, Human
auguuuuuaauaaaag

SEQ ID NO: 1446644 - RNA, 15 nt, Human
auguuuuuaauaaaa

SEQ ID NO: 1446645 - RNA, 16 nt, Human
auguuuuucuaaagga

SEQ ID NO: 1446646 - RNA, 15 nt, Human
auuaaaaaagauaaa

SEQ ID NO: 1446647 - RNA, 17 nt, Human
auuaaaaaagauaaaca

SEQ ID NO: 1446648 - RNA, 14 nt, Human
auuaaaaaagauaa

SEQ ID NO: 1446649 - RNA, 13 nt, Human
auuaaaaaagaua

SEQ ID NO: 1446650 - RNA, 23 nt, Human
auuaaaaaucucaaauuucuaaa

SEQ ID NO: 1446651 - RNA, 22 nt, Human
auguuuuuugccacagcuuuug

SEQ ID NO: 1446652 - RNA, 20 nt, Human
auuaaaaaaaaagaucuguu

SEQ ID NO: 1446653 - RNA, 14 nt, Human
auuaaaaaaaaaga

SEQ ID NO: 1446654 - RNA, 21 nt, Human
auguuuuuugccacagcuuuu

SEQ ID NO: 1446655 - RNA, 19 nt, Human
auguuuuuugccacagcuu

SEQ ID NO: 1446656 - RNA, 18 nt, Human
auguuuuuugccacagcu

SEQ ID NO: 1446657 - RNA, 12 nt, Human
auguuuuuugcc

SEQ ID NO: 1446658 - RNA, 14 nt, Human
auguuuuucuaaag

SEQ ID NO: 1446659 - RNA, 15 nt, Human
auguuuuuuuuuaaa

SEQ ID NO: 1446660 - RNA, 18 nt, Human
uuuuauugacacagaaaa

SEQ ID NO: 1446661 - RNA, 16 nt, Human
uuuuauugacacagaa

SEQ ID NO: 1446662 - RNA, 13 nt, Human
uuuuauuaaugca

SEQ ID NO: 1446663 - RNA, 11 nt, Human
uuuuauuaaug

SEQ ID NO: 1446664 - RNA, 12 nt, Human
uuuuaguugaau

SEQ ID NO: 1446665 - RNA, 21 nt, Human
uuuuauggcuuuugugcauua

SEQ ID NO: 1446666 - RNA, 19 nt, Human
uuuuagugaacuugaaaua

SEQ ID NO: 1446667 - RNA, 21 nt, Human
uuuuagacagucucacuuugu

SEQ ID NO: 1446668 - RNA, 23 nt, Human
uuuuagaguugauacuacaguuu

SEQ ID NO: 1446669 - RNA, 19 nt, Human
uuuuaguugcaacuuugua

SEQ ID NO: 1446670 - RNA, 18 nt, Human
uuuuauggcuuuugugca

SEQ ID NO: 1446671 - RNA, 19 nt, Human
uuuuauggcuuuugugcau

SEQ ID NO: 1446672 - RNA, 21 nt, Human
uuuuccaacuuggcugcagga

SEQ ID NO: 1446673 - RNA, 18 nt, Human
uuuuccaacuacuaauag

SEQ ID NO: 1446674 - RNA, 14 nt, Human
uuuuccaacuacua

SEQ ID NO: 1446675 - RNA, 22 nt, Human
uuuuccaaauguaauaaacuuu

SEQ ID NO: 1446676 - RNA, 11 nt, Human
uuuuccaaaug

SEQ ID NO: 1446677 - RNA, 19 nt, Human
uuuuccaaagagugauagu

SEQ ID NO: 1446678 - RNA, 19 nt, Human
uuuucaguauuauauguac

SEQ ID NO: 1446679 - RNA, 20 nt, Human
uuuucaggcuagauguaugu

SEQ ID NO: 1446680 - RNA, 21 nt, Human
uuuucucugguaauauugacu

SEQ ID NO: 1446681 - RNA, 16 nt, Human
uuuucucugguaauau

SEQ ID NO: 1446682 - RNA, 14 nt, Human
uuuucucugguaau

SEQ ID NO: 1446683 - RNA, 15 nt, Human
uuuucucucaacacc

SEQ ID NO: 1446684 - RNA, 10 nt, Human
uuuucucuca

SEQ ID NO: 1446685 - RNA, 20 nt, Human
uuuucucuaggaaauauacu

SEQ ID NO: 1446686 - RNA, 17 nt, Human
uuuucucugaacacauu

SEQ ID NO: 1446687 - RNA, 21 nt, Human
uuuucucucaacaccaugauu

SEQ ID NO: 1446688 - RNA, 17 nt, Human
uuuucucugauacagaa

SEQ ID NO: 1446689 - RNA, 20 nt, Human
uuuuccagcuggaugagaau

SEQ ID NO: 1446690 - RNA, 16 nt, Human
uuuucuauaauuuaaa

SEQ ID NO: 1446691 - RNA, 23 nt, Human
auguuggacaccuuuagguucuu

SEQ ID NO: 1446692 - RNA, 17 nt, Human
uuuuagaguugauacua

SEQ ID NO: 1446693 - RNA, 22 nt, Human
auguuggacaccuuuagguucu

SEQ ID NO: 1446694 - RNA, 19 nt, Human
auguuggacaccuuuaggu

SEQ ID NO: 1446695 - RNA, 17 nt, Human
auguuggacaccuuuag

SEQ ID NO: 1446696 - RNA, 19 nt, Human
auguugcuggacugucaua

SEQ ID NO: 1446697 - RNA, 15 nt, Human
auguugcuggacugu

SEQ ID NO: 1446698 - RNA, 20 nt, Human
auguugcugaaaaaugggca

SEQ ID NO: 1446699 - RNA, 22 nt, Human
auguugaaauaugauguuaaaa

SEQ ID NO: 1446700 - RNA, 18 nt, Human
auguucacuuuugacaaa

SEQ ID NO: 1446701 - RNA, 14 nt, Human
auguucacuuuuga

SEQ ID NO: 1446702 - RNA, 23 nt, Human
auguucaaagucaaauaacuccu

SEQ ID NO: 1446703 - RNA, 14 nt, Human
auguucaaagucaa

SEQ ID NO: 1446704 - RNA, 20 nt, Human
auguuauuuuuuaauuauua

SEQ ID NO: 1446705 - RNA, 16 nt, Human
auguucuuuggaaagu

SEQ ID NO: 1446706 - RNA, 14 nt, Human
auguucuuuggaaa

SEQ ID NO: 1446707 - RNA, 13 nt, Human
auguucuuuggaa

SEQ ID NO: 1446708 - RNA, 19 nt, Human
auguucuuuggaaaguaca

SEQ ID NO: 1446709 - RNA, 20 nt, Human
auguucuuuuaaaugauuga

SEQ ID NO: 1446710 - RNA, 24 nt, Human
auguuaaauaggcggggcuugccu

SEQ ID NO: 1446711 - RNA, 22 nt, Human
auguuaaauaaauuguauauuc

SEQ ID NO: 1446712 - RNA, 19 nt, Human
auguuaaauaaauuguaua

SEQ ID NO: 1446713 - RNA, 20 nt, Human
auguuaaauaaauuguauau

SEQ ID NO: 1446714 - RNA, 14 nt, Human
auguuaaauaaauu

SEQ ID NO: 1446715 - RNA, 16 nt, Human
auguuaaauaaauugu

SEQ ID NO: 1446716 - RNA, 17 nt, Human
auguuaaauaaauugua

SEQ ID NO: 1446717 - RNA, 18 nt, Human
auguuaaauaaauuguau

SEQ ID NO: 1446718 - RNA, 20 nt, Human
auguuaagacuugacagugg

SEQ ID NO: 1446719 - RNA, 16 nt, Human
auguuaagacuugaca

SEQ ID NO: 1446720 - RNA, 13 nt, Human
auguuauuaucug

SEQ ID NO: 1446721 - RNA, 19 nt, Human
auguuauuuuuuaauuauu

SEQ ID NO: 1446722 - RNA, 17 nt, Human
auguuauuuuuuaauua

SEQ ID NO: 1446723 - RNA, 19 nt, Human
auguuauuuguaauagaug

SEQ ID NO: 1446724 - RNA, 15 nt, Human
auguuauuuguaaua

SEQ ID NO: 1446725 - RNA, 14 nt, Human
auguuacauuauua

SEQ ID NO: 1446726 - RNA, 18 nt, Human
auguuaagacuugacagu

SEQ ID NO: 1446727 - RNA, 22 nt, Human
auguuaucuucucaaguucuaa

SEQ ID NO: 1446728 - RNA, 21 nt, Human
auguuaucuucucaaguucua

SEQ ID NO: 1446729 - RNA, 20 nt, Human
auguuaucuucucaaguucu

SEQ ID NO: 1446730 - RNA, 17 nt, Human
auguuaucuucucaagu

SEQ ID NO: 1446731 - RNA, 18 nt, Human
auguuaugacuauguaaa

SEQ ID NO: 1446732 - RNA, 24 nt, Human
auguuaugacuauguaaacuacuu

SEQ ID NO: 1446733 - RNA, 17 nt, Human
uuuguuuuuccuuccaa

SEQ ID NO: 1446734 - RNA, 12 nt, Human
uuuguuuuucau

SEQ ID NO: 1446735 - RNA, 23 nt, Human
uuuguuuuuaaacuguacagugu

SEQ ID NO: 1446736 - RNA, 21 nt, Human
uuuguuuuuaaacuguacagu

SEQ ID NO: 1446737 - RNA, 20 nt, Human
uuuguuuuuaaacuguacag

SEQ ID NO: 1446738 - RNA, 19 nt, Human
uuuguuuuuaaacuguaca

SEQ ID NO: 1446739 - RNA, 16 nt, Human
uuuguuuuuaaacugu

SEQ ID NO: 1446740 - RNA, 17 nt, Human
uuuguuuuguuuuuaca

SEQ ID NO: 1446741 - RNA, 15 nt, Human
uuuguuuuguuuaca

SEQ ID NO: 1446742 - RNA, 14 nt, Human
uuuguuuugugucu

SEQ ID NO: 1446743 - RNA, 15 nt, Human
uuuguuuugugucuc

SEQ ID NO: 1446744 - RNA, 13 nt, Human
uuuguuuuguguc

SEQ ID NO: 1446745 - RNA, 12 nt, Human
uuuguuuugcac

SEQ ID NO: 1446746 - RNA, 21 nt, Human
augugccagggcaaugaugaa

SEQ ID NO: 1446747 - RNA, 20 nt, Human
augugccagggcaaugauga

SEQ ID NO: 1446748 - RNA, 17 nt, Human
augugcauucuccagcc

SEQ ID NO: 1446749 - RNA, 18 nt, Human
augugcuauacugcauac

SEQ ID NO: 1446750 - RNA, 19 nt, Human
augugcuauacugcauacu

SEQ ID NO: 1446751 - RNA, 21 nt, Human
augugcuaguaauuggaaagg

SEQ ID NO: 1446752 - RNA, 23 nt, Human
auguggaacugcugccacugagg

SEQ ID NO: 1446753 - RNA, 19 nt, Human
auguggaacugcugccacu

SEQ ID NO: 1446754 - RNA, 18 nt, Human
auguggaacugcugccac

SEQ ID NO: 1446755 - RNA, 17 nt, Human
auguggaacugcugcca

SEQ ID NO: 1446756 - RNA, 16 nt, Human
auguggaacugcugcc

SEQ ID NO: 1446757 - RNA, 15 nt, Human
auguggaacugcugc

SEQ ID NO: 1446758 - RNA, 14 nt, Human
augugcuuugagaa

SEQ ID NO: 1446759 - RNA, 16 nt, Human
auguguguauauggac

SEQ ID NO: 1446760 - RNA, 15 nt, Human
auguguguauaugga

SEQ ID NO: 1446761 - RNA, 22 nt, Human
auguguguccacgacugucucc

SEQ ID NO: 1446762 - RNA, 21 nt, Human
auguguguccacgacugucuc

SEQ ID NO: 1446763 - RNA, 23 nt, Human
auguuaaacuuauaacccacuuu

SEQ ID NO: 1446764 - RNA, 15 nt, Human
auguuaaaaaaauaa

SEQ ID NO: 1446765 - RNA, 13 nt, Human
auguuaaauaaau

SEQ ID NO: 1446766 - RNA, 17 nt, Human
auguguuugcuuucuga

SEQ ID NO: 1446767 - RNA, 16 nt, Human
auguguuugcuuucug

SEQ ID NO: 1446768 - RNA, 15 nt, Human
auguguuugcuuucu

SEQ ID NO: 1446769 - RNA, 12 nt, Human
auguguuugcuu

SEQ ID NO: 1446770 - RNA, 23 nt, Human
auguguuucacaguuugaaauaa

SEQ ID NO: 1446771 - RNA, 22 nt, Human
auguguguugauacuguugcac

SEQ ID NO: 1446772 - RNA, 23 nt, Human
auguguguugauacuguugcacg

SEQ ID NO: 1446773 - RNA, 21 nt, Human
auguguguugauacuguugca

SEQ ID NO: 1446774 - RNA, 20 nt, Human
auguguguugauacuguugc

SEQ ID NO: 1446775 - RNA, 19 nt, Human
auguguguugauacuguug

SEQ ID NO: 1446776 - RNA, 18 nt, Human
auguguguugauacuguu

SEQ ID NO: 1446777 - RNA, 17 nt, Human
auguguguugauacugu

SEQ ID NO: 1446778 - RNA, 16 nt, Human
auguguguugauacug

SEQ ID NO: 1446779 - RNA, 15 nt, Human
auguguguugauacu

SEQ ID NO: 1446780 - RNA, 23 nt, Human
auguguguccacgacugucucca

SEQ ID NO: 1446781 - RNA, 22 nt, Human
auguguuucacaguuugaaaua

SEQ ID NO: 1446782 - RNA, 21 nt, Human
auguguuucacaguuugaaau

SEQ ID NO: 1446783 - RNA, 20 nt, Human
auguguuucacaguuugaaa

SEQ ID NO: 1446784 - RNA, 18 nt, Human
auguguuucacaguuuga

SEQ ID NO: 1446785 - RNA, 17 nt, Human
auguguuucacaguuug

SEQ ID NO: 1446786 - RNA, 15 nt, Human
auguguguuuuaaaa

SEQ ID NO: 1446787 - RNA, 19 nt, Human
auugaaggcuuaaacccau

SEQ ID NO: 1446788 - RNA, 15 nt, Human
auugaaggcuuaaac

SEQ ID NO: 1446789 - RNA, 17 nt, Human
auugaaggaugcugucu

SEQ ID NO: 1446790 - RNA, 20 nt, Human
auugaacacaaacuguaaau

SEQ ID NO: 1446791 - RNA, 19 nt, Human
auugaacacaaacuguaaa

SEQ ID NO: 1446792 - RNA, 18 nt, Human
auugaacacaaacuguaa

SEQ ID NO: 1446793 - RNA, 17 nt, Human
auugaacacaaacugua

SEQ ID NO: 1446794 - RNA, 16 nt, Human
auugaacacaaacugu

SEQ ID NO: 1446795 - RNA, 15 nt, Human
auugaacacaaacug

SEQ ID NO: 1446796 - RNA, 14 nt, Human
auugaacacaaacu

SEQ ID NO: 1446797 - RNA, 21 nt, Human
auuccuauacgcagcgugcuu

SEQ ID NO: 1446798 - RNA, 24 nt, Human
auuccuagaaacugacacaugcug

SEQ ID NO: 1446799 - RNA, 18 nt, Human
auugaauacuuugaaugu

SEQ ID NO: 1446800 - RNA, 20 nt, Human
auugaauacuuugaaugugu

SEQ ID NO: 1446801 - RNA, 16 nt, Human
auugaauacuuugaau

SEQ ID NO: 1446802 - RNA, 15 nt, Human
auugaauacuuugaa

SEQ ID NO: 1446803 - RNA, 14 nt, Human
auugaauacuuuga

SEQ ID NO: 1446804 - RNA, 13 nt, Human
auugaauacuuug

SEQ ID NO: 1446805 - RNA, 16 nt, Human
auugaaguaaacuuuu

SEQ ID NO: 1446806 - RNA, 19 nt, Human
auugaaguauuuugcugga

SEQ ID NO: 1446807 - RNA, 22 nt, Human
auugaaguaaacuuuuuguucu

SEQ ID NO: 1446808 - RNA, 15 nt, Human
auugaaguaaacuuu

SEQ ID NO: 1446809 - RNA, 13 nt, Human
auugaauuaucuu

SEQ ID NO: 1446810 - RNA, 23 nt, Human
auugaauggcuauguuuuuaaug

SEQ ID NO: 1446811 - RNA, 22 nt, Human
auugaauggcuauguuuuuaau

SEQ ID NO: 1446812 - RNA, 21 nt, Human
auugaauggcuauguuuuuaa

SEQ ID NO: 1446813 - RNA, 23 nt, Human
auugaauucuugguugaggaaac

SEQ ID NO: 1446814 - RNA, 22 nt, Human
auugaauucuugguugaggaaa

SEQ ID NO: 1446815 - RNA, 20 nt, Human
auugaauucuugguugagga

SEQ ID NO: 1446816 - RNA, 21 nt, Human
auugaauuaucuugguugaaa

SEQ ID NO: 1446817 - RNA, 19 nt, Human
auugauuuuuauaaauacu

SEQ ID NO: 1446818 - RNA, 13 nt, Human
auugauuuugaac

SEQ ID NO: 1446819 - RNA, 12 nt, Human
auugauuuugaa

SEQ ID NO: 1446820 - RNA, 12 nt, Human
auugauuuuugg

SEQ ID NO: 1446821 - RNA, 20 nt, Human
auugauuugcauugaacaca

SEQ ID NO: 1446822 - RNA, 16 nt, Human
auugauuugcauugaa

SEQ ID NO: 1446823 - RNA, 15 nt, Human
auugauuugcauuga

SEQ ID NO: 1446824 - RNA, 13 nt, Human
auugauuugcauu

SEQ ID NO: 1446825 - RNA, 12 nt, Human
auugauuugcau

SEQ ID NO: 1446826 - RNA, 16 nt, Human
auugauuugaagaaca

SEQ ID NO: 1446827 - RNA, 14 nt, Human
auugauuugaagaa

SEQ ID NO: 1446828 - RNA, 23 nt, Human
auugcacguggccucuugagcag

SEQ ID NO: 1446829 - RNA, 19 nt, Human
auugcacguggccucuuga

SEQ ID NO: 1446830 - RNA, 17 nt, Human
auugcacguggccucuu

SEQ ID NO: 1446831 - RNA, 16 nt, Human
auugcacguggccucu

SEQ ID NO: 1446832 - RNA, 15 nt, Human
auugcacguggccuc

SEQ ID NO: 1446833 - RNA, 15 nt, Human
auugcacauuguaaa

SEQ ID NO: 1446834 - RNA, 22 nt, Human
auuggcauggaaauuuaaagca

SEQ ID NO: 1446835 - RNA, 23 nt, Human
auuggcauggaaauuuaaagcag

SEQ ID NO: 1446836 - RNA, 19 nt, Human
auuggcuagagguucaaag

SEQ ID NO: 1446837 - RNA, 20 nt, Human
auuggcuagagguucaaaga

SEQ ID NO: 1446838 - RNA, 22 nt, Human
auuggcuagagguucaaagaua

SEQ ID NO: 1446839 - RNA, 21 nt, Human
auuggcauggaaauuuaaagc

SEQ ID NO: 1446840 - RNA, 15 nt, Human
auuggcauggaaauu

SEQ ID NO: 1446841 - RNA, 19 nt, Human
auuggagcucgugggacag

SEQ ID NO: 1446842 - RNA, 17 nt, Human
auuggagcucgugggac

SEQ ID NO: 1446843 - RNA, 16 nt, Human
auuggagcucguggaa

SEQ ID NO: 1446844 - RNA, 18 nt, Human
auuggcuauuuaaaacuu

SEQ ID NO: 1446845 - RNA, 17 nt, Human
auuggcuauuuaaaacu

SEQ ID NO: 1446846 - RNA, 22 nt, Human
auuggccuguagaguugcugag

SEQ ID NO: 1446847 - RNA, 21 nt, Human
auuggccuguagaguugcuga

SEQ ID NO: 1446848 - RNA, 20 nt, Human
auuggccuguagaguugcug

SEQ ID NO: 1446849 - RNA, 12 nt, Human
auuggccuguag

SEQ ID NO: 1446850 - RNA, 23 nt, Human
auuggcuagagguucaaagauau

SEQ ID NO: 1446851 - RNA, 22 nt, Human
auuggggaagagagccugcagg

SEQ ID NO: 1446852 - RNA, 16 nt, Human
auuggggaagagagcc

SEQ ID NO: 1446853 - RNA, 23 nt, Human
auuggccuguagaguugcugaga

SEQ ID NO: 1446854 - RNA, 22 nt, Human
auuguacuaaagccaaacauau

SEQ ID NO: 1446855 - RNA, 15 nt, Human
auuguacuaaagcca

SEQ ID NO: 1446856 - RNA, 23 nt, Human
auuggggaagagagccugcagga

SEQ ID NO: 1446857 - RNA, 23 nt, Human
auugcaucucccagauaauguga

SEQ ID NO: 1446858 - RNA, 22 nt, Human
auugcaucucccagauaaugug

SEQ ID NO: 1446859 - RNA, 15 nt, Human
auugcaucucccaga

SEQ ID NO: 1446860 - RNA, 16 nt, Human
auugcaucaaagcauc

SEQ ID NO: 1446861 - RNA, 15 nt, Human
auugcauugacuuuc

SEQ ID NO: 1446862 - RNA, 14 nt, Human
auugcauugacuuu

SEQ ID NO: 1446863 - RNA, 18 nt, Human
auugccuuaacuggagcc

SEQ ID NO: 1446864 - RNA, 11 nt, Human
auugcauugac

SEQ ID NO: 1446865 - RNA, 15 nt, Human
auuggacccuuccau

SEQ ID NO: 1446866 - RNA, 24 nt, Human
auuggaagagcagcaccuccucag

SEQ ID NO: 1446867 - RNA, 22 nt, Human
auuggaagagcagcaccuccuc

SEQ ID NO: 1446868 - RNA, 21 nt, Human
auuggaagagcagcaccuccu

SEQ ID NO: 1446869 - RNA, 15 nt, Human
auuggaacuggaggc

SEQ ID NO: 1446870 - RNA, 18 nt, Human
auuggaacuggaggcagg

SEQ ID NO: 1446871 - RNA, 14 nt, Human
auuggaacuggagg

SEQ ID NO: 1446872 - RNA, 16 nt, Human
auuggaaauuuagcau

SEQ ID NO: 1446873 - RNA, 18 nt, Human
auugcgagagaugugugu

SEQ ID NO: 1446874 - RNA, 17 nt, Human
auugcgagagaugugug

SEQ ID NO: 1446875 - RNA, 16 nt, Human
auugcgagagaugugu

SEQ ID NO: 1446876 - RNA, 15 nt, Human
auugcgagagaugug

SEQ ID NO: 1446877 - RNA, 14 nt, Human
auugcgagagaugu

SEQ ID NO: 1446878 - RNA, 13 nt, Human
auugcgagagaug

SEQ ID NO: 1446879 - RNA, 23 nt, Human
auugccuuuuuucuguauaaaug

SEQ ID NO: 1446880 - RNA, 18 nt, Human
auugccuuuuuucuguau

SEQ ID NO: 1446881 - RNA, 17 nt, Human
auugccuuuuuucugua

SEQ ID NO: 1446882 - RNA, 14 nt, Human
auuggaaacaaguc

SEQ ID NO: 1446883 - RNA, 22 nt, Human
auuucuuugaaaaaaaauaaau

SEQ ID NO: 1446884 - RNA, 15 nt, Human
auuucuuugaaaaaa

SEQ ID NO: 1446885 - RNA, 12 nt, Human
auuucuuugaaa

SEQ ID NO: 1446886 - RNA, 17 nt, Human
auuugagagaaauauga

SEQ ID NO: 1446887 - RNA, 22 nt, Human
auuugacuuuucuguaauucag

SEQ ID NO: 1446888 - RNA, 16 nt, Human
auuucuuugaaaaaaa

SEQ ID NO: 1446889 - RNA, 17 nt, Human
auuugaggucuguucuu

SEQ ID NO: 1446890 - RNA, 18 nt, Human
auuugaggucuguucuuu

SEQ ID NO: 1446891 - RNA, 21 nt, Human
auuuggaguguuccccuucca

SEQ ID NO: 1446892 - RNA, 23 nt, Human
auuuggagggaagcucuuggagc

SEQ ID NO: 1446893 - RNA, 19 nt, Human
auuuggagggaagcucuug

SEQ ID NO: 1446894 - RNA, 18 nt, Human
auuugauguaauacuucu

SEQ ID NO: 1446895 - RNA, 17 nt, Human
auuugauguaauacuuc

SEQ ID NO: 1446896 - RNA, 13 nt, Human
auuugauguaaua

SEQ ID NO: 1446897 - RNA, 18 nt, Human
auuugagagaaauaugaa

SEQ ID NO: 1446898 - RNA, 22 nt, Human
auuugaggucuguucuuuccaa

SEQ ID NO: 1446899 - RNA, 21 nt, Human
auuugaggucuguucuuucca

SEQ ID NO: 1446900 - RNA, 19 nt, Human
auuugauaugugaacaguu

SEQ ID NO: 1446901 - RNA, 18 nt, Human
auuugauaugugaacagu

SEQ ID NO: 1446902 - RNA, 17 nt, Human
auuuggcaucccugggc

SEQ ID NO: 1446903 - RNA, 21 nt, Human
auuugguucauuaauucuaua

SEQ ID NO: 1446904 - RNA, 16 nt, Human
auuugguucauuaauu

SEQ ID NO: 1446905 - RNA, 16 nt, Human
auuuggcaucccuggg

SEQ ID NO: 1446906 - RNA, 14 nt, Human
auuuggcaucccug

SEQ ID NO: 1446907 - RNA, 19 nt, Human
auuuggcaaugccaucauc

SEQ ID NO: 1446908 - RNA, 20 nt, Human
auuuggcaucccugggccuu

SEQ ID NO: 1446909 - RNA, 21 nt, Human
auuuggugguuucagaaaugu

SEQ ID NO: 1446910 - RNA, 23 nt, Human
auuuggauuuaaaagccugcuca

SEQ ID NO: 1446911 - RNA, 20 nt, Human
auuuggauuuaaaagccugc

SEQ ID NO: 1446912 - RNA, 18 nt, Human
auuuggauuuaaaagccu

SEQ ID NO: 1446913 - RNA, 15 nt, Human
auuuggauccugugu

SEQ ID NO: 1446914 - RNA, 21 nt, Human
auuuguacauaguuauuuauu

SEQ ID NO: 1446915 - RNA, 23 nt, Human
auuuguaauuaaaagcaaaucau

SEQ ID NO: 1446916 - RNA, 22 nt, Human
auuuguaauuaaaagcaaauca

SEQ ID NO: 1446917 - RNA, 21 nt, Human
auuuguaauuaaaagcaaauc

SEQ ID NO: 1446918 - RNA, 19 nt, Human
auuuguaauuaaaagcaaa

SEQ ID NO: 1446919 - RNA, 13 nt, Human
auuuguaauuaaa

SEQ ID NO: 1446920 - RNA, 23 nt, Human
auuuguaaugucuugagcucuau

SEQ ID NO: 1446921 - RNA, 20 nt, Human
auuuguaaugucuugagcuc

SEQ ID NO: 1446922 - RNA, 19 nt, Human
auuuguaaugucuugagcu

SEQ ID NO: 1446923 - RNA, 22 nt, Human
auuuguaauagauguuugauag

SEQ ID NO: 1446924 - RNA, 17 nt, Human
auuuguaauagauguuu

SEQ ID NO: 1446925 - RNA, 14 nt, Human
auuugguuuucaca

SEQ ID NO: 1446926 - RNA, 12 nt, Human
auuugguuuuca

SEQ ID NO: 1446927 - RNA, 14 nt, Human
auuuccuaaauaua

SEQ ID NO: 1446928 - RNA, 15 nt, Human
auuuccuaguucugu

SEQ ID NO: 1446929 - RNA, 18 nt, Human
auuuccuaguucuguaga

SEQ ID NO: 1446930 - RNA, 20 nt, Human
auuuccuaguucuguagaaa

SEQ ID NO: 1446931 - RNA, 18 nt, Human
auuuccuaucaccuauuu

SEQ ID NO: 1446932 - RNA, 22 nt, Human
auuuccuaguucuguagaaaug

SEQ ID NO: 1446933 - RNA, 21 nt, Human
auuuccuaauacugucauccu

SEQ ID NO: 1446934 - RNA, 17 nt, Human
auuuccuaauacuguca

SEQ ID NO: 1446935 - RNA, 21 nt, Human
auuuccuaaauauauuuuaag

SEQ ID NO: 1446936 - RNA, 19 nt, Human
auuucuuaacuucuugcuu

SEQ ID NO: 1446937 - RNA, 14 nt, Human
auuucuuaacuucu

SEQ ID NO: 1446938 - RNA, 17 nt, Human
auuucuuaacuucuugc

SEQ ID NO: 1446939 - RNA, 14 nt, Human
auuucuaaaaucuu

SEQ ID NO: 1446940 - RNA, 20 nt, Human
auuucggauuuuuuccaaaa

SEQ ID NO: 1446941 - RNA, 19 nt, Human
auuucggauuuuuuccaaa

SEQ ID NO: 1446942 - RNA, 17 nt, Human
auuucggauuuuuucca

SEQ ID NO: 1446943 - RNA, 19 nt, Human
auuuccuuuuuuguuauua

SEQ ID NO: 1446944 - RNA, 20 nt, Human
auuuccuccgucaccucaga

SEQ ID NO: 1446945 - RNA, 16 nt, Human
auuuccuccacaaauu

SEQ ID NO: 1446946 - RNA, 19 nt, Human
auuuccuauuuuuggaaga

SEQ ID NO: 1446947 - RNA, 22 nt, Human
auuuccucaacguugcucccca

SEQ ID NO: 1446948 - RNA, 24 nt, Human
auuuccucaacguugcuccccauc

SEQ ID NO: 1446949 - RNA, 23 nt, Human
auuuccuugaauguggcuugaga

SEQ ID NO: 1446950 - RNA, 15 nt, Human
auuucaugauuagaa

SEQ ID NO: 1446951 - RNA, 18 nt, Human
auuucaugcuaucucugu

SEQ ID NO: 1446952 - RNA, 15 nt, Human
auuucaugauuucau

SEQ ID NO: 1446953 - RNA, 16 nt, Human
auuucauguuuuugau

SEQ ID NO: 1446954 - RNA, 22 nt, Human
auuuauuuuuucuuuucuuuac

SEQ ID NO: 1446955 - RNA, 17 nt, Human
auuuauuuuuucuuuuc

SEQ ID NO: 1446956 - RNA, 21 nt, Human
auuuauuuugacauaaaguug

SEQ ID NO: 1446957 - RNA, 14 nt, Human
auuuauuuugacau

SEQ ID NO: 1446958 - RNA, 13 nt, Human
auuuauuuugaca

SEQ ID NO: 1446959 - RNA, 12 nt, Human
auuuauuuugac

SEQ ID NO: 1446960 - RNA, 16 nt, Human
auuuauuguauucugg

SEQ ID NO: 1446961 - RNA, 15 nt, Human
auuuauugguuuugc

SEQ ID NO: 1446962 - RNA, 14 nt, Human
auuuauugguuuug

SEQ ID NO: 1446963 - RNA, 20 nt, Human
auuuauuacuguaagaaaau

SEQ ID NO: 1446964 - RNA, 19 nt, Human
auuuauuacuguaagaaaa

SEQ ID NO: 1446965 - RNA, 21 nt, Human
auuuauugcaggauggugucu

SEQ ID NO: 1446966 - RNA, 16 nt, Human
auuuaguguucauaaa

SEQ ID NO: 1446967 - RNA, 16 nt, Human
auuuaguuguaaacca

SEQ ID NO: 1446968 - RNA, 17 nt, Human
auuuagaaaacuuuaaa

SEQ ID NO: 1446969 - RNA, 14 nt, Human
auuuagaaaacuuu

SEQ ID NO: 1446970 - RNA, 13 nt, Human
auuuagaaaacuu

SEQ ID NO: 1446971 - RNA, 17 nt, Human
auuuaguguucauaaau

SEQ ID NO: 1446972 - RNA, 22 nt, Human
auuuauguauugugcaaugugu

SEQ ID NO: 1446973 - RNA, 15 nt, Human
auuuauguccaggug

SEQ ID NO: 1446974 - RNA, 19 nt, Human
auuuauguauugugcaaug

SEQ ID NO: 1446975 - RNA, 18 nt, Human
auuuauguauugugcaau

SEQ ID NO: 1446976 - RNA, 17 nt, Human
auuuauguauugugcaa

SEQ ID NO: 1446977 - RNA, 14 nt, Human
auuuauguauugug

SEQ ID NO: 1446978 - RNA, 12 nt, Human
auuuauguauug

SEQ ID NO: 1446979 - RNA, 14 nt, Human
auuuauguauggug

SEQ ID NO: 1446980 - RNA, 23 nt, Human
auuuaugguuguuaaaaauguca

SEQ ID NO: 1446981 - RNA, 15 nt, Human
auuuaugguuguuaa

SEQ ID NO: 1446982 - RNA, 20 nt, Human
auuuauaacguguucaauau

SEQ ID NO: 1446983 - RNA, 22 nt, Human
auuuauaaauauauuuaagaua

SEQ ID NO: 1446984 - RNA, 15 nt, Human
auuuauaaacuuuuu

SEQ ID NO: 1446985 - RNA, 22 nt, Human
auuuaaaauagcaaaagaagaa

SEQ ID NO: 1446986 - RNA, 21 nt, Human
auuuaaaauagcaaaagaaga

SEQ ID NO: 1446987 - RNA, 20 nt, Human
auuuaaaauagcaaaagaag

SEQ ID NO: 1446988 - RNA, 18 nt, Human
auuuaaaauagcaaaaga

SEQ ID NO: 1446989 - RNA, 15 nt, Human
auuuaaaauagcaaa

SEQ ID NO: 1446990 - RNA, 13 nt, Human
auuuaaaauagca

SEQ ID NO: 1446991 - RNA, 16 nt, Human
auuuaaaauaauuaua

SEQ ID NO: 1446992 - RNA, 15 nt, Human
auuuaaaagugucaa

SEQ ID NO: 1446993 - RNA, 17 nt, Human
auuuaaaagccugcuca

SEQ ID NO: 1446994 - RNA, 15 nt, Human
auuuaaaagccugcu

SEQ ID NO: 1446995 - RNA, 14 nt, Human
auuuaaaagccugc

SEQ ID NO: 1446996 - RNA, 19 nt, Human
auuguuuuaucugaauuuu

SEQ ID NO: 1446997 - RNA, 19 nt, Human
auuguuuuacaauaguucu

SEQ ID NO: 1446998 - RNA, 23 nt, Human
auuguagugcuuugagagagaaa

SEQ ID NO: 1446999 - RNA, 14 nt, Human
auuguagugcuuug

SEQ ID NO: 1447000 - RNA, 13 nt, Human
auuguaguaaucu

SEQ ID NO: 1447001 - RNA, 20 nt, Human
auuguagcgucuuucuuuuu

SEQ ID NO: 1447002 - RNA, 21 nt, Human
auuguacuaaagccaaacaua

SEQ ID NO: 1447003 - RNA, 20 nt, Human
auuguagcauccuggaauau

SEQ ID NO: 1447004 - RNA, 17 nt, Human
auuguagcauccuggaa

SEQ ID NO: 1447005 - RNA, 16 nt, Human
auuguaguccuguaau

SEQ ID NO: 1447006 - RNA, 21 nt, Human
auuuaaauacagucuuccauu

SEQ ID NO: 1447007 - RNA, 23 nt, Human
auuuaaaauagcaaaagaagaag

SEQ ID NO: 1447008 - RNA, 16 nt, Human
auuuaaauagcuuuuu

SEQ ID NO: 1447009 - RNA, 16 nt, Human
auuuacaggaacuuca

SEQ ID NO: 1447010 - RNA, 15 nt, Human
auuuacaggaacuuc

SEQ ID NO: 1447011 - RNA, 13 nt, Human
auuuaaaucuguu

SEQ ID NO: 1447012 - RNA, 19 nt, Human
auuuaaauguaaagacaaa

SEQ ID NO: 1447013 - RNA, 15 nt, Human
auuuacauuuaauag

SEQ ID NO: 1447014 - RNA, 19 nt, Human
auuuacauguuuuaaagaa

SEQ ID NO: 1447015 - RNA, 22 nt, Human
auuuaccacuuguguuuugcaa

SEQ ID NO: 1447016 - RNA, 16 nt, Human
auuuacaucauuucuu

SEQ ID NO: 1447017 - RNA, 18 nt, Human
auuuacaugaauugcauu

SEQ ID NO: 1447018 - RNA, 20 nt, Human
auuuacaugaauugcauuuu

SEQ ID NO: 1447019 - RNA, 21 nt, Human
auuuacaugaauugcauuuua

SEQ ID NO: 1447020 - RNA, 15 nt, Human
auuuaccacuugugu

SEQ ID NO: 1447021 - RNA, 20 nt, Human
aaucaaucuugcauguaacg

SEQ ID NO: 1447022 - RNA, 12 nt, Human
aaucaauaauau

SEQ ID NO: 1447023 - RNA, 15 nt, Human
aaucaaacauuuuga

SEQ ID NO: 1447024 - RNA, 23 nt, Human
aaucaaacauuuugaaagucugu

SEQ ID NO: 1447025 - RNA, 17 nt, Human
aaucaaacauuuucugg

SEQ ID NO: 1447026 - RNA, 16 nt, Human
aaucaaacauuuucug

SEQ ID NO: 1447027 - RNA, 13 nt, Human
aaucaaacauuuu

SEQ ID NO: 1447028 - RNA, 19 nt, Human
aaucaaaaucucuccacuu

SEQ ID NO: 1447029 - RNA, 16 nt, Human
aaucaaaaucucucca

SEQ ID NO: 1447030 - RNA, 15 nt, Human
aaucaaaaucucucc

SEQ ID NO: 1447031 - RNA, 12 nt, Human
aaucaaaaucuc

SEQ ID NO: 1447032 - RNA, 20 nt, Human
aaucaaaagggccaaagaac

SEQ ID NO: 1447033 - RNA, 23 nt, Human
aaucaaaagggccaaagaaccaa

SEQ ID NO: 1447034 - RNA, 19 nt, Human
aaucaaaagggccaaagaa

SEQ ID NO: 1447035 - RNA, 18 nt, Human
aaucaaaagggccaaaga

SEQ ID NO: 1447036 - RNA, 20 nt, Human
aaucacgcuuuuugaaaaag

SEQ ID NO: 1447037 - RNA, 16 nt, Human
aaucacgcuuuuugaa

SEQ ID NO: 1447038 - RNA, 15 nt, Human
aaucacgcuuuuuga

SEQ ID NO: 1447039 - RNA, 14 nt, Human
aaucacgcuuuuug

SEQ ID NO: 1447040 - RNA, 18 nt, Human
aaucacgcuuuuugaaaa

SEQ ID NO: 1447041 - RNA, 17 nt, Human
aaucacgcuuuuugaaa

SEQ ID NO: 1447042 - RNA, 16 nt, Human
aaucacgcuuuccuga

SEQ ID NO: 1447043 - RNA, 18 nt, Human
aaucaaucuugcauguaa

SEQ ID NO: 1447044 - RNA, 16 nt, Human
aaucaaucuugcaugu

SEQ ID NO: 1447045 - RNA, 14 nt, Human
aaucaaucuugcau

SEQ ID NO: 1447046 - RNA, 21 nt, Human
aauauuaaaucugcuggaguu

SEQ ID NO: 1447047 - RNA, 13 nt, Human
aauauuaaaucug

SEQ ID NO: 1447048 - RNA, 13 nt, Human
aauauguccuggg

SEQ ID NO: 1447049 - RNA, 12 nt, Human
aauauguccugg

SEQ ID NO: 1447050 - RNA, 11 nt, Human
aauaugucagu

SEQ ID NO: 1447051 - RNA, 16 nt, Human
aauauauaucaaauau

SEQ ID NO: 1447052 - RNA, 19 nt, Human
aaugauggcaauuuuguaa

SEQ ID NO: 1447053 - RNA, 18 nt, Human
aaugauggcaauuuugua

SEQ ID NO: 1447054 - RNA, 17 nt, Human
aaugauggcaauuuugu

SEQ ID NO: 1447055 - RNA, 14 nt, Human
aaugauggcaauuu

SEQ ID NO: 1447056 - RNA, 19 nt, Human
aaugaaguuugaauguuaa

SEQ ID NO: 1447057 - RNA, 20 nt, Human
aaugaaguuugaauguuaaa

SEQ ID NO: 1447058 - RNA, 21 nt, Human
aaugaaguuugaauguuaaau

SEQ ID NO: 1447059 - RNA, 22 nt, Human
aaugaaguuugaauguuaaaua

SEQ ID NO: 1447060 - RNA, 20 nt, Human
aaugaauacuuuauaaagga

SEQ ID NO: 1447061 - RNA, 20 nt, Human
aaugaagauacugaaauaaa

SEQ ID NO: 1447062 - RNA, 17 nt, Human
aaugaaguuugaauguu

SEQ ID NO: 1447063 - RNA, 18 nt, Human
aaugaaguuugaauguua

SEQ ID NO: 1447064 - RNA, 23 nt, Human
aaugaagcaaaugucaugcugcc

SEQ ID NO: 1447065 - RNA, 24 nt, Human
aaugaagaucuaaauaaaaugcua

SEQ ID NO: 1447066 - RNA, 12 nt, Human
aaugaagaucua

SEQ ID NO: 1447067 - RNA, 14 nt, Human
aaugaagcaaugcu

SEQ ID NO: 1447068 - RNA, 17 nt, Human
aaucugacccagugccc

SEQ ID NO: 1447069 - RNA, 15 nt, Human
aaucugacccagugc

SEQ ID NO: 1447070 - RNA, 14 nt, Human
aaucugacccagug

SEQ ID NO: 1447071 - RNA, 13 nt, Human
aaucugacccagu

SEQ ID NO: 1447072 - RNA, 12 nt, Human
aaucugacccag

SEQ ID NO: 1447073 - RNA, 21 nt, Human
aaucucaguugauuuucugga

SEQ ID NO: 1447074 - RNA, 16 nt, Human
aaucucaguugauuuu

SEQ ID NO: 1447075 - RNA, 22 nt, Human
aaucucaguugauuuucuggau

SEQ ID NO: 1447076 - RNA, 16 nt, Human
aaucucaauauuucag

SEQ ID NO: 1447077 - RNA, 17 nt, Human
aaucucaauucuucccu

SEQ ID NO: 1447078 - RNA, 21 nt, Human
aauaauguguaguucauguaa

SEQ ID NO: 1447079 - RNA, 20 nt, Human
aauaauguguaguucaugua

SEQ ID NO: 1447080 - RNA, 22 nt, Human
aauaauguguaguucauguaaa

SEQ ID NO: 1447081 - RNA, 19 nt, Human
aauaauguguaguucaugu

SEQ ID NO: 1447082 - RNA, 14 nt, Human
aauaauguguaguu

SEQ ID NO: 1447083 - RNA, 17 nt, Human
aauaaugugcacugaau

SEQ ID NO: 1447084 - RNA, 12 nt, Human
aauaaagaaugg

SEQ ID NO: 1447085 - RNA, 17 nt, Human
aauaaagaaaagaugca

SEQ ID NO: 1447086 - RNA, 20 nt, Human
aauaaagaaaagaugcacuu

SEQ ID NO: 1447087 - RNA, 16 nt, Human
aauaaagaaaagaugc

SEQ ID NO: 1447088 - RNA, 15 nt, Human
aauaaagaaaagaug

SEQ ID NO: 1447089 - RNA, 17 nt, Human
aauaaagaauggaaagc

SEQ ID NO: 1447090 - RNA, 11 nt, Human
aauaaagcaau

SEQ ID NO: 1447091 - RNA, 12 nt, Human
aauaaagcaauu

SEQ ID NO: 1447092 - RNA, 14 nt, Human
aauaaagcagcguu

SEQ ID NO: 1447093 - RNA, 17 nt, Human
aauaaugugaaacugga

SEQ ID NO: 1447094 - RNA, 22 nt, Human
aauaaugugaaacuggauuaaa

SEQ ID NO: 1447095 - RNA, 17 nt, Human
aaguggacucagggcag

SEQ ID NO: 1447096 - RNA, 19 nt, Human
aaguggccaagaagcagug

SEQ ID NO: 1447097 - RNA, 22 nt, Human
aagugcugcauuuaaaagauac

SEQ ID NO: 1447098 - RNA, 14 nt, Human
aaguuguaaaguau

SEQ ID NO: 1447099 - RNA, 17 nt, Human
aaguuguaaaguaugua

SEQ ID NO: 1447100 - RNA, 21 nt, Human
aaguugggcuugcuauucugu

SEQ ID NO: 1447101 - RNA, 20 nt, Human
aaguugggcuugcuauucug

SEQ ID NO: 1447102 - RNA, 17 nt, Human
aaguugggcuugcuauu

SEQ ID NO: 1447103 - RNA, 21 nt, Human
aaguuggggacacauguauuu

SEQ ID NO: 1447104 - RNA, 23 nt, Human
aaguuggaguuuuguuuccucug

SEQ ID NO: 1447105 - RNA, 12 nt, Human
aaguugaauuuu

SEQ ID NO: 1447106 - RNA, 14 nt, Human
aauaaagaaaagau

SEQ ID NO: 1447107 - RNA, 13 nt, Human
aauaaagaaaaga

SEQ ID NO: 1447108 - RNA, 13 nt, Human
aauaaacuuuaau

SEQ ID NO: 1447109 - RNA, 19 nt, Human
aauaaacacucuugaaaaa

SEQ ID NO: 1447110 - RNA, 17 nt, Human
aaguuuaauaaauuuau

SEQ ID NO: 1447111 - RNA, 14 nt, Human
aaguuuaauaaauu

SEQ ID NO: 1447112 - RNA, 11 nt, Human
aauaaacacuc

SEQ ID NO: 1447113 - RNA, 16 nt, Human
aauaaacacucuugaa

SEQ ID NO: 1447114 - RNA, 24 nt, Human
aagagucuaaagauggaguuucua

SEQ ID NO: 1447115 - RNA, 14 nt, Human
aagagucuaaagau

SEQ ID NO: 1447116 - RNA, 13 nt, Human
aagagucuaaaga

SEQ ID NO: 1447117 - RNA, 15 nt, Human
aagaguuuaaaauca

SEQ ID NO: 1447118 - RNA, 14 nt, Human
aagaguuggcuggu

SEQ ID NO: 1447119 - RNA, 16 nt, Human
aagaguucaagaaaua

SEQ ID NO: 1447120 - RNA, 14 nt, Human
aagaguucaagaaa

SEQ ID NO: 1447121 - RNA, 18 nt, Human
aagacaccguucauucag

SEQ ID NO: 1447122 - RNA, 21 nt, Human
aagacacauuuuuuaggaaau

SEQ ID NO: 1447123 - RNA, 22 nt, Human
aagacaagaacuccccuuuuuu

SEQ ID NO: 1447124 - RNA, 22 nt, Human
aagacaaugacuuacuguacau

SEQ ID NO: 1447125 - RNA, 13 nt, Human
aagaagaagggca

SEQ ID NO: 1447126 - RNA, 18 nt, Human
aagaacuuugagcuacug

SEQ ID NO: 1447127 - RNA, 13 nt, Human
aagaacuuugagc

SEQ ID NO: 1447128 - RNA, 17 nt, Human
aagaacuuuaaauugug

SEQ ID NO: 1447129 - RNA, 20 nt, Human
aagaacuuugagcuacugcc

SEQ ID NO: 1447130 - RNA, 16 nt, Human
aagaagacaaacuuug

SEQ ID NO: 1447131 - RNA, 19 nt, Human
aagaagacaaacuuugcau

SEQ ID NO: 1447132 - RNA, 15 nt, Human
aagaagacaaacuuu

SEQ ID NO: 1447133 - RNA, 15 nt, Human
aagaagacugcauua

SEQ ID NO: 1447134 - RNA, 21 nt, Human
aagaagaccugagaauguauc

SEQ ID NO: 1447135 - RNA, 20 nt, Human
aagaagaccugagaauguau

SEQ ID NO: 1447136 - RNA, 20 nt, Human
aagaagacugcauuauauuu

SEQ ID NO: 1447137 - RNA, 21 nt, Human
aagacaaggaaaaaauaacaa

SEQ ID NO: 1447138 - RNA, 23 nt, Human
aagaacugcaggcccuggccucc

SEQ ID NO: 1447139 - RNA, 22 nt, Human
aagaacugcaggcccuggccuc

SEQ ID NO: 1447140 - RNA, 18 nt, Human
aagaacugcaggcccugg

SEQ ID NO: 1447141 - RNA, 15 nt, Human
aagaacugaaaucau

SEQ ID NO: 1447142 - RNA, 13 nt, Human
aagaacugaaauc

SEQ ID NO: 1447143 - RNA, 12 nt, Human
aagaacugaaau

SEQ ID NO: 1447144 - RNA, 13 nt, Human
aagaaccacuugu

SEQ ID NO: 1447145 - RNA, 11 nt, Human
aagaacugaaa

SEQ ID NO: 1447146 - RNA, 20 nt, Human
aagaaccaguccccccaccc

SEQ ID NO: 1447147 - RNA, 17 nt, Human
aagaaccagucccccca

SEQ ID NO: 1447148 - RNA, 16 nt, Human
aagaaccaaagaagaa

SEQ ID NO: 1447149 - RNA, 11 nt, Human
aagaacaugug

SEQ ID NO: 1447150 - RNA, 14 nt, Human
aagaaccuggaacu

SEQ ID NO: 1447151 - RNA, 14 nt, Human
aagaacggaagaag

SEQ ID NO: 1447152 - RNA, 21 nt, Human
aagacaugauuuccuugaaug

SEQ ID NO: 1447153 - RNA, 15 nt, Human
aagaccacguuucua

SEQ ID NO: 1447154 - RNA, 17 nt, Human
aagaccacguuucuaaa

SEQ ID NO: 1447155 - RNA, 20 nt, Human
aagacaugauuuccuugaau

SEQ ID NO: 1447156 - RNA, 16 nt, Human
aagacaugauuuccuu

SEQ ID NO: 1447157 - RNA, 15 nt, Human
aagacaugauuuccu

SEQ ID NO: 1447158 - RNA, 14 nt, Human
aagacaugauuucc

SEQ ID NO: 1447159 - RNA, 12 nt, Human
aagacaugaagc

SEQ ID NO: 1447160 - RNA, 18 nt, Human
aagacagaaguuugcacu

SEQ ID NO: 1447161 - RNA, 16 nt, Human
aagacagaaguuugca

SEQ ID NO: 1447162 - RNA, 20 nt, Human
aagacagaaccacagggcua

SEQ ID NO: 1447163 - RNA, 22 nt, Human
aagacagagccccacccucaga

SEQ ID NO: 1447164 - RNA, 20 nt, Human
aagagaaacaguugguaacu

SEQ ID NO: 1447165 - RNA, 11 nt, Human
aagagaaaaag

SEQ ID NO: 1447166 - RNA, 14 nt, Human
aagagacagugaua

SEQ ID NO: 1447167 - RNA, 16 nt, Human
aagagauaacuguaaa

SEQ ID NO: 1447168 - RNA, 14 nt, Human
aagagauacagagg

SEQ ID NO: 1447169 - RNA, 15 nt, Human
aagagaucaggaaga

SEQ ID NO: 1447170 - RNA, 16 nt, Human
aagagaucaggaagag

SEQ ID NO: 1447171 - RNA, 22 nt, Human
aagagaucaggaagagaaggag

SEQ ID NO: 1447172 - RNA, 17 nt, Human
aaggcauacgagagcag

SEQ ID NO: 1447173 - RNA, 19 nt, Human
aaggcaguuugcaaaaaau

SEQ ID NO: 1447174 - RNA, 15 nt, Human
aaggcaguuuucuaa

SEQ ID NO: 1447175 - RNA, 15 nt, Human
aaggcaguuugcaaa

SEQ ID NO: 1447176 - RNA, 23 nt, Human
aaggcaguuaccauuaaaccauc

SEQ ID NO: 1447177 - RNA, 22 nt, Human
aaggcaguuaccauuaaaccau

SEQ ID NO: 1447178 - RNA, 22 nt, Human
aaggcauacgagagcagagguc

SEQ ID NO: 1447179 - RNA, 21 nt, Human
aaggcauacgagagcagaggu

SEQ ID NO: 1447180 - RNA, 13 nt, Human
aagcugaguauua

SEQ ID NO: 1447181 - RNA, 19 nt, Human
aaggcagggaggaggcaga

SEQ ID NO: 1447182 - RNA, 14 nt, Human
aaggcagggaggag

SEQ ID NO: 1447183 - RNA, 18 nt, Human
aaggcaagcacuuguggg

SEQ ID NO: 1447184 - RNA, 21 nt, Human
aaggcaacaaaagaagcccgg

SEQ ID NO: 1447185 - RNA, 22 nt, Human
aaggcaacaaaagaagcccggc

SEQ ID NO: 1447186 - RNA, 16 nt, Human
aaggagaaucaucagg

SEQ ID NO: 1447187 - RNA, 17 nt, Human
aaggagaaucaucagga

SEQ ID NO: 1447188 - RNA, 18 nt, Human
aaggagaaucaucaggac

SEQ ID NO: 1447189 - RNA, 19 nt, Human
aaggagaaucaucaggacc

SEQ ID NO: 1447190 - RNA, 15 nt, Human
aaggagaaccagcac

SEQ ID NO: 1447191 - RNA, 17 nt, Human
aaggacuuuguacauuu

SEQ ID NO: 1447192 - RNA, 15 nt, Human
aaggacuuuguacau

SEQ ID NO: 1447193 - RNA, 14 nt, Human
aaggacuuuguaca

SEQ ID NO: 1447194 - RNA, 18 nt, Human
aagcugauuuuuuuuaau

SEQ ID NO: 1447195 - RNA, 15 nt, Human
aagcugauuaaauga

SEQ ID NO: 1447196 - RNA, 16 nt, Human
aagcugauuaaaugac

SEQ ID NO: 1447197 - RNA, 22 nt, Human
aagcugaguuuccuaugggaac

SEQ ID NO: 1447198 - RNA, 15 nt, Human
aagcugaguuuccua

SEQ ID NO: 1447199 - RNA, 14 nt, Human
aagcugaguuuccu

SEQ ID NO: 1447200 - RNA, 13 nt, Human
aagcugaguuucc

SEQ ID NO: 1447201 - RNA, 23 nt, Human
aagcugaguuaggugucuguccu

SEQ ID NO: 1447202 - RNA, 22 nt, Human
aagcugaguuaggugucugucc

SEQ ID NO: 1447203 - RNA, 19 nt, Human
aagcugaguauuaaaaugu

SEQ ID NO: 1447204 - RNA, 18 nt, Human
aagcugaguauuaaaaug

SEQ ID NO: 1447205 - RNA, 21 nt, Human
aagcuagacacaugaagguaa

SEQ ID NO: 1447206 - RNA, 17 nt, Human
aagcuagacacaugaag

SEQ ID NO: 1447207 - RNA, 16 nt, Human
aagcuagacacaugaa

SEQ ID NO: 1447208 - RNA, 15 nt, Human
aagcuagacacauga

SEQ ID NO: 1447209 - RNA, 19 nt, Human
aagcuagaauugaguguuu

SEQ ID NO: 1447210 - RNA, 22 nt, Human
aagcuagacacaugaagguaaa

SEQ ID NO: 1447211 - RNA, 20 nt, Human
aagcuagacacaugaaggua

SEQ ID NO: 1447212 - RNA, 18 nt, Human
aagcuagacacaugaagg

SEQ ID NO: 1447213 - RNA, 22 nt, Human
aagauacagaacucuuucaaaa

SEQ ID NO: 1447214 - RNA, 20 nt, Human
aagauacagaacucuuucaa

SEQ ID NO: 1447215 - RNA, 15 nt, Human
aagauaauucacugu

SEQ ID NO: 1447216 - RNA, 12 nt, Human
aagauaauuaua

SEQ ID NO: 1447217 - RNA, 17 nt, Human
aagauacaguuacucag

SEQ ID NO: 1447218 - RNA, 23 nt, Human
aagauacaguuacucagaauucu

SEQ ID NO: 1447219 - RNA, 23 nt, Human
aagccaggaauuucccaggaccc

SEQ ID NO: 1447220 - RNA, 20 nt, Human
aagaguuugaugaggcccuc

SEQ ID NO: 1447221 - RNA, 16 nt, Human
aagccaggucccucuc

SEQ ID NO: 1447222 - RNA, 15 nt, Human
aagccaggucccucu

SEQ ID NO: 1447223 - RNA, 13 nt, Human
aagccaggucccu

SEQ ID NO: 1447224 - RNA, 24 nt, Human
aagccaggaauuucccaggacccu

SEQ ID NO: 1447225 - RNA, 17 nt, Human
aagccaggucccucuca

SEQ ID NO: 1447226 - RNA, 23 nt, Human
aagccagguuccacagaggacac

SEQ ID NO: 1447227 - RNA, 21 nt, Human
aagccagguuccacagaggac

SEQ ID NO: 1447228 - RNA, 23 nt, Human
aagccaguuuggguaaaauacuu

SEQ ID NO: 1447229 - RNA, 20 nt, Human
aagccaguuuggguaaaaua

SEQ ID NO: 1447230 - RNA, 14 nt, Human
aagcgauucuccug

SEQ ID NO: 1447231 - RNA, 15 nt, Human
aagcgaaaaaaucag

SEQ ID NO: 1447232 - RNA, 14 nt, Human
aagcggugucucuc

SEQ ID NO: 1447233 - RNA, 20 nt, Human
aagcgauucucuugccucaa

SEQ ID NO: 1447234 - RNA, 19 nt, Human
aagcgauucucuugccuca

SEQ ID NO: 1447235 - RNA, 21 nt, Human
aagcggugucucuccugcccc

SEQ ID NO: 1447236 - RNA, 23 nt, Human
aagcuacugugugugugaaugaa

SEQ ID NO: 1447237 - RNA, 22 nt, Human
aagcuacugugugugugaauga

SEQ ID NO: 1447238 - RNA, 13 nt, Human
aagcuacuuauug

SEQ ID NO: 1447239 - RNA, 15 nt, Human
aaaaucucaaauuuc

SEQ ID NO: 1447240 - RNA, 16 nt, Human
aaaaucucaaauuucu

SEQ ID NO: 1447241 - RNA, 18 nt, Human
aaaaucucaaauuucuaa

SEQ ID NO: 1447242 - RNA, 11 nt, Human
aaagaaaaaaa

SEQ ID NO: 1447243 - RNA, 23 nt, Human
aaacuuuuuuucuguaccaguua

SEQ ID NO: 1447244 - RNA, 20 nt, Human
aaacucuguugcaagugcaa

SEQ ID NO: 1447245 - RNA, 19 nt, Human
aaacucuguugcaagugca

SEQ ID NO: 1447246 - RNA, 22 nt, Human
aaacucuguuacacuuuuugga

SEQ ID NO: 1447247 - RNA, 18 nt, Human
aaacucuguuacacuuuu

SEQ ID NO: 1447248 - RNA, 15 nt, Human
aaaccgccagcucug

SEQ ID NO: 1447249 - RNA, 14 nt, Human
aaaccgccagcucu

SEQ ID NO: 1447250 - RNA, 13 nt, Human
aaaccgccagcuc

SEQ ID NO: 1447251 - RNA, 18 nt, Human
aaacccaccugcuagugu

SEQ ID NO: 1447252 - RNA, 22 nt, Human
aaaccgaacugauguaaguaaa

SEQ ID NO: 1447253 - RNA, 24 nt, Human
aaaccagguccaaugagcuuucug

SEQ ID NO: 1447254 - RNA, 22 nt, Human
aaaccagguccaaugagcuuuc

SEQ ID NO: 1447255 - RNA, 20 nt, Human
aaaccagguccaaugagcuu

SEQ ID NO: 1447256 - RNA, 15 nt, Human
aaacccaauccaaau

SEQ ID NO: 1447257 - RNA, 19 nt, Human
aaaccaguguuagggaagg

SEQ ID NO: 1447258 - RNA, 16 nt, Human
aaagauauuuuuaucu

SEQ ID NO: 1447259 - RNA, 21 nt, Human
aaagaaaaaaauugaaaugua

SEQ ID NO: 1447260 - RNA, 22 nt, Human
aaagaaaaaaauugaaauguaa

SEQ ID NO: 1447261 - RNA, 19 nt, Human
aaagaaaaaaauugaaaug

SEQ ID NO: 1447262 - RNA, 18 nt, Human
aaagaaaaaaauugaaau

SEQ ID NO: 1447263 - RNA, 16 nt, Human
aaagaaaaaaauugaa

SEQ ID NO: 1447264 - RNA, 15 nt, Human
aaagaaaaaaauuga

SEQ ID NO: 1447265 - RNA, 13 nt, Human
aaagaaaaaaauu

SEQ ID NO: 1447266 - RNA, 18 nt, Human
aaagaaaaaaauguauuu

SEQ ID NO: 1447267 - RNA, 22 nt, Human
aaagaaaaaaauguauuuuaug

SEQ ID NO: 1447268 - RNA, 17 nt, Human
aaagaaaaaaauguauu

SEQ ID NO: 1447269 - RNA, 23 nt, Human
aaagaaaaaaaaccaucaaguug

SEQ ID NO: 1447270 - RNA, 10 nt, Human
aaagaaaaaa

SEQ ID NO: 1447271 - RNA, 20 nt, Human
aaagaucuguccucagccuu

SEQ ID NO: 1447272 - RNA, 19 nt, Human
aaagaucuguccucagccu

SEQ ID NO: 1447273 - RNA, 18 nt, Human
aaagaucuguccucagcc

SEQ ID NO: 1447274 - RNA, 13 nt, Human
aaagaucccaaau

SEQ ID NO: 1447275 - RNA, 13 nt, Human
aaagaucuguuuu

SEQ ID NO: 1447276 - RNA, 21 nt, Human
aaagaucuguccucagccuug

SEQ ID NO: 1447277 - RNA, 16 nt, Human
aaagaucuguuuugaa

SEQ ID NO: 1447278 - RNA, 18 nt, Human
aaagccugggugacauuu

SEQ ID NO: 1447279 - RNA, 17 nt, Human
aaagccugggugacauu

SEQ ID NO: 1447280 - RNA, 12 nt, Human
aaagccugcuca

SEQ ID NO: 1447281 - RNA, 19 nt, Human
aaagccugaguacuccaca

SEQ ID NO: 1447282 - RNA, 13 nt, Human
aaagccaugcugg

SEQ ID NO: 1447283 - RNA, 15 nt, Human
aaaagugaagacaga

SEQ ID NO: 1447284 - RNA, 13 nt, Human
aaaagugaaauaa

SEQ ID NO: 1447285 - RNA, 24 nt, Human
aaaaucagccaauuauguuaaacu

SEQ ID NO: 1447286 - RNA, 22 nt, Human
aaaauaaaacccguugauuacu

SEQ ID NO: 1447287 - RNA, 22 nt, Human
aaaaucagccaauuauguuaaa

SEQ ID NO: 1447288 - RNA, 16 nt, Human
aaaauaaaacuuuuua

SEQ ID NO: 1447289 - RNA, 13 nt, Human
aaaauaaaaaugg

SEQ ID NO: 1447290 - RNA, 14 nt, Human
aaaauaaaacuuuu

SEQ ID NO: 1447291 - RNA, 22 nt, Human
aaaaguugcuauuugaacuuuu

SEQ ID NO: 1447292 - RNA, 21 nt, Human
aaaaguugcagcuguuuuguu

SEQ ID NO: 1447293 - RNA, 18 nt, Human
aaaaguugcagcuguuuu

SEQ ID NO: 1447294 - RNA, 15 nt, Human
aaaaguugcagcugu

SEQ ID NO: 1447295 - RNA, 14 nt, Human
aaaaguugcagcug

SEQ ID NO: 1447296 - RNA, 18 nt, Human
aaaaguugaauuuuacau

SEQ ID NO: 1447297 - RNA, 14 nt, Human
aaaaguugcuauuu

SEQ ID NO: 1447298 - RNA, 23 nt, Human
aaaagaucuguuuugaaggcaaa

SEQ ID NO: 1447299 - RNA, 10 nt, Human
aaaagauccc

SEQ ID NO: 1447300 - RNA, 15 nt, Human
aaaagauauaagugc

SEQ ID NO: 1447301 - RNA, 18 nt, Human
aaaagauauaagugcugu

SEQ ID NO: 1447302 - RNA, 19 nt, Human
aaaagauauaagugcugua

SEQ ID NO: 1447303 - RNA, 23 nt, Human
aaaagauauaagugcuguauaaa

SEQ ID NO: 1447304 - RNA, 12 nt, Human
aaaagauauaag

SEQ ID NO: 1447305 - RNA, 13 nt, Human
aaaagauauaagu

SEQ ID NO: 1447306 - RNA, 14 nt, Human
aaaagauauaagug

SEQ ID NO: 1447307 - RNA, 12 nt, Human
aaaagacucauc

SEQ ID NO: 1447308 - RNA, 11 nt, Human
aaaagacucau

SEQ ID NO: 1447309 - RNA, 10 nt, Human
aaaagacuca

SEQ ID NO: 1447310 - RNA, 17 nt, Human
aaaagauaaacacaaga

SEQ ID NO: 1447311 - RNA, 19 nt, Human
aaaagauaaacacaagauu

SEQ ID NO: 1447312 - RNA, 12 nt, Human
aaaagauaaaca

SEQ ID NO: 1447313 - RNA, 19 nt, Human
aaaacuuuggaaccagacu

SEQ ID NO: 1447314 - RNA, 17 nt, Human
aaaacuuuggaaccaga

SEQ ID NO: 1447315 - RNA, 16 nt, Human
aaaacuuuggaaccag

SEQ ID NO: 1447316 - RNA, 11 nt, Human
aaaacuuugga

SEQ ID NO: 1447317 - RNA, 22 nt, Human
aaaacagguagaauuaucuaau

SEQ ID NO: 1447318 - RNA, 17 nt, Human
aaaacagguagaauuau

SEQ ID NO: 1447319 - RNA, 12 nt, Human
aaaacagguaga

SEQ ID NO: 1447320 - RNA, 23 nt, Human
aaaacaggcacugcccugguggc

SEQ ID NO: 1447321 - RNA, 18 nt, Human
aaaacaggcacugcccug

SEQ ID NO: 1447322 - RNA, 17 nt, Human
aaaacaggcacugcccu

SEQ ID NO: 1447323 - RNA, 17 nt, Human
aaaacagacacuggcau

SEQ ID NO: 1447324 - RNA, 13 nt, Human
aaaacagaagccu

SEQ ID NO: 1447325 - RNA, 14 nt, Human
aaaacagaacacuu

SEQ ID NO: 1447326 - RNA, 13 nt, Human
aaaacacugugca

SEQ ID NO: 1447327 - RNA, 21 nt, Human
aaaacacuaaaaauaaaaaug

SEQ ID NO: 1447328 - RNA, 17 nt, Human
aaaacacauuuuucuua

SEQ ID NO: 1447329 - RNA, 13 nt, Human
aaaagacucaucc

SEQ ID NO: 1447330 - RNA, 15 nt, Human
aaaagacauucagga

SEQ ID NO: 1447331 - RNA, 13 nt, Human
aaaagacauucag

SEQ ID NO: 1447332 - RNA, 20 nt, Human
aaaagacacacuuguccaca

SEQ ID NO: 1447333 - RNA, 22 nt, Human
aaaagaauuguuggggguuuuu

SEQ ID NO: 1447334 - RNA, 13 nt, Human
aaaagaauuguug

SEQ ID NO: 1447335 - RNA, 11 nt, Human
aaaagaaugau

SEQ ID NO: 1447336 - RNA, 11 nt, Human
aaaagaaguaa

SEQ ID NO: 1447337 - RNA, 14 nt, Human
aaaagaagaaguuu

SEQ ID NO: 1447338 - RNA, 20 nt, Human
aaaagacaaggaaaaaauaa

SEQ ID NO: 1447339 - RNA, 19 nt, Human
aaaagaagcccggcuccug

SEQ ID NO: 1447340 - RNA, 12 nt, Human
aaaagaagaagu

SEQ ID NO: 1447341 - RNA, 11 nt, Human
aaaagaaaggc

SEQ ID NO: 1447342 - RNA, 18 nt, Human
aaaagaaaggcuguuaaa

SEQ ID NO: 1447343 - RNA, 12 nt, Human
aaaagaaacuuu

SEQ ID NO: 1447344 - RNA, 13 nt, Human
aaaagaaaaagau

SEQ ID NO: 1447345 - RNA, 22 nt, Human
aaaagaaaaucuuuauaaaugu

SEQ ID NO: 1447346 - RNA, 11 nt, Human
aaaagaaaauu

SEQ ID NO: 1447347 - RNA, 15 nt, Human
aaaagaaaauuuuug

SEQ ID NO: 1447348 - RNA, 13 nt, Human
aaaggaugugauu

SEQ ID NO: 1447349 - RNA, 23 nt, Human
aaaggaugugauauauaagugua

SEQ ID NO: 1447350 - RNA, 19 nt, Human
aaaggaugugauauauaag

SEQ ID NO: 1447351 - RNA, 17 nt, Human
aaaggaugugauauaua

SEQ ID NO: 1447352 - RNA, 14 nt, Human
aaaggaugugauau

SEQ ID NO: 1447353 - RNA, 12 nt, Human
aaaggaugugau

SEQ ID NO: 1447354 - RNA, 18 nt, Human
aaagccuguucauggcag

SEQ ID NO: 1447355 - RNA, 17 nt, Human
aaagccuguucauggca

SEQ ID NO: 1447356 - RNA, 23 nt, Human
aaagccuggguuugguguauggu

SEQ ID NO: 1447357 - RNA, 20 nt, Human
aaagccuggguuugguguau

SEQ ID NO: 1447358 - RNA, 13 nt, Human
aaagccugcucaa

SEQ ID NO: 1447359 - RNA, 16 nt, Human
aaaucucaauucuucc

SEQ ID NO: 1447360 - RNA, 19 nt, Human
aaaucuccaaaauaaaacu

SEQ ID NO: 1447361 - RNA, 23 nt, Human
aaaucuuucuuucuuagaaauuu

SEQ ID NO: 1447362 - RNA, 15 nt, Human
aaaucaaaaucucuc

SEQ ID NO: 1447363 - RNA, 14 nt, Human
aaaucaaaaucucu

SEQ ID NO: 1447364 - RNA, 13 nt, Human
aaaucaaaaucuc

SEQ ID NO: 1447365 - RNA, 22 nt, Human
aaaucaaaagggccaaagaacc

SEQ ID NO: 1447366 - RNA, 22 nt, Human
aaauauuuuuggucauuguaau

SEQ ID NO: 1447367 - RNA, 17 nt, Human
aaaucaaaaucucucca

SEQ ID NO: 1447368 - RNA, 16 nt, Human
aaaucaaaaucucucc

SEQ ID NO: 1447369 - RNA, 18 nt, Human
aaaucucaauauuucaga

SEQ ID NO: 1447370 - RNA, 23 nt, Human
aaaugcuggcuauagaugucuuu

SEQ ID NO: 1447371 - RNA, 11 nt, Human
aaaucuuuuac

SEQ ID NO: 1447372 - RNA, 18 nt, Human
aaaucuuuuauaggauuu

SEQ ID NO: 1447373 - RNA, 14 nt, Human
aaaugaaaaaauau

SEQ ID NO: 1447374 - RNA, 19 nt, Human
aaaugcuuagaaauucagc

SEQ ID NO: 1447375 - RNA, 18 nt, Human
aaaugcuuuuuauuucug

SEQ ID NO: 1447376 - RNA, 17 nt, Human
aaauauuuuaaagaauu

SEQ ID NO: 1447377 - RNA, 16 nt, Human
aaauauuuuaaagaau

SEQ ID NO: 1447378 - RNA, 15 nt, Human
aaauauuuuaaagaa

SEQ ID NO: 1447379 - RNA, 18 nt, Human
aaauauuuuaaagaauug

SEQ ID NO: 1447380 - RNA, 22 nt, Human
aaauauuuugaaucaauaauau

SEQ ID NO: 1447381 - RNA, 14 nt, Human
aaauauuuuaaaga

SEQ ID NO: 1447382 - RNA, 19 nt, Human
aaauauuuuaaaaucagcu

SEQ ID NO: 1447383 - RNA, 22 nt, Human
aaauauuuguacauaguuauuu

SEQ ID NO: 1447384 - RNA, 15 nt, Human
aaauauuuguacaua

SEQ ID NO: 1447385 - RNA, 14 nt, Human
aaauauuuguacau

SEQ ID NO: 1447386 - RNA, 22 nt, Human
aaauauuuagauguaauuuugu

SEQ ID NO: 1447387 - RNA, 21 nt, Human
aaauauuuauuuuaauaaugu

SEQ ID NO: 1447388 - RNA, 17 nt, Human
aaauagcaaaagaagaa

SEQ ID NO: 1447389 - RNA, 21 nt, Human
aaauagauaagaguagaaacu

SEQ ID NO: 1447390 - RNA, 16 nt, Human
aaauagcaaaagaaga

SEQ ID NO: 1447391 - RNA, 22 nt, Human
aaauauuguuuuacaauaguuc

SEQ ID NO: 1447392 - RNA, 13 nt, Human
aaauggccauuug

SEQ ID NO: 1447393 - RNA, 16 nt, Human
aaauggccauuugcuu

SEQ ID NO: 1447394 - RNA, 21 nt, Human
aaauguuuuuggucuuuuaua

SEQ ID NO: 1447395 - RNA, 14 nt, Human
aaauguuuuugguc

SEQ ID NO: 1447396 - RNA, 12 nt, Human
aaauguuuuugg

SEQ ID NO: 1447397 - RNA, 22 nt, Human
aaauguuuuuaauaaaagaaaa

SEQ ID NO: 1447398 - RNA, 21 nt, Human
aaauguuuuuaauaaaagaaa

SEQ ID NO: 1447399 - RNA, 20 nt, Human
aaauguuuuuaauaaaagaa

SEQ ID NO: 1447400 - RNA, 19 nt, Human
aaauguugagaaucccaaa

SEQ ID NO: 1447401 - RNA, 19 nt, Human
aaauguugcugaaaaaugg

SEQ ID NO: 1447402 - RNA, 11 nt, Human
aaauguugcug

SEQ ID NO: 1447403 - RNA, 23 nt, Human
aaauguugacaugggacauuugc

SEQ ID NO: 1447404 - RNA, 21 nt, Human
aaauguuauuuuuuaauuauu

SEQ ID NO: 1447405 - RNA, 21 nt, Human
aaauguucagaagguugcucu

SEQ ID NO: 1447406 - RNA, 15 nt, Human
aaauguucagaaggu

SEQ ID NO: 1447407 - RNA, 16 nt, Human
aaauguucacuuuuga

SEQ ID NO: 1447408 - RNA, 13 nt, Human
aaauguucacuuu

SEQ ID NO: 1447409 - RNA, 22 nt, Human
aaauguugacaugggacauuug

SEQ ID NO: 1447410 - RNA, 18 nt, Human
aaccguuuugaagcuacu

SEQ ID NO: 1447411 - RNA, 17 nt, Human
aaccguuuugaagcuac

SEQ ID NO: 1447412 - RNA, 17 nt, Human
aaccuaaaacucuuucg

SEQ ID NO: 1447413 - RNA, 19 nt, Human
aaccguggcccuuccugga

SEQ ID NO: 1447414 - RNA, 21 nt, Human
aaccguggcccuuccuggaca

SEQ ID NO: 1447415 - RNA, 18 nt, Human
aaccguggcccuuccugg

SEQ ID NO: 1447416 - RNA, 17 nt, Human
aaccguggcccuuccug

SEQ ID NO: 1447417 - RNA, 11 nt, Human
aaccguggccc

SEQ ID NO: 1447418 - RNA, 22 nt, Human
aaccgucuguuaugcugugaca

SEQ ID NO: 1447419 - RNA, 18 nt, Human
aaccgucuguuaugcugu

SEQ ID NO: 1447420 - RNA, 16 nt, Human
aaccgucuguuaugcu

SEQ ID NO: 1447421 - RNA, 17 nt, Human
aaccguagaugauuuca

SEQ ID NO: 1447422 - RNA, 18 nt, Human
aacccucuguuccuuccc

SEQ ID NO: 1447423 - RNA, 18 nt, Human
aacccucagggcaaagcc

SEQ ID NO: 1447424 - RNA, 20 nt, Human
aacccucagggcaaagccag

SEQ ID NO: 1447425 - RNA, 11 nt, Human
aacccucaggg

SEQ ID NO: 1447426 - RNA, 10 nt, Human
aacccucagg

SEQ ID NO: 1447427 - RNA, 23 nt, Human
aacaugguuaccaugucuuucuc

SEQ ID NO: 1447428 - RNA, 13 nt, Human
aacauggcuuuga

SEQ ID NO: 1447429 - RNA, 12 nt, Human
aaccuuuuuaaa

SEQ ID NO: 1447430 - RNA, 16 nt, Human
aaccuuugugcccuau

SEQ ID NO: 1447431 - RNA, 14 nt, Human
aaccuuugugcccu

SEQ ID NO: 1447432 - RNA, 18 nt, Human
aaccuuuguuugcaucug

SEQ ID NO: 1447433 - RNA, 23 nt, Human
aaauucuucugaacucaaacuga

SEQ ID NO: 1447434 - RNA, 18 nt, Human
aaauucuugcaaaguauc

SEQ ID NO: 1447435 - RNA, 15 nt, Human
aaauucuugcaaagu

SEQ ID NO: 1447436 - RNA, 19 nt, Human
aacagcccuccucugcacu

SEQ ID NO: 1447437 - RNA, 17 nt, Human
aacagcccuccucugca

SEQ ID NO: 1447438 - RNA, 19 nt, Human
aacagccaacuagccccug

SEQ ID NO: 1447439 - RNA, 18 nt, Human
aacagccacuacauuacu

SEQ ID NO: 1447440 - RNA, 18 nt, Human
aacagccugacaacauuu

SEQ ID NO: 1447441 - RNA, 18 nt, Human
aacaggcacuuggcagcc

SEQ ID NO: 1447442 - RNA, 13 nt, Human
aacaggcacuugg

SEQ ID NO: 1447443 - RNA, 18 nt, Human
aacaggcacugcccuggu

SEQ ID NO: 1447444 - RNA, 17 nt, Human
aacaggcacugcccugg

SEQ ID NO: 1447445 - RNA, 16 nt, Human
aacaggcacugcccug

SEQ ID NO: 1447446 - RNA, 21 nt, Human
aacaucuuugaaauuauguaa

SEQ ID NO: 1447447 - RNA, 20 nt, Human
aacaugacccuaaaucuuga

SEQ ID NO: 1447448 - RNA, 18 nt, Human
aacaugaggccacuggag

SEQ ID NO: 1447449 - RNA, 20 nt, Human
aacaggccucagggcuccuu

SEQ ID NO: 1447450 - RNA, 15 nt, Human
aacaggccucagggc

SEQ ID NO: 1447451 - RNA, 14 nt, Human
aacaggccucaggg

SEQ ID NO: 1447452 - RNA, 21 nt, Human
aacaggcacuuggcagccuug

SEQ ID NO: 1447453 - RNA, 14 nt, Human
aacaggcucagagg

SEQ ID NO: 1447454 - RNA, 22 nt, Human
aacaucuuugaaauuauguaaa

SEQ ID NO: 1447455 - RNA, 12 nt, Human
aacaucuuuaag

SEQ ID NO: 1447456 - RNA, 18 nt, Human
aacaucuuuaaggggagg

SEQ ID NO: 1447457 - RNA, 15 nt, Human
acaaacaccucccag

SEQ ID NO: 1447458 - RNA, 17 nt, Human
acaaacacacacaaaag

SEQ ID NO: 1447459 - RNA, 13 nt, Human
acaaacaaugaaa

SEQ ID NO: 1447460 - RNA, 14 nt, Human
acaaccauuccaga

SEQ ID NO: 1447461 - RNA, 22 nt, Human
acaaccaugucauuucagaagu

SEQ ID NO: 1447462 - RNA, 15 nt, Human
acaaccacuggucug

SEQ ID NO: 1447463 - RNA, 16 nt, Human
acaaccaauggaaugu

SEQ ID NO: 1447464 - RNA, 22 nt, Human
acaacauuucuauagccaaaaa

SEQ ID NO: 1447465 - RNA, 20 nt, Human
acaacauuucuauagccaaa

SEQ ID NO: 1447466 - RNA, 14 nt, Human
acaacauuucuaua

SEQ ID NO: 1447467 - RNA, 19 nt, Human
acaacauguuuccagcauu

SEQ ID NO: 1447468 - RNA, 21 nt, Human
acaacauguuuccagcauucc

SEQ ID NO: 1447469 - RNA, 16 nt, Human
acaacauguuuccagc

SEQ ID NO: 1447470 - RNA, 16 nt, Human
acaaacuguguaacug

SEQ ID NO: 1447471 - RNA, 15 nt, Human
acaaacuguguaacu

SEQ ID NO: 1447472 - RNA, 19 nt, Human
acaaacuguaauacaauga

SEQ ID NO: 1447473 - RNA, 11 nt, Human
acaaacugaag

SEQ ID NO: 1447474 - RNA, 20 nt, Human
acaaacucguuuuuuacaaa

SEQ ID NO: 1447475 - RNA, 21 nt, Human
acaaacucguuuuuuacaaag

SEQ ID NO: 1447476 - RNA, 14 nt, Human
acaaacaugacccu

SEQ ID NO: 1447477 - RNA, 17 nt, Human
acaaacuguaauacaau

SEQ ID NO: 1447478 - RNA, 16 nt, Human
acaaacuguaauacaa

SEQ ID NO: 1447479 - RNA, 13 nt, Human
acaaacuguaaau

SEQ ID NO: 1447480 - RNA, 19 nt, Human
acaacuggcaggcaggcuc

SEQ ID NO: 1447481 - RNA, 16 nt, Human
acaacuggcaggcagg

SEQ ID NO: 1447482 - RNA, 17 nt, Human
acaacugcucccaccuc

SEQ ID NO: 1447483 - RNA, 22 nt, Human
acaacugccucgaaacacagaa

SEQ ID NO: 1447484 - RNA, 21 nt, Human
acaacugccucgaaacacaga

SEQ ID NO: 1447485 - RNA, 21 nt, Human
acaacucacuccuuuuaaaga

SEQ ID NO: 1447486 - RNA, 14 nt, Human
acaacucauacacu

SEQ ID NO: 1447487 - RNA, 19 nt, Human
acaacucacuccuuuuaaa

SEQ ID NO: 1447488 - RNA, 14 nt, Human
acaaccaugucauu

SEQ ID NO: 1447489 - RNA, 14 nt, Human
acaagugcccucca

SEQ ID NO: 1447490 - RNA, 16 nt, Human
acaaggucuuuaaagu

SEQ ID NO: 1447491 - RNA, 23 nt, Human
acaagguccucugucagucacag

SEQ ID NO: 1447492 - RNA, 15 nt, Human
acaaguggacucagg

SEQ ID NO: 1447493 - RNA, 14 nt, Human
acaagugcugaaca

SEQ ID NO: 1447494 - RNA, 19 nt, Human
acaagugcccuccaggcuu

SEQ ID NO: 1447495 - RNA, 19 nt, Human
acaaguggacucagggcag

SEQ ID NO: 1447496 - RNA, 18 nt, Human
acaaguggacucagggca

SEQ ID NO: 1447497 - RNA, 16 nt, Human
acaaguuauuuaaauc

SEQ ID NO: 1447498 - RNA, 20 nt, Human
acacagaaaauguugagaau

SEQ ID NO: 1447499 - RNA, 19 nt, Human
acacagaaaauguugagaa

SEQ ID NO: 1447500 - RNA, 18 nt, Human
acacagaaaauguugaga

SEQ ID NO: 1447501 - RNA, 20 nt, Human
acacagcauuguauauguga

SEQ ID NO: 1447502 - RNA, 18 nt, Human
acacagcauuguauaugu

SEQ ID NO: 1447503 - RNA, 17 nt, Human
acacagcauuguauaug

SEQ ID NO: 1447504 - RNA, 21 nt, Human
acaccaagcacagcagccugg

SEQ ID NO: 1447505 - RNA, 20 nt, Human
acaccaagcacagcagccug

SEQ ID NO: 1447506 - RNA, 19 nt, Human
acaccaagcacagcagccu

SEQ ID NO: 1447507 - RNA, 18 nt, Human
acaccaagcacagcagcc

SEQ ID NO: 1447508 - RNA, 16 nt, Human
acaccaagcacagcag

SEQ ID NO: 1447509 - RNA, 17 nt, Human
acacgugacacaaacac

SEQ ID NO: 1447510 - RNA, 22 nt, Human
acacguauuugaauggccuuca

SEQ ID NO: 1447511 - RNA, 19 nt, Human
acacguauuugaauggccu

SEQ ID NO: 1447512 - RNA, 19 nt, Human
acacguaucccaccugaca

SEQ ID NO: 1447513 - RNA, 14 nt, Human
acacuaaaaauaaa

SEQ ID NO: 1447514 - RNA, 17 nt, Human
acacgcaccugccucag

SEQ ID NO: 1447515 - RNA, 16 nt, Human
acacgcaccugccuca

SEQ ID NO: 1447516 - RNA, 14 nt, Human
acacgcaccugccu

SEQ ID NO: 1447517 - RNA, 13 nt, Human
acacgcaccugcc

SEQ ID NO: 1447518 - RNA, 21 nt, Human
acacgcacggcagccacagcu

SEQ ID NO: 1447519 - RNA, 22 nt, Human
aauuucccaggacccugaaggg

SEQ ID NO: 1447520 - RNA, 21 nt, Human
aauuucccaggacccugaagg

SEQ ID NO: 1447521 - RNA, 17 nt, Human
aauuucccaggacccug

SEQ ID NO: 1447522 - RNA, 16 nt, Human
aauuucccaggacccu

SEQ ID NO: 1447523 - RNA, 15 nt, Human
aauuucccaggaccc

SEQ ID NO: 1447524 - RNA, 14 nt, Human
aauuucccaggacc

SEQ ID NO: 1447525 - RNA, 12 nt, Human
aauuucccagga

SEQ ID NO: 1447526 - RNA, 11 nt, Human
aauuguaauag

SEQ ID NO: 1447527 - RNA, 13 nt, Human
aauuguaaucuga

SEQ ID NO: 1447528 - RNA, 20 nt, Human
aauugggccagcuuuucaaa

SEQ ID NO: 1447529 - RNA, 19 nt, Human
aauugggccagcuuuucaa

SEQ ID NO: 1447530 - RNA, 17 nt, Human
aauuguacuaaagccaa

SEQ ID NO: 1447531 - RNA, 16 nt, Human
aauuguacuaaagcca

SEQ ID NO: 1447532 - RNA, 14 nt, Human
aauuguacagccgg

SEQ ID NO: 1447533 - RNA, 15 nt, Human
aauuuccugggagcu

SEQ ID NO: 1447534 - RNA, 12 nt, Human
aauuuccuggga

SEQ ID NO: 1447535 - RNA, 17 nt, Human
aauuuccugggagcuuu

SEQ ID NO: 1447536 - RNA, 15 nt, Human
aauucuccuggaggu

SEQ ID NO: 1447537 - RNA, 13 nt, Human
aauucuccuggag

SEQ ID NO: 1447538 - RNA, 12 nt, Human
aauucuccugga

SEQ ID NO: 1447539 - RNA, 18 nt, Human
aauucucauuaaaagaau

SEQ ID NO: 1447540 - RNA, 15 nt, Human
aauucucuaguuuga

SEQ ID NO: 1447541 - RNA, 17 nt, Human
aauucucuaguuugauu

SEQ ID NO: 1447542 - RNA, 23 nt, Human
aauucuauuaaagugcuaagguu

SEQ ID NO: 1447543 - RNA, 15 nt, Human
aauucuauuaaagug

SEQ ID NO: 1447544 - RNA, 15 nt, Human
aauucuaugccuguc

SEQ ID NO: 1447545 - RNA, 13 nt, Human
aauucuaugccug

SEQ ID NO: 1447546 - RNA, 22 nt, Human
aauucuauaaggccauaaaaca

SEQ ID NO: 1447547 - RNA, 16 nt, Human
aauucuauaaggccau

SEQ ID NO: 1447548 - RNA, 19 nt, Human
aauucuaaaugaauguuua

SEQ ID NO: 1447549 - RNA, 13 nt, Human
aauucuaaaugaa

SEQ ID NO: 1447550 - RNA, 14 nt, Human
aauucuaaaaugau

SEQ ID NO: 1447551 - RNA, 12 nt, Human
aauucuaaaaug

SEQ ID NO: 1447552 - RNA, 22 nt, Human
aauucguguguuuuuuuaugaa

SEQ ID NO: 1447553 - RNA, 13 nt, Human
aauucguguguuu

SEQ ID NO: 1447554 - RNA, 23 nt, Human
aauucuaccaaggucuucuuaau

SEQ ID NO: 1447555 - RNA, 21 nt, Human
aauugggagcuugggaaugga

SEQ ID NO: 1447556 - RNA, 23 nt, Human
aauuggcauggaaauuuaaagca

SEQ ID NO: 1447557 - RNA, 20 nt, Human
aauuggcaccgaagcccaga

SEQ ID NO: 1447558 - RNA, 17 nt, Human
aauuggauuuccuaaua

SEQ ID NO: 1447559 - RNA, 15 nt, Human
aauuggauuuccuaa

SEQ ID NO: 1447560 - RNA, 11 nt, Human
aauuggauuuc

SEQ ID NO: 1447561 - RNA, 16 nt, Human
aauugggccagcuuuu

SEQ ID NO: 1447562 - RNA, 23 nt, Human
aauucugaguuuuguguuuguug

SEQ ID NO: 1447563 - RNA, 17 nt, Human
aauucugaguuuugugu

SEQ ID NO: 1447564 - RNA, 21 nt, Human
aauucuggcugguagagcagg

SEQ ID NO: 1447565 - RNA, 16 nt, Human
aauucugcucagauag

SEQ ID NO: 1447566 - RNA, 16 nt, Human
aauucugugccuuguu

SEQ ID NO: 1447567 - RNA, 15 nt, Human
aauucggugugcacc

SEQ ID NO: 1447568 - RNA, 22 nt, Human
aauuauguagcucuuugucagg

SEQ ID NO: 1447569 - RNA, 16 nt, Human
aauuauguagcucuuu

SEQ ID NO: 1447570 - RNA, 13 nt, Human
aauuauguagcuc

SEQ ID NO: 1447571 - RNA, 12 nt, Human
aauuauguagcu

SEQ ID NO: 1447572 - RNA, 17 nt, Human
aauuauguaaauuauca

SEQ ID NO: 1447573 - RNA, 17 nt, Human
aauuauguaaauuaugu

SEQ ID NO: 1447574 - RNA, 15 nt, Human
aauuauguaaauuau

SEQ ID NO: 1447575 - RNA, 12 nt, Human
aauuauguaaau

SEQ ID NO: 1447576 - RNA, 19 nt, Human
aauuaugccuuuuuugauc

SEQ ID NO: 1447577 - RNA, 17 nt, Human
aauuaugccuuuuuuga

SEQ ID NO: 1447578 - RNA, 18 nt, Human
aauuaugaaacuuuugga

SEQ ID NO: 1447579 - RNA, 23 nt, Human
aauuaucuauagcuaaguacaca

SEQ ID NO: 1447580 - RNA, 15 nt, Human
aauuaugaaacuuuu

SEQ ID NO: 1447581 - RNA, 13 nt, Human
aauuaugaaacuu

SEQ ID NO: 1447582 - RNA, 12 nt, Human
aauuaugaaacu

SEQ ID NO: 1447583 - RNA, 22 nt, Human
aauuaucaggcaaauuugcauu

SEQ ID NO: 1447584 - RNA, 13 nt, Human
aauuauccaggaa

SEQ ID NO: 1447585 - RNA, 18 nt, Human
aauuaucuaauuuauaaa

SEQ ID NO: 1447586 - RNA, 15 nt, Human
aauuaucuaauuuau

SEQ ID NO: 1447587 - RNA, 14 nt, Human
aauuaucuaauuua

SEQ ID NO: 1447588 - RNA, 19 nt, Human
aauuaucuaauuuauaaaa

SEQ ID NO: 1447589 - RNA, 15 nt, Human
aauuaucuauagcua

SEQ ID NO: 1447590 - RNA, 22 nt, Human
aauuaucuauagcuaaguacac

SEQ ID NO: 1447591 - RNA, 21 nt, Human
aauuauauaacuguauuugaa

SEQ ID NO: 1447592 - RNA, 19 nt, Human
aauuauauaacuguauuug

SEQ ID NO: 1447593 - RNA, 17 nt, Human
aauuauauaacuguauu

SEQ ID NO: 1447594 - RNA, 14 nt, Human
aauuauauaacugu

SEQ ID NO: 1447595 - RNA, 21 nt, Human
aauuauaguuucugaggcuuu

SEQ ID NO: 1447596 - RNA, 17 nt, Human
aauuauaguuucugagg

SEQ ID NO: 1447597 - RNA, 16 nt, Human
aauuauaguuucugag

SEQ ID NO: 1447598 - RNA, 15 nt, Human
aauuauaguuucuga

SEQ ID NO: 1447599 - RNA, 14 nt, Human
aauuauaguuucug

SEQ ID NO: 1447600 - RNA, 13 nt, Human
aauuauaguuucu

SEQ ID NO: 1447601 - RNA, 22 nt, Human
aauuauagugauguaaucuuga

SEQ ID NO: 1447602 - RNA, 14 nt, Human
aauuauauguugua

SEQ ID NO: 1447603 - RNA, 22 nt, Human
acauguuugcaccuuucuaguu

SEQ ID NO: 1447604 - RNA, 16 nt, Human
acauguuuuaaagaaa

SEQ ID NO: 1447605 - RNA, 21 nt, Human
acauguuugcaccuuucuagu

SEQ ID NO: 1447606 - RNA, 20 nt, Human
acauguguuaaguauuuuca

SEQ ID NO: 1447607 - RNA, 18 nt, Human
acauccaaagcagacagc

SEQ ID NO: 1447608 - RNA, 17 nt, Human
acauccaaagcagacag

SEQ ID NO: 1447609 - RNA, 16 nt, Human
acauccaaagcagaca

SEQ ID NO: 1447610 - RNA, 15 nt, Human
acauccaaagcagac

SEQ ID NO: 1447611 - RNA, 21 nt, Human
acauccaaaauaguuaagaca

SEQ ID NO: 1447612 - RNA, 22 nt, Human
acaucauuucuuuuugggagag

SEQ ID NO: 1447613 - RNA, 13 nt, Human
acaucauuucuuu

SEQ ID NO: 1447614 - RNA, 12 nt, Human
acaucauuucuu

SEQ ID NO: 1447615 - RNA, 11 nt, Human
acaucauuucu

SEQ ID NO: 1447616 - RNA, 15 nt, Human
acaucauucuugaga

SEQ ID NO: 1447617 - RNA, 20 nt, Human
acauacagaauuacuguaac

SEQ ID NO: 1447618 - RNA, 19 nt, Human
acauacagaauuacuguaa

SEQ ID NO: 1447619 - RNA, 18 nt, Human
acauacagaauuacugua

SEQ ID NO: 1447620 - RNA, 21 nt, Human
acauacaccuaugucauuuca

SEQ ID NO: 1447621 - RNA, 23 nt, Human
acauaaucuucugccuucucaug

SEQ ID NO: 1447622 - RNA, 21 nt, Human
acauaaugcgugcauaccacu

SEQ ID NO: 1447623 - RNA, 16 nt, Human
acauaaccacugcuuc

SEQ ID NO: 1447624 - RNA, 20 nt, Human
acauaacugaaaaugugcua

SEQ ID NO: 1447625 - RNA, 12 nt, Human
acauaacugaaa

SEQ ID NO: 1447626 - RNA, 19 nt, Human
acauaaguuuaggauaaaa

SEQ ID NO: 1447627 - RNA, 20 nt, Human
acauaaguauuuaauucaug

SEQ ID NO: 1447628 - RNA, 18 nt, Human
acauguggggccagguca

SEQ ID NO: 1447629 - RNA, 16 nt, Human
acauguggggccaggu

SEQ ID NO: 1447630 - RNA, 18 nt, Human
acaugugcugcccuacag

SEQ ID NO: 1447631 - RNA, 22 nt, Human
acaugugccagggcaaugauga

SEQ ID NO: 1447632 - RNA, 18 nt, Human
acaugcgguagccagcac

SEQ ID NO: 1447633 - RNA, 17 nt, Human
acaugcgguagccagca

SEQ ID NO: 1447634 - RNA, 17 nt, Human
acaucccugggccugcu

SEQ ID NO: 1447635 - RNA, 16 nt, Human
acaucccugggccugc

SEQ ID NO: 1447636 - RNA, 15 nt, Human
acaucccugggccug

SEQ ID NO: 1447637 - RNA, 14 nt, Human
acaucccugggccu

SEQ ID NO: 1447638 - RNA, 13 nt, Human
acaucccugggcc

SEQ ID NO: 1447639 - RNA, 12 nt, Human
acaucccugggc

SEQ ID NO: 1447640 - RNA, 21 nt, Human
acaucauuucuuuuugggaga

SEQ ID NO: 1447641 - RNA, 19 nt, Human
acauccaaagcagacagcu

SEQ ID NO: 1447642 - RNA, 22 nt, Human
acaugcacuuggcugcauaaau

SEQ ID NO: 1447643 - RNA, 18 nt, Human
acaugcacuuggcugcau

SEQ ID NO: 1447644 - RNA, 21 nt, Human
acaucccugggccugcugcug

SEQ ID NO: 1447645 - RNA, 20 nt, Human
acaucccugggccugcugcu

SEQ ID NO: 1447646 - RNA, 19 nt, Human
acaucccugggccugcugc

SEQ ID NO: 1447647 - RNA, 18 nt, Human
acaucccugggccugcug

SEQ ID NO: 1447648 - RNA, 20 nt, Human
acaucccuuaccugggaaag

SEQ ID NO: 1447649 - RNA, 22 nt, Human
accaccagggcaucucugggcu

SEQ ID NO: 1447650 - RNA, 21 nt, Human
accaccagggcaucucugggc

SEQ ID NO: 1447651 - RNA, 20 nt, Human
accaccagggcaucucuggg

SEQ ID NO: 1447652 - RNA, 17 nt, Human
accaccagggcaucucu

SEQ ID NO: 1447653 - RNA, 17 nt, Human
accaccagcugugucca

SEQ ID NO: 1447654 - RNA, 15 nt, Human
accaccagcuguguc

SEQ ID NO: 1447655 - RNA, 13 nt, Human
accaccagcugug

SEQ ID NO: 1447656 - RNA, 12 nt, Human
accaccagcugu

SEQ ID NO: 1447657 - RNA, 19 nt, Human
accaaccugaagacaccgu

SEQ ID NO: 1447658 - RNA, 18 nt, Human
accaccccgccugcccuc

SEQ ID NO: 1447659 - RNA, 14 nt, Human
accaccccaucugc

SEQ ID NO: 1447660 - RNA, 18 nt, Human
accaccccaucugcauuc

SEQ ID NO: 1447661 - RNA, 13 nt, Human
accacguuucuaa

SEQ ID NO: 1447662 - RNA, 14 nt, Human
accacguuucuaaa

SEQ ID NO: 1447663 - RNA, 21 nt, Human
accaacccucagggcaaagcc

SEQ ID NO: 1447664 - RNA, 16 nt, Human
accaacccucagggca

SEQ ID NO: 1447665 - RNA, 21 nt, Human
acauuuguauaaaauaauuuu

SEQ ID NO: 1447666 - RNA, 19 nt, Human
acauuuguauaaaauaauu

SEQ ID NO: 1447667 - RNA, 16 nt, Human
acauuuguauaaaaua

SEQ ID NO: 1447668 - RNA, 16 nt, Human
acauuugcucauggaa

SEQ ID NO: 1447669 - RNA, 15 nt, Human
acauuugcucaugga

SEQ ID NO: 1447670 - RNA, 21 nt, Human
acaggauguguuugcuuucug

SEQ ID NO: 1447671 - RNA, 20 nt, Human
acaggauguguuugcuuucu

SEQ ID NO: 1447672 - RNA, 19 nt, Human
acaggauguguuugcuuuc

SEQ ID NO: 1447673 - RNA, 18 nt, Human
acaggauguguuugcuuu

SEQ ID NO: 1447674 - RNA, 16 nt, Human
acaggauguguuugcu

SEQ ID NO: 1447675 - RNA, 22 nt, Human
acaggauguguuugcuuucuga

SEQ ID NO: 1447676 - RNA, 24 nt, Human
acaggaugguucccuugaugaaga

SEQ ID NO: 1447677 - RNA, 21 nt, Human
acaguggcucacgccuguaau

SEQ ID NO: 1447678 - RNA, 13 nt, Human
acagugggagcca

SEQ ID NO: 1447679 - RNA, 14 nt, Human
acagugggagccag

SEQ ID NO: 1447680 - RNA, 15 nt, Human
acagugggagccagg

SEQ ID NO: 1447681 - RNA, 16 nt, Human
acagugggagccaggg

SEQ ID NO: 1447682 - RNA, 17 nt, Human
acagugggagccagggc

SEQ ID NO: 1447683 - RNA, 18 nt, Human
acaguggaucacaaagug

SEQ ID NO: 1447684 - RNA, 17 nt, Human
acaguggaucacaaagu

SEQ ID NO: 1447685 - RNA, 15 nt, Human
acaguggaucacaaa

SEQ ID NO: 1447686 - RNA, 18 nt, Human
acaguggaacuacauuag

SEQ ID NO: 1447687 - RNA, 16 nt, Human
acaguggaacuacauu

SEQ ID NO: 1447688 - RNA, 21 nt, Human
acagugcuuuuaagugaaaau

SEQ ID NO: 1447689 - RNA, 20 nt, Human
acagugcugaccagacagcc

SEQ ID NO: 1447690 - RNA, 21 nt, Human
acagugcucuuuucuccucac

SEQ ID NO: 1447691 - RNA, 17 nt, Human
acagugcucuuuucucc

SEQ ID NO: 1447692 - RNA, 16 nt, Human
acagugcucuuuucuc

SEQ ID NO: 1447693 - RNA, 15 nt, Human
acagugcucuuuucu

SEQ ID NO: 1447694 - RNA, 16 nt, Human
acaggcacugcccugg

SEQ ID NO: 1447695 - RNA, 15 nt, Human
acaggcacugcccug

SEQ ID NO: 1447696 - RNA, 20 nt, Human
acaggcacuuggcagccuug

SEQ ID NO: 1447697 - RNA, 16 nt, Human
acaggcacuuggcagc

SEQ ID NO: 1447698 - RNA, 13 nt, Human
acaggcacuuggc

SEQ ID NO: 1447699 - RNA, 23 nt, Human
acaggcacugcccugguggcccu

SEQ ID NO: 1447700 - RNA, 18 nt, Human
acaggcacugcccuggug

SEQ ID NO: 1447701 - RNA, 18 nt, Human
acagugauauuggaacuu

SEQ ID NO: 1447702 - RNA, 23 nt, Human
acagugaucaaguuauuuuuaau

SEQ ID NO: 1447703 - RNA, 16 nt, Human
acugugccauguguuu

SEQ ID NO: 1447704 - RNA, 15 nt, Human
acugugccucagaga

SEQ ID NO: 1447705 - RNA, 18 nt, Human
acugugccucagagacca

SEQ ID NO: 1447706 - RNA, 16 nt, Human
acuguaacugauuaca

SEQ ID NO: 1447707 - RNA, 22 nt, Human
acugucuuuuuucuaaaguaaa

SEQ ID NO: 1447708 - RNA, 23 nt, Human
acugucuuuuuucuaaaguaaaa

SEQ ID NO: 1447709 - RNA, 14 nt, Human
acugguuuucacau

SEQ ID NO: 1447710 - RNA, 14 nt, Human
acuguaaacacaga

SEQ ID NO: 1447711 - RNA, 16 nt, Human
acuguaaacacagaca

SEQ ID NO: 1447712 - RNA, 13 nt, Human
acuguaaacacag

SEQ ID NO: 1447713 - RNA, 22 nt, Human
acuguaaaaugugggauuaugg

SEQ ID NO: 1447714 - RNA, 21 nt, Human
acuguaaaaugugggauuaug

SEQ ID NO: 1447715 - RNA, 16 nt, Human
acuguaaaauguggga

SEQ ID NO: 1447716 - RNA, 18 nt, Human
acuguaaauaaaaagaaa

SEQ ID NO: 1447717 - RNA, 15 nt, Human
acuguaacauucagg

SEQ ID NO: 1447718 - RNA, 13 nt, Human
acuguaaagaugu

SEQ ID NO: 1447719 - RNA, 16 nt, Human
acugucuuuuuucuaa

SEQ ID NO: 1447720 - RNA, 20 nt, Human
acugccgucagugcugugcu

SEQ ID NO: 1447721 - RNA, 17 nt, Human
acugccguaauuuaacu

SEQ ID NO: 1447722 - RNA, 16 nt, Human
acugccguaauuuaac

SEQ ID NO: 1447723 - RNA, 14 nt, Human
acugccuaagcccu

SEQ ID NO: 1447724 - RNA, 15 nt, Human
acugccuaagcccuc

SEQ ID NO: 1447725 - RNA, 15 nt, Human
acugccguaauuuaa

SEQ ID NO: 1447726 - RNA, 17 nt, Human
acugcccaggcacugca

SEQ ID NO: 1447727 - RNA, 11 nt, Human
acugcccuggu

SEQ ID NO: 1447728 - RNA, 16 nt, Human
acugcccauggacagg

SEQ ID NO: 1447729 - RNA, 16 nt, Human
acuggaacacuagaca

SEQ ID NO: 1447730 - RNA, 11 nt, Human
acuggagcccc

SEQ ID NO: 1447731 - RNA, 22 nt, Human
acuggaacacuagacaagccag

SEQ ID NO: 1447732 - RNA, 12 nt, Human
acuggaaagaag

SEQ ID NO: 1447733 - RNA, 23 nt, Human
acuggaaagcuuuucuauuuuaa

SEQ ID NO: 1447734 - RNA, 23 nt, Human
acuggaaaacagaacacuuaugu

SEQ ID NO: 1447735 - RNA, 20 nt, Human
acuggaaaacagaacacuua

SEQ ID NO: 1447736 - RNA, 19 nt, Human
acuggaaaacagaacacuu

SEQ ID NO: 1447737 - RNA, 18 nt, Human
acuggaaaacagaacacu

SEQ ID NO: 1447738 - RNA, 17 nt, Human
acuggaaaacagaacac

SEQ ID NO: 1447739 - RNA, 16 nt, Human
acuggaaaacagaaca

SEQ ID NO: 1447740 - RNA, 23 nt, Human
acugccuagaaacaacacuguag

SEQ ID NO: 1447741 - RNA, 22 nt, Human
acugccuagaaacaacacugua

SEQ ID NO: 1447742 - RNA, 21 nt, Human
acugccuagaaacaacacugu

SEQ ID NO: 1447743 - RNA, 20 nt, Human
acugccuagaaacaacacug

SEQ ID NO: 1447744 - RNA, 19 nt, Human
acugccuagaaacaacacu

SEQ ID NO: 1447745 - RNA, 16 nt, Human
acugccuagaaacaac

SEQ ID NO: 1447746 - RNA, 15 nt, Human
acugccuagaaacaa

SEQ ID NO: 1447747 - RNA, 14 nt, Human
acugccuagaaaca

SEQ ID NO: 1447748 - RNA, 13 nt, Human
acugccuagaaac

SEQ ID NO: 1447749 - RNA, 18 nt, Human
acugccgucagugcugug

SEQ ID NO: 1447750 - RNA, 15 nt, Human
acugccuauuuuaau

SEQ ID NO: 1447751 - RNA, 17 nt, Human
acuguaaaauaauaacu

SEQ ID NO: 1447752 - RNA, 23 nt, Human
acuggugcaaguugaggacuucu

SEQ ID NO: 1447753 - RNA, 16 nt, Human
acuggagugugcgugg

SEQ ID NO: 1447754 - RNA, 15 nt, Human
acuguuuuuuaaguc

SEQ ID NO: 1447755 - RNA, 13 nt, Human
acuguuuuuuaag

SEQ ID NO: 1447756 - RNA, 18 nt, Human
acuguuuuucggacaguu

SEQ ID NO: 1447757 - RNA, 19 nt, Human
acuguuuuucggacaguuu

SEQ ID NO: 1447758 - RNA, 23 nt, Human
acuguuuuucagggagguggcug

SEQ ID NO: 1447759 - RNA, 19 nt, Human
acuguuucaaacuuuacua

SEQ ID NO: 1447760 - RNA, 15 nt, Human
acuguuucaaacuuu

SEQ ID NO: 1447761 - RNA, 18 nt, Human
acuguuucaaacuuuacu

SEQ ID NO: 1447762 - RNA, 19 nt, Human
acuucaaauccuugaagau

SEQ ID NO: 1447763 - RNA, 18 nt, Human
acuucaaauccuugaaga

SEQ ID NO: 1447764 - RNA, 18 nt, Human
acuucaaacuacuuugcu

SEQ ID NO: 1447765 - RNA, 17 nt, Human
acuucaaauccuugaag

SEQ ID NO: 1447766 - RNA, 20 nt, Human
acuuguacaaaauaaacaaa

SEQ ID NO: 1447767 - RNA, 18 nt, Human
acuuguacaaaauaaaca

SEQ ID NO: 1447768 - RNA, 14 nt, Human
acuuguacaaaaua

SEQ ID NO: 1447769 - RNA, 18 nt, Human
acuuguaauuuuuuuaau

SEQ ID NO: 1447770 - RNA, 16 nt, Human
acuuguaauuauggag

SEQ ID NO: 1447771 - RNA, 15 nt, Human
acuuguaauuaugga

SEQ ID NO: 1447772 - RNA, 13 nt, Human
acuuguaauuaug

SEQ ID NO: 1447773 - RNA, 16 nt, Human
acuugguaauuguacu

SEQ ID NO: 1447774 - RNA, 15 nt, Human
acuugggucuucccu

SEQ ID NO: 1447775 - RNA, 20 nt, Human
acuuggggguucaggcccgg

SEQ ID NO: 1447776 - RNA, 19 nt, Human
acuuggggguucaggcccg

SEQ ID NO: 1447777 - RNA, 21 nt, Human
acuucuuuuuucaaaagaaag

SEQ ID NO: 1447778 - RNA, 22 nt, Human
acuucuuuuuucaaaagaaagu

SEQ ID NO: 1447779 - RNA, 23 nt, Human
acuucuuuuuucaaaagaaaguc

SEQ ID NO: 1447780 - RNA, 12 nt, Human
acuugaaaauua

SEQ ID NO: 1447781 - RNA, 14 nt, Human
acuugaaaauuaac

SEQ ID NO: 1447782 - RNA, 16 nt, Human
acuugaaaauuaacau

SEQ ID NO: 1447783 - RNA, 21 nt, Human
acuucaaacuacuuugcugcu

SEQ ID NO: 1447784 - RNA, 16 nt, Human
acuucaaacugagauc

SEQ ID NO: 1447785 - RNA, 20 nt, Human
acuucuugaaggugcugacg

SEQ ID NO: 1447786 - RNA, 17 nt, Human
acuucagcgguuuauau

SEQ ID NO: 1447787 - RNA, 19 nt, Human
acuucuugcuucuuucuag

SEQ ID NO: 1447788 - RNA, 18 nt, Human
acuucuugcuucuuucua

SEQ ID NO: 1447789 - RNA, 11 nt, Human
acuucuugcuu

SEQ ID NO: 1447790 - RNA, 19 nt, Human
acuucuugcuggucuaguc

SEQ ID NO: 1447791 - RNA, 19 nt, Human
acuucuuguguguaugcac

SEQ ID NO: 1447792 - RNA, 15 nt, Human
acuucuuguguguau

SEQ ID NO: 1447793 - RNA, 20 nt, Human
acuucuugcuucuuucuaga

SEQ ID NO: 1447794 - RNA, 15 nt, Human
acuccccaaccccca

SEQ ID NO: 1447795 - RNA, 16 nt, Human
acuccccaacccccaa

SEQ ID NO: 1447796 - RNA, 22 nt, Human
acucccauuccugaagaaccag

SEQ ID NO: 1447797 - RNA, 21 nt, Human
acucccucucaggauccaagc

SEQ ID NO: 1447798 - RNA, 13 nt, Human
acucccucucagg

SEQ ID NO: 1447799 - RNA, 23 nt, Human
acuccgagaggugggccagucug

SEQ ID NO: 1447800 - RNA, 22 nt, Human
acuccgagaggugggccagucu

SEQ ID NO: 1447801 - RNA, 20 nt, Human
acuccauguuggcuagccuc

SEQ ID NO: 1447802 - RNA, 14 nt, Human
acuccauguuggcu

SEQ ID NO: 1447803 - RNA, 14 nt, Human
acucccaccugaca

SEQ ID NO: 1447804 - RNA, 20 nt, Human
acucccauuccugaagaacc

SEQ ID NO: 1447805 - RNA, 16 nt, Human
acucccauuccugaag

SEQ ID NO: 1447806 - RNA, 13 nt, Human
acucccauuccug

SEQ ID NO: 1447807 - RNA, 16 nt, Human
acucccaccugacaca

SEQ ID NO: 1447808 - RNA, 21 nt, Human
acuccguuggccacuccgaga

SEQ ID NO: 1447809 - RNA, 18 nt, Human
acuccguuggccacuccg

SEQ ID NO: 1447810 - RNA, 19 nt, Human
acuccguaacagauuuugu

SEQ ID NO: 1447811 - RNA, 17 nt, Human
acuccguuggccacucc

SEQ ID NO: 1447812 - RNA, 15 nt, Human
acuccguuggccacu

SEQ ID NO: 1447813 - RNA, 20 nt, Human
acuccgugcuuaaccaaaga

SEQ ID NO: 1447814 - RNA, 14 nt, Human
acucguuuuuuaca

SEQ ID NO: 1447815 - RNA, 21 nt, Human
acucuaaaauuauaaaugaca

SEQ ID NO: 1447816 - RNA, 15 nt, Human
acucuaaaauuauaa

SEQ ID NO: 1447817 - RNA, 19 nt, Human
acucguuaauuuguagugu

SEQ ID NO: 1447818 - RNA, 14 nt, Human
acucguuaauuugu

SEQ ID NO: 1447819 - RNA, 18 nt, Human
acugauguuguguuuuua

SEQ ID NO: 1447820 - RNA, 17 nt, Human
acugauguuguguuuuu

SEQ ID NO: 1447821 - RNA, 13 nt, Human
acugauguugugu

SEQ ID NO: 1447822 - RNA, 15 nt, Human
acugaucacaaaaac

SEQ ID NO: 1447823 - RNA, 22 nt, Human
acugacauguggggccagguca

SEQ ID NO: 1447824 - RNA, 19 nt, Human
acugauaugggucuugaua

SEQ ID NO: 1447825 - RNA, 13 nt, Human
acugaugucuccu

SEQ ID NO: 1447826 - RNA, 20 nt, Human
acugauguaugaggaauuuc

SEQ ID NO: 1447827 - RNA, 14 nt, Human
acugaucucguuuu

SEQ ID NO: 1447828 - RNA, 14 nt, Human
acugaugucuccua

SEQ ID NO: 1447829 - RNA, 17 nt, Human
acugaugucuccuaagc

SEQ ID NO: 1447830 - RNA, 14 nt, Human
acugauuacugccu

SEQ ID NO: 1447831 - RNA, 18 nt, Human
acugacauguggggccag

SEQ ID NO: 1447832 - RNA, 12 nt, Human
acugacaugugg

SEQ ID NO: 1447833 - RNA, 14 nt, Human
acugacagaggggg

SEQ ID NO: 1447834 - RNA, 13 nt, Human
acugacacacacg

SEQ ID NO: 1447835 - RNA, 18 nt, Human
acugacaagccaucuuga

SEQ ID NO: 1447836 - RNA, 13 nt, Human
acugacacaugcu

SEQ ID NO: 1447837 - RNA, 23 nt, Human
acugaauuucuuuugccguuauu

SEQ ID NO: 1447838 - RNA, 19 nt, Human
acucuacccauauuacaga

SEQ ID NO: 1447839 - RNA, 17 nt, Human
acucuacccauauuaca

SEQ ID NO: 1447840 - RNA, 14 nt, Human
acugaaugucauug

SEQ ID NO: 1447841 - RNA, 20 nt, Human
acugaaugaggucagcaugu

SEQ ID NO: 1447842 - RNA, 12 nt, Human
acugaaugaggu

SEQ ID NO: 1447843 - RNA, 20 nt, Human
acugaauuaugaaacuuuug

SEQ ID NO: 1447844 - RNA, 12 nt, Human
acugaauuucuu

SEQ ID NO: 1447845 - RNA, 15 nt, Human
acugaauuaugaaac

SEQ ID NO: 1447846 - RNA, 14 nt, Human
acugaauuaugaaa

SEQ ID NO: 1447847 - RNA, 13 nt, Human
acugaauuaugaa

SEQ ID NO: 1447848 - RNA, 18 nt, Human
accuuggcaccagacacc

SEQ ID NO: 1447849 - RNA, 17 nt, Human
accuuggcaccagacac

SEQ ID NO: 1447850 - RNA, 16 nt, Human
accuuggcaccagaca

SEQ ID NO: 1447851 - RNA, 14 nt, Human
accuuggcaccaga

SEQ ID NO: 1447852 - RNA, 19 nt, Human
accuuggacauccuccucc

SEQ ID NO: 1447853 - RNA, 18 nt, Human
accuuggacauccuccuc

SEQ ID NO: 1447854 - RNA, 22 nt, Human
accuuggcaccagacacccagg

SEQ ID NO: 1447855 - RNA, 22 nt, Human
accucuguauuugaaucagccu

SEQ ID NO: 1447856 - RNA, 19 nt, Human
accugugcacaccccacuc

SEQ ID NO: 1447857 - RNA, 11 nt, Human
accuguaauca

SEQ ID NO: 1447858 - RNA, 15 nt, Human
accuguaagugucuu

SEQ ID NO: 1447859 - RNA, 23 nt, Human
accuugcugcaagcacagcccuu

SEQ ID NO: 1447860 - RNA, 22 nt, Human
accuugcugcaagcacagcccu

SEQ ID NO: 1447861 - RNA, 14 nt, Human
accuguggauauuu

SEQ ID NO: 1447862 - RNA, 13 nt, Human
accuguggauauu

SEQ ID NO: 1447863 - RNA, 18 nt, Human
accuugccugguacagua

SEQ ID NO: 1447864 - RNA, 22 nt, Human
accugugcuucgggcccuuccc

SEQ ID NO: 1447865 - RNA, 19 nt, Human
accugugcuucgggcccuu

SEQ ID NO: 1447866 - RNA, 23 nt, Human
accugugcuucgggcccuuccca

SEQ ID NO: 1447867 - RNA, 20 nt, Human
accuguggaacauaaaaagg

SEQ ID NO: 1447868 - RNA, 10 nt, Human
accuguggau

SEQ ID NO: 1447869 - RNA, 23 nt, Human
accuguggaacauaaaaaggaca

SEQ ID NO: 1447870 - RNA, 16 nt, Human
acuaauggcaugagaa

SEQ ID NO: 1447871 - RNA, 13 nt, Human
acuaauggcauga

SEQ ID NO: 1447872 - RNA, 12 nt, Human
acuaauggcaug

SEQ ID NO: 1447873 - RNA, 24 nt, Human
acuaaugccuuacucuucuugaaa

SEQ ID NO: 1447874 - RNA, 23 nt, Human
acuaaugccuuacucuucuugaa

SEQ ID NO: 1447875 - RNA, 13 nt, Human
acuaauuccacac

SEQ ID NO: 1447876 - RNA, 18 nt, Human
acuaauucauaaucacuc

SEQ ID NO: 1447877 - RNA, 22 nt, Human
acuaauggcaugagaaauacaa

SEQ ID NO: 1447878 - RNA, 21 nt, Human
acuaauggcaugagaaauaca

SEQ ID NO: 1447879 - RNA, 20 nt, Human
acuaauguguaagacaaaaa

SEQ ID NO: 1447880 - RNA, 19 nt, Human
acgugcucuuuguuuugug

SEQ ID NO: 1447881 - RNA, 23 nt, Human
acgugcucuuuguuuugugucuc

SEQ ID NO: 1447882 - RNA, 18 nt, Human
acgugcucugugggucuc

SEQ ID NO: 1447883 - RNA, 15 nt, Human
acgcaaguucccagu

SEQ ID NO: 1447884 - RNA, 18 nt, Human
acgauuuuuaaaauguac

SEQ ID NO: 1447885 - RNA, 14 nt, Human
acgcacacugucug

SEQ ID NO: 1447886 - RNA, 20 nt, Human
acgauuucuguuuagauaau

SEQ ID NO: 1447887 - RNA, 23 nt, Human
acgauuucuguuuagauaauaca

SEQ ID NO: 1447888 - RNA, 16 nt, Human
acgcaccugccucagg

SEQ ID NO: 1447889 - RNA, 15 nt, Human
acgcaccugccucag

SEQ ID NO: 1447890 - RNA, 14 nt, Human
acgcaccugccuca

SEQ ID NO: 1447891 - RNA, 22 nt, Human
acgcaccaccaugccaggcuaa

SEQ ID NO: 1447892 - RNA, 23 nt, Human
acggacaaaaccccccagauauc

SEQ ID NO: 1447893 - RNA, 19 nt, Human
acgugacacaaacacacac

SEQ ID NO: 1447894 - RNA, 13 nt, Human
acgugacacaaac

SEQ ID NO: 1447895 - RNA, 12 nt, Human
acgucuucuaaa

SEQ ID NO: 1447896 - RNA, 14 nt, Human
acgucuuaaauauu

SEQ ID NO: 1447897 - RNA, 13 nt, Human
acgucuuaaauau

SEQ ID NO: 1447898 - RNA, 19 nt, Human
accuccaaagcuucccacg

SEQ ID NO: 1447899 - RNA, 21 nt, Human
accuccaaagcuucccacggc

SEQ ID NO: 1447900 - RNA, 17 nt, Human
accguggcccuuccugg

SEQ ID NO: 1447901 - RNA, 20 nt, Human
accgggccacuccuuccugc

SEQ ID NO: 1447902 - RNA, 19 nt, Human
accgggccacuccuuccug

SEQ ID NO: 1447903 - RNA, 12 nt, Human
accgggccacuc

SEQ ID NO: 1447904 - RNA, 21 nt, Human
accgggccacuccuuccugcc

SEQ ID NO: 1447905 - RNA, 13 nt, Human
accggggccuggg

SEQ ID NO: 1447906 - RNA, 15 nt, Human
accucaggcagcuca

SEQ ID NO: 1447907 - RNA, 12 nt, Human
accucaggcagc

SEQ ID NO: 1447908 - RNA, 17 nt, Human
accucagccugggcgcu

SEQ ID NO: 1447909 - RNA, 15 nt, Human
accucagccugggcg

SEQ ID NO: 1447910 - RNA, 14 nt, Human
accucagccugggc

SEQ ID NO: 1447911 - RNA, 13 nt, Human
accucagccuggg

SEQ ID NO: 1447912 - RNA, 12 nt, Human
accucagccugg

SEQ ID NO: 1447913 - RNA, 21 nt, Human
accucagccuggccagacaca

SEQ ID NO: 1447914 - RNA, 20 nt, Human
accucagccuggccagacac

SEQ ID NO: 1447915 - RNA, 19 nt, Human
accucagccuggccagaca

SEQ ID NO: 1447916 - RNA, 17 nt, Human
accucagccuggccaga

SEQ ID NO: 1447917 - RNA, 16 nt, Human
accucagccuggccag

SEQ ID NO: 1447918 - RNA, 15 nt, Human
accucagccuggcca

SEQ ID NO: 1447919 - RNA, 14 nt, Human
accucagccuggcc

SEQ ID NO: 1447920 - RNA, 13 nt, Human
accucagccuggc

SEQ ID NO: 1447921 - RNA, 16 nt, Human
accguggcccuuccug

SEQ ID NO: 1447922 - RNA, 11 nt, Human
accucagccug

SEQ ID NO: 1447923 - RNA, 23 nt, Human
accucagugccuuccuguuuuuc

SEQ ID NO: 1447924 - RNA, 21 nt, Human
accucaguaauuuagaaauca

SEQ ID NO: 1447925 - RNA, 17 nt, Human
accucaguaauuuagaa

SEQ ID NO: 1447926 - RNA, 15 nt, Human
accucaguaauuuag

SEQ ID NO: 1447927 - RNA, 17 nt, Human
accucaggcagcucaag

SEQ ID NO: 1447928 - RNA, 16 nt, Human
accucaggcagcucaa

SEQ ID NO: 1447929 - RNA, 13 nt, Human
acccguggaggcu

SEQ ID NO: 1447930 - RNA, 23 nt, Human
acccgugccaaguccagguccug

SEQ ID NO: 1447931 - RNA, 22 nt, Human
acccgugccaaguccagguccu

SEQ ID NO: 1447932 - RNA, 21 nt, Human
acccgugccaaguccaggucc

SEQ ID NO: 1447933 - RNA, 18 nt, Human
acccgugccaaguccagg

SEQ ID NO: 1447934 - RNA, 23 nt, Human
acccuauauuuugcauaguacca

SEQ ID NO: 1447935 - RNA, 21 nt, Human
acccuaguucuaccucaggca

SEQ ID NO: 1447936 - RNA, 15 nt, Human
acccuaguucuaccu

SEQ ID NO: 1447937 - RNA, 17 nt, Human
acccuagccuugcuugu

SEQ ID NO: 1447938 - RNA, 21 nt, Human
acccucacuggcucuccuggc

SEQ ID NO: 1447939 - RNA, 22 nt, Human
acccucacuggcucuccuggcc

SEQ ID NO: 1447940 - RNA, 19 nt, Human
acccucacuggcucuccug

SEQ ID NO: 1447941 - RNA, 15 nt, Human
acccucacuggcucu

SEQ ID NO: 1447942 - RNA, 15 nt, Human
acccucacacuggga

SEQ ID NO: 1447943 - RNA, 18 nt, Human
acccguucaugggggagg

SEQ ID NO: 1447944 - RNA, 23 nt, Human
acccguucaugggggagggggca

SEQ ID NO: 1447945 - RNA, 17 nt, Human
acccguucaugggggag

SEQ ID NO: 1447946 - RNA, 16 nt, Human
acccguucauggggga

SEQ ID NO: 1447947 - RNA, 21 nt, Human
acccguucaacuuuuccuuug

SEQ ID NO: 1447948 - RNA, 13 nt, Human
acccguucaacuu

SEQ ID NO: 1447949 - RNA, 17 nt, Human
acccguggaggcugcuc

SEQ ID NO: 1447950 - RNA, 15 nt, Human
acccguggaggcugc

SEQ ID NO: 1447951 - RNA, 16 nt, Human
acccuaaauaauaaaa

SEQ ID NO: 1447952 - RNA, 20 nt, Human
acccuaaauaauaaaaauaa

SEQ ID NO: 1447953 - RNA, 16 nt, Human
acccuaaaucuugacu

SEQ ID NO: 1447954 - RNA, 13 nt, Human
acccuaaccaagu

SEQ ID NO: 1447955 - RNA, 14 nt, Human
acccuaaccaaguu

SEQ ID NO: 1447956 - RNA, 15 nt, Human
acccuaaccaaguuc

SEQ ID NO: 1447957 - RNA, 17 nt, Human
acccuaccugugccuga

SEQ ID NO: 1447958 - RNA, 16 nt, Human
acccuaccugugccug

SEQ ID NO: 1447959 - RNA, 13 nt, Human
acccuaccugugc

SEQ ID NO: 1447960 - RNA, 16 nt, Human
acccuaaccaaguucc

SEQ ID NO: 1447961 - RNA, 17 nt, Human
acccuaaccaaguuccu

SEQ ID NO: 1447962 - RNA, 15 nt, Human
acccuagccuugcuu

SEQ ID NO: 1447963 - RNA, 12 nt, Human
acccuagccuug

SEQ ID NO: 1447964 - RNA, 14 nt, Human
acccuacuucuuuu

SEQ ID NO: 1447965 - RNA, 18 nt, Human
acccuacuucuuuugcuc

SEQ ID NO: 1447966 - RNA, 13 nt, Human
acccuagcaaaag

SEQ ID NO: 1447967 - RNA, 22 nt, Human
acccuguacuguucugugucuu

SEQ ID NO: 1447968 - RNA, 20 nt, Human
acccuguacuguucuguguc

SEQ ID NO: 1447969 - RNA, 19 nt, Human
acccuguccaaacugccua

SEQ ID NO: 1447970 - RNA, 15 nt, Human
acccuggugggccaa

SEQ ID NO: 1447971 - RNA, 11 nt, Human
acccuguccuc

SEQ ID NO: 1447972 - RNA, 13 nt, Human
acccugucugccc

SEQ ID NO: 1447973 - RNA, 21 nt, Human
acccugucugccccgcccuca

SEQ ID NO: 1447974 - RNA, 17 nt, Human
acccugggcccugggcu

SEQ ID NO: 1447975 - RNA, 15 nt, Human
acccugggcccuggg

SEQ ID NO: 1447976 - RNA, 14 nt, Human
acccugggcccugg

SEQ ID NO: 1447977 - RNA, 23 nt, Human
acccuggccuagaccagcagaca

SEQ ID NO: 1447978 - RNA, 22 nt, Human
acccuggccgcccccugccccc

SEQ ID NO: 1447979 - RNA, 19 nt, Human
acccuggccgcccccugcc

SEQ ID NO: 1447980 - RNA, 17 nt, Human
acccuggccgcccccug

SEQ ID NO: 1447981 - RNA, 16 nt, Human
acccuggccgcccccu

SEQ ID NO: 1447982 - RNA, 22 nt, Human
acccuggccgaguccaagcugg

SEQ ID NO: 1447983 - RNA, 21 nt, Human
acccuggccgaguccaagcug

SEQ ID NO: 1447984 - RNA, 18 nt, Human
acccuggccgaguccaag

SEQ ID NO: 1447985 - RNA, 19 nt, Human
acccuggccccucucccuu

SEQ ID NO: 1447986 - RNA, 18 nt, Human
acccuggccccucucccu

SEQ ID NO: 1447987 - RNA, 17 nt, Human
acccuggccccucuccc

SEQ ID NO: 1447988 - RNA, 16 nt, Human
acccuggccccucucc

SEQ ID NO: 1447989 - RNA, 15 nt, Human
acccuggcuccuugu

SEQ ID NO: 1447990 - RNA, 22 nt, Human
acccugggcccugggcuggaau

SEQ ID NO: 1447991 - RNA, 20 nt, Human
acccugggcccugggcugga

SEQ ID NO: 1447992 - RNA, 18 nt, Human
acccugggcccugggcug

SEQ ID NO: 1447993 - RNA, 21 nt, Human
acccucagggcaaagccaggu

SEQ ID NO: 1447994 - RNA, 19 nt, Human
acccucagggcaaagccag

SEQ ID NO: 1447995 - RNA, 18 nt, Human
acccucagggcaaagcca

SEQ ID NO: 1447996 - RNA, 20 nt, Human
acccucagaugcacaugagc

SEQ ID NO: 1447997 - RNA, 15 nt, Human
acccuggccccucuc

SEQ ID NO: 1447998 - RNA, 14 nt, Human
acccuggccccucu

SEQ ID NO: 1447999 - RNA, 21 nt, Human
acccuggaggccccaacccug

SEQ ID NO: 1448000 - RNA, 20 nt, Human
acccuggaggcaccuggugg

SEQ ID NO: 1448001 - RNA, 17 nt, Human
acccuggaggcaccugg

SEQ ID NO: 1448002 - RNA, 12 nt, Human
acccuggaggca

SEQ ID NO: 1448003 - RNA, 14 nt, Human
acccuggacccagc

SEQ ID NO: 1448004 - RNA, 18 nt, Human
acccucauacacagaaac

SEQ ID NO: 1448005 - RNA, 13 nt, Human
acccucaugcugu

SEQ ID NO: 1448006 - RNA, 14 nt, Human
acccucaucuuucu

SEQ ID NO: 1448007 - RNA, 13 nt, Human
acccucaucuuuc

SEQ ID NO: 1448008 - RNA, 19 nt, Human
acccucaucuuucuuccaa

SEQ ID NO: 1448009 - RNA, 16 nt, Human
acccucaucuuucuuc

SEQ ID NO: 1448010 - RNA, 12 nt, Human
acccucaugcug

SEQ ID NO: 1448011 - RNA, 21 nt, Human
auacuuuuuuuucuuuaaaaa

SEQ ID NO: 1448012 - RNA, 17 nt, Human
auacuuuuacucugccu

SEQ ID NO: 1448013 - RNA, 20 nt, Human
auacuuuuuacaauuaaaaa

SEQ ID NO: 1448014 - RNA, 13 nt, Human
auacuuuuuacaa

SEQ ID NO: 1448015 - RNA, 19 nt, Human
auacuuuuuaaauguaaag

SEQ ID NO: 1448016 - RNA, 16 nt, Human
auacuuuugcccuuug

SEQ ID NO: 1448017 - RNA, 20 nt, Human
auacuuuuacucugccuaca

SEQ ID NO: 1448018 - RNA, 16 nt, Human
auacuuuuacucugcc

SEQ ID NO: 1448019 - RNA, 15 nt, Human
auacuuuuacucugc

SEQ ID NO: 1448020 - RNA, 21 nt, Human
auacuuuuacaaguaacaaaa

SEQ ID NO: 1448021 - RNA, 20 nt, Human
auacuuuuacaaguaacaaa

SEQ ID NO: 1448022 - RNA, 19 nt, Human
auacuugaacguuuucuaa

SEQ ID NO: 1448023 - RNA, 16 nt, Human
auacuuuuacaaguaa

SEQ ID NO: 1448024 - RNA, 22 nt, Human
auacuugaagggccagagccag

SEQ ID NO: 1448025 - RNA, 21 nt, Human
auacuugaagggccagagcca

SEQ ID NO: 1448026 - RNA, 20 nt, Human
auacuugaagggccagagcc

SEQ ID NO: 1448027 - RNA, 19 nt, Human
auacuugaagggccagagc

SEQ ID NO: 1448028 - RNA, 18 nt, Human
auacuugaagggccagag

SEQ ID NO: 1448029 - RNA, 17 nt, Human
auacuugaagggccaga

SEQ ID NO: 1448030 - RNA, 16 nt, Human
auacuugaagggccag

SEQ ID NO: 1448031 - RNA, 21 nt, Human
auacuugaacguuuucuaauu

SEQ ID NO: 1448032 - RNA, 19 nt, Human
auacuguugcacguguguu

SEQ ID NO: 1448033 - RNA, 15 nt, Human
auacuguugugcgca

SEQ ID NO: 1448034 - RNA, 18 nt, Human
auacuguugcacgugugu

SEQ ID NO: 1448035 - RNA, 15 nt, Human
auacuguugcacgug

SEQ ID NO: 1448036 - RNA, 14 nt, Human
auacuguugcacgu

SEQ ID NO: 1448037 - RNA, 13 nt, Human
auacuguugcacg

SEQ ID NO: 1448038 - RNA, 12 nt, Human
auacuguugcac

SEQ ID NO: 1448039 - RNA, 11 nt, Human
auacuguugca

SEQ ID NO: 1448040 - RNA, 19 nt, Human
auacuguauuuuguauugu

SEQ ID NO: 1448041 - RNA, 11 nt, Human
auacacugugu

SEQ ID NO: 1448042 - RNA, 18 nt, Human
auacacuguguaaauacc

SEQ ID NO: 1448043 - RNA, 17 nt, Human
auacacuguguaaauac

SEQ ID NO: 1448044 - RNA, 24 nt, Human
auacacccaagaugggcaucuuuu

SEQ ID NO: 1448045 - RNA, 17 nt, Human
auacaccacuacauucu

SEQ ID NO: 1448046 - RNA, 18 nt, Human
auacaccacuacauucug

SEQ ID NO: 1448047 - RNA, 22 nt, Human
auaaagacguuuuauaagcauc

SEQ ID NO: 1448048 - RNA, 21 nt, Human
auaaagacguuuuauaagcau

SEQ ID NO: 1448049 - RNA, 20 nt, Human
auaaagacguuuuauaagca

SEQ ID NO: 1448050 - RNA, 16 nt, Human
auaaagacguuuuaua

SEQ ID NO: 1448051 - RNA, 14 nt, Human
auaaagaccacuuu

SEQ ID NO: 1448052 - RNA, 20 nt, Human
auaaaagaugaaagagcagu

SEQ ID NO: 1448053 - RNA, 10 nt, Human
auaaaagaug

SEQ ID NO: 1448054 - RNA, 20 nt, Human
auaaaacaucuuugaaauua

SEQ ID NO: 1448055 - RNA, 24 nt, Human
auaaagacguuuuauaagcaucau

SEQ ID NO: 1448056 - RNA, 21 nt, Human
auaaagaugagugagcaugcc

SEQ ID NO: 1448057 - RNA, 12 nt, Human
auaagugcccuc

SEQ ID NO: 1448058 - RNA, 13 nt, Human
auaagugcuguau

SEQ ID NO: 1448059 - RNA, 14 nt, Human
auaagugcuguaua

SEQ ID NO: 1448060 - RNA, 15 nt, Human
auaagugcuguauaa

SEQ ID NO: 1448061 - RNA, 16 nt, Human
auaagugcuguauaaa

SEQ ID NO: 1448062 - RNA, 13 nt, Human
auaaguaaguuug

SEQ ID NO: 1448063 - RNA, 22 nt, Human
auaaguggacaaauuuugaguu

SEQ ID NO: 1448064 - RNA, 22 nt, Human
auaagugcuguauaaaaucagc

SEQ ID NO: 1448065 - RNA, 17 nt, Human
auaagugcuguauaaaa

SEQ ID NO: 1448066 - RNA, 18 nt, Human
auaagugcuguauaaaau

SEQ ID NO: 1448067 - RNA, 19 nt, Human
auaagugcuguauaaaauc

SEQ ID NO: 1448068 - RNA, 20 nt, Human
auaagugcuguauaaaauca

SEQ ID NO: 1448069 - RNA, 20 nt, Human
auaauguguaguucauguaa

SEQ ID NO: 1448070 - RNA, 23 nt, Human
auaauguguaguucauguaaaua

SEQ ID NO: 1448071 - RNA, 19 nt, Human
auaauguguaguucaugua

SEQ ID NO: 1448072 - RNA, 18 nt, Human
auaauguguaguucaugu

SEQ ID NO: 1448073 - RNA, 15 nt, Human
auacaccacuacauu

SEQ ID NO: 1448074 - RNA, 23 nt, Human
auacaaugcugugcccuaaagug

SEQ ID NO: 1448075 - RNA, 18 nt, Human
auaagcuauuuuucuaac

SEQ ID NO: 1448076 - RNA, 16 nt, Human
auaagcuauuuuucua

SEQ ID NO: 1448077 - RNA, 23 nt, Human
auaagcuauuugauguaauacuu

SEQ ID NO: 1448078 - RNA, 22 nt, Human
auaagcuauuugauguaauacu

SEQ ID NO: 1448079 - RNA, 18 nt, Human
auaagcuauuugauguaa

SEQ ID NO: 1448080 - RNA, 16 nt, Human
auaagcuauuugaugu

SEQ ID NO: 1448081 - RNA, 15 nt, Human
auaagcuauuugaug

SEQ ID NO: 1448082 - RNA, 13 nt, Human
auaagcuauuuga

SEQ ID NO: 1448083 - RNA, 19 nt, Human
auaagguuuuaauuuagua

SEQ ID NO: 1448084 - RNA, 18 nt, Human
auaagcuuaugcuuaaau

SEQ ID NO: 1448085 - RNA, 20 nt, Human
aguuguuagauuaagaaaua

SEQ ID NO: 1448086 - RNA, 21 nt, Human
aguuguucgggccaaggaccu

SEQ ID NO: 1448087 - RNA, 19 nt, Human
aguuguuccuuaagucaga

SEQ ID NO: 1448088 - RNA, 12 nt, Human
aguugaauauug

SEQ ID NO: 1448089 - RNA, 19 nt, Human
aguucuuuuugaaguauuu

SEQ ID NO: 1448090 - RNA, 14 nt, Human
aguugaagcaaauc

SEQ ID NO: 1448091 - RNA, 22 nt, Human
aguucuuuguucauagcccagu

SEQ ID NO: 1448092 - RNA, 21 nt, Human
aguucuuuguucauagcccag

SEQ ID NO: 1448093 - RNA, 16 nt, Human
aguuccagaaaguaaa

SEQ ID NO: 1448094 - RNA, 15 nt, Human
aguuccagaaaguaa

SEQ ID NO: 1448095 - RNA, 20 nt, Human
aguuccacuuauagccucug

SEQ ID NO: 1448096 - RNA, 15 nt, Human
aguuccacugagacc

SEQ ID NO: 1448097 - RNA, 13 nt, Human
aguuccacugaga

SEQ ID NO: 1448098 - RNA, 20 nt, Human
aguuccaagagucuaaagau

SEQ ID NO: 1448099 - RNA, 19 nt, Human
aguucuuuguucauagccc

SEQ ID NO: 1448100 - RNA, 21 nt, Human
aguucuuugggccagacaugc

SEQ ID NO: 1448101 - RNA, 14 nt, Human
aguuccagaagugu

SEQ ID NO: 1448102 - RNA, 18 nt, Human
aguuccagaagugugacu

SEQ ID NO: 1448103 - RNA, 22 nt, Human
aguucauauguaccauguacau

SEQ ID NO: 1448104 - RNA, 18 nt, Human
aguucauauguaccaugu

SEQ ID NO: 1448105 - RNA, 14 nt, Human
agugcucaaggcca

SEQ ID NO: 1448106 - RNA, 16 nt, Human
agugcucaaggccagc

SEQ ID NO: 1448107 - RNA, 11 nt, Human
agugcucccuc

SEQ ID NO: 1448108 - RNA, 17 nt, Human
agugcucauuucaggau

SEQ ID NO: 1448109 - RNA, 17 nt, Human
agugcucccucacaugu

SEQ ID NO: 1448110 - RNA, 14 nt, Human
agugcucccucaca

SEQ ID NO: 1448111 - RNA, 20 nt, Human
aguggcaucaucucagcuca

SEQ ID NO: 1448112 - RNA, 19 nt, Human
aguggcaucaucucagcuc

SEQ ID NO: 1448113 - RNA, 14 nt, Human
agugcucgcuguug

SEQ ID NO: 1448114 - RNA, 19 nt, Human
aguggcccauggcauuuua

SEQ ID NO: 1448115 - RNA, 18 nt, Human
aguggccaagaagcagug

SEQ ID NO: 1448116 - RNA, 11 nt, Human
aguguuucuuu

SEQ ID NO: 1448117 - RNA, 22 nt, Human
aguuaacacacuaccgaaugug

SEQ ID NO: 1448118 - RNA, 16 nt, Human
aguuaacacacuaccg

SEQ ID NO: 1448119 - RNA, 13 nt, Human
aguuaacacacua

SEQ ID NO: 1448120 - RNA, 12 nt, Human
aguuaacacacu

SEQ ID NO: 1448121 - RNA, 12 nt, Human
aguuaaauguag

SEQ ID NO: 1448122 - RNA, 15 nt, Human
aguguuuucucugaa

SEQ ID NO: 1448123 - RNA, 15 nt, Human
aguguuuucugggau

SEQ ID NO: 1448124 - RNA, 13 nt, Human
aguguuuucuggg

SEQ ID NO: 1448125 - RNA, 14 nt, Human
aguguuuucucuga

SEQ ID NO: 1448126 - RNA, 21 nt, Human
aguguuuuaugagaaagccuu

SEQ ID NO: 1448127 - RNA, 18 nt, Human
aguguuuuaugagaaagc

SEQ ID NO: 1448128 - RNA, 19 nt, Human
aguuaacagacaacacguu

SEQ ID NO: 1448129 - RNA, 15 nt, Human
aguuaacuauugcau

SEQ ID NO: 1448130 - RNA, 17 nt, Human
aguuaacuauugcauuu

SEQ ID NO: 1448131 - RNA, 19 nt, Human
aguuaacuauugcauuuau

SEQ ID NO: 1448132 - RNA, 23 nt, Human
aguuaauuuuuccaacuacuaau

SEQ ID NO: 1448133 - RNA, 17 nt, Human
aguuaauuuuuccaacu

SEQ ID NO: 1448134 - RNA, 15 nt, Human
aguuaauuuuuccaa

SEQ ID NO: 1448135 - RNA, 14 nt, Human
aguuaauuuaaagu

SEQ ID NO: 1448136 - RNA, 24 nt, Human
aguuaacuauugcauuuauaugua

SEQ ID NO: 1448137 - RNA, 20 nt, Human
aguuaacuauugcauuuaua

SEQ ID NO: 1448138 - RNA, 23 nt, Human
aguuucugucguuaaaaacagau

SEQ ID NO: 1448139 - RNA, 22 nt, Human
aguuucugucguuaaaaacaga

SEQ ID NO: 1448140 - RNA, 20 nt, Human
aguuucugucguuaaaaaca

SEQ ID NO: 1448141 - RNA, 17 nt, Human
aguuucugggaccucag

SEQ ID NO: 1448142 - RNA, 18 nt, Human
aguuugaugaggcccucc

SEQ ID NO: 1448143 - RNA, 16 nt, Human
aguuugauuaaauucu

SEQ ID NO: 1448144 - RNA, 17 nt, Human
aguuugaugaggcccuc

SEQ ID NO: 1448145 - RNA, 16 nt, Human
aguuugaugaggcccu

SEQ ID NO: 1448146 - RNA, 14 nt, Human
aguuugauuaaauu

SEQ ID NO: 1448147 - RNA, 12 nt, Human
auaaaacaggua

SEQ ID NO: 1448148 - RNA, 16 nt, Human
auaaaaaugaucuaaa

SEQ ID NO: 1448149 - RNA, 12 nt, Human
auaaaaauguuu

SEQ ID NO: 1448150 - RNA, 17 nt, Human
auaaaaaugaucuaaac

SEQ ID NO: 1448151 - RNA, 18 nt, Human
auaaaaagaucacuuucu

SEQ ID NO: 1448152 - RNA, 22 nt, Human
auaaaaagaucacuuucucagu

SEQ ID NO: 1448153 - RNA, 16 nt, Human
auaaaagacagugaaa

SEQ ID NO: 1448154 - RNA, 15 nt, Human
auaaaagacagugaa

SEQ ID NO: 1448155 - RNA, 16 nt, Human
auaaaaaagaucccaa

SEQ ID NO: 1448156 - RNA, 15 nt, Human
auaaaaaagauccca

SEQ ID NO: 1448157 - RNA, 11 nt, Human
auaaaaaagau

SEQ ID NO: 1448158 - RNA, 17 nt, Human
auaaaaaagaucccaaa

SEQ ID NO: 1448159 - RNA, 13 nt, Human
auaaaaaaugguu

SEQ ID NO: 1448160 - RNA, 14 nt, Human
auaaaaagaaaggc

SEQ ID NO: 1448161 - RNA, 14 nt, Human
auaaaaagaucacu

SEQ ID NO: 1448162 - RNA, 13 nt, Human
auaaaaagaauga

SEQ ID NO: 1448163 - RNA, 15 nt, Human
aggggccagaggcuc

SEQ ID NO: 1448164 - RNA, 14 nt, Human
aggggccagaggcu

SEQ ID NO: 1448165 - RNA, 13 nt, Human
aggggccagaggc

SEQ ID NO: 1448166 - RNA, 12 nt, Human
aggggccagagg

SEQ ID NO: 1448167 - RNA, 17 nt, Human
aggggccagaggcucgu

SEQ ID NO: 1448168 - RNA, 14 nt, Human
aguaaacuuuuugu

SEQ ID NO: 1448169 - RNA, 23 nt, Human
aguaaaccacugaaaaaauauau

SEQ ID NO: 1448170 - RNA, 17 nt, Human
aguaaaccacugaaaaa

SEQ ID NO: 1448171 - RNA, 15 nt, Human
aguaaaccacugaaa

SEQ ID NO: 1448172 - RNA, 22 nt, Human
aguaaaauugccauauugcaca

SEQ ID NO: 1448173 - RNA, 23 nt, Human
aguaaaauugccauauugcacau

SEQ ID NO: 1448174 - RNA, 17 nt, Human
aguaaaauugccauauu

SEQ ID NO: 1448175 - RNA, 19 nt, Human
aguaaaauugccauauugc

SEQ ID NO: 1448176 - RNA, 20 nt, Human
aguaaaauugccauauugca

SEQ ID NO: 1448177 - RNA, 21 nt, Human
aguaaaauugccauauugcac

SEQ ID NO: 1448178 - RNA, 14 nt, Human
aguaaaauugccau

SEQ ID NO: 1448179 - RNA, 16 nt, Human
aguaaaauugccauau

SEQ ID NO: 1448180 - RNA, 14 nt, Human
aguaaauaaugcuu

SEQ ID NO: 1448181 - RNA, 18 nt, Human
aguaaagucaaggagaaa

SEQ ID NO: 1448182 - RNA, 16 nt, Human
aguaaagucaaggaga

SEQ ID NO: 1448183 - RNA, 15 nt, Human
aguaaagaauuauuu

SEQ ID NO: 1448184 - RNA, 16 nt, Human
aguaaagaauuauuuu

SEQ ID NO: 1448185 - RNA, 22 nt, Human
aguaaagaacguggucagagua

SEQ ID NO: 1448186 - RNA, 15 nt, Human
aguaaauacaauuuu

SEQ ID NO: 1448187 - RNA, 21 nt, Human
aguaaaugggggugcauuuga

SEQ ID NO: 1448188 - RNA, 19 nt, Human
aguaaaugggggugcauuu

SEQ ID NO: 1448189 - RNA, 20 nt, Human
aguaaaugggggugcauuug

SEQ ID NO: 1448190 - RNA, 13 nt, Human
aguaccugagggu

SEQ ID NO: 1448191 - RNA, 17 nt, Human
aguaacuguuuuuuaag

SEQ ID NO: 1448192 - RNA, 19 nt, Human
aguaacuucuuauggaauu

SEQ ID NO: 1448193 - RNA, 17 nt, Human
aguaacuucuuauggaa

SEQ ID NO: 1448194 - RNA, 23 nt, Human
aguaacuguuuuuuaagucucuc

SEQ ID NO: 1448195 - RNA, 11 nt, Human
aguaacuguuu

SEQ ID NO: 1448196 - RNA, 14 nt, Human
aguaacucaucugu

SEQ ID NO: 1448197 - RNA, 18 nt, Human
aguaacgcgucuuccuga

SEQ ID NO: 1448198 - RNA, 17 nt, Human
aguaacgcgucuuccug

SEQ ID NO: 1448199 - RNA, 16 nt, Human
aguaacgcgucuuccu

SEQ ID NO: 1448200 - RNA, 22 nt, Human
aguaacgcgucuuccugagugg

SEQ ID NO: 1448201 - RNA, 19 nt, Human
aguaacgcgucuuccugag

SEQ ID NO: 1448202 - RNA, 17 nt, Human
aguaacuacaguuaggg

SEQ ID NO: 1448203 - RNA, 19 nt, Human
aguaacuacaguuagggcu

SEQ ID NO: 1448204 - RNA, 20 nt, Human
aguacuccacacugcacaau

SEQ ID NO: 1448205 - RNA, 19 nt, Human
aguacuccacacugcacaa

SEQ ID NO: 1448206 - RNA, 18 nt, Human
aguacuccacacugcaca

SEQ ID NO: 1448207 - RNA, 16 nt, Human
aguacuccacacugca

SEQ ID NO: 1448208 - RNA, 15 nt, Human
aguacuccacacugc

SEQ ID NO: 1448209 - RNA, 14 nt, Human
aguacuccacacug

SEQ ID NO: 1448210 - RNA, 13 nt, Human
aguacuccacacu

SEQ ID NO: 1448211 - RNA, 18 nt, Human
aguacgaaccuacaguuu

SEQ ID NO: 1448212 - RNA, 16 nt, Human
aguacgaaccuacagu

SEQ ID NO: 1448213 - RNA, 19 nt, Human
aguaccuuuuauaucccau

SEQ ID NO: 1448214 - RNA, 18 nt, Human
aguaccugggcaagcugg

SEQ ID NO: 1448215 - RNA, 19 nt, Human
aguaccugggcaagcuggc

SEQ ID NO: 1448216 - RNA, 13 nt, Human
aguaccugggcaa

SEQ ID NO: 1448217 - RNA, 22 nt, Human
aguaccugagggucuguagguu

SEQ ID NO: 1448218 - RNA, 21 nt, Human
aguaccugagggucuguaggu

SEQ ID NO: 1448219 - RNA, 19 nt, Human
aguaccugagggucuguag

SEQ ID NO: 1448220 - RNA, 16 nt, Human
aguaccugagggucug

SEQ ID NO: 1448221 - RNA, 15 nt, Human
aguaccugagggucu

SEQ ID NO: 1448222 - RNA, 14 nt, Human
aguacguugugcau

SEQ ID NO: 1448223 - RNA, 21 nt, Human
aguauauugauaaccuugaaa

SEQ ID NO: 1448224 - RNA, 22 nt, Human
aguauauugauccagaaagaaa

SEQ ID NO: 1448225 - RNA, 14 nt, Human
agugaaugcuggga

SEQ ID NO: 1448226 - RNA, 15 nt, Human
agugaaugcugggac

SEQ ID NO: 1448227 - RNA, 11 nt, Human
agugacagcua

SEQ ID NO: 1448228 - RNA, 13 nt, Human
agugaaugauuca

SEQ ID NO: 1448229 - RNA, 20 nt, Human
agugaauacugcuacagcaa

SEQ ID NO: 1448230 - RNA, 16 nt, Human
agugaauacugcuaca

SEQ ID NO: 1448231 - RNA, 17 nt, Human
agugaauaaaugucuug

SEQ ID NO: 1448232 - RNA, 14 nt, Human
agugaauaaauguc

SEQ ID NO: 1448233 - RNA, 19 nt, Human
agugaaugauucaguguua

SEQ ID NO: 1448234 - RNA, 17 nt, Human
agugaaugauucagugu

SEQ ID NO: 1448235 - RNA, 16 nt, Human
agugaaugauucagug

SEQ ID NO: 1448236 - RNA, 19 nt, Human
agugcgguuuacucacugc

SEQ ID NO: 1448237 - RNA, 16 nt, Human
agugcggguccggcag

SEQ ID NO: 1448238 - RNA, 15 nt, Human
agugcguccacgagc

SEQ ID NO: 1448239 - RNA, 21 nt, Human
agugccuuucaggaucuauuu

SEQ ID NO: 1448240 - RNA, 19 nt, Human
agugccuuucaggaucuau

SEQ ID NO: 1448241 - RNA, 17 nt, Human
agugccuuucaggaucu

SEQ ID NO: 1448242 - RNA, 13 nt, Human
agugccuuucagg

SEQ ID NO: 1448243 - RNA, 19 nt, Human
agugccuuccuguuuuuca

SEQ ID NO: 1448244 - RNA, 16 nt, Human
agugcuacagggucca

SEQ ID NO: 1448245 - RNA, 14 nt, Human
agugcuaaguguga

SEQ ID NO: 1448246 - RNA, 21 nt, Human
agugcuaagguucuaaggccu

SEQ ID NO: 1448247 - RNA, 18 nt, Human
agugcuaagguucuaagg

SEQ ID NO: 1448248 - RNA, 17 nt, Human
agugcuaagguucuaag

SEQ ID NO: 1448249 - RNA, 16 nt, Human
agugcuaagguucuaa

SEQ ID NO: 1448250 - RNA, 13 nt, Human
agugcuaagugug

SEQ ID NO: 1448251 - RNA, 15 nt, Human
agugcuaagguucua

SEQ ID NO: 1448252 - RNA, 14 nt, Human
agugcuaagguucu

SEQ ID NO: 1448253 - RNA, 13 nt, Human
agugcuaagguuc

SEQ ID NO: 1448254 - RNA, 20 nt, Human
aguaucaucagauagcaucu

SEQ ID NO: 1448255 - RNA, 15 nt, Human
aguaucaugcccugu

SEQ ID NO: 1448256 - RNA, 19 nt, Human
aguaucaugcccugugcaa

SEQ ID NO: 1448257 - RNA, 22 nt, Human
agucauuugcugagcauguacu

SEQ ID NO: 1448258 - RNA, 19 nt, Human
agucauuugcugagcaugu

SEQ ID NO: 1448259 - RNA, 22 nt, Human
aguccugugaaugccacugccu

SEQ ID NO: 1448260 - RNA, 21 nt, Human
aguccuuuuuuuccaucuuua

SEQ ID NO: 1448261 - RNA, 16 nt, Human
aguccuuuuuuuccau

SEQ ID NO: 1448262 - RNA, 14 nt, Human
aguccuuggccugc

SEQ ID NO: 1448263 - RNA, 24 nt, Human
aguccuuaaaauguaagauuauag

SEQ ID NO: 1448264 - RNA, 19 nt, Human
agucgauagagcuguauua

SEQ ID NO: 1448265 - RNA, 13 nt, Human
agugaauaaaugu

SEQ ID NO: 1448266 - RNA, 13 nt, Human
agucuguccuuga

SEQ ID NO: 1448267 - RNA, 12 nt, Human
agucuguccuug

SEQ ID NO: 1448268 - RNA, 15 nt, Human
agucuggugaagcuc

SEQ ID NO: 1448269 - RNA, 21 nt, Human
agucuggauaacuuccacagg

SEQ ID NO: 1448270 - RNA, 23 nt, Human
agucuggauaacuuccacagggu

SEQ ID NO: 1448271 - RNA, 20 nt, Human
agucuggauaacuuccacag

SEQ ID NO: 1448272 - RNA, 16 nt, Human
augcauguccuguaaa

SEQ ID NO: 1448273 - RNA, 20 nt, Human
augcaugguuucagcacuag

SEQ ID NO: 1448274 - RNA, 19 nt, Human
augcaugguuucagcacua

SEQ ID NO: 1448275 - RNA, 18 nt, Human
augcaugguuucagcacu

SEQ ID NO: 1448276 - RNA, 17 nt, Human
augcaugguuucagcac

SEQ ID NO: 1448277 - RNA, 16 nt, Human
augcaugguuucagca

SEQ ID NO: 1448278 - RNA, 13 nt, Human
augcaugguuuca

SEQ ID NO: 1448279 - RNA, 22 nt, Human
augcauggugccccaggaccag

SEQ ID NO: 1448280 - RNA, 21 nt, Human
augcauggugccccaggacca

SEQ ID NO: 1448281 - RNA, 17 nt, Human
augcauguccuguaaag

SEQ ID NO: 1448282 - RNA, 14 nt, Human
augcauaaaugcau

SEQ ID NO: 1448283 - RNA, 14 nt, Human
augcauacaaguuu

SEQ ID NO: 1448284 - RNA, 20 nt, Human
augcauggugccccaggacc

SEQ ID NO: 1448285 - RNA, 19 nt, Human
augcauggugccccaggac

SEQ ID NO: 1448286 - RNA, 18 nt, Human
augcauggugccccagga

SEQ ID NO: 1448287 - RNA, 17 nt, Human
augcauggugccccagg

SEQ ID NO: 1448288 - RNA, 16 nt, Human
augcauggugccccag

SEQ ID NO: 1448289 - RNA, 23 nt, Human
augcauggagggcugcccuguac

SEQ ID NO: 1448290 - RNA, 16 nt, Human
augcauggaaauuccc

SEQ ID NO: 1448291 - RNA, 20 nt, Human
augcaucagaaagggagggc

SEQ ID NO: 1448292 - RNA, 18 nt, Human
augcaucagaaagggagg

SEQ ID NO: 1448293 - RNA, 15 nt, Human
augcaucagaaaggg

SEQ ID NO: 1448294 - RNA, 14 nt, Human
augcaucagaaagg

SEQ ID NO: 1448295 - RNA, 16 nt, Human
augcauauuuguuuau

SEQ ID NO: 1448296 - RNA, 17 nt, Human
augcauacacucucaaa

SEQ ID NO: 1448297 - RNA, 12 nt, Human
augcauauuugu

SEQ ID NO: 1448298 - RNA, 24 nt, Human
augcauauuauuuuauguugcaua

SEQ ID NO: 1448299 - RNA, 17 nt, Human
auggagugcaccaaaga

SEQ ID NO: 1448300 - RNA, 20 nt, Human
auggagauugaccuggaugg

SEQ ID NO: 1448301 - RNA, 17 nt, Human
auggagauugaccugga

SEQ ID NO: 1448302 - RNA, 20 nt, Human
auggagauucaguuuucauu

SEQ ID NO: 1448303 - RNA, 18 nt, Human
auggagagcccugggacc

SEQ ID NO: 1448304 - RNA, 15 nt, Human
auggagagcccuggg

SEQ ID NO: 1448305 - RNA, 13 nt, Human
auggagagcccug

SEQ ID NO: 1448306 - RNA, 19 nt, Human
auggagauucaguuuucau

SEQ ID NO: 1448307 - RNA, 16 nt, Human
auggagagcccuggga

SEQ ID NO: 1448308 - RNA, 16 nt, Human
augcuuugaaacagaa

SEQ ID NO: 1448309 - RNA, 19 nt, Human
augcuuugaaauugaaccu

SEQ ID NO: 1448310 - RNA, 21 nt, Human
augcuuugaaauugaaccuuu

SEQ ID NO: 1448311 - RNA, 18 nt, Human
augcuuugaaacagaaaa

SEQ ID NO: 1448312 - RNA, 17 nt, Human
augcuuugaaacagaaa

SEQ ID NO: 1448313 - RNA, 15 nt, Human
augcucuuaauugcc

SEQ ID NO: 1448314 - RNA, 23 nt, Human
augcucuuaauugccaccucuaa

SEQ ID NO: 1448315 - RNA, 19 nt, Human
augcucuuaauugccaccu

SEQ ID NO: 1448316 - RNA, 16 nt, Human
augcucuuaauugcca

SEQ ID NO: 1448317 - RNA, 15 nt, Human
auggaguuucuaagg

SEQ ID NO: 1448318 - RNA, 16 nt, Human
auggaguuucuaaggu

SEQ ID NO: 1448319 - RNA, 14 nt, Human
auggaguuucuaag

SEQ ID NO: 1448320 - RNA, 13 nt, Human
auggaguuucuaa

SEQ ID NO: 1448321 - RNA, 16 nt, Human
auggaguguacaagua

SEQ ID NO: 1448322 - RNA, 22 nt, Human
auggaguggcagcccagccagc

SEQ ID NO: 1448323 - RNA, 20 nt, Human
auggaguggcagcccagcca

SEQ ID NO: 1448324 - RNA, 18 nt, Human
auggaguggcagcccagc

SEQ ID NO: 1448325 - RNA, 17 nt, Human
auggaguggcagcccag

SEQ ID NO: 1448326 - RNA, 21 nt, Human
auggagugcuguuuuguuaua

SEQ ID NO: 1448327 - RNA, 20 nt, Human
auggagugcuguuuuguuau

SEQ ID NO: 1448328 - RNA, 19 nt, Human
auggagugcuguuuuguua

SEQ ID NO: 1448329 - RNA, 18 nt, Human
auggagugcuguuuuguu

SEQ ID NO: 1448330 - RNA, 13 nt, Human
auggagugcuguu

SEQ ID NO: 1448331 - RNA, 12 nt, Human
auggagugcugu

SEQ ID NO: 1448332 - RNA, 20 nt, Human
auggagugcaccaaagagaa

SEQ ID NO: 1448333 - RNA, 19 nt, Human
auggagugcaccaaagaga

SEQ ID NO: 1448334 - RNA, 18 nt, Human
auggagugcaccaaagag

SEQ ID NO: 1448335 - RNA, 23 nt, Human
auggcuuccuggcaauagucaaa

SEQ ID NO: 1448336 - RNA, 17 nt, Human
augggaacaauugaagu

SEQ ID NO: 1448337 - RNA, 20 nt, Human
augggacauuugcucaugga

SEQ ID NO: 1448338 - RNA, 13 nt, Human
augaggcuuucca

SEQ ID NO: 1448339 - RNA, 14 nt, Human
augagggaaaagaa

SEQ ID NO: 1448340 - RNA, 13 nt, Human
augagggaaaaga

SEQ ID NO: 1448341 - RNA, 11 nt, Human
aucuaggauuu

SEQ ID NO: 1448342 - RNA, 18 nt, Human
aucuaggcaacauaguau

SEQ ID NO: 1448343 - RNA, 19 nt, Human
aucuaggauuuuaagggaa

SEQ ID NO: 1448344 - RNA, 21 nt, Human
augagcuuugucuacuucaaa

SEQ ID NO: 1448345 - RNA, 22 nt, Human
augagcuuucugaacagcuggu

SEQ ID NO: 1448346 - RNA, 21 nt, Human
augagcuuucugaacagcugg

SEQ ID NO: 1448347 - RNA, 20 nt, Human
augagcuuucugaacagcug

SEQ ID NO: 1448348 - RNA, 19 nt, Human
augagcuuucugaacagcu

SEQ ID NO: 1448349 - RNA, 18 nt, Human
augagcuuucugaacagc

SEQ ID NO: 1448350 - RNA, 17 nt, Human
augagcuuucugaacag

SEQ ID NO: 1448351 - RNA, 15 nt, Human
augagcuuucugaac

SEQ ID NO: 1448352 - RNA, 14 nt, Human
augagcuuucugaa

SEQ ID NO: 1448353 - RNA, 13 nt, Human
augagcuuucuga

SEQ ID NO: 1448354 - RNA, 12 nt, Human
augagcuuucug

SEQ ID NO: 1448355 - RNA, 16 nt, Human
augagcucuucauguu

SEQ ID NO: 1448356 - RNA, 19 nt, Human
augaggcccuccacaccug

SEQ ID NO: 1448357 - RNA, 20 nt, Human
augaggcccuccacaccugc

SEQ ID NO: 1448358 - RNA, 15 nt, Human
augaggcccuccaca

SEQ ID NO: 1448359 - RNA, 14 nt, Human
augaggcccuccac

SEQ ID NO: 1448360 - RNA, 23 nt, Human
augagcuuucugaacagcuggug

SEQ ID NO: 1448361 - RNA, 15 nt, Human
augaggccacuggag

SEQ ID NO: 1448362 - RNA, 12 nt, Human
augaggccagac

SEQ ID NO: 1448363 - RNA, 13 nt, Human
augaggccagacc

SEQ ID NO: 1448364 - RNA, 14 nt, Human
augaggccagacca

SEQ ID NO: 1448365 - RNA, 21 nt, Human
augaggccauggacucugucc

SEQ ID NO: 1448366 - RNA, 15 nt, Human
augaggccauggacu

SEQ ID NO: 1448367 - RNA, 17 nt, Human
augaggccagaccaugg

SEQ ID NO: 1448368 - RNA, 13 nt, Human
augaagcuguugu

SEQ ID NO: 1448369 - RNA, 23 nt, Human
augaaguaauaugcacacauuuu

SEQ ID NO: 1448370 - RNA, 14 nt, Human
augaaguaauaugc

SEQ ID NO: 1448371 - RNA, 21 nt, Human
augaaguaauaugcacacauu

SEQ ID NO: 1448372 - RNA, 12 nt, Human
augaauacuuug

SEQ ID NO: 1448373 - RNA, 21 nt, Human
augaauacuguauuuuguauu

SEQ ID NO: 1448374 - RNA, 21 nt, Human
augaauacauuuccaaaaugg

SEQ ID NO: 1448375 - RNA, 14 nt, Human
augaauacauuucc

SEQ ID NO: 1448376 - RNA, 20 nt, Human
augaagccuccuuagaaaaa

SEQ ID NO: 1448377 - RNA, 16 nt, Human
augaaacuuuuggaag

SEQ ID NO: 1448378 - RNA, 21 nt, Human
aucaaacccuagccuugcuug

SEQ ID NO: 1448379 - RNA, 20 nt, Human
aucaaacccuagccuugcuu

SEQ ID NO: 1448380 - RNA, 18 nt, Human
aucaaacccuagccuugc

SEQ ID NO: 1448381 - RNA, 17 nt, Human
aucaaacccuagccuug

SEQ ID NO: 1448382 - RNA, 16 nt, Human
aucaaacauuuugaaa

SEQ ID NO: 1448383 - RNA, 15 nt, Human
aucaaacauuuugaa

SEQ ID NO: 1448384 - RNA, 14 nt, Human
aucaaacauuuuga

SEQ ID NO: 1448385 - RNA, 22 nt, Human
aucaaaagggccaaagaaccaa

SEQ ID NO: 1448386 - RNA, 18 nt, Human
aucaaaagggccaaagaa

SEQ ID NO: 1448387 - RNA, 22 nt, Human
aucaaacccuagccuugcuugu

SEQ ID NO: 1448388 - RNA, 18 nt, Human
auauuuuuuucugaaauu

SEQ ID NO: 1448389 - RNA, 16 nt, Human
auauuuuuuucugaaa

SEQ ID NO: 1448390 - RNA, 18 nt, Human
auauuuuuuucuuuucuu

SEQ ID NO: 1448391 - RNA, 14 nt, Human
auauuuuuuucuga

SEQ ID NO: 1448392 - RNA, 21 nt, Human
aucaaaacuuucuuuucugga

SEQ ID NO: 1448393 - RNA, 15 nt, Human
aucaaaacuuucuuu

SEQ ID NO: 1448394 - RNA, 19 nt, Human
aucaaaaaaggcaguuacc

SEQ ID NO: 1448395 - RNA, 23 nt, Human
auauuuuuuuuuaagcucugagc

SEQ ID NO: 1448396 - RNA, 21 nt, Human
auauuuuuuuuuaagcucuga

SEQ ID NO: 1448397 - RNA, 18 nt, Human
auauuuuuuuuuaagcuc

SEQ ID NO: 1448398 - RNA, 19 nt, Human
auauuuuuuucugaaauuu

SEQ ID NO: 1448399 - RNA, 21 nt, Human
aucauccuuuagguaagaagu

SEQ ID NO: 1448400 - RNA, 15 nt, Human
aucauccucuggcuu

SEQ ID NO: 1448401 - RNA, 13 nt, Human
aucauccucuggc

SEQ ID NO: 1448402 - RNA, 20 nt, Human
aucaugacaaagacugagua

SEQ ID NO: 1448403 - RNA, 14 nt, Human
aucaaauacauuua

SEQ ID NO: 1448404 - RNA, 13 nt, Human
aucaaauacauuu

SEQ ID NO: 1448405 - RNA, 12 nt, Human
aucaugcccugu

SEQ ID NO: 1448406 - RNA, 21 nt, Human
aucaugcauguccuguaaagg

SEQ ID NO: 1448407 - RNA, 23 nt, Human
aucaugagugaauaaaugucuug

SEQ ID NO: 1448408 - RNA, 21 nt, Human
aucaucuaccuagauuuaaua

SEQ ID NO: 1448409 - RNA, 22 nt, Human
aucaugccucugaggccagccu

SEQ ID NO: 1448410 - RNA, 20 nt, Human
aucaugccucugaggccagc

SEQ ID NO: 1448411 - RNA, 19 nt, Human
aucaugccucugaggccag

SEQ ID NO: 1448412 - RNA, 17 nt, Human
aucaugccucugaggcc

SEQ ID NO: 1448413 - RNA, 16 nt, Human
aucaugccucugaggc

SEQ ID NO: 1448414 - RNA, 15 nt, Human
aucaugccucugagg

SEQ ID NO: 1448415 - RNA, 14 nt, Human
aucaugccucugag

SEQ ID NO: 1448416 - RNA, 23 nt, Human
aucaugccucugaggccagccug

SEQ ID NO: 1448417 - RNA, 23 nt, Human
auccacuuuaucuugaauaaugu

SEQ ID NO: 1448418 - RNA, 23 nt, Human
auccagccuaacuuacauucuua

SEQ ID NO: 1448419 - RNA, 12 nt, Human
auccagccuggg

SEQ ID NO: 1448420 - RNA, 19 nt, Human
auccagccuggggcugagg

SEQ ID NO: 1448421 - RNA, 12 nt, Human
auccacuuugca

SEQ ID NO: 1448422 - RNA, 22 nt, Human
auccaggcagauccaggacuau

SEQ ID NO: 1448423 - RNA, 17 nt, Human
auccagccuggggucug

SEQ ID NO: 1448424 - RNA, 21 nt, Human
auccagccuggggcugaggcu

SEQ ID NO: 1448425 - RNA, 14 nt, Human
auccaggccggcuu

SEQ ID NO: 1448426 - RNA, 21 nt, Human
auccagggacagaggccccag

SEQ ID NO: 1448427 - RNA, 20 nt, Human
auccagggacagaggcccca

SEQ ID NO: 1448428 - RNA, 19 nt, Human
auccagggacagaggcccc

SEQ ID NO: 1448429 - RNA, 16 nt, Human
auccagggacagaggc

SEQ ID NO: 1448430 - RNA, 14 nt, Human
auccagggacagag

SEQ ID NO: 1448431 - RNA, 13 nt, Human
auccagggacaga

SEQ ID NO: 1448432 - RNA, 12 nt, Human
auccagggacag

SEQ ID NO: 1448433 - RNA, 23 nt, Human
auccaggccggcuugccacaccc

SEQ ID NO: 1448434 - RNA, 15 nt, Human
aucgaaccguuuuga

SEQ ID NO: 1448435 - RNA, 14 nt, Human
aucgaaugaaauua

SEQ ID NO: 1448436 - RNA, 13 nt, Human
aucgaaugaaauu

SEQ ID NO: 1448437 - RNA, 21 nt, Human
aucgacuuguuuuugcacaug

SEQ ID NO: 1448438 - RNA, 20 nt, Human
aucgaaucuacuaauuccac

SEQ ID NO: 1448439 - RNA, 18 nt, Human
aucgaaucuacuaauucc

SEQ ID NO: 1448440 - RNA, 17 nt, Human
auccuuccucacaccag

SEQ ID NO: 1448441 - RNA, 12 nt, Human
auccuugaagau

SEQ ID NO: 1448442 - RNA, 23 nt, Human
auccagggaggcugguccuaugg

SEQ ID NO: 1448443 - RNA, 17 nt, Human
auccagggggcaagagg

SEQ ID NO: 1448444 - RNA, 15 nt, Human
auccccaguaaaauu

SEQ ID NO: 1448445 - RNA, 21 nt, Human
auccccaguaaaauugccaua

SEQ ID NO: 1448446 - RNA, 12 nt, Human
aucccccagaaa

SEQ ID NO: 1448447 - RNA, 20 nt, Human
auccccccaucuugcuuccc

SEQ ID NO: 1448448 - RNA, 17 nt, Human
auccccccaucuugcuu

SEQ ID NO: 1448449 - RNA, 15 nt, Human
auccccccaucuugc

SEQ ID NO: 1448450 - RNA, 17 nt, Human
aucccccagaaaagaaa

SEQ ID NO: 1448451 - RNA, 12 nt, Human
aucccccagccu

SEQ ID NO: 1448452 - RNA, 12 nt, Human
agaacacuuaug

SEQ ID NO: 1448453 - RNA, 16 nt, Human
agaacacuaauucaua

SEQ ID NO: 1448454 - RNA, 19 nt, Human
agaacacuaauucauaauc

SEQ ID NO: 1448455 - RNA, 15 nt, Human
agaacacuaauucau

SEQ ID NO: 1448456 - RNA, 14 nt, Human
agaacacuaauuca

SEQ ID NO: 1448457 - RNA, 11 nt, Human
agaacacuaau

SEQ ID NO: 1448458 - RNA, 17 nt, Human
agaacaccuaugcaaag

SEQ ID NO: 1448459 - RNA, 11 nt, Human
agaacacaguu

SEQ ID NO: 1448460 - RNA, 20 nt, Human
agaacacagcaauuccucag

SEQ ID NO: 1448461 - RNA, 15 nt, Human
agaacacacacacuu

SEQ ID NO: 1448462 - RNA, 14 nt, Human
agaacacacacacu

SEQ ID NO: 1448463 - RNA, 12 nt, Human
agaacacacaca

SEQ ID NO: 1448464 - RNA, 15 nt, Human
agaacaaugugcuau

SEQ ID NO: 1448465 - RNA, 10 nt, Human
agaacaaggc

SEQ ID NO: 1448466 - RNA, 18 nt, Human
agaacagcagacucagcu

SEQ ID NO: 1448467 - RNA, 21 nt, Human
agaacauagacagaagaaaca

SEQ ID NO: 1448468 - RNA, 19 nt, Human
agaacauagacagaagaaa

SEQ ID NO: 1448469 - RNA, 22 nt, Human
agaacagggaaaauaggcagga

SEQ ID NO: 1448470 - RNA, 20 nt, Human
agaacagggaaaauaggcag

SEQ ID NO: 1448471 - RNA, 19 nt, Human
agaacagggaaaauaggca

SEQ ID NO: 1448472 - RNA, 22 nt, Human
agaacaugugagagguuugacu

SEQ ID NO: 1448473 - RNA, 13 nt, Human
agaacaugugaga

SEQ ID NO: 1448474 - RNA, 18 nt, Human
agaacauggccuaagggc

SEQ ID NO: 1448475 - RNA, 20 nt, Human
agaacaucuguauacccucu

SEQ ID NO: 1448476 - RNA, 13 nt, Human
agaacaucccucc

SEQ ID NO: 1448477 - RNA, 17 nt, Human
agaacaucccuccuggg

SEQ ID NO: 1448478 - RNA, 23 nt, Human
agaaucuuuagagaaguauacau

SEQ ID NO: 1448479 - RNA, 14 nt, Human
agaaucuuuagaga

SEQ ID NO: 1448480 - RNA, 12 nt, Human
agaaugagccuc

SEQ ID NO: 1448481 - RNA, 20 nt, Human
agaaucuugguuugccuucc

SEQ ID NO: 1448482 - RNA, 19 nt, Human
agaaucuugguuugccuuc

SEQ ID NO: 1448483 - RNA, 17 nt, Human
agaaucugcaauucaaa

SEQ ID NO: 1448484 - RNA, 18 nt, Human
agaaucuauauuuaacaa

SEQ ID NO: 1448485 - RNA, 17 nt, Human
agaaucgaggugcuguu

SEQ ID NO: 1448486 - RNA, 19 nt, Human
agaaugcacaagaauggau

SEQ ID NO: 1448487 - RNA, 20 nt, Human
agaaugcacaagaauggauc

SEQ ID NO: 1448488 - RNA, 17 nt, Human
agaaugcacaagaaugg

SEQ ID NO: 1448489 - RNA, 16 nt, Human
agaaugcacaagaaug

SEQ ID NO: 1448490 - RNA, 21 nt, Human
agaagggcugcuucccugaag

SEQ ID NO: 1448491 - RNA, 23 nt, Human
agaagggagggcagagcuggugc

SEQ ID NO: 1448492 - RNA, 22 nt, Human
agaagggagggcagagcuggug

SEQ ID NO: 1448493 - RNA, 21 nt, Human
agaagggagggcagagcuggu

SEQ ID NO: 1448494 - RNA, 19 nt, Human
agaagggagggcagagcug

SEQ ID NO: 1448495 - RNA, 16 nt, Human
agaagggagggcagag

SEQ ID NO: 1448496 - RNA, 15 nt, Human
agaagggagggcaga

SEQ ID NO: 1448497 - RNA, 18 nt, Human
agaagaugaaugagcaaa

SEQ ID NO: 1448498 - RNA, 21 nt, Human
agaagucacagggcaguaccu

SEQ ID NO: 1448499 - RNA, 19 nt, Human
agaagucacagggcaguac

SEQ ID NO: 1448500 - RNA, 18 nt, Human
agaagucacagggcagua

SEQ ID NO: 1448501 - RNA, 17 nt, Human
agaagucacagggcagu

SEQ ID NO: 1448502 - RNA, 16 nt, Human
agaagucacagggcag

SEQ ID NO: 1448503 - RNA, 15 nt, Human
agaagucacagggca

SEQ ID NO: 1448504 - RNA, 14 nt, Human
agaagucacagggc

SEQ ID NO: 1448505 - RNA, 13 nt, Human
agaagucucagcu

SEQ ID NO: 1448506 - RNA, 23 nt, Human
agaagucacagggcaguaccuga

SEQ ID NO: 1448507 - RNA, 22 nt, Human
agaaucccuuaacaguuguauu

SEQ ID NO: 1448508 - RNA, 21 nt, Human
agaauccuaggcuccacccca

SEQ ID NO: 1448509 - RNA, 15 nt, Human
agaagucucuuccag

SEQ ID NO: 1448510 - RNA, 22 nt, Human
agaagucucagcuaagcucacg

SEQ ID NO: 1448511 - RNA, 14 nt, Human
agaagucucagcua

SEQ ID NO: 1448512 - RNA, 24 nt, Human
agaagagcgagagaucaaagauga

SEQ ID NO: 1448513 - RNA, 18 nt, Human
agaaccaaaucuggaagc

SEQ ID NO: 1448514 - RNA, 16 nt, Human
agaaccaaaucuggaa

SEQ ID NO: 1448515 - RNA, 13 nt, Human
agaaccaaaucug

SEQ ID NO: 1448516 - RNA, 16 nt, Human
agaaccaaagaagaaa

SEQ ID NO: 1448517 - RNA, 22 nt, Human
agaaccacagggcuauuuuguu

SEQ ID NO: 1448518 - RNA, 19 nt, Human
agaaccaaagaagaaaguc

SEQ ID NO: 1448519 - RNA, 11 nt, Human
agaaccaaaga

SEQ ID NO: 1448520 - RNA, 20 nt, Human
agaaccaguccccccacccu

SEQ ID NO: 1448521 - RNA, 19 nt, Human
agaaccaguccccccaccc

SEQ ID NO: 1448522 - RNA, 16 nt, Human
agaaccagucccccca

SEQ ID NO: 1448523 - RNA, 16 nt, Human
agaaccaggcuacaag

SEQ ID NO: 1448524 - RNA, 21 nt, Human
agaagacugcauuauauuuau

SEQ ID NO: 1448525 - RNA, 20 nt, Human
agagaaucaacauuucucaa

SEQ ID NO: 1448526 - RNA, 15 nt, Human
agagaaucaacauuu

SEQ ID NO: 1448527 - RNA, 12 nt, Human
agagaaucaaca

SEQ ID NO: 1448528 - RNA, 13 nt, Human
agagaauaaauug

SEQ ID NO: 1448529 - RNA, 12 nt, Human
agagaaguugua

SEQ ID NO: 1448530 - RNA, 23 nt, Human
agagaagucacagggcaguaccu

SEQ ID NO: 1448531 - RNA, 20 nt, Human
agagaagucacagggcagua

SEQ ID NO: 1448532 - RNA, 19 nt, Human
agagaagucacagggcagu

SEQ ID NO: 1448533 - RNA, 14 nt, Human
agagaacccagccc

SEQ ID NO: 1448534 - RNA, 13 nt, Human
agagaaccaggcu

SEQ ID NO: 1448535 - RNA, 23 nt, Human
agagaaauaagugcccucuccca

SEQ ID NO: 1448536 - RNA, 14 nt, Human
agagaaauaugaag

SEQ ID NO: 1448537 - RNA, 15 nt, Human
agagaacccagccca

SEQ ID NO: 1448538 - RNA, 18 nt, Human
agagaacccagcccaccc

SEQ ID NO: 1448539 - RNA, 18 nt, Human
agagaaguauacauaagu

SEQ ID NO: 1448540 - RNA, 18 nt, Human
agagaagucacagggcag

SEQ ID NO: 1448541 - RNA, 15 nt, Human
agagaagucacaggg

SEQ ID NO: 1448542 - RNA, 21 nt, Human
agagaaaccagcuuccuucag

SEQ ID NO: 1448543 - RNA, 22 nt, Human
agagaaaccagcuuccuucaga

SEQ ID NO: 1448544 - RNA, 20 nt, Human
agagaaaccagcuuccuuca

SEQ ID NO: 1448545 - RNA, 19 nt, Human
agagaaaccagcuuccuuc

SEQ ID NO: 1448546 - RNA, 18 nt, Human
agagaaaccagcuuccuu

SEQ ID NO: 1448547 - RNA, 17 nt, Human
agagaaaccagcuuccu

SEQ ID NO: 1448548 - RNA, 15 nt, Human
agagaaaccagcuuc

SEQ ID NO: 1448549 - RNA, 14 nt, Human
agagaaaccagcuu

SEQ ID NO: 1448550 - RNA, 13 nt, Human
agagaaaccagcu

SEQ ID NO: 1448551 - RNA, 12 nt, Human
agagaaaccagc

SEQ ID NO: 1448552 - RNA, 16 nt, Human
agagaaacaguuggua

SEQ ID NO: 1448553 - RNA, 13 nt, Human
agagaaacaguug

SEQ ID NO: 1448554 - RNA, 22 nt, Human
agacugacaguuuacagacgcu

SEQ ID NO: 1448555 - RNA, 22 nt, Human
agacugaauagauaugaaagcu

SEQ ID NO: 1448556 - RNA, 21 nt, Human
agacugaauagauaugaaagc

SEQ ID NO: 1448557 - RNA, 18 nt, Human
agacucuuuuccuucccu

SEQ ID NO: 1448558 - RNA, 21 nt, Human
agacucuuuuccuucccuuuu

SEQ ID NO: 1448559 - RNA, 24 nt, Human
agacugaauagauaugaaagcuga

SEQ ID NO: 1448560 - RNA, 20 nt, Human
agagaaaaugcgguuauaaa

SEQ ID NO: 1448561 - RNA, 16 nt, Human
agagccugcaggaucu

SEQ ID NO: 1448562 - RNA, 14 nt, Human
agagccugcaggau

SEQ ID NO: 1448563 - RNA, 13 nt, Human
agagccugaggga

SEQ ID NO: 1448564 - RNA, 14 nt, Human
agagccugagggau

SEQ ID NO: 1448565 - RNA, 14 nt, Human
agagcccagcucca

SEQ ID NO: 1448566 - RNA, 13 nt, Human
agagcccagcucc

SEQ ID NO: 1448567 - RNA, 12 nt, Human
agagcccagcuc

SEQ ID NO: 1448568 - RNA, 23 nt, Human
agagcccacuccaucugguagaa

SEQ ID NO: 1448569 - RNA, 17 nt, Human
agagccugcaggaucuc

SEQ ID NO: 1448570 - RNA, 12 nt, Human
agagaggccauu

SEQ ID NO: 1448571 - RNA, 23 nt, Human
agagaggccauucuuucccaaca

SEQ ID NO: 1448572 - RNA, 22 nt, Human
agagaggccauucuuucccaac

SEQ ID NO: 1448573 - RNA, 20 nt, Human
agaauuuuauacuuucccua

SEQ ID NO: 1448574 - RNA, 18 nt, Human
agaauuuuauacuuuccc

SEQ ID NO: 1448575 - RNA, 19 nt, Human
agacaaaaaacuauaugua

SEQ ID NO: 1448576 - RNA, 21 nt, Human
agaauuuuauacuuucccuac

SEQ ID NO: 1448577 - RNA, 22 nt, Human
agaauuuuauacuuucccuacc

SEQ ID NO: 1448578 - RNA, 17 nt, Human
agacaagccagaacuug

SEQ ID NO: 1448579 - RNA, 17 nt, Human
agacaagccuggccuac

SEQ ID NO: 1448580 - RNA, 16 nt, Human
agacaauugacaacag

SEQ ID NO: 1448581 - RNA, 15 nt, Human
agacaagccagaacu

SEQ ID NO: 1448582 - RNA, 19 nt, Human
agacaaggaaaaaauaaca

SEQ ID NO: 1448583 - RNA, 16 nt, Human
agacuagauggaccug

SEQ ID NO: 1448584 - RNA, 23 nt, Human
agacuagauguaguauuuuuugu

SEQ ID NO: 1448585 - RNA, 19 nt, Human
agacuagauguaguauuuu

SEQ ID NO: 1448586 - RNA, 16 nt, Human
agacuagauguaguau

SEQ ID NO: 1448587 - RNA, 14 nt, Human
agacuagauguagu

SEQ ID NO: 1448588 - RNA, 13 nt, Human
agacuagauguag

SEQ ID NO: 1448589 - RNA, 12 nt, Human
agacuagaugua

SEQ ID NO: 1448590 - RNA, 14 nt, Human
agaccaccccgccu

SEQ ID NO: 1448591 - RNA, 23 nt, Human
agaccaccagggcaucucugggc

SEQ ID NO: 1448592 - RNA, 14 nt, Human
agaccaccagggca

SEQ ID NO: 1448593 - RNA, 11 nt, Human
agaccaccagg

SEQ ID NO: 1448594 - RNA, 17 nt, Human
agacagcuccacccugg

SEQ ID NO: 1448595 - RNA, 19 nt, Human
agacaauugacaacaguua

SEQ ID NO: 1448596 - RNA, 23 nt, Human
agacaauugagguaaguuuuuug

SEQ ID NO: 1448597 - RNA, 24 nt, Human
agaccacgcccguccugccugugg

SEQ ID NO: 1448598 - RNA, 23 nt, Human
agaccacgcccguccugccugug

SEQ ID NO: 1448599 - RNA, 21 nt, Human
agaccacgcccguccugccug

SEQ ID NO: 1448600 - RNA, 20 nt, Human
agaccacgcccguccugccu

SEQ ID NO: 1448601 - RNA, 16 nt, Human
agaccaccccgccugc

SEQ ID NO: 1448602 - RNA, 12 nt, Human
agaccaccucuc

SEQ ID NO: 1448603 - RNA, 19 nt, Human
agaccacgcccguccugcc

SEQ ID NO: 1448604 - RNA, 17 nt, Human
agaccaccucucaauau

SEQ ID NO: 1448605 - RNA, 14 nt, Human
agacaauuuauuau

SEQ ID NO: 1448606 - RNA, 12 nt, Human
agaccauggaca

SEQ ID NO: 1448607 - RNA, 15 nt, Human
agaccacguuucuaa

SEQ ID NO: 1448608 - RNA, 21 nt, Human
agaccauggacacuacaccca

SEQ ID NO: 1448609 - RNA, 22 nt, Human
agaccauggacacuacacccag

SEQ ID NO: 1448610 - RNA, 23 nt, Human
agaccauggacacuacacccagc

SEQ ID NO: 1448611 - RNA, 14 nt, Human
agaccacguuucua

SEQ ID NO: 1448612 - RNA, 14 nt, Human
agaccuuuuuuagg

SEQ ID NO: 1448613 - RNA, 16 nt, Human
agaccuuuuuuaggaa

SEQ ID NO: 1448614 - RNA, 18 nt, Human
agacgaaacauuuguucu

SEQ ID NO: 1448615 - RNA, 21 nt, Human
agcaguggcugguccagggcu

SEQ ID NO: 1448616 - RNA, 19 nt, Human
agcaguggcugguccaggg

SEQ ID NO: 1448617 - RNA, 18 nt, Human
agcaguggcugguccagg

SEQ ID NO: 1448618 - RNA, 17 nt, Human
agcaguggcugguccag

SEQ ID NO: 1448619 - RNA, 16 nt, Human
agcaguggcuggucca

SEQ ID NO: 1448620 - RNA, 13 nt, Human
agcaguggcuggu

SEQ ID NO: 1448621 - RNA, 12 nt, Human
agcaguggcugg

SEQ ID NO: 1448622 - RNA, 11 nt, Human
agcaguggcug

SEQ ID NO: 1448623 - RNA, 22 nt, Human
agcaguggcugguccagggcua

SEQ ID NO: 1448624 - RNA, 19 nt, Human
agcaguggccuuauugcau

SEQ ID NO: 1448625 - RNA, 12 nt, Human
agcaguggccuu

SEQ ID NO: 1448626 - RNA, 22 nt, Human
agcaguggcaggcagaggccca

SEQ ID NO: 1448627 - RNA, 15 nt, Human
agcaguggcaggcag

SEQ ID NO: 1448628 - RNA, 12 nt, Human
agcagugcuuuu

SEQ ID NO: 1448629 - RNA, 19 nt, Human
agcagugauugucuuaaua

SEQ ID NO: 1448630 - RNA, 19 nt, Human
agcagcguuucuaugacac

SEQ ID NO: 1448631 - RNA, 23 nt, Human
agcagccugagcaacucuugauu

SEQ ID NO: 1448632 - RNA, 14 nt, Human
agcagccuggagcc

SEQ ID NO: 1448633 - RNA, 15 nt, Human
agcagccuggagccc

SEQ ID NO: 1448634 - RNA, 16 nt, Human
agcagccuggagcccu

SEQ ID NO: 1448635 - RNA, 19 nt, Human
agcagccuggagcccugga

SEQ ID NO: 1448636 - RNA, 20 nt, Human
agcagccuggagcccuggag

SEQ ID NO: 1448637 - RNA, 19 nt, Human
agcacucgcuagcaguggc

SEQ ID NO: 1448638 - RNA, 20 nt, Human
agcacuagccaaaccucacc

SEQ ID NO: 1448639 - RNA, 19 nt, Human
agcacuagccaaaccucac

SEQ ID NO: 1448640 - RNA, 16 nt, Human
agcacuagccaaaccu

SEQ ID NO: 1448641 - RNA, 13 nt, Human
agcacugccagga

SEQ ID NO: 1448642 - RNA, 12 nt, Human
agcacugccagg

SEQ ID NO: 1448643 - RNA, 14 nt, Human
agcacugccaccag

SEQ ID NO: 1448644 - RNA, 20 nt, Human
agcacagauggccagccccu

SEQ ID NO: 1448645 - RNA, 17 nt, Human
agcacagauggccagcc

SEQ ID NO: 1448646 - RNA, 16 nt, Human
agcacagauggccagc

SEQ ID NO: 1448647 - RNA, 15 nt, Human
agcacagauggccag

SEQ ID NO: 1448648 - RNA, 17 nt, Human
agcacagagagucugga

SEQ ID NO: 1448649 - RNA, 19 nt, Human
agcacagagagucuggaua

SEQ ID NO: 1448650 - RNA, 12 nt, Human
agcacagagagu

SEQ ID NO: 1448651 - RNA, 13 nt, Human
agcaauuucuaau

SEQ ID NO: 1448652 - RNA, 13 nt, Human
agcaauuuaaaug

SEQ ID NO: 1448653 - RNA, 16 nt, Human
agcaauuuaaauguua

SEQ ID NO: 1448654 - RNA, 17 nt, Human
agcaauuuaaauguuau

SEQ ID NO: 1448655 - RNA, 19 nt, Human
agcaauuuaaauguuauga

SEQ ID NO: 1448656 - RNA, 23 nt, Human
agcaucuaaguuauaagacucuc

SEQ ID NO: 1448657 - RNA, 22 nt, Human
agcaucuaaguuauaagacucu

SEQ ID NO: 1448658 - RNA, 20 nt, Human
agcaucuaaguuauaagacu

SEQ ID NO: 1448659 - RNA, 12 nt, Human
agcaucuaaguu

SEQ ID NO: 1448660 - RNA, 23 nt, Human
agcaucggacaagacccccagca

SEQ ID NO: 1448661 - RNA, 22 nt, Human
agcaucggacaagacccccagc

SEQ ID NO: 1448662 - RNA, 16 nt, Human
agcaucuccaagcagc

SEQ ID NO: 1448663 - RNA, 22 nt, Human
agccaagggauggacaucuugu

SEQ ID NO: 1448664 - RNA, 22 nt, Human
agccaagguuuuauaaggcuga

SEQ ID NO: 1448665 - RNA, 23 nt, Human
agccaagggcaacagaucaguaa

SEQ ID NO: 1448666 - RNA, 16 nt, Human
agccaaggggcuucag

SEQ ID NO: 1448667 - RNA, 20 nt, Human
agccaagggauggacaucuu

SEQ ID NO: 1448668 - RNA, 18 nt, Human
agccaagggauggacauc

SEQ ID NO: 1448669 - RNA, 14 nt, Human
agccaagggaugga

SEQ ID NO: 1448670 - RNA, 11 nt, Human
agccaagggau

SEQ ID NO: 1448671 - RNA, 21 nt, Human
agccaagggaaccuguguccg

SEQ ID NO: 1448672 - RNA, 20 nt, Human
agccaagggaaccugugucc

SEQ ID NO: 1448673 - RNA, 19 nt, Human
agccaagggaaccuguguc

SEQ ID NO: 1448674 - RNA, 17 nt, Human
agccaagggaaccugug

SEQ ID NO: 1448675 - RNA, 16 nt, Human
agccaagggaaccugu

SEQ ID NO: 1448676 - RNA, 22 nt, Human
agcaucugggccuuggccugga

SEQ ID NO: 1448677 - RNA, 19 nt, Human
agcaucugggccuuggccu

SEQ ID NO: 1448678 - RNA, 18 nt, Human
agcaucugggccuuggcc

SEQ ID NO: 1448679 - RNA, 13 nt, Human
agcaucugggccu

SEQ ID NO: 1448680 - RNA, 18 nt, Human
agcaucuggcucuaauuc

SEQ ID NO: 1448681 - RNA, 16 nt, Human
agcaucuggcucuaau

SEQ ID NO: 1448682 - RNA, 13 nt, Human
agcaucuggcucu

SEQ ID NO: 1448683 - RNA, 23 nt, Human
agcaucucuaccuucuccccagc

SEQ ID NO: 1448684 - RNA, 22 nt, Human
agcaucucuaccuucuccccag

SEQ ID NO: 1448685 - RNA, 19 nt, Human
agcaucucuaccuucuccc

SEQ ID NO: 1448686 - RNA, 18 nt, Human
agcaucucuaccuucucc

SEQ ID NO: 1448687 - RNA, 17 nt, Human
agcaucucuaccuucuc

SEQ ID NO: 1448688 - RNA, 15 nt, Human
agcaucucuaccuuc

SEQ ID NO: 1448689 - RNA, 14 nt, Human
agcaucucuaccuu

SEQ ID NO: 1448690 - RNA, 17 nt, Human
agcaucuccaagcagcu

SEQ ID NO: 1448691 - RNA, 20 nt, Human
agccaacuaugauuauuaac

SEQ ID NO: 1448692 - RNA, 17 nt, Human
agccaacuaugauuauu

SEQ ID NO: 1448693 - RNA, 17 nt, Human
agccaacuagccccugg

SEQ ID NO: 1448694 - RNA, 16 nt, Human
agccaacuagccccug

SEQ ID NO: 1448695 - RNA, 15 nt, Human
agcaucugucccccu

SEQ ID NO: 1448696 - RNA, 23 nt, Human
agcaucugggccuuggccuggag

SEQ ID NO: 1448697 - RNA, 17 nt, Human
agccaacuauggccugu

SEQ ID NO: 1448698 - RNA, 18 nt, Human
agauucuauaguucuaga

SEQ ID NO: 1448699 - RNA, 16 nt, Human
agauucuauaguucua

SEQ ID NO: 1448700 - RNA, 15 nt, Human
agauucuauaguucu

SEQ ID NO: 1448701 - RNA, 14 nt, Human
agauucuagaugau

SEQ ID NO: 1448702 - RNA, 14 nt, Human
agauucuagaucag

SEQ ID NO: 1448703 - RNA, 12 nt, Human
agauucuagauc

SEQ ID NO: 1448704 - RNA, 11 nt, Human
agauucuagau

SEQ ID NO: 1448705 - RNA, 14 nt, Human
agauucuaaugaug

SEQ ID NO: 1448706 - RNA, 13 nt, Human
agauucuaaugau

SEQ ID NO: 1448707 - RNA, 12 nt, Human
agauucuaacgg

SEQ ID NO: 1448708 - RNA, 10 nt, Human
agauucuaac

SEQ ID NO: 1448709 - RNA, 23 nt, Human
agauucuaaagguccacaggucu

SEQ ID NO: 1448710 - RNA, 13 nt, Human
agauucuaaaggu

SEQ ID NO: 1448711 - RNA, 12 nt, Human
agauucuuuccc

SEQ ID NO: 1448712 - RNA, 21 nt, Human
agauucuauaguucuagacau

SEQ ID NO: 1448713 - RNA, 20 nt, Human
agauucuauaguucuagaca

SEQ ID NO: 1448714 - RNA, 19 nt, Human
agauucuauaguucuagac

SEQ ID NO: 1448715 - RNA, 12 nt, Human
agauucuaaagg

SEQ ID NO: 1448716 - RNA, 21 nt, Human
agauucuaaagauucuauagu

SEQ ID NO: 1448717 - RNA, 18 nt, Human
agauucuaaagauucuau

SEQ ID NO: 1448718 - RNA, 17 nt, Human
agauucuaaagauucua

SEQ ID NO: 1448719 - RNA, 16 nt, Human
agauucuaaagauucu

SEQ ID NO: 1448720 - RNA, 15 nt, Human
agauucuaaagauuc

SEQ ID NO: 1448721 - RNA, 14 nt, Human
agauucuaaagauu

SEQ ID NO: 1448722 - RNA, 16 nt, Human
agauggggucuguaaa

SEQ ID NO: 1448723 - RNA, 18 nt, Human
agauggggucuguaaaau

SEQ ID NO: 1448724 - RNA, 19 nt, Human
agauggggucuguaaaauc

SEQ ID NO: 1448725 - RNA, 17 nt, Human
agaugaauguccugaaa

SEQ ID NO: 1448726 - RNA, 20 nt, Human
agaugaccacuuuuuagaaa

SEQ ID NO: 1448727 - RNA, 16 nt, Human
agaugaaugccgugga

SEQ ID NO: 1448728 - RNA, 19 nt, Human
agaugaaugaagcaaaugu

SEQ ID NO: 1448729 - RNA, 21 nt, Human
agaucugcagggggugugucu

SEQ ID NO: 1448730 - RNA, 23 nt, Human
agaucugauuuguaacccacuga

SEQ ID NO: 1448731 - RNA, 22 nt, Human
agcaaaucaccacaaacuguaa

SEQ ID NO: 1448732 - RNA, 21 nt, Human
agcaaaucaccacaaacugua

SEQ ID NO: 1448733 - RNA, 18 nt, Human
agcaaaucaccacaaacu

SEQ ID NO: 1448734 - RNA, 11 nt, Human
agcaaaucacc

SEQ ID NO: 1448735 - RNA, 22 nt, Human
agcaaaucauuuguuuaaaaag

SEQ ID NO: 1448736 - RNA, 19 nt, Human
agcaaaucauuuguuuaaa

SEQ ID NO: 1448737 - RNA, 23 nt, Human
agcaaaucaccacaaacuguaau

SEQ ID NO: 1448738 - RNA, 17 nt, Human
agcaaaucgaaugaaau

SEQ ID NO: 1448739 - RNA, 15 nt, Human
agcaaaucgaaugaa

SEQ ID NO: 1448740 - RNA, 15 nt, Human
agcaacaauuuauga

SEQ ID NO: 1448741 - RNA, 12 nt, Human
agcaacaauaaa

SEQ ID NO: 1448742 - RNA, 13 nt, Human
agcaacaauaaau

SEQ ID NO: 1448743 - RNA, 18 nt, Human
agcaacaauaaauagaca

SEQ ID NO: 1448744 - RNA, 14 nt, Human
agcaaagcacagag

SEQ ID NO: 1448745 - RNA, 15 nt, Human
agcaaagcacagaga

SEQ ID NO: 1448746 - RNA, 13 nt, Human
agcaaagcacaga

SEQ ID NO: 1448747 - RNA, 12 nt, Human
agcaaagcacag

SEQ ID NO: 1448748 - RNA, 20 nt, Human
agcaaagauaucucaucucu

SEQ ID NO: 1448749 - RNA, 20 nt, Human
agcaaacugcaugcccagag

SEQ ID NO: 1448750 - RNA, 22 nt, Human
agcaaacugcaugcccagagac

SEQ ID NO: 1448751 - RNA, 19 nt, Human
agcaaacugcaugcccaga

SEQ ID NO: 1448752 - RNA, 15 nt, Human
agcaaacugcaugcc

SEQ ID NO: 1448753 - RNA, 17 nt, Human
agcaaacucuuuuccca

SEQ ID NO: 1448754 - RNA, 13 nt, Human
agcaaacucuuuu

SEQ ID NO: 1448755 - RNA, 23 nt, Human
agcaaaauuuuuucucuaggaaa

SEQ ID NO: 1448756 - RNA, 15 nt, Human
agcaaaaucuaccag

SEQ ID NO: 1448757 - RNA, 14 nt, Human
agauugcugaaauu

SEQ ID NO: 1448758 - RNA, 13 nt, Human
agauugcugaaau

SEQ ID NO: 1448759 - RNA, 23 nt, Human
agauugcagaaaauucugugccu

SEQ ID NO: 1448760 - RNA, 21 nt, Human
agauugcagaaaauucugugc

SEQ ID NO: 1448761 - RNA, 20 nt, Human
agauugcagaaaauucugug

SEQ ID NO: 1448762 - RNA, 19 nt, Human
agauugcagaaaauucugu

SEQ ID NO: 1448763 - RNA, 18 nt, Human
agauugcagaaaauucug

SEQ ID NO: 1448764 - RNA, 16 nt, Human
agauugcagaaaauuc

SEQ ID NO: 1448765 - RNA, 16 nt, Human
agauugauuguauugu

SEQ ID NO: 1448766 - RNA, 15 nt, Human
agauugauuguauug

SEQ ID NO: 1448767 - RNA, 14 nt, Human
agauugauuguauu

SEQ ID NO: 1448768 - RNA, 15 nt, Human
agauugacgacaagu

SEQ ID NO: 1448769 - RNA, 17 nt, Human
agauugacgacaagugc

SEQ ID NO: 1448770 - RNA, 18 nt, Human
agauugagcucucugccc

SEQ ID NO: 1448771 - RNA, 17 nt, Human
agauugagcucucugcc

SEQ ID NO: 1448772 - RNA, 15 nt, Human
agauugagagaauuu

SEQ ID NO: 1448773 - RNA, 13 nt, Human
agauugagagaau

SEQ ID NO: 1448774 - RNA, 19 nt, Human
agauugagagaagagacaa

SEQ ID NO: 1448775 - RNA, 18 nt, Human
agauugagagaagagaca

SEQ ID NO: 1448776 - RNA, 17 nt, Human
agauugagauguguuca

SEQ ID NO: 1448777 - RNA, 14 nt, Human
agaguggggguggg

SEQ ID NO: 1448778 - RNA, 18 nt, Human
agagggucugggggcaca

SEQ ID NO: 1448779 - RNA, 16 nt, Human
agauagaaugacaguc

SEQ ID NO: 1448780 - RNA, 15 nt, Human
agauagaaugacagu

SEQ ID NO: 1448781 - RNA, 12 nt, Human
agauagaaugac

SEQ ID NO: 1448782 - RNA, 13 nt, Human
agaguugaaccua

SEQ ID NO: 1448783 - RNA, 12 nt, Human
agaguugaaccu

SEQ ID NO: 1448784 - RNA, 22 nt, Human
agaguucuuuuugaaguauuua

SEQ ID NO: 1448785 - RNA, 21 nt, Human
agaguucuuuuugaaguauuu

SEQ ID NO: 1448786 - RNA, 20 nt, Human
agaguucuuuuugaaguauu

SEQ ID NO: 1448787 - RNA, 14 nt, Human
agauagcugugacu

SEQ ID NO: 1448788 - RNA, 16 nt, Human
agauagcugugacuuc

SEQ ID NO: 1448789 - RNA, 19 nt, Human
agauagcccuguccuggug

SEQ ID NO: 1448790 - RNA, 18 nt, Human
agauagcccuguccuggu

SEQ ID NO: 1448791 - RNA, 20 nt, Human
agauagcccuguccuggugg

SEQ ID NO: 1448792 - RNA, 13 nt, Human
agauauaagugcu

SEQ ID NO: 1448793 - RNA, 15 nt, Human
agauauaagugcugu

SEQ ID NO: 1448794 - RNA, 17 nt, Human
agauagcccuguccugg

SEQ ID NO: 1448795 - RNA, 15 nt, Human
agauagcccuguccu

SEQ ID NO: 1448796 - RNA, 20 nt, Human
agauagauaggucagugcaa

SEQ ID NO: 1448797 - RNA, 18 nt, Human
agauaugaacauauuguu

SEQ ID NO: 1448798 - RNA, 22 nt, Human
agauaucuuggacaaaucacau

SEQ ID NO: 1448799 - RNA, 21 nt, Human
agauaucuuggacaaaucaca

SEQ ID NO: 1448800 - RNA, 19 nt, Human
agauaucuuggacaaauca

SEQ ID NO: 1448801 - RNA, 14 nt, Human
agauauauauucau

SEQ ID NO: 1448802 - RNA, 16 nt, Human
agauauaagugcugua

SEQ ID NO: 1448803 - RNA, 17 nt, Human
agauauaagugcuguau

SEQ ID NO: 1448804 - RNA, 18 nt, Human
agauauaagugcuguaua

SEQ ID NO: 1448805 - RNA, 20 nt, Human
agauauaagugcuguauaaa

SEQ ID NO: 1448806 - RNA, 21 nt, Human
agauauaagugcuguauaaaa

SEQ ID NO: 1448807 - RNA, 22 nt, Human
agauauaagugcuguauaaaau

SEQ ID NO: 1448808 - RNA, 23 nt, Human
agauauaagugcuguauaaaauc

SEQ ID NO: 1448809 - RNA, 16 nt, Human
agauaugauucaaaug

SEQ ID NO: 1448810 - RNA, 15 nt, Human
agauaugauucaaau

SEQ ID NO: 1448811 - RNA, 15 nt, Human
agauaugaaagcuga

SEQ ID NO: 1448812 - RNA, 14 nt, Human
agauaugauucaaa

SEQ ID NO: 1448813 - RNA, 23 nt, Human
agccuuucucucuuuauacagcu

SEQ ID NO: 1448814 - RNA, 15 nt, Human
agccuuucucucuuu

SEQ ID NO: 1448815 - RNA, 23 nt, Human
agccuuuuuuccccagacuuguu

SEQ ID NO: 1448816 - RNA, 23 nt, Human
agcgaaaaaaucagguggcuuuu

SEQ ID NO: 1448817 - RNA, 21 nt, Human
agccuuuuuuccccagacuug

SEQ ID NO: 1448818 - RNA, 20 nt, Human
agccuuuuuuccccagacuu

SEQ ID NO: 1448819 - RNA, 19 nt, Human
agccuuuuuuccccagacu

SEQ ID NO: 1448820 - RNA, 17 nt, Human
agccuuuuuuccccaga

SEQ ID NO: 1448821 - RNA, 16 nt, Human
agccuuuuuuccccag

SEQ ID NO: 1448822 - RNA, 18 nt, Human
agccuuuuuguuucaaug

SEQ ID NO: 1448823 - RNA, 21 nt, Human
agccuuuuuguauaaaauaga

SEQ ID NO: 1448824 - RNA, 17 nt, Human
agccuggccuccugccu

SEQ ID NO: 1448825 - RNA, 16 nt, Human
agccuggccuccugcc

SEQ ID NO: 1448826 - RNA, 15 nt, Human
agccuggccuccugc

SEQ ID NO: 1448827 - RNA, 14 nt, Human
agccuggccuccug

SEQ ID NO: 1448828 - RNA, 13 nt, Human
agccuggccuccu

SEQ ID NO: 1448829 - RNA, 11 nt, Human
agccuggccuc

SEQ ID NO: 1448830 - RNA, 17 nt, Human
agccuggccccaugguc

SEQ ID NO: 1448831 - RNA, 16 nt, Human
agccuggccccauggu

SEQ ID NO: 1448832 - RNA, 22 nt, Human
agccuggccagacacaggcccu

SEQ ID NO: 1448833 - RNA, 21 nt, Human
agccuggccagacacaggccc

SEQ ID NO: 1448834 - RNA, 18 nt, Human
agccuggccagacacagg

SEQ ID NO: 1448835 - RNA, 16 nt, Human
agccuggccagacaca

SEQ ID NO: 1448836 - RNA, 15 nt, Human
agccuggccagacac

SEQ ID NO: 1448837 - RNA, 14 nt, Human
agccuggccagaca

SEQ ID NO: 1448838 - RNA, 20 nt, Human
agccuggccuccugccucua

SEQ ID NO: 1448839 - RNA, 19 nt, Human
agccuggcuauguccuaau

SEQ ID NO: 1448840 - RNA, 19 nt, Human
agccuggccuccugccucu

SEQ ID NO: 1448841 - RNA, 18 nt, Human
agccuggccuccugccuc

SEQ ID NO: 1448842 - RNA, 13 nt, Human
agccuggccagac

SEQ ID NO: 1448843 - RNA, 12 nt, Human
agccuggccaga

SEQ ID NO: 1448844 - RNA, 17 nt, Human
agccuggagcccuggag

SEQ ID NO: 1448845 - RNA, 18 nt, Human
agccuggagcccuggaga

SEQ ID NO: 1448846 - RNA, 22 nt, Human
agccuggaccucugacagcagc

SEQ ID NO: 1448847 - RNA, 24 nt, Human
agccuggaccucugacagcagcau

SEQ ID NO: 1448848 - RNA, 21 nt, Human
agccuggaccucugacagcag

SEQ ID NO: 1448849 - RNA, 19 nt, Human
agccuggaccucugacagc

SEQ ID NO: 1448850 - RNA, 18 nt, Human
agccuggaccucugacag

SEQ ID NO: 1448851 - RNA, 17 nt, Human
agccuggaccucugaca

SEQ ID NO: 1448852 - RNA, 16 nt, Human
agccuggaccucugac

SEQ ID NO: 1448853 - RNA, 15 nt, Human
agccuggaccucuga

SEQ ID NO: 1448854 - RNA, 10 nt, Human
agccuggacc

SEQ ID NO: 1448855 - RNA, 17 nt, Human
agccugcugccugcuuu

SEQ ID NO: 1448856 - RNA, 18 nt, Human
agcuaagggguggggcug

SEQ ID NO: 1448857 - RNA, 19 nt, Human
agcuaagguuuagauaaau

SEQ ID NO: 1448858 - RNA, 19 nt, Human
agcuaagggguggggcugc

SEQ ID NO: 1448859 - RNA, 20 nt, Human
agcuaaggcucuaugagucu

SEQ ID NO: 1448860 - RNA, 18 nt, Human
agcuaaggcucuaugagu

SEQ ID NO: 1448861 - RNA, 15 nt, Human
agcuaaggcucuaug

SEQ ID NO: 1448862 - RNA, 13 nt, Human
agcuaaggcucua

SEQ ID NO: 1448863 - RNA, 10 nt, Human
agcuaaggcu

SEQ ID NO: 1448864 - RNA, 23 nt, Human
agcuaagcucacguccugagaaa

SEQ ID NO: 1448865 - RNA, 18 nt, Human
agcuaagcuaggaaugaa

SEQ ID NO: 1448866 - RNA, 17 nt, Human
agcuaagcuaggaauga

SEQ ID NO: 1448867 - RNA, 17 nt, Human
agcuaagaaccuggaac

SEQ ID NO: 1448868 - RNA, 16 nt, Human
agcuaagaaccuggaa

SEQ ID NO: 1448869 - RNA, 14 nt, Human
agcuaagaaccugg

SEQ ID NO: 1448870 - RNA, 19 nt, Human
agcucacaaggcagcaagg

SEQ ID NO: 1448871 - RNA, 20 nt, Human
agcucacaaggcagcaaggc

SEQ ID NO: 1448872 - RNA, 18 nt, Human
agcucacaaggcagcaag

SEQ ID NO: 1448873 - RNA, 14 nt, Human
agcuacagagaaac

SEQ ID NO: 1448874 - RNA, 13 nt, Human
agcuacagagaaa

SEQ ID NO: 1448875 - RNA, 13 nt, Human
agcuacaaaugca

SEQ ID NO: 1448876 - RNA, 13 nt, Human
agcuaagaaccug

SEQ ID NO: 1448877 - RNA, 12 nt, Human
agcuaagaaccu

SEQ ID NO: 1448878 - RNA, 23 nt, Human
agcuaacagggaaggcaggcagg

SEQ ID NO: 1448879 - RNA, 21 nt, Human
agcuaacagggaaggcaggca

SEQ ID NO: 1448880 - RNA, 20 nt, Human
agcuaacagggaaggcaggc

SEQ ID NO: 1448881 - RNA, 19 nt, Human
agcuaacagggaaggcagg

SEQ ID NO: 1448882 - RNA, 18 nt, Human
agcuaacagggaaggcag

SEQ ID NO: 1448883 - RNA, 16 nt, Human
agcuaacagggaaggc

SEQ ID NO: 1448884 - RNA, 13 nt, Human
agcuaacagggaa

SEQ ID NO: 1448885 - RNA, 20 nt, Human
agcuaaauaccucaaucagu

SEQ ID NO: 1448886 - RNA, 13 nt, Human
agcuaaauccuuu

SEQ ID NO: 1448887 - RNA, 18 nt, Human
agcuaaacggauuccaaa

SEQ ID NO: 1448888 - RNA, 23 nt, Human
agcgauucccucucccaggcccc

SEQ ID NO: 1448889 - RNA, 24 nt, Human
agcgauucuccugccucagccucc

SEQ ID NO: 1448890 - RNA, 19 nt, Human
agcugacuuggcuggugug

SEQ ID NO: 1448891 - RNA, 22 nt, Human
agcugacuuggcugguguggua

SEQ ID NO: 1448892 - RNA, 18 nt, Human
agcugacuuggcuggugu

SEQ ID NO: 1448893 - RNA, 17 nt, Human
agcugacuuggcuggug

SEQ ID NO: 1448894 - RNA, 13 nt, Human
agcuggugcggcu

SEQ ID NO: 1448895 - RNA, 18 nt, Human
agcugguguagcuacaga

SEQ ID NO: 1448896 - RNA, 17 nt, Human
agcugguguagcuacag

SEQ ID NO: 1448897 - RNA, 14 nt, Human
agcugguguagcua

SEQ ID NO: 1448898 - RNA, 13 nt, Human
agcugguguagcu

SEQ ID NO: 1448899 - RNA, 17 nt, Human
agcuggugcggcuggcc

SEQ ID NO: 1448900 - RNA, 19 nt, Human
agcuggugcggcuggccau

SEQ ID NO: 1448901 - RNA, 15 nt, Human
agcugguuagaaaug

SEQ ID NO: 1448902 - RNA, 23 nt, Human
agcugguguagcuacagagaaac

SEQ ID NO: 1448903 - RNA, 22 nt, Human
agcugguguagcuacagagaaa

SEQ ID NO: 1448904 - RNA, 21 nt, Human
agcugguguagcuacagagaa

SEQ ID NO: 1448905 - RNA, 20 nt, Human
agcugguguagcuacagaga

SEQ ID NO: 1448906 - RNA, 19 nt, Human
agcugguguagcuacagag

SEQ ID NO: 1448907 - RNA, 24 nt, Human
agcuccucuccccagcccagagac

SEQ ID NO: 1448908 - RNA, 23 nt, Human
agcuccucuccccagcccagaga

SEQ ID NO: 1448909 - RNA, 22 nt, Human
agcuccucuccccagcccagag

SEQ ID NO: 1448910 - RNA, 21 nt, Human
agcuccucuccccagcccaga

SEQ ID NO: 1448911 - RNA, 20 nt, Human
agcuccucuccccagcccag

SEQ ID NO: 1448912 - RNA, 19 nt, Human
agcuccucuccccagccca

SEQ ID NO: 1448913 - RNA, 18 nt, Human
agcuccucuccccagccc

SEQ ID NO: 1448914 - RNA, 17 nt, Human
agcuccucuccccagcc

SEQ ID NO: 1448915 - RNA, 16 nt, Human
agcuccucuccccagc

SEQ ID NO: 1448916 - RNA, 18 nt, Human
agcucuuguugagccgug

SEQ ID NO: 1448917 - RNA, 21 nt, Human
agcucuugugaggaaagucau

SEQ ID NO: 1448918 - RNA, 12 nt, Human
agcucuugugag

SEQ ID NO: 1448919 - RNA, 13 nt, Human
agcucuugugagg

SEQ ID NO: 1448920 - RNA, 16 nt, Human
agcucuugugaggaaa

SEQ ID NO: 1448921 - RNA, 17 nt, Human
agcucuugugaggaaag

SEQ ID NO: 1448922 - RNA, 15 nt, Human
agcucuuggagcugu

SEQ ID NO: 1448923 - RNA, 13 nt, Human
agcugacucacac

SEQ ID NO: 1448924 - RNA, 23 nt, Human
agcugacuaaacuuuuuuucugu

SEQ ID NO: 1448925 - RNA, 16 nt, Human
agcugacuuggcuggu

SEQ ID NO: 1448926 - RNA, 14 nt, Human
agcugacuuggcug

SEQ ID NO: 1448927 - RNA, 16 nt, Human
aggaagguggauggcc

SEQ ID NO: 1448928 - RNA, 15 nt, Human
aggaagguggauggc

SEQ ID NO: 1448929 - RNA, 20 nt, Human
aggaagaauggugugggaga

SEQ ID NO: 1448930 - RNA, 14 nt, Human
aggaacuuccaggu

SEQ ID NO: 1448931 - RNA, 23 nt, Human
agcuuuuuucucugauacagaaa

SEQ ID NO: 1448932 - RNA, 22 nt, Human
agcuuuuuucucugauacagaa

SEQ ID NO: 1448933 - RNA, 20 nt, Human
agcuuuuuucucugauacag

SEQ ID NO: 1448934 - RNA, 19 nt, Human
agcuuuuuucucugauaca

SEQ ID NO: 1448935 - RNA, 13 nt, Human
aggaaaaacaggu

SEQ ID NO: 1448936 - RNA, 18 nt, Human
aggaaaaaauaacaauga

SEQ ID NO: 1448937 - RNA, 16 nt, Human
agcuguauugucugaa

SEQ ID NO: 1448938 - RNA, 17 nt, Human
agcugguuagaaaugca

SEQ ID NO: 1448939 - RNA, 16 nt, Human
agcugucaaggcucag

SEQ ID NO: 1448940 - RNA, 18 nt, Human
agcuguaugauucccagc

SEQ ID NO: 1448941 - RNA, 17 nt, Human
agcuguaugauucccag

SEQ ID NO: 1448942 - RNA, 14 nt, Human
agggacaugcuuag

SEQ ID NO: 1448943 - RNA, 19 nt, Human
agggacaugcuuagcaguc

SEQ ID NO: 1448944 - RNA, 14 nt, Human
aggcuuacacccac

SEQ ID NO: 1448945 - RNA, 14 nt, Human
aggcuuaaacccau

SEQ ID NO: 1448946 - RNA, 20 nt, Human
aggcuguuaaauacaggaaa

SEQ ID NO: 1448947 - RNA, 23 nt, Human
aggcuguuaaauacaggaaacag

SEQ ID NO: 1448948 - RNA, 22 nt, Human
aggcugcauugaaaagagcuga

SEQ ID NO: 1448949 - RNA, 21 nt, Human
aggcugcauugaaaagagcug

SEQ ID NO: 1448950 - RNA, 20 nt, Human
aggcugcauugaaaagagcu

SEQ ID NO: 1448951 - RNA, 19 nt, Human
aggcuaggguggggagaga

SEQ ID NO: 1448952 - RNA, 16 nt, Human
aggcuaggguggggag

SEQ ID NO: 1448953 - RNA, 15 nt, Human
aggcuagggugggga

SEQ ID NO: 1448954 - RNA, 14 nt, Human
aggcuagggugggg

SEQ ID NO: 1448955 - RNA, 22 nt, Human
aggcucuuagcagcuuccagau

SEQ ID NO: 1448956 - RNA, 19 nt, Human
aggcucuuagcagcuucca

SEQ ID NO: 1448957 - RNA, 15 nt, Human
aggcucugucuggaa

SEQ ID NO: 1448958 - RNA, 23 nt, Human
aggcuagguggguugaaagccaa

SEQ ID NO: 1448959 - RNA, 21 nt, Human
aggcuagguggguugaaagcc

SEQ ID NO: 1448960 - RNA, 22 nt, Human
aggcucuggagcccacuguacu

SEQ ID NO: 1448961 - RNA, 22 nt, Human
agggaugacuaaaauauuuauu

SEQ ID NO: 1448962 - RNA, 15 nt, Human
agggaugacuaaaau

SEQ ID NO: 1448963 - RNA, 16 nt, Human
agggauggacaucuug

SEQ ID NO: 1448964 - RNA, 17 nt, Human
agggauggacaucuugu

SEQ ID NO: 1448965 - RNA, 15 nt, Human
agggauggacaucuu

SEQ ID NO: 1448966 - RNA, 24 nt, Human
agggcucaaucucugggggcugag

SEQ ID NO: 1448967 - RNA, 24 nt, Human
agggcuagugacuugugucccaug

SEQ ID NO: 1448968 - RNA, 22 nt, Human
agggcuagugacuuguguccca

SEQ ID NO: 1448969 - RNA, 23 nt, Human
agggcuacccugagcugaggcag

SEQ ID NO: 1448970 - RNA, 22 nt, Human
agggcuacccugagcugaggca

SEQ ID NO: 1448971 - RNA, 21 nt, Human
agggcuacccugagcugaggc

SEQ ID NO: 1448972 - RNA, 20 nt, Human
agggcuacccugagcugagg

SEQ ID NO: 1448973 - RNA, 18 nt, Human
agggcuacccugagcuga

SEQ ID NO: 1448974 - RNA, 17 nt, Human
agggcuacccugagcug

SEQ ID NO: 1448975 - RNA, 20 nt, Human
agggauucugguuccagggu

SEQ ID NO: 1448976 - RNA, 15 nt, Human
agggcuacccugagc

SEQ ID NO: 1448977 - RNA, 19 nt, Human
agggcguggaaaggggcag

SEQ ID NO: 1448978 - RNA, 16 nt, Human
agggacugaccagcag

SEQ ID NO: 1448979 - RNA, 17 nt, Human
agggacugagaaauuua

SEQ ID NO: 1448980 - RNA, 15 nt, Human
agggacugagaaauu

SEQ ID NO: 1448981 - RNA, 13 nt, Human
agggacugagaaa

SEQ ID NO: 1448982 - RNA, 14 nt, Human
agggacugagaaau

SEQ ID NO: 1448983 - RNA, 18 nt, Human
aggcacuuggcagccuug

SEQ ID NO: 1448984 - RNA, 17 nt, Human
aggcacuuggcagccuu

SEQ ID NO: 1448985 - RNA, 15 nt, Human
aggcacuuggcagcc

SEQ ID NO: 1448986 - RNA, 19 nt, Human
aggcacuugagggggaagg

SEQ ID NO: 1448987 - RNA, 16 nt, Human
aggcagauccaggacu

SEQ ID NO: 1448988 - RNA, 15 nt, Human
aggcagauccaggac

SEQ ID NO: 1448989 - RNA, 11 nt, Human
aggcagaucca

SEQ ID NO: 1448990 - RNA, 22 nt, Human
aggcagaggccugggcugggaa

SEQ ID NO: 1448991 - RNA, 22 nt, Human
aggcagaacucaucuagguaaa

SEQ ID NO: 1448992 - RNA, 15 nt, Human
aggccagggcagagu

SEQ ID NO: 1448993 - RNA, 13 nt, Human
aggccagggcaga

SEQ ID NO: 1448994 - RNA, 21 nt, Human
aggcauucuggaccucugggu

SEQ ID NO: 1448995 - RNA, 20 nt, Human
aggcauucuggaccucuggg

SEQ ID NO: 1448996 - RNA, 16 nt, Human
aggcauucuggaccuc

SEQ ID NO: 1448997 - RNA, 15 nt, Human
aggcauucuggaccu

SEQ ID NO: 1448998 - RNA, 22 nt, Human
aggcauuaaauuuuagcaaaga

SEQ ID NO: 1448999 - RNA, 14 nt, Human
aggcauuaaauuuu

SEQ ID NO: 1449000 - RNA, 19 nt, Human
aggcaucgucaugcacagu

SEQ ID NO: 1449001 - RNA, 23 nt, Human
aggcaucgucaugcacaguauuu

SEQ ID NO: 1449002 - RNA, 13 nt, Human
aggcagccagcca

SEQ ID NO: 1449003 - RNA, 20 nt, Human
aggcagccagcaucugggcc

SEQ ID NO: 1449004 - RNA, 19 nt, Human
aggcaucggggagccggga

SEQ ID NO: 1449005 - RNA, 16 nt, Human
aggcagccagcaucug

SEQ ID NO: 1449006 - RNA, 15 nt, Human
aggcagccagcaucu

SEQ ID NO: 1449007 - RNA, 17 nt, Human
aggcagauccaggacua

SEQ ID NO: 1449008 - RNA, 23 nt, Human
aggcaugugucaccaugcccagc

SEQ ID NO: 1449009 - RNA, 20 nt, Human
aggaugggcaugguguucuc

SEQ ID NO: 1449010 - RNA, 18 nt, Human
aggauggcuuugaaugcg

SEQ ID NO: 1449011 - RNA, 18 nt, Human
aggauggucuuacagcag

SEQ ID NO: 1449012 - RNA, 14 nt, Human
aggaugugauauau

SEQ ID NO: 1449013 - RNA, 19 nt, Human
aggauggucuuacagcagg

SEQ ID NO: 1449014 - RNA, 13 nt, Human
aggauguguuugc

SEQ ID NO: 1449015 - RNA, 21 nt, Human
aggaugugucccaucuaggga

SEQ ID NO: 1449016 - RNA, 20 nt, Human
aggauguggaaaccuccuuc

SEQ ID NO: 1449017 - RNA, 20 nt, Human
aggaugugauuguggaaugg

SEQ ID NO: 1449018 - RNA, 21 nt, Human
aggaugugauauauaagugua

SEQ ID NO: 1449019 - RNA, 18 nt, Human
aggaugugauauauaagu

SEQ ID NO: 1449020 - RNA, 19 nt, Human
aggauguguuugcuuucug

SEQ ID NO: 1449021 - RNA, 18 nt, Human
aggauguguuugcuuucu

SEQ ID NO: 1449022 - RNA, 17 nt, Human
aggauguguuugcuuuc

SEQ ID NO: 1449023 - RNA, 13 nt, Human
aggagggcaggca

SEQ ID NO: 1449024 - RNA, 15 nt, Human
aggagggaggugcuu

SEQ ID NO: 1449025 - RNA, 16 nt, Human
aggagggucggugccu

SEQ ID NO: 1449026 - RNA, 15 nt, Human
aggagggcaggcauc

SEQ ID NO: 1449027 - RNA, 15 nt, Human
aggagggugggaagg

SEQ ID NO: 1449028 - RNA, 14 nt, Human
aggagggugggaag

SEQ ID NO: 1449029 - RNA, 17 nt, Human
aggagggucggugccuu

SEQ ID NO: 1449030 - RNA, 21 nt, Human
aggagggucggugccuucaag

SEQ ID NO: 1449031 - RNA, 15 nt, Human
aggaaguagaaacaa

SEQ ID NO: 1449032 - RNA, 14 nt, Human
aggaaguagaaaca

SEQ ID NO: 1449033 - RNA, 18 nt, Human
aggagacaguucaagaaa

SEQ ID NO: 1449034 - RNA, 20 nt, Human
aggagacagguuagcugcuc

SEQ ID NO: 1449035 - RNA, 19 nt, Human
aggaguaacaauacaaaug

SEQ ID NO: 1449036 - RNA, 22 nt, Human
aggaggugucucaggcugccug

SEQ ID NO: 1449037 - RNA, 23 nt, Human
aggaggugucucaggcugccuga

SEQ ID NO: 1449038 - RNA, 21 nt, Human
aggaggugucucaggcugccu

SEQ ID NO: 1449039 - RNA, 20 nt, Human
aggaggugucucaggcugcc

SEQ ID NO: 1449040 - RNA, 19 nt, Human
aggaggugucucaggcugc

SEQ ID NO: 1449041 - RNA, 15 nt, Human
aggaggugucucagg

SEQ ID NO: 1449042 - RNA, 23 nt, Human
aggagucugagguccugagcacu

SEQ ID NO: 1449043 - RNA, 22 nt, Human
aggagucugagguccugagcac

SEQ ID NO: 1449044 - RNA, 14 nt, Human
aggaguagcugagc

SEQ ID NO: 1449045 - RNA, 13 nt, Human
aggaguagcugag

SEQ ID NO: 1449046 - RNA, 11 nt, Human
aggaguaacaa

SEQ ID NO: 1449047 - RNA, 14 nt, Human
aggaggugccacug

SEQ ID NO: 1449048 - RNA, 14 nt, Human
aggaguuuauguuc

SEQ ID NO: 1449049 - RNA, 23 nt, Human
aggaguuuauguuccauuaaacg

SEQ ID NO: 1449050 - RNA, 18 nt, Human
aggaguuucguuuucaaa

SEQ ID NO: 1449051 - RNA, 14 nt, Human
cacccaacgcucca

SEQ ID NO: 1449052 - RNA, 22 nt, Human
cacccaaagagguauuuaucuu

SEQ ID NO: 1449053 - RNA, 24 nt, Human
caccauuuggcaucccugggccuu

SEQ ID NO: 1449054 - RNA, 23 nt, Human
caccauuuggcaucccugggccu

SEQ ID NO: 1449055 - RNA, 22 nt, Human
caccauuuggcaucccugggcc

SEQ ID NO: 1449056 - RNA, 21 nt, Human
caccauuuggcaucccugggc

SEQ ID NO: 1449057 - RNA, 20 nt, Human
caccauuuggcaucccuggg

SEQ ID NO: 1449058 - RNA, 19 nt, Human
caccauuuggcaucccugg

SEQ ID NO: 1449059 - RNA, 18 nt, Human
caccauuuggcaucccug

SEQ ID NO: 1449060 - RNA, 17 nt, Human
caccauuuggcaaugcc

SEQ ID NO: 1449061 - RNA, 17 nt, Human
caccauuuggauccugu

SEQ ID NO: 1449062 - RNA, 16 nt, Human
caccauugaaggcuua

SEQ ID NO: 1449063 - RNA, 15 nt, Human
caccauugaaggcuu

SEQ ID NO: 1449064 - RNA, 14 nt, Human
caccauugaaggcu

SEQ ID NO: 1449065 - RNA, 13 nt, Human
caccauugaaggc

SEQ ID NO: 1449066 - RNA, 14 nt, Human
caccauucugacuc

SEQ ID NO: 1449067 - RNA, 13 nt, Human
caccauucugacu

SEQ ID NO: 1449068 - RNA, 18 nt, Human
caccauuauaaugaauuu

SEQ ID NO: 1449069 - RNA, 20 nt, Human
caccauuccaagucuccacc

SEQ ID NO: 1449070 - RNA, 13 nt, Human
caccauucagguc

SEQ ID NO: 1449071 - RNA, 22 nt, Human
caccauuauaaugaauuuagug

SEQ ID NO: 1449072 - RNA, 17 nt, Human
caccauuauaaugaauu

SEQ ID NO: 1449073 - RNA, 16 nt, Human
caccauuauaaugaau

SEQ ID NO: 1449074 - RNA, 14 nt, Human
caccauuauaauga

SEQ ID NO: 1449075 - RNA, 20 nt, Human
caccauguuggccaggcuug

SEQ ID NO: 1449076 - RNA, 18 nt, Human
caccagacacccaggacu

SEQ ID NO: 1449077 - RNA, 17 nt, Human
caccagacacccaggac

SEQ ID NO: 1449078 - RNA, 16 nt, Human
caccagacacccagga

SEQ ID NO: 1449079 - RNA, 15 nt, Human
caccagacacccagg

SEQ ID NO: 1449080 - RNA, 22 nt, Human
caccacggaccaaagggagucu

SEQ ID NO: 1449081 - RNA, 20 nt, Human
caccagacacccaggacuua

SEQ ID NO: 1449082 - RNA, 19 nt, Human
caccagacacccaggacuu

SEQ ID NO: 1449083 - RNA, 23 nt, Human
caccaauguuucaagaggagccc

SEQ ID NO: 1449084 - RNA, 23 nt, Human
caccaauguacccaccgggccac

SEQ ID NO: 1449085 - RNA, 22 nt, Human
caccaauguacccaccgggcca

SEQ ID NO: 1449086 - RNA, 17 nt, Human
caccaauguacccaccg

SEQ ID NO: 1449087 - RNA, 22 nt, Human
caccaagugcggguccggcagc

SEQ ID NO: 1449088 - RNA, 23 nt, Human
caccaaguuggaacauccuugga

SEQ ID NO: 1449089 - RNA, 22 nt, Human
caccaaguuggaacauccuugg

SEQ ID NO: 1449090 - RNA, 21 nt, Human
caccaagugcggguccggcag

SEQ ID NO: 1449091 - RNA, 16 nt, Human
caccaagugcgggucc

SEQ ID NO: 1449092 - RNA, 14 nt, Human
caccaagccaaggg

SEQ ID NO: 1449093 - RNA, 13 nt, Human
caccaagcugcug

SEQ ID NO: 1449094 - RNA, 13 nt, Human
caccaagccaagg

SEQ ID NO: 1449095 - RNA, 21 nt, Human
caccaagcaggaaaugaaaau

SEQ ID NO: 1449096 - RNA, 19 nt, Human
caccaagcacagcagccug

SEQ ID NO: 1449097 - RNA, 18 nt, Human
caccaagcacagcagccu

SEQ ID NO: 1449098 - RNA, 17 nt, Human
caccaagcacagcagcc

SEQ ID NO: 1449099 - RNA, 16 nt, Human
caccaagcacagcagc

SEQ ID NO: 1449100 - RNA, 15 nt, Human
caccaagcacagcag

SEQ ID NO: 1449101 - RNA, 14 nt, Human
caccaagcacagca

SEQ ID NO: 1449102 - RNA, 13 nt, Human
caccaagcacagc

SEQ ID NO: 1449103 - RNA, 19 nt, Human
caccaacuccuaguucuag

SEQ ID NO: 1449104 - RNA, 22 nt, Human
caccaacuccuaguucuagaaa

SEQ ID NO: 1449105 - RNA, 18 nt, Human
caccaacuacuaccugua

SEQ ID NO: 1449106 - RNA, 22 nt, Human
caccaugcugcuggggaagaca

SEQ ID NO: 1449107 - RNA, 19 nt, Human
caccaugcugcuggggaag

SEQ ID NO: 1449108 - RNA, 17 nt, Human
caccaugcugcugggga

SEQ ID NO: 1449109 - RNA, 19 nt, Human
caccaugauuccuuuaaca

SEQ ID NO: 1449110 - RNA, 17 nt, Human
caccaugauuccuuuaa

SEQ ID NO: 1449111 - RNA, 15 nt, Human
caccaugauuccuuu

SEQ ID NO: 1449112 - RNA, 20 nt, Human
caccauguugcccaggcugg

SEQ ID NO: 1449113 - RNA, 18 nt, Human
caccauguacauagcuug

SEQ ID NO: 1449114 - RNA, 23 nt, Human
caccaggguugaccccagaggau

SEQ ID NO: 1449115 - RNA, 22 nt, Human
caccaggguugaccccagagga

SEQ ID NO: 1449116 - RNA, 19 nt, Human
caccaggguugaccccaga

SEQ ID NO: 1449117 - RNA, 22 nt, Human
caccaggguccuuuugacacug

SEQ ID NO: 1449118 - RNA, 15 nt, Human
caccagggguuucuc

SEQ ID NO: 1449119 - RNA, 16 nt, Human
caccagggccagccuc

SEQ ID NO: 1449120 - RNA, 17 nt, Human
caccagggccagccucu

SEQ ID NO: 1449121 - RNA, 13 nt, Human
caccagaugcuga

SEQ ID NO: 1449122 - RNA, 13 nt, Human
caccagaucugau

SEQ ID NO: 1449123 - RNA, 14 nt, Human
caccagggccagcc

SEQ ID NO: 1449124 - RNA, 23 nt, Human
caccagggcaucucugggcugga

SEQ ID NO: 1449125 - RNA, 23 nt, Human
caccagaugcugaaaauguccuu

SEQ ID NO: 1449126 - RNA, 23 nt, Human
caccaguguguggcuuucagagc

SEQ ID NO: 1449127 - RNA, 21 nt, Human
caccaguguguggcuuucaga

SEQ ID NO: 1449128 - RNA, 20 nt, Human
caccaguucucauggguggc

SEQ ID NO: 1449129 - RNA, 11 nt, Human
caccaguucuc

SEQ ID NO: 1449130 - RNA, 17 nt, Human
caccauagguagaaugu

SEQ ID NO: 1449131 - RNA, 21 nt, Human
caccauauuaccacagacaua

SEQ ID NO: 1449132 - RNA, 21 nt, Human
caccauauuggccagucuggu

SEQ ID NO: 1449133 - RNA, 19 nt, Human
cacagccaggggagcagag

SEQ ID NO: 1449134 - RNA, 18 nt, Human
cacagccaggggagcaga

SEQ ID NO: 1449135 - RNA, 20 nt, Human
cacagccagcaccuggcauc

SEQ ID NO: 1449136 - RNA, 17 nt, Human
cacagccagcaccuggc

SEQ ID NO: 1449137 - RNA, 16 nt, Human
cacagccagcaccugg

SEQ ID NO: 1449138 - RNA, 15 nt, Human
cacagccagcaccug

SEQ ID NO: 1449139 - RNA, 15 nt, Human
cacagcacagccaac

SEQ ID NO: 1449140 - RNA, 12 nt, Human
cacagcacagcc

SEQ ID NO: 1449141 - RNA, 23 nt, Human
cacagcacaaauuaguuauauau

SEQ ID NO: 1449142 - RNA, 18 nt, Human
cacagcacaaauuaguua

SEQ ID NO: 1449143 - RNA, 16 nt, Human
cacagcacaaauuagu

SEQ ID NO: 1449144 - RNA, 14 nt, Human
cacagcacaaauua

SEQ ID NO: 1449145 - RNA, 18 nt, Human
cacagcaauuccucaggc

SEQ ID NO: 1449146 - RNA, 16 nt, Human
cacagcaauuccucag

SEQ ID NO: 1449147 - RNA, 18 nt, Human
cacagcaaccccaggcug

SEQ ID NO: 1449148 - RNA, 17 nt, Human
cacagcaaccccaggcu

SEQ ID NO: 1449149 - RNA, 14 nt, Human
cacagcaaccccag

SEQ ID NO: 1449150 - RNA, 23 nt, Human
cacaggcauuuccuggguggcua

SEQ ID NO: 1449151 - RNA, 20 nt, Human
cacaggcauuuccugggugg

SEQ ID NO: 1449152 - RNA, 19 nt, Human
cacaggcauuuccugggug

SEQ ID NO: 1449153 - RNA, 18 nt, Human
cacaggcauuuccugggu

SEQ ID NO: 1449154 - RNA, 17 nt, Human
cacaggcauuuccuggg

SEQ ID NO: 1449155 - RNA, 16 nt, Human
cacaggcauuuccugg

SEQ ID NO: 1449156 - RNA, 15 nt, Human
cacaggcauuuccug

SEQ ID NO: 1449157 - RNA, 20 nt, Human
cacaggcaaaauccuugcuu

SEQ ID NO: 1449158 - RNA, 16 nt, Human
cacaggcaaaauccuu

SEQ ID NO: 1449159 - RNA, 22 nt, Human
cacaggcccccuugaguggggu

SEQ ID NO: 1449160 - RNA, 21 nt, Human
cacaggcccccuugagugggg

SEQ ID NO: 1449161 - RNA, 13 nt, Human
cacaggcccccuu

SEQ ID NO: 1449162 - RNA, 12 nt, Human
cacaggcccccu

SEQ ID NO: 1449163 - RNA, 17 nt, Human
cacaggacauuucucua

SEQ ID NO: 1449164 - RNA, 15 nt, Human
cacaggacauuucuc

SEQ ID NO: 1449165 - RNA, 23 nt, Human
cacaggacaugcgguagccagca

SEQ ID NO: 1449166 - RNA, 22 nt, Human
cacaggacaugcgguagccagc

SEQ ID NO: 1449167 - RNA, 20 nt, Human
cacaggacaugcgguagcca

SEQ ID NO: 1449168 - RNA, 14 nt, Human
cacagcccagcccg

SEQ ID NO: 1449169 - RNA, 18 nt, Human
cacaugaauuauuacagu

SEQ ID NO: 1449170 - RNA, 17 nt, Human
cacaugcaaggucauuu

SEQ ID NO: 1449171 - RNA, 19 nt, Human
cacaugcaaggucauuuuu

SEQ ID NO: 1449172 - RNA, 20 nt, Human
cacaugcaaggucauuuuuu

SEQ ID NO: 1449173 - RNA, 21 nt, Human
cacaugccccaucccaugcug

SEQ ID NO: 1449174 - RNA, 14 nt, Human
cacaugccccaucc

SEQ ID NO: 1449175 - RNA, 20 nt, Human
cacaugucaguaccuucaaa

SEQ ID NO: 1449176 - RNA, 21 nt, Human
cacaugucagcaaguccuaag

SEQ ID NO: 1449177 - RNA, 20 nt, Human
cacaugcuucccuuuccuga

SEQ ID NO: 1449178 - RNA, 20 nt, Human
cacaugaaucugcacaucug

SEQ ID NO: 1449179 - RNA, 18 nt, Human
cacaugaaucugcacauc

SEQ ID NO: 1449180 - RNA, 20 nt, Human
cacaugacucgggggugggg

SEQ ID NO: 1449181 - RNA, 22 nt, Human
cacaugaauuauuacaguguuu

SEQ ID NO: 1449182 - RNA, 17 nt, Human
cacagugacuucugaga

SEQ ID NO: 1449183 - RNA, 15 nt, Human
cacagugacuucuga

SEQ ID NO: 1449184 - RNA, 16 nt, Human
cacagugacuucugag

SEQ ID NO: 1449185 - RNA, 20 nt, Human
cacaugaaguccaagcauuu

SEQ ID NO: 1449186 - RNA, 17 nt, Human
cacaugaaguccaagca

SEQ ID NO: 1449187 - RNA, 19 nt, Human
cacacuaaccaagcugagu

SEQ ID NO: 1449188 - RNA, 19 nt, Human
caauguaaauauuuuaaag

SEQ ID NO: 1449189 - RNA, 14 nt, Human
caagugcugugcaa

SEQ ID NO: 1449190 - RNA, 24 nt, Human
caaugauggcaauuuuguaacgaa

SEQ ID NO: 1449191 - RNA, 13 nt, Human
caaugaaaugaau

SEQ ID NO: 1449192 - RNA, 20 nt, Human
caaugaaaacucuuugcugc

SEQ ID NO: 1449193 - RNA, 19 nt, Human
caaugaaaacucuuugcug

SEQ ID NO: 1449194 - RNA, 16 nt, Human
caaugaaaacucuuug

SEQ ID NO: 1449195 - RNA, 15 nt, Human
caaugaaaaaaugua

SEQ ID NO: 1449196 - RNA, 22 nt, Human
caaucuuuaaaccaauugcugc

SEQ ID NO: 1449197 - RNA, 15 nt, Human
caaucuuuaaaccaa

SEQ ID NO: 1449198 - RNA, 18 nt, Human
caaucuugcauguaacgc

SEQ ID NO: 1449199 - RNA, 17 nt, Human
caaucuugcauguaacg

SEQ ID NO: 1449200 - RNA, 13 nt, Human
caaucuugcaugu

SEQ ID NO: 1449201 - RNA, 19 nt, Human
caaugaaaugaauuaaagu

SEQ ID NO: 1449202 - RNA, 11 nt, Human
caaugaaauga

SEQ ID NO: 1449203 - RNA, 15 nt, Human
caauauuaaaucugc

SEQ ID NO: 1449204 - RNA, 13 nt, Human
caagguguccuac

SEQ ID NO: 1449205 - RNA, 14 nt, Human
caauauuaaaucug

SEQ ID NO: 1449206 - RNA, 18 nt, Human
caagugcugaacagugga

SEQ ID NO: 1449207 - RNA, 20 nt, Human
caagugcugaacaguggagg

SEQ ID NO: 1449208 - RNA, 17 nt, Human
caagugcugaacagugg

SEQ ID NO: 1449209 - RNA, 16 nt, Human
caagugcugaacagug

SEQ ID NO: 1449210 - RNA, 14 nt, Human
caagugcugaacag

SEQ ID NO: 1449211 - RNA, 16 nt, Human
caaucuacucaaagca

SEQ ID NO: 1449212 - RNA, 17 nt, Human
caaucuacucaaagcau

SEQ ID NO: 1449213 - RNA, 21 nt, Human
caaucuuccuguuuaaaaaac

SEQ ID NO: 1449214 - RNA, 14 nt, Human
caauauucaauaaa

SEQ ID NO: 1449215 - RNA, 15 nt, Human
caauauucaauaaag

SEQ ID NO: 1449216 - RNA, 16 nt, Human
caauauucaauaaagc

SEQ ID NO: 1449217 - RNA, 17 nt, Human
caauauucaauaaagcu

SEQ ID NO: 1449218 - RNA, 22 nt, Human
cacaaguggguacccccaggac

SEQ ID NO: 1449219 - RNA, 21 nt, Human
cacaaguggguacccccagga

SEQ ID NO: 1449220 - RNA, 19 nt, Human
cacaaguggguacccccag

SEQ ID NO: 1449221 - RNA, 18 nt, Human
cacaaguggguaccccca

SEQ ID NO: 1449222 - RNA, 21 nt, Human
cacaagugcccuccaggcuuu

SEQ ID NO: 1449223 - RNA, 23 nt, Human
cacaagaauggaucacaagaugg

SEQ ID NO: 1449224 - RNA, 14 nt, Human
cacaagaauggauc

SEQ ID NO: 1449225 - RNA, 13 nt, Human
cacaagaauggau

SEQ ID NO: 1449226 - RNA, 23 nt, Human
cacaaauauuuauuuucuuucug

SEQ ID NO: 1449227 - RNA, 21 nt, Human
cacaaauauuuauuuucuuuc

SEQ ID NO: 1449228 - RNA, 13 nt, Human
cacaaauauuuau

SEQ ID NO: 1449229 - RNA, 13 nt, Human
cacaaacuguaaa

SEQ ID NO: 1449230 - RNA, 14 nt, Human
cacaaauuaguuau

SEQ ID NO: 1449231 - RNA, 13 nt, Human
cacaaauuaguua

SEQ ID NO: 1449232 - RNA, 16 nt, Human
cacaaauuaguuauau

SEQ ID NO: 1449233 - RNA, 20 nt, Human
cacaacuuguuuuugguuuu

SEQ ID NO: 1449234 - RNA, 12 nt, Human
cacaacuuguuu

SEQ ID NO: 1449235 - RNA, 13 nt, Human
caauuauguuaaa

SEQ ID NO: 1449236 - RNA, 22 nt, Human
caauuauaguuucugaggcuuu

SEQ ID NO: 1449237 - RNA, 15 nt, Human
caauuauguuaaacu

SEQ ID NO: 1449238 - RNA, 18 nt, Human
caauuauaguuucugagg

SEQ ID NO: 1449239 - RNA, 15 nt, Human
caauuauaguuucug

SEQ ID NO: 1449240 - RNA, 14 nt, Human
caauuauaguuucu

SEQ ID NO: 1449241 - RNA, 21 nt, Human
caauuauaagaggauaugaac

SEQ ID NO: 1449242 - RNA, 21 nt, Human
caauuaguuuccuuuuuaaua

SEQ ID NO: 1449243 - RNA, 18 nt, Human
caauuaguuuccuuuuua

SEQ ID NO: 1449244 - RNA, 17 nt, Human
caauuaguuuccuuuuu

SEQ ID NO: 1449245 - RNA, 14 nt, Human
caauuaguuuccuu

SEQ ID NO: 1449246 - RNA, 13 nt, Human
caauuaguuuccu

SEQ ID NO: 1449247 - RNA, 17 nt, Human
caauguaaauauuuuaa

SEQ ID NO: 1449248 - RNA, 16 nt, Human
caauuagggccuagcc

SEQ ID NO: 1449249 - RNA, 14 nt, Human
caauguaaauauuu

SEQ ID NO: 1449250 - RNA, 23 nt, Human
caaugcaccuaaagaaaaacaaa

SEQ ID NO: 1449251 - RNA, 18 nt, Human
caaugcaccuaaagaaaa

SEQ ID NO: 1449252 - RNA, 17 nt, Human
caaugcaccuaaagaaa

SEQ ID NO: 1449253 - RNA, 15 nt, Human
cacaaaccaugcaaa

SEQ ID NO: 1449254 - RNA, 13 nt, Human
caauuuuuauauu

SEQ ID NO: 1449255 - RNA, 12 nt, Human
cacaaacuguaa

SEQ ID NO: 1449256 - RNA, 20 nt, Human
caauuuucuggaauacauga

SEQ ID NO: 1449257 - RNA, 13 nt, Human
caauucaaaaguu

SEQ ID NO: 1449258 - RNA, 12 nt, Human
caauucaaaaca

SEQ ID NO: 1449259 - RNA, 11 nt, Human
caauuuuguaa

SEQ ID NO: 1449260 - RNA, 12 nt, Human
caauuuuguaac

SEQ ID NO: 1449261 - RNA, 14 nt, Human
cacacacugaugcu

SEQ ID NO: 1449262 - RNA, 18 nt, Human
cacacaaugugucugaga

SEQ ID NO: 1449263 - RNA, 18 nt, Human
cacacaagaagaagggca

SEQ ID NO: 1449264 - RNA, 19 nt, Human
cacacaaggauagaugcug

SEQ ID NO: 1449265 - RNA, 16 nt, Human
cacacaagaagaaggg

SEQ ID NO: 1449266 - RNA, 19 nt, Human
cacacacaaaagggaaccc

SEQ ID NO: 1449267 - RNA, 18 nt, Human
cacaccaggcgcuaauuc

SEQ ID NO: 1449268 - RNA, 14 nt, Human
cacaccaggauaga

SEQ ID NO: 1449269 - RNA, 19 nt, Human
cacacagcaagucaggguu

SEQ ID NO: 1449270 - RNA, 10 nt, Human
cacaccuccu

SEQ ID NO: 1449271 - RNA, 22 nt, Human
cacaccuacuagucaccagaga

SEQ ID NO: 1449272 - RNA, 21 nt, Human
caaagccaggucccucucauu

SEQ ID NO: 1449273 - RNA, 14 nt, Human
caaagaguagaauu

SEQ ID NO: 1449274 - RNA, 16 nt, Human
caaagagguauuuauc

SEQ ID NO: 1449275 - RNA, 16 nt, Human
caaagaguucaagaaa

SEQ ID NO: 1449276 - RNA, 15 nt, Human
caaagaguucaagaa

SEQ ID NO: 1449277 - RNA, 22 nt, Human
caaagacuuaagcccagugcac

SEQ ID NO: 1449278 - RNA, 17 nt, Human
caaagacccuggcuuuc

SEQ ID NO: 1449279 - RNA, 18 nt, Human
caaagacccuggcuuuca

SEQ ID NO: 1449280 - RNA, 16 nt, Human
caaagacccuggcuuu

SEQ ID NO: 1449281 - RNA, 14 nt, Human
caaagacccuggcu

SEQ ID NO: 1449282 - RNA, 23 nt, Human
caaacugggaaccccuuucccac

SEQ ID NO: 1449283 - RNA, 22 nt, Human
caaacugggaaccccuuuccca

SEQ ID NO: 1449284 - RNA, 20 nt, Human
caaacugggaaccccuuucc

SEQ ID NO: 1449285 - RNA, 16 nt, Human
caaacugggaaccccu

SEQ ID NO: 1449286 - RNA, 12 nt, Human
caaagaaauuau

SEQ ID NO: 1449287 - RNA, 13 nt, Human
caaagaaauuaug

SEQ ID NO: 1449288 - RNA, 16 nt, Human
caaagaaaguguauug

SEQ ID NO: 1449289 - RNA, 15 nt, Human
caaagaaauuaugug

SEQ ID NO: 1449290 - RNA, 20 nt, Human
caaacugcaugcccagagac

SEQ ID NO: 1449291 - RNA, 17 nt, Human
caaacugccuaagcccu

SEQ ID NO: 1449292 - RNA, 19 nt, Human
caaacugcaugcccagaga

SEQ ID NO: 1449293 - RNA, 18 nt, Human
caaacugcaugcccagag

SEQ ID NO: 1449294 - RNA, 18 nt, Human
caaacugccuaagcccuc

SEQ ID NO: 1449295 - RNA, 23 nt, Human
caaacugccuaagcccuccgcca

SEQ ID NO: 1449296 - RNA, 16 nt, Human
caaacugcaugcccag

SEQ ID NO: 1449297 - RNA, 14 nt, Human
caaacugcaugccc

SEQ ID NO: 1449298 - RNA, 13 nt, Human
caaacugcaugcc

SEQ ID NO: 1449299 - RNA, 22 nt, Human
caaacugaggaauuucaccugu

SEQ ID NO: 1449300 - RNA, 23 nt, Human
auuuuaaugaagaaaguggaaaa

SEQ ID NO: 1449301 - RNA, 14 nt, Human
auuuuaaucaaauu

SEQ ID NO: 1449302 - RNA, 19 nt, Human
auuuuaauaauguuucaaa

SEQ ID NO: 1449303 - RNA, 18 nt, Human
auuuuaauaauguuucaa

SEQ ID NO: 1449304 - RNA, 18 nt, Human
auuuuaaaguuaguaucu

SEQ ID NO: 1449305 - RNA, 21 nt, Human
auuuuaaaguuaguaucuuuu

SEQ ID NO: 1449306 - RNA, 14 nt, Human
auuuuaaaguuagu

SEQ ID NO: 1449307 - RNA, 13 nt, Human
auuuuaaaguuag

SEQ ID NO: 1449308 - RNA, 12 nt, Human
auuuuaaaguua

SEQ ID NO: 1449309 - RNA, 18 nt, Human
auuuguacuauuuaacug

SEQ ID NO: 1449310 - RNA, 17 nt, Human
auuuguacuauuuaacu

SEQ ID NO: 1449311 - RNA, 22 nt, Human
caaaggggaggcaucagugucc

SEQ ID NO: 1449312 - RNA, 17 nt, Human
caaaggggaccuggaag

SEQ ID NO: 1449313 - RNA, 18 nt, Human
caaagggagucugccagg

SEQ ID NO: 1449314 - RNA, 17 nt, Human
caaagggagucugccag

SEQ ID NO: 1449315 - RNA, 23 nt, Human
caaaggagccugugaacccagga

SEQ ID NO: 1449316 - RNA, 16 nt, Human
caaaggagccugugaa

SEQ ID NO: 1449317 - RNA, 15 nt, Human
caaaggagccuguga

SEQ ID NO: 1449318 - RNA, 14 nt, Human
caaaggagccugug

SEQ ID NO: 1449319 - RNA, 13 nt, Human
caaaggagccugu

SEQ ID NO: 1449320 - RNA, 12 nt, Human
caaaggagccug

SEQ ID NO: 1449321 - RNA, 11 nt, Human
caaaggagccu

SEQ ID NO: 1449322 - RNA, 18 nt, Human
caaagcccccagagccca

SEQ ID NO: 1449323 - RNA, 17 nt, Human
caaagcccccagagccc

SEQ ID NO: 1449324 - RNA, 16 nt, Human
caaagcccccagagcc

SEQ ID NO: 1449325 - RNA, 15 nt, Human
caaagcccccagagc

SEQ ID NO: 1449326 - RNA, 14 nt, Human
caaagcccccagag

SEQ ID NO: 1449327 - RNA, 19 nt, Human
caaagcccccagagcccag

SEQ ID NO: 1449328 - RNA, 22 nt, Human
caaagcccccagagcccaggcu

SEQ ID NO: 1449329 - RNA, 16 nt, Human
caaaggacgcacugag

SEQ ID NO: 1449330 - RNA, 18 nt, Human
caaaggacgcacugagca

SEQ ID NO: 1449331 - RNA, 13 nt, Human
caaaggacgcacu

SEQ ID NO: 1449332 - RNA, 21 nt, Human
caaauauuuagauguaauuuu

SEQ ID NO: 1449333 - RNA, 23 nt, Human
caaaguucuaauaauuucuaaug

SEQ ID NO: 1449334 - RNA, 13 nt, Human
caaauauuccaga

SEQ ID NO: 1449335 - RNA, 17 nt, Human
caaauauuccagagacu

SEQ ID NO: 1449336 - RNA, 14 nt, Human
caaauauuuauuuu

SEQ ID NO: 1449337 - RNA, 12 nt, Human
caaauauuuauu

SEQ ID NO: 1449338 - RNA, 23 nt, Human
caaauauuuagauguaauuuugu

SEQ ID NO: 1449339 - RNA, 22 nt, Human
caaauauuuagauguaauuuug

SEQ ID NO: 1449340 - RNA, 16 nt, Human
caaauauuuauuuucu

SEQ ID NO: 1449341 - RNA, 15 nt, Human
caaauauuuauuuuc

SEQ ID NO: 1449342 - RNA, 20 nt, Human
caaaguucuaauaauuucua

SEQ ID NO: 1449343 - RNA, 18 nt, Human
caaaggggaccuggaagg

SEQ ID NO: 1449344 - RNA, 22 nt, Human
caaaguucuaauaauuucuaau

SEQ ID NO: 1449345 - RNA, 21 nt, Human
caaaguucuaauaauuucuaa

SEQ ID NO: 1449346 - RNA, 20 nt, Human
caaauuaaaaaagauaaaca

SEQ ID NO: 1449347 - RNA, 21 nt, Human
caaauuaaaaaagauaaacac

SEQ ID NO: 1449348 - RNA, 19 nt, Human
caaauuaaaaaagauaaac

SEQ ID NO: 1449349 - RNA, 17 nt, Human
caaauuaaaaaagauaa

SEQ ID NO: 1449350 - RNA, 16 nt, Human
caaauuaaaaaagaua

SEQ ID NO: 1449351 - RNA, 15 nt, Human
caaauuaaaaaagau

SEQ ID NO: 1449352 - RNA, 23 nt, Human
caaauguuuauuaagcaucagaa

SEQ ID NO: 1449353 - RNA, 15 nt, Human
caaauucuucugaac

SEQ ID NO: 1449354 - RNA, 14 nt, Human
caaauucuucugaa

SEQ ID NO: 1449355 - RNA, 21 nt, Human
caaauuggagcuucauggcag

SEQ ID NO: 1449356 - RNA, 17 nt, Human
caaauuguaagcaugca

SEQ ID NO: 1449357 - RNA, 22 nt, Human
caacaguuuuuuaugcuaauca

SEQ ID NO: 1449358 - RNA, 22 nt, Human
caacaguuuuccuaugcuuuga

SEQ ID NO: 1449359 - RNA, 20 nt, Human
caacaguuuuccuaugcuuu

SEQ ID NO: 1449360 - RNA, 13 nt, Human
caacaguuuuccu

SEQ ID NO: 1449361 - RNA, 12 nt, Human
caacaguuuucc

SEQ ID NO: 1449362 - RNA, 20 nt, Human
caacaguuuaaugaagaucu

SEQ ID NO: 1449363 - RNA, 15 nt, Human
caacaguuuaaugaa

SEQ ID NO: 1449364 - RNA, 12 nt, Human
caacaguuuaau

SEQ ID NO: 1449365 - RNA, 16 nt, Human
caacaguuacauaauu

SEQ ID NO: 1449366 - RNA, 15 nt, Human
caaccuaaaacucuu

SEQ ID NO: 1449367 - RNA, 13 nt, Human
caaccuaaaacuc

SEQ ID NO: 1449368 - RNA, 18 nt, Human
caaccucaacugccuacu

SEQ ID NO: 1449369 - RNA, 18 nt, Human
caaccucauccuccuucu

SEQ ID NO: 1449370 - RNA, 18 nt, Human
caaccucaguaauuuaga

SEQ ID NO: 1449371 - RNA, 15 nt, Human
caaccucaguaauuu

SEQ ID NO: 1449372 - RNA, 15 nt, Human
caaccucauccucuc

SEQ ID NO: 1449373 - RNA, 21 nt, Human
caacugucuccuaccucugcu

SEQ ID NO: 1449374 - RNA, 23 nt, Human
caacugucucgaugcaaugaaca

SEQ ID NO: 1449375 - RNA, 21 nt, Human
caacugucucgaugcaaugaa

SEQ ID NO: 1449376 - RNA, 19 nt, Human
caacuggcccuauuuagau

SEQ ID NO: 1449377 - RNA, 23 nt, Human
caacuggcccuauuuagaugaua

SEQ ID NO: 1449378 - RNA, 18 nt, Human
caacuggcccuauuuaga

SEQ ID NO: 1449379 - RNA, 14 nt, Human
caacuggcaggcag

SEQ ID NO: 1449380 - RNA, 12 nt, Human
caacuggcaggc

SEQ ID NO: 1449381 - RNA, 18 nt, Human
caacugaaugaggucagc

SEQ ID NO: 1449382 - RNA, 18 nt, Human
caacucuuuguuauuuga

SEQ ID NO: 1449383 - RNA, 14 nt, Human
caacucuuuguuau

SEQ ID NO: 1449384 - RNA, 13 nt, Human
caacucuuuguua

SEQ ID NO: 1449385 - RNA, 16 nt, Human
caacucuuugagaaac

SEQ ID NO: 1449386 - RNA, 15 nt, Human
caacucuuugagaaa

SEQ ID NO: 1449387 - RNA, 14 nt, Human
caacucuuugagaa

SEQ ID NO: 1449388 - RNA, 13 nt, Human
caacucuuugaga

SEQ ID NO: 1449389 - RNA, 16 nt, Human
caaccugcucuccucu

SEQ ID NO: 1449390 - RNA, 18 nt, Human
caacucuugauuauccau

SEQ ID NO: 1449391 - RNA, 16 nt, Human
caacucuugauuaucc

SEQ ID NO: 1449392 - RNA, 12 nt, Human
caacucuugauu

SEQ ID NO: 1449393 - RNA, 15 nt, Human
caaccugcucuccuc

SEQ ID NO: 1449394 - RNA, 14 nt, Human
caaccuccaccucc

SEQ ID NO: 1449395 - RNA, 21 nt, Human
caaccugccugacauuuggag

SEQ ID NO: 1449396 - RNA, 17 nt, Human
caaccugcaaagaucug

SEQ ID NO: 1449397 - RNA, 20 nt, Human
caaccuccaccuccuggguu

SEQ ID NO: 1449398 - RNA, 20 nt, Human
caaccuccgcauccgggguu

SEQ ID NO: 1449399 - RNA, 21 nt, Human
caagugaccuauaccuguguu

SEQ ID NO: 1449400 - RNA, 17 nt, Human
caagguuuaaagagucu

SEQ ID NO: 1449401 - RNA, 15 nt, Human
caagguucuccaaca

SEQ ID NO: 1449402 - RNA, 13 nt, Human
caagguucuaacc

SEQ ID NO: 1449403 - RNA, 18 nt, Human
caagguucaacuuauuaa

SEQ ID NO: 1449404 - RNA, 21 nt, Human
caagguuuaaagagucuagau

SEQ ID NO: 1449405 - RNA, 22 nt, Human
caagguuuaaagagucuagauu

SEQ ID NO: 1449406 - RNA, 20 nt, Human
caagguuuaaagagucuaga

SEQ ID NO: 1449407 - RNA, 18 nt, Human
caagguuuaaagagucua

SEQ ID NO: 1449408 - RNA, 15 nt, Human
caagguaccauccua

SEQ ID NO: 1449409 - RNA, 16 nt, Human
caagguacucugguga

SEQ ID NO: 1449410 - RNA, 14 nt, Human
caagguacucuggu

SEQ ID NO: 1449411 - RNA, 20 nt, Human
caagguguccuacagaaaaa

SEQ ID NO: 1449412 - RNA, 21 nt, Human
caagguguccuacagaaaaac

SEQ ID NO: 1449413 - RNA, 18 nt, Human
caagguguccuacagaaa

SEQ ID NO: 1449414 - RNA, 17 nt, Human
caagguguccuacagaa

SEQ ID NO: 1449415 - RNA, 16 nt, Human
caagguguccuacaga

SEQ ID NO: 1449416 - RNA, 15 nt, Human
caagguguccuacag

SEQ ID NO: 1449417 - RNA, 13 nt, Human
caaggucauuuuu

SEQ ID NO: 1449418 - RNA, 21 nt, Human
caaggggauuuuuaugucugg

SEQ ID NO: 1449419 - RNA, 18 nt, Human
caaggggaaucagaacuc

SEQ ID NO: 1449420 - RNA, 14 nt, Human
caagggccugaugg

SEQ ID NO: 1449421 - RNA, 17 nt, Human
caagggaggcugcugcu

SEQ ID NO: 1449422 - RNA, 16 nt, Human
caagggaggcugcugc

SEQ ID NO: 1449423 - RNA, 14 nt, Human
caagggaggcugcu

SEQ ID NO: 1449424 - RNA, 18 nt, Human
caagggcauaaauuauug

SEQ ID NO: 1449425 - RNA, 15 nt, Human
caagcuucugagacg

SEQ ID NO: 1449426 - RNA, 24 nt, Human
caagcuucugagacgucaugagga

SEQ ID NO: 1449427 - RNA, 17 nt, Human
caagcuuguccaacccg

SEQ ID NO: 1449428 - RNA, 20 nt, Human
caagcuuaauggcugauaau

SEQ ID NO: 1449429 - RNA, 16 nt, Human
caagcuguuuucuucu

SEQ ID NO: 1449430 - RNA, 14 nt, Human
caagcuguuuucuu

SEQ ID NO: 1449431 - RNA, 17 nt, Human
caagcauucagaagaaa

SEQ ID NO: 1449432 - RNA, 22 nt, Human
caagcauucagaagaaaaagaa

SEQ ID NO: 1449433 - RNA, 16 nt, Human
caagcauucagaagaa

SEQ ID NO: 1449434 - RNA, 22 nt, Human
caagcauggucccacaucccug

SEQ ID NO: 1449435 - RNA, 23 nt, Human
caagcauggucccacaucccugg

SEQ ID NO: 1449436 - RNA, 21 nt, Human
caagcauggcuauuuuauauu

SEQ ID NO: 1449437 - RNA, 18 nt, Human
caagcauggcuauuuuau

SEQ ID NO: 1449438 - RNA, 21 nt, Human
caagcaucuuggggggguggc

SEQ ID NO: 1449439 - RNA, 22 nt, Human
caagcaguugggacuacaggcg

SEQ ID NO: 1449440 - RNA, 21 nt, Human
caagcagucgugccugugucc

SEQ ID NO: 1449441 - RNA, 20 nt, Human
caagcagucgugccuguguc

SEQ ID NO: 1449442 - RNA, 19 nt, Human
caagcagucgugccugugu

SEQ ID NO: 1449443 - RNA, 18 nt, Human
caagcagucgugccugug

SEQ ID NO: 1449444 - RNA, 16 nt, Human
caagcagucgugccug

SEQ ID NO: 1449445 - RNA, 15 nt, Human
caagcagucgugccu

SEQ ID NO: 1449446 - RNA, 23 nt, Human
caagcaggaaaugaaaaugucuu

SEQ ID NO: 1449447 - RNA, 17 nt, Human
caagcaggaaaugaaaa

SEQ ID NO: 1449448 - RNA, 19 nt, Human
caagcccagcccauggaga

SEQ ID NO: 1449449 - RNA, 17 nt, Human
caagcccagcacugcuu

SEQ ID NO: 1449450 - RNA, 20 nt, Human
caagccaucuugagugguca

SEQ ID NO: 1449451 - RNA, 14 nt, Human
caagcauucugucu

SEQ ID NO: 1449452 - RNA, 19 nt, Human
caagcauuuagauguauag

SEQ ID NO: 1449453 - RNA, 16 nt, Human
caagcauuuagaugua

SEQ ID NO: 1449454 - RNA, 13 nt, Human
caagagcccuguc

SEQ ID NO: 1449455 - RNA, 21 nt, Human
caagacuucucuuugccucaa

SEQ ID NO: 1449456 - RNA, 20 nt, Human
caagacuucucuuugccuca

SEQ ID NO: 1449457 - RNA, 23 nt, Human
caagacugcuguggccaggaggu

SEQ ID NO: 1449458 - RNA, 20 nt, Human
caagcagcuuagaguuggcc

SEQ ID NO: 1449459 - RNA, 18 nt, Human
caagcagcuuagaguugg

SEQ ID NO: 1449460 - RNA, 13 nt, Human
caagcagcuuaga

SEQ ID NO: 1449461 - RNA, 22 nt, Human
caagcagcgaccgcccccuccu

SEQ ID NO: 1449462 - RNA, 21 nt, Human
caagcagccugagcaacucuu

SEQ ID NO: 1449463 - RNA, 22 nt, Human
caagacugcuguggccaggagg

SEQ ID NO: 1449464 - RNA, 21 nt, Human
caagacugcuguggccaggag

SEQ ID NO: 1449465 - RNA, 20 nt, Human
caagacugcuguggccagga

SEQ ID NO: 1449466 - RNA, 19 nt, Human
caagacugcuguggccagg

SEQ ID NO: 1449467 - RNA, 12 nt, Human
caagacugcugu

SEQ ID NO: 1449468 - RNA, 21 nt, Human
caagacccuuuuggguuucug

SEQ ID NO: 1449469 - RNA, 17 nt, Human
caagaccucagugccuu

SEQ ID NO: 1449470 - RNA, 20 nt, Human
caacuugagcauguuacuga

SEQ ID NO: 1449471 - RNA, 18 nt, Human
caacuugagcauguuacu

SEQ ID NO: 1449472 - RNA, 19 nt, Human
caacuugagcauguuacug

SEQ ID NO: 1449473 - RNA, 20 nt, Human
caagaaauaaaaggaagcca

SEQ ID NO: 1449474 - RNA, 19 nt, Human
caagaaauaaaaggaagcc

SEQ ID NO: 1449475 - RNA, 13 nt, Human
caagaaauaaaag

SEQ ID NO: 1449476 - RNA, 18 nt, Human
caagaaauaaguuuuugu

SEQ ID NO: 1449477 - RNA, 21 nt, Human
caagaaauaaaaggaagccaa

SEQ ID NO: 1449478 - RNA, 16 nt, Human
caagaccgaucggcgg

SEQ ID NO: 1449479 - RNA, 23 nt, Human
cauuucuauagccaaaaauagcu

SEQ ID NO: 1449480 - RNA, 21 nt, Human
cauuugaaaccccuguaggcc

SEQ ID NO: 1449481 - RNA, 19 nt, Human
cauuugaaaccccuguagg

SEQ ID NO: 1449482 - RNA, 10 nt, Human
cauuugaaug

SEQ ID NO: 1449483 - RNA, 11 nt, Human
cauuugaaugc

SEQ ID NO: 1449484 - RNA, 22 nt, Human
cauuugaaaauuuugauguuuu

SEQ ID NO: 1449485 - RNA, 20 nt, Human
cauuugaaaauuuugauguu

SEQ ID NO: 1449486 - RNA, 14 nt, Human
cauuugcucaugga

SEQ ID NO: 1449487 - RNA, 13 nt, Human
cauuugcucaugg

SEQ ID NO: 1449488 - RNA, 20 nt, Human
cauuuguuugaacugauaaa

SEQ ID NO: 1449489 - RNA, 22 nt, Human
cauuuguuugaacugauaaaga

SEQ ID NO: 1449490 - RNA, 12 nt, Human
cauuugaaugca

SEQ ID NO: 1449491 - RNA, 14 nt, Human
cauuugcauuuguu

SEQ ID NO: 1449492 - RNA, 22 nt, Human
ccaaacaccuuccagcuccugu

SEQ ID NO: 1449493 - RNA, 16 nt, Human
ccaaacaggcucagag

SEQ ID NO: 1449494 - RNA, 17 nt, Human
cauuuuucaauagcaca

SEQ ID NO: 1449495 - RNA, 16 nt, Human
cauuuuuccguaaaaa

SEQ ID NO: 1449496 - RNA, 16 nt, Human
cauuuuucaugauaau

SEQ ID NO: 1449497 - RNA, 23 nt, Human
cauuuuucuuagggaaggauaca

SEQ ID NO: 1449498 - RNA, 12 nt, Human
cauuuuguaaua

SEQ ID NO: 1449499 - RNA, 16 nt, Human
cauuuuguaauaauaa

SEQ ID NO: 1449500 - RNA, 13 nt, Human
cauuuuguaauaa

SEQ ID NO: 1449501 - RNA, 19 nt, Human
cauuuguuuuguuuacaga

SEQ ID NO: 1449502 - RNA, 17 nt, Human
cauuuguuuuguuuaca

SEQ ID NO: 1449503 - RNA, 11 nt, Human
cauuugcugaa

SEQ ID NO: 1449504 - RNA, 19 nt, Human
cauuuuagggguagcauuu

SEQ ID NO: 1449505 - RNA, 12 nt, Human
cauuucuauuaa

SEQ ID NO: 1449506 - RNA, 20 nt, Human
cauuucuagcgcauggccug

SEQ ID NO: 1449507 - RNA, 21 nt, Human
cauuucuaauuauguagcucu

SEQ ID NO: 1449508 - RNA, 23 nt, Human
cauuucuaauuauguagcucuuu

SEQ ID NO: 1449509 - RNA, 20 nt, Human
cauuucuaauuauguagcuc

SEQ ID NO: 1449510 - RNA, 19 nt, Human
cauuucuaauuauguagcu

SEQ ID NO: 1449511 - RNA, 11 nt, Human
cauuucuaauu

SEQ ID NO: 1449512 - RNA, 12 nt, Human
cauuucuaaaau

SEQ ID NO: 1449513 - RNA, 22 nt, Human
cauuuccuggguggcuacucug

SEQ ID NO: 1449514 - RNA, 21 nt, Human
cauuuccuggguggcuacucu

SEQ ID NO: 1449515 - RNA, 20 nt, Human
cauuuccuggguggcuacuc

SEQ ID NO: 1449516 - RNA, 14 nt, Human
cauuuccugggugg

SEQ ID NO: 1449517 - RNA, 12 nt, Human
cauuuccugggu

SEQ ID NO: 1449518 - RNA, 21 nt, Human
cauuuaaaacauuaaaauaua

SEQ ID NO: 1449519 - RNA, 21 nt, Human
cauuuaaaagauacaguuacu

SEQ ID NO: 1449520 - RNA, 12 nt, Human
cauuuaaaagau

SEQ ID NO: 1449521 - RNA, 20 nt, Human
cauuuaaaacauuaaaauau

SEQ ID NO: 1449522 - RNA, 15 nt, Human
cauuuaaaagauaca

SEQ ID NO: 1449523 - RNA, 16 nt, Human
cauuuaaaagauacag

SEQ ID NO: 1449524 - RNA, 22 nt, Human
cauuuccucagacucuaagaaa

SEQ ID NO: 1449525 - RNA, 14 nt, Human
cauuuccucagacu

SEQ ID NO: 1449526 - RNA, 23 nt, Human
cauuuccuaucaccuauuuccau

SEQ ID NO: 1449527 - RNA, 22 nt, Human
cauuuagcuaaacggauuccaa

SEQ ID NO: 1449528 - RNA, 18 nt, Human
cauuuagccuguccuguc

SEQ ID NO: 1449529 - RNA, 17 nt, Human
cauuuagccuguccugu

SEQ ID NO: 1449530 - RNA, 16 nt, Human
cauuuagccuguccug

SEQ ID NO: 1449531 - RNA, 16 nt, Human
cauuuagcauguuguu

SEQ ID NO: 1449532 - RNA, 13 nt, Human
cauuuaauagacu

SEQ ID NO: 1449533 - RNA, 22 nt, Human
cauuuaauggggaggacaaaau

SEQ ID NO: 1449534 - RNA, 24 nt, Human
cauuguagugcuuugagagagaaa

SEQ ID NO: 1449535 - RNA, 20 nt, Human
cauuguagugcuuugagaga

SEQ ID NO: 1449536 - RNA, 18 nt, Human
cauuguagugcuuugaga

SEQ ID NO: 1449537 - RNA, 15 nt, Human
cauuguagugcuuug

SEQ ID NO: 1449538 - RNA, 19 nt, Human
cauuguagcgucuuucuuu

SEQ ID NO: 1449539 - RNA, 18 nt, Human
cauuguagcgucuuucuu

SEQ ID NO: 1449540 - RNA, 14 nt, Human
cauuguagaaaagc

SEQ ID NO: 1449541 - RNA, 15 nt, Human
cauugccaagggcuu

SEQ ID NO: 1449542 - RNA, 17 nt, Human
cauuguuucguaacaca

SEQ ID NO: 1449543 - RNA, 18 nt, Human
cauuguuuagaaagaaua

SEQ ID NO: 1449544 - RNA, 20 nt, Human
cauuguugagcuauugcugu

SEQ ID NO: 1449545 - RNA, 13 nt, Human
cauuguugagcua

SEQ ID NO: 1449546 - RNA, 22 nt, Human
cauugugccaugucaaacaaau

SEQ ID NO: 1449547 - RNA, 17 nt, Human
cauugugcuucuuucuu

SEQ ID NO: 1449548 - RNA, 18 nt, Human
cauugugauuggccugua

SEQ ID NO: 1449549 - RNA, 13 nt, Human
cauugugcuucuu

SEQ ID NO: 1449550 - RNA, 16 nt, Human
cauugugauuggccug

SEQ ID NO: 1449551 - RNA, 14 nt, Human
cauugucuuuuuag

SEQ ID NO: 1449552 - RNA, 20 nt, Human
cauugucuuuuuagaugccc

SEQ ID NO: 1449553 - RNA, 14 nt, Human
cauugucucagagc

SEQ ID NO: 1449554 - RNA, 14 nt, Human
cauuguauauguga

SEQ ID NO: 1449555 - RNA, 21 nt, Human
cauuguccaauccuauguuuu

SEQ ID NO: 1449556 - RNA, 19 nt, Human
cauuguccaauccuauguu

SEQ ID NO: 1449557 - RNA, 15 nt, Human
cauuguaugugguca

SEQ ID NO: 1449558 - RNA, 23 nt, Human
cauuguauucagaguugaugguu

SEQ ID NO: 1449559 - RNA, 22 nt, Human
ccaagacugcuguggccaggag

SEQ ID NO: 1449560 - RNA, 23 nt, Human
ccaagacugcuguggccaggagg

SEQ ID NO: 1449561 - RNA, 21 nt, Human
ccaagacugcuguggccagga

SEQ ID NO: 1449562 - RNA, 18 nt, Human
ccaagacugcuguggcca

SEQ ID NO: 1449563 - RNA, 17 nt, Human
ccaagacugcuguggcc

SEQ ID NO: 1449564 - RNA, 22 nt, Human
ccaagacucuagaguccaaggu

SEQ ID NO: 1449565 - RNA, 18 nt, Human
ccaagaugggcaucuuuu

SEQ ID NO: 1449566 - RNA, 18 nt, Human
ccaagauggcccauccug

SEQ ID NO: 1449567 - RNA, 15 nt, Human
ccaagauggcccauc

SEQ ID NO: 1449568 - RNA, 18 nt, Human
ccaagauacuuaagugcu

SEQ ID NO: 1449569 - RNA, 16 nt, Human
ccaagagucuaaagau

SEQ ID NO: 1449570 - RNA, 15 nt, Human
ccaagagucuaaaga

SEQ ID NO: 1449571 - RNA, 11 nt, Human
ccaagagucua

SEQ ID NO: 1449572 - RNA, 21 nt, Human
ccaagaggcuguucccaccag

SEQ ID NO: 1449573 - RNA, 21 nt, Human
ccaagacucuagaguccaagg

SEQ ID NO: 1449574 - RNA, 15 nt, Human
ccaagacucuagagu

SEQ ID NO: 1449575 - RNA, 14 nt, Human
ccaagacucuagag

SEQ ID NO: 1449576 - RNA, 11 nt, Human
ccaagaaucuu

SEQ ID NO: 1449577 - RNA, 21 nt, Human
ccaagaauccacauuucuaaa

SEQ ID NO: 1449578 - RNA, 19 nt, Human
ccaagaauccacauuucua

SEQ ID NO: 1449579 - RNA, 18 nt, Human
ccaagaauccacauuucu

SEQ ID NO: 1449580 - RNA, 14 nt, Human
ccaacccucagggc

SEQ ID NO: 1449581 - RNA, 13 nt, Human
ccaacccucaggg

SEQ ID NO: 1449582 - RNA, 12 nt, Human
ccaacccucagg

SEQ ID NO: 1449583 - RNA, 15 nt, Human
ccaacccucagggca

SEQ ID NO: 1449584 - RNA, 22 nt, Human
ccaacccgucuggcccaccagg

SEQ ID NO: 1449585 - RNA, 17 nt, Human
ccaacccgaggcccgca

SEQ ID NO: 1449586 - RNA, 15 nt, Human
ccaacccgaggcccg

SEQ ID NO: 1449587 - RNA, 19 nt, Human
ccaacccccgacuucaucc

SEQ ID NO: 1449588 - RNA, 18 nt, Human
ccaacccguggaggcugc

SEQ ID NO: 1449589 - RNA, 17 nt, Human
ccaacccguggaggcug

SEQ ID NO: 1449590 - RNA, 15 nt, Human
ccaacccguggaggc

SEQ ID NO: 1449591 - RNA, 14 nt, Human
ccaacccguggagg

SEQ ID NO: 1449592 - RNA, 21 nt, Human
ccaacccguggaggcugcucg

SEQ ID NO: 1449593 - RNA, 20 nt, Human
ccaacccguggaggcugcuc

SEQ ID NO: 1449594 - RNA, 12 nt, Human
ccaacccuagca

SEQ ID NO: 1449595 - RNA, 15 nt, Human
ccaaagcuuuccugc

SEQ ID NO: 1449596 - RNA, 14 nt, Human
ccaaagcuuuccug

SEQ ID NO: 1449597 - RNA, 13 nt, Human
ccaaagcuuuccu

SEQ ID NO: 1449598 - RNA, 16 nt, Human
ccaaagcuuucaugua

SEQ ID NO: 1449599 - RNA, 17 nt, Human
ccaaagcuucccacggc

SEQ ID NO: 1449600 - RNA, 14 nt, Human
ccaaaggcucccug

SEQ ID NO: 1449601 - RNA, 19 nt, Human
ccaaaggaugugauauaua

SEQ ID NO: 1449602 - RNA, 16 nt, Human
ccaaaggaugugauau

SEQ ID NO: 1449603 - RNA, 14 nt, Human
ccaaaggaggaugg

SEQ ID NO: 1449604 - RNA, 21 nt, Human
ccaaaggacgcacugagcaac

SEQ ID NO: 1449605 - RNA, 19 nt, Human
ccaaaggacgcacugagca

SEQ ID NO: 1449606 - RNA, 18 nt, Human
ccaaaggacgcacugagc

SEQ ID NO: 1449607 - RNA, 17 nt, Human
ccaaaggacagccgccu

SEQ ID NO: 1449608 - RNA, 20 nt, Human
ccaaagcuuuccugccccag

SEQ ID NO: 1449609 - RNA, 19 nt, Human
ccaaagcuuuccugcccca

SEQ ID NO: 1449610 - RNA, 17 nt, Human
ccaaagcuuuccugccc

SEQ ID NO: 1449611 - RNA, 16 nt, Human
ccaaagcuuuccugcc

SEQ ID NO: 1449612 - RNA, 12 nt, Human
ccaaacugccua

SEQ ID NO: 1449613 - RNA, 17 nt, Human
ccaaacugauccaguau

SEQ ID NO: 1449614 - RNA, 18 nt, Human
ccaaacucuucccucucu

SEQ ID NO: 1449615 - RNA, 22 nt, Human
ccaaacugacucuuaagaagac

SEQ ID NO: 1449616 - RNA, 18 nt, Human
ccaacagcuggacccuga

SEQ ID NO: 1449617 - RNA, 22 nt, Human
ccaacagcuggacccugaccag

SEQ ID NO: 1449618 - RNA, 12 nt, Human
ccaacagcugga

SEQ ID NO: 1449619 - RNA, 16 nt, Human
ccaacagcgcccaaag

SEQ ID NO: 1449620 - RNA, 23 nt, Human
ccaacagcgcccaaaggacgcac

SEQ ID NO: 1449621 - RNA, 17 nt, Human
ccaaccauuuccucaga

SEQ ID NO: 1449622 - RNA, 14 nt, Human
ccaaccauuuccuc

SEQ ID NO: 1449623 - RNA, 13 nt, Human
ccaaccauuuccu

SEQ ID NO: 1449624 - RNA, 19 nt, Human
ccaacaaagaacacuaacu

SEQ ID NO: 1449625 - RNA, 20 nt, Human
ccaaauuugauugauuugaa

SEQ ID NO: 1449626 - RNA, 15 nt, Human
ccaaauuugauugau

SEQ ID NO: 1449627 - RNA, 20 nt, Human
ccaaaguacacuguuucaaa

SEQ ID NO: 1449628 - RNA, 18 nt, Human
ccaaaggggaccuggaag

SEQ ID NO: 1449629 - RNA, 19 nt, Human
ccaaaggggaccuggaagg

SEQ ID NO: 1449630 - RNA, 21 nt, Human
ccaaagggagucugccagggc

SEQ ID NO: 1449631 - RNA, 19 nt, Human
ccaaagggagucugccagg

SEQ ID NO: 1449632 - RNA, 18 nt, Human
ccaaagggagucugccag

SEQ ID NO: 1449633 - RNA, 13 nt, Human
ccaaagggagucu

SEQ ID NO: 1449634 - RNA, 15 nt, Human
ccaaaguacacuguu

SEQ ID NO: 1449635 - RNA, 18 nt, Human
ccaaaguacacuguuuca

SEQ ID NO: 1449636 - RNA, 16 nt, Human
ccaacacugccagcau

SEQ ID NO: 1449637 - RNA, 15 nt, Human
ccaacacugccagca

SEQ ID NO: 1449638 - RNA, 14 nt, Human
ccaacacugccagc

SEQ ID NO: 1449639 - RNA, 21 nt, Human
ccaacacgcaccugccucagg

SEQ ID NO: 1449640 - RNA, 20 nt, Human
ccaacacgcaccugccucag

SEQ ID NO: 1449641 - RNA, 13 nt, Human
ccaacacugccag

SEQ ID NO: 1449642 - RNA, 23 nt, Human
ccaacaccaagcacagcagccug

SEQ ID NO: 1449643 - RNA, 22 nt, Human
ccaacaccaagcacagcagccu

SEQ ID NO: 1449644 - RNA, 19 nt, Human
ccaacaccaagcacagcag

SEQ ID NO: 1449645 - RNA, 17 nt, Human
ccaacaccaagcacagc

SEQ ID NO: 1449646 - RNA, 16 nt, Human
ccaacaccaagcacag

SEQ ID NO: 1449647 - RNA, 13 nt, Human
ccaacaccaagca

SEQ ID NO: 1449648 - RNA, 21 nt, Human
ccaacaagaagggacugagag

SEQ ID NO: 1449649 - RNA, 21 nt, Human
ccaacaagauugcuuaauaaa

SEQ ID NO: 1449650 - RNA, 16 nt, Human
ccaagguaccauccua

SEQ ID NO: 1449651 - RNA, 16 nt, Human
ccaaggggcuucaggu

SEQ ID NO: 1449652 - RNA, 22 nt, Human
ccaaggggccugagcaguccuu

SEQ ID NO: 1449653 - RNA, 17 nt, Human
ccaaggggccugagcag

SEQ ID NO: 1449654 - RNA, 16 nt, Human
ccaaggggccugagca

SEQ ID NO: 1449655 - RNA, 15 nt, Human
ccaaggggccugagc

SEQ ID NO: 1449656 - RNA, 14 nt, Human
ccaaggggccugag

SEQ ID NO: 1449657 - RNA, 22 nt, Human
ccaaggggauuuuuaugucugg

SEQ ID NO: 1449658 - RNA, 19 nt, Human
ccaaggggaaucagaacuc

SEQ ID NO: 1449659 - RNA, 21 nt, Human
ccaagggcuuuguuuugcaca

SEQ ID NO: 1449660 - RNA, 13 nt, Human
ccaagggcugccg

SEQ ID NO: 1449661 - RNA, 18 nt, Human
ccaagggaggcugcugcu

SEQ ID NO: 1449662 - RNA, 22 nt, Human
ccaagggaggcugcugcugcuc

SEQ ID NO: 1449663 - RNA, 15 nt, Human
ccaagggaggcugcu

SEQ ID NO: 1449664 - RNA, 13 nt, Human
ccaagggaggcug

SEQ ID NO: 1449665 - RNA, 19 nt, Human
ccaagggaaccuguguccg

SEQ ID NO: 1449666 - RNA, 18 nt, Human
ccaagggaaccugugucc

SEQ ID NO: 1449667 - RNA, 17 nt, Human
ccaagggaaccuguguc

SEQ ID NO: 1449668 - RNA, 16 nt, Human
ccaagggaaccugugu

SEQ ID NO: 1449669 - RNA, 18 nt, Human
ccaagggccgacuaagag

SEQ ID NO: 1449670 - RNA, 19 nt, Human
ccaagggcauaaauuauug

SEQ ID NO: 1449671 - RNA, 18 nt, Human
ccaagggauggacaucuu

SEQ ID NO: 1449672 - RNA, 16 nt, Human
ccaaggcuuucucuac

SEQ ID NO: 1449673 - RNA, 11 nt, Human
ccaaguuccuc

SEQ ID NO: 1449674 - RNA, 13 nt, Human
ccaaguuccucua

SEQ ID NO: 1449675 - RNA, 19 nt, Human
ccaaguccagguccuggug

SEQ ID NO: 1449676 - RNA, 18 nt, Human
ccaaguccagguccuggu

SEQ ID NO: 1449677 - RNA, 17 nt, Human
ccaaguccagguccugg

SEQ ID NO: 1449678 - RNA, 16 nt, Human
ccaaguccagguccug

SEQ ID NO: 1449679 - RNA, 15 nt, Human
ccaaguccagguccu

SEQ ID NO: 1449680 - RNA, 18 nt, Human
ccaauagggcugagcucu

SEQ ID NO: 1449681 - RNA, 21 nt, Human
ccaagguuuuauaaggcugau

SEQ ID NO: 1449682 - RNA, 20 nt, Human
ccaagguuuuauaaggcuga

SEQ ID NO: 1449683 - RNA, 19 nt, Human
ccaagguuuuauaaggcug

SEQ ID NO: 1449684 - RNA, 16 nt, Human
ccaaggucuucuuaau

SEQ ID NO: 1449685 - RNA, 22 nt, Human
ccaaguagaaucucaguugauu

SEQ ID NO: 1449686 - RNA, 20 nt, Human
ccaaguaacugggauuacag

SEQ ID NO: 1449687 - RNA, 20 nt, Human
ccaaguagcugggauuacag

SEQ ID NO: 1449688 - RNA, 20 nt, Human
ccaaguagcugagacuacag

SEQ ID NO: 1449689 - RNA, 19 nt, Human
ccaagccagaggcuggguu

SEQ ID NO: 1449690 - RNA, 17 nt, Human
ccaagccagaggcuggg

SEQ ID NO: 1449691 - RNA, 16 nt, Human
ccaagccagaggcugg

SEQ ID NO: 1449692 - RNA, 23 nt, Human
ccaagccaagggaaccugugucc

SEQ ID NO: 1449693 - RNA, 22 nt, Human
ccaagccaagggaaccuguguc

SEQ ID NO: 1449694 - RNA, 20 nt, Human
ccaagccaagggaaccugug

SEQ ID NO: 1449695 - RNA, 18 nt, Human
ccaagccaagggaaccug

SEQ ID NO: 1449696 - RNA, 15 nt, Human
ccaagcccagcccau

SEQ ID NO: 1449697 - RNA, 22 nt, Human
ccaagccuuggggauucuucca

SEQ ID NO: 1449698 - RNA, 17 nt, Human
ccaagcggugucucucc

SEQ ID NO: 1449699 - RNA, 15 nt, Human
ccaagcggugucucu

SEQ ID NO: 1449700 - RNA, 20 nt, Human
ccaagcuaagcacugccacu

SEQ ID NO: 1449701 - RNA, 17 nt, Human
ccaagcuaagcacugcc

SEQ ID NO: 1449702 - RNA, 17 nt, Human
ccaagcuauucaauucu

SEQ ID NO: 1449703 - RNA, 21 nt, Human
ccaagcaguugggacuacagg

SEQ ID NO: 1449704 - RNA, 20 nt, Human
ccaagcaguugggacuacag

SEQ ID NO: 1449705 - RNA, 22 nt, Human
ccaagcaguugggacuacaggc

SEQ ID NO: 1449706 - RNA, 23 nt, Human
ccaagcaucuuggggggguggcc

SEQ ID NO: 1449707 - RNA, 22 nt, Human
ccaagcaucuuggggggguggc

SEQ ID NO: 1449708 - RNA, 13 nt, Human
ccaagcaucuugg

SEQ ID NO: 1449709 - RNA, 17 nt, Human
ccaagcauuuagaugua

SEQ ID NO: 1449710 - RNA, 17 nt, Human
ccaagauucuagaugau

SEQ ID NO: 1449711 - RNA, 18 nt, Human
ccaagauugagcucucug

SEQ ID NO: 1449712 - RNA, 21 nt, Human
ccaagauuggccugaggcugc

SEQ ID NO: 1449713 - RNA, 16 nt, Human
ccaagauucuagauga

SEQ ID NO: 1449714 - RNA, 15 nt, Human
ccaagauucuagaug

SEQ ID NO: 1449715 - RNA, 14 nt, Human
ccaagauucuagau

SEQ ID NO: 1449716 - RNA, 13 nt, Human
ccaagauucuaga

SEQ ID NO: 1449717 - RNA, 20 nt, Human
ccaagauuccggauccuaag

SEQ ID NO: 1449718 - RNA, 13 nt, Human
ccaagauuccgga

SEQ ID NO: 1449719 - RNA, 22 nt, Human
ccaagaugggcaucuuuuguau

SEQ ID NO: 1449720 - RNA, 12 nt, Human
ccaagcacagca

SEQ ID NO: 1449721 - RNA, 14 nt, Human
ccaagcaaguauua

SEQ ID NO: 1449722 - RNA, 18 nt, Human
ccaagcacagcagccugg

SEQ ID NO: 1449723 - RNA, 17 nt, Human
ccaagcacagcagccug

SEQ ID NO: 1449724 - RNA, 15 nt, Human
ccaagcacagcagcc

SEQ ID NO: 1449725 - RNA, 14 nt, Human
ccaagcacagcagc

SEQ ID NO: 1449726 - RNA, 13 nt, Human
ccaagcacagcag

SEQ ID NO: 1449727 - RNA, 18 nt, Human
ccaagcacuucuuuuucu

SEQ ID NO: 1449728 - RNA, 20 nt, Human
ccaagcaccugggauuacaa

SEQ ID NO: 1449729 - RNA, 13 nt, Human
ccagacacugguu

SEQ ID NO: 1449730 - RNA, 11 nt, Human
ccagacacugg

SEQ ID NO: 1449731 - RNA, 14 nt, Human
ccagacacaggccc

SEQ ID NO: 1449732 - RNA, 12 nt, Human
ccagacacuggu

SEQ ID NO: 1449733 - RNA, 15 nt, Human
ccagacacaggcccu

SEQ ID NO: 1449734 - RNA, 16 nt, Human
ccagaauuuaaaccua

SEQ ID NO: 1449735 - RNA, 16 nt, Human
ccagaagaugacugag

SEQ ID NO: 1449736 - RNA, 21 nt, Human
ccagaagaugacugaggguga

SEQ ID NO: 1449737 - RNA, 13 nt, Human
ccagaagaugacu

SEQ ID NO: 1449738 - RNA, 18 nt, Human
ccagaagugugacuggcu

SEQ ID NO: 1449739 - RNA, 16 nt, Human
ccagaagugugacugg

SEQ ID NO: 1449740 - RNA, 13 nt, Human
ccacuuaaaaugu

SEQ ID NO: 1449741 - RNA, 16 nt, Human
ccacuuaaaaauuaaa

SEQ ID NO: 1449742 - RNA, 21 nt, Human
ccacuuacauuuacaaacuga

SEQ ID NO: 1449743 - RNA, 20 nt, Human
ccacuuaauguauguuacca

SEQ ID NO: 1449744 - RNA, 17 nt, Human
ccacuuaauguauguua

SEQ ID NO: 1449745 - RNA, 15 nt, Human
ccacuuaauguaugu

SEQ ID NO: 1449746 - RNA, 18 nt, Human
ccacuccaucugguagaa

SEQ ID NO: 1449747 - RNA, 17 nt, Human
ccacuccaucugguaga

SEQ ID NO: 1449748 - RNA, 16 nt, Human
ccacuccaucugguag

SEQ ID NO: 1449749 - RNA, 13 nt, Human
ccacuccaucugg

SEQ ID NO: 1449750 - RNA, 15 nt, Human
ccacuuauagccucu

SEQ ID NO: 1449751 - RNA, 17 nt, Human
ccacuucaagugaccac

SEQ ID NO: 1449752 - RNA, 22 nt, Human
ccacuuauuccccauucuuccu

SEQ ID NO: 1449753 - RNA, 16 nt, Human
ccacuuauagccucug

SEQ ID NO: 1449754 - RNA, 15 nt, Human
ccagaaaguaaaggu

SEQ ID NO: 1449755 - RNA, 23 nt, Human
ccagaaagccccacccaggccag

SEQ ID NO: 1449756 - RNA, 22 nt, Human
ccagaaagccccacccaggcca

SEQ ID NO: 1449757 - RNA, 21 nt, Human
ccagaaagcaguugagacaag

SEQ ID NO: 1449758 - RNA, 14 nt, Human
ccacuucagccucc

SEQ ID NO: 1449759 - RNA, 17 nt, Human
ccacucagagacaugca

SEQ ID NO: 1449760 - RNA, 15 nt, Human
ccacucagagacaug

SEQ ID NO: 1449761 - RNA, 13 nt, Human
ccacucagagaca

SEQ ID NO: 1449762 - RNA, 12 nt, Human
ccacucagagac

SEQ ID NO: 1449763 - RNA, 16 nt, Human
ccacuagccucagggg

SEQ ID NO: 1449764 - RNA, 15 nt, Human
ccacuagccucaggg

SEQ ID NO: 1449765 - RNA, 14 nt, Human
ccacuagccucagg

SEQ ID NO: 1449766 - RNA, 16 nt, Human
ccacuacauucuguua

SEQ ID NO: 1449767 - RNA, 17 nt, Human
ccacuacauucuguuaa

SEQ ID NO: 1449768 - RNA, 11 nt, Human
ccacuacauuc

SEQ ID NO: 1449769 - RNA, 15 nt, Human
ccacuacauucuguu

SEQ ID NO: 1449770 - RNA, 14 nt, Human
ccacuacauucugu

SEQ ID NO: 1449771 - RNA, 17 nt, Human
ccacguacugcagccuc

SEQ ID NO: 1449772 - RNA, 16 nt, Human
ccacguacugcagccu

SEQ ID NO: 1449773 - RNA, 13 nt, Human
ccacguacugcag

SEQ ID NO: 1449774 - RNA, 21 nt, Human
ccacgucagcugggacacccc

SEQ ID NO: 1449775 - RNA, 19 nt, Human
ccaccccagggcagccagg

SEQ ID NO: 1449776 - RNA, 20 nt, Human
ccaccccagggcagccaggg

SEQ ID NO: 1449777 - RNA, 18 nt, Human
ccaccccagggcagccag

SEQ ID NO: 1449778 - RNA, 14 nt, Human
ccaccccagggcag

SEQ ID NO: 1449779 - RNA, 17 nt, Human
ccaccccaauccuccca

SEQ ID NO: 1449780 - RNA, 15 nt, Human
ccaccccacccacuu

SEQ ID NO: 1449781 - RNA, 22 nt, Human
ccaccccaaccugcucuccucu

SEQ ID NO: 1449782 - RNA, 13 nt, Human
ccacccccaaggu

SEQ ID NO: 1449783 - RNA, 16 nt, Human
ccaccccauucccgca

SEQ ID NO: 1449784 - RNA, 18 nt, Human
ccaccccauccaguucau

SEQ ID NO: 1449785 - RNA, 12 nt, Human
ccaccccaugcu

SEQ ID NO: 1449786 - RNA, 22 nt, Human
ccaccugucugucugucugucc

SEQ ID NO: 1449787 - RNA, 11 nt, Human
ccaccugucug

SEQ ID NO: 1449788 - RNA, 12 nt, Human
ccaccugucugu

SEQ ID NO: 1449789 - RNA, 14 nt, Human
ccaccugucugucu

SEQ ID NO: 1449790 - RNA, 16 nt, Human
ccaccugucugucugu

SEQ ID NO: 1449791 - RNA, 17 nt, Human
ccacggggacucagccc

SEQ ID NO: 1449792 - RNA, 14 nt, Human
ccacgguguucugu

SEQ ID NO: 1449793 - RNA, 16 nt, Human
ccaccccaaccugcuc

SEQ ID NO: 1449794 - RNA, 17 nt, Human
ccacccaggggcagccc

SEQ ID NO: 1449795 - RNA, 23 nt, Human
ccacccaggggcagccccaggcc

SEQ ID NO: 1449796 - RNA, 14 nt, Human
ccacccaggccagg

SEQ ID NO: 1449797 - RNA, 12 nt, Human
ccacccaggcca

SEQ ID NO: 1449798 - RNA, 21 nt, Human
ccaccauuuggcaucccuggg

SEQ ID NO: 1449799 - RNA, 22 nt, Human
ccaccauuuggcaucccugggc

SEQ ID NO: 1449800 - RNA, 18 nt, Human
ccaccauuuggcaucccu

SEQ ID NO: 1449801 - RNA, 17 nt, Human
ccaccauuuggcauccc

SEQ ID NO: 1449802 - RNA, 16 nt, Human
ccaccauuuggcaucc

SEQ ID NO: 1449803 - RNA, 16 nt, Human
ccaccauggccagcua

SEQ ID NO: 1449804 - RNA, 13 nt, Human
ccacauccuccac

SEQ ID NO: 1449805 - RNA, 22 nt, Human
ccacaucccugggccugcugcu

SEQ ID NO: 1449806 - RNA, 23 nt, Human
ccacaucccugggccugcugcug

SEQ ID NO: 1449807 - RNA, 21 nt, Human
ccacaucccugggccugcugc

SEQ ID NO: 1449808 - RNA, 20 nt, Human
ccacaucccugggccugcug

SEQ ID NO: 1449809 - RNA, 19 nt, Human
ccacaucccugggccugcu

SEQ ID NO: 1449810 - RNA, 18 nt, Human
ccacaucccugggccugc

SEQ ID NO: 1449811 - RNA, 17 nt, Human
ccacaucccugggccug

SEQ ID NO: 1449812 - RNA, 16 nt, Human
ccacaucccugggccu

SEQ ID NO: 1449813 - RNA, 15 nt, Human
ccacaucccugggcc

SEQ ID NO: 1449814 - RNA, 14 nt, Human
ccacaucccugggc

SEQ ID NO: 1449815 - RNA, 13 nt, Human
ccacaucccuggg

SEQ ID NO: 1449816 - RNA, 16 nt, Human
ccacaucccaucgucu

SEQ ID NO: 1449817 - RNA, 22 nt, Human
ccacaucccacucacaacagcu

SEQ ID NO: 1449818 - RNA, 19 nt, Human
ccacagugucaggcacugg

SEQ ID NO: 1449819 - RNA, 14 nt, Human
ccacagugucaggc

SEQ ID NO: 1449820 - RNA, 13 nt, Human
ccacagugucagg

SEQ ID NO: 1449821 - RNA, 20 nt, Human
ccacagugccuaauaauacu

SEQ ID NO: 1449822 - RNA, 19 nt, Human
ccacagucccaucugcuuc

SEQ ID NO: 1449823 - RNA, 17 nt, Human
ccacaguagucuugaug

SEQ ID NO: 1449824 - RNA, 15 nt, Human
ccacaguagucuuga

SEQ ID NO: 1449825 - RNA, 15 nt, Human
ccacaggucuagacu

SEQ ID NO: 1449826 - RNA, 14 nt, Human
ccacaggucuagac

SEQ ID NO: 1449827 - RNA, 21 nt, Human
ccacagggucccacagccacg

SEQ ID NO: 1449828 - RNA, 20 nt, Human
ccacagggucccacagccac

SEQ ID NO: 1449829 - RNA, 19 nt, Human
ccacagggucccacagcca

SEQ ID NO: 1449830 - RNA, 16 nt, Human
ccacagggucccacag

SEQ ID NO: 1449831 - RNA, 19 nt, Human
ccacaggcuucugagcagc

SEQ ID NO: 1449832 - RNA, 14 nt, Human
ccacaggcuucuga

SEQ ID NO: 1449833 - RNA, 20 nt, Human
ccacaggcucaggcaggggc

SEQ ID NO: 1449834 - RNA, 19 nt, Human
ccacaggcucaggcagggg

SEQ ID NO: 1449835 - RNA, 17 nt, Human
ccacaggcucaggcagg

SEQ ID NO: 1449836 - RNA, 21 nt, Human
ccacaggcucaggcaggggcc

SEQ ID NO: 1449837 - RNA, 16 nt, Human
ccacaggcucaggcag

SEQ ID NO: 1449838 - RNA, 15 nt, Human
ccacaggcucaggca

SEQ ID NO: 1449839 - RNA, 18 nt, Human
ccaccaacccucagggca

SEQ ID NO: 1449840 - RNA, 17 nt, Human
ccaccaacccucagggc

SEQ ID NO: 1449841 - RNA, 16 nt, Human
ccaccaacccucaggg

SEQ ID NO: 1449842 - RNA, 15 nt, Human
ccaccaacccucagg

SEQ ID NO: 1449843 - RNA, 14 nt, Human
ccaccaacccucag

SEQ ID NO: 1449844 - RNA, 13 nt, Human
ccaccaacccuca

SEQ ID NO: 1449845 - RNA, 16 nt, Human
ccaccaaaacugcucc

SEQ ID NO: 1449846 - RNA, 15 nt, Human
ccaccaaaacugcuc

SEQ ID NO: 1449847 - RNA, 17 nt, Human
ccaccaagagggacgcc

SEQ ID NO: 1449848 - RNA, 21 nt, Human
ccaccaagagggacgccuggg

SEQ ID NO: 1449849 - RNA, 13 nt, Human
ccacauuuggaau

SEQ ID NO: 1449850 - RNA, 15 nt, Human
ccacauuucuaaaau

SEQ ID NO: 1449851 - RNA, 14 nt, Human
ccacauuucuaaaa

SEQ ID NO: 1449852 - RNA, 17 nt, Human
ccacauuggaagagcag

SEQ ID NO: 1449853 - RNA, 19 nt, Human
ccacauuggaagagcagca

SEQ ID NO: 1449854 - RNA, 14 nt, Human
ccacauuggaagag

SEQ ID NO: 1449855 - RNA, 20 nt, Human
ccacauuaaagaagaccuga

SEQ ID NO: 1449856 - RNA, 16 nt, Human
ccacauuaaagaagac

SEQ ID NO: 1449857 - RNA, 14 nt, Human
ccacauuaaagaag

SEQ ID NO: 1449858 - RNA, 13 nt, Human
ccacauuaaagaa

SEQ ID NO: 1449859 - RNA, 19 nt, Human
ccacauuuggaauacuuuu

SEQ ID NO: 1449860 - RNA, 22 nt, Human
ccacauuuggaauacuuuuugu

SEQ ID NO: 1449861 - RNA, 16 nt, Human
ccacaugggaggcuca

SEQ ID NO: 1449862 - RNA, 17 nt, Human
ccacauggcacagagau

SEQ ID NO: 1449863 - RNA, 15 nt, Human
ccacauggcacagag

SEQ ID NO: 1449864 - RNA, 12 nt, Human
ccacaugcccca

SEQ ID NO: 1449865 - RNA, 14 nt, Human
ccacaugccccauc

SEQ ID NO: 1449866 - RNA, 22 nt, Human
ccacaugccauuuguacugacc

SEQ ID NO: 1449867 - RNA, 20 nt, Human
ccacaugccauuuguacuga

SEQ ID NO: 1449868 - RNA, 22 nt, Human
ccacacagugcucaaggccagc

SEQ ID NO: 1449869 - RNA, 23 nt, Human
ccacacagugcucaaggccagcu

SEQ ID NO: 1449870 - RNA, 20 nt, Human
ccacacagugcucaaggcca

SEQ ID NO: 1449871 - RNA, 16 nt, Human
ccacacagcugccggu

SEQ ID NO: 1449872 - RNA, 12 nt, Human
ccacacagcugc

SEQ ID NO: 1449873 - RNA, 15 nt, Human
ccaauauuaaaucug

SEQ ID NO: 1449874 - RNA, 22 nt, Human
ccaauagggcugagcucucugu

SEQ ID NO: 1449875 - RNA, 18 nt, Human
ccaauauuaaaucugcug

SEQ ID NO: 1449876 - RNA, 20 nt, Human
ccacaccagggccagccucu

SEQ ID NO: 1449877 - RNA, 19 nt, Human
ccacaccagggccagccuc

SEQ ID NO: 1449878 - RNA, 17 nt, Human
ccacaggccgcccugcg

SEQ ID NO: 1449879 - RNA, 16 nt, Human
ccacaggccgcccugc

SEQ ID NO: 1449880 - RNA, 21 nt, Human
ccacaggacauuucucuaaga

SEQ ID NO: 1449881 - RNA, 16 nt, Human
ccacaggacauuucuc

SEQ ID NO: 1449882 - RNA, 23 nt, Human
ccacaggaagccugcaguccugg

SEQ ID NO: 1449883 - RNA, 19 nt, Human
ccacacucagauccuccuc

SEQ ID NO: 1449884 - RNA, 18 nt, Human
ccacacucagauccuccu

SEQ ID NO: 1449885 - RNA, 11 nt, Human
ccacacucaga

SEQ ID NO: 1449886 - RNA, 19 nt, Human
ccacacccuguacuguucu

SEQ ID NO: 1449887 - RNA, 16 nt, Human
ccacacccuguacugu

SEQ ID NO: 1449888 - RNA, 21 nt, Human
ccacacucagauccuccucau

SEQ ID NO: 1449889 - RNA, 14 nt, Human
ccacacucagcaca

SEQ ID NO: 1449890 - RNA, 22 nt, Human
ccacaggaagccugcaguccug

SEQ ID NO: 1449891 - RNA, 19 nt, Human
ccacaggaagccugcaguc

SEQ ID NO: 1449892 - RNA, 15 nt, Human
ccacagcuuuugcaa

SEQ ID NO: 1449893 - RNA, 13 nt, Human
ccacagcuuuugc

SEQ ID NO: 1449894 - RNA, 20 nt, Human
ccacaggaaccacaagacug

SEQ ID NO: 1449895 - RNA, 23 nt, Human
ccaggccaaaggggaccuggaag

SEQ ID NO: 1449896 - RNA, 22 nt, Human
ccaggccaaaggggaccuggaa

SEQ ID NO: 1449897 - RNA, 16 nt, Human
ccaggcauugccaagg

SEQ ID NO: 1449898 - RNA, 18 nt, Human
ccaggcauguggcagggg

SEQ ID NO: 1449899 - RNA, 20 nt, Human
ccaggcauccuccacaauag

SEQ ID NO: 1449900 - RNA, 20 nt, Human
ccaggaggacccagggcucu

SEQ ID NO: 1449901 - RNA, 21 nt, Human
ccaggaggacccagggcucug

SEQ ID NO: 1449902 - RNA, 19 nt, Human
ccaggaggacccagggcuc

SEQ ID NO: 1449903 - RNA, 18 nt, Human
ccaggaggacccagggcu

SEQ ID NO: 1449904 - RNA, 15 nt, Human
ccaggaggacccagg

SEQ ID NO: 1449905 - RNA, 14 nt, Human
ccaggaggacccag

SEQ ID NO: 1449906 - RNA, 13 nt, Human
ccaggacucugca

SEQ ID NO: 1449907 - RNA, 12 nt, Human
ccaggacucugc

SEQ ID NO: 1449908 - RNA, 23 nt, Human
ccaggccccaugaccuccagcuu

SEQ ID NO: 1449909 - RNA, 22 nt, Human
ccaggccccaugaccuccagcu

SEQ ID NO: 1449910 - RNA, 21 nt, Human
ccaggccccaugaccuccagc

SEQ ID NO: 1449911 - RNA, 20 nt, Human
ccaggccccaugaccuccag

SEQ ID NO: 1449912 - RNA, 18 nt, Human
ccaggccccaugaccucc

SEQ ID NO: 1449913 - RNA, 17 nt, Human
ccaggccccaugaccuc

SEQ ID NO: 1449914 - RNA, 16 nt, Human
ccaggccccaugaccu

SEQ ID NO: 1449915 - RNA, 15 nt, Human
ccaggccccaugacc

SEQ ID NO: 1449916 - RNA, 13 nt, Human
ccaggccccauga

SEQ ID NO: 1449917 - RNA, 17 nt, Human
ccaggcuugccugcagg

SEQ ID NO: 1449918 - RNA, 18 nt, Human
ccagggccacgcuccagc

SEQ ID NO: 1449919 - RNA, 19 nt, Human
ccagggccacgcuccagcu

SEQ ID NO: 1449920 - RNA, 16 nt, Human
ccagggccacgcucca

SEQ ID NO: 1449921 - RNA, 14 nt, Human
ccagggccacgcuc

SEQ ID NO: 1449922 - RNA, 19 nt, Human
ccagggcaucucugggcug

SEQ ID NO: 1449923 - RNA, 20 nt, Human
ccagggcaucucugggcugg

SEQ ID NO: 1449924 - RNA, 18 nt, Human
ccagggcaucucugggcu

SEQ ID NO: 1449925 - RNA, 17 nt, Human
ccagggcaucucugggc

SEQ ID NO: 1449926 - RNA, 16 nt, Human
ccagggcaucucuggg

SEQ ID NO: 1449927 - RNA, 15 nt, Human
ccagggcaucucugg

SEQ ID NO: 1449928 - RNA, 14 nt, Human
ccagggcaucucug

SEQ ID NO: 1449929 - RNA, 13 nt, Human
ccagggcaucucu

SEQ ID NO: 1449930 - RNA, 20 nt, Human
ccagggcagccagggagagc

SEQ ID NO: 1449931 - RNA, 19 nt, Human
ccagggcagccagggagag

SEQ ID NO: 1449932 - RNA, 15 nt, Human
ccagggcagccaggg

SEQ ID NO: 1449933 - RNA, 14 nt, Human
ccagggcagccagg

SEQ ID NO: 1449934 - RNA, 13 nt, Human
ccagggcagccag

SEQ ID NO: 1449935 - RNA, 23 nt, Human
ccagggaagcagcagccucgccc

SEQ ID NO: 1449936 - RNA, 18 nt, Human
ccagggaagcagcagccu

SEQ ID NO: 1449937 - RNA, 16 nt, Human
ccagggaagcagcagc

SEQ ID NO: 1449938 - RNA, 14 nt, Human
ccagggaagcagca

SEQ ID NO: 1449939 - RNA, 23 nt, Human
ccaggcuucugcuggggccuggg

SEQ ID NO: 1449940 - RNA, 21 nt, Human
ccaggcugguuucgaacuccu

SEQ ID NO: 1449941 - RNA, 18 nt, Human
ccaggcuugccugcaggc

SEQ ID NO: 1449942 - RNA, 19 nt, Human
ccaggcuuuuuuaucaugu

SEQ ID NO: 1449943 - RNA, 23 nt, Human
ccaggucccucucauuuagccug

SEQ ID NO: 1449944 - RNA, 16 nt, Human
ccaggucccucucauu

SEQ ID NO: 1449945 - RNA, 15 nt, Human
ccaggucccucucau

SEQ ID NO: 1449946 - RNA, 13 nt, Human
ccaggucccucuc

SEQ ID NO: 1449947 - RNA, 12 nt, Human
ccaggucccucu

SEQ ID NO: 1449948 - RNA, 18 nt, Human
ccagguccagcucuggag

SEQ ID NO: 1449949 - RNA, 19 nt, Human
ccagguccagcucuggagg

SEQ ID NO: 1449950 - RNA, 17 nt, Human
ccagguccagcucugga

SEQ ID NO: 1449951 - RNA, 16 nt, Human
ccagguccagcucugg

SEQ ID NO: 1449952 - RNA, 15 nt, Human
ccagguccagcucug

SEQ ID NO: 1449953 - RNA, 14 nt, Human
ccagguccagcucu

SEQ ID NO: 1449954 - RNA, 13 nt, Human
ccagguccagcuc

SEQ ID NO: 1449955 - RNA, 20 nt, Human
ccagguccaaugagcuuucu

SEQ ID NO: 1449956 - RNA, 19 nt, Human
ccagguccaaugagcuuuc

SEQ ID NO: 1449957 - RNA, 18 nt, Human
ccagguccaaugagcuuu

SEQ ID NO: 1449958 - RNA, 17 nt, Human
ccagguccaaugagcuu

SEQ ID NO: 1449959 - RNA, 14 nt, Human
ccagggcuccagcc

SEQ ID NO: 1449960 - RNA, 20 nt, Human
ccaggucacccuuugcugug

SEQ ID NO: 1449961 - RNA, 12 nt, Human
ccagggcuccag

SEQ ID NO: 1449962 - RNA, 17 nt, Human
ccagggcuccagccccu

SEQ ID NO: 1449963 - RNA, 19 nt, Human
ccagggcuagugacuugug

SEQ ID NO: 1449964 - RNA, 16 nt, Human
ccagggcuagugacuu

SEQ ID NO: 1449965 - RNA, 15 nt, Human
ccagggccugucuca

SEQ ID NO: 1449966 - RNA, 23 nt, Human
ccaggugaacaaaguuuaccaga

SEQ ID NO: 1449967 - RNA, 13 nt, Human
ccaggucucccug

SEQ ID NO: 1449968 - RNA, 20 nt, Human
ccaggucucccuggaucaga

SEQ ID NO: 1449969 - RNA, 21 nt, Human
ccagguccugguggggcagcu

SEQ ID NO: 1449970 - RNA, 19 nt, Human
ccagguccugguggggcag

SEQ ID NO: 1449971 - RNA, 15 nt, Human
ccagguccugguggg

SEQ ID NO: 1449972 - RNA, 14 nt, Human
ccagguccuggugg

SEQ ID NO: 1449973 - RNA, 13 nt, Human
ccagguccuggug

SEQ ID NO: 1449974 - RNA, 12 nt, Human
ccagguccuggu

SEQ ID NO: 1449975 - RNA, 20 nt, Human
ccaggugaggucagcacauc

SEQ ID NO: 1449976 - RNA, 19 nt, Human
ccaggugaggucagcacau

SEQ ID NO: 1449977 - RNA, 15 nt, Human
ccaggugaggucagc

SEQ ID NO: 1449978 - RNA, 21 nt, Human
ccagguguuacuguaauuccu

SEQ ID NO: 1449979 - RNA, 17 nt, Human
ccagguguuacuguaau

SEQ ID NO: 1449980 - RNA, 23 nt, Human
ccagguguuaacauuccaagacu

SEQ ID NO: 1449981 - RNA, 20 nt, Human
ccagguguuaacauuccaag

SEQ ID NO: 1449982 - RNA, 19 nt, Human
ccagguguuaacauuccaa

SEQ ID NO: 1449983 - RNA, 22 nt, Human
ccaggugcuacacccuuuucca

SEQ ID NO: 1449984 - RNA, 16 nt, Human
ccaguaacaggcucaa

SEQ ID NO: 1449985 - RNA, 16 nt, Human
ccaguaacucaucugu

SEQ ID NO: 1449986 - RNA, 15 nt, Human
ccaguaacucaucug

SEQ ID NO: 1449987 - RNA, 21 nt, Human
ccaguaacgcgucuuccugag

SEQ ID NO: 1449988 - RNA, 20 nt, Human
ccaguaacgcgucuuccuga

SEQ ID NO: 1449989 - RNA, 19 nt, Human
ccaguaacgcgucuuccug

SEQ ID NO: 1449990 - RNA, 15 nt, Human
ccaguaacaggcuca

SEQ ID NO: 1449991 - RNA, 14 nt, Human
ccaguaacaggcuc

SEQ ID NO: 1449992 - RNA, 22 nt, Human
ccagucuuccugacacuuuaau

SEQ ID NO: 1449993 - RNA, 17 nt, Human
ccagucuuccugacacu

SEQ ID NO: 1449994 - RNA, 16 nt, Human
ccagucuguuccccau

SEQ ID NO: 1449995 - RNA, 18 nt, Human
ccaguaucucuucagucu

SEQ ID NO: 1449996 - RNA, 20 nt, Human
ccaguaucucuucagucucu

SEQ ID NO: 1449997 - RNA, 21 nt, Human
ccagucuguggaucagagaug

SEQ ID NO: 1449998 - RNA, 22 nt, Human
ccaguagaccuuguuacuucug

SEQ ID NO: 1449999 - RNA, 18 nt, Human
ccaguacaccccaccucu

SEQ ID NO: 1450000 - RNA, 20 nt, Human
ccaguaggggcuuauaauaa

SEQ ID NO: 1450001 - RNA, 13 nt, Human
ccaguaucgcuca

SEQ ID NO: 1450002 - RNA, 15 nt, Human
ccaguaucucuucag

SEQ ID NO: 1450003 - RNA, 16 nt, Human
ccaguaucucuucagu

SEQ ID NO: 1450004 - RNA, 22 nt, Human
ccagcugcuccgaggacccagg

SEQ ID NO: 1450005 - RNA, 18 nt, Human
ccagcugggcucugcaau

SEQ ID NO: 1450006 - RNA, 16 nt, Human
ccagcugggcucugca

SEQ ID NO: 1450007 - RNA, 23 nt, Human
ccagcuggaggcaggggcuuccu

SEQ ID NO: 1450008 - RNA, 22 nt, Human
ccagcuggaggcaggggcuucc

SEQ ID NO: 1450009 - RNA, 18 nt, Human
ccagcuggaggcaggggc

SEQ ID NO: 1450010 - RNA, 17 nt, Human
ccagcuggaggcagggg

SEQ ID NO: 1450011 - RNA, 15 nt, Human
ccagcuggaggcagg

SEQ ID NO: 1450012 - RNA, 13 nt, Human
ccagcuggaggca

SEQ ID NO: 1450013 - RNA, 22 nt, Human
ccagcugccuagauucagggaa

SEQ ID NO: 1450014 - RNA, 18 nt, Human
ccagcugccccggccccu

SEQ ID NO: 1450015 - RNA, 19 nt, Human
ccagcugcacugaugcugc

SEQ ID NO: 1450016 - RNA, 18 nt, Human
ccagcugcacugaugcug

SEQ ID NO: 1450017 - RNA, 14 nt, Human
ccagcugcacugau

SEQ ID NO: 1450018 - RNA, 19 nt, Human
ccagcucuggaggggaggg

SEQ ID NO: 1450019 - RNA, 16 nt, Human
ccagagcccagcucca

SEQ ID NO: 1450020 - RNA, 15 nt, Human
ccagagcccagcucc

SEQ ID NO: 1450021 - RNA, 14 nt, Human
ccagagcccagcuc

SEQ ID NO: 1450022 - RNA, 13 nt, Human
ccagagcccagcu

SEQ ID NO: 1450023 - RNA, 12 nt, Human
ccagagcccagc

SEQ ID NO: 1450024 - RNA, 11 nt, Human
ccagagcccag

SEQ ID NO: 1450025 - RNA, 20 nt, Human
ccagagcccacuccaucugg

SEQ ID NO: 1450026 - RNA, 15 nt, Human
ccagagcccacucca

SEQ ID NO: 1450027 - RNA, 15 nt, Human
ccaggaagcuuuggu

SEQ ID NO: 1450028 - RNA, 22 nt, Human
ccaggaagccguccuggcgccu

SEQ ID NO: 1450029 - RNA, 16 nt, Human
ccaggaagccguccug

SEQ ID NO: 1450030 - RNA, 11 nt, Human
ccaggaagccg

SEQ ID NO: 1450031 - RNA, 15 nt, Human
ccaggacaagcaugg

SEQ ID NO: 1450032 - RNA, 22 nt, Human
ccaggaauuucccaggacccug

SEQ ID NO: 1450033 - RNA, 23 nt, Human
ccaggaauuucccaggacccuga

SEQ ID NO: 1450034 - RNA, 21 nt, Human
ccaggaauuucccaggacccu

SEQ ID NO: 1450035 - RNA, 20 nt, Human
ccaggaauuucccaggaccc

SEQ ID NO: 1450036 - RNA, 19 nt, Human
ccaggaauuucccaggacc

SEQ ID NO: 1450037 - RNA, 18 nt, Human
ccaggaauuucccaggac

SEQ ID NO: 1450038 - RNA, 17 nt, Human
ccaggaauuucccagga

SEQ ID NO: 1450039 - RNA, 16 nt, Human
ccaggaauuucccagg

SEQ ID NO: 1450040 - RNA, 14 nt, Human
ccaggaauuuccca

SEQ ID NO: 1450041 - RNA, 20 nt, Human
ccaggaagucucaucugggg

SEQ ID NO: 1450042 - RNA, 15 nt, Human
ccaggaagucucauc

SEQ ID NO: 1450043 - RNA, 14 nt, Human
ccaggaagucucau

SEQ ID NO: 1450044 - RNA, 19 nt, Human
ccagcugggcucugcaauu

SEQ ID NO: 1450045 - RNA, 17 nt, Human
ccagcuggggccaggcu

SEQ ID NO: 1450046 - RNA, 18 nt, Human
ccagcuggggccaggcug

SEQ ID NO: 1450047 - RNA, 19 nt, Human
ccagcuggggccaggcugg

SEQ ID NO: 1450048 - RNA, 20 nt, Human
ccagcuggggccaggcuggg

SEQ ID NO: 1450049 - RNA, 21 nt, Human
ccagcuggggccaggcugggu

SEQ ID NO: 1450050 - RNA, 22 nt, Human
ccagcuggggccaggcuggguc

SEQ ID NO: 1450051 - RNA, 23 nt, Human
ccagcuggggccaggcugggucg

SEQ ID NO: 1450052 - RNA, 21 nt, Human
ccaggacuauauuugggccug

SEQ ID NO: 1450053 - RNA, 20 nt, Human
ccaggacuauauuugggccu

SEQ ID NO: 1450054 - RNA, 12 nt, Human
ccaggaccacag

SEQ ID NO: 1450055 - RNA, 15 nt, Human
ccaggacaggaucca

SEQ ID NO: 1450056 - RNA, 17 nt, Human
ccaggacaggauccagg

SEQ ID NO: 1450057 - RNA, 19 nt, Human
ccaggacaggauccaggcc

SEQ ID NO: 1450058 - RNA, 23 nt, Human
ccaggacaagcauggucccacau

SEQ ID NO: 1450059 - RNA, 20 nt, Human
ccaggacaagcaugguccca

SEQ ID NO: 1450060 - RNA, 17 nt, Human
ccaggacaagcaugguc

SEQ ID NO: 1450061 - RNA, 13 nt, Human
ccaggacaggauc

SEQ ID NO: 1450062 - RNA, 14 nt, Human
ccauucugcuccuu

SEQ ID NO: 1450063 - RNA, 13 nt, Human
ccauucugcuccu

SEQ ID NO: 1450064 - RNA, 14 nt, Human
ccauggagaaagcu

SEQ ID NO: 1450065 - RNA, 13 nt, Human
ccauggagaaagc

SEQ ID NO: 1450066 - RNA, 21 nt, Human
ccauggacucuguccugaagg

SEQ ID NO: 1450067 - RNA, 18 nt, Human
ccauggacucuguccuga

SEQ ID NO: 1450068 - RNA, 16 nt, Human
ccauggacucuguccu

SEQ ID NO: 1450069 - RNA, 15 nt, Human
ccauggacucugucc

SEQ ID NO: 1450070 - RNA, 19 nt, Human
ccauggacaggcuggcucc

SEQ ID NO: 1450071 - RNA, 18 nt, Human
ccauggacaggcuggcuc

SEQ ID NO: 1450072 - RNA, 16 nt, Human
ccauggacaggcuggc

SEQ ID NO: 1450073 - RNA, 22 nt, Human
ccaugcugugcgcccagggcug

SEQ ID NO: 1450074 - RNA, 20 nt, Human
ccaugcugugcgcccagggc

SEQ ID NO: 1450075 - RNA, 19 nt, Human
ccaugcugugcgcccaggg

SEQ ID NO: 1450076 - RNA, 22 nt, Human
cccaaacaccuuccagcuccug

SEQ ID NO: 1450077 - RNA, 21 nt, Human
cccaaacaccuuccagcuccu

SEQ ID NO: 1450078 - RNA, 19 nt, Human
cccaaacaccuuccagcuc

SEQ ID NO: 1450079 - RNA, 16 nt, Human
cccaaacaccuuccag

SEQ ID NO: 1450080 - RNA, 23 nt, Human
cccaaacgcccuuuccuccucag

SEQ ID NO: 1450081 - RNA, 16 nt, Human
cccaaacgcccuuucc

SEQ ID NO: 1450082 - RNA, 21 nt, Human
cccaaagcaagcaagaggccg

SEQ ID NO: 1450083 - RNA, 13 nt, Human
cccaaagcaagca

SEQ ID NO: 1450084 - RNA, 22 nt, Human
cccaaacgcccuuuccuccuca

SEQ ID NO: 1450085 - RNA, 19 nt, Human
ccauucuggaagugacuuu

SEQ ID NO: 1450086 - RNA, 19 nt, Human
ccauucugcuccuucccca

SEQ ID NO: 1450087 - RNA, 16 nt, Human
ccauucugcuccuucc

SEQ ID NO: 1450088 - RNA, 12 nt, Human
ccauucuggaag

SEQ ID NO: 1450089 - RNA, 15 nt, Human
ccauucuggaaguga

SEQ ID NO: 1450090 - RNA, 16 nt, Human
ccaucugggcuccucc

SEQ ID NO: 1450091 - RNA, 12 nt, Human
ccaucugggcuc

SEQ ID NO: 1450092 - RNA, 21 nt, Human
ccaugauggcaacagaucugg

SEQ ID NO: 1450093 - RNA, 19 nt, Human
ccaugauggcaacagaucu

SEQ ID NO: 1450094 - RNA, 16 nt, Human
ccaugauggcaacaga

SEQ ID NO: 1450095 - RNA, 15 nt, Human
ccaugauggcaacag

SEQ ID NO: 1450096 - RNA, 14 nt, Human
ccaugauggcaaca

SEQ ID NO: 1450097 - RNA, 17 nt, Human
ccaugcacugugaagga

SEQ ID NO: 1450098 - RNA, 16 nt, Human
ccaugcacugugaagg

SEQ ID NO: 1450099 - RNA, 15 nt, Human
ccaugcacugugaag

SEQ ID NO: 1450100 - RNA, 13 nt, Human
ccaugcacuguga

SEQ ID NO: 1450101 - RNA, 11 nt, Human
ccaugcacugu

SEQ ID NO: 1450102 - RNA, 21 nt, Human
ccaugcacccucauacacaga

SEQ ID NO: 1450103 - RNA, 23 nt, Human
ccaugauucuauuuauauguaca

SEQ ID NO: 1450104 - RNA, 16 nt, Human
ccaugauguuuagaaa

SEQ ID NO: 1450105 - RNA, 23 nt, Human
ccaugcugcuggggaagacagug

SEQ ID NO: 1450106 - RNA, 22 nt, Human
ccaugcugcuggggaagacagu

SEQ ID NO: 1450107 - RNA, 24 nt, Human
ccaugcuccucuuccccagacgcc

SEQ ID NO: 1450108 - RNA, 17 nt, Human
ccaugcuggccuugcca

SEQ ID NO: 1450109 - RNA, 19 nt, Human
ccaugcugaggccugggcc

SEQ ID NO: 1450110 - RNA, 18 nt, Human
ccaugcugaggccugggc

SEQ ID NO: 1450111 - RNA, 20 nt, Human
ccaugcugaggccugggccg

SEQ ID NO: 1450112 - RNA, 20 nt, Human
ccaugcucaucugcuggucc

SEQ ID NO: 1450113 - RNA, 18 nt, Human
ccaugcucaucugcuggu

SEQ ID NO: 1450114 - RNA, 17 nt, Human
ccaugcucaucugcugg

SEQ ID NO: 1450115 - RNA, 18 nt, Human
ccaugcuccucuucccca

SEQ ID NO: 1450116 - RNA, 16 nt, Human
ccaugcuccucuuccc

SEQ ID NO: 1450117 - RNA, 15 nt, Human
ccaugcuccucuucc

SEQ ID NO: 1450118 - RNA, 13 nt, Human
ccaugcuccucuu

SEQ ID NO: 1450119 - RNA, 20 nt, Human
ccaugcuccucuuccccaga

SEQ ID NO: 1450120 - RNA, 19 nt, Human
ccaugcuccucuuccccag

SEQ ID NO: 1450121 - RNA, 16 nt, Human
ccaugcucaucugcug

SEQ ID NO: 1450122 - RNA, 13 nt, Human
ccaugcucaucug

SEQ ID NO: 1450123 - RNA, 20 nt, Human
ccaugcguguuucugacucu

SEQ ID NO: 1450124 - RNA, 22 nt, Human
ccaugcgcucagggccaugcug

SEQ ID NO: 1450125 - RNA, 16 nt, Human
ccaugcgcucagggcc

SEQ ID NO: 1450126 - RNA, 15 nt, Human
ccaugcgcucagggc

SEQ ID NO: 1450127 - RNA, 13 nt, Human
ccaugcgcucagg

SEQ ID NO: 1450128 - RNA, 22 nt, Human
ccaugcgcccccuccgcccugc

SEQ ID NO: 1450129 - RNA, 21 nt, Human
ccaugcccggcuaauuuuugu

SEQ ID NO: 1450130 - RNA, 20 nt, Human
ccaugcacugugaaggaccc

SEQ ID NO: 1450131 - RNA, 19 nt, Human
ccaugcacugugaaggacc

SEQ ID NO: 1450132 - RNA, 21 nt, Human
ccaugcacugugaaggacccu

SEQ ID NO: 1450133 - RNA, 11 nt, Human
ccaugcagaaa

SEQ ID NO: 1450134 - RNA, 15 nt, Human
ccaugcagaaagcau

SEQ ID NO: 1450135 - RNA, 14 nt, Human
ccaugcagaaagca

SEQ ID NO: 1450136 - RNA, 18 nt, Human
ccauagucuuaacugguc

SEQ ID NO: 1450137 - RNA, 15 nt, Human
ccauagucuuaacug

SEQ ID NO: 1450138 - RNA, 22 nt, Human
ccagugaagagccacugccauu

SEQ ID NO: 1450139 - RNA, 18 nt, Human
ccauauccuuacccuccu

SEQ ID NO: 1450140 - RNA, 21 nt, Human
ccauaucacacacauugcugu

SEQ ID NO: 1450141 - RNA, 21 nt, Human
ccauaguggaucacucaccau

SEQ ID NO: 1450142 - RNA, 16 nt, Human
ccaucaaguugugcca

SEQ ID NO: 1450143 - RNA, 22 nt, Human
ccaucagaaacacccucacacu

SEQ ID NO: 1450144 - RNA, 15 nt, Human
ccaucugcuccugga

SEQ ID NO: 1450145 - RNA, 14 nt, Human
ccaucugcuccugg

SEQ ID NO: 1450146 - RNA, 13 nt, Human
ccaucugcuccug

SEQ ID NO: 1450147 - RNA, 12 nt, Human
ccaucugcuccu

SEQ ID NO: 1450148 - RNA, 11 nt, Human
ccaucugcucc

SEQ ID NO: 1450149 - RNA, 23 nt, Human
ccaucugcgugacaauaaaacau

SEQ ID NO: 1450150 - RNA, 19 nt, Human
ccaucucccuggugcuuau

SEQ ID NO: 1450151 - RNA, 20 nt, Human
ccaucucccuggugcuuaug

SEQ ID NO: 1450152 - RNA, 17 nt, Human
ccaucucccuggugcuu

SEQ ID NO: 1450153 - RNA, 16 nt, Human
ccaucucccuggugcu

SEQ ID NO: 1450154 - RNA, 15 nt, Human
ccaucucccuggugc

SEQ ID NO: 1450155 - RNA, 12 nt, Human
ccaucucccugg

SEQ ID NO: 1450156 - RNA, 17 nt, Human
ccauccaccuuucccaa

SEQ ID NO: 1450157 - RNA, 17 nt, Human
ccauccacaugggagcc

SEQ ID NO: 1450158 - RNA, 15 nt, Human
ccauccaaggccagg

SEQ ID NO: 1450159 - RNA, 16 nt, Human
ccaucaucaugugugu

SEQ ID NO: 1450160 - RNA, 17 nt, Human
ccaucagugcucccuca

SEQ ID NO: 1450161 - RNA, 12 nt, Human
ccaucagugcuc

SEQ ID NO: 1450162 - RNA, 20 nt, Human
ccaucaggguaggcuggagu

SEQ ID NO: 1450163 - RNA, 13 nt, Human
ccaucagccucca

SEQ ID NO: 1450164 - RNA, 23 nt, Human
ccaucagaaacacccucacacug

SEQ ID NO: 1450165 - RNA, 18 nt, Human
cccauuccuucccagagg

SEQ ID NO: 1450166 - RNA, 14 nt, Human
cccauuccugggaa

SEQ ID NO: 1450167 - RNA, 14 nt, Human
cccauggcccugag

SEQ ID NO: 1450168 - RNA, 15 nt, Human
cccauggcauuuuau

SEQ ID NO: 1450169 - RNA, 22 nt, Human
cccauggcagugggaaaaaugu

SEQ ID NO: 1450170 - RNA, 23 nt, Human
cccauggagauugaccuggaugg

SEQ ID NO: 1450171 - RNA, 21 nt, Human
cccauggagauugaccuggau

SEQ ID NO: 1450172 - RNA, 20 nt, Human
cccauggagauugaccugga

SEQ ID NO: 1450173 - RNA, 16 nt, Human
cccagugcacuugcug

SEQ ID NO: 1450174 - RNA, 22 nt, Human
ccccaacuccuuccagcuagug

SEQ ID NO: 1450175 - RNA, 17 nt, Human
ccccaacuccuuccagc

SEQ ID NO: 1450176 - RNA, 16 nt, Human
ccccaacuccuuccag

SEQ ID NO: 1450177 - RNA, 23 nt, Human
ccccaaccauuuccucagacucu

SEQ ID NO: 1450178 - RNA, 16 nt, Human
ccccaacaugcacuga

SEQ ID NO: 1450179 - RNA, 23 nt, Human
ccccaacagcuggacccugacca

SEQ ID NO: 1450180 - RNA, 22 nt, Human
ccccaacagcuggacccugacc

SEQ ID NO: 1450181 - RNA, 21 nt, Human
ccccaacagcuggacccugac

SEQ ID NO: 1450182 - RNA, 14 nt, Human
ccccaacagcugga

SEQ ID NO: 1450183 - RNA, 13 nt, Human
ccccaacagcugg

SEQ ID NO: 1450184 - RNA, 17 nt, Human
ccccaacagcgcccaaa

SEQ ID NO: 1450185 - RNA, 15 nt, Human
ccccaacagcgccca

SEQ ID NO: 1450186 - RNA, 14 nt, Human
ccccaacagcgccc

SEQ ID NO: 1450187 - RNA, 20 nt, Human
ccccaagggaggcugcugcu

SEQ ID NO: 1450188 - RNA, 17 nt, Human
ccccaagcuguuuucuu

SEQ ID NO: 1450189 - RNA, 16 nt, Human
ccccaagcuguuuucu

SEQ ID NO: 1450190 - RNA, 14 nt, Human
ccccaagcuguuuu

SEQ ID NO: 1450191 - RNA, 22 nt, Human
ccccaagauugagcucucugcc

SEQ ID NO: 1450192 - RNA, 18 nt, Human
cccaggcccacugugccu

SEQ ID NO: 1450193 - RNA, 11 nt, Human
cccaggcccac

SEQ ID NO: 1450194 - RNA, 20 nt, Human
cccaggccccaugaccucca

SEQ ID NO: 1450195 - RNA, 17 nt, Human
cccaggccccaugaccu

SEQ ID NO: 1450196 - RNA, 16 nt, Human
cccaggccccaugacc

SEQ ID NO: 1450197 - RNA, 14 nt, Human
cccaggccccauga

SEQ ID NO: 1450198 - RNA, 22 nt, Human
cccaggcccacugugccucaga

SEQ ID NO: 1450199 - RNA, 23 nt, Human
cccaggccaggacucugcagccu

SEQ ID NO: 1450200 - RNA, 22 nt, Human
cccaggccaggacucugcagcc

SEQ ID NO: 1450201 - RNA, 21 nt, Human
cccaggccaggacucugcagc

SEQ ID NO: 1450202 - RNA, 20 nt, Human
cccaggccaggacucugcag

SEQ ID NO: 1450203 - RNA, 19 nt, Human
cccaggccaggacucugca

SEQ ID NO: 1450204 - RNA, 18 nt, Human
cccaggccaggacucugc

SEQ ID NO: 1450205 - RNA, 17 nt, Human
cccaggccaggacucug

SEQ ID NO: 1450206 - RNA, 15 nt, Human
cccaggccaggacuc

SEQ ID NO: 1450207 - RNA, 14 nt, Human
cccaggccaggacu

SEQ ID NO: 1450208 - RNA, 13 nt, Human
cccaggccaggac

SEQ ID NO: 1450209 - RNA, 13 nt, Human
cccaggcacugca

SEQ ID NO: 1450210 - RNA, 21 nt, Human
cccaggcauugccaagggcuu

SEQ ID NO: 1450211 - RNA, 14 nt, Human
cccaggcauugcca

SEQ ID NO: 1450212 - RNA, 17 nt, Human
cccaggcacugggcucc

SEQ ID NO: 1450213 - RNA, 12 nt, Human
cccaggcacugc

SEQ ID NO: 1450214 - RNA, 19 nt, Human
cccaggcaaggcuguggac

SEQ ID NO: 1450215 - RNA, 18 nt, Human
cccaggcaaggcugugga

SEQ ID NO: 1450216 - RNA, 13 nt, Human
cccaggcaaggcu

SEQ ID NO: 1450217 - RNA, 15 nt, Human
cccaggauccccaag

SEQ ID NO: 1450218 - RNA, 13 nt, Human
cccaggagcuccc

SEQ ID NO: 1450219 - RNA, 20 nt, Human
cccaggagcuccccucccca

SEQ ID NO: 1450220 - RNA, 12 nt, Human
cccaggagcucc

SEQ ID NO: 1450221 - RNA, 17 nt, Human
cccaggguccugggagg

SEQ ID NO: 1450222 - RNA, 18 nt, Human
cccaggguccugggagga

SEQ ID NO: 1450223 - RNA, 16 nt, Human
cccaggguccugggag

SEQ ID NO: 1450224 - RNA, 15 nt, Human
cccaggguccuggga

SEQ ID NO: 1450225 - RNA, 23 nt, Human
cccaggggcucccuccgccccca

SEQ ID NO: 1450226 - RNA, 17 nt, Human
cccaggggcucccuccg

SEQ ID NO: 1450227 - RNA, 16 nt, Human
cccaggggcucccucc

SEQ ID NO: 1450228 - RNA, 14 nt, Human
cccaggggcucccu

SEQ ID NO: 1450229 - RNA, 16 nt, Human
cccaggggcagcccca

SEQ ID NO: 1450230 - RNA, 22 nt, Human
cccaggcucguggacugagugg

SEQ ID NO: 1450231 - RNA, 17 nt, Human
cccaggcucguggacug

SEQ ID NO: 1450232 - RNA, 19 nt, Human
cccaggcucggccugcccc

SEQ ID NO: 1450233 - RNA, 17 nt, Human
cccaggcucggccugcc

SEQ ID NO: 1450234 - RNA, 21 nt, Human
cccaggccccaugaccuccag

SEQ ID NO: 1450235 - RNA, 22 nt, Human
cccaggccccaugaccuccagc

SEQ ID NO: 1450236 - RNA, 21 nt, Human
cccaggucucccuggaucaga

SEQ ID NO: 1450237 - RNA, 13 nt, Human
cccagguccucac

SEQ ID NO: 1450238 - RNA, 18 nt, Human
cccagguccagcucugga

SEQ ID NO: 1450239 - RNA, 17 nt, Human
cccagguccagcucugg

SEQ ID NO: 1450240 - RNA, 19 nt, Human
cccagguguuaacauucca

SEQ ID NO: 1450241 - RNA, 22 nt, Human
cccagguguuaacauuccaaga

SEQ ID NO: 1450242 - RNA, 21 nt, Human
cccagguguuaacauuccaag

SEQ ID NO: 1450243 - RNA, 18 nt, Human
cccagguuggagugcagu

SEQ ID NO: 1450244 - RNA, 21 nt, Human
cccagguuggcucugccaguc

SEQ ID NO: 1450245 - RNA, 20 nt, Human
cccagguuggcucugccagu

SEQ ID NO: 1450246 - RNA, 18 nt, Human
cccagguuggcucugcca

SEQ ID NO: 1450247 - RNA, 16 nt, Human
cccagguuggcucugc

SEQ ID NO: 1450248 - RNA, 15 nt, Human
cccagguuggcucug

SEQ ID NO: 1450249 - RNA, 14 nt, Human
cccagguuggcucu

SEQ ID NO: 1450250 - RNA, 19 nt, Human
cccagguuggagugcagug

SEQ ID NO: 1450251 - RNA, 14 nt, Human
cccagugacagcua

SEQ ID NO: 1450252 - RNA, 21 nt, Human
cccagugagcagccuggagcc

SEQ ID NO: 1450253 - RNA, 15 nt, Human
cccagugacagcuag

SEQ ID NO: 1450254 - RNA, 11 nt, Human
cccagucuguc

SEQ ID NO: 1450255 - RNA, 17 nt, Human
cccagucuguuccccau

SEQ ID NO: 1450256 - RNA, 17 nt, Human
cccagucauucugggaa

SEQ ID NO: 1450257 - RNA, 15 nt, Human
cccaguaucucuuca

SEQ ID NO: 1450258 - RNA, 16 nt, Human
cccaguagaccuuguu

SEQ ID NO: 1450259 - RNA, 16 nt, Human
cccaguaucucuucag

SEQ ID NO: 1450260 - RNA, 22 nt, Human
cccagcuccugacacugcugga

SEQ ID NO: 1450261 - RNA, 20 nt, Human
cccagcuccugacacugcug

SEQ ID NO: 1450262 - RNA, 12 nt, Human
cccagcuccuga

SEQ ID NO: 1450263 - RNA, 11 nt, Human
cccagcuccug

SEQ ID NO: 1450264 - RNA, 17 nt, Human
cccagcuccggccuguc

SEQ ID NO: 1450265 - RNA, 13 nt, Human
cccagcucccagg

SEQ ID NO: 1450266 - RNA, 14 nt, Human
cccagcucccagga

SEQ ID NO: 1450267 - RNA, 16 nt, Human
cccagcucccaccucc

SEQ ID NO: 1450268 - RNA, 12 nt, Human
cccagcucccac

SEQ ID NO: 1450269 - RNA, 22 nt, Human
cccagcuacccuuuuucuccag

SEQ ID NO: 1450270 - RNA, 22 nt, Human
cccagcuaagaaccuggaacuu

SEQ ID NO: 1450271 - RNA, 20 nt, Human
cccagcuaagaaccuggaac

SEQ ID NO: 1450272 - RNA, 19 nt, Human
cccagcuaagaaccuggaa

SEQ ID NO: 1450273 - RNA, 18 nt, Human
cccagcuaagaaccugga

SEQ ID NO: 1450274 - RNA, 17 nt, Human
cccagcuaagaaccugg

SEQ ID NO: 1450275 - RNA, 16 nt, Human
cccagcuaagaaccug

SEQ ID NO: 1450276 - RNA, 16 nt, Human
cccagcggcaucaggc

SEQ ID NO: 1450277 - RNA, 14 nt, Human
cccagcggacacac

SEQ ID NO: 1450278 - RNA, 15 nt, Human
cccagcggacacacg

SEQ ID NO: 1450279 - RNA, 21 nt, Human
cccagcgauucccucucccag

SEQ ID NO: 1450280 - RNA, 23 nt, Human
cccagcgauucccucucccaggc

SEQ ID NO: 1450281 - RNA, 14 nt, Human
cccagcgauucccu

SEQ ID NO: 1450282 - RNA, 10 nt, Human
cccagccugg

SEQ ID NO: 1450283 - RNA, 23 nt, Human
cccagccgcuuggcgaugccagc

SEQ ID NO: 1450284 - RNA, 19 nt, Human
cccagccgacccccucucc

SEQ ID NO: 1450285 - RNA, 22 nt, Human
cccagccgacccccucucccug

SEQ ID NO: 1450286 - RNA, 22 nt, Human
cccagagggucugggggcacaa

SEQ ID NO: 1450287 - RNA, 15 nt, Human
cccagagggucuggg

SEQ ID NO: 1450288 - RNA, 23 nt, Human
cccagaggggccugccaccugga

SEQ ID NO: 1450289 - RNA, 21 nt, Human
cccagaggggccugccaccug

SEQ ID NO: 1450290 - RNA, 20 nt, Human
cccagaggggccugccaccu

SEQ ID NO: 1450291 - RNA, 19 nt, Human
cccagaggggccugccacc

SEQ ID NO: 1450292 - RNA, 18 nt, Human
cccagaggggccugccac

SEQ ID NO: 1450293 - RNA, 17 nt, Human
cccagaggggccugcca

SEQ ID NO: 1450294 - RNA, 15 nt, Human
cccagaggggccugc

SEQ ID NO: 1450295 - RNA, 14 nt, Human
cccagaggggccug

SEQ ID NO: 1450296 - RNA, 13 nt, Human
cccagaggggccu

SEQ ID NO: 1450297 - RNA, 12 nt, Human
cccacacucaga

SEQ ID NO: 1450298 - RNA, 21 nt, Human
cccacacucagauccuccuca

SEQ ID NO: 1450299 - RNA, 19 nt, Human
cccaaauuugauugauuug

SEQ ID NO: 1450300 - RNA, 14 nt, Human
cccaaauggcccug

SEQ ID NO: 1450301 - RNA, 13 nt, Human
cccaacacaaaga

SEQ ID NO: 1450302 - RNA, 16 nt, Human
cccaaauuugauugau

SEQ ID NO: 1450303 - RNA, 13 nt, Human
cccaacaccucuu

SEQ ID NO: 1450304 - RNA, 14 nt, Human
cccaauccagugga

SEQ ID NO: 1450305 - RNA, 19 nt, Human
cccaaguucaugcagcugu

SEQ ID NO: 1450306 - RNA, 22 nt, Human
cccaauuucggauuuuuuccaa

SEQ ID NO: 1450307 - RNA, 15 nt, Human
cccaauuucagacuc

SEQ ID NO: 1450308 - RNA, 14 nt, Human
cccaauugcuggag

SEQ ID NO: 1450309 - RNA, 15 nt, Human
cccaauugagaaaaa

SEQ ID NO: 1450310 - RNA, 20 nt, Human
ccguggggccgccgccucuu

SEQ ID NO: 1450311 - RNA, 18 nt, Human
ccgcuuggagcagagggg

SEQ ID NO: 1450312 - RNA, 17 nt, Human
ccgcuuggagcagaggg

SEQ ID NO: 1450313 - RNA, 20 nt, Human
ccgcuuggagcuauuuucca

SEQ ID NO: 1450314 - RNA, 15 nt, Human
ccgcuuggagcagag

SEQ ID NO: 1450315 - RNA, 15 nt, Human
ccgcccugccacuca

SEQ ID NO: 1450316 - RNA, 14 nt, Human
ccgcccugccacuc

SEQ ID NO: 1450317 - RNA, 13 nt, Human
ccgcccugccacu

SEQ ID NO: 1450318 - RNA, 15 nt, Human
ccggcugcagaggcc

SEQ ID NO: 1450319 - RNA, 18 nt, Human
ccggaccagccuggccca

SEQ ID NO: 1450320 - RNA, 16 nt, Human
ccggaccagccuggcc

SEQ ID NO: 1450321 - RNA, 15 nt, Human
ccggaccagccuggc

SEQ ID NO: 1450322 - RNA, 14 nt, Human
ccggaccagccugg

SEQ ID NO: 1450323 - RNA, 13 nt, Human
ccggaccagccug

SEQ ID NO: 1450324 - RNA, 11 nt, Human
ccggaaagaag

SEQ ID NO: 1450325 - RNA, 21 nt, Human
ccgggccacuccuuccugccc

SEQ ID NO: 1450326 - RNA, 20 nt, Human
ccgggccacuccuuccugcc

SEQ ID NO: 1450327 - RNA, 19 nt, Human
ccgggccacuccuuccugc

SEQ ID NO: 1450328 - RNA, 23 nt, Human
ccguuucauuuagucaugugacc

SEQ ID NO: 1450329 - RNA, 17 nt, Human
ccguggggccgccgccu

SEQ ID NO: 1450330 - RNA, 14 nt, Human
ccgugggcucccug

SEQ ID NO: 1450331 - RNA, 15 nt, Human
ccguggcuuugguuu

SEQ ID NO: 1450332 - RNA, 19 nt, Human
ccgugggccccacccucgg

SEQ ID NO: 1450333 - RNA, 22 nt, Human
ccgugggcaauugucugaaaag

SEQ ID NO: 1450334 - RNA, 19 nt, Human
ccguuuugucacuuuuucu

SEQ ID NO: 1450335 - RNA, 14 nt, Human
ccguuuugucacuu

SEQ ID NO: 1450336 - RNA, 18 nt, Human
ccuaaaagaaacccugca

SEQ ID NO: 1450337 - RNA, 17 nt, Human
ccuaauucuaugccugu

SEQ ID NO: 1450338 - RNA, 16 nt, Human
ccuaaagaaaaacaaa

SEQ ID NO: 1450339 - RNA, 19 nt, Human
ccuaaagccucaaaacaaa

SEQ ID NO: 1450340 - RNA, 13 nt, Human
ccuaaagccucaa

SEQ ID NO: 1450341 - RNA, 14 nt, Human
ccuaaaguguauuu

SEQ ID NO: 1450342 - RNA, 22 nt, Human
ccuagagaagacaggcuggaag

SEQ ID NO: 1450343 - RNA, 19 nt, Human
ccuagagaagacaggcugg

SEQ ID NO: 1450344 - RNA, 17 nt, Human
ccuagagaagacaggcu

SEQ ID NO: 1450345 - RNA, 16 nt, Human
ccuaccugugccugac

SEQ ID NO: 1450346 - RNA, 15 nt, Human
ccuaccugugccuga

SEQ ID NO: 1450347 - RNA, 14 nt, Human
ccuaccugugccug

SEQ ID NO: 1450348 - RNA, 13 nt, Human
ccuaccugcccca

SEQ ID NO: 1450349 - RNA, 21 nt, Human
ccuaccccgcagacaccuugg

SEQ ID NO: 1450350 - RNA, 20 nt, Human
ccuaccccgcagacaccuug

SEQ ID NO: 1450351 - RNA, 22 nt, Human
ccuaccccauggugcuaggaag

SEQ ID NO: 1450352 - RNA, 13 nt, Human
ccuaccuccaaag

SEQ ID NO: 1450353 - RNA, 15 nt, Human
ccuacccuaaccaag

SEQ ID NO: 1450354 - RNA, 16 nt, Human
ccuacccuaaccaagu

SEQ ID NO: 1450355 - RNA, 18 nt, Human
ccuacccuaaccaaguuc

SEQ ID NO: 1450356 - RNA, 23 nt, Human
ccucaguagucccugcacaguga

SEQ ID NO: 1450357 - RNA, 17 nt, Human
ccuaucaccuauuucca

SEQ ID NO: 1450358 - RNA, 16 nt, Human
ccuaucaccuauuucc

SEQ ID NO: 1450359 - RNA, 20 nt, Human
ccuaucacccaacgcuccaa

SEQ ID NO: 1450360 - RNA, 24 nt, Human
ccuagagaagacaggcuggaagau

SEQ ID NO: 1450361 - RNA, 12 nt, Human
ccuauggccuca

SEQ ID NO: 1450362 - RNA, 15 nt, Human
ccuauggccucaugu

SEQ ID NO: 1450363 - RNA, 22 nt, Human
ccuauggagagcccugggaccg

SEQ ID NO: 1450364 - RNA, 21 nt, Human
ccuauggagagcccugggacc

SEQ ID NO: 1450365 - RNA, 19 nt, Human
ccuauggagagcccuggga

SEQ ID NO: 1450366 - RNA, 20 nt, Human
ccuaucagaguugcugcaaa

SEQ ID NO: 1450367 - RNA, 23 nt, Human
ccucaaugccaguaacgcgucuu

SEQ ID NO: 1450368 - RNA, 18 nt, Human
ccucaauccagcuauguu

SEQ ID NO: 1450369 - RNA, 13 nt, Human
ccucaauccagcu

SEQ ID NO: 1450370 - RNA, 18 nt, Human
ccuaugucauuucauuuc

SEQ ID NO: 1450371 - RNA, 16 nt, Human
ccucaauuucugaaca

SEQ ID NO: 1450372 - RNA, 22 nt, Human
ccucacaaguggguacccccag

SEQ ID NO: 1450373 - RNA, 21 nt, Human
ccucacaaguggguaccccca

SEQ ID NO: 1450374 - RNA, 15 nt, Human
ccucacaggccccag

SEQ ID NO: 1450375 - RNA, 13 nt, Human
ccucacacacccu

SEQ ID NO: 1450376 - RNA, 23 nt, Human
ccucacacacaaugugucugaga

SEQ ID NO: 1450377 - RNA, 14 nt, Human
ccucaccuccucua

SEQ ID NO: 1450378 - RNA, 21 nt, Human
ccucaccuuggcaccagacac

SEQ ID NO: 1450379 - RNA, 16 nt, Human
ccucaccuuggcacca

SEQ ID NO: 1450380 - RNA, 15 nt, Human
ccucaccuuggcacc

SEQ ID NO: 1450381 - RNA, 15 nt, Human
ccucaccuucugagu

SEQ ID NO: 1450382 - RNA, 15 nt, Human
ccucaccuguagcag

SEQ ID NO: 1450383 - RNA, 17 nt, Human
ccuauggagagcccugg

SEQ ID NO: 1450384 - RNA, 19 nt, Human
ccucacccccagcuuugcu

SEQ ID NO: 1450385 - RNA, 17 nt, Human
ccucacccccagcuuug

SEQ ID NO: 1450386 - RNA, 21 nt, Human
ccucacccaccccugcacagu

SEQ ID NO: 1450387 - RNA, 19 nt, Human
ccucacccaccccugcaca

SEQ ID NO: 1450388 - RNA, 22 nt, Human
ccucacaguauugcucacccag

SEQ ID NO: 1450389 - RNA, 17 nt, Human
ccucacaguauugcuca

SEQ ID NO: 1450390 - RNA, 16 nt, Human
ccucacccaccccugc

SEQ ID NO: 1450391 - RNA, 14 nt, Human
ccccacuggagcag

SEQ ID NO: 1450392 - RNA, 13 nt, Human
ccccacuggagca

SEQ ID NO: 1450393 - RNA, 12 nt, Human
ccccacuggagc

SEQ ID NO: 1450394 - RNA, 24 nt, Human
ccccacuggagcagaaggggagau

SEQ ID NO: 1450395 - RNA, 15 nt, Human
ccccacugaccagaa

SEQ ID NO: 1450396 - RNA, 14 nt, Human
ccccacugaccaga

SEQ ID NO: 1450397 - RNA, 17 nt, Human
ccccacucugcucugau

SEQ ID NO: 1450398 - RNA, 19 nt, Human
ccccacucugcucugaugc

SEQ ID NO: 1450399 - RNA, 16 nt, Human
ccccacucugcucuga

SEQ ID NO: 1450400 - RNA, 15 nt, Human
ccccacucugcucug

SEQ ID NO: 1450401 - RNA, 13 nt, Human
ccccacucugcuc

SEQ ID NO: 1450402 - RNA, 12 nt, Human
ccccacucugcu

SEQ ID NO: 1450403 - RNA, 21 nt, Human
ccccagcuaagaaccuggaac

SEQ ID NO: 1450404 - RNA, 19 nt, Human
ccccagcuaagaaccugga

SEQ ID NO: 1450405 - RNA, 17 nt, Human
ccccagcuaagaaccug

SEQ ID NO: 1450406 - RNA, 11 nt, Human
ccccagccugu

SEQ ID NO: 1450407 - RNA, 20 nt, Human
ccccagccugggccuaugga

SEQ ID NO: 1450408 - RNA, 10 nt, Human
ccccagccug

SEQ ID NO: 1450409 - RNA, 16 nt, Human
ccccagccucuggcau

SEQ ID NO: 1450410 - RNA, 15 nt, Human
ccccagccucuggca

SEQ ID NO: 1450411 - RNA, 14 nt, Human
ccccagccucuggc

SEQ ID NO: 1450412 - RNA, 15 nt, Human
ccccagccucccuga

SEQ ID NO: 1450413 - RNA, 13 nt, Human
ccccagccucccu

SEQ ID NO: 1450414 - RNA, 21 nt, Human
ccccagccgcuuggcgaugcc

SEQ ID NO: 1450415 - RNA, 23 nt, Human
ccccagcugucaucaauuaaagg

SEQ ID NO: 1450416 - RNA, 14 nt, Human
ccccagcucccagg

SEQ ID NO: 1450417 - RNA, 13 nt, Human
ccccagcuccggc

SEQ ID NO: 1450418 - RNA, 11 nt, Human
ccccagcuccg

SEQ ID NO: 1450419 - RNA, 13 nt, Human
ccccagcucccag

SEQ ID NO: 1450420 - RNA, 14 nt, Human
ccccagcucccacc

SEQ ID NO: 1450421 - RNA, 13 nt, Human
ccccagcucccac

SEQ ID NO: 1450422 - RNA, 14 nt, Human
ccccagcucaaugg

SEQ ID NO: 1450423 - RNA, 22 nt, Human
ccccagcuacccuuuuucucca

SEQ ID NO: 1450424 - RNA, 11 nt, Human
ccccagcuacc

SEQ ID NO: 1450425 - RNA, 15 nt, Human
ccccaggaccagcuc

SEQ ID NO: 1450426 - RNA, 13 nt, Human
ccccaggaccagc

SEQ ID NO: 1450427 - RNA, 20 nt, Human
ccccaggaccagaagcuccc

SEQ ID NO: 1450428 - RNA, 18 nt, Human
ccccaggaccagaagcuc

SEQ ID NO: 1450429 - RNA, 14 nt, Human
ccccaggaccagaa

SEQ ID NO: 1450430 - RNA, 13 nt, Human
ccccaggaccaga

SEQ ID NO: 1450431 - RNA, 11 nt, Human
ccccaggacca

SEQ ID NO: 1450432 - RNA, 16 nt, Human
ccccaggaccagcuca

SEQ ID NO: 1450433 - RNA, 19 nt, Human
cccccaagcuguuuucuuc

SEQ ID NO: 1450434 - RNA, 20 nt, Human
cccccaaccauuuccucaga

SEQ ID NO: 1450435 - RNA, 15 nt, Human
ccccgucaagaguga

SEQ ID NO: 1450436 - RNA, 17 nt, Human
cccccuggccuccccca

SEQ ID NO: 1450437 - RNA, 14 nt, Human
cccccugcugccau

SEQ ID NO: 1450438 - RNA, 22 nt, Human
cccccugccccccagccucugg

SEQ ID NO: 1450439 - RNA, 19 nt, Human
cccccucucccugcauggc

SEQ ID NO: 1450440 - RNA, 18 nt, Human
cccccucucccugcaugg

SEQ ID NO: 1450441 - RNA, 13 nt, Human
ccccccuguacac

SEQ ID NO: 1450442 - RNA, 12 nt, Human
ccccccuggccu

SEQ ID NO: 1450443 - RNA, 12 nt, Human
ccccccucuguc

SEQ ID NO: 1450444 - RNA, 17 nt, Human
cccccucucccugcaug

SEQ ID NO: 1450445 - RNA, 15 nt, Human
cccccucucccugca

SEQ ID NO: 1450446 - RNA, 14 nt, Human
cccccucucccugc

SEQ ID NO: 1450447 - RNA, 14 nt, Human
cccccucucccagu

SEQ ID NO: 1450448 - RNA, 14 nt, Human
cccccggcagcagc

SEQ ID NO: 1450449 - RNA, 21 nt, Human
cccccagcccagggcuccugc

SEQ ID NO: 1450450 - RNA, 14 nt, Human
cccccagcccaggg

SEQ ID NO: 1450451 - RNA, 13 nt, Human
cccccagcccagg

SEQ ID NO: 1450452 - RNA, 12 nt, Human
cccccagcacuu

SEQ ID NO: 1450453 - RNA, 18 nt, Human
cccccaagggaggcugcu

SEQ ID NO: 1450454 - RNA, 20 nt, Human
cccccaagggaggcugcugc

SEQ ID NO: 1450455 - RNA, 13 nt, Human
cccccaauccaug

SEQ ID NO: 1450456 - RNA, 18 nt, Human
cccccaagguucuccaac

SEQ ID NO: 1450457 - RNA, 11 nt, Human
cccccagcacu

SEQ ID NO: 1450458 - RNA, 15 nt, Human
cccccaggaccagaa

SEQ ID NO: 1450459 - RNA, 23 nt, Human
cccccagcuuugcuaccaaagca

SEQ ID NO: 1450460 - RNA, 14 nt, Human
cccccaggaccaga

SEQ ID NO: 1450461 - RNA, 22 nt, Human
cccccagcccccuccuggugcc

SEQ ID NO: 1450462 - RNA, 14 nt, Human
ccccccaugcacug

SEQ ID NO: 1450463 - RNA, 14 nt, Human
ccccccagauauca

SEQ ID NO: 1450464 - RNA, 13 nt, Human
ccccccagccucu

SEQ ID NO: 1450465 - RNA, 12 nt, Human
ccccccagccuc

SEQ ID NO: 1450466 - RNA, 21 nt, Human
ccccccagauaucaucuaccu

SEQ ID NO: 1450467 - RNA, 21 nt, Human
ccccccaagggaggcugcugc

SEQ ID NO: 1450468 - RNA, 19 nt, Human
ccccccaagggaggcugcu

SEQ ID NO: 1450469 - RNA, 14 nt, Human
cccccaugcacugu

SEQ ID NO: 1450470 - RNA, 18 nt, Human
cccccaugcacugugaag

SEQ ID NO: 1450471 - RNA, 18 nt, Human
cccccaggguccugggag

SEQ ID NO: 1450472 - RNA, 16 nt, Human
cccccaucauccucug

SEQ ID NO: 1450473 - RNA, 18 nt, Human
cccccaguaucucuucag

SEQ ID NO: 1450474 - RNA, 14 nt, Human
cccuuacaguagga

SEQ ID NO: 1450475 - RNA, 19 nt, Human
cccuguuucagaggcucag

SEQ ID NO: 1450476 - RNA, 16 nt, Human
cccuguuucagaggcu

SEQ ID NO: 1450477 - RNA, 11 nt, Human
cccuguugcua

SEQ ID NO: 1450478 - RNA, 13 nt, Human
cccuguacagugu

SEQ ID NO: 1450479 - RNA, 18 nt, Human
cccuguacacaacucacu

SEQ ID NO: 1450480 - RNA, 11 nt, Human
cccuguaacuu

SEQ ID NO: 1450481 - RNA, 15 nt, Human
cccuguacaguguua

SEQ ID NO: 1450482 - RNA, 18 nt, Human
cccuguacuguucugugu

SEQ ID NO: 1450483 - RNA, 19 nt, Human
cccuguaccuuuugaggag

SEQ ID NO: 1450484 - RNA, 20 nt, Human
cccuguacaguguuaccauc

SEQ ID NO: 1450485 - RNA, 13 nt, Human
ccccuccccucca

SEQ ID NO: 1450486 - RNA, 20 nt, Human
ccccucccccugagauucag

SEQ ID NO: 1450487 - RNA, 14 nt, Human
ccccuagaguccca

SEQ ID NO: 1450488 - RNA, 18 nt, Human
ccccuaagagagcaccug

SEQ ID NO: 1450489 - RNA, 17 nt, Human
ccccuaagagagcaccu

SEQ ID NO: 1450490 - RNA, 23 nt, Human
ccccuaacccuuugugugcucuc

SEQ ID NO: 1450491 - RNA, 22 nt, Human
ccccuaacccuuugugugcucu

SEQ ID NO: 1450492 - RNA, 14 nt, Human
ccccguuucuggug

SEQ ID NO: 1450493 - RNA, 19 nt, Human
ccccuaaagccucaaaaca

SEQ ID NO: 1450494 - RNA, 20 nt, Human
ccccuaaaagaaacccugca

SEQ ID NO: 1450495 - RNA, 13 nt, Human
ccgagaagaacag

SEQ ID NO: 1450496 - RNA, 22 nt, Human
ccgacuuuuguuuaccagagaa

SEQ ID NO: 1450497 - RNA, 15 nt, Human
ccgacuggggcaggg

SEQ ID NO: 1450498 - RNA, 16 nt, Human
cccuuuuucuccagcu

SEQ ID NO: 1450499 - RNA, 15 nt, Human
cccuuuuucuccagc

SEQ ID NO: 1450500 - RNA, 14 nt, Human
cccuuuuucaauga

SEQ ID NO: 1450501 - RNA, 20 nt, Human
cccuuuuggguuucugcccu

SEQ ID NO: 1450502 - RNA, 16 nt, Human
cccuuuuggguuucug

SEQ ID NO: 1450503 - RNA, 13 nt, Human
cccuuuucuguuc

SEQ ID NO: 1450504 - RNA, 12 nt, Human
ccgcccugccac

SEQ ID NO: 1450505 - RNA, 11 nt, Human
ccgcccugcca

SEQ ID NO: 1450506 - RNA, 13 nt, Human
ccgaugcccagag

SEQ ID NO: 1450507 - RNA, 16 nt, Human
ccgaugcccagagaca

SEQ ID NO: 1450508 - RNA, 12 nt, Human
ccgaggcugaga

SEQ ID NO: 1450509 - RNA, 18 nt, Human
ccgagcuccucuuccaug

SEQ ID NO: 1450510 - RNA, 17 nt, Human
ccgagcuccucuuccau

SEQ ID NO: 1450511 - RNA, 16 nt, Human
ccgagcuccucuucca

SEQ ID NO: 1450512 - RNA, 11 nt, Human
ccgagcuccuc

SEQ ID NO: 1450513 - RNA, 20 nt, Human
ccgagcagcugagcagggcc

SEQ ID NO: 1450514 - RNA, 18 nt, Human
ccgagcagcugagcaggg

SEQ ID NO: 1450515 - RNA, 17 nt, Human
ccgagcagcugagcagg

SEQ ID NO: 1450516 - RNA, 16 nt, Human
ccgagcagcugagcag

SEQ ID NO: 1450517 - RNA, 15 nt, Human
ccgagcagcugagca

SEQ ID NO: 1450518 - RNA, 14 nt, Human
ccgagcagcugagc

SEQ ID NO: 1450519 - RNA, 12 nt, Human
ccgagcagcuga

SEQ ID NO: 1450520 - RNA, 23 nt, Human
ccgagcaaccguggcccuuccug

SEQ ID NO: 1450521 - RNA, 21 nt, Human
ccgagcagcugagcagggccg

SEQ ID NO: 1450522 - RNA, 16 nt, Human
ccgagcaggaggccua

SEQ ID NO: 1450523 - RNA, 18 nt, Human
ccgagcaaccguggcccu

SEQ ID NO: 1450524 - RNA, 16 nt, Human
ccgagcaaccguggcc

SEQ ID NO: 1450525 - RNA, 14 nt, Human
ccgagcaaccgugg

SEQ ID NO: 1450526 - RNA, 21 nt, Human
cccuugggccagaaguaccag

SEQ ID NO: 1450527 - RNA, 16 nt, Human
cccuugggccagaagu

SEQ ID NO: 1450528 - RNA, 15 nt, Human
cccuugggccagaag

SEQ ID NO: 1450529 - RNA, 21 nt, Human
cccuuccucccuauuaaccua

SEQ ID NO: 1450530 - RNA, 16 nt, Human
cccuugaugaagaagu

SEQ ID NO: 1450531 - RNA, 23 nt, Human
cccuuugugugcucuccauucug

SEQ ID NO: 1450532 - RNA, 23 nt, Human
cccuuugcugugaggcuguccug

SEQ ID NO: 1450533 - RNA, 17 nt, Human
cccuuugcugcauggca

SEQ ID NO: 1450534 - RNA, 14 nt, Human
cccuuugccuucau

SEQ ID NO: 1450535 - RNA, 17 nt, Human
cccuuugcccagaaaga

SEQ ID NO: 1450536 - RNA, 14 nt, Human
cccuuugagugcag

SEQ ID NO: 1450537 - RNA, 12 nt, Human
cccuuugagugc

SEQ ID NO: 1450538 - RNA, 22 nt, Human
cccuuucuaucguucucucuuu

SEQ ID NO: 1450539 - RNA, 17 nt, Human
cccuuucuagaccaaua

SEQ ID NO: 1450540 - RNA, 16 nt, Human
cccuuucuagaccaau

SEQ ID NO: 1450541 - RNA, 18 nt, Human
cccuuucggauccaggga

SEQ ID NO: 1450542 - RNA, 22 nt, Human
cccuuggggguccuccuccagg

SEQ ID NO: 1450543 - RNA, 21 nt, Human
cccuuggggguccuccuccag

SEQ ID NO: 1450544 - RNA, 12 nt, Human
cccuuggggguc

SEQ ID NO: 1450545 - RNA, 16 nt, Human
cccuugggcucugaug

SEQ ID NO: 1450546 - RNA, 15 nt, Human
cccuugggcucugau

SEQ ID NO: 1450547 - RNA, 14 nt, Human
cccuugggcccaca

SEQ ID NO: 1450548 - RNA, 15 nt, Human
cccuugggcccacac

SEQ ID NO: 1450549 - RNA, 23 nt, Human
cccuuggggguccuccuccaggg

SEQ ID NO: 1450550 - RNA, 17 nt, Human
cccuuuccuccucaggc

SEQ ID NO: 1450551 - RNA, 14 nt, Human
cccuuuccuccuca

SEQ ID NO: 1450552 - RNA, 16 nt, Human
cccuuuccugaguccc

SEQ ID NO: 1450553 - RNA, 21 nt, Human
ccugaauuuuguugcuguuuu

SEQ ID NO: 1450554 - RNA, 14 nt, Human
ccugaugaaaauaa

SEQ ID NO: 1450555 - RNA, 13 nt, Human
ccugaugaaaaua

SEQ ID NO: 1450556 - RNA, 21 nt, Human
ccugaugaaaauaaagaaugg

SEQ ID NO: 1450557 - RNA, 19 nt, Human
ccugaugaaaauaaagaau

SEQ ID NO: 1450558 - RNA, 18 nt, Human
ccugaugaaaauaaagaa

SEQ ID NO: 1450559 - RNA, 17 nt, Human
ccugaugaaaauaaaga

SEQ ID NO: 1450560 - RNA, 15 nt, Human
ccugaugaaaauaaa

SEQ ID NO: 1450561 - RNA, 21 nt, Human
ccugaugggguggaaggcaug

SEQ ID NO: 1450562 - RNA, 21 nt, Human
ccugaugcugacauucaccug

SEQ ID NO: 1450563 - RNA, 13 nt, Human
ccugaugcugaca

SEQ ID NO: 1450564 - RNA, 23 nt, Human
ccugaugcugacauucaccugcc

SEQ ID NO: 1450565 - RNA, 23 nt, Human
ccucugucucgagcgcccugcag

SEQ ID NO: 1450566 - RNA, 21 nt, Human
ccucugucucgagcgcccugc

SEQ ID NO: 1450567 - RNA, 20 nt, Human
ccucugucucgagcgcccug

SEQ ID NO: 1450568 - RNA, 19 nt, Human
ccucugucucgagcgcccu

SEQ ID NO: 1450569 - RNA, 18 nt, Human
ccucugucucgagcgccc

SEQ ID NO: 1450570 - RNA, 15 nt, Human
ccucugucucgagcg

SEQ ID NO: 1450571 - RNA, 21 nt, Human
ccucugucagucacagccacc

SEQ ID NO: 1450572 - RNA, 19 nt, Human
ccucugucagucacagcca

SEQ ID NO: 1450573 - RNA, 18 nt, Human
ccucugucagucacagcc

SEQ ID NO: 1450574 - RNA, 16 nt, Human
ccucugucagucacag

SEQ ID NO: 1450575 - RNA, 15 nt, Human
ccucugucagucaca

SEQ ID NO: 1450576 - RNA, 23 nt, Human
ccucuguauuugaaucagccuac

SEQ ID NO: 1450577 - RNA, 21 nt, Human
ccucuguccaggcacugagau

SEQ ID NO: 1450578 - RNA, 20 nt, Human
ccucuguccaggcacugaga

SEQ ID NO: 1450579 - RNA, 19 nt, Human
ccucuguccaggcacugag

SEQ ID NO: 1450580 - RNA, 15 nt, Human
ccucuguccaggcac

SEQ ID NO: 1450581 - RNA, 21 nt, Human
ccucuggucgcuccugcccac

SEQ ID NO: 1450582 - RNA, 20 nt, Human
ccucuggucgcuccugccca

SEQ ID NO: 1450583 - RNA, 19 nt, Human
ccucuggucgcuccugccc

SEQ ID NO: 1450584 - RNA, 17 nt, Human
ccucuggucgcuccugc

SEQ ID NO: 1450585 - RNA, 16 nt, Human
ccucugugcugugugu

SEQ ID NO: 1450586 - RNA, 13 nt, Human
ccucugugcugug

SEQ ID NO: 1450587 - RNA, 21 nt, Human
ccucugugaccaaugucuuga

SEQ ID NO: 1450588 - RNA, 19 nt, Human
ccucugugaccaaugucuu

SEQ ID NO: 1450589 - RNA, 18 nt, Human
ccucugugaccaaugucu

SEQ ID NO: 1450590 - RNA, 22 nt, Human
ccucugucuugugaaggcaggg

SEQ ID NO: 1450591 - RNA, 16 nt, Human
ccucugucuucuggac

SEQ ID NO: 1450592 - RNA, 15 nt, Human
ccucugucuucugga

SEQ ID NO: 1450593 - RNA, 14 nt, Human
ccucugucuggcaa

SEQ ID NO: 1450594 - RNA, 22 nt, Human
ccucugucuggcaaugccacag

SEQ ID NO: 1450595 - RNA, 22 nt, Human
ccucugucucgagcgcccugca

SEQ ID NO: 1450596 - RNA, 18 nt, Human
ccucuguguauuugcuuu

SEQ ID NO: 1450597 - RNA, 15 nt, Human
ccucugugcugugug

SEQ ID NO: 1450598 - RNA, 16 nt, Human
ccucuguuccuucccu

SEQ ID NO: 1450599 - RNA, 16 nt, Human
ccucuguucaaagcug

SEQ ID NO: 1450600 - RNA, 18 nt, Human
ccucuguucaaagcugcc

SEQ ID NO: 1450601 - RNA, 18 nt, Human
ccucuuaaauaaaccuuu

SEQ ID NO: 1450602 - RNA, 17 nt, Human
ccucuuaaauaaaccuu

SEQ ID NO: 1450603 - RNA, 23 nt, Human
ccucuuagaugcaguucugaaga

SEQ ID NO: 1450604 - RNA, 19 nt, Human
ccucuuuuuucguuuguuu

SEQ ID NO: 1450605 - RNA, 13 nt, Human
ccucuuuuuucgu

SEQ ID NO: 1450606 - RNA, 23 nt, Human
ccucuuuuuccaacuuggcugca

SEQ ID NO: 1450607 - RNA, 17 nt, Human
ccucuuuuccuucccaa

SEQ ID NO: 1450608 - RNA, 17 nt, Human
ccugaaaacacugugca

SEQ ID NO: 1450609 - RNA, 17 nt, Human
ccugaacaagaauugga

SEQ ID NO: 1450610 - RNA, 16 nt, Human
ccugaacaagaauugg

SEQ ID NO: 1450611 - RNA, 15 nt, Human
ccugaacaagaauug

SEQ ID NO: 1450612 - RNA, 13 nt, Human
ccugaacaagaau

SEQ ID NO: 1450613 - RNA, 15 nt, Human
ccugaaauuucagau

SEQ ID NO: 1450614 - RNA, 14 nt, Human
ccugaaauuucaga

SEQ ID NO: 1450615 - RNA, 18 nt, Human
ccugaaauuccaaagucu

SEQ ID NO: 1450616 - RNA, 16 nt, Human
ccugaaauuccaaagu

SEQ ID NO: 1450617 - RNA, 15 nt, Human
ccugaaauuccaaag

SEQ ID NO: 1450618 - RNA, 14 nt, Human
ccugaaauuccaaa

SEQ ID NO: 1450619 - RNA, 21 nt, Human
ccugaaaaaaaaccugagauu

SEQ ID NO: 1450620 - RNA, 22 nt, Human
ccugaaagaggcugaggccugg

SEQ ID NO: 1450621 - RNA, 19 nt, Human
ccugaaagaggcugaggcc

SEQ ID NO: 1450622 - RNA, 15 nt, Human
ccugaaagaggcuga

SEQ ID NO: 1450623 - RNA, 19 nt, Human
ccucuuccuacuggucucu

SEQ ID NO: 1450624 - RNA, 15 nt, Human
ccucuuccuacuggu

SEQ ID NO: 1450625 - RNA, 18 nt, Human
ccucuuccgugacgucac

SEQ ID NO: 1450626 - RNA, 21 nt, Human
ccucuuccuacuggucucucu

SEQ ID NO: 1450627 - RNA, 15 nt, Human
ccugaauucuuuuuc

SEQ ID NO: 1450628 - RNA, 21 nt, Human
ccugaauccaaacuaauccau

SEQ ID NO: 1450629 - RNA, 20 nt, Human
ccugaauccaaacuaaucca

SEQ ID NO: 1450630 - RNA, 17 nt, Human
ccugaauccaaacuaau

SEQ ID NO: 1450631 - RNA, 12 nt, Human
ccugaaguauuu

SEQ ID NO: 1450632 - RNA, 17 nt, Human
ccugaagaaccaguccc

SEQ ID NO: 1450633 - RNA, 22 nt, Human
ccugaagcuaucguaaaauuaa

SEQ ID NO: 1450634 - RNA, 23 nt, Human
ccugaagcuaucguaaaauuaag

SEQ ID NO: 1450635 - RNA, 16 nt, Human
ccugaagaaccagucc

SEQ ID NO: 1450636 - RNA, 13 nt, Human
ccugaagaaccag

SEQ ID NO: 1450637 - RNA, 17 nt, Human
ccugaacugaacaccau

SEQ ID NO: 1450638 - RNA, 17 nt, Human
ccugaaccccagggcug

SEQ ID NO: 1450639 - RNA, 18 nt, Human
ccugaaccccagggcugu

SEQ ID NO: 1450640 - RNA, 16 nt, Human
ccugaaccccagggcu

SEQ ID NO: 1450641 - RNA, 21 nt, Human
ccugaacaagaauuggaagcu

SEQ ID NO: 1450642 - RNA, 20 nt, Human
ccugaacaggauauucucac

SEQ ID NO: 1450643 - RNA, 21 nt, Human
ccucaguagucccugcacagu

SEQ ID NO: 1450644 - RNA, 19 nt, Human
ccucaguagucccugcaca

SEQ ID NO: 1450645 - RNA, 18 nt, Human
ccucaguagucccugcac

SEQ ID NO: 1450646 - RNA, 15 nt, Human
ccucaguagucccug

SEQ ID NO: 1450647 - RNA, 23 nt, Human
ccucaggggucugagcuccagcu

SEQ ID NO: 1450648 - RNA, 22 nt, Human
ccucaggggucugagcuccagc

SEQ ID NO: 1450649 - RNA, 18 nt, Human
ccucaggggucugagcuc

SEQ ID NO: 1450650 - RNA, 16 nt, Human
ccucaggggucugagc

SEQ ID NO: 1450651 - RNA, 13 nt, Human
ccucaggggucug

SEQ ID NO: 1450652 - RNA, 23 nt, Human
ccucagggcuccuugugggccug

SEQ ID NO: 1450653 - RNA, 22 nt, Human
ccucagggcuccuugugggccu

SEQ ID NO: 1450654 - RNA, 16 nt, Human
ccucagggcuccuugu

SEQ ID NO: 1450655 - RNA, 22 nt, Human
ccucagggcaaagccagguccc

SEQ ID NO: 1450656 - RNA, 21 nt, Human
ccucagggcaaagccaggucc

SEQ ID NO: 1450657 - RNA, 17 nt, Human
ccucagggcaaagccag

SEQ ID NO: 1450658 - RNA, 16 nt, Human
ccucagggcaaagcca

SEQ ID NO: 1450659 - RNA, 15 nt, Human
ccucagggcaaagcc

SEQ ID NO: 1450660 - RNA, 14 nt, Human
ccucagggcaaagc

SEQ ID NO: 1450661 - RNA, 18 nt, Human
ccucagccacuugccugu

SEQ ID NO: 1450662 - RNA, 21 nt, Human
ccucagacucuaagaaagaac

SEQ ID NO: 1450663 - RNA, 20 nt, Human
ccucagacucuaagaaagaa

SEQ ID NO: 1450664 - RNA, 19 nt, Human
ccucagacucuaagaaaga

SEQ ID NO: 1450665 - RNA, 15 nt, Human
ccucagacucuaaga

SEQ ID NO: 1450666 - RNA, 22 nt, Human
ccucacuuuuaaugaacaaaug

SEQ ID NO: 1450667 - RNA, 18 nt, Human
ccucacuuuuaaugaaca

SEQ ID NO: 1450668 - RNA, 20 nt, Human
ccucagaaaacaaggaugaa

SEQ ID NO: 1450669 - RNA, 14 nt, Human
ccuccucccucccu

SEQ ID NO: 1450670 - RNA, 13 nt, Human
ccuccucccuccc

SEQ ID NO: 1450671 - RNA, 14 nt, Human
ccuccuccccacuu

SEQ ID NO: 1450672 - RNA, 13 nt, Human
ccuccuccccacu

SEQ ID NO: 1450673 - RNA, 21 nt, Human
ccuccuccccaacuguggggg

SEQ ID NO: 1450674 - RNA, 23 nt, Human
ccucccugagcuagaacccucug

SEQ ID NO: 1450675 - RNA, 22 nt, Human
ccucccugagcuagaacccucu

SEQ ID NO: 1450676 - RNA, 19 nt, Human
ccucccugaagccuuugca

SEQ ID NO: 1450677 - RNA, 15 nt, Human
ccucccucccucucc

SEQ ID NO: 1450678 - RNA, 14 nt, Human
ccucccucccucuc

SEQ ID NO: 1450679 - RNA, 15 nt, Human
ccucccuccccuugc

SEQ ID NO: 1450680 - RNA, 17 nt, Human
ccuccccucuccuuccu

SEQ ID NO: 1450681 - RNA, 22 nt, Human
ccucccuacccuaaccaaguuc

SEQ ID NO: 1450682 - RNA, 17 nt, Human
ccucccucaaccucauc

SEQ ID NO: 1450683 - RNA, 21 nt, Human
ccucccucaaccucauccucu

SEQ ID NO: 1450684 - RNA, 21 nt, Human
ccuccucugcacucccaccug

SEQ ID NO: 1450685 - RNA, 15 nt, Human
ccuccucugcccggg

SEQ ID NO: 1450686 - RNA, 14 nt, Human
ccuccucugcccgg

SEQ ID NO: 1450687 - RNA, 19 nt, Human
ccuccugcagaccacgccc

SEQ ID NO: 1450688 - RNA, 21 nt, Human
ccuccugggcccucucugcuc

SEQ ID NO: 1450689 - RNA, 19 nt, Human
ccuccugccggcuccuugg

SEQ ID NO: 1450690 - RNA, 17 nt, Human
ccuccugggaaugaagc

SEQ ID NO: 1450691 - RNA, 14 nt, Human
ccucucagcccuca

SEQ ID NO: 1450692 - RNA, 13 nt, Human
ccucucagcccuc

SEQ ID NO: 1450693 - RNA, 11 nt, Human
ccucucagccc

SEQ ID NO: 1450694 - RNA, 18 nt, Human
ccucucaggauccaagcu

SEQ ID NO: 1450695 - RNA, 15 nt, Human
ccucucaggauccaa

SEQ ID NO: 1450696 - RNA, 18 nt, Human
ccucucagcuccaggugg

SEQ ID NO: 1450697 - RNA, 16 nt, Human
ccucucagcuccaggu

SEQ ID NO: 1450698 - RNA, 13 nt, Human
ccucucagcucca

SEQ ID NO: 1450699 - RNA, 23 nt, Human
ccucucaggauccaagcuaagca

SEQ ID NO: 1450700 - RNA, 23 nt, Human
ccucuccacucaugugacucuuu

SEQ ID NO: 1450701 - RNA, 23 nt, Human
ccuccuguugggagagggcgcag

SEQ ID NO: 1450702 - RNA, 23 nt, Human
ccucucccaggccccaugaccuc

SEQ ID NO: 1450703 - RNA, 15 nt, Human
ccucucccaggcccc

SEQ ID NO: 1450704 - RNA, 14 nt, Human
ccucucccaggccc

SEQ ID NO: 1450705 - RNA, 13 nt, Human
ccucucccaggcc

SEQ ID NO: 1450706 - RNA, 22 nt, Human
ccucucccaggcaggggcccgc

SEQ ID NO: 1450707 - RNA, 19 nt, Human
ccucucccaggcaggggcc

SEQ ID NO: 1450708 - RNA, 14 nt, Human
ccucucccaggcag

SEQ ID NO: 1450709 - RNA, 21 nt, Human
ccucuccccagcccagagaca

SEQ ID NO: 1450710 - RNA, 20 nt, Human
ccucuccccagcccagagac

SEQ ID NO: 1450711 - RNA, 19 nt, Human
ccucuccccagcccagaga

SEQ ID NO: 1450712 - RNA, 18 nt, Human
ccucuccccagcccagag

SEQ ID NO: 1450713 - RNA, 15 nt, Human
ccucucccaguuguc

SEQ ID NO: 1450714 - RNA, 13 nt, Human
ccucucccaguug

SEQ ID NO: 1450715 - RNA, 12 nt, Human
ccucucccaguu

SEQ ID NO: 1450716 - RNA, 18 nt, Human
ccucucccaggccccaug

SEQ ID NO: 1450717 - RNA, 17 nt, Human
ccucucccaggccccau

SEQ ID NO: 1450718 - RNA, 16 nt, Human
ccucucccaggcccca

SEQ ID NO: 1450719 - RNA, 23 nt, Human
ccucuccccugcccccugcagga

SEQ ID NO: 1450720 - RNA, 15 nt, Human
ccucuccccugccug

SEQ ID NO: 1450721 - RNA, 22 nt, Human
ccucuccccugcccccugcagg

SEQ ID NO: 1450722 - RNA, 21 nt, Human
ccucuccccugcccccugcag

SEQ ID NO: 1450723 - RNA, 20 nt, Human
ccucuccccugcccccugca

SEQ ID NO: 1450724 - RNA, 16 nt, Human
ccucuccccugccccc

SEQ ID NO: 1450725 - RNA, 13 nt, Human
ccucuccccugcc

SEQ ID NO: 1450726 - RNA, 12 nt, Human
ccucuccccugc

SEQ ID NO: 1450727 - RNA, 16 nt, Human
ccucuccccucagccu

SEQ ID NO: 1450728 - RNA, 15 nt, Human
ccucuccccucagcc

SEQ ID NO: 1450729 - RNA, 12 nt, Human
ccucuccccuca

SEQ ID NO: 1450730 - RNA, 18 nt, Human
ccucuccccucagccucu

SEQ ID NO: 1450731 - RNA, 23 nt, Human
ccucuccccagguccagcucugg

SEQ ID NO: 1450732 - RNA, 21 nt, Human
ccucuccccagguccagcucu

SEQ ID NO: 1450733 - RNA, 22 nt, Human
ccucuccccagggaagcagcag

SEQ ID NO: 1450734 - RNA, 12 nt, Human
ccucucuggaga

SEQ ID NO: 1450735 - RNA, 16 nt, Human
ccucucugcucugcgu

SEQ ID NO: 1450736 - RNA, 15 nt, Human
ccucucugcucugcg

SEQ ID NO: 1450737 - RNA, 12 nt, Human
ccucucugcucu

SEQ ID NO: 1450738 - RNA, 12 nt, Human
ccucucuuccuc

SEQ ID NO: 1450739 - RNA, 11 nt, Human
ccucucuuccu

SEQ ID NO: 1450740 - RNA, 23 nt, Human
ccucucuggagaaagggcccugg

SEQ ID NO: 1450741 - RNA, 22 nt, Human
ccucucuggagaaagggcccug

SEQ ID NO: 1450742 - RNA, 13 nt, Human
ccucucuggagaa

SEQ ID NO: 1450743 - RNA, 23 nt, Human
ccucuggcauuagaauuauuuaa

SEQ ID NO: 1450744 - RNA, 21 nt, Human
ccucuggcauuagaauuauuu

SEQ ID NO: 1450745 - RNA, 14 nt, Human
ccucuggagccagc

SEQ ID NO: 1450746 - RNA, 22 nt, Human
ccucuggagggguguggcuccu

SEQ ID NO: 1450747 - RNA, 20 nt, Human
ccucuggagggguguggcuc

SEQ ID NO: 1450748 - RNA, 17 nt, Human
ccucuggaggggugugg

SEQ ID NO: 1450749 - RNA, 16 nt, Human
ccucuggagccagccg

SEQ ID NO: 1450750 - RNA, 22 nt, Human
ccucugcuuucuccuuuaauug

SEQ ID NO: 1450751 - RNA, 19 nt, Human
ccucugcauccucuggagc

SEQ ID NO: 1450752 - RNA, 22 nt, Human
ccucugccaaaggaugugauau

SEQ ID NO: 1450753 - RNA, 20 nt, Human
ccucugccaaaggaugugau

SEQ ID NO: 1450754 - RNA, 20 nt, Human
ccucuggcuuggccacagcc

SEQ ID NO: 1450755 - RNA, 18 nt, Human
ccucuggcuuggccacag

SEQ ID NO: 1450756 - RNA, 16 nt, Human
ccucuggucgcuccug

SEQ ID NO: 1450757 - RNA, 19 nt, Human
ccucugguaaccucuuacu

SEQ ID NO: 1450758 - RNA, 20 nt, Human
ccucugggggguggccaggc

SEQ ID NO: 1450759 - RNA, 19 nt, Human
ccucugggggguggccagg

SEQ ID NO: 1450760 - RNA, 15 nt, Human
ccucugggggguggc

SEQ ID NO: 1450761 - RNA, 16 nt, Human
ccucugggcucugagu

SEQ ID NO: 1450762 - RNA, 14 nt, Human
ccucugggcucuga

SEQ ID NO: 1450763 - RNA, 12 nt, Human
ccucugggcucu

SEQ ID NO: 1450764 - RNA, 23 nt, Human
ccucuggcuuggccacagccagg

SEQ ID NO: 1450765 - RNA, 21 nt, Human
ccucuggcuuggccacagcca

SEQ ID NO: 1450766 - RNA, 21 nt, Human
ccucugcacuacugacaugug

SEQ ID NO: 1450767 - RNA, 20 nt, Human
ccucugcacuacugacaugu

SEQ ID NO: 1450768 - RNA, 19 nt, Human
ccucugcaccuuugcacgu

SEQ ID NO: 1450769 - RNA, 16 nt, Human
ccucugcacucccacc

SEQ ID NO: 1450770 - RNA, 19 nt, Human
ccucugccaaaggauguga

SEQ ID NO: 1450771 - RNA, 18 nt, Human
ccucugcauccucuggag

SEQ ID NO: 1450772 - RNA, 17 nt, Human
ccucugcauccucugga

SEQ ID NO: 1450773 - RNA, 16 nt, Human
ccucugcauccucugg

SEQ ID NO: 1450774 - RNA, 16 nt, Human
ccucugcagucucuau

SEQ ID NO: 1450775 - RNA, 17 nt, Human
ccucugcagucucuaua

SEQ ID NO: 1450776 - RNA, 23 nt, Human
ccucugcagucucuauaccaaua

SEQ ID NO: 1450777 - RNA, 21 nt, Human
ccuucaagcucugagggaaag

SEQ ID NO: 1450778 - RNA, 16 nt, Human
ccuucaagcucugagg

SEQ ID NO: 1450779 - RNA, 15 nt, Human
ccuucaagcucugag

SEQ ID NO: 1450780 - RNA, 14 nt, Human
ccuucaagcucuga

SEQ ID NO: 1450781 - RNA, 13 nt, Human
ccuucaagcucug

SEQ ID NO: 1450782 - RNA, 18 nt, Human
ccuucaagaaaacaggca

SEQ ID NO: 1450783 - RNA, 14 nt, Human
ccuucaacccgaga

SEQ ID NO: 1450784 - RNA, 22 nt, Human
ccuucaacaauucuaaaaugau

SEQ ID NO: 1450785 - RNA, 14 nt, Human
ccuuagaucuggca

SEQ ID NO: 1450786 - RNA, 17 nt, Human
ccuuagacucuuuuccu

SEQ ID NO: 1450787 - RNA, 20 nt, Human
ccuuagacucuuuuccuucc

SEQ ID NO: 1450788 - RNA, 16 nt, Human
ccuuagacucuuuucc

SEQ ID NO: 1450789 - RNA, 18 nt, Human
ccuuauuuucaagaaacu

SEQ ID NO: 1450790 - RNA, 14 nt, Human
ccuuauuuucaaga

SEQ ID NO: 1450791 - RNA, 17 nt, Human
ccuuacuuuuuauauau

SEQ ID NO: 1450792 - RNA, 18 nt, Human
ccuuacuuuuuauauaua

SEQ ID NO: 1450793 - RNA, 15 nt, Human
ccuuacuuuuuauau

SEQ ID NO: 1450794 - RNA, 23 nt, Human
ccuguggccaugacccugccucu

SEQ ID NO: 1450795 - RNA, 21 nt, Human
ccuuacccugccccagcuggg

SEQ ID NO: 1450796 - RNA, 17 nt, Human
ccuuacccuccuuggga

SEQ ID NO: 1450797 - RNA, 17 nt, Human
ccuguggccccacccug

SEQ ID NO: 1450798 - RNA, 16 nt, Human
ccuguggccccacccu

SEQ ID NO: 1450799 - RNA, 15 nt, Human
ccuguggccccaccc

SEQ ID NO: 1450800 - RNA, 22 nt, Human
ccuguggccaugacccugccuc

SEQ ID NO: 1450801 - RNA, 17 nt, Human
ccuguggccaugacccu

SEQ ID NO: 1450802 - RNA, 22 nt, Human
ccuguggccccacccugggccc

SEQ ID NO: 1450803 - RNA, 20 nt, Human
ccuguggccccacccugggc

SEQ ID NO: 1450804 - RNA, 18 nt, Human
ccuguggccccacccugg

SEQ ID NO: 1450805 - RNA, 22 nt, Human
ccugugcuucgggcccuuccca

SEQ ID NO: 1450806 - RNA, 19 nt, Human
ccuguggaacauaaaaagg

SEQ ID NO: 1450807 - RNA, 23 nt, Human
ccuguggaacauaaaaaggacau

SEQ ID NO: 1450808 - RNA, 24 nt, Human
ccuguggaacauaaaaaggacauc

SEQ ID NO: 1450809 - RNA, 23 nt, Human
ccuuccugccccaacuccuucca

SEQ ID NO: 1450810 - RNA, 17 nt, Human
ccuuccugccagccccu

SEQ ID NO: 1450811 - RNA, 16 nt, Human
ccuuccugccagcccc

SEQ ID NO: 1450812 - RNA, 10 nt, Human
ccuucccaaa

SEQ ID NO: 1450813 - RNA, 20 nt, Human
ccuuccucuuuuccuuccca

SEQ ID NO: 1450814 - RNA, 14 nt, Human
ccuuccagaaaaca

SEQ ID NO: 1450815 - RNA, 15 nt, Human
ccuuccacugagggc

SEQ ID NO: 1450816 - RNA, 17 nt, Human
ccuuccacugagggcag

SEQ ID NO: 1450817 - RNA, 18 nt, Human
ccuucaagcucugaggga

SEQ ID NO: 1450818 - RNA, 23 nt, Human
ccuucaguacccucucagcucca

SEQ ID NO: 1450819 - RNA, 20 nt, Human
ccuucaguacccucucagcu

SEQ ID NO: 1450820 - RNA, 19 nt, Human
ccuucaguacccucucagc

SEQ ID NO: 1450821 - RNA, 17 nt, Human
ccuucaguacccucuca

SEQ ID NO: 1450822 - RNA, 20 nt, Human
ccuucauacuugaacguuuu

SEQ ID NO: 1450823 - RNA, 19 nt, Human
ccuucauacuugaacguuu

SEQ ID NO: 1450824 - RNA, 15 nt, Human
ccuucauacuugaac

SEQ ID NO: 1450825 - RNA, 18 nt, Human
ccuucaguuaugauuuuu

SEQ ID NO: 1450826 - RNA, 24 nt, Human
ccuucaguacccucucagcuccag

SEQ ID NO: 1450827 - RNA, 19 nt, Human
ccuucauaucauccacaca

SEQ ID NO: 1450828 - RNA, 18 nt, Human
ccuucauaucauccacac

SEQ ID NO: 1450829 - RNA, 13 nt, Human
ccuucaucuggaa

SEQ ID NO: 1450830 - RNA, 20 nt, Human
ccuucaucuggauuccagag

SEQ ID NO: 1450831 - RNA, 17 nt, Human
ccuuccaaugucuggag

SEQ ID NO: 1450832 - RNA, 14 nt, Human
ccuucaucuggaac

SEQ ID NO: 1450833 - RNA, 14 nt, Human
ccuuccacccaggg

SEQ ID NO: 1450834 - RNA, 13 nt, Human
ccuuccacccagg

SEQ ID NO: 1450835 - RNA, 20 nt, Human
ccuuccaaugucuggagacc

SEQ ID NO: 1450836 - RNA, 21 nt, Human
ccuuccaaugucuggagacca

SEQ ID NO: 1450837 - RNA, 19 nt, Human
ccuuccaaugucuggagac

SEQ ID NO: 1450838 - RNA, 18 nt, Human
ccuuccaaugucuggaga

SEQ ID NO: 1450839 - RNA, 15 nt, Human
ccuuccacccagggg

SEQ ID NO: 1450840 - RNA, 13 nt, Human
ccuuccacccagu

SEQ ID NO: 1450841 - RNA, 19 nt, Human
ccuugaacuuugaccucug

SEQ ID NO: 1450842 - RNA, 17 nt, Human
ccuugaacuuugaccuc

SEQ ID NO: 1450843 - RNA, 19 nt, Human
ccuucuuucuacccugcug

SEQ ID NO: 1450844 - RNA, 13 nt, Human
ccuucuuucuacc

SEQ ID NO: 1450845 - RNA, 16 nt, Human
ccuuccuggacagcug

SEQ ID NO: 1450846 - RNA, 13 nt, Human
ccuuccuggacag

SEQ ID NO: 1450847 - RNA, 15 nt, Human
ccuugacaacuggca

SEQ ID NO: 1450848 - RNA, 17 nt, Human
ccuugaaaaaaaacagu

SEQ ID NO: 1450849 - RNA, 12 nt, Human
ccuugaaugugg

SEQ ID NO: 1450850 - RNA, 14 nt, Human
ccuugacaccugcu

SEQ ID NO: 1450851 - RNA, 21 nt, Human
ccuugacaacuggcaggcagg

SEQ ID NO: 1450852 - RNA, 16 nt, Human
ccuugacaacuggcag

SEQ ID NO: 1450853 - RNA, 23 nt, Human
ccuuggcaccagacacccaggac

SEQ ID NO: 1450854 - RNA, 22 nt, Human
ccuuggcaccagacacccagga

SEQ ID NO: 1450855 - RNA, 21 nt, Human
ccuuggcaccagacacccagg

SEQ ID NO: 1450856 - RNA, 20 nt, Human
ccuuggcaccagacacccag

SEQ ID NO: 1450857 - RNA, 15 nt, Human
ccuuggcaccagaca

SEQ ID NO: 1450858 - RNA, 18 nt, Human
ccuugaucagccccaccc

SEQ ID NO: 1450859 - RNA, 20 nt, Human
ccuugaucagccccacccug

SEQ ID NO: 1450860 - RNA, 14 nt, Human
ccuugaugaagaag

SEQ ID NO: 1450861 - RNA, 22 nt, Human
ccuguauuuguucccaagagca

SEQ ID NO: 1450862 - RNA, 21 nt, Human
ccuguauuuguucccaagagc

SEQ ID NO: 1450863 - RNA, 19 nt, Human
ccuguauuuguucccaaga

SEQ ID NO: 1450864 - RNA, 16 nt, Human
ccuguauuuguuccca

SEQ ID NO: 1450865 - RNA, 19 nt, Human
ccuguauuccugaccuccg

SEQ ID NO: 1450866 - RNA, 23 nt, Human
ccuguauuccugaccuccgccau

SEQ ID NO: 1450867 - RNA, 16 nt, Human
ccuguauucagacaga

SEQ ID NO: 1450868 - RNA, 15 nt, Human
ccuguauucagacag

SEQ ID NO: 1450869 - RNA, 17 nt, Human
ccuguaugucuccagua

SEQ ID NO: 1450870 - RNA, 21 nt, Human
ccuguagauucagguaauaca

SEQ ID NO: 1450871 - RNA, 17 nt, Human
ccuguacuguucugugu

SEQ ID NO: 1450872 - RNA, 17 nt, Human
ccuguacugccugcuug

SEQ ID NO: 1450873 - RNA, 16 nt, Human
ccuguacugccugcuu

SEQ ID NO: 1450874 - RNA, 15 nt, Human
ccuguacugccugcu

SEQ ID NO: 1450875 - RNA, 14 nt, Human
ccuguacugccugc

SEQ ID NO: 1450876 - RNA, 13 nt, Human
ccuguacugccug

SEQ ID NO: 1450877 - RNA, 23 nt, Human
ccuguaccuuuugaggagcccca

SEQ ID NO: 1450878 - RNA, 22 nt, Human
ccuguaccuuuugaggagcccc

SEQ ID NO: 1450879 - RNA, 17 nt, Human
ccuguacacaacucacu

SEQ ID NO: 1450880 - RNA, 15 nt, Human
ccuguagcacuuacu

SEQ ID NO: 1450881 - RNA, 17 nt, Human
ccuguagaguugcugag

SEQ ID NO: 1450882 - RNA, 16 nt, Human
ccuguagaguugcuga

SEQ ID NO: 1450883 - RNA, 14 nt, Human
ccuguagaguugcu

SEQ ID NO: 1450884 - RNA, 13 nt, Human
ccuguagaguugc

SEQ ID NO: 1450885 - RNA, 18 nt, Human
ccuguacuguucuguguc

SEQ ID NO: 1450886 - RNA, 20 nt, Human
ccuguacuguucugugucuu

SEQ ID NO: 1450887 - RNA, 15 nt, Human
ccuggugcuggaggu

SEQ ID NO: 1450888 - RNA, 14 nt, Human
ccuggugcuggagg

SEQ ID NO: 1450889 - RNA, 13 nt, Human
ccuggugcuggag

SEQ ID NO: 1450890 - RNA, 20 nt, Human
ccuggugcugccucuaccug

SEQ ID NO: 1450891 - RNA, 15 nt, Human
ccuggugcugccucu

SEQ ID NO: 1450892 - RNA, 20 nt, Human
ccuggugcuucuccucuccu

SEQ ID NO: 1450893 - RNA, 16 nt, Human
ccuggugcuucuccuc

SEQ ID NO: 1450894 - RNA, 14 nt, Human
ccuggugcuucucc

SEQ ID NO: 1450895 - RNA, 23 nt, Human
ccugugcacaccccacucccaca

SEQ ID NO: 1450896 - RNA, 22 nt, Human
ccugugcacaccccacucccac

SEQ ID NO: 1450897 - RNA, 18 nt, Human
ccugugcacaccccacuc

SEQ ID NO: 1450898 - RNA, 17 nt, Human
ccugugcaaugcauuag

SEQ ID NO: 1450899 - RNA, 15 nt, Human
ccugugccuccucac

SEQ ID NO: 1450900 - RNA, 12 nt, Human
ccugugccuccu

SEQ ID NO: 1450901 - RNA, 13 nt, Human
ccugugcccccag

SEQ ID NO: 1450902 - RNA, 21 nt, Human
ccugugcagccgcugagcgag

SEQ ID NO: 1450903 - RNA, 20 nt, Human
ccugugcagccgcugagcga

SEQ ID NO: 1450904 - RNA, 18 nt, Human
ccugugcagccgcugagc

SEQ ID NO: 1450905 - RNA, 16 nt, Human
ccugugccuccucccu

SEQ ID NO: 1450906 - RNA, 15 nt, Human
ccugugccuccuccc

SEQ ID NO: 1450907 - RNA, 21 nt, Human
ccugugccuccucacccccag

SEQ ID NO: 1450908 - RNA, 20 nt, Human
ccugugccuccucaccccca

SEQ ID NO: 1450909 - RNA, 15 nt, Human
ccuguccagcuccaa

SEQ ID NO: 1450910 - RNA, 14 nt, Human
ccuguccagcucca

SEQ ID NO: 1450911 - RNA, 13 nt, Human
ccuguccagcucc

SEQ ID NO: 1450912 - RNA, 21 nt, Human
ccuguccacaggcuucugagc

SEQ ID NO: 1450913 - RNA, 14 nt, Human
ccuguccacaggcu

SEQ ID NO: 1450914 - RNA, 19 nt, Human
ccuguccaaacugccuaag

SEQ ID NO: 1450915 - RNA, 23 nt, Human
ccuguccaaacugccuaagcccu

SEQ ID NO: 1450916 - RNA, 18 nt, Human
ccuguccacaggcuucug

SEQ ID NO: 1450917 - RNA, 19 nt, Human
ccuguccagcuccaaccug

SEQ ID NO: 1450918 - RNA, 19 nt, Human
ccuguccucuuucagcucc

SEQ ID NO: 1450919 - RNA, 22 nt, Human
ccuguccuccaacaccaagcac

SEQ ID NO: 1450920 - RNA, 21 nt, Human
ccuguccuccaacaccaagca

SEQ ID NO: 1450921 - RNA, 13 nt, Human
ccuguccuccaac

SEQ ID NO: 1450922 - RNA, 13 nt, Human
ccuguccccugcu

SEQ ID NO: 1450923 - RNA, 14 nt, Human
ccuguccccugcua

SEQ ID NO: 1450924 - RNA, 18 nt, Human
ccuguccucuuucagcuc

SEQ ID NO: 1450925 - RNA, 20 nt, Human
ccugugagcccagcuggguc

SEQ ID NO: 1450926 - RNA, 17 nt, Human
ccugugagcccagcugg

SEQ ID NO: 1450927 - RNA, 15 nt, Human
ccugugagcccagcu

SEQ ID NO: 1450928 - RNA, 17 nt, Human
ccuguccucuuucagcu

SEQ ID NO: 1450929 - RNA, 16 nt, Human
ccuguccucuuucagc

SEQ ID NO: 1450930 - RNA, 22 nt, Human
ccugugagcuaggaauuguguu

SEQ ID NO: 1450931 - RNA, 17 nt, Human
ccugcuaaggucuugga

SEQ ID NO: 1450932 - RNA, 19 nt, Human
ccugcuaacggugcucagg

SEQ ID NO: 1450933 - RNA, 18 nt, Human
ccugcuaacggugcucag

SEQ ID NO: 1450934 - RNA, 22 nt, Human
ccugcuccagaccugauccugg

SEQ ID NO: 1450935 - RNA, 16 nt, Human
ccugcuccagaccuga

SEQ ID NO: 1450936 - RNA, 22 nt, Human
ccugauuuaggagaagccagga

SEQ ID NO: 1450937 - RNA, 21 nt, Human
ccugauuuaggagaagccagg

SEQ ID NO: 1450938 - RNA, 20 nt, Human
ccugauuuaggagaagccag

SEQ ID NO: 1450939 - RNA, 19 nt, Human
ccugauuuaggagaagcca

SEQ ID NO: 1450940 - RNA, 18 nt, Human
ccugauuuaggagaagcc

SEQ ID NO: 1450941 - RNA, 16 nt, Human
ccugauuuuuuuuccu

SEQ ID NO: 1450942 - RNA, 15 nt, Human
ccugcuuccugcuug

SEQ ID NO: 1450943 - RNA, 18 nt, Human
ccugcuuccugcuugcca

SEQ ID NO: 1450944 - RNA, 14 nt, Human
ccugcuuccugcuu

SEQ ID NO: 1450945 - RNA, 15 nt, Human
ccugcucccauccug

SEQ ID NO: 1450946 - RNA, 20 nt, Human
ccugcucccauccugugugu

SEQ ID NO: 1450947 - RNA, 16 nt, Human
ccugcuuuuuguguuu

SEQ ID NO: 1450948 - RNA, 14 nt, Human
ccuggaaaccuucc

SEQ ID NO: 1450949 - RNA, 23 nt, Human
ccugcuuggggggugaugagggc

SEQ ID NO: 1450950 - RNA, 22 nt, Human
ccugcuugccaaggcagaggcc

SEQ ID NO: 1450951 - RNA, 23 nt, Human
ccugcuugccaaggcagaggccu

SEQ ID NO: 1450952 - RNA, 21 nt, Human
ccugcuugccaaggcagaggc

SEQ ID NO: 1450953 - RNA, 18 nt, Human
ccugcuugccaaggcaga

SEQ ID NO: 1450954 - RNA, 17 nt, Human
ccugcuugccaaggcag

SEQ ID NO: 1450955 - RNA, 15 nt, Human
ccugcuugccaaggc

SEQ ID NO: 1450956 - RNA, 22 nt, Human
ccugcuugaugggauucuggac

SEQ ID NO: 1450957 - RNA, 21 nt, Human
ccugcuugaugggauucugga

SEQ ID NO: 1450958 - RNA, 17 nt, Human
ccugcuuuaaccacccc

SEQ ID NO: 1450959 - RNA, 19 nt, Human
ccugcuuuaaccaccccau

SEQ ID NO: 1450960 - RNA, 21 nt, Human
ccugcuuuaaccaccccaucu

SEQ ID NO: 1450961 - RNA, 22 nt, Human
ccugggagggacaugcuuagca

SEQ ID NO: 1450962 - RNA, 13 nt, Human
ccugggaggcucu

SEQ ID NO: 1450963 - RNA, 21 nt, Human
ccugggaggcucuggagccca

SEQ ID NO: 1450964 - RNA, 23 nt, Human
ccugggauucaggaaaaggccug

SEQ ID NO: 1450965 - RNA, 13 nt, Human
ccugggcaaagcc

SEQ ID NO: 1450966 - RNA, 18 nt, Human
ccugggauucaggaaaag

SEQ ID NO: 1450967 - RNA, 16 nt, Human
ccugggauucaggaaa

SEQ ID NO: 1450968 - RNA, 13 nt, Human
ccugggauuacag

SEQ ID NO: 1450969 - RNA, 21 nt, Human
ccugggaugagaguuuuggau

SEQ ID NO: 1450970 - RNA, 20 nt, Human
ccuggcccccucccuggaug

SEQ ID NO: 1450971 - RNA, 12 nt, Human
ccuggcccccuc

SEQ ID NO: 1450972 - RNA, 12 nt, Human
ccuggccagugc

SEQ ID NO: 1450973 - RNA, 16 nt, Human
ccuggccagugcccug

SEQ ID NO: 1450974 - RNA, 21 nt, Human
ccuggcucucaccucuagguc

SEQ ID NO: 1450975 - RNA, 16 nt, Human
ccuggcuauguccuaa

SEQ ID NO: 1450976 - RNA, 17 nt, Human
ccuggcucaccuugugc

SEQ ID NO: 1450977 - RNA, 19 nt, Human
ccuggcucucaccucuagg

SEQ ID NO: 1450978 - RNA, 17 nt, Human
ccuggcucucaccucua

SEQ ID NO: 1450979 - RNA, 15 nt, Human
ccuggcgccuggcag

SEQ ID NO: 1450980 - RNA, 13 nt, Human
ccuggcccccucc

SEQ ID NO: 1450981 - RNA, 12 nt, Human
ccuggcggggug

SEQ ID NO: 1450982 - RNA, 20 nt, Human
ccuggacagcugugccucgc

SEQ ID NO: 1450983 - RNA, 22 nt, Human
ccuggagcagaagcagcaacuu

SEQ ID NO: 1450984 - RNA, 17 nt, Human
ccuggagcagccacccc

SEQ ID NO: 1450985 - RNA, 18 nt, Human
ccuggagcagaccacccc

SEQ ID NO: 1450986 - RNA, 21 nt, Human
ccuggagcagaagcagcaacu

SEQ ID NO: 1450987 - RNA, 17 nt, Human
ccuggagcagaagcagc

SEQ ID NO: 1450988 - RNA, 15 nt, Human
ccuggagcagaagca

SEQ ID NO: 1450989 - RNA, 13 nt, Human
ccuggagcagaag

SEQ ID NO: 1450990 - RNA, 16 nt, Human
ccuggagcacaaagac

SEQ ID NO: 1450991 - RNA, 21 nt, Human
ccuggagaugacuugaggccu

SEQ ID NO: 1450992 - RNA, 21 nt, Human
ccuggagauccuccugcagac

SEQ ID NO: 1450993 - RNA, 14 nt, Human
ccuggacuguuuuc

SEQ ID NO: 1450994 - RNA, 24 nt, Human
ccuggacuuaagcaucuggcucua

SEQ ID NO: 1450995 - RNA, 20 nt, Human
ccuggacuuaagcaucuggc

SEQ ID NO: 1450996 - RNA, 19 nt, Human
ccuggacuuggccccugcc

SEQ ID NO: 1450997 - RNA, 19 nt, Human
ccuggaccucugacagcag

SEQ ID NO: 1450998 - RNA, 20 nt, Human
ccuggaccucugacagcagc

SEQ ID NO: 1450999 - RNA, 18 nt, Human
ccuggaccucugacagca

SEQ ID NO: 1451000 - RNA, 17 nt, Human
ccuggaccucugacagc

SEQ ID NO: 1451001 - RNA, 15 nt, Human
ccuggaccucugaca

SEQ ID NO: 1451002 - RNA, 12 nt, Human
ccuggaccucug

SEQ ID NO: 1451003 - RNA, 23 nt, Human
ccuggacccguucaugggggagg

SEQ ID NO: 1451004 - RNA, 22 nt, Human
ccuggacccguucaugggggag

SEQ ID NO: 1451005 - RNA, 17 nt, Human
ccuggacugugugcuca

SEQ ID NO: 1451006 - RNA, 20 nt, Human
ccuggacugugugcucagga

SEQ ID NO: 1451007 - RNA, 15 nt, Human
ccuggaccccugcau

SEQ ID NO: 1451008 - RNA, 14 nt, Human
ccuggaccccugca

SEQ ID NO: 1451009 - RNA, 13 nt, Human
ccuggaccccugc

SEQ ID NO: 1451010 - RNA, 24 nt, Human
ccuggaccccccuuucacaggcag

SEQ ID NO: 1451011 - RNA, 23 nt, Human
ccuggaccccccuuucacaggca

SEQ ID NO: 1451012 - RNA, 18 nt, Human
ccuggaccccccuuucac

SEQ ID NO: 1451013 - RNA, 16 nt, Human
ccuggaccagccucuc

SEQ ID NO: 1451014 - RNA, 15 nt, Human
ccuggaccagccucu

SEQ ID NO: 1451015 - RNA, 14 nt, Human
ccuggaccagccuc

SEQ ID NO: 1451016 - RNA, 24 nt, Human
ccuggacaugaagauucuuuccca

SEQ ID NO: 1451017 - RNA, 23 nt, Human
ccuggacaugaagauucuuuccc

SEQ ID NO: 1451018 - RNA, 21 nt, Human
ccuggacaugaagauucuuuc

SEQ ID NO: 1451019 - RNA, 22 nt, Human
ccuggacagcugugccucgcuc

SEQ ID NO: 1451020 - RNA, 21 nt, Human
ccuggacagcugugccucgcu

SEQ ID NO: 1451021 - RNA, 17 nt, Human
ccuggaaaccuuccacc

SEQ ID NO: 1451022 - RNA, 18 nt, Human
ccuggaaaccuuccaccc

SEQ ID NO: 1451023 - RNA, 20 nt, Human
ccuggaaaccuuccacccag

SEQ ID NO: 1451024 - RNA, 23 nt, Human
cggcuggggucccagcagcugcc

SEQ ID NO: 1451025 - RNA, 18 nt, Human
cggcuggggucccagcag

SEQ ID NO: 1451026 - RNA, 16 nt, Human
cggcuggggucccagc

SEQ ID NO: 1451027 - RNA, 15 nt, Human
cggccuuucuagccu

SEQ ID NO: 1451028 - RNA, 23 nt, Human
cggcugggaggagggcaggcauc

SEQ ID NO: 1451029 - RNA, 22 nt, Human
cggcugggaggagggcaggcau

SEQ ID NO: 1451030 - RNA, 16 nt, Human
cgggagcucaggaacc

SEQ ID NO: 1451031 - RNA, 20 nt, Human
cggcccauccccaggcaccu

SEQ ID NO: 1451032 - RNA, 19 nt, Human
cggcaggggccuggagauc

SEQ ID NO: 1451033 - RNA, 18 nt, Human
cggcaggggccuggagau

SEQ ID NO: 1451034 - RNA, 17 nt, Human
cggcaggggccuggaga

SEQ ID NO: 1451035 - RNA, 15 nt, Human
cggcaggggccugga

SEQ ID NO: 1451036 - RNA, 17 nt, Human
cggccccuccccuccaa

SEQ ID NO: 1451037 - RNA, 14 nt, Human
cggccccucccccu

SEQ ID NO: 1451038 - RNA, 22 nt, Human
cggccugccaggaggacccagg

SEQ ID NO: 1451039 - RNA, 20 nt, Human
cggccugcccccaccccauu

SEQ ID NO: 1451040 - RNA, 15 nt, Human
cggccugccaggagg

SEQ ID NO: 1451041 - RNA, 14 nt, Human
cggccugccaggag

SEQ ID NO: 1451042 - RNA, 13 nt, Human
cggccugccagga

SEQ ID NO: 1451043 - RNA, 15 nt, Human
cggccuguccuccaa

SEQ ID NO: 1451044 - RNA, 12 nt, Human
cggccuguccuc

SEQ ID NO: 1451045 - RNA, 21 nt, Human
cggccuguccuccaacaccaa

SEQ ID NO: 1451046 - RNA, 14 nt, Human
cggcaggggccugg

SEQ ID NO: 1451047 - RNA, 23 nt, Human
cggcagggcgggcagagggcugg

SEQ ID NO: 1451048 - RNA, 22 nt, Human
cggcagggcgggcagagggcug

SEQ ID NO: 1451049 - RNA, 20 nt, Human
cggcagggcgggcagagggc

SEQ ID NO: 1451050 - RNA, 11 nt, Human
cggcaggacac

SEQ ID NO: 1451051 - RNA, 19 nt, Human
cggcacagggucugcucuu

SEQ ID NO: 1451052 - RNA, 18 nt, Human
cggcacagggucugcucu

SEQ ID NO: 1451053 - RNA, 14 nt, Human
cggcacagggucug

SEQ ID NO: 1451054 - RNA, 17 nt, Human
cggauuuuuuccaaaau

SEQ ID NO: 1451055 - RNA, 12 nt, Human
cggcaacaucaa

SEQ ID NO: 1451056 - RNA, 16 nt, Human
cggauuuuuuccaaaa

SEQ ID NO: 1451057 - RNA, 13 nt, Human
cggauuuuuucca

SEQ ID NO: 1451058 - RNA, 24 nt, Human
cggauuccaaagaguagaauugca

SEQ ID NO: 1451059 - RNA, 16 nt, Human
cggacgcccaggaccc

SEQ ID NO: 1451060 - RNA, 13 nt, Human
cggaccagccugg

SEQ ID NO: 1451061 - RNA, 14 nt, Human
cggaccagccuggc

SEQ ID NO: 1451062 - RNA, 17 nt, Human
cggaccagccuggccca

SEQ ID NO: 1451063 - RNA, 15 nt, Human
cggaccccagccauc

SEQ ID NO: 1451064 - RNA, 19 nt, Human
cggauccuaagcaucuaag

SEQ ID NO: 1451065 - RNA, 21 nt, Human
cggacuuagaaaaccagcuca

SEQ ID NO: 1451066 - RNA, 20 nt, Human
cggauccuaagcaucuaagu

SEQ ID NO: 1451067 - RNA, 14 nt, Human
cgcucucuccaggc

SEQ ID NO: 1451068 - RNA, 14 nt, Human
cgcucucaguucuc

SEQ ID NO: 1451069 - RNA, 18 nt, Human
cggaaagaagagcgagag

SEQ ID NO: 1451070 - RNA, 12 nt, Human
cggaaagaagag

SEQ ID NO: 1451071 - RNA, 16 nt, Human
cgcuauuccagcuguc

SEQ ID NO: 1451072 - RNA, 18 nt, Human
cgcuaucugggaagcuau

SEQ ID NO: 1451073 - RNA, 21 nt, Human
cgcuaucucccugccuccugc

SEQ ID NO: 1451074 - RNA, 20 nt, Human
cggacaagacccccagcacu

SEQ ID NO: 1451075 - RNA, 18 nt, Human
cggacaagacccccagca

SEQ ID NO: 1451076 - RNA, 16 nt, Human
cggacaagacccccag

SEQ ID NO: 1451077 - RNA, 22 nt, Human
cggacaaaaccccccagauauc

SEQ ID NO: 1451078 - RNA, 22 nt, Human
cggaauccugucgauuagacug

SEQ ID NO: 1451079 - RNA, 21 nt, Human
cggaauccugucgauuagacu

SEQ ID NO: 1451080 - RNA, 21 nt, Human
cggaagaagagaucaggaaga

SEQ ID NO: 1451081 - RNA, 22 nt, Human
cggaagaagagaucaggaagag

SEQ ID NO: 1451082 - RNA, 14 nt, Human
cgcccccuccucua

SEQ ID NO: 1451083 - RNA, 20 nt, Human
cgcccccuccgcccugccac

SEQ ID NO: 1451084 - RNA, 19 nt, Human
cgcccccuccgcccugcca

SEQ ID NO: 1451085 - RNA, 17 nt, Human
cgcccccuccgcccugc

SEQ ID NO: 1451086 - RNA, 14 nt, Human
cgcccugccacuca

SEQ ID NO: 1451087 - RNA, 11 nt, Human
cgcccugccac

SEQ ID NO: 1451088 - RNA, 20 nt, Human
cgcccugcagacccugcccu

SEQ ID NO: 1451089 - RNA, 16 nt, Human
cgcccugcagacccug

SEQ ID NO: 1451090 - RNA, 15 nt, Human
cgcccugcagacccu

SEQ ID NO: 1451091 - RNA, 12 nt, Human
cgcccugcagac

SEQ ID NO: 1451092 - RNA, 11 nt, Human
cgcccugcaga

SEQ ID NO: 1451093 - RNA, 16 nt, Human
cgcccagcuccugaca

SEQ ID NO: 1451094 - RNA, 14 nt, Human
cgcccaggacccca

SEQ ID NO: 1451095 - RNA, 22 nt, Human
cgcccagcuccugacacugcug

SEQ ID NO: 1451096 - RNA, 15 nt, Human
cgcccagcuccugac

SEQ ID NO: 1451097 - RNA, 17 nt, Human
cgcagacaccuuggaca

SEQ ID NO: 1451098 - RNA, 13 nt, Human
cgcagaaggaagg

SEQ ID NO: 1451099 - RNA, 16 nt, Human
cgcgucuuccugagug

SEQ ID NO: 1451100 - RNA, 14 nt, Human
cgcgucuuccugag

SEQ ID NO: 1451101 - RNA, 13 nt, Human
cgcgucuuccuga

SEQ ID NO: 1451102 - RNA, 12 nt, Human
cgcgucuuccug

SEQ ID NO: 1451103 - RNA, 16 nt, Human
cgcgucuacccuggga

SEQ ID NO: 1451104 - RNA, 17 nt, Human
cgcgucuacccugggau

SEQ ID NO: 1451105 - RNA, 15 nt, Human
cgcgucuacccuggg

SEQ ID NO: 1451106 - RNA, 14 nt, Human
cgcgucuacccugg

SEQ ID NO: 1451107 - RNA, 22 nt, Human
cgcgacuaauuucaaaaugcuu

SEQ ID NO: 1451108 - RNA, 21 nt, Human
cgcccugcagacccugcccuu

SEQ ID NO: 1451109 - RNA, 13 nt, Human
cgcccagcuccug

SEQ ID NO: 1451110 - RNA, 12 nt, Human
cgcccugccacu

SEQ ID NO: 1451111 - RNA, 15 nt, Human
cgcgacuaauuucaa

SEQ ID NO: 1451112 - RNA, 14 nt, Human
cgcgaucucagcuc

SEQ ID NO: 1451113 - RNA, 14 nt, Human
cgcgauguggaacu

SEQ ID NO: 1451114 - RNA, 15 nt, Human
cgcgaucucagcuca

SEQ ID NO: 1451115 - RNA, 20 nt, Human
cgcuagcaguggcaggcaga

SEQ ID NO: 1451116 - RNA, 15 nt, Human
cgcuagcaguggcag

SEQ ID NO: 1451117 - RNA, 14 nt, Human
cgcuagcaguggca

SEQ ID NO: 1451118 - RNA, 18 nt, Human
cgcuagaggaagcagcca

SEQ ID NO: 1451119 - RNA, 20 nt, Human
cgcuacuaugauuuaauuug

SEQ ID NO: 1451120 - RNA, 16 nt, Human
ccuuugcugcauggca

SEQ ID NO: 1451121 - RNA, 23 nt, Human
ccuuugcgcuccuggcccagccu

SEQ ID NO: 1451122 - RNA, 16 nt, Human
ccuuugcccagaaaga

SEQ ID NO: 1451123 - RNA, 13 nt, Human
ccuuugccaggug

SEQ ID NO: 1451124 - RNA, 23 nt, Human
ccuuugcugugaggcuguccugu

SEQ ID NO: 1451125 - RNA, 22 nt, Human
ccuuugcugugaggcuguccug

SEQ ID NO: 1451126 - RNA, 17 nt, Human
ccuuugcugugaggcug

SEQ ID NO: 1451127 - RNA, 13 nt, Human
ccuuugcugugag

SEQ ID NO: 1451128 - RNA, 18 nt, Human
ccuuuggcaggugcagcc

SEQ ID NO: 1451129 - RNA, 15 nt, Human
ccuuuggcagaguuc

SEQ ID NO: 1451130 - RNA, 19 nt, Human
ccuuuggcaggugcagccc

SEQ ID NO: 1451131 - RNA, 20 nt, Human
ccuuuggcaggugcagcccc

SEQ ID NO: 1451132 - RNA, 16 nt, Human
ccuuugaauccucucu

SEQ ID NO: 1451133 - RNA, 14 nt, Human
ccuuugaauccucu

SEQ ID NO: 1451134 - RNA, 12 nt, Human
ccuuucuuuucc

SEQ ID NO: 1451135 - RNA, 19 nt, Human
ccuuucuuuucccccuuug

SEQ ID NO: 1451136 - RNA, 12 nt, Human
ccuuucuuccgg

SEQ ID NO: 1451137 - RNA, 19 nt, Human
ccuuucuuccggccccucc

SEQ ID NO: 1451138 - RNA, 11 nt, Human
ccuuucuuccg

SEQ ID NO: 1451139 - RNA, 21 nt, Human
ccuuugauuaaagacuccagu

SEQ ID NO: 1451140 - RNA, 22 nt, Human
ccuuugagugcaguccugauca

SEQ ID NO: 1451141 - RNA, 19 nt, Human
ccuuugagugcaguccuga

SEQ ID NO: 1451142 - RNA, 20 nt, Human
ccuuugaauccucucucugu

SEQ ID NO: 1451143 - RNA, 14 nt, Human
ccuuugacaaaggu

SEQ ID NO: 1451144 - RNA, 15 nt, Human
ccuuugaccugccuc

SEQ ID NO: 1451145 - RNA, 20 nt, Human
ccuuggcugacaugaagcug

SEQ ID NO: 1451146 - RNA, 15 nt, Human
ccuuggccaugcaga

SEQ ID NO: 1451147 - RNA, 17 nt, Human
ccuuggccaugcagaaa

SEQ ID NO: 1451148 - RNA, 14 nt, Human
ccuuguuuuuuucu

SEQ ID NO: 1451149 - RNA, 12 nt, Human
ccuuuaaaauuu

SEQ ID NO: 1451150 - RNA, 20 nt, Human
ccuuuaaaauuuuuuuagaa

SEQ ID NO: 1451151 - RNA, 21 nt, Human
ccuuuaaaauuuuuuuagaaa

SEQ ID NO: 1451152 - RNA, 19 nt, Human
ccuuguuuggggcaggagu

SEQ ID NO: 1451153 - RNA, 17 nt, Human
ccuuguuuggggcagga

SEQ ID NO: 1451154 - RNA, 16 nt, Human
ccuuguuuggggcagg

SEQ ID NO: 1451155 - RNA, 15 nt, Human
ccuuguuacuucuga

SEQ ID NO: 1451156 - RNA, 21 nt, Human
ccuuuaacaacauguuuccag

SEQ ID NO: 1451157 - RNA, 17 nt, Human
ccuuuaacaacauguuu

SEQ ID NO: 1451158 - RNA, 16 nt, Human
ccuuuaacaacauguu

SEQ ID NO: 1451159 - RNA, 16 nt, Human
ccuuguuuuggacagu

SEQ ID NO: 1451160 - RNA, 23 nt, Human
ccuuucuggauuauucugggggc

SEQ ID NO: 1451161 - RNA, 22 nt, Human
ccuuucucucuuuauacagcug

SEQ ID NO: 1451162 - RNA, 19 nt, Human
ccuuuaacugacaagccau

SEQ ID NO: 1451163 - RNA, 22 nt, Human
ccuuuaacaacauguuuccagc

SEQ ID NO: 1451164 - RNA, 20 nt, Human
ccuuuaacugacaagccauc

SEQ ID NO: 1451165 - RNA, 13 nt, Human
cgaggcugagaau

SEQ ID NO: 1451166 - RNA, 20 nt, Human
cgaggcugagaaucagacug

SEQ ID NO: 1451167 - RNA, 12 nt, Human
cgaggcugagaa

SEQ ID NO: 1451168 - RNA, 22 nt, Human
cgaggaaucugugggucuggga

SEQ ID NO: 1451169 - RNA, 16 nt, Human
cgaggaaucugugggu

SEQ ID NO: 1451170 - RNA, 10 nt, Human
cgagcuccuc

SEQ ID NO: 1451171 - RNA, 21 nt, Human
cgagcgcccugcagacccugc

SEQ ID NO: 1451172 - RNA, 20 nt, Human
cgagcgcccugcagacccug

SEQ ID NO: 1451173 - RNA, 19 nt, Human
cgagcgcccugcagacccu

SEQ ID NO: 1451174 - RNA, 16 nt, Human
cgagcgcccugcagac

SEQ ID NO: 1451175 - RNA, 15 nt, Human
cgagcgcccugcaga

SEQ ID NO: 1451176 - RNA, 15 nt, Human
ccuuuguauucucuc

SEQ ID NO: 1451177 - RNA, 18 nt, Human
ccuuuguauucucuccug

SEQ ID NO: 1451178 - RNA, 20 nt, Human
ccuuuguauucucuccugua

SEQ ID NO: 1451179 - RNA, 12 nt, Human
cgauuguaacuc

SEQ ID NO: 1451180 - RNA, 21 nt, Human
cgauucccucucccaggcccc

SEQ ID NO: 1451181 - RNA, 12 nt, Human
cgauuucuguuu

SEQ ID NO: 1451182 - RNA, 14 nt, Human
cgcaaguucccagu

SEQ ID NO: 1451183 - RNA, 14 nt, Human
cgcaagggccugau

SEQ ID NO: 1451184 - RNA, 12 nt, Human
cgcagaaggaag

SEQ ID NO: 1451185 - RNA, 16 nt, Human
cgauucucuugccuca

SEQ ID NO: 1451186 - RNA, 23 nt, Human
cgauucccucucccaggccccau

SEQ ID NO: 1451187 - RNA, 19 nt, Human
cgauucccucucccaggcc

SEQ ID NO: 1451188 - RNA, 18 nt, Human
cgaucuguaccugagagg

SEQ ID NO: 1451189 - RNA, 20 nt, Human
cgaucuugguucacugcaac

SEQ ID NO: 1451190 - RNA, 14 nt, Human
cgaucucccaccuu

SEQ ID NO: 1451191 - RNA, 13 nt, Human
cgaucucagcuca

SEQ ID NO: 1451192 - RNA, 18 nt, Human
cguggcucagccagcacu

SEQ ID NO: 1451193 - RNA, 15 nt, Human
cguggcucagccagc

SEQ ID NO: 1451194 - RNA, 14 nt, Human
cguggcucagccag

SEQ ID NO: 1451195 - RNA, 20 nt, Human
cguggccuuguucugucacc

SEQ ID NO: 1451196 - RNA, 22 nt, Human
cguggcccuuccuggacagcug

SEQ ID NO: 1451197 - RNA, 23 nt, Human
cguggccucuugagcaguggcug

SEQ ID NO: 1451198 - RNA, 16 nt, Human
cguggccucuugagca

SEQ ID NO: 1451199 - RNA, 15 nt, Human
cguggccucuugagc

SEQ ID NO: 1451200 - RNA, 20 nt, Human
cguggcccuuccuggacagc

SEQ ID NO: 1451201 - RNA, 18 nt, Human
cguggcccuuccuggaca

SEQ ID NO: 1451202 - RNA, 17 nt, Human
cguggcccuuccuggac

SEQ ID NO: 1451203 - RNA, 16 nt, Human
cguggcccuuccugga

SEQ ID NO: 1451204 - RNA, 15 nt, Human
cguggcccuuccugg

SEQ ID NO: 1451205 - RNA, 14 nt, Human
cguggcccuuccug

SEQ ID NO: 1451206 - RNA, 15 nt, Human
cgugccuguguccau

SEQ ID NO: 1451207 - RNA, 14 nt, Human
cgugccugugucca

SEQ ID NO: 1451208 - RNA, 12 nt, Human
cgugccuguguc

SEQ ID NO: 1451209 - RNA, 13 nt, Human
cguggccuuguuc

SEQ ID NO: 1451210 - RNA, 18 nt, Human
cguggcugcugugggaaa

SEQ ID NO: 1451211 - RNA, 21 nt, Human
cguucaugggggagggggcag

SEQ ID NO: 1451212 - RNA, 11 nt, Human
cguuuugucac

SEQ ID NO: 1451213 - RNA, 14 nt, Human
cguuuucuuaaagu

SEQ ID NO: 1451214 - RNA, 20 nt, Human
cguuuugaagcuacugugug

SEQ ID NO: 1451215 - RNA, 13 nt, Human
cguuuugaagcua

SEQ ID NO: 1451216 - RNA, 20 nt, Human
cguuuucuaauugcuuauuu

SEQ ID NO: 1451217 - RNA, 17 nt, Human
cguuuucuaauugcuua

SEQ ID NO: 1451218 - RNA, 15 nt, Human
cguuuucuaauugcu

SEQ ID NO: 1451219 - RNA, 12 nt, Human
cguuuucuaauu

SEQ ID NO: 1451220 - RNA, 17 nt, Human
cguuugaccuuuuaugu

SEQ ID NO: 1451221 - RNA, 14 nt, Human
cguuuccuuuguug

SEQ ID NO: 1451222 - RNA, 22 nt, Human
cguuucuccaccuagacuguaa

SEQ ID NO: 1451223 - RNA, 18 nt, Human
cguuucuccaccuagacu

SEQ ID NO: 1451224 - RNA, 12 nt, Human
cguuuccuaccg

SEQ ID NO: 1451225 - RNA, 20 nt, Human
cguuucuaugacacaugcaa

SEQ ID NO: 1451226 - RNA, 19 nt, Human
cguuucuaaaggcuaccuu

SEQ ID NO: 1451227 - RNA, 21 nt, Human
cguuucuaaaggcuaccuuug

SEQ ID NO: 1451228 - RNA, 12 nt, Human
cguucugugcac

SEQ ID NO: 1451229 - RNA, 13 nt, Human
cguucucucuuug

SEQ ID NO: 1451230 - RNA, 14 nt, Human
cguucugcucauca

SEQ ID NO: 1451231 - RNA, 19 nt, Human
cguucucucuuugcaugga

SEQ ID NO: 1451232 - RNA, 16 nt, Human
cguuccuuucuuuucc

SEQ ID NO: 1451233 - RNA, 23 nt, Human
cguuccuagagaagacaggcugg

SEQ ID NO: 1451234 - RNA, 22 nt, Human
cguuucauuuagucaugugacc

SEQ ID NO: 1451235 - RNA, 22 nt, Human
cguuucagcgacuccguuggcc

SEQ ID NO: 1451236 - RNA, 14 nt, Human
cguuuauuuucaag

SEQ ID NO: 1451237 - RNA, 15 nt, Human
cguuuauuuucaaga

SEQ ID NO: 1451238 - RNA, 14 nt, Human
cguucuuguaauuu

SEQ ID NO: 1451239 - RNA, 13 nt, Human
cguucuuguaauu

SEQ ID NO: 1451240 - RNA, 12 nt, Human
cguucuuguaau

SEQ ID NO: 1451241 - RNA, 15 nt, Human
cguucuuguaauuuu

SEQ ID NO: 1451242 - RNA, 18 nt, Human
cguucuuguaauuuuaca

SEQ ID NO: 1451243 - RNA, 18 nt, Human
cgugaaugggugcccaca

SEQ ID NO: 1451244 - RNA, 18 nt, Human
cgugcacgcacacugucu

SEQ ID NO: 1451245 - RNA, 23 nt, Human
cgugcauaccacuuuuguucuug

SEQ ID NO: 1451246 - RNA, 19 nt, Human
cgugcauaccacuuuuguu

SEQ ID NO: 1451247 - RNA, 14 nt, Human
cgugcauaccacuu

SEQ ID NO: 1451248 - RNA, 18 nt, Human
cgugcauaccacuuuugu

SEQ ID NO: 1451249 - RNA, 12 nt, Human
cgucuggguggc

SEQ ID NO: 1451250 - RNA, 17 nt, Human
cgucuggcccaccaggg

SEQ ID NO: 1451251 - RNA, 15 nt, Human
cgucuggaaguccaa

SEQ ID NO: 1451252 - RNA, 20 nt, Human
cgucucuuuuacccuggccc

SEQ ID NO: 1451253 - RNA, 21 nt, Human
cgucucuuuuacccuggcccc

SEQ ID NO: 1451254 - RNA, 16 nt, Human
cgucucggccuucaca

SEQ ID NO: 1451255 - RNA, 24 nt, Human
cgucucccccaacagcuggacccu

SEQ ID NO: 1451256 - RNA, 15 nt, Human
cgucuacccugggau

SEQ ID NO: 1451257 - RNA, 20 nt, Human
cgucucccccaacagcugga

SEQ ID NO: 1451258 - RNA, 19 nt, Human
cgucucccccaacagcugg

SEQ ID NO: 1451259 - RNA, 15 nt, Human
cgucggucugugccc

SEQ ID NO: 1451260 - RNA, 22 nt, Human
cguagauauuggacaaagaacc

SEQ ID NO: 1451261 - RNA, 23 nt, Human
cguagauauuggacaaagaaccu

SEQ ID NO: 1451262 - RNA, 13 nt, Human
cggugcucagggg

SEQ ID NO: 1451263 - RNA, 17 nt, Human
cggggcaucuggccugg

SEQ ID NO: 1451264 - RNA, 19 nt, Human
cggggcagcccccucacag

SEQ ID NO: 1451265 - RNA, 13 nt, Human
cggggcagccccc

SEQ ID NO: 1451266 - RNA, 14 nt, Human
cggggauguguccu

SEQ ID NO: 1451267 - RNA, 23 nt, Human
cggggauguguccugacacugca

SEQ ID NO: 1451268 - RNA, 15 nt, Human
cggggcaucuggccu

SEQ ID NO: 1451269 - RNA, 21 nt, Human
cguaggcuacagagaagccuu

SEQ ID NO: 1451270 - RNA, 23 nt, Human
cguaggcuacagagaagccuuca

SEQ ID NO: 1451271 - RNA, 20 nt, Human
cguaggcuacagagaagccu

SEQ ID NO: 1451272 - RNA, 19 nt, Human
cguaggcuacagagaagcc

SEQ ID NO: 1451273 - RNA, 17 nt, Human
cguaggcuacagagaag

SEQ ID NO: 1451274 - RNA, 16 nt, Human
cguaggcuacagagaa

SEQ ID NO: 1451275 - RNA, 15 nt, Human
cguaggcuacagaga

SEQ ID NO: 1451276 - RNA, 14 nt, Human
cguaggcuacagag

SEQ ID NO: 1451277 - RNA, 19 nt, Human
cguagcuauccggacagag

SEQ ID NO: 1451278 - RNA, 14 nt, Human
cguagaugauuuca

SEQ ID NO: 1451279 - RNA, 16 nt, Human
cguauaaaagccuguu

SEQ ID NO: 1451280 - RNA, 17 nt, Human
cguauaaaagccuguuu

SEQ ID NO: 1451281 - RNA, 21 nt, Human
cguauaaaagccuguuuaaga

SEQ ID NO: 1451282 - RNA, 22 nt, Human
cguauaaaagccuguuuaagag

SEQ ID NO: 1451283 - RNA, 19 nt, Human
cguccaggagccugugccu

SEQ ID NO: 1451284 - RNA, 22 nt, Human
cgucaugaggagauucugccuu

SEQ ID NO: 1451285 - RNA, 20 nt, Human
cgucaugcacaguauuugua

SEQ ID NO: 1451286 - RNA, 23 nt, Human
cguccaucacguuagcuguccca

SEQ ID NO: 1451287 - RNA, 21 nt, Human
cgucaugaggagauucugccu

SEQ ID NO: 1451288 - RNA, 14 nt, Human
cgucagugcugugc

SEQ ID NO: 1451289 - RNA, 19 nt, Human
cgucagcugggacaccccg

SEQ ID NO: 1451290 - RNA, 23 nt, Human
cguauuuaauagcaaagaauuga

SEQ ID NO: 1451291 - RNA, 21 nt, Human
cguauuuaauagcaaagaauu

SEQ ID NO: 1451292 - RNA, 15 nt, Human
cguauuuaauagcaa

SEQ ID NO: 1451293 - RNA, 19 nt, Human
cguaugucugguucucaau

SEQ ID NO: 1451294 - RNA, 18 nt, Human
cguaugucugguucucaa

SEQ ID NO: 1451295 - RNA, 15 nt, Human
cguaugucugguucu

SEQ ID NO: 1451296 - RNA, 21 nt, Human
cgucaccccuguuucuggcac

SEQ ID NO: 1451297 - RNA, 12 nt, Human
cgucaccucaga

SEQ ID NO: 1451298 - RNA, 18 nt, Human
cgucaccacgacuggcca

SEQ ID NO: 1451299 - RNA, 23 nt, Human
cgucaagagugaauucccucacu

SEQ ID NO: 1451300 - RNA, 22 nt, Human
cgucaagagugaauucccucac

SEQ ID NO: 1451301 - RNA, 21 nt, Human
cgucaaaacagauuguuugca

SEQ ID NO: 1451302 - RNA, 20 nt, Human
cgucaacucauauuuucaug

SEQ ID NO: 1451303 - RNA, 22 nt, Human
cgucaaaacagauuguuugcaa

SEQ ID NO: 1451304 - RNA, 16 nt, Human
cgucaacucauauuuu

SEQ ID NO: 1451305 - RNA, 21 nt, Human
cuccuaguucuucaucccacu

SEQ ID NO: 1451306 - RNA, 23 nt, Human
cuccuaguucuagaaaaacaggc

SEQ ID NO: 1451307 - RNA, 17 nt, Human
cuccuaguucuagaaaa

SEQ ID NO: 1451308 - RNA, 14 nt, Human
cuccuaguucuaga

SEQ ID NO: 1451309 - RNA, 15 nt, Human
cuccuaggcauucug

SEQ ID NO: 1451310 - RNA, 19 nt, Human
cuccuaggcauucuggacc

SEQ ID NO: 1451311 - RNA, 19 nt, Human
cucccuuucuaucguucuc

SEQ ID NO: 1451312 - RNA, 15 nt, Human
cucccuuucacuaaa

SEQ ID NO: 1451313 - RNA, 14 nt, Human
cucccuucuucccu

SEQ ID NO: 1451314 - RNA, 16 nt, Human
cucccuucuacagccu

SEQ ID NO: 1451315 - RNA, 10 nt, Human
cucccugggg

SEQ ID NO: 1451316 - RNA, 11 nt, Human
cucccuggggg

SEQ ID NO: 1451317 - RNA, 19 nt, Human
cucccauccuguguguuaa

SEQ ID NO: 1451318 - RNA, 16 nt, Human
cucccauccugugugu

SEQ ID NO: 1451319 - RNA, 15 nt, Human
cucccauccugugug

SEQ ID NO: 1451320 - RNA, 13 nt, Human
cucccauccugug

SEQ ID NO: 1451321 - RNA, 22 nt, Human
cucccagguguuaacauuccaa

SEQ ID NO: 1451322 - RNA, 21 nt, Human
cucccagguguuaacauucca

SEQ ID NO: 1451323 - RNA, 23 nt, Human
cuccugaccaguugcagucacuc

SEQ ID NO: 1451324 - RNA, 22 nt, Human
cuccugaccaguugcagucacu

SEQ ID NO: 1451325 - RNA, 16 nt, Human
cuccugaccaguugca

SEQ ID NO: 1451326 - RNA, 12 nt, Human
cuccugaccagu

SEQ ID NO: 1451327 - RNA, 18 nt, Human
cuccugacacugcuggag

SEQ ID NO: 1451328 - RNA, 17 nt, Human
cuccugacacugcugga

SEQ ID NO: 1451329 - RNA, 14 nt, Human
cuccugacacugcu

SEQ ID NO: 1451330 - RNA, 22 nt, Human
cuccugacacccuucucccacu

SEQ ID NO: 1451331 - RNA, 20 nt, Human
cuccugacacccuucuccca

SEQ ID NO: 1451332 - RNA, 18 nt, Human
cuccugacacccuucucc

SEQ ID NO: 1451333 - RNA, 17 nt, Human
cuccugacacccuucuc

SEQ ID NO: 1451334 - RNA, 23 nt, Human
cuccugaaaaaaaaccugagauu

SEQ ID NO: 1451335 - RNA, 22 nt, Human
cuccugaaaagguuuaugaaaa

SEQ ID NO: 1451336 - RNA, 21 nt, Human
cuccugaaaaaaaaccugaga

SEQ ID NO: 1451337 - RNA, 20 nt, Human
cuccugagaaaaaagguucc

SEQ ID NO: 1451338 - RNA, 15 nt, Human
cuccugaccucaggc

SEQ ID NO: 1451339 - RNA, 16 nt, Human
cuccugaccucaggca

SEQ ID NO: 1451340 - RNA, 15 nt, Human
cuccugaccucaagu

SEQ ID NO: 1451341 - RNA, 14 nt, Human
cuccugaccucagg

SEQ ID NO: 1451342 - RNA, 16 nt, Human
cuccugaggcuuugga

SEQ ID NO: 1451343 - RNA, 17 nt, Human
cuccugaggcuuuggau

SEQ ID NO: 1451344 - RNA, 19 nt, Human
cuccucuagcugugggggu

SEQ ID NO: 1451345 - RNA, 18 nt, Human
cuccucuagcuguggggg

SEQ ID NO: 1451346 - RNA, 17 nt, Human
cuccucuagcugugggg

SEQ ID NO: 1451347 - RNA, 19 nt, Human
cuccucacuguauccaggu

SEQ ID NO: 1451348 - RNA, 16 nt, Human
cuccucacuguaucca

SEQ ID NO: 1451349 - RNA, 14 nt, Human
cuccucacuguauc

SEQ ID NO: 1451350 - RNA, 16 nt, Human
cuccucccucccucuc

SEQ ID NO: 1451351 - RNA, 19 nt, Human
cucgacaugaaaauucaga

SEQ ID NO: 1451352 - RNA, 14 nt, Human
cucgaaucugugug

SEQ ID NO: 1451353 - RNA, 18 nt, Human
cucgaaucucugugccuu

SEQ ID NO: 1451354 - RNA, 17 nt, Human
cucgaaucucugugccu

SEQ ID NO: 1451355 - RNA, 16 nt, Human
cucgaaucucugugcc

SEQ ID NO: 1451356 - RNA, 15 nt, Human
cucgaaucucugugc

SEQ ID NO: 1451357 - RNA, 14 nt, Human
cucgaaucucugug

SEQ ID NO: 1451358 - RNA, 13 nt, Human
cucgaaucucugu

SEQ ID NO: 1451359 - RNA, 15 nt, Human
cucgccccuggcaga

SEQ ID NO: 1451360 - RNA, 14 nt, Human
cucgccccuggcag

SEQ ID NO: 1451361 - RNA, 14 nt, Human
cucgccccagcagg

SEQ ID NO: 1451362 - RNA, 19 nt, Human
cucgcccauccccuugagg

SEQ ID NO: 1451363 - RNA, 20 nt, Human
cucgauguggucacagcugu

SEQ ID NO: 1451364 - RNA, 22 nt, Human
cucgcauaggaccuuuccacca

SEQ ID NO: 1451365 - RNA, 24 nt, Human
cucgauguggucacagcuguauag

SEQ ID NO: 1451366 - RNA, 19 nt, Human
cucgauguggucacagcug

SEQ ID NO: 1451367 - RNA, 20 nt, Human
cucgccccuggcagagaugc

SEQ ID NO: 1451368 - RNA, 17 nt, Human
cucgccccuggcagaga

SEQ ID NO: 1451369 - RNA, 16 nt, Human
cucgccccuggcagag

SEQ ID NO: 1451370 - RNA, 16 nt, Human
cucgcggcccucagua

SEQ ID NO: 1451371 - RNA, 15 nt, Human
cucgcggcccucagu

SEQ ID NO: 1451372 - RNA, 22 nt, Human
cucgcuagcaguggcaggcaga

SEQ ID NO: 1451373 - RNA, 15 nt, Human
cucggccucccaaag

SEQ ID NO: 1451374 - RNA, 23 nt, Human
cucggcagcccuuccaaacucuu

SEQ ID NO: 1451375 - RNA, 14 nt, Human
cucggaucucuccu

SEQ ID NO: 1451376 - RNA, 13 nt, Human
cucggccugcccc

SEQ ID NO: 1451377 - RNA, 20 nt, Human
cucggccucccaaagugcug

SEQ ID NO: 1451378 - RNA, 18 nt, Human
cucggccucccaaagugc

SEQ ID NO: 1451379 - RNA, 22 nt, Human
cucuaaagucuguugauuaaag

SEQ ID NO: 1451380 - RNA, 17 nt, Human
cucggccuucacaaucu

SEQ ID NO: 1451381 - RNA, 11 nt, Human
cucggccugcc

SEQ ID NO: 1451382 - RNA, 17 nt, Human
cucuaaauucuuucauu

SEQ ID NO: 1451383 - RNA, 13 nt, Human
cucuaaauucuuu

SEQ ID NO: 1451384 - RNA, 14 nt, Human
cucuaacagcccuc

SEQ ID NO: 1451385 - RNA, 14 nt, Human
cucuaacagcacca

SEQ ID NO: 1451386 - RNA, 13 nt, Human
cucuaacagcacc

SEQ ID NO: 1451387 - RNA, 15 nt, Human
cucuaacaguggaca

SEQ ID NO: 1451388 - RNA, 19 nt, Human
cucuaacaguggacaaagu

SEQ ID NO: 1451389 - RNA, 21 nt, Human
cuccuugauuuuagccuucuc

SEQ ID NO: 1451390 - RNA, 22 nt, Human
cuccuugagggcaagagccaca

SEQ ID NO: 1451391 - RNA, 23 nt, Human
cuccuucugagcuccuguccccu

SEQ ID NO: 1451392 - RNA, 20 nt, Human
cuccuucugagcuccugucc

SEQ ID NO: 1451393 - RNA, 19 nt, Human
cuccuucugagcuccuguc

SEQ ID NO: 1451394 - RNA, 18 nt, Human
cuccuucugagcuccugu

SEQ ID NO: 1451395 - RNA, 16 nt, Human
cuccuucugagcuccu

SEQ ID NO: 1451396 - RNA, 14 nt, Human
cuccuucugagcuc

SEQ ID NO: 1451397 - RNA, 13 nt, Human
cuccuucugagcu

SEQ ID NO: 1451398 - RNA, 16 nt, Human
cuccuuccagcuagug

SEQ ID NO: 1451399 - RNA, 19 nt, Human
cuccuucaugacagccucc

SEQ ID NO: 1451400 - RNA, 14 nt, Human
cuccuuagaaaaaa

SEQ ID NO: 1451401 - RNA, 19 nt, Human
cuccugaggauguguccca

SEQ ID NO: 1451402 - RNA, 13 nt, Human
cuccugcccacgg

SEQ ID NO: 1451403 - RNA, 16 nt, Human
cuccuguugggagagg

SEQ ID NO: 1451404 - RNA, 14 nt, Human
cuccuguugggaga

SEQ ID NO: 1451405 - RNA, 13 nt, Human
cuccuguugggag

SEQ ID NO: 1451406 - RNA, 17 nt, Human
cuccugcccacggaguc

SEQ ID NO: 1451407 - RNA, 19 nt, Human
cuccuguuuugcacagcca

SEQ ID NO: 1451408 - RNA, 22 nt, Human
cuccuguugggagagggcgcag

SEQ ID NO: 1451409 - RNA, 24 nt, Human
cuccuguugggagagggcgcaggc

SEQ ID NO: 1451410 - RNA, 13 nt, Human
cuccuuaaggcuc

SEQ ID NO: 1451411 - RNA, 22 nt, Human
cuccuuaaggcucuuuuguaag

SEQ ID NO: 1451412 - RNA, 13 nt, Human
cuccuuagaaaaa

SEQ ID NO: 1451413 - RNA, 17 nt, Human
cuccauucugcuccuuc

SEQ ID NO: 1451414 - RNA, 16 nt, Human
cuccauucugcuccuu

SEQ ID NO: 1451415 - RNA, 15 nt, Human
cuccauucugcuccu

SEQ ID NO: 1451416 - RNA, 14 nt, Human
cuccauucugcucc

SEQ ID NO: 1451417 - RNA, 18 nt, Human
cucccaaggggccugagc

SEQ ID NO: 1451418 - RNA, 22 nt, Human
cucccaaguagcugggauuaca

SEQ ID NO: 1451419 - RNA, 19 nt, Human
cucccaaggggccugagca

SEQ ID NO: 1451420 - RNA, 21 nt, Human
cucccaggccccaugaccucc

SEQ ID NO: 1451421 - RNA, 19 nt, Human
cucccaggccccaugaccu

SEQ ID NO: 1451422 - RNA, 16 nt, Human
cucccaggccccauga

SEQ ID NO: 1451423 - RNA, 15 nt, Human
cucccaggccccaug

SEQ ID NO: 1451424 - RNA, 12 nt, Human
cucccaggcccc

SEQ ID NO: 1451425 - RNA, 17 nt, Human
cuccaggcccaaggcuc

SEQ ID NO: 1451426 - RNA, 16 nt, Human
cuccaggcccaaggcu

SEQ ID NO: 1451427 - RNA, 19 nt, Human
cuccaggcccaaggcuccc

SEQ ID NO: 1451428 - RNA, 12 nt, Human
cuccaggcccaa

SEQ ID NO: 1451429 - RNA, 11 nt, Human
cuccaggccca

SEQ ID NO: 1451430 - RNA, 16 nt, Human
cuccagcuccuuuggg

SEQ ID NO: 1451431 - RNA, 15 nt, Human
cuccagcucccugug

SEQ ID NO: 1451432 - RNA, 13 nt, Human
cuccagcucccug

SEQ ID NO: 1451433 - RNA, 17 nt, Human
cuccagcuccuuugggc

SEQ ID NO: 1451434 - RNA, 22 nt, Human
cuccagcucccugugcccccag

SEQ ID NO: 1451435 - RNA, 21 nt, Human
cuccagcucccugugccccca

SEQ ID NO: 1451436 - RNA, 17 nt, Human
cuccagcucccugugcc

SEQ ID NO: 1451437 - RNA, 21 nt, Human
cuccagccaucaagagacuga

SEQ ID NO: 1451438 - RNA, 20 nt, Human
cuccagccaucaagagacug

SEQ ID NO: 1451439 - RNA, 20 nt, Human
cuccagccugacaucaaaaa

SEQ ID NO: 1451440 - RNA, 13 nt, Human
cuccagccugaca

SEQ ID NO: 1451441 - RNA, 12 nt, Human
cuccagccugac

SEQ ID NO: 1451442 - RNA, 12 nt, Human
cuccagccucag

SEQ ID NO: 1451443 - RNA, 15 nt, Human
cuccagccucagccu

SEQ ID NO: 1451444 - RNA, 17 nt, Human
cuccagccucagccucc

SEQ ID NO: 1451445 - RNA, 14 nt, Human
cuccagccucagcu

SEQ ID NO: 1451446 - RNA, 15 nt, Human
cuccacucugcuucu

SEQ ID NO: 1451447 - RNA, 14 nt, Human
cuccacucugcuuc

SEQ ID NO: 1451448 - RNA, 13 nt, Human
cuccacucugcuu

SEQ ID NO: 1451449 - RNA, 12 nt, Human
cuccacucugcu

SEQ ID NO: 1451450 - RNA, 21 nt, Human
cuccacucugcuucucugacu

SEQ ID NO: 1451451 - RNA, 20 nt, Human
cuccacucugcuucucugac

SEQ ID NO: 1451452 - RNA, 17 nt, Human
cuccacucugcuucucu

SEQ ID NO: 1451453 - RNA, 16 nt, Human
cuccacucugcuucuc

SEQ ID NO: 1451454 - RNA, 14 nt, Human
cuccacucuuucuu

SEQ ID NO: 1451455 - RNA, 19 nt, Human
cuccacagcaaccccaggc

SEQ ID NO: 1451456 - RNA, 16 nt, Human
cuccacagcaacccca

SEQ ID NO: 1451457 - RNA, 15 nt, Human
cuccacacugcacaa

SEQ ID NO: 1451458 - RNA, 14 nt, Human
cuccacacugcaca

SEQ ID NO: 1451459 - RNA, 16 nt, Human
cuccacaccugcggcc

SEQ ID NO: 1451460 - RNA, 15 nt, Human
cuccacaccugcggc

SEQ ID NO: 1451461 - RNA, 13 nt, Human
cuccacaccugcg

SEQ ID NO: 1451462 - RNA, 16 nt, Human
cucauuuagccugucc

SEQ ID NO: 1451463 - RNA, 12 nt, Human
cuccacaccugc

SEQ ID NO: 1451464 - RNA, 14 nt, Human
cucauuuagccugu

SEQ ID NO: 1451465 - RNA, 19 nt, Human
cucauuuaauccucccuuc

SEQ ID NO: 1451466 - RNA, 22 nt, Human
cucauuuaauccucccuuccuc

SEQ ID NO: 1451467 - RNA, 13 nt, Human
cucauuuaauccu

SEQ ID NO: 1451468 - RNA, 19 nt, Human
cucauugucuguguagagu

SEQ ID NO: 1451469 - RNA, 20 nt, Human
cuccacauauuucagugagg

SEQ ID NO: 1451470 - RNA, 15 nt, Human
cuccacagcugccuc

SEQ ID NO: 1451471 - RNA, 17 nt, Human
cucauacacucguauga

SEQ ID NO: 1451472 - RNA, 20 nt, Human
cucauaacuugagaccuaau

SEQ ID NO: 1451473 - RNA, 17 nt, Human
cucauaacuugagaccu

SEQ ID NO: 1451474 - RNA, 14 nt, Human
cucauaacuugaga

SEQ ID NO: 1451475 - RNA, 17 nt, Human
cucauaacggaucagaa

SEQ ID NO: 1451476 - RNA, 19 nt, Human
cucauaacggaucagaaau

SEQ ID NO: 1451477 - RNA, 21 nt, Human
cucauaacggaucagaaauac

SEQ ID NO: 1451478 - RNA, 20 nt, Human
cucaggucccuggggcuagg

SEQ ID NO: 1451479 - RNA, 19 nt, Human
cucaggucacauaaaacuu

SEQ ID NO: 1451480 - RNA, 15 nt, Human
cucagguacuuguaa

SEQ ID NO: 1451481 - RNA, 21 nt, Human
cucaggggucugagcuccagc

SEQ ID NO: 1451482 - RNA, 23 nt, Human
cucagggggcgccugugguucug

SEQ ID NO: 1451483 - RNA, 19 nt, Human
cucagggggcgccuguggu

SEQ ID NO: 1451484 - RNA, 14 nt, Human
cucagggggcgccu

SEQ ID NO: 1451485 - RNA, 19 nt, Human
cuaaaagugggcuugauuc

SEQ ID NO: 1451486 - RNA, 17 nt, Human
cucaggggccugcccag

SEQ ID NO: 1451487 - RNA, 18 nt, Human
cucaggggcccuggagca

SEQ ID NO: 1451488 - RNA, 19 nt, Human
cucaggggcccuggagcag

SEQ ID NO: 1451489 - RNA, 21 nt, Human
cucaggggcccuggagcagcc

SEQ ID NO: 1451490 - RNA, 20 nt, Human
cguuuuuuuuuuguuuguug

SEQ ID NO: 1451491 - RNA, 17 nt, Human
cuaaaagauauaagugc

SEQ ID NO: 1451492 - RNA, 20 nt, Human
cuaaaagauauaagugcugu

SEQ ID NO: 1451493 - RNA, 21 nt, Human
cuaaaagauauaagugcugua

SEQ ID NO: 1451494 - RNA, 15 nt, Human
cguuuuuuucauucc

SEQ ID NO: 1451495 - RNA, 17 nt, Human
cguuuuuuaaauguaua

SEQ ID NO: 1451496 - RNA, 15 nt, Human
cucauuguaaacaaa

SEQ ID NO: 1451497 - RNA, 22 nt, Human
cucauuggaaauuuagcauugu

SEQ ID NO: 1451498 - RNA, 18 nt, Human
cucauuggacccuuccau

SEQ ID NO: 1451499 - RNA, 17 nt, Human
cucauuggacccuucca

SEQ ID NO: 1451500 - RNA, 13 nt, Human
cucauuggacccu

SEQ ID NO: 1451501 - RNA, 20 nt, Human
cucauuggaaauuuagcauu

SEQ ID NO: 1451502 - RNA, 19 nt, Human
cucauuggaaauuuagcau

SEQ ID NO: 1451503 - RNA, 18 nt, Human
cucauuggaaauuuagca

SEQ ID NO: 1451504 - RNA, 16 nt, Human
cucauuggaaauuuag

SEQ ID NO: 1451505 - RNA, 19 nt, Human
cucauugcuuacaagccua

SEQ ID NO: 1451506 - RNA, 22 nt, Human
cucauuauuuauguccaggugu

SEQ ID NO: 1451507 - RNA, 21 nt, Human
cucauuauuuauguccaggug

SEQ ID NO: 1451508 - RNA, 14 nt, Human
cucauuagacugga

SEQ ID NO: 1451509 - RNA, 18 nt, Human
cucaucucagugaagaau

SEQ ID NO: 1451510 - RNA, 11 nt, Human
cucaucucagu

SEQ ID NO: 1451511 - RNA, 17 nt, Human
cucaucuccccaucauu

SEQ ID NO: 1451512 - RNA, 14 nt, Human
cucauccugcaggc

SEQ ID NO: 1451513 - RNA, 21 nt, Human
cucaucuagguaaauuacagu

SEQ ID NO: 1451514 - RNA, 13 nt, Human
cucauccugcagg

SEQ ID NO: 1451515 - RNA, 19 nt, Human
cucauccaucaucaugugu

SEQ ID NO: 1451516 - RNA, 16 nt, Human
cucauccaucaucaug

SEQ ID NO: 1451517 - RNA, 22 nt, Human
cucauccacucuacuaaugccu

SEQ ID NO: 1451518 - RNA, 24 nt, Human
cucauccaccccaucccuccccag

SEQ ID NO: 1451519 - RNA, 19 nt, Human
cucauccaccccaucccuc

SEQ ID NO: 1451520 - RNA, 16 nt, Human
cucauccaccccaucc

SEQ ID NO: 1451521 - RNA, 15 nt, Human
cucauccaccccauc

SEQ ID NO: 1451522 - RNA, 13 nt, Human
cucauccacccca

SEQ ID NO: 1451523 - RNA, 13 nt, Human
cucauauugugau

SEQ ID NO: 1451524 - RNA, 21 nt, Human
cucauauugugauucugccuu

SEQ ID NO: 1451525 - RNA, 19 nt, Human
cucauauugugauucugcc

SEQ ID NO: 1451526 - RNA, 20 nt, Human
cucauccacauacccugacc

SEQ ID NO: 1451527 - RNA, 18 nt, Human
cucauccacauacccuga

SEQ ID NO: 1451528 - RNA, 22 nt, Human
cucauaacucugugaucuugcu

SEQ ID NO: 1451529 - RNA, 23 nt, Human
cucaucauucucugucucaucca

SEQ ID NO: 1451530 - RNA, 13 nt, Human
cucaucaacugaa

SEQ ID NO: 1451531 - RNA, 14 nt, Human
cucauauuuucaug

SEQ ID NO: 1451532 - RNA, 22 nt, Human
cucugaggcgccccaacccgug

SEQ ID NO: 1451533 - RNA, 23 nt, Human
cucugaggcgccccaacccgugg

SEQ ID NO: 1451534 - RNA, 21 nt, Human
cucugaggcgccccaacccgu

SEQ ID NO: 1451535 - RNA, 19 nt, Human
cucugaggcgccccaaccc

SEQ ID NO: 1451536 - RNA, 12 nt, Human
cucugaggcgcc

SEQ ID NO: 1451537 - RNA, 10 nt, Human
cucugaggcg

SEQ ID NO: 1451538 - RNA, 21 nt, Human
cucugaggccagccuggccuc

SEQ ID NO: 1451539 - RNA, 20 nt, Human
cucugaggccagccuggccu

SEQ ID NO: 1451540 - RNA, 19 nt, Human
cucugaggccagccuggcc

SEQ ID NO: 1451541 - RNA, 18 nt, Human
cucugaggccagccuggc

SEQ ID NO: 1451542 - RNA, 17 nt, Human
cucugaggccagccugg

SEQ ID NO: 1451543 - RNA, 16 nt, Human
cucugaggccagccug

SEQ ID NO: 1451544 - RNA, 15 nt, Human
cucugaggccagccu

SEQ ID NO: 1451545 - RNA, 14 nt, Human
cucugaggccagcc

SEQ ID NO: 1451546 - RNA, 13 nt, Human
cucugaggccagc

SEQ ID NO: 1451547 - RNA, 19 nt, Human
cucugagcugucaacgaga

SEQ ID NO: 1451548 - RNA, 15 nt, Human
cucugagcugucaac

SEQ ID NO: 1451549 - RNA, 15 nt, Human
cucugagcugugcag

SEQ ID NO: 1451550 - RNA, 13 nt, Human
cucugagcuguca

SEQ ID NO: 1451551 - RNA, 11 nt, Human
cucugagcugu

SEQ ID NO: 1451552 - RNA, 13 nt, Human
cucugagcgccuc

SEQ ID NO: 1451553 - RNA, 13 nt, Human
cucugagcaguga

SEQ ID NO: 1451554 - RNA, 22 nt, Human
cucugagagucuagauucucug

SEQ ID NO: 1451555 - RNA, 19 nt, Human
cucugagagucuagauucu

SEQ ID NO: 1451556 - RNA, 23 nt, Human
cucugagacuccagaccugaggc

SEQ ID NO: 1451557 - RNA, 18 nt, Human
cucugagagucuagauuc

SEQ ID NO: 1451558 - RNA, 22 nt, Human
cucucugcucugcgugucaccu

SEQ ID NO: 1451559 - RNA, 14 nt, Human
cucucugcucugcg

SEQ ID NO: 1451560 - RNA, 12 nt, Human
cucucugcucug

SEQ ID NO: 1451561 - RNA, 17 nt, Human
cucucugcccuugauca

SEQ ID NO: 1451562 - RNA, 21 nt, Human
cucugacuucugccuggagac

SEQ ID NO: 1451563 - RNA, 19 nt, Human
cucugacuucugccuggag

SEQ ID NO: 1451564 - RNA, 18 nt, Human
cucugacuucugccugga

SEQ ID NO: 1451565 - RNA, 17 nt, Human
cucugacuucugccugg

SEQ ID NO: 1451566 - RNA, 16 nt, Human
cucugacuucugccug

SEQ ID NO: 1451567 - RNA, 15 nt, Human
cucugacuucugccu

SEQ ID NO: 1451568 - RNA, 14 nt, Human
cucugacuucugcc

SEQ ID NO: 1451569 - RNA, 13 nt, Human
cucugacuucugc

SEQ ID NO: 1451570 - RNA, 10 nt, Human
cucugagaac

SEQ ID NO: 1451571 - RNA, 15 nt, Human
cucugagacuccaga

SEQ ID NO: 1451572 - RNA, 14 nt, Human
cucugagacuccag

SEQ ID NO: 1451573 - RNA, 23 nt, Human
cucugagaauuguugagauacuu

SEQ ID NO: 1451574 - RNA, 20 nt, Human
cucugagaauuguugagaua

SEQ ID NO: 1451575 - RNA, 19 nt, Human
cucugauuuucaaagcuuu

SEQ ID NO: 1451576 - RNA, 18 nt, Human
cucugauuuucaaagcuu

SEQ ID NO: 1451577 - RNA, 15 nt, Human
cucugauuuucaaag

SEQ ID NO: 1451578 - RNA, 20 nt, Human
cucugaugcaucagaaaggg

SEQ ID NO: 1451579 - RNA, 15 nt, Human
cucugaugcaucaga

SEQ ID NO: 1451580 - RNA, 18 nt, Human
cucugaugcagcuuauac

SEQ ID NO: 1451581 - RNA, 14 nt, Human
cucugaugcagcuu

SEQ ID NO: 1451582 - RNA, 13 nt, Human
cucugaugcagcu

SEQ ID NO: 1451583 - RNA, 23 nt, Human
cucugaugaaaaauugcugacug

SEQ ID NO: 1451584 - RNA, 20 nt, Human
cucugauuuucaaagcuuuu

SEQ ID NO: 1451585 - RNA, 22 nt, Human
cucugauuuucaaagcuuuuuc

SEQ ID NO: 1451586 - RNA, 22 nt, Human
cucugaucccucuacagagcuu

SEQ ID NO: 1451587 - RNA, 21 nt, Human
cucugaucccucuacagagcu

SEQ ID NO: 1451588 - RNA, 12 nt, Human
cucugaucccuc

SEQ ID NO: 1451589 - RNA, 22 nt, Human
cucugaugaaaaauugcugacu

SEQ ID NO: 1451590 - RNA, 14 nt, Human
cucugaugaaaaau

SEQ ID NO: 1451591 - RNA, 20 nt, Human
cucugaggggcuaccaggaa

SEQ ID NO: 1451592 - RNA, 21 nt, Human
cucugaggggcuaccaggaaa

SEQ ID NO: 1451593 - RNA, 17 nt, Human
cucugcaauuccccucu

SEQ ID NO: 1451594 - RNA, 16 nt, Human
cucugcaauuccccuc

SEQ ID NO: 1451595 - RNA, 15 nt, Human
cucugcaauuccccu

SEQ ID NO: 1451596 - RNA, 21 nt, Human
cucugcaauuccccucugcug

SEQ ID NO: 1451597 - RNA, 20 nt, Human
cucugcaauuccccucugcu

SEQ ID NO: 1451598 - RNA, 19 nt, Human
cucugcaauuccccucugc

SEQ ID NO: 1451599 - RNA, 18 nt, Human
cucugcaauuccccucug

SEQ ID NO: 1451600 - RNA, 22 nt, Human
cucugcagucucuauaccaaua

SEQ ID NO: 1451601 - RNA, 23 nt, Human
cucugcaggucccuaauaaagcu

SEQ ID NO: 1451602 - RNA, 23 nt, Human
cucugcaauuccccucugcugcu

SEQ ID NO: 1451603 - RNA, 22 nt, Human
cucugcaauuccccucugcugc

SEQ ID NO: 1451604 - RNA, 15 nt, Human
cucugcagucccagc

SEQ ID NO: 1451605 - RNA, 14 nt, Human
cucugcagucucua

SEQ ID NO: 1451606 - RNA, 14 nt, Human
cucugcccaggcac

SEQ ID NO: 1451607 - RNA, 19 nt, Human
cucugcccaggcacugcua

SEQ ID NO: 1451608 - RNA, 21 nt, Human
cucugcccuugaucagcccca

SEQ ID NO: 1451609 - RNA, 14 nt, Human
cucuggaauuugaa

SEQ ID NO: 1451610 - RNA, 15 nt, Human
cucuggacagcccca

SEQ ID NO: 1451611 - RNA, 18 nt, Human
cucuggacagccccaccc

SEQ ID NO: 1451612 - RNA, 21 nt, Human
cucuggagaaagggcccuggg

SEQ ID NO: 1451613 - RNA, 15 nt, Human
cucuggagcauuucu

SEQ ID NO: 1451614 - RNA, 14 nt, Human
cucuggagcauuuc

SEQ ID NO: 1451615 - RNA, 12 nt, Human
cucuggagccca

SEQ ID NO: 1451616 - RNA, 13 nt, Human
cucucgcacaccu

SEQ ID NO: 1451617 - RNA, 15 nt, Human
cucucgcacaccucu

SEQ ID NO: 1451618 - RNA, 11 nt, Human
cucuccccagc

SEQ ID NO: 1451619 - RNA, 22 nt, Human
cucuccuguaccucuugagccu

SEQ ID NO: 1451620 - RNA, 17 nt, Human
cucuccuguaccucuug

SEQ ID NO: 1451621 - RNA, 18 nt, Human
cucuccuguaccucuuga

SEQ ID NO: 1451622 - RNA, 21 nt, Human
cucuccccacgagggcuggcu

SEQ ID NO: 1451623 - RNA, 19 nt, Human
cucuccccacgagggcugg

SEQ ID NO: 1451624 - RNA, 18 nt, Human
cucuccccacgagggcug

SEQ ID NO: 1451625 - RNA, 13 nt, Human
cucuccuguaccu

SEQ ID NO: 1451626 - RNA, 14 nt, Human
cucuccuguaccuc

SEQ ID NO: 1451627 - RNA, 15 nt, Human
cucuccuguaccucu

SEQ ID NO: 1451628 - RNA, 16 nt, Human
cucucuacagucucgu

SEQ ID NO: 1451629 - RNA, 18 nt, Human
cucucuacagucucgucu

SEQ ID NO: 1451630 - RNA, 14 nt, Human
cucucuacagucuc

SEQ ID NO: 1451631 - RNA, 19 nt, Human
cucucuacaaacucccacu

SEQ ID NO: 1451632 - RNA, 19 nt, Human
cucucggguugugugucug

SEQ ID NO: 1451633 - RNA, 18 nt, Human
cucucggcuccccaugug

SEQ ID NO: 1451634 - RNA, 17 nt, Human
cucucggcuccccaugu

SEQ ID NO: 1451635 - RNA, 16 nt, Human
cucucggcuccccaug

SEQ ID NO: 1451636 - RNA, 15 nt, Human
cucucggcuccccau

SEQ ID NO: 1451637 - RNA, 14 nt, Human
cucucggcucccca

SEQ ID NO: 1451638 - RNA, 12 nt, Human
cucucugcaggu

SEQ ID NO: 1451639 - RNA, 13 nt, Human
cucucugcagguc

SEQ ID NO: 1451640 - RNA, 14 nt, Human
cucucugcaggucc

SEQ ID NO: 1451641 - RNA, 16 nt, Human
cucucugcaggucccu

SEQ ID NO: 1451642 - RNA, 17 nt, Human
cucucugcaggucccua

SEQ ID NO: 1451643 - RNA, 19 nt, Human
cucucugcaggucccuaau

SEQ ID NO: 1451644 - RNA, 22 nt, Human
cucucugcaggucccuaauaaa

SEQ ID NO: 1451645 - RNA, 12 nt, Human
cucucccaguug

SEQ ID NO: 1451646 - RNA, 16 nt, Human
cucucccaggccccau

SEQ ID NO: 1451647 - RNA, 14 nt, Human
cucucccaggcccc

SEQ ID NO: 1451648 - RNA, 13 nt, Human
cucucccaggccc

SEQ ID NO: 1451649 - RNA, 12 nt, Human
cucucccaggcc

SEQ ID NO: 1451650 - RNA, 14 nt, Human
cucucccaggcagg

SEQ ID NO: 1451651 - RNA, 13 nt, Human
cucucccaggcag

SEQ ID NO: 1451652 - RNA, 21 nt, Human
cucucccacccucuuccuacu

SEQ ID NO: 1451653 - RNA, 19 nt, Human
cucucccacccucuuccua

SEQ ID NO: 1451654 - RNA, 17 nt, Human
cucucccacccucuucc

SEQ ID NO: 1451655 - RNA, 16 nt, Human
cucucccacccucuuc

SEQ ID NO: 1451656 - RNA, 14 nt, Human
cucucccacccucu

SEQ ID NO: 1451657 - RNA, 13 nt, Human
cucucccacccuc

SEQ ID NO: 1451658 - RNA, 14 nt, Human
cucucccaacucuu

SEQ ID NO: 1451659 - RNA, 21 nt, Human
cucucccaggccccaugaccu

SEQ ID NO: 1451660 - RNA, 19 nt, Human
cucucccaggccccaugac

SEQ ID NO: 1451661 - RNA, 24 nt, Human
cucucccaggccccaugaccucca

SEQ ID NO: 1451662 - RNA, 18 nt, Human
cucuccagcugacuaaac

SEQ ID NO: 1451663 - RNA, 19 nt, Human
cucuccacuuucagcuguc

SEQ ID NO: 1451664 - RNA, 21 nt, Human
cucuccacuuucagcugucuu

SEQ ID NO: 1451665 - RNA, 18 nt, Human
cucuccacuuucagcugu

SEQ ID NO: 1451666 - RNA, 17 nt, Human
cucuccacuuucagcug

SEQ ID NO: 1451667 - RNA, 16 nt, Human
cucuccacuuucagcu

SEQ ID NO: 1451668 - RNA, 15 nt, Human
cucuccacuuucagc

SEQ ID NO: 1451669 - RNA, 14 nt, Human
cucuccacuuucag

SEQ ID NO: 1451670 - RNA, 23 nt, Human
cucuccaggcaggucugaagcuc

SEQ ID NO: 1451671 - RNA, 21 nt, Human
cucuccauucugcuccuuccc

SEQ ID NO: 1451672 - RNA, 20 nt, Human
cucuccauucugcuccuucc

SEQ ID NO: 1451673 - RNA, 19 nt, Human
cucuccauucugcuccuuc

SEQ ID NO: 1451674 - RNA, 17 nt, Human
cucuccauucugcuccu

SEQ ID NO: 1451675 - RNA, 16 nt, Human
cucuccauucugcucc

SEQ ID NO: 1451676 - RNA, 15 nt, Human
cucuccauucugcuc

SEQ ID NO: 1451677 - RNA, 12 nt, Human
cucuccauucug

SEQ ID NO: 1451678 - RNA, 13 nt, Human
cucucccaacucu

SEQ ID NO: 1451679 - RNA, 13 nt, Human
cucucccaaaaaa

SEQ ID NO: 1451680 - RNA, 14 nt, Human
cucuaagguugggc

SEQ ID NO: 1451681 - RNA, 19 nt, Human
cucuaauauggcaaccauu

SEQ ID NO: 1451682 - RNA, 15 nt, Human
cucuaauacauucca

SEQ ID NO: 1451683 - RNA, 16 nt, Human
cucuaauucacagugc

SEQ ID NO: 1451684 - RNA, 15 nt, Human
cucuaauucacagug

SEQ ID NO: 1451685 - RNA, 17 nt, Human
cucucagucucugagca

SEQ ID NO: 1451686 - RNA, 16 nt, Human
cucucagucucugagc

SEQ ID NO: 1451687 - RNA, 15 nt, Human
cucucagucucugag

SEQ ID NO: 1451688 - RNA, 14 nt, Human
cucucagucucuga

SEQ ID NO: 1451689 - RNA, 13 nt, Human
cucucagucucug

SEQ ID NO: 1451690 - RNA, 18 nt, Human
cucucaggugaaaggaaa

SEQ ID NO: 1451691 - RNA, 19 nt, Human
cucucagggccaggccucu

SEQ ID NO: 1451692 - RNA, 18 nt, Human
cucucagggccaggccuc

SEQ ID NO: 1451693 - RNA, 15 nt, Human
cucucagggccaggc

SEQ ID NO: 1451694 - RNA, 17 nt, Human
cucuaauucacagugcu

SEQ ID NO: 1451695 - RNA, 19 nt, Human
cucuccacucaugugacuc

SEQ ID NO: 1451696 - RNA, 23 nt, Human
cucuccacacagugcucaaggcc

SEQ ID NO: 1451697 - RNA, 22 nt, Human
cucuccacacagugcucaaggc

SEQ ID NO: 1451698 - RNA, 17 nt, Human
cucuccacagcugccuc

SEQ ID NO: 1451699 - RNA, 14 nt, Human
cucucaugaaccuc

SEQ ID NO: 1451700 - RNA, 13 nt, Human
cucucaugaaccu

SEQ ID NO: 1451701 - RNA, 18 nt, Human
cucucaucaacugaauga

SEQ ID NO: 1451702 - RNA, 17 nt, Human
cucucaucaacugaaug

SEQ ID NO: 1451703 - RNA, 18 nt, Human
cucucagucucugagcag

SEQ ID NO: 1451704 - RNA, 15 nt, Human
cucucaguugcagcc

SEQ ID NO: 1451705 - RNA, 19 nt, Human
cucucaguugcagcccugc

SEQ ID NO: 1451706 - RNA, 22 nt, Human
cucucaguugcagcccugcugc

SEQ ID NO: 1451707 - RNA, 16 nt, Human
cucucaucaacugaau

SEQ ID NO: 1451708 - RNA, 15 nt, Human
cucucauacccuccc

SEQ ID NO: 1451709 - RNA, 21 nt, Human
cucuuggggaguuuagggugg

SEQ ID NO: 1451710 - RNA, 19 nt, Human
cucuuggcuggacccagcc

SEQ ID NO: 1451711 - RNA, 21 nt, Human
cucuugggaacugaacucacu

SEQ ID NO: 1451712 - RNA, 20 nt, Human
cucuuggcuggacccagcca

SEQ ID NO: 1451713 - RNA, 17 nt, Human
cucuuggcuggacccag

SEQ ID NO: 1451714 - RNA, 16 nt, Human
cucuuggcuggaccca

SEQ ID NO: 1451715 - RNA, 15 nt, Human
cucuuggcuggaccc

SEQ ID NO: 1451716 - RNA, 14 nt, Human
cucuuggcuggacc

SEQ ID NO: 1451717 - RNA, 12 nt, Human
cucuuggcugga

SEQ ID NO: 1451718 - RNA, 16 nt, Human
cucuuggccugaucag

SEQ ID NO: 1451719 - RNA, 15 nt, Human
cucuuggagcuguga

SEQ ID NO: 1451720 - RNA, 19 nt, Human
cucuugaccaggcugccuc

SEQ ID NO: 1451721 - RNA, 15 nt, Human
cucuugaccaggcug

SEQ ID NO: 1451722 - RNA, 14 nt, Human
cucuugaccaggcu

SEQ ID NO: 1451723 - RNA, 22 nt, Human
cucuugagcaguggcuggucca

SEQ ID NO: 1451724 - RNA, 18 nt, Human
cucuugagcaguggcugg

SEQ ID NO: 1451725 - RNA, 15 nt, Human
cucuugagcaguggc

SEQ ID NO: 1451726 - RNA, 14 nt, Human
cucuuucuguauau

SEQ ID NO: 1451727 - RNA, 13 nt, Human
cucuuucuguaua

SEQ ID NO: 1451728 - RNA, 11 nt, Human
cucuuucugua

SEQ ID NO: 1451729 - RNA, 18 nt, Human
cucuuucucugccaguga

SEQ ID NO: 1451730 - RNA, 17 nt, Human
cucuuucucugccagug

SEQ ID NO: 1451731 - RNA, 16 nt, Human
cucuuucucugccagu

SEQ ID NO: 1451732 - RNA, 15 nt, Human
cucuuucucugccag

SEQ ID NO: 1451733 - RNA, 13 nt, Human
cucuuucucugcc

SEQ ID NO: 1451734 - RNA, 12 nt, Human
cucuuucucugc

SEQ ID NO: 1451735 - RNA, 21 nt, Human
cucuuguauaagauccuagau

SEQ ID NO: 1451736 - RNA, 20 nt, Human
cucuuguauaagauccuaga

SEQ ID NO: 1451737 - RNA, 20 nt, Human
cucuugugaggaaagucauu

SEQ ID NO: 1451738 - RNA, 21 nt, Human
cucuuguaauccgaaucucuu

SEQ ID NO: 1451739 - RNA, 12 nt, Human
cucuuucagcuc

SEQ ID NO: 1451740 - RNA, 11 nt, Human
cucuuucagcu

SEQ ID NO: 1451741 - RNA, 22 nt, Human
cucuuucaagcagucgugccug

SEQ ID NO: 1451742 - RNA, 12 nt, Human
cucuuucaaaac

SEQ ID NO: 1451743 - RNA, 18 nt, Human
cucuuuccaugacaucaa

SEQ ID NO: 1451744 - RNA, 15 nt, Human
cucuuucagcuccug

SEQ ID NO: 1451745 - RNA, 14 nt, Human
cucuuucagcuccu

SEQ ID NO: 1451746 - RNA, 13 nt, Human
cucuuucagcucc

SEQ ID NO: 1451747 - RNA, 15 nt, Human
cucuguuccuucccu

SEQ ID NO: 1451748 - RNA, 23 nt, Human
cucuggagccagccgagcaggag

SEQ ID NO: 1451749 - RNA, 21 nt, Human
cucuggagccagccgagcagg

SEQ ID NO: 1451750 - RNA, 15 nt, Human
cucuggagcccacug

SEQ ID NO: 1451751 - RNA, 15 nt, Human
cucuggagccagccg

SEQ ID NO: 1451752 - RNA, 13 nt, Human
cucuggagccagc

SEQ ID NO: 1451753 - RNA, 19 nt, Human
cucuggagcccacuguacu

SEQ ID NO: 1451754 - RNA, 21 nt, Human
cucuguucuuccucagccagc

SEQ ID NO: 1451755 - RNA, 20 nt, Human
cucuguugcaagugcaauaa

SEQ ID NO: 1451756 - RNA, 22 nt, Human
cucuguucuuccucagccagcc

SEQ ID NO: 1451757 - RNA, 20 nt, Human
cucuguucuuccucagccag

SEQ ID NO: 1451758 - RNA, 19 nt, Human
cucuguucuuccucagcca

SEQ ID NO: 1451759 - RNA, 18 nt, Human
cucuguucuuccucagcc

SEQ ID NO: 1451760 - RNA, 15 nt, Human
cucuguucuuccuca

SEQ ID NO: 1451761 - RNA, 13 nt, Human
cucuguucuuccu

SEQ ID NO: 1451762 - RNA, 22 nt, Human
cucuguuccuucccugugccuc

SEQ ID NO: 1451763 - RNA, 13 nt, Human
cucuuaagaagac

SEQ ID NO: 1451764 - RNA, 23 nt, Human
cucuucuggggcaggcugggcca

SEQ ID NO: 1451765 - RNA, 21 nt, Human
cucuucuggggcaggcugggc

SEQ ID NO: 1451766 - RNA, 19 nt, Human
cucuucuggggcaggcugg

SEQ ID NO: 1451767 - RNA, 15 nt, Human
cucuucugggccuga

SEQ ID NO: 1451768 - RNA, 22 nt, Human
cucuucugggagggcagcaggg

SEQ ID NO: 1451769 - RNA, 21 nt, Human
cucuucugggagggcagcagg

SEQ ID NO: 1451770 - RNA, 22 nt, Human
cucuucucuccagcugacuaaa

SEQ ID NO: 1451771 - RNA, 19 nt, Human
cucuucucuccagcugacu

SEQ ID NO: 1451772 - RNA, 15 nt, Human
cucuucucuccagcu

SEQ ID NO: 1451773 - RNA, 14 nt, Human
cucuucucuccagc

SEQ ID NO: 1451774 - RNA, 13 nt, Human
cucuucucuccag

SEQ ID NO: 1451775 - RNA, 23 nt, Human
cucuuccagucuuccugacacuu

SEQ ID NO: 1451776 - RNA, 22 nt, Human
cucuuccagucuuccugacacu

SEQ ID NO: 1451777 - RNA, 19 nt, Human
cucuuccagucuuccugac

SEQ ID NO: 1451778 - RNA, 13 nt, Human
cucuucagucucu

SEQ ID NO: 1451779 - RNA, 15 nt, Human
cugacauucugauuc

SEQ ID NO: 1451780 - RNA, 23 nt, Human
cugacauucaccugccccaacuc

SEQ ID NO: 1451781 - RNA, 17 nt, Human
cugacauucaccugccc

SEQ ID NO: 1451782 - RNA, 16 nt, Human
cugacauucaccugcc

SEQ ID NO: 1451783 - RNA, 12 nt, Human
cugaccagcagc

SEQ ID NO: 1451784 - RNA, 13 nt, Human
cugaccagaacua

SEQ ID NO: 1451785 - RNA, 23 nt, Human
cugaccacucagagacaugcaga

SEQ ID NO: 1451786 - RNA, 22 nt, Human
cugaccacucagagacaugcag

SEQ ID NO: 1451787 - RNA, 17 nt, Human
cugaccacucagagaca

SEQ ID NO: 1451788 - RNA, 15 nt, Human
cugaccaugcucauc

SEQ ID NO: 1451789 - RNA, 16 nt, Human
cugaccacucagagac

SEQ ID NO: 1451790 - RNA, 15 nt, Human
cugaccacucagaga

SEQ ID NO: 1451791 - RNA, 14 nt, Human
cugaccacucagag

SEQ ID NO: 1451792 - RNA, 13 nt, Human
cugaccacucaga

SEQ ID NO: 1451793 - RNA, 22 nt, Human
cugaccaccuuuguuucucccc

SEQ ID NO: 1451794 - RNA, 18 nt, Human
cugaccacagcacagcca

SEQ ID NO: 1451795 - RNA, 15 nt, Human
cugaccacagcacag

SEQ ID NO: 1451796 - RNA, 14 nt, Human
cugaccacagcaca

SEQ ID NO: 1451797 - RNA, 12 nt, Human
cugaccacagca

SEQ ID NO: 1451798 - RNA, 20 nt, Human
cugaauccaaacuaauccau

SEQ ID NO: 1451799 - RNA, 19 nt, Human
cugaauccaaacuaaucca

SEQ ID NO: 1451800 - RNA, 21 nt, Human
cugaauauugccauuaugcuu

SEQ ID NO: 1451801 - RNA, 17 nt, Human
cugaauauacagcaggu

SEQ ID NO: 1451802 - RNA, 21 nt, Human
cugaauaggcgaucacaacgu

SEQ ID NO: 1451803 - RNA, 23 nt, Human
cugaauaggcgaucacaacgugc

SEQ ID NO: 1451804 - RNA, 15 nt, Human
cugaauagcagaagg

SEQ ID NO: 1451805 - RNA, 18 nt, Human
cugaauaggcgaucacaa

SEQ ID NO: 1451806 - RNA, 15 nt, Human
cugaauagauaugaa

SEQ ID NO: 1451807 - RNA, 22 nt, Human
cugaauaccacucuguaauugc

SEQ ID NO: 1451808 - RNA, 17 nt, Human
cugaauacccuuuucug

SEQ ID NO: 1451809 - RNA, 22 nt, Human
cugaaucugcuaccaaaacagu

SEQ ID NO: 1451810 - RNA, 17 nt, Human
cugaaucugcuaccaaa

SEQ ID NO: 1451811 - RNA, 15 nt, Human
cugaaucugcuacca

SEQ ID NO: 1451812 - RNA, 13 nt, Human
cugacagaggggg

SEQ ID NO: 1451813 - RNA, 23 nt, Human
cugaauuuaaauagcuuuuuucu

SEQ ID NO: 1451814 - RNA, 13 nt, Human
cugaauuucccuc

SEQ ID NO: 1451815 - RNA, 18 nt, Human
cugaauuuaaauagcuuu

SEQ ID NO: 1451816 - RNA, 14 nt, Human
cugaauuuaaauag

SEQ ID NO: 1451817 - RNA, 18 nt, Human
cugaacuugcauugugau

SEQ ID NO: 1451818 - RNA, 17 nt, Human
cugaacuugcauuguga

SEQ ID NO: 1451819 - RNA, 23 nt, Human
cugaaccuauuucuuaaacacuu

SEQ ID NO: 1451820 - RNA, 18 nt, Human
cucuuuggcuccccugua

SEQ ID NO: 1451821 - RNA, 21 nt, Human
cucuuuggcgaccuccuuuca

SEQ ID NO: 1451822 - RNA, 16 nt, Human
cugaagguuguggccu

SEQ ID NO: 1451823 - RNA, 17 nt, Human
cugaagguuguggccuu

SEQ ID NO: 1451824 - RNA, 23 nt, Human
cugaauaccacucuguaauugca

SEQ ID NO: 1451825 - RNA, 21 nt, Human
cugaauaccacucuguaauug

SEQ ID NO: 1451826 - RNA, 20 nt, Human
cugaauaccacucuguaauu

SEQ ID NO: 1451827 - RNA, 19 nt, Human
cugaauaccacucuguaau

SEQ ID NO: 1451828 - RNA, 18 nt, Human
cugaauaccacucuguaa

SEQ ID NO: 1451829 - RNA, 17 nt, Human
cugaauaccacucugua

SEQ ID NO: 1451830 - RNA, 15 nt, Human
cugaauaccacucug

SEQ ID NO: 1451831 - RNA, 21 nt, Human
cugaauaaauuguacagccgg

SEQ ID NO: 1451832 - RNA, 22 nt, Human
cugaauaaauuguacagccggc

SEQ ID NO: 1451833 - RNA, 16 nt, Human
cugaagugcuuagugu

SEQ ID NO: 1451834 - RNA, 21 nt, Human
cugaagugagcacagccuagg

SEQ ID NO: 1451835 - RNA, 19 nt, Human
cugaagugagcacagccua

SEQ ID NO: 1451836 - RNA, 18 nt, Human
cugaagugagcacagccu

SEQ ID NO: 1451837 - RNA, 22 nt, Human
cugcagaaccggagagccagcu

SEQ ID NO: 1451838 - RNA, 21 nt, Human
cugcagaaccggagagccagc

SEQ ID NO: 1451839 - RNA, 19 nt, Human
cugcagaaccggagagcca

SEQ ID NO: 1451840 - RNA, 16 nt, Human
cugcagaaccggagag

SEQ ID NO: 1451841 - RNA, 18 nt, Human
cugcagacuucccagcua

SEQ ID NO: 1451842 - RNA, 16 nt, Human
cugcacuuacuugcuu

SEQ ID NO: 1451843 - RNA, 15 nt, Human
cugcacuuacuugcu

SEQ ID NO: 1451844 - RNA, 21 nt, Human
cugcagccccacccagaugcc

SEQ ID NO: 1451845 - RNA, 15 nt, Human
cugcaggcugagugc

SEQ ID NO: 1451846 - RNA, 16 nt, Human
cugcaggcugagugca

SEQ ID NO: 1451847 - RNA, 21 nt, Human
cugcaggcccuggccuccccu

SEQ ID NO: 1451848 - RNA, 14 nt, Human
cugcaggcugagug

SEQ ID NO: 1451849 - RNA, 22 nt, Human
cugcagggaaaauuauuugcau

SEQ ID NO: 1451850 - RNA, 12 nt, Human
cugcagggaaaa

SEQ ID NO: 1451851 - RNA, 23 nt, Human
cugcagggaaaauuauuugcaua

SEQ ID NO: 1451852 - RNA, 21 nt, Human
cugcaccaugcugcuggggaa

SEQ ID NO: 1451853 - RNA, 23 nt, Human
cugcaccaugcugcuggggaaga

SEQ ID NO: 1451854 - RNA, 20 nt, Human
cugcaccaugcugcugggga

SEQ ID NO: 1451855 - RNA, 19 nt, Human
cugcaccaugcugcugggg

SEQ ID NO: 1451856 - RNA, 22 nt, Human
cugcacagugacuucugagauc

SEQ ID NO: 1451857 - RNA, 21 nt, Human
cugcacauuaaggagaaaucu

SEQ ID NO: 1451858 - RNA, 16 nt, Human
cugcacagugacuucu

SEQ ID NO: 1451859 - RNA, 14 nt, Human
cugcacagugacuu

SEQ ID NO: 1451860 - RNA, 21 nt, Human
cugcacagugacuucugagau

SEQ ID NO: 1451861 - RNA, 20 nt, Human
cugcacagugacuucugaga

SEQ ID NO: 1451862 - RNA, 19 nt, Human
cugcacagugacuucugag

SEQ ID NO: 1451863 - RNA, 18 nt, Human
cugcacagugacuucuga

SEQ ID NO: 1451864 - RNA, 24 nt, Human
cugcaauucaaaaguuccaagagu

SEQ ID NO: 1451865 - RNA, 20 nt, Human
cugcaauuccccucugcugc

SEQ ID NO: 1451866 - RNA, 17 nt, Human
cugcaauuccccucugc

SEQ ID NO: 1451867 - RNA, 16 nt, Human
cugcaauuccccucug

SEQ ID NO: 1451868 - RNA, 15 nt, Human
cugcaauuccccucu

SEQ ID NO: 1451869 - RNA, 22 nt, Human
cugcaauucaaaaguuccaaga

SEQ ID NO: 1451870 - RNA, 21 nt, Human
cugcaauucaaaaguuccaag

SEQ ID NO: 1451871 - RNA, 18 nt, Human
cugcaauucaaaaguucc

SEQ ID NO: 1451872 - RNA, 14 nt, Human
cugcaauucaaaag

SEQ ID NO: 1451873 - RNA, 22 nt, Human
cugcaauuggcaccgaagccca

SEQ ID NO: 1451874 - RNA, 20 nt, Human
cugcaaaccugaccccugcu

SEQ ID NO: 1451875 - RNA, 18 nt, Human
cugcaaaccugaccccug

SEQ ID NO: 1451876 - RNA, 22 nt, Human
cugcaaacaccaacauguuggg

SEQ ID NO: 1451877 - RNA, 18 nt, Human
cugcaaaaggacucucag

SEQ ID NO: 1451878 - RNA, 17 nt, Human
cugagugggaagcccau

SEQ ID NO: 1451879 - RNA, 15 nt, Human
cugagugggaagccc

SEQ ID NO: 1451880 - RNA, 13 nt, Human
cugagugggaagc

SEQ ID NO: 1451881 - RNA, 18 nt, Human
cugaguggcaggggacag

SEQ ID NO: 1451882 - RNA, 16 nt, Human
cugaguggcaggggac

SEQ ID NO: 1451883 - RNA, 13 nt, Human
cugaguggcaggg

SEQ ID NO: 1451884 - RNA, 17 nt, Human
cugagugcuugcuuuuc

SEQ ID NO: 1451885 - RNA, 23 nt, Human
cugauaaaaccauguagaaaauu

SEQ ID NO: 1451886 - RNA, 19 nt, Human
cugauaaaaccauguagaa

SEQ ID NO: 1451887 - RNA, 21 nt, Human
cugaguuuuguguuuguugua

SEQ ID NO: 1451888 - RNA, 20 nt, Human
cugaguuuuguguuuguugu

SEQ ID NO: 1451889 - RNA, 19 nt, Human
cugaguuuuguguuuguug

SEQ ID NO: 1451890 - RNA, 17 nt, Human
cugaguuuuguguuugu

SEQ ID NO: 1451891 - RNA, 13 nt, Human
cugauaaagauga

SEQ ID NO: 1451892 - RNA, 14 nt, Human
cugaguuuuguguu

SEQ ID NO: 1451893 - RNA, 13 nt, Human
cugaguuuugugu

SEQ ID NO: 1451894 - RNA, 22 nt, Human
cugaguuuuccauggcaggaag

SEQ ID NO: 1451895 - RNA, 20 nt, Human
cugaguuuuccauggcagga

SEQ ID NO: 1451896 - RNA, 19 nt, Human
cugaguuuuccauggcagg

SEQ ID NO: 1451897 - RNA, 18 nt, Human
cugaguuuuccauggcag

SEQ ID NO: 1451898 - RNA, 21 nt, Human
cugagugggaagcccauccug

SEQ ID NO: 1451899 - RNA, 21 nt, Human
cugagugacucuauauagcug

SEQ ID NO: 1451900 - RNA, 11 nt, Human
cugagugacuc

SEQ ID NO: 1451901 - RNA, 21 nt, Human
cugagggaaaggccagcacuc

SEQ ID NO: 1451902 - RNA, 20 nt, Human
cugagggaaaggccagcacu

SEQ ID NO: 1451903 - RNA, 18 nt, Human
cugagggaaaggccagca

SEQ ID NO: 1451904 - RNA, 17 nt, Human
cugagggaaaggccagc

SEQ ID NO: 1451905 - RNA, 21 nt, Human
cugaggcuuuggauuugacau

SEQ ID NO: 1451906 - RNA, 18 nt, Human
cugaggcuuuggauuuga

SEQ ID NO: 1451907 - RNA, 17 nt, Human
cugaggcuuuggauuug

SEQ ID NO: 1451908 - RNA, 15 nt, Human
cugaggcuuuggauu

SEQ ID NO: 1451909 - RNA, 14 nt, Human
cugaggcuuuggau

SEQ ID NO: 1451910 - RNA, 21 nt, Human
cugacccagugcccccacuga

SEQ ID NO: 1451911 - RNA, 20 nt, Human
cugacccagugcccccacug

SEQ ID NO: 1451912 - RNA, 23 nt, Human
cugacccagugcccccacugacc

SEQ ID NO: 1451913 - RNA, 18 nt, Human
cugacccagugcccccac

SEQ ID NO: 1451914 - RNA, 13 nt, Human
cugacccagugcc

SEQ ID NO: 1451915 - RNA, 12 nt, Human
cugacccagugc

SEQ ID NO: 1451916 - RNA, 10 nt, Human
cugacccagu

SEQ ID NO: 1451917 - RNA, 22 nt, Human
cugaccaugcucaucugcuggu

SEQ ID NO: 1451918 - RNA, 21 nt, Human
cugaccaugcucaucugcugg

SEQ ID NO: 1451919 - RNA, 20 nt, Human
cugaccaugcucaucugcug

SEQ ID NO: 1451920 - RNA, 22 nt, Human
cugagggcaguucgcagccacc

SEQ ID NO: 1451921 - RNA, 21 nt, Human
cugagggcaguucgcagccac

SEQ ID NO: 1451922 - RNA, 19 nt, Human
cugagggcaguucgcagcc

SEQ ID NO: 1451923 - RNA, 12 nt, Human
cugagggcaguu

SEQ ID NO: 1451924 - RNA, 16 nt, Human
cugagggcagucgaua

SEQ ID NO: 1451925 - RNA, 21 nt, Human
cugagucgugaccugcuaggc

SEQ ID NO: 1451926 - RNA, 20 nt, Human
cugagucgugaccugcuagg

SEQ ID NO: 1451927 - RNA, 17 nt, Human
cugagucgugaccugcu

SEQ ID NO: 1451928 - RNA, 23 nt, Human
cugagucguacagaaagcugccu

SEQ ID NO: 1451929 - RNA, 21 nt, Human
cugagucguacagaaagcugc

SEQ ID NO: 1451930 - RNA, 20 nt, Human
cugagucguacagaaagcug

SEQ ID NO: 1451931 - RNA, 19 nt, Human
cugagucguacagaaagcu

SEQ ID NO: 1451932 - RNA, 18 nt, Human
cugagucguacagaaagc

SEQ ID NO: 1451933 - RNA, 17 nt, Human
cugagucguacagaaag

SEQ ID NO: 1451934 - RNA, 13 nt, Human
cugagucccaucc

SEQ ID NO: 1451935 - RNA, 15 nt, Human
cugauuaaaugacac

SEQ ID NO: 1451936 - RNA, 16 nt, Human
cugauuaaaugacacu

SEQ ID NO: 1451937 - RNA, 21 nt, Human
cugauuaaaaugcuuccuccc

SEQ ID NO: 1451938 - RNA, 12 nt, Human
cugauguugugu

SEQ ID NO: 1451939 - RNA, 19 nt, Human
cugauucgaaugacacugu

SEQ ID NO: 1451940 - RNA, 17 nt, Human
cugauucgaaugacacu

SEQ ID NO: 1451941 - RNA, 21 nt, Human
cugauucacaucucauuuuuc

SEQ ID NO: 1451942 - RNA, 17 nt, Human
cugauucacaucucauu

SEQ ID NO: 1451943 - RNA, 16 nt, Human
cugaucgccuucccca

SEQ ID NO: 1451944 - RNA, 15 nt, Human
cugaucgccuucccc

SEQ ID NO: 1451945 - RNA, 13 nt, Human
cugaucgccuucc

SEQ ID NO: 1451946 - RNA, 21 nt, Human
cugaucccagagagcccgagg

SEQ ID NO: 1451947 - RNA, 21 nt, Human
cugauccuggaggcccaguuc

SEQ ID NO: 1451948 - RNA, 13 nt, Human
cugaucccucuac

SEQ ID NO: 1451949 - RNA, 19 nt, Human
cugauccuggaggcccagu

SEQ ID NO: 1451950 - RNA, 12 nt, Human
cugaucccucua

SEQ ID NO: 1451951 - RNA, 20 nt, Human
cugaucccagagagcccgag

SEQ ID NO: 1451952 - RNA, 18 nt, Human
cugaucccagagagcccg

SEQ ID NO: 1451953 - RNA, 21 nt, Human
cugaugucuccuaagcaccug

SEQ ID NO: 1451954 - RNA, 18 nt, Human
cugaugucuccuaagcac

SEQ ID NO: 1451955 - RNA, 15 nt, Human
cugaugucuccuaag

SEQ ID NO: 1451956 - RNA, 13 nt, Human
cugaugucuccua

SEQ ID NO: 1451957 - RNA, 22 nt, Human
cugaugucaauuucuguguugc

SEQ ID NO: 1451958 - RNA, 20 nt, Human
cugaugucaauuucuguguu

SEQ ID NO: 1451959 - RNA, 19 nt, Human
cugaugucaauuucugugu

SEQ ID NO: 1451960 - RNA, 18 nt, Human
cugaugucaauuucugug

SEQ ID NO: 1451961 - RNA, 13 nt, Human
cugaucucguuuu

SEQ ID NO: 1451962 - RNA, 23 nt, Human
cugauaggguuugugacagggcg

SEQ ID NO: 1451963 - RNA, 20 nt, Human
cugauaggguuugugacagg

SEQ ID NO: 1451964 - RNA, 19 nt, Human
cugauaggguuugugacag

SEQ ID NO: 1451965 - RNA, 18 nt, Human
cugauaaaagauggccau

SEQ ID NO: 1451966 - RNA, 21 nt, Human
cugauaaagaugagugagcau

SEQ ID NO: 1451967 - RNA, 20 nt, Human
cugauacuuugacaguguuu

SEQ ID NO: 1451968 - RNA, 22 nt, Human
cugaucagugggccuccaagga

SEQ ID NO: 1451969 - RNA, 15 nt, Human
cugaucccagagagc

SEQ ID NO: 1451970 - RNA, 13 nt, Human
cugcucugagaau

SEQ ID NO: 1451971 - RNA, 12 nt, Human
cugcucugagaa

SEQ ID NO: 1451972 - RNA, 19 nt, Human
cugcucugaacacgaagcu

SEQ ID NO: 1451973 - RNA, 16 nt, Human
cugcucugaacacgaa

SEQ ID NO: 1451974 - RNA, 13 nt, Human
cugcucggggugc

SEQ ID NO: 1451975 - RNA, 14 nt, Human
cugcucgcucccug

SEQ ID NO: 1451976 - RNA, 23 nt, Human
cugcuccuuccccaucguugccc

SEQ ID NO: 1451977 - RNA, 15 nt, Human
cugcuccuuccccau

SEQ ID NO: 1451978 - RNA, 14 nt, Human
cugcuccuucccca

SEQ ID NO: 1451979 - RNA, 14 nt, Human
cugcucccucagac

SEQ ID NO: 1451980 - RNA, 13 nt, Human
cugcucccucaga

SEQ ID NO: 1451981 - RNA, 12 nt, Human
cugcucccucag

SEQ ID NO: 1451982 - RNA, 19 nt, Human
cugcuccccuaaagccuca

SEQ ID NO: 1451983 - RNA, 14 nt, Human
cugcuccagacagg

SEQ ID NO: 1451984 - RNA, 22 nt, Human
cugcuccagaccugauccugga

SEQ ID NO: 1451985 - RNA, 21 nt, Human
cugcuccagaccugauccugg

SEQ ID NO: 1451986 - RNA, 18 nt, Human
cugcuaacggugcucagg

SEQ ID NO: 1451987 - RNA, 19 nt, Human
cugcuaacggugcucaggg

SEQ ID NO: 1451988 - RNA, 15 nt, Human
cugcuccagaccuga

SEQ ID NO: 1451989 - RNA, 14 nt, Human
cugcuccagaccug

SEQ ID NO: 1451990 - RNA, 13 nt, Human
cugcuccagaccu

SEQ ID NO: 1451991 - RNA, 16 nt, Human
cugcuaaggucuugga

SEQ ID NO: 1451992 - RNA, 23 nt, Human
cugcuaaauaaaauuuguugcau

SEQ ID NO: 1451993 - RNA, 15 nt, Human
cugcuaaauaaaauu

SEQ ID NO: 1451994 - RNA, 12 nt, Human
cugcuaaauaaa

SEQ ID NO: 1451995 - RNA, 22 nt, Human
cugcgugggugugugcguguuu

SEQ ID NO: 1451996 - RNA, 19 nt, Human
cugcgugucaccugugcuu

SEQ ID NO: 1451997 - RNA, 22 nt, Human
cugcgguagaugggagggaggc

SEQ ID NO: 1451998 - RNA, 21 nt, Human
cugcggguggggcuuggggcu

SEQ ID NO: 1451999 - RNA, 13 nt, Human
cugcggguggggc

SEQ ID NO: 1452000 - RNA, 15 nt, Human
cugccuuaucuugca

SEQ ID NO: 1452001 - RNA, 23 nt, Human
cugccuuagucucaguuugugug

SEQ ID NO: 1452002 - RNA, 20 nt, Human
cugccuuagucucaguuugu

SEQ ID NO: 1452003 - RNA, 16 nt, Human
cugccuuagucucagu

SEQ ID NO: 1452004 - RNA, 15 nt, Human
cugccuucaccuuca

SEQ ID NO: 1452005 - RNA, 21 nt, Human
cugccuuauucagggaaggag

SEQ ID NO: 1452006 - RNA, 20 nt, Human
cugccuuauucagggaagga

SEQ ID NO: 1452007 - RNA, 19 nt, Human
cugccuuauucagggaagg

SEQ ID NO: 1452008 - RNA, 18 nt, Human
cugccuuauucagggaag

SEQ ID NO: 1452009 - RNA, 17 nt, Human
cugccuuaucuugcacc

SEQ ID NO: 1452010 - RNA, 23 nt, Human
cugccucaggaggcaggaccuuc

SEQ ID NO: 1452011 - RNA, 22 nt, Human
cugccucaggaggcaggaccuu

SEQ ID NO: 1452012 - RNA, 14 nt, Human
cugccucaggacug

SEQ ID NO: 1452013 - RNA, 13 nt, Human
cugccucaggacu

SEQ ID NO: 1452014 - RNA, 12 nt, Human
cugccucaggac

SEQ ID NO: 1452015 - RNA, 20 nt, Human
cugccugagucgugaccugc

SEQ ID NO: 1452016 - RNA, 21 nt, Human
cugccugagucgugaccugcu

SEQ ID NO: 1452017 - RNA, 19 nt, Human
cugccugagucgugaccug

SEQ ID NO: 1452018 - RNA, 23 nt, Human
cugccugacauuuggaguguucc

SEQ ID NO: 1452019 - RNA, 20 nt, Human
cugccugacauuuggagugu

SEQ ID NO: 1452020 - RNA, 19 nt, Human
cugccucuuaaauaaaccu

SEQ ID NO: 1452021 - RNA, 18 nt, Human
cugccucuucccucuucc

SEQ ID NO: 1452022 - RNA, 19 nt, Human
cugccucuucccucuuccu

SEQ ID NO: 1452023 - RNA, 12 nt, Human
cugccucucugc

SEQ ID NO: 1452024 - RNA, 13 nt, Human
cugccucucugca

SEQ ID NO: 1452025 - RNA, 14 nt, Human
cugccucucuagga

SEQ ID NO: 1452026 - RNA, 21 nt, Human
cugccucucgcuccucaaccc

SEQ ID NO: 1452027 - RNA, 14 nt, Human
cugccucucugcag

SEQ ID NO: 1452028 - RNA, 23 nt, Human
cugccaggagggacaaaggagcc

SEQ ID NO: 1452029 - RNA, 22 nt, Human
cugccaggagggacaaaggagc

SEQ ID NO: 1452030 - RNA, 21 nt, Human
cugccaggagggacaaaggag

SEQ ID NO: 1452031 - RNA, 20 nt, Human
cugccaggagggacaaagga

SEQ ID NO: 1452032 - RNA, 18 nt, Human
cugccaggagggacaaag

SEQ ID NO: 1452033 - RNA, 13 nt, Human
cugccaggaggga

SEQ ID NO: 1452034 - RNA, 23 nt, Human
cugccaggaggacccagggcucu

SEQ ID NO: 1452035 - RNA, 22 nt, Human
cugccaggaggacccagggcuc

SEQ ID NO: 1452036 - RNA, 21 nt, Human
cugccaggaggacccagggcu

SEQ ID NO: 1452037 - RNA, 19 nt, Human
cugccaggaggacccaggg

SEQ ID NO: 1452038 - RNA, 18 nt, Human
cugccaggaggacccagg

SEQ ID NO: 1452039 - RNA, 16 nt, Human
cugccaggaggaccca

SEQ ID NO: 1452040 - RNA, 11 nt, Human
cugccaggagg

SEQ ID NO: 1452041 - RNA, 15 nt, Human
cugccaggagcuuug

SEQ ID NO: 1452042 - RNA, 20 nt, Human
cugccaggagcacggcucug

SEQ ID NO: 1452043 - RNA, 16 nt, Human
cugccaggagacaggu

SEQ ID NO: 1452044 - RNA, 16 nt, Human
cugccagccccugcca

SEQ ID NO: 1452045 - RNA, 14 nt, Human
cugccagccccugc

SEQ ID NO: 1452046 - RNA, 12 nt, Human
cugccagccccu

SEQ ID NO: 1452047 - RNA, 23 nt, Human
cugccaccaggccaccuccccag

SEQ ID NO: 1452048 - RNA, 18 nt, Human
cugccaccaggccaccuc

SEQ ID NO: 1452049 - RNA, 17 nt, Human
cugccaccaggccaccu

SEQ ID NO: 1452050 - RNA, 15 nt, Human
cugccaccaggccac

SEQ ID NO: 1452051 - RNA, 14 nt, Human
cugccaccaggcca

SEQ ID NO: 1452052 - RNA, 13 nt, Human
cugccaccaggcc

SEQ ID NO: 1452053 - RNA, 23 nt, Human
cugccacagccuccccugccagg

SEQ ID NO: 1452054 - RNA, 22 nt, Human
cugccacagccuccccugccag

SEQ ID NO: 1452055 - RNA, 21 nt, Human
cugccacagccuccccugcca

SEQ ID NO: 1452056 - RNA, 20 nt, Human
cugccagcauuucccuuccu

SEQ ID NO: 1452057 - RNA, 19 nt, Human
cugcccagugcacuugcug

SEQ ID NO: 1452058 - RNA, 16 nt, Human
cugcccagugcacuug

SEQ ID NO: 1452059 - RNA, 20 nt, Human
cugcccaggcacugcuaggc

SEQ ID NO: 1452060 - RNA, 16 nt, Human
cugcccaggcacugca

SEQ ID NO: 1452061 - RNA, 15 nt, Human
cugcccaggcacugc

SEQ ID NO: 1452062 - RNA, 23 nt, Human
cugcccaaagcagcacuuauaaa

SEQ ID NO: 1452063 - RNA, 13 nt, Human
cugcccaaagcag

SEQ ID NO: 1452064 - RNA, 20 nt, Human
cugcccaacccuucccucac

SEQ ID NO: 1452065 - RNA, 17 nt, Human
cugcccaacccuucccu

SEQ ID NO: 1452066 - RNA, 14 nt, Human
cugcccaggcacug

SEQ ID NO: 1452067 - RNA, 23 nt, Human
cugcccuccugugcucagcccug

SEQ ID NO: 1452068 - RNA, 22 nt, Human
cugcccuccugugcucagcccu

SEQ ID NO: 1452069 - RNA, 21 nt, Human
cugcccuccugugcucagccc

SEQ ID NO: 1452070 - RNA, 20 nt, Human
cugcccuccugugcucagcc

SEQ ID NO: 1452071 - RNA, 19 nt, Human
cugcccuccugugcucagc

SEQ ID NO: 1452072 - RNA, 16 nt, Human
cugcccuccugugcuc

SEQ ID NO: 1452073 - RNA, 12 nt, Human
cugcccuccugu

SEQ ID NO: 1452074 - RNA, 18 nt, Human
cugcccgggagcucagga

SEQ ID NO: 1452075 - RNA, 21 nt, Human
cugcccagugcacuugcugga

SEQ ID NO: 1452076 - RNA, 13 nt, Human
cugcccugcccac

SEQ ID NO: 1452077 - RNA, 17 nt, Human
cugcccucugcauccuc

SEQ ID NO: 1452078 - RNA, 20 nt, Human
cugcccucugcauccucugg

SEQ ID NO: 1452079 - RNA, 11 nt, Human
cugcccugcca

SEQ ID NO: 1452080 - RNA, 13 nt, Human
cugcccugccacc

SEQ ID NO: 1452081 - RNA, 14 nt, Human
cugcccugccaccu

SEQ ID NO: 1452082 - RNA, 15 nt, Human
cugcccugccaccug

SEQ ID NO: 1452083 - RNA, 16 nt, Human
cugcccugccaccugu

SEQ ID NO: 1452084 - RNA, 17 nt, Human
cugcccugccaccuguc

SEQ ID NO: 1452085 - RNA, 18 nt, Human
cugcccugccaccugucu

SEQ ID NO: 1452086 - RNA, 20 nt, Human
cugcccugccaccugucugu

SEQ ID NO: 1452087 - RNA, 21 nt, Human
cugcccugccaccugucuguc

SEQ ID NO: 1452088 - RNA, 11 nt, Human
cugcccugccc

SEQ ID NO: 1452089 - RNA, 20 nt, Human
cugguucucaauuccaacag

SEQ ID NO: 1452090 - RNA, 16 nt, Human
cugguucucaauucca

SEQ ID NO: 1452091 - RNA, 15 nt, Human
cuggugguauuuuca

SEQ ID NO: 1452092 - RNA, 23 nt, Human
cugguggucuguuggcaggcugg

SEQ ID NO: 1452093 - RNA, 22 nt, Human
cugguggucuguuggcaggcug

SEQ ID NO: 1452094 - RNA, 20 nt, Human
cugguggucuguuggcaggc

SEQ ID NO: 1452095 - RNA, 18 nt, Human
cugguggucuguuggcag

SEQ ID NO: 1452096 - RNA, 16 nt, Human
cuggugguauuuucaa

SEQ ID NO: 1452097 - RNA, 21 nt, Human
cuggugggugccuaggccugg

SEQ ID NO: 1452098 - RNA, 18 nt, Human
cuggugggugccuaggcc

SEQ ID NO: 1452099 - RNA, 17 nt, Human
cugguggggcagcuccu

SEQ ID NO: 1452100 - RNA, 20 nt, Human
cugguggggcagcuccucug

SEQ ID NO: 1452101 - RNA, 16 nt, Human
cugguggggcagcucc

SEQ ID NO: 1452102 - RNA, 15 nt, Human
cugguggggcagcuc

SEQ ID NO: 1452103 - RNA, 14 nt, Human
cugguggggcagcu

SEQ ID NO: 1452104 - RNA, 22 nt, Human
cugguggggauaggccagccgc

SEQ ID NO: 1452105 - RNA, 21 nt, Human
cugguggggauaggccagccg

SEQ ID NO: 1452106 - RNA, 13 nt, Human
cuggugggccaac

SEQ ID NO: 1452107 - RNA, 20 nt, Human
cugguggccccguuucuggu

SEQ ID NO: 1452108 - RNA, 22 nt, Human
cugguggccccguuucuggugg

SEQ ID NO: 1452109 - RNA, 21 nt, Human
cugguggccccguuucuggug

SEQ ID NO: 1452110 - RNA, 21 nt, Human
cuggugcuucuccucuccuag

SEQ ID NO: 1452111 - RNA, 19 nt, Human
cuggugcuuaugcucuuaa

SEQ ID NO: 1452112 - RNA, 17 nt, Human
cuggugcuuaugcucuu

SEQ ID NO: 1452113 - RNA, 14 nt, Human
cuggugcuggaggu

SEQ ID NO: 1452114 - RNA, 19 nt, Human
cuggucucaaacuccugac

SEQ ID NO: 1452115 - RNA, 23 nt, Human
cuggucgcuccugcccacggagu

SEQ ID NO: 1452116 - RNA, 18 nt, Human
cuggucgcuccugcccac

SEQ ID NO: 1452117 - RNA, 16 nt, Human
cuggucgcuccugccc

SEQ ID NO: 1452118 - RNA, 15 nt, Human
cuggucgcuccugcc

SEQ ID NO: 1452119 - RNA, 14 nt, Human
cuggucgcuccugc

SEQ ID NO: 1452120 - RNA, 13 nt, Human
cuggucgcuccug

SEQ ID NO: 1452121 - RNA, 22 nt, Human
cugguccuuuuuggucgaggag

SEQ ID NO: 1452122 - RNA, 15 nt, Human
cugguccuuuuuggu

SEQ ID NO: 1452123 - RNA, 16 nt, Human
cugguccuuucuuccg

SEQ ID NO: 1452124 - RNA, 20 nt, Human
cuggucccggggccagcacu

SEQ ID NO: 1452125 - RNA, 19 nt, Human
cuggucccggggccagcac

SEQ ID NO: 1452126 - RNA, 17 nt, Human
cugguccccuccuuccc

SEQ ID NO: 1452127 - RNA, 14 nt, Human
cugguccccuccuu

SEQ ID NO: 1452128 - RNA, 18 nt, Human
cuggguugcagacaggaa

SEQ ID NO: 1452129 - RNA, 14 nt, Human
cugguccagggcua

SEQ ID NO: 1452130 - RNA, 13 nt, Human
cugguccagggcu

SEQ ID NO: 1452131 - RNA, 17 nt, Human
cuggguugccuuuauuu

SEQ ID NO: 1452132 - RNA, 15 nt, Human
cuggguugcagacag

SEQ ID NO: 1452133 - RNA, 15 nt, Human
cugggguggccacca

SEQ ID NO: 1452134 - RNA, 19 nt, Human
cuggguaggaaagaggaag

SEQ ID NO: 1452135 - RNA, 12 nt, Human
cugggcucagug

SEQ ID NO: 1452136 - RNA, 14 nt, Human
cugggcgcuggucc

SEQ ID NO: 1452137 - RNA, 17 nt, Human
cugggccuugggcuccg

SEQ ID NO: 1452138 - RNA, 15 nt, Human
cugggccuugggcuc

SEQ ID NO: 1452139 - RNA, 14 nt, Human
cugggccuugggcu

SEQ ID NO: 1452140 - RNA, 20 nt, Human
cugggccuuggccuggagca

SEQ ID NO: 1452141 - RNA, 19 nt, Human
cugggccuuggccuggagc

SEQ ID NO: 1452142 - RNA, 18 nt, Human
cugggccuuggccuggag

SEQ ID NO: 1452143 - RNA, 17 nt, Human
cugggccuuggccugga

SEQ ID NO: 1452144 - RNA, 16 nt, Human
cugggccuuggccugg

SEQ ID NO: 1452145 - RNA, 11 nt, Human
cugggccuugg

SEQ ID NO: 1452146 - RNA, 19 nt, Human
cugggccccugccucucug

SEQ ID NO: 1452147 - RNA, 18 nt, Human
cuggggugggcaguuuuu

SEQ ID NO: 1452148 - RNA, 16 nt, Human
cuggggugggcaguuu

SEQ ID NO: 1452149 - RNA, 16 nt, Human
cugggguggccaccag

SEQ ID NO: 1452150 - RNA, 17 nt, Human
cuggguagcgggggagg

SEQ ID NO: 1452151 - RNA, 14 nt, Human
cuggguaggaaaga

SEQ ID NO: 1452152 - RNA, 15 nt, Human
cuggguaggaaagag

SEQ ID NO: 1452153 - RNA, 17 nt, Human
cuggguaggaaagagga

SEQ ID NO: 1452154 - RNA, 18 nt, Human
cugggaaauauucccuag

SEQ ID NO: 1452155 - RNA, 16 nt, Human
cugggaaauauucccu

SEQ ID NO: 1452156 - RNA, 14 nt, Human
cugggaaaugagau

SEQ ID NO: 1452157 - RNA, 21 nt, Human
cuggcuucccauccccagcga

SEQ ID NO: 1452158 - RNA, 22 nt, Human
cuggcuucccauccccagcgau

SEQ ID NO: 1452159 - RNA, 20 nt, Human
cuggcuucccauccccagcg

SEQ ID NO: 1452160 - RNA, 18 nt, Human
cuggcuucccauccccag

SEQ ID NO: 1452161 - RNA, 19 nt, Human
cuggcuucuggccaggaag

SEQ ID NO: 1452162 - RNA, 17 nt, Human
cuggcuucuggccagga

SEQ ID NO: 1452163 - RNA, 13 nt, Human
cuggcuucuggcc

SEQ ID NO: 1452164 - RNA, 12 nt, Human
cuggcuucuggc

SEQ ID NO: 1452165 - RNA, 16 nt, Human
cuggcuucccaucccc

SEQ ID NO: 1452166 - RNA, 12 nt, Human
cuggcuguuuga

SEQ ID NO: 1452167 - RNA, 20 nt, Human
cuggcugcugaucgccuucc

SEQ ID NO: 1452168 - RNA, 21 nt, Human
cuggcugcugaucgccuuccc

SEQ ID NO: 1452169 - RNA, 23 nt, Human
cuggcucuugauaccccccucug

SEQ ID NO: 1452170 - RNA, 22 nt, Human
cuggcucuugauaccccccucu

SEQ ID NO: 1452171 - RNA, 21 nt, Human
cuggcucuugauaccccccuc

SEQ ID NO: 1452172 - RNA, 20 nt, Human
cuggcucuugauaccccccu

SEQ ID NO: 1452173 - RNA, 19 nt, Human
cugggcaaugauggcaauu

SEQ ID NO: 1452174 - RNA, 15 nt, Human
cugggauagaggggu

SEQ ID NO: 1452175 - RNA, 21 nt, Human
cugggauuacaggcgugagcc

SEQ ID NO: 1452176 - RNA, 23 nt, Human
cugggaguugaucgccuuuccca

SEQ ID NO: 1452177 - RNA, 17 nt, Human
cugggaggcuccccuuc

SEQ ID NO: 1452178 - RNA, 22 nt, Human
cugggagggcagcagggcuacc

SEQ ID NO: 1452179 - RNA, 12 nt, Human
cugggccccugc

SEQ ID NO: 1452180 - RNA, 16 nt, Human
cugggccccugccucu

SEQ ID NO: 1452181 - RNA, 17 nt, Human
cugggccccugccucuc

SEQ ID NO: 1452182 - RNA, 20 nt, Human
cugggagggcagcagggcua

SEQ ID NO: 1452183 - RNA, 19 nt, Human
cugggagggcagcagggcu

SEQ ID NO: 1452184 - RNA, 17 nt, Human
cugggagggcagcaggg

SEQ ID NO: 1452185 - RNA, 15 nt, Human
cugggagggcagcag

SEQ ID NO: 1452186 - RNA, 13 nt, Human
cugggagggcagc

SEQ ID NO: 1452187 - RNA, 11 nt, Human
cugggagggca

SEQ ID NO: 1452188 - RNA, 22 nt, Human
cugggagggacaugcuuagcag

SEQ ID NO: 1452189 - RNA, 16 nt, Human
cugggaggcuccccuu

SEQ ID NO: 1452190 - RNA, 17 nt, Human
cugggaggcucuggagc

SEQ ID NO: 1452191 - RNA, 15 nt, Human
cugggaggcucugga

SEQ ID NO: 1452192 - RNA, 16 nt, Human
cugggaggcucuggag

SEQ ID NO: 1452193 - RNA, 17 nt, Human
cugggaacucaucuggu

SEQ ID NO: 1452194 - RNA, 18 nt, Human
cugggaaccccuuuccca

SEQ ID NO: 1452195 - RNA, 17 nt, Human
cugggaaccccuuuccc

SEQ ID NO: 1452196 - RNA, 19 nt, Human
cugggaaccccuuucccac

SEQ ID NO: 1452197 - RNA, 21 nt, Human
cugggaacagugugcaaggca

SEQ ID NO: 1452198 - RNA, 16 nt, Human
cugggaaggcuacuuc

SEQ ID NO: 1452199 - RNA, 23 nt, Human
cugggagcuccacucugcuucuc

SEQ ID NO: 1452200 - RNA, 23 nt, Human
cugggaaggcuacuucggggcug

SEQ ID NO: 1452201 - RNA, 16 nt, Human
cugggagcuuuuguag

SEQ ID NO: 1452202 - RNA, 16 nt, Human
cuggacagcugugccu

SEQ ID NO: 1452203 - RNA, 15 nt, Human
cuggacagcugugcc

SEQ ID NO: 1452204 - RNA, 14 nt, Human
cuggacagcugugc

SEQ ID NO: 1452205 - RNA, 13 nt, Human
cuggacagcugug

SEQ ID NO: 1452206 - RNA, 19 nt, Human
cuggacagccccacccugg

SEQ ID NO: 1452207 - RNA, 18 nt, Human
cuggacagccccacccug

SEQ ID NO: 1452208 - RNA, 16 nt, Human
cuggacagccccaccc

SEQ ID NO: 1452209 - RNA, 15 nt, Human
cuggacagccccacc

SEQ ID NO: 1452210 - RNA, 14 nt, Human
cuggacagccccac

SEQ ID NO: 1452211 - RNA, 13 nt, Human
cuggacagcccca

SEQ ID NO: 1452212 - RNA, 18 nt, Human
cuggacacucagaccuga

SEQ ID NO: 1452213 - RNA, 21 nt, Human
cuggaauguaaucaauguuuc

SEQ ID NO: 1452214 - RNA, 15 nt, Human
cuggaauacaugaaa

SEQ ID NO: 1452215 - RNA, 14 nt, Human
cuggaauaaguuca

SEQ ID NO: 1452216 - RNA, 20 nt, Human
cuggaauguaaucaauguuu

SEQ ID NO: 1452217 - RNA, 15 nt, Human
cuggaauguaaucaa

SEQ ID NO: 1452218 - RNA, 14 nt, Human
cuggaauguaauca

SEQ ID NO: 1452219 - RNA, 22 nt, Human
cugcuuuucccuuugugaguca

SEQ ID NO: 1452220 - RNA, 21 nt, Human
cuggaagugcuaauuuugaaa

SEQ ID NO: 1452221 - RNA, 22 nt, Human
cuggaagcauuuguuucuacuu

SEQ ID NO: 1452222 - RNA, 23 nt, Human
cuggaauaauccuaaacauauga

SEQ ID NO: 1452223 - RNA, 19 nt, Human
cugcuuuucccuuugugag

SEQ ID NO: 1452224 - RNA, 18 nt, Human
cugcuuuucccuuuguga

SEQ ID NO: 1452225 - RNA, 14 nt, Human
cugcuuucuccuuu

SEQ ID NO: 1452226 - RNA, 15 nt, Human
cugcuuucuguucca

SEQ ID NO: 1452227 - RNA, 13 nt, Human
cugcuuucuguuc

SEQ ID NO: 1452228 - RNA, 11 nt, Human
cugcuuucugu

SEQ ID NO: 1452229 - RNA, 21 nt, Human
cugcucuuucucugccaguga

SEQ ID NO: 1452230 - RNA, 20 nt, Human
cugcucuuucucugccagug

SEQ ID NO: 1452231 - RNA, 19 nt, Human
cugcucuuucucugccagu

SEQ ID NO: 1452232 - RNA, 18 nt, Human
cugcucuuucucugccag

SEQ ID NO: 1452233 - RNA, 17 nt, Human
cugcucuuucucugcca

SEQ ID NO: 1452234 - RNA, 16 nt, Human
cugcucuuucucugcc

SEQ ID NO: 1452235 - RNA, 15 nt, Human
cugcucuuucucugc

SEQ ID NO: 1452236 - RNA, 14 nt, Human
cugcucuuucucug

SEQ ID NO: 1452237 - RNA, 23 nt, Human
cugcucuuggcuggacccagcca

SEQ ID NO: 1452238 - RNA, 22 nt, Human
cugcucugagaauuguugagau

SEQ ID NO: 1452239 - RNA, 22 nt, Human
cugcucuuucucugccagugac

SEQ ID NO: 1452240 - RNA, 13 nt, Human
cuggagcagaagg

SEQ ID NO: 1452241 - RNA, 12 nt, Human
cuggagcagcca

SEQ ID NO: 1452242 - RNA, 13 nt, Human
cuggagcagccac

SEQ ID NO: 1452243 - RNA, 14 nt, Human
cuggagcagccacc

SEQ ID NO: 1452244 - RNA, 17 nt, Human
cuggagcagccacccca

SEQ ID NO: 1452245 - RNA, 22 nt, Human
cuggagcagaccaccccgccug

SEQ ID NO: 1452246 - RNA, 18 nt, Human
cuggagcagaccaccccg

SEQ ID NO: 1452247 - RNA, 15 nt, Human
cuggagcagaccacc

SEQ ID NO: 1452248 - RNA, 13 nt, Human
cuggagcagacca

SEQ ID NO: 1452249 - RNA, 17 nt, Human
cuggagcagaagcagca

SEQ ID NO: 1452250 - RNA, 16 nt, Human
cuggagcagaagcagc

SEQ ID NO: 1452251 - RNA, 23 nt, Human
cuggagcacaauaaauggcugua

SEQ ID NO: 1452252 - RNA, 12 nt, Human
cuggagaggccc

SEQ ID NO: 1452253 - RNA, 20 nt, Human
cuggagagcauagggucugg

SEQ ID NO: 1452254 - RNA, 14 nt, Human
cuggagagaacagg

SEQ ID NO: 1452255 - RNA, 16 nt, Human
cuggagagaacagguu

SEQ ID NO: 1452256 - RNA, 21 nt, Human
cuggagacuuagggcaccagg

SEQ ID NO: 1452257 - RNA, 12 nt, Human
cuggaccagccu

SEQ ID NO: 1452258 - RNA, 15 nt, Human
cuggaccacugggca

SEQ ID NO: 1452259 - RNA, 14 nt, Human
cuggaccacugggc

SEQ ID NO: 1452260 - RNA, 23 nt, Human
cuggacaugaagauucuuuccca

SEQ ID NO: 1452261 - RNA, 20 nt, Human
cuggacagcugugccucgcu

SEQ ID NO: 1452262 - RNA, 19 nt, Human
cuggacagcugugccucgc

SEQ ID NO: 1452263 - RNA, 18 nt, Human
cuggacagcugugccucg

SEQ ID NO: 1452264 - RNA, 17 nt, Human
cuggacagcugugccuc

SEQ ID NO: 1452265 - RNA, 14 nt, Human
cuggacagcuugug

SEQ ID NO: 1452266 - RNA, 12 nt, Human
cuggacagcuug

SEQ ID NO: 1452267 - RNA, 21 nt, Human
cuggaggaccugagccugccg

SEQ ID NO: 1452268 - RNA, 22 nt, Human
cuggaggaccugagccugccga

SEQ ID NO: 1452269 - RNA, 20 nt, Human
cuggaggaccugagccugcc

SEQ ID NO: 1452270 - RNA, 19 nt, Human
cuggaggaccugagccugc

SEQ ID NO: 1452271 - RNA, 18 nt, Human
cuggaggaccugagccug

SEQ ID NO: 1452272 - RNA, 17 nt, Human
cuggaggaccugagccu

SEQ ID NO: 1452273 - RNA, 16 nt, Human
cuggaggaccugagcc

SEQ ID NO: 1452274 - RNA, 15 nt, Human
cuggaggaccugagc

SEQ ID NO: 1452275 - RNA, 14 nt, Human
cuggaggaccugag

SEQ ID NO: 1452276 - RNA, 12 nt, Human
cuggaggaccug

SEQ ID NO: 1452277 - RNA, 22 nt, Human
cuggagcuagaauuugauaugu

SEQ ID NO: 1452278 - RNA, 17 nt, Human
cuggagcuagaauuuga

SEQ ID NO: 1452279 - RNA, 16 nt, Human
cuggagcuagaauuug

SEQ ID NO: 1452280 - RNA, 21 nt, Human
cuggagcccacuguacuugcu

SEQ ID NO: 1452281 - RNA, 14 nt, Human
cuggagcauuucuc

SEQ ID NO: 1452282 - RNA, 14 nt, Human
cuggagccagccga

SEQ ID NO: 1452283 - RNA, 22 nt, Human
cuggagccagccgagcaggagg

SEQ ID NO: 1452284 - RNA, 12 nt, Human
cuggagccagcc

SEQ ID NO: 1452285 - RNA, 13 nt, Human
cuggagcccacug

SEQ ID NO: 1452286 - RNA, 15 nt, Human
cuggagcccacugua

SEQ ID NO: 1452287 - RNA, 16 nt, Human
cuggagcccacuguac

SEQ ID NO: 1452288 - RNA, 17 nt, Human
cuggagcccacuguacu

SEQ ID NO: 1452289 - RNA, 20 nt, Human
cuggagcccacuguacuugc

SEQ ID NO: 1452290 - RNA, 15 nt, Human
cuggccucugcuuuc

SEQ ID NO: 1452291 - RNA, 15 nt, Human
cuggccuccugccuc

SEQ ID NO: 1452292 - RNA, 16 nt, Human
cuggccuccugccucu

SEQ ID NO: 1452293 - RNA, 14 nt, Human
cuggccuccugccu

SEQ ID NO: 1452294 - RNA, 13 nt, Human
cuggccuccugcc

SEQ ID NO: 1452295 - RNA, 17 nt, Human
cuggccucccccacuuu

SEQ ID NO: 1452296 - RNA, 21 nt, Human
cuggccuccccugccaccagg

SEQ ID NO: 1452297 - RNA, 18 nt, Human
cuggccuccccugccacc

SEQ ID NO: 1452298 - RNA, 17 nt, Human
cuggccuccccugccac

SEQ ID NO: 1452299 - RNA, 16 nt, Human
cuggccuccccugcca

SEQ ID NO: 1452300 - RNA, 15 nt, Human
cuggccucccccacu

SEQ ID NO: 1452301 - RNA, 14 nt, Human
cuggccucccccac

SEQ ID NO: 1452302 - RNA, 21 nt, Human
cuggccucaaagcaagcauuc

SEQ ID NO: 1452303 - RNA, 16 nt, Human
cuggccucaaagcaag

SEQ ID NO: 1452304 - RNA, 23 nt, Human
cuggccuagcauacguacacauu

SEQ ID NO: 1452305 - RNA, 11 nt, Human
cuggcccaggg

SEQ ID NO: 1452306 - RNA, 12 nt, Human
cuggcccagggc

SEQ ID NO: 1452307 - RNA, 15 nt, Human
cuggcccagggccca

SEQ ID NO: 1452308 - RNA, 14 nt, Human
cuggcccagggccc

SEQ ID NO: 1452309 - RNA, 13 nt, Human
cuggcccagggcc

SEQ ID NO: 1452310 - RNA, 17 nt, Human
cuggccuagcauacgua

SEQ ID NO: 1452311 - RNA, 15 nt, Human
cuggcccagccuuug

SEQ ID NO: 1452312 - RNA, 21 nt, Human
cuggcccagccuuuguucccc

SEQ ID NO: 1452313 - RNA, 13 nt, Human
cuggcccagccuu

SEQ ID NO: 1452314 - RNA, 16 nt, Human
cuggcccaccccaccc

SEQ ID NO: 1452315 - RNA, 14 nt, Human
cuggcccaccccac

SEQ ID NO: 1452316 - RNA, 17 nt, Human
cuggccauggagaaagc

SEQ ID NO: 1452317 - RNA, 14 nt, Human
cuggcccaccaggg

SEQ ID NO: 1452318 - RNA, 13 nt, Human
cuggcccaccagg

SEQ ID NO: 1452319 - RNA, 20 nt, Human
cuggccauggccugcaaacu

SEQ ID NO: 1452320 - RNA, 22 nt, Human
cuggccauggccugcaaacugg

SEQ ID NO: 1452321 - RNA, 16 nt, Human
cuggccauggccugca

SEQ ID NO: 1452322 - RNA, 15 nt, Human
cuggccauggccugc

SEQ ID NO: 1452323 - RNA, 14 nt, Human
cuggccauggccug

SEQ ID NO: 1452324 - RNA, 13 nt, Human
cuggccauggccu

SEQ ID NO: 1452325 - RNA, 23 nt, Human
cuggccauggagaaagcugacuu

SEQ ID NO: 1452326 - RNA, 21 nt, Human
cuggccauggagaaagcugac

SEQ ID NO: 1452327 - RNA, 20 nt, Human
cuggccauggagaaagcuga

SEQ ID NO: 1452328 - RNA, 19 nt, Human
cuggccauggagaaagcug

SEQ ID NO: 1452329 - RNA, 18 nt, Human
cuggccauggagaaagcu

SEQ ID NO: 1452330 - RNA, 17 nt, Human
cuggccaagcugaggug

SEQ ID NO: 1452331 - RNA, 16 nt, Human
cuggccaagcugaggu

SEQ ID NO: 1452332 - RNA, 15 nt, Human
cuggccaagcugagg

SEQ ID NO: 1452333 - RNA, 14 nt, Human
cuggccaagcugag

SEQ ID NO: 1452334 - RNA, 13 nt, Human
cuggccaagcuga

SEQ ID NO: 1452335 - RNA, 22 nt, Human
cuggcauuagaauuauuuaaac

SEQ ID NO: 1452336 - RNA, 20 nt, Human
cuggcauuagaauuauuuaa

SEQ ID NO: 1452337 - RNA, 16 nt, Human
cuggaggcaccuggug

SEQ ID NO: 1452338 - RNA, 21 nt, Human
cuggaggagcccaggccagga

SEQ ID NO: 1452339 - RNA, 19 nt, Human
cuggaggagcccaggccag

SEQ ID NO: 1452340 - RNA, 16 nt, Human
cuggaggagcccaggc

SEQ ID NO: 1452341 - RNA, 15 nt, Human
cuggaggagcccagg

SEQ ID NO: 1452342 - RNA, 14 nt, Human
cuggaggagcccag

SEQ ID NO: 1452343 - RNA, 13 nt, Human
cuggaggagccca

SEQ ID NO: 1452344 - RNA, 12 nt, Human
cuggaggagccc

SEQ ID NO: 1452345 - RNA, 13 nt, Human
cuggauggggcag

SEQ ID NO: 1452346 - RNA, 15 nt, Human
cuggauguaccacca

SEQ ID NO: 1452347 - RNA, 24 nt, Human
cuggauggggcaggccaccuggcu

SEQ ID NO: 1452348 - RNA, 17 nt, Human
cuggauggggcaggcca

SEQ ID NO: 1452349 - RNA, 15 nt, Human
cuggauggggcaggc

SEQ ID NO: 1452350 - RNA, 13 nt, Human
cuggauuaaacuu

SEQ ID NO: 1452351 - RNA, 23 nt, Human
cuggauuaaacuuaaucuaaaug

SEQ ID NO: 1452352 - RNA, 17 nt, Human
cuggauuauauuaugaa

SEQ ID NO: 1452353 - RNA, 16 nt, Human
cuggauuauucugggg

SEQ ID NO: 1452354 - RNA, 21 nt, Human
cuggauuccagagcacugcuc

SEQ ID NO: 1452355 - RNA, 20 nt, Human
cuggauuccccaucucaggc

SEQ ID NO: 1452356 - RNA, 13 nt, Human
cuggauuccagag

SEQ ID NO: 1452357 - RNA, 14 nt, Human
cuggcacagccugg

SEQ ID NO: 1452358 - RNA, 21 nt, Human
cuggcaaugccacagcccugu

SEQ ID NO: 1452359 - RNA, 20 nt, Human
cuggcaaugccacagcccug

SEQ ID NO: 1452360 - RNA, 19 nt, Human
cuggcaaugccacagcccu

SEQ ID NO: 1452361 - RNA, 15 nt, Human
cuggcaaugccacag

SEQ ID NO: 1452362 - RNA, 12 nt, Human
cuggcaaugcca

SEQ ID NO: 1452363 - RNA, 21 nt, Human
cuggauuccccaucucaggcc

SEQ ID NO: 1452364 - RNA, 22 nt, Human
cuggauugaucggagccuccuc

SEQ ID NO: 1452365 - RNA, 15 nt, Human
cuuuguuggagucaa

SEQ ID NO: 1452366 - RNA, 17 nt, Human
cuuuguguagcuuugcu

SEQ ID NO: 1452367 - RNA, 23 nt, Human
cuuuguuuugcacacuuugccau

SEQ ID NO: 1452368 - RNA, 19 nt, Human
cuuuguuuugcacacuuug

SEQ ID NO: 1452369 - RNA, 16 nt, Human
cuuuguuuuauuuuca

SEQ ID NO: 1452370 - RNA, 15 nt, Human
cuuuguuuuauuuuc

SEQ ID NO: 1452371 - RNA, 18 nt, Human
cuuuguuuugugucucuu

SEQ ID NO: 1452372 - RNA, 17 nt, Human
cuuuguuuugugucucu

SEQ ID NO: 1452373 - RNA, 14 nt, Human
cuuuguuuuguguc

SEQ ID NO: 1452374 - RNA, 16 nt, Human
cuuuucuuaaaccuuc

SEQ ID NO: 1452375 - RNA, 15 nt, Human
cuuuucuuaaaccuu

SEQ ID NO: 1452376 - RNA, 17 nt, Human
cuuuucuguucuaguuu

SEQ ID NO: 1452377 - RNA, 16 nt, Human
cuuuucuguucuaguu

SEQ ID NO: 1452378 - RNA, 20 nt, Human
cuuuuucaaugaauuuuaua

SEQ ID NO: 1452379 - RNA, 15 nt, Human
cuuuuuauuugcaug

SEQ ID NO: 1452380 - RNA, 14 nt, Human
cuuuuuauuugcau

SEQ ID NO: 1452381 - RNA, 13 nt, Human
cuuuuuauuugca

SEQ ID NO: 1452382 - RNA, 16 nt, Human
cuuuuuauuucugcau

SEQ ID NO: 1452383 - RNA, 13 nt, Human
cuuuuuauuucug

SEQ ID NO: 1452384 - RNA, 19 nt, Human
cuuuuuaaaaauagacacu

SEQ ID NO: 1452385 - RNA, 13 nt, Human
cuuuuguuuauuu

SEQ ID NO: 1452386 - RNA, 16 nt, Human
cuuuuguuuccuuuuu

SEQ ID NO: 1452387 - RNA, 17 nt, Human
cuuuugacaaaggcaag

SEQ ID NO: 1452388 - RNA, 22 nt, Human
cuuuuguucuugguuuguaaau

SEQ ID NO: 1452389 - RNA, 16 nt, Human
cuuuuugaaguauuua

SEQ ID NO: 1452390 - RNA, 20 nt, Human
cuuuuugaggcaaaagaagg

SEQ ID NO: 1452391 - RNA, 15 nt, Human
cuuuuugaggcaaaa

SEQ ID NO: 1452392 - RNA, 14 nt, Human
cuuuuugaggcaaa

SEQ ID NO: 1452393 - RNA, 12 nt, Human
cuuuuugcagcu

SEQ ID NO: 1452394 - RNA, 13 nt, Human
cuuuuugcuuucg

SEQ ID NO: 1452395 - RNA, 13 nt, Human
cuuuuugcagcuu

SEQ ID NO: 1452396 - RNA, 14 nt, Human
cuuuuugcagcuuu

SEQ ID NO: 1452397 - RNA, 18 nt, Human
cuuuuuuaaaugaagaaa

SEQ ID NO: 1452398 - RNA, 20 nt, Human
gaaaagguucuuacugcuug

SEQ ID NO: 1452399 - RNA, 23 nt, Human
gaaaagguagaggagucacguua

SEQ ID NO: 1452400 - RNA, 21 nt, Human
gaaaagggagauucagacugu

SEQ ID NO: 1452401 - RNA, 15 nt, Human
gaaaaccuuucuuca

SEQ ID NO: 1452402 - RNA, 11 nt, Human
gaaaaccuuuc

SEQ ID NO: 1452403 - RNA, 14 nt, Human
gaaaacaaggaagu

SEQ ID NO: 1452404 - RNA, 13 nt, Human
gaaaacauuccau

SEQ ID NO: 1452405 - RNA, 19 nt, Human
gaaaacaugcuacacacug

SEQ ID NO: 1452406 - RNA, 21 nt, Human
gaaaacccuugggccagaagu

SEQ ID NO: 1452407 - RNA, 22 nt, Human
gaaaacccuugggccagaagua

SEQ ID NO: 1452408 - RNA, 20 nt, Human
gaaaacccuugggccagaag

SEQ ID NO: 1452409 - RNA, 17 nt, Human
gaaaacccuugggccag

SEQ ID NO: 1452410 - RNA, 20 nt, Human
gaaaacccccaaaccagaua

SEQ ID NO: 1452411 - RNA, 17 nt, Human
gaaaacauuccauccuu

SEQ ID NO: 1452412 - RNA, 13 nt, Human
gaaaaguauguuc

SEQ ID NO: 1452413 - RNA, 20 nt, Human
gaaaaguauauugauaaccu

SEQ ID NO: 1452414 - RNA, 20 nt, Human
gaaaaguauguuagugcaaa

SEQ ID NO: 1452415 - RNA, 23 nt, Human
gaaaagguuuaugaaaaagaaga

SEQ ID NO: 1452416 - RNA, 22 nt, Human
gaaaagguuuaugaaaaagaag

SEQ ID NO: 1452417 - RNA, 17 nt, Human
gaaaagguuuaugaaaa

SEQ ID NO: 1452418 - RNA, 14 nt, Human
gaaaaguauguuag

SEQ ID NO: 1452419 - RNA, 19 nt, Human
gaaaaguauguucuaaccu

SEQ ID NO: 1452420 - RNA, 15 nt, Human
gaaaaguauguucua

SEQ ID NO: 1452421 - RNA, 19 nt, Human
gaaaauaacaauaaaagac

SEQ ID NO: 1452422 - RNA, 21 nt, Human
gaaaaauugcugacuguagcu

SEQ ID NO: 1452423 - RNA, 22 nt, Human
gaaaaauugcugacuguagcuu

SEQ ID NO: 1452424 - RNA, 16 nt, Human
gaaaaauuccacucaa

SEQ ID NO: 1452425 - RNA, 16 nt, Human
gaaaaauauguaccaa

SEQ ID NO: 1452426 - RNA, 19 nt, Human
gaaaaauauauacuaaaca

SEQ ID NO: 1452427 - RNA, 16 nt, Human
cuuuuuuagaguugau

SEQ ID NO: 1452428 - RNA, 12 nt, Human
gaaaacaaggaa

SEQ ID NO: 1452429 - RNA, 13 nt, Human
gaaaacaaaacug

SEQ ID NO: 1452430 - RNA, 14 nt, Human
gaaaacaaggauga

SEQ ID NO: 1452431 - RNA, 18 nt, Human
gaaaacaugcuacacacu

SEQ ID NO: 1452432 - RNA, 21 nt, Human
cuuugaccuaaauuauuuacu

SEQ ID NO: 1452433 - RNA, 13 nt, Human
cuuugaccucugc

SEQ ID NO: 1452434 - RNA, 20 nt, Human
cuuugaaagguuagagaaua

SEQ ID NO: 1452435 - RNA, 19 nt, Human
cuuugacaaagguaaauca

SEQ ID NO: 1452436 - RNA, 22 nt, Human
cuuugcauggauuucuuugaaa

SEQ ID NO: 1452437 - RNA, 17 nt, Human
cuuugcauggauuucuu

SEQ ID NO: 1452438 - RNA, 15 nt, Human
cuuugcauggauuuc

SEQ ID NO: 1452439 - RNA, 16 nt, Human
cuuugcaucucaguau

SEQ ID NO: 1452440 - RNA, 22 nt, Human
cuuugcaucucaguaugaauua

SEQ ID NO: 1452441 - RNA, 14 nt, Human
cuuugcauuuugga

SEQ ID NO: 1452442 - RNA, 16 nt, Human
cuuugccacccucaug

SEQ ID NO: 1452443 - RNA, 17 nt, Human
cuuugccacccucaugc

SEQ ID NO: 1452444 - RNA, 12 nt, Human
cuuugcuucauu

SEQ ID NO: 1452445 - RNA, 18 nt, Human
cuuugccacccucaugcu

SEQ ID NO: 1452446 - RNA, 21 nt, Human
cuuugcuuuaauauaaaugca

SEQ ID NO: 1452447 - RNA, 19 nt, Human
cuuugcuuuaauauaaaug

SEQ ID NO: 1452448 - RNA, 18 nt, Human
cuuugcuuuaauauaaau

SEQ ID NO: 1452449 - RNA, 17 nt, Human
cuuugcuuuaauauaaa

SEQ ID NO: 1452450 - RNA, 16 nt, Human
cuuugcuuuaauauaa

SEQ ID NO: 1452451 - RNA, 19 nt, Human
cuuugcuugcuuugaagua

SEQ ID NO: 1452452 - RNA, 18 nt, Human
cuuugcuugcuuugaagu

SEQ ID NO: 1452453 - RNA, 13 nt, Human
cuuugcuugcuuu

SEQ ID NO: 1452454 - RNA, 12 nt, Human
cuuugcuugcuu

SEQ ID NO: 1452455 - RNA, 23 nt, Human
cuuugcuucauucaagucagcuc

SEQ ID NO: 1452456 - RNA, 18 nt, Human
cuuuguguagcuuugcuc

SEQ ID NO: 1452457 - RNA, 16 nt, Human
cuuuguguagcuuugc

SEQ ID NO: 1452458 - RNA, 23 nt, Human
cuuugugauucaaucuguaaacu

SEQ ID NO: 1452459 - RNA, 22 nt, Human
cuuugugauucaaucuguaaac

SEQ ID NO: 1452460 - RNA, 13 nt, Human
cuuugugagucaa

SEQ ID NO: 1452461 - RNA, 19 nt, Human
cuuugugagucaauacaua

SEQ ID NO: 1452462 - RNA, 12 nt, Human
cuuugugauuuu

SEQ ID NO: 1452463 - RNA, 21 nt, Human
cuuugggccagacaugccaca

SEQ ID NO: 1452464 - RNA, 13 nt, Human
cuuugggccagac

SEQ ID NO: 1452465 - RNA, 12 nt, Human
cuuugggccaga

SEQ ID NO: 1452466 - RNA, 17 nt, Human
cuuuggauuugacauug

SEQ ID NO: 1452467 - RNA, 16 nt, Human
cuuuggauuugacauu

SEQ ID NO: 1452468 - RNA, 15 nt, Human
cuuuggauuugacau

SEQ ID NO: 1452469 - RNA, 13 nt, Human
cuuuggauuugac

SEQ ID NO: 1452470 - RNA, 13 nt, Human
cuuuggcaggugc

SEQ ID NO: 1452471 - RNA, 14 nt, Human
cuuuggcagaguuc

SEQ ID NO: 1452472 - RNA, 24 nt, Human
cuuuggcaggugcagcccccacug

SEQ ID NO: 1452473 - RNA, 15 nt, Human
cuuuaggcauuaaau

SEQ ID NO: 1452474 - RNA, 23 nt, Human
cuuuaggcauuaaauuuuagcaa

SEQ ID NO: 1452475 - RNA, 15 nt, Human
cuuuaggagcagugg

SEQ ID NO: 1452476 - RNA, 20 nt, Human
cuuuagaguuagacuguugg

SEQ ID NO: 1452477 - RNA, 17 nt, Human
cuuuagaguuagacugu

SEQ ID NO: 1452478 - RNA, 22 nt, Human
cuuuagagaaguauacauaagu

SEQ ID NO: 1452479 - RNA, 14 nt, Human
cuuuagaguuagac

SEQ ID NO: 1452480 - RNA, 19 nt, Human
cuuuagagaaguauacaua

SEQ ID NO: 1452481 - RNA, 18 nt, Human
cuuucugaucaaggccuu

SEQ ID NO: 1452482 - RNA, 17 nt, Human
cuuucugaucaaggccu

SEQ ID NO: 1452483 - RNA, 16 nt, Human
cuuucugaucaaggcc

SEQ ID NO: 1452484 - RNA, 15 nt, Human
cuuucugaucaaggc

SEQ ID NO: 1452485 - RNA, 14 nt, Human
cuuucugaauugca

SEQ ID NO: 1452486 - RNA, 17 nt, Human
cuuucugaauugcacau

SEQ ID NO: 1452487 - RNA, 23 nt, Human
cuuucugaacagcugguguagcu

SEQ ID NO: 1452488 - RNA, 21 nt, Human
cuuucugaacagcugguguag

SEQ ID NO: 1452489 - RNA, 20 nt, Human
cuuucugaacagcuggugua

SEQ ID NO: 1452490 - RNA, 19 nt, Human
cuuucugaacagcuggugu

SEQ ID NO: 1452491 - RNA, 18 nt, Human
cuuucugaacagcuggug

SEQ ID NO: 1452492 - RNA, 17 nt, Human
cuuucugaacagcuggu

SEQ ID NO: 1452493 - RNA, 16 nt, Human
cuuucugaacagcugg

SEQ ID NO: 1452494 - RNA, 15 nt, Human
cuuucugaacagcug

SEQ ID NO: 1452495 - RNA, 14 nt, Human
cuuucugaacagcu

SEQ ID NO: 1452496 - RNA, 13 nt, Human
cuuucugaacagc

SEQ ID NO: 1452497 - RNA, 20 nt, Human
cuuucucuuuuccucuacca

SEQ ID NO: 1452498 - RNA, 13 nt, Human
cuuuccucgccug

SEQ ID NO: 1452499 - RNA, 22 nt, Human
cuuuccuccucaggcacacagc

SEQ ID NO: 1452500 - RNA, 20 nt, Human
cuuucuguauauacuuuuuu

SEQ ID NO: 1452501 - RNA, 19 nt, Human
cuuucuguauauacuuuuu

SEQ ID NO: 1452502 - RNA, 15 nt, Human
cuuucugccuggagu

SEQ ID NO: 1452503 - RNA, 14 nt, Human
cuuucugccuggag

SEQ ID NO: 1452504 - RNA, 12 nt, Human
cuuucugccugg

SEQ ID NO: 1452505 - RNA, 11 nt, Human
cuuucugccug

SEQ ID NO: 1452506 - RNA, 20 nt, Human
cuuucugaucaaggccuuau

SEQ ID NO: 1452507 - RNA, 20 nt, Human
cuuucuguuccaaauucagu

SEQ ID NO: 1452508 - RNA, 16 nt, Human
cuuucuguuccaaauu

SEQ ID NO: 1452509 - RNA, 15 nt, Human
cuuucuguuccaaau

SEQ ID NO: 1452510 - RNA, 14 nt, Human
cuuucuguuccaaa

SEQ ID NO: 1452511 - RNA, 13 nt, Human
cuuucuguuccaa

SEQ ID NO: 1452512 - RNA, 12 nt, Human
cuuucuguucca

SEQ ID NO: 1452513 - RNA, 22 nt, Human
cuuucuguuccaaauucaguuu

SEQ ID NO: 1452514 - RNA, 18 nt, Human
cuuucugucuucuacaga

SEQ ID NO: 1452515 - RNA, 17 nt, Human
cuuucuuuaaaguucuu

SEQ ID NO: 1452516 - RNA, 19 nt, Human
cuuucuuuuuuggccaucu

SEQ ID NO: 1452517 - RNA, 18 nt, Human
cuuucuuuuuuggccauc

SEQ ID NO: 1452518 - RNA, 16 nt, Human
cuuucuuuuuugauau

SEQ ID NO: 1452519 - RNA, 15 nt, Human
cuuucuuuuuugaua

SEQ ID NO: 1452520 - RNA, 22 nt, Human
cuuucuuuuuguagcuggggcu

SEQ ID NO: 1452521 - RNA, 21 nt, Human
cuuucuuuuuguagcuggggc

SEQ ID NO: 1452522 - RNA, 16 nt, Human
cuuucuuuuuguagcu

SEQ ID NO: 1452523 - RNA, 17 nt, Human
cuuugaaaaaaaauaaa

SEQ ID NO: 1452524 - RNA, 23 nt, Human
cuuucuuuuuuggccaucugcuc

SEQ ID NO: 1452525 - RNA, 13 nt, Human
cuuugaaacagaa

SEQ ID NO: 1452526 - RNA, 15 nt, Human
cuuugaaaaaaaaua

SEQ ID NO: 1452527 - RNA, 17 nt, Human
cuuugacaaagguaaau

SEQ ID NO: 1452528 - RNA, 23 nt, Human
cuuuagaaucccagcccccugac

SEQ ID NO: 1452529 - RNA, 21 nt, Human
cuuuagaaucccagcccccug

SEQ ID NO: 1452530 - RNA, 19 nt, Human
cuuuaccuuuuuuauacau

SEQ ID NO: 1452531 - RNA, 20 nt, Human
cuuuaccuuuuuuauacaua

SEQ ID NO: 1452532 - RNA, 17 nt, Human
cuuuaccuuuuuuauac

SEQ ID NO: 1452533 - RNA, 22 nt, Human
cuuguuuacaugcuuauuccau

SEQ ID NO: 1452534 - RNA, 16 nt, Human
cuuguuuacaugcuua

SEQ ID NO: 1452535 - RNA, 14 nt, Human
cuuguuuacaugcu

SEQ ID NO: 1452536 - RNA, 18 nt, Human
cuuguugagccgugggca

SEQ ID NO: 1452537 - RNA, 13 nt, Human
cuuguugagccgu

SEQ ID NO: 1452538 - RNA, 19 nt, Human
cuuguugagccgugggcaa

SEQ ID NO: 1452539 - RNA, 14 nt, Human
cuuguuuggggcag

SEQ ID NO: 1452540 - RNA, 17 nt, Human
cuuguuugcuucaacug

SEQ ID NO: 1452541 - RNA, 12 nt, Human
cuuguuucaauu

SEQ ID NO: 1452542 - RNA, 21 nt, Human
cuuguuuacaugcuuauucca

SEQ ID NO: 1452543 - RNA, 18 nt, Human
cuuguuuacaugcuuauu

SEQ ID NO: 1452544 - RNA, 17 nt, Human
cuuguuuacaugcuuau

SEQ ID NO: 1452545 - RNA, 22 nt, Human
cuuguuucaauuccaccugcaa

SEQ ID NO: 1452546 - RNA, 13 nt, Human
cuuguuucauauu

SEQ ID NO: 1452547 - RNA, 16 nt, Human
cuuguccuagcacaga

SEQ ID NO: 1452548 - RNA, 21 nt, Human
cuuguagcuccuccccuggag

SEQ ID NO: 1452549 - RNA, 23 nt, Human
cuuguagcuccuccccuggaggg

SEQ ID NO: 1452550 - RNA, 19 nt, Human
cuuguagcuccuccccugg

SEQ ID NO: 1452551 - RNA, 18 nt, Human
cuuguagcuccuccccug

SEQ ID NO: 1452552 - RNA, 16 nt, Human
cuuguagcuccucccc

SEQ ID NO: 1452553 - RNA, 14 nt, Human
cuuguagcuccucc

SEQ ID NO: 1452554 - RNA, 13 nt, Human
cuuguagcuccuc

SEQ ID NO: 1452555 - RNA, 21 nt, Human
cuuguagcccuuuccaagcuu

SEQ ID NO: 1452556 - RNA, 21 nt, Human
cuuguagccagccggggcgag

SEQ ID NO: 1452557 - RNA, 16 nt, Human
cuuguagccagccggg

SEQ ID NO: 1452558 - RNA, 15 nt, Human
cuuguagccagccgg

SEQ ID NO: 1452559 - RNA, 14 nt, Human
cuuguagccagccg

SEQ ID NO: 1452560 - RNA, 13 nt, Human
cuuguagccagcc

SEQ ID NO: 1452561 - RNA, 15 nt, Human
cuuguccuuucccuu

SEQ ID NO: 1452562 - RNA, 14 nt, Human
cuuguccuuucccu

SEQ ID NO: 1452563 - RNA, 19 nt, Human
cuuguccuuagccuggacc

SEQ ID NO: 1452564 - RNA, 18 nt, Human
cuuguccuuagccuggac

SEQ ID NO: 1452565 - RNA, 17 nt, Human
cuuguccuuagccugga

SEQ ID NO: 1452566 - RNA, 16 nt, Human
cuuguccuuagccugg

SEQ ID NO: 1452567 - RNA, 14 nt, Human
cuuguccuuagccu

SEQ ID NO: 1452568 - RNA, 17 nt, Human
cuuguccuagcacagau

SEQ ID NO: 1452569 - RNA, 20 nt, Human
cuuguccuagcacagauggc

SEQ ID NO: 1452570 - RNA, 14 nt, Human
cuuguggggccugg

SEQ ID NO: 1452571 - RNA, 20 nt, Human
cuuguccuuagccuggaccu

SEQ ID NO: 1452572 - RNA, 22 nt, Human
cuugucgccccucccucccaga

SEQ ID NO: 1452573 - RNA, 17 nt, Human
cuuguggggccugggag

SEQ ID NO: 1452574 - RNA, 18 nt, Human
cuuguggggccugggagg

SEQ ID NO: 1452575 - RNA, 16 nt, Human
cuuguggggccuggga

SEQ ID NO: 1452576 - RNA, 15 nt, Human
cuuguggggccuggg

SEQ ID NO: 1452577 - RNA, 17 nt, Human
cuuguuacuucugaggu

SEQ ID NO: 1452578 - RNA, 15 nt, Human
cuuguuacuucugag

SEQ ID NO: 1452579 - RNA, 14 nt, Human
cuuguuacuucuga

SEQ ID NO: 1452580 - RNA, 13 nt, Human
cuuguucugucac

SEQ ID NO: 1452581 - RNA, 18 nt, Human
cuuggagaagucucagcu

SEQ ID NO: 1452582 - RNA, 17 nt, Human
cuuggagaagucucagc

SEQ ID NO: 1452583 - RNA, 19 nt, Human
cuuggagaagucucagcua

SEQ ID NO: 1452584 - RNA, 14 nt, Human
cuuggacaaaucac

SEQ ID NO: 1452585 - RNA, 15 nt, Human
cuuggacacgcucag

SEQ ID NO: 1452586 - RNA, 19 nt, Human
cuugggcccuuugagugca

SEQ ID NO: 1452587 - RNA, 17 nt, Human
cuugggcccuuugagug

SEQ ID NO: 1452588 - RNA, 16 nt, Human
cuugggcccuuugagu

SEQ ID NO: 1452589 - RNA, 14 nt, Human
cuugggcccuuuga

SEQ ID NO: 1452590 - RNA, 16 nt, Human
cuugggcccacaccuc

SEQ ID NO: 1452591 - RNA, 18 nt, Human
cuugggcccacaccuccu

SEQ ID NO: 1452592 - RNA, 15 nt, Human
cuugggcccacaccu

SEQ ID NO: 1452593 - RNA, 23 nt, Human
cuugggccagaaguaccagacua

SEQ ID NO: 1452594 - RNA, 15 nt, Human
cuugggccagaagua

SEQ ID NO: 1452595 - RNA, 21 nt, Human
cuugggcacccccagccuggg

SEQ ID NO: 1452596 - RNA, 13 nt, Human
cuugggcagagcu

SEQ ID NO: 1452597 - RNA, 22 nt, Human
cuugggcacccccagccugggc

SEQ ID NO: 1452598 - RNA, 20 nt, Human
cuugggcacccccagccugg

SEQ ID NO: 1452599 - RNA, 19 nt, Human
cuugggcacccccagccug

SEQ ID NO: 1452600 - RNA, 18 nt, Human
cuugggcacccccagccu

SEQ ID NO: 1452601 - RNA, 17 nt, Human
cuugggcacccccagcc

SEQ ID NO: 1452602 - RNA, 13 nt, Human
cuugggcaccccc

SEQ ID NO: 1452603 - RNA, 17 nt, Human
cuugggauuugcugugu

SEQ ID NO: 1452604 - RNA, 13 nt, Human
cuuguacaaaaua

SEQ ID NO: 1452605 - RNA, 22 nt, Human
cuuguaauuuuuuuaauuuaca

SEQ ID NO: 1452606 - RNA, 22 nt, Human
cuuguaauuuuacacgcuuuug

SEQ ID NO: 1452607 - RNA, 18 nt, Human
cuuguaauuauggaguca

SEQ ID NO: 1452608 - RNA, 23 nt, Human
cuuguaauucuaaaugaauguuu

SEQ ID NO: 1452609 - RNA, 16 nt, Human
cuuguaauucuaaaug

SEQ ID NO: 1452610 - RNA, 12 nt, Human
cuuguacaaaau

SEQ ID NO: 1452611 - RNA, 15 nt, Human
cuuguaauucuaaau

SEQ ID NO: 1452612 - RNA, 13 nt, Human
cuuguaauucuaa

SEQ ID NO: 1452613 - RNA, 14 nt, Human
cuuguaauuaugga

SEQ ID NO: 1452614 - RNA, 11 nt, Human
cuuguaauuau

SEQ ID NO: 1452615 - RNA, 10 nt, Human
cuuguaauua

SEQ ID NO: 1452616 - RNA, 20 nt, Human
cuugguuuguaaauuaacuu

SEQ ID NO: 1452617 - RNA, 14 nt, Human
cuugguuuguaaau

SEQ ID NO: 1452618 - RNA, 15 nt, Human
cuugguuuguaaauu

SEQ ID NO: 1452619 - RNA, 15 nt, Human
cuugguuugccuucc

SEQ ID NO: 1452620 - RNA, 15 nt, Human
cuugguugucuggca

SEQ ID NO: 1452621 - RNA, 19 nt, Human
cuugguugguaggguggga

SEQ ID NO: 1452622 - RNA, 16 nt, Human
cuuggggcuggagagg

SEQ ID NO: 1452623 - RNA, 18 nt, Human
cuuggggcucacacaccu

SEQ ID NO: 1452624 - RNA, 18 nt, Human
cuuggggcugaugcaguu

SEQ ID NO: 1452625 - RNA, 13 nt, Human
cuugggcucugau

SEQ ID NO: 1452626 - RNA, 21 nt, Human
cuugggcuccgugugggagac

SEQ ID NO: 1452627 - RNA, 21 nt, Human
cuugggcucccuguaaccucu

SEQ ID NO: 1452628 - RNA, 13 nt, Human
cuugggcucccug

SEQ ID NO: 1452629 - RNA, 23 nt, Human
cuugggcucagggaccauggcuu

SEQ ID NO: 1452630 - RNA, 17 nt, Human
cuugggccuaggcugca

SEQ ID NO: 1452631 - RNA, 18 nt, Human
cuugggcucugaugaaaa

SEQ ID NO: 1452632 - RNA, 17 nt, Human
cuugggcucugaugaaa

SEQ ID NO: 1452633 - RNA, 16 nt, Human
cuugggcucugaugaa

SEQ ID NO: 1452634 - RNA, 16 nt, Human
cuuggggcugaugcag

SEQ ID NO: 1452635 - RNA, 23 nt, Human
cuugcaccccaaagcuuuccugc

SEQ ID NO: 1452636 - RNA, 22 nt, Human
cuugcaccccaaagcuuuccug

SEQ ID NO: 1452637 - RNA, 23 nt, Human
cuugcacagucacugcucuucag

SEQ ID NO: 1452638 - RNA, 19 nt, Human
cuugcacagucacugcucu

SEQ ID NO: 1452639 - RNA, 15 nt, Human
cuugcacagucacug

SEQ ID NO: 1452640 - RNA, 20 nt, Human
cuugagggggaaggauucug

SEQ ID NO: 1452641 - RNA, 22 nt, Human
cuugcagcucuccccuucucug

SEQ ID NO: 1452642 - RNA, 13 nt, Human
cuugagggggaag

SEQ ID NO: 1452643 - RNA, 19 nt, Human
cuugaggggaccaggagug

SEQ ID NO: 1452644 - RNA, 22 nt, Human
cuugagaaauauggacacuuaa

SEQ ID NO: 1452645 - RNA, 18 nt, Human
cuugagaaaccccucgau

SEQ ID NO: 1452646 - RNA, 19 nt, Human
cuucugggagggcagcagg

SEQ ID NO: 1452647 - RNA, 15 nt, Human
cuucugggagggcag

SEQ ID NO: 1452648 - RNA, 17 nt, Human
cuucuggccaggaagcu

SEQ ID NO: 1452649 - RNA, 15 nt, Human
cuucuggccaggaag

SEQ ID NO: 1452650 - RNA, 13 nt, Human
cuucuggccagga

SEQ ID NO: 1452651 - RNA, 22 nt, Human
cuucuggccaggaagcuuuggu

SEQ ID NO: 1452652 - RNA, 12 nt, Human
cuucuggccagg

SEQ ID NO: 1452653 - RNA, 21 nt, Human
cuugaggggaccaggaguggg

SEQ ID NO: 1452654 - RNA, 18 nt, Human
cuugaggggaccaggagu

SEQ ID NO: 1452655 - RNA, 17 nt, Human
cuugaggggaccaggag

SEQ ID NO: 1452656 - RNA, 16 nt, Human
cuugaggggaccagga

SEQ ID NO: 1452657 - RNA, 15 nt, Human
cuugaggggaccagg

SEQ ID NO: 1452658 - RNA, 23 nt, Human
cuugaggggaagcuagucuuuug

SEQ ID NO: 1452659 - RNA, 21 nt, Human
cuugaggggaagcuagucuuu

SEQ ID NO: 1452660 - RNA, 19 nt, Human
cuugaggggaagcuagucu

SEQ ID NO: 1452661 - RNA, 17 nt, Human
cuugccaaggcagaggc

SEQ ID NO: 1452662 - RNA, 14 nt, Human
cuugccaaggcaga

SEQ ID NO: 1452663 - RNA, 13 nt, Human
cuugccaaauuua

SEQ ID NO: 1452664 - RNA, 19 nt, Human
cuugccaaggcagaggccu

SEQ ID NO: 1452665 - RNA, 20 nt, Human
cuugccaaggcagaggccug

SEQ ID NO: 1452666 - RNA, 13 nt, Human
cuugccacacccc

SEQ ID NO: 1452667 - RNA, 19 nt, Human
cuugccacaccccccaccc

SEQ ID NO: 1452668 - RNA, 23 nt, Human
cuugccacaccccccaccccuag

SEQ ID NO: 1452669 - RNA, 13 nt, Human
cuugccacacucu

SEQ ID NO: 1452670 - RNA, 17 nt, Human
cuugcucuugaugccug

SEQ ID NO: 1452671 - RNA, 18 nt, Human
cuugcucuugaugccugg

SEQ ID NO: 1452672 - RNA, 19 nt, Human
cuugcucuugaugccuggc

SEQ ID NO: 1452673 - RNA, 19 nt, Human
cuugcuucuuucuagaaag

SEQ ID NO: 1452674 - RNA, 18 nt, Human
cuugcuucuuucuagaaa

SEQ ID NO: 1452675 - RNA, 15 nt, Human
cuugcuucuuucuag

SEQ ID NO: 1452676 - RNA, 14 nt, Human
cuugcuucuuucua

SEQ ID NO: 1452677 - RNA, 17 nt, Human
cuugcuucccuaaucua

SEQ ID NO: 1452678 - RNA, 13 nt, Human
cuugcuucccuaa

SEQ ID NO: 1452679 - RNA, 21 nt, Human
cuugcugcaagcacagcccuu

SEQ ID NO: 1452680 - RNA, 20 nt, Human
cuugcugcaagcacagcccu

SEQ ID NO: 1452681 - RNA, 20 nt, Human
cuugcuugauuguauggugg

SEQ ID NO: 1452682 - RNA, 14 nt, Human
cuuacuuggaacug

SEQ ID NO: 1452683 - RNA, 19 nt, Human
cuuacuuggaacugaaggg

SEQ ID NO: 1452684 - RNA, 14 nt, Human
cuuacuucucacua

SEQ ID NO: 1452685 - RNA, 18 nt, Human
cuuacuuauuaucuucag

SEQ ID NO: 1452686 - RNA, 23 nt, Human
cuuacuuaaacccagcucccuuc

SEQ ID NO: 1452687 - RNA, 16 nt, Human
cuuacuccugugggag

SEQ ID NO: 1452688 - RNA, 14 nt, Human
cuuacuccuguggg

SEQ ID NO: 1452689 - RNA, 13 nt, Human
cuuacuccugugg

SEQ ID NO: 1452690 - RNA, 12 nt, Human
cuuacuccugug

SEQ ID NO: 1452691 - RNA, 15 nt, Human
cuuacucccaggcac

SEQ ID NO: 1452692 - RNA, 15 nt, Human
cuuacuccuguggga

SEQ ID NO: 1452693 - RNA, 16 nt, Human
cuuacuguacaugaaa

SEQ ID NO: 1452694 - RNA, 20 nt, Human
cuuaccuuuuuauuugcaug

SEQ ID NO: 1452695 - RNA, 23 nt, Human
cuuacgaauacuuuugcccuuug

SEQ ID NO: 1452696 - RNA, 19 nt, Human
cuuaccuuuuuauuugcau

SEQ ID NO: 1452697 - RNA, 21 nt, Human
cuuaauguauguuaccaaaaa

SEQ ID NO: 1452698 - RNA, 22 nt, Human
cuuaauggcugauaauuuuaaa

SEQ ID NO: 1452699 - RNA, 20 nt, Human
cuuaauggcugauaauuuua

SEQ ID NO: 1452700 - RNA, 16 nt, Human
cuuaauggcugauaau

SEQ ID NO: 1452701 - RNA, 14 nt, Human
cuuaauguauguua

SEQ ID NO: 1452702 - RNA, 17 nt, Human
cuuaauguauguuacca

SEQ ID NO: 1452703 - RNA, 15 nt, Human
cuuagaaauuuauuu

SEQ ID NO: 1452704 - RNA, 14 nt, Human
cuuacuuuuuauau

SEQ ID NO: 1452705 - RNA, 17 nt, Human
cuuacuuuuuauauaua

SEQ ID NO: 1452706 - RNA, 16 nt, Human
cuuacuuuuuauauau

SEQ ID NO: 1452707 - RNA, 14 nt, Human
cuuagaaauuuauu

SEQ ID NO: 1452708 - RNA, 17 nt, Human
cuuagaguuggccauau

SEQ ID NO: 1452709 - RNA, 16 nt, Human
cuuagaucuggcaugu

SEQ ID NO: 1452710 - RNA, 15 nt, Human
cuuagaucuggcaug

SEQ ID NO: 1452711 - RNA, 20 nt, Human
cuuagaugcaguucugaaga

SEQ ID NO: 1452712 - RNA, 19 nt, Human
cuuagaugcaguucugaag

SEQ ID NO: 1452713 - RNA, 14 nt, Human
cuuaugaaaagaau

SEQ ID NO: 1452714 - RNA, 13 nt, Human
cuuaugaaaagaa

SEQ ID NO: 1452715 - RNA, 11 nt, Human
cuuaugaaaag

SEQ ID NO: 1452716 - RNA, 22 nt, Human
cuuaucugaucagaacaaaugu

SEQ ID NO: 1452717 - RNA, 23 nt, Human
cuuaugauagcaaauggccucau

SEQ ID NO: 1452718 - RNA, 22 nt, Human
cuuaugacaucacuuguacaaa

SEQ ID NO: 1452719 - RNA, 21 nt, Human
cuuaugacaucacuuguacaa

SEQ ID NO: 1452720 - RNA, 21 nt, Human
cuuaugaaaagaauuguuggg

SEQ ID NO: 1452721 - RNA, 18 nt, Human
cuuaugaaaagaauuguu

SEQ ID NO: 1452722 - RNA, 19 nt, Human
cuuauuuucaagaaacuga

SEQ ID NO: 1452723 - RNA, 18 nt, Human
cuuauuuucaagaaacug

SEQ ID NO: 1452724 - RNA, 15 nt, Human
cuuauuuucaagaaa

SEQ ID NO: 1452725 - RNA, 14 nt, Human
cuuauuuucaagaa

SEQ ID NO: 1452726 - RNA, 12 nt, Human
cuuauuuucaag

SEQ ID NO: 1452727 - RNA, 21 nt, Human
cuuagaucuggcauguuagcc

SEQ ID NO: 1452728 - RNA, 21 nt, Human
cuuaggguuaugauuaaguaa

SEQ ID NO: 1452729 - RNA, 13 nt, Human
cuuauaauuuaaa

SEQ ID NO: 1452730 - RNA, 14 nt, Human
cuuauaauaaagga

SEQ ID NO: 1452731 - RNA, 16 nt, Human
cuuauaauaaaggacu

SEQ ID NO: 1452732 - RNA, 20 nt, Human
cuuauaauaaaggacuguaa

SEQ ID NO: 1452733 - RNA, 22 nt, Human
cuuauaauucuuucaauacaga

SEQ ID NO: 1452734 - RNA, 17 nt, Human
cuuauaauaaaggacug

SEQ ID NO: 1452735 - RNA, 14 nt, Human
cuuauaauuuaaaa

SEQ ID NO: 1452736 - RNA, 16 nt, Human
cuuauaguucuaggca

SEQ ID NO: 1452737 - RNA, 15 nt, Human
cuuauaguucuaggc

SEQ ID NO: 1452738 - RNA, 14 nt, Human
cuuauaguucuagg

SEQ ID NO: 1452739 - RNA, 21 nt, Human
cuuauaguuacuguguaauua

SEQ ID NO: 1452740 - RNA, 19 nt, Human
cuuauaguuacuguguaau

SEQ ID NO: 1452741 - RNA, 18 nt, Human
cuuauaguuacuguguaa

SEQ ID NO: 1452742 - RNA, 16 nt, Human
cuuauaguuacugugu

SEQ ID NO: 1452743 - RNA, 15 nt, Human
cuuauaguuacugug

SEQ ID NO: 1452744 - RNA, 21 nt, Human
cuuauaauuguucucagaauc

SEQ ID NO: 1452745 - RNA, 14 nt, Human
cuuauaauuguucu

SEQ ID NO: 1452746 - RNA, 13 nt, Human
cuuauaguacaug

SEQ ID NO: 1452747 - RNA, 17 nt, Human
cuuauaguacaugauaa

SEQ ID NO: 1452748 - RNA, 14 nt, Human
cuuauaguuacugu

SEQ ID NO: 1452749 - RNA, 19 nt, Human
cuuauaguacaugauaaau

SEQ ID NO: 1452750 - RNA, 22 nt, Human
cuuaaucagguccucagagaau

SEQ ID NO: 1452751 - RNA, 20 nt, Human
cuuaaucagguccucagaga

SEQ ID NO: 1452752 - RNA, 21 nt, Human
cuuaaucagauagauauuccu

SEQ ID NO: 1452753 - RNA, 21 nt, Human
cuuaaguuaguuccacugaga

SEQ ID NO: 1452754 - RNA, 19 nt, Human
cuuaaguuaguuccacuga

SEQ ID NO: 1452755 - RNA, 14 nt, Human
cuuaaucuaaaugg

SEQ ID NO: 1452756 - RNA, 16 nt, Human
cuuaaucuaaauggaa

SEQ ID NO: 1452757 - RNA, 16 nt, Human
cuuaagugcugcaauu

SEQ ID NO: 1452758 - RNA, 17 nt, Human
cuuaagucagaacagca

SEQ ID NO: 1452759 - RNA, 18 nt, Human
cuuaagucagaacagcag

SEQ ID NO: 1452760 - RNA, 22 nt, Human
cuuaagcccagugcacugaaag

SEQ ID NO: 1452761 - RNA, 19 nt, Human
cuuaagcccagugcacuga

SEQ ID NO: 1452762 - RNA, 23 nt, Human
cuuaagcaucuggcucuaauuca

SEQ ID NO: 1452763 - RNA, 18 nt, Human
cuuaagcaucuggcucua

SEQ ID NO: 1452764 - RNA, 17 nt, Human
cuuaagcaucuggcucu

SEQ ID NO: 1452765 - RNA, 15 nt, Human
cuuaagcaucuggcu

SEQ ID NO: 1452766 - RNA, 22 nt, Human
cuuaacuucuugcuucuuucua

SEQ ID NO: 1452767 - RNA, 21 nt, Human
cuuaacuucuugcuucuuucu

SEQ ID NO: 1452768 - RNA, 18 nt, Human
cuuaacuucuugcuucuu

SEQ ID NO: 1452769 - RNA, 15 nt, Human
cuuaacuucuugcuu

SEQ ID NO: 1452770 - RNA, 14 nt, Human
cuuaacuucuugcu

SEQ ID NO: 1452771 - RNA, 21 nt, Human
cuuaagaagacugcauuauau

SEQ ID NO: 1452772 - RNA, 16 nt, Human
cuuaacuggucuccuu

SEQ ID NO: 1452773 - RNA, 16 nt, Human
cuuaacuggagcccca

SEQ ID NO: 1452774 - RNA, 12 nt, Human
cuuaacuucaca

SEQ ID NO: 1452775 - RNA, 14 nt, Human
cuuaacuucacaua

SEQ ID NO: 1452776 - RNA, 15 nt, Human
cuuaacuucacauau

SEQ ID NO: 1452777 - RNA, 16 nt, Human
cuuaacuucacauauu

SEQ ID NO: 1452778 - RNA, 17 nt, Human
cuuaacuucacauauug

SEQ ID NO: 1452779 - RNA, 22 nt, Human
cuuaacuucacauauugauuuc

SEQ ID NO: 1452780 - RNA, 20 nt, Human
cuuaacggaccaaagcaaga

SEQ ID NO: 1452781 - RNA, 17 nt, Human
cuuaacggaccaaagca

SEQ ID NO: 1452782 - RNA, 16 nt, Human
cuuaacggaccaaagc

SEQ ID NO: 1452783 - RNA, 16 nt, Human
cuuaaauguuauuauc

SEQ ID NO: 1452784 - RNA, 22 nt, Human
cuuaaaugcaaccauuugaaac

SEQ ID NO: 1452785 - RNA, 14 nt, Human
cuguuuuuuuguua

SEQ ID NO: 1452786 - RNA, 20 nt, Human
cugguucuuguguuggcugu

SEQ ID NO: 1452787 - RNA, 17 nt, Human
cugguucucaauuccaa

SEQ ID NO: 1452788 - RNA, 20 nt, Human
cuguuuaguagcagugauug

SEQ ID NO: 1452789 - RNA, 14 nt, Human
cuguuuagauaaua

SEQ ID NO: 1452790 - RNA, 14 nt, Human
cuguuuagaacaca

SEQ ID NO: 1452791 - RNA, 13 nt, Human
cuguuuagaacac

SEQ ID NO: 1452792 - RNA, 17 nt, Human
cuguuuacugcaagguu

SEQ ID NO: 1452793 - RNA, 15 nt, Human
cuguuuacugcaagg

SEQ ID NO: 1452794 - RNA, 12 nt, Human
cuguuuagauaa

SEQ ID NO: 1452795 - RNA, 16 nt, Human
cuguuuauuaaucuua

SEQ ID NO: 1452796 - RNA, 14 nt, Human
cuguuuauuaaucu

SEQ ID NO: 1452797 - RNA, 22 nt, Human
cuguuuauuaaaguacaaccau

SEQ ID NO: 1452798 - RNA, 17 nt, Human
cuguuuccuagcugugu

SEQ ID NO: 1452799 - RNA, 16 nt, Human
cuguuucccaggccca

SEQ ID NO: 1452800 - RNA, 18 nt, Human
cuguuuauuaaucuuagu

SEQ ID NO: 1452801 - RNA, 16 nt, Human
cuguuuccuagcugug

SEQ ID NO: 1452802 - RNA, 22 nt, Human
cuguuuuucggacaguuuauuu

SEQ ID NO: 1452803 - RNA, 17 nt, Human
cuguuuuucuaacuggg

SEQ ID NO: 1452804 - RNA, 20 nt, Human
cuguuuuucggacaguuuau

SEQ ID NO: 1452805 - RNA, 17 nt, Human
cuguuuuucggacaguu

SEQ ID NO: 1452806 - RNA, 15 nt, Human
cuguuuuucggacag

SEQ ID NO: 1452807 - RNA, 23 nt, Human
cuguuuuguuucgcucuuugaga

SEQ ID NO: 1452808 - RNA, 16 nt, Human
cuguuuuguuucgcuc

SEQ ID NO: 1452809 - RNA, 22 nt, Human
cuguuuuguugacauucugaau

SEQ ID NO: 1452810 - RNA, 21 nt, Human
cuguuuuguugacauucugaa

SEQ ID NO: 1452811 - RNA, 20 nt, Human
cuguuuuguugacauucuga

SEQ ID NO: 1452812 - RNA, 19 nt, Human
cuguuuuguugacauucug

SEQ ID NO: 1452813 - RNA, 17 nt, Human
cuguuuuguugacauuc

SEQ ID NO: 1452814 - RNA, 16 nt, Human
cuguuuuguugacauu

SEQ ID NO: 1452815 - RNA, 14 nt, Human
cuguuuuguugaca

SEQ ID NO: 1452816 - RNA, 13 nt, Human
cuguuuuguugac

SEQ ID NO: 1452817 - RNA, 19 nt, Human
cuguuuuguuauauaauuu

SEQ ID NO: 1452818 - RNA, 20 nt, Human
cuguuuuguuauauaauuua

SEQ ID NO: 1452819 - RNA, 18 nt, Human
cuguuuuguuauauaauu

SEQ ID NO: 1452820 - RNA, 17 nt, Human
cuguuuuguuauauaau

SEQ ID NO: 1452821 - RNA, 13 nt, Human
cuguuuuguuaua

SEQ ID NO: 1452822 - RNA, 17 nt, Human
cuguuuugaaggcaaaa

SEQ ID NO: 1452823 - RNA, 18 nt, Human
cuguuuucuucuauucca

SEQ ID NO: 1452824 - RNA, 12 nt, Human
cuguuuucuucu

SEQ ID NO: 1452825 - RNA, 19 nt, Human
cuguuuuauaauuuuguga

SEQ ID NO: 1452826 - RNA, 21 nt, Human
cuucccagaggggccugccac

SEQ ID NO: 1452827 - RNA, 16 nt, Human
cuucccagcuaggaag

SEQ ID NO: 1452828 - RNA, 22 nt, Human
cuucccagaggggccugccacc

SEQ ID NO: 1452829 - RNA, 19 nt, Human
cuucccagaggggccugcc

SEQ ID NO: 1452830 - RNA, 18 nt, Human
cuucccagaggggccugc

SEQ ID NO: 1452831 - RNA, 22 nt, Human
cuuccagucuuccugacacuuu

SEQ ID NO: 1452832 - RNA, 22 nt, Human
cuuccagguguuacuguaauuc

SEQ ID NO: 1452833 - RNA, 20 nt, Human
cuuccagguguuacuguaau

SEQ ID NO: 1452834 - RNA, 19 nt, Human
cuuccagguguuacuguaa

SEQ ID NO: 1452835 - RNA, 16 nt, Human
cuuccagguguuacug

SEQ ID NO: 1452836 - RNA, 14 nt, Human
cuuccagcuccugu

SEQ ID NO: 1452837 - RNA, 21 nt, Human
cuuccagucuuccugacacuu

SEQ ID NO: 1452838 - RNA, 20 nt, Human
cuuccagucuuccugacacu

SEQ ID NO: 1452839 - RNA, 13 nt, Human
cuuccaccacaga

SEQ ID NO: 1452840 - RNA, 23 nt, Human
cuuccaccaaguuggaacauccu

SEQ ID NO: 1452841 - RNA, 23 nt, Human
cuuccacagggucccacagccac

SEQ ID NO: 1452842 - RNA, 22 nt, Human
cuuccacagggucccacagcca

SEQ ID NO: 1452843 - RNA, 19 nt, Human
cuuccacagggucccacag

SEQ ID NO: 1452844 - RNA, 15 nt, Human
cuuccagcuccugua

SEQ ID NO: 1452845 - RNA, 13 nt, Human
cuuccagcuccug

SEQ ID NO: 1452846 - RNA, 12 nt, Human
cuuccagcuccu

SEQ ID NO: 1452847 - RNA, 22 nt, Human
cuuccagcuagugacccacaug

SEQ ID NO: 1452848 - RNA, 18 nt, Human
cuuccagcuagugaccca

SEQ ID NO: 1452849 - RNA, 16 nt, Human
cuuccagcuagugacc

SEQ ID NO: 1452850 - RNA, 14 nt, Human
cuucccucucugga

SEQ ID NO: 1452851 - RNA, 17 nt, Human
cuucccucaccuuggca

SEQ ID NO: 1452852 - RNA, 17 nt, Human
cuuccuaccaagucaaa

SEQ ID NO: 1452853 - RNA, 19 nt, Human
cuuccuaccaagucaaacu

SEQ ID NO: 1452854 - RNA, 17 nt, Human
cuuccggccccuccccu

SEQ ID NO: 1452855 - RNA, 13 nt, Human
cuuccggccccuc

SEQ ID NO: 1452856 - RNA, 23 nt, Human
cuuccgcuuggagcuauuuucca

SEQ ID NO: 1452857 - RNA, 22 nt, Human
cuuccgcuuggagcuauuuucc

SEQ ID NO: 1452858 - RNA, 17 nt, Human
cuuccgccacuggggcu

SEQ ID NO: 1452859 - RNA, 22 nt, Human
cuuccgccacuggggcucagag

SEQ ID NO: 1452860 - RNA, 16 nt, Human
cuuccgccacuggggc

SEQ ID NO: 1452861 - RNA, 15 nt, Human
cuuccgccacugggg

SEQ ID NO: 1452862 - RNA, 14 nt, Human
cuuccgccacuggg

SEQ ID NO: 1452863 - RNA, 16 nt, Human
cuucccuuuucuguuc

SEQ ID NO: 1452864 - RNA, 16 nt, Human
cuucccucucuggaga

SEQ ID NO: 1452865 - RNA, 14 nt, Human
cuucccuuuucugu

SEQ ID NO: 1452866 - RNA, 16 nt, Human
cuuccaaauccccuaa

SEQ ID NO: 1452867 - RNA, 18 nt, Human
cuucauuugggaugcuac

SEQ ID NO: 1452868 - RNA, 20 nt, Human
cuuccaaauccccuaagcag

SEQ ID NO: 1452869 - RNA, 19 nt, Human
cuuccaaauccccuaagca

SEQ ID NO: 1452870 - RNA, 16 nt, Human
cuuccaaugucuggag

SEQ ID NO: 1452871 - RNA, 18 nt, Human
cuuccacagggucccaca

SEQ ID NO: 1452872 - RNA, 15 nt, Human
cuuccacaggguccc

SEQ ID NO: 1452873 - RNA, 13 nt, Human
cuuccacaggguc

SEQ ID NO: 1452874 - RNA, 15 nt, Human
cuuccaaugucugga

SEQ ID NO: 1452875 - RNA, 14 nt, Human
cuucauuuccuccg

SEQ ID NO: 1452876 - RNA, 14 nt, Human
cuucagcucugaaa

SEQ ID NO: 1452877 - RNA, 13 nt, Human
cuucagcucugaa

SEQ ID NO: 1452878 - RNA, 22 nt, Human
cuucaggcccccgccuuggccu

SEQ ID NO: 1452879 - RNA, 17 nt, Human
cuuauuuuugacagugu

SEQ ID NO: 1452880 - RNA, 15 nt, Human
cuucagccaggagcu

SEQ ID NO: 1452881 - RNA, 17 nt, Human
cuucagccaggagcugg

SEQ ID NO: 1452882 - RNA, 18 nt, Human
cuucagcgguuuauauaa

SEQ ID NO: 1452883 - RNA, 18 nt, Human
cuucagccaggagcuggg

SEQ ID NO: 1452884 - RNA, 19 nt, Human
cuucagccaggagcugggc

SEQ ID NO: 1452885 - RNA, 15 nt, Human
cuucuggacugguuu

SEQ ID NO: 1452886 - RNA, 18 nt, Human
cuucugcucagcucuggg

SEQ ID NO: 1452887 - RNA, 16 nt, Human
cuucugcucagcucug

SEQ ID NO: 1452888 - RNA, 15 nt, Human
cuucugcucagcucu

SEQ ID NO: 1452889 - RNA, 14 nt, Human
cuucugcucagcuc

SEQ ID NO: 1452890 - RNA, 16 nt, Human
cuucugccuucucaug

SEQ ID NO: 1452891 - RNA, 14 nt, Human
cuucugccuucuca

SEQ ID NO: 1452892 - RNA, 21 nt, Human
cuucugccuuagucucaguuu

SEQ ID NO: 1452893 - RNA, 20 nt, Human
cuucugccuuagucucaguu

SEQ ID NO: 1452894 - RNA, 19 nt, Human
cuucugccuuagucucagu

SEQ ID NO: 1452895 - RNA, 21 nt, Human
cuucucguccucguuuguguu

SEQ ID NO: 1452896 - RNA, 19 nt, Human
cuucuccccagcucccagg

SEQ ID NO: 1452897 - RNA, 20 nt, Human
cuucuccccagcucccagga

SEQ ID NO: 1452898 - RNA, 18 nt, Human
cuucuccccagcucccag

SEQ ID NO: 1452899 - RNA, 17 nt, Human
cuucuccccagcuccca

SEQ ID NO: 1452900 - RNA, 17 nt, Human
cuucucccaggcaaggc

SEQ ID NO: 1452901 - RNA, 15 nt, Human
cuucucccaggcaag

SEQ ID NO: 1452902 - RNA, 14 nt, Human
cuucucccaggcaa

SEQ ID NO: 1452903 - RNA, 19 nt, Human
cuucucccacucuccuagg

SEQ ID NO: 1452904 - RNA, 20 nt, Human
cuucucccacucuccuaggc

SEQ ID NO: 1452905 - RNA, 17 nt, Human
cuucucccacucuccua

SEQ ID NO: 1452906 - RNA, 16 nt, Human
cuucucccacucuccu

SEQ ID NO: 1452907 - RNA, 15 nt, Human
cuucucccacucucc

SEQ ID NO: 1452908 - RNA, 13 nt, Human
cuucucccacucu

SEQ ID NO: 1452909 - RNA, 12 nt, Human
cuucucccacuc

SEQ ID NO: 1452910 - RNA, 20 nt, Human
cuucucccaggcaaggcugu

SEQ ID NO: 1452911 - RNA, 21 nt, Human
cuucucccaggcaaggcugug

SEQ ID NO: 1452912 - RNA, 19 nt, Human
cuucucccaggcaaggcug

SEQ ID NO: 1452913 - RNA, 18 nt, Human
cuucucccaggcaaggcu

SEQ ID NO: 1452914 - RNA, 20 nt, Human
cuucucauuuuuuaaaaaag

SEQ ID NO: 1452915 - RNA, 14 nt, Human
cuucuccauccaca

SEQ ID NO: 1452916 - RNA, 16 nt, Human
cuucuccauccacaug

SEQ ID NO: 1452917 - RNA, 17 nt, Human
cuucuccauggcccugc

SEQ ID NO: 1452918 - RNA, 15 nt, Human
cuucucccaauucau

SEQ ID NO: 1452919 - RNA, 19 nt, Human
cuucuccauggcccugcca

SEQ ID NO: 1452920 - RNA, 15 nt, Human
cuucgggcugugccc

SEQ ID NO: 1452921 - RNA, 14 nt, Human
cuucgggcugugcc

SEQ ID NO: 1452922 - RNA, 17 nt, Human
cuucgggcccuucccac

SEQ ID NO: 1452923 - RNA, 16 nt, Human
cuucgggcccuuccca

SEQ ID NO: 1452924 - RNA, 16 nt, Human
cuucgaguucccaggg

SEQ ID NO: 1452925 - RNA, 22 nt, Human
cuucuaaacuuccccaucuucu

SEQ ID NO: 1452926 - RNA, 19 nt, Human
cuucuaaacuuccccaucu

SEQ ID NO: 1452927 - RNA, 18 nt, Human
cuucuaaacuuccccauc

SEQ ID NO: 1452928 - RNA, 19 nt, Human
cuucuaaacccaauccaaa

SEQ ID NO: 1452929 - RNA, 18 nt, Human
cuucguuuauuuucaaga

SEQ ID NO: 1452930 - RNA, 16 nt, Human
cuucguuuauuuucaa

SEQ ID NO: 1452931 - RNA, 15 nt, Human
cuucguuuauuuuca

SEQ ID NO: 1452932 - RNA, 23 nt, Human
cuucucaggacacaggccugugu

SEQ ID NO: 1452933 - RNA, 22 nt, Human
cuucucaggacacaggccugug

SEQ ID NO: 1452934 - RNA, 21 nt, Human
cuucucaggacacaggccugu

SEQ ID NO: 1452935 - RNA, 20 nt, Human
cuucucaggacacaggccug

SEQ ID NO: 1452936 - RNA, 19 nt, Human
cuucucaggacacaggccu

SEQ ID NO: 1452937 - RNA, 18 nt, Human
cuucucaggacacaggcc

SEQ ID NO: 1452938 - RNA, 17 nt, Human
cuucucaggacacaggc

SEQ ID NO: 1452939 - RNA, 14 nt, Human
cuucucagauuucu

SEQ ID NO: 1452940 - RNA, 19 nt, Human
cuucucagauuucugagga

SEQ ID NO: 1452941 - RNA, 22 nt, Human
cuucucagauuucugaggaaau

SEQ ID NO: 1452942 - RNA, 17 nt, Human
cuucgacacuguucuua

SEQ ID NO: 1452943 - RNA, 16 nt, Human
cuucgacacuguucuu

SEQ ID NO: 1452944 - RNA, 15 nt, Human
cuuccuuuugaggga

SEQ ID NO: 1452945 - RNA, 17 nt, Human
cuuccuugcuuaaggua

SEQ ID NO: 1452946 - RNA, 22 nt, Human
cuuccuugaagaacugcaggcc

SEQ ID NO: 1452947 - RNA, 21 nt, Human
cuuccuugaagaacugcaggc

SEQ ID NO: 1452948 - RNA, 15 nt, Human
cuuccuaccuauccc

SEQ ID NO: 1452949 - RNA, 14 nt, Human
cuuccuuccucucc

SEQ ID NO: 1452950 - RNA, 16 nt, Human
cuuccuucccugcugu

SEQ ID NO: 1452951 - RNA, 22 nt, Human
gacuaaacuuuuuuucuguacc

SEQ ID NO: 1452952 - RNA, 20 nt, Human
gacuaaacuuuuuuucugua

SEQ ID NO: 1452953 - RNA, 19 nt, Human
gacuaaacuuuuuuucugu

SEQ ID NO: 1452954 - RNA, 18 nt, Human
gacuaaacuuuuuuucug

SEQ ID NO: 1452955 - RNA, 23 nt, Human
gacuaaccauguguuauguuuuc

SEQ ID NO: 1452956 - RNA, 22 nt, Human
gacuaacacucagaagccuggg

SEQ ID NO: 1452957 - RNA, 21 nt, Human
gacuaacacucagaagccugg

SEQ ID NO: 1452958 - RNA, 19 nt, Human
gacuaacacucagaagccu

SEQ ID NO: 1452959 - RNA, 16 nt, Human
gacuaacacucagaag

SEQ ID NO: 1452960 - RNA, 14 nt, Human
gacuaacacucaga

SEQ ID NO: 1452961 - RNA, 23 nt, Human
gacuaacuagacaccaaaguucu

SEQ ID NO: 1452962 - RNA, 21 nt, Human
gacuaacuagacaccaaaguu

SEQ ID NO: 1452963 - RNA, 23 nt, Human
gacuaacacucagaagccugggg

SEQ ID NO: 1452964 - RNA, 22 nt, Human
gacuaaucuuauucauuuucuc

SEQ ID NO: 1452965 - RNA, 15 nt, Human
gacuaaucuuauuca

SEQ ID NO: 1452966 - RNA, 22 nt, Human
gacuaauagaaaaguauguucu

SEQ ID NO: 1452967 - RNA, 12 nt, Human
gacuaagccagc

SEQ ID NO: 1452968 - RNA, 18 nt, Human
gacuaagccagcaccgga

SEQ ID NO: 1452969 - RNA, 23 nt, Human
gacuaagagaaguuguaaaguau

SEQ ID NO: 1452970 - RNA, 16 nt, Human
gacuaagagaaguugu

SEQ ID NO: 1452971 - RNA, 22 nt, Human
gacguuuuauaagcaucauuau

SEQ ID NO: 1452972 - RNA, 12 nt, Human
gacuaaaagaua

SEQ ID NO: 1452973 - RNA, 13 nt, Human
gacuaaaagauau

SEQ ID NO: 1452974 - RNA, 16 nt, Human
gacguuuuauaagcau

SEQ ID NO: 1452975 - RNA, 23 nt, Human
gacuaaaagauauaagugcugua

SEQ ID NO: 1452976 - RNA, 21 nt, Human
gacuaaaagauauaagugcug

SEQ ID NO: 1452977 - RNA, 22 nt, Human
gacuaaaagauauaagugcugu

SEQ ID NO: 1452978 - RNA, 17 nt, Human
gacuaaaagauauaagu

SEQ ID NO: 1452979 - RNA, 18 nt, Human
gacuaaaagauauaagug

SEQ ID NO: 1452980 - RNA, 19 nt, Human
gacuaaaagauauaagugc

SEQ ID NO: 1452981 - RNA, 20 nt, Human
gacuaaaagauauaagugcu

SEQ ID NO: 1452982 - RNA, 16 nt, Human
gacguggcucagccag

SEQ ID NO: 1452983 - RNA, 15 nt, Human
gacguggcucagcca

SEQ ID NO: 1452984 - RNA, 14 nt, Human
gacguggcucagcc

SEQ ID NO: 1452985 - RNA, 12 nt, Human
gacguggcucag

SEQ ID NO: 1452986 - RNA, 22 nt, Human
gacgugaccggacuuuucugca

SEQ ID NO: 1452987 - RNA, 17 nt, Human
gacgucuggguggcccu

SEQ ID NO: 1452988 - RNA, 18 nt, Human
gacggaaggguaaacaau

SEQ ID NO: 1452989 - RNA, 16 nt, Human
gaccuucgggcugugc

SEQ ID NO: 1452990 - RNA, 23 nt, Human
gaccuuccucauccaccccaucc

SEQ ID NO: 1452991 - RNA, 22 nt, Human
gaccuuccucauccaccccauc

SEQ ID NO: 1452992 - RNA, 14 nt, Human
gaccuuccucaucc

SEQ ID NO: 1452993 - RNA, 12 nt, Human
gaccuuccucau

SEQ ID NO: 1452994 - RNA, 19 nt, Human
gaccuucgggcugugcccg

SEQ ID NO: 1452995 - RNA, 18 nt, Human
gaccuucgggcugugccc

SEQ ID NO: 1452996 - RNA, 14 nt, Human
gaccuuaaaugcaa

SEQ ID NO: 1452997 - RNA, 19 nt, Human
gaccuguuagcagacaggc

SEQ ID NO: 1452998 - RNA, 18 nt, Human
gaccuguuagcagacagg

SEQ ID NO: 1452999 - RNA, 17 nt, Human
gaccuguuagcagacag

SEQ ID NO: 1453000 - RNA, 23 nt, Human
gaccugugagcccagcuggguca

SEQ ID NO: 1453001 - RNA, 14 nt, Human
gaccugugcacacc

SEQ ID NO: 1453002 - RNA, 19 nt, Human
gaccugugagcccagcugg

SEQ ID NO: 1453003 - RNA, 16 nt, Human
gaccugugagcccagc

SEQ ID NO: 1453004 - RNA, 15 nt, Human
gaccugugagcccag

SEQ ID NO: 1453005 - RNA, 12 nt, Human
gaccuguaauca

SEQ ID NO: 1453006 - RNA, 22 nt, Human
gaccuggugcugccucuaccug

SEQ ID NO: 1453007 - RNA, 17 nt, Human
gaccuggugcugccucu

SEQ ID NO: 1453008 - RNA, 23 nt, Human
gaccugguacccuccuggcucuu

SEQ ID NO: 1453009 - RNA, 21 nt, Human
gaccugguacccuccuggcuc

SEQ ID NO: 1453010 - RNA, 19 nt, Human
gaccugguacccuccuggc

SEQ ID NO: 1453011 - RNA, 17 nt, Human
gaccugguacccuccug

SEQ ID NO: 1453012 - RNA, 16 nt, Human
gaccuggcagcucugg

SEQ ID NO: 1453013 - RNA, 15 nt, Human
gaccuggcagcucug

SEQ ID NO: 1453014 - RNA, 10 nt, Human
gaccuggcag

SEQ ID NO: 1453015 - RNA, 21 nt, Human
gacccuugacaccugcugaga

SEQ ID NO: 1453016 - RNA, 21 nt, Human
gacccugccucucccaggcag

SEQ ID NO: 1453017 - RNA, 23 nt, Human
gacccugccucucccaggcaggg

SEQ ID NO: 1453018 - RNA, 16 nt, Human
gacccugccucuccca

SEQ ID NO: 1453019 - RNA, 13 nt, Human
gacccugccucuc

SEQ ID NO: 1453020 - RNA, 12 nt, Human
gacccugccucu

SEQ ID NO: 1453021 - RNA, 23 nt, Human
gacccugcccuuguuuggggcag

SEQ ID NO: 1453022 - RNA, 15 nt, Human
gacccugcccuuguu

SEQ ID NO: 1453023 - RNA, 13 nt, Human
gacccugcccuug

SEQ ID NO: 1453024 - RNA, 17 nt, Human
gacugagugggaagccc

SEQ ID NO: 1453025 - RNA, 16 nt, Human
gacugagugggaagcc

SEQ ID NO: 1453026 - RNA, 18 nt, Human
gacugaguacguugugca

SEQ ID NO: 1453027 - RNA, 14 nt, Human
gacugaccagcagc

SEQ ID NO: 1453028 - RNA, 13 nt, Human
gacugagaaauuu

SEQ ID NO: 1453029 - RNA, 20 nt, Human
gacugccaagacugcugugg

SEQ ID NO: 1453030 - RNA, 19 nt, Human
gacugccaagacugcugug

SEQ ID NO: 1453031 - RNA, 16 nt, Human
gacugaugucuccuaa

SEQ ID NO: 1453032 - RNA, 15 nt, Human
gacugaugucuccua

SEQ ID NO: 1453033 - RNA, 14 nt, Human
gacugaugucuccu

SEQ ID NO: 1453034 - RNA, 22 nt, Human
gacugagugggaagcccauccu

SEQ ID NO: 1453035 - RNA, 22 nt, Human
gacugaugucuccuaagcaccu

SEQ ID NO: 1453036 - RNA, 16 nt, Human
gacugauuucagagug

SEQ ID NO: 1453037 - RNA, 14 nt, Human
gacugauuucagag

SEQ ID NO: 1453038 - RNA, 18 nt, Human
gacugaugucuccuaagc

SEQ ID NO: 1453039 - RNA, 17 nt, Human
gacugaugucuccuaag

SEQ ID NO: 1453040 - RNA, 14 nt, Human
gacuacaggcguga

SEQ ID NO: 1453041 - RNA, 16 nt, Human
gacuaauggcaugaga

SEQ ID NO: 1453042 - RNA, 14 nt, Human
gacuaauggcauga

SEQ ID NO: 1453043 - RNA, 20 nt, Human
gacuaauggcaugagaaaua

SEQ ID NO: 1453044 - RNA, 16 nt, Human
gacucuaagaaagaac

SEQ ID NO: 1453045 - RNA, 15 nt, Human
gacucuaagaaagaa

SEQ ID NO: 1453046 - RNA, 14 nt, Human
gacucuaagaaaga

SEQ ID NO: 1453047 - RNA, 15 nt, Human
gacucuaaagucugu

SEQ ID NO: 1453048 - RNA, 15 nt, Human
gacugaccagcagcu

SEQ ID NO: 1453049 - RNA, 13 nt, Human
gacugaccagcag

SEQ ID NO: 1453050 - RNA, 21 nt, Human
gacugacaguuuacagacgcu

SEQ ID NO: 1453051 - RNA, 11 nt, Human
gacugagaaau

SEQ ID NO: 1453052 - RNA, 21 nt, Human
gacuuagaaaaccagcucagc

SEQ ID NO: 1453053 - RNA, 23 nt, Human
gacuuagaaaaccagcucagcac

SEQ ID NO: 1453054 - RNA, 15 nt, Human
gacuuacucuaagau

SEQ ID NO: 1453055 - RNA, 14 nt, Human
gacuuacucuaaga

SEQ ID NO: 1453056 - RNA, 12 nt, Human
gacuuacucuaa

SEQ ID NO: 1453057 - RNA, 19 nt, Human
gacuuacaugauucauuuu

SEQ ID NO: 1453058 - RNA, 18 nt, Human
gacuuacuguacaugaaa

SEQ ID NO: 1453059 - RNA, 23 nt, Human
gacuuacuguacaugaaaacaca

SEQ ID NO: 1453060 - RNA, 18 nt, Human
gacuuacaugauucauuu

SEQ ID NO: 1453061 - RNA, 16 nt, Human
gacuuacaugauucau

SEQ ID NO: 1453062 - RNA, 15 nt, Human
gacuuacaugauuca

SEQ ID NO: 1453063 - RNA, 14 nt, Human
gacuuacaugauuc

SEQ ID NO: 1453064 - RNA, 12 nt, Human
gacuuacuguac

SEQ ID NO: 1453065 - RNA, 15 nt, Human
gacuuacuguacaug

SEQ ID NO: 1453066 - RNA, 16 nt, Human
gacuuacuguacauga

SEQ ID NO: 1453067 - RNA, 21 nt, Human
gacuucaagcauggcuauuuu

SEQ ID NO: 1453068 - RNA, 17 nt, Human
gacuuagggcaccaggg

SEQ ID NO: 1453069 - RNA, 16 nt, Human
gacuuagggcaccagg

SEQ ID NO: 1453070 - RNA, 16 nt, Human
gacuuauaguacauga

SEQ ID NO: 1453071 - RNA, 17 nt, Human
gacuuauaguacaugau

SEQ ID NO: 1453072 - RNA, 18 nt, Human
gacuuauaguacaugaua

SEQ ID NO: 1453073 - RNA, 23 nt, Human
gacuggcuuuuauuaaugcacuu

SEQ ID NO: 1453074 - RNA, 22 nt, Human
gacuggcuuuuauuaaugcacu

SEQ ID NO: 1453075 - RNA, 21 nt, Human
gacuggcuuuuauuaaugcac

SEQ ID NO: 1453076 - RNA, 20 nt, Human
gacuggcuuuuauuaaugca

SEQ ID NO: 1453077 - RNA, 10 nt, Human
gacuggcuuu

SEQ ID NO: 1453078 - RNA, 20 nt, Human
gacugggaccaggcaccagg

SEQ ID NO: 1453079 - RNA, 18 nt, Human
gacugggaccaggcacca

SEQ ID NO: 1453080 - RNA, 16 nt, Human
gacugggaccaggcac

SEQ ID NO: 1453081 - RNA, 20 nt, Human
gacugggagcccccagccug

SEQ ID NO: 1453082 - RNA, 19 nt, Human
gacugggagcccccagccu

SEQ ID NO: 1453083 - RNA, 18 nt, Human
gacugggagcccccagcc

SEQ ID NO: 1453084 - RNA, 17 nt, Human
gacugggagcccccagc

SEQ ID NO: 1453085 - RNA, 21 nt, Human
gacugggagcccccagccugu

SEQ ID NO: 1453086 - RNA, 18 nt, Human
gacuggcggggggcccau

SEQ ID NO: 1453087 - RNA, 12 nt, Human
gacuggccaggg

SEQ ID NO: 1453088 - RNA, 15 nt, Human
gacuggccagggcca

SEQ ID NO: 1453089 - RNA, 24 nt, Human
gacuggcauacuauguggauguga

SEQ ID NO: 1453090 - RNA, 23 nt, Human
gacuggcauacuauguggaugug

SEQ ID NO: 1453091 - RNA, 22 nt, Human
gacuggcauacuauguggaugu

SEQ ID NO: 1453092 - RNA, 17 nt, Human
gacuggauguaccacca

SEQ ID NO: 1453093 - RNA, 22 nt, Human
gacuggauaguccgucucugcu

SEQ ID NO: 1453094 - RNA, 18 nt, Human
gacugcuaaauaaaauuu

SEQ ID NO: 1453095 - RNA, 17 nt, Human
gacugcuaaauaaaauu

SEQ ID NO: 1453096 - RNA, 14 nt, Human
gacugcuaaauaaa

SEQ ID NO: 1453097 - RNA, 17 nt, Human
gacugccauauuaaauu

SEQ ID NO: 1453098 - RNA, 15 nt, Human
gacugcggaggaagg

SEQ ID NO: 1453099 - RNA, 12 nt, Human
gacugcuaaaua

SEQ ID NO: 1453100 - RNA, 23 nt, Human
gacugcggaggaaggaggaccca

SEQ ID NO: 1453101 - RNA, 17 nt, Human
gacuggauaguccgucu

SEQ ID NO: 1453102 - RNA, 18 nt, Human
gacaggauguuugcucag

SEQ ID NO: 1453103 - RNA, 20 nt, Human
gacaggauguguuugcuuuc

SEQ ID NO: 1453104 - RNA, 19 nt, Human
gacaggauguguuugcuuu

SEQ ID NO: 1453105 - RNA, 19 nt, Human
gacagcagcaucucuaccu

SEQ ID NO: 1453106 - RNA, 16 nt, Human
gacagcagcaucucua

SEQ ID NO: 1453107 - RNA, 14 nt, Human
gacagcagcaucuc

SEQ ID NO: 1453108 - RNA, 18 nt, Human
gacagcaaccuguagagu

SEQ ID NO: 1453109 - RNA, 19 nt, Human
gacagaugccuccuuccuc

SEQ ID NO: 1453110 - RNA, 23 nt, Human
gacaggaugguucccuugaugaa

SEQ ID NO: 1453111 - RNA, 18 nt, Human
gacaggauguguuugcuu

SEQ ID NO: 1453112 - RNA, 14 nt, Human
gacaggauguguuu

SEQ ID NO: 1453113 - RNA, 20 nt, Human
gacauaaaguugauaaagau

SEQ ID NO: 1453114 - RNA, 19 nt, Human
gacauaaaguugauaaaga

SEQ ID NO: 1453115 - RNA, 17 nt, Human
gacauaaaguugauaaa

SEQ ID NO: 1453116 - RNA, 21 nt, Human
gacauaaaggaaaagacacau

SEQ ID NO: 1453117 - RNA, 17 nt, Human
gacauaaaggaaaagac

SEQ ID NO: 1453118 - RNA, 15 nt, Human
gacauaaaggaaaag

SEQ ID NO: 1453119 - RNA, 14 nt, Human
gacauaaaggaaaa

SEQ ID NO: 1453120 - RNA, 21 nt, Human
gacaguuuaccaguugccuuu

SEQ ID NO: 1453121 - RNA, 16 nt, Human
gacaguuuauuuguug

SEQ ID NO: 1453122 - RNA, 19 nt, Human
gacaguuuaccaguugccu

SEQ ID NO: 1453123 - RNA, 23 nt, Human
gacaguuuaccaguugccuuuua

SEQ ID NO: 1453124 - RNA, 15 nt, Human
gacaucacuuguaca

SEQ ID NO: 1453125 - RNA, 17 nt, Human
gacauaaccacugcuuc

SEQ ID NO: 1453126 - RNA, 22 nt, Human
gacauaaaguugauaaagauuu

SEQ ID NO: 1453127 - RNA, 21 nt, Human
gacaguuccagaagugugacu

SEQ ID NO: 1453128 - RNA, 17 nt, Human
gacaguucauauguacc

SEQ ID NO: 1453129 - RNA, 15 nt, Human
gacaguucauaugua

SEQ ID NO: 1453130 - RNA, 14 nt, Human
gacaguucaagaaa

SEQ ID NO: 1453131 - RNA, 17 nt, Human
gacagggcggggguggc

SEQ ID NO: 1453132 - RNA, 16 nt, Human
gacagggcgggggugg

SEQ ID NO: 1453133 - RNA, 18 nt, Human
gacagggcggggguggcg

SEQ ID NO: 1453134 - RNA, 16 nt, Human
gacaggcaaauaaaag

SEQ ID NO: 1453135 - RNA, 14 nt, Human
gacagaugccuccu

SEQ ID NO: 1453136 - RNA, 13 nt, Human
gacagaggcccuc

SEQ ID NO: 1453137 - RNA, 19 nt, Human
gacagaggccccagccucc

SEQ ID NO: 1453138 - RNA, 18 nt, Human
gacagaggccccagccuc

SEQ ID NO: 1453139 - RNA, 13 nt, Human
gacagaggcccca

SEQ ID NO: 1453140 - RNA, 21 nt, Human
gacagacaggcucuuagcagc

SEQ ID NO: 1453141 - RNA, 15 nt, Human
gacagacaggcucuu

SEQ ID NO: 1453142 - RNA, 14 nt, Human
gacagacaggcucu

SEQ ID NO: 1453143 - RNA, 18 nt, Human
gacacuagcccaaugaaa

SEQ ID NO: 1453144 - RNA, 17 nt, Human
gacagagcccugugagg

SEQ ID NO: 1453145 - RNA, 16 nt, Human
gacagagcccugugag

SEQ ID NO: 1453146 - RNA, 21 nt, Human
gacagagccccacccucagau

SEQ ID NO: 1453147 - RNA, 23 nt, Human
gacagagcgugagcugagcaggc

SEQ ID NO: 1453148 - RNA, 17 nt, Human
gaauuucccacauaccc

SEQ ID NO: 1453149 - RNA, 21 nt, Human
gaauuucaccuguaaaccuga

SEQ ID NO: 1453150 - RNA, 17 nt, Human
gaauuucaccuguaaac

SEQ ID NO: 1453151 - RNA, 12 nt, Human
gaauuucaccug

SEQ ID NO: 1453152 - RNA, 17 nt, Human
gaauuucccaggacccu

SEQ ID NO: 1453153 - RNA, 16 nt, Human
gaauuucccaggaccc

SEQ ID NO: 1453154 - RNA, 15 nt, Human
gaauuucccaggacc

SEQ ID NO: 1453155 - RNA, 14 nt, Human
gaauuucccaggac

SEQ ID NO: 1453156 - RNA, 22 nt, Human
gaauuucccaggacccugaagg

SEQ ID NO: 1453157 - RNA, 16 nt, Human
gaauuucacugucuuu

SEQ ID NO: 1453158 - RNA, 14 nt, Human
gacacgcacggcag

SEQ ID NO: 1453159 - RNA, 19 nt, Human
gacacgcacggcagccaca

SEQ ID NO: 1453160 - RNA, 20 nt, Human
gacacgcacggcagccacag

SEQ ID NO: 1453161 - RNA, 21 nt, Human
gacacgcacggcagccacagc

SEQ ID NO: 1453162 - RNA, 22 nt, Human
gacacgcacggcagccacagcu

SEQ ID NO: 1453163 - RNA, 22 nt, Human
gacacgggccuguccacaggcu

SEQ ID NO: 1453164 - RNA, 21 nt, Human
gacacgggccuguccacaggc

SEQ ID NO: 1453165 - RNA, 20 nt, Human
gacacgggccuguccacagg

SEQ ID NO: 1453166 - RNA, 19 nt, Human
gacacgggccuguccacag

SEQ ID NO: 1453167 - RNA, 18 nt, Human
gacacgggccuguccaca

SEQ ID NO: 1453168 - RNA, 15 nt, Human
gacacgggccugucc

SEQ ID NO: 1453169 - RNA, 14 nt, Human
gacacuacacccag

SEQ ID NO: 1453170 - RNA, 15 nt, Human
gacacuacacccagc

SEQ ID NO: 1453171 - RNA, 16 nt, Human
gacacuacacccagca

SEQ ID NO: 1453172 - RNA, 17 nt, Human
gacacuacacccagcaa

SEQ ID NO: 1453173 - RNA, 18 nt, Human
gacacuacacccagcaau

SEQ ID NO: 1453174 - RNA, 19 nt, Human
gacacuacacccagcaaua

SEQ ID NO: 1453175 - RNA, 20 nt, Human
gacacuacacccagcaauag

SEQ ID NO: 1453176 - RNA, 22 nt, Human
gaccagcagacagagccaggag

SEQ ID NO: 1453177 - RNA, 23 nt, Human
gaccagcagacagagccaggaga

SEQ ID NO: 1453178 - RNA, 20 nt, Human
gaccagcagacagagccagg

SEQ ID NO: 1453179 - RNA, 19 nt, Human
gaccagcagacagagccag

SEQ ID NO: 1453180 - RNA, 18 nt, Human
gaccagcagacagagcca

SEQ ID NO: 1453181 - RNA, 15 nt, Human
gaccagcagacagag

SEQ ID NO: 1453182 - RNA, 21 nt, Human
gaccacucagagacaugcaga

SEQ ID NO: 1453183 - RNA, 19 nt, Human
gaccacucagagacaugca

SEQ ID NO: 1453184 - RNA, 14 nt, Human
gaccacucagagac

SEQ ID NO: 1453185 - RNA, 13 nt, Human
gaccacucagaga

SEQ ID NO: 1453186 - RNA, 23 nt, Human
gaccaccagggcaucucugggcu

SEQ ID NO: 1453187 - RNA, 22 nt, Human
gaccaccagggcaucucugggc

SEQ ID NO: 1453188 - RNA, 21 nt, Human
gaccaccagggcaucucuggg

SEQ ID NO: 1453189 - RNA, 20 nt, Human
gaccaccagggcaucucugg

SEQ ID NO: 1453190 - RNA, 19 nt, Human
gaccaccagggcaucucug

SEQ ID NO: 1453191 - RNA, 13 nt, Human
gaccaccagggca

SEQ ID NO: 1453192 - RNA, 13 nt, Human
gaccacaugcccc

SEQ ID NO: 1453193 - RNA, 16 nt, Human
gaccacaggcucaggc

SEQ ID NO: 1453194 - RNA, 18 nt, Human
gaccacaggcucaggcag

SEQ ID NO: 1453195 - RNA, 13 nt, Human
gaccacaggcuca

SEQ ID NO: 1453196 - RNA, 16 nt, Human
gaccacagcacagcca

SEQ ID NO: 1453197 - RNA, 15 nt, Human
gaccacagcacagcc

SEQ ID NO: 1453198 - RNA, 14 nt, Human
gaccacagcacagc

SEQ ID NO: 1453199 - RNA, 12 nt, Human
gaccacagcaca

SEQ ID NO: 1453200 - RNA, 16 nt, Human
gaccacacccuguacu

SEQ ID NO: 1453201 - RNA, 14 nt, Human
gaccacaacaugag

SEQ ID NO: 1453202 - RNA, 12 nt, Human
gaccaauaaaga

SEQ ID NO: 1453203 - RNA, 15 nt, Human
gaccaagcaucuugg

SEQ ID NO: 1453204 - RNA, 20 nt, Human
gaccaagcaucuuggggggg

SEQ ID NO: 1453205 - RNA, 23 nt, Human
gacauccauguuccgagaagaac

SEQ ID NO: 1453206 - RNA, 22 nt, Human
gacaucacuuguacaaaauaaa

SEQ ID NO: 1453207 - RNA, 16 nt, Human
gacaucacuuguacaa

SEQ ID NO: 1453208 - RNA, 16 nt, Human
gacaucagguuuuucc

SEQ ID NO: 1453209 - RNA, 14 nt, Human
gacaucagcaaaca

SEQ ID NO: 1453210 - RNA, 13 nt, Human
gacauccagcaga

SEQ ID NO: 1453211 - RNA, 13 nt, Human
gacauccaggagg

SEQ ID NO: 1453212 - RNA, 22 nt, Human
gacauccagcagauuuccagcc

SEQ ID NO: 1453213 - RNA, 15 nt, Human
gacccagccaggccc

SEQ ID NO: 1453214 - RNA, 14 nt, Human
gacccagccaggcc

SEQ ID NO: 1453215 - RNA, 22 nt, Human
gaccagccgugagcauguuugg

SEQ ID NO: 1453216 - RNA, 18 nt, Human
gaccagccgugagcaugu

SEQ ID NO: 1453217 - RNA, 12 nt, Human
gaccagcagccc

SEQ ID NO: 1453218 - RNA, 16 nt, Human
gaccagcagccccaca

SEQ ID NO: 1453219 - RNA, 20 nt, Human
gacccagugcccccacugac

SEQ ID NO: 1453220 - RNA, 17 nt, Human
gacccagugcccccacu

SEQ ID NO: 1453221 - RNA, 16 nt, Human
gacccagugcccccac

SEQ ID NO: 1453222 - RNA, 15 nt, Human
gacccagugccccca

SEQ ID NO: 1453223 - RNA, 17 nt, Human
gacccagcccucauccc

SEQ ID NO: 1453224 - RNA, 16 nt, Human
gacccagcccucaucc

SEQ ID NO: 1453225 - RNA, 22 nt, Human
gacccagccaggcccagccgac

SEQ ID NO: 1453226 - RNA, 19 nt, Human
gacccagccaggcccagcc

SEQ ID NO: 1453227 - RNA, 17 nt, Human
gacccagccaggcccag

SEQ ID NO: 1453228 - RNA, 23 nt, Human
gacccaugaguuggggucuggca

SEQ ID NO: 1453229 - RNA, 17 nt, Human
gacccccucucccugca

SEQ ID NO: 1453230 - RNA, 20 nt, Human
gaccccccuuucacaggcag

SEQ ID NO: 1453231 - RNA, 23 nt, Human
gaccccaaacaccuuccagcucc

SEQ ID NO: 1453232 - RNA, 15 nt, Human
gaccccaccagccuc

SEQ ID NO: 1453233 - RNA, 15 nt, Human
gacccauuccuuccc

SEQ ID NO: 1453234 - RNA, 16 nt, Human
gacccauuccuuccca

SEQ ID NO: 1453235 - RNA, 14 nt, Human
gacccauuccuucc

SEQ ID NO: 1453236 - RNA, 22 nt, Human
gaccccccuuucacaggcagcc

SEQ ID NO: 1453237 - RNA, 19 nt, Human
gaccccccuuucacaggca

SEQ ID NO: 1453238 - RNA, 15 nt, Human
gaccccccuuucaca

SEQ ID NO: 1453239 - RNA, 23 nt, Human
gacccccagcuccggccuguccu

SEQ ID NO: 1453240 - RNA, 17 nt, Human
gacccccagcuccggcc

SEQ ID NO: 1453241 - RNA, 13 nt, Human
gacccccagcucc

SEQ ID NO: 1453242 - RNA, 12 nt, Human
gaccccagagga

SEQ ID NO: 1453243 - RNA, 15 nt, Human
gaccccagccaucca

SEQ ID NO: 1453244 - RNA, 17 nt, Human
gaauucggugugcacca

SEQ ID NO: 1453245 - RNA, 20 nt, Human
gaauucccucacucgucucc

SEQ ID NO: 1453246 - RNA, 21 nt, Human
gaauucccucacucgucuccc

SEQ ID NO: 1453247 - RNA, 14 nt, Human
gaauucccucacuc

SEQ ID NO: 1453248 - RNA, 13 nt, Human
gaauucccucacu

SEQ ID NO: 1453249 - RNA, 12 nt, Human
gaauucccucac

SEQ ID NO: 1453250 - RNA, 17 nt, Human
gaauucucuaguuugau

SEQ ID NO: 1453251 - RNA, 13 nt, Human
gaauucagacauc

SEQ ID NO: 1453252 - RNA, 19 nt, Human
gaauugaguguuuaaaguu

SEQ ID NO: 1453253 - RNA, 16 nt, Human
gaauugaguaauggug

SEQ ID NO: 1453254 - RNA, 14 nt, Human
gaauugaguaaugg

SEQ ID NO: 1453255 - RNA, 19 nt, Human
gaauucuugguugaggaaa

SEQ ID NO: 1453256 - RNA, 20 nt, Human
gaauucuugguugaggaaac

SEQ ID NO: 1453257 - RNA, 19 nt, Human
gaauucuuuaaaauuacaa

SEQ ID NO: 1453258 - RNA, 19 nt, Human
gaauucucuaguuugauua

SEQ ID NO: 1453259 - RNA, 16 nt, Human
gaauuuaauaaucugu

SEQ ID NO: 1453260 - RNA, 17 nt, Human
gaauugauuugcauuga

SEQ ID NO: 1453261 - RNA, 15 nt, Human
gaauugauuugcauu

SEQ ID NO: 1453262 - RNA, 14 nt, Human
gaauugauuugcau

SEQ ID NO: 1453263 - RNA, 13 nt, Human
gaauugauuugca

SEQ ID NO: 1453264 - RNA, 12 nt, Human
gaauugauuugc

SEQ ID NO: 1453265 - RNA, 15 nt, Human
gaauugaguguuuaa

SEQ ID NO: 1453266 - RNA, 18 nt, Human
gaauugauuugcauugaa

SEQ ID NO: 1453267 - RNA, 22 nt, Human
gaauuguugagauacuuuacua

SEQ ID NO: 1453268 - RNA, 16 nt, Human
gaauugugguuuauau

SEQ ID NO: 1453269 - RNA, 22 nt, Human
gaauugugguuuauauauuuaa

SEQ ID NO: 1453270 - RNA, 22 nt, Human
gaauuuaaauagcuuuuuucuc

SEQ ID NO: 1453271 - RNA, 15 nt, Human
gaauuguguuuauaa

SEQ ID NO: 1453272 - RNA, 23 nt, Human
gaauuguguuuauaauuuuaaau

SEQ ID NO: 1453273 - RNA, 14 nt, Human
gaauguaaauuugu

SEQ ID NO: 1453274 - RNA, 17 nt, Human
gaauguaaauuuguacu

SEQ ID NO: 1453275 - RNA, 15 nt, Human
gaauguaaagcuugu

SEQ ID NO: 1453276 - RNA, 20 nt, Human
gaauguaaagcuugucugau

SEQ ID NO: 1453277 - RNA, 21 nt, Human
gaauggauuuuucuuuaacug

SEQ ID NO: 1453278 - RNA, 17 nt, Human
gaauggaucacaagaug

SEQ ID NO: 1453279 - RNA, 19 nt, Human
gaauggaucacaagaugga

SEQ ID NO: 1453280 - RNA, 14 nt, Human
gaauggaucacaag

SEQ ID NO: 1453281 - RNA, 15 nt, Human
gaauggaaagcuuca

SEQ ID NO: 1453282 - RNA, 15 nt, Human
gaauggaggggcaga

SEQ ID NO: 1453283 - RNA, 16 nt, Human
gaauggaggggcagag

SEQ ID NO: 1453284 - RNA, 20 nt, Human
gaauggaggggcagagccag

SEQ ID NO: 1453285 - RNA, 21 nt, Human
gaauggaggggcagagccagg

SEQ ID NO: 1453286 - RNA, 22 nt, Human
gaauggaggggcagagccagga

SEQ ID NO: 1453287 - RNA, 16 nt, Human
gaaugggugcccacag

SEQ ID NO: 1453288 - RNA, 21 nt, Human
gaauggugugggagagggaug

SEQ ID NO: 1453289 - RNA, 23 nt, Human
gaaucuuuagagaaguauacaua

SEQ ID NO: 1453290 - RNA, 22 nt, Human
gaaucuuuagagaaguauacau

SEQ ID NO: 1453291 - RNA, 19 nt, Human
gaaucaagggucaggccuu

SEQ ID NO: 1453292 - RNA, 19 nt, Human
gaaucuuuaaaagaugcuu

SEQ ID NO: 1453293 - RNA, 11 nt, Human
gaaucaauaau

SEQ ID NO: 1453294 - RNA, 17 nt, Human
gaaucaagggucaggcc

SEQ ID NO: 1453295 - RNA, 16 nt, Human
gaaucaagggucaggc

SEQ ID NO: 1453296 - RNA, 21 nt, Human
gaaugccacugccuucgcuuc

SEQ ID NO: 1453297 - RNA, 14 nt, Human
gaaugccguggauu

SEQ ID NO: 1453298 - RNA, 22 nt, Human
gaaugccacugccuucgcuucu

SEQ ID NO: 1453299 - RNA, 14 nt, Human
gaaugcauuuuguu

SEQ ID NO: 1453300 - RNA, 19 nt, Human
gaaugaagauacugaaaua

SEQ ID NO: 1453301 - RNA, 21 nt, Human
gaaugaagauacugaaauaaa

SEQ ID NO: 1453302 - RNA, 18 nt, Human
gaaugaagauacugaaau

SEQ ID NO: 1453303 - RNA, 17 nt, Human
gaaugaagauacugaaa

SEQ ID NO: 1453304 - RNA, 13 nt, Human
gaaguuuuacauu

SEQ ID NO: 1453305 - RNA, 19 nt, Human
gaaguuugaauguuaaaua

SEQ ID NO: 1453306 - RNA, 20 nt, Human
gaaguuugaauguuaaauaa

SEQ ID NO: 1453307 - RNA, 13 nt, Human
gaaguuugaaugu

SEQ ID NO: 1453308 - RNA, 14 nt, Human
gaaguuugaauguu

SEQ ID NO: 1453309 - RNA, 16 nt, Human
gaaguuugaauguuaa

SEQ ID NO: 1453310 - RNA, 17 nt, Human
gaaguuugaauguuaaa

SEQ ID NO: 1453311 - RNA, 21 nt, Human
gaauaaucacgcuuuccugaa

SEQ ID NO: 1453312 - RNA, 20 nt, Human
gaauaaucacgcuuuccuga

SEQ ID NO: 1453313 - RNA, 19 nt, Human
gaauaaucacgcuuuccug

SEQ ID NO: 1453314 - RNA, 18 nt, Human
gaauaaucacgcuuuccu

SEQ ID NO: 1453315 - RNA, 20 nt, Human
gaauaauccuaaacauauga

SEQ ID NO: 1453316 - RNA, 17 nt, Human
gaaucaacauuucucaa

SEQ ID NO: 1453317 - RNA, 14 nt, Human
gaaucaaacauuuu

SEQ ID NO: 1453318 - RNA, 23 nt, Human
gaauauuuuguuuugugcagaga

SEQ ID NO: 1453319 - RNA, 22 nt, Human
gaauauuuguuauguagauaac

SEQ ID NO: 1453320 - RNA, 18 nt, Human
gaauauuugaaucuuguc

SEQ ID NO: 1453321 - RNA, 22 nt, Human
gaauauuugaaucuugucucaa

SEQ ID NO: 1453322 - RNA, 22 nt, Human
gaauaggcgaucacaacgugca

SEQ ID NO: 1453323 - RNA, 23 nt, Human
gaauaggcgaucacaacgugcau

SEQ ID NO: 1453324 - RNA, 14 nt, Human
gaauauuugaaucu

SEQ ID NO: 1453325 - RNA, 16 nt, Human
gaauauuugaaucuug

SEQ ID NO: 1453326 - RNA, 23 nt, Human
gaauaccacucuguaauugcaaa

SEQ ID NO: 1453327 - RNA, 16 nt, Human
gaauaccacucuguaa

SEQ ID NO: 1453328 - RNA, 15 nt, Human
gaauaccacucugua

SEQ ID NO: 1453329 - RNA, 12 nt, Human
gaauacccuuuu

SEQ ID NO: 1453330 - RNA, 21 nt, Human
gaauaccacucuguaauugca

SEQ ID NO: 1453331 - RNA, 19 nt, Human
gaauaccacucuguaauug

SEQ ID NO: 1453332 - RNA, 17 nt, Human
gaauaccacucuguaau

SEQ ID NO: 1453333 - RNA, 13 nt, Human
gaauaccugcuca

SEQ ID NO: 1453334 - RNA, 22 nt, Human
gaauagcuuuaaugauaugcuu

SEQ ID NO: 1453335 - RNA, 16 nt, Human
gaauaggcgaucacaa

SEQ ID NO: 1453336 - RNA, 13 nt, Human
gaauacugaacau

SEQ ID NO: 1453337 - RNA, 20 nt, Human
gaauacucuuauaucuauau

SEQ ID NO: 1453338 - RNA, 22 nt, Human
gaagcuaacagggaaggcaggc

SEQ ID NO: 1453339 - RNA, 21 nt, Human
gaagcuaacagggaaggcagg

SEQ ID NO: 1453340 - RNA, 20 nt, Human
gaagcuaacagggaaggcag

SEQ ID NO: 1453341 - RNA, 19 nt, Human
gaagcuaacagggaaggca

SEQ ID NO: 1453342 - RNA, 18 nt, Human
gaagcuaacagggaaggc

SEQ ID NO: 1453343 - RNA, 17 nt, Human
gaagcuaacagggaagg

SEQ ID NO: 1453344 - RNA, 16 nt, Human
gaagcuaacagggaag

SEQ ID NO: 1453345 - RNA, 15 nt, Human
gaagcuaacagggaa

SEQ ID NO: 1453346 - RNA, 14 nt, Human
gaagcuaacaggga

SEQ ID NO: 1453347 - RNA, 20 nt, Human
gaagcguuguccucagcccc

SEQ ID NO: 1453348 - RNA, 19 nt, Human
gaagcguuguccucagccc

SEQ ID NO: 1453349 - RNA, 13 nt, Human
gaagcguuguccu

SEQ ID NO: 1453350 - RNA, 20 nt, Human
gaaguagaaacaaaauacaa

SEQ ID NO: 1453351 - RNA, 14 nt, Human
gaaguaccagacua

SEQ ID NO: 1453352 - RNA, 13 nt, Human
gaaguaccagacu

SEQ ID NO: 1453353 - RNA, 21 nt, Human
gaaggugcugacggccaggga

SEQ ID NO: 1453354 - RNA, 19 nt, Human
gaaggugcugacggccagg

SEQ ID NO: 1453355 - RNA, 18 nt, Human
gaaggugcugacggccag

SEQ ID NO: 1453356 - RNA, 22 nt, Human
gaagguggauggccccagcaca

SEQ ID NO: 1453357 - RNA, 22 nt, Human
gaaguaauaugcacacauuuuu

SEQ ID NO: 1453358 - RNA, 18 nt, Human
gaagucaucuugcuacca

SEQ ID NO: 1453359 - RNA, 15 nt, Human
gaagucaucuugcua

SEQ ID NO: 1453360 - RNA, 18 nt, Human
gaagucauaccaaugaaa

SEQ ID NO: 1453361 - RNA, 14 nt, Human
gaaguauaaagaau

SEQ ID NO: 1453362 - RNA, 14 nt, Human
gaaguauaccugau

SEQ ID NO: 1453363 - RNA, 13 nt, Human
gaaguaggaagua

SEQ ID NO: 1453364 - RNA, 19 nt, Human
gaagucucaucuggggagc

SEQ ID NO: 1453365 - RNA, 24 nt, Human
gaagucucaucuggggagcaggca

SEQ ID NO: 1453366 - RNA, 18 nt, Human
gaagucucaucuggggag

SEQ ID NO: 1453367 - RNA, 13 nt, Human
gaagucucagcua

SEQ ID NO: 1453368 - RNA, 22 nt, Human
gaaguccaagcauuuagaugua

SEQ ID NO: 1453369 - RNA, 12 nt, Human
gaaguccaagca

SEQ ID NO: 1453370 - RNA, 12 nt, Human
gaaguuugaaug

SEQ ID NO: 1453371 - RNA, 16 nt, Human
gaacgaaaaugaaagc

SEQ ID NO: 1453372 - RNA, 20 nt, Human
gaaccuuugugcccuaucac

SEQ ID NO: 1453373 - RNA, 19 nt, Human
gaaccuuugugcccuauca

SEQ ID NO: 1453374 - RNA, 17 nt, Human
gaaccuuugugcccuau

SEQ ID NO: 1453375 - RNA, 18 nt, Human
gaacguuuucuaauugcu

SEQ ID NO: 1453376 - RNA, 20 nt, Human
gaacguuuucuaauugcuua

SEQ ID NO: 1453377 - RNA, 16 nt, Human
gaacguuuucuaauug

SEQ ID NO: 1453378 - RNA, 15 nt, Human
gaacguuuucuaauu

SEQ ID NO: 1453379 - RNA, 14 nt, Human
gaacguuuucuaau

SEQ ID NO: 1453380 - RNA, 21 nt, Human
gaacucagauccagggacaga

SEQ ID NO: 1453381 - RNA, 19 nt, Human
gaacucagauccagggaca

SEQ ID NO: 1453382 - RNA, 18 nt, Human
gaacucagauccagggac

SEQ ID NO: 1453383 - RNA, 16 nt, Human
gaacucagauccaggg

SEQ ID NO: 1453384 - RNA, 15 nt, Human
gaacucagauccagg

SEQ ID NO: 1453385 - RNA, 14 nt, Human
gaacucagauccag

SEQ ID NO: 1453386 - RNA, 13 nt, Human
gaacucagaucca

SEQ ID NO: 1453387 - RNA, 21 nt, Human
gaacuagaguuuagcuggaaa

SEQ ID NO: 1453388 - RNA, 19 nt, Human
gaacuaccuugguuccccc

SEQ ID NO: 1453389 - RNA, 21 nt, Human
gaacuaaagugcugcacucaa

SEQ ID NO: 1453390 - RNA, 19 nt, Human
gaacuagaauuugauuauu

SEQ ID NO: 1453391 - RNA, 20 nt, Human
gaacuaccuugguuccccca

SEQ ID NO: 1453392 - RNA, 14 nt, Human
gaacuacugaggau

SEQ ID NO: 1453393 - RNA, 21 nt, Human
gaaccucagccuggccagaca

SEQ ID NO: 1453394 - RNA, 19 nt, Human
gaaccucagccuggccaga

SEQ ID NO: 1453395 - RNA, 18 nt, Human
gaaccucagccuggccag

SEQ ID NO: 1453396 - RNA, 17 nt, Human
gaaccucagccuggcca

SEQ ID NO: 1453397 - RNA, 15 nt, Human
gaaccucagccuggc

SEQ ID NO: 1453398 - RNA, 14 nt, Human
gaaccucagccugg

SEQ ID NO: 1453399 - RNA, 13 nt, Human
gaaccucagccug

SEQ ID NO: 1453400 - RNA, 12 nt, Human
gaaccucagccu

SEQ ID NO: 1453401 - RNA, 15 nt, Human
gaacauugguucuuu

SEQ ID NO: 1453402 - RNA, 22 nt, Human
gaacauuggaauguucucagau

SEQ ID NO: 1453403 - RNA, 21 nt, Human
gaacauuggaauguucucaga

SEQ ID NO: 1453404 - RNA, 12 nt, Human
gaacauuggaau

SEQ ID NO: 1453405 - RNA, 14 nt, Human
gaacaucccuccug

SEQ ID NO: 1453406 - RNA, 11 nt, Human
gaaauuucaga

SEQ ID NO: 1453407 - RNA, 18 nt, Human
gaaauuucacauagccca

SEQ ID NO: 1453408 - RNA, 23 nt, Human
gaaauuuauuuccuaguucugua

SEQ ID NO: 1453409 - RNA, 19 nt, Human
gaaauuguauauuguaauu

SEQ ID NO: 1453410 - RNA, 13 nt, Human
gaaauuguauauu

SEQ ID NO: 1453411 - RNA, 22 nt, Human
gaaauuuauuuccuaguucugu

SEQ ID NO: 1453412 - RNA, 18 nt, Human
gaaauuguauuacaaauc

SEQ ID NO: 1453413 - RNA, 16 nt, Human
gaaauuuauaaacuuu

SEQ ID NO: 1453414 - RNA, 17 nt, Human
gaaauuuauaaacuuuu

SEQ ID NO: 1453415 - RNA, 19 nt, Human
gaaaauaggcaggaagccc

SEQ ID NO: 1453416 - RNA, 17 nt, Human
gaaaauaggcaggaagc

SEQ ID NO: 1453417 - RNA, 15 nt, Human
gaaaauaaagaaugg

SEQ ID NO: 1453418 - RNA, 16 nt, Human
gaaaauaaagaaugga

SEQ ID NO: 1453419 - RNA, 13 nt, Human
gaaaauaaagaau

SEQ ID NO: 1453420 - RNA, 12 nt, Human
gaaaauaaagaa

SEQ ID NO: 1453421 - RNA, 16 nt, Human
gaaaauauaaccagcc

SEQ ID NO: 1453422 - RNA, 16 nt, Human
gaaauuguauuacaaa

SEQ ID NO: 1453423 - RNA, 20 nt, Human
gaacagcagacucagcucug

SEQ ID NO: 1453424 - RNA, 21 nt, Human
gaacagcagacucagcucuga

SEQ ID NO: 1453425 - RNA, 18 nt, Human
gaacagauaaucccugua

SEQ ID NO: 1453426 - RNA, 17 nt, Human
gaacagauaaucccugu

SEQ ID NO: 1453427 - RNA, 18 nt, Human
gaacacucuuuugcuuua

SEQ ID NO: 1453428 - RNA, 16 nt, Human
gaacacucuuuugcuu

SEQ ID NO: 1453429 - RNA, 23 nt, Human
gaaauuucagauucccagagcaa

SEQ ID NO: 1453430 - RNA, 21 nt, Human
gaaauuucagauucccagagc

SEQ ID NO: 1453431 - RNA, 19 nt, Human
gaacauccaaaaucuugau

SEQ ID NO: 1453432 - RNA, 14 nt, Human
gaacaucacagcuu

SEQ ID NO: 1453433 - RNA, 18 nt, Human
gaacauauuguugaaagg

SEQ ID NO: 1453434 - RNA, 12 nt, Human
gaacauauuguu

SEQ ID NO: 1453435 - RNA, 16 nt, Human
gaacauagacagaaga

SEQ ID NO: 1453436 - RNA, 22 nt, Human
gaacauaccccuuacaaaugaa

SEQ ID NO: 1453437 - RNA, 13 nt, Human
gaacagcuggugu

SEQ ID NO: 1453438 - RNA, 14 nt, Human
gaacagcuggugua

SEQ ID NO: 1453439 - RNA, 12 nt, Human
gaacagcuggug

SEQ ID NO: 1453440 - RNA, 22 nt, Human
gaacagugugcaaggcagccgu

SEQ ID NO: 1453441 - RNA, 21 nt, Human
gaacagugugcaaggcagccg

SEQ ID NO: 1453442 - RNA, 17 nt, Human
gaacagugugcaaggca

SEQ ID NO: 1453443 - RNA, 24 nt, Human
gaacagugugcaaggcagccgugg

SEQ ID NO: 1453444 - RNA, 14 nt, Human
gaacauaaaaagga

SEQ ID NO: 1453445 - RNA, 16 nt, Human
gaacauaaaaaggaca

SEQ ID NO: 1453446 - RNA, 18 nt, Human
gaacauaaaaaggacauc

SEQ ID NO: 1453447 - RNA, 22 nt, Human
gaacauaaaaaggacaucagca

SEQ ID NO: 1453448 - RNA, 15 nt, Human
gaagcccucccaggu

SEQ ID NO: 1453449 - RNA, 13 nt, Human
gaagcccucccag

SEQ ID NO: 1453450 - RNA, 21 nt, Human
gaagcccggcuccuggucacc

SEQ ID NO: 1453451 - RNA, 19 nt, Human
gaagcccggcuccugguca

SEQ ID NO: 1453452 - RNA, 18 nt, Human
gaagcccggcuccugguc

SEQ ID NO: 1453453 - RNA, 17 nt, Human
gaagcccggcuccuggu

SEQ ID NO: 1453454 - RNA, 16 nt, Human
gaagcccggcuccugg

SEQ ID NO: 1453455 - RNA, 15 nt, Human
gaagcccggcuccug

SEQ ID NO: 1453456 - RNA, 14 nt, Human
gaagcccggcuccu

SEQ ID NO: 1453457 - RNA, 19 nt, Human
gaagcccauccugaccagc

SEQ ID NO: 1453458 - RNA, 22 nt, Human
gaagcccccagcuaagaaccug

SEQ ID NO: 1453459 - RNA, 21 nt, Human
gaagcccccagcuaagaaccu

SEQ ID NO: 1453460 - RNA, 17 nt, Human
gaagcccccagcuaaga

SEQ ID NO: 1453461 - RNA, 14 nt, Human
gaagcccccagcua

SEQ ID NO: 1453462 - RNA, 20 nt, Human
gaagcccccaccgugggcag

SEQ ID NO: 1453463 - RNA, 21 nt, Human
gaagcccauccugaccagcug

SEQ ID NO: 1453464 - RNA, 17 nt, Human
gaagcccauccugacca

SEQ ID NO: 1453465 - RNA, 16 nt, Human
gaagcccauccugacc

SEQ ID NO: 1453466 - RNA, 20 nt, Human
gaagccaauucagacaggca

SEQ ID NO: 1453467 - RNA, 18 nt, Human
gaagccaauucagacagg

SEQ ID NO: 1453468 - RNA, 20 nt, Human
gaagcauuguaaaauaauuc

SEQ ID NO: 1453469 - RNA, 17 nt, Human
gaagcauuguaaaauaa

SEQ ID NO: 1453470 - RNA, 13 nt, Human
gaagcauuguaaa

SEQ ID NO: 1453471 - RNA, 18 nt, Human
gaagcauucucauuggaa

SEQ ID NO: 1453472 - RNA, 21 nt, Human
gaagcauucucauuggaaauu

SEQ ID NO: 1453473 - RNA, 16 nt, Human
gaagcauucucauugg

SEQ ID NO: 1453474 - RNA, 20 nt, Human
gaagagguuuuaaagcuucc

SEQ ID NO: 1453475 - RNA, 16 nt, Human
gaagauagcugugacu

SEQ ID NO: 1453476 - RNA, 23 nt, Human
gaagaguaagucaaccugccuga

SEQ ID NO: 1453477 - RNA, 15 nt, Human
gaagauacugaaaua

SEQ ID NO: 1453478 - RNA, 21 nt, Human
gaacucaucuagguaaauuac

SEQ ID NO: 1453479 - RNA, 23 nt, Human
gaacuuugaccucugcagcaaua

SEQ ID NO: 1453480 - RNA, 20 nt, Human
gaacucaucuagguaaauua

SEQ ID NO: 1453481 - RNA, 22 nt, Human
gaagaaccaguccccccacccu

SEQ ID NO: 1453482 - RNA, 19 nt, Human
gaagaaccaguccccccac

SEQ ID NO: 1453483 - RNA, 16 nt, Human
gaacuuuuuauugauu

SEQ ID NO: 1453484 - RNA, 22 nt, Human
gaacucaucuagguaaauuaca

SEQ ID NO: 1453485 - RNA, 19 nt, Human
gaacuuugcugagccugua

SEQ ID NO: 1453486 - RNA, 17 nt, Human
gaagacuggaagcuaau

SEQ ID NO: 1453487 - RNA, 16 nt, Human
gaagacuggaagcuaa

SEQ ID NO: 1453488 - RNA, 15 nt, Human
gaagacuggaagcua

SEQ ID NO: 1453489 - RNA, 19 nt, Human
gaagaacugcaggcccugg

SEQ ID NO: 1453490 - RNA, 15 nt, Human
gaagaacugcaggcc

SEQ ID NO: 1453491 - RNA, 14 nt, Human
gaagaacugcaggc

SEQ ID NO: 1453492 - RNA, 13 nt, Human
gaagaacugcagg

SEQ ID NO: 1453493 - RNA, 19 nt, Human
gaagacugcauuauauuua

SEQ ID NO: 1453494 - RNA, 12 nt, Human
gaagaacugaaa

SEQ ID NO: 1453495 - RNA, 12 nt, Human
gaagagaaggag

SEQ ID NO: 1453496 - RNA, 13 nt, Human
gaagagaaggagc

SEQ ID NO: 1453497 - RNA, 14 nt, Human
gaagagaaggagca

SEQ ID NO: 1453498 - RNA, 15 nt, Human
gaagagaaggagcag

SEQ ID NO: 1453499 - RNA, 20 nt, Human
gaagaggccuguuuggccuc

SEQ ID NO: 1453500 - RNA, 18 nt, Human
gaagaggaggggaagagg

SEQ ID NO: 1453501 - RNA, 23 nt, Human
gaagagcaggacuccaggcccaa

SEQ ID NO: 1453502 - RNA, 22 nt, Human
gaagagcaggacuccaggccca

SEQ ID NO: 1453503 - RNA, 18 nt, Human
gaagagcaggacuccagg

SEQ ID NO: 1453504 - RNA, 23 nt, Human
gaagagcagcaccuccucagccu

SEQ ID NO: 1453505 - RNA, 12 nt, Human
gaagagcagccc

SEQ ID NO: 1453506 - RNA, 18 nt, Human
gaagagcagcaccuccuc

SEQ ID NO: 1453507 - RNA, 14 nt, Human
gaagagcagcaccu

SEQ ID NO: 1453508 - RNA, 20 nt, Human
gaagagagccugcaggaucu

SEQ ID NO: 1453509 - RNA, 17 nt, Human
gaagagaucaggaagag

SEQ ID NO: 1453510 - RNA, 16 nt, Human
gaagagaucaggaaga

SEQ ID NO: 1453511 - RNA, 20 nt, Human
gcaaaugucaugcugccuua

SEQ ID NO: 1453512 - RNA, 15 nt, Human
gcaacucuugauuau

SEQ ID NO: 1453513 - RNA, 14 nt, Human
gcaaauggccucau

SEQ ID NO: 1453514 - RNA, 12 nt, Human
gcaaaucuugaa

SEQ ID NO: 1453515 - RNA, 12 nt, Human
gcaaaugugaau

SEQ ID NO: 1453516 - RNA, 23 nt, Human
gcaaauguaguauggccuguguc

SEQ ID NO: 1453517 - RNA, 19 nt, Human
gcaaaugucaugcugccuu

SEQ ID NO: 1453518 - RNA, 18 nt, Human
gcaaaugucaugcugccu

SEQ ID NO: 1453519 - RNA, 23 nt, Human
gcaaaugugaaucauuuuaccuu

SEQ ID NO: 1453520 - RNA, 15 nt, Human
gcaaagugguucccu

SEQ ID NO: 1453521 - RNA, 17 nt, Human
gcaaauaacaaaugcca

SEQ ID NO: 1453522 - RNA, 19 nt, Human
gcaaauaacaaaugccaaa

SEQ ID NO: 1453523 - RNA, 12 nt, Human
gcaaauaaaagu

SEQ ID NO: 1453524 - RNA, 22 nt, Human
gcaaagacuauucccuucuaac

SEQ ID NO: 1453525 - RNA, 21 nt, Human
gcaaagacuauucccuucuaa

SEQ ID NO: 1453526 - RNA, 14 nt, Human
gcaaagaauugacu

SEQ ID NO: 1453527 - RNA, 22 nt, Human
gcaaacugggaaccccuuuccc

SEQ ID NO: 1453528 - RNA, 20 nt, Human
gcaaacugggaaccccuuuc

SEQ ID NO: 1453529 - RNA, 20 nt, Human
gcaaacuuuauuuuguguuu

SEQ ID NO: 1453530 - RNA, 22 nt, Human
gauuuguuuuuaaacuguacag

SEQ ID NO: 1453531 - RNA, 23 nt, Human
gauuuguuuuuaaacuguacagu

SEQ ID NO: 1453532 - RNA, 21 nt, Human
gauuuguuuuuaaacuguaca

SEQ ID NO: 1453533 - RNA, 18 nt, Human
gauuuguuuuuaaacugu

SEQ ID NO: 1453534 - RNA, 21 nt, Human
gcaaaccugaccccugcucag

SEQ ID NO: 1453535 - RNA, 19 nt, Human
gcaaaccugaccccugcuc

SEQ ID NO: 1453536 - RNA, 19 nt, Human
gcaaacccaucaacaaaaa

SEQ ID NO: 1453537 - RNA, 16 nt, Human
gcaaacugcaugccca

SEQ ID NO: 1453538 - RNA, 15 nt, Human
gcaaacugcaugccc

SEQ ID NO: 1453539 - RNA, 14 nt, Human
gcaaacugcaugcc

SEQ ID NO: 1453540 - RNA, 13 nt, Human
gcaaacugcaugc

SEQ ID NO: 1453541 - RNA, 23 nt, Human
gcaaacucuuuggucguuuuuuu

SEQ ID NO: 1453542 - RNA, 22 nt, Human
gcaaacucuuuggucguuuuuu

SEQ ID NO: 1453543 - RNA, 20 nt, Human
gcaaacucuuuggucguuuu

SEQ ID NO: 1453544 - RNA, 10 nt, Human
gcaaacucuu

SEQ ID NO: 1453545 - RNA, 23 nt, Human
gcaaacugggaaccccuuuccca

SEQ ID NO: 1453546 - RNA, 17 nt, Human
gcaaacugggaaccccu

SEQ ID NO: 1453547 - RNA, 19 nt, Human
gcaaacugcaugcccagag

SEQ ID NO: 1453548 - RNA, 22 nt, Human
gcaaacugcaugcccagagacc

SEQ ID NO: 1453549 - RNA, 18 nt, Human
gcaaacuuuauuuugugu

SEQ ID NO: 1453550 - RNA, 23 nt, Human
gcaagcaagaggccguggcugcu

SEQ ID NO: 1453551 - RNA, 15 nt, Human
gcaagcacagcccuu

SEQ ID NO: 1453552 - RNA, 20 nt, Human
gcaagcaauccuagguaggg

SEQ ID NO: 1453553 - RNA, 15 nt, Human
gcaagcaagaggccg

SEQ ID NO: 1453554 - RNA, 14 nt, Human
gcaagcaagaggcc

SEQ ID NO: 1453555 - RNA, 22 nt, Human
gcaacuuguccuagcacagaug

SEQ ID NO: 1453556 - RNA, 20 nt, Human
gcaacuuguccuagcacaga

SEQ ID NO: 1453557 - RNA, 19 nt, Human
gcaacuuguccuagcacag

SEQ ID NO: 1453558 - RNA, 21 nt, Human
gcaacuuguccuagcacagau

SEQ ID NO: 1453559 - RNA, 22 nt, Human
gcaacuuuguauaaaagggacu

SEQ ID NO: 1453560 - RNA, 23 nt, Human
gcaagauggggagugagaggcug

SEQ ID NO: 1453561 - RNA, 16 nt, Human
gcaaggaaaaacaggu

SEQ ID NO: 1453562 - RNA, 23 nt, Human
gcaagcuuaauggcugauaauuu

SEQ ID NO: 1453563 - RNA, 17 nt, Human
gcaagcuggcggcuggg

SEQ ID NO: 1453564 - RNA, 19 nt, Human
gcaagcugauuaaaugaca

SEQ ID NO: 1453565 - RNA, 17 nt, Human
gcaagcugauuaaauga

SEQ ID NO: 1453566 - RNA, 17 nt, Human
gcaagcauucagaagaa

SEQ ID NO: 1453567 - RNA, 14 nt, Human
gcaaugaacacuua

SEQ ID NO: 1453568 - RNA, 18 nt, Human
gcaagguccggcccaucc

SEQ ID NO: 1453569 - RNA, 20 nt, Human
gcaauccucccacuucagcc

SEQ ID NO: 1453570 - RNA, 23 nt, Human
gcaauccucccacuucagccucc

SEQ ID NO: 1453571 - RNA, 15 nt, Human
gauucagggaaagug

SEQ ID NO: 1453572 - RNA, 16 nt, Human
gauucauaguaacuuc

SEQ ID NO: 1453573 - RNA, 22 nt, Human
gauucaguuuucauuugguuca

SEQ ID NO: 1453574 - RNA, 15 nt, Human
gauucaguuuucauu

SEQ ID NO: 1453575 - RNA, 20 nt, Human
gauucaguguuaaaugugau

SEQ ID NO: 1453576 - RNA, 22 nt, Human
gauucagggaaagugggacagc

SEQ ID NO: 1453577 - RNA, 23 nt, Human
gauucaggaaaaggccuggggug

SEQ ID NO: 1453578 - RNA, 22 nt, Human
gauucaggaaaaggccuggggu

SEQ ID NO: 1453579 - RNA, 21 nt, Human
gauucaggaaaaggccugggg

SEQ ID NO: 1453580 - RNA, 20 nt, Human
gauucaggaaaaggccuggg

SEQ ID NO: 1453581 - RNA, 19 nt, Human
gauucaggaaaaggccugg

SEQ ID NO: 1453582 - RNA, 18 nt, Human
gauucaggaaaaggccug

SEQ ID NO: 1453583 - RNA, 17 nt, Human
gauucaggaaaaggccu

SEQ ID NO: 1453584 - RNA, 19 nt, Human
gauucauuuuaacaucuga

SEQ ID NO: 1453585 - RNA, 21 nt, Human
gauucaugccaauuagcaauu

SEQ ID NO: 1453586 - RNA, 23 nt, Human
gauuccaaagaguagaauugcau

SEQ ID NO: 1453587 - RNA, 19 nt, Human
gauuccaaagaguagaauu

SEQ ID NO: 1453588 - RNA, 18 nt, Human
gauuccaaagaguagaau

SEQ ID NO: 1453589 - RNA, 23 nt, Human
gauuacaaaucagaagucaucuu

SEQ ID NO: 1453590 - RNA, 21 nt, Human
gauuacaaaucagaagucauc

SEQ ID NO: 1453591 - RNA, 20 nt, Human
gauuacaaaucagaagucau

SEQ ID NO: 1453592 - RNA, 19 nt, Human
gauuacaaaucagaaguca

SEQ ID NO: 1453593 - RNA, 17 nt, Human
gauuacaaaucagaagu

SEQ ID NO: 1453594 - RNA, 16 nt, Human
gauuacaaaucagaag

SEQ ID NO: 1453595 - RNA, 20 nt, Human
gauguucuaaggcucugaga

SEQ ID NO: 1453596 - RNA, 19 nt, Human
gauguucuaagucuuucca

SEQ ID NO: 1453597 - RNA, 19 nt, Human
gauguucuaaggcucugag

SEQ ID NO: 1453598 - RNA, 18 nt, Human
gauguucuaaggcucuga

SEQ ID NO: 1453599 - RNA, 16 nt, Human
gauguucuaaggcucu

SEQ ID NO: 1453600 - RNA, 14 nt, Human
gauguucuaaggcu

SEQ ID NO: 1453601 - RNA, 13 nt, Human
gauguucuaaggc

SEQ ID NO: 1453602 - RNA, 22 nt, Human
gauguucuauuuuuuguuuugu

SEQ ID NO: 1453603 - RNA, 15 nt, Human
gauguucucuaucau

SEQ ID NO: 1453604 - RNA, 19 nt, Human
gauguucucuaucauuuaa

SEQ ID NO: 1453605 - RNA, 21 nt, Human
gauguucucuaucauuuaaua

SEQ ID NO: 1453606 - RNA, 22 nt, Human
gaugcagugcucgcuguugcug

SEQ ID NO: 1453607 - RNA, 23 nt, Human
gauguuuauucuucuagaguuca

SEQ ID NO: 1453608 - RNA, 21 nt, Human
gauguuuauucuucuagaguu

SEQ ID NO: 1453609 - RNA, 19 nt, Human
gauguuuauucuucuagag

SEQ ID NO: 1453610 - RNA, 18 nt, Human
gauguucuggauaccauu

SEQ ID NO: 1453611 - RNA, 14 nt, Human
gauuaaguaaugau

SEQ ID NO: 1453612 - RNA, 21 nt, Human
gauguuuuaaggaugcuugua

SEQ ID NO: 1453613 - RNA, 22 nt, Human
gauuaaguaaugauaacuggaa

SEQ ID NO: 1453614 - RNA, 21 nt, Human
gauugcugccccaucagugcu

SEQ ID NO: 1453615 - RNA, 20 nt, Human
gauuggccuguagaguugcu

SEQ ID NO: 1453616 - RNA, 23 nt, Human
gauuggccuguagaguugcugag

SEQ ID NO: 1453617 - RNA, 16 nt, Human
gauuggccuguagagu

SEQ ID NO: 1453618 - RNA, 11 nt, Human
gauuggccugu

SEQ ID NO: 1453619 - RNA, 20 nt, Human
gauugcugccccaucagugc

SEQ ID NO: 1453620 - RNA, 16 nt, Human
gauugcugccccauca

SEQ ID NO: 1453621 - RNA, 16 nt, Human
gauuuguuuuuaaacu

SEQ ID NO: 1453622 - RNA, 18 nt, Human
gauuugaagaacauguga

SEQ ID NO: 1453623 - RNA, 14 nt, Human
gauuucuuugaaaa

SEQ ID NO: 1453624 - RNA, 17 nt, Human
gauuucuuugaaaaaaa

SEQ ID NO: 1453625 - RNA, 21 nt, Human
gauuucauuucaacuguuugc

SEQ ID NO: 1453626 - RNA, 20 nt, Human
gauuucaugcuaucucugug

SEQ ID NO: 1453627 - RNA, 18 nt, Human
gauuucaugcuaucucug

SEQ ID NO: 1453628 - RNA, 16 nt, Human
gauuucaugcuaucuc

SEQ ID NO: 1453629 - RNA, 13 nt, Human
gauuucaugauuu

SEQ ID NO: 1453630 - RNA, 20 nt, Human
gauuucauuucaacuguuug

SEQ ID NO: 1453631 - RNA, 22 nt, Human
gauuucuguuuagauaauacac

SEQ ID NO: 1453632 - RNA, 18 nt, Human
gauuuaaaagccugcuca

SEQ ID NO: 1453633 - RNA, 16 nt, Human
gauuuaaaagccugcu

SEQ ID NO: 1453634 - RNA, 11 nt, Human
gauuguuugca

SEQ ID NO: 1453635 - RNA, 15 nt, Human
gauuguuccugcuuu

SEQ ID NO: 1453636 - RNA, 16 nt, Human
gauuguuacagaagcu

SEQ ID NO: 1453637 - RNA, 16 nt, Human
gauugggaauccgccc

SEQ ID NO: 1453638 - RNA, 24 nt, Human
gaucccuguguugucucuagagca

SEQ ID NO: 1453639 - RNA, 21 nt, Human
gaucccuguguugucucuaga

SEQ ID NO: 1453640 - RNA, 20 nt, Human
gaucccuguguugucucuag

SEQ ID NO: 1453641 - RNA, 19 nt, Human
gaucccuguguugucucua

SEQ ID NO: 1453642 - RNA, 18 nt, Human
gaucccuguguugucucu

SEQ ID NO: 1453643 - RNA, 14 nt, Human
gaucccuguguugu

SEQ ID NO: 1453644 - RNA, 23 nt, Human
gaucccucuacagagcuucccug

SEQ ID NO: 1453645 - RNA, 23 nt, Human
gaucccucccccccaugcacugu

SEQ ID NO: 1453646 - RNA, 21 nt, Human
gaucccucccccccaugcacu

SEQ ID NO: 1453647 - RNA, 19 nt, Human
gaucccucccccccaugca

SEQ ID NO: 1453648 - RNA, 13 nt, Human
gaucccucccccc

SEQ ID NO: 1453649 - RNA, 18 nt, Human
gaucccucaucugucccu

SEQ ID NO: 1453650 - RNA, 14 nt, Human
gaucccucaucugu

SEQ ID NO: 1453651 - RNA, 17 nt, Human
gaucauaaggcuucaaa

SEQ ID NO: 1453652 - RNA, 13 nt, Human
gaucauaaggcuu

SEQ ID NO: 1453653 - RNA, 19 nt, Human
gauccuaagcaucuaaguu

SEQ ID NO: 1453654 - RNA, 16 nt, Human
gauccuaagcaucuaa

SEQ ID NO: 1453655 - RNA, 14 nt, Human
gauccggaaagaag

SEQ ID NO: 1453656 - RNA, 20 nt, Human
gauccgacugcuuuggaccu

SEQ ID NO: 1453657 - RNA, 18 nt, Human
gauccgacugcuuuggac

SEQ ID NO: 1453658 - RNA, 17 nt, Human
gauccgacugcuuugga

SEQ ID NO: 1453659 - RNA, 14 nt, Human
gauccgacugcuuu

SEQ ID NO: 1453660 - RNA, 15 nt, Human
gauccuagauccuaa

SEQ ID NO: 1453661 - RNA, 21 nt, Human
gauccuccugcagaccacgcc

SEQ ID NO: 1453662 - RNA, 16 nt, Human
gauccuccugcagacc

SEQ ID NO: 1453663 - RNA, 15 nt, Human
gauccuccugcagac

SEQ ID NO: 1453664 - RNA, 12 nt, Human
gauccuccucau

SEQ ID NO: 1453665 - RNA, 22 nt, Human
gauccuccugcagaccacgccc

SEQ ID NO: 1453666 - RNA, 18 nt, Human
gaucuaaauaaaaugcua

SEQ ID NO: 1453667 - RNA, 20 nt, Human
gauccuguauucagacagau

SEQ ID NO: 1453668 - RNA, 17 nt, Human
gauccuggaggcccagu

SEQ ID NO: 1453669 - RNA, 16 nt, Human
gauccuggaggcccag

SEQ ID NO: 1453670 - RNA, 15 nt, Human
gauccuggaggccca

SEQ ID NO: 1453671 - RNA, 12 nt, Human
gauccuggaggc

SEQ ID NO: 1453672 - RNA, 14 nt, Human
gauccuggaaauca

SEQ ID NO: 1453673 - RNA, 20 nt, Human
gaucuacuucuguaauugug

SEQ ID NO: 1453674 - RNA, 17 nt, Human
gaugacccuuuucauga

SEQ ID NO: 1453675 - RNA, 15 nt, Human
gaugacccuuuucau

SEQ ID NO: 1453676 - RNA, 14 nt, Human
gaugaccacuuuuu

SEQ ID NO: 1453677 - RNA, 16 nt, Human
gaugaaugccguggau

SEQ ID NO: 1453678 - RNA, 15 nt, Human
gaugaaugccgugga

SEQ ID NO: 1453679 - RNA, 13 nt, Human
gaugaaugagaau

SEQ ID NO: 1453680 - RNA, 23 nt, Human
gaugaaguuuuacauuguugagc

SEQ ID NO: 1453681 - RNA, 22 nt, Human
gaugaaguuuuacauuguugag

SEQ ID NO: 1453682 - RNA, 14 nt, Human
gaucuguccucagc

SEQ ID NO: 1453683 - RNA, 18 nt, Human
gaucuguccucagccuug

SEQ ID NO: 1453684 - RNA, 17 nt, Human
gaucuguccucagccuu

SEQ ID NO: 1453685 - RNA, 16 nt, Human
gaucuguccucagccu

SEQ ID NO: 1453686 - RNA, 15 nt, Human
gaucuguccucagcc

SEQ ID NO: 1453687 - RNA, 15 nt, Human
gaugcagggcaguca

SEQ ID NO: 1453688 - RNA, 14 nt, Human
gaugcagggcaguc

SEQ ID NO: 1453689 - RNA, 14 nt, Human
gaugcagcuuauac

SEQ ID NO: 1453690 - RNA, 15 nt, Human
gaugcagcuuauacg

SEQ ID NO: 1453691 - RNA, 14 nt, Human
gaugcagcucaaga

SEQ ID NO: 1453692 - RNA, 22 nt, Human
gaugcacuuugcuuuaauauaa

SEQ ID NO: 1453693 - RNA, 23 nt, Human
gaugcacuuugcuuuaauauaaa

SEQ ID NO: 1453694 - RNA, 21 nt, Human
gaugcacuuugcuuuaauaua

SEQ ID NO: 1453695 - RNA, 22 nt, Human
gaugcacuucaaauucaaauaa

SEQ ID NO: 1453696 - RNA, 15 nt, Human
gaugcacuucaaauu

SEQ ID NO: 1453697 - RNA, 17 nt, Human
gauauauaaguguacau

SEQ ID NO: 1453698 - RNA, 15 nt, Human
gauauauaaguguac

SEQ ID NO: 1453699 - RNA, 24 nt, Human
gauauaguuuuacuuuuaaacugu

SEQ ID NO: 1453700 - RNA, 21 nt, Human
gauauaguuuuacuuuuaaac

SEQ ID NO: 1453701 - RNA, 19 nt, Human
gauauaguuuuacuuuuaa

SEQ ID NO: 1453702 - RNA, 21 nt, Human
gauauaucaugagugaauaaa

SEQ ID NO: 1453703 - RNA, 23 nt, Human
gauaguuuucauccauaacugaa

SEQ ID NO: 1453704 - RNA, 22 nt, Human
gauaguuuucauccauaacuga

SEQ ID NO: 1453705 - RNA, 14 nt, Human
gauaguuuucaucc

SEQ ID NO: 1453706 - RNA, 14 nt, Human
gauaauuauaauau

SEQ ID NO: 1453707 - RNA, 14 nt, Human
gauaauagauucuc

SEQ ID NO: 1453708 - RNA, 13 nt, Human
gauaauagauucu

SEQ ID NO: 1453709 - RNA, 12 nt, Human
gauaauagauuc

SEQ ID NO: 1453710 - RNA, 12 nt, Human
gauaauuuuaaa

SEQ ID NO: 1453711 - RNA, 18 nt, Human
gauaauuuuaaauucucu

SEQ ID NO: 1453712 - RNA, 19 nt, Human
gauaggaagaaagaagaca

SEQ ID NO: 1453713 - RNA, 17 nt, Human
gauacaaaagcauguga

SEQ ID NO: 1453714 - RNA, 16 nt, Human
gauacaaaagcaugug

SEQ ID NO: 1453715 - RNA, 13 nt, Human
gauaggccagccg

SEQ ID NO: 1453716 - RNA, 17 nt, Human
gauaggucagugcaaau

SEQ ID NO: 1453717 - RNA, 17 nt, Human
gaucagcguggccuugu

SEQ ID NO: 1453718 - RNA, 16 nt, Human
gaucagcguggccuug

SEQ ID NO: 1453719 - RNA, 15 nt, Human
gaucagcguggccuu

SEQ ID NO: 1453720 - RNA, 13 nt, Human
gaucagcguggcc

SEQ ID NO: 1453721 - RNA, 23 nt, Human
gaucagcuuauugucuagugaaa

SEQ ID NO: 1453722 - RNA, 12 nt, Human
gaucaggaagag

SEQ ID NO: 1453723 - RNA, 15 nt, Human
gaucaggaagagaag

SEQ ID NO: 1453724 - RNA, 16 nt, Human
gaucaggaagagaagg

SEQ ID NO: 1453725 - RNA, 18 nt, Human
gaucaggaagagaaggag

SEQ ID NO: 1453726 - RNA, 17 nt, Human
gaucaggaagagaagga

SEQ ID NO: 1453727 - RNA, 14 nt, Human
gauaucucaucucu

SEQ ID NO: 1453728 - RNA, 13 nt, Human
gauaucucaucuc

SEQ ID NO: 1453729 - RNA, 23 nt, Human
gauaucgacuuguuuuugcacau

SEQ ID NO: 1453730 - RNA, 20 nt, Human
gauauaucaugagugaauaa

SEQ ID NO: 1453731 - RNA, 16 nt, Human
gauaucaugcaaauuu

SEQ ID NO: 1453732 - RNA, 23 nt, Human
gaucaccgacugaaaauauuguu

SEQ ID NO: 1453733 - RNA, 19 nt, Human
gaucacagcuucagccagg

SEQ ID NO: 1453734 - RNA, 21 nt, Human
gaucacagcuucagccaggag

SEQ ID NO: 1453735 - RNA, 14 nt, Human
gauaaagagacagu

SEQ ID NO: 1453736 - RNA, 22 nt, Human
gauaaacacaagauugguguuu

SEQ ID NO: 1453737 - RNA, 15 nt, Human
gauaaacacaagauu

SEQ ID NO: 1453738 - RNA, 14 nt, Human
gauaaacacaagau

SEQ ID NO: 1453739 - RNA, 16 nt, Human
gauaaaagauggccau

SEQ ID NO: 1453740 - RNA, 22 nt, Human
gaguucucccuguacaguguua

SEQ ID NO: 1453741 - RNA, 16 nt, Human
gaguucucccuguaca

SEQ ID NO: 1453742 - RNA, 13 nt, Human
gauaaaagauggc

SEQ ID NO: 1453743 - RNA, 16 nt, Human
gauaaccuugaaaaaa

SEQ ID NO: 1453744 - RNA, 14 nt, Human
gauaauacaccacu

SEQ ID NO: 1453745 - RNA, 12 nt, Human
gauaauacacca

SEQ ID NO: 1453746 - RNA, 23 nt, Human
gauaauacaccacuacauucugu

SEQ ID NO: 1453747 - RNA, 24 nt, Human
gauaauacaccacuacauucuguu

SEQ ID NO: 1453748 - RNA, 24 nt, Human
gacuucaucucccaccuagcagca

SEQ ID NO: 1453749 - RNA, 18 nt, Human
gacuucccagcuaggaag

SEQ ID NO: 1453750 - RNA, 13 nt, Human
gacuucccagcua

SEQ ID NO: 1453751 - RNA, 12 nt, Human
gacuucccagcu

SEQ ID NO: 1453752 - RNA, 12 nt, Human
gacuucauccca

SEQ ID NO: 1453753 - RNA, 18 nt, Human
gacuucccacggcuccuc

SEQ ID NO: 1453754 - RNA, 22 nt, Human
gacuuccuguccagcuccaacc

SEQ ID NO: 1453755 - RNA, 21 nt, Human
gacuuccuguccagcuccaac

SEQ ID NO: 1453756 - RNA, 20 nt, Human
gacuuccuguccagcuccaa

SEQ ID NO: 1453757 - RNA, 19 nt, Human
gacuuccuguccagcucca

SEQ ID NO: 1453758 - RNA, 18 nt, Human
gacuuccuguccagcucc

SEQ ID NO: 1453759 - RNA, 13 nt, Human
gacuucccugugu

SEQ ID NO: 1453760 - RNA, 21 nt, Human
gaguucagaguccuuaaaaug

SEQ ID NO: 1453761 - RNA, 13 nt, Human
gaguguucccuau

SEQ ID NO: 1453762 - RNA, 19 nt, Human
gaguguuccccuuccacug

SEQ ID NO: 1453763 - RNA, 21 nt, Human
gccaaagaaccaaagaagaaa

SEQ ID NO: 1453764 - RNA, 23 nt, Human
gccaaacaaaaagguucucaggu

SEQ ID NO: 1453765 - RNA, 23 nt, Human
gccaaaacaauguuuaaaccuuu

SEQ ID NO: 1453766 - RNA, 16 nt, Human
gcauuuuguuugguau

SEQ ID NO: 1453767 - RNA, 12 nt, Human
gcauuuuguaau

SEQ ID NO: 1453768 - RNA, 22 nt, Human
gcauuuuguaaguugaagcaaa

SEQ ID NO: 1453769 - RNA, 23 nt, Human
gcauuuuggagaguuuccugaaa

SEQ ID NO: 1453770 - RNA, 22 nt, Human
gcauuuuggagaguuuccugaa

SEQ ID NO: 1453771 - RNA, 16 nt, Human
gcauugccaagggcuu

SEQ ID NO: 1453772 - RNA, 14 nt, Human
gcauugccaagggc

SEQ ID NO: 1453773 - RNA, 20 nt, Human
gcauucucauuggaaauuua

SEQ ID NO: 1453774 - RNA, 18 nt, Human
gcauucucauuggaaauu

SEQ ID NO: 1453775 - RNA, 13 nt, Human
gcauucuaguacu

SEQ ID NO: 1453776 - RNA, 20 nt, Human
gcauucccagguaggccaag

SEQ ID NO: 1453777 - RNA, 21 nt, Human
gcauucccagguaggccaagg

SEQ ID NO: 1453778 - RNA, 18 nt, Human
gcauuggauauuuuuuac

SEQ ID NO: 1453779 - RNA, 21 nt, Human
gcauuuggugguuucagaaau

SEQ ID NO: 1453780 - RNA, 12 nt, Human
gcauuggauauu

SEQ ID NO: 1453781 - RNA, 16 nt, Human
gcauuggaacuggagg

SEQ ID NO: 1453782 - RNA, 19 nt, Human
gcauuggaacuggaggcag

SEQ ID NO: 1453783 - RNA, 17 nt, Human
gcauuuguuuuguuuac

SEQ ID NO: 1453784 - RNA, 18 nt, Human
gcauuuggguccaggagg

SEQ ID NO: 1453785 - RNA, 17 nt, Human
gcauuuggguccaggag

SEQ ID NO: 1453786 - RNA, 16 nt, Human
gcauuuggguccagga

SEQ ID NO: 1453787 - RNA, 15 nt, Human
gcauuuggguccagg

SEQ ID NO: 1453788 - RNA, 16 nt, Human
gcauuuuacuguacag

SEQ ID NO: 1453789 - RNA, 17 nt, Human
gcauuuuacuguacaga

SEQ ID NO: 1453790 - RNA, 15 nt, Human
gcaugaauuugugaa

SEQ ID NO: 1453791 - RNA, 19 nt, Human
gcaugcccagagacccagc

SEQ ID NO: 1453792 - RNA, 18 nt, Human
gcaugcccagagacccag

SEQ ID NO: 1453793 - RNA, 12 nt, Human
gcaugcccagag

SEQ ID NO: 1453794 - RNA, 12 nt, Human
gcaugcaguguu

SEQ ID NO: 1453795 - RNA, 23 nt, Human
gcaugcacuguucccccugugca

SEQ ID NO: 1453796 - RNA, 22 nt, Human
gcaugcacuguucccccugugc

SEQ ID NO: 1453797 - RNA, 21 nt, Human
gcaugcacuguucccccugug

SEQ ID NO: 1453798 - RNA, 17 nt, Human
gcaugcacuguuccccc

SEQ ID NO: 1453799 - RNA, 16 nt, Human
gcaugcacuguucccc

SEQ ID NO: 1453800 - RNA, 22 nt, Human
gcaugaauuuguaaugucuuga

SEQ ID NO: 1453801 - RNA, 15 nt, Human
gcaugaauuuguaau

SEQ ID NO: 1453802 - RNA, 17 nt, Human
gcaugaauuugugaagg

SEQ ID NO: 1453803 - RNA, 17 nt, Human
gcaugcuggugagccaa

SEQ ID NO: 1453804 - RNA, 20 nt, Human
gcaugcccagagacccagcg

SEQ ID NO: 1453805 - RNA, 15 nt, Human
gcaugccuucaaauc

SEQ ID NO: 1453806 - RNA, 17 nt, Human
gcauguugucuaagaaa

SEQ ID NO: 1453807 - RNA, 17 nt, Human
gcauguuugugauugac

SEQ ID NO: 1453808 - RNA, 21 nt, Human
gcauggacaauggaccggaga

SEQ ID NO: 1453809 - RNA, 18 nt, Human
gcauggacaauggaccgg

SEQ ID NO: 1453810 - RNA, 14 nt, Human
gcauggacaaugga

SEQ ID NO: 1453811 - RNA, 16 nt, Human
gcauggaacacuucga

SEQ ID NO: 1453812 - RNA, 23 nt, Human
gcauggaaauuuaaagcagguuc

SEQ ID NO: 1453813 - RNA, 19 nt, Human
gcauggaaauuuaaagcag

SEQ ID NO: 1453814 - RNA, 17 nt, Human
gcauggaaauuuaaagc

SEQ ID NO: 1453815 - RNA, 11 nt, Human
gcauggaaauu

SEQ ID NO: 1453816 - RNA, 23 nt, Human
gcauggaaauucccuucaucugg

SEQ ID NO: 1453817 - RNA, 15 nt, Human
gcauuagaauuauuu

SEQ ID NO: 1453818 - RNA, 17 nt, Human
gcauuacugcaugcacu

SEQ ID NO: 1453819 - RNA, 14 nt, Human
gcauuacugcaugc

SEQ ID NO: 1453820 - RNA, 16 nt, Human
gcauguuuagacuuua

SEQ ID NO: 1453821 - RNA, 22 nt, Human
gcauguuuagacuuuaacauaa

SEQ ID NO: 1453822 - RNA, 13 nt, Human
gcauucccaggua

SEQ ID NO: 1453823 - RNA, 12 nt, Human
gcauucccaggu

SEQ ID NO: 1453824 - RNA, 19 nt, Human
gcauuccagccccucuggu

SEQ ID NO: 1453825 - RNA, 16 nt, Human
gcauuccagccccucu

SEQ ID NO: 1453826 - RNA, 15 nt, Human
gcauuccagccccuc

SEQ ID NO: 1453827 - RNA, 12 nt, Human
gcauuccagccc

SEQ ID NO: 1453828 - RNA, 18 nt, Human
gcauuagggaugccuccu

SEQ ID NO: 1453829 - RNA, 18 nt, Human
gcauuagaauuauuuaaa

SEQ ID NO: 1453830 - RNA, 17 nt, Human
gcauuagaauuauuuaa

SEQ ID NO: 1453831 - RNA, 15 nt, Human
gcauuauaaaaagaa

SEQ ID NO: 1453832 - RNA, 23 nt, Human
gcauauuauuuuauguugcauag

SEQ ID NO: 1453833 - RNA, 21 nt, Human
gcauauguugaauacuuuuua

SEQ ID NO: 1453834 - RNA, 20 nt, Human
gcauauguugaauacuuuuu

SEQ ID NO: 1453835 - RNA, 19 nt, Human
gcauauguugaauacuuuu

SEQ ID NO: 1453836 - RNA, 18 nt, Human
gcauauguugaauacuuu

SEQ ID NO: 1453837 - RNA, 18 nt, Human
gcauauuauuuuauguug

SEQ ID NO: 1453838 - RNA, 17 nt, Human
gcauauguugaauacuu

SEQ ID NO: 1453839 - RNA, 14 nt, Human
gcauauguugaaua

SEQ ID NO: 1453840 - RNA, 12 nt, Human
gcauauguugaa

SEQ ID NO: 1453841 - RNA, 19 nt, Human
gcauauuuauaaaaauaaa

SEQ ID NO: 1453842 - RNA, 20 nt, Human
gcaguucgcagccacccuga

SEQ ID NO: 1453843 - RNA, 19 nt, Human
gcaguucgcagccacccug

SEQ ID NO: 1453844 - RNA, 18 nt, Human
gcaguucgcagccacccu

SEQ ID NO: 1453845 - RNA, 17 nt, Human
gcaguucgcagccaccc

SEQ ID NO: 1453846 - RNA, 16 nt, Human
gcaguucgcagccacc

SEQ ID NO: 1453847 - RNA, 15 nt, Human
gcaguucgcagccac

SEQ ID NO: 1453848 - RNA, 17 nt, Human
gcaguucgacucugugc

SEQ ID NO: 1453849 - RNA, 16 nt, Human
gcaguuauauuuugca

SEQ ID NO: 1453850 - RNA, 13 nt, Human
gcaguuauauuuu

SEQ ID NO: 1453851 - RNA, 11 nt, Human
gcaguuauauu

SEQ ID NO: 1453852 - RNA, 18 nt, Human
gcaguuaccauuaaacca

SEQ ID NO: 1453853 - RNA, 19 nt, Human
gcaguuaccauuaaaccau

SEQ ID NO: 1453854 - RNA, 15 nt, Human
gcaguuaccauuaaa

SEQ ID NO: 1453855 - RNA, 14 nt, Human
gcaguuaccauuaa

SEQ ID NO: 1453856 - RNA, 18 nt, Human
gcagugggaggguaccag

SEQ ID NO: 1453857 - RNA, 21 nt, Human
gcagugugaggccagggcaga

SEQ ID NO: 1453858 - RNA, 19 nt, Human
gcagugugaggccagggca

SEQ ID NO: 1453859 - RNA, 21 nt, Human
gcauaggaguuuggaggaagu

SEQ ID NO: 1453860 - RNA, 18 nt, Human
gcauaggaguuuggagga

SEQ ID NO: 1453861 - RNA, 22 nt, Human
gcauagcuacuaaaaucaguga

SEQ ID NO: 1453862 - RNA, 19 nt, Human
gcauaggaccuuuccacca

SEQ ID NO: 1453863 - RNA, 15 nt, Human
gcauagcucuggggu

SEQ ID NO: 1453864 - RNA, 14 nt, Human
gcauagcucugggg

SEQ ID NO: 1453865 - RNA, 20 nt, Human
gcauaggugauccauguaac

SEQ ID NO: 1453866 - RNA, 19 nt, Human
gcauaggugauccauguaa

SEQ ID NO: 1453867 - RNA, 16 nt, Human
gcauauagauuguccu

SEQ ID NO: 1453868 - RNA, 22 nt, Human
gcaguucgcagccacccugagg

SEQ ID NO: 1453869 - RNA, 23 nt, Human
gcaguucgcagccacccugagga

SEQ ID NO: 1453870 - RNA, 14 nt, Human
gcaguucugaagaa

SEQ ID NO: 1453871 - RNA, 13 nt, Human
gcaguucugaaga

SEQ ID NO: 1453872 - RNA, 15 nt, Human
gcaggggcuuccugg

SEQ ID NO: 1453873 - RNA, 14 nt, Human
gcaggggcuuccug

SEQ ID NO: 1453874 - RNA, 13 nt, Human
gcaggggcuuccu

SEQ ID NO: 1453875 - RNA, 22 nt, Human
gcagggcgggcagagggcugga

SEQ ID NO: 1453876 - RNA, 23 nt, Human
gcagggcuacccugagcugaggc

SEQ ID NO: 1453877 - RNA, 22 nt, Human
gcagggcuacccugagcugagg

SEQ ID NO: 1453878 - RNA, 21 nt, Human
gcagggcuacccugagcugag

SEQ ID NO: 1453879 - RNA, 20 nt, Human
gcagggcuacccugagcuga

SEQ ID NO: 1453880 - RNA, 17 nt, Human
gcagggcuacccugagc

SEQ ID NO: 1453881 - RNA, 21 nt, Human
gcagggcgggcagagggcugg

SEQ ID NO: 1453882 - RNA, 20 nt, Human
gcagggcgggcagagggcug

SEQ ID NO: 1453883 - RNA, 18 nt, Human
gcagggcgggcagagggc

SEQ ID NO: 1453884 - RNA, 17 nt, Human
gcagggcgggcagaggg

SEQ ID NO: 1453885 - RNA, 22 nt, Human
gcaggcucccagggacaccugg

SEQ ID NO: 1453886 - RNA, 14 nt, Human
gcaggcucccaggg

SEQ ID NO: 1453887 - RNA, 21 nt, Human
gcaggauuggggaagagagcc

SEQ ID NO: 1453888 - RNA, 20 nt, Human
gcaggauuggggaagagagc

SEQ ID NO: 1453889 - RNA, 22 nt, Human
gcaggauugaaaauguccagga

SEQ ID NO: 1453890 - RNA, 14 nt, Human
gcaggauugaaaau

SEQ ID NO: 1453891 - RNA, 21 nt, Human
gcaggaucucaccaggcagcc

SEQ ID NO: 1453892 - RNA, 22 nt, Human
gcaggaucucaccaggcagccu

SEQ ID NO: 1453893 - RNA, 20 nt, Human
gcaggaucucaccaggcagc

SEQ ID NO: 1453894 - RNA, 19 nt, Human
gcaggaucucaccaggcag

SEQ ID NO: 1453895 - RNA, 18 nt, Human
gcaggaucucaccaggca

SEQ ID NO: 1453896 - RNA, 17 nt, Human
gcaggaucucaccaggc

SEQ ID NO: 1453897 - RNA, 18 nt, Human
gcagguggccaaguuccu

SEQ ID NO: 1453898 - RNA, 21 nt, Human
gcagguggggagacugggcug

SEQ ID NO: 1453899 - RNA, 17 nt, Human
gcagguggggagacugg

SEQ ID NO: 1453900 - RNA, 21 nt, Human
gcagguggccaaguuccucua

SEQ ID NO: 1453901 - RNA, 21 nt, Human
gcagguggaucuauuucaugu

SEQ ID NO: 1453902 - RNA, 20 nt, Human
gcagguggaucuauuucaug

SEQ ID NO: 1453903 - RNA, 19 nt, Human
gcagguggaucuauuucau

SEQ ID NO: 1453904 - RNA, 13 nt, Human
gcagguggaucua

SEQ ID NO: 1453905 - RNA, 17 nt, Human
gcaggugcuggucccgg

SEQ ID NO: 1453906 - RNA, 17 nt, Human
gcagugcucgcuguugc

SEQ ID NO: 1453907 - RNA, 18 nt, Human
gcagugcucgcuguugcu

SEQ ID NO: 1453908 - RNA, 19 nt, Human
gcagugcucgcuguugcug

SEQ ID NO: 1453909 - RNA, 21 nt, Human
gcagugcucgcuguugcugaa

SEQ ID NO: 1453910 - RNA, 12 nt, Human
gcaggucccuaa

SEQ ID NO: 1453911 - RNA, 13 nt, Human
gcaggucccuaau

SEQ ID NO: 1453912 - RNA, 22 nt, Human
gcagggggcugcugcugggcuc

SEQ ID NO: 1453913 - RNA, 17 nt, Human
gcagggggcugcugcug

SEQ ID NO: 1453914 - RNA, 16 nt, Human
gcagggggcugcugcu

SEQ ID NO: 1453915 - RNA, 15 nt, Human
gcagggggcugcugc

SEQ ID NO: 1453916 - RNA, 14 nt, Human
gcagggggcugcug

SEQ ID NO: 1453917 - RNA, 18 nt, Human
gcaggggcuuccuggugc

SEQ ID NO: 1453918 - RNA, 22 nt, Human
gcaggggcuuccuggugcugga

SEQ ID NO: 1453919 - RNA, 10 nt, Human
gcaggucccu

SEQ ID NO: 1453920 - RNA, 11 nt, Human
gcaggucccua

SEQ ID NO: 1453921 - RNA, 23 nt, Human
gcacugucccuugccucaaugcc

SEQ ID NO: 1453922 - RNA, 18 nt, Human
gcacugucccuugccuca

SEQ ID NO: 1453923 - RNA, 17 nt, Human
gcacugucccuugccuc

SEQ ID NO: 1453924 - RNA, 16 nt, Human
gcagaagcagcaacuu

SEQ ID NO: 1453925 - RNA, 19 nt, Human
gcacuguaguucuaagacu

SEQ ID NO: 1453926 - RNA, 18 nt, Human
gcacuguaguucuaagac

SEQ ID NO: 1453927 - RNA, 17 nt, Human
gcacuguaguucuaaga

SEQ ID NO: 1453928 - RNA, 16 nt, Human
gcacuguaguucuaag

SEQ ID NO: 1453929 - RNA, 23 nt, Human
gcacuggggagcccgucucagug

SEQ ID NO: 1453930 - RNA, 22 nt, Human
gcacuggggagcccgucucagu

SEQ ID NO: 1453931 - RNA, 19 nt, Human
gcacuggggagcccgucuc

SEQ ID NO: 1453932 - RNA, 18 nt, Human
gcacuggggagcccgucu

SEQ ID NO: 1453933 - RNA, 15 nt, Human
gcacuggggagcccg

SEQ ID NO: 1453934 - RNA, 18 nt, Human
gcacugauguuguguuuu

SEQ ID NO: 1453935 - RNA, 20 nt, Human
gcacugauguuguguuuuua

SEQ ID NO: 1453936 - RNA, 17 nt, Human
gcacugauguuguguuu

SEQ ID NO: 1453937 - RNA, 22 nt, Human
gcacugaugcugccccucaucu

SEQ ID NO: 1453938 - RNA, 19 nt, Human
gcacugaugcugccccuca

SEQ ID NO: 1453939 - RNA, 18 nt, Human
gcacugaugcugccccuc

SEQ ID NO: 1453940 - RNA, 16 nt, Human
gcaccugccucaggac

SEQ ID NO: 1453941 - RNA, 15 nt, Human
gcaccugccucagga

SEQ ID NO: 1453942 - RNA, 14 nt, Human
gcaccugccucagg

SEQ ID NO: 1453943 - RNA, 13 nt, Human
gcaccugccucag

SEQ ID NO: 1453944 - RNA, 12 nt, Human
gcaccugccuca

SEQ ID NO: 1453945 - RNA, 21 nt, Human
gcaccugcccuaccugcccca

SEQ ID NO: 1453946 - RNA, 23 nt, Human
gcaccugcugucuggguggcuca

SEQ ID NO: 1453947 - RNA, 12 nt, Human
gcaccugcuguc

SEQ ID NO: 1453948 - RNA, 19 nt, Human
gcacuaacguugagccccu

SEQ ID NO: 1453949 - RNA, 15 nt, Human
gcaccugcugucugg

SEQ ID NO: 1453950 - RNA, 21 nt, Human
gcacuagccaaaccucaccaa

SEQ ID NO: 1453951 - RNA, 20 nt, Human
gcacuagccaaaccucacca

SEQ ID NO: 1453952 - RNA, 18 nt, Human
gcacuagccaaaccucac

SEQ ID NO: 1453953 - RNA, 17 nt, Human
gcacuagccaaaccuca

SEQ ID NO: 1453954 - RNA, 15 nt, Human
gcacuagccaaaccu

SEQ ID NO: 1453955 - RNA, 13 nt, Human
gcacugaugcugc

SEQ ID NO: 1453956 - RNA, 18 nt, Human
gcacuacugacauguggg

SEQ ID NO: 1453957 - RNA, 17 nt, Human
gcacuacugacaugugg

SEQ ID NO: 1453958 - RNA, 20 nt, Human
gcacuaacguugagccccug

SEQ ID NO: 1453959 - RNA, 20 nt, Human
gcaccccaaagcuuuccugc

SEQ ID NO: 1453960 - RNA, 17 nt, Human
gcaccccaaagcuuucc

SEQ ID NO: 1453961 - RNA, 21 nt, Human
gcacccaucugucugccaacc

SEQ ID NO: 1453962 - RNA, 19 nt, Human
gcaccaccaugccaggcua

SEQ ID NO: 1453963 - RNA, 18 nt, Human
gcaccaccaagccaaggg

SEQ ID NO: 1453964 - RNA, 13 nt, Human
gcacaugucuuaa

SEQ ID NO: 1453965 - RNA, 15 nt, Human
gcacaugucuuaaug

SEQ ID NO: 1453966 - RNA, 17 nt, Human
gcacaugucuuaaugaa

SEQ ID NO: 1453967 - RNA, 20 nt, Human
gcacaugucuuaaugaaguu

SEQ ID NO: 1453968 - RNA, 21 nt, Human
gcacaugucuuaaugaaguuu

SEQ ID NO: 1453969 - RNA, 22 nt, Human
gcacaugucuuaaugaaguuug

SEQ ID NO: 1453970 - RNA, 15 nt, Human
gcacaggcuaauuuu

SEQ ID NO: 1453971 - RNA, 16 nt, Human
gcacaggcuaauuuuu

SEQ ID NO: 1453972 - RNA, 14 nt, Human
gcacaggcccccuu

SEQ ID NO: 1453973 - RNA, 23 nt, Human
gcacaggagggggucguggagag

SEQ ID NO: 1453974 - RNA, 20 nt, Human
gcacaggaguguccucuucc

SEQ ID NO: 1453975 - RNA, 22 nt, Human
gcacaggagggggucguggaga

SEQ ID NO: 1453976 - RNA, 21 nt, Human
gcacaggagggggucguggag

SEQ ID NO: 1453977 - RNA, 12 nt, Human
gcacaggagggg

SEQ ID NO: 1453978 - RNA, 20 nt, Human
gcacaggagcuaccugugug

SEQ ID NO: 1453979 - RNA, 21 nt, Human
gcacaggagcuaccugugugg

SEQ ID NO: 1453980 - RNA, 16 nt, Human
gcacaggagcuaccug

SEQ ID NO: 1453981 - RNA, 15 nt, Human
gcacaggagcuaccu

SEQ ID NO: 1453982 - RNA, 12 nt, Human
gcacaggagcua

SEQ ID NO: 1453983 - RNA, 19 nt, Human
gcacagcuuagauuucaua

SEQ ID NO: 1453984 - RNA, 22 nt, Human
gcacaggacaugcgguagccag

SEQ ID NO: 1453985 - RNA, 21 nt, Human
gcacaggacaugcgguagcca

SEQ ID NO: 1453986 - RNA, 17 nt, Human
gcacagcuuagauuuca

SEQ ID NO: 1453987 - RNA, 16 nt, Human
gcacagcuuagauuuc

SEQ ID NO: 1453988 - RNA, 15 nt, Human
gcacagcuuagauuu

SEQ ID NO: 1453989 - RNA, 16 nt, Human
gcacagcuaugaaggc

SEQ ID NO: 1453990 - RNA, 13 nt, Human
gcacagcuaugaa

SEQ ID NO: 1453991 - RNA, 15 nt, Human
gcacagcuaauucua

SEQ ID NO: 1453992 - RNA, 19 nt, Human
gcacagccuggcuguggcc

SEQ ID NO: 1453993 - RNA, 12 nt, Human
gcacagccuggc

SEQ ID NO: 1453994 - RNA, 20 nt, Human
gcacagccucuuagaugcag

SEQ ID NO: 1453995 - RNA, 20 nt, Human
gcagaguuacaguucugugg

SEQ ID NO: 1453996 - RNA, 18 nt, Human
gcagaguuacaguucugu

SEQ ID NO: 1453997 - RNA, 17 nt, Human
gcagaguuacaguucug

SEQ ID NO: 1453998 - RNA, 13 nt, Human
gcagaagcagcaa

SEQ ID NO: 1453999 - RNA, 21 nt, Human
gcagaguuacaguucuguggu

SEQ ID NO: 1454000 - RNA, 17 nt, Human
gcagcaccugcccuacc

SEQ ID NO: 1454001 - RNA, 14 nt, Human
gcagcaccugcccu

SEQ ID NO: 1454002 - RNA, 13 nt, Human
gcagcaccugccc

SEQ ID NO: 1454003 - RNA, 20 nt, Human
gcagcaccuccucagccuga

SEQ ID NO: 1454004 - RNA, 19 nt, Human
gcagcaccuccucagccug

SEQ ID NO: 1454005 - RNA, 18 nt, Human
gcagcaccuccucagccu

SEQ ID NO: 1454006 - RNA, 17 nt, Human
gcagcaccuccucagcc

SEQ ID NO: 1454007 - RNA, 16 nt, Human
gcagcaccuccucagc

SEQ ID NO: 1454008 - RNA, 15 nt, Human
gcagcaccuccucag

SEQ ID NO: 1454009 - RNA, 19 nt, Human
gcagcaccguucugugcac

SEQ ID NO: 1454010 - RNA, 18 nt, Human
gcagcaccguucugugca

SEQ ID NO: 1454011 - RNA, 17 nt, Human
gcagcaccguucugugc

SEQ ID NO: 1454012 - RNA, 15 nt, Human
gcagcacaggagggc

SEQ ID NO: 1454013 - RNA, 15 nt, Human
gcagcacagcugaga

SEQ ID NO: 1454014 - RNA, 21 nt, Human
gcagcaaggcccgagcagcug

SEQ ID NO: 1454015 - RNA, 22 nt, Human
gcagcaaggcccgagcagcuga

SEQ ID NO: 1454016 - RNA, 17 nt, Human
gcagcaaggcccgagca

SEQ ID NO: 1454017 - RNA, 16 nt, Human
gcagcaaggcccgagc

SEQ ID NO: 1454018 - RNA, 22 nt, Human
gcagcaacuuguccuagcacag

SEQ ID NO: 1454019 - RNA, 12 nt, Human
gcagcaauaaag

SEQ ID NO: 1454020 - RNA, 19 nt, Human
gcagcaacuuguccuagca

SEQ ID NO: 1454021 - RNA, 18 nt, Human
gcagcaacuuguccuagc

SEQ ID NO: 1454022 - RNA, 16 nt, Human
gcagcaacuuguccua

SEQ ID NO: 1454023 - RNA, 15 nt, Human
gcagcaacuuguccu

SEQ ID NO: 1454024 - RNA, 11 nt, Human
gcagcaacaau

SEQ ID NO: 1454025 - RNA, 16 nt, Human
gcagcaacaauaaaua

SEQ ID NO: 1454026 - RNA, 14 nt, Human
gcagcgaccgcccc

SEQ ID NO: 1454027 - RNA, 12 nt, Human
gcagccuggagc

SEQ ID NO: 1454028 - RNA, 13 nt, Human
gcagccuggagcc

SEQ ID NO: 1454029 - RNA, 15 nt, Human
gcagccuggagcccu

SEQ ID NO: 1454030 - RNA, 19 nt, Human
gcagccuggagcccuggag

SEQ ID NO: 1454031 - RNA, 23 nt, Human
gcagccugcgccaccgcccagag

SEQ ID NO: 1454032 - RNA, 14 nt, Human
gcagcagggguugg

SEQ ID NO: 1454033 - RNA, 13 nt, Human
gcagcagggguug

SEQ ID NO: 1454034 - RNA, 20 nt, Human
gcagcagggcuacccugagc

SEQ ID NO: 1454035 - RNA, 19 nt, Human
gcagcagggcuacccugag

SEQ ID NO: 1454036 - RNA, 17 nt, Human
gcagcagggcuacccug

SEQ ID NO: 1454037 - RNA, 12 nt, Human
gcagcagggcua

SEQ ID NO: 1454038 - RNA, 20 nt, Human
gcaggaccuucgggcugugc

SEQ ID NO: 1454039 - RNA, 14 nt, Human
gcagcgccaggcug

SEQ ID NO: 1454040 - RNA, 13 nt, Human
gcagcgccaggcu

SEQ ID NO: 1454041 - RNA, 12 nt, Human
gcagcgagccug

SEQ ID NO: 1454042 - RNA, 15 nt, Human
gcagcgagccugcua

SEQ ID NO: 1454043 - RNA, 22 nt, Human
gcagcgaccgcccccuccucua

SEQ ID NO: 1454044 - RNA, 18 nt, Human
gcagcgaccgcccccucc

SEQ ID NO: 1454045 - RNA, 17 nt, Human
gcagcgaccgcccccuc

SEQ ID NO: 1454046 - RNA, 16 nt, Human
gcagcgaccgcccccu

SEQ ID NO: 1454047 - RNA, 21 nt, Human
gcaggagcggcagauggggag

SEQ ID NO: 1454048 - RNA, 15 nt, Human
gcaggagggaggugc

SEQ ID NO: 1454049 - RNA, 21 nt, Human
gcaggaguagcugagcucaca

SEQ ID NO: 1454050 - RNA, 19 nt, Human
gcaggaguagcugagcuca

SEQ ID NO: 1454051 - RNA, 18 nt, Human
gcaggaguagcugagcuc

SEQ ID NO: 1454052 - RNA, 17 nt, Human
gcaggaguagcugagcu

SEQ ID NO: 1454053 - RNA, 16 nt, Human
gcaggaguagcugagc

SEQ ID NO: 1454054 - RNA, 15 nt, Human
gcaggaguagcugag

SEQ ID NO: 1454055 - RNA, 14 nt, Human
gcaggaguagcuga

SEQ ID NO: 1454056 - RNA, 18 nt, Human
gcaggaggggggagggaa

SEQ ID NO: 1454057 - RNA, 15 nt, Human
gcaggaggggggagg

SEQ ID NO: 1454058 - RNA, 14 nt, Human
gcaggaggggggag

SEQ ID NO: 1454059 - RNA, 20 nt, Human
gcaggaguuucguuuucaaa

SEQ ID NO: 1454060 - RNA, 21 nt, Human
gcaggaguuucguuuucaaaa

SEQ ID NO: 1454061 - RNA, 17 nt, Human
gccagagaacccagccc

SEQ ID NO: 1454062 - RNA, 18 nt, Human
gccagagaacccagccca

SEQ ID NO: 1454063 - RNA, 20 nt, Human
gccacugaggggggauccag

SEQ ID NO: 1454064 - RNA, 18 nt, Human
gccagagccuggggcucu

SEQ ID NO: 1454065 - RNA, 17 nt, Human
gccagagccuggggcuc

SEQ ID NO: 1454066 - RNA, 16 nt, Human
gccagagccuggggcu

SEQ ID NO: 1454067 - RNA, 19 nt, Human
gccagagccuggggcucua

SEQ ID NO: 1454068 - RNA, 22 nt, Human
gccagagcuacccgcagaguuc

SEQ ID NO: 1454069 - RNA, 15 nt, Human
gccagagccuggggc

SEQ ID NO: 1454070 - RNA, 14 nt, Human
gccagagccugggg

SEQ ID NO: 1454071 - RNA, 13 nt, Human
gccagagccuggg

SEQ ID NO: 1454072 - RNA, 12 nt, Human
gccagagccugg

SEQ ID NO: 1454073 - RNA, 24 nt, Human
gccagagcccacuccaucugguag

SEQ ID NO: 1454074 - RNA, 23 nt, Human
gccagagcccacuccaucuggua

SEQ ID NO: 1454075 - RNA, 20 nt, Human
gccagagcccacuccaucug

SEQ ID NO: 1454076 - RNA, 23 nt, Human
gccagagauccaaaagaagcccc

SEQ ID NO: 1454077 - RNA, 16 nt, Human
gccagagcccacucca

SEQ ID NO: 1454078 - RNA, 15 nt, Human
gccagagcccacucc

SEQ ID NO: 1454079 - RNA, 14 nt, Human
gccagagccagggg

SEQ ID NO: 1454080 - RNA, 12 nt, Human
gccagagccagg

SEQ ID NO: 1454081 - RNA, 22 nt, Human
gccagagccaaggggcuucagg

SEQ ID NO: 1454082 - RNA, 23 nt, Human
gccacucacuaggcccccacuug

SEQ ID NO: 1454083 - RNA, 19 nt, Human
gccacucacuaggccccca

SEQ ID NO: 1454084 - RNA, 18 nt, Human
gccacucacuaggccccc

SEQ ID NO: 1454085 - RNA, 15 nt, Human
gccacucacuaggcc

SEQ ID NO: 1454086 - RNA, 14 nt, Human
gccacucacuaggc

SEQ ID NO: 1454087 - RNA, 23 nt, Human
gccacuaaccuugccugguacag

SEQ ID NO: 1454088 - RNA, 22 nt, Human
gccacuaaccuugccugguaca

SEQ ID NO: 1454089 - RNA, 19 nt, Human
gccacuaaccuugccuggu

SEQ ID NO: 1454090 - RNA, 22 nt, Human
gccacguuggagaagcccgugu

SEQ ID NO: 1454091 - RNA, 23 nt, Human
gccacguguuugugcuguggugu

SEQ ID NO: 1454092 - RNA, 21 nt, Human
gccacguguuuagaccuagau

SEQ ID NO: 1454093 - RNA, 23 nt, Human
gccaaauuaaaaaagauaaacac

SEQ ID NO: 1454094 - RNA, 22 nt, Human
gccaaauuaaaaaagauaaaca

SEQ ID NO: 1454095 - RNA, 21 nt, Human
gccaaauuaaaaaagauaaac

SEQ ID NO: 1454096 - RNA, 18 nt, Human
gccaaauuaaaaaagaua

SEQ ID NO: 1454097 - RNA, 16 nt, Human
gccaaauuaaaaaaga

SEQ ID NO: 1454098 - RNA, 14 nt, Human
gccaaauuaaaaaa

SEQ ID NO: 1454099 - RNA, 12 nt, Human
gccaaauuaaaa

SEQ ID NO: 1454100 - RNA, 19 nt, Human
gccaaaggggaccuggaag

SEQ ID NO: 1454101 - RNA, 17 nt, Human
gccaaauauguccuggg

SEQ ID NO: 1454102 - RNA, 15 nt, Human
gccaaauauguccug

SEQ ID NO: 1454103 - RNA, 20 nt, Human
gccaaaggggaccuggaagg

SEQ ID NO: 1454104 - RNA, 18 nt, Human
gccaaaggggaccuggaa

SEQ ID NO: 1454105 - RNA, 18 nt, Human
gccaaaggaugugauaua

SEQ ID NO: 1454106 - RNA, 17 nt, Human
gccaaaggaugugauau

SEQ ID NO: 1454107 - RNA, 16 nt, Human
gccaaaggaugugaua

SEQ ID NO: 1454108 - RNA, 17 nt, Human
gccagcuuguuuacaug

SEQ ID NO: 1454109 - RNA, 16 nt, Human
gccagcuuguuuacau

SEQ ID NO: 1454110 - RNA, 15 nt, Human
gccagcuuguuuaca

SEQ ID NO: 1454111 - RNA, 14 nt, Human
gccagcuuguuuac

SEQ ID NO: 1454112 - RNA, 20 nt, Human
gccagcugugguuuucuuuu

SEQ ID NO: 1454113 - RNA, 15 nt, Human
gccagcuggaggcag

SEQ ID NO: 1454114 - RNA, 17 nt, Human
gccagcuggaggcaggg

SEQ ID NO: 1454115 - RNA, 14 nt, Human
gccagcuggaggca

SEQ ID NO: 1454116 - RNA, 15 nt, Human
gccagcucuguauca

SEQ ID NO: 1454117 - RNA, 13 nt, Human
gccagcucuguau

SEQ ID NO: 1454118 - RNA, 23 nt, Human
gccagcuacuuccuccuccccac

SEQ ID NO: 1454119 - RNA, 22 nt, Human
gccagcuaagggguggggcugc

SEQ ID NO: 1454120 - RNA, 16 nt, Human
gccagcuaaggggugg

SEQ ID NO: 1454121 - RNA, 15 nt, Human
gccagcuaaggggug

SEQ ID NO: 1454122 - RNA, 22 nt, Human
gccagcgucggucugugccccu

SEQ ID NO: 1454123 - RNA, 21 nt, Human
gccagcgucggucugugcccc

SEQ ID NO: 1454124 - RNA, 20 nt, Human
gccagcgucggucugugccc

SEQ ID NO: 1454125 - RNA, 19 nt, Human
gccagcgucggucugugcc

SEQ ID NO: 1454126 - RNA, 18 nt, Human
gccagcgucggucugugc

SEQ ID NO: 1454127 - RNA, 22 nt, Human
gccagcguccuccucugugacc

SEQ ID NO: 1454128 - RNA, 19 nt, Human
gccagcguccuccucugug

SEQ ID NO: 1454129 - RNA, 13 nt, Human
gccagcguccucc

SEQ ID NO: 1454130 - RNA, 12 nt, Human
gccagcguccuc

SEQ ID NO: 1454131 - RNA, 20 nt, Human
gccagcgagcgcccagcucc

SEQ ID NO: 1454132 - RNA, 22 nt, Human
gccagcgagcgcccagcuccug

SEQ ID NO: 1454133 - RNA, 17 nt, Human
gccagcccugccuggag

SEQ ID NO: 1454134 - RNA, 16 nt, Human
gccagcccugccugga

SEQ ID NO: 1454135 - RNA, 15 nt, Human
gccagcccugccugg

SEQ ID NO: 1454136 - RNA, 14 nt, Human
gccagcccugccug

SEQ ID NO: 1454137 - RNA, 13 nt, Human
gccagcccugccu

SEQ ID NO: 1454138 - RNA, 10 nt, Human
gccagcccug

SEQ ID NO: 1454139 - RNA, 20 nt, Human
gccagccccuuagacagagg

SEQ ID NO: 1454140 - RNA, 22 nt, Human
gccagccccuuagacagaggcc

SEQ ID NO: 1454141 - RNA, 19 nt, Human
gccagccccuuagacagag

SEQ ID NO: 1454142 - RNA, 14 nt, Human
gccagccccugcca

SEQ ID NO: 1454143 - RNA, 20 nt, Human
gccagccccuggccccagga

SEQ ID NO: 1454144 - RNA, 19 nt, Human
gccagccccuggccccagg

SEQ ID NO: 1454145 - RNA, 14 nt, Human
gccagccccuggcc

SEQ ID NO: 1454146 - RNA, 23 nt, Human
gccagcccugccuggaggaccug

SEQ ID NO: 1454147 - RNA, 20 nt, Human
gccagcccugccuggaggac

SEQ ID NO: 1454148 - RNA, 19 nt, Human
gccagcccugccuggagga

SEQ ID NO: 1454149 - RNA, 18 nt, Human
gccagcccugccuggagg

SEQ ID NO: 1454150 - RNA, 10 nt, Human
gccagccccu

SEQ ID NO: 1454151 - RNA, 17 nt, Human
gccaucccgucuucucc

SEQ ID NO: 1454152 - RNA, 14 nt, Human
gccagugacagaca

SEQ ID NO: 1454153 - RNA, 14 nt, Human
gccaguccuguccu

SEQ ID NO: 1454154 - RNA, 13 nt, Human
gccaggucccucu

SEQ ID NO: 1454155 - RNA, 18 nt, Human
gccaggugaggucagcac

SEQ ID NO: 1454156 - RNA, 13 nt, Human
gccagugacagac

SEQ ID NO: 1454157 - RNA, 20 nt, Human
gccagucuguggaucagaga

SEQ ID NO: 1454158 - RNA, 13 nt, Human
gccagucugugga

SEQ ID NO: 1454159 - RNA, 12 nt, Human
gccagucugugg

SEQ ID NO: 1454160 - RNA, 21 nt, Human
gccaggugacugucuggggag

SEQ ID NO: 1454161 - RNA, 14 nt, Human
gccaggucccucuc

SEQ ID NO: 1454162 - RNA, 22 nt, Human
gccaggucacccuuugcuguga

SEQ ID NO: 1454163 - RNA, 15 nt, Human
gccagguccagagag

SEQ ID NO: 1454164 - RNA, 21 nt, Human
gccaggucacccuuugcugug

SEQ ID NO: 1454165 - RNA, 14 nt, Human
gccagcuuuucaaa

SEQ ID NO: 1454166 - RNA, 15 nt, Human
gccagcuuucccugc

SEQ ID NO: 1454167 - RNA, 23 nt, Human
gccagcuuguuuacaugcuuauu

SEQ ID NO: 1454168 - RNA, 20 nt, Human
gccagcuuguuuacaugcuu

SEQ ID NO: 1454169 - RNA, 23 nt, Human
gccagggccccucuccccaggga

SEQ ID NO: 1454170 - RNA, 22 nt, Human
gccagggccccucuccccaggg

SEQ ID NO: 1454171 - RNA, 20 nt, Human
gccagggccccucuccccag

SEQ ID NO: 1454172 - RNA, 19 nt, Human
gccagggccccucucccca

SEQ ID NO: 1454173 - RNA, 18 nt, Human
gccagggccccucucccc

SEQ ID NO: 1454174 - RNA, 17 nt, Human
gccagggccccucuccc

SEQ ID NO: 1454175 - RNA, 16 nt, Human
gccagggccccucucc

SEQ ID NO: 1454176 - RNA, 19 nt, Human
gccaggaagaucccccaga

SEQ ID NO: 1454177 - RNA, 21 nt, Human
gccauggagaaagcugacuug

SEQ ID NO: 1454178 - RNA, 22 nt, Human
gccauggagaaagcugacuugg

SEQ ID NO: 1454179 - RNA, 20 nt, Human
gccauggagaaagcugacuu

SEQ ID NO: 1454180 - RNA, 17 nt, Human
gccauggagaaagcuga

SEQ ID NO: 1454181 - RNA, 16 nt, Human
gccauggagaaagcug

SEQ ID NO: 1454182 - RNA, 15 nt, Human
gccauggagaaagcu

SEQ ID NO: 1454183 - RNA, 14 nt, Human
gccauggagaaagc

SEQ ID NO: 1454184 - RNA, 22 nt, Human
gccauggacucuguccugaagg

SEQ ID NO: 1454185 - RNA, 21 nt, Human
gccauggacucuguccugaag

SEQ ID NO: 1454186 - RNA, 20 nt, Human
gccauggacucuguccugaa

SEQ ID NO: 1454187 - RNA, 23 nt, Human
gccauggccugcaaacugggaac

SEQ ID NO: 1454188 - RNA, 21 nt, Human
gccauggccugcaaacuggga

SEQ ID NO: 1454189 - RNA, 18 nt, Human
gccauggccugcaaacug

SEQ ID NO: 1454190 - RNA, 17 nt, Human
gccauggccugcaaacu

SEQ ID NO: 1454191 - RNA, 14 nt, Human
gccauuuguacuga

SEQ ID NO: 1454192 - RNA, 15 nt, Human
gccauuugcuuuuuc

SEQ ID NO: 1454193 - RNA, 11 nt, Human
gccauuugaga

SEQ ID NO: 1454194 - RNA, 20 nt, Human
gcccacccccggcagcagcc

SEQ ID NO: 1454195 - RNA, 16 nt, Human
gcccacccccggcagc

SEQ ID NO: 1454196 - RNA, 19 nt, Human
gcccaaaggacgcacugag

SEQ ID NO: 1454197 - RNA, 21 nt, Human
gcccaaaggacgcacugagca

SEQ ID NO: 1454198 - RNA, 16 nt, Human
gcccaaaggacgcacu

SEQ ID NO: 1454199 - RNA, 15 nt, Human
gcccaaaggacgcac

SEQ ID NO: 1454200 - RNA, 21 nt, Human
gcccacaccuccuucccucuc

SEQ ID NO: 1454201 - RNA, 13 nt, Human
gcccacaccuccu

SEQ ID NO: 1454202 - RNA, 16 nt, Human
gcccacagcuguauga

SEQ ID NO: 1454203 - RNA, 14 nt, Human
gcccacagcaggcc

SEQ ID NO: 1454204 - RNA, 13 nt, Human
gccccgugaggca

SEQ ID NO: 1454205 - RNA, 13 nt, Human
gccccgcccucau

SEQ ID NO: 1454206 - RNA, 15 nt, Human
gccccgcccugcccc

SEQ ID NO: 1454207 - RNA, 13 nt, Human
gccccgcguggaa

SEQ ID NO: 1454208 - RNA, 21 nt, Human
gccccucaucucucugcccaa

SEQ ID NO: 1454209 - RNA, 21 nt, Human
gccccuagcgcuaucucccug

SEQ ID NO: 1454210 - RNA, 23 nt, Human
gccccuggcugggacguggcuca

SEQ ID NO: 1454211 - RNA, 16 nt, Human
gccccuggcugggacg

SEQ ID NO: 1454212 - RNA, 14 nt, Human
gccccuggcuggga

SEQ ID NO: 1454213 - RNA, 12 nt, Human
gccccuggcugg

SEQ ID NO: 1454214 - RNA, 14 nt, Human
gccccuggccccag

SEQ ID NO: 1454215 - RNA, 13 nt, Human
gccccuggcccca

SEQ ID NO: 1454216 - RNA, 22 nt, Human
gcccgcucuacaucuucugccu

SEQ ID NO: 1454217 - RNA, 21 nt, Human
gccccuuccgccacuggggcu

SEQ ID NO: 1454218 - RNA, 19 nt, Human
gccccuuccgccacugggg

SEQ ID NO: 1454219 - RNA, 17 nt, Human
gccccuuccgccacugg

SEQ ID NO: 1454220 - RNA, 15 nt, Human
gccccuuccgccacu

SEQ ID NO: 1454221 - RNA, 14 nt, Human
gccccuuccgccac

SEQ ID NO: 1454222 - RNA, 17 nt, Human
gcccuccuuccuaaauu

SEQ ID NO: 1454223 - RNA, 23 nt, Human
gcccuccugugcucagcccugag

SEQ ID NO: 1454224 - RNA, 22 nt, Human
gcccuccugugcucagcccuga

SEQ ID NO: 1454225 - RNA, 21 nt, Human
gcccuccugugcucagcccug

SEQ ID NO: 1454226 - RNA, 20 nt, Human
gcccuccugugcucagcccu

SEQ ID NO: 1454227 - RNA, 19 nt, Human
gcccuccugugcucagccc

SEQ ID NO: 1454228 - RNA, 18 nt, Human
gcccuccugugcucagcc

SEQ ID NO: 1454229 - RNA, 17 nt, Human
gcccuccugugcucagc

SEQ ID NO: 1454230 - RNA, 12 nt, Human
gcccuccugugc

SEQ ID NO: 1454231 - RNA, 16 nt, Human
gcccuccucugcacuc

SEQ ID NO: 1454232 - RNA, 19 nt, Human
gcccggacgcccaggaccc

SEQ ID NO: 1454233 - RNA, 21 nt, Human
gcccggacgcccaggacccca

SEQ ID NO: 1454234 - RNA, 14 nt, Human
gcccaguuaaucuu

SEQ ID NO: 1454235 - RNA, 19 nt, Human
gcccagugcacuugcugga

SEQ ID NO: 1454236 - RNA, 15 nt, Human
gcccagugcacugaa

SEQ ID NO: 1454237 - RNA, 22 nt, Human
gcccagugcacuugcuggaaga

SEQ ID NO: 1454238 - RNA, 18 nt, Human
gcccauccccaggcaccu

SEQ ID NO: 1454239 - RNA, 21 nt, Human
gcccaguuggagacugucugg

SEQ ID NO: 1454240 - RNA, 15 nt, Human
gcccaguuaaucuug

SEQ ID NO: 1454241 - RNA, 19 nt, Human
gcccaguucacccugauuu

SEQ ID NO: 1454242 - RNA, 17 nt, Human
gcccaguagaccuuguu

SEQ ID NO: 1454243 - RNA, 15 nt, Human
gcccaguagaccuug

SEQ ID NO: 1454244 - RNA, 23 nt, Human
gcccagggcccagagcccagcuc

SEQ ID NO: 1454245 - RNA, 21 nt, Human
gcccagggcccagagcccagc

SEQ ID NO: 1454246 - RNA, 20 nt, Human
gcccagggcccagagcccag

SEQ ID NO: 1454247 - RNA, 19 nt, Human
gcccagggcccagagccca

SEQ ID NO: 1454248 - RNA, 18 nt, Human
gcccagggcccagagccc

SEQ ID NO: 1454249 - RNA, 17 nt, Human
gcccagggcccagagcc

SEQ ID NO: 1454250 - RNA, 16 nt, Human
gcccagggcccagagc

SEQ ID NO: 1454251 - RNA, 15 nt, Human
gcccagggcccagag

SEQ ID NO: 1454252 - RNA, 14 nt, Human
gcccagggcccaga

SEQ ID NO: 1454253 - RNA, 13 nt, Human
gcccagcucugaa

SEQ ID NO: 1454254 - RNA, 23 nt, Human
gcccagcuccugacacugcugga

SEQ ID NO: 1454255 - RNA, 14 nt, Human
gcccagcuccugac

SEQ ID NO: 1454256 - RNA, 12 nt, Human
gcccagcuccug

SEQ ID NO: 1454257 - RNA, 15 nt, Human
gcccagcuccaaggg

SEQ ID NO: 1454258 - RNA, 12 nt, Human
gcccagcuccaa

SEQ ID NO: 1454259 - RNA, 19 nt, Human
gcccaggcucggccugccc

SEQ ID NO: 1454260 - RNA, 18 nt, Human
gcccaggcucggccugcc

SEQ ID NO: 1454261 - RNA, 18 nt, Human
gcccaggcugccgucccc

SEQ ID NO: 1454262 - RNA, 16 nt, Human
gcccaggcugccgucc

SEQ ID NO: 1454263 - RNA, 13 nt, Human
gcccaggcugccg

SEQ ID NO: 1454264 - RNA, 12 nt, Human
gcccaggcugcc

SEQ ID NO: 1454265 - RNA, 20 nt, Human
gcccaggcucggccugcccc

SEQ ID NO: 1454266 - RNA, 17 nt, Human
gccccaugaccuccagc

SEQ ID NO: 1454267 - RNA, 18 nt, Human
gccccaugaccuccagcu

SEQ ID NO: 1454268 - RNA, 16 nt, Human
gccccaugaccuccag

SEQ ID NO: 1454269 - RNA, 15 nt, Human
gccccaugaccucca

SEQ ID NO: 1454270 - RNA, 14 nt, Human
gccccaugaccucc

SEQ ID NO: 1454271 - RNA, 22 nt, Human
gccccaggaccuggcugccaua

SEQ ID NO: 1454272 - RNA, 21 nt, Human
gccccaggaccuggcugccau

SEQ ID NO: 1454273 - RNA, 20 nt, Human
gccccaggaccuggcugcca

SEQ ID NO: 1454274 - RNA, 24 nt, Human
gccccaggaccagcucaggacaga

SEQ ID NO: 1454275 - RNA, 23 nt, Human
gccccaggaccagcucaggacag

SEQ ID NO: 1454276 - RNA, 22 nt, Human
gccccaggaccagcucaggaca

SEQ ID NO: 1454277 - RNA, 19 nt, Human
gccccaggaccagcucagg

SEQ ID NO: 1454278 - RNA, 18 nt, Human
gccccaggaccagcucag

SEQ ID NO: 1454279 - RNA, 17 nt, Human
gccccaggaccagcuca

SEQ ID NO: 1454280 - RNA, 16 nt, Human
gccccaggaccagcuc

SEQ ID NO: 1454281 - RNA, 15 nt, Human
gccccaggaccagcu

SEQ ID NO: 1454282 - RNA, 14 nt, Human
gccccaggaccagc

SEQ ID NO: 1454283 - RNA, 12 nt, Human
gccccaggacca

SEQ ID NO: 1454284 - RNA, 11 nt, Human
gccccaggacc

SEQ ID NO: 1454285 - RNA, 22 nt, Human
gccccaggaaaggcccagccac

SEQ ID NO: 1454286 - RNA, 15 nt, Human
gccccaggaaaggcc

SEQ ID NO: 1454287 - RNA, 21 nt, Human
gccccagccucccugaagccu

SEQ ID NO: 1454288 - RNA, 18 nt, Human
gccccagccucccugaag

SEQ ID NO: 1454289 - RNA, 16 nt, Human
gccccagccucccuga

SEQ ID NO: 1454290 - RNA, 22 nt, Human
gccccagcccagccccacuccu

SEQ ID NO: 1454291 - RNA, 19 nt, Human
gccccagcccagccccacu

SEQ ID NO: 1454292 - RNA, 14 nt, Human
gccccagcccagcc

SEQ ID NO: 1454293 - RNA, 23 nt, Human
gccccagcccagccccacuccuc

SEQ ID NO: 1454294 - RNA, 22 nt, Human
gcccauggagauugaccuggau

SEQ ID NO: 1454295 - RNA, 21 nt, Human
gcccauggagauugaccugga

SEQ ID NO: 1454296 - RNA, 13 nt, Human
gcccauggagauu

SEQ ID NO: 1454297 - RNA, 23 nt, Human
gcccauggacaggcuggcuccag

SEQ ID NO: 1454298 - RNA, 21 nt, Human
gcccauggacaggcuggcucc

SEQ ID NO: 1454299 - RNA, 20 nt, Human
gcccauggacaggcuggcuc

SEQ ID NO: 1454300 - RNA, 19 nt, Human
gcccauggacaggcuggcu

SEQ ID NO: 1454301 - RNA, 19 nt, Human
gcccauccuguggucacug

SEQ ID NO: 1454302 - RNA, 18 nt, Human
gcccauccugaccagcug

SEQ ID NO: 1454303 - RNA, 16 nt, Human
gcccauccugaccagc

SEQ ID NO: 1454304 - RNA, 15 nt, Human
gcccauccugaccag

SEQ ID NO: 1454305 - RNA, 14 nt, Human
gcccauccugacca

SEQ ID NO: 1454306 - RNA, 22 nt, Human
gcccauccccuugaggucucag

SEQ ID NO: 1454307 - RNA, 14 nt, Human
gcccauccccuuga

SEQ ID NO: 1454308 - RNA, 22 nt, Human
gcccaucugggggccucuucug

SEQ ID NO: 1454309 - RNA, 23 nt, Human
gccuguccacaggcuucugagca

SEQ ID NO: 1454310 - RNA, 18 nt, Human
gccuguccacaggcuucu

SEQ ID NO: 1454311 - RNA, 15 nt, Human
gccuguccacaggcu

SEQ ID NO: 1454312 - RNA, 21 nt, Human
gccugucagauccaggagcuc

SEQ ID NO: 1454313 - RNA, 15 nt, Human
gccugucagauccag

SEQ ID NO: 1454314 - RNA, 22 nt, Human
gccugucagauccaggagcucc

SEQ ID NO: 1454315 - RNA, 20 nt, Human
gccugucagauccaggagcu

SEQ ID NO: 1454316 - RNA, 19 nt, Human
gccugucagauccaggagc

SEQ ID NO: 1454317 - RNA, 18 nt, Human
gccugucagauccaggag

SEQ ID NO: 1454318 - RNA, 13 nt, Human
gccuguaaacuuu

SEQ ID NO: 1454319 - RNA, 19 nt, Human
gccuguaacaagccagauu

SEQ ID NO: 1454320 - RNA, 21 nt, Human
gccugguuaaauaaggcaggg

SEQ ID NO: 1454321 - RNA, 14 nt, Human
gccugguuagaggc

SEQ ID NO: 1454322 - RNA, 21 nt, Human
gccuggagaugacuugaggcc

SEQ ID NO: 1454323 - RNA, 12 nt, Human
gccuggagcccu

SEQ ID NO: 1454324 - RNA, 16 nt, Human
gccuggagauccuccu

SEQ ID NO: 1454325 - RNA, 23 nt, Human
gccuggagacuuagggcaccagg

SEQ ID NO: 1454326 - RNA, 19 nt, Human
gccuggagacuuagggcac

SEQ ID NO: 1454327 - RNA, 17 nt, Human
gccuggagacuuagggc

SEQ ID NO: 1454328 - RNA, 18 nt, Human
gccuggacuuuccugcaa

SEQ ID NO: 1454329 - RNA, 17 nt, Human
gccuggacuuuccugca

SEQ ID NO: 1454330 - RNA, 16 nt, Human
gccuggacuuuccugc

SEQ ID NO: 1454331 - RNA, 15 nt, Human
gccuggacuuuccug

SEQ ID NO: 1454332 - RNA, 14 nt, Human
gccuggacuuuccu

SEQ ID NO: 1454333 - RNA, 23 nt, Human
gccuggaccucugacagcagcau

SEQ ID NO: 1454334 - RNA, 22 nt, Human
gccuggaccucugacagcagca

SEQ ID NO: 1454335 - RNA, 21 nt, Human
gccuggaccucugacagcagc

SEQ ID NO: 1454336 - RNA, 15 nt, Human
gccuggagcacaaag

SEQ ID NO: 1454337 - RNA, 14 nt, Human
gccuggagaugacu

SEQ ID NO: 1454338 - RNA, 22 nt, Human
gccuggagauccuccugcagac

SEQ ID NO: 1454339 - RNA, 20 nt, Human
gccuggagauccuccugcag

SEQ ID NO: 1454340 - RNA, 19 nt, Human
gccuggagauccuccugca

SEQ ID NO: 1454341 - RNA, 18 nt, Human
gccuggagauccuccugc

SEQ ID NO: 1454342 - RNA, 17 nt, Human
gccuggagauccuccug

SEQ ID NO: 1454343 - RNA, 15 nt, Human
gccuggagcccugga

SEQ ID NO: 1454344 - RNA, 16 nt, Human
gccuggagcccuggag

SEQ ID NO: 1454345 - RNA, 17 nt, Human
gccuggagcccuggaga

SEQ ID NO: 1454346 - RNA, 14 nt, Human
gccuguccugccug

SEQ ID NO: 1454347 - RNA, 13 nt, Human
gccuguccugccu

SEQ ID NO: 1454348 - RNA, 12 nt, Human
gccuguccugcc

SEQ ID NO: 1454349 - RNA, 20 nt, Human
gccuguccugaccugucuca

SEQ ID NO: 1454350 - RNA, 22 nt, Human
gccuguccuccaacaccaagca

SEQ ID NO: 1454351 - RNA, 20 nt, Human
gccuguccacaggcuucuga

SEQ ID NO: 1454352 - RNA, 20 nt, Human
gccugucccacccccacccc

SEQ ID NO: 1454353 - RNA, 15 nt, Human
gccuuagucucaguu

SEQ ID NO: 1454354 - RNA, 19 nt, Human
gccuuaggaagagccuucc

SEQ ID NO: 1454355 - RNA, 18 nt, Human
gccuuagucucaguuugu

SEQ ID NO: 1454356 - RNA, 22 nt, Human
gccuuagucucaguuugugugu

SEQ ID NO: 1454357 - RNA, 22 nt, Human
gccuucaagcucugagggaaag

SEQ ID NO: 1454358 - RNA, 16 nt, Human
gccuucaagcucugag

SEQ ID NO: 1454359 - RNA, 15 nt, Human
gccuucaagcucuga

SEQ ID NO: 1454360 - RNA, 14 nt, Human
gccuucaagcucug

SEQ ID NO: 1454361 - RNA, 11 nt, Human
gccuucaagcu

SEQ ID NO: 1454362 - RNA, 22 nt, Human
gccuucaagaaaacaggcacug

SEQ ID NO: 1454363 - RNA, 20 nt, Human
gccuucaagaaaacaggcac

SEQ ID NO: 1454364 - RNA, 18 nt, Human
gccuuauucagggaagga

SEQ ID NO: 1454365 - RNA, 16 nt, Human
gccuuauucagggaag

SEQ ID NO: 1454366 - RNA, 19 nt, Human
gccuuauuagagugucuuu

SEQ ID NO: 1454367 - RNA, 22 nt, Human
gccuuauuggaaagcagucccc

SEQ ID NO: 1454368 - RNA, 13 nt, Human
gccuucaaaucaa

SEQ ID NO: 1454369 - RNA, 23 nt, Human
gccuucagacagagaggacugua

SEQ ID NO: 1454370 - RNA, 22 nt, Human
gccuucacaaucugucaguucu

SEQ ID NO: 1454371 - RNA, 17 nt, Human
gccuucacaaucuguca

SEQ ID NO: 1454372 - RNA, 19 nt, Human
gccuucaagcucugaggga

SEQ ID NO: 1454373 - RNA, 12 nt, Human
gccuuccccacc

SEQ ID NO: 1454374 - RNA, 22 nt, Human
gccuuccccacccaccaacccu

SEQ ID NO: 1454375 - RNA, 17 nt, Human
gccuucgcuucuugccu

SEQ ID NO: 1454376 - RNA, 20 nt, Human
gccuuccccuuauccucccu

SEQ ID NO: 1454377 - RNA, 22 nt, Human
gccuuccccuuauccucccugu

SEQ ID NO: 1454378 - RNA, 21 nt, Human
gccuugggcuccgugugggag

SEQ ID NO: 1454379 - RNA, 22 nt, Human
gccuugggcuccgugugggaga

SEQ ID NO: 1454380 - RNA, 20 nt, Human
gccuugggcuccguguggga

SEQ ID NO: 1454381 - RNA, 18 nt, Human
gccuugggcuccgugugg

SEQ ID NO: 1454382 - RNA, 17 nt, Human
gccuugggcuccgugug

SEQ ID NO: 1454383 - RNA, 20 nt, Human
gccuuggcugacaugaagcu

SEQ ID NO: 1454384 - RNA, 22 nt, Human
gccuucgcuucuugccucugug

SEQ ID NO: 1454385 - RNA, 21 nt, Human
gccuucgcuucuugccucugu

SEQ ID NO: 1454386 - RNA, 20 nt, Human
gccuucgcuucuugccucug

SEQ ID NO: 1454387 - RNA, 18 nt, Human
gccuuggggcugaugcag

SEQ ID NO: 1454388 - RNA, 21 nt, Human
gccuuuaaaauuuuuuuagaa

SEQ ID NO: 1454389 - RNA, 20 nt, Human
gccuuuguuccccacuggag

SEQ ID NO: 1454390 - RNA, 19 nt, Human
gccuuuguuccccacugga

SEQ ID NO: 1454391 - RNA, 18 nt, Human
gccuuuguuccccacugg

SEQ ID NO: 1454392 - RNA, 14 nt, Human
gccuuucaggaucu

SEQ ID NO: 1454393 - RNA, 17 nt, Human
gccuuucaggaucuauu

SEQ ID NO: 1454394 - RNA, 14 nt, Human
gccuuuauuuguua

SEQ ID NO: 1454395 - RNA, 23 nt, Human
gccuuuauuuuuggcguggcuga

SEQ ID NO: 1454396 - RNA, 20 nt, Human
gccuuuauuuccacugugca

SEQ ID NO: 1454397 - RNA, 19 nt, Human
gccuuuauuuccacugugc

SEQ ID NO: 1454398 - RNA, 22 nt, Human
gccuuuauuguguuugucauua

SEQ ID NO: 1454399 - RNA, 23 nt, Human
gccuuuauuguguuugucauuag

SEQ ID NO: 1454400 - RNA, 21 nt, Human
gccuuuauuaaaaacugagug

SEQ ID NO: 1454401 - RNA, 13 nt, Human
gccuuuauugugu

SEQ ID NO: 1454402 - RNA, 14 nt, Human
gccuuuauuguguu

SEQ ID NO: 1454403 - RNA, 20 nt, Human
gccuuuauuguguuugucau

SEQ ID NO: 1454404 - RNA, 18 nt, Human
gccuuuugcaaccaggaa

SEQ ID NO: 1454405 - RNA, 20 nt, Human
gccuuuucccucuuuggcuc

SEQ ID NO: 1454406 - RNA, 13 nt, Human
gccuuuucccucu

SEQ ID NO: 1454407 - RNA, 22 nt, Human
gccuuuguuccccacuggagca

SEQ ID NO: 1454408 - RNA, 21 nt, Human
gccuuuguuccccacuggagc

SEQ ID NO: 1454409 - RNA, 23 nt, Human
gccuuuguuccccacuggagcag

SEQ ID NO: 1454410 - RNA, 22 nt, Human
gccuuuuaucccaaaguuguug

SEQ ID NO: 1454411 - RNA, 22 nt, Human
gcgaccuuccucauccacccca

SEQ ID NO: 1454412 - RNA, 15 nt, Human
gcgaccuuccucauc

SEQ ID NO: 1454413 - RNA, 10 nt, Human
gcgaccuccu

SEQ ID NO: 1454414 - RNA, 15 nt, Human
gcgaccgcccccucc

SEQ ID NO: 1454415 - RNA, 14 nt, Human
gcgaccgcccccuc

SEQ ID NO: 1454416 - RNA, 13 nt, Human
gcgaccgcccccu

SEQ ID NO: 1454417 - RNA, 16 nt, Human
gcguccuccucuguga

SEQ ID NO: 1454418 - RNA, 15 nt, Human
gcguccuccucugug

SEQ ID NO: 1454419 - RNA, 14 nt, Human
gcguccuccucugu

SEQ ID NO: 1454420 - RNA, 19 nt, Human
gcguccugucggagcccug

SEQ ID NO: 1454421 - RNA, 14 nt, Human
gcggggaggaggaa

SEQ ID NO: 1454422 - RNA, 20 nt, Human
gcggaacaaggagucagaca

SEQ ID NO: 1454423 - RNA, 23 nt, Human
gcgcugucaggauugcgagagau

SEQ ID NO: 1454424 - RNA, 17 nt, Human
gcgcugguccuuucuuc

SEQ ID NO: 1454425 - RNA, 19 nt, Human
gcgcccagggcugggagga

SEQ ID NO: 1454426 - RNA, 13 nt, Human
gcgcccagggcug

SEQ ID NO: 1454427 - RNA, 15 nt, Human
gcgcccagcuccuga

SEQ ID NO: 1454428 - RNA, 14 nt, Human
gcgcccagcuccug

SEQ ID NO: 1454429 - RNA, 22 nt, Human
gcgccaggcugaccacagcaca

SEQ ID NO: 1454430 - RNA, 20 nt, Human
gcgccaggcugaccacagca

SEQ ID NO: 1454431 - RNA, 15 nt, Human
gcgccaggcugacca

SEQ ID NO: 1454432 - RNA, 22 nt, Human
gcgccaggauggaacacggcca

SEQ ID NO: 1454433 - RNA, 21 nt, Human
gcgccaggauggaacacggcc

SEQ ID NO: 1454434 - RNA, 14 nt, Human
gcgacuuucugccu

SEQ ID NO: 1454435 - RNA, 12 nt, Human
gcgacuuucugc

SEQ ID NO: 1454436 - RNA, 20 nt, Human
gcgacuccguuggccacucc

SEQ ID NO: 1454437 - RNA, 19 nt, Human
gcgacuccguuggccacuc

SEQ ID NO: 1454438 - RNA, 18 nt, Human
gcgacuccguuggccacu

SEQ ID NO: 1454439 - RNA, 23 nt, Human
gcgacuaauuucaaaaugcuuuu

SEQ ID NO: 1454440 - RNA, 21 nt, Human
gcgacuaauuucaaaaugcuu

SEQ ID NO: 1454441 - RNA, 13 nt, Human
gcgacuaauuuca

SEQ ID NO: 1454442 - RNA, 23 nt, Human
gcgaccuuccucauccaccccau

SEQ ID NO: 1454443 - RNA, 21 nt, Human
gcgacguuagucgugagcucu

SEQ ID NO: 1454444 - RNA, 22 nt, Human
gcgacguuagucgugagcucuu

SEQ ID NO: 1454445 - RNA, 20 nt, Human
gcgcuccuggcccagccuuu

SEQ ID NO: 1454446 - RNA, 19 nt, Human
gcgcuccuggcccagccuu

SEQ ID NO: 1454447 - RNA, 18 nt, Human
gcgcuccuggcccagccu

SEQ ID NO: 1454448 - RNA, 18 nt, Human
gcgccuccaacccuagca

SEQ ID NO: 1454449 - RNA, 23 nt, Human
gcuagacacaugaagguaaauaa

SEQ ID NO: 1454450 - RNA, 22 nt, Human
gcuagacacaugaagguaaaua

SEQ ID NO: 1454451 - RNA, 22 nt, Human
gcuacccuuuuucuccagcugg

SEQ ID NO: 1454452 - RNA, 21 nt, Human
gcuacccuuuuucuccagcug

SEQ ID NO: 1454453 - RNA, 20 nt, Human
gcuacccuuuuucuccagcu

SEQ ID NO: 1454454 - RNA, 19 nt, Human
gcuacccuuuuucuccagc

SEQ ID NO: 1454455 - RNA, 18 nt, Human
gcuacccuuuuucuccag

SEQ ID NO: 1454456 - RNA, 19 nt, Human
gcuagagcuccucccucuc

SEQ ID NO: 1454457 - RNA, 16 nt, Human
gcuagagcuccucccu

SEQ ID NO: 1454458 - RNA, 15 nt, Human
gcuagagcuccuccc

SEQ ID NO: 1454459 - RNA, 13 nt, Human
gcuagagcuccuc

SEQ ID NO: 1454460 - RNA, 16 nt, Human
gcuacccuuuuucucc

SEQ ID NO: 1454461 - RNA, 19 nt, Human
gcuacccugagcugaggca

SEQ ID NO: 1454462 - RNA, 20 nt, Human
gcuacccugagcugaggcag

SEQ ID NO: 1454463 - RNA, 16 nt, Human
gcuacccugagcugag

SEQ ID NO: 1454464 - RNA, 14 nt, Human
gcuacccugagcug

SEQ ID NO: 1454465 - RNA, 12 nt, Human
gcuacccugagc

SEQ ID NO: 1454466 - RNA, 22 nt, Human
gcuaccaguauuuagaagccaa

SEQ ID NO: 1454467 - RNA, 21 nt, Human
gcuaccaguauuuagaagcca

SEQ ID NO: 1454468 - RNA, 19 nt, Human
gcuaccaguauuuagaagc

SEQ ID NO: 1454469 - RNA, 18 nt, Human
gcuaccaguauuuagaag

SEQ ID NO: 1454470 - RNA, 20 nt, Human
gcuaccaaagcaccuuagcu

SEQ ID NO: 1454471 - RNA, 14 nt, Human
gcuaccaaaacagu

SEQ ID NO: 1454472 - RNA, 13 nt, Human
gcuacauaauuua

SEQ ID NO: 1454473 - RNA, 12 nt, Human
gcuacagagaag

SEQ ID NO: 1454474 - RNA, 22 nt, Human
gcuacagagaaaccagcuuccu

SEQ ID NO: 1454475 - RNA, 21 nt, Human
gcuacagagaaaccagcuucc

SEQ ID NO: 1454476 - RNA, 20 nt, Human
gcuacagagaaaccagcuuc

SEQ ID NO: 1454477 - RNA, 19 nt, Human
gcuacagagaaaccagcuu

SEQ ID NO: 1454478 - RNA, 17 nt, Human
gcuacagagaaaccagc

SEQ ID NO: 1454479 - RNA, 21 nt, Human
gcuaccaccagcuguguccaa

SEQ ID NO: 1454480 - RNA, 20 nt, Human
gcuaccaccagcugugucca

SEQ ID NO: 1454481 - RNA, 16 nt, Human
gcuaccaccagcugug

SEQ ID NO: 1454482 - RNA, 15 nt, Human
gcuaccaccagcugu

SEQ ID NO: 1454483 - RNA, 14 nt, Human
gcuaccaccagcug

SEQ ID NO: 1454484 - RNA, 13 nt, Human
gcuaccaccagcu

SEQ ID NO: 1454485 - RNA, 12 nt, Human
gcuaccaccagc

SEQ ID NO: 1454486 - RNA, 15 nt, Human
gcuaccaguauuuag

SEQ ID NO: 1454487 - RNA, 14 nt, Human
gcuaccaguauuua

SEQ ID NO: 1454488 - RNA, 13 nt, Human
gcuaccaguauuu

SEQ ID NO: 1454489 - RNA, 13 nt, Human
gcuaccaggaaag

SEQ ID NO: 1454490 - RNA, 22 nt, Human
gcguccugucggagcccugucu

SEQ ID NO: 1454491 - RNA, 17 nt, Human
gcuaagaaccuggaacu

SEQ ID NO: 1454492 - RNA, 16 nt, Human
gcuaagaaccuggaac

SEQ ID NO: 1454493 - RNA, 23 nt, Human
gcuaagaaccuggaacuugggga

SEQ ID NO: 1454494 - RNA, 17 nt, Human
gcuacacccuuuuccag

SEQ ID NO: 1454495 - RNA, 21 nt, Human
gcuacaccacucuggcagcca

SEQ ID NO: 1454496 - RNA, 20 nt, Human
gcuacaccacucuggcagcc

SEQ ID NO: 1454497 - RNA, 19 nt, Human
gcuacaccacucuggcagc

SEQ ID NO: 1454498 - RNA, 18 nt, Human
gcuacaccacucuggcag

SEQ ID NO: 1454499 - RNA, 17 nt, Human
gcuacaccacucuggca

SEQ ID NO: 1454500 - RNA, 16 nt, Human
gcuacaccacucuggc

SEQ ID NO: 1454501 - RNA, 23 nt, Human
gcuacaccuauuaucccagcugc

SEQ ID NO: 1454502 - RNA, 19 nt, Human
gcuacacccuuuuccagcu

SEQ ID NO: 1454503 - RNA, 16 nt, Human
gcuacagagaaaccag

SEQ ID NO: 1454504 - RNA, 15 nt, Human
gcuacagagaaacca

SEQ ID NO: 1454505 - RNA, 13 nt, Human
gcuacagagaaac

SEQ ID NO: 1454506 - RNA, 12 nt, Human
gcuacagagaaa

SEQ ID NO: 1454507 - RNA, 11 nt, Human
gcuacagagaa

SEQ ID NO: 1454508 - RNA, 22 nt, Human
gcuacaccacucuggcagccac

SEQ ID NO: 1454509 - RNA, 16 nt, Human
gcuacagaagaaacug

SEQ ID NO: 1454510 - RNA, 15 nt, Human
gccugagcccaggga

SEQ ID NO: 1454511 - RNA, 14 nt, Human
gccugagcccaggg

SEQ ID NO: 1454512 - RNA, 13 nt, Human
gccugagcccagg

SEQ ID NO: 1454513 - RNA, 12 nt, Human
gccugagcccag

SEQ ID NO: 1454514 - RNA, 23 nt, Human
gccugagcaguccuuggccugcu

SEQ ID NO: 1454515 - RNA, 19 nt, Human
gccugagcaguccuuggcc

SEQ ID NO: 1454516 - RNA, 18 nt, Human
gccugagcaguccuuggc

SEQ ID NO: 1454517 - RNA, 16 nt, Human
gccugagcaguccuug

SEQ ID NO: 1454518 - RNA, 18 nt, Human
gccugagcaacucuugau

SEQ ID NO: 1454519 - RNA, 20 nt, Human
gccugagcccagggaggccg

SEQ ID NO: 1454520 - RNA, 19 nt, Human
gccugagcccagggaggcc

SEQ ID NO: 1454521 - RNA, 18 nt, Human
gccugagcccagggaggc

SEQ ID NO: 1454522 - RNA, 17 nt, Human
gccugagcccagggagg

SEQ ID NO: 1454523 - RNA, 16 nt, Human
gccugagcccagggag

SEQ ID NO: 1454524 - RNA, 20 nt, Human
gccuggaccucugacagcag

SEQ ID NO: 1454525 - RNA, 18 nt, Human
gccuggaccucugacagc

SEQ ID NO: 1454526 - RNA, 15 nt, Human
gccuggaccucugac

SEQ ID NO: 1454527 - RNA, 13 nt, Human
gccuggaccucug

SEQ ID NO: 1454528 - RNA, 23 nt, Human
gccugcugcugagaaccuggccu

SEQ ID NO: 1454529 - RNA, 22 nt, Human
gccugcugcugagaaccuggcc

SEQ ID NO: 1454530 - RNA, 17 nt, Human
gccugaacuccugccau

SEQ ID NO: 1454531 - RNA, 19 nt, Human
gccugaaccccagggcugu

SEQ ID NO: 1454532 - RNA, 14 nt, Human
gccugaacccaaga

SEQ ID NO: 1454533 - RNA, 23 nt, Human
gccugaaagaggcugaggccugg

SEQ ID NO: 1454534 - RNA, 20 nt, Human
gccucccccacuuucuuucu

SEQ ID NO: 1454535 - RNA, 11 nt, Human
gccucccccac

SEQ ID NO: 1454536 - RNA, 22 nt, Human
gccucccauccagggcccccau

SEQ ID NO: 1454537 - RNA, 15 nt, Human
gccucccauccaggg

SEQ ID NO: 1454538 - RNA, 14 nt, Human
gccucccauguuca

SEQ ID NO: 1454539 - RNA, 16 nt, Human
gccucccuccugcccc

SEQ ID NO: 1454540 - RNA, 21 nt, Human
gccuccccuuaaaggggagac

SEQ ID NO: 1454541 - RNA, 13 nt, Human
gccucccccacuu

SEQ ID NO: 1454542 - RNA, 13 nt, Human
gccucccugagcu

SEQ ID NO: 1454543 - RNA, 12 nt, Human
gccucccugagc

SEQ ID NO: 1454544 - RNA, 16 nt, Human
gccucccuggucccuu

SEQ ID NO: 1454545 - RNA, 18 nt, Human
gccucccugaagccuuug

SEQ ID NO: 1454546 - RNA, 13 nt, Human
gccucccugaagc

SEQ ID NO: 1454547 - RNA, 15 nt, Human
gccucccucugcugu

SEQ ID NO: 1454548 - RNA, 18 nt, Human
gccucuccccagguccag

SEQ ID NO: 1454549 - RNA, 17 nt, Human
gccucucccaggcaggg

SEQ ID NO: 1454550 - RNA, 15 nt, Human
gccucucccaggcag

SEQ ID NO: 1454551 - RNA, 14 nt, Human
gccucucccaggca

SEQ ID NO: 1454552 - RNA, 17 nt, Human
gccucuccccugccugc

SEQ ID NO: 1454553 - RNA, 18 nt, Human
gccucuccccugccugcc

SEQ ID NO: 1454554 - RNA, 16 nt, Human
gccucuccccugccug

SEQ ID NO: 1454555 - RNA, 20 nt, Human
gccucucccaggcaggggcc

SEQ ID NO: 1454556 - RNA, 23 nt, Human
gccucuccccagguccagcucug

SEQ ID NO: 1454557 - RNA, 22 nt, Human
gccucuccccagguccagcucu

SEQ ID NO: 1454558 - RNA, 20 nt, Human
gccucuccccagguccagcu

SEQ ID NO: 1454559 - RNA, 10 nt, Human
gccucucugc

SEQ ID NO: 1454560 - RNA, 14 nt, Human
gccucucugcaggu

SEQ ID NO: 1454561 - RNA, 16 nt, Human
gccucucugcaggucc

SEQ ID NO: 1454562 - RNA, 17 nt, Human
gccucucugcagguccc

SEQ ID NO: 1454563 - RNA, 18 nt, Human
gccucucugcaggucccu

SEQ ID NO: 1454564 - RNA, 22 nt, Human
gccgugacgucuggguggcccu

SEQ ID NO: 1454565 - RNA, 18 nt, Human
gccgugacgucugggugg

SEQ ID NO: 1454566 - RNA, 14 nt, Human
gccgugacgucugg

SEQ ID NO: 1454567 - RNA, 16 nt, Human
gccgugaaugggugcc

SEQ ID NO: 1454568 - RNA, 23 nt, Human
gccgucuccaggggcugcuuccu

SEQ ID NO: 1454569 - RNA, 21 nt, Human
gccgucuccaggggcugcuuc

SEQ ID NO: 1454570 - RNA, 16 nt, Human
gccgucuccaggggcu

SEQ ID NO: 1454571 - RNA, 14 nt, Human
gccgucuccagggg

SEQ ID NO: 1454572 - RNA, 23 nt, Human
gccggguguccccaacagcgccc

SEQ ID NO: 1454573 - RNA, 20 nt, Human
gccguggcugcugugggaaa

SEQ ID NO: 1454574 - RNA, 16 nt, Human
gccguggcugcugugg

SEQ ID NO: 1454575 - RNA, 23 nt, Human
gccguggauugcacguggccucu

SEQ ID NO: 1454576 - RNA, 22 nt, Human
gccguggauugcacguggccuc

SEQ ID NO: 1454577 - RNA, 21 nt, Human
gccguggauugcacguggccu

SEQ ID NO: 1454578 - RNA, 23 nt, Human
gccuaaaagugggcuugauucug

SEQ ID NO: 1454579 - RNA, 22 nt, Human
gccucaauuucugaacaccaua

SEQ ID NO: 1454580 - RNA, 14 nt, Human
gccucaaugccagu

SEQ ID NO: 1454581 - RNA, 21 nt, Human
gccuaagaggcugcccuccug

SEQ ID NO: 1454582 - RNA, 13 nt, Human
gccuaagaggcug

SEQ ID NO: 1454583 - RNA, 12 nt, Human
gccuaagaggcu

SEQ ID NO: 1454584 - RNA, 22 nt, Human
gccuaaaagugggcuugauucu

SEQ ID NO: 1454585 - RNA, 22 nt, Human
gccucaaagcaagcauucagaa

SEQ ID NO: 1454586 - RNA, 20 nt, Human
gccucaaauaaaaagugcuu

SEQ ID NO: 1454587 - RNA, 17 nt, Human
gccucaaaggcccgcuc

SEQ ID NO: 1454588 - RNA, 15 nt, Human
gccucaaaggcccgc

SEQ ID NO: 1454589 - RNA, 20 nt, Human
gccuauugcuagagcuccuc

SEQ ID NO: 1454590 - RNA, 23 nt, Human
gccuauugcuagagcuccucccu

SEQ ID NO: 1454591 - RNA, 19 nt, Human
gccuauugcuagagcuccu

SEQ ID NO: 1454592 - RNA, 18 nt, Human
gccuauugcuagagcucc

SEQ ID NO: 1454593 - RNA, 17 nt, Human
gccuauugcuagagcuc

SEQ ID NO: 1454594 - RNA, 20 nt, Human
gccuaagaggcugcccuccu

SEQ ID NO: 1454595 - RNA, 17 nt, Human
gccuauuuuaauaaaca

SEQ ID NO: 1454596 - RNA, 22 nt, Human
gccggggugggguggcugcagc

SEQ ID NO: 1454597 - RNA, 21 nt, Human
gccgggucugccucuucuggg

SEQ ID NO: 1454598 - RNA, 14 nt, Human
gccgggucugccuc

SEQ ID NO: 1454599 - RNA, 23 nt, Human
gccggggugggguggcugcagcc

SEQ ID NO: 1454600 - RNA, 20 nt, Human
gccggggugggguggcugca

SEQ ID NO: 1454601 - RNA, 19 nt, Human
gccggggugggguggcugc

SEQ ID NO: 1454602 - RNA, 17 nt, Human
gccggggcgaguggcac

SEQ ID NO: 1454603 - RNA, 15 nt, Human
gccggggcagccccc

SEQ ID NO: 1454604 - RNA, 23 nt, Human
gccggggaacuggccaagcugag

SEQ ID NO: 1454605 - RNA, 19 nt, Human
gccgggagccugacccuca

SEQ ID NO: 1454606 - RNA, 14 nt, Human
gccgggagccugac

SEQ ID NO: 1454607 - RNA, 13 nt, Human
gccgggagccuga

SEQ ID NO: 1454608 - RNA, 14 nt, Human
gccgaugcccagag

SEQ ID NO: 1454609 - RNA, 22 nt, Human
gccgauauacucuagaugaagu

SEQ ID NO: 1454610 - RNA, 17 nt, Human
gccgauauacucuagau

SEQ ID NO: 1454611 - RNA, 18 nt, Human
gccgaguccaagcuggga

SEQ ID NO: 1454612 - RNA, 15 nt, Human
gccgaguccaagcug

SEQ ID NO: 1454613 - RNA, 14 nt, Human
gccgaguccaagcu

SEQ ID NO: 1454614 - RNA, 17 nt, Human
gcccuugaguccccauu

SEQ ID NO: 1454615 - RNA, 16 nt, Human
gcccuucuuucuaccc

SEQ ID NO: 1454616 - RNA, 13 nt, Human
gcccuucuuucua

SEQ ID NO: 1454617 - RNA, 12 nt, Human
gcccuucuuucu

SEQ ID NO: 1454618 - RNA, 18 nt, Human
gccgacgcuugcacgacc

SEQ ID NO: 1454619 - RNA, 21 nt, Human
gccgagaguccaucagccucc

SEQ ID NO: 1454620 - RNA, 17 nt, Human
gcccucugggcucugag

SEQ ID NO: 1454621 - RNA, 18 nt, Human
gcccucugggcucugagu

SEQ ID NO: 1454622 - RNA, 16 nt, Human
gcccucugggcucuga

SEQ ID NO: 1454623 - RNA, 15 nt, Human
gcccucugggcucug

SEQ ID NO: 1454624 - RNA, 14 nt, Human
gcccucugggcucu

SEQ ID NO: 1454625 - RNA, 13 nt, Human
gcccucugggcuc

SEQ ID NO: 1454626 - RNA, 12 nt, Human
gcccucugggcu

SEQ ID NO: 1454627 - RNA, 11 nt, Human
gcccucugggc

SEQ ID NO: 1454628 - RNA, 18 nt, Human
gcccuuccuggacagcug

SEQ ID NO: 1454629 - RNA, 17 nt, Human
gcccuuccuggacagcu

SEQ ID NO: 1454630 - RNA, 16 nt, Human
gcccuuccuggacagc

SEQ ID NO: 1454631 - RNA, 15 nt, Human
gcccuuccuggacag

SEQ ID NO: 1454632 - RNA, 14 nt, Human
gcccuuccuggaca

SEQ ID NO: 1454633 - RNA, 13 nt, Human
gcccuuccuggac

SEQ ID NO: 1454634 - RNA, 12 nt, Human
gcccuuccugga

SEQ ID NO: 1454635 - RNA, 22 nt, Human
gcccuuccuggacagcugugcc

SEQ ID NO: 1454636 - RNA, 21 nt, Human
gcccuuccuggacagcugugc

SEQ ID NO: 1454637 - RNA, 20 nt, Human
gcccuuccuggacagcugug

SEQ ID NO: 1454638 - RNA, 19 nt, Human
gcccuuccuggacagcugu

SEQ ID NO: 1454639 - RNA, 23 nt, Human
gcccuuccuggacagcugugccu

SEQ ID NO: 1454640 - RNA, 20 nt, Human
gcccuucuauacccacccag

SEQ ID NO: 1454641 - RNA, 19 nt, Human
gcccuucuuuccacagaag

SEQ ID NO: 1454642 - RNA, 21 nt, Human
gcccuucuauacccacccaga

SEQ ID NO: 1454643 - RNA, 22 nt, Human
gcccuucuauacccacccagaa

SEQ ID NO: 1454644 - RNA, 22 nt, Human
gcuggccucccaaaugagccau

SEQ ID NO: 1454645 - RNA, 21 nt, Human
gcuggccucccaaaugagcca

SEQ ID NO: 1454646 - RNA, 21 nt, Human
gcuggccucacccaccccugc

SEQ ID NO: 1454647 - RNA, 16 nt, Human
gcuggccucugcgagu

SEQ ID NO: 1454648 - RNA, 15 nt, Human
gcuggccucugcgag

SEQ ID NO: 1454649 - RNA, 14 nt, Human
gcuggccucugcga

SEQ ID NO: 1454650 - RNA, 13 nt, Human
gcuggccucugcg

SEQ ID NO: 1454651 - RNA, 12 nt, Human
gcuggccucugc

SEQ ID NO: 1454652 - RNA, 23 nt, Human
gcugggacaccccgacuuuuguu

SEQ ID NO: 1454653 - RNA, 20 nt, Human
gcugggacguggcucagcca

SEQ ID NO: 1454654 - RNA, 19 nt, Human
gcugggacguggcucagcc

SEQ ID NO: 1454655 - RNA, 17 nt, Human
gcugggacguggcucag

SEQ ID NO: 1454656 - RNA, 23 nt, Human
gcugggacucagccuucagacag

SEQ ID NO: 1454657 - RNA, 22 nt, Human
gcugggacucagccuucagaca

SEQ ID NO: 1454658 - RNA, 19 nt, Human
gcugggacucagccuucag

SEQ ID NO: 1454659 - RNA, 16 nt, Human
gcugggacucagccuu

SEQ ID NO: 1454660 - RNA, 15 nt, Human
gcugggacucagccu

SEQ ID NO: 1454661 - RNA, 14 nt, Human
gcugggacucagcc

SEQ ID NO: 1454662 - RNA, 12 nt, Human
gcugggacucag

SEQ ID NO: 1454663 - RNA, 14 nt, Human
gcugggacuacagg

SEQ ID NO: 1454664 - RNA, 22 nt, Human
gcugggacguggcucagccagc

SEQ ID NO: 1454665 - RNA, 21 nt, Human
gcugggacguggcucagccag

SEQ ID NO: 1454666 - RNA, 20 nt, Human
gcuggcccagggcccagagc

SEQ ID NO: 1454667 - RNA, 19 nt, Human
gcuggcccagggcccagag

SEQ ID NO: 1454668 - RNA, 18 nt, Human
gcuggcccagggcccaga

SEQ ID NO: 1454669 - RNA, 21 nt, Human
gcuggcccagggcccagagcc

SEQ ID NO: 1454670 - RNA, 17 nt, Human
gcuggcccagggcccag

SEQ ID NO: 1454671 - RNA, 16 nt, Human
gcuggcccagggccca

SEQ ID NO: 1454672 - RNA, 15 nt, Human
gcuggcccagggccc

SEQ ID NO: 1454673 - RNA, 13 nt, Human
gcuggcccagggc

SEQ ID NO: 1454674 - RNA, 21 nt, Human
gcuggcaacacagaggcagcc

SEQ ID NO: 1454675 - RNA, 19 nt, Human
gcuggcaacacagaggcag

SEQ ID NO: 1454676 - RNA, 14 nt, Human
gcuggcaacacaga

SEQ ID NO: 1454677 - RNA, 15 nt, Human
gcuggaugagcuccc

SEQ ID NO: 1454678 - RNA, 23 nt, Human
gcuggaugagcucccacaagccu

SEQ ID NO: 1454679 - RNA, 14 nt, Human
gcuggaugagcucc

SEQ ID NO: 1454680 - RNA, 13 nt, Human
gcuggaugagcuc

SEQ ID NO: 1454681 - RNA, 20 nt, Human
gcuggaugagaauuugagug

SEQ ID NO: 1454682 - RNA, 23 nt, Human
gcugcuucucccaggcaaggcug

SEQ ID NO: 1454683 - RNA, 16 nt, Human
gcugcuuccuccugga

SEQ ID NO: 1454684 - RNA, 15 nt, Human
gcugcuuccuccugg

SEQ ID NO: 1454685 - RNA, 14 nt, Human
gcugcuuccuccug

SEQ ID NO: 1454686 - RNA, 13 nt, Human
gcugcuuccuccu

SEQ ID NO: 1454687 - RNA, 13 nt, Human
gcugcuuccagug

SEQ ID NO: 1454688 - RNA, 22 nt, Human
gcugcuucucccaggcaaggcu

SEQ ID NO: 1454689 - RNA, 21 nt, Human
gcugcuucucccaggcaaggc

SEQ ID NO: 1454690 - RNA, 19 nt, Human
gcugcuucucccaggcaag

SEQ ID NO: 1454691 - RNA, 18 nt, Human
gcugcuucucccaggcaa

SEQ ID NO: 1454692 - RNA, 19 nt, Human
gcugcuucccugaagcucc

SEQ ID NO: 1454693 - RNA, 17 nt, Human
gcugcuuccuccuggaa

SEQ ID NO: 1454694 - RNA, 22 nt, Human
gcugcugugugcuuuuuuugug

SEQ ID NO: 1454695 - RNA, 21 nt, Human
gcugcugugugcuuuuuuugu

SEQ ID NO: 1454696 - RNA, 19 nt, Human
gcugcuagagugacucacu

SEQ ID NO: 1454697 - RNA, 20 nt, Human
gcugcuguggccaucaaccu

SEQ ID NO: 1454698 - RNA, 20 nt, Human
gcugcuagagugacucacua

SEQ ID NO: 1454699 - RNA, 13 nt, Human
gcugcuagaguga

SEQ ID NO: 1454700 - RNA, 14 nt, Human
gcugcgcacugugu

SEQ ID NO: 1454701 - RNA, 20 nt, Human
gcugccuuuggacuuguccc

SEQ ID NO: 1454702 - RNA, 15 nt, Human
gcugccuuuggacuu

SEQ ID NO: 1454703 - RNA, 18 nt, Human
gcugcccuguaccccagc

SEQ ID NO: 1454704 - RNA, 17 nt, Human
gcuagagcuccucccuc

SEQ ID NO: 1454705 - RNA, 18 nt, Human
gcuagaggaagcagccaa

SEQ ID NO: 1454706 - RNA, 18 nt, Human
gcuagauguauguacuuc

SEQ ID NO: 1454707 - RNA, 12 nt, Human
gcuagcaaauag

SEQ ID NO: 1454708 - RNA, 16 nt, Human
gcuagcaaauaguaau

SEQ ID NO: 1454709 - RNA, 22 nt, Human
gcuguguccaaaaccgccagcu

SEQ ID NO: 1454710 - RNA, 18 nt, Human
gcuguguaagauuuguuu

SEQ ID NO: 1454711 - RNA, 23 nt, Human
gcuguguaagauuuguuuuuaaa

SEQ ID NO: 1454712 - RNA, 16 nt, Human
gcuguguaagauuugu

SEQ ID NO: 1454713 - RNA, 22 nt, Human
gcugugguuuucuuuugccaug

SEQ ID NO: 1454714 - RNA, 23 nt, Human
gcugugguuuucuuuugccauga

SEQ ID NO: 1454715 - RNA, 15 nt, Human
gcugugguuuucuuu

SEQ ID NO: 1454716 - RNA, 14 nt, Human
gcugugguuuucuu

SEQ ID NO: 1454717 - RNA, 13 nt, Human
gcugugguuuucu

SEQ ID NO: 1454718 - RNA, 21 nt, Human
gcugucuuaaacuaaaugugc

SEQ ID NO: 1454719 - RNA, 23 nt, Human
gcugucuguuguauucauugugg

SEQ ID NO: 1454720 - RNA, 23 nt, Human
gcugucugggugcuacuggggaa

SEQ ID NO: 1454721 - RNA, 22 nt, Human
gcugucugggugcuacugggga

SEQ ID NO: 1454722 - RNA, 20 nt, Human
gcugucugggugcuacuggg

SEQ ID NO: 1454723 - RNA, 17 nt, Human
gcugucugggugcuacu

SEQ ID NO: 1454724 - RNA, 18 nt, Human
gcugucugaggcuaggug

SEQ ID NO: 1454725 - RNA, 16 nt, Human
gcugucccucccccuu

SEQ ID NO: 1454726 - RNA, 15 nt, Human
gcugucccucccccu

SEQ ID NO: 1454727 - RNA, 17 nt, Human
gcugucacaaccaagaa

SEQ ID NO: 1454728 - RNA, 13 nt, Human
gcugucacaggcg

SEQ ID NO: 1454729 - RNA, 22 nt, Human
gcugguguuaacagaagggagg

SEQ ID NO: 1454730 - RNA, 14 nt, Human
gcugucaaggcuca

SEQ ID NO: 1454731 - RNA, 14 nt, Human
gcugguuagaaaug

SEQ ID NO: 1454732 - RNA, 22 nt, Human
gcuguauuuuaaaagaaugauu

SEQ ID NO: 1454733 - RNA, 21 nt, Human
gcugguguuaacagaagggag

SEQ ID NO: 1454734 - RNA, 18 nt, Human
gcugguguuaacagaagg

SEQ ID NO: 1454735 - RNA, 17 nt, Human
gcugguguuaacagaag

SEQ ID NO: 1454736 - RNA, 16 nt, Human
gcugguguuaacagaa

SEQ ID NO: 1454737 - RNA, 14 nt, Human
gcugguguuaacag

SEQ ID NO: 1454738 - RNA, 13 nt, Human
gcugguguuaaca

SEQ ID NO: 1454739 - RNA, 23 nt, Human
gcuggugugguacagagaagcca

SEQ ID NO: 1454740 - RNA, 22 nt, Human
gcuggugugguacagagaagcc

SEQ ID NO: 1454741 - RNA, 21 nt, Human
gcuggugugguacagagaagc

SEQ ID NO: 1454742 - RNA, 20 nt, Human
gcuggugugguacagagaag

SEQ ID NO: 1454743 - RNA, 19 nt, Human
gcuggugugguacagagaa

SEQ ID NO: 1454744 - RNA, 18 nt, Human
gcuggugugguacagaga

SEQ ID NO: 1454745 - RNA, 17 nt, Human
gcuggugugguacagag

SEQ ID NO: 1454746 - RNA, 15 nt, Human
gcuggugugguacag

SEQ ID NO: 1454747 - RNA, 18 nt, Human
gcuggugggugccuaggc

SEQ ID NO: 1454748 - RNA, 20 nt, Human
gcuggugcggcuggccaugg

SEQ ID NO: 1454749 - RNA, 18 nt, Human
gcuggugcggcuggccau

SEQ ID NO: 1454750 - RNA, 15 nt, Human
gcuggugcggcuggc

SEQ ID NO: 1454751 - RNA, 23 nt, Human
gcugggagaggcagcccaggaag

SEQ ID NO: 1454752 - RNA, 22 nt, Human
gcugggagcuccacucugcuuc

SEQ ID NO: 1454753 - RNA, 21 nt, Human
gcugggagcuccacucugcuu

SEQ ID NO: 1454754 - RNA, 20 nt, Human
gcugggagcuccacucugcu

SEQ ID NO: 1454755 - RNA, 19 nt, Human
gcugggaggagggcaggca

SEQ ID NO: 1454756 - RNA, 15 nt, Human
gcugggaggaaggac

SEQ ID NO: 1454757 - RNA, 22 nt, Human
gcugggaggaaggacuucccug

SEQ ID NO: 1454758 - RNA, 17 nt, Human
gcugggaggagggcagg

SEQ ID NO: 1454759 - RNA, 18 nt, Human
gcugggagcuccacucug

SEQ ID NO: 1454760 - RNA, 16 nt, Human
gcugggagcuccacuc

SEQ ID NO: 1454761 - RNA, 14 nt, Human
gcugggagcuccac

SEQ ID NO: 1454762 - RNA, 13 nt, Human
gcugggagcucca

SEQ ID NO: 1454763 - RNA, 15 nt, Human
gcugggagaggcagc

SEQ ID NO: 1454764 - RNA, 14 nt, Human
gcugggagaggcag

SEQ ID NO: 1454765 - RNA, 20 nt, Human
gcuggggugcagggaugugg

SEQ ID NO: 1454766 - RNA, 15 nt, Human
gcuggggugcaggga

SEQ ID NO: 1454767 - RNA, 13 nt, Human
gcuggggugcagg

SEQ ID NO: 1454768 - RNA, 12 nt, Human
gcuggggugcag

SEQ ID NO: 1454769 - RNA, 19 nt, Human
gcuggggucccagcagcug

SEQ ID NO: 1454770 - RNA, 17 nt, Human
gcuggggucccagcagc

SEQ ID NO: 1454771 - RNA, 16 nt, Human
gcuggggucccagcag

SEQ ID NO: 1454772 - RNA, 14 nt, Human
gcuggggucccagc

SEQ ID NO: 1454773 - RNA, 16 nt, Human
gcuggggccugggaca

SEQ ID NO: 1454774 - RNA, 15 nt, Human
gcuggggccugggac

SEQ ID NO: 1454775 - RNA, 13 nt, Human
gcuggggccuggg

SEQ ID NO: 1454776 - RNA, 12 nt, Human
gcuggggccugg

SEQ ID NO: 1454777 - RNA, 16 nt, Human
gcuggggccaggcugg

SEQ ID NO: 1454778 - RNA, 19 nt, Human
gcuggggccaggcuggguc

SEQ ID NO: 1454779 - RNA, 17 nt, Human
gcuucuggccaggaagc

SEQ ID NO: 1454780 - RNA, 16 nt, Human
gcuucuggccaggaag

SEQ ID NO: 1454781 - RNA, 18 nt, Human
gcuucuggccaggaagcu

SEQ ID NO: 1454782 - RNA, 15 nt, Human
gcuucuggccaggaa

SEQ ID NO: 1454783 - RNA, 22 nt, Human
gcuucucugacuucugccugga

SEQ ID NO: 1454784 - RNA, 21 nt, Human
gcuucucugacuucugccugg

SEQ ID NO: 1454785 - RNA, 20 nt, Human
gcuucucugacuucugccug

SEQ ID NO: 1454786 - RNA, 18 nt, Human
gcuucucugacuucugcc

SEQ ID NO: 1454787 - RNA, 17 nt, Human
gcuucucugacuucugc

SEQ ID NO: 1454788 - RNA, 14 nt, Human
gcuucucugacuuc

SEQ ID NO: 1454789 - RNA, 13 nt, Human
gcuucucugacuu

SEQ ID NO: 1454790 - RNA, 16 nt, Human
gcuucucucuguggga

SEQ ID NO: 1454791 - RNA, 14 nt, Human
gcuucucucugugg

SEQ ID NO: 1454792 - RNA, 20 nt, Human
gcuucuaguucugccaggag

SEQ ID NO: 1454793 - RNA, 19 nt, Human
gcuucuaguucugccagga

SEQ ID NO: 1454794 - RNA, 21 nt, Human
gcuucuaguucugccaggaga

SEQ ID NO: 1454795 - RNA, 13 nt, Human
gcuucuccucucc

SEQ ID NO: 1454796 - RNA, 18 nt, Human
gcuucuaguucugccagg

SEQ ID NO: 1454797 - RNA, 20 nt, Human
gcuugccaaggcagaggccu

SEQ ID NO: 1454798 - RNA, 15 nt, Human
gcuugccaaggcaga

SEQ ID NO: 1454799 - RNA, 14 nt, Human
gcuugauucugcag

SEQ ID NO: 1454800 - RNA, 22 nt, Human
gcuugaugggauucuggacagg

SEQ ID NO: 1454801 - RNA, 20 nt, Human
gcuugaugggauucuggaca

SEQ ID NO: 1454802 - RNA, 19 nt, Human
gcuugaugggauucuggac

SEQ ID NO: 1454803 - RNA, 14 nt, Human
gcuugauuuuugcc

SEQ ID NO: 1454804 - RNA, 20 nt, Human
gcuugauagaaaugccaagc

SEQ ID NO: 1454805 - RNA, 18 nt, Human
gcuugccaaggcagaggc

SEQ ID NO: 1454806 - RNA, 21 nt, Human
gcuugcccuaagcagaaagug

SEQ ID NO: 1454807 - RNA, 20 nt, Human
gcuugcccuaagcagaaagu

SEQ ID NO: 1454808 - RNA, 19 nt, Human
gcuugcccuaagcagaaag

SEQ ID NO: 1454809 - RNA, 16 nt, Human
gcuugcccuaagcaga

SEQ ID NO: 1454810 - RNA, 19 nt, Human
gcuuuaauauaaaugcaaa

SEQ ID NO: 1454811 - RNA, 17 nt, Human
gcuuuaauauaaaugca

SEQ ID NO: 1454812 - RNA, 21 nt, Human
gcuuuaauauaaaugcaaaua

SEQ ID NO: 1454813 - RNA, 16 nt, Human
gcuuuaauauaaaugc

SEQ ID NO: 1454814 - RNA, 15 nt, Human
gcuuuaauauaaaug

SEQ ID NO: 1454815 - RNA, 14 nt, Human
gcuuuaauauaaau

SEQ ID NO: 1454816 - RNA, 13 nt, Human
gcuuuaauauaaa

SEQ ID NO: 1454817 - RNA, 12 nt, Human
gcuuuaauauaa

SEQ ID NO: 1454818 - RNA, 17 nt, Human
gcuuggccacagccagg

SEQ ID NO: 1454819 - RNA, 18 nt, Human
gcuuggccacagccaggg

SEQ ID NO: 1454820 - RNA, 15 nt, Human
gcuuggagcugagca

SEQ ID NO: 1454821 - RNA, 14 nt, Human
gcuuggagcugagc

SEQ ID NO: 1454822 - RNA, 18 nt, Human
gcuuggagcagaggggcu

SEQ ID NO: 1454823 - RNA, 23 nt, Human
gcuugcccuaagcagaaagugcc

SEQ ID NO: 1454824 - RNA, 21 nt, Human
gcuuuaugauaauagauucuc

SEQ ID NO: 1454825 - RNA, 20 nt, Human
gcuuuaugauaauagauucu

SEQ ID NO: 1454826 - RNA, 20 nt, Human
gcuuuauccucuuuagaguu

SEQ ID NO: 1454827 - RNA, 15 nt, Human
gcuuuauccucuuua

SEQ ID NO: 1454828 - RNA, 16 nt, Human
gcuuuauccucuuuag

SEQ ID NO: 1454829 - RNA, 17 nt, Human
gcuuuauccucuuuaga

SEQ ID NO: 1454830 - RNA, 19 nt, Human
gcuuuauccucuuuagagu

SEQ ID NO: 1454831 - RNA, 19 nt, Human
gcuuuacuccguaacagau

SEQ ID NO: 1454832 - RNA, 17 nt, Human
gcuuuauuccagaaugc

SEQ ID NO: 1454833 - RNA, 17 nt, Human
gcuuuggauuugacauu

SEQ ID NO: 1454834 - RNA, 17 nt, Human
gcuuuggaccuaaucca

SEQ ID NO: 1454835 - RNA, 22 nt, Human
gcuuuggaccuaaauggccuca

SEQ ID NO: 1454836 - RNA, 19 nt, Human
ggaaaaaguggguuuuuua

SEQ ID NO: 1454837 - RNA, 17 nt, Human
ggaaaaacuuuggaacc

SEQ ID NO: 1454838 - RNA, 23 nt, Human
ggaaaaagcaaguucgucuguug

SEQ ID NO: 1454839 - RNA, 19 nt, Human
ggaaaaacuuuggaaccag

SEQ ID NO: 1454840 - RNA, 20 nt, Human
ggaaaacuccaccuucccac

SEQ ID NO: 1454841 - RNA, 22 nt, Human
ggaaaaccagacuacuugggag

SEQ ID NO: 1454842 - RNA, 12 nt, Human
ggaaaaccagac

SEQ ID NO: 1454843 - RNA, 19 nt, Human
gcuuuuaacagagucugaa

SEQ ID NO: 1454844 - RNA, 14 nt, Human
gcuuuuaaaagauu

SEQ ID NO: 1454845 - RNA, 20 nt, Human
ggaaaaaauaacaaugaaag

SEQ ID NO: 1454846 - RNA, 19 nt, Human
ggaaaguacacucugcugu

SEQ ID NO: 1454847 - RNA, 20 nt, Human
ggaaaggugugagacuggga

SEQ ID NO: 1454848 - RNA, 16 nt, Human
ggaaagucauuggcuu

SEQ ID NO: 1454849 - RNA, 21 nt, Human
ggaaagucauuggcuuuaucc

SEQ ID NO: 1454850 - RNA, 16 nt, Human
ggaaaggugguguuuc

SEQ ID NO: 1454851 - RNA, 20 nt, Human
ggaaaggggucggcugacca

SEQ ID NO: 1454852 - RNA, 19 nt, Human
ggaaaauaggcaggaagcc

SEQ ID NO: 1454853 - RNA, 16 nt, Human
ggaaaauaauacugcu

SEQ ID NO: 1454854 - RNA, 13 nt, Human
ggaaaagacacau

SEQ ID NO: 1454855 - RNA, 17 nt, Human
ggaaaagacacauuuuu

SEQ ID NO: 1454856 - RNA, 22 nt, Human
ggaaaucaaaagggccaaagaa

SEQ ID NO: 1454857 - RNA, 18 nt, Human
ggaaauauuuauuuuaau

SEQ ID NO: 1454858 - RNA, 17 nt, Human
ggaaauauuuauuuuaa

SEQ ID NO: 1454859 - RNA, 15 nt, Human
ggaaauauuuauuuu

SEQ ID NO: 1454860 - RNA, 13 nt, Human
ggaaauauuuauu

SEQ ID NO: 1454861 - RNA, 23 nt, Human
ggaaaguggccaagaagcagugg

SEQ ID NO: 1454862 - RNA, 19 nt, Human
ggaaagugcugucuuaaac

SEQ ID NO: 1454863 - RNA, 12 nt, Human
ggaaauauuuau

SEQ ID NO: 1454864 - RNA, 13 nt, Human
ggaaccucagccu

SEQ ID NO: 1454865 - RNA, 12 nt, Human
ggaaccucagcc

SEQ ID NO: 1454866 - RNA, 24 nt, Human
ggaacccuuacaguaggagcccag

SEQ ID NO: 1454867 - RNA, 20 nt, Human
ggaaccgaggcagggaagga

SEQ ID NO: 1454868 - RNA, 16 nt, Human
ggaaccgaggcaggga

SEQ ID NO: 1454869 - RNA, 15 nt, Human
ggaaccgaggcaggg

SEQ ID NO: 1454870 - RNA, 23 nt, Human
ggaacccugcccacucccaggac

SEQ ID NO: 1454871 - RNA, 19 nt, Human
ggaaccccuuucccacccc

SEQ ID NO: 1454872 - RNA, 17 nt, Human
ggaaccccuuucccacc

SEQ ID NO: 1454873 - RNA, 16 nt, Human
ggaaccccuuucccac

SEQ ID NO: 1454874 - RNA, 14 nt, Human
ggaaccccuuuccc

SEQ ID NO: 1454875 - RNA, 13 nt, Human
ggaaccccuuucc

SEQ ID NO: 1454876 - RNA, 17 nt, Human
ggaacucaucugguuga

SEQ ID NO: 1454877 - RNA, 20 nt, Human
ggaacucagauccagggaca

SEQ ID NO: 1454878 - RNA, 19 nt, Human
ggaacucagauccagggac

SEQ ID NO: 1454879 - RNA, 17 nt, Human
ggaacucagauccaggg

SEQ ID NO: 1454880 - RNA, 16 nt, Human
ggaacucagauccagg

SEQ ID NO: 1454881 - RNA, 15 nt, Human
ggaacucagauccag

SEQ ID NO: 1454882 - RNA, 13 nt, Human
ggaacucagaucc

SEQ ID NO: 1454883 - RNA, 23 nt, Human
ggaaccucagccuggccagacac

SEQ ID NO: 1454884 - RNA, 21 nt, Human
ggaaccucagccuggccagac

SEQ ID NO: 1454885 - RNA, 20 nt, Human
ggaaccucagccuggccaga

SEQ ID NO: 1454886 - RNA, 19 nt, Human
ggaaccucagccuggccag

SEQ ID NO: 1454887 - RNA, 16 nt, Human
ggaaccucagccuggc

SEQ ID NO: 1454888 - RNA, 15 nt, Human
ggaaccucagccugg

SEQ ID NO: 1454889 - RNA, 14 nt, Human
ggaaccucagccug

SEQ ID NO: 1454890 - RNA, 22 nt, Human
ggaaccucagccuggccagaca

SEQ ID NO: 1454891 - RNA, 19 nt, Human
ggaagcauuuguuucuacu

SEQ ID NO: 1454892 - RNA, 14 nt, Human
ggaagccaaagagu

SEQ ID NO: 1454893 - RNA, 22 nt, Human
ggaagccaaaauguaggcuuag

SEQ ID NO: 1454894 - RNA, 22 nt, Human
ggaagcauuguaaaauaauucu

SEQ ID NO: 1454895 - RNA, 14 nt, Human
ggaagcagcagccu

SEQ ID NO: 1454896 - RNA, 13 nt, Human
ggaagcagcagcc

SEQ ID NO: 1454897 - RNA, 12 nt, Human
ggaagcagcagc

SEQ ID NO: 1454898 - RNA, 18 nt, Human
ggaagcagcagccucgcc

SEQ ID NO: 1454899 - RNA, 15 nt, Human
ggaagcagcagccuc

SEQ ID NO: 1454900 - RNA, 18 nt, Human
ggaagcagaaauccaagc

SEQ ID NO: 1454901 - RNA, 22 nt, Human
ggaagauggggaccagcagccc

SEQ ID NO: 1454902 - RNA, 18 nt, Human
ggaagauggggaccagca

SEQ ID NO: 1454903 - RNA, 22 nt, Human
ggaagauccugcggguggggcu

SEQ ID NO: 1454904 - RNA, 12 nt, Human
ggaagauccugc

SEQ ID NO: 1454905 - RNA, 18 nt, Human
ggaagaucccccagaaaa

SEQ ID NO: 1454906 - RNA, 22 nt, Human
ggaagaucccccagaaaagaaa

SEQ ID NO: 1454907 - RNA, 16 nt, Human
ggaagagcaggacucc

SEQ ID NO: 1454908 - RNA, 23 nt, Human
ggaagagcaggacuccaggccca

SEQ ID NO: 1454909 - RNA, 13 nt, Human
ggaagagcaggac

SEQ ID NO: 1454910 - RNA, 22 nt, Human
ggaagagcagcaccuccucagc

SEQ ID NO: 1454911 - RNA, 17 nt, Human
ggaagagcagcaccucc

SEQ ID NO: 1454912 - RNA, 17 nt, Human
ggaacucgugucuggca

SEQ ID NO: 1454913 - RNA, 15 nt, Human
ggaagagggacagau

SEQ ID NO: 1454914 - RNA, 13 nt, Human
ggaagaggccugu

SEQ ID NO: 1454915 - RNA, 20 nt, Human
ggaagagccuuccacccagg

SEQ ID NO: 1454916 - RNA, 19 nt, Human
ggaagagccuuccacccag

SEQ ID NO: 1454917 - RNA, 17 nt, Human
ggaagagccuuccaccc

SEQ ID NO: 1454918 - RNA, 23 nt, Human
ggaagaggccuguuuggccucuc

SEQ ID NO: 1454919 - RNA, 14 nt, Human
ggaagauagcugug

SEQ ID NO: 1454920 - RNA, 14 nt, Human
ggaagaucccccag

SEQ ID NO: 1454921 - RNA, 14 nt, Human
ggagagggaaugug

SEQ ID NO: 1454922 - RNA, 19 nt, Human
ggagagggaaugugaaauu

SEQ ID NO: 1454923 - RNA, 22 nt, Human
ggagagcuaggagcaaagccug

SEQ ID NO: 1454924 - RNA, 21 nt, Human
ggagagcuaggagcaaagccu

SEQ ID NO: 1454925 - RNA, 15 nt, Human
ggagagcuaggagca

SEQ ID NO: 1454926 - RNA, 14 nt, Human
ggagagcuaggagc

SEQ ID NO: 1454927 - RNA, 13 nt, Human
ggagagcuaggag

SEQ ID NO: 1454928 - RNA, 12 nt, Human
ggagagcuagga

SEQ ID NO: 1454929 - RNA, 17 nt, Human
ggagaccucagaaguaa

SEQ ID NO: 1454930 - RNA, 21 nt, Human
ggagaccggccugccaggagg

SEQ ID NO: 1454931 - RNA, 20 nt, Human
ggagaccggccugccaggag

SEQ ID NO: 1454932 - RNA, 19 nt, Human
ggagaccggccugccagga

SEQ ID NO: 1454933 - RNA, 22 nt, Human
ggagaccggccugccaggagga

SEQ ID NO: 1454934 - RNA, 17 nt, Human
ggagaccggccugccag

SEQ ID NO: 1454935 - RNA, 14 nt, Human
ggacugucgcugcu

SEQ ID NO: 1454936 - RNA, 20 nt, Human
ggacugucgcugcuucgugg

SEQ ID NO: 1454937 - RNA, 15 nt, Human
ggacugucauagaaa

SEQ ID NO: 1454938 - RNA, 18 nt, Human
ggacuguaaguugggcuu

SEQ ID NO: 1454939 - RNA, 20 nt, Human
ggacuguagggagggcggca

SEQ ID NO: 1454940 - RNA, 18 nt, Human
ggacuguagggagggcgg

SEQ ID NO: 1454941 - RNA, 21 nt, Human
ggacuguaaguugggcuugcu

SEQ ID NO: 1454942 - RNA, 22 nt, Human
ggacugggagcccccagccugu

SEQ ID NO: 1454943 - RNA, 23 nt, Human
ggacugggagcccccagccuguc

SEQ ID NO: 1454944 - RNA, 19 nt, Human
ggacugcuaaauaaaauuu

SEQ ID NO: 1454945 - RNA, 18 nt, Human
ggacugcuaaauaaaauu

SEQ ID NO: 1454946 - RNA, 15 nt, Human
ggacugcggaggaag

SEQ ID NO: 1454947 - RNA, 16 nt, Human
ggacugcggaggaagg

SEQ ID NO: 1454948 - RNA, 13 nt, Human
ggagauucugccu

SEQ ID NO: 1454949 - RNA, 23 nt, Human
ggagauucucauaacuugagacc

SEQ ID NO: 1454950 - RNA, 22 nt, Human
ggagauucucauaacuugagac

SEQ ID NO: 1454951 - RNA, 14 nt, Human
ggagauucagacug

SEQ ID NO: 1454952 - RNA, 19 nt, Human
ggagauggaggaaagugau

SEQ ID NO: 1454953 - RNA, 15 nt, Human
ggagauugaccugga

SEQ ID NO: 1454954 - RNA, 20 nt, Human
ggagauuuacaacuggggga

SEQ ID NO: 1454955 - RNA, 21 nt, Human
ggagagggggcuggugggugc

SEQ ID NO: 1454956 - RNA, 15 nt, Human
ggagaugcuccuugg

SEQ ID NO: 1454957 - RNA, 18 nt, Human
ggagagggggcugguggg

SEQ ID NO: 1454958 - RNA, 14 nt, Human
ggagagggggcugg

SEQ ID NO: 1454959 - RNA, 13 nt, Human
ggagagggcgcag

SEQ ID NO: 1454960 - RNA, 21 nt, Human
ggagccccuucugcucagcuc

SEQ ID NO: 1454961 - RNA, 19 nt, Human
ggagccccuucugcucagc

SEQ ID NO: 1454962 - RNA, 18 nt, Human
ggagccccuucugcucag

SEQ ID NO: 1454963 - RNA, 24 nt, Human
ggagcaaagccuguucauggcaga

SEQ ID NO: 1454964 - RNA, 23 nt, Human
ggagcaaagccuguucauggcag

SEQ ID NO: 1454965 - RNA, 22 nt, Human
ggagcaaagccuguucauggca

SEQ ID NO: 1454966 - RNA, 15 nt, Human
ggagcaaagccuguu

SEQ ID NO: 1454967 - RNA, 14 nt, Human
ggagcaaagccugu

SEQ ID NO: 1454968 - RNA, 13 nt, Human
ggagcaaagccug

SEQ ID NO: 1454969 - RNA, 23 nt, Human
ggagcaaacugcaugcccagaga

SEQ ID NO: 1454970 - RNA, 22 nt, Human
ggagcaaacugcaugcccagag

SEQ ID NO: 1454971 - RNA, 21 nt, Human
ggagcaaacugcaugcccaga

SEQ ID NO: 1454972 - RNA, 20 nt, Human
ggagcaaacugcaugcccag

SEQ ID NO: 1454973 - RNA, 19 nt, Human
ggagcaaacugcaugccca

SEQ ID NO: 1454974 - RNA, 16 nt, Human
ggagcccgucucagug

SEQ ID NO: 1454975 - RNA, 12 nt, Human
ggagcccuggga

SEQ ID NO: 1454976 - RNA, 13 nt, Human
ggagcccugggag

SEQ ID NO: 1454977 - RNA, 13 nt, Human
ggacucugcagcc

SEQ ID NO: 1454978 - RNA, 21 nt, Human
ggacucucagucucugagcag

SEQ ID NO: 1454979 - RNA, 20 nt, Human
ggacucucagucucugagca

SEQ ID NO: 1454980 - RNA, 18 nt, Human
ggacucucagucucugag

SEQ ID NO: 1454981 - RNA, 17 nt, Human
ggacucucagucucuga

SEQ ID NO: 1454982 - RNA, 13 nt, Human
ggacucuaaaguc

SEQ ID NO: 1454983 - RNA, 16 nt, Human
ggacuccugaaaaaaa

SEQ ID NO: 1454984 - RNA, 16 nt, Human
ggacugaugucuccua

SEQ ID NO: 1454985 - RNA, 15 nt, Human
ggacugaugucuccu

SEQ ID NO: 1454986 - RNA, 18 nt, Human
ggacugagugggaagccc

SEQ ID NO: 1454987 - RNA, 17 nt, Human
ggacugagugggaagcc

SEQ ID NO: 1454988 - RNA, 22 nt, Human
ggacucuguccugaaggccuga

SEQ ID NO: 1454989 - RNA, 23 nt, Human
ggacucuguccugaaggccugag

SEQ ID NO: 1454990 - RNA, 21 nt, Human
ggacucuguccugaaggccug

SEQ ID NO: 1454991 - RNA, 16 nt, Human
ggacucuguccugaag

SEQ ID NO: 1454992 - RNA, 14 nt, Human
ggacucuguccuga

SEQ ID NO: 1454993 - RNA, 12 nt, Human
ggacucuguccu

SEQ ID NO: 1454994 - RNA, 18 nt, Human
ggacucuggugccuccag

SEQ ID NO: 1454995 - RNA, 17 nt, Human
ggacucuggugccucca

SEQ ID NO: 1454996 - RNA, 17 nt, Human
ggacucugcagccucag

SEQ ID NO: 1454997 - RNA, 15 nt, Human
ggacucugcagccuc

SEQ ID NO: 1454998 - RNA, 14 nt, Human
ggacucugcagccu

SEQ ID NO: 1454999 - RNA, 14 nt, Human
ggaccuggcugcca

SEQ ID NO: 1455000 - RNA, 14 nt, Human
ggaccuggaaggga

SEQ ID NO: 1455001 - RNA, 13 nt, Human
ggaccugccugca

SEQ ID NO: 1455002 - RNA, 20 nt, Human
ggaccugagccugccgagca

SEQ ID NO: 1455003 - RNA, 23 nt, Human
ggaccugagccugccgagcaacc

SEQ ID NO: 1455004 - RNA, 19 nt, Human
ggaccugagccugccgagc

SEQ ID NO: 1455005 - RNA, 17 nt, Human
ggaccugagccugccga

SEQ ID NO: 1455006 - RNA, 16 nt, Human
ggaccugagccugccg

SEQ ID NO: 1455007 - RNA, 15 nt, Human
ggaccugagccugcc

SEQ ID NO: 1455008 - RNA, 14 nt, Human
ggaccugagccugc

SEQ ID NO: 1455009 - RNA, 13 nt, Human
ggaccugagccug

SEQ ID NO: 1455010 - RNA, 12 nt, Human
ggaccugagccu

SEQ ID NO: 1455011 - RNA, 19 nt, Human
ggaccugaaauuccaaagu

SEQ ID NO: 1455012 - RNA, 17 nt, Human
ggaccugguacccuccu

SEQ ID NO: 1455013 - RNA, 17 nt, Human
ggaccuggugcugccuc

SEQ ID NO: 1455014 - RNA, 11 nt, Human
ggacuccugaa

SEQ ID NO: 1455015 - RNA, 17 nt, Human
ggaccuucgggcugugc

SEQ ID NO: 1455016 - RNA, 18 nt, Human
ggaaggagcugccuggac

SEQ ID NO: 1455017 - RNA, 17 nt, Human
ggaaggagcugccugga

SEQ ID NO: 1455018 - RNA, 15 nt, Human
ggaaggagcugccug

SEQ ID NO: 1455019 - RNA, 14 nt, Human
ggaaggagcugccu

SEQ ID NO: 1455020 - RNA, 13 nt, Human
ggaaggagcugcc

SEQ ID NO: 1455021 - RNA, 12 nt, Human
ggaaggagcugc

SEQ ID NO: 1455022 - RNA, 20 nt, Human
ggaaggagcugccuggaccc

SEQ ID NO: 1455023 - RNA, 19 nt, Human
ggaaggagcugccuggacc

SEQ ID NO: 1455024 - RNA, 16 nt, Human
ggaaggaggacccagg

SEQ ID NO: 1455025 - RNA, 13 nt, Human
ggaaggaggagcc

SEQ ID NO: 1455026 - RNA, 22 nt, Human
ggaaggagcugccuggacccgu

SEQ ID NO: 1455027 - RNA, 19 nt, Human
ggaaggaggacccaggaca

SEQ ID NO: 1455028 - RNA, 16 nt, Human
ggaaggaggagccugu

SEQ ID NO: 1455029 - RNA, 17 nt, Human
ggaaggaggagccuguc

SEQ ID NO: 1455030 - RNA, 18 nt, Human
ggaccagcucaggacaga

SEQ ID NO: 1455031 - RNA, 16 nt, Human
ggaccagcucaggaca

SEQ ID NO: 1455032 - RNA, 17 nt, Human
ggaaggaucccaugagc

SEQ ID NO: 1455033 - RNA, 22 nt, Human
ggaccagcucaggacagaugcc

SEQ ID NO: 1455034 - RNA, 19 nt, Human
ggaccagcucaggacagau

SEQ ID NO: 1455035 - RNA, 15 nt, Human
ggaccagcuuuuccc

SEQ ID NO: 1455036 - RNA, 17 nt, Human
ggaccagcuuuucccaa

SEQ ID NO: 1455037 - RNA, 22 nt, Human
ggaccagcuuuucccaaaagcc

SEQ ID NO: 1455038 - RNA, 16 nt, Human
ggaccucugacagcag

SEQ ID NO: 1455039 - RNA, 17 nt, Human
ggaccucugacagcagc

SEQ ID NO: 1455040 - RNA, 13 nt, Human
ggaccucugacag

SEQ ID NO: 1455041 - RNA, 12 nt, Human
ggaccucugaca

SEQ ID NO: 1455042 - RNA, 22 nt, Human
ggacccaugaguuggggucugg

SEQ ID NO: 1455043 - RNA, 13 nt, Human
ggacccagggcuc

SEQ ID NO: 1455044 - RNA, 21 nt, Human
ggacccagaggaaggggccag

SEQ ID NO: 1455045 - RNA, 21 nt, Human
ggaccaggaguggguggggag

SEQ ID NO: 1455046 - RNA, 20 nt, Human
ggaccaggagugggugggga

SEQ ID NO: 1455047 - RNA, 11 nt, Human
ggaccaggagu

SEQ ID NO: 1455048 - RNA, 20 nt, Human
ggacccagccaggcccagcc

SEQ ID NO: 1455049 - RNA, 15 nt, Human
ggacccagccaggcc

SEQ ID NO: 1455050 - RNA, 12 nt, Human
ggacccagccag

SEQ ID NO: 1455051 - RNA, 13 nt, Human
ggacccagcuaau

SEQ ID NO: 1455052 - RNA, 16 nt, Human
ggacccagccaggccc

SEQ ID NO: 1455053 - RNA, 10 nt, Human
ggacccagga

SEQ ID NO: 1455054 - RNA, 13 nt, Human
ggacccaggacag

SEQ ID NO: 1455055 - RNA, 21 nt, Human
ggauagaugcuggcccagggc

SEQ ID NO: 1455056 - RNA, 20 nt, Human
ggauagaugcuggcccaggg

SEQ ID NO: 1455057 - RNA, 19 nt, Human
ggauagaugcuggcccagg

SEQ ID NO: 1455058 - RNA, 15 nt, Human
ggagugaguggcccu

SEQ ID NO: 1455059 - RNA, 16 nt, Human
ggaucagaacaggagc

SEQ ID NO: 1455060 - RNA, 14 nt, Human
ggaucagaaauaca

SEQ ID NO: 1455061 - RNA, 16 nt, Human
ggaucagaaauacaga

SEQ ID NO: 1455062 - RNA, 20 nt, Human
ggagucugccagggccccuc

SEQ ID NO: 1455063 - RNA, 12 nt, Human
ggagucuugcuc

SEQ ID NO: 1455064 - RNA, 22 nt, Human
ggagucugccagggccccucuc

SEQ ID NO: 1455065 - RNA, 16 nt, Human
ggagucugccagggcc

SEQ ID NO: 1455066 - RNA, 15 nt, Human
ggagucugccagggc

SEQ ID NO: 1455067 - RNA, 14 nt, Human
ggagucugccaggg

SEQ ID NO: 1455068 - RNA, 13 nt, Human
ggagucugccagg

SEQ ID NO: 1455069 - RNA, 21 nt, Human
ggagucugccacccaggaucc

SEQ ID NO: 1455070 - RNA, 20 nt, Human
ggagucugccacccaggauc

SEQ ID NO: 1455071 - RNA, 17 nt, Human
ggagucugccacccagg

SEQ ID NO: 1455072 - RNA, 23 nt, Human
ggagucugagguccugagcacug

SEQ ID NO: 1455073 - RNA, 21 nt, Human
ggagucugagguccugagcac

SEQ ID NO: 1455074 - RNA, 20 nt, Human
ggagucugagguccugagca

SEQ ID NO: 1455075 - RNA, 19 nt, Human
ggagucugagguccugagc

SEQ ID NO: 1455076 - RNA, 18 nt, Human
ggagucugagguccugag

SEQ ID NO: 1455077 - RNA, 16 nt, Human
ggagucugagguccug

SEQ ID NO: 1455078 - RNA, 13 nt, Human
ggagucugagguc

SEQ ID NO: 1455079 - RNA, 24 nt, Human
ggagucguggggugugcugggagc

SEQ ID NO: 1455080 - RNA, 22 nt, Human
ggagucguggggugugcuggga

SEQ ID NO: 1455081 - RNA, 16 nt, Human
ggaguccacuuuguuu

SEQ ID NO: 1455082 - RNA, 16 nt, Human
ggaggggaagaggccu

SEQ ID NO: 1455083 - RNA, 22 nt, Human
ggagggcugucaucugugcacu

SEQ ID NO: 1455084 - RNA, 18 nt, Human
ggagggcucugaggcgcc

SEQ ID NO: 1455085 - RNA, 21 nt, Human
ggagggcucugaggcgcccca

SEQ ID NO: 1455086 - RNA, 16 nt, Human
ggagggcucugaggcg

SEQ ID NO: 1455087 - RNA, 15 nt, Human
ggagggcucugaggc

SEQ ID NO: 1455088 - RNA, 14 nt, Human
ggagggcucugagg

SEQ ID NO: 1455089 - RNA, 13 nt, Human
ggagggcucugag

SEQ ID NO: 1455090 - RNA, 12 nt, Human
ggagggcucuga

SEQ ID NO: 1455091 - RNA, 19 nt, Human
ggagggcagagcuggugcg

SEQ ID NO: 1455092 - RNA, 17 nt, Human
ggagggcagagcuggug

SEQ ID NO: 1455093 - RNA, 16 nt, Human
ggagggcagagcuggu

SEQ ID NO: 1455094 - RNA, 14 nt, Human
ggagggcagagcug

SEQ ID NO: 1455095 - RNA, 10 nt, Human
ggagggcaga

SEQ ID NO: 1455096 - RNA, 16 nt, Human
ggagggaggcucaggu

SEQ ID NO: 1455097 - RNA, 15 nt, Human
ggagggaggcucagg

SEQ ID NO: 1455098 - RNA, 22 nt, Human
ggagggagagucucccagggag

SEQ ID NO: 1455099 - RNA, 17 nt, Human
ggagggcagcagggcua

SEQ ID NO: 1455100 - RNA, 16 nt, Human
ggagggcagcagggcu

SEQ ID NO: 1455101 - RNA, 15 nt, Human
ggagggcagcagggc

SEQ ID NO: 1455102 - RNA, 13 nt, Human
ggagggcagcagg

SEQ ID NO: 1455103 - RNA, 14 nt, Human
ggagggcaggcauc

SEQ ID NO: 1455104 - RNA, 13 nt, Human
ggagggcaggcau

SEQ ID NO: 1455105 - RNA, 22 nt, Human
ggagggacaaguggacucaggg

SEQ ID NO: 1455106 - RNA, 22 nt, Human
ggagggacaaaggagccuguga

SEQ ID NO: 1455107 - RNA, 21 nt, Human
ggagggacaaaggagccugug

SEQ ID NO: 1455108 - RNA, 20 nt, Human
ggagggacaaaggagccugu

SEQ ID NO: 1455109 - RNA, 19 nt, Human
ggagggacaaaggagccug

SEQ ID NO: 1455110 - RNA, 18 nt, Human
ggagggacaaaggagccu

SEQ ID NO: 1455111 - RNA, 17 nt, Human
ggagggacaaaggagcc

SEQ ID NO: 1455112 - RNA, 21 nt, Human
ggagggaagggagccaaggga

SEQ ID NO: 1455113 - RNA, 23 nt, Human
ggagggaagggagccaagggaug

SEQ ID NO: 1455114 - RNA, 18 nt, Human
ggagggaagggagccaag

SEQ ID NO: 1455115 - RNA, 17 nt, Human
ggagggaagggagccaa

SEQ ID NO: 1455116 - RNA, 13 nt, Human
ggaggagaaugag

SEQ ID NO: 1455117 - RNA, 22 nt, Human
ggaggagagacacuggugggga

SEQ ID NO: 1455118 - RNA, 17 nt, Human
ggagcccuggagacccc

SEQ ID NO: 1455119 - RNA, 21 nt, Human
ggagccgaggccuaccccgca

SEQ ID NO: 1455120 - RNA, 16 nt, Human
ggagccgggagccuga

SEQ ID NO: 1455121 - RNA, 19 nt, Human
ggaggagggucggugccuu

SEQ ID NO: 1455122 - RNA, 20 nt, Human
ggaggagggcaggcaucggg

SEQ ID NO: 1455123 - RNA, 15 nt, Human
ggaggagggcaggca

SEQ ID NO: 1455124 - RNA, 14 nt, Human
ggaggagggcaggc

SEQ ID NO: 1455125 - RNA, 15 nt, Human
ggaggaggaaauccc

SEQ ID NO: 1455126 - RNA, 16 nt, Human
ggaggagccuguccug

SEQ ID NO: 1455127 - RNA, 15 nt, Human
ggaggagccuguccu

SEQ ID NO: 1455128 - RNA, 13 nt, Human
ggaggagccuguc

SEQ ID NO: 1455129 - RNA, 12 nt, Human
ggaggagccugu

SEQ ID NO: 1455130 - RNA, 20 nt, Human
ggaggagcccaggccaggac

SEQ ID NO: 1455131 - RNA, 13 nt, Human
ggaggagcccagg

SEQ ID NO: 1455132 - RNA, 12 nt, Human
ggaggagcccag

SEQ ID NO: 1455133 - RNA, 13 nt, Human
ggaggaggagggu

SEQ ID NO: 1455134 - RNA, 21 nt, Human
ggaggagccuguccugccugu

SEQ ID NO: 1455135 - RNA, 17 nt, Human
ggaggaggcagagaaga

SEQ ID NO: 1455136 - RNA, 18 nt, Human
ggaggaggcagagaagaa

SEQ ID NO: 1455137 - RNA, 23 nt, Human
ggcagguaugaucggcaggacac

SEQ ID NO: 1455138 - RNA, 23 nt, Human
ggcaggaagcccaauugcuggag

SEQ ID NO: 1455139 - RNA, 14 nt, Human
ggcagcuuuuaaaa

SEQ ID NO: 1455140 - RNA, 15 nt, Human
ggcagcuuuuaaaag

SEQ ID NO: 1455141 - RNA, 12 nt, Human
ggcagcagccag

SEQ ID NO: 1455142 - RNA, 13 nt, Human
ggcagcuuuuaaa

SEQ ID NO: 1455143 - RNA, 21 nt, Human
ggcagguaugaucggcaggac

SEQ ID NO: 1455144 - RNA, 11 nt, Human
ggcagcagcca

SEQ ID NO: 1455145 - RNA, 18 nt, Human
ggcagaggccugggcugg

SEQ ID NO: 1455146 - RNA, 22 nt, Human
ggcagaggccugggcugggaaa

SEQ ID NO: 1455147 - RNA, 17 nt, Human
ggcagaggccugggcug

SEQ ID NO: 1455148 - RNA, 14 nt, Human
ggcagaggccuggg

SEQ ID NO: 1455149 - RNA, 13 nt, Human
ggcagaggccugg

SEQ ID NO: 1455150 - RNA, 22 nt, Human
ggcagaggcccaggcugccguc

SEQ ID NO: 1455151 - RNA, 21 nt, Human
ggcagaggcccaggcugccgu

SEQ ID NO: 1455152 - RNA, 19 nt, Human
ggcagaggcccaggcugcc

SEQ ID NO: 1455153 - RNA, 17 nt, Human
ggcagaggcccaggcug

SEQ ID NO: 1455154 - RNA, 16 nt, Human
ggcagaggcccaggcu

SEQ ID NO: 1455155 - RNA, 14 nt, Human
ggcagaggcccagg

SEQ ID NO: 1455156 - RNA, 15 nt, Human
ggcagaggcaguacc

SEQ ID NO: 1455157 - RNA, 20 nt, Human
ggcagaggaccaggcuguag

SEQ ID NO: 1455158 - RNA, 18 nt, Human
ggcagagcuggugcggcu

SEQ ID NO: 1455159 - RNA, 23 nt, Human
ggcagcaaggcccgagcagcuga

SEQ ID NO: 1455160 - RNA, 16 nt, Human
ggcagcaauuuaaaug

SEQ ID NO: 1455161 - RNA, 16 nt, Human
ggcagcaaggcccgag

SEQ ID NO: 1455162 - RNA, 13 nt, Human
ggcagcaaggccc

SEQ ID NO: 1455163 - RNA, 12 nt, Human
ggcagcaaggcc

SEQ ID NO: 1455164 - RNA, 17 nt, Human
ggcagcaacaauaaaua

SEQ ID NO: 1455165 - RNA, 22 nt, Human
ggcagcaacaauaaauagacac

SEQ ID NO: 1455166 - RNA, 20 nt, Human
ggcagcaaggcccgagcagc

SEQ ID NO: 1455167 - RNA, 19 nt, Human
ggcagcaaggcccgagcag

SEQ ID NO: 1455168 - RNA, 18 nt, Human
ggcagcaaggcccgagca

SEQ ID NO: 1455169 - RNA, 17 nt, Human
ggcagcaaggcccgagc

SEQ ID NO: 1455170 - RNA, 22 nt, Human
ggcagcaaggcccgagcagcug

SEQ ID NO: 1455171 - RNA, 21 nt, Human
ggcagcaaggcccgagcagcu

SEQ ID NO: 1455172 - RNA, 15 nt, Human
ggcagcaauuuaaau

SEQ ID NO: 1455173 - RNA, 16 nt, Human
ggcagauccaggacua

SEQ ID NO: 1455174 - RNA, 14 nt, Human
ggcagauccaggac

SEQ ID NO: 1455175 - RNA, 14 nt, Human
ggcagauguaggag

SEQ ID NO: 1455176 - RNA, 15 nt, Human
ggcagauggggagac

SEQ ID NO: 1455177 - RNA, 20 nt, Human
ggcagauguaggagggacug

SEQ ID NO: 1455178 - RNA, 17 nt, Human
ggcagauguaggaggga

SEQ ID NO: 1455179 - RNA, 16 nt, Human
ggcagauguaggaggg

SEQ ID NO: 1455180 - RNA, 15 nt, Human
ggcagcaacaauaaa

SEQ ID NO: 1455181 - RNA, 22 nt, Human
ggcaccugggcccuggggccug

SEQ ID NO: 1455182 - RNA, 16 nt, Human
ggcaccugggcccugg

SEQ ID NO: 1455183 - RNA, 13 nt, Human
ggcaccugggccc

SEQ ID NO: 1455184 - RNA, 19 nt, Human
ggcaccucacaggccccag

SEQ ID NO: 1455185 - RNA, 16 nt, Human
ggcaccucacaggccc

SEQ ID NO: 1455186 - RNA, 21 nt, Human
ggcaccuacacucaccugcac

SEQ ID NO: 1455187 - RNA, 22 nt, Human
ggcaccuaauccaggcagaucc

SEQ ID NO: 1455188 - RNA, 15 nt, Human
ggcagagcuggugcg

SEQ ID NO: 1455189 - RNA, 14 nt, Human
ggcagagcuggugc

SEQ ID NO: 1455190 - RNA, 13 nt, Human
ggcagagcuggug

SEQ ID NO: 1455191 - RNA, 12 nt, Human
ggcagagcuggu

SEQ ID NO: 1455192 - RNA, 19 nt, Human
ggcaccugggcccuggggc

SEQ ID NO: 1455193 - RNA, 17 nt, Human
ggcaccugggcccuggg

SEQ ID NO: 1455194 - RNA, 19 nt, Human
ggcaccuaauccaggcaga

SEQ ID NO: 1455195 - RNA, 18 nt, Human
ggcaccuaauccaggcag

SEQ ID NO: 1455196 - RNA, 17 nt, Human
ggcaccuaauccaggca

SEQ ID NO: 1455197 - RNA, 19 nt, Human
ggcacccccugcagcuugu

SEQ ID NO: 1455198 - RNA, 18 nt, Human
ggcacccccugcagcuug

SEQ ID NO: 1455199 - RNA, 16 nt, Human
ggcacccccugcagcu

SEQ ID NO: 1455200 - RNA, 16 nt, Human
ggcaaggcuguggacc

SEQ ID NO: 1455201 - RNA, 16 nt, Human
ggcaacgcacaaaaca

SEQ ID NO: 1455202 - RNA, 20 nt, Human
ggaucccaugagcuccuuaa

SEQ ID NO: 1455203 - RNA, 17 nt, Human
ggauccaaacugaucca

SEQ ID NO: 1455204 - RNA, 18 nt, Human
ggaucagggguaggaaug

SEQ ID NO: 1455205 - RNA, 13 nt, Human
ggauccagggagg

SEQ ID NO: 1455206 - RNA, 17 nt, Human
ggaucccaugagcuccu

SEQ ID NO: 1455207 - RNA, 19 nt, Human
ggaucagcguggccuuguu

SEQ ID NO: 1455208 - RNA, 17 nt, Human
ggaucagcguggccuug

SEQ ID NO: 1455209 - RNA, 16 nt, Human
ggaucagcguggccuu

SEQ ID NO: 1455210 - RNA, 15 nt, Human
ggaucagcguggccu

SEQ ID NO: 1455211 - RNA, 13 nt, Human
ggaucagcguggc

SEQ ID NO: 1455212 - RNA, 12 nt, Human
ggaucagaauag

SEQ ID NO: 1455213 - RNA, 18 nt, Human
ggaucagcguggccuugu

SEQ ID NO: 1455214 - RNA, 21 nt, Human
ggaucaguuaacuauugcauu

SEQ ID NO: 1455215 - RNA, 14 nt, Human
ggccccucugaccu

SEQ ID NO: 1455216 - RNA, 23 nt, Human
ggccccucucccuugggcucuga

SEQ ID NO: 1455217 - RNA, 12 nt, Human
ggccccucuccc

SEQ ID NO: 1455218 - RNA, 20 nt, Human
ggccccucucagcccucaca

SEQ ID NO: 1455219 - RNA, 16 nt, Human
ggccccucucagcccu

SEQ ID NO: 1455220 - RNA, 15 nt, Human
ggccccucucagccc

SEQ ID NO: 1455221 - RNA, 14 nt, Human
ggccccucucagcc

SEQ ID NO: 1455222 - RNA, 13 nt, Human
ggccccucucagc

SEQ ID NO: 1455223 - RNA, 12 nt, Human
ggccccucucag

SEQ ID NO: 1455224 - RNA, 22 nt, Human
ggccccucacccugccuuaucu

SEQ ID NO: 1455225 - RNA, 17 nt, Human
ggccccuccccuccaaa

SEQ ID NO: 1455226 - RNA, 14 nt, Human
ggccccuccccucc

SEQ ID NO: 1455227 - RNA, 16 nt, Human
ggccccucccccugag

SEQ ID NO: 1455228 - RNA, 19 nt, Human
ggccccucacccugccuua

SEQ ID NO: 1455229 - RNA, 18 nt, Human
ggccccguuucugguggu

SEQ ID NO: 1455230 - RNA, 17 nt, Human
ggcccccucccuggaug

SEQ ID NO: 1455231 - RNA, 16 nt, Human
ggcccccucccuggau

SEQ ID NO: 1455232 - RNA, 13 nt, Human
ggcccccucccug

SEQ ID NO: 1455233 - RNA, 23 nt, Human
ggcccccgccuuggccuguguuc

SEQ ID NO: 1455234 - RNA, 19 nt, Human
ggcccccgccuuggccugu

SEQ ID NO: 1455235 - RNA, 21 nt, Human
ggccccccugguccccuccuu

SEQ ID NO: 1455236 - RNA, 15 nt, Human
ggccccccugguccc

SEQ ID NO: 1455237 - RNA, 14 nt, Human
ggcccccccagcug

SEQ ID NO: 1455238 - RNA, 15 nt, Human
ggcccccaucucaug

SEQ ID NO: 1455239 - RNA, 21 nt, Human
ggcccccaucucaugccccug

SEQ ID NO: 1455240 - RNA, 14 nt, Human
ggcccccaucucau

SEQ ID NO: 1455241 - RNA, 19 nt, Human
ggcccccaucauccucugg

SEQ ID NO: 1455242 - RNA, 23 nt, Human
ggcccccagcccagggcuccugc

SEQ ID NO: 1455243 - RNA, 20 nt, Human
ggcccccagcccagggcucc

SEQ ID NO: 1455244 - RNA, 18 nt, Human
ggcccccagcccagggcu

SEQ ID NO: 1455245 - RNA, 17 nt, Human
ggcccccagcccagggc

SEQ ID NO: 1455246 - RNA, 14 nt, Human
ggcccccagcccag

SEQ ID NO: 1455247 - RNA, 18 nt, Human
ggcccccacuugccucuu

SEQ ID NO: 1455248 - RNA, 16 nt, Human
ggcccccacuugccuc

SEQ ID NO: 1455249 - RNA, 15 nt, Human
ggcccccacuugccu

SEQ ID NO: 1455250 - RNA, 17 nt, Human
ggcccccaccuggcuca

SEQ ID NO: 1455251 - RNA, 16 nt, Human
ggcccccaccuggcuc

SEQ ID NO: 1455252 - RNA, 15 nt, Human
ggccauggccugcaa

SEQ ID NO: 1455253 - RNA, 14 nt, Human
ggccauggccugca

SEQ ID NO: 1455254 - RNA, 13 nt, Human
ggccauggccugc

SEQ ID NO: 1455255 - RNA, 20 nt, Human
ggcagucugagagaggccau

SEQ ID NO: 1455256 - RNA, 19 nt, Human
ggcagucugaauuuuuaaa

SEQ ID NO: 1455257 - RNA, 19 nt, Human
ggcauuagaauuauuuaaa

SEQ ID NO: 1455258 - RNA, 17 nt, Human
ggcauuagaauuauuua

SEQ ID NO: 1455259 - RNA, 20 nt, Human
ggcauuagaauuauuuaaac

SEQ ID NO: 1455260 - RNA, 21 nt, Human
ggcagugagggagggcuguca

SEQ ID NO: 1455261 - RNA, 16 nt, Human
ggcagugagggagggc

SEQ ID NO: 1455262 - RNA, 15 nt, Human
ggccacacagcugcc

SEQ ID NO: 1455263 - RNA, 16 nt, Human
ggccacacagcugccg

SEQ ID NO: 1455264 - RNA, 14 nt, Human
ggccacacagcugc

SEQ ID NO: 1455265 - RNA, 13 nt, Human
ggccacacagcug

SEQ ID NO: 1455266 - RNA, 12 nt, Human
ggccacacagcu

SEQ ID NO: 1455267 - RNA, 22 nt, Human
ggccaaugcaccuaaagaaaaa

SEQ ID NO: 1455268 - RNA, 13 nt, Human
ggccaaguuccuc

SEQ ID NO: 1455269 - RNA, 15 nt, Human
ggccaaguuccucua

SEQ ID NO: 1455270 - RNA, 14 nt, Human
ggccaggaggugcc

SEQ ID NO: 1455271 - RNA, 14 nt, Human
ggccacgcuccagc

SEQ ID NO: 1455272 - RNA, 22 nt, Human
ggccaccuggcucucaccucua

SEQ ID NO: 1455273 - RNA, 17 nt, Human
ggccaccuggcucucac

SEQ ID NO: 1455274 - RNA, 16 nt, Human
ggccaccuggcucuca

SEQ ID NO: 1455275 - RNA, 18 nt, Human
ggccaggcugggucgccc

SEQ ID NO: 1455276 - RNA, 22 nt, Human
ggccaggcugggucgcccugga

SEQ ID NO: 1455277 - RNA, 13 nt, Human
ggccaggaggugc

SEQ ID NO: 1455278 - RNA, 19 nt, Human
ggccaggcauguggcaggg

SEQ ID NO: 1455279 - RNA, 20 nt, Human
ggccaggcaggagcccuucu

SEQ ID NO: 1455280 - RNA, 18 nt, Human
ggcugcagaggccagagg

SEQ ID NO: 1455281 - RNA, 16 nt, Human
ggcugcagaggccaga

SEQ ID NO: 1455282 - RNA, 13 nt, Human
ggcugcagaggcc

SEQ ID NO: 1455283 - RNA, 14 nt, Human
ggcugauuucuagg

SEQ ID NO: 1455284 - RNA, 19 nt, Human
ggcugcagaggccagaggc

SEQ ID NO: 1455285 - RNA, 14 nt, Human
ggcugcagccucag

SEQ ID NO: 1455286 - RNA, 15 nt, Human
ggcugauggaguaaa

SEQ ID NO: 1455287 - RNA, 15 nt, Human
ggcugauaauuuuaa

SEQ ID NO: 1455288 - RNA, 24 nt, Human
ggcugaugucaauuucuguguugc

SEQ ID NO: 1455289 - RNA, 22 nt, Human
ggcugaugucaauuucuguguu

SEQ ID NO: 1455290 - RNA, 18 nt, Human
ggcugaugucaauuucug

SEQ ID NO: 1455291 - RNA, 22 nt, Human
ggcugagggcaguucgcagcca

SEQ ID NO: 1455292 - RNA, 21 nt, Human
ggcugagggcaguucgcagcc

SEQ ID NO: 1455293 - RNA, 13 nt, Human
ggcugagggcagu

SEQ ID NO: 1455294 - RNA, 16 nt, Human
ggcugagggagccugg

SEQ ID NO: 1455295 - RNA, 20 nt, Human
ggcugagcucucugugggcu

SEQ ID NO: 1455296 - RNA, 15 nt, Human
ggcugagcucucugu

SEQ ID NO: 1455297 - RNA, 15 nt, Human
ggcugagauaugaac

SEQ ID NO: 1455298 - RNA, 13 nt, Human
ggccccugccucu

SEQ ID NO: 1455299 - RNA, 20 nt, Human
ggccccugccaccuccugcc

SEQ ID NO: 1455300 - RNA, 13 nt, Human
ggcucuggagccc

SEQ ID NO: 1455301 - RNA, 14 nt, Human
ggcucuggagccca

SEQ ID NO: 1455302 - RNA, 18 nt, Human
ggcugcuuccuccuggaa

SEQ ID NO: 1455303 - RNA, 17 nt, Human
ggcugcuuccuccugga

SEQ ID NO: 1455304 - RNA, 16 nt, Human
ggcugcuuccuccugg

SEQ ID NO: 1455305 - RNA, 15 nt, Human
ggcugcuuccuccug

SEQ ID NO: 1455306 - RNA, 19 nt, Human
ggcugcuuccuccuggaaa

SEQ ID NO: 1455307 - RNA, 13 nt, Human
ggcugcuuccucc

SEQ ID NO: 1455308 - RNA, 19 nt, Human
ggcugcuucccugaagcuc

SEQ ID NO: 1455309 - RNA, 18 nt, Human
ggcugcuucccugaagcu

SEQ ID NO: 1455310 - RNA, 19 nt, Human
ggcuggaagauccugcggg

SEQ ID NO: 1455311 - RNA, 22 nt, Human
ggcuggaagauccugcgggugg

SEQ ID NO: 1455312 - RNA, 15 nt, Human
ggcuggaagauccug

SEQ ID NO: 1455313 - RNA, 18 nt, Human
ggcuggaagauagcugug

SEQ ID NO: 1455314 - RNA, 23 nt, Human
ggcuggacccagccaggcccagc

SEQ ID NO: 1455315 - RNA, 20 nt, Human
ggcuggacccagccaggccc

SEQ ID NO: 1455316 - RNA, 19 nt, Human
ggcuggacccagccaggcc

SEQ ID NO: 1455317 - RNA, 15 nt, Human
ggcuggacccagcca

SEQ ID NO: 1455318 - RNA, 14 nt, Human
ggcuggacccagcc

SEQ ID NO: 1455319 - RNA, 12 nt, Human
ggcuggacccag

SEQ ID NO: 1455320 - RNA, 11 nt, Human
ggcugggccau

SEQ ID NO: 1455321 - RNA, 21 nt, Human
ggcuggacccagccaggccca

SEQ ID NO: 1455322 - RNA, 20 nt, Human
ggcugcagccucaggacugg

SEQ ID NO: 1455323 - RNA, 19 nt, Human
ggcugcagccucaggacug

SEQ ID NO: 1455324 - RNA, 22 nt, Human
ggcugcagccucaggacuggga

SEQ ID NO: 1455325 - RNA, 18 nt, Human
ggcugcagccucaggacu

SEQ ID NO: 1455326 - RNA, 17 nt, Human
ggcugcagccucaggac

SEQ ID NO: 1455327 - RNA, 16 nt, Human
ggcugcagccucagga

SEQ ID NO: 1455328 - RNA, 15 nt, Human
ggcugcagccucagg

SEQ ID NO: 1455329 - RNA, 17 nt, Human
ggcugcugugggaaaug

SEQ ID NO: 1455330 - RNA, 18 nt, Human
ggcugcugcugggcucag

SEQ ID NO: 1455331 - RNA, 20 nt, Human
ggcugcugcugggcucagug

SEQ ID NO: 1455332 - RNA, 19 nt, Human
ggcugcugaucgccuuccc

SEQ ID NO: 1455333 - RNA, 21 nt, Human
ggcugcugaucgccuucccca

SEQ ID NO: 1455334 - RNA, 16 nt, Human
ggcugcugcugggcuc

SEQ ID NO: 1455335 - RNA, 14 nt, Human
ggcugcugcugggc

SEQ ID NO: 1455336 - RNA, 23 nt, Human
ggcugcugcugcucuuggcugga

SEQ ID NO: 1455337 - RNA, 22 nt, Human
ggcugcugcugcucuuggcugg

SEQ ID NO: 1455338 - RNA, 11 nt, Human
ggcugcugcug

SEQ ID NO: 1455339 - RNA, 15 nt, Human
ggcugcugcuacaau

SEQ ID NO: 1455340 - RNA, 23 nt, Human
ggcuuaaacccauauuguaaaac

SEQ ID NO: 1455341 - RNA, 21 nt, Human
ggcugggccauguccaaagag

SEQ ID NO: 1455342 - RNA, 20 nt, Human
ggcugggccauguccaaaga

SEQ ID NO: 1455343 - RNA, 17 nt, Human
ggcugggccauguccaa

SEQ ID NO: 1455344 - RNA, 18 nt, Human
ggcuuauaucuggccucu

SEQ ID NO: 1455345 - RNA, 17 nt, Human
ggcuuauaauucuuuca

SEQ ID NO: 1455346 - RNA, 16 nt, Human
ggcuuauaauucuuuc

SEQ ID NO: 1455347 - RNA, 22 nt, Human
ggcuuaguuuguguguugucuc

SEQ ID NO: 1455348 - RNA, 20 nt, Human
ggcuugagcccccgcgccca

SEQ ID NO: 1455349 - RNA, 21 nt, Human
ggcuugagaaauauggacacu

SEQ ID NO: 1455350 - RNA, 14 nt, Human
ggcuuaccuggccc

SEQ ID NO: 1455351 - RNA, 20 nt, Human
ggcuuaccuggcccaucagg

SEQ ID NO: 1455352 - RNA, 13 nt, Human
ggcuuacacccac

SEQ ID NO: 1455353 - RNA, 20 nt, Human
ggcuuucauuuucucucagg

SEQ ID NO: 1455354 - RNA, 19 nt, Human
ggcuuucauuuucucucag

SEQ ID NO: 1455355 - RNA, 22 nt, Human
ggcuuuaugauaauagauucuc

SEQ ID NO: 1455356 - RNA, 20 nt, Human
ggcuuuaugauaauagauuc

SEQ ID NO: 1455357 - RNA, 10 nt, Human
ggcuuuugug

SEQ ID NO: 1455358 - RNA, 18 nt, Human
ggcuuguggggccuggga

SEQ ID NO: 1455359 - RNA, 14 nt, Human
ggcuuuauccucuu

SEQ ID NO: 1455360 - RNA, 15 nt, Human
ggcuuuauccucuuu

SEQ ID NO: 1455361 - RNA, 18 nt, Human
ggcuuuauccucuuuaga

SEQ ID NO: 1455362 - RNA, 20 nt, Human
ggcuuuauccucuuuagagu

SEQ ID NO: 1455363 - RNA, 21 nt, Human
ggcuuuauccucuuuagaguu

SEQ ID NO: 1455364 - RNA, 16 nt, Human
ggcuuguggggccugg

SEQ ID NO: 1455365 - RNA, 14 nt, Human
ggcuuguggggccu

SEQ ID NO: 1455366 - RNA, 22 nt, Human
ggcuuggggcucacacaccugu

SEQ ID NO: 1455367 - RNA, 22 nt, Human
ggcuugaguuuaaauuguaaua

SEQ ID NO: 1455368 - RNA, 15 nt, Human
gggacaaaggagccu

SEQ ID NO: 1455369 - RNA, 18 nt, Human
gggacaaaggagccugug

SEQ ID NO: 1455370 - RNA, 17 nt, Human
gggacaaaggagccugu

SEQ ID NO: 1455371 - RNA, 16 nt, Human
gggacaaaggagccug

SEQ ID NO: 1455372 - RNA, 14 nt, Human
gggaauggcagcag

SEQ ID NO: 1455373 - RNA, 19 nt, Human
gggacaaguggacucaggg

SEQ ID NO: 1455374 - RNA, 18 nt, Human
gggacaaguggacucagg

SEQ ID NO: 1455375 - RNA, 19 nt, Human
gggacaacugcucccaccu

SEQ ID NO: 1455376 - RNA, 20 nt, Human
gggaccuagggaggcauggu

SEQ ID NO: 1455377 - RNA, 22 nt, Human
gggaccgcuacaccacucuggc

SEQ ID NO: 1455378 - RNA, 21 nt, Human
gggaccgcuacaccacucugg

SEQ ID NO: 1455379 - RNA, 20 nt, Human
gggaccggcggaccccagcc

SEQ ID NO: 1455380 - RNA, 19 nt, Human
gggaccuagggaggcaugg

SEQ ID NO: 1455381 - RNA, 20 nt, Human
gggacguggcucagccagca

SEQ ID NO: 1455382 - RNA, 22 nt, Human
gggacguggcucagccagcacu

SEQ ID NO: 1455383 - RNA, 22 nt, Human
gggacguucgugguccugcgcu

SEQ ID NO: 1455384 - RNA, 16 nt, Human
gggaagggccugccca

SEQ ID NO: 1455385 - RNA, 21 nt, Human
gggaaggugggguccuggagc

SEQ ID NO: 1455386 - RNA, 13 nt, Human
gggaaugaagaua

SEQ ID NO: 1455387 - RNA, 21 nt, Human
gggaagggagccaagggaugg

SEQ ID NO: 1455388 - RNA, 22 nt, Human
gggaagggagccaagggaugga

SEQ ID NO: 1455389 - RNA, 16 nt, Human
gggaagggagccaagg

SEQ ID NO: 1455390 - RNA, 14 nt, Human
gggaagggagccaa

SEQ ID NO: 1455391 - RNA, 14 nt, Human
gggaagggacacac

SEQ ID NO: 1455392 - RNA, 22 nt, Human
gggaaggcuacuucggggcugg

SEQ ID NO: 1455393 - RNA, 21 nt, Human
gggaaggcuacuucggggcug

SEQ ID NO: 1455394 - RNA, 21 nt, Human
gggaaggcaggcagggcucuc

SEQ ID NO: 1455395 - RNA, 15 nt, Human
gggaaggcaggcagg

SEQ ID NO: 1455396 - RNA, 14 nt, Human
gggaaggcaggcag

SEQ ID NO: 1455397 - RNA, 22 nt, Human
gggaaggauucugcuggccucu

SEQ ID NO: 1455398 - RNA, 21 nt, Human
gggaaggauucugcuggccuc

SEQ ID NO: 1455399 - RNA, 15 nt, Human
gggaaggaucccaug

SEQ ID NO: 1455400 - RNA, 14 nt, Human
ggcuuuugugcauu

SEQ ID NO: 1455401 - RNA, 21 nt, Human
gggaaggauacaaaagcaugu

SEQ ID NO: 1455402 - RNA, 23 nt, Human
gggaaggauacaaaagcauguga

SEQ ID NO: 1455403 - RNA, 19 nt, Human
gggcagucugagagaggcc

SEQ ID NO: 1455404 - RNA, 18 nt, Human
gggcagucugagagaggc

SEQ ID NO: 1455405 - RNA, 20 nt, Human
gggcaguaccugagggucug

SEQ ID NO: 1455406 - RNA, 15 nt, Human
gggcaguaccugagg

SEQ ID NO: 1455407 - RNA, 17 nt, Human
gggcagucugagagagg

SEQ ID NO: 1455408 - RNA, 14 nt, Human
gggcagggugaccc

SEQ ID NO: 1455409 - RNA, 19 nt, Human
gggcacccccagccugggc

SEQ ID NO: 1455410 - RNA, 18 nt, Human
gggcacaggagcuaccug

SEQ ID NO: 1455411 - RNA, 21 nt, Human
gggcacaggagcuaccugugu

SEQ ID NO: 1455412 - RNA, 17 nt, Human
gggcacaggagcuaccu

SEQ ID NO: 1455413 - RNA, 15 nt, Human
gggcacaggagcuac

SEQ ID NO: 1455414 - RNA, 14 nt, Human
gggcacaggagcua

SEQ ID NO: 1455415 - RNA, 13 nt, Human
gggcacaggagcu

SEQ ID NO: 1455416 - RNA, 12 nt, Human
gggcacaggagc

SEQ ID NO: 1455417 - RNA, 16 nt, Human
gggcacaagacugacg

SEQ ID NO: 1455418 - RNA, 23 nt, Human
gggcacaagacugacgccagggu

SEQ ID NO: 1455419 - RNA, 20 nt, Human
gggcaccagggguuucucgc

SEQ ID NO: 1455420 - RNA, 18 nt, Human
gggcaccagggguuucuc

SEQ ID NO: 1455421 - RNA, 21 nt, Human
gggcacccccagccugggccu

SEQ ID NO: 1455422 - RNA, 18 nt, Human
gggcacccccagccuggg

SEQ ID NO: 1455423 - RNA, 17 nt, Human
gggcacccccagccugg

SEQ ID NO: 1455424 - RNA, 16 nt, Human
gggcacccccagccug

SEQ ID NO: 1455425 - RNA, 14 nt, Human
gggcacccccagcc

SEQ ID NO: 1455426 - RNA, 12 nt, Human
gggaguguuccc

SEQ ID NO: 1455427 - RNA, 23 nt, Human
gggaguuaagaccuggcagcucu

SEQ ID NO: 1455428 - RNA, 20 nt, Human
gggaguuaagaccuggcagc

SEQ ID NO: 1455429 - RNA, 17 nt, Human
gggaguuaagaccuggc

SEQ ID NO: 1455430 - RNA, 16 nt, Human
gggaguuuaggguggg

SEQ ID NO: 1455431 - RNA, 16 nt, Human
gggaguuaagaccugg

SEQ ID NO: 1455432 - RNA, 15 nt, Human
gggaguuaagaccug

SEQ ID NO: 1455433 - RNA, 13 nt, Human
gggagugugugcc

SEQ ID NO: 1455434 - RNA, 23 nt, Human
gggagugacucaagaagugaaga

SEQ ID NO: 1455435 - RNA, 14 nt, Human
gggagguggcuggg

SEQ ID NO: 1455436 - RNA, 23 nt, Human
gggaggugcuucuaguucugcca

SEQ ID NO: 1455437 - RNA, 15 nt, Human
gggacugaccagcag

SEQ ID NO: 1455438 - RNA, 18 nt, Human
gggaggugagaccaccuc

SEQ ID NO: 1455439 - RNA, 18 nt, Human
gggacuagccuggcuugg

SEQ ID NO: 1455440 - RNA, 20 nt, Human
gggacuacaggcgugagcca

SEQ ID NO: 1455441 - RNA, 19 nt, Human
gggacuacaggcgugagcc

SEQ ID NO: 1455442 - RNA, 17 nt, Human
gggacuaaaugcccugc

SEQ ID NO: 1455443 - RNA, 22 nt, Human
gggacucagccuucagacagag

SEQ ID NO: 1455444 - RNA, 12 nt, Human
gggacucagccc

SEQ ID NO: 1455445 - RNA, 13 nt, Human
gggacugagaaau

SEQ ID NO: 1455446 - RNA, 15 nt, Human
gggauaggccagccg

SEQ ID NO: 1455447 - RNA, 18 nt, Human
gggaucagggguaggaau

SEQ ID NO: 1455448 - RNA, 17 nt, Human
gggauccgacugcuuug

SEQ ID NO: 1455449 - RNA, 20 nt, Human
gggaucccucccccccaugc

SEQ ID NO: 1455450 - RNA, 13 nt, Human
gggcaagaggaau

SEQ ID NO: 1455451 - RNA, 20 nt, Human
gggcaauuaauuccuucagc

SEQ ID NO: 1455452 - RNA, 14 nt, Human
gggcaauugucuga

SEQ ID NO: 1455453 - RNA, 21 nt, Human
gggcaauuaauuccuucagca

SEQ ID NO: 1455454 - RNA, 14 nt, Human
gggcaucucugggc

SEQ ID NO: 1455455 - RNA, 23 nt, Human
gggcaguucgcagccacccugag

SEQ ID NO: 1455456 - RNA, 14 nt, Human
gggcauaaauuauu

SEQ ID NO: 1455457 - RNA, 22 nt, Human
gggcaguucgcagccacccuga

SEQ ID NO: 1455458 - RNA, 21 nt, Human
gggcaguucgcagccacccug

SEQ ID NO: 1455459 - RNA, 20 nt, Human
gggcaguucgcagccacccu

SEQ ID NO: 1455460 - RNA, 19 nt, Human
gggcaguucgcagccaccc

SEQ ID NO: 1455461 - RNA, 17 nt, Human
gggcaguucgcagccac

SEQ ID NO: 1455462 - RNA, 16 nt, Human
gggcaguucgcagcca

SEQ ID NO: 1455463 - RNA, 17 nt, Human
gggcaguaccugagggu

SEQ ID NO: 1455464 - RNA, 17 nt, Human
gggcagucauuauccag

SEQ ID NO: 1455465 - RNA, 21 nt, Human
gggcagucugagagaggccau

SEQ ID NO: 1455466 - RNA, 20 nt, Human
gggcagucugagagaggcca

SEQ ID NO: 1455467 - RNA, 19 nt, Human
gggcaugguguucuccugc

SEQ ID NO: 1455468 - RNA, 21 nt, Human
gggcaugguguucuccugcug

SEQ ID NO: 1455469 - RNA, 22 nt, Human
gggcaugagggguuccuccccu

SEQ ID NO: 1455470 - RNA, 21 nt, Human
gggcaucuggccuggccagug

SEQ ID NO: 1455471 - RNA, 17 nt, Human
gggcaucucugggcugg

SEQ ID NO: 1455472 - RNA, 22 nt, Human
gggcaucucugggcuggaugag

SEQ ID NO: 1455473 - RNA, 16 nt, Human
gggcaucucugggcug

SEQ ID NO: 1455474 - RNA, 15 nt, Human
gggcaucucugggcu

SEQ ID NO: 1455475 - RNA, 20 nt, Human
gggcccagagcccagcucca

SEQ ID NO: 1455476 - RNA, 19 nt, Human
gggcccagagcccagcucc

SEQ ID NO: 1455477 - RNA, 17 nt, Human
gggcccagagcccagcu

SEQ ID NO: 1455478 - RNA, 16 nt, Human
gggcccagagcccagc

SEQ ID NO: 1455479 - RNA, 15 nt, Human
gggcccagagcccag

SEQ ID NO: 1455480 - RNA, 13 nt, Human
gggcccagagccc

SEQ ID NO: 1455481 - RNA, 12 nt, Human
gggcccagagcc

SEQ ID NO: 1455482 - RNA, 11 nt, Human
gggcccagagc

SEQ ID NO: 1455483 - RNA, 20 nt, Human
gggccacuccuuccugcccc

SEQ ID NO: 1455484 - RNA, 21 nt, Human
gggccacuccuuccugcccca

SEQ ID NO: 1455485 - RNA, 19 nt, Human
gggccacuccuuccugccc

SEQ ID NO: 1455486 - RNA, 17 nt, Human
gggccacuccuuccugc

SEQ ID NO: 1455487 - RNA, 16 nt, Human
gggccacuccuuccug

SEQ ID NO: 1455488 - RNA, 12 nt, Human
gggccacuccuu

SEQ ID NO: 1455489 - RNA, 13 nt, Human
gggcccacaccuc

SEQ ID NO: 1455490 - RNA, 18 nt, Human
gggcccacaccuccuucc

SEQ ID NO: 1455491 - RNA, 17 nt, Human
gggccacgcuccagcug

SEQ ID NO: 1455492 - RNA, 16 nt, Human
gggccacgcuccagcu

SEQ ID NO: 1455493 - RNA, 19 nt, Human
gggccacaugggaggcuca

SEQ ID NO: 1455494 - RNA, 13 nt, Human
gggccaagcccag

SEQ ID NO: 1455495 - RNA, 16 nt, Human
gggccaaggaccugag

SEQ ID NO: 1455496 - RNA, 15 nt, Human
gggccaaggaccuga

SEQ ID NO: 1455497 - RNA, 14 nt, Human
gggccaaggaccug

SEQ ID NO: 1455498 - RNA, 13 nt, Human
gggccaaggaccu

SEQ ID NO: 1455499 - RNA, 15 nt, Human
gggccugggcaggag

SEQ ID NO: 1455500 - RNA, 13 nt, Human
gggccugggcagg

SEQ ID NO: 1455501 - RNA, 12 nt, Human
gggccugggagg

SEQ ID NO: 1455502 - RNA, 23 nt, Human
gggccuggcuggcugagggcagu

SEQ ID NO: 1455503 - RNA, 22 nt, Human
gggccuggcuggcugagggcag

SEQ ID NO: 1455504 - RNA, 21 nt, Human
gggccuggcuggcugagggca

SEQ ID NO: 1455505 - RNA, 12 nt, Human
gggccugggcag

SEQ ID NO: 1455506 - RNA, 20 nt, Human
gggccuggcuggcugagggc

SEQ ID NO: 1455507 - RNA, 18 nt, Human
gggccuggcuggcugagg

SEQ ID NO: 1455508 - RNA, 17 nt, Human
gggccuggcuggcugag

SEQ ID NO: 1455509 - RNA, 16 nt, Human
gggccuggcuggcuga

SEQ ID NO: 1455510 - RNA, 15 nt, Human
gggccuggcuggcug

SEQ ID NO: 1455511 - RNA, 14 nt, Human
gggccuggcuggcu

SEQ ID NO: 1455512 - RNA, 13 nt, Human
gggccuggcuggc

SEQ ID NO: 1455513 - RNA, 18 nt, Human
gggcccugggccugccuc

SEQ ID NO: 1455514 - RNA, 14 nt, Human
gggcccugggcugg

SEQ ID NO: 1455515 - RNA, 15 nt, Human
gggcccugggcugga

SEQ ID NO: 1455516 - RNA, 13 nt, Human
gggcccugggcug

SEQ ID NO: 1455517 - RNA, 17 nt, Human
gggcccugggccugccu

SEQ ID NO: 1455518 - RNA, 11 nt, Human
gggcccuggag

SEQ ID NO: 1455519 - RNA, 13 nt, Human
gggcccuggagca

SEQ ID NO: 1455520 - RNA, 15 nt, Human
gggcccuggagcagc

SEQ ID NO: 1455521 - RNA, 21 nt, Human
gggcccuggagcagccacccc

SEQ ID NO: 1455522 - RNA, 22 nt, Human
gggcccgcgauguggaacugcu

SEQ ID NO: 1455523 - RNA, 22 nt, Human
gggccccugccucucugcaggu

SEQ ID NO: 1455524 - RNA, 19 nt, Human
gggccccucacccugccuu

SEQ ID NO: 1455525 - RNA, 17 nt, Human
gggccccucacccugcc

SEQ ID NO: 1455526 - RNA, 14 nt, Human
gggcccccaucuca

SEQ ID NO: 1455527 - RNA, 21 nt, Human
gggccccucuccccagggaag

SEQ ID NO: 1455528 - RNA, 12 nt, Human
gggccccucucc

SEQ ID NO: 1455529 - RNA, 17 nt, Human
gggccccucucagcccu

SEQ ID NO: 1455530 - RNA, 16 nt, Human
gggccccucucagccc

SEQ ID NO: 1455531 - RNA, 15 nt, Human
gggccccucucagcc

SEQ ID NO: 1455532 - RNA, 14 nt, Human
gggccccucucagc

SEQ ID NO: 1455533 - RNA, 13 nt, Human
gggccccucuccc

SEQ ID NO: 1455534 - RNA, 13 nt, Human
gggccccugccuc

SEQ ID NO: 1455535 - RNA, 15 nt, Human
gggccccugccucuc

SEQ ID NO: 1455536 - RNA, 17 nt, Human
gggccccugccucucug

SEQ ID NO: 1455537 - RNA, 18 nt, Human
gggccccugccucucugc

SEQ ID NO: 1455538 - RNA, 19 nt, Human
gggccccugccucucugca

SEQ ID NO: 1455539 - RNA, 21 nt, Human
gggccccugccucucugcagg

SEQ ID NO: 1455540 - RNA, 13 nt, Human
ggucaggccuuug

SEQ ID NO: 1455541 - RNA, 20 nt, Human
ggucaggccuuugagcucag

SEQ ID NO: 1455542 - RNA, 12 nt, Human
ggucaggccuuu

SEQ ID NO: 1455543 - RNA, 11 nt, Human
ggucaggccuu

SEQ ID NO: 1455544 - RNA, 13 nt, Human
ggucaggcagggu

SEQ ID NO: 1455545 - RNA, 16 nt, Human
ggucaacaguuuuccu

SEQ ID NO: 1455546 - RNA, 18 nt, Human
ggucaaaauagugccacu

SEQ ID NO: 1455547 - RNA, 12 nt, Human
gguauuuucaau

SEQ ID NO: 1455548 - RNA, 21 nt, Human
ggucacagcggagguguggag

SEQ ID NO: 1455549 - RNA, 23 nt, Human
ggucaacuugagcauguuacuga

SEQ ID NO: 1455550 - RNA, 22 nt, Human
ggucaacuugagcauguuacug

SEQ ID NO: 1455551 - RNA, 22 nt, Human
ggucaacaguuuuccuaugcuu

SEQ ID NO: 1455552 - RNA, 12 nt, Human
ggucacagcugu

SEQ ID NO: 1455553 - RNA, 20 nt, Human
ggucaccuaggaagccucag

SEQ ID NO: 1455554 - RNA, 20 nt, Human
ggucacguuuggugcuucuc

SEQ ID NO: 1455555 - RNA, 16 nt, Human
gguacuugucauuucg

SEQ ID NO: 1455556 - RNA, 19 nt, Human
gguacuucuugaaggugcu

SEQ ID NO: 1455557 - RNA, 16 nt, Human
gguacuucuugaaggu

SEQ ID NO: 1455558 - RNA, 15 nt, Human
gguacuucuugaagg

SEQ ID NO: 1455559 - RNA, 21 nt, Human
gguaccagcagaaagguuagu

SEQ ID NO: 1455560 - RNA, 15 nt, Human
gguagaagggaaagc

SEQ ID NO: 1455561 - RNA, 21 nt, Human
gguagccagcacacagggcag

SEQ ID NO: 1455562 - RNA, 20 nt, Human
gguauuguauuuauucaaua

SEQ ID NO: 1455563 - RNA, 22 nt, Human
gguauuguauuuauucaauaaa

SEQ ID NO: 1455564 - RNA, 23 nt, Human
gguauuguauuuauucaauaaag

SEQ ID NO: 1455565 - RNA, 16 nt, Human
gguagccagcacacag

SEQ ID NO: 1455566 - RNA, 13 nt, Human
gguagccagcaca

SEQ ID NO: 1455567 - RNA, 18 nt, Human
gguagcauuuguguugaa

SEQ ID NO: 1455568 - RNA, 19 nt, Human
gggugcuacuggggaaacu

SEQ ID NO: 1455569 - RNA, 16 nt, Human
gggugcuacuggggaa

SEQ ID NO: 1455570 - RNA, 15 nt, Human
gggugcuacugggga

SEQ ID NO: 1455571 - RNA, 24 nt, Human
gggugccuaggccugggcagugga

SEQ ID NO: 1455572 - RNA, 23 nt, Human
gggugcaguaucaugcccugugc

SEQ ID NO: 1455573 - RNA, 19 nt, Human
gggugcacaggaggggguc

SEQ ID NO: 1455574 - RNA, 16 nt, Human
gggugcacaggagggg

SEQ ID NO: 1455575 - RNA, 14 nt, Human
gggugcacaggagg

SEQ ID NO: 1455576 - RNA, 13 nt, Human
gggugcacaggag

SEQ ID NO: 1455577 - RNA, 23 nt, Human
gggugaugagggcagcagccagc

SEQ ID NO: 1455578 - RNA, 21 nt, Human
gggugaugagggcagcagcca

SEQ ID NO: 1455579 - RNA, 19 nt, Human
gggugaugagggcagcagc

SEQ ID NO: 1455580 - RNA, 18 nt, Human
gggugaugagggcagcag

SEQ ID NO: 1455581 - RNA, 17 nt, Human
gggugaugagggcagca

SEQ ID NO: 1455582 - RNA, 14 nt, Human
gggugaugagggca

SEQ ID NO: 1455583 - RNA, 23 nt, Human
gggugaguuggcuuaccuggccc

SEQ ID NO: 1455584 - RNA, 17 nt, Human
gggugagggucccaugu

SEQ ID NO: 1455585 - RNA, 15 nt, Human
gggugaggagcuggg

SEQ ID NO: 1455586 - RNA, 14 nt, Human
gggugaggagcugg

SEQ ID NO: 1455587 - RNA, 20 nt, Human
gggugacccggcacccccug

SEQ ID NO: 1455588 - RNA, 21 nt, Human
gggucuguagguugcacacuu

SEQ ID NO: 1455589 - RNA, 21 nt, Human
gggucuguaaaaucuuucuuu

SEQ ID NO: 1455590 - RNA, 15 nt, Human
gggucuguaaaaucu

SEQ ID NO: 1455591 - RNA, 16 nt, Human
gggucuguaaaaucuu

SEQ ID NO: 1455592 - RNA, 17 nt, Human
gggucuguaaaaucuuu

SEQ ID NO: 1455593 - RNA, 20 nt, Human
gggucuguaaaaucuuucuu

SEQ ID NO: 1455594 - RNA, 20 nt, Human
gggugaacaaagcagccacg

SEQ ID NO: 1455595 - RNA, 20 nt, Human
gggucuguagguugcacacu

SEQ ID NO: 1455596 - RNA, 17 nt, Human
gggugaagugaagacaa

SEQ ID NO: 1455597 - RNA, 22 nt, Human
gguaccagaugcagcucaagag

SEQ ID NO: 1455598 - RNA, 21 nt, Human
ggguuggagcaguagcuggag

SEQ ID NO: 1455599 - RNA, 20 nt, Human
ggguucaccugggcugaggc

SEQ ID NO: 1455600 - RNA, 13 nt, Human
ggguuaucucugu

SEQ ID NO: 1455601 - RNA, 16 nt, Human
ggguuaagaagacuuu

SEQ ID NO: 1455602 - RNA, 17 nt, Human
gggugcugggccccugc

SEQ ID NO: 1455603 - RNA, 18 nt, Human
gggugcugggccccugcc

SEQ ID NO: 1455604 - RNA, 16 nt, Human
gggcuuguggggccug

SEQ ID NO: 1455605 - RNA, 18 nt, Human
gggcuuguggggccuggg

SEQ ID NO: 1455606 - RNA, 17 nt, Human
gggccugggcuccugga

SEQ ID NO: 1455607 - RNA, 18 nt, Human
gggccugggcuccuggac

SEQ ID NO: 1455608 - RNA, 16 nt, Human
gggccugggcuccugg

SEQ ID NO: 1455609 - RNA, 15 nt, Human
gggccugggcuccug

SEQ ID NO: 1455610 - RNA, 12 nt, Human
gggccugggcuc

SEQ ID NO: 1455611 - RNA, 17 nt, Human
gggccugggcaggaggg

SEQ ID NO: 1455612 - RNA, 16 nt, Human
gggccugggcaggagg

SEQ ID NO: 1455613 - RNA, 22 nt, Human
gggcuuugauguuccuuccagu

SEQ ID NO: 1455614 - RNA, 14 nt, Human
ggggagggauucug

SEQ ID NO: 1455615 - RNA, 18 nt, Human
ggggagggaagggagcca

SEQ ID NO: 1455616 - RNA, 17 nt, Human
ggggagggaagggagcc

SEQ ID NO: 1455617 - RNA, 14 nt, Human
ggggagggaaggga

SEQ ID NO: 1455618 - RNA, 14 nt, Human
gggcuuuuuucuuu

SEQ ID NO: 1455619 - RNA, 20 nt, Human
ggggagggaagggagccaag

SEQ ID NO: 1455620 - RNA, 15 nt, Human
ggggagggauucugg

SEQ ID NO: 1455621 - RNA, 13 nt, Human
ggggaggguaggc

SEQ ID NO: 1455622 - RNA, 15 nt, Human
ggggagggggauccg

SEQ ID NO: 1455623 - RNA, 20 nt, Human
ggggauucuuccaucugauu

SEQ ID NO: 1455624 - RNA, 17 nt, Human
ggggaggguaggcagga

SEQ ID NO: 1455625 - RNA, 13 nt, Human
ggggauguguccu

SEQ ID NO: 1455626 - RNA, 16 nt, Human
ggggcgcggcugggag

SEQ ID NO: 1455627 - RNA, 15 nt, Human
ggggcgcggcuggga

SEQ ID NO: 1455628 - RNA, 19 nt, Human
ggggcagucugagagaggc

SEQ ID NO: 1455629 - RNA, 15 nt, Human
ggggcagucugagag

SEQ ID NO: 1455630 - RNA, 18 nt, Human
ggggcagucugagagagg

SEQ ID NO: 1455631 - RNA, 22 nt, Human
ggggcacaagacugacgccagg

SEQ ID NO: 1455632 - RNA, 14 nt, Human
ggggcacaagacug

SEQ ID NO: 1455633 - RNA, 23 nt, Human
ggggcucuaacgccugagcccag

SEQ ID NO: 1455634 - RNA, 22 nt, Human
ggggcucuaacgccugagccca

SEQ ID NO: 1455635 - RNA, 21 nt, Human
ggggcucuaacgccugagccc

SEQ ID NO: 1455636 - RNA, 20 nt, Human
ggggcucuaacgccugagcc

SEQ ID NO: 1455637 - RNA, 18 nt, Human
ggggcucuaacgccugag

SEQ ID NO: 1455638 - RNA, 17 nt, Human
ggggcucuaacgccuga

SEQ ID NO: 1455639 - RNA, 19 nt, Human
ggggcucccuccgccccca

SEQ ID NO: 1455640 - RNA, 16 nt, Human
ggggcucccuccgccc

SEQ ID NO: 1455641 - RNA, 14 nt, Human
ggggcuaauuuaac

SEQ ID NO: 1455642 - RNA, 11 nt, Human
ggggcucagag

SEQ ID NO: 1455643 - RNA, 14 nt, Human
ggggcuaccaggaa

SEQ ID NO: 1455644 - RNA, 21 nt, Human
gggucugggggcacaagacug

SEQ ID NO: 1455645 - RNA, 18 nt, Human
gggucuggcugguguuaa

SEQ ID NO: 1455646 - RNA, 15 nt, Human
gggucuggcuggugu

SEQ ID NO: 1455647 - RNA, 13 nt, Human
gggucuguaaaau

SEQ ID NO: 1455648 - RNA, 14 nt, Human
gggucuguaaaauc

SEQ ID NO: 1455649 - RNA, 14 nt, Human
gggucuggcuggug

SEQ ID NO: 1455650 - RNA, 13 nt, Human
gggucuggcuggu

SEQ ID NO: 1455651 - RNA, 12 nt, Human
gggucuggcugg

SEQ ID NO: 1455652 - RNA, 22 nt, Human
gggucuggcagccucccaucca

SEQ ID NO: 1455653 - RNA, 22 nt, Human
gggucuggaguugaucuggaac

SEQ ID NO: 1455654 - RNA, 20 nt, Human
gggucuggaguugaucugga

SEQ ID NO: 1455655 - RNA, 22 nt, Human
gggucugcucuuucucugccag

SEQ ID NO: 1455656 - RNA, 21 nt, Human
gggucugcucuuucucugcca

SEQ ID NO: 1455657 - RNA, 20 nt, Human
gggucugcucuuucucugcc

SEQ ID NO: 1455658 - RNA, 19 nt, Human
gggucugcucuuucucugc

SEQ ID NO: 1455659 - RNA, 23 nt, Human
gggucugcucccaaggggccuga

SEQ ID NO: 1455660 - RNA, 21 nt, Human
gggucugcucccaaggggccu

SEQ ID NO: 1455661 - RNA, 17 nt, Human
gggucugagcuccagcu

SEQ ID NO: 1455662 - RNA, 16 nt, Human
gggucugagcuccagc

SEQ ID NO: 1455663 - RNA, 15 nt, Human
gggguuaucucugug

SEQ ID NO: 1455664 - RNA, 14 nt, Human
gggguggugucaga

SEQ ID NO: 1455665 - RNA, 19 nt, Human
gggguguggcuccuuccca

SEQ ID NO: 1455666 - RNA, 11 nt, Human
ggguaaacaau

SEQ ID NO: 1455667 - RNA, 15 nt, Human
ggguaaaauacuuuu

SEQ ID NO: 1455668 - RNA, 21 nt, Human
ggguaaaauacuuuuacucug

SEQ ID NO: 1455669 - RNA, 21 nt, Human
ggguaaacccucacaucagag

SEQ ID NO: 1455670 - RNA, 17 nt, Human
ggguaaucccugcuuuu

SEQ ID NO: 1455671 - RNA, 21 nt, Human
gggggacuuacaugauucauu

SEQ ID NO: 1455672 - RNA, 15 nt, Human
gggggagagggcugc

SEQ ID NO: 1455673 - RNA, 15 nt, Human
ggggcugaggagcag

SEQ ID NO: 1455674 - RNA, 22 nt, Human
gggggagccccuucugcucagc

SEQ ID NO: 1455675 - RNA, 18 nt, Human
ggggugcugggccccugc

SEQ ID NO: 1455676 - RNA, 18 nt, Human
gggguggcugcagccuca

SEQ ID NO: 1455677 - RNA, 13 nt, Human
gggguggccaggc

SEQ ID NO: 1455678 - RNA, 13 nt, Human
ggggugggcuggu

SEQ ID NO: 1455679 - RNA, 15 nt, Human
gggguggguauaaaa

SEQ ID NO: 1455680 - RNA, 20 nt, Human
gggguggggggggugcuggg

SEQ ID NO: 1455681 - RNA, 21 nt, Human
ggugcugacuucaucucccac

SEQ ID NO: 1455682 - RNA, 12 nt, Human
ggugcucugucu

SEQ ID NO: 1455683 - RNA, 20 nt, Human
ggugcugacggccagggaga

SEQ ID NO: 1455684 - RNA, 17 nt, Human
ggugcugacggccaggg

SEQ ID NO: 1455685 - RNA, 16 nt, Human
ggugcugacggccagg

SEQ ID NO: 1455686 - RNA, 15 nt, Human
ggugcugacggccag

SEQ ID NO: 1455687 - RNA, 14 nt, Human
ggugcuaggaagag

SEQ ID NO: 1455688 - RNA, 23 nt, Human
gguggcuacucugugccagagcc

SEQ ID NO: 1455689 - RNA, 19 nt, Human
gguggcuacucugugccag

SEQ ID NO: 1455690 - RNA, 18 nt, Human
gguggcuacucugugcca

SEQ ID NO: 1455691 - RNA, 16 nt, Human
gguggcuacucugugc

SEQ ID NO: 1455692 - RNA, 14 nt, Human
gguggcuacucugu

SEQ ID NO: 1455693 - RNA, 15 nt, Human
gguggccaugcuccu

SEQ ID NO: 1455694 - RNA, 13 nt, Human
gguggccaggccg

SEQ ID NO: 1455695 - RNA, 16 nt, Human
gguggccaggccggga

SEQ ID NO: 1455696 - RNA, 12 nt, Human
gguggccaggcc

SEQ ID NO: 1455697 - RNA, 11 nt, Human
gguggccaggc

SEQ ID NO: 1455698 - RNA, 21 nt, Human
ggugcuacuggggaaacuggc

SEQ ID NO: 1455699 - RNA, 18 nt, Human
ggugcuacuggggaaacu

SEQ ID NO: 1455700 - RNA, 14 nt, Human
ggugcuacugggga

SEQ ID NO: 1455701 - RNA, 18 nt, Human
ggugcgagugcgugaaua

SEQ ID NO: 1455702 - RNA, 23 nt, Human
ggugcuacacccuuuuccagcug

SEQ ID NO: 1455703 - RNA, 22 nt, Human
ggugcuacacccuuuuccagcu

SEQ ID NO: 1455704 - RNA, 17 nt, Human
ggugccuuuauuuccac

SEQ ID NO: 1455705 - RNA, 17 nt, Human
ggugccugucccacccc

SEQ ID NO: 1455706 - RNA, 13 nt, Human
ggugccuguccca

SEQ ID NO: 1455707 - RNA, 14 nt, Human
ggugagaccaccuc

SEQ ID NO: 1455708 - RNA, 15 nt, Human
ggugagaaauuuaaa

SEQ ID NO: 1455709 - RNA, 15 nt, Human
ggugagaccaccucu

SEQ ID NO: 1455710 - RNA, 15 nt, Human
ggucucacccuggag

SEQ ID NO: 1455711 - RNA, 17 nt, Human
ggucucaaacuccugac

SEQ ID NO: 1455712 - RNA, 22 nt, Human
ggucuccagaaagccccaccca

SEQ ID NO: 1455713 - RNA, 11 nt, Human
ggucucagccc

SEQ ID NO: 1455714 - RNA, 21 nt, Human
ggucucaccggcucucaccug

SEQ ID NO: 1455715 - RNA, 19 nt, Human
ggucucaccggcucucacc

SEQ ID NO: 1455716 - RNA, 21 nt, Human
ggucucacccuggaggcaccu

SEQ ID NO: 1455717 - RNA, 20 nt, Human
ggucucacccuggaggcacc

SEQ ID NO: 1455718 - RNA, 16 nt, Human
ggucucacccuggagg

SEQ ID NO: 1455719 - RNA, 19 nt, Human
ggucucucucucucuacaa

SEQ ID NO: 1455720 - RNA, 20 nt, Human
ggucucuucugaauaaagca

SEQ ID NO: 1455721 - RNA, 21 nt, Human
ggucucuucugaauaaagcaa

SEQ ID NO: 1455722 - RNA, 22 nt, Human
ggucucuucugaauaaagcaau

SEQ ID NO: 1455723 - RNA, 18 nt, Human
ggugacaucggaaaaaua

SEQ ID NO: 1455724 - RNA, 18 nt, Human
ggugacaucagguuuuuc

SEQ ID NO: 1455725 - RNA, 20 nt, Human
ggucugcucuuucucugcca

SEQ ID NO: 1455726 - RNA, 19 nt, Human
ggucugcucuuucucugcc

SEQ ID NO: 1455727 - RNA, 22 nt, Human
ggucugcucuuucucugccagu

SEQ ID NO: 1455728 - RNA, 18 nt, Human
ggucugcucuuucucugc

SEQ ID NO: 1455729 - RNA, 16 nt, Human
ggucugcucuuucucu

SEQ ID NO: 1455730 - RNA, 22 nt, Human
ggucugcucccaaggggccuga

SEQ ID NO: 1455731 - RNA, 23 nt, Human
ggucugcucccaaggggccugag

SEQ ID NO: 1455732 - RNA, 20 nt, Human
ggucugcucccaaggggccu

SEQ ID NO: 1455733 - RNA, 14 nt, Human
ggucugcucccaag

SEQ ID NO: 1455734 - RNA, 12 nt, Human
ggucugcuccca

SEQ ID NO: 1455735 - RNA, 23 nt, Human
ggucugcccucugcauccucugg

SEQ ID NO: 1455736 - RNA, 23 nt, Human
ggucugccucuucugggagggca

SEQ ID NO: 1455737 - RNA, 16 nt, Human
ggugaccccagggcac

SEQ ID NO: 1455738 - RNA, 15 nt, Human
ggugaccccagggca

SEQ ID NO: 1455739 - RNA, 14 nt, Human
ggugaccccagggc

SEQ ID NO: 1455740 - RNA, 13 nt, Human
ggugaccccaggg

SEQ ID NO: 1455741 - RNA, 17 nt, Human
ggugacaucggaaaaau

SEQ ID NO: 1455742 - RNA, 21 nt, Human
ggugacugucuggggagcggg

SEQ ID NO: 1455743 - RNA, 14 nt, Human
ggugacugucuggg

SEQ ID NO: 1455744 - RNA, 21 nt, Human
ggugagaaccuggguugcaga

SEQ ID NO: 1455745 - RNA, 13 nt, Human
ggugagaaauuua

SEQ ID NO: 1455746 - RNA, 10 nt, Human
gguucuuguu

SEQ ID NO: 1455747 - RNA, 21 nt, Human
gguucuugaggggaccaggag

SEQ ID NO: 1455748 - RNA, 22 nt, Human
gguucuugaggggaccaggagu

SEQ ID NO: 1455749 - RNA, 20 nt, Human
gguucuugaggggaccagga

SEQ ID NO: 1455750 - RNA, 19 nt, Human
gguucuugaggggaccagg

SEQ ID NO: 1455751 - RNA, 14 nt, Human
gguucuuguuggug

SEQ ID NO: 1455752 - RNA, 11 nt, Human
gguugaggaaa

SEQ ID NO: 1455753 - RNA, 18 nt, Human
gguucuuucauuugcuuu

SEQ ID NO: 1455754 - RNA, 15 nt, Human
gguugacuuuaccca

SEQ ID NO: 1455755 - RNA, 22 nt, Human
gguucacaaacuucauuucaga

SEQ ID NO: 1455756 - RNA, 21 nt, Human
gguucaaagauauuuugcuuu

SEQ ID NO: 1455757 - RNA, 23 nt, Human
gguuauuuugauguaaagauguu

SEQ ID NO: 1455758 - RNA, 13 nt, Human
gguucaaagauau

SEQ ID NO: 1455759 - RNA, 20 nt, Human
gguguuuuguucaccauuau

SEQ ID NO: 1455760 - RNA, 21 nt, Human
gguguccuacagaaaaaccuu

SEQ ID NO: 1455761 - RNA, 18 nt, Human
gguguccuacagaaaaac

SEQ ID NO: 1455762 - RNA, 16 nt, Human
gguguccuacagaaaa

SEQ ID NO: 1455763 - RNA, 15 nt, Human
gguguccuacagaaa

SEQ ID NO: 1455764 - RNA, 14 nt, Human
gguguccuacagaa

SEQ ID NO: 1455765 - RNA, 21 nt, Human
gguguccugcaccggggccug

SEQ ID NO: 1455766 - RNA, 23 nt, Human
gguuauagacagucguucccagu

SEQ ID NO: 1455767 - RNA, 14 nt, Human
gguuaucucugugu

SEQ ID NO: 1455768 - RNA, 23 nt, Human
gguuagaccuacagggggucugg

SEQ ID NO: 1455769 - RNA, 22 nt, Human
gguuagaccuacagggggucug

SEQ ID NO: 1455770 - RNA, 20 nt, Human
gguuagaccuacaggggguc

SEQ ID NO: 1455771 - RNA, 15 nt, Human
gguuagaccuacagg

SEQ ID NO: 1455772 - RNA, 14 nt, Human
gguuagaccuacag

SEQ ID NO: 1455773 - RNA, 13 nt, Human
gguuagaccuaca

SEQ ID NO: 1455774 - RNA, 16 nt, Human
gguuagggaaaacauu

SEQ ID NO: 1455775 - RNA, 23 nt, Human
gguggugucagacccuggaggcc

SEQ ID NO: 1455776 - RNA, 14 nt, Human
ggugguggccuggu

SEQ ID NO: 1455777 - RNA, 15 nt, Human
ggugguggcucggga

SEQ ID NO: 1455778 - RNA, 22 nt, Human
gguggucuguuggcaggcuggc

SEQ ID NO: 1455779 - RNA, 21 nt, Human
gguggucuguuggcaggcugg

SEQ ID NO: 1455780 - RNA, 16 nt, Human
gguggucuguuggcag

SEQ ID NO: 1455781 - RNA, 14 nt, Human
gguggucccugggu

SEQ ID NO: 1455782 - RNA, 13 nt, Human
ggugguauuuuca

SEQ ID NO: 1455783 - RNA, 20 nt, Human
ggugguauuuucaauagcca

SEQ ID NO: 1455784 - RNA, 16 nt, Human
ggugguacccucugga

SEQ ID NO: 1455785 - RNA, 19 nt, Human
ggugggugccuaggccugg

SEQ ID NO: 1455786 - RNA, 20 nt, Human
gguggguccaugggcagagc

SEQ ID NO: 1455787 - RNA, 17 nt, Human
gguggguccaugggcag

SEQ ID NO: 1455788 - RNA, 14 nt, Human
gguggguccauggg

SEQ ID NO: 1455789 - RNA, 10 nt, Human
ggugggucca

SEQ ID NO: 1455790 - RNA, 11 nt, Human
gguggggugga

SEQ ID NO: 1455791 - RNA, 14 nt, Human
gguggguauaaaag

SEQ ID NO: 1455792 - RNA, 22 nt, Human
gguggcuacucugugccagagc

SEQ ID NO: 1455793 - RNA, 16 nt, Human
gguggcugcagccuca

SEQ ID NO: 1455794 - RNA, 15 nt, Human
gguggcugcagccuc

SEQ ID NO: 1455795 - RNA, 14 nt, Human
gguggcugcagccu

SEQ ID NO: 1455796 - RNA, 23 nt, Human
ggugggguccuggagcagaccac

SEQ ID NO: 1455797 - RNA, 14 nt, Human
ggugggguccugga

SEQ ID NO: 1455798 - RNA, 16 nt, Human
gguguagcuacagaga

SEQ ID NO: 1455799 - RNA, 15 nt, Human
gguguagcuacagag

SEQ ID NO: 1455800 - RNA, 22 nt, Human
gguguagaacacuaauucauaa

SEQ ID NO: 1455801 - RNA, 15 nt, Human
ggugguuuucuguuc

SEQ ID NO: 1455802 - RNA, 18 nt, Human
ggugguuuucuguucuuu

SEQ ID NO: 1455803 - RNA, 17 nt, Human
ggugguuucagaaaugu

SEQ ID NO: 1455804 - RNA, 18 nt, Human
ggugguuucagaaaugug

SEQ ID NO: 1455805 - RNA, 12 nt, Human
gguguccuacag

SEQ ID NO: 1455806 - RNA, 20 nt, Human
gguguccccaacagcgccca

SEQ ID NO: 1455807 - RNA, 19 nt, Human
gguguccccaacagcgccc

SEQ ID NO: 1455808 - RNA, 15 nt, Human
gguguccccaacagc

SEQ ID NO: 1455809 - RNA, 13 nt, Human
gguguccccaaca

SEQ ID NO: 1455810 - RNA, 23 nt, Human
ggugucagacccuggaggcccca

SEQ ID NO: 1455811 - RNA, 18 nt, Human
ggugucagacccuggagg

SEQ ID NO: 1455812 - RNA, 22 nt, Human
gguguagcuacagagaaaccag

SEQ ID NO: 1455813 - RNA, 18 nt, Human
gguguagcuacagagaaa

SEQ ID NO: 1455814 - RNA, 17 nt, Human
gguguagcuacagagaa

SEQ ID NO: 1455815 - RNA, 23 nt, Human
uacuguugcacguguguuuuucu

SEQ ID NO: 1455816 - RNA, 16 nt, Human
uacuguugcacgugug

SEQ ID NO: 1455817 - RNA, 15 nt, Human
uacuguugcacgugu

SEQ ID NO: 1455818 - RNA, 14 nt, Human
uacuguugcacgug

SEQ ID NO: 1455819 - RNA, 13 nt, Human
uacuguugcacgu

SEQ ID NO: 1455820 - RNA, 16 nt, Human
uacuguucugugucuu

SEQ ID NO: 1455821 - RNA, 17 nt, Human
uacuguucugugucuuu

SEQ ID NO: 1455822 - RNA, 14 nt, Human
uacuguucuguguc

SEQ ID NO: 1455823 - RNA, 21 nt, Human
uacuguucuaaagcucugaca

SEQ ID NO: 1455824 - RNA, 19 nt, Human
uacuguucuaaagcucuga

SEQ ID NO: 1455825 - RNA, 18 nt, Human
uacuguucuaaagcucug

SEQ ID NO: 1455826 - RNA, 17 nt, Human
uacuguucuaaagcucu

SEQ ID NO: 1455827 - RNA, 15 nt, Human
uacuguucuaaagcu

SEQ ID NO: 1455828 - RNA, 14 nt, Human
uacuguucuaaagc

SEQ ID NO: 1455829 - RNA, 13 nt, Human
uacuguucuaaag

SEQ ID NO: 1455830 - RNA, 12 nt, Human
uacuguucuaaa

SEQ ID NO: 1455831 - RNA, 21 nt, Human
uacugugugugugaaugaaca

SEQ ID NO: 1455832 - RNA, 19 nt, Human
uacugugugugugaaugaa

SEQ ID NO: 1455833 - RNA, 18 nt, Human
uacugugugugugaauga

SEQ ID NO: 1455834 - RNA, 17 nt, Human
uacugugugugugaaug

SEQ ID NO: 1455835 - RNA, 14 nt, Human
uacuguguguguga

SEQ ID NO: 1455836 - RNA, 14 nt, Human
uacuguguaauuag

SEQ ID NO: 1455837 - RNA, 13 nt, Human
uacuguguaauua

SEQ ID NO: 1455838 - RNA, 15 nt, Human
uacugcauacuuuuu

SEQ ID NO: 1455839 - RNA, 13 nt, Human
uacugcauacuuu

SEQ ID NO: 1455840 - RNA, 22 nt, Human
uacugcauacuuuuuaaaugua

SEQ ID NO: 1455841 - RNA, 21 nt, Human
uacugcauacuuuuuaaaugu

SEQ ID NO: 1455842 - RNA, 18 nt, Human
uacugcauacuuuuuaaa

SEQ ID NO: 1455843 - RNA, 17 nt, Human
uacugcauacuuuuuaa

SEQ ID NO: 1455844 - RNA, 23 nt, Human
uacuguauuuuguauuguuucaa

SEQ ID NO: 1455845 - RNA, 17 nt, Human
uacuguauuuuguauug

SEQ ID NO: 1455846 - RNA, 21 nt, Human
uacuguaucaugacaaagacu

SEQ ID NO: 1455847 - RNA, 15 nt, Human
uacuuguaaauauaa

SEQ ID NO: 1455848 - RNA, 14 nt, Human
uacuuguaaauaua

SEQ ID NO: 1455849 - RNA, 16 nt, Human
uacuuguaaauauaaa

SEQ ID NO: 1455850 - RNA, 13 nt, Human
uacuuguaaauau

SEQ ID NO: 1455851 - RNA, 23 nt, Human
uacuugggagaccuguaaucaua

SEQ ID NO: 1455852 - RNA, 21 nt, Human
uacuugggagaccuguaauca

SEQ ID NO: 1455853 - RNA, 14 nt, Human
uacuuggauuuagu

SEQ ID NO: 1455854 - RNA, 22 nt, Human
uacuugaagggccagagccagg

SEQ ID NO: 1455855 - RNA, 21 nt, Human
uacuugaagggccagagccag

SEQ ID NO: 1455856 - RNA, 19 nt, Human
uacuuacaugcauuacugc

SEQ ID NO: 1455857 - RNA, 23 nt, Human
uacuuacaugcauuacugcaugc

SEQ ID NO: 1455858 - RNA, 15 nt, Human
uacuuaauccaaugg

SEQ ID NO: 1455859 - RNA, 12 nt, Human
uacuugaaugaa

SEQ ID NO: 1455860 - RNA, 14 nt, Human
uacuugaaugaaaa

SEQ ID NO: 1455861 - RNA, 14 nt, Human
uacuugaccuccua

SEQ ID NO: 1455862 - RNA, 17 nt, Human
uacuugcucagguacuu

SEQ ID NO: 1455863 - RNA, 16 nt, Human
uacuugcucagguacu

SEQ ID NO: 1455864 - RNA, 23 nt, Human
uacuugccuuauuagagugucuu

SEQ ID NO: 1455865 - RNA, 21 nt, Human
uacuugcucuugaugccuggc

SEQ ID NO: 1455866 - RNA, 22 nt, Human
uagaacaugguuaccaugucuu

SEQ ID NO: 1455867 - RNA, 22 nt, Human
uagaacagggaaaauaggcagg

SEQ ID NO: 1455868 - RNA, 19 nt, Human
uagaacacuaauucauaau

SEQ ID NO: 1455869 - RNA, 18 nt, Human
uagaacacuaauucauaa

SEQ ID NO: 1455870 - RNA, 16 nt, Human
uagaacacuaauucau

SEQ ID NO: 1455871 - RNA, 15 nt, Human
uagaacacuaauuca

SEQ ID NO: 1455872 - RNA, 20 nt, Human
uagaacacuaauucauaauc

SEQ ID NO: 1455873 - RNA, 15 nt, Human
uagaacacaggcaaa

SEQ ID NO: 1455874 - RNA, 17 nt, Human
uagaacacacacacuua

SEQ ID NO: 1455875 - RNA, 12 nt, Human
uagaacacacac

SEQ ID NO: 1455876 - RNA, 13 nt, Human
uagaacaaggcug

SEQ ID NO: 1455877 - RNA, 18 nt, Human
uagaaauuaccuguggau

SEQ ID NO: 1455878 - RNA, 16 nt, Human
uagaaauuaccugugg

SEQ ID NO: 1455879 - RNA, 19 nt, Human
uagaaauuacacccaaaga

SEQ ID NO: 1455880 - RNA, 23 nt, Human
uagaaauuuauuuccuaguucug

SEQ ID NO: 1455881 - RNA, 16 nt, Human
uagaaaucauuuugca

SEQ ID NO: 1455882 - RNA, 19 nt, Human
uagaaauguaacuuuugua

SEQ ID NO: 1455883 - RNA, 23 nt, Human
uagaaaugguuguauuagauguu

SEQ ID NO: 1455884 - RNA, 16 nt, Human
uagaaaugguuguauu

SEQ ID NO: 1455885 - RNA, 17 nt, Human
uagaaaugguuguauua

SEQ ID NO: 1455886 - RNA, 19 nt, Human
uagaaaugguuguauuaga

SEQ ID NO: 1455887 - RNA, 20 nt, Human
uagaaaugguuguauuagau

SEQ ID NO: 1455888 - RNA, 17 nt, Human
uagaaaucauuuugcaa

SEQ ID NO: 1455889 - RNA, 13 nt, Human
uagaaaucauuuu

SEQ ID NO: 1455890 - RNA, 20 nt, Human
uagaaauauuuuaaaaucag

SEQ ID NO: 1455891 - RNA, 15 nt, Human
uagaaaugguuguau

SEQ ID NO: 1455892 - RNA, 11 nt, Human
uagaaaucaua

SEQ ID NO: 1455893 - RNA, 19 nt, Human
uagaaauauuuuaaaauca

SEQ ID NO: 1455894 - RNA, 16 nt, Human
uagaaauauuuuaaaa

SEQ ID NO: 1455895 - RNA, 15 nt, Human
uagaaauauuuuaaa

SEQ ID NO: 1455896 - RNA, 14 nt, Human
uagaaauauuuuaa

SEQ ID NO: 1455897 - RNA, 13 nt, Human
uagaaagcauuug

SEQ ID NO: 1455898 - RNA, 14 nt, Human
uagaaagcauuuga

SEQ ID NO: 1455899 - RNA, 18 nt, Human
uagaaagagauacagagg

SEQ ID NO: 1455900 - RNA, 17 nt, Human
uagaaagagauacagag

SEQ ID NO: 1455901 - RNA, 16 nt, Human
uagaaagagaaacagu

SEQ ID NO: 1455902 - RNA, 17 nt, Human
uagaaagaccaggccaa

SEQ ID NO: 1455903 - RNA, 15 nt, Human
uagaaagaccaggcc

SEQ ID NO: 1455904 - RNA, 15 nt, Human
uagaaacuuccaaau

SEQ ID NO: 1455905 - RNA, 15 nt, Human
uagaaagaagaugaa

SEQ ID NO: 1455906 - RNA, 20 nt, Human
uacuuuauguuacuacaugc

SEQ ID NO: 1455907 - RNA, 17 nt, Human
uacuuuauguuacuaca

SEQ ID NO: 1455908 - RNA, 23 nt, Human
uacuuuauaacuaacauguccug

SEQ ID NO: 1455909 - RNA, 20 nt, Human
uacuuuauaacuaacauguc

SEQ ID NO: 1455910 - RNA, 19 nt, Human
uacuuuauaacuaacaugu

SEQ ID NO: 1455911 - RNA, 21 nt, Human
uacuuuagaagccugcauaau

SEQ ID NO: 1455912 - RNA, 17 nt, Human
uacuuuagaagccugca

SEQ ID NO: 1455913 - RNA, 20 nt, Human
uagaaauaaaggaugugauu

SEQ ID NO: 1455914 - RNA, 19 nt, Human
uagaaauaaaggaugugau

SEQ ID NO: 1455915 - RNA, 16 nt, Human
uagaaauaaagcaucu

SEQ ID NO: 1455916 - RNA, 11 nt, Human
uagaaagcuau

SEQ ID NO: 1455917 - RNA, 13 nt, Human
uagaaaggccuuu

SEQ ID NO: 1455918 - RNA, 14 nt, Human
uagaaaggccuuua

SEQ ID NO: 1455919 - RNA, 15 nt, Human
uagaaaggccuuuaa

SEQ ID NO: 1455920 - RNA, 16 nt, Human
uagaaaggccuuuaaa

SEQ ID NO: 1455921 - RNA, 15 nt, Human
uagaaagcauuugaa

SEQ ID NO: 1455922 - RNA, 16 nt, Human
uagaaagcauuugaau

SEQ ID NO: 1455923 - RNA, 17 nt, Human
uagaaagcauuugaaug

SEQ ID NO: 1455924 - RNA, 18 nt, Human
uagaaagcauuugaaugc

SEQ ID NO: 1455925 - RNA, 19 nt, Human
uagaaagcauuugaaugca

SEQ ID NO: 1455926 - RNA, 20 nt, Human
uagaaagcauuugaaugcau

SEQ ID NO: 1455927 - RNA, 21 nt, Human
uagaaagcauuugaaugcauu

SEQ ID NO: 1455928 - RNA, 22 nt, Human
uagaaagcauuugaaugcauuu

SEQ ID NO: 1455929 - RNA, 23 nt, Human
uacucagauaagguaaaaugcca

SEQ ID NO: 1455930 - RNA, 16 nt, Human
uacucagauaagguaa

SEQ ID NO: 1455931 - RNA, 17 nt, Human
uacucacuuuucccacu

SEQ ID NO: 1455932 - RNA, 22 nt, Human
uacucagaauucucuaguuuga

SEQ ID NO: 1455933 - RNA, 18 nt, Human
uacucacuuuucccacuc

SEQ ID NO: 1455934 - RNA, 16 nt, Human
uacucagaauucucua

SEQ ID NO: 1455935 - RNA, 16 nt, Human
uacucacuuuucccac

SEQ ID NO: 1455936 - RNA, 20 nt, Human
uacuaccuugaaaauaagaa

SEQ ID NO: 1455937 - RNA, 16 nt, Human
uacuaccuugaaaaua

SEQ ID NO: 1455938 - RNA, 14 nt, Human
uacuaccuugaaaa

SEQ ID NO: 1455939 - RNA, 13 nt, Human
uacuaccuugaaa

SEQ ID NO: 1455940 - RNA, 14 nt, Human
uacuaccuguaaug

SEQ ID NO: 1455941 - RNA, 13 nt, Human
uacuacaugcacu

SEQ ID NO: 1455942 - RNA, 16 nt, Human
uacugauauauuuuac

SEQ ID NO: 1455943 - RNA, 14 nt, Human
uacugauauauuuu

SEQ ID NO: 1455944 - RNA, 23 nt, Human
uacugagccuuguaauucuaaau

SEQ ID NO: 1455945 - RNA, 19 nt, Human
uacugagccuuguaauucu

SEQ ID NO: 1455946 - RNA, 18 nt, Human
uacugagccuuguaauuc

SEQ ID NO: 1455947 - RNA, 15 nt, Human
uacugagccuuguaa

SEQ ID NO: 1455948 - RNA, 21 nt, Human
uacuccugugggagccucgca

SEQ ID NO: 1455949 - RNA, 20 nt, Human
uacuccugugggagccucgc

SEQ ID NO: 1455950 - RNA, 18 nt, Human
uacuccugugggagccuc

SEQ ID NO: 1455951 - RNA, 17 nt, Human
uacuccugugggagccu

SEQ ID NO: 1455952 - RNA, 12 nt, Human
uacuccuguggg

SEQ ID NO: 1455953 - RNA, 11 nt, Human
uacuccugugg

SEQ ID NO: 1455954 - RNA, 15 nt, Human
uacuccccuccuuga

SEQ ID NO: 1455955 - RNA, 20 nt, Human
uacuaauagaauaaaggcag

SEQ ID NO: 1455956 - RNA, 22 nt, Human
uacuaauaaacuaauaauugca

SEQ ID NO: 1455957 - RNA, 20 nt, Human
uacuaauaaacuaauaauug

SEQ ID NO: 1455958 - RNA, 23 nt, Human
uacuaauagaauaaaggcaguuu

SEQ ID NO: 1455959 - RNA, 20 nt, Human
uacuaauagacaauuuauua

SEQ ID NO: 1455960 - RNA, 16 nt, Human
uacuaauaaacuaaua

SEQ ID NO: 1455961 - RNA, 14 nt, Human
uacuaauaaacuaa

SEQ ID NO: 1455962 - RNA, 15 nt, Human
uacuaauagacaauu

SEQ ID NO: 1455963 - RNA, 17 nt, Human
uacuaauagacaauuua

SEQ ID NO: 1455964 - RNA, 23 nt, Human
uacgacaguacacugucagcagg

SEQ ID NO: 1455965 - RNA, 18 nt, Human
uacuaaccagcagaaaug

SEQ ID NO: 1455966 - RNA, 19 nt, Human
uacuaaccagcagaaaugc

SEQ ID NO: 1455967 - RNA, 14 nt, Human
uacgaauacuuuug

SEQ ID NO: 1455968 - RNA, 22 nt, Human
uaccuuuuuuauacauaaacaa

SEQ ID NO: 1455969 - RNA, 17 nt, Human
uaccuugcaucucacag

SEQ ID NO: 1455970 - RNA, 22 nt, Human
uaccuugaaaauaagaauagaa

SEQ ID NO: 1455971 - RNA, 23 nt, Human
uaccuucuccccagcucccagga

SEQ ID NO: 1455972 - RNA, 19 nt, Human
uacccaugucuacacagau

SEQ ID NO: 1455973 - RNA, 22 nt, Human
uaccuucuccccagcucccagg

SEQ ID NO: 1455974 - RNA, 19 nt, Human
uaccuucuccccagcuccc

SEQ ID NO: 1455975 - RNA, 13 nt, Human
uaccuucucccca

SEQ ID NO: 1455976 - RNA, 24 nt, Human
uacccaguuucuaaacuggagacu

SEQ ID NO: 1455977 - RNA, 23 nt, Human
uacccaguuucuaaacuggagac

SEQ ID NO: 1455978 - RNA, 22 nt, Human
uacccaguuucuaaacuggaga

SEQ ID NO: 1455979 - RNA, 22 nt, Human
uacccaguaacucaucugucac

SEQ ID NO: 1455980 - RNA, 19 nt, Human
uacccaguaacucaucugu

SEQ ID NO: 1455981 - RNA, 12 nt, Human
uaccuuucauac

SEQ ID NO: 1455982 - RNA, 18 nt, Human
uaccuuuuuuauacauaa

SEQ ID NO: 1455983 - RNA, 19 nt, Human
uaccuuuuuuauacauaaa

SEQ ID NO: 1455984 - RNA, 20 nt, Human
uaccuuuuuuauacauaaac

SEQ ID NO: 1455985 - RNA, 20 nt, Human
uaccuuguauacuguaggca

SEQ ID NO: 1455986 - RNA, 16 nt, Human
uaccuuguauacugua

SEQ ID NO: 1455987 - RNA, 14 nt, Human
uaccuuguauacug

SEQ ID NO: 1455988 - RNA, 22 nt, Human
uaccuugguucccccacugauc

SEQ ID NO: 1455989 - RNA, 13 nt, Human
uaccuugguuccc

SEQ ID NO: 1455990 - RNA, 19 nt, Human
uaccuuugacaaagguaaa

SEQ ID NO: 1455991 - RNA, 20 nt, Human
uaccuuuguauucucuccug

SEQ ID NO: 1455992 - RNA, 16 nt, Human
uacaugagaaggaacu

SEQ ID NO: 1455993 - RNA, 18 nt, Human
uacaugagaacaaacaga

SEQ ID NO: 1455994 - RNA, 17 nt, Human
uacaugagaacaaacag

SEQ ID NO: 1455995 - RNA, 21 nt, Human
uacaugacauuuauuuuucau

SEQ ID NO: 1455996 - RNA, 16 nt, Human
uacaugacauuuauuu

SEQ ID NO: 1455997 - RNA, 22 nt, Human
uacaugaaguauuuuuucagua

SEQ ID NO: 1455998 - RNA, 18 nt, Human
uacaugaauugcauuuua

SEQ ID NO: 1455999 - RNA, 21 nt, Human
uacaugaaguauuuuuucagu

SEQ ID NO: 1456000 - RNA, 15 nt, Human
uacaugaaguauuuu

SEQ ID NO: 1456001 - RNA, 13 nt, Human
uacaugaaguauu

SEQ ID NO: 1456002 - RNA, 17 nt, Human
uacaucuucugccuuag

SEQ ID NO: 1456003 - RNA, 14 nt, Human
uacaucuucugccu

SEQ ID NO: 1456004 - RNA, 23 nt, Human
uacaucuauuuuggauuguauau

SEQ ID NO: 1456005 - RNA, 22 nt, Human
uacaucuauuuuggauuguaua

SEQ ID NO: 1456006 - RNA, 20 nt, Human
uacaucuauuuuggauugua

SEQ ID NO: 1456007 - RNA, 19 nt, Human
uacaucuauuuuggauugu

SEQ ID NO: 1456008 - RNA, 18 nt, Human
uacaucuauuuuggauug

SEQ ID NO: 1456009 - RNA, 23 nt, Human
uacaguguuuauccuuucauaua

SEQ ID NO: 1456010 - RNA, 15 nt, Human
uacaguguuuauccu

SEQ ID NO: 1456011 - RNA, 23 nt, Human
uacaguuacucagaauucucuag

SEQ ID NO: 1456012 - RNA, 23 nt, Human
uacagugucuuuuuuuguauagu

SEQ ID NO: 1456013 - RNA, 12 nt, Human
uacaguguuacc

SEQ ID NO: 1456014 - RNA, 21 nt, Human
uacagugucuuuuuuuguaua

SEQ ID NO: 1456015 - RNA, 14 nt, Human
uacagugucuuuuu

SEQ ID NO: 1456016 - RNA, 19 nt, Human
uacaguuacucagaauucu

SEQ ID NO: 1456017 - RNA, 19 nt, Human
uacaguuaucuaaguuaau

SEQ ID NO: 1456018 - RNA, 21 nt, Human
uacaguuagggcuccuauuca

SEQ ID NO: 1456019 - RNA, 18 nt, Human
uacaguuccuagguauaa

SEQ ID NO: 1456020 - RNA, 12 nt, Human
uaccaaccuguu

SEQ ID NO: 1456021 - RNA, 17 nt, Human
uaccaaagaugaaugaa

SEQ ID NO: 1456022 - RNA, 12 nt, Human
uaccaaagcaca

SEQ ID NO: 1456023 - RNA, 21 nt, Human
uacauuugggaguuuuuauga

SEQ ID NO: 1456024 - RNA, 15 nt, Human
uacauuuucuaagaa

SEQ ID NO: 1456025 - RNA, 20 nt, Human
uacauuuucuaagaaacauu

SEQ ID NO: 1456026 - RNA, 19 nt, Human
uacauuuucuaagaaacau

SEQ ID NO: 1456027 - RNA, 14 nt, Human
uacaugauucauuu

SEQ ID NO: 1456028 - RNA, 15 nt, Human
uacaugauucauuuu

SEQ ID NO: 1456029 - RNA, 23 nt, Human
uacaugaggacucuauucuuuaa

SEQ ID NO: 1456030 - RNA, 22 nt, Human
uacaugaggacucuauucuuua

SEQ ID NO: 1456031 - RNA, 21 nt, Human
uacaugaggacucuauucuuu

SEQ ID NO: 1456032 - RNA, 14 nt, Human
uacaugaggacucu

SEQ ID NO: 1456033 - RNA, 13 nt, Human
uacaugaggacuc

SEQ ID NO: 1456034 - RNA, 11 nt, Human
uacauuugugu

SEQ ID NO: 1456035 - RNA, 17 nt, Human
uacauuuguauaaaaua

SEQ ID NO: 1456036 - RNA, 19 nt, Human
uacauuugggaguuuuuau

SEQ ID NO: 1456037 - RNA, 16 nt, Human
uacauuuguauaaaau

SEQ ID NO: 1456038 - RNA, 15 nt, Human
uaccauuugccuccc

SEQ ID NO: 1456039 - RNA, 16 nt, Human
uaccauuucagagagg

SEQ ID NO: 1456040 - RNA, 15 nt, Human
uaccauuucagagag

SEQ ID NO: 1456041 - RNA, 12 nt, Human
uaccauuucaga

SEQ ID NO: 1456042 - RNA, 16 nt, Human
uaccauuuucugguuc

SEQ ID NO: 1456043 - RNA, 15 nt, Human
uaccauuuucugguu

SEQ ID NO: 1456044 - RNA, 18 nt, Human
uaccauuuuaaaguuagu

SEQ ID NO: 1456045 - RNA, 17 nt, Human
uaccauuuacauguuuu

SEQ ID NO: 1456046 - RNA, 13 nt, Human
uaccauuuacaug

SEQ ID NO: 1456047 - RNA, 18 nt, Human
uaccaccagcugugucca

SEQ ID NO: 1456048 - RNA, 14 nt, Human
uaccaccagcugug

SEQ ID NO: 1456049 - RNA, 13 nt, Human
uaccaccagcugu

SEQ ID NO: 1456050 - RNA, 18 nt, Human
uaccaccagucugacugu

SEQ ID NO: 1456051 - RNA, 23 nt, Human
uaccacaggaaccacaagacugc

SEQ ID NO: 1456052 - RNA, 17 nt, Human
uaccaaugaaaaaaugu

SEQ ID NO: 1456053 - RNA, 15 nt, Human
uaccaaugaaaaaau

SEQ ID NO: 1456054 - RNA, 13 nt, Human
uaccaaugaaaaa

SEQ ID NO: 1456055 - RNA, 22 nt, Human
uaccaaucauuuuaauuauuau

SEQ ID NO: 1456056 - RNA, 20 nt, Human
uaccaaucauuuuaauuauu

SEQ ID NO: 1456057 - RNA, 19 nt, Human
uaccaaucauuuuaauuau

SEQ ID NO: 1456058 - RNA, 15 nt, Human
uaccaaucauuuuaa

SEQ ID NO: 1456059 - RNA, 18 nt, Human
uaccacaaugcagugccu

SEQ ID NO: 1456060 - RNA, 13 nt, Human
uaccacagacaua

SEQ ID NO: 1456061 - RNA, 14 nt, Human
uaccaagucaaacu

SEQ ID NO: 1456062 - RNA, 18 nt, Human
uaccaaggucuucuuaau

SEQ ID NO: 1456063 - RNA, 12 nt, Human
uaccaauaaagu

SEQ ID NO: 1456064 - RNA, 13 nt, Human
uaccaauaaagug

SEQ ID NO: 1456065 - RNA, 17 nt, Human
uaccaauaaagugaccc

SEQ ID NO: 1456066 - RNA, 14 nt, Human
uaccaauaaaguga

SEQ ID NO: 1456067 - RNA, 22 nt, Human
uacccaccgggccacuccuucc

SEQ ID NO: 1456068 - RNA, 20 nt, Human
uacccaccgggccacuccuu

SEQ ID NO: 1456069 - RNA, 12 nt, Human
uacccacccaga

SEQ ID NO: 1456070 - RNA, 15 nt, Human
uacccaaacugcuuu

SEQ ID NO: 1456071 - RNA, 14 nt, Human
uacccaaacugcuu

SEQ ID NO: 1456072 - RNA, 15 nt, Human
uacccaaauuaagag

SEQ ID NO: 1456073 - RNA, 20 nt, Human
uacacugucagcagggacug

SEQ ID NO: 1456074 - RNA, 14 nt, Human
uacacuguuucaaa

SEQ ID NO: 1456075 - RNA, 15 nt, Human
uacacagcucuagac

SEQ ID NO: 1456076 - RNA, 17 nt, Human
uacacagcaccagaaug

SEQ ID NO: 1456077 - RNA, 22 nt, Human
uacacagaucacagcuucagcc

SEQ ID NO: 1456078 - RNA, 22 nt, Human
uacacacugcauguuugugauu

SEQ ID NO: 1456079 - RNA, 14 nt, Human
uacacaauaagcaa

SEQ ID NO: 1456080 - RNA, 18 nt, Human
uacacaauagaauuauaa

SEQ ID NO: 1456081 - RNA, 16 nt, Human
uacacaauagaauuau

SEQ ID NO: 1456082 - RNA, 15 nt, Human
uacacaauaagcaaa

SEQ ID NO: 1456083 - RNA, 14 nt, Human
uaauuuuguaucuu

SEQ ID NO: 1456084 - RNA, 19 nt, Human
uaauuuuguaauguaucaa

SEQ ID NO: 1456085 - RNA, 12 nt, Human
uaauuuuguaau

SEQ ID NO: 1456086 - RNA, 13 nt, Human
uaauuuugugaag

SEQ ID NO: 1456087 - RNA, 13 nt, Human
uaauuuuggauuu

SEQ ID NO: 1456088 - RNA, 22 nt, Human
uaauuuugaagugcuguuuauu

SEQ ID NO: 1456089 - RNA, 18 nt, Human
uaauuuugaagugcuguu

SEQ ID NO: 1456090 - RNA, 12 nt, Human
uaauuuucuacc

SEQ ID NO: 1456091 - RNA, 13 nt, Human
uaauuuugaaaaa

SEQ ID NO: 1456092 - RNA, 17 nt, Human
uaauuuugaaaaacugc

SEQ ID NO: 1456093 - RNA, 24 nt, Human
uacaagaugaaggagaggcaacau

SEQ ID NO: 1456094 - RNA, 22 nt, Human
uacaagacugccauauuaaauu

SEQ ID NO: 1456095 - RNA, 23 nt, Human
uacaagagaaaaagcagaggcca

SEQ ID NO: 1456096 - RNA, 20 nt, Human
uacaagacugccauauuaaa

SEQ ID NO: 1456097 - RNA, 19 nt, Human
uacaagacugccauauuaa

SEQ ID NO: 1456098 - RNA, 16 nt, Human
uacaagacugccauau

SEQ ID NO: 1456099 - RNA, 19 nt, Human
uacaagaagcauuuuguaa

SEQ ID NO: 1456100 - RNA, 21 nt, Human
uacaagaagcauuuuguaagu

SEQ ID NO: 1456101 - RNA, 22 nt, Human
uacacaacucacuccuuuuaaa

SEQ ID NO: 1456102 - RNA, 15 nt, Human
uacacaacucacucc

SEQ ID NO: 1456103 - RNA, 14 nt, Human
uacacaacucacuc

SEQ ID NO: 1456104 - RNA, 13 nt, Human
uacacaacucacu

SEQ ID NO: 1456105 - RNA, 21 nt, Human
uacaauuuuuuuuauuaguau

SEQ ID NO: 1456106 - RNA, 19 nt, Human
uacaauuuuuuuuauuagu

SEQ ID NO: 1456107 - RNA, 18 nt, Human
uacaauuuuuuuuauuag

SEQ ID NO: 1456108 - RNA, 23 nt, Human
uacaauuuuuuaucaugcauguc

SEQ ID NO: 1456109 - RNA, 17 nt, Human
uacaauuuuuuaucaug

SEQ ID NO: 1456110 - RNA, 15 nt, Human
uacagccucagaaac

SEQ ID NO: 1456111 - RNA, 13 nt, Human
uacagugucuuuu

SEQ ID NO: 1456112 - RNA, 12 nt, Human
uacagugucuuu

SEQ ID NO: 1456113 - RNA, 13 nt, Human
uacaggaacuuca

SEQ ID NO: 1456114 - RNA, 21 nt, Human
uacaggaaacaguugcaugua

SEQ ID NO: 1456115 - RNA, 15 nt, Human
uacaggaaacaguug

SEQ ID NO: 1456116 - RNA, 13 nt, Human
uacagaaagcugc

SEQ ID NO: 1456117 - RNA, 16 nt, Human
uacagaaaaaccuugg

SEQ ID NO: 1456118 - RNA, 22 nt, Human
uacagaaaaguugaauuuuaca

SEQ ID NO: 1456119 - RNA, 20 nt, Human
uacagaaaaaccuuggguua

SEQ ID NO: 1456120 - RNA, 15 nt, Human
uacagaaaaaccuug

SEQ ID NO: 1456121 - RNA, 18 nt, Human
uacagaaaaguugaauuu

SEQ ID NO: 1456122 - RNA, 17 nt, Human
uacacuguuucaaacuu

SEQ ID NO: 1456123 - RNA, 18 nt, Human
uacacuguuucaaacuuu

SEQ ID NO: 1456124 - RNA, 19 nt, Human
uacacuguuucaaacuuua

SEQ ID NO: 1456125 - RNA, 16 nt, Human
uacagcacccuguggu

SEQ ID NO: 1456126 - RNA, 15 nt, Human
uacagaauuacugua

SEQ ID NO: 1456127 - RNA, 23 nt, Human
uacagaauuacuguaacugauua

SEQ ID NO: 1456128 - RNA, 13 nt, Human
uacagaauuuuau

SEQ ID NO: 1456129 - RNA, 20 nt, Human
uacagaaauuuaauucagaa

SEQ ID NO: 1456130 - RNA, 19 nt, Human
uacagaaauuuaauucaga

SEQ ID NO: 1456131 - RNA, 14 nt, Human
uacagaaagcugcc

SEQ ID NO: 1456132 - RNA, 19 nt, Human
uacagaacucuuucaaaac

SEQ ID NO: 1456133 - RNA, 17 nt, Human
uacagaacucuuucaaa

SEQ ID NO: 1456134 - RNA, 16 nt, Human
uacagaacucuuucaa

SEQ ID NO: 1456135 - RNA, 11 nt, Human
uacagaacuac

SEQ ID NO: 1456136 - RNA, 19 nt, Human
uacagaacuucagaaagac

SEQ ID NO: 1456137 - RNA, 18 nt, Human
uacagaacuucagaaaga

SEQ ID NO: 1456138 - RNA, 15 nt, Human
uacagaacuucagaa

SEQ ID NO: 1456139 - RNA, 14 nt, Human
uacagaagaaacug

SEQ ID NO: 1456140 - RNA, 23 nt, Human
uaucaucaguguagaaccuaauu

SEQ ID NO: 1456141 - RNA, 11 nt, Human
uaucagugcuu

SEQ ID NO: 1456142 - RNA, 13 nt, Human
uaucagugcuucc

SEQ ID NO: 1456143 - RNA, 22 nt, Human
uaucaucuaccuagauuuaaua

SEQ ID NO: 1456144 - RNA, 17 nt, Human
uaucaucuaccuagauu

SEQ ID NO: 1456145 - RNA, 16 nt, Human
uaucaucuaccuagau

SEQ ID NO: 1456146 - RNA, 17 nt, Human
uaucauccacacaugaa

SEQ ID NO: 1456147 - RNA, 15 nt, Human
uaucauccacacaug

SEQ ID NO: 1456148 - RNA, 14 nt, Human
uaucauccacacau

SEQ ID NO: 1456149 - RNA, 17 nt, Human
uaucaugacaaagacug

SEQ ID NO: 1456150 - RNA, 16 nt, Human
uaucaugacaaagacu

SEQ ID NO: 1456151 - RNA, 21 nt, Human
uaucaggacccagaggaaggg

SEQ ID NO: 1456152 - RNA, 20 nt, Human
uaucaggacccagaggaagg

SEQ ID NO: 1456153 - RNA, 19 nt, Human
uaucaggcaaauuugcauu

SEQ ID NO: 1456154 - RNA, 17 nt, Human
uaucgcugggaaaugag

SEQ ID NO: 1456155 - RNA, 20 nt, Human
uaucgcaccacuguguauuu

SEQ ID NO: 1456156 - RNA, 23 nt, Human
uaucgacuuguuuuugcacaugu

SEQ ID NO: 1456157 - RNA, 19 nt, Human
uaucgucacugcuuaacuu

SEQ ID NO: 1456158 - RNA, 18 nt, Human
uaucguuuucuuaaagug

SEQ ID NO: 1456159 - RNA, 12 nt, Human
uaucucuucagu

SEQ ID NO: 1456160 - RNA, 13 nt, Human
uaucucuucaguc

SEQ ID NO: 1456161 - RNA, 14 nt, Human
uaucucuucagucu

SEQ ID NO: 1456162 - RNA, 22 nt, Human
uaucuaaauauggacugcucag

SEQ ID NO: 1456163 - RNA, 16 nt, Human
uaucucuucagucucu

SEQ ID NO: 1456164 - RNA, 22 nt, Human
uauccuguuugaggaaagcaag

SEQ ID NO: 1456165 - RNA, 21 nt, Human
uauccuguuugaggaaagcaa

SEQ ID NO: 1456166 - RNA, 17 nt, Human
uaucaugugaaaucauu

SEQ ID NO: 1456167 - RNA, 22 nt, Human
uaucaugugaaaucauucauuu

SEQ ID NO: 1456168 - RNA, 13 nt, Human
uauauaauugcca

SEQ ID NO: 1456169 - RNA, 14 nt, Human
uauauaauugccaa

SEQ ID NO: 1456170 - RNA, 16 nt, Human
uauauaaucaucaagu

SEQ ID NO: 1456171 - RNA, 23 nt, Human
uauauaaguguacauaugugcug

SEQ ID NO: 1456172 - RNA, 19 nt, Human
uauauaaguguacauaugu

SEQ ID NO: 1456173 - RNA, 22 nt, Human
uauacuuguggacuaaaagaua

SEQ ID NO: 1456174 - RNA, 23 nt, Human
uauacuuguggacuaaaagauau

SEQ ID NO: 1456175 - RNA, 22 nt, Human
uauacuuguaauuauggaguca

SEQ ID NO: 1456176 - RNA, 17 nt, Human
uauacuuguggacuaaa

SEQ ID NO: 1456177 - RNA, 21 nt, Human
uauacuuguggacuaaaagau

SEQ ID NO: 1456178 - RNA, 18 nt, Human
uauacuuguaauuaugga

SEQ ID NO: 1456179 - RNA, 16 nt, Human
uauacuuguaauuaug

SEQ ID NO: 1456180 - RNA, 15 nt, Human
uauacuuguaauuau

SEQ ID NO: 1456181 - RNA, 14 nt, Human
uauacuuguaauua

SEQ ID NO: 1456182 - RNA, 13 nt, Human
uauacuuguaauu

SEQ ID NO: 1456183 - RNA, 14 nt, Human
uauacuugaaugaa

SEQ ID NO: 1456184 - RNA, 16 nt, Human
uauacuugaaugaaaa

SEQ ID NO: 1456185 - RNA, 21 nt, Human
uauacucucaccauuuggauc

SEQ ID NO: 1456186 - RNA, 21 nt, Human
uauauaccaaagcacauuuua

SEQ ID NO: 1456187 - RNA, 16 nt, Human
uauauaccaaagcaca

SEQ ID NO: 1456188 - RNA, 13 nt, Human
uauaugauggggg

SEQ ID NO: 1456189 - RNA, 19 nt, Human
uauaugaggacuugugucu

SEQ ID NO: 1456190 - RNA, 21 nt, Human
uauaugcacuuauaauuuucc

SEQ ID NO: 1456191 - RNA, 23 nt, Human
uauauuuauuacuguaagaaaau

SEQ ID NO: 1456192 - RNA, 21 nt, Human
uauauggggaugguaguuuuu

SEQ ID NO: 1456193 - RNA, 20 nt, Human
uauauggggaugguaguuuu

SEQ ID NO: 1456194 - RNA, 22 nt, Human
uauauguacccucugaaauaca

SEQ ID NO: 1456195 - RNA, 19 nt, Human
uauauguacccucugaaau

SEQ ID NO: 1456196 - RNA, 18 nt, Human
uauauguacccucugaaa

SEQ ID NO: 1456197 - RNA, 12 nt, Human
uauauguacagu

SEQ ID NO: 1456198 - RNA, 12 nt, Human
uauauguacaug

SEQ ID NO: 1456199 - RNA, 19 nt, Human
uauauguaccguaggcuuu

SEQ ID NO: 1456200 - RNA, 20 nt, Human
uauauuugaaauauugacuu

SEQ ID NO: 1456201 - RNA, 14 nt, Human
uauauuugaaauau

SEQ ID NO: 1456202 - RNA, 13 nt, Human
uauauuugaaaua

SEQ ID NO: 1456203 - RNA, 13 nt, Human
uauauuuuaagaa

SEQ ID NO: 1456204 - RNA, 23 nt, Human
uauauuucuauuuuauuaugaag

SEQ ID NO: 1456205 - RNA, 13 nt, Human
uauauuuuaagac

SEQ ID NO: 1456206 - RNA, 16 nt, Human
uauauuuuacaauuuu

SEQ ID NO: 1456207 - RNA, 14 nt, Human
uauauuuuaagacg

SEQ ID NO: 1456208 - RNA, 15 nt, Human
uauaauucaccuucu

SEQ ID NO: 1456209 - RNA, 16 nt, Human
uauaccuaacugaaua

SEQ ID NO: 1456210 - RNA, 12 nt, Human
uauaccugauuu

SEQ ID NO: 1456211 - RNA, 12 nt, Human
uauaccucacuu

SEQ ID NO: 1456212 - RNA, 15 nt, Human
uauacccacccagaa

SEQ ID NO: 1456213 - RNA, 16 nt, Human
uauaauucucauuaaa

SEQ ID NO: 1456214 - RNA, 15 nt, Human
uauaauucucauuaa

SEQ ID NO: 1456215 - RNA, 22 nt, Human
uauacccacccagaaugagaca

SEQ ID NO: 1456216 - RNA, 22 nt, Human
uauacucuuucuguauauacuu

SEQ ID NO: 1456217 - RNA, 19 nt, Human
uauacucuuucuguauaua

SEQ ID NO: 1456218 - RNA, 17 nt, Human
uauacucuuucuguaua

SEQ ID NO: 1456219 - RNA, 16 nt, Human
uauacucuuucuguau

SEQ ID NO: 1456220 - RNA, 18 nt, Human
uauacucuagaugaaguu

SEQ ID NO: 1456221 - RNA, 21 nt, Human
uauacuauuaaaaagguuuac

SEQ ID NO: 1456222 - RNA, 20 nt, Human
uauaccugauuuuuuuuccu

SEQ ID NO: 1456223 - RNA, 17 nt, Human
uauacuauaguaccagu

SEQ ID NO: 1456224 - RNA, 19 nt, Human
uauacuauuaaaaagguuu

SEQ ID NO: 1456225 - RNA, 16 nt, Human
uauacuauauuuaugg

SEQ ID NO: 1456226 - RNA, 20 nt, Human
uauacuauaguaccaguagg

SEQ ID NO: 1456227 - RNA, 16 nt, Human
uauaaugaauuuagug

SEQ ID NO: 1456228 - RNA, 18 nt, Human
uauaacaaugcuguauuu

SEQ ID NO: 1456229 - RNA, 14 nt, Human
uaguuuuacuuuua

SEQ ID NO: 1456230 - RNA, 19 nt, Human
uaguuuguguguugucucu

SEQ ID NO: 1456231 - RNA, 11 nt, Human
uaguuuggaua

SEQ ID NO: 1456232 - RNA, 21 nt, Human
uaguuugauuauucaguguca

SEQ ID NO: 1456233 - RNA, 19 nt, Human
uauaaauauauuauuacuu

SEQ ID NO: 1456234 - RNA, 15 nt, Human
uauaaauauauuuaa

SEQ ID NO: 1456235 - RNA, 15 nt, Human
uauaaauauauuauu

SEQ ID NO: 1456236 - RNA, 19 nt, Human
uauaaauauauauucuauu

SEQ ID NO: 1456237 - RNA, 22 nt, Human
uaguuuuacuuuuaaacugugu

SEQ ID NO: 1456238 - RNA, 20 nt, Human
uaguuuuacuuuuaaacugu

SEQ ID NO: 1456239 - RNA, 15 nt, Human
uaguuuuauaugcuu

SEQ ID NO: 1456240 - RNA, 13 nt, Human
uaguuuccuuuuu

SEQ ID NO: 1456241 - RNA, 20 nt, Human
uaguuucauauaaaguauca

SEQ ID NO: 1456242 - RNA, 19 nt, Human
uaguuucauauaaaguauc

SEQ ID NO: 1456243 - RNA, 21 nt, Human
uaguuucaguagauugcagaa

SEQ ID NO: 1456244 - RNA, 15 nt, Human
uaguuguguuucaac

SEQ ID NO: 1456245 - RNA, 12 nt, Human
uaguugugucug

SEQ ID NO: 1456246 - RNA, 17 nt, Human
uaguugucuuuccuggc

SEQ ID NO: 1456247 - RNA, 13 nt, Human
uaguuucugaggc

SEQ ID NO: 1456248 - RNA, 23 nt, Human
uaguuugauuaaauucuugcaaa

SEQ ID NO: 1456249 - RNA, 23 nt, Human
uaguggauuacugccauucacuu

SEQ ID NO: 1456250 - RNA, 17 nt, Human
uaguggauuacugccau

SEQ ID NO: 1456251 - RNA, 19 nt, Human
uaguguaugauuacuggcc

SEQ ID NO: 1456252 - RNA, 15 nt, Human
uaguguaugauuacu

SEQ ID NO: 1456253 - RNA, 18 nt, Human
uaguuguaaaccaaguga

SEQ ID NO: 1456254 - RNA, 15 nt, Human
uaguggaaaaggcac

SEQ ID NO: 1456255 - RNA, 15 nt, Human
uagugcuuugagaga

SEQ ID NO: 1456256 - RNA, 12 nt, Human
uagugcuuugag

SEQ ID NO: 1456257 - RNA, 22 nt, Human
uagugcugcugugugcuuuuuu

SEQ ID NO: 1456258 - RNA, 15 nt, Human
uagugcuacaggguc

SEQ ID NO: 1456259 - RNA, 17 nt, Human
uagugcuacagggucca

SEQ ID NO: 1456260 - RNA, 22 nt, Human
uagugauuuuuaugccaccuga

SEQ ID NO: 1456261 - RNA, 14 nt, Human
uagugcuaagugug

SEQ ID NO: 1456262 - RNA, 15 nt, Human
uagugcuaaguguga

SEQ ID NO: 1456263 - RNA, 17 nt, Human
uagugcuaagugugaac

SEQ ID NO: 1456264 - RNA, 18 nt, Human
uagugcuaagugugaacu

SEQ ID NO: 1456265 - RNA, 19 nt, Human
uagugcuaagugugaacug

SEQ ID NO: 1456266 - RNA, 21 nt, Human
uagugauuuuuaugccaccug

SEQ ID NO: 1456267 - RNA, 20 nt, Human
uagugauuuuuaugccaccu

SEQ ID NO: 1456268 - RNA, 22 nt, Human
uaggcggggcuugccuucuggu

SEQ ID NO: 1456269 - RNA, 19 nt, Human
uaggcggggcuugccuucu

SEQ ID NO: 1456270 - RNA, 23 nt, Human
uaggcgaucacaacgugcauugu

SEQ ID NO: 1456271 - RNA, 23 nt, Human
uaggccuugcggcuccucaggga

SEQ ID NO: 1456272 - RNA, 24 nt, Human
uaggccuugcggcuccucagggac

SEQ ID NO: 1456273 - RNA, 13 nt, Human
uaggcgaucacaa

SEQ ID NO: 1456274 - RNA, 17 nt, Human
uaggcuacagagaagcc

SEQ ID NO: 1456275 - RNA, 16 nt, Human
uaggcuacagagaagc

SEQ ID NO: 1456276 - RNA, 15 nt, Human
uaggcuacagagaag

SEQ ID NO: 1456277 - RNA, 14 nt, Human
uaggcuacagagaa

SEQ ID NO: 1456278 - RNA, 13 nt, Human
uaggcuacagaga

SEQ ID NO: 1456279 - RNA, 12 nt, Human
uaggcuacagag

SEQ ID NO: 1456280 - RNA, 21 nt, Human
uaggcuacagagaagccuuca

SEQ ID NO: 1456281 - RNA, 20 nt, Human
uaggcuacagagaagccuuc

SEQ ID NO: 1456282 - RNA, 19 nt, Human
uaggcuacagagaagccuu

SEQ ID NO: 1456283 - RNA, 18 nt, Human
uaggcuacagagaagccu

SEQ ID NO: 1456284 - RNA, 13 nt, Human
uaggcuagggugg

SEQ ID NO: 1456285 - RNA, 19 nt, Human
uagucaaugacaugaauuu

SEQ ID NO: 1456286 - RNA, 18 nt, Human
uagucaaugacaugaauu

SEQ ID NO: 1456287 - RNA, 21 nt, Human
uagucaaucaagucuguuuac

SEQ ID NO: 1456288 - RNA, 19 nt, Human
uagucaaucaagucuguuu

SEQ ID NO: 1456289 - RNA, 18 nt, Human
uagucaaucaagucuguu

SEQ ID NO: 1456290 - RNA, 15 nt, Human
uagucaaucaagucu

SEQ ID NO: 1456291 - RNA, 15 nt, Human
uaggcuagggugggg

SEQ ID NO: 1456292 - RNA, 18 nt, Human
uagucaaauugugugaaa

SEQ ID NO: 1456293 - RNA, 16 nt, Human
uagccucugucuggca

SEQ ID NO: 1456294 - RNA, 15 nt, Human
uagccugaguagaaa

SEQ ID NO: 1456295 - RNA, 22 nt, Human
uagccucaggggucugagcucc

SEQ ID NO: 1456296 - RNA, 12 nt, Human
uagccucagggg

SEQ ID NO: 1456297 - RNA, 18 nt, Human
uagccucacuuuuaauga

SEQ ID NO: 1456298 - RNA, 23 nt, Human
uagccucacuuuuaaugaacaaa

SEQ ID NO: 1456299 - RNA, 19 nt, Human
uagccucaauuucugaaca

SEQ ID NO: 1456300 - RNA, 17 nt, Human
uagcccuguccuggugg

SEQ ID NO: 1456301 - RNA, 22 nt, Human
uagcccuguccuggugguauuu

SEQ ID NO: 1456302 - RNA, 15 nt, Human
uagcccuguccuggu

SEQ ID NO: 1456303 - RNA, 14 nt, Human
uagcccuguccugg

SEQ ID NO: 1456304 - RNA, 13 nt, Human
uagcccuguccug

SEQ ID NO: 1456305 - RNA, 20 nt, Human
uagcccuccuuuuuccaaca

SEQ ID NO: 1456306 - RNA, 18 nt, Human
uagcccuccuuuuuccaa

SEQ ID NO: 1456307 - RNA, 17 nt, Human
uagccccagugacagcu

SEQ ID NO: 1456308 - RNA, 13 nt, Human
uagccccagugac

SEQ ID NO: 1456309 - RNA, 21 nt, Human
uagcccacuuacauuuacaaa

SEQ ID NO: 1456310 - RNA, 18 nt, Human
uagcccaaugaaaugaau

SEQ ID NO: 1456311 - RNA, 18 nt, Human
uagcaguggcaggcagag

SEQ ID NO: 1456312 - RNA, 16 nt, Human
uagcaguggcaggcag

SEQ ID NO: 1456313 - RNA, 15 nt, Human
uagcaguggcaggca

SEQ ID NO: 1456314 - RNA, 16 nt, Human
uagcaguccccuuccc

SEQ ID NO: 1456315 - RNA, 24 nt, Human
uagcaguggcaggcagaggcccag

SEQ ID NO: 1456316 - RNA, 16 nt, Human
uagcauacguacacau

SEQ ID NO: 1456317 - RNA, 15 nt, Human
uagcuccuccccugg

SEQ ID NO: 1456318 - RNA, 11 nt, Human
uagcuccuccc

SEQ ID NO: 1456319 - RNA, 22 nt, Human
uagcucauucuccuuguguuac

SEQ ID NO: 1456320 - RNA, 16 nt, Human
uagcuccuguggcccc

SEQ ID NO: 1456321 - RNA, 14 nt, Human
uagcuccuguggcc

SEQ ID NO: 1456322 - RNA, 13 nt, Human
uagcuccuguggc

SEQ ID NO: 1456323 - RNA, 12 nt, Human
uagcuccugugg

SEQ ID NO: 1456324 - RNA, 22 nt, Human
uagcuccuguggccccacccug

SEQ ID NO: 1456325 - RNA, 20 nt, Human
uagcuccuguggccccaccc

SEQ ID NO: 1456326 - RNA, 12 nt, Human
uagcuccucccc

SEQ ID NO: 1456327 - RNA, 13 nt, Human
uagcucugagaac

SEQ ID NO: 1456328 - RNA, 11 nt, Human
uagcucugaga

SEQ ID NO: 1456329 - RNA, 13 nt, Human
uagcucuuuguca

SEQ ID NO: 1456330 - RNA, 23 nt, Human
uagcucuuguugagccgugggca

SEQ ID NO: 1456331 - RNA, 12 nt, Human
uagcucugagaa

SEQ ID NO: 1456332 - RNA, 23 nt, Human
uagcucuggggugggcaguuuuu

SEQ ID NO: 1456333 - RNA, 22 nt, Human
uagcucuggggugggcaguuuu

SEQ ID NO: 1456334 - RNA, 11 nt, Human
uagcucugggg

SEQ ID NO: 1456335 - RNA, 21 nt, Human
uaggaaauguuuuuaauaaaa

SEQ ID NO: 1456336 - RNA, 23 nt, Human
uaggaaauggcuuugugauucaa

SEQ ID NO: 1456337 - RNA, 22 nt, Human
uaggaaauggcuuugugauuca

SEQ ID NO: 1456338 - RNA, 15 nt, Human
uagcugggauuacag

SEQ ID NO: 1456339 - RNA, 21 nt, Human
uaggaacuuaaauaaugugaa

SEQ ID NO: 1456340 - RNA, 14 nt, Human
uaggaagccucaga

SEQ ID NO: 1456341 - RNA, 21 nt, Human
uaggaagagccuuccacccag

SEQ ID NO: 1456342 - RNA, 18 nt, Human
uaggaagagcaggacucc

SEQ ID NO: 1456343 - RNA, 19 nt, Human
uaggaagaaagaagacaaa

SEQ ID NO: 1456344 - RNA, 17 nt, Human
uaggaagaaagaagaca

SEQ ID NO: 1456345 - RNA, 12 nt, Human
uaggaagaaaga

SEQ ID NO: 1456346 - RNA, 16 nt, Human
uaggccagagcccacu

SEQ ID NO: 1456347 - RNA, 14 nt, Human
uaggccagagccca

SEQ ID NO: 1456348 - RNA, 22 nt, Human
uaggccaagguguccuacagaa

SEQ ID NO: 1456349 - RNA, 23 nt, Human
uaggccaagguguccuacagaaa

SEQ ID NO: 1456350 - RNA, 21 nt, Human
uaggccaagguguccuacaga

SEQ ID NO: 1456351 - RNA, 18 nt, Human
uaggccaagguguccuac

SEQ ID NO: 1456352 - RNA, 19 nt, Human
uaggccucaggugaaacuc

SEQ ID NO: 1456353 - RNA, 21 nt, Human
uaggccuugcggcuccucagg

SEQ ID NO: 1456354 - RNA, 23 nt, Human
uaggccagcaagcggggaugucc

SEQ ID NO: 1456355 - RNA, 22 nt, Human
uaggccagccgcgcaucagacu

SEQ ID NO: 1456356 - RNA, 13 nt, Human
uaggccagcaagc

SEQ ID NO: 1456357 - RNA, 17 nt, Human
uaggccagagcccacuc

SEQ ID NO: 1456358 - RNA, 16 nt, Human
uaggaaguaaauuaua

SEQ ID NO: 1456359 - RNA, 17 nt, Human
uaggaaguugacuuaua

SEQ ID NO: 1456360 - RNA, 14 nt, Human
uaggaauuguguuu

SEQ ID NO: 1456361 - RNA, 22 nt, Human
uaggaaguugacuuauaguaca

SEQ ID NO: 1456362 - RNA, 16 nt, Human
uaggaauuguguuuau

SEQ ID NO: 1456363 - RNA, 18 nt, Human
uagagacuggaacacuag

SEQ ID NO: 1456364 - RNA, 14 nt, Human
uagagacuggaaca

SEQ ID NO: 1456365 - RNA, 19 nt, Human
uagagguucaaagauauuu

SEQ ID NO: 1456366 - RNA, 16 nt, Human
uagagguucaaagaua

SEQ ID NO: 1456367 - RNA, 21 nt, Human
uagagguucaaagauauuuug

SEQ ID NO: 1456368 - RNA, 20 nt, Human
uagagucccagguuggcucu

SEQ ID NO: 1456369 - RNA, 12 nt, Human
uagaguugcuga

SEQ ID NO: 1456370 - RNA, 16 nt, Human
uagaguccaagguuua

SEQ ID NO: 1456371 - RNA, 13 nt, Human
uagaguccaaggu

SEQ ID NO: 1456372 - RNA, 17 nt, Human
uagaguagaagucucuu

SEQ ID NO: 1456373 - RNA, 21 nt, Human
uagauaaaacaucuuugaaau

SEQ ID NO: 1456374 - RNA, 20 nt, Human
uagauaaaacaucuuugaaa

SEQ ID NO: 1456375 - RNA, 19 nt, Human
uagauaaaacaucuuugaa

SEQ ID NO: 1456376 - RNA, 18 nt, Human
uagaguuuuuaaacauca

SEQ ID NO: 1456377 - RNA, 16 nt, Human
uagaguugcugagagg

SEQ ID NO: 1456378 - RNA, 14 nt, Human
uagaguuggccaua

SEQ ID NO: 1456379 - RNA, 14 nt, Human
uagaguugcugaga

SEQ ID NO: 1456380 - RNA, 13 nt, Human
uagaguugcugag

SEQ ID NO: 1456381 - RNA, 18 nt, Human
uagaguuuagcuggaaaa

SEQ ID NO: 1456382 - RNA, 17 nt, Human
uagaguuuagcuggaaa

SEQ ID NO: 1456383 - RNA, 21 nt, Human
uagacucuuuuccuucccuuu

SEQ ID NO: 1456384 - RNA, 16 nt, Human
uagaccuccagcuguu

SEQ ID NO: 1456385 - RNA, 15 nt, Human
uagaccuacaggggg

SEQ ID NO: 1456386 - RNA, 13 nt, Human
uagaccuacaggg

SEQ ID NO: 1456387 - RNA, 12 nt, Human
uagaccuacagg

SEQ ID NO: 1456388 - RNA, 23 nt, Human
uagaaccuaauucaauucaaagc

SEQ ID NO: 1456389 - RNA, 15 nt, Human
uagaaccuaauucaa

SEQ ID NO: 1456390 - RNA, 21 nt, Human
uagaacccucuguuccuuccc

SEQ ID NO: 1456391 - RNA, 22 nt, Human
uagaacccucuguuccuucccu

SEQ ID NO: 1456392 - RNA, 21 nt, Human
uagacuuuaacauaagcuauu

SEQ ID NO: 1456393 - RNA, 14 nt, Human
uagacuuuaacaua

SEQ ID NO: 1456394 - RNA, 16 nt, Human
uagacuuggauucuuu

SEQ ID NO: 1456395 - RNA, 20 nt, Human
uagacuuggauucuuuccau

SEQ ID NO: 1456396 - RNA, 16 nt, Human
uagacuggacagcuug

SEQ ID NO: 1456397 - RNA, 13 nt, Human
uagagaagacagg

SEQ ID NO: 1456398 - RNA, 18 nt, Human
uagacuggacagcuugug

SEQ ID NO: 1456399 - RNA, 14 nt, Human
uagacuggacagcu

SEQ ID NO: 1456400 - RNA, 19 nt, Human
uagacuggaacuugaacug

SEQ ID NO: 1456401 - RNA, 11 nt, Human
uagcagacagg

SEQ ID NO: 1456402 - RNA, 23 nt, Human
uagcagaagguugcaccuccccc

SEQ ID NO: 1456403 - RNA, 13 nt, Human
uagauuuaauaua

SEQ ID NO: 1456404 - RNA, 20 nt, Human
uagauuguccuuuugcaaag

SEQ ID NO: 1456405 - RNA, 23 nt, Human
uagauuuaauauaaaguuuuaua

SEQ ID NO: 1456406 - RNA, 23 nt, Human
uagauuguccuuuugcaaagaaa

SEQ ID NO: 1456407 - RNA, 18 nt, Human
uagauuguccuuuugcaa

SEQ ID NO: 1456408 - RNA, 12 nt, Human
uagauugcagaa

SEQ ID NO: 1456409 - RNA, 23 nt, Human
uagauugcagaaaauucugugcc

SEQ ID NO: 1456410 - RNA, 23 nt, Human
uagauugauuguauuguugaaaa

SEQ ID NO: 1456411 - RNA, 16 nt, Human
uagauugauuguauug

SEQ ID NO: 1456412 - RNA, 14 nt, Human
uagauugauuguau

SEQ ID NO: 1456413 - RNA, 23 nt, Human
uagauucucuuguauaagauccu

SEQ ID NO: 1456414 - RNA, 23 nt, Human
uagauucucugugucuaagauuc

SEQ ID NO: 1456415 - RNA, 22 nt, Human
uagauucucugugucuaagauu

SEQ ID NO: 1456416 - RNA, 21 nt, Human
uagauucucugugucuaagau

SEQ ID NO: 1456417 - RNA, 20 nt, Human
uagauucucugugucuaaga

SEQ ID NO: 1456418 - RNA, 19 nt, Human
uagauucucugugucuaag

SEQ ID NO: 1456419 - RNA, 23 nt, Human
uagauucucuggcuguaaggcuc

SEQ ID NO: 1456420 - RNA, 22 nt, Human
uagauucucuggcuguaaggcu

SEQ ID NO: 1456421 - RNA, 18 nt, Human
uagauucuaaagauucua

SEQ ID NO: 1456422 - RNA, 17 nt, Human
uagauucuaaagauucu

SEQ ID NO: 1456423 - RNA, 15 nt, Human
uagauucuaaagauu

SEQ ID NO: 1456424 - RNA, 21 nt, Human
uagauguuuauucuucuagag

SEQ ID NO: 1456425 - RNA, 20 nt, Human
uagauguuuauucuucuaga

SEQ ID NO: 1456426 - RNA, 23 nt, Human
uagauguucucuaucauuuaaua

SEQ ID NO: 1456427 - RNA, 16 nt, Human
uagauuuaauauaaag

SEQ ID NO: 1456428 - RNA, 20 nt, Human
uagcagcaccguucugugca

SEQ ID NO: 1456429 - RNA, 19 nt, Human
uagcagcaccguucugugc

SEQ ID NO: 1456430 - RNA, 15 nt, Human
uagcagacaguguuu

SEQ ID NO: 1456431 - RNA, 19 nt, Human
uagcagacaggccccguga

SEQ ID NO: 1456432 - RNA, 13 nt, Human
uagcagacaggcc

SEQ ID NO: 1456433 - RNA, 22 nt, Human
uagaugggggaaagcaaagcac

SEQ ID NO: 1456434 - RNA, 21 nt, Human
uagaugggagggaggcucagg

SEQ ID NO: 1456435 - RNA, 16 nt, Human
uagauguaauuuugug

SEQ ID NO: 1456436 - RNA, 22 nt, Human
uagauacccuacgcuguccaga

SEQ ID NO: 1456437 - RNA, 23 nt, Human
uagauaaaacaucuuugaaauua

SEQ ID NO: 1456438 - RNA, 23 nt, Human
uagauaacaagaccucagugccu

SEQ ID NO: 1456439 - RNA, 18 nt, Human
uagauaauacaccacuac

SEQ ID NO: 1456440 - RNA, 21 nt, Human
uagauguucuaagucuuucca

SEQ ID NO: 1456441 - RNA, 14 nt, Human
uagauguucucuau

SEQ ID NO: 1456442 - RNA, 18 nt, Human
uagauguuccaguaaucu

SEQ ID NO: 1456443 - RNA, 18 nt, Human
uagauguucucuaucauu

SEQ ID NO: 1456444 - RNA, 19 nt, Human
uagauguucucuaucauuu

SEQ ID NO: 1456445 - RNA, 21 nt, Human
uagauguucucuaucauuuaa

SEQ ID NO: 1456446 - RNA, 22 nt, Human
uagauguucucuaucauuuaau

SEQ ID NO: 1456447 - RNA, 13 nt, Human
uagaugucuuuuc

SEQ ID NO: 1456448 - RNA, 20 nt, Human
uagaugucuuuucccauuua

SEQ ID NO: 1456449 - RNA, 20 nt, Human
uagauguauguacuucaugc

SEQ ID NO: 1456450 - RNA, 16 nt, Human
uagauguauaacuagg

SEQ ID NO: 1456451 - RNA, 17 nt, Human
uagauguaguauuuuuu

SEQ ID NO: 1456452 - RNA, 15 nt, Human
uagauguaguauuuu

SEQ ID NO: 1456453 - RNA, 16 nt, Human
uagauguauguacuuc

SEQ ID NO: 1456454 - RNA, 23 nt, Human
uaagauccuagauccuaaggguc

SEQ ID NO: 1456455 - RNA, 13 nt, Human
uaagauaauuaua

SEQ ID NO: 1456456 - RNA, 12 nt, Human
uaagauaauuau

SEQ ID NO: 1456457 - RNA, 14 nt, Human
uaagagugcugggc

SEQ ID NO: 1456458 - RNA, 18 nt, Human
uaagaguccaagaaucca

SEQ ID NO: 1456459 - RNA, 21 nt, Human
uaagaguagaaacugcaggga

SEQ ID NO: 1456460 - RNA, 18 nt, Human
uaagagguguuauuugga

SEQ ID NO: 1456461 - RNA, 20 nt, Human
uaagaggcugcccuccugug

SEQ ID NO: 1456462 - RNA, 17 nt, Human
uaagaggcugcccuccu

SEQ ID NO: 1456463 - RNA, 13 nt, Human
uaagaaauagaau

SEQ ID NO: 1456464 - RNA, 15 nt, Human
uaagaaauacagacu

SEQ ID NO: 1456465 - RNA, 22 nt, Human
uaagaaaggaagcauuguaaaa

SEQ ID NO: 1456466 - RNA, 23 nt, Human
uaagaaaggaagcauuguaaaau

SEQ ID NO: 1456467 - RNA, 21 nt, Human
uaagaaaggaagcauuguaaa

SEQ ID NO: 1456468 - RNA, 20 nt, Human
uaagaaaggaagcauuguaa

SEQ ID NO: 1456469 - RNA, 18 nt, Human
uaagaaaggaagcauugu

SEQ ID NO: 1456470 - RNA, 15 nt, Human
uaagaaaggaagcau

SEQ ID NO: 1456471 - RNA, 17 nt, Human
uaagaaagccugaguac

SEQ ID NO: 1456472 - RNA, 15 nt, Human
uaagaaagccugagu

SEQ ID NO: 1456473 - RNA, 14 nt, Human
uaagaaagccugag

SEQ ID NO: 1456474 - RNA, 13 nt, Human
uaagaaagccuga

SEQ ID NO: 1456475 - RNA, 21 nt, Human
uaacuuuuauaaacuuuaccu

SEQ ID NO: 1456476 - RNA, 22 nt, Human
uaacuuuuauaaacuuuaccuu

SEQ ID NO: 1456477 - RNA, 16 nt, Human
uaagaggcugcccucc

SEQ ID NO: 1456478 - RNA, 22 nt, Human
uaagagcucaggaugagggaaa

SEQ ID NO: 1456479 - RNA, 15 nt, Human
uaagagcucaggaug

SEQ ID NO: 1456480 - RNA, 14 nt, Human
uaagagcucaggau

SEQ ID NO: 1456481 - RNA, 12 nt, Human
uaagagcucagg

SEQ ID NO: 1456482 - RNA, 20 nt, Human
uaagagcaaaagaauggcag

SEQ ID NO: 1456483 - RNA, 22 nt, Human
uaagagcaaaagaauggcagaa

SEQ ID NO: 1456484 - RNA, 23 nt, Human
uaagaagcacgugguaaaacacu

SEQ ID NO: 1456485 - RNA, 21 nt, Human
uaagaagaaugcuuaaucaga

SEQ ID NO: 1456486 - RNA, 17 nt, Human
uaagagagucuauuuac

SEQ ID NO: 1456487 - RNA, 22 nt, Human
uaagccagcaccggaccagccu

SEQ ID NO: 1456488 - RNA, 23 nt, Human
uaagccagcaccggaccagccug

SEQ ID NO: 1456489 - RNA, 17 nt, Human
uaagccagcaccggacc

SEQ ID NO: 1456490 - RNA, 20 nt, Human
uaagccacuuaaaauguuca

SEQ ID NO: 1456491 - RNA, 19 nt, Human
uaaggaugcuuguacauaa

SEQ ID NO: 1456492 - RNA, 19 nt, Human
uaaggauggagccagcucu

SEQ ID NO: 1456493 - RNA, 20 nt, Human
uaaggauggagccagcucug

SEQ ID NO: 1456494 - RNA, 15 nt, Human
uaaggcaaucauggu

SEQ ID NO: 1456495 - RNA, 20 nt, Human
uaaggaugcuuguacauaau

SEQ ID NO: 1456496 - RNA, 21 nt, Human
uaaggaugcuuguacauaaug

SEQ ID NO: 1456497 - RNA, 22 nt, Human
uaaggaugcuuguacauaaugc

SEQ ID NO: 1456498 - RNA, 23 nt, Human
uaaggaugcuuguacauaaugcg

SEQ ID NO: 1456499 - RNA, 17 nt, Human
uaagaucuauagccucu

SEQ ID NO: 1456500 - RNA, 20 nt, Human
uaagaucuuagauucucugu

SEQ ID NO: 1456501 - RNA, 17 nt, Human
uaagaucuuagauucuc

SEQ ID NO: 1456502 - RNA, 16 nt, Human
uaagaucuuagauucu

SEQ ID NO: 1456503 - RNA, 14 nt, Human
uaagaucuuagauu

SEQ ID NO: 1456504 - RNA, 18 nt, Human
uaagaucuuuuauuuugc

SEQ ID NO: 1456505 - RNA, 14 nt, Human
uaagcaucuaaguu

SEQ ID NO: 1456506 - RNA, 22 nt, Human
uaagcaucauuauuuauguauu

SEQ ID NO: 1456507 - RNA, 23 nt, Human
uaagcaucauuauuuauguauug

SEQ ID NO: 1456508 - RNA, 21 nt, Human
uaagcaucauuauuuauguau

SEQ ID NO: 1456509 - RNA, 20 nt, Human
uaagcaucauuauuuaugua

SEQ ID NO: 1456510 - RNA, 19 nt, Human
uaagcaucauuauuuaugu

SEQ ID NO: 1456511 - RNA, 14 nt, Human
uaagcaucauuauu

SEQ ID NO: 1456512 - RNA, 18 nt, Human
uaagcaucuggcucuaau

SEQ ID NO: 1456513 - RNA, 15 nt, Human
uaagcaugcacaaau

SEQ ID NO: 1456514 - RNA, 16 nt, Human
uaagccaaaacaaugu

SEQ ID NO: 1456515 - RNA, 19 nt, Human
uaagccacuuaaaauguuc

SEQ ID NO: 1456516 - RNA, 17 nt, Human
uaagccacuuaaaaugu

SEQ ID NO: 1456517 - RNA, 22 nt, Human
uaagcauugaauggcuauguuu

SEQ ID NO: 1456518 - RNA, 20 nt, Human
uaagcauuccaacuaucuca

SEQ ID NO: 1456519 - RNA, 18 nt, Human
uaagcauuccaacuaucu

SEQ ID NO: 1456520 - RNA, 16 nt, Human
uaagcauuccaacuau

SEQ ID NO: 1456521 - RNA, 18 nt, Human
uaaccucaucuucuucac

SEQ ID NO: 1456522 - RNA, 14 nt, Human
uaaccucaucuucu

SEQ ID NO: 1456523 - RNA, 20 nt, Human
uaaccuaugauauuuucugu

SEQ ID NO: 1456524 - RNA, 23 nt, Human
uaaccgagaucaguauuuaacua

SEQ ID NO: 1456525 - RNA, 14 nt, Human
uaacucaucuguca

SEQ ID NO: 1456526 - RNA, 16 nt, Human
uaacucauuagacugg

SEQ ID NO: 1456527 - RNA, 12 nt, Human
uaacucauuaga

SEQ ID NO: 1456528 - RNA, 15 nt, Human
uaacucaucugucac

SEQ ID NO: 1456529 - RNA, 17 nt, Human
uaacugggggaaaagau

SEQ ID NO: 1456530 - RNA, 15 nt, Human
uaacugccuagaaac

SEQ ID NO: 1456531 - RNA, 16 nt, Human
uaacugccuagaaaca

SEQ ID NO: 1456532 - RNA, 14 nt, Human
uaacugccuagaaa

SEQ ID NO: 1456533 - RNA, 17 nt, Human
uaacugccguaauuuaa

SEQ ID NO: 1456534 - RNA, 21 nt, Human
uaacugcccaaagcagcacuu

SEQ ID NO: 1456535 - RNA, 17 nt, Human
uaacugcccaaagcagc

SEQ ID NO: 1456536 - RNA, 11 nt, Human
uaacugccagg

SEQ ID NO: 1456537 - RNA, 14 nt, Human
uaacugcauacacu

SEQ ID NO: 1456538 - RNA, 18 nt, Human
uaacuguaaaugugacau

SEQ ID NO: 1456539 - RNA, 23 nt, Human
uaacuguaaagauguuuauuuca

SEQ ID NO: 1456540 - RNA, 15 nt, Human
uaacuguaaagaugu

SEQ ID NO: 1456541 - RNA, 20 nt, Human
uaacuggguaaugaaacaaa

SEQ ID NO: 1456542 - RNA, 19 nt, Human
uaacuggguaaugaaacaa

SEQ ID NO: 1456543 - RNA, 17 nt, Human
uaacuggguaaugaaac

SEQ ID NO: 1456544 - RNA, 14 nt, Human
uaacuguauuugaa

SEQ ID NO: 1456545 - RNA, 22 nt, Human
uaacuguauuugaaauaagaau

SEQ ID NO: 1456546 - RNA, 12 nt, Human
uaacuguauuug

SEQ ID NO: 1456547 - RNA, 20 nt, Human
uaacuuuuauaaacuuuacc

SEQ ID NO: 1456548 - RNA, 21 nt, Human
uaacaggcucaaacaaugaca

SEQ ID NO: 1456549 - RNA, 15 nt, Human
uaacaggccaaagag

SEQ ID NO: 1456550 - RNA, 19 nt, Human
uaacaggcucaaacaauga

SEQ ID NO: 1456551 - RNA, 14 nt, Human
uaacagggaaggca

SEQ ID NO: 1456552 - RNA, 17 nt, Human
uaacagggaaggcaggc

SEQ ID NO: 1456553 - RNA, 16 nt, Human
uaacagggaaggcagg

SEQ ID NO: 1456554 - RNA, 20 nt, Human
uaaccaagcugaguuuccua

SEQ ID NO: 1456555 - RNA, 16 nt, Human
uaaccaagcugaguuu

SEQ ID NO: 1456556 - RNA, 21 nt, Human
uaaccaagagauaacuguaaa

SEQ ID NO: 1456557 - RNA, 22 nt, Human
uaacauuccaagacucuagagu

SEQ ID NO: 1456558 - RNA, 10 nt, Human
uaacauuccu

SEQ ID NO: 1456559 - RNA, 18 nt, Human
uaacauuccaagacucua

SEQ ID NO: 1456560 - RNA, 13 nt, Human
uaacauuccaaga

SEQ ID NO: 1456561 - RNA, 12 nt, Human
uaacauuccaag

SEQ ID NO: 1456562 - RNA, 21 nt, Human
uaacauucaggaauucuugga

SEQ ID NO: 1456563 - RNA, 22 nt, Human
uaacauuaucuaguucauugaa

SEQ ID NO: 1456564 - RNA, 19 nt, Human
uaaccaagcugaguuuccu

SEQ ID NO: 1456565 - RNA, 11 nt, Human
uaaccaaguuc

SEQ ID NO: 1456566 - RNA, 12 nt, Human
uaaccaaguucc

SEQ ID NO: 1456567 - RNA, 14 nt, Human
uaaccagcagaaau

SEQ ID NO: 1456568 - RNA, 11 nt, Human
uaaccacccca

SEQ ID NO: 1456569 - RNA, 16 nt, Human
uaaccaccccaucugc

SEQ ID NO: 1456570 - RNA, 22 nt, Human
uaaccgagaucaguauuuaacu

SEQ ID NO: 1456571 - RNA, 21 nt, Human
uaacccuuugugugcucucca

SEQ ID NO: 1456572 - RNA, 19 nt, Human
uaacccuuugugugcucuc

SEQ ID NO: 1456573 - RNA, 17 nt, Human
uaacccuuugugugcuc

SEQ ID NO: 1456574 - RNA, 17 nt, Human
uaaccaggggccaugaa

SEQ ID NO: 1456575 - RNA, 16 nt, Human
uaaccagcagaaaugc

SEQ ID NO: 1456576 - RNA, 19 nt, Human
uaaccagcagaaaugccuu

SEQ ID NO: 1456577 - RNA, 20 nt, Human
uaacagcccuccucugcacu

SEQ ID NO: 1456578 - RNA, 18 nt, Human
uaacagcccuccucugca

SEQ ID NO: 1456579 - RNA, 17 nt, Human
uaacagcccuccucugc

SEQ ID NO: 1456580 - RNA, 11 nt, Human
uaacagcccuc

SEQ ID NO: 1456581 - RNA, 15 nt, Human
uaacagcaccaaauc

SEQ ID NO: 1456582 - RNA, 19 nt, Human
uaacagaagggagggcaga

SEQ ID NO: 1456583 - RNA, 22 nt, Human
uaacagaaauuguauauuguaa

SEQ ID NO: 1456584 - RNA, 17 nt, Human
uaacagaaauuguauau

SEQ ID NO: 1456585 - RNA, 15 nt, Human
uaacagaaauuguau

SEQ ID NO: 1456586 - RNA, 14 nt, Human
uaacagaaauugua

SEQ ID NO: 1456587 - RNA, 13 nt, Human
uaacagaaauugu

SEQ ID NO: 1456588 - RNA, 14 nt, Human
uaacagaaauguac

SEQ ID NO: 1456589 - RNA, 15 nt, Human
uaacagaaauguaca

SEQ ID NO: 1456590 - RNA, 20 nt, Human
uaacacacuaccgaaugugu

SEQ ID NO: 1456591 - RNA, 21 nt, Human
uaacacagcauuguauaugug

SEQ ID NO: 1456592 - RNA, 23 nt, Human
uaacacacuaccgaaugugucuu

SEQ ID NO: 1456593 - RNA, 22 nt, Human
uaacacacuaccgaaugugucu

SEQ ID NO: 1456594 - RNA, 21 nt, Human
uaacacacuaccgaauguguc

SEQ ID NO: 1456595 - RNA, 13 nt, Human
uaacagaaaugua

SEQ ID NO: 1456596 - RNA, 20 nt, Human
uaacaauuguguagccuuuu

SEQ ID NO: 1456597 - RNA, 23 nt, Human
uaacaauuguguagccuuuuugu

SEQ ID NO: 1456598 - RNA, 19 nt, Human
uaacaauuguguagccuuu

SEQ ID NO: 1456599 - RNA, 18 nt, Human
uaacaauuguguagccuu

SEQ ID NO: 1456600 - RNA, 14 nt, Human
uaacaauuguguag

SEQ ID NO: 1456601 - RNA, 14 nt, Human
uaacaauuccucua

SEQ ID NO: 1456602 - RNA, 13 nt, Human
uaacaauuccucu

SEQ ID NO: 1456603 - RNA, 20 nt, Human
uaacaauuaggcagacucuu

SEQ ID NO: 1456604 - RNA, 16 nt, Human
uaacaauuaggcagac

SEQ ID NO: 1456605 - RNA, 17 nt, Human
uaaauuguacagccggc

SEQ ID NO: 1456606 - RNA, 13 nt, Human
uaaauuguauauu

SEQ ID NO: 1456607 - RNA, 21 nt, Human
uaaauuggcauggaaauuuaa

SEQ ID NO: 1456608 - RNA, 14 nt, Human
uaaauuguauauuc

SEQ ID NO: 1456609 - RNA, 17 nt, Human
uaaauuguauauucacu

SEQ ID NO: 1456610 - RNA, 18 nt, Human
uaaauuguauauucacuu

SEQ ID NO: 1456611 - RNA, 19 nt, Human
uaaauuguauauucacuuu

SEQ ID NO: 1456612 - RNA, 22 nt, Human
uaaauuuaguauuuuguuucag

SEQ ID NO: 1456613 - RNA, 14 nt, Human
uaaauuuaguauuu

SEQ ID NO: 1456614 - RNA, 22 nt, Human
uaaauugauuuuuauaaauacu

SEQ ID NO: 1456615 - RNA, 21 nt, Human
uaaauugauuuuuauaaauac

SEQ ID NO: 1456616 - RNA, 13 nt, Human
uaaauugauuuuu

SEQ ID NO: 1456617 - RNA, 16 nt, Human
uaaauugauguugcug

SEQ ID NO: 1456618 - RNA, 20 nt, Human
uaaauuggcauggaaauuua

SEQ ID NO: 1456619 - RNA, 17 nt, Human
uaaauuggcauggaaau

SEQ ID NO: 1456620 - RNA, 13 nt, Human
uaaauuggaaagc

SEQ ID NO: 1456621 - RNA, 18 nt, Human
uaaucuuauaauuguucu

SEQ ID NO: 1456622 - RNA, 15 nt, Human
uaaucuuauaauugu

SEQ ID NO: 1456623 - RNA, 18 nt, Human
uaaucuuaguguaugauu

SEQ ID NO: 1456624 - RNA, 15 nt, Human
uaaucuuaguguaug

SEQ ID NO: 1456625 - RNA, 13 nt, Human
uaaucuuagugua

SEQ ID NO: 1456626 - RNA, 23 nt, Human
uaaucugaauaaaguguaacaau

SEQ ID NO: 1456627 - RNA, 22 nt, Human
uaaucugaauaaaguguaacaa

SEQ ID NO: 1456628 - RNA, 21 nt, Human
uaaucugaauaaaguguaaca

SEQ ID NO: 1456629 - RNA, 20 nt, Human
uaaucugaauaaaguguaac

SEQ ID NO: 1456630 - RNA, 17 nt, Human
uaaucugaauaaagugu

SEQ ID NO: 1456631 - RNA, 13 nt, Human
uaaucugaauaaa

SEQ ID NO: 1456632 - RNA, 17 nt, Human
uaaucucuguaaagcua

SEQ ID NO: 1456633 - RNA, 18 nt, Human
uaaucucuguaaagcuaa

SEQ ID NO: 1456634 - RNA, 11 nt, Human
uaaucuaaaug

SEQ ID NO: 1456635 - RNA, 12 nt, Human
uaaucuaaaugg

SEQ ID NO: 1456636 - RNA, 14 nt, Human
uaaugcacuuucua

SEQ ID NO: 1456637 - RNA, 13 nt, Human
uaaugcacuuucu

SEQ ID NO: 1456638 - RNA, 12 nt, Human
uaaugcacuuuc

SEQ ID NO: 1456639 - RNA, 15 nt, Human
uaaugauaugcuugu

SEQ ID NO: 1456640 - RNA, 16 nt, Human
uaaugauaugcuugua

SEQ ID NO: 1456641 - RNA, 22 nt, Human
uaaucuuauaauuguucucaga

SEQ ID NO: 1456642 - RNA, 22 nt, Human
uaaucuuauucauuuucucuaa

SEQ ID NO: 1456643 - RNA, 21 nt, Human
uaaucuuauucauuuucucua

SEQ ID NO: 1456644 - RNA, 15 nt, Human
uaaucuuauuuagga

SEQ ID NO: 1456645 - RNA, 15 nt, Human
uaaucuucaauaguu

SEQ ID NO: 1456646 - RNA, 19 nt, Human
uaauauauauuaucuuuuc

SEQ ID NO: 1456647 - RNA, 18 nt, Human
uaauauauauuaucuuuu

SEQ ID NO: 1456648 - RNA, 16 nt, Human
uaauauauauuaucuu

SEQ ID NO: 1456649 - RNA, 16 nt, Human
uaauauacuauauuua

SEQ ID NO: 1456650 - RNA, 13 nt, Human
uaauauacuugug

SEQ ID NO: 1456651 - RNA, 15 nt, Human
uaauauacuugugga

SEQ ID NO: 1456652 - RNA, 17 nt, Human
uaauauacuuguggacu

SEQ ID NO: 1456653 - RNA, 21 nt, Human
uaauauacuuguggacuaaaa

SEQ ID NO: 1456654 - RNA, 13 nt, Human
uaauauauuuucu

SEQ ID NO: 1456655 - RNA, 17 nt, Human
uaauauauuuaaaaaua

SEQ ID NO: 1456656 - RNA, 14 nt, Human
uaauauauuuaaaa

SEQ ID NO: 1456657 - RNA, 21 nt, Human
uaauauauuuucuguuuucuu

SEQ ID NO: 1456658 - RNA, 17 nt, Human
uaauauauuuucuguuu

SEQ ID NO: 1456659 - RNA, 20 nt, Human
uaauauguucuuuuaaauga

SEQ ID NO: 1456660 - RNA, 14 nt, Human
uaaggcucuagauc

SEQ ID NO: 1456661 - RNA, 12 nt, Human
uaaggcucuaga

SEQ ID NO: 1456662 - RNA, 15 nt, Human
uaagugcuguauaaa

SEQ ID NO: 1456663 - RNA, 17 nt, Human
uaagugcuguauaaaau

SEQ ID NO: 1456664 - RNA, 18 nt, Human
uaagugcuguauaaaauc

SEQ ID NO: 1456665 - RNA, 19 nt, Human
uaagugcuguauaaaauca

SEQ ID NO: 1456666 - RNA, 20 nt, Human
uaagugcuguauaaaaucag

SEQ ID NO: 1456667 - RNA, 22 nt, Human
uaagugcuguauaaaaucagcc

SEQ ID NO: 1456668 - RNA, 16 nt, Human
uaaggccugugggggg

SEQ ID NO: 1456669 - RNA, 21 nt, Human
uaaggccuaggauucuaaaau

SEQ ID NO: 1456670 - RNA, 20 nt, Human
uaaggccuaggauucuaaaa

SEQ ID NO: 1456671 - RNA, 19 nt, Human
uaaggccuaggauucuaaa

SEQ ID NO: 1456672 - RNA, 18 nt, Human
uaaggccuaggauucuaa

SEQ ID NO: 1456673 - RNA, 16 nt, Human
uaaggccuaggauucu

SEQ ID NO: 1456674 - RNA, 19 nt, Human
uaaggccauuauuguacuu

SEQ ID NO: 1456675 - RNA, 17 nt, Human
uaauaaacuuuaauaua

SEQ ID NO: 1456676 - RNA, 23 nt, Human
uaagugcuguauaaaaucagcca

SEQ ID NO: 1456677 - RNA, 19 nt, Human
uaauaaauguacauuaauu

SEQ ID NO: 1456678 - RNA, 17 nt, Human
uaauaaauguacauuaa

SEQ ID NO: 1456679 - RNA, 11 nt, Human
uaauaaagcug

SEQ ID NO: 1456680 - RNA, 22 nt, Human
uaauauaaaugcaaauaacaaa

SEQ ID NO: 1456681 - RNA, 16 nt, Human
uaauauaaaugcaaau

SEQ ID NO: 1456682 - RNA, 14 nt, Human
uaauauaaaugcaa

SEQ ID NO: 1456683 - RNA, 13 nt, Human
uaauauaaaugca

SEQ ID NO: 1456684 - RNA, 12 nt, Human
uaauauaaaugc

SEQ ID NO: 1456685 - RNA, 22 nt, Human
uaauauaaaguuuuauauauua

SEQ ID NO: 1456686 - RNA, 20 nt, Human
uaauauaaaguuuuauauau

SEQ ID NO: 1456687 - RNA, 15 nt, Human
uaauauaaaguuuua

SEQ ID NO: 1456688 - RNA, 21 nt, Human
uaauauaaaguaguccuguga

SEQ ID NO: 1456689 - RNA, 12 nt, Human
uaauaguuccug

SEQ ID NO: 1456690 - RNA, 21 nt, Human
uaauauaaaaagcuuccauga

SEQ ID NO: 1456691 - RNA, 13 nt, Human
uaauaguuccugc

SEQ ID NO: 1456692 - RNA, 14 nt, Human
uaauacaccacuac

SEQ ID NO: 1456693 - RNA, 15 nt, Human
uaauacaaacuauau

SEQ ID NO: 1456694 - RNA, 14 nt, Human
uaauacaaaggcuu

SEQ ID NO: 1456695 - RNA, 14 nt, Human
uaauacaaacuaau

SEQ ID NO: 1456696 - RNA, 16 nt, Human
uaauaauuuuuuaauu

SEQ ID NO: 1456697 - RNA, 20 nt, Human
uaauaauuuuuaagaaauaa

SEQ ID NO: 1456698 - RNA, 16 nt, Human
uaauaauaaagaauag

SEQ ID NO: 1456699 - RNA, 13 nt, Human
uaauaauauacuu

SEQ ID NO: 1456700 - RNA, 14 nt, Human
uaauaauauacuug

SEQ ID NO: 1456701 - RNA, 21 nt, Human
uaauaagguuuuaauuuagua

SEQ ID NO: 1456702 - RNA, 16 nt, Human
uaauaagguuuuaauu

SEQ ID NO: 1456703 - RNA, 14 nt, Human
uaauaagguuuuaa

SEQ ID NO: 1456704 - RNA, 13 nt, Human
uaauaagguuuua

SEQ ID NO: 1456705 - RNA, 15 nt, Human
uaauaauguuucaaa

SEQ ID NO: 1456706 - RNA, 16 nt, Human
uaauaauauacuugug

SEQ ID NO: 1456707 - RNA, 19 nt, Human
uaauaauauacuuguggac

SEQ ID NO: 1456708 - RNA, 22 nt, Human
uaauaauauacuuguggacuaa

SEQ ID NO: 1456709 - RNA, 16 nt, Human
uaauaauuucuaaugu

SEQ ID NO: 1456710 - RNA, 14 nt, Human
uaauaauuucuaau

SEQ ID NO: 1456711 - RNA, 13 nt, Human
uaauaauuucuaa

SEQ ID NO: 1456712 - RNA, 22 nt, Human
uaauaauuuagacuucaagcau

SEQ ID NO: 1456713 - RNA, 21 nt, Human
uaauaauauacuuguggacua

SEQ ID NO: 1456714 - RNA, 17 nt, Human
uaauuuuccuaauaaag

SEQ ID NO: 1456715 - RNA, 23 nt, Human
uaauuuuaguuuuucauuaaaua

SEQ ID NO: 1456716 - RNA, 21 nt, Human
uaauuuuaguuuuucauuaaa

SEQ ID NO: 1456717 - RNA, 19 nt, Human
uaauuuuaguuuuucauua

SEQ ID NO: 1456718 - RNA, 16 nt, Human
uaauuuuaguuuuuca

SEQ ID NO: 1456719 - RNA, 14 nt, Human
uaauuuuaguuuuu

SEQ ID NO: 1456720 - RNA, 21 nt, Human
uaauuuuacacgcuuuuguga

SEQ ID NO: 1456721 - RNA, 20 nt, Human
uaauuuuacacgcuuuugug

SEQ ID NO: 1456722 - RNA, 19 nt, Human
uaauuuuacacgcuuuugu

SEQ ID NO: 1456723 - RNA, 18 nt, Human
uaauuuuacacgcuuuug

SEQ ID NO: 1456724 - RNA, 13 nt, Human
uaauuuuaaauuc

SEQ ID NO: 1456725 - RNA, 14 nt, Human
uaauuuuaaacaaa

SEQ ID NO: 1456726 - RNA, 17 nt, Human
uaauuuguuuuggauau

SEQ ID NO: 1456727 - RNA, 19 nt, Human
uaauuugugauacaaugcu

SEQ ID NO: 1456728 - RNA, 22 nt, Human
uaauuugugauacaaugcugug

SEQ ID NO: 1456729 - RNA, 23 nt, Human
uaauuuguaguguuggagaagaa

SEQ ID NO: 1456730 - RNA, 14 nt, Human
uaauuugugauaca

SEQ ID NO: 1456731 - RNA, 15 nt, Human
uaauuugugauacaa

SEQ ID NO: 1456732 - RNA, 18 nt, Human
uaauuugugauacaaugc

SEQ ID NO: 1456733 - RNA, 21 nt, Human
uaauuguuguucuguuaacug

SEQ ID NO: 1456734 - RNA, 23 nt, Human
uaauuguuguucuguuaacugaa

SEQ ID NO: 1456735 - RNA, 17 nt, Human
uaauuugguuuucacau

SEQ ID NO: 1456736 - RNA, 15 nt, Human
uaauuugguuuucac

SEQ ID NO: 1456737 - RNA, 18 nt, Human
uaauuugguuuucacauu

SEQ ID NO: 1456738 - RNA, 20 nt, Human
uaauuuguaguguuggagaa

SEQ ID NO: 1456739 - RNA, 22 nt, Human
uaauugugauuagacagaacac

SEQ ID NO: 1456740 - RNA, 23 nt, Human
uaauugugauuagacagaacacc

SEQ ID NO: 1456741 - RNA, 23 nt, Human
uaauuguacuaaagccaaacaua

SEQ ID NO: 1456742 - RNA, 22 nt, Human
uaauuguacuaaagccaaacau

SEQ ID NO: 1456743 - RNA, 18 nt, Human
uaauuguacuaaagccaa

SEQ ID NO: 1456744 - RNA, 22 nt, Human
uaauuguaaaguaaaagcuaua

SEQ ID NO: 1456745 - RNA, 20 nt, Human
uaauuguuguucuguuaacu

SEQ ID NO: 1456746 - RNA, 19 nt, Human
uaauuguuguucuguuaac

SEQ ID NO: 1456747 - RNA, 18 nt, Human
uaauuguuguucuguuaa

SEQ ID NO: 1456748 - RNA, 17 nt, Human
uaauuguuguucuguua

SEQ ID NO: 1456749 - RNA, 16 nt, Human
uaauuguuguucuguu

SEQ ID NO: 1456750 - RNA, 15 nt, Human
uaauuguuguucugu

SEQ ID NO: 1456751 - RNA, 14 nt, Human
uaauuguuguucug

SEQ ID NO: 1456752 - RNA, 16 nt, Human
uaauuguugcuaaucu

SEQ ID NO: 1456753 - RNA, 16 nt, Human
uaauuguucucagaau

SEQ ID NO: 1456754 - RNA, 17 nt, Human
uaauuguucucagaauc

SEQ ID NO: 1456755 - RNA, 14 nt, Human
uaauuguguggauu

SEQ ID NO: 1456756 - RNA, 20 nt, Human
uaauuguguggauucuuuaa

SEQ ID NO: 1456757 - RNA, 21 nt, Human
uaauugcuuauuuauuguauu

SEQ ID NO: 1456758 - RNA, 20 nt, Human
uaauugcuuauuuauuguau

SEQ ID NO: 1456759 - RNA, 13 nt, Human
uaauugcuuauuu

SEQ ID NO: 1456760 - RNA, 12 nt, Human
uaauugccaugu

SEQ ID NO: 1456761 - RNA, 11 nt, Human
uaauugccaug

SEQ ID NO: 1456762 - RNA, 23 nt, Human
uaauugccaccucuaacagcacc

SEQ ID NO: 1456763 - RNA, 18 nt, Human
uaauugccaccucuaaca

SEQ ID NO: 1456764 - RNA, 14 nt, Human
uaauugccaccucu

SEQ ID NO: 1456765 - RNA, 23 nt, Human
uaauugccaaaaagugaaauaau

SEQ ID NO: 1456766 - RNA, 22 nt, Human
uaauugccaaaaagugaaauaa

SEQ ID NO: 1456767 - RNA, 17 nt, Human
uaauugcauugacuuuc

SEQ ID NO: 1456768 - RNA, 18 nt, Human
uaauugggccagcuuuuc

SEQ ID NO: 1456769 - RNA, 18 nt, Human
uaauugguccgaucuuug

SEQ ID NO: 1456770 - RNA, 21 nt, Human
uaauugggccagcuuuucaaa

SEQ ID NO: 1456771 - RNA, 23 nt, Human
uaauuggauuuccuaauacuguc

SEQ ID NO: 1456772 - RNA, 17 nt, Human
uaauuggauuuccuaau

SEQ ID NO: 1456773 - RNA, 16 nt, Human
uaauuggauuuccuaa

SEQ ID NO: 1456774 - RNA, 15 nt, Human
uaauuggauuuccua

SEQ ID NO: 1456775 - RNA, 22 nt, Human
uaauugcuuauuuauuguauuc

SEQ ID NO: 1456776 - RNA, 22 nt, Human
uaauuggaaaggcagcucuaaa

SEQ ID NO: 1456777 - RNA, 20 nt, Human
uaauucuucaccuuaggaau

SEQ ID NO: 1456778 - RNA, 21 nt, Human
uaauucuuucaauacagauau

SEQ ID NO: 1456779 - RNA, 20 nt, Human
uaauucuuucaauacagaua

SEQ ID NO: 1456780 - RNA, 18 nt, Human
uaauucuuucaauacaga

SEQ ID NO: 1456781 - RNA, 12 nt, Human
uaauucuuucaa

SEQ ID NO: 1456782 - RNA, 18 nt, Human
uaauucucauuaaaagaa

SEQ ID NO: 1456783 - RNA, 16 nt, Human
uaauuaccuacucugg

SEQ ID NO: 1456784 - RNA, 21 nt, Human
uaauuaccaaccuguuaccua

SEQ ID NO: 1456785 - RNA, 17 nt, Human
uaauuaccaaccuguua

SEQ ID NO: 1456786 - RNA, 16 nt, Human
uaauuaccaaccuguu

SEQ ID NO: 1456787 - RNA, 14 nt, Human
uaauuaauuguaau

SEQ ID NO: 1456788 - RNA, 21 nt, Human
uaauuaauugggccagcuuuu

SEQ ID NO: 1456789 - RNA, 17 nt, Human
uaauucugaguuuugug

SEQ ID NO: 1456790 - RNA, 14 nt, Human
uaauucucauuaaa

SEQ ID NO: 1456791 - RNA, 18 nt, Human
uaauucuuagcucauucu

SEQ ID NO: 1456792 - RNA, 21 nt, Human
uaaugccuuacucuucuugaa

SEQ ID NO: 1456793 - RNA, 15 nt, Human
uaaugccuuacucuu

SEQ ID NO: 1456794 - RNA, 18 nt, Human
uaaugccucuucauucuu

SEQ ID NO: 1456795 - RNA, 12 nt, Human
uaaugcccagac

SEQ ID NO: 1456796 - RNA, 19 nt, Human
uaaugcauucuucucuguu

SEQ ID NO: 1456797 - RNA, 18 nt, Human
uaaugcauucuucucugu

SEQ ID NO: 1456798 - RNA, 14 nt, Human
uaaugcgugcauac

SEQ ID NO: 1456799 - RNA, 15 nt, Human
uaauguuucaaacau

SEQ ID NO: 1456800 - RNA, 15 nt, Human
uaauguuuaaaacau

SEQ ID NO: 1456801 - RNA, 14 nt, Human
uaauguuucaaaca

SEQ ID NO: 1456802 - RNA, 19 nt, Human
uaauuaaaagcaaaucauu

SEQ ID NO: 1456803 - RNA, 18 nt, Human
uaauuaaaagcaaaucau

SEQ ID NO: 1456804 - RNA, 18 nt, Human
uaaaguuuuauauauuau

SEQ ID NO: 1456805 - RNA, 17 nt, Human
uaaaguuuuauauauua

SEQ ID NO: 1456806 - RNA, 14 nt, Human
uaaaguuuuauaua

SEQ ID NO: 1456807 - RNA, 14 nt, Human
uaaaguuuguugaa

SEQ ID NO: 1456808 - RNA, 17 nt, Human
uaaauaaaaagaaaggc

SEQ ID NO: 1456809 - RNA, 16 nt, Human
uaaauaaaaagaaagg

SEQ ID NO: 1456810 - RNA, 19 nt, Human
uaaaguuuuauauauuaua

SEQ ID NO: 1456811 - RNA, 23 nt, Human
uaaaguuuuauauauuauaugga

SEQ ID NO: 1456812 - RNA, 17 nt, Human
uaaauaaaaauaauccu

SEQ ID NO: 1456813 - RNA, 16 nt, Human
uaaaggcaaaggcaau

SEQ ID NO: 1456814 - RNA, 19 nt, Human
uaaaggaguuuauguucca

SEQ ID NO: 1456815 - RNA, 22 nt, Human
uaaaggaugugauuguggaaug

SEQ ID NO: 1456816 - RNA, 16 nt, Human
uaaaggaugugauugu

SEQ ID NO: 1456817 - RNA, 21 nt, Human
uaaaguguauuuuuuuacuaa

SEQ ID NO: 1456818 - RNA, 22 nt, Human
uaaaguguauuuuuuuacuaau

SEQ ID NO: 1456819 - RNA, 23 nt, Human
uaaaguguauuuuuuuacuaaua

SEQ ID NO: 1456820 - RNA, 23 nt, Human
uaaagcuaaaauaaagaaauaga

SEQ ID NO: 1456821 - RNA, 22 nt, Human
uaaagcuaaaauaaagaaauag

SEQ ID NO: 1456822 - RNA, 15 nt, Human
uaaagcuaaaauaaa

SEQ ID NO: 1456823 - RNA, 21 nt, Human
uaaagcguuugcacagaucaa

SEQ ID NO: 1456824 - RNA, 15 nt, Human
uaaagcguuugcaca

SEQ ID NO: 1456825 - RNA, 13 nt, Human
uaaagcauuuaga

SEQ ID NO: 1456826 - RNA, 19 nt, Human
uaaagcauuuagaaaacuu

SEQ ID NO: 1456827 - RNA, 20 nt, Human
uaaagcauuuaaccccccug

SEQ ID NO: 1456828 - RNA, 11 nt, Human
uaaagcauuua

SEQ ID NO: 1456829 - RNA, 17 nt, Human
uaaaggaguuuauguuc

SEQ ID NO: 1456830 - RNA, 16 nt, Human
uaaaggaguuuauguu

SEQ ID NO: 1456831 - RNA, 15 nt, Human
uaaaggaguuuaugu

SEQ ID NO: 1456832 - RNA, 14 nt, Human
uaaagcucugacau

SEQ ID NO: 1456833 - RNA, 12 nt, Human
uaaaggacugua

SEQ ID NO: 1456834 - RNA, 14 nt, Human
uaaaggacuguaau

SEQ ID NO: 1456835 - RNA, 17 nt, Human
uaaagcaguauuuuucu

SEQ ID NO: 1456836 - RNA, 14 nt, Human
uaaagcaguauuuu

SEQ ID NO: 1456837 - RNA, 13 nt, Human
uaaagcaguauuu

SEQ ID NO: 1456838 - RNA, 18 nt, Human
uaaacuuuuuuucuguac

SEQ ID NO: 1456839 - RNA, 16 nt, Human
uaaacuuuuuuucugu

SEQ ID NO: 1456840 - RNA, 17 nt, Human
uaaacuuuuuguucugg

SEQ ID NO: 1456841 - RNA, 12 nt, Human
uaaacuuuuugu

SEQ ID NO: 1456842 - RNA, 16 nt, Human
uaaacuuuuaauucau

SEQ ID NO: 1456843 - RNA, 15 nt, Human
uaaacuuuaucacuu

SEQ ID NO: 1456844 - RNA, 17 nt, Human
uaaacuuuuaauucauu

SEQ ID NO: 1456845 - RNA, 15 nt, Human
uaaacuuuuaauuca

SEQ ID NO: 1456846 - RNA, 20 nt, Human
uaaacuuuuuucuuacuguc

SEQ ID NO: 1456847 - RNA, 15 nt, Human
uaaauauuuuaaaga

SEQ ID NO: 1456848 - RNA, 14 nt, Human
uaaauauuuuaaag

SEQ ID NO: 1456849 - RNA, 18 nt, Human
uaaauauuuuaaagaauu

SEQ ID NO: 1456850 - RNA, 23 nt, Human
uaaauauggacugcucaggaaac

SEQ ID NO: 1456851 - RNA, 21 nt, Human
uaaauauggacugcucaggaa

SEQ ID NO: 1456852 - RNA, 19 nt, Human
uaaauauggacugcucagg

SEQ ID NO: 1456853 - RNA, 17 nt, Human
uaaauauggacugcuca

SEQ ID NO: 1456854 - RNA, 18 nt, Human
uaaaucacgcuuuuugaa

SEQ ID NO: 1456855 - RNA, 16 nt, Human
uaaaucacgcuuuuug

SEQ ID NO: 1456856 - RNA, 17 nt, Human
uaaauauuuuaaagaau

SEQ ID NO: 1456857 - RNA, 13 nt, Human
uaaaucaauaaag

SEQ ID NO: 1456858 - RNA, 20 nt, Human
uaaaucagacuaugaaguuu

SEQ ID NO: 1456859 - RNA, 18 nt, Human
uaaaucaguaagaggugu

SEQ ID NO: 1456860 - RNA, 22 nt, Human
uaaaucacgcuuuuugaaaaag

SEQ ID NO: 1456861 - RNA, 21 nt, Human
uaaaucacgcuuuuugaaaaa

SEQ ID NO: 1456862 - RNA, 19 nt, Human
uaaaucacgcuuuuugaaa

SEQ ID NO: 1456863 - RNA, 17 nt, Human
uaaaucaguaagaggug

SEQ ID NO: 1456864 - RNA, 20 nt, Human
uaaauauaucuaccccagac

SEQ ID NO: 1456865 - RNA, 18 nt, Human
uaaauauaucuaccccag

SEQ ID NO: 1456866 - RNA, 14 nt, Human
uaaauauaucuacc

SEQ ID NO: 1456867 - RNA, 13 nt, Human
uaaauaaacccuu

SEQ ID NO: 1456868 - RNA, 20 nt, Human
uaaauaaaauuuguugcaua

SEQ ID NO: 1456869 - RNA, 14 nt, Human
uaaauaaaauuugu

SEQ ID NO: 1456870 - RNA, 13 nt, Human
uaaauaaaauuug

SEQ ID NO: 1456871 - RNA, 23 nt, Human
uaaauaaaaugcuagguucuacc

SEQ ID NO: 1456872 - RNA, 22 nt, Human
uaaauaaaaugcuagguucuac

SEQ ID NO: 1456873 - RNA, 21 nt, Human
uaaauaaaaugcuagguucua

SEQ ID NO: 1456874 - RNA, 20 nt, Human
uaaauaaaaugcuagguucu

SEQ ID NO: 1456875 - RNA, 17 nt, Human
uaaauaaaaugcuaggu

SEQ ID NO: 1456876 - RNA, 22 nt, Human
uaaauauauuuaagauaauuau

SEQ ID NO: 1456877 - RNA, 17 nt, Human
uaaauauauuuaagaua

SEQ ID NO: 1456878 - RNA, 22 nt, Human
uaaauauauuauuacuuguaaa

SEQ ID NO: 1456879 - RNA, 21 nt, Human
uaaauauauuauuacuuguaa

SEQ ID NO: 1456880 - RNA, 20 nt, Human
uaaauauauuauuacuugua

SEQ ID NO: 1456881 - RNA, 18 nt, Human
uaaauauauuauuacuug

SEQ ID NO: 1456882 - RNA, 17 nt, Human
uaaauauauuauuacuu

SEQ ID NO: 1456883 - RNA, 15 nt, Human
uaaauauauuauuac

SEQ ID NO: 1456884 - RNA, 14 nt, Human
uaaauauauuauua

SEQ ID NO: 1456885 - RNA, 13 nt, Human
uaaauauauuauu

SEQ ID NO: 1456886 - RNA, 18 nt, Human
uaaauauaugcuaagucu

SEQ ID NO: 1456887 - RNA, 23 nt, Human
uaaauauauuauuacuuguaaau

SEQ ID NO: 1456888 - RNA, 16 nt, Human
uaaauauauuuuaaga

SEQ ID NO: 1456889 - RNA, 22 nt, Human
uaaauauauuuuaagacgaaac

SEQ ID NO: 1456890 - RNA, 23 nt, Human
uaaacagugagccugaauuuugu

SEQ ID NO: 1456891 - RNA, 20 nt, Human
uaaacagugagccugaauuu

SEQ ID NO: 1456892 - RNA, 23 nt, Human
uaaacuggagacugugugugccc

SEQ ID NO: 1456893 - RNA, 14 nt, Human
uaaacuggagacug

SEQ ID NO: 1456894 - RNA, 13 nt, Human
uaaacuggagacu

SEQ ID NO: 1456895 - RNA, 12 nt, Human
uaaacuggagac

SEQ ID NO: 1456896 - RNA, 16 nt, Human
uaaacuuuaucacuua

SEQ ID NO: 1456897 - RNA, 22 nt, Human
uaaacuuuaccuuuuuuauaca

SEQ ID NO: 1456898 - RNA, 17 nt, Human
uaaacuguacagugucu

SEQ ID NO: 1456899 - RNA, 15 nt, Human
uaaacuguacagugu

SEQ ID NO: 1456900 - RNA, 14 nt, Human
uaaacuguacagug

SEQ ID NO: 1456901 - RNA, 13 nt, Human
uaaacuguacagu

SEQ ID NO: 1456902 - RNA, 12 nt, Human
uaaacuguacag

SEQ ID NO: 1456903 - RNA, 16 nt, Human
uaaacuggagacugug

SEQ ID NO: 1456904 - RNA, 16 nt, Human
uaaacuuuaccuuuuu

SEQ ID NO: 1456905 - RNA, 14 nt, Human
uaaacuuaaucuaa

SEQ ID NO: 1456906 - RNA, 18 nt, Human
uaaacuuaaucuaaaugg

SEQ ID NO: 1456907 - RNA, 19 nt, Human
uaaacuuaaucuaaaugga

SEQ ID NO: 1456908 - RNA, 20 nt, Human
uaaaaugcuagguucuaccu

SEQ ID NO: 1456909 - RNA, 17 nt, Human
uaaaaugcuagguucua

SEQ ID NO: 1456910 - RNA, 16 nt, Human
uaaaaugcuagguucu

SEQ ID NO: 1456911 - RNA, 14 nt, Human
uaaaaugcuagguu

SEQ ID NO: 1456912 - RNA, 16 nt, Human
uaaaaugauuguagua

SEQ ID NO: 1456913 - RNA, 13 nt, Human
uaaacaagaaaaa

SEQ ID NO: 1456914 - RNA, 18 nt, Human
uaaacaagaccacguuuc

SEQ ID NO: 1456915 - RNA, 23 nt, Human
uaaacaaguauuuguuaauuuag

SEQ ID NO: 1456916 - RNA, 18 nt, Human
uaaacaauaucagacuuu

SEQ ID NO: 1456917 - RNA, 18 nt, Human
uaaacaaguauuuguuaa

SEQ ID NO: 1456918 - RNA, 13 nt, Human
uaaacaaguauuu

SEQ ID NO: 1456919 - RNA, 20 nt, Human
uaaacaagaaaaauaaagaa

SEQ ID NO: 1456920 - RNA, 21 nt, Human
uaaacaagaaaaauaaagaaa

SEQ ID NO: 1456921 - RNA, 19 nt, Human
uaaacaagaaaaauaaaga

SEQ ID NO: 1456922 - RNA, 18 nt, Human
uaaacaagaaaaauaaag

SEQ ID NO: 1456923 - RNA, 17 nt, Human
uaaacaagaaaaauaaa

SEQ ID NO: 1456924 - RNA, 14 nt, Human
uaaacaagaaaaau

SEQ ID NO: 1456925 - RNA, 19 nt, Human
uaaacaagaccacguuucu

SEQ ID NO: 1456926 - RNA, 16 nt, Human
uaaacacuugcaaccu

SEQ ID NO: 1456927 - RNA, 20 nt, Human
uaaacacaagauugguguuu

SEQ ID NO: 1456928 - RNA, 14 nt, Human
uaaacacagacagg

SEQ ID NO: 1456929 - RNA, 22 nt, Human
uaaacacaagauugguguuuuu

SEQ ID NO: 1456930 - RNA, 22 nt, Human
uaaacaaguauuuguuaauuua

SEQ ID NO: 1456931 - RNA, 21 nt, Human
uaaacacucuugaaaaaugca

SEQ ID NO: 1456932 - RNA, 15 nt, Human
uaaaagaugcuuuua

SEQ ID NO: 1456933 - RNA, 14 nt, Human
uaaaagaugcuuuu

SEQ ID NO: 1456934 - RNA, 12 nt, Human
uaaaagaugcuu

SEQ ID NO: 1456935 - RNA, 17 nt, Human
uaaaagaugaaagagca

SEQ ID NO: 1456936 - RNA, 18 nt, Human
uaaaagauggggucugua

SEQ ID NO: 1456937 - RNA, 19 nt, Human
uaaaagauggggucuguaa

SEQ ID NO: 1456938 - RNA, 20 nt, Human
uaaaagauggggucuguaaa

SEQ ID NO: 1456939 - RNA, 21 nt, Human
uaaaagauggggucuguaaaa

SEQ ID NO: 1456940 - RNA, 22 nt, Human
uaaaagauggggucuguaaaau

SEQ ID NO: 1456941 - RNA, 13 nt, Human
uaaaagaugaaag

SEQ ID NO: 1456942 - RNA, 22 nt, Human
uaaaagauauaagugcuguaua

SEQ ID NO: 1456943 - RNA, 23 nt, Human
uaaaaauggcaggggguggaauu

SEQ ID NO: 1456944 - RNA, 16 nt, Human
uaaaaaugauuucagu

SEQ ID NO: 1456945 - RNA, 15 nt, Human
uaaaaaugaucuaaa

SEQ ID NO: 1456946 - RNA, 22 nt, Human
uaaaaauggaaacuauauugac

SEQ ID NO: 1456947 - RNA, 14 nt, Human
uaaaagccugcuca

SEQ ID NO: 1456948 - RNA, 12 nt, Human
uaaaagccugcu

SEQ ID NO: 1456949 - RNA, 18 nt, Human
uaaaagcauuuuguaaua

SEQ ID NO: 1456950 - RNA, 17 nt, Human
uaaaagcauuuuguaau

SEQ ID NO: 1456951 - RNA, 16 nt, Human
uaaaagcauuuuguaa

SEQ ID NO: 1456952 - RNA, 15 nt, Human
uaaaagcauuuugua

SEQ ID NO: 1456953 - RNA, 14 nt, Human
uaaaagcauuuugu

SEQ ID NO: 1456954 - RNA, 17 nt, Human
uaaaagggacugagaaa

SEQ ID NO: 1456955 - RNA, 19 nt, Human
uaaaagggacugagaaauu

SEQ ID NO: 1456956 - RNA, 20 nt, Human
uaaaagggacugagaaauuu

SEQ ID NO: 1456957 - RNA, 21 nt, Human
uaaaagggacugagaaauuua

SEQ ID NO: 1456958 - RNA, 15 nt, Human
uaaaauccucaaucc

SEQ ID NO: 1456959 - RNA, 21 nt, Human
uaaaaucagccaauuauguua

SEQ ID NO: 1456960 - RNA, 22 nt, Human
uaaaaucagccaauuauguuaa

SEQ ID NO: 1456961 - RNA, 23 nt, Human
uaaaaucagccaauuauguuaaa

SEQ ID NO: 1456962 - RNA, 19 nt, Human
uaaaauccauacauuugug

SEQ ID NO: 1456963 - RNA, 20 nt, Human
uaaaauauuuugaaucaaua

SEQ ID NO: 1456964 - RNA, 13 nt, Human
uaaaaucagccaa

SEQ ID NO: 1456965 - RNA, 14 nt, Human
uaaaaucagccaau

SEQ ID NO: 1456966 - RNA, 15 nt, Human
uaaaaucagccaauu

SEQ ID NO: 1456967 - RNA, 17 nt, Human
uaaaaucagccaauuau

SEQ ID NO: 1456968 - RNA, 16 nt, Human
uaaaauauuuugaauc

SEQ ID NO: 1456969 - RNA, 14 nt, Human
uaaaauauuuugaa

SEQ ID NO: 1456970 - RNA, 13 nt, Human
uaaaauauuuauu

SEQ ID NO: 1456971 - RNA, 22 nt, Human
uaaaaucuugucauguguauaa

SEQ ID NO: 1456972 - RNA, 21 nt, Human
uaaaaucuugucauguguaua

SEQ ID NO: 1456973 - RNA, 18 nt, Human
uaaaaucuuucuuucuua

SEQ ID NO: 1456974 - RNA, 20 nt, Human
uaaaaucuugucauguguau

SEQ ID NO: 1456975 - RNA, 19 nt, Human
uaaaaucuuucuuucuuag

SEQ ID NO: 1456976 - RNA, 20 nt, Human
uaaaaucuuucuuucuuaga

SEQ ID NO: 1456977 - RNA, 21 nt, Human
uaaaaucuuucuuucuuagaa

SEQ ID NO: 1456978 - RNA, 22 nt, Human
uaaaaucuuucuuucuuagaaa

SEQ ID NO: 1456979 - RNA, 14 nt, Human
uaaaaugacaauca

SEQ ID NO: 1456980 - RNA, 23 nt, Human
uaaaaucuugucauguguauaaa

SEQ ID NO: 1456981 - RNA, 13 nt, Human
uaaaaugagaaau

SEQ ID NO: 1456982 - RNA, 19 nt, Human
uaaaaugacaaucaugugu

SEQ ID NO: 1456983 - RNA, 18 nt, Human
uaaaaugacaaucaugug

SEQ ID NO: 1456984 - RNA, 17 nt, Human
uaaaaugacaaucaugu

SEQ ID NO: 1456985 - RNA, 21 nt, Human
uaaaaugacaaucaugugugu

SEQ ID NO: 1456986 - RNA, 15 nt, Human
uaaaaugagaaaucu

SEQ ID NO: 1456987 - RNA, 16 nt, Human
uaaaaugagaaaucua

SEQ ID NO: 1456988 - RNA, 22 nt, Human
guuuuuaaacuguacagugucu

SEQ ID NO: 1456989 - RNA, 20 nt, Human
guuuuuaaacuguacagugu

SEQ ID NO: 1456990 - RNA, 18 nt, Human
guuuuuaaacuguacagu

SEQ ID NO: 1456991 - RNA, 17 nt, Human
guuuuuaaacuguacag

SEQ ID NO: 1456992 - RNA, 16 nt, Human
guuuuuaaacuguaca

SEQ ID NO: 1456993 - RNA, 15 nt, Human
guuuuuaaacuguac

SEQ ID NO: 1456994 - RNA, 14 nt, Human
guuuuuaaacugua

SEQ ID NO: 1456995 - RNA, 13 nt, Human
guuuuuaaacugu

SEQ ID NO: 1456996 - RNA, 16 nt, Human
guuuuuacugcucuga

SEQ ID NO: 1456997 - RNA, 18 nt, Human
guuuuuacugcucugaga

SEQ ID NO: 1456998 - RNA, 14 nt, Human
guuuuuacugcucu

SEQ ID NO: 1456999 - RNA, 19 nt, Human
guuuuuauggcuuuugugc

SEQ ID NO: 1457000 - RNA, 22 nt, Human
guuuuuauggcuuuugugcauu

SEQ ID NO: 1457001 - RNA, 23 nt, Human
guuuuuauggcuuuugugcauua

SEQ ID NO: 1457002 - RNA, 15 nt, Human
guuuuguuuuuacaa

SEQ ID NO: 1457003 - RNA, 16 nt, Human
guuuugugucucuuau

SEQ ID NO: 1457004 - RNA, 14 nt, Human
guuuugugucucuu

SEQ ID NO: 1457005 - RNA, 15 nt, Human
guuuuguauucucug

SEQ ID NO: 1457006 - RNA, 12 nt, Human
guuuuguauucu

SEQ ID NO: 1457007 - RNA, 17 nt, Human
guuuucugaaaauauaa

SEQ ID NO: 1457008 - RNA, 14 nt, Human
guuuucucugaaca

SEQ ID NO: 1457009 - RNA, 19 nt, Human
guuuucucucggcucccca

SEQ ID NO: 1457010 - RNA, 12 nt, Human
guuuucuaauug

SEQ ID NO: 1457011 - RNA, 11 nt, Human
guuuucuaauu

SEQ ID NO: 1457012 - RNA, 16 nt, Human
guuuucgaaaaucaaa

SEQ ID NO: 1457013 - RNA, 14 nt, Human
guuuucgaaaauca

SEQ ID NO: 1457014 - RNA, 17 nt, Human
guuuucucucggcuccc

SEQ ID NO: 1457015 - RNA, 18 nt, Human
guuuucuccaagagcuac

SEQ ID NO: 1457016 - RNA, 21 nt, Human
guuuucuccucccaggaacug

SEQ ID NO: 1457017 - RNA, 18 nt, Human
guuuucuccucccaggaa

SEQ ID NO: 1457018 - RNA, 16 nt, Human
guuuucuccucccagg

SEQ ID NO: 1457019 - RNA, 13 nt, Human
guuuucuccuccc

SEQ ID NO: 1457020 - RNA, 14 nt, Human
guuuucuaauugcu

SEQ ID NO: 1457021 - RNA, 21 nt, Human
guuuucauccauaacugaaca

SEQ ID NO: 1457022 - RNA, 20 nt, Human
guuuucauccauaacugaac

SEQ ID NO: 1457023 - RNA, 19 nt, Human
guuuucauccauaacugaa

SEQ ID NO: 1457024 - RNA, 16 nt, Human
guuuucauuugguuca

SEQ ID NO: 1457025 - RNA, 17 nt, Human
guuuucauuugguucau

SEQ ID NO: 1457026 - RNA, 18 nt, Human
guuuguuuacaaaaucag

SEQ ID NO: 1457027 - RNA, 22 nt, Human
guuuguugguugguuuucuucu

SEQ ID NO: 1457028 - RNA, 23 nt, Human
guuugugccuuuuuauuuuuguu

SEQ ID NO: 1457029 - RNA, 18 nt, Human
guuuucauccauaacuga

SEQ ID NO: 1457030 - RNA, 18 nt, Human
guuuucaggcuagaugua

SEQ ID NO: 1457031 - RNA, 11 nt, Human
uaaaaaacaac

SEQ ID NO: 1457032 - RNA, 12 nt, Human
uaaaaaacacug

SEQ ID NO: 1457033 - RNA, 20 nt, Human
uaaaaaagcuuaaaacuuug

SEQ ID NO: 1457034 - RNA, 17 nt, Human
uaaaaaagauaaacaca

SEQ ID NO: 1457035 - RNA, 16 nt, Human
uaaaaaagauaaacac

SEQ ID NO: 1457036 - RNA, 13 nt, Human
uaaaaaagauaaa

SEQ ID NO: 1457037 - RNA, 12 nt, Human
uaaaaaagauaa

SEQ ID NO: 1457038 - RNA, 19 nt, Human
uaaaaaacuaaaaacuaga

SEQ ID NO: 1457039 - RNA, 17 nt, Human
uaaaaaacuaaaaacua

SEQ ID NO: 1457040 - RNA, 15 nt, Human
uaaaaaaccacaugg

SEQ ID NO: 1457041 - RNA, 16 nt, Human
uaaaaaagaaacauuu

SEQ ID NO: 1457042 - RNA, 19 nt, Human
uaaaaaugauuucaguagc

SEQ ID NO: 1457043 - RNA, 16 nt, Human
uaaaaacugagugacu

SEQ ID NO: 1457044 - RNA, 21 nt, Human
uaaaaacugagugacucuaua

SEQ ID NO: 1457045 - RNA, 14 nt, Human
uaaaaacucaagga

SEQ ID NO: 1457046 - RNA, 20 nt, Human
uaaaaacuagaggugagaaa

SEQ ID NO: 1457047 - RNA, 18 nt, Human
uaaaaaagcuuaaaacuu

SEQ ID NO: 1457048 - RNA, 17 nt, Human
uaaaaaagcuuaaaacu

SEQ ID NO: 1457049 - RNA, 17 nt, Human
uaaaaaagaucccaaau

SEQ ID NO: 1457050 - RNA, 19 nt, Human
uaaaaaagcuuaaaacuuu

SEQ ID NO: 1457051 - RNA, 14 nt, Human
uaaaaaauggucac

SEQ ID NO: 1457052 - RNA, 12 nt, Human
uaaaaaaugguu

SEQ ID NO: 1457053 - RNA, 19 nt, Human
uaaaaaaugguucagaauu

SEQ ID NO: 1457054 - RNA, 17 nt, Human
uaaaaacaaagaaauua

SEQ ID NO: 1457055 - RNA, 15 nt, Human
guuuuuaugagaaac

SEQ ID NO: 1457056 - RNA, 17 nt, Human
guuuuuaugagaaacuu

SEQ ID NO: 1457057 - RNA, 21 nt, Human
guuuuuaucugaaaucaauua

SEQ ID NO: 1457058 - RNA, 19 nt, Human
uaaaaaaaaagaucuguuu

SEQ ID NO: 1457059 - RNA, 14 nt, Human
guuuuucacauuuu

SEQ ID NO: 1457060 - RNA, 12 nt, Human
guuuuucacauu

SEQ ID NO: 1457061 - RNA, 16 nt, Human
guuuuucacauuuucc

SEQ ID NO: 1457062 - RNA, 15 nt, Human
uaaaaaaaagaugaa

SEQ ID NO: 1457063 - RNA, 20 nt, Human
uaaaaaaauaagaagaaugc

SEQ ID NO: 1457064 - RNA, 15 nt, Human
uaaaaaaauaagaag

SEQ ID NO: 1457065 - RNA, 22 nt, Human
uaaaaaaauaagaagaaugcuu

SEQ ID NO: 1457066 - RNA, 11 nt, Human
uaaaaaacacu

SEQ ID NO: 1457067 - RNA, 19 nt, Human
guuugaugaggcccuccac

SEQ ID NO: 1457068 - RNA, 15 nt, Human
guuugaugaggcccu

SEQ ID NO: 1457069 - RNA, 16 nt, Human
guuugauagauuuucu

SEQ ID NO: 1457070 - RNA, 15 nt, Human
guuugagauucucaa

SEQ ID NO: 1457071 - RNA, 17 nt, Human
guuugauuaaauucuug

SEQ ID NO: 1457072 - RNA, 19 nt, Human
guuugauuaaauucuugca

SEQ ID NO: 1457073 - RNA, 22 nt, Human
guuugauuaaauucuugcaaag

SEQ ID NO: 1457074 - RNA, 20 nt, Human
guuugaugaggcccuccaca

SEQ ID NO: 1457075 - RNA, 17 nt, Human
guuuguaaauuaacuuu

SEQ ID NO: 1457076 - RNA, 19 nt, Human
guuuguaaauuaacuuuua

SEQ ID NO: 1457077 - RNA, 20 nt, Human
guuuguaaauuaacuuuuau

SEQ ID NO: 1457078 - RNA, 19 nt, Human
guuugugcuguaaagaguu

SEQ ID NO: 1457079 - RNA, 17 nt, Human
guuugugacagggcggg

SEQ ID NO: 1457080 - RNA, 16 nt, Human
guuugugacagggcgg

SEQ ID NO: 1457081 - RNA, 17 nt, Human
guuucuaaacuggagac

SEQ ID NO: 1457082 - RNA, 15 nt, Human
guuucuaaacuggag

SEQ ID NO: 1457083 - RNA, 23 nt, Human
guuucguggggaggucuaaucua

SEQ ID NO: 1457084 - RNA, 15 nt, Human
guuucguggggaggu

SEQ ID NO: 1457085 - RNA, 19 nt, Human
guuuccuugggaguuguca

SEQ ID NO: 1457086 - RNA, 18 nt, Human
guuucuaaacuggagacu

SEQ ID NO: 1457087 - RNA, 23 nt, Human
guuucuuucuuucuuuauuuuga

SEQ ID NO: 1457088 - RNA, 12 nt, Human
guuucuuucuuu

SEQ ID NO: 1457089 - RNA, 20 nt, Human
guuucuuucucugaggacaa

SEQ ID NO: 1457090 - RNA, 19 nt, Human
guuucuuucucugaggaca

SEQ ID NO: 1457091 - RNA, 14 nt, Human
guuucuuuguaaug

SEQ ID NO: 1457092 - RNA, 17 nt, Human
guuucuuuguaaugaaa

SEQ ID NO: 1457093 - RNA, 18 nt, Human
guuucuuuguaaugaaaa

SEQ ID NO: 1457094 - RNA, 14 nt, Human
guuugaauguuaaa

SEQ ID NO: 1457095 - RNA, 15 nt, Human
guuugaauguuaaau

SEQ ID NO: 1457096 - RNA, 19 nt, Human
guuuccagcauucccaggu

SEQ ID NO: 1457097 - RNA, 16 nt, Human
guuuccagcauuccca

SEQ ID NO: 1457098 - RNA, 13 nt, Human
guuuccagcauuc

SEQ ID NO: 1457099 - RNA, 16 nt, Human
guuuccacagccugca

SEQ ID NO: 1457100 - RNA, 21 nt, Human
guuucauuuagucaugugacc

SEQ ID NO: 1457101 - RNA, 20 nt, Human
guuucauuuagucaugugac

SEQ ID NO: 1457102 - RNA, 19 nt, Human
guuucauuuagucauguga

SEQ ID NO: 1457103 - RNA, 23 nt, Human
guuucaggagagaguugaaccua

SEQ ID NO: 1457104 - RNA, 22 nt, Human
guuucaggagagaguugaaccu

SEQ ID NO: 1457105 - RNA, 23 nt, Human
guuucagcacuagccaaaccuca

SEQ ID NO: 1457106 - RNA, 12 nt, Human
guuucagcacua

SEQ ID NO: 1457107 - RNA, 18 nt, Human
guuucagcgacuccguug

SEQ ID NO: 1457108 - RNA, 18 nt, Human
guuucagaaauguguuau

SEQ ID NO: 1457109 - RNA, 22 nt, Human
guuuccugaaacaacuuggaaa

SEQ ID NO: 1457110 - RNA, 14 nt, Human
guuucccaggccca

SEQ ID NO: 1457111 - RNA, 16 nt, Human
guuucccaagagcuac

SEQ ID NO: 1457112 - RNA, 23 nt, Human
guuuccucuguucaaagcugccu

SEQ ID NO: 1457113 - RNA, 16 nt, Human
guuuccuuauauuaug

SEQ ID NO: 1457114 - RNA, 16 nt, Human
guuuacuuguuucaga

SEQ ID NO: 1457115 - RNA, 20 nt, Human
gguuggcucugccaguccug

SEQ ID NO: 1457116 - RNA, 16 nt, Human
gguuggcucugccagu

SEQ ID NO: 1457117 - RNA, 14 nt, Human
gguugcagacagga

SEQ ID NO: 1457118 - RNA, 20 nt, Human
guuuagauuuaugguuguua

SEQ ID NO: 1457119 - RNA, 13 nt, Human
guuuagcucugag

SEQ ID NO: 1457120 - RNA, 12 nt, Human
guuuagcucuga

SEQ ID NO: 1457121 - RNA, 17 nt, Human
guuuagggaacaauuug

SEQ ID NO: 1457122 - RNA, 16 nt, Human
guuuagggaacaauuu

SEQ ID NO: 1457123 - RNA, 23 nt, Human
guuuaggcuauuuguaaaucugc

SEQ ID NO: 1457124 - RNA, 22 nt, Human
guuuaggcuauuuguaaaucug

SEQ ID NO: 1457125 - RNA, 15 nt, Human
guuuaggcuauuugu

SEQ ID NO: 1457126 - RNA, 15 nt, Human
guuuagcucugagaa

SEQ ID NO: 1457127 - RNA, 14 nt, Human
guuuagcucugaga

SEQ ID NO: 1457128 - RNA, 16 nt, Human
guuuagcucugagaac

SEQ ID NO: 1457129 - RNA, 14 nt, Human
guuuaggcuauuug

SEQ ID NO: 1457130 - RNA, 16 nt, Human
guuuaguaaucauauu

SEQ ID NO: 1457131 - RNA, 22 nt, Human
ucaauagccacuaaccuugccu

SEQ ID NO: 1457132 - RNA, 23 nt, Human
ucaauagccacuaaccuugccug

SEQ ID NO: 1457133 - RNA, 13 nt, Human
ucaauagccacua

SEQ ID NO: 1457134 - RNA, 12 nt, Human
ucaauagccacu

SEQ ID NO: 1457135 - RNA, 14 nt, Human
ucaauacagauaua

SEQ ID NO: 1457136 - RNA, 19 nt, Human
ucaauacagauauauuuuc

SEQ ID NO: 1457137 - RNA, 16 nt, Human
ucaauacagauauauu

SEQ ID NO: 1457138 - RNA, 15 nt, Human
ucaauacagauauau

SEQ ID NO: 1457139 - RNA, 14 nt, Human
ucaauggggccagu

SEQ ID NO: 1457140 - RNA, 12 nt, Human
ucaaugcucaua

SEQ ID NO: 1457141 - RNA, 13 nt, Human
ucaaugcucauaa

SEQ ID NO: 1457142 - RNA, 14 nt, Human
ucaaugcucauaac

SEQ ID NO: 1457143 - RNA, 13 nt, Human
ucacacaaagcag

SEQ ID NO: 1457144 - RNA, 15 nt, Human
ucacaaugagauuga

SEQ ID NO: 1457145 - RNA, 15 nt, Human
ucacaauaauuuucu

SEQ ID NO: 1457146 - RNA, 13 nt, Human
ucacaauacuguu

SEQ ID NO: 1457147 - RNA, 16 nt, Human
ucacaauaauuuucua

SEQ ID NO: 1457148 - RNA, 23 nt, Human
ucacacaggcauuuccugggugg

SEQ ID NO: 1457149 - RNA, 21 nt, Human
ucacacaggcauuuccugggu

SEQ ID NO: 1457150 - RNA, 20 nt, Human
ucacacaggcauuuccuggg

SEQ ID NO: 1457151 - RNA, 14 nt, Human
ucacacaaagcaga

SEQ ID NO: 1457152 - RNA, 23 nt, Human
ucacaggacagcccuucuuucca

SEQ ID NO: 1457153 - RNA, 21 nt, Human
ucaagcugaguauuaaaaugu

SEQ ID NO: 1457154 - RNA, 23 nt, Human
ucaagcugaguauuaaaauguau

SEQ ID NO: 1457155 - RNA, 20 nt, Human
ucaagcugaguauuaaaaug

SEQ ID NO: 1457156 - RNA, 18 nt, Human
ucaagcucugagggaaag

SEQ ID NO: 1457157 - RNA, 21 nt, Human
ucaagcucugagggaaagggc

SEQ ID NO: 1457158 - RNA, 15 nt, Human
ucaagcucugaggga

SEQ ID NO: 1457159 - RNA, 13 nt, Human
ucaagcucugagg

SEQ ID NO: 1457160 - RNA, 12 nt, Human
ucaagcucugag

SEQ ID NO: 1457161 - RNA, 11 nt, Human
ucaagcucuga

SEQ ID NO: 1457162 - RNA, 16 nt, Human
ucaagccccggacuca

SEQ ID NO: 1457163 - RNA, 12 nt, Human
ucaagcccugca

SEQ ID NO: 1457164 - RNA, 13 nt, Human
ucaagcccugcag

SEQ ID NO: 1457165 - RNA, 23 nt, Human
ucaagcagucgugccugugucca

SEQ ID NO: 1457166 - RNA, 22 nt, Human
ucaagcagucgugccugugucc

SEQ ID NO: 1457167 - RNA, 21 nt, Human
ucaagcagucgugccuguguc

SEQ ID NO: 1457168 - RNA, 20 nt, Human
ucaagcagucgugccugugu

SEQ ID NO: 1457169 - RNA, 19 nt, Human
ucaagcagucgugccugug

SEQ ID NO: 1457170 - RNA, 15 nt, Human
ucaagcgauucuccu

SEQ ID NO: 1457171 - RNA, 16 nt, Human
ucaaagaaaguguauu

SEQ ID NO: 1457172 - RNA, 15 nt, Human
ucaaagaaaguguau

SEQ ID NO: 1457173 - RNA, 14 nt, Human
ucaaagaaagugua

SEQ ID NO: 1457174 - RNA, 12 nt, Human
ucaaagaaagug

SEQ ID NO: 1457175 - RNA, 15 nt, Human
ucaaacugaggaauu

SEQ ID NO: 1457176 - RNA, 16 nt, Human
ucaaacuuuacuaugg

SEQ ID NO: 1457177 - RNA, 21 nt, Human
ucaaacuccugaccucaggca

SEQ ID NO: 1457178 - RNA, 20 nt, Human
ucaaacuccugaccucaggc

SEQ ID NO: 1457179 - RNA, 18 nt, Human
ucaaacuccugaccucag

SEQ ID NO: 1457180 - RNA, 20 nt, Human
ucaaacuacuuugcugcuaa

SEQ ID NO: 1457181 - RNA, 15 nt, Human
ucaaacuuuacuaug

SEQ ID NO: 1457182 - RNA, 13 nt, Human
ucaaacuuuacua

SEQ ID NO: 1457183 - RNA, 15 nt, Human
ucaacguauuguuuc

SEQ ID NO: 1457184 - RNA, 21 nt, Human
ucaacggaaagugcugucuua

SEQ ID NO: 1457185 - RNA, 12 nt, Human
ucaaccucccaa

SEQ ID NO: 1457186 - RNA, 11 nt, Human
ucaaccucauc

SEQ ID NO: 1457187 - RNA, 18 nt, Human
ucaagcagucgugccugu

SEQ ID NO: 1457188 - RNA, 17 nt, Human
ucaagcagucgugccug

SEQ ID NO: 1457189 - RNA, 16 nt, Human
ucaagcagucgugccu

SEQ ID NO: 1457190 - RNA, 23 nt, Human
ucaagcagcgaccgcccccuccu

SEQ ID NO: 1457191 - RNA, 15 nt, Human
ucaacuaggaucaga

SEQ ID NO: 1457192 - RNA, 19 nt, Human
ucaacuccaaacugacucu

SEQ ID NO: 1457193 - RNA, 21 nt, Human
uauuuuagugaacuugaaaua

SEQ ID NO: 1457194 - RNA, 23 nt, Human
uauuugggccugcuccagaccug

SEQ ID NO: 1457195 - RNA, 15 nt, Human
uauuugggaagugaa

SEQ ID NO: 1457196 - RNA, 14 nt, Human
uauuugggaaguga

SEQ ID NO: 1457197 - RNA, 19 nt, Human
uauuuggaaauaaagucag

SEQ ID NO: 1457198 - RNA, 17 nt, Human
uauuuggaaauaaaguc

SEQ ID NO: 1457199 - RNA, 16 nt, Human
uauuuggaaauaaagu

SEQ ID NO: 1457200 - RNA, 11 nt, Human
uauuugcuuuu

SEQ ID NO: 1457201 - RNA, 14 nt, Human
uauuugcuaauuuu

SEQ ID NO: 1457202 - RNA, 19 nt, Human
uauuugauguaauacuucu

SEQ ID NO: 1457203 - RNA, 14 nt, Human
uauuugauguaaua

SEQ ID NO: 1457204 - RNA, 16 nt, Human
uauuucuuaaacacuu

SEQ ID NO: 1457205 - RNA, 13 nt, Human
uauuucuuaaaca

SEQ ID NO: 1457206 - RNA, 14 nt, Human
uauuucugccuccc

SEQ ID NO: 1457207 - RNA, 17 nt, Human
uauuucugcauauguug

SEQ ID NO: 1457208 - RNA, 19 nt, Human
uaucugaauuuuuaaacaa

SEQ ID NO: 1457209 - RNA, 20 nt, Human
uaucugaauuuuuaaacaag

SEQ ID NO: 1457210 - RNA, 21 nt, Human
uauuucuaugaaauauuaugu

SEQ ID NO: 1457211 - RNA, 17 nt, Human
uauuuauuguauucugg

SEQ ID NO: 1457212 - RNA, 13 nt, Human
uauuuauuguauu

SEQ ID NO: 1457213 - RNA, 14 nt, Human
uauuuauugguuuu

SEQ ID NO: 1457214 - RNA, 22 nt, Human
uauuucuaugaaauauuauguu

SEQ ID NO: 1457215 - RNA, 13 nt, Human
uauuuauuacugu

SEQ ID NO: 1457216 - RNA, 16 nt, Human
ucaaaacuacaaauca

SEQ ID NO: 1457217 - RNA, 15 nt, Human
ucaaaaccuuuugaa

SEQ ID NO: 1457218 - RNA, 21 nt, Human
ucaaacuacuuugcugcuaau

SEQ ID NO: 1457219 - RNA, 16 nt, Human
ucaaacuacuuugcug

SEQ ID NO: 1457220 - RNA, 18 nt, Human
ucaaacuacauauuguaa

SEQ ID NO: 1457221 - RNA, 22 nt, Human
ucaaaaccagguccaaugagcu

SEQ ID NO: 1457222 - RNA, 22 nt, Human
ucaaaacauugugccaugucaa

SEQ ID NO: 1457223 - RNA, 12 nt, Human
ucaaaacauugu

SEQ ID NO: 1457224 - RNA, 12 nt, Human
ucaaaaagaacc

SEQ ID NO: 1457225 - RNA, 22 nt, Human
ucaaaaacuuuggaguccccuc

SEQ ID NO: 1457226 - RNA, 17 nt, Human
ucaaaaacuuuggaguc

SEQ ID NO: 1457227 - RNA, 13 nt, Human
ucaaaaacuauuu

SEQ ID NO: 1457228 - RNA, 13 nt, Human
ucaaaaaauugca

SEQ ID NO: 1457229 - RNA, 17 nt, Human
uauuuuuuucugaaauu

SEQ ID NO: 1457230 - RNA, 16 nt, Human
uauuuuuuucugaaau

SEQ ID NO: 1457231 - RNA, 12 nt, Human
ucaaaaaaggca

SEQ ID NO: 1457232 - RNA, 17 nt, Human
uauuuuuuucuauuuuu

SEQ ID NO: 1457233 - RNA, 22 nt, Human
uauuuuuuucugaauuauuuuc

SEQ ID NO: 1457234 - RNA, 15 nt, Human
uauuuuuuuacuaau

SEQ ID NO: 1457235 - RNA, 15 nt, Human
uauuuuuuaauuauu

SEQ ID NO: 1457236 - RNA, 12 nt, Human
uauuuuuuaauu

SEQ ID NO: 1457237 - RNA, 17 nt, Human
uauuuugacauaaaguu

SEQ ID NO: 1457238 - RNA, 18 nt, Human
uauuuugacauaaaguug

SEQ ID NO: 1457239 - RNA, 23 nt, Human
uauuuugaaucaauaauauauuu

SEQ ID NO: 1457240 - RNA, 22 nt, Human
uauuuugaaucaauaauauauu

SEQ ID NO: 1457241 - RNA, 16 nt, Human
uauuuugaaucaauaa

SEQ ID NO: 1457242 - RNA, 15 nt, Human
uauuuugaaucaaua

SEQ ID NO: 1457243 - RNA, 13 nt, Human
uauuuugaaucaa

SEQ ID NO: 1457244 - RNA, 12 nt, Human
uauuuugaauca

SEQ ID NO: 1457245 - RNA, 14 nt, Human
uauuuucauucaaa

SEQ ID NO: 1457246 - RNA, 12 nt, Human
uauuuucuuucu

SEQ ID NO: 1457247 - RNA, 13 nt, Human
uauuuucuuggau

SEQ ID NO: 1457248 - RNA, 19 nt, Human
uauuuucauccuugucuua

SEQ ID NO: 1457249 - RNA, 18 nt, Human
uauuuucaauagccacua

SEQ ID NO: 1457250 - RNA, 14 nt, Human
uauuuucagaugug

SEQ ID NO: 1457251 - RNA, 14 nt, Human
uauuuucaccauuu

SEQ ID NO: 1457252 - RNA, 13 nt, Human
uauuuucaccauu

SEQ ID NO: 1457253 - RNA, 21 nt, Human
uauuuuauguuauauauaaau

SEQ ID NO: 1457254 - RNA, 19 nt, Human
uauuuucaauagccacuaa

SEQ ID NO: 1457255 - RNA, 16 nt, Human
uauuuucaagaaacug

SEQ ID NO: 1457256 - RNA, 13 nt, Human
uauuuucaagaaa

SEQ ID NO: 1457257 - RNA, 14 nt, Human
uauuuuauguuaua

SEQ ID NO: 1457258 - RNA, 12 nt, Human
uauuuuauguua

SEQ ID NO: 1457259 - RNA, 15 nt, Human
uauuuuauguugcau

SEQ ID NO: 1457260 - RNA, 16 nt, Human
uauuuuauguugcaua

SEQ ID NO: 1457261 - RNA, 23 nt, Human
ucagaaagugccugacacacuaa

SEQ ID NO: 1457262 - RNA, 15 nt, Human
ucagaaagugccuga

SEQ ID NO: 1457263 - RNA, 23 nt, Human
ucagaaagggagggcucugaggc

SEQ ID NO: 1457264 - RNA, 13 nt, Human
ucagaaauacaga

SEQ ID NO: 1457265 - RNA, 16 nt, Human
ucagaaauacagauuu

SEQ ID NO: 1457266 - RNA, 20 nt, Human
ucagaaauacagauuuugau

SEQ ID NO: 1457267 - RNA, 22 nt, Human
ucagaaagggagggcucugagg

SEQ ID NO: 1457268 - RNA, 21 nt, Human
ucagaaagggagggcucugag

SEQ ID NO: 1457269 - RNA, 20 nt, Human
ucagaaagggagggcucuga

SEQ ID NO: 1457270 - RNA, 19 nt, Human
ucagaaagggagggcucug

SEQ ID NO: 1457271 - RNA, 18 nt, Human
ucagaaagggagggcucu

SEQ ID NO: 1457272 - RNA, 17 nt, Human
ucagaaagggagggcuc

SEQ ID NO: 1457273 - RNA, 14 nt, Human
ucagaaagggaggg

SEQ ID NO: 1457274 - RNA, 17 nt, Human
ucagaaaggaaaaacaa

SEQ ID NO: 1457275 - RNA, 20 nt, Human
ucagaaaggaaaaacaaacu

SEQ ID NO: 1457276 - RNA, 23 nt, Human
ucagaaaauguucuguuugcugu

SEQ ID NO: 1457277 - RNA, 19 nt, Human
ucagaaaauguucuguuug

SEQ ID NO: 1457278 - RNA, 18 nt, Human
ucagaaaauguucuguuu

SEQ ID NO: 1457279 - RNA, 13 nt, Human
ucagaaagacuug

SEQ ID NO: 1457280 - RNA, 15 nt, Human
ucagaaaauguucug

SEQ ID NO: 1457281 - RNA, 20 nt, Human
ucagaaaauaucccuccugu

SEQ ID NO: 1457282 - RNA, 20 nt, Human
ucacuuuuugaggcaaaaga

SEQ ID NO: 1457283 - RNA, 16 nt, Human
ucacuuuuugaggcaa

SEQ ID NO: 1457284 - RNA, 22 nt, Human
ucacuuuuugaggcaaaagaag

SEQ ID NO: 1457285 - RNA, 17 nt, Human
ucacuuuuucugauaaa

SEQ ID NO: 1457286 - RNA, 16 nt, Human
ucacuuuuucugauaa

SEQ ID NO: 1457287 - RNA, 14 nt, Human
ucacuuuuucugau

SEQ ID NO: 1457288 - RNA, 13 nt, Human
ucacuuuuucuga

SEQ ID NO: 1457289 - RNA, 15 nt, Human
ucacuuuucccacuc

SEQ ID NO: 1457290 - RNA, 18 nt, Human
ucacuuuugacaaaggca

SEQ ID NO: 1457291 - RNA, 18 nt, Human
ucacuuuuccucccucag

SEQ ID NO: 1457292 - RNA, 13 nt, Human
ucacuuuuccucc

SEQ ID NO: 1457293 - RNA, 21 nt, Human
ucacuuuuaaugaacaaaugg

SEQ ID NO: 1457294 - RNA, 19 nt, Human
ucacuuuuaaugaacaaau

SEQ ID NO: 1457295 - RNA, 14 nt, Human
ucacuuucucaguu

SEQ ID NO: 1457296 - RNA, 17 nt, Human
ucacuugugcaguguug

SEQ ID NO: 1457297 - RNA, 12 nt, Human
ucacuuuuccuc

SEQ ID NO: 1457298 - RNA, 14 nt, Human
ucacuuuucccacu

SEQ ID NO: 1457299 - RNA, 13 nt, Human
ucacuuuucccac

SEQ ID NO: 1457300 - RNA, 17 nt, Human
ucacucugaguguuuua

SEQ ID NO: 1457301 - RNA, 15 nt, Human
ucacugcuuaacuuc

SEQ ID NO: 1457302 - RNA, 17 nt, Human
ucacugcuuaacuucac

SEQ ID NO: 1457303 - RNA, 18 nt, Human
ucacugcuuaacuucaca

SEQ ID NO: 1457304 - RNA, 20 nt, Human
ucacugcuuaacuucacaua

SEQ ID NO: 1457305 - RNA, 17 nt, Human
ucacuggcucuccuggc

SEQ ID NO: 1457306 - RNA, 12 nt, Human
ucacuggcucuc

SEQ ID NO: 1457307 - RNA, 13 nt, Human
ucacuggcucucc

SEQ ID NO: 1457308 - RNA, 22 nt, Human
ucacuggcgacacguagcagcu

SEQ ID NO: 1457309 - RNA, 20 nt, Human
ucacuggcgacacguagcag

SEQ ID NO: 1457310 - RNA, 15 nt, Human
ucacuuguacaaaau

SEQ ID NO: 1457311 - RNA, 14 nt, Human
ucacuuguacaaaa

SEQ ID NO: 1457312 - RNA, 13 nt, Human
ucacuuguacaaa

SEQ ID NO: 1457313 - RNA, 18 nt, Human
ucacuggcucuccuggcc

SEQ ID NO: 1457314 - RNA, 22 nt, Human
ucacuugucaggagugugugug

SEQ ID NO: 1457315 - RNA, 21 nt, Human
ucacuugucaggagugugugu

SEQ ID NO: 1457316 - RNA, 19 nt, Human
ucacuugucaggagugugu

SEQ ID NO: 1457317 - RNA, 17 nt, Human
ucacuuguacaaaauaa

SEQ ID NO: 1457318 - RNA, 16 nt, Human
ucacuuguacaaaaua

SEQ ID NO: 1457319 - RNA, 17 nt, Human
ucacuugucaauaaaau

SEQ ID NO: 1457320 - RNA, 18 nt, Human
ucagacugacaguuuaca

SEQ ID NO: 1457321 - RNA, 18 nt, Human
ucagacucuaagaaagaa

SEQ ID NO: 1457322 - RNA, 17 nt, Human
ucagacucuaagaaaga

SEQ ID NO: 1457323 - RNA, 15 nt, Human
ucagacuaagccagc

SEQ ID NO: 1457324 - RNA, 19 nt, Human
ucagacucuaagaaagaac

SEQ ID NO: 1457325 - RNA, 22 nt, Human
ucagacucccauuccugaagaa

SEQ ID NO: 1457326 - RNA, 21 nt, Human
ucagacucccauuccugaaga

SEQ ID NO: 1457327 - RNA, 19 nt, Human
ucagacucccauuccugaa

SEQ ID NO: 1457328 - RNA, 17 nt, Human
ucagacuaagccagcac

SEQ ID NO: 1457329 - RNA, 14 nt, Human
ucagaccacggcuc

SEQ ID NO: 1457330 - RNA, 14 nt, Human
ucagaccacaugcc

SEQ ID NO: 1457331 - RNA, 22 nt, Human
ucagacaucugagguuuuauuu

SEQ ID NO: 1457332 - RNA, 19 nt, Human
ucagacaucugagguuuua

SEQ ID NO: 1457333 - RNA, 19 nt, Human
ucagcacaaggccaucugg

SEQ ID NO: 1457334 - RNA, 19 nt, Human
ucagcaagacuucucuuug

SEQ ID NO: 1457335 - RNA, 16 nt, Human
ucagcaacucgcuuua

SEQ ID NO: 1457336 - RNA, 20 nt, Human
ucagcaaagugguucccucu

SEQ ID NO: 1457337 - RNA, 18 nt, Human
ucagcaaagugguucccu

SEQ ID NO: 1457338 - RNA, 19 nt, Human
ucagcacuuggcccuucua

SEQ ID NO: 1457339 - RNA, 21 nt, Human
ucagcacugucccuugccuca

SEQ ID NO: 1457340 - RNA, 14 nt, Human
ucagcacugucccu

SEQ ID NO: 1457341 - RNA, 13 nt, Human
ucagcacuguccc

SEQ ID NO: 1457342 - RNA, 12 nt, Human
ucagcacugucc

SEQ ID NO: 1457343 - RNA, 22 nt, Human
ucagcacugccugcucccaucc

SEQ ID NO: 1457344 - RNA, 18 nt, Human
ucagcacugccugcuccc

SEQ ID NO: 1457345 - RNA, 15 nt, Human
ucagcacugccugcu

SEQ ID NO: 1457346 - RNA, 13 nt, Human
ucagcacaaggcc

SEQ ID NO: 1457347 - RNA, 14 nt, Human
ucagcacuagccaa

SEQ ID NO: 1457348 - RNA, 19 nt, Human
ucagcacgauuucuguuua

SEQ ID NO: 1457349 - RNA, 22 nt, Human
ucagaggcccucgcugccagcu

SEQ ID NO: 1457350 - RNA, 21 nt, Human
ucagaggcccucgcugccagc

SEQ ID NO: 1457351 - RNA, 18 nt, Human
ucagaggcccucgcugcc

SEQ ID NO: 1457352 - RNA, 19 nt, Human
ucagagugacauccaggag

SEQ ID NO: 1457353 - RNA, 18 nt, Human
ucagaguccuuaaaaugu

SEQ ID NO: 1457354 - RNA, 17 nt, Human
ucagaguccuuaaaaug

SEQ ID NO: 1457355 - RNA, 16 nt, Human
ucagaggcgcacugug

SEQ ID NO: 1457356 - RNA, 19 nt, Human
ucagaguucuuuuugaagu

SEQ ID NO: 1457357 - RNA, 16 nt, Human
ucagaguucuuuuuga

SEQ ID NO: 1457358 - RNA, 20 nt, Human
ucagagugacuacacacagu

SEQ ID NO: 1457359 - RNA, 21 nt, Human
ucagagugacauccaggagga

SEQ ID NO: 1457360 - RNA, 22 nt, Human
ucagaguugaugguuguacaua

SEQ ID NO: 1457361 - RNA, 15 nt, Human
ucagcaaacaggauc

SEQ ID NO: 1457362 - RNA, 21 nt, Human
ucagaguugcugcaaaccuga

SEQ ID NO: 1457363 - RNA, 15 nt, Human
ucagcaaacucuuuu

SEQ ID NO: 1457364 - RNA, 21 nt, Human
ucagcaaacaggaucaguuaa

SEQ ID NO: 1457365 - RNA, 14 nt, Human
ucacgcaugcagug

SEQ ID NO: 1457366 - RNA, 18 nt, Human
ucacgccagacuucccac

SEQ ID NO: 1457367 - RNA, 16 nt, Human
ucacgcaugcaguguu

SEQ ID NO: 1457368 - RNA, 22 nt, Human
ucaccucagauggcagcuuuua

SEQ ID NO: 1457369 - RNA, 23 nt, Human
ucaccucagauggcagcuuuuaa

SEQ ID NO: 1457370 - RNA, 21 nt, Human
ucaccucagauggcagcuuuu

SEQ ID NO: 1457371 - RNA, 20 nt, Human
ucaccucagauggcagcuuu

SEQ ID NO: 1457372 - RNA, 19 nt, Human
ucaccucagauggcagcuu

SEQ ID NO: 1457373 - RNA, 18 nt, Human
ucaccucagauggcagcu

SEQ ID NO: 1457374 - RNA, 17 nt, Human
ucaccucagauggcagc

SEQ ID NO: 1457375 - RNA, 16 nt, Human
ucaccucagauggcag

SEQ ID NO: 1457376 - RNA, 20 nt, Human
ucaccuauuuccauucaaca

SEQ ID NO: 1457377 - RNA, 23 nt, Human
ucaccuaggaagccucagauucc

SEQ ID NO: 1457378 - RNA, 20 nt, Human
ucaccuaggaagccucagau

SEQ ID NO: 1457379 - RNA, 19 nt, Human
ucaccuaggaagccucaga

SEQ ID NO: 1457380 - RNA, 17 nt, Human
ucaccuaggaagccuca

SEQ ID NO: 1457381 - RNA, 15 nt, Human
ucaccuaggaagccu

SEQ ID NO: 1457382 - RNA, 14 nt, Human
ucaccuaggaagcc

SEQ ID NO: 1457383 - RNA, 23 nt, Human
ucaccuagcugaauguuuuucua

SEQ ID NO: 1457384 - RNA, 22 nt, Human
ucaccuagcugaauguuuuucu

SEQ ID NO: 1457385 - RNA, 19 nt, Human
ucaccuuggcaccagacac

SEQ ID NO: 1457386 - RNA, 18 nt, Human
ucaccuuggcaccagaca

SEQ ID NO: 1457387 - RNA, 19 nt, Human
ucacacaggcauuuccugg

SEQ ID NO: 1457388 - RNA, 23 nt, Human
ucaccuuggcaccagacacccag

SEQ ID NO: 1457389 - RNA, 20 nt, Human
ucaccuagcugaauguuuuu

SEQ ID NO: 1457390 - RNA, 16 nt, Human
ucaccuagcugaaugu

SEQ ID NO: 1457391 - RNA, 19 nt, Human
ucaccuacucacacaggca

SEQ ID NO: 1457392 - RNA, 20 nt, Human
ucacagggcaguaccugagg

SEQ ID NO: 1457393 - RNA, 22 nt, Human
ucacagggcaguaccugagggu

SEQ ID NO: 1457394 - RNA, 18 nt, Human
ucacagggcaguaccuga

SEQ ID NO: 1457395 - RNA, 16 nt, Human
ucacagggcaguaccu

SEQ ID NO: 1457396 - RNA, 12 nt, Human
ucacagggcagu

SEQ ID NO: 1457397 - RNA, 23 nt, Human
ucacaggcagccagugcccugag

SEQ ID NO: 1457398 - RNA, 22 nt, Human
ucacaggcagccagugcccuga

SEQ ID NO: 1457399 - RNA, 19 nt, Human
ucacaggcagccagugccc

SEQ ID NO: 1457400 - RNA, 19 nt, Human
ucacaggccccaggaaagg

SEQ ID NO: 1457401 - RNA, 15 nt, Human
ucacaggcagccagu

SEQ ID NO: 1457402 - RNA, 14 nt, Human
ucacaggcagccag

SEQ ID NO: 1457403 - RNA, 16 nt, Human
ucacgcuuuuugaaaa

SEQ ID NO: 1457404 - RNA, 22 nt, Human
ucacgcuuuccugaauccaaac

SEQ ID NO: 1457405 - RNA, 17 nt, Human
ucacgcuuuccugaauc

SEQ ID NO: 1457406 - RNA, 16 nt, Human
ucacgcuuuccugaau

SEQ ID NO: 1457407 - RNA, 15 nt, Human
ucacgcuuuccugaa

SEQ ID NO: 1457408 - RNA, 14 nt, Human
ucacgcuuuccuga

SEQ ID NO: 1457409 - RNA, 17 nt, Human
ucacgggacuauuucca

SEQ ID NO: 1457410 - RNA, 19 nt, Human
ucacggcugcgcacugugu

SEQ ID NO: 1457411 - RNA, 18 nt, Human
ucacggcugcgcacugug

SEQ ID NO: 1457412 - RNA, 14 nt, Human
ucacggcugcgcac

SEQ ID NO: 1457413 - RNA, 20 nt, Human
ucacggccacacagcugccg

SEQ ID NO: 1457414 - RNA, 19 nt, Human
ucacggccacacagcugcc

SEQ ID NO: 1457415 - RNA, 21 nt, Human
ucacucuaauuaauuguaauc

SEQ ID NO: 1457416 - RNA, 16 nt, Human
ucacucgucuccccca

SEQ ID NO: 1457417 - RNA, 18 nt, Human
ucacucgauaauaaagua

SEQ ID NO: 1457418 - RNA, 14 nt, Human
ucacucgauaauaa

SEQ ID NO: 1457419 - RNA, 18 nt, Human
ucacuccuuuuaaagaaa

SEQ ID NO: 1457420 - RNA, 17 nt, Human
ucacuccuuuuaaagaa

SEQ ID NO: 1457421 - RNA, 16 nt, Human
ucacuccuuuuaaaga

SEQ ID NO: 1457422 - RNA, 15 nt, Human
ucacuccuuuuaaag

SEQ ID NO: 1457423 - RNA, 14 nt, Human
ucacuccuuuuaaa

SEQ ID NO: 1457424 - RNA, 13 nt, Human
ucacuccuuuuaa

SEQ ID NO: 1457425 - RNA, 20 nt, Human
ucacucugaguguuuuauga

SEQ ID NO: 1457426 - RNA, 15 nt, Human
ucacucugaguguuu

SEQ ID NO: 1457427 - RNA, 21 nt, Human
ucacucuagucaaugacauga

SEQ ID NO: 1457428 - RNA, 20 nt, Human
ucacucuagucaaugacaug

SEQ ID NO: 1457429 - RNA, 18 nt, Human
ucacucuagucaaugaca

SEQ ID NO: 1457430 - RNA, 16 nt, Human
ucccccucccuccccu

SEQ ID NO: 1457431 - RNA, 15 nt, Human
ucccccucuguccag

SEQ ID NO: 1457432 - RNA, 12 nt, Human
ucccccucuguc

SEQ ID NO: 1457433 - RNA, 16 nt, Human
ucccccauguucuguc

SEQ ID NO: 1457434 - RNA, 17 nt, Human
uccccagcucccaggac

SEQ ID NO: 1457435 - RNA, 16 nt, Human
uccccagcucccagga

SEQ ID NO: 1457436 - RNA, 15 nt, Human
uccccagcucccagg

SEQ ID NO: 1457437 - RNA, 13 nt, Human
uccccagcuccca

SEQ ID NO: 1457438 - RNA, 23 nt, Human
uccccagcgauucccucucccag

SEQ ID NO: 1457439 - RNA, 14 nt, Human
uccccagccuggga

SEQ ID NO: 1457440 - RNA, 11 nt, Human
uccccagagaa

SEQ ID NO: 1457441 - RNA, 10 nt, Human
uccccagaga

SEQ ID NO: 1457442 - RNA, 17 nt, Human
uccccagacuuguuggc

SEQ ID NO: 1457443 - RNA, 15 nt, Human
uccccagacuuguug

SEQ ID NO: 1457444 - RNA, 23 nt, Human
ucccccagucauucugggaacau

SEQ ID NO: 1457445 - RNA, 12 nt, Human
ucccccagccuc

SEQ ID NO: 1457446 - RNA, 19 nt, Human
uccccugcccccugcagga

SEQ ID NO: 1457447 - RNA, 18 nt, Human
uccccugcccccugcagg

SEQ ID NO: 1457448 - RNA, 17 nt, Human
uccccugcccccugcag

SEQ ID NO: 1457449 - RNA, 16 nt, Human
uccccugcccccugca

SEQ ID NO: 1457450 - RNA, 12 nt, Human
uccccugccccc

SEQ ID NO: 1457451 - RNA, 21 nt, Human
uccccugcccaugcugggagc

SEQ ID NO: 1457452 - RNA, 15 nt, Human
uccccugcccaugcu

SEQ ID NO: 1457453 - RNA, 14 nt, Human
uccccugcccaugc

SEQ ID NO: 1457454 - RNA, 20 nt, Human
uccccugcaggcugagugca

SEQ ID NO: 1457455 - RNA, 20 nt, Human
uccccugccagggcagggcc

SEQ ID NO: 1457456 - RNA, 15 nt, Human
uccccugccagggca

SEQ ID NO: 1457457 - RNA, 14 nt, Human
uccccugccagggc

SEQ ID NO: 1457458 - RNA, 12 nt, Human
uccccugccagg

SEQ ID NO: 1457459 - RNA, 19 nt, Human
uccccugccaccaggccac

SEQ ID NO: 1457460 - RNA, 17 nt, Human
uccccugccaccaggcc

SEQ ID NO: 1457461 - RNA, 16 nt, Human
uccccugccaccaggc

SEQ ID NO: 1457462 - RNA, 14 nt, Human
uccccugccaccag

SEQ ID NO: 1457463 - RNA, 13 nt, Human
uccccugccacca

SEQ ID NO: 1457464 - RNA, 18 nt, Human
uccccugcaggcugagug

SEQ ID NO: 1457465 - RNA, 14 nt, Human
uccccugcaggcug

SEQ ID NO: 1457466 - RNA, 22 nt, Human
uccccugcacuguaaaaugugg

SEQ ID NO: 1457467 - RNA, 19 nt, Human
uccccugcacuguaaaaug

SEQ ID NO: 1457468 - RNA, 18 nt, Human
uccccugcacuguaaaau

SEQ ID NO: 1457469 - RNA, 17 nt, Human
uccccugcacuguaaaa

SEQ ID NO: 1457470 - RNA, 16 nt, Human
uccccugcacuguaaa

SEQ ID NO: 1457471 - RNA, 15 nt, Human
uccccugcacuguaa

SEQ ID NO: 1457472 - RNA, 14 nt, Human
uccccugcacugua

SEQ ID NO: 1457473 - RNA, 13 nt, Human
uccccugcacugu

SEQ ID NO: 1457474 - RNA, 23 nt, Human
uccccgauaccaugcuguaagga

SEQ ID NO: 1457475 - RNA, 21 nt, Human
uccccgcaccccccaagcugu

SEQ ID NO: 1457476 - RNA, 14 nt, Human
uccccgcacccccc

SEQ ID NO: 1457477 - RNA, 17 nt, Human
uccccgacuggggcagg

SEQ ID NO: 1457478 - RNA, 18 nt, Human
uccccugccugcccuggu

SEQ ID NO: 1457479 - RNA, 23 nt, Human
uccccugcccccugcaggaagga

SEQ ID NO: 1457480 - RNA, 21 nt, Human
uccccugcccccugcaggaag

SEQ ID NO: 1457481 - RNA, 19 nt, Human
uccccuggagggggaaugg

SEQ ID NO: 1457482 - RNA, 20 nt, Human
uccccuggaacugucucuca

SEQ ID NO: 1457483 - RNA, 18 nt, Human
uccccuggaacugucucu

SEQ ID NO: 1457484 - RNA, 18 nt, Human
uccccuuccacugagggc

SEQ ID NO: 1457485 - RNA, 17 nt, Human
uccccuuccacugaggg

SEQ ID NO: 1457486 - RNA, 13 nt, Human
uccccuuccacug

SEQ ID NO: 1457487 - RNA, 11 nt, Human
ucccuaauaaa

SEQ ID NO: 1457488 - RNA, 12 nt, Human
ucccuaauaaag

SEQ ID NO: 1457489 - RNA, 14 nt, Human
ucccucccucuccg

SEQ ID NO: 1457490 - RNA, 21 nt, Human
ucccuacugaagcccuuguga

SEQ ID NO: 1457491 - RNA, 18 nt, Human
ucccuacugaagcccuug

SEQ ID NO: 1457492 - RNA, 15 nt, Human
ucccuacugaagccc

SEQ ID NO: 1457493 - RNA, 19 nt, Human
ucccuaccuugaaagaaga

SEQ ID NO: 1457494 - RNA, 15 nt, Human
ucccuacuguaauuu

SEQ ID NO: 1457495 - RNA, 13 nt, Human
ucccuaauaaagc

SEQ ID NO: 1457496 - RNA, 14 nt, Human
ucccuaauaaagcu

SEQ ID NO: 1457497 - RNA, 19 nt, Human
ucccaaauuugauugauuu

SEQ ID NO: 1457498 - RNA, 17 nt, Human
ucccaaauuugauugau

SEQ ID NO: 1457499 - RNA, 14 nt, Human
ucccaaaugagcca

SEQ ID NO: 1457500 - RNA, 16 nt, Human
ucccaagcucagaggc

SEQ ID NO: 1457501 - RNA, 22 nt, Human
ucccaaauuugauugauuugaa

SEQ ID NO: 1457502 - RNA, 20 nt, Human
ucccaaauuugauugauuug

SEQ ID NO: 1457503 - RNA, 17 nt, Human
uccauccauggccagca

SEQ ID NO: 1457504 - RNA, 16 nt, Human
uccauccauggccagc

SEQ ID NO: 1457505 - RNA, 19 nt, Human
uccauccauggccagcagc

SEQ ID NO: 1457506 - RNA, 15 nt, Human
uccauccacauggga

SEQ ID NO: 1457507 - RNA, 21 nt, Human
uccauccaaggccagguucuc

SEQ ID NO: 1457508 - RNA, 13 nt, Human
uccauccaaggcc

SEQ ID NO: 1457509 - RNA, 15 nt, Human
uccauccauggccag

SEQ ID NO: 1457510 - RNA, 18 nt, Human
uccauccaccuuucccaa

SEQ ID NO: 1457511 - RNA, 23 nt, Human
uccagcucccugugcccccaggg

SEQ ID NO: 1457512 - RNA, 20 nt, Human
uccagcucccugugccccca

SEQ ID NO: 1457513 - RNA, 19 nt, Human
uccagcucccugugccccc

SEQ ID NO: 1457514 - RNA, 17 nt, Human
uccagcucccugugccc

SEQ ID NO: 1457515 - RNA, 19 nt, Human
uccagcuccaaccugcaaa

SEQ ID NO: 1457516 - RNA, 18 nt, Human
uccagcuccaaccugcaa

SEQ ID NO: 1457517 - RNA, 16 nt, Human
uccagcuccaaccugc

SEQ ID NO: 1457518 - RNA, 12 nt, Human
uccagcuccaac

SEQ ID NO: 1457519 - RNA, 16 nt, Human
uccagcauucccaggu

SEQ ID NO: 1457520 - RNA, 17 nt, Human
uccagcauucccaggua

SEQ ID NO: 1457521 - RNA, 24 nt, Human
uccauguaacugccuagaaacaac

SEQ ID NO: 1457522 - RNA, 15 nt, Human
uccauguaacugccu

SEQ ID NO: 1457523 - RNA, 14 nt, Human
uccauguaacugcc

SEQ ID NO: 1457524 - RNA, 12 nt, Human
uccauguaacug

SEQ ID NO: 1457525 - RNA, 17 nt, Human
uccauggccagcagcac

SEQ ID NO: 1457526 - RNA, 22 nt, Human
uccauguaacugccuagaaaca

SEQ ID NO: 1457527 - RNA, 14 nt, Human
uccauggccagcag

SEQ ID NO: 1457528 - RNA, 18 nt, Human
uccauggcaggaaggcuu

SEQ ID NO: 1457529 - RNA, 20 nt, Human
uccauggcccugcaaaagga

SEQ ID NO: 1457530 - RNA, 16 nt, Human
uccauggccagcagca

SEQ ID NO: 1457531 - RNA, 15 nt, Human
uccauggccagcagc

SEQ ID NO: 1457532 - RNA, 14 nt, Human
uccauggcccugcc

SEQ ID NO: 1457533 - RNA, 15 nt, Human
ucccauuccugaaga

SEQ ID NO: 1457534 - RNA, 17 nt, Human
ucccauuccugaagaac

SEQ ID NO: 1457535 - RNA, 14 nt, Human
ucccauuccugaag

SEQ ID NO: 1457536 - RNA, 13 nt, Human
ucccauuccugaa

SEQ ID NO: 1457537 - RNA, 19 nt, Human
uccccacuuguccgcuggg

SEQ ID NO: 1457538 - RNA, 19 nt, Human
uccccacuugcagcccugu

SEQ ID NO: 1457539 - RNA, 21 nt, Human
uccccacuuguccgcugggug

SEQ ID NO: 1457540 - RNA, 21 nt, Human
uccccagacgccuggcugcug

SEQ ID NO: 1457541 - RNA, 18 nt, Human
uccccagacgccuggcug

SEQ ID NO: 1457542 - RNA, 23 nt, Human
ucccaugggcagaggaccaggcu

SEQ ID NO: 1457543 - RNA, 14 nt, Human
ucccauggggaggg

SEQ ID NO: 1457544 - RNA, 13 nt, Human
ucccaucugcuuc

SEQ ID NO: 1457545 - RNA, 19 nt, Human
ucccaggacccuggaccca

SEQ ID NO: 1457546 - RNA, 22 nt, Human
ucccaggagacaguucaagaaa

SEQ ID NO: 1457547 - RNA, 16 nt, Human
ucccaggagacaguuc

SEQ ID NO: 1457548 - RNA, 15 nt, Human
ucccaggagacaguu

SEQ ID NO: 1457549 - RNA, 19 nt, Human
ucccaggacccugaagggg

SEQ ID NO: 1457550 - RNA, 16 nt, Human
ucccaggacccugaag

SEQ ID NO: 1457551 - RNA, 14 nt, Human
ucccaggacccuga

SEQ ID NO: 1457552 - RNA, 17 nt, Human
ucccaccuagcagcacc

SEQ ID NO: 1457553 - RNA, 19 nt, Human
ucccaaggggccugagcag

SEQ ID NO: 1457554 - RNA, 13 nt, Human
ucccaggacccug

SEQ ID NO: 1457555 - RNA, 18 nt, Human
ucccaaggggccugagca

SEQ ID NO: 1457556 - RNA, 17 nt, Human
ucccaaggggccugagc

SEQ ID NO: 1457557 - RNA, 16 nt, Human
ucccaaggggccugag

SEQ ID NO: 1457558 - RNA, 15 nt, Human
ucccaagggcugccg

SEQ ID NO: 1457559 - RNA, 20 nt, Human
ucccaaguaacugggauuac

SEQ ID NO: 1457560 - RNA, 21 nt, Human
ucccaaguaacugggauuaca

SEQ ID NO: 1457561 - RNA, 21 nt, Human
uccacaaauuauuaaugaaaa

SEQ ID NO: 1457562 - RNA, 20 nt, Human
uccacaaaauaaccaauccu

SEQ ID NO: 1457563 - RNA, 12 nt, Human
uccacaaaauaa

SEQ ID NO: 1457564 - RNA, 22 nt, Human
uccaauuuucuggaauacauga

SEQ ID NO: 1457565 - RNA, 20 nt, Human
uccacaaauuauuaaugaaa

SEQ ID NO: 1457566 - RNA, 14 nt, Human
uccacaaauuauua

SEQ ID NO: 1457567 - RNA, 20 nt, Human
uccaagcauuuagauguaua

SEQ ID NO: 1457568 - RNA, 20 nt, Human
uccaagauucuagaugauua

SEQ ID NO: 1457569 - RNA, 18 nt, Human
uccaagauucuagaugau

SEQ ID NO: 1457570 - RNA, 15 nt, Human
uccaagcaaauguga

SEQ ID NO: 1457571 - RNA, 23 nt, Human
uccaccgucuuucuuuuauacug

SEQ ID NO: 1457572 - RNA, 14 nt, Human
uccaccucaacucc

SEQ ID NO: 1457573 - RNA, 15 nt, Human
uccaccgcagaagga

SEQ ID NO: 1457574 - RNA, 16 nt, Human
uccaccgcagaaggaa

SEQ ID NO: 1457575 - RNA, 17 nt, Human
uccaccgcagaaggaag

SEQ ID NO: 1457576 - RNA, 18 nt, Human
uccaccgcagaaggaagg

SEQ ID NO: 1457577 - RNA, 19 nt, Human
uccagaaauacaauuuuag

SEQ ID NO: 1457578 - RNA, 19 nt, Human
uccacuucugacagccuca

SEQ ID NO: 1457579 - RNA, 17 nt, Human
uccacuucugacagccu

SEQ ID NO: 1457580 - RNA, 15 nt, Human
uccagcauucccagg

SEQ ID NO: 1457581 - RNA, 22 nt, Human
uccagcagauuuccagccuucu

SEQ ID NO: 1457582 - RNA, 14 nt, Human
uccagauccuggaa

SEQ ID NO: 1457583 - RNA, 17 nt, Human
uccagauccuggaaauc

SEQ ID NO: 1457584 - RNA, 16 nt, Human
uccagauccuggaaau

SEQ ID NO: 1457585 - RNA, 22 nt, Human
uccaagacaugucuguucuaca

SEQ ID NO: 1457586 - RNA, 20 nt, Human
uccaagacaugucuguucua

SEQ ID NO: 1457587 - RNA, 17 nt, Human
uccaagacaugucuguu

SEQ ID NO: 1457588 - RNA, 22 nt, Human
uccaagauauuuuaaaaucugu

SEQ ID NO: 1457589 - RNA, 18 nt, Human
uccaagauauuuuaaaau

SEQ ID NO: 1457590 - RNA, 18 nt, Human
uccaagagucuaaagaug

SEQ ID NO: 1457591 - RNA, 17 nt, Human
uccaagagucuaaagau

SEQ ID NO: 1457592 - RNA, 16 nt, Human
uccaagagucuaaaga

SEQ ID NO: 1457593 - RNA, 17 nt, Human
uccaagcauuuagaugu

SEQ ID NO: 1457594 - RNA, 17 nt, Human
uccaagauucuagauga

SEQ ID NO: 1457595 - RNA, 16 nt, Human
uccaagauucuagaug

SEQ ID NO: 1457596 - RNA, 15 nt, Human
uccaagauucuagau

SEQ ID NO: 1457597 - RNA, 14 nt, Human
uccaagauucuaga

SEQ ID NO: 1457598 - RNA, 13 nt, Human
uccaagauucuag

SEQ ID NO: 1457599 - RNA, 12 nt, Human
uccaagauucua

SEQ ID NO: 1457600 - RNA, 15 nt, Human
uccaagauuccggau

SEQ ID NO: 1457601 - RNA, 13 nt, Human
uccaagauuccgg

SEQ ID NO: 1457602 - RNA, 13 nt, Human
uccaagcaaaugu

SEQ ID NO: 1457603 - RNA, 15 nt, Human
uccaaagcagacagc

SEQ ID NO: 1457604 - RNA, 14 nt, Human
uccaaagcagacag

SEQ ID NO: 1457605 - RNA, 16 nt, Human
uccaaagcuucccacg

SEQ ID NO: 1457606 - RNA, 22 nt, Human
uccaaaggaggauggcauauaa

SEQ ID NO: 1457607 - RNA, 14 nt, Human
uccaagaauccaca

SEQ ID NO: 1457608 - RNA, 23 nt, Human
uccaagaauccacauuucuaaaa

SEQ ID NO: 1457609 - RNA, 22 nt, Human
uccaagaauccacauuucuaaa

SEQ ID NO: 1457610 - RNA, 21 nt, Human
uccaagaauccacauuucuaa

SEQ ID NO: 1457611 - RNA, 20 nt, Human
uccaagaauccacauuucua

SEQ ID NO: 1457612 - RNA, 19 nt, Human
uccaagaauccacauuucu

SEQ ID NO: 1457613 - RNA, 16 nt, Human
uccaagaauccacauu

SEQ ID NO: 1457614 - RNA, 14 nt, Human
uccaagaauuucua

SEQ ID NO: 1457615 - RNA, 22 nt, Human
ucauuucuuuuugggagagacu

SEQ ID NO: 1457616 - RNA, 16 nt, Human
uccaaaagcuuuuuau

SEQ ID NO: 1457617 - RNA, 17 nt, Human
uccaaaauaaaacuuuu

SEQ ID NO: 1457618 - RNA, 13 nt, Human
uccaaaagcuuuu

SEQ ID NO: 1457619 - RNA, 22 nt, Human
uccaaaagauugcugaaauuuu

SEQ ID NO: 1457620 - RNA, 20 nt, Human
uccaaaagauugcugaaauu

SEQ ID NO: 1457621 - RNA, 19 nt, Human
uccaaaagauugcugaaau

SEQ ID NO: 1457622 - RNA, 16 nt, Human
uccaaaauaaaacuuu

SEQ ID NO: 1457623 - RNA, 23 nt, Human
uccaaagaguagaauugcauuga

SEQ ID NO: 1457624 - RNA, 22 nt, Human
uccaaagaguagaauugcauug

SEQ ID NO: 1457625 - RNA, 19 nt, Human
uccaaacugaagcagccuc

SEQ ID NO: 1457626 - RNA, 19 nt, Human
uccaaacucuucccucucu

SEQ ID NO: 1457627 - RNA, 20 nt, Human
uccaaacugccuaagcccuc

SEQ ID NO: 1457628 - RNA, 23 nt, Human
uccaaacugacucuuaagaagac

SEQ ID NO: 1457629 - RNA, 23 nt, Human
ucauuucuuuuugggagagacuu

SEQ ID NO: 1457630 - RNA, 16 nt, Human
uccaaaagauugcuga

SEQ ID NO: 1457631 - RNA, 14 nt, Human
ucauuucucaucca

SEQ ID NO: 1457632 - RNA, 18 nt, Human
ucauucauuagucauguu

SEQ ID NO: 1457633 - RNA, 22 nt, Human
ucauucagauaugauucaaaug

SEQ ID NO: 1457634 - RNA, 12 nt, Human
ucaucugugcac

SEQ ID NO: 1457635 - RNA, 18 nt, Human
ucaucugucccuccggga

SEQ ID NO: 1457636 - RNA, 17 nt, Human
ucaucugucccuccggg

SEQ ID NO: 1457637 - RNA, 12 nt, Human
ucaucugucccu

SEQ ID NO: 1457638 - RNA, 20 nt, Human
ucaucugguugaacucuggu

SEQ ID NO: 1457639 - RNA, 23 nt, Human
ucaucugguugaacucugguggc

SEQ ID NO: 1457640 - RNA, 21 nt, Human
ucaucuggggagcaggcagcc

SEQ ID NO: 1457641 - RNA, 23 nt, Human
ucaucuggggagcaggcagccag

SEQ ID NO: 1457642 - RNA, 20 nt, Human
ucaucuggggagcaggcagc

SEQ ID NO: 1457643 - RNA, 16 nt, Human
ucaucuggggagcagg

SEQ ID NO: 1457644 - RNA, 14 nt, Human
ucaucucuucuuuu

SEQ ID NO: 1457645 - RNA, 16 nt, Human
ucaucucucugcccaa

SEQ ID NO: 1457646 - RNA, 14 nt, Human
ucaucucucugccc

SEQ ID NO: 1457647 - RNA, 23 nt, Human
ucaucuccugccuuccuccuggg

SEQ ID NO: 1457648 - RNA, 22 nt, Human
ucaucuccugccuuccuccugg

SEQ ID NO: 1457649 - RNA, 21 nt, Human
ucaucuccugccuuccuccug

SEQ ID NO: 1457650 - RNA, 21 nt, Human
ucauaguaacuucuuauggaa

SEQ ID NO: 1457651 - RNA, 18 nt, Human
ucauaguaacuucuuaug

SEQ ID NO: 1457652 - RNA, 16 nt, Human
ucauaguaacuucuua

SEQ ID NO: 1457653 - RNA, 15 nt, Human
ucauaguaacuucuu

SEQ ID NO: 1457654 - RNA, 14 nt, Human
ucauaguaacuucu

SEQ ID NO: 1457655 - RNA, 16 nt, Human
ucauaggucugaaauu

SEQ ID NO: 1457656 - RNA, 22 nt, Human
ucauaggucugaaauuuuucuu

SEQ ID NO: 1457657 - RNA, 15 nt, Human
ucauaggucugaaau

SEQ ID NO: 1457658 - RNA, 14 nt, Human
ucauaggucugaaa

SEQ ID NO: 1457659 - RNA, 15 nt, Human
ucauaccaaugaaaa

SEQ ID NO: 1457660 - RNA, 21 nt, Human
ucauacauuuucuaagaaaca

SEQ ID NO: 1457661 - RNA, 15 nt, Human
ucaugcuaucucugu

SEQ ID NO: 1457662 - RNA, 22 nt, Human
ucaugccucugaggccagccug

SEQ ID NO: 1457663 - RNA, 21 nt, Human
ucaugccucugaggccagccu

SEQ ID NO: 1457664 - RNA, 16 nt, Human
ucaugccucugaggcc

SEQ ID NO: 1457665 - RNA, 15 nt, Human
ucaugccucugaggc

SEQ ID NO: 1457666 - RNA, 14 nt, Human
ucaugccucugagg

SEQ ID NO: 1457667 - RNA, 13 nt, Human
ucaugccucugag

SEQ ID NO: 1457668 - RNA, 15 nt, Human
ucaugcccugugcaa

SEQ ID NO: 1457669 - RNA, 16 nt, Human
ucaugccccuggcugg

SEQ ID NO: 1457670 - RNA, 13 nt, Human
ucauguaaauaau

SEQ ID NO: 1457671 - RNA, 16 nt, Human
ucauguaaacugugca

SEQ ID NO: 1457672 - RNA, 17 nt, Human
ucauguaaacugugcac

SEQ ID NO: 1457673 - RNA, 14 nt, Human
ucauguaaacugug

SEQ ID NO: 1457674 - RNA, 13 nt, Human
ucauguaaacugu

SEQ ID NO: 1457675 - RNA, 20 nt, Human
ucauguaacuucccugaaaa

SEQ ID NO: 1457676 - RNA, 18 nt, Human
ucauguaaauaauacauu

SEQ ID NO: 1457677 - RNA, 19 nt, Human
ucauguaaauaauacauua

SEQ ID NO: 1457678 - RNA, 16 nt, Human
ucauuaggugugacug

SEQ ID NO: 1457679 - RNA, 22 nt, Human
ucauuauuuauguauugugcaa

SEQ ID NO: 1457680 - RNA, 22 nt, Human
ucauuaggugugacugaauuuc

SEQ ID NO: 1457681 - RNA, 18 nt, Human
ucauuaggugugacugaa

SEQ ID NO: 1457682 - RNA, 21 nt, Human
ucauuaggugugacugaauuu

SEQ ID NO: 1457683 - RNA, 15 nt, Human
ucauguaauccucaa

SEQ ID NO: 1457684 - RNA, 23 nt, Human
ucauacagagaagucacagggca

SEQ ID NO: 1457685 - RNA, 14 nt, Human
ucauacagagaagu

SEQ ID NO: 1457686 - RNA, 13 nt, Human
ucauacagagaag

SEQ ID NO: 1457687 - RNA, 12 nt, Human
ucauacagagaa

SEQ ID NO: 1457688 - RNA, 11 nt, Human
ucauacagaga

SEQ ID NO: 1457689 - RNA, 13 nt, Human
ucauacacagaaa

SEQ ID NO: 1457690 - RNA, 14 nt, Human
ucauacauuuucua

SEQ ID NO: 1457691 - RNA, 17 nt, Human
ucauacagagaagucac

SEQ ID NO: 1457692 - RNA, 16 nt, Human
ucauacagagaaguca

SEQ ID NO: 1457693 - RNA, 15 nt, Human
ucauacagagaaguc

SEQ ID NO: 1457694 - RNA, 19 nt, Human
ucauaauugcauugacuuu

SEQ ID NO: 1457695 - RNA, 23 nt, Human
ucauaauugcauugacuuucccc

SEQ ID NO: 1457696 - RNA, 19 nt, Human
ucauaauggggguaaaguu

SEQ ID NO: 1457697 - RNA, 13 nt, Human
ucaguugucucug

SEQ ID NO: 1457698 - RNA, 15 nt, Human
ucauaauuauuauuu

SEQ ID NO: 1457699 - RNA, 15 nt, Human
ucaguugugacuaac

SEQ ID NO: 1457700 - RNA, 18 nt, Human
ucaguugauuuucuggau

SEQ ID NO: 1457701 - RNA, 17 nt, Human
ucaguugauuuucugga

SEQ ID NO: 1457702 - RNA, 12 nt, Human
ucaguugcagcc

SEQ ID NO: 1457703 - RNA, 17 nt, Human
ucagcagccucccugaa

SEQ ID NO: 1457704 - RNA, 16 nt, Human
ucagcacuuggcccuu

SEQ ID NO: 1457705 - RNA, 14 nt, Human
ucagcacuuggccc

SEQ ID NO: 1457706 - RNA, 21 nt, Human
ucagcacuuuagaauaugccu

SEQ ID NO: 1457707 - RNA, 11 nt, Human
ucugacccagu

SEQ ID NO: 1457708 - RNA, 17 nt, Human
ucugacauucugauucg

SEQ ID NO: 1457709 - RNA, 15 nt, Human
ucugacccagugccc

SEQ ID NO: 1457710 - RNA, 14 nt, Human
ucugacccagugcc

SEQ ID NO: 1457711 - RNA, 13 nt, Human
ucugacccagugc

SEQ ID NO: 1457712 - RNA, 23 nt, Human
ucugacauuaugugguuuuagau

SEQ ID NO: 1457713 - RNA, 22 nt, Human
ucugacauuaugugguuuuaga

SEQ ID NO: 1457714 - RNA, 18 nt, Human
ucugaacuugcauuguga

SEQ ID NO: 1457715 - RNA, 19 nt, Human
ucugaacuugcauugugau

SEQ ID NO: 1457716 - RNA, 22 nt, Human
ucugagcacuguuuauacacug

SEQ ID NO: 1457717 - RNA, 21 nt, Human
ucugagcagcgagccugcuag

SEQ ID NO: 1457718 - RNA, 19 nt, Human
ucugagcagcgagccugcu

SEQ ID NO: 1457719 - RNA, 18 nt, Human
ucugagcagcgagccugc

SEQ ID NO: 1457720 - RNA, 17 nt, Human
ucugagcagcgagccug

SEQ ID NO: 1457721 - RNA, 22 nt, Human
ucugagauggcucccaggggcu

SEQ ID NO: 1457722 - RNA, 19 nt, Human
ucugagauggcucccaggg

SEQ ID NO: 1457723 - RNA, 18 nt, Human
ucugagauggcucccagg

SEQ ID NO: 1457724 - RNA, 22 nt, Human
ucugagaucuguugauugauga

SEQ ID NO: 1457725 - RNA, 23 nt, Human
ucugacccagugcccccacugac

SEQ ID NO: 1457726 - RNA, 22 nt, Human
ucugacccagugcccccacuga

SEQ ID NO: 1457727 - RNA, 19 nt, Human
ucugacccagugcccccac

SEQ ID NO: 1457728 - RNA, 20 nt, Human
ucugauucgaaugacacugu

SEQ ID NO: 1457729 - RNA, 22 nt, Human
ucugauucgaaugacacuguuc

SEQ ID NO: 1457730 - RNA, 19 nt, Human
ucugauucgaaugacacug

SEQ ID NO: 1457731 - RNA, 18 nt, Human
ucugaggacaagagaaaa

SEQ ID NO: 1457732 - RNA, 20 nt, Human
ucugcaauuccccucugcug

SEQ ID NO: 1457733 - RNA, 18 nt, Human
ucugcaauuccccucugc

SEQ ID NO: 1457734 - RNA, 16 nt, Human
ucugcaauuccccucu

SEQ ID NO: 1457735 - RNA, 23 nt, Human
ucugcaauucaaaaguuccaaga

SEQ ID NO: 1457736 - RNA, 16 nt, Human
ucugauugugauguga

SEQ ID NO: 1457737 - RNA, 22 nt, Human
ucugcaauuccccucugcugcu

SEQ ID NO: 1457738 - RNA, 21 nt, Human
ucugcaauuccccucugcugc

SEQ ID NO: 1457739 - RNA, 12 nt, Human
ucugagcuccug

SEQ ID NO: 1457740 - RNA, 20 nt, Human
ucugagcuccuguccccugc

SEQ ID NO: 1457741 - RNA, 19 nt, Human
ucugagcagugaaugauuc

SEQ ID NO: 1457742 - RNA, 10 nt, Human
ucugagcugu

SEQ ID NO: 1457743 - RNA, 19 nt, Human
ucugagcugucaacgagac

SEQ ID NO: 1457744 - RNA, 17 nt, Human
ucugaggacaagagaaa

SEQ ID NO: 1457745 - RNA, 14 nt, Human
ucugaggacaagag

SEQ ID NO: 1457746 - RNA, 18 nt, Human
ucucuuuuugcuuucgaa

SEQ ID NO: 1457747 - RNA, 14 nt, Human
ucucuuugccucaa

SEQ ID NO: 1457748 - RNA, 21 nt, Human
ucugaacucaaacugaggaau

SEQ ID NO: 1457749 - RNA, 17 nt, Human
ucugaacucaaacugag

SEQ ID NO: 1457750 - RNA, 16 nt, Human
ucugaacucaaacuga

SEQ ID NO: 1457751 - RNA, 14 nt, Human
ucugaacucaaacu

SEQ ID NO: 1457752 - RNA, 12 nt, Human
ucugaacucaaa

SEQ ID NO: 1457753 - RNA, 13 nt, Human
ucugaaaugaaga

SEQ ID NO: 1457754 - RNA, 14 nt, Human
ucugaaauuuccug

SEQ ID NO: 1457755 - RNA, 22 nt, Human
ucucuuauugccucacuucagg

SEQ ID NO: 1457756 - RNA, 13 nt, Human
ucucuucagucuc

SEQ ID NO: 1457757 - RNA, 17 nt, Human
ucucuucagucucuaua

SEQ ID NO: 1457758 - RNA, 15 nt, Human
ucucugcagacuucc

SEQ ID NO: 1457759 - RNA, 20 nt, Human
ucucugcagacuucccagcu

SEQ ID NO: 1457760 - RNA, 16 nt, Human
ucucuuauugccucac

SEQ ID NO: 1457761 - RNA, 15 nt, Human
ucucuuauugccuca

SEQ ID NO: 1457762 - RNA, 20 nt, Human
ucucuuauggauguccccag

SEQ ID NO: 1457763 - RNA, 20 nt, Human
ucucugcaggcagccugccu

SEQ ID NO: 1457764 - RNA, 16 nt, Human
ucucuuauggaugucc

SEQ ID NO: 1457765 - RNA, 11 nt, Human
ucucugcaggu

SEQ ID NO: 1457766 - RNA, 22 nt, Human
ucucuuccucuucccccaagau

SEQ ID NO: 1457767 - RNA, 20 nt, Human
ucucuuccuuuuaucaguag

SEQ ID NO: 1457768 - RNA, 16 nt, Human
ucucuucucuccagcu

SEQ ID NO: 1457769 - RNA, 15 nt, Human
ucucuucucuccagc

SEQ ID NO: 1457770 - RNA, 14 nt, Human
ucucuucucuccag

SEQ ID NO: 1457771 - RNA, 12 nt, Human
ucucuucucucc

SEQ ID NO: 1457772 - RNA, 13 nt, Human
ucucuuugccuca

SEQ ID NO: 1457773 - RNA, 23 nt, Human
ucucuucucuccagcugacuaaa

SEQ ID NO: 1457774 - RNA, 19 nt, Human
ucucuucugaauaaagcaa

SEQ ID NO: 1457775 - RNA, 20 nt, Human
ucucuucugaauaaagcaau

SEQ ID NO: 1457776 - RNA, 19 nt, Human
ucucuaccuucuccccagc

SEQ ID NO: 1457777 - RNA, 22 nt, Human
ucucuacugaaugucauugaaa

SEQ ID NO: 1457778 - RNA, 23 nt, Human
ucucuaccuucuccccagcuccc

SEQ ID NO: 1457779 - RNA, 18 nt, Human
ucucuaccuucuccccag

SEQ ID NO: 1457780 - RNA, 16 nt, Human
ucucuaccuucucccc

SEQ ID NO: 1457781 - RNA, 14 nt, Human
ucucuaccuucucc

SEQ ID NO: 1457782 - RNA, 20 nt, Human
ucucuaccacugcugauauu

SEQ ID NO: 1457783 - RNA, 22 nt, Human
ucucuacagucucgucucuuuu

SEQ ID NO: 1457784 - RNA, 21 nt, Human
ucucuacagucucgucucuuu

SEQ ID NO: 1457785 - RNA, 18 nt, Human
ucucuacagucucgucuc

SEQ ID NO: 1457786 - RNA, 15 nt, Human
ucucuaauucuauua

SEQ ID NO: 1457787 - RNA, 13 nt, Human
ucuccuguaccuc

SEQ ID NO: 1457788 - RNA, 19 nt, Human
ucucuaggaaauauuuauu

SEQ ID NO: 1457789 - RNA, 13 nt, Human
ucucuaggaaaua

SEQ ID NO: 1457790 - RNA, 18 nt, Human
ucucuaguuugauuaaau

SEQ ID NO: 1457791 - RNA, 19 nt, Human
ucucuaguuugauuaaauu

SEQ ID NO: 1457792 - RNA, 14 nt, Human
ucucuauaccaaua

SEQ ID NO: 1457793 - RNA, 16 nt, Human
ucucuauaccaauaaa

SEQ ID NO: 1457794 - RNA, 17 nt, Human
ucucuauaccaauaaag

SEQ ID NO: 1457795 - RNA, 19 nt, Human
ucucuauaccaauaaagug

SEQ ID NO: 1457796 - RNA, 12 nt, Human
ucucuaucauuu

SEQ ID NO: 1457797 - RNA, 13 nt, Human
ucucuaucauuua

SEQ ID NO: 1457798 - RNA, 14 nt, Human
ucucuaucauuuaa

SEQ ID NO: 1457799 - RNA, 15 nt, Human
ucucuaucauuuaau

SEQ ID NO: 1457800 - RNA, 16 nt, Human
ucucuaucauuuaaua

SEQ ID NO: 1457801 - RNA, 17 nt, Human
ucucuaucauuuaauaa

SEQ ID NO: 1457802 - RNA, 16 nt, Human
ucucugacuucugccu

SEQ ID NO: 1457803 - RNA, 14 nt, Human
ucucugacuucugc

SEQ ID NO: 1457804 - RNA, 20 nt, Human
ucucucuuugcauggauuuc

SEQ ID NO: 1457805 - RNA, 12 nt, Human
ucucugaacaca

SEQ ID NO: 1457806 - RNA, 17 nt, Human
ucucucuuuauacagcu

SEQ ID NO: 1457807 - RNA, 12 nt, Human
ucucucuucucu

SEQ ID NO: 1457808 - RNA, 16 nt, Human
ucucucuuuauacagc

SEQ ID NO: 1457809 - RNA, 16 nt, Human
ucucugagcugugcag

SEQ ID NO: 1457810 - RNA, 15 nt, Human
ucucugagcugugca

SEQ ID NO: 1457811 - RNA, 14 nt, Human
ucucugagcaguga

SEQ ID NO: 1457812 - RNA, 19 nt, Human
ucucugacuucugccugga

SEQ ID NO: 1457813 - RNA, 18 nt, Human
ucucugacuucugccugg

SEQ ID NO: 1457814 - RNA, 17 nt, Human
ucucugacuucugccug

SEQ ID NO: 1457815 - RNA, 20 nt, Human
ucucugauuuucaaagcuuu

SEQ ID NO: 1457816 - RNA, 19 nt, Human
ucucugauuuucaaagcuu

SEQ ID NO: 1457817 - RNA, 23 nt, Human
ucucucggcuccccauguguccu

SEQ ID NO: 1457818 - RNA, 20 nt, Human
ucucucggcuccccaugugu

SEQ ID NO: 1457819 - RNA, 15 nt, Human
ucucucggcucccca

SEQ ID NO: 1457820 - RNA, 19 nt, Human
ucucucaacaccaugauuc

SEQ ID NO: 1457821 - RNA, 13 nt, Human
ucucucaacacca

SEQ ID NO: 1457822 - RNA, 13 nt, Human
ucucuaugccucu

SEQ ID NO: 1457823 - RNA, 18 nt, Human
ucucuauccucucuuccu

SEQ ID NO: 1457824 - RNA, 20 nt, Human
ucucuaucauuuaauaauau

SEQ ID NO: 1457825 - RNA, 22 nt, Human
ucucuaucauuuaauaauauac

SEQ ID NO: 1457826 - RNA, 11 nt, Human
ucucucugugg

SEQ ID NO: 1457827 - RNA, 22 nt, Human
ucucucucacucccucccuuuc

SEQ ID NO: 1457828 - RNA, 13 nt, Human
ucucucuaugccu

SEQ ID NO: 1457829 - RNA, 15 nt, Human
ucucucgugaguaua

SEQ ID NO: 1457830 - RNA, 13 nt, Human
ucucccugcaugg

SEQ ID NO: 1457831 - RNA, 22 nt, Human
ucucccugagaugggcuuccca

SEQ ID NO: 1457832 - RNA, 16 nt, Human
ucuccugccuugaaaa

SEQ ID NO: 1457833 - RNA, 23 nt, Human
ucuccuggcuucccauccccagc

SEQ ID NO: 1457834 - RNA, 20 nt, Human
ucuccugccuuccuccuggg

SEQ ID NO: 1457835 - RNA, 18 nt, Human
ucuccugccuuccuccug

SEQ ID NO: 1457836 - RNA, 17 nt, Human
ucuccugccuuccuccu

SEQ ID NO: 1457837 - RNA, 16 nt, Human
ucuccugccuuccucc

SEQ ID NO: 1457838 - RNA, 16 nt, Human
ucucagugaagacuau

SEQ ID NO: 1457839 - RNA, 20 nt, Human
ucucaguaccccauggagcu

SEQ ID NO: 1457840 - RNA, 20 nt, Human
ucucagugaagacuaugaaa

SEQ ID NO: 1457841 - RNA, 22 nt, Human
ucucaguguugagccuuuuccc

SEQ ID NO: 1457842 - RNA, 18 nt, Human
ucucaguguugagccuuu

SEQ ID NO: 1457843 - RNA, 20 nt, Human
ucucccggagguuggguggg

SEQ ID NO: 1457844 - RNA, 19 nt, Human
ucuccccugcccccugcag

SEQ ID NO: 1457845 - RNA, 21 nt, Human
ucuccccugcccccugcagga

SEQ ID NO: 1457846 - RNA, 18 nt, Human
ucuccccugcccccugca

SEQ ID NO: 1457847 - RNA, 15 nt, Human
ucuccccccgccugc

SEQ ID NO: 1457848 - RNA, 14 nt, Human
ucucaguugcagcc

SEQ ID NO: 1457849 - RNA, 22 nt, Human
ucuagucaaugacaugaauuuu

SEQ ID NO: 1457850 - RNA, 20 nt, Human
ucuagucaaugacaugaauu

SEQ ID NO: 1457851 - RNA, 14 nt, Human
ucuagucaaugaca

SEQ ID NO: 1457852 - RNA, 24 nt, Human
ucuaguauuccagaccugaagaau

SEQ ID NO: 1457853 - RNA, 22 nt, Human
ucuaguacuugggagaccugua

SEQ ID NO: 1457854 - RNA, 20 nt, Human
ucuagguuucaaagaugcug

SEQ ID NO: 1457855 - RNA, 19 nt, Human
ucuagguuucaaagaugcu

SEQ ID NO: 1457856 - RNA, 17 nt, Human
ucuagguuucaaagaug

SEQ ID NO: 1457857 - RNA, 15 nt, Human
ucuagguuucaaaga

SEQ ID NO: 1457858 - RNA, 20 nt, Human
ucuaggguacauggugcugg

SEQ ID NO: 1457859 - RNA, 23 nt, Human
ucuaggguacauggugcugggag

SEQ ID NO: 1457860 - RNA, 20 nt, Human
ucucaacaggccucagggcu

SEQ ID NO: 1457861 - RNA, 23 nt, Human
ucucaacaggccucagggcuccu

SEQ ID NO: 1457862 - RNA, 19 nt, Human
ucucaacaggccucagggc

SEQ ID NO: 1457863 - RNA, 18 nt, Human
ucucaacaggccucaggg

SEQ ID NO: 1457864 - RNA, 17 nt, Human
ucucaacaggccucagg

SEQ ID NO: 1457865 - RNA, 16 nt, Human
ucucaacaggccucag

SEQ ID NO: 1457866 - RNA, 23 nt, Human
ucucaacacccaguuuccuuggg

SEQ ID NO: 1457867 - RNA, 19 nt, Human
ucucaacacccaguuuccu

SEQ ID NO: 1457868 - RNA, 14 nt, Human
ucucaacacccagu

SEQ ID NO: 1457869 - RNA, 21 nt, Human
ucucaacaccaugauuccuuu

SEQ ID NO: 1457870 - RNA, 23 nt, Human
ucucaaacuccugaccucaggca

SEQ ID NO: 1457871 - RNA, 14 nt, Human
ucucaaacuggggc

SEQ ID NO: 1457872 - RNA, 21 nt, Human
ucucaaacuccugaccucagg

SEQ ID NO: 1457873 - RNA, 16 nt, Human
ucucaaacuccugacc

SEQ ID NO: 1457874 - RNA, 21 nt, Human
ucucagaaucccuuaacaguu

SEQ ID NO: 1457875 - RNA, 12 nt, Human
ucucagaauccc

SEQ ID NO: 1457876 - RNA, 21 nt, Human
ucucagaaagugccugacaca

SEQ ID NO: 1457877 - RNA, 19 nt, Human
ucucagaaagugccugaca

SEQ ID NO: 1457878 - RNA, 17 nt, Human
ucucagaaagugccuga

SEQ ID NO: 1457879 - RNA, 11 nt, Human
ucucagaaagu

SEQ ID NO: 1457880 - RNA, 15 nt, Human
ucucaacuccaaacu

SEQ ID NO: 1457881 - RNA, 23 nt, Human
ucuagaaucugcaauucaaaagu

SEQ ID NO: 1457882 - RNA, 22 nt, Human
ucuagaaucugcaauucaaaag

SEQ ID NO: 1457883 - RNA, 19 nt, Human
ucuacugggaaggcuacuu

SEQ ID NO: 1457884 - RNA, 17 nt, Human
ucuagaacacaggcaaa

SEQ ID NO: 1457885 - RNA, 13 nt, Human
ucuaacucagcaa

SEQ ID NO: 1457886 - RNA, 15 nt, Human
ucuaacuacaaaggu

SEQ ID NO: 1457887 - RNA, 17 nt, Human
ucuaacuacaaagguuu

SEQ ID NO: 1457888 - RNA, 22 nt, Human
ucuaacggucuguucuguuuca

SEQ ID NO: 1457889 - RNA, 17 nt, Human
ucuaacggucuguucug

SEQ ID NO: 1457890 - RNA, 23 nt, Human
ucuaacgccugagcccagggagg

SEQ ID NO: 1457891 - RNA, 21 nt, Human
ucuaacgccugagcccaggga

SEQ ID NO: 1457892 - RNA, 16 nt, Human
ucuaacgccugagccc

SEQ ID NO: 1457893 - RNA, 15 nt, Human
ucuaacgccugagcc

SEQ ID NO: 1457894 - RNA, 14 nt, Human
ucuaacgccugagc

SEQ ID NO: 1457895 - RNA, 13 nt, Human
ucuaacgccugag

SEQ ID NO: 1457896 - RNA, 22 nt, Human
ucuaaccuuuacaugaggacuc

SEQ ID NO: 1457897 - RNA, 16 nt, Human
ucuaaccuuuacauga

SEQ ID NO: 1457898 - RNA, 14 nt, Human
ucuaaccuuuacau

SEQ ID NO: 1457899 - RNA, 20 nt, Human
ucuaaccucaucuucuucac

SEQ ID NO: 1457900 - RNA, 18 nt, Human
ucuaaccucaucuucuuc

SEQ ID NO: 1457901 - RNA, 13 nt, Human
ucuaaccucaucu

SEQ ID NO: 1457902 - RNA, 21 nt, Human
ucuacacuaagagagaaugag

SEQ ID NO: 1457903 - RNA, 22 nt, Human
ucuaacuucaccauauuaccac

SEQ ID NO: 1457904 - RNA, 15 nt, Human
ucuaacuucaccaua

SEQ ID NO: 1457905 - RNA, 16 nt, Human
ucuaacuucaccauau

SEQ ID NO: 1457906 - RNA, 19 nt, Human
ucuaacccuauacuguagu

SEQ ID NO: 1457907 - RNA, 12 nt, Human
ucuaacaaguca

SEQ ID NO: 1457908 - RNA, 21 nt, Human
ucuaaauguaguucugcucca

SEQ ID NO: 1457909 - RNA, 16 nt, Human
ucuaaauucuuucauu

SEQ ID NO: 1457910 - RNA, 17 nt, Human
uccuuaagucagaacag

SEQ ID NO: 1457911 - RNA, 19 nt, Human
uccuuaaggcucuuuugua

SEQ ID NO: 1457912 - RNA, 21 nt, Human
uccuguauuuguucccaagag

SEQ ID NO: 1457913 - RNA, 22 nt, Human
uccuguauuuguucccaagagc

SEQ ID NO: 1457914 - RNA, 20 nt, Human
uccuguauuuguucccaaga

SEQ ID NO: 1457915 - RNA, 19 nt, Human
uccuguauuuguucccaag

SEQ ID NO: 1457916 - RNA, 17 nt, Human
uccuguauuuguuccca

SEQ ID NO: 1457917 - RNA, 21 nt, Human
uccuguauucagacagaugag

SEQ ID NO: 1457918 - RNA, 22 nt, Human
uccugucaucaucauggccagc

SEQ ID NO: 1457919 - RNA, 16 nt, Human
uccuuaaggcucuuuu

SEQ ID NO: 1457920 - RNA, 20 nt, Human
uccuucaacaauucuaaaau

SEQ ID NO: 1457921 - RNA, 18 nt, Human
uccuucaacaauucuaaa

SEQ ID NO: 1457922 - RNA, 21 nt, Human
uccuucaaaguuuaauaaauu

SEQ ID NO: 1457923 - RNA, 22 nt, Human
uccuuacaaguuagaaaacaua

SEQ ID NO: 1457924 - RNA, 21 nt, Human
uccuuacaaguuagaaaacau

SEQ ID NO: 1457925 - RNA, 23 nt, Human
uccuugauuuuagccuucucugu

SEQ ID NO: 1457926 - RNA, 22 nt, Human
uccuugauuuuagccuucucug

SEQ ID NO: 1457927 - RNA, 22 nt, Human
uccuugauuuaucacacaaagc

SEQ ID NO: 1457928 - RNA, 14 nt, Human
uccuggugccaccu

SEQ ID NO: 1457929 - RNA, 15 nt, Human
uccuggugccaccuc

SEQ ID NO: 1457930 - RNA, 13 nt, Human
uccuggugccacc

SEQ ID NO: 1457931 - RNA, 21 nt, Human
uccuggugccaauuucaaguu

SEQ ID NO: 1457932 - RNA, 20 nt, Human
uccuggugccaauuucaagu

SEQ ID NO: 1457933 - RNA, 21 nt, Human
uccuggucaccuaggaagccu

SEQ ID NO: 1457934 - RNA, 20 nt, Human
uccuggucaccuaggaagcc

SEQ ID NO: 1457935 - RNA, 17 nt, Human
uccuggucaccuaggaa

SEQ ID NO: 1457936 - RNA, 15 nt, Human
uccuggcccagccuu

SEQ ID NO: 1457937 - RNA, 14 nt, Human
uccuggcccagccu

SEQ ID NO: 1457938 - RNA, 13 nt, Human
uccuggcccagcc

SEQ ID NO: 1457939 - RNA, 23 nt, Human
uccugguucccguuucuccaccu

SEQ ID NO: 1457940 - RNA, 21 nt, Human
uccugguucccguuucuccac

SEQ ID NO: 1457941 - RNA, 15 nt, Human
uccugguucccguuu

SEQ ID NO: 1457942 - RNA, 19 nt, Human
uccuguaaagguuacaagc

SEQ ID NO: 1457943 - RNA, 20 nt, Human
uccuguauucagacagauga

SEQ ID NO: 1457944 - RNA, 17 nt, Human
uccuguauucagacaga

SEQ ID NO: 1457945 - RNA, 16 nt, Human
uccuguauucagacag

SEQ ID NO: 1457946 - RNA, 19 nt, Human
uccuguauaccuccuccag

SEQ ID NO: 1457947 - RNA, 16 nt, Human
uccuggugguauuuuc

SEQ ID NO: 1457948 - RNA, 21 nt, Human
uccugguggggcagcuccucu

SEQ ID NO: 1457949 - RNA, 19 nt, Human
uccugguggggcagcuccu

SEQ ID NO: 1457950 - RNA, 17 nt, Human
uccugguggggcagcuc

SEQ ID NO: 1457951 - RNA, 16 nt, Human
uccugguggggcagcu

SEQ ID NO: 1457952 - RNA, 13 nt, Human
uccugguggggca

SEQ ID NO: 1457953 - RNA, 14 nt, Human
uccuggugcuggag

SEQ ID NO: 1457954 - RNA, 12 nt, Human
uccuggugcugg

SEQ ID NO: 1457955 - RNA, 19 nt, Human
uccuggugguauuuucaau

SEQ ID NO: 1457956 - RNA, 18 nt, Human
uccuggugguauuuucaa

SEQ ID NO: 1457957 - RNA, 21 nt, Human
uccuggugguauuuucaauag

SEQ ID NO: 1457958 - RNA, 16 nt, Human
uccuugggcccuuuga

SEQ ID NO: 1457959 - RNA, 14 nt, Human
uccuugggcccuuu

SEQ ID NO: 1457960 - RNA, 13 nt, Human
uccuugggcccuu

SEQ ID NO: 1457961 - RNA, 23 nt, Human
uccuuggccugcuaaggucuugg

SEQ ID NO: 1457962 - RNA, 17 nt, Human
uccuuggccaugcagaa

SEQ ID NO: 1457963 - RNA, 17 nt, Human
uccuuuuuaauaugcuu

SEQ ID NO: 1457964 - RNA, 12 nt, Human
uccuuuuuaaua

SEQ ID NO: 1457965 - RNA, 13 nt, Human
ucgaaacacagaa

SEQ ID NO: 1457966 - RNA, 14 nt, Human
ucgaaaaucaaaug

SEQ ID NO: 1457967 - RNA, 14 nt, Human
uccuuuuuuuguac

SEQ ID NO: 1457968 - RNA, 21 nt, Human
uccuuuuuuuccaucuuuaca

SEQ ID NO: 1457969 - RNA, 12 nt, Human
uccuuuuuuucc

SEQ ID NO: 1457970 - RNA, 23 nt, Human
uccuuuuuggucgaggaguaaca

SEQ ID NO: 1457971 - RNA, 16 nt, Human
uccuuuuuccucucca

SEQ ID NO: 1457972 - RNA, 21 nt, Human
uccuuuuuccucuccacacag

SEQ ID NO: 1457973 - RNA, 12 nt, Human
uccuuuuuccuc

SEQ ID NO: 1457974 - RNA, 15 nt, Human
uccuuuuuccaacaa

SEQ ID NO: 1457975 - RNA, 17 nt, Human
uccuuuuuccaacaaga

SEQ ID NO: 1457976 - RNA, 14 nt, Human
ucgauacugcgacu

SEQ ID NO: 1457977 - RNA, 15 nt, Human
ucgaguucccagggu

SEQ ID NO: 1457978 - RNA, 23 nt, Human
ucgagugagacagacuagaaguu

SEQ ID NO: 1457979 - RNA, 14 nt, Human
ucgagugagacaga

SEQ ID NO: 1457980 - RNA, 19 nt, Human
ucgcccaggcuggagugca

SEQ ID NO: 1457981 - RNA, 21 nt, Human
ucgcccagcggcaucaggcuu

SEQ ID NO: 1457982 - RNA, 10 nt, Human
ucgcagccac

SEQ ID NO: 1457983 - RNA, 17 nt, Human
ucgcaccauucugacuc

SEQ ID NO: 1457984 - RNA, 16 nt, Human
ucgcaccauucugacu

SEQ ID NO: 1457985 - RNA, 21 nt, Human
ucgcaccacuguguauuuaac

SEQ ID NO: 1457986 - RNA, 20 nt, Human
ucgcaacccgugccaagucc

SEQ ID NO: 1457987 - RNA, 15 nt, Human
ucgauuucuccagga

SEQ ID NO: 1457988 - RNA, 16 nt, Human
ucgcuucuugccucug

SEQ ID NO: 1457989 - RNA, 15 nt, Human
ucgcuucuugccucu

SEQ ID NO: 1457990 - RNA, 14 nt, Human
ucgcuucuugccuc

SEQ ID NO: 1457991 - RNA, 15 nt, Human
ucgcuguugcugaau

SEQ ID NO: 1457992 - RNA, 17 nt, Human
ucgcuguugcugaauag

SEQ ID NO: 1457993 - RNA, 12 nt, Human
ucgcuguugcug

SEQ ID NO: 1457994 - RNA, 14 nt, Human
ucgcuguugcugaa

SEQ ID NO: 1457995 - RNA, 19 nt, Human
ucgcuucuugccucugugc

SEQ ID NO: 1457996 - RNA, 15 nt, Human
ucggaaaucuuaaac

SEQ ID NO: 1457997 - RNA, 17 nt, Human
ucgcuucuugccucugu

SEQ ID NO: 1457998 - RNA, 21 nt, Human
ucggacaagacccccagcacu

SEQ ID NO: 1457999 - RNA, 19 nt, Human
ucggacaagacccccagca

SEQ ID NO: 1458000 - RNA, 10 nt, Human
ucggaccagc

SEQ ID NO: 1458001 - RNA, 12 nt, Human
ugaagacauaaa

SEQ ID NO: 1458002 - RNA, 17 nt, Human
ugaacuugcauugugau

SEQ ID NO: 1458003 - RNA, 18 nt, Human
ugaagacuggaagcuaau

SEQ ID NO: 1458004 - RNA, 23 nt, Human
ugaagaggaggggaagaggccug

SEQ ID NO: 1458005 - RNA, 17 nt, Human
ugaagaggaggggaaga

SEQ ID NO: 1458006 - RNA, 22 nt, Human
ugaacuuguaaaggaauuuaaa

SEQ ID NO: 1458007 - RNA, 21 nt, Human
ugaacuggacccuguugcuaa

SEQ ID NO: 1458008 - RNA, 22 nt, Human
ugaacuggacccuguugcuaag

SEQ ID NO: 1458009 - RNA, 23 nt, Human
ugaacuggacccuguugcuaagc

SEQ ID NO: 1458010 - RNA, 14 nt, Human
ugaaggcaaaauug

SEQ ID NO: 1458011 - RNA, 20 nt, Human
ugaaggccuucaacccgaga

SEQ ID NO: 1458012 - RNA, 17 nt, Human
ugaaggcaaaauugcaa

SEQ ID NO: 1458013 - RNA, 16 nt, Human
ugaaggcaaaauugca

SEQ ID NO: 1458014 - RNA, 22 nt, Human
ugaaguccaagcauuuagaugu

SEQ ID NO: 1458015 - RNA, 21 nt, Human
ugaaguccaagcauuuagaug

SEQ ID NO: 1458016 - RNA, 20 nt, Human
ugaagaucuaaauaaaaugc

SEQ ID NO: 1458017 - RNA, 22 nt, Human
ugaagaucuaaauaaaaugcua

SEQ ID NO: 1458018 - RNA, 15 nt, Human
ugaagaucuaaauaa

SEQ ID NO: 1458019 - RNA, 14 nt, Human
ugaagaucuaaaua

SEQ ID NO: 1458020 - RNA, 23 nt, Human
ugaaggagccccauuccugggaa

SEQ ID NO: 1458021 - RNA, 22 nt, Human
ugaaggagccccauuccuggga

SEQ ID NO: 1458022 - RNA, 11 nt, Human
ugaaggagccc

SEQ ID NO: 1458023 - RNA, 22 nt, Human
ugaaggagaggcaacauccaaa

SEQ ID NO: 1458024 - RNA, 19 nt, Human
ugaagagguuuuaaagcuu

SEQ ID NO: 1458025 - RNA, 22 nt, Human
ugaacugaacaccauugaaggc

SEQ ID NO: 1458026 - RNA, 13 nt, Human
ugaacugauaaag

SEQ ID NO: 1458027 - RNA, 21 nt, Human
ugaacugauucacaucucauu

SEQ ID NO: 1458028 - RNA, 20 nt, Human
ugaacugauucacaucucau

SEQ ID NO: 1458029 - RNA, 17 nt, Human
ugaacugauucacaucu

SEQ ID NO: 1458030 - RNA, 12 nt, Human
ugaacugauuca

SEQ ID NO: 1458031 - RNA, 17 nt, Human
ugaacuggacccuguug

SEQ ID NO: 1458032 - RNA, 18 nt, Human
ugaacuggacccuguugc

SEQ ID NO: 1458033 - RNA, 19 nt, Human
ugaacuggacccuguugcu

SEQ ID NO: 1458034 - RNA, 20 nt, Human
ugaacuggacccuguugcua

SEQ ID NO: 1458035 - RNA, 15 nt, Human
ugaacugauaaagau

SEQ ID NO: 1458036 - RNA, 12 nt, Human
ugaacugaacac

SEQ ID NO: 1458037 - RNA, 14 nt, Human
ugaacugaacacca

SEQ ID NO: 1458038 - RNA, 13 nt, Human
ugaacugaacacc

SEQ ID NO: 1458039 - RNA, 15 nt, Human
ugaacucuucacucu

SEQ ID NO: 1458040 - RNA, 21 nt, Human
ugaacucuuaaucaaauagca

SEQ ID NO: 1458041 - RNA, 17 nt, Human
ugaacaucugaguccug

SEQ ID NO: 1458042 - RNA, 20 nt, Human
ugaacaucugaguccuggau

SEQ ID NO: 1458043 - RNA, 20 nt, Human
ugaacaucccuuuuucaaug

SEQ ID NO: 1458044 - RNA, 17 nt, Human
ugaacauauuguugaaa

SEQ ID NO: 1458045 - RNA, 13 nt, Human
ugaacagaacaua

SEQ ID NO: 1458046 - RNA, 16 nt, Human
ugaacacgaagcuuag

SEQ ID NO: 1458047 - RNA, 20 nt, Human
ugaacaccauugaaggcuua

SEQ ID NO: 1458048 - RNA, 17 nt, Human
ugaacaccauugaaggc

SEQ ID NO: 1458049 - RNA, 19 nt, Human
ugaacacaaacuguaaaua

SEQ ID NO: 1458050 - RNA, 19 nt, Human
ugaaauggacuuuuguaca

SEQ ID NO: 1458051 - RNA, 19 nt, Human
ugaaaugcagagucaauga

SEQ ID NO: 1458052 - RNA, 14 nt, Human
ugaaauccugcuuc

SEQ ID NO: 1458053 - RNA, 15 nt, Human
ugaaaggacccugug

SEQ ID NO: 1458054 - RNA, 12 nt, Human
ugaaaagagcug

SEQ ID NO: 1458055 - RNA, 20 nt, Human
ugaaaggaaauuaaggcaac

SEQ ID NO: 1458056 - RNA, 16 nt, Human
ugaaaggaaauuaagg

SEQ ID NO: 1458057 - RNA, 12 nt, Human
ugaaaggaaauu

SEQ ID NO: 1458058 - RNA, 13 nt, Human
ugaaagauucaau

SEQ ID NO: 1458059 - RNA, 16 nt, Human
ugaaagcugauuuuuu

SEQ ID NO: 1458060 - RNA, 22 nt, Human
ucuuuuugggagagacuuguuu

SEQ ID NO: 1458061 - RNA, 19 nt, Human
ucuuuuuuaaaugaagaaa

SEQ ID NO: 1458062 - RNA, 20 nt, Human
ucuuuuuguagcuggggcuu

SEQ ID NO: 1458063 - RNA, 19 nt, Human
ucuuuuugggagagacuug

SEQ ID NO: 1458064 - RNA, 15 nt, Human
ucuuuuugaaguauu

SEQ ID NO: 1458065 - RNA, 17 nt, Human
ucuuuuugaaguauuua

SEQ ID NO: 1458066 - RNA, 14 nt, Human
ucuuuuugaaguau

SEQ ID NO: 1458067 - RNA, 13 nt, Human
ugaaaagaauugu

SEQ ID NO: 1458068 - RNA, 16 nt, Human
ugaaaacuuuguagua

SEQ ID NO: 1458069 - RNA, 13 nt, Human
ugaaaacuuugua

SEQ ID NO: 1458070 - RNA, 18 nt, Human
ugaaaacucuuugcugcu

SEQ ID NO: 1458071 - RNA, 17 nt, Human
ugaaaacucuuugcugc

SEQ ID NO: 1458072 - RNA, 13 nt, Human
ugaaaacucuuug

SEQ ID NO: 1458073 - RNA, 16 nt, Human
ucuuuuuucaaaagaa

SEQ ID NO: 1458074 - RNA, 21 nt, Human
ucuuuuggaggacguacguaa

SEQ ID NO: 1458075 - RNA, 18 nt, Human
ucuuuugcuuuuggcaaa

SEQ ID NO: 1458076 - RNA, 19 nt, Human
ucuuuugcuuuugcccauu

SEQ ID NO: 1458077 - RNA, 13 nt, Human
ucuuuugcuuuug

SEQ ID NO: 1458078 - RNA, 23 nt, Human
ucuuuugccuuuugcaaccagga

SEQ ID NO: 1458079 - RNA, 13 nt, Human
ucuuuugccauga

SEQ ID NO: 1458080 - RNA, 20 nt, Human
ucuuuugguuaugaauacuu

SEQ ID NO: 1458081 - RNA, 22 nt, Human
ucuuuugguaaagacuggcuuu

SEQ ID NO: 1458082 - RNA, 19 nt, Human
ucuuuuguaagguuuuugu

SEQ ID NO: 1458083 - RNA, 17 nt, Human
ucuuuugccguuauuaa

SEQ ID NO: 1458084 - RNA, 19 nt, Human
ucuuuugccguuauuaaaa

SEQ ID NO: 1458085 - RNA, 12 nt, Human
ucuuuucuuuac

SEQ ID NO: 1458086 - RNA, 19 nt, Human
ucuuuucuggaauguaauc

SEQ ID NO: 1458087 - RNA, 15 nt, Human
ucuuucacagcuccu

SEQ ID NO: 1458088 - RNA, 14 nt, Human
ucuuucacagcucc

SEQ ID NO: 1458089 - RNA, 20 nt, Human
ucuuucaauacagauauauu

SEQ ID NO: 1458090 - RNA, 19 nt, Human
ucuuucaauacagauauau

SEQ ID NO: 1458091 - RNA, 18 nt, Human
ucuuucaauacagauaua

SEQ ID NO: 1458092 - RNA, 16 nt, Human
ucuuucaauacagaua

SEQ ID NO: 1458093 - RNA, 19 nt, Human
ucuuuaaaagaugcuuuua

SEQ ID NO: 1458094 - RNA, 20 nt, Human
ucuuucacagcuccucccac

SEQ ID NO: 1458095 - RNA, 19 nt, Human
ucuuucacagcuccuccca

SEQ ID NO: 1458096 - RNA, 18 nt, Human
ucuuucacagcuccuccc

SEQ ID NO: 1458097 - RNA, 17 nt, Human
ucuuucacauuuaaaua

SEQ ID NO: 1458098 - RNA, 23 nt, Human
ucuuaugcuguacccaguuucua

SEQ ID NO: 1458099 - RNA, 18 nt, Human
ucuuaugcuguacccagu

SEQ ID NO: 1458100 - RNA, 15 nt, Human
ucuuaugcuguaccc

SEQ ID NO: 1458101 - RNA, 16 nt, Human
ucuuauaguucuaggc

SEQ ID NO: 1458102 - RNA, 17 nt, Human
ucuuauaguucuaggca

SEQ ID NO: 1458103 - RNA, 13 nt, Human
ucuuauaguucua

SEQ ID NO: 1458104 - RNA, 21 nt, Human
ucuuauaauuguucucagaau

SEQ ID NO: 1458105 - RNA, 19 nt, Human
ucuuauggauguccccagc

SEQ ID NO: 1458106 - RNA, 12 nt, Human
ucuuauggaugu

SEQ ID NO: 1458107 - RNA, 22 nt, Human
ucuuauggaauugauuugcauu

SEQ ID NO: 1458108 - RNA, 21 nt, Human
ucuuauggaauugauuugcau

SEQ ID NO: 1458109 - RNA, 18 nt, Human
ucuuauggaauugauuug

SEQ ID NO: 1458110 - RNA, 17 nt, Human
ucuuauggaauugauuu

SEQ ID NO: 1458111 - RNA, 15 nt, Human
ucuuauggaauugau

SEQ ID NO: 1458112 - RNA, 14 nt, Human
ucuuauggaauuga

SEQ ID NO: 1458113 - RNA, 18 nt, Human
ucuuauggauguccccag

SEQ ID NO: 1458114 - RNA, 13 nt, Human
ucuuaaaacuccu

SEQ ID NO: 1458115 - RNA, 12 nt, Human
ucuuaaaacucc

SEQ ID NO: 1458116 - RNA, 22 nt, Human
ucuuaaaaaguuauaaccaacu

SEQ ID NO: 1458117 - RNA, 20 nt, Human
ucuuaaaacauuaugaguuu

SEQ ID NO: 1458118 - RNA, 14 nt, Human
ucuuaguguaugau

SEQ ID NO: 1458119 - RNA, 22 nt, Human
ucuucuacucacuuuucccacu

SEQ ID NO: 1458120 - RNA, 14 nt, Human
ucuucuaccaccca

SEQ ID NO: 1458121 - RNA, 12 nt, Human
ucuucuaaaugg

SEQ ID NO: 1458122 - RNA, 22 nt, Human
ucuucuaaacuuccccaucuuc

SEQ ID NO: 1458123 - RNA, 13 nt, Human
ucuucuaaacuuc

SEQ ID NO: 1458124 - RNA, 11 nt, Human
ucuucucaagu

SEQ ID NO: 1458125 - RNA, 13 nt, Human
ucuucuauuuugu

SEQ ID NO: 1458126 - RNA, 14 nt, Human
ucuucuagaguuca

SEQ ID NO: 1458127 - RNA, 17 nt, Human
ucuucuagguucuaaaa

SEQ ID NO: 1458128 - RNA, 17 nt, Human
ucuucuagaguucagag

SEQ ID NO: 1458129 - RNA, 12 nt, Human
ucuucuagaguu

SEQ ID NO: 1458130 - RNA, 18 nt, Human
ucuucuacaacucauaca

SEQ ID NO: 1458131 - RNA, 23 nt, Human
ucuucucaaguucuaagauucua

SEQ ID NO: 1458132 - RNA, 21 nt, Human
ucuucucaaguucuaagauuc

SEQ ID NO: 1458133 - RNA, 19 nt, Human
ucuucucaaguucuaagau

SEQ ID NO: 1458134 - RNA, 18 nt, Human
ucuucucaaguucuaaga

SEQ ID NO: 1458135 - RNA, 17 nt, Human
ucuucucaaguucuaag

SEQ ID NO: 1458136 - RNA, 15 nt, Human
ucuucucaaguucua

SEQ ID NO: 1458137 - RNA, 14 nt, Human
ucuucucaaguucu

SEQ ID NO: 1458138 - RNA, 19 nt, Human
ucuugccucugugcugugu

SEQ ID NO: 1458139 - RNA, 16 nt, Human
ucuugccucugugcug

SEQ ID NO: 1458140 - RNA, 15 nt, Human
ucuugccucugugcu

SEQ ID NO: 1458141 - RNA, 14 nt, Human
ucuugccucugugc

SEQ ID NO: 1458142 - RNA, 13 nt, Human
ucuugccucugug

SEQ ID NO: 1458143 - RNA, 12 nt, Human
ucuugccucugu

SEQ ID NO: 1458144 - RNA, 16 nt, Human
ucuugccucaaccucc

SEQ ID NO: 1458145 - RNA, 16 nt, Human
ucuugacuacagucag

SEQ ID NO: 1458146 - RNA, 23 nt, Human
ucuugaauuuaauaaucuguagg

SEQ ID NO: 1458147 - RNA, 21 nt, Human
ucuugaauuuaauaaucugua

SEQ ID NO: 1458148 - RNA, 13 nt, Human
ucuugaauuuaau

SEQ ID NO: 1458149 - RNA, 13 nt, Human
ucuugucauuuuu

SEQ ID NO: 1458150 - RNA, 17 nt, Human
ucuugucauguguauaa

SEQ ID NO: 1458151 - RNA, 15 nt, Human
ucuugucauguguau

SEQ ID NO: 1458152 - RNA, 13 nt, Human
ucuugucaugugu

SEQ ID NO: 1458153 - RNA, 11 nt, Human
ucuugucaugu

SEQ ID NO: 1458154 - RNA, 22 nt, Human
ucuuguauuuauugguuuugca

SEQ ID NO: 1458155 - RNA, 15 nt, Human
ucuuguauuuauugg

SEQ ID NO: 1458156 - RNA, 23 nt, Human
ucuugccuguuucccaggcccac

SEQ ID NO: 1458157 - RNA, 16 nt, Human
ucuugccuguuuccca

SEQ ID NO: 1458158 - RNA, 21 nt, Human
ucuugccugaacuccugccau

SEQ ID NO: 1458159 - RNA, 16 nt, Human
ucuuuaaaaggaaaga

SEQ ID NO: 1458160 - RNA, 18 nt, Human
ucuuuaaaaggaaagaaa

SEQ ID NO: 1458161 - RNA, 15 nt, Human
ucuugugaaggcagg

SEQ ID NO: 1458162 - RNA, 12 nt, Human
ucuugucuuuau

SEQ ID NO: 1458163 - RNA, 21 nt, Human
ucuuguccccaacaccccaca

SEQ ID NO: 1458164 - RNA, 23 nt, Human
ucuggagcccacuguacuugcuc

SEQ ID NO: 1458165 - RNA, 14 nt, Human
ucuggagagaacag

SEQ ID NO: 1458166 - RNA, 20 nt, Human
ucuggagaccaccagggcau

SEQ ID NO: 1458167 - RNA, 19 nt, Human
ucuggagaccaccagggca

SEQ ID NO: 1458168 - RNA, 16 nt, Human
ucuggagaccaccagg

SEQ ID NO: 1458169 - RNA, 13 nt, Human
ucuggcucugucu

SEQ ID NO: 1458170 - RNA, 20 nt, Human
ucuggcucuaauucacagug

SEQ ID NO: 1458171 - RNA, 22 nt, Human
ucuggcucuaauucacagugcu

SEQ ID NO: 1458172 - RNA, 17 nt, Human
ucuggcuaugcauuuga

SEQ ID NO: 1458173 - RNA, 14 nt, Human
ucuggcuaugcauu

SEQ ID NO: 1458174 - RNA, 21 nt, Human
ucuggaggggagggggauccg

SEQ ID NO: 1458175 - RNA, 14 nt, Human
ucuggaggggaggg

SEQ ID NO: 1458176 - RNA, 20 nt, Human
ucugguucucaauuccaaca

SEQ ID NO: 1458177 - RNA, 19 nt, Human
ucugguucucaauuccaac

SEQ ID NO: 1458178 - RNA, 18 nt, Human
ucugguucucaauuccaa

SEQ ID NO: 1458179 - RNA, 17 nt, Human
ucugguucucaauucca

SEQ ID NO: 1458180 - RNA, 21 nt, Human
ucuggcuuggccacagccagg

SEQ ID NO: 1458181 - RNA, 20 nt, Human
ucuggcuuggccacagccag

SEQ ID NO: 1458182 - RNA, 19 nt, Human
ucuguaauaaacucauuuc

SEQ ID NO: 1458183 - RNA, 23 nt, Human
ucuguaauaaacucauuucuagc

SEQ ID NO: 1458184 - RNA, 24 nt, Human
ucuguaauaaacucauuucuagca

SEQ ID NO: 1458185 - RNA, 22 nt, Human
ucugguuguuucuguuccaaau

SEQ ID NO: 1458186 - RNA, 20 nt, Human
ucugguuguuucuguuccaa

SEQ ID NO: 1458187 - RNA, 18 nt, Human
ucugguuguuucuguucc

SEQ ID NO: 1458188 - RNA, 17 nt, Human
ucugguuguuucuguuc

SEQ ID NO: 1458189 - RNA, 16 nt, Human
ucugguuguuucuguu

SEQ ID NO: 1458190 - RNA, 15 nt, Human
ucugguuguuucugu

SEQ ID NO: 1458191 - RNA, 15 nt, Human
ucugguugaacucug

SEQ ID NO: 1458192 - RNA, 18 nt, Human
ucuguaagcauaagcuua

SEQ ID NO: 1458193 - RNA, 17 nt, Human
ucuguaaaaucuuucuu

SEQ ID NO: 1458194 - RNA, 13 nt, Human
ucuguaaaaucuu

SEQ ID NO: 1458195 - RNA, 14 nt, Human
ucuguaaaaucuuu

SEQ ID NO: 1458196 - RNA, 14 nt, Human
ucuguaaaacuaag

SEQ ID NO: 1458197 - RNA, 21 nt, Human
ucuguaaaacuaagaaacuua

SEQ ID NO: 1458198 - RNA, 11 nt, Human
ucuguaaaauc

SEQ ID NO: 1458199 - RNA, 12 nt, Human
ucuguaaaaucu

SEQ ID NO: 1458200 - RNA, 21 nt, Human
ucugugucuuucacagcuccu

SEQ ID NO: 1458201 - RNA, 12 nt, Human
ucugugucuugu

SEQ ID NO: 1458202 - RNA, 23 nt, Human
ucugugucuaagauucuagauca

SEQ ID NO: 1458203 - RNA, 22 nt, Human
ucugugucuaagauucuagauc

SEQ ID NO: 1458204 - RNA, 20 nt, Human
ucugugucuaagauucuaga

SEQ ID NO: 1458205 - RNA, 18 nt, Human
ucugugucuaagauucua

SEQ ID NO: 1458206 - RNA, 17 nt, Human
ucugugucuaagauucu

SEQ ID NO: 1458207 - RNA, 16 nt, Human
ucugugucuaagauuc

SEQ ID NO: 1458208 - RNA, 14 nt, Human
ucugugucuaagau

SEQ ID NO: 1458209 - RNA, 23 nt, Human
ucugucccuagguguuuuguuca

SEQ ID NO: 1458210 - RNA, 22 nt, Human
ucuguaccaguuaauuuuucca

SEQ ID NO: 1458211 - RNA, 13 nt, Human
ucuguaccaguua

SEQ ID NO: 1458212 - RNA, 12 nt, Human
ucuguaccaguu

SEQ ID NO: 1458213 - RNA, 22 nt, Human
ucugucccuugccccccuggcc

SEQ ID NO: 1458214 - RNA, 16 nt, Human
ucugucccuugccccc

SEQ ID NO: 1458215 - RNA, 19 nt, Human
ucugucccuugccccccug

SEQ ID NO: 1458216 - RNA, 20 nt, Human
ucuguccguucacaugugug

SEQ ID NO: 1458217 - RNA, 19 nt, Human
ucuguuacacuuuuuggaa

SEQ ID NO: 1458218 - RNA, 21 nt, Human
ucuguuaacugaauaccacuc

SEQ ID NO: 1458219 - RNA, 20 nt, Human
ucuguuaacugaauaccacu

SEQ ID NO: 1458220 - RNA, 17 nt, Human
ucuguuaacugaauacc

SEQ ID NO: 1458221 - RNA, 16 nt, Human
ucuguuaacugaauac

SEQ ID NO: 1458222 - RNA, 13 nt, Human
ucuguuaacugaa

SEQ ID NO: 1458223 - RNA, 18 nt, Human
ucuguguuuugaaagaau

SEQ ID NO: 1458224 - RNA, 11 nt, Human
ucugugucuuu

SEQ ID NO: 1458225 - RNA, 16 nt, Human
ucuguguugccaagcu

SEQ ID NO: 1458226 - RNA, 14 nt, Human
ucuguguugccaag

SEQ ID NO: 1458227 - RNA, 20 nt, Human
ucuguucaaagcugccuguc

SEQ ID NO: 1458228 - RNA, 22 nt, Human
ucuguucacuuuuccucccuca

SEQ ID NO: 1458229 - RNA, 21 nt, Human
ucuguucacuuuuccucccuc

SEQ ID NO: 1458230 - RNA, 19 nt, Human
ucuguucacuuuuccuccc

SEQ ID NO: 1458231 - RNA, 17 nt, Human
ucuguuaugcugugaca

SEQ ID NO: 1458232 - RNA, 22 nt, Human
ucuguuuuauaauuuugugaag

SEQ ID NO: 1458233 - RNA, 23 nt, Human
ugccugagucgugaccugcuagg

SEQ ID NO: 1458234 - RNA, 24 nt, Human
ugccugagucgugaccugcuaggc

SEQ ID NO: 1458235 - RNA, 20 nt, Human
ugccugagucgugaccugcu

SEQ ID NO: 1458236 - RNA, 19 nt, Human
ugccugagucgugaccugc

SEQ ID NO: 1458237 - RNA, 18 nt, Human
ugccucugucuucuggac

SEQ ID NO: 1458238 - RNA, 13 nt, Human
ugccugacacacu

SEQ ID NO: 1458239 - RNA, 15 nt, Human
ugccugaauauuugu

SEQ ID NO: 1458240 - RNA, 16 nt, Human
ugccucugugcugugu

SEQ ID NO: 1458241 - RNA, 14 nt, Human
ugccucugugcugu

SEQ ID NO: 1458242 - RNA, 17 nt, Human
ugccucugugcugugug

SEQ ID NO: 1458243 - RNA, 13 nt, Human
ugccucugugcug

SEQ ID NO: 1458244 - RNA, 12 nt, Human
ugccucugugcu

SEQ ID NO: 1458245 - RNA, 11 nt, Human
ugccucugugc

SEQ ID NO: 1458246 - RNA, 16 nt, Human
ugccucugucuucugg

SEQ ID NO: 1458247 - RNA, 13 nt, Human
ugccuccuuccuc

SEQ ID NO: 1458248 - RNA, 18 nt, Human
ugccuccccucuccuucc

SEQ ID NO: 1458249 - RNA, 17 nt, Human
ugccuccccucuccuuc

SEQ ID NO: 1458250 - RNA, 16 nt, Human
ugccuaggccugggca

SEQ ID NO: 1458251 - RNA, 20 nt, Human
ugccuaggccugggcagugg

SEQ ID NO: 1458252 - RNA, 14 nt, Human
ugccuaggccuggg

SEQ ID NO: 1458253 - RNA, 22 nt, Human
ugccuagaaacaacacuguagu

SEQ ID NO: 1458254 - RNA, 17 nt, Human
ugccuagauucagggaa

SEQ ID NO: 1458255 - RNA, 23 nt, Human
ugccuagaaacaacacuguagua

SEQ ID NO: 1458256 - RNA, 19 nt, Human
ugccuagaaacaacacugu

SEQ ID NO: 1458257 - RNA, 18 nt, Human
ugccuagaaacaacacug

SEQ ID NO: 1458258 - RNA, 13 nt, Human
ugccuagaaacaa

SEQ ID NO: 1458259 - RNA, 23 nt, Human
ugccuacagaacuucagaaagac

SEQ ID NO: 1458260 - RNA, 22 nt, Human
ugccuacagaacuucagaaaga

SEQ ID NO: 1458261 - RNA, 17 nt, Human
ugccuacagaacuucag

SEQ ID NO: 1458262 - RNA, 22 nt, Human
ugccuaaguccaguguuucuuu

SEQ ID NO: 1458263 - RNA, 16 nt, Human
ugccuuccuccugggc

SEQ ID NO: 1458264 - RNA, 15 nt, Human
ugccuuccuccuggg

SEQ ID NO: 1458265 - RNA, 14 nt, Human
ugccuuccuccugg

SEQ ID NO: 1458266 - RNA, 18 nt, Human
ugccuuccagaaaacaaa

SEQ ID NO: 1458267 - RNA, 15 nt, Human
ugccuuccagaaaac

SEQ ID NO: 1458268 - RNA, 12 nt, Human
ugccuucauuug

SEQ ID NO: 1458269 - RNA, 17 nt, Human
ugccuuauucagggaag

SEQ ID NO: 1458270 - RNA, 23 nt, Human
ugccuuauuagagugucuuucca

SEQ ID NO: 1458271 - RNA, 21 nt, Human
ugccuuauuagagugucuuuc

SEQ ID NO: 1458272 - RNA, 12 nt, Human
ugccuucaagaa

SEQ ID NO: 1458273 - RNA, 18 nt, Human
ugccuuauucagggaagg

SEQ ID NO: 1458274 - RNA, 15 nt, Human
ugccuggcggggugg

SEQ ID NO: 1458275 - RNA, 21 nt, Human
ugcgcccccuccgcccugcca

SEQ ID NO: 1458276 - RNA, 23 nt, Human
ugcgcccagggcugggaggaagg

SEQ ID NO: 1458277 - RNA, 19 nt, Human
ugcgcccagggcugggagg

SEQ ID NO: 1458278 - RNA, 18 nt, Human
ugcgcccagggcugggag

SEQ ID NO: 1458279 - RNA, 19 nt, Human
ugcgguuauaaaaaauggu

SEQ ID NO: 1458280 - RNA, 21 nt, Human
ugcgguuaauuuugaagugcu

SEQ ID NO: 1458281 - RNA, 16 nt, Human
ugcgguuaauuuugaa

SEQ ID NO: 1458282 - RNA, 23 nt, Human
ugcgcccccuccgcccugccacu

SEQ ID NO: 1458283 - RNA, 21 nt, Human
ugcgcccuuaacugcauccag

SEQ ID NO: 1458284 - RNA, 20 nt, Human
ugccuucgcuucuugccucu

SEQ ID NO: 1458285 - RNA, 17 nt, Human
ugccuucgcuucuugcc

SEQ ID NO: 1458286 - RNA, 16 nt, Human
ugccuucgcuucuugc

SEQ ID NO: 1458287 - RNA, 14 nt, Human
ugccuucgcuucuu

SEQ ID NO: 1458288 - RNA, 13 nt, Human
ugccuucgcuucu

SEQ ID NO: 1458289 - RNA, 19 nt, Human
ugccuuccuguuuuucaca

SEQ ID NO: 1458290 - RNA, 15 nt, Human
ugccuuccuguuuuu

SEQ ID NO: 1458291 - RNA, 20 nt, Human
ugccuuccuccugggcccuc

SEQ ID NO: 1458292 - RNA, 19 nt, Human
ugccuuccuccugggcccu

SEQ ID NO: 1458293 - RNA, 17 nt, Human
ugccuuccuccugggcc

SEQ ID NO: 1458294 - RNA, 13 nt, Human
ugccuucucucuc

SEQ ID NO: 1458295 - RNA, 22 nt, Human
ugccuucucaacuccaaacuga

SEQ ID NO: 1458296 - RNA, 20 nt, Human
ugcguggaaugcccuucacu

SEQ ID NO: 1458297 - RNA, 19 nt, Human
ugcguccacgagcuguuua

SEQ ID NO: 1458298 - RNA, 15 nt, Human
ugcgugcauaccacu

SEQ ID NO: 1458299 - RNA, 23 nt, Human
ugcgguucaggaaaauugaaugc

SEQ ID NO: 1458300 - RNA, 18 nt, Human
ugcgguuccggcauggac

SEQ ID NO: 1458301 - RNA, 22 nt, Human
ugcgguuauaaaaaaugguuca

SEQ ID NO: 1458302 - RNA, 20 nt, Human
ugcgguuauaaaaaaugguu

SEQ ID NO: 1458303 - RNA, 21 nt, Human
ugcgugguggucccuggguag

SEQ ID NO: 1458304 - RNA, 19 nt, Human
ugcgugguggucccugggu

SEQ ID NO: 1458305 - RNA, 18 nt, Human
ugcgugguggucccuggg

SEQ ID NO: 1458306 - RNA, 23 nt, Human
ugcgugggugugugcguguuugg

SEQ ID NO: 1458307 - RNA, 14 nt, Human
ugcgugggugugug

SEQ ID NO: 1458308 - RNA, 18 nt, Human
ugcgugggagugugugcc

SEQ ID NO: 1458309 - RNA, 14 nt, Human
ugcuagagcuccuc

SEQ ID NO: 1458310 - RNA, 13 nt, Human
ugcuagagcuccu

SEQ ID NO: 1458311 - RNA, 13 nt, Human
ugcuagguucuac

SEQ ID NO: 1458312 - RNA, 12 nt, Human
ugcuagguucua

SEQ ID NO: 1458313 - RNA, 20 nt, Human
ugcucagcugucaaggcuca

SEQ ID NO: 1458314 - RNA, 16 nt, Human
ugcucagcugucaagg

SEQ ID NO: 1458315 - RNA, 20 nt, Human
ugcucagcucugggccauuc

SEQ ID NO: 1458316 - RNA, 18 nt, Human
ugcucagcucugggccau

SEQ ID NO: 1458317 - RNA, 20 nt, Human
ugcucagcuucuccaacaau

SEQ ID NO: 1458318 - RNA, 17 nt, Human
ugcucagcuucuccaac

SEQ ID NO: 1458319 - RNA, 14 nt, Human
ugcucaggagcccu

SEQ ID NO: 1458320 - RNA, 21 nt, Human
ugcuccuggaucucccugaga

SEQ ID NO: 1458321 - RNA, 18 nt, Human
ugcuccuggaucucccug

SEQ ID NO: 1458322 - RNA, 16 nt, Human
ugcuccucuuccccag

SEQ ID NO: 1458323 - RNA, 19 nt, Human
ugcuccucuuccccagacg

SEQ ID NO: 1458324 - RNA, 15 nt, Human
ugcuccucuucccca

SEQ ID NO: 1458325 - RNA, 13 nt, Human
ugcuccucuuccc

SEQ ID NO: 1458326 - RNA, 18 nt, Human
ugcucaucugcugguccg

SEQ ID NO: 1458327 - RNA, 16 nt, Human
ugcucaucugcugguc

SEQ ID NO: 1458328 - RNA, 15 nt, Human
ugcucaucugcuggu

SEQ ID NO: 1458329 - RNA, 14 nt, Human
ugcucaucugcugg

SEQ ID NO: 1458330 - RNA, 13 nt, Human
ugcucaucugcug

SEQ ID NO: 1458331 - RNA, 17 nt, Human
ugcucauccacucuacu

SEQ ID NO: 1458332 - RNA, 11 nt, Human
ugcucauggaa

SEQ ID NO: 1458333 - RNA, 23 nt, Human
ugcucaucauucucugucucauc

SEQ ID NO: 1458334 - RNA, 21 nt, Human
ugcucaucauucucugucuca

SEQ ID NO: 1458335 - RNA, 20 nt, Human
ugcucaucauucucugucuc

SEQ ID NO: 1458336 - RNA, 19 nt, Human
ugcucaucauucucugucu

SEQ ID NO: 1458337 - RNA, 17 nt, Human
ugcucaucauucucugu

SEQ ID NO: 1458338 - RNA, 15 nt, Human
ugcucaucauucucu

SEQ ID NO: 1458339 - RNA, 15 nt, Human
ugcucaggagcccug

SEQ ID NO: 1458340 - RNA, 18 nt, Human
ugcugaaaauguccuugu

SEQ ID NO: 1458341 - RNA, 21 nt, Human
ugcugaaaauguccuugugau

SEQ ID NO: 1458342 - RNA, 16 nt, Human
ugcugaaaauguccuu

SEQ ID NO: 1458343 - RNA, 22 nt, Human
ugcucuuuguuuugugucucuu

SEQ ID NO: 1458344 - RNA, 16 nt, Human
ugcugaaaaaugggca

SEQ ID NO: 1458345 - RNA, 11 nt, Human
ugcugaauagg

SEQ ID NO: 1458346 - RNA, 18 nt, Human
ugcugaauaggcgaucac

SEQ ID NO: 1458347 - RNA, 21 nt, Human
ugcugaauaggcgaucacaac

SEQ ID NO: 1458348 - RNA, 23 nt, Human
ugcucuuuucuccucacuguauc

SEQ ID NO: 1458349 - RNA, 21 nt, Human
ugcucuuuucuccucacugua

SEQ ID NO: 1458350 - RNA, 15 nt, Human
ugcucuuuucuccuc

SEQ ID NO: 1458351 - RNA, 13 nt, Human
ugcucuuuucucc

SEQ ID NO: 1458352 - RNA, 20 nt, Human
ugcucuuuguuuugugucuc

SEQ ID NO: 1458353 - RNA, 18 nt, Human
ugcucuuuguuuuguguc

SEQ ID NO: 1458354 - RNA, 15 nt, Human
ugcucuuuguuuugu

SEQ ID NO: 1458355 - RNA, 14 nt, Human
ugcucuuuguuuug

SEQ ID NO: 1458356 - RNA, 22 nt, Human
ugcucuuucucugccagugaca

SEQ ID NO: 1458357 - RNA, 21 nt, Human
ugcucuuucucugccagugac

SEQ ID NO: 1458358 - RNA, 18 nt, Human
ugcucuuucucugccagu

SEQ ID NO: 1458359 - RNA, 17 nt, Human
ugcucuuucucugccag

SEQ ID NO: 1458360 - RNA, 16 nt, Human
ugcucuuucucugcca

SEQ ID NO: 1458361 - RNA, 13 nt, Human
ugcuccuucccca

SEQ ID NO: 1458362 - RNA, 21 nt, Human
ugcuccuugggcccuuugagu

SEQ ID NO: 1458363 - RNA, 19 nt, Human
ugcuccuugggcccuuuga

SEQ ID NO: 1458364 - RNA, 18 nt, Human
ugcuccuugggcccuuug

SEQ ID NO: 1458365 - RNA, 16 nt, Human
ugcuccuugggcccuu

SEQ ID NO: 1458366 - RNA, 15 nt, Human
ugcuccuugggcccu

SEQ ID NO: 1458367 - RNA, 14 nt, Human
ugcuccuugggccc

SEQ ID NO: 1458368 - RNA, 12 nt, Human
ugcuccuugggc

SEQ ID NO: 1458369 - RNA, 15 nt, Human
ugcuccuuccccauc

SEQ ID NO: 1458370 - RNA, 21 nt, Human
ugcuccuguucacaccagaga

SEQ ID NO: 1458371 - RNA, 20 nt, Human
ugcugaauguugggacugcu

SEQ ID NO: 1458372 - RNA, 18 nt, Human
ugcugaauguugggacug

SEQ ID NO: 1458373 - RNA, 18 nt, Human
ugcugaauauacagcagg

SEQ ID NO: 1458374 - RNA, 18 nt, Human
ugcugaucgccuucccca

SEQ ID NO: 1458375 - RNA, 17 nt, Human
ugcugaucgccuucccc

SEQ ID NO: 1458376 - RNA, 21 nt, Human
ugcugaugaacucuuaaucaa

SEQ ID NO: 1458377 - RNA, 16 nt, Human
ugcugaucgccuuccc

SEQ ID NO: 1458378 - RNA, 18 nt, Human
ugcugauauuuucucuag

SEQ ID NO: 1458379 - RNA, 21 nt, Human
ugcugauauuuucucuaggaa

SEQ ID NO: 1458380 - RNA, 15 nt, Human
ugcugauauuuucuc

SEQ ID NO: 1458381 - RNA, 22 nt, Human
ugcaggaucucaccaggcagcc

SEQ ID NO: 1458382 - RNA, 21 nt, Human
ugcaggaucucaccaggcagc

SEQ ID NO: 1458383 - RNA, 20 nt, Human
ugcaggaucucaccaggcag

SEQ ID NO: 1458384 - RNA, 19 nt, Human
ugcaggaucucaccaggca

SEQ ID NO: 1458385 - RNA, 17 nt, Human
ugcaggaucucaccagg

SEQ ID NO: 1458386 - RNA, 19 nt, Human
ugcaggaaucuuuaaaaga

SEQ ID NO: 1458387 - RNA, 16 nt, Human
ugcauguccuguaaag

SEQ ID NO: 1458388 - RNA, 19 nt, Human
ugcauccucuggagccagc

SEQ ID NO: 1458389 - RNA, 22 nt, Human
ugcauccucuggagccagccga

SEQ ID NO: 1458390 - RNA, 14 nt, Human
ugcaggaugguguc

SEQ ID NO: 1458391 - RNA, 18 nt, Human
ugcaggauggugucucuu

SEQ ID NO: 1458392 - RNA, 21 nt, Human
ugcauccagccuggggcugag

SEQ ID NO: 1458393 - RNA, 23 nt, Human
ugccaagacugcuguggccagga

SEQ ID NO: 1458394 - RNA, 22 nt, Human
ugccaagacugcuguggccagg

SEQ ID NO: 1458395 - RNA, 21 nt, Human
ugccaagacugcuguggccag

SEQ ID NO: 1458396 - RNA, 17 nt, Human
ugccaagacugcugugg

SEQ ID NO: 1458397 - RNA, 14 nt, Human
ugccaagacugcug

SEQ ID NO: 1458398 - RNA, 21 nt, Human
ugccaaaaagugaaauaaugu

SEQ ID NO: 1458399 - RNA, 22 nt, Human
ugccaaaaagugaaauaaugug

SEQ ID NO: 1458400 - RNA, 19 nt, Human
ugccaaaaagugaaauaau

SEQ ID NO: 1458401 - RNA, 18 nt, Human
ugccaaaaagugaaauaa

SEQ ID NO: 1458402 - RNA, 17 nt, Human
ugccaaaaagugaaaua

SEQ ID NO: 1458403 - RNA, 16 nt, Human
ugccaaaaagugaaau

SEQ ID NO: 1458404 - RNA, 16 nt, Human
ugccaaaaaaaaauac

SEQ ID NO: 1458405 - RNA, 23 nt, Human
ugcauuuuguuugguauuguauu

SEQ ID NO: 1458406 - RNA, 19 nt, Human
ugcauuaaauucacaaacu

SEQ ID NO: 1458407 - RNA, 17 nt, Human
ugcauuaaauucacaaa

SEQ ID NO: 1458408 - RNA, 16 nt, Human
ugcauuaaauucacaa

SEQ ID NO: 1458409 - RNA, 15 nt, Human
ugcauuaaauucaca

SEQ ID NO: 1458410 - RNA, 14 nt, Human
ugcauuaaauucac

SEQ ID NO: 1458411 - RNA, 13 nt, Human
ugcauuaaauuca

SEQ ID NO: 1458412 - RNA, 17 nt, Human
ugcauuaaauuacagaa

SEQ ID NO: 1458413 - RNA, 21 nt, Human
ugcauuauauuuauuacugua

SEQ ID NO: 1458414 - RNA, 20 nt, Human
ugcauuauauuuauuacugu

SEQ ID NO: 1458415 - RNA, 20 nt, Human
ugcauuaaauuacagaaauu

SEQ ID NO: 1458416 - RNA, 21 nt, Human
ugcauuaaauucacaaacuuu

SEQ ID NO: 1458417 - RNA, 20 nt, Human
ugcauuaaauucacaaacuu

SEQ ID NO: 1458418 - RNA, 15 nt, Human
ugcauuauauuuauu

SEQ ID NO: 1458419 - RNA, 21 nt, Human
ugcccacagugucaggcacug

SEQ ID NO: 1458420 - RNA, 23 nt, Human
ugcccacagugucaggcacuggg

SEQ ID NO: 1458421 - RNA, 20 nt, Human
ugcccacagugucaggcacu

SEQ ID NO: 1458422 - RNA, 18 nt, Human
ugcccacagugucaggca

SEQ ID NO: 1458423 - RNA, 20 nt, Human
ugccaugaugccucugucuu

SEQ ID NO: 1458424 - RNA, 21 nt, Human
ugccaugaugccucugucuuc

SEQ ID NO: 1458425 - RNA, 22 nt, Human
ugccaucugcgugacaauaaaa

SEQ ID NO: 1458426 - RNA, 17 nt, Human
ugccaguauuuuaaaau

SEQ ID NO: 1458427 - RNA, 21 nt, Human
ugccaguauuuuaaaauagcg

SEQ ID NO: 1458428 - RNA, 21 nt, Human
ugccaguaacgcgucuuccug

SEQ ID NO: 1458429 - RNA, 18 nt, Human
ugccaguaacgcgucuuc

SEQ ID NO: 1458430 - RNA, 17 nt, Human
ugccaguaacaggcuca

SEQ ID NO: 1458431 - RNA, 23 nt, Human
ugccaguaacgcgucuuccugag

SEQ ID NO: 1458432 - RNA, 22 nt, Human
ugccaguaacgcgucuuccuga

SEQ ID NO: 1458433 - RNA, 13 nt, Human
ugccacccaggau

SEQ ID NO: 1458434 - RNA, 22 nt, Human
ugccacccagccccagccaggg

SEQ ID NO: 1458435 - RNA, 21 nt, Human
ugccacccagccccagccagg

SEQ ID NO: 1458436 - RNA, 20 nt, Human
ugccacccagccccagccag

SEQ ID NO: 1458437 - RNA, 17 nt, Human
ugccacccagccccagc

SEQ ID NO: 1458438 - RNA, 12 nt, Human
ugccagggcagg

SEQ ID NO: 1458439 - RNA, 11 nt, Human
ugccagggcag

SEQ ID NO: 1458440 - RNA, 22 nt, Human
ugccagggcaaugaugaaugag

SEQ ID NO: 1458441 - RNA, 17 nt, Human
ugccagggcaaugauga

SEQ ID NO: 1458442 - RNA, 20 nt, Human
ugccaggcuggagugcagug

SEQ ID NO: 1458443 - RNA, 22 nt, Human
ugcacacuuugguaccagauaa

SEQ ID NO: 1458444 - RNA, 14 nt, Human
ugcacacuuugcca

SEQ ID NO: 1458445 - RNA, 22 nt, Human
ugcacacuuugccauauuuuca

SEQ ID NO: 1458446 - RNA, 17 nt, Human
ugcacacuuugguacca

SEQ ID NO: 1458447 - RNA, 13 nt, Human
ugcacacuuuggu

SEQ ID NO: 1458448 - RNA, 21 nt, Human
ugcacagaguuguuacauuuu

SEQ ID NO: 1458449 - RNA, 22 nt, Human
ugcacagaguuguuacauuuuu

SEQ ID NO: 1458450 - RNA, 23 nt, Human
ugcacagcacaaauuaguuauau

SEQ ID NO: 1458451 - RNA, 18 nt, Human
ugcacagcacaaauuagu

SEQ ID NO: 1458452 - RNA, 16 nt, Human
ugcacagcacaaauua

SEQ ID NO: 1458453 - RNA, 23 nt, Human
ugcacagaguuguuacauuuuua

SEQ ID NO: 1458454 - RNA, 22 nt, Human
ugcacagcacaaauuaguuaua

SEQ ID NO: 1458455 - RNA, 23 nt, Human
ugcacaggagggggucguggaga

SEQ ID NO: 1458456 - RNA, 15 nt, Human
ugcacaggagggggu

SEQ ID NO: 1458457 - RNA, 13 nt, Human
ugcacaggagggg

SEQ ID NO: 1458458 - RNA, 12 nt, Human
ugcacaggaggg

SEQ ID NO: 1458459 - RNA, 21 nt, Human
ugcaccuaaagaaaaacaaac

SEQ ID NO: 1458460 - RNA, 19 nt, Human
ugcaccuaaagaaaaacaa

SEQ ID NO: 1458461 - RNA, 16 nt, Human
ugcaccuaaagaaaaa

SEQ ID NO: 1458462 - RNA, 15 nt, Human
ugcaccuaaagaaaa

SEQ ID NO: 1458463 - RNA, 14 nt, Human
ugcaccuaaagaaa

SEQ ID NO: 1458464 - RNA, 13 nt, Human
ugcaccuaaagaa

SEQ ID NO: 1458465 - RNA, 19 nt, Human
ugcacaucugugucuuguu

SEQ ID NO: 1458466 - RNA, 18 nt, Human
ugcacaucugugucuugu

SEQ ID NO: 1458467 - RNA, 16 nt, Human
ugcacaucugugucuu

SEQ ID NO: 1458468 - RNA, 15 nt, Human
ugcacaucugugucu

SEQ ID NO: 1458469 - RNA, 22 nt, Human
ugcacaucuguaaaucuacaca

SEQ ID NO: 1458470 - RNA, 12 nt, Human
ugcacaucccug

SEQ ID NO: 1458471 - RNA, 15 nt, Human
ugcacaucaaaauau

SEQ ID NO: 1458472 - RNA, 22 nt, Human
ugcagcuuguagccagccgggg

SEQ ID NO: 1458473 - RNA, 21 nt, Human
ugcagcuuguagccagccggg

SEQ ID NO: 1458474 - RNA, 14 nt, Human
ugcaggaaggagcu

SEQ ID NO: 1458475 - RNA, 12 nt, Human
ugcaggaaggag

SEQ ID NO: 1458476 - RNA, 22 nt, Human
ugcaggaaggagcugccuggac

SEQ ID NO: 1458477 - RNA, 21 nt, Human
ugcaggaaggagcugccugga

SEQ ID NO: 1458478 - RNA, 20 nt, Human
ugcaggaaggagcugccugg

SEQ ID NO: 1458479 - RNA, 19 nt, Human
ugcaggaaggagcugccug

SEQ ID NO: 1458480 - RNA, 18 nt, Human
ugcaggaaggagcugccu

SEQ ID NO: 1458481 - RNA, 17 nt, Human
ugcaggaaggagcugcc

SEQ ID NO: 1458482 - RNA, 16 nt, Human
ugcaggaaggagcugc

SEQ ID NO: 1458483 - RNA, 15 nt, Human
ugcaggaaggagcug

SEQ ID NO: 1458484 - RNA, 23 nt, Human
ugcaggaaggagcugccuggacc

SEQ ID NO: 1458485 - RNA, 14 nt, Human
ugcagcaauaaagc

SEQ ID NO: 1458486 - RNA, 15 nt, Human
ugcagcaauaaagca

SEQ ID NO: 1458487 - RNA, 16 nt, Human
ugcagcaauaaagcag

SEQ ID NO: 1458488 - RNA, 20 nt, Human
ugcagcaauaaagcagcguu

SEQ ID NO: 1458489 - RNA, 16 nt, Human
ugcacuuggcugcaua

SEQ ID NO: 1458490 - RNA, 22 nt, Human
ugcacuugcgguuccggcaugg

SEQ ID NO: 1458491 - RNA, 21 nt, Human
ugcacguaaaguacuuguagu

SEQ ID NO: 1458492 - RNA, 19 nt, Human
ugcacguaaaguacuugua

SEQ ID NO: 1458493 - RNA, 18 nt, Human
ugcacguaaaguacuugu

SEQ ID NO: 1458494 - RNA, 16 nt, Human
ugcacguaaaguacuu

SEQ ID NO: 1458495 - RNA, 12 nt, Human
uggcagaaaagu

SEQ ID NO: 1458496 - RNA, 16 nt, Human
uggcacuuugaagggg

SEQ ID NO: 1458497 - RNA, 11 nt, Human
uggcacuuuga

SEQ ID NO: 1458498 - RNA, 21 nt, Human
uggcaggcagaggcccaggcu

SEQ ID NO: 1458499 - RNA, 18 nt, Human
uggcaggcagaggcccag

SEQ ID NO: 1458500 - RNA, 17 nt, Human
uggcaggcagaggccca

SEQ ID NO: 1458501 - RNA, 12 nt, Human
uggcaggcagag

SEQ ID NO: 1458502 - RNA, 21 nt, Human
uggaugccaauauuaaaucug

SEQ ID NO: 1458503 - RNA, 20 nt, Human
uggaugccaauauuaaaucu

SEQ ID NO: 1458504 - RNA, 20 nt, Human
uggaugauacuaauaaacua

SEQ ID NO: 1458505 - RNA, 23 nt, Human
uggaugcagugcucgcuguugcu

SEQ ID NO: 1458506 - RNA, 15 nt, Human
uggcaggcuggccag

SEQ ID NO: 1458507 - RNA, 18 nt, Human
uggcaggcuggccagucc

SEQ ID NO: 1458508 - RNA, 14 nt, Human
uggcaggcuggcca

SEQ ID NO: 1458509 - RNA, 13 nt, Human
uggcaggcuggcc

SEQ ID NO: 1458510 - RNA, 12 nt, Human
uggcaggcuggc

SEQ ID NO: 1458511 - RNA, 15 nt, Human
uggcaggccagcugu

SEQ ID NO: 1458512 - RNA, 20 nt, Human
uggcaggcaggcucccaggg

SEQ ID NO: 1458513 - RNA, 22 nt, Human
uggcaggcagaggcccaggcug

SEQ ID NO: 1458514 - RNA, 23 nt, Human
uggcaggcagaggcccaggcugc

SEQ ID NO: 1458515 - RNA, 18 nt, Human
uggccagacacaggcccu

SEQ ID NO: 1458516 - RNA, 13 nt, Human
uggccagacacag

SEQ ID NO: 1458517 - RNA, 12 nt, Human
uggccagacaca

SEQ ID NO: 1458518 - RNA, 16 nt, Human
uggcaguuuauauuua

SEQ ID NO: 1458519 - RNA, 23 nt, Human
uggccacuccgagaggugggcca

SEQ ID NO: 1458520 - RNA, 20 nt, Human
uggccacuccgagagguggg

SEQ ID NO: 1458521 - RNA, 21 nt, Human
uggccacuugggucuucccug

SEQ ID NO: 1458522 - RNA, 20 nt, Human
uggcaguuuauauuuaacuc

SEQ ID NO: 1458523 - RNA, 13 nt, Human
uggcaguuauauu

SEQ ID NO: 1458524 - RNA, 18 nt, Human
uggccacuccgagaggug

SEQ ID NO: 1458525 - RNA, 14 nt, Human
uggccacuccgaga

SEQ ID NO: 1458526 - RNA, 16 nt, Human
uggaugauacuaauaa

SEQ ID NO: 1458527 - RNA, 23 nt, Human
uggaugagcucccacaagccuga

SEQ ID NO: 1458528 - RNA, 19 nt, Human
uggaugauauaaugcgggu

SEQ ID NO: 1458529 - RNA, 13 nt, Human
uggaugagcuccc

SEQ ID NO: 1458530 - RNA, 14 nt, Human
uggaugacauuaaa

SEQ ID NO: 1458531 - RNA, 21 nt, Human
uggaucuugauguaaggaugg

SEQ ID NO: 1458532 - RNA, 16 nt, Human
uggauauaguuuuacu

SEQ ID NO: 1458533 - RNA, 15 nt, Human
uggauacuuggauuu

SEQ ID NO: 1458534 - RNA, 14 nt, Human
uggauacuuggauu

SEQ ID NO: 1458535 - RNA, 22 nt, Human
uggauacuuggauuuaguuuca

SEQ ID NO: 1458536 - RNA, 15 nt, Human
uggauaccauuauau

SEQ ID NO: 1458537 - RNA, 13 nt, Human
uggauaccauuau

SEQ ID NO: 1458538 - RNA, 12 nt, Human
uggaggcugcuc

SEQ ID NO: 1458539 - RNA, 15 nt, Human
uggaggcccaguuca

SEQ ID NO: 1458540 - RNA, 18 nt, Human
uggaggccccaacccugu

SEQ ID NO: 1458541 - RNA, 12 nt, Human
uggaggcccagu

SEQ ID NO: 1458542 - RNA, 18 nt, Human
uggaggcccaggcuggga

SEQ ID NO: 1458543 - RNA, 14 nt, Human
uggaggcccaggcu

SEQ ID NO: 1458544 - RNA, 12 nt, Human
uggaggcccagg

SEQ ID NO: 1458545 - RNA, 22 nt, Human
uggaggccauugugugagccua

SEQ ID NO: 1458546 - RNA, 14 nt, Human
uggaggcaggggcu

SEQ ID NO: 1458547 - RNA, 19 nt, Human
uggaggcaggggcuuccug

SEQ ID NO: 1458548 - RNA, 21 nt, Human
uggaggccacuguuuggaaau

SEQ ID NO: 1458549 - RNA, 20 nt, Human
uggaggcaggggcuuccugg

SEQ ID NO: 1458550 - RNA, 18 nt, Human
uggaggcaggggcuuccu

SEQ ID NO: 1458551 - RNA, 17 nt, Human
uggaggcaggggcuucc

SEQ ID NO: 1458552 - RNA, 13 nt, Human
uggacaggaugug

SEQ ID NO: 1458553 - RNA, 23 nt, Human
uggacaggacuaacacucagaag

SEQ ID NO: 1458554 - RNA, 13 nt, Human
uggacagcuugug

SEQ ID NO: 1458555 - RNA, 12 nt, Human
uggacagcuugu

SEQ ID NO: 1458556 - RNA, 19 nt, Human
uggacagcugugccucgcu

SEQ ID NO: 1458557 - RNA, 18 nt, Human
uggacagcugugccucgc

SEQ ID NO: 1458558 - RNA, 16 nt, Human
uggacagcugugccuc

SEQ ID NO: 1458559 - RNA, 15 nt, Human
uggacagcugugccu

SEQ ID NO: 1458560 - RNA, 14 nt, Human
uggacagcugugcc

SEQ ID NO: 1458561 - RNA, 13 nt, Human
uggacagcugugc

SEQ ID NO: 1458562 - RNA, 19 nt, Human
uggagagagcagacuggcg

SEQ ID NO: 1458563 - RNA, 23 nt, Human
uggagacugugugugcccucugg

SEQ ID NO: 1458564 - RNA, 21 nt, Human
uggagacuuagggcaccaggg

SEQ ID NO: 1458565 - RNA, 16 nt, Human
uggagacuuagggcac

SEQ ID NO: 1458566 - RNA, 21 nt, Human
uggagacugugugugcccucu

SEQ ID NO: 1458567 - RNA, 20 nt, Human
uggagacugugugugcccuc

SEQ ID NO: 1458568 - RNA, 18 nt, Human
uggagacugugugugccc

SEQ ID NO: 1458569 - RNA, 21 nt, Human
uggagacugucuggccccccu

SEQ ID NO: 1458570 - RNA, 20 nt, Human
uggagacugucuggcccccc

SEQ ID NO: 1458571 - RNA, 18 nt, Human
uggacaggauguguuugc

SEQ ID NO: 1458572 - RNA, 18 nt, Human
uggagagggaaugugaaa

SEQ ID NO: 1458573 - RNA, 19 nt, Human
uggagagggaaugugaaau

SEQ ID NO: 1458574 - RNA, 17 nt, Human
uggagagggaaugugaa

SEQ ID NO: 1458575 - RNA, 16 nt, Human
uggagagggaauguga

SEQ ID NO: 1458576 - RNA, 15 nt, Human
uggagagggaaugug

SEQ ID NO: 1458577 - RNA, 19 nt, Human
uggagaugaggccagacca

SEQ ID NO: 1458578 - RNA, 22 nt, Human
uggagaugaggccagaccaugg

SEQ ID NO: 1458579 - RNA, 18 nt, Human
uggagaugaggccagacc

SEQ ID NO: 1458580 - RNA, 24 nt, Human
uggagaugaggccagaccauggac

SEQ ID NO: 1458581 - RNA, 16 nt, Human
uggagauugaccugga

SEQ ID NO: 1458582 - RNA, 15 nt, Human
uggagauugaccugg

SEQ ID NO: 1458583 - RNA, 13 nt, Human
uggagauguuuag

SEQ ID NO: 1458584 - RNA, 16 nt, Human
ugcuucuaaguaaaua

SEQ ID NO: 1458585 - RNA, 18 nt, Human
ugcuucgggcccuuccca

SEQ ID NO: 1458586 - RNA, 15 nt, Human
ugcuucgggcccuuc

SEQ ID NO: 1458587 - RNA, 22 nt, Human
ugcuucuaaguaaauacaauuu

SEQ ID NO: 1458588 - RNA, 20 nt, Human
ugcuucuaaguaaauacaau

SEQ ID NO: 1458589 - RNA, 19 nt, Human
ugcuucuaaguaaauacaa

SEQ ID NO: 1458590 - RNA, 18 nt, Human
ugcuucuaaguaaauaca

SEQ ID NO: 1458591 - RNA, 17 nt, Human
ugcuucuaaguaaauac

SEQ ID NO: 1458592 - RNA, 19 nt, Human
ugcuucuaguucugccagg

SEQ ID NO: 1458593 - RNA, 18 nt, Human
ugcuucuaguucugccag

SEQ ID NO: 1458594 - RNA, 20 nt, Human
ugcuucucugacuucugccu

SEQ ID NO: 1458595 - RNA, 19 nt, Human
ugcuucucugacuucugcc

SEQ ID NO: 1458596 - RNA, 17 nt, Human
ugcuucucugacuucug

SEQ ID NO: 1458597 - RNA, 14 nt, Human
ugcuucucugacuu

SEQ ID NO: 1458598 - RNA, 20 nt, Human
ugcuucuaguucugccagga

SEQ ID NO: 1458599 - RNA, 23 nt, Human
ugcuucucugacuucugccugga

SEQ ID NO: 1458600 - RNA, 22 nt, Human
ugcuucucugacuucugccugg

SEQ ID NO: 1458601 - RNA, 21 nt, Human
ugcuucucugacuucugccug

SEQ ID NO: 1458602 - RNA, 14 nt, Human
ugcuucuguuuuau

SEQ ID NO: 1458603 - RNA, 15 nt, Human
ugcuucuuucuagaa

SEQ ID NO: 1458604 - RNA, 19 nt, Human
ugcuucuuucuuugggaau

SEQ ID NO: 1458605 - RNA, 14 nt, Human
ugcuucuuucuaga

SEQ ID NO: 1458606 - RNA, 17 nt, Human
ugcuuuuuuguuuuggc

SEQ ID NO: 1458607 - RNA, 18 nt, Human
ugcuuuccauucgugaaa

SEQ ID NO: 1458608 - RNA, 16 nt, Human
ugcuuuuuguguuuuu

SEQ ID NO: 1458609 - RNA, 14 nt, Human
ugcuuuauuccaga

SEQ ID NO: 1458610 - RNA, 17 nt, Human
ugcuuuauuccagaaug

SEQ ID NO: 1458611 - RNA, 15 nt, Human
ugcuuuauuccagaa

SEQ ID NO: 1458612 - RNA, 22 nt, Human
uggaacugaagggggcggccua

SEQ ID NO: 1458613 - RNA, 21 nt, Human
uggaacugaagggggcggccu

SEQ ID NO: 1458614 - RNA, 20 nt, Human
uggaacugaagggggcggcc

SEQ ID NO: 1458615 - RNA, 16 nt, Human
uggaacugaagggggc

SEQ ID NO: 1458616 - RNA, 15 nt, Human
uggaacugaaggggg

SEQ ID NO: 1458617 - RNA, 13 nt, Human
uggaacugaaggg

SEQ ID NO: 1458618 - RNA, 13 nt, Human
uggaacucugcuu

SEQ ID NO: 1458619 - RNA, 17 nt, Human
uggaaccucagccuggc

SEQ ID NO: 1458620 - RNA, 16 nt, Human
uggaaccucagccugg

SEQ ID NO: 1458621 - RNA, 15 nt, Human
uggaaccucagccug

SEQ ID NO: 1458622 - RNA, 17 nt, Human
uggaacuggaggcaggg

SEQ ID NO: 1458623 - RNA, 23 nt, Human
uggaacugucucucaugaaccuc

SEQ ID NO: 1458624 - RNA, 16 nt, Human
uggaacuggaggcagg

SEQ ID NO: 1458625 - RNA, 13 nt, Human
uggaacuggaggc

SEQ ID NO: 1458626 - RNA, 20 nt, Human
uggaacuggaauccuuucag

SEQ ID NO: 1458627 - RNA, 20 nt, Human
uggaacugcugccacugagg

SEQ ID NO: 1458628 - RNA, 19 nt, Human
uggaacugcugccacugag

SEQ ID NO: 1458629 - RNA, 17 nt, Human
uggaacugcugccacug

SEQ ID NO: 1458630 - RNA, 15 nt, Human
uggaacugcugccac

SEQ ID NO: 1458631 - RNA, 13 nt, Human
uggaacugcugcc

SEQ ID NO: 1458632 - RNA, 16 nt, Human
uggaaaaacagcaugu

SEQ ID NO: 1458633 - RNA, 14 nt, Human
ugcuuuuuuuuccu

SEQ ID NO: 1458634 - RNA, 23 nt, Human
ugcuuuuuuuguguguauuugcu

SEQ ID NO: 1458635 - RNA, 17 nt, Human
ugcuuuuuuugugugua

SEQ ID NO: 1458636 - RNA, 17 nt, Human
ugcuuuuuuuuccuucu

SEQ ID NO: 1458637 - RNA, 15 nt, Human
uggaacccagacuca

SEQ ID NO: 1458638 - RNA, 14 nt, Human
uggaacccagacuc

SEQ ID NO: 1458639 - RNA, 12 nt, Human
uggaacccagac

SEQ ID NO: 1458640 - RNA, 17 nt, Human
uggaacccagacucaga

SEQ ID NO: 1458641 - RNA, 16 nt, Human
uggaacccagacucag

SEQ ID NO: 1458642 - RNA, 22 nt, Human
uggaacccagacucagacauug

SEQ ID NO: 1458643 - RNA, 19 nt, Human
uggaacccuaaauaauaaa

SEQ ID NO: 1458644 - RNA, 13 nt, Human
uggaauccuuuca

SEQ ID NO: 1458645 - RNA, 23 nt, Human
uggaaucaggaauauuuuccaaa

SEQ ID NO: 1458646 - RNA, 22 nt, Human
uggaaucaggaauauuuuccaa

SEQ ID NO: 1458647 - RNA, 21 nt, Human
uggaaucaggaauauuuucca

SEQ ID NO: 1458648 - RNA, 16 nt, Human
uggaaucagcucagga

SEQ ID NO: 1458649 - RNA, 22 nt, Human
uggaaucacuguuuagaacaca

SEQ ID NO: 1458650 - RNA, 20 nt, Human
uggaauauuguccauugucc

SEQ ID NO: 1458651 - RNA, 15 nt, Human
uggaauauuguccau

SEQ ID NO: 1458652 - RNA, 21 nt, Human
uggaauguggccccugaacaa

SEQ ID NO: 1458653 - RNA, 14 nt, Human
uggaauguaaucaa

SEQ ID NO: 1458654 - RNA, 23 nt, Human
uggaauguggccccugaacaaga

SEQ ID NO: 1458655 - RNA, 18 nt, Human
uggaaguuauuaacuuua

SEQ ID NO: 1458656 - RNA, 15 nt, Human
uggaauacaugaaau

SEQ ID NO: 1458657 - RNA, 14 nt, Human
uggaauacaugaaa

SEQ ID NO: 1458658 - RNA, 19 nt, Human
uggaaguuuagcucugaga

SEQ ID NO: 1458659 - RNA, 18 nt, Human
uggaaguuuagcucugag

SEQ ID NO: 1458660 - RNA, 20 nt, Human
uggaaguuuagcucugagaa

SEQ ID NO: 1458661 - RNA, 18 nt, Human
uggaauacuuuuuguuau

SEQ ID NO: 1458662 - RNA, 13 nt, Human
uggaauacuuuuu

SEQ ID NO: 1458663 - RNA, 12 nt, Human
uggaauacuuuu

SEQ ID NO: 1458664 - RNA, 16 nt, Human
uggaauacucuuauau

SEQ ID NO: 1458665 - RNA, 15 nt, Human
uggcucucaccucua

SEQ ID NO: 1458666 - RNA, 14 nt, Human
uggcucuacuuccc

SEQ ID NO: 1458667 - RNA, 19 nt, Human
uggcucuaauucacagugc

SEQ ID NO: 1458668 - RNA, 21 nt, Human
uggcucgaaucucugugccuu

SEQ ID NO: 1458669 - RNA, 18 nt, Human
uggcuccuugugccagag

SEQ ID NO: 1458670 - RNA, 20 nt, Human
uggcucgaaucucugugccu

SEQ ID NO: 1458671 - RNA, 19 nt, Human
uggcucgaaucucugugcc

SEQ ID NO: 1458672 - RNA, 18 nt, Human
uggcucgaaucucugugc

SEQ ID NO: 1458673 - RNA, 20 nt, Human
uggcuccuugugccagagaa

SEQ ID NO: 1458674 - RNA, 17 nt, Human
uggcuccuugugccaga

SEQ ID NO: 1458675 - RNA, 19 nt, Human
uggcuccuucccaucgcug

SEQ ID NO: 1458676 - RNA, 17 nt, Human
uggcuccuucccaucgc

SEQ ID NO: 1458677 - RNA, 14 nt, Human
uggcuaaagcucga

SEQ ID NO: 1458678 - RNA, 18 nt, Human
uggcguaggcuacagaga

SEQ ID NO: 1458679 - RNA, 24 nt, Human
uggccuuugcgcuccuggcccagc

SEQ ID NO: 1458680 - RNA, 19 nt, Human
uggccuuugcgcuccuggc

SEQ ID NO: 1458681 - RNA, 16 nt, Human
uggccuuugcgcuccu

SEQ ID NO: 1458682 - RNA, 14 nt, Human
uggccuuugcgcuc

SEQ ID NO: 1458683 - RNA, 12 nt, Human
uggccuuuauua

SEQ ID NO: 1458684 - RNA, 22 nt, Human
uggccuuuauuaaaaacugagu

SEQ ID NO: 1458685 - RNA, 19 nt, Human
uggccuuguucugucacca

SEQ ID NO: 1458686 - RNA, 14 nt, Human
uggccuuguucugu

SEQ ID NO: 1458687 - RNA, 22 nt, Human
uggcguaggcuacagagaagcc

SEQ ID NO: 1458688 - RNA, 23 nt, Human
uggcguaggcuacagagaagccu

SEQ ID NO: 1458689 - RNA, 21 nt, Human
uggcguaggcuacagagaagc

SEQ ID NO: 1458690 - RNA, 20 nt, Human
uggcguaggcuacagagaag

SEQ ID NO: 1458691 - RNA, 19 nt, Human
uggcguaggcuacagagaa

SEQ ID NO: 1458692 - RNA, 22 nt, Human
uggccuuuuucauuuaucuaua

SEQ ID NO: 1458693 - RNA, 20 nt, Human
uggccuuuuucauuuaucua

SEQ ID NO: 1458694 - RNA, 19 nt, Human
uggccuuuuucauuuaucu

SEQ ID NO: 1458695 - RNA, 16 nt, Human
uggccuuuuucauuua

SEQ ID NO: 1458696 - RNA, 17 nt, Human
uggcgccgucuccaggg

SEQ ID NO: 1458697 - RNA, 15 nt, Human
uggcgccgucuccag

SEQ ID NO: 1458698 - RNA, 21 nt, Human
uggcgcgaucucggcucacug

SEQ ID NO: 1458699 - RNA, 18 nt, Human
uggcgccgucuccagggg

SEQ ID NO: 1458700 - RNA, 18 nt, Human
uggcgcgaucucagcuca

SEQ ID NO: 1458701 - RNA, 22 nt, Human
uggcuuuuauuaaugcacuuuc

SEQ ID NO: 1458702 - RNA, 17 nt, Human
ugggaauggaggggcag

SEQ ID NO: 1458703 - RNA, 19 nt, Human
ugggaauggaggggcagag

SEQ ID NO: 1458704 - RNA, 21 nt, Human
ugggacagucaccucauggaa

SEQ ID NO: 1458705 - RNA, 20 nt, Human
ugggacagucaccucaugga

SEQ ID NO: 1458706 - RNA, 18 nt, Human
ugggacagucaccucaug

SEQ ID NO: 1458707 - RNA, 23 nt, Human
ugggaauggaggggcagagccag

SEQ ID NO: 1458708 - RNA, 16 nt, Human
uggcuguaaggcucua

SEQ ID NO: 1458709 - RNA, 15 nt, Human
uggcuguaaggcucu

SEQ ID NO: 1458710 - RNA, 21 nt, Human
uggcugguguuaacagaaggg

SEQ ID NO: 1458711 - RNA, 20 nt, Human
uggcugguguuaacagaagg

SEQ ID NO: 1458712 - RNA, 21 nt, Human
uggcuguaaggcucuagauca

SEQ ID NO: 1458713 - RNA, 20 nt, Human
uggcuguaaggcucuagauc

SEQ ID NO: 1458714 - RNA, 19 nt, Human
uggcuguaaggcucuagau

SEQ ID NO: 1458715 - RNA, 21 nt, Human
uggcuuuuauuaaugcacuuu

SEQ ID NO: 1458716 - RNA, 20 nt, Human
uggcuuuuauuaaugcacuu

SEQ ID NO: 1458717 - RNA, 17 nt, Human
uggcuuuuauuaaugca

SEQ ID NO: 1458718 - RNA, 20 nt, Human
uggcuuugugauucaaucug

SEQ ID NO: 1458719 - RNA, 19 nt, Human
uggcugguguuaacagaag

SEQ ID NO: 1458720 - RNA, 16 nt, Human
ugggagcugaggccac

SEQ ID NO: 1458721 - RNA, 22 nt, Human
ugggagcuccacucugcuucuc

SEQ ID NO: 1458722 - RNA, 19 nt, Human
ugggagcuccacucugcuu

SEQ ID NO: 1458723 - RNA, 16 nt, Human
ugggagcuccacucug

SEQ ID NO: 1458724 - RNA, 23 nt, Human
ugggagccgggucugccucuucu

SEQ ID NO: 1458725 - RNA, 18 nt, Human
ugggagccgggucugccu

SEQ ID NO: 1458726 - RNA, 14 nt, Human
ugggagccgggucu

SEQ ID NO: 1458727 - RNA, 19 nt, Human
ugggagcccccagccuguc

SEQ ID NO: 1458728 - RNA, 20 nt, Human
ugggagcccccagccuguca

SEQ ID NO: 1458729 - RNA, 18 nt, Human
ugggagcccccagccugu

SEQ ID NO: 1458730 - RNA, 17 nt, Human
ugggagcccccagccug

SEQ ID NO: 1458731 - RNA, 16 nt, Human
ugggagcccccagccu

SEQ ID NO: 1458732 - RNA, 15 nt, Human
ugggagcccccagcc

SEQ ID NO: 1458733 - RNA, 12 nt, Human
ugggagccaggg

SEQ ID NO: 1458734 - RNA, 22 nt, Human
ugggagcaaacugcaugcccag

SEQ ID NO: 1458735 - RNA, 20 nt, Human
ugggagcaaacugcaugccc

SEQ ID NO: 1458736 - RNA, 19 nt, Human
ugggagcaaacugcaugcc

SEQ ID NO: 1458737 - RNA, 14 nt, Human
ugggaccaggcacc

SEQ ID NO: 1458738 - RNA, 13 nt, Human
ugggaccaggcac

SEQ ID NO: 1458739 - RNA, 17 nt, Human
ugggaccacaacuauuu

SEQ ID NO: 1458740 - RNA, 17 nt, Human
ugggacauuccaaagaa

SEQ ID NO: 1458741 - RNA, 20 nt, Human
ugggacauuugcucauggaa

SEQ ID NO: 1458742 - RNA, 19 nt, Human
ugggacauuugcucaugga

SEQ ID NO: 1458743 - RNA, 20 nt, Human
uggggcaggaguagcugagc

SEQ ID NO: 1458744 - RNA, 19 nt, Human
uggggcaggaguagcugag

SEQ ID NO: 1458745 - RNA, 18 nt, Human
uggggcaggaguagcuga

SEQ ID NO: 1458746 - RNA, 15 nt, Human
uggggcaggaguagc

SEQ ID NO: 1458747 - RNA, 14 nt, Human
uggggcaggaguag

SEQ ID NO: 1458748 - RNA, 13 nt, Human
uggggcaggagua

SEQ ID NO: 1458749 - RNA, 12 nt, Human
uggggcaggagu

SEQ ID NO: 1458750 - RNA, 22 nt, Human
ugggcuugggccuaggcugcau

SEQ ID NO: 1458751 - RNA, 19 nt, Human
ugggcuugggccuaggcug

SEQ ID NO: 1458752 - RNA, 18 nt, Human
ugggcuugggccuaggcu

SEQ ID NO: 1458753 - RNA, 15 nt, Human
ugggcuugggccuag

SEQ ID NO: 1458754 - RNA, 14 nt, Human
ugggcuugggccua

SEQ ID NO: 1458755 - RNA, 13 nt, Human
ugggcuugggccu

SEQ ID NO: 1458756 - RNA, 22 nt, Human
ugggcgcugguccuuucuuccg

SEQ ID NO: 1458757 - RNA, 14 nt, Human
ugggcgcugguccu

SEQ ID NO: 1458758 - RNA, 16 nt, Human
ugggccuugggcuccg

SEQ ID NO: 1458759 - RNA, 15 nt, Human
ugggccuugggcucc

SEQ ID NO: 1458760 - RNA, 14 nt, Human
ugggccuugggcuc

SEQ ID NO: 1458761 - RNA, 19 nt, Human
ugggccuuggccuggagca

SEQ ID NO: 1458762 - RNA, 18 nt, Human
ugggccuuggccuggagc

SEQ ID NO: 1458763 - RNA, 17 nt, Human
ugggccuuggccuggag

SEQ ID NO: 1458764 - RNA, 16 nt, Human
ugggccuuggccugga

SEQ ID NO: 1458765 - RNA, 16 nt, Human
ugggcaguuuuuugaa

SEQ ID NO: 1458766 - RNA, 15 nt, Human
ugggcaguuuuuuga

SEQ ID NO: 1458767 - RNA, 13 nt, Human
ugggaggaaggac

SEQ ID NO: 1458768 - RNA, 20 nt, Human
ugggagcugguuagaaaugc

SEQ ID NO: 1458769 - RNA, 18 nt, Human
ugggagcugguuagaaau

SEQ ID NO: 1458770 - RNA, 16 nt, Human
ugggagcuugggaaug

SEQ ID NO: 1458771 - RNA, 19 nt, Human
ugggagcugguuagaaaug

SEQ ID NO: 1458772 - RNA, 16 nt, Human
ugggagcuuuuguaga

SEQ ID NO: 1458773 - RNA, 15 nt, Human
ugggccuuggccugg

SEQ ID NO: 1458774 - RNA, 13 nt, Human
ugggccuuggccu

SEQ ID NO: 1458775 - RNA, 12 nt, Human
ugggccuuggcc

SEQ ID NO: 1458776 - RNA, 22 nt, Human
ugggcaugagggguuccucccc

SEQ ID NO: 1458777 - RNA, 23 nt, Human
ugggcaugagggguuccuccccu

SEQ ID NO: 1458778 - RNA, 19 nt, Human
ugggcaucuuuuguauuaa

SEQ ID NO: 1458779 - RNA, 18 nt, Human
ugggcaucuuuuguauua

SEQ ID NO: 1458780 - RNA, 15 nt, Human
ugggcaucuuuugua

SEQ ID NO: 1458781 - RNA, 13 nt, Human
ugggcaucuuuug

SEQ ID NO: 1458782 - RNA, 20 nt, Human
ugggcaugguguucuccugc

SEQ ID NO: 1458783 - RNA, 19 nt, Human
ugggcaugguguucuccug

SEQ ID NO: 1458784 - RNA, 13 nt, Human
ugggcauucaaau

SEQ ID NO: 1458785 - RNA, 17 nt, Human
uggguccaugggcagag

SEQ ID NO: 1458786 - RNA, 14 nt, Human
uggguccaugggca

SEQ ID NO: 1458787 - RNA, 13 nt, Human
uggguccaggagg

SEQ ID NO: 1458788 - RNA, 15 nt, Human
uggguuccacagacg

SEQ ID NO: 1458789 - RNA, 14 nt, Human
uggguuccacagac

SEQ ID NO: 1458790 - RNA, 13 nt, Human
uggguuccacaga

SEQ ID NO: 1458791 - RNA, 15 nt, Human
uggguugucaccaag

SEQ ID NO: 1458792 - RNA, 15 nt, Human
uggguugggaucagg

SEQ ID NO: 1458793 - RNA, 21 nt, Human
uggguugcagacaggaaucuu

SEQ ID NO: 1458794 - RNA, 16 nt, Human
uggguugcagacagga

SEQ ID NO: 1458795 - RNA, 22 nt, Human
uggguucugccugccagcugca

SEQ ID NO: 1458796 - RNA, 21 nt, Human
uggguucugccugccagcugc

SEQ ID NO: 1458797 - RNA, 18 nt, Human
uggggcaggcugggccau

SEQ ID NO: 1458798 - RNA, 17 nt, Human
uggggcaggcugggcca

SEQ ID NO: 1458799 - RNA, 16 nt, Human
uggggcaggcugggcc

SEQ ID NO: 1458800 - RNA, 15 nt, Human
uggggcaggcugggc

SEQ ID NO: 1458801 - RNA, 14 nt, Human
uggggcaggcuggg

SEQ ID NO: 1458802 - RNA, 21 nt, Human
uggggcaggccaccuggcucu

SEQ ID NO: 1458803 - RNA, 21 nt, Human
uggggcaggaguagcugagcu

SEQ ID NO: 1458804 - RNA, 22 nt, Human
uggggcaggaguagcugagcuc

SEQ ID NO: 1458805 - RNA, 18 nt, Human
uggggcaggggccggggg

SEQ ID NO: 1458806 - RNA, 20 nt, Human
uggggcaggcugggccaugu

SEQ ID NO: 1458807 - RNA, 16 nt, Human
uggggcaggggccggg

SEQ ID NO: 1458808 - RNA, 19 nt, Human
ugggguggggggggugcug

SEQ ID NO: 1458809 - RNA, 16 nt, Human
uggguagacacacaug

SEQ ID NO: 1458810 - RNA, 17 nt, Human
uggguagacacacauga

SEQ ID NO: 1458811 - RNA, 21 nt, Human
ugggguggggggggugcuggg

SEQ ID NO: 1458812 - RNA, 22 nt, Human
ugggguggggggggugcugggc

SEQ ID NO: 1458813 - RNA, 14 nt, Human
uggguccaggagga

SEQ ID NO: 1458814 - RNA, 12 nt, Human
uggguccaggag

SEQ ID NO: 1458815 - RNA, 13 nt, Human
ugggucaggcagg

SEQ ID NO: 1458816 - RNA, 18 nt, Human
uggguaggguaaaucagu

SEQ ID NO: 1458817 - RNA, 12 nt, Human
uggguauaaaag

SEQ ID NO: 1458818 - RNA, 14 nt, Human
uggguauaaaagau

SEQ ID NO: 1458819 - RNA, 23 nt, Human
uggguaggaaagaggaagcaaau

SEQ ID NO: 1458820 - RNA, 17 nt, Human
uguuuguuuccuuuguu

SEQ ID NO: 1458821 - RNA, 18 nt, Human
uguuuuaaaaugagaaau

SEQ ID NO: 1458822 - RNA, 14 nt, Human
uguuuguuuaauuu

SEQ ID NO: 1458823 - RNA, 13 nt, Human
uguuuguuuaauu

SEQ ID NO: 1458824 - RNA, 22 nt, Human
uguuuacagauaauuaccuacu

SEQ ID NO: 1458825 - RNA, 16 nt, Human
uguuuacagauaauua

SEQ ID NO: 1458826 - RNA, 15 nt, Human
uguuuacagauaauu

SEQ ID NO: 1458827 - RNA, 16 nt, Human
uguuucuauuuuuuga

SEQ ID NO: 1458828 - RNA, 21 nt, Human
uguuucucccccauguucugu

SEQ ID NO: 1458829 - RNA, 13 nt, Human
uguuucuccccca

SEQ ID NO: 1458830 - RNA, 22 nt, Human
uguuucuauuuuuugaaaagca

SEQ ID NO: 1458831 - RNA, 12 nt, Human
uguuuuuucuaa

SEQ ID NO: 1458832 - RNA, 22 nt, Human
uguuuuucuauuaaaagacuca

SEQ ID NO: 1458833 - RNA, 21 nt, Human
uguuuuucuauuaaaagacuc

SEQ ID NO: 1458834 - RNA, 20 nt, Human
uguuuuucuauuaaaagacu

SEQ ID NO: 1458835 - RNA, 19 nt, Human
uguuuuucuauuaaaagac

SEQ ID NO: 1458836 - RNA, 18 nt, Human
uguuuuucuauuaaaaga

SEQ ID NO: 1458837 - RNA, 17 nt, Human
uguuuuucuauuaaaag

SEQ ID NO: 1458838 - RNA, 16 nt, Human
uguuuuucuauuaaaa

SEQ ID NO: 1458839 - RNA, 15 nt, Human
uguuuuucuauuaaa

SEQ ID NO: 1458840 - RNA, 14 nt, Human
uguuuuucuauuaa

SEQ ID NO: 1458841 - RNA, 13 nt, Human
uguuuuucuauua

SEQ ID NO: 1458842 - RNA, 13 nt, Human
uguuuuucuaaag

SEQ ID NO: 1458843 - RNA, 16 nt, Human
uguuuuuccuuccaau

SEQ ID NO: 1458844 - RNA, 11 nt, Human
uguuuuucauu

SEQ ID NO: 1458845 - RNA, 13 nt, Human
uguuuuucacauu

SEQ ID NO: 1458846 - RNA, 16 nt, Human
uguuuuuaucuuuuua

SEQ ID NO: 1458847 - RNA, 23 nt, Human
uguuuuggcugaaauucuccugg

SEQ ID NO: 1458848 - RNA, 18 nt, Human
uguuuuggcugaaauucu

SEQ ID NO: 1458849 - RNA, 19 nt, Human
uguuuuggacaguuuacca

SEQ ID NO: 1458850 - RNA, 14 nt, Human
uguuuugcuaaagg

SEQ ID NO: 1458851 - RNA, 22 nt, Human
uguuuuaaacauuaauagcagc

SEQ ID NO: 1458852 - RNA, 23 nt, Human
uguuuuaaaaugagaaaucuaaa

SEQ ID NO: 1458853 - RNA, 19 nt, Human
uuaaagagucuagauucaa

SEQ ID NO: 1458854 - RNA, 14 nt, Human
uuaaagccuccuca

SEQ ID NO: 1458855 - RNA, 23 nt, Human
uuaaagagucuagauucaaaggu

SEQ ID NO: 1458856 - RNA, 18 nt, Human
uuaaagagucuagauuca

SEQ ID NO: 1458857 - RNA, 17 nt, Human
uuaaagagucuagauuc

SEQ ID NO: 1458858 - RNA, 16 nt, Human
uuaaagagucuagauu

SEQ ID NO: 1458859 - RNA, 15 nt, Human
uuaaagagucuagau

SEQ ID NO: 1458860 - RNA, 14 nt, Human
uuaaagagucuaga

SEQ ID NO: 1458861 - RNA, 12 nt, Human
uuaaagagucua

SEQ ID NO: 1458862 - RNA, 20 nt, Human
uuaaacuuaaucuaaaugga

SEQ ID NO: 1458863 - RNA, 22 nt, Human
uuaaacuuaaucuaaauggaac

SEQ ID NO: 1458864 - RNA, 12 nt, Human
uuaaaagacuca

SEQ ID NO: 1458865 - RNA, 18 nt, Human
uuaaaagacucauccguc

SEQ ID NO: 1458866 - RNA, 14 nt, Human
uuaaaagacucauc

SEQ ID NO: 1458867 - RNA, 13 nt, Human
uuaaaagacucau

SEQ ID NO: 1458868 - RNA, 16 nt, Human
uuaaacuuaaucuaaa

SEQ ID NO: 1458869 - RNA, 18 nt, Human
uuaaacuuaaucuaaaug

SEQ ID NO: 1458870 - RNA, 14 nt, Human
uuaaaacagacacu

SEQ ID NO: 1458871 - RNA, 21 nt, Human
uuaaaacagacacuggcaugg

SEQ ID NO: 1458872 - RNA, 15 nt, Human
uuaaaacauuaaaau

SEQ ID NO: 1458873 - RNA, 19 nt, Human
uuaaaagaaugauuaugaa

SEQ ID NO: 1458874 - RNA, 17 nt, Human
uuaaauguaaagauauu

SEQ ID NO: 1458875 - RNA, 13 nt, Human
uuaaauguaaaga

SEQ ID NO: 1458876 - RNA, 18 nt, Human
uuaaauguaaagacaaaa

SEQ ID NO: 1458877 - RNA, 11 nt, Human
uuaacauuccu

SEQ ID NO: 1458878 - RNA, 17 nt, Human
uuaacauuccaagacuc

SEQ ID NO: 1458879 - RNA, 14 nt, Human
uuaacauuccaaga

SEQ ID NO: 1458880 - RNA, 13 nt, Human
uuaacauuccaag

SEQ ID NO: 1458881 - RNA, 14 nt, Human
uuaaagcuguuauu

SEQ ID NO: 1458882 - RNA, 19 nt, Human
uuaaauagcuuuuuucucu

SEQ ID NO: 1458883 - RNA, 20 nt, Human
uuaaagcuuccauuguuguc

SEQ ID NO: 1458884 - RNA, 15 nt, Human
uuaaagcuuccauug

SEQ ID NO: 1458885 - RNA, 16 nt, Human
uuaaaugcaccuggaa

SEQ ID NO: 1458886 - RNA, 17 nt, Human
uuaaaugcaccuggaau

SEQ ID NO: 1458887 - RNA, 18 nt, Human
uuaaaugcaccuggaaua

SEQ ID NO: 1458888 - RNA, 19 nt, Human
uuaacauuccaagacucua

SEQ ID NO: 1458889 - RNA, 23 nt, Human
uuaacauuccucaugaauguaaa

SEQ ID NO: 1458890 - RNA, 17 nt, Human
uuaaggaugcuuguaca

SEQ ID NO: 1458891 - RNA, 18 nt, Human
uuaaggaugcuuguacau

SEQ ID NO: 1458892 - RNA, 19 nt, Human
uuaaggaugcuuguacaua

SEQ ID NO: 1458893 - RNA, 20 nt, Human
uuaaggaugcuuguacauaa

SEQ ID NO: 1458894 - RNA, 22 nt, Human
uuaaggaugcuuguacauaaug

SEQ ID NO: 1458895 - RNA, 19 nt, Human
uuaauaauuuagacuucaa

SEQ ID NO: 1458896 - RNA, 16 nt, Human
uuaauagguuuggaca

SEQ ID NO: 1458897 - RNA, 18 nt, Human
uuaauaauguuucaaaca

SEQ ID NO: 1458898 - RNA, 18 nt, Human
uuaagggaagaauuccag

SEQ ID NO: 1458899 - RNA, 14 nt, Human
uuaauuauuauuug

SEQ ID NO: 1458900 - RNA, 14 nt, Human
uuaauuauuauuua

SEQ ID NO: 1458901 - RNA, 17 nt, Human
uuaauuauuauucuuca

SEQ ID NO: 1458902 - RNA, 14 nt, Human
uuaauuauuauucu

SEQ ID NO: 1458903 - RNA, 22 nt, Human
uuaauuaugccuuuuuugauca

SEQ ID NO: 1458904 - RNA, 21 nt, Human
uuaauuagugcuaagugugaa

SEQ ID NO: 1458905 - RNA, 16 nt, Human
uuaauggcugauaauu

SEQ ID NO: 1458906 - RNA, 16 nt, Human
uuaauuagugcuaagu

SEQ ID NO: 1458907 - RNA, 18 nt, Human
uuaauuagugcuaagugu

SEQ ID NO: 1458908 - RNA, 20 nt, Human
uuaauuagugcuaaguguga

SEQ ID NO: 1458909 - RNA, 18 nt, Human
uuaauggcugauaauuuu

SEQ ID NO: 1458910 - RNA, 20 nt, Human
uuaauaugcuuaaaauaagc

SEQ ID NO: 1458911 - RNA, 19 nt, Human
uuaauauccuaaacaucau

SEQ ID NO: 1458912 - RNA, 17 nt, Human
uuaauauccuaaacauc

SEQ ID NO: 1458913 - RNA, 14 nt, Human
uuaauauccuaaac

SEQ ID NO: 1458914 - RNA, 20 nt, Human
uuaauaucccuacauguauu

SEQ ID NO: 1458915 - RNA, 19 nt, Human
uuaauaucccuacauguau

SEQ ID NO: 1458916 - RNA, 23 nt, Human
uuaauauaaaguaguccugugaa

SEQ ID NO: 1458917 - RNA, 22 nt, Human
uuaauauaaaguaguccuguga

SEQ ID NO: 1458918 - RNA, 21 nt, Human
uuaauagguuuggacaaaaug

SEQ ID NO: 1458919 - RNA, 20 nt, Human
uuacauuuguauaaaauaau

SEQ ID NO: 1458920 - RNA, 23 nt, Human
uuacauuuuuaagugcugcauuu

SEQ ID NO: 1458921 - RNA, 22 nt, Human
uuacauuuuuaagugcugcauu

SEQ ID NO: 1458922 - RNA, 20 nt, Human
uuacauuuuuaagugcugca

SEQ ID NO: 1458923 - RNA, 21 nt, Human
uuacauuuuuaagugcugcau

SEQ ID NO: 1458924 - RNA, 24 nt, Human
uuaccagauuuuuacacauguauc

SEQ ID NO: 1458925 - RNA, 21 nt, Human
uuaccagauuuuuacacaugu

SEQ ID NO: 1458926 - RNA, 18 nt, Human
uuaccuuuuuauuugcau

SEQ ID NO: 1458927 - RNA, 15 nt, Human
uuaccuuuuuauuug

SEQ ID NO: 1458928 - RNA, 21 nt, Human
uuaccacuuguguuuugcaag

SEQ ID NO: 1458929 - RNA, 20 nt, Human
uuaccuuuuuauuugcaugu

SEQ ID NO: 1458930 - RNA, 22 nt, Human
uuaccuuuuuuauacauaaaca

SEQ ID NO: 1458931 - RNA, 19 nt, Human
uuaccuuuuuuauacauaa

SEQ ID NO: 1458932 - RNA, 20 nt, Human
uuaccuuuuuuauacauaaa

SEQ ID NO: 1458933 - RNA, 22 nt, Human
uuacguaugucugguucucaau

SEQ ID NO: 1458934 - RNA, 19 nt, Human
uuacguaugucugguucuc

SEQ ID NO: 1458935 - RNA, 13 nt, Human
uuacgcuuugauu

SEQ ID NO: 1458936 - RNA, 16 nt, Human
uuacgcuuugauucau

SEQ ID NO: 1458937 - RNA, 15 nt, Human
uuacgcuuugauuca

SEQ ID NO: 1458938 - RNA, 16 nt, Human
uuacggaacucaaaua

SEQ ID NO: 1458939 - RNA, 15 nt, Human
uuacaauguaauuau

SEQ ID NO: 1458940 - RNA, 14 nt, Human
uuacaauguaauua

SEQ ID NO: 1458941 - RNA, 13 nt, Human
uuacaauguaauu

SEQ ID NO: 1458942 - RNA, 19 nt, Human
uuacaauguaauuauuuau

SEQ ID NO: 1458943 - RNA, 21 nt, Human
uuacaauguaauuauuuaugu

SEQ ID NO: 1458944 - RNA, 17 nt, Human
uuacaauguaauuauuu

SEQ ID NO: 1458945 - RNA, 16 nt, Human
uuacaauguaauuauu

SEQ ID NO: 1458946 - RNA, 21 nt, Human
uuaauucagaaccccaacuac

SEQ ID NO: 1458947 - RNA, 21 nt, Human
uuaauuauuauuuguguuuua

SEQ ID NO: 1458948 - RNA, 15 nt, Human
uuacaauaguucugu

SEQ ID NO: 1458949 - RNA, 17 nt, Human
uuacaauaguucugugg

SEQ ID NO: 1458950 - RNA, 16 nt, Human
uuacauguuuuaaaga

SEQ ID NO: 1458951 - RNA, 13 nt, Human
uuacauguuugca

SEQ ID NO: 1458952 - RNA, 12 nt, Human
uuacauguuugc

SEQ ID NO: 1458953 - RNA, 23 nt, Human
uuacauggcuggagcuagaauuu

SEQ ID NO: 1458954 - RNA, 18 nt, Human
uuacagauauuugucaug

SEQ ID NO: 1458955 - RNA, 22 nt, Human
uuacauggcuggagcuagaauu

SEQ ID NO: 1458956 - RNA, 14 nt, Human
uuacauguuugcac

SEQ ID NO: 1458957 - RNA, 19 nt, Human
uuacauuauuaucaacaau

SEQ ID NO: 1458958 - RNA, 15 nt, Human
uuacauuuguauaaa

SEQ ID NO: 1458959 - RNA, 14 nt, Human
uuacauuuguauaa

SEQ ID NO: 1458960 - RNA, 15 nt, Human
uguuacuguaauucc

SEQ ID NO: 1458961 - RNA, 23 nt, Human
uguuaccaaaaauaaauauaucu

SEQ ID NO: 1458962 - RNA, 19 nt, Human
uguuaccaaaaauaaauau

SEQ ID NO: 1458963 - RNA, 22 nt, Human
uguuacauuuuuaagugcugca

SEQ ID NO: 1458964 - RNA, 15 nt, Human
uguuacauuauuauc

SEQ ID NO: 1458965 - RNA, 13 nt, Human
uguuacauuuuua

SEQ ID NO: 1458966 - RNA, 15 nt, Human
uguguuuguguauuu

SEQ ID NO: 1458967 - RNA, 19 nt, Human
uguguuugucauuagccug

SEQ ID NO: 1458968 - RNA, 17 nt, Human
uguguuuggcuuucagg

SEQ ID NO: 1458969 - RNA, 14 nt, Human
uguguuugucauua

SEQ ID NO: 1458970 - RNA, 17 nt, Human
uguguuugucauuagcc

SEQ ID NO: 1458971 - RNA, 16 nt, Human
uguguuuggcuuucag

SEQ ID NO: 1458972 - RNA, 15 nt, Human
uguguuuggcuuuca

SEQ ID NO: 1458973 - RNA, 17 nt, Human
uguguuuggaagacuau

SEQ ID NO: 1458974 - RNA, 15 nt, Human
uguguuugcuuucug

SEQ ID NO: 1458975 - RNA, 14 nt, Human
uguguuugcuuucu

SEQ ID NO: 1458976 - RNA, 18 nt, Human
uguuaaacuagcauaucu

SEQ ID NO: 1458977 - RNA, 19 nt, Human
uguuaaacuagcauaucug

SEQ ID NO: 1458978 - RNA, 20 nt, Human
uguuaaacuagcauaucugc

SEQ ID NO: 1458979 - RNA, 22 nt, Human
uguuaaacuagcauaucugccu

SEQ ID NO: 1458980 - RNA, 23 nt, Human
uguuaaacuagcauaucugccuu

SEQ ID NO: 1458981 - RNA, 16 nt, Human
uguucacaccagagaa

SEQ ID NO: 1458982 - RNA, 15 nt, Human
uguucaauauuuucu

SEQ ID NO: 1458983 - RNA, 21 nt, Human
uguucaagcgauucuccugcc

SEQ ID NO: 1458984 - RNA, 16 nt, Human
uguucacaauauauuu

SEQ ID NO: 1458985 - RNA, 23 nt, Human
uguuaguuaccuuauaguuacug

SEQ ID NO: 1458986 - RNA, 20 nt, Human
uguuaguuaccuuauaguua

SEQ ID NO: 1458987 - RNA, 19 nt, Human
uguucaacuaggaucagaa

SEQ ID NO: 1458988 - RNA, 12 nt, Human
uguuauaaucuu

SEQ ID NO: 1458989 - RNA, 20 nt, Human
uguuagauuaagaaauagac

SEQ ID NO: 1458990 - RNA, 17 nt, Human
uguuagauuaagaaaua

SEQ ID NO: 1458991 - RNA, 21 nt, Human
uguguauauauauauauaugu

SEQ ID NO: 1458992 - RNA, 22 nt, Human
uguguauaaacaagaaaaauaa

SEQ ID NO: 1458993 - RNA, 21 nt, Human
uguguauaaacaagaaaaaua

SEQ ID NO: 1458994 - RNA, 14 nt, Human
uguguauaaacaag

SEQ ID NO: 1458995 - RNA, 13 nt, Human
uguguauaaacaa

SEQ ID NO: 1458996 - RNA, 21 nt, Human
uguguauaaaaauaaaaaaga

SEQ ID NO: 1458997 - RNA, 17 nt, Human
uguguaguucauguaaa

SEQ ID NO: 1458998 - RNA, 14 nt, Human
uguguaguucaugu

SEQ ID NO: 1458999 - RNA, 13 nt, Human
uguguauauggac

SEQ ID NO: 1459000 - RNA, 14 nt, Human
uguguauauggaca

SEQ ID NO: 1459001 - RNA, 14 nt, Human
uguguauuccaaga

SEQ ID NO: 1459002 - RNA, 23 nt, Human
ugugucacaaugagauugaauuu

SEQ ID NO: 1459003 - RNA, 15 nt, Human
uguguauuugcuaau

SEQ ID NO: 1459004 - RNA, 13 nt, Human
uguguauuugcua

SEQ ID NO: 1459005 - RNA, 11 nt, Human
uguguauuugc

SEQ ID NO: 1459006 - RNA, 15 nt, Human
uguguauuuacgcuu

SEQ ID NO: 1459007 - RNA, 22 nt, Human
ugugugaaugaacacucuuuug

SEQ ID NO: 1459008 - RNA, 18 nt, Human
ugugugaaugaacacucu

SEQ ID NO: 1459009 - RNA, 17 nt, Human
ugugugaaugaacacuc

SEQ ID NO: 1459010 - RNA, 16 nt, Human
ugugugaaugaacacu

SEQ ID NO: 1459011 - RNA, 12 nt, Human
ugugugaaugaa

SEQ ID NO: 1459012 - RNA, 20 nt, Human
ugugugcccucugggcucug

SEQ ID NO: 1459013 - RNA, 14 nt, Human
ugugugcccucugg

SEQ ID NO: 1459014 - RNA, 19 nt, Human
ugugugcguccugucggag

SEQ ID NO: 1459015 - RNA, 17 nt, Human
ugugugcaucaggcuuu

SEQ ID NO: 1459016 - RNA, 22 nt, Human
ugugugcaucaggcuuucuuuu

SEQ ID NO: 1459017 - RNA, 15 nt, Human
ugugugcaucaggcu

SEQ ID NO: 1459018 - RNA, 19 nt, Human
uguguguccaaaacugccu

SEQ ID NO: 1459019 - RNA, 16 nt, Human
uguguguccaaaacug

SEQ ID NO: 1459020 - RNA, 20 nt, Human
uguguguauuugcuaauuuu

SEQ ID NO: 1459021 - RNA, 14 nt, Human
uguguguauuugcu

SEQ ID NO: 1459022 - RNA, 13 nt, Human
uguguguauuugc

SEQ ID NO: 1459023 - RNA, 12 nt, Human
uguguguaugca

SEQ ID NO: 1459024 - RNA, 20 nt, Human
uguguuuacuuuauguuacu

SEQ ID NO: 1459025 - RNA, 22 nt, Human
uguguguccacgacugucucca

SEQ ID NO: 1459026 - RNA, 22 nt, Human
uguguuuaggaacuacugagga

SEQ ID NO: 1459027 - RNA, 21 nt, Human
uguucuccugcugcucccuca

SEQ ID NO: 1459028 - RNA, 23 nt, Human
uguucucuugggaacugaacuca

SEQ ID NO: 1459029 - RNA, 13 nt, Human
uguucuccugcug

SEQ ID NO: 1459030 - RNA, 11 nt, Human
uguucuccugc

SEQ ID NO: 1459031 - RNA, 15 nt, Human
uguucugauaaugaa

SEQ ID NO: 1459032 - RNA, 14 nt, Human
uguucuuucuggcu

SEQ ID NO: 1459033 - RNA, 17 nt, Human
uguugaaaauguucaga

SEQ ID NO: 1459034 - RNA, 14 nt, Human
uguugaaaauguuc

SEQ ID NO: 1459035 - RNA, 20 nt, Human
uguucuuucuggcuaugcau

SEQ ID NO: 1459036 - RNA, 22 nt, Human
uguucuuucuggcuaugcauuu

SEQ ID NO: 1459037 - RNA, 23 nt, Human
uguugaaagguuuuuuuucaguu

SEQ ID NO: 1459038 - RNA, 24 nt, Human
uguugaaagguaauuugagagaaa

SEQ ID NO: 1459039 - RNA, 22 nt, Human
uguucucagaaucccuuaacag

SEQ ID NO: 1459040 - RNA, 12 nt, Human
uguucucagauu

SEQ ID NO: 1459041 - RNA, 23 nt, Human
uguucucacacuggucugcuguc

SEQ ID NO: 1459042 - RNA, 22 nt, Human
uguucucacacuggucugcugu

SEQ ID NO: 1459043 - RNA, 17 nt, Human
uguucucacacuggucu

SEQ ID NO: 1459044 - RNA, 21 nt, Human
uguucuaguuuuuuacuuuug

SEQ ID NO: 1459045 - RNA, 14 nt, Human
uguucuaguuuuuu

SEQ ID NO: 1459046 - RNA, 12 nt, Human
uguucuauagcu

SEQ ID NO: 1459047 - RNA, 15 nt, Human
uguucaccauuauaa

SEQ ID NO: 1459048 - RNA, 22 nt, Human
uguucaccauuauaaugaauuu

SEQ ID NO: 1459049 - RNA, 13 nt, Human
uguucauaaauaa

SEQ ID NO: 1459050 - RNA, 13 nt, Human
uguucauuuccuc

SEQ ID NO: 1459051 - RNA, 11 nt, Human
uguucauuucc

SEQ ID NO: 1459052 - RNA, 13 nt, Human
uguucauggcaga

SEQ ID NO: 1459053 - RNA, 14 nt, Human
uguucauggcagau

SEQ ID NO: 1459054 - RNA, 14 nt, Human
uguucauuccucca

SEQ ID NO: 1459055 - RNA, 15 nt, Human
uguucauuccuccag

SEQ ID NO: 1459056 - RNA, 16 nt, Human
uguucauuccuccagg

SEQ ID NO: 1459057 - RNA, 21 nt, Human
uguuggagaagaacugaaauc

SEQ ID NO: 1459058 - RNA, 18 nt, Human
uguugagccuuuucccuc

SEQ ID NO: 1459059 - RNA, 16 nt, Human
uguugagccuuuuccc

SEQ ID NO: 1459060 - RNA, 19 nt, Human
uguugauacuguugcacgu

SEQ ID NO: 1459061 - RNA, 23 nt, Human
uguugcugaauaggcgaucacaa

SEQ ID NO: 1459062 - RNA, 17 nt, Human
uguugauacuguugcac

SEQ ID NO: 1459063 - RNA, 16 nt, Human
uguugauacuguugca

SEQ ID NO: 1459064 - RNA, 15 nt, Human
uguugauacuguugc

SEQ ID NO: 1459065 - RNA, 14 nt, Human
uguugauacuguug

SEQ ID NO: 1459066 - RNA, 20 nt, Human
uguugagcaucacagaaugu

SEQ ID NO: 1459067 - RNA, 17 nt, Human
uguugagcaucacagaa

SEQ ID NO: 1459068 - RNA, 16 nt, Human
uguugagcaucacaga

SEQ ID NO: 1459069 - RNA, 15 nt, Human
uguugagagugugac

SEQ ID NO: 1459070 - RNA, 17 nt, Human
uguugaagccacugccu

SEQ ID NO: 1459071 - RNA, 13 nt, Human
uguugagacagag

SEQ ID NO: 1459072 - RNA, 19 nt, Human
uguugaagagguuuuaaag

SEQ ID NO: 1459073 - RNA, 18 nt, Human
uguuuaaaacuucaguuu

SEQ ID NO: 1459074 - RNA, 12 nt, Human
uguuuaaaacuu

SEQ ID NO: 1459075 - RNA, 18 nt, Human
uguuuacacucuuuguaa

SEQ ID NO: 1459076 - RNA, 16 nt, Human
uguuuacacucuuugu

SEQ ID NO: 1459077 - RNA, 19 nt, Human
uguuuacaaaaucagguaa

SEQ ID NO: 1459078 - RNA, 21 nt, Human
uguuuacaaaaauuucuguaa

SEQ ID NO: 1459079 - RNA, 21 nt, Human
uguuuaauuuuuauuucuucc

SEQ ID NO: 1459080 - RNA, 19 nt, Human
uguuuaauuuuuauuucuu

SEQ ID NO: 1459081 - RNA, 18 nt, Human
uguuuaauuuuuauuucu

SEQ ID NO: 1459082 - RNA, 19 nt, Human
uguuuacacucuuuguaag

SEQ ID NO: 1459083 - RNA, 17 nt, Human
uguuguuucuuaaauaa

SEQ ID NO: 1459084 - RNA, 21 nt, Human
uguuguuucuuaaauaagaaa

SEQ ID NO: 1459085 - RNA, 16 nt, Human
uguuguuucuuaaaua

SEQ ID NO: 1459086 - RNA, 15 nt, Human
uguuguuucuuaaau

SEQ ID NO: 1459087 - RNA, 19 nt, Human
uguuguugaaagguuuuuu

SEQ ID NO: 1459088 - RNA, 16 nt, Human
uguuuaaaacaucauu

SEQ ID NO: 1459089 - RNA, 15 nt, Human
uguuuaaaacaucau

SEQ ID NO: 1459090 - RNA, 12 nt, Human
uguuuaaaacau

SEQ ID NO: 1459091 - RNA, 18 nt, Human
uguuuaaaaaaccacaug

SEQ ID NO: 1459092 - RNA, 16 nt, Human
ugugggggacuguaag

SEQ ID NO: 1459093 - RNA, 15 nt, Human
ugugggggacuguaa

SEQ ID NO: 1459094 - RNA, 14 nt, Human
uguggggccuggga

SEQ ID NO: 1459095 - RNA, 16 nt, Human
uguggggccugggagg

SEQ ID NO: 1459096 - RNA, 15 nt, Human
uguggggccagguca

SEQ ID NO: 1459097 - RNA, 16 nt, Human
uguggggauuuucacu

SEQ ID NO: 1459098 - RNA, 22 nt, Human
ugugggggguaaucccugcuuu

SEQ ID NO: 1459099 - RNA, 19 nt, Human
ugugggggguaaucccugc

SEQ ID NO: 1459100 - RNA, 17 nt, Human
uguggcuuucagagccu

SEQ ID NO: 1459101 - RNA, 15 nt, Human
uguggcuccuuccca

SEQ ID NO: 1459102 - RNA, 14 nt, Human
uguggcuccuuccc

SEQ ID NO: 1459103 - RNA, 17 nt, Human
ugugggacuagccuggc

SEQ ID NO: 1459104 - RNA, 16 nt, Human
uguggaaaagauggca

SEQ ID NO: 1459105 - RNA, 16 nt, Human
ugugcuuuuuuugugu

SEQ ID NO: 1459106 - RNA, 17 nt, Human
ugugcuuuuuuugugug

SEQ ID NO: 1459107 - RNA, 23 nt, Human
uguggacucuggugccuccagag

SEQ ID NO: 1459108 - RNA, 22 nt, Human
uguggacucuggugccuccaga

SEQ ID NO: 1459109 - RNA, 12 nt, Human
uguggacucugg

SEQ ID NO: 1459110 - RNA, 21 nt, Human
uguggacuaaaagauauaagu

SEQ ID NO: 1459111 - RNA, 19 nt, Human
ugugcaguacuuugugcau

SEQ ID NO: 1459112 - RNA, 17 nt, Human
ugugcaggagcggcaga

SEQ ID NO: 1459113 - RNA, 14 nt, Human
ugugcagguuccca

SEQ ID NO: 1459114 - RNA, 23 nt, Human
ugugcagguggggagacugggcu

SEQ ID NO: 1459115 - RNA, 16 nt, Human
ugugcagguggggaga

SEQ ID NO: 1459116 - RNA, 18 nt, Human
ugugcaggagcggcagau

SEQ ID NO: 1459117 - RNA, 19 nt, Human
ugugcagccgcugagcgag

SEQ ID NO: 1459118 - RNA, 20 nt, Human
ugugcacguaaaguacuugu

SEQ ID NO: 1459119 - RNA, 22 nt, Human
ugugcacguaaaguacuuguag

SEQ ID NO: 1459120 - RNA, 20 nt, Human
ugugcaauguguauaaacaa

SEQ ID NO: 1459121 - RNA, 14 nt, Human
ugugcaccaggguu

SEQ ID NO: 1459122 - RNA, 13 nt, Human
ugugcaccagggu

SEQ ID NO: 1459123 - RNA, 22 nt, Human
ugugcaauguguauaaacaaga

SEQ ID NO: 1459124 - RNA, 16 nt, Human
ugugcaauguguauaa

SEQ ID NO: 1459125 - RNA, 15 nt, Human
ugugcaauguguaua

SEQ ID NO: 1459126 - RNA, 13 nt, Human
ugugcaucaggcu

SEQ ID NO: 1459127 - RNA, 12 nt, Human
ugugcaguguug

SEQ ID NO: 1459128 - RNA, 22 nt, Human
ugugcgugguggucccugggua

SEQ ID NO: 1459129 - RNA, 21 nt, Human
ugugcgugguggucccugggu

SEQ ID NO: 1459130 - RNA, 19 nt, Human
ugugcgugguggucccugg

SEQ ID NO: 1459131 - RNA, 16 nt, Human
ugugcguggugguccc

SEQ ID NO: 1459132 - RNA, 22 nt, Human
ugugcuacaauucauuguguua

SEQ ID NO: 1459133 - RNA, 16 nt, Human
ugugcuuuuaaaugca

SEQ ID NO: 1459134 - RNA, 14 nt, Human
ugugcuucuuucuu

SEQ ID NO: 1459135 - RNA, 21 nt, Human
ugugcuucuuucuuugggaau

SEQ ID NO: 1459136 - RNA, 19 nt, Human
ugugcuucgggcccuuccc

SEQ ID NO: 1459137 - RNA, 19 nt, Human
ugugcuuaugguaccagau

SEQ ID NO: 1459138 - RNA, 15 nt, Human
ugugccugacccuac

SEQ ID NO: 1459139 - RNA, 17 nt, Human
ugugcggcugugugugc

SEQ ID NO: 1459140 - RNA, 14 nt, Human
ugugcguccugucg

SEQ ID NO: 1459141 - RNA, 15 nt, Human
ugugcggcugugugu

SEQ ID NO: 1459142 - RNA, 19 nt, Human
ugucugccaaccuaaaacu

SEQ ID NO: 1459143 - RNA, 15 nt, Human
ugucugccaaccuaa

SEQ ID NO: 1459144 - RNA, 16 nt, Human
ugucucaaugcucaua

SEQ ID NO: 1459145 - RNA, 17 nt, Human
ugucucaaugcucauaa

SEQ ID NO: 1459146 - RNA, 19 nt, Human
ugucucaaugcucauaacg

SEQ ID NO: 1459147 - RNA, 22 nt, Human
ugucucaaugcucauaacggau

SEQ ID NO: 1459148 - RNA, 19 nt, Human
ugucucaagcucuuccuua

SEQ ID NO: 1459149 - RNA, 14 nt, Human
ugucucaaugcuca

SEQ ID NO: 1459150 - RNA, 15 nt, Human
ugucucaaugcucau

SEQ ID NO: 1459151 - RNA, 20 nt, Human
uguccccaacagcgcccaaa

SEQ ID NO: 1459152 - RNA, 14 nt, Human
uguccccaacagcg

SEQ ID NO: 1459153 - RNA, 13 nt, Human
uguccccaacagc

SEQ ID NO: 1459154 - RNA, 16 nt, Human
ugucugguggccccgu

SEQ ID NO: 1459155 - RNA, 14 nt, Human
ugucugguggcccc

SEQ ID NO: 1459156 - RNA, 13 nt, Human
ugucugguggccc

SEQ ID NO: 1459157 - RNA, 21 nt, Human
ugucugggugcuacuggggaa

SEQ ID NO: 1459158 - RNA, 16 nt, Human
ugucugggugcuacug

SEQ ID NO: 1459159 - RNA, 15 nt, Human
ugucugggugcuacu

SEQ ID NO: 1459160 - RNA, 14 nt, Human
ugucuggggcagaa

SEQ ID NO: 1459161 - RNA, 21 nt, Human
ugucuggggagcgggucugcu

SEQ ID NO: 1459162 - RNA, 22 nt, Human
ugucugguucucaauuccaaca

SEQ ID NO: 1459163 - RNA, 14 nt, Human
ugucuuuuuucuaa

SEQ ID NO: 1459164 - RNA, 15 nt, Human
ugugaaacuuucauu

SEQ ID NO: 1459165 - RNA, 14 nt, Human
ugugaaacuuucau

SEQ ID NO: 1459166 - RNA, 22 nt, Human
ugucuuuuuuuguauaguuaac

SEQ ID NO: 1459167 - RNA, 23 nt, Human
ugucuuuuuuuguauaguuaaca

SEQ ID NO: 1459168 - RNA, 16 nt, Human
ugucuuuuuuuguaua

SEQ ID NO: 1459169 - RNA, 14 nt, Human
ugucuuuuuuugua

SEQ ID NO: 1459170 - RNA, 14 nt, Human
ugucugguucucaa

SEQ ID NO: 1459171 - RNA, 13 nt, Human
ugucugguucuca

SEQ ID NO: 1459172 - RNA, 20 nt, Human
ugucugggugcuacugggga

SEQ ID NO: 1459173 - RNA, 21 nt, Human
ugucuggugguggcaccaucu

SEQ ID NO: 1459174 - RNA, 13 nt, Human
ugugaaacauguu

SEQ ID NO: 1459175 - RNA, 21 nt, Human
ugugacauacccccuccccca

SEQ ID NO: 1459176 - RNA, 16 nt, Human
ugugacauacccccuc

SEQ ID NO: 1459177 - RNA, 12 nt, Human
ugugacagggcg

SEQ ID NO: 1459178 - RNA, 21 nt, Human
ugugacaaaaaauuaaagcau

SEQ ID NO: 1459179 - RNA, 16 nt, Human
ugugacaaaaaauuaa

SEQ ID NO: 1459180 - RNA, 15 nt, Human
ugugacaaaaaauua

SEQ ID NO: 1459181 - RNA, 12 nt, Human
ugugacaaaaaa

SEQ ID NO: 1459182 - RNA, 15 nt, Human
ugugaccacaacaug

SEQ ID NO: 1459183 - RNA, 17 nt, Human
ugugaaugccacugccu

SEQ ID NO: 1459184 - RNA, 17 nt, Human
ugugaaugaacacucuu

SEQ ID NO: 1459185 - RNA, 23 nt, Human
ugugaaugaacacucuuuugcuu

SEQ ID NO: 1459186 - RNA, 14 nt, Human
ugugaaugaacacu

SEQ ID NO: 1459187 - RNA, 22 nt, Human
ugugaauagaacucugaaauga

SEQ ID NO: 1459188 - RNA, 21 nt, Human
ugugaauaccugcucacguca

SEQ ID NO: 1459189 - RNA, 22 nt, Human
ugugaaucaagggucaggccuu

SEQ ID NO: 1459190 - RNA, 21 nt, Human
ugugaaucaagggucaggccu

SEQ ID NO: 1459191 - RNA, 17 nt, Human
ugugaaucaagggucag

SEQ ID NO: 1459192 - RNA, 16 nt, Human
ugugaaucaaggguca

SEQ ID NO: 1459193 - RNA, 16 nt, Human
ugugaaucauuuuacc

SEQ ID NO: 1459194 - RNA, 17 nt, Human
ugugacccccagcuccg

SEQ ID NO: 1459195 - RNA, 20 nt, Human
ugugacccccagcuccggcc

SEQ ID NO: 1459196 - RNA, 16 nt, Human
ugugacccccagcucc

SEQ ID NO: 1459197 - RNA, 15 nt, Human
ugugacccccagcuc

SEQ ID NO: 1459198 - RNA, 13 nt, Human
ugugauaaggaaa

SEQ ID NO: 1459199 - RNA, 21 nt, Human
ugugauacaaugcugugcccu

SEQ ID NO: 1459200 - RNA, 21 nt, Human
ugugagucaauacauagugcu

SEQ ID NO: 1459201 - RNA, 23 nt, Human
ugugaguuuaccuuguauacugu

SEQ ID NO: 1459202 - RNA, 16 nt, Human
ugugagucaauacaua

SEQ ID NO: 1459203 - RNA, 22 nt, Human
ugugaguuuaccuuguauacug

SEQ ID NO: 1459204 - RNA, 14 nt, Human
ugugcaauguguau

SEQ ID NO: 1459205 - RNA, 11 nt, Human
ugugcaaugug

SEQ ID NO: 1459206 - RNA, 18 nt, Human
ugugcaauguaaauauuu

SEQ ID NO: 1459207 - RNA, 17 nt, Human
ugugcaauguaaauauu

SEQ ID NO: 1459208 - RNA, 16 nt, Human
ugugcaauagaaggug

SEQ ID NO: 1459209 - RNA, 13 nt, Human
ugugcaauagaag

SEQ ID NO: 1459210 - RNA, 21 nt, Human
ugugcaaggcagccgugggcc

SEQ ID NO: 1459211 - RNA, 18 nt, Human
ugugcaagguauuacacu

SEQ ID NO: 1459212 - RNA, 19 nt, Human
ugugcaaggcagccguggg

SEQ ID NO: 1459213 - RNA, 17 nt, Human
ugugcaaggcagccgug

SEQ ID NO: 1459214 - RNA, 15 nt, Human
ugugcaaggcagccg

SEQ ID NO: 1459215 - RNA, 13 nt, Human
ugugauauaagug

SEQ ID NO: 1459216 - RNA, 22 nt, Human
uguccaugcgcucagggccaug

SEQ ID NO: 1459217 - RNA, 20 nt, Human
ugucauuguuauauaaucau

SEQ ID NO: 1459218 - RNA, 14 nt, Human
ugucauuguuauau

SEQ ID NO: 1459219 - RNA, 12 nt, Human
ugucauuguuau

SEQ ID NO: 1459220 - RNA, 16 nt, Human
ugucauugaaaaacua

SEQ ID NO: 1459221 - RNA, 23 nt, Human
ugucauucgcuacuaugauuuaa

SEQ ID NO: 1459222 - RNA, 13 nt, Human
ugucauuagccug

SEQ ID NO: 1459223 - RNA, 14 nt, Human
ugucauuagccuga

SEQ ID NO: 1459224 - RNA, 17 nt, Human
ugucauuagccugagua

SEQ ID NO: 1459225 - RNA, 20 nt, Human
ugucauuagccugaguagaa

SEQ ID NO: 1459226 - RNA, 21 nt, Human
ugucauuagccugaguagaaa

SEQ ID NO: 1459227 - RNA, 23 nt, Human
ugucauuaaauggggcucacaaa

SEQ ID NO: 1459228 - RNA, 15 nt, Human
ugucaucaauuaaag

SEQ ID NO: 1459229 - RNA, 14 nt, Human
ugucaucaauuaaa

SEQ ID NO: 1459230 - RNA, 16 nt, Human
ugucauagaaauuaca

SEQ ID NO: 1459231 - RNA, 15 nt, Human
ugucauagaaauuac

SEQ ID NO: 1459232 - RNA, 18 nt, Human
ugucccaugaucccugug

SEQ ID NO: 1459233 - RNA, 17 nt, Human
ugucccaugaucccugu

SEQ ID NO: 1459234 - RNA, 16 nt, Human
ugucccaugaucccug

SEQ ID NO: 1459235 - RNA, 21 nt, Human
ugucccaucggagugcggacc

SEQ ID NO: 1459236 - RNA, 17 nt, Human
ugucccagguccucacu

SEQ ID NO: 1459237 - RNA, 16 nt, Human
ugucccagguccucac

SEQ ID NO: 1459238 - RNA, 14 nt, Human
ugucccagguccuc

SEQ ID NO: 1459239 - RNA, 21 nt, Human
ugucccagaagaugacugagg

SEQ ID NO: 1459240 - RNA, 16 nt, Human
ugucccagaagaugac

SEQ ID NO: 1459241 - RNA, 14 nt, Human
ugucccagaagaug

SEQ ID NO: 1459242 - RNA, 17 nt, Human
uguccauuguccaaucc

SEQ ID NO: 1459243 - RNA, 14 nt, Human
uguccauuguccaa

SEQ ID NO: 1459244 - RNA, 15 nt, Human
ugucagucacagcca

SEQ ID NO: 1459245 - RNA, 14 nt, Human
ugucagucacagcc

SEQ ID NO: 1459246 - RNA, 17 nt, Human
ugucacugacacacacg

SEQ ID NO: 1459247 - RNA, 22 nt, Human
ugucacucaaggcggugcuuga

SEQ ID NO: 1459248 - RNA, 20 nt, Human
ugucacucaaggcggugcuu

SEQ ID NO: 1459249 - RNA, 17 nt, Human
ugucacucaaggcggug

SEQ ID NO: 1459250 - RNA, 14 nt, Human
ugucacucaaggcg

SEQ ID NO: 1459251 - RNA, 14 nt, Human
ugucacuaaagcag

SEQ ID NO: 1459252 - RNA, 15 nt, Human
ugucacuaaagcagg

SEQ ID NO: 1459253 - RNA, 17 nt, Human
uguauuugcuaauuuuu

SEQ ID NO: 1459254 - RNA, 21 nt, Human
uguauuuggaaauaaagucag

SEQ ID NO: 1459255 - RNA, 13 nt, Human
uguauuuggaaau

SEQ ID NO: 1459256 - RNA, 12 nt, Human
uguauuuggaaa

SEQ ID NO: 1459257 - RNA, 14 nt, Human
uguauuugcuuuuu

SEQ ID NO: 1459258 - RNA, 13 nt, Human
uguauuugcuaau

SEQ ID NO: 1459259 - RNA, 12 nt, Human
uguauuugcuaa

SEQ ID NO: 1459260 - RNA, 16 nt, Human
ugucauacagagaagu

SEQ ID NO: 1459261 - RNA, 18 nt, Human
ugucauacagagaaguca

SEQ ID NO: 1459262 - RNA, 15 nt, Human
ugucauacagagaag

SEQ ID NO: 1459263 - RNA, 14 nt, Human
ugucauacagagaa

SEQ ID NO: 1459264 - RNA, 13 nt, Human
ugucauacagaga

SEQ ID NO: 1459265 - RNA, 12 nt, Human
ugucauacagag

SEQ ID NO: 1459266 - RNA, 22 nt, Human
ugucagucacagccaccccuga

SEQ ID NO: 1459267 - RNA, 18 nt, Human
ugucagucacagccaccc

SEQ ID NO: 1459268 - RNA, 17 nt, Human
ugucagucacagccacc

SEQ ID NO: 1459269 - RNA, 16 nt, Human
ugucagucacagccac

SEQ ID NO: 1459270 - RNA, 21 nt, Human
uguauaauuggauuuccuaau

SEQ ID NO: 1459271 - RNA, 19 nt, Human
uguauaauuggauuuccua

SEQ ID NO: 1459272 - RNA, 18 nt, Human
uguauaauuggauuuccu

SEQ ID NO: 1459273 - RNA, 14 nt, Human
uguauaauuggauu

SEQ ID NO: 1459274 - RNA, 19 nt, Human
uguagcacuuacugguagg

SEQ ID NO: 1459275 - RNA, 15 nt, Human
uguagcacuuacugg

SEQ ID NO: 1459276 - RNA, 20 nt, Human
uguagcaacuacagucuaaa

SEQ ID NO: 1459277 - RNA, 16 nt, Human
uguauccccugcaggc

SEQ ID NO: 1459278 - RNA, 14 nt, Human
uguauccccugcag

SEQ ID NO: 1459279 - RNA, 19 nt, Human
uguauacuauaguaccagu

SEQ ID NO: 1459280 - RNA, 15 nt, Human
uguauacuauaguac

SEQ ID NO: 1459281 - RNA, 17 nt, Human
uguauacuauaguacca

SEQ ID NO: 1459282 - RNA, 14 nt, Human
uguauacuauagua

SEQ ID NO: 1459283 - RNA, 19 nt, Human
uguaucuaugcauuuucug

SEQ ID NO: 1459284 - RNA, 15 nt, Human
uguaugcauguuguc

SEQ ID NO: 1459285 - RNA, 21 nt, Human
uguaugcacaugaacuuagau

SEQ ID NO: 1459286 - RNA, 18 nt, Human
uguaucuaugcauuuucu

SEQ ID NO: 1459287 - RNA, 18 nt, Human
uguaugcacaugaacuua

SEQ ID NO: 1459288 - RNA, 17 nt, Human
uguaugcacaugaacuu

SEQ ID NO: 1459289 - RNA, 16 nt, Human
uguaugcacaguaaaa

SEQ ID NO: 1459290 - RNA, 17 nt, Human
uguauuugaaauaagaa

SEQ ID NO: 1459291 - RNA, 21 nt, Human
uguauuuauaaauauauuuaa

SEQ ID NO: 1459292 - RNA, 14 nt, Human
uguauuuauaaaua

SEQ ID NO: 1459293 - RNA, 23 nt, Human
uguauuuacgcuuugauucauag

SEQ ID NO: 1459294 - RNA, 21 nt, Human
uguauuuacgcuuugauucau

SEQ ID NO: 1459295 - RNA, 20 nt, Human
uguauuuacgcuuugauuca

SEQ ID NO: 1459296 - RNA, 21 nt, Human
uguauuuaacagaaauuguau

SEQ ID NO: 1459297 - RNA, 16 nt, Human
uguauuuaacagaaau

SEQ ID NO: 1459298 - RNA, 15 nt, Human
uguauuuaacagaaa

SEQ ID NO: 1459299 - RNA, 14 nt, Human
uguauuuaacagaa

SEQ ID NO: 1459300 - RNA, 19 nt, Human
uguauugcacauuguaaaa

SEQ ID NO: 1459301 - RNA, 15 nt, Human
uguauugcacauugu

SEQ ID NO: 1459302 - RNA, 14 nt, Human
uguauugcacauug

SEQ ID NO: 1459303 - RNA, 13 nt, Human
uguaugcauguug

SEQ ID NO: 1459304 - RNA, 16 nt, Human
uguauuguauauuaca

SEQ ID NO: 1459305 - RNA, 18 nt, Human
uguauuguauauuacaau

SEQ ID NO: 1459306 - RNA, 18 nt, Human
uguaacugcccaaagcag

SEQ ID NO: 1459307 - RNA, 16 nt, Human
uguaacugccuagaaa

SEQ ID NO: 1459308 - RNA, 13 nt, Human
uguaacugcccaa

SEQ ID NO: 1459309 - RNA, 11 nt, Human
uguaacugccc

SEQ ID NO: 1459310 - RNA, 18 nt, Human
uguaacugccaggcucuc

SEQ ID NO: 1459311 - RNA, 15 nt, Human
uguaacugccaggcu

SEQ ID NO: 1459312 - RNA, 13 nt, Human
uguaacugccagg

SEQ ID NO: 1459313 - RNA, 17 nt, Human
uguaaucauauaauaaa

SEQ ID NO: 1459314 - RNA, 18 nt, Human
uguaacuacuuuauaacu

SEQ ID NO: 1459315 - RNA, 17 nt, Human
uguaacuacuuuauaac

SEQ ID NO: 1459316 - RNA, 16 nt, Human
uguaacuacuuuauaa

SEQ ID NO: 1459317 - RNA, 23 nt, Human
uguaacuaaaauaauuuuguaau

SEQ ID NO: 1459318 - RNA, 15 nt, Human
uguaacuaaaauaau

SEQ ID NO: 1459319 - RNA, 14 nt, Human
uguaacuaaaauaa

SEQ ID NO: 1459320 - RNA, 19 nt, Human
uguaacgcaaguucccagu

SEQ ID NO: 1459321 - RNA, 23 nt, Human
uguaacgcaaguucccaguugga

SEQ ID NO: 1459322 - RNA, 13 nt, Human
uguaaauuaugua

SEQ ID NO: 1459323 - RNA, 12 nt, Human
uguaaauuaugu

SEQ ID NO: 1459324 - RNA, 14 nt, Human
uguaaauuaucagg

SEQ ID NO: 1459325 - RNA, 11 nt, Human
uguaaauuggc

SEQ ID NO: 1459326 - RNA, 19 nt, Human
uguaaccucuucagaggcc

SEQ ID NO: 1459327 - RNA, 12 nt, Human
uguaaauuggca

SEQ ID NO: 1459328 - RNA, 13 nt, Human
uguaaaucugcca

SEQ ID NO: 1459329 - RNA, 11 nt, Human
uguaaacacag

SEQ ID NO: 1459330 - RNA, 21 nt, Human
uguaaacaaacuguguaacug

SEQ ID NO: 1459331 - RNA, 19 nt, Human
ugguagggugggagugguu

SEQ ID NO: 1459332 - RNA, 13 nt, Human
ugguaggguggga

SEQ ID NO: 1459333 - RNA, 16 nt, Human
ugguaggcauuuccua

SEQ ID NO: 1459334 - RNA, 16 nt, Human
uguaaaucugccacaa

SEQ ID NO: 1459335 - RNA, 15 nt, Human
uguaaaucugccaca

SEQ ID NO: 1459336 - RNA, 14 nt, Human
uguaaaucugccac

SEQ ID NO: 1459337 - RNA, 13 nt, Human
uguaaauuaacuu

SEQ ID NO: 1459338 - RNA, 14 nt, Human
uguaaauuaacuuu

SEQ ID NO: 1459339 - RNA, 15 nt, Human
uguaaauuaacuuuu

SEQ ID NO: 1459340 - RNA, 16 nt, Human
uguaaauuaacuuuua

SEQ ID NO: 1459341 - RNA, 17 nt, Human
uguaaauuaacuuuuau

SEQ ID NO: 1459342 - RNA, 18 nt, Human
uguacaguauguucaaag

SEQ ID NO: 1459343 - RNA, 20 nt, Human
uguacaguagauuuuccaaa

SEQ ID NO: 1459344 - RNA, 18 nt, Human
uguacaguagauuuucca

SEQ ID NO: 1459345 - RNA, 17 nt, Human
uguacaguagauuuucc

SEQ ID NO: 1459346 - RNA, 14 nt, Human
uguacaguagauuu

SEQ ID NO: 1459347 - RNA, 23 nt, Human
uguaauguaucaaauacauuuaa

SEQ ID NO: 1459348 - RNA, 19 nt, Human
uguaaugguacugacuuug

SEQ ID NO: 1459349 - RNA, 21 nt, Human
uguaaugguacugacuuugcu

SEQ ID NO: 1459350 - RNA, 23 nt, Human
uguaauggcaguuauauuuugca

SEQ ID NO: 1459351 - RNA, 17 nt, Human
uguaauggcaguuauau

SEQ ID NO: 1459352 - RNA, 12 nt, Human
uguaaugacagg

SEQ ID NO: 1459353 - RNA, 12 nt, Human
uguacccaguuu

SEQ ID NO: 1459354 - RNA, 14 nt, Human
uguacccaguuucu

SEQ ID NO: 1459355 - RNA, 21 nt, Human
uguacccaccgggccacuccu

SEQ ID NO: 1459356 - RNA, 20 nt, Human
uguacccaccgggccacucc

SEQ ID NO: 1459357 - RNA, 16 nt, Human
uguacccaccgggcca

SEQ ID NO: 1459358 - RNA, 12 nt, Human
uguacccaccgg

SEQ ID NO: 1459359 - RNA, 18 nt, Human
uguaccauuuuaaaguua

SEQ ID NO: 1459360 - RNA, 14 nt, Human
uguaccauuugccu

SEQ ID NO: 1459361 - RNA, 18 nt, Human
uguaccugcccccaaucc

SEQ ID NO: 1459362 - RNA, 17 nt, Human
uguacccucugaaauac

SEQ ID NO: 1459363 - RNA, 23 nt, Human
uguaccucuugagccuugaacuu

SEQ ID NO: 1459364 - RNA, 22 nt, Human
uguaccucuugagccuugaacu

SEQ ID NO: 1459365 - RNA, 14 nt, Human
uguaccucuugagc

SEQ ID NO: 1459366 - RNA, 20 nt, Human
uguacuaaagccaaacauau

SEQ ID NO: 1459367 - RNA, 18 nt, Human
uguacuaaagccaaacau

SEQ ID NO: 1459368 - RNA, 16 nt, Human
uguacuaaagccaaac

SEQ ID NO: 1459369 - RNA, 15 nt, Human
uguacuaaagccaaa

SEQ ID NO: 1459370 - RNA, 14 nt, Human
uguacuauuuaacu

SEQ ID NO: 1459371 - RNA, 16 nt, Human
uguacuaacuagcauu

SEQ ID NO: 1459372 - RNA, 18 nt, Human
uguacuauuuaacugacu

SEQ ID NO: 1459373 - RNA, 15 nt, Human
uguacuauuuaacug

SEQ ID NO: 1459374 - RNA, 12 nt, Human
uguacugaaaaa

SEQ ID NO: 1459375 - RNA, 20 nt, Human
uguacugaaaaaugguaauu

SEQ ID NO: 1459376 - RNA, 17 nt, Human
uguacugagccuuguaa

SEQ ID NO: 1459377 - RNA, 20 nt, Human
uguacugagccuuguaauuc

SEQ ID NO: 1459378 - RNA, 19 nt, Human
uguacugagccuuguaauu

SEQ ID NO: 1459379 - RNA, 22 nt, Human
uguacugagccuuguaauucua

SEQ ID NO: 1459380 - RNA, 14 nt, Human
uguagauaaguguu

SEQ ID NO: 1459381 - RNA, 13 nt, Human
uguagauaagugu

SEQ ID NO: 1459382 - RNA, 20 nt, Human
uguagaguugcugagagggc

SEQ ID NO: 1459383 - RNA, 15 nt, Human
uguagaguugcugag

SEQ ID NO: 1459384 - RNA, 14 nt, Human
uguagaguugcuga

SEQ ID NO: 1459385 - RNA, 13 nt, Human
uguagaguugcug

SEQ ID NO: 1459386 - RNA, 17 nt, Human
uguagauaauacaguuc

SEQ ID NO: 1459387 - RNA, 14 nt, Human
uuguacauaaugcg

SEQ ID NO: 1459388 - RNA, 14 nt, Human
uuguauccccugca

SEQ ID NO: 1459389 - RNA, 15 nt, Human
uuguauccccugcag

SEQ ID NO: 1459390 - RNA, 19 nt, Human
uuguagauugauuguauug

SEQ ID NO: 1459391 - RNA, 15 nt, Human
uuguagauugauugu

SEQ ID NO: 1459392 - RNA, 22 nt, Human
uuguauucaaaaauuaucuaua

SEQ ID NO: 1459393 - RNA, 17 nt, Human
uuguauuagauguucuc

SEQ ID NO: 1459394 - RNA, 15 nt, Human
uuguauuagauguuc

SEQ ID NO: 1459395 - RNA, 16 nt, Human
uuguauuagauguucu

SEQ ID NO: 1459396 - RNA, 13 nt, Human
uuguauuagaugu

SEQ ID NO: 1459397 - RNA, 14 nt, Human
uuguauucagaguu

SEQ ID NO: 1459398 - RNA, 21 nt, Human
uuguauucagaguugaugguu

SEQ ID NO: 1459399 - RNA, 14 nt, Human
uuguaaauauugug

SEQ ID NO: 1459400 - RNA, 13 nt, Human
uuguaaauauugu

SEQ ID NO: 1459401 - RNA, 17 nt, Human
uuguaaaguauguauua

SEQ ID NO: 1459402 - RNA, 16 nt, Human
uuguaaaggaauuuaa

SEQ ID NO: 1459403 - RNA, 17 nt, Human
uuggcaucccugggccu

SEQ ID NO: 1459404 - RNA, 13 nt, Human
uuggcaucccugg

SEQ ID NO: 1459405 - RNA, 22 nt, Human
uuggcauggaaauuuaaagcag

SEQ ID NO: 1459406 - RNA, 21 nt, Human
uuggcauggaaauuuaaagca

SEQ ID NO: 1459407 - RNA, 20 nt, Human
uuggcauggaaauuuaaagc

SEQ ID NO: 1459408 - RNA, 16 nt, Human
uuggcauggaaauuua

SEQ ID NO: 1459409 - RNA, 15 nt, Human
uuggcaucccugggc

SEQ ID NO: 1459410 - RNA, 17 nt, Human
uuggccaaggaaaggca

SEQ ID NO: 1459411 - RNA, 22 nt, Human
uuggccacuccgagaggugggc

SEQ ID NO: 1459412 - RNA, 21 nt, Human
uuggccacuccgagagguggg

SEQ ID NO: 1459413 - RNA, 14 nt, Human
uuggccacuccgag

SEQ ID NO: 1459414 - RNA, 23 nt, Human
uuggccaaugcaccuaaagaaaa

SEQ ID NO: 1459415 - RNA, 22 nt, Human
uuggccaaugcaccuaaagaaa

SEQ ID NO: 1459416 - RNA, 22 nt, Human
uuggcuggugugguacagagaa

SEQ ID NO: 1459417 - RNA, 23 nt, Human
uuggcuggugugguacagagaag

SEQ ID NO: 1459418 - RNA, 21 nt, Human
uuggcuggugugguacagaga

SEQ ID NO: 1459419 - RNA, 20 nt, Human
uuggcuggugugguacagag

SEQ ID NO: 1459420 - RNA, 18 nt, Human
uuggccauauuuaccuca

SEQ ID NO: 1459421 - RNA, 15 nt, Human
uuggccacagccagg

SEQ ID NO: 1459422 - RNA, 19 nt, Human
uuggccauauuuaccucag

SEQ ID NO: 1459423 - RNA, 15 nt, Human
uuggcuggacccagc

SEQ ID NO: 1459424 - RNA, 17 nt, Human
uuggcuggacccagcca

SEQ ID NO: 1459425 - RNA, 12 nt, Human
uuggcuggaccc

SEQ ID NO: 1459426 - RNA, 18 nt, Human
uugggaacugaacucacu

SEQ ID NO: 1459427 - RNA, 14 nt, Human
uuggcuuaccuggc

SEQ ID NO: 1459428 - RNA, 16 nt, Human
uugggaaacuuggcuc

SEQ ID NO: 1459429 - RNA, 15 nt, Human
uuggguuuuuuuccu

SEQ ID NO: 1459430 - RNA, 12 nt, Human
uugguaaaccuu

SEQ ID NO: 1459431 - RNA, 19 nt, Human
uugguaaagacuggcuuuu

SEQ ID NO: 1459432 - RNA, 16 nt, Human
uugguaaagacuggcu

SEQ ID NO: 1459433 - RNA, 14 nt, Human
uugguaaaccuuuu

SEQ ID NO: 1459434 - RNA, 14 nt, Human
uugcgguucaggaa

SEQ ID NO: 1459435 - RNA, 14 nt, Human
uugcggcuccucag

SEQ ID NO: 1459436 - RNA, 15 nt, Human
uugccugguacagua

SEQ ID NO: 1459437 - RNA, 14 nt, Human
uugccugguacagu

SEQ ID NO: 1459438 - RNA, 13 nt, Human
uugccugguacag

SEQ ID NO: 1459439 - RNA, 12 nt, Human
uugccugguaca

SEQ ID NO: 1459440 - RNA, 16 nt, Human
uugccugccuuuccau

SEQ ID NO: 1459441 - RNA, 23 nt, Human
uugccugccuuuccauccauggc

SEQ ID NO: 1459442 - RNA, 15 nt, Human
uugccugccuuucca

SEQ ID NO: 1459443 - RNA, 14 nt, Human
uugccugccuuucc

SEQ ID NO: 1459444 - RNA, 12 nt, Human
uugccugccuuu

SEQ ID NO: 1459445 - RNA, 12 nt, Human
uugccugcaggc

SEQ ID NO: 1459446 - RNA, 19 nt, Human
uugccugaacuccugccau

SEQ ID NO: 1459447 - RNA, 19 nt, Human
uugccucuuccagucuucc

SEQ ID NO: 1459448 - RNA, 17 nt, Human
uugccucuuccagucuu

SEQ ID NO: 1459449 - RNA, 19 nt, Human
uugccucugugcugugugu

SEQ ID NO: 1459450 - RNA, 14 nt, Human
uugccucugugcug

SEQ ID NO: 1459451 - RNA, 15 nt, Human
uugcugcauggcagg

SEQ ID NO: 1459452 - RNA, 16 nt, Human
uugcugcauggcaggg

SEQ ID NO: 1459453 - RNA, 20 nt, Human
uugcugcaagcacagcccuu

SEQ ID NO: 1459454 - RNA, 15 nt, Human
uugcugcaaaccuga

SEQ ID NO: 1459455 - RNA, 13 nt, Human
uugcugcaaaccu

SEQ ID NO: 1459456 - RNA, 20 nt, Human
uugcugccccaucagugcuc

SEQ ID NO: 1459457 - RNA, 19 nt, Human
uugcugccccaucagugcu

SEQ ID NO: 1459458 - RNA, 22 nt, Human
uugcuaaaggaaaaaaccaucc

SEQ ID NO: 1459459 - RNA, 13 nt, Human
uugccucugugcu

SEQ ID NO: 1459460 - RNA, 12 nt, Human
uugccucugugc

SEQ ID NO: 1459461 - RNA, 13 nt, Human
uugccauauugca

SEQ ID NO: 1459462 - RNA, 15 nt, Human
uugccauauugcaca

SEQ ID NO: 1459463 - RNA, 17 nt, Human
uugccauauugcacaug

SEQ ID NO: 1459464 - RNA, 22 nt, Human
uugccauauugcacaugucuua

SEQ ID NO: 1459465 - RNA, 23 nt, Human
uugccauauugcacaugucuuaa

SEQ ID NO: 1459466 - RNA, 13 nt, Human
uugcuguuuugau

SEQ ID NO: 1459467 - RNA, 18 nt, Human
uugcuguuuuaaacauua

SEQ ID NO: 1459468 - RNA, 16 nt, Human
uugcuguaauguuaau

SEQ ID NO: 1459469 - RNA, 21 nt, Human
uuggaaaguacacucugcugu

SEQ ID NO: 1459470 - RNA, 21 nt, Human
uuggaaauaaagucagaugga

SEQ ID NO: 1459471 - RNA, 13 nt, Human
uuggaaauaaagu

SEQ ID NO: 1459472 - RNA, 22 nt, Human
uuggaaaguacacucugcuguu

SEQ ID NO: 1459473 - RNA, 17 nt, Human
uuggaaaguacacucug

SEQ ID NO: 1459474 - RNA, 14 nt, Human
uuggaaaggaccag

SEQ ID NO: 1459475 - RNA, 13 nt, Human
uuggaaagcaggu

SEQ ID NO: 1459476 - RNA, 14 nt, Human
uugcuuaccucuca

SEQ ID NO: 1459477 - RNA, 14 nt, Human
uuggaaccuuguuu

SEQ ID NO: 1459478 - RNA, 15 nt, Human
uuggaaccagacucu

SEQ ID NO: 1459479 - RNA, 14 nt, Human
uuggaaccagacuc

SEQ ID NO: 1459480 - RNA, 13 nt, Human
uuggaaccagacu

SEQ ID NO: 1459481 - RNA, 22 nt, Human
uuggaacauuggaauguucuca

SEQ ID NO: 1459482 - RNA, 18 nt, Human
uuggaaauuuagcauugu

SEQ ID NO: 1459483 - RNA, 17 nt, Human
uuggaaauuuagcauug

SEQ ID NO: 1459484 - RNA, 16 nt, Human
uuggaaauuuagcauu

SEQ ID NO: 1459485 - RNA, 15 nt, Human
uuggaaauuuagcau

SEQ ID NO: 1459486 - RNA, 20 nt, Human
uuggauucuuuccauuugca

SEQ ID NO: 1459487 - RNA, 18 nt, Human
uuggauuguauauugugu

SEQ ID NO: 1459488 - RNA, 14 nt, Human
uuggauuguauauu

SEQ ID NO: 1459489 - RNA, 16 nt, Human
uuggaacuggaggcag

SEQ ID NO: 1459490 - RNA, 14 nt, Human
uuggaacuggaggc

SEQ ID NO: 1459491 - RNA, 13 nt, Human
uuggaacuggagg

SEQ ID NO: 1459492 - RNA, 17 nt, Human
uuggaacugaagggggc

SEQ ID NO: 1459493 - RNA, 16 nt, Human
uuggaacucugcuuga

SEQ ID NO: 1459494 - RNA, 19 nt, Human
uuggaaccuuguuuuggac

SEQ ID NO: 1459495 - RNA, 18 nt, Human
uuggaagaaggggcaggu

SEQ ID NO: 1459496 - RNA, 14 nt, Human
uuggaacuugccug

SEQ ID NO: 1459497 - RNA, 22 nt, Human
uuggaacuugccugccuuucca

SEQ ID NO: 1459498 - RNA, 15 nt, Human
uuggaaguuuuaauc

SEQ ID NO: 1459499 - RNA, 21 nt, Human
uuggaaguuuagcucugagaa

SEQ ID NO: 1459500 - RNA, 19 nt, Human
uuggaaguuuagcucugag

SEQ ID NO: 1459501 - RNA, 18 nt, Human
uuggaaguuuagcucuga

SEQ ID NO: 1459502 - RNA, 17 nt, Human
uuggaaguuuagcucug

SEQ ID NO: 1459503 - RNA, 20 nt, Human
uuggaagugaaaacuuugua

SEQ ID NO: 1459504 - RNA, 13 nt, Human
uuggaaggagcag

SEQ ID NO: 1459505 - RNA, 15 nt, Human
uuggaaggagcagaa

SEQ ID NO: 1459506 - RNA, 20 nt, Human
uuggaaguuuagcucugaga

SEQ ID NO: 1459507 - RNA, 14 nt, Human
uugcaaccucgcug

SEQ ID NO: 1459508 - RNA, 14 nt, Human
uugcaaccgucugu

SEQ ID NO: 1459509 - RNA, 18 nt, Human
uugcaaccaggaacagca

SEQ ID NO: 1459510 - RNA, 13 nt, Human
uugcaaccaggaa

SEQ ID NO: 1459511 - RNA, 16 nt, Human
uugcagacaggaaucu

SEQ ID NO: 1459512 - RNA, 15 nt, Human
uugcagacaggaauc

SEQ ID NO: 1459513 - RNA, 11 nt, Human
uugcagacagg

SEQ ID NO: 1459514 - RNA, 20 nt, Human
uugcagaagggggucucuuc

SEQ ID NO: 1459515 - RNA, 14 nt, Human
uugcagguggccaa

SEQ ID NO: 1459516 - RNA, 17 nt, Human
uugcaggguccucuucu

SEQ ID NO: 1459517 - RNA, 23 nt, Human
uugcaggguccucuucugggccu

SEQ ID NO: 1459518 - RNA, 13 nt, Human
uugcaguaacugu

SEQ ID NO: 1459519 - RNA, 23 nt, Human
uugcagguggccaaguuccucua

SEQ ID NO: 1459520 - RNA, 15 nt, Human
uugcaguaacuguuu

SEQ ID NO: 1459521 - RNA, 20 nt, Human
uugcagcuguuuuguugaca

SEQ ID NO: 1459522 - RNA, 21 nt, Human
uugcagcuguuuuguugacau

SEQ ID NO: 1459523 - RNA, 18 nt, Human
uugcagcuguuuuguuga

SEQ ID NO: 1459524 - RNA, 18 nt, Human
uugcagacaggaaucuua

SEQ ID NO: 1459525 - RNA, 20 nt, Human
uugccaccucuaacagcacc

SEQ ID NO: 1459526 - RNA, 18 nt, Human
uugccaccucuaacagca

SEQ ID NO: 1459527 - RNA, 16 nt, Human
uugccacccucaugcu

SEQ ID NO: 1459528 - RNA, 22 nt, Human
uugcauaguaccaaucauuuua

SEQ ID NO: 1459529 - RNA, 13 nt, Human
uugccacccucau

SEQ ID NO: 1459530 - RNA, 21 nt, Human
uugcagucccaagcggugucu

SEQ ID NO: 1459531 - RNA, 13 nt, Human
uugcagucccaag

SEQ ID NO: 1459532 - RNA, 22 nt, Human
uugcagucacucuagucaauga

SEQ ID NO: 1459533 - RNA, 16 nt, Human
uugcagucacucuagu

SEQ ID NO: 1459534 - RNA, 14 nt, Human
uugcagucacucua

SEQ ID NO: 1459535 - RNA, 23 nt, Human
uugcagucccaagcggugucucu

SEQ ID NO: 1459536 - RNA, 14 nt, Human
uugcauagaauaaa

SEQ ID NO: 1459537 - RNA, 17 nt, Human
uugcagcuguuuuguug

SEQ ID NO: 1459538 - RNA, 19 nt, Human
uugcaaaaacuacaaccaa

SEQ ID NO: 1459539 - RNA, 20 nt, Human
uugcaaaaacuacaaccaau

SEQ ID NO: 1459540 - RNA, 15 nt, Human
uugcaaaaacuacaa

SEQ ID NO: 1459541 - RNA, 19 nt, Human
uugcaaaaaauguuuuugg

SEQ ID NO: 1459542 - RNA, 20 nt, Human
uugauuuuugccucuuccag

SEQ ID NO: 1459543 - RNA, 14 nt, Human
uugauuuucuggau

SEQ ID NO: 1459544 - RNA, 18 nt, Human
uugauuuccguuaaaaua

SEQ ID NO: 1459545 - RNA, 22 nt, Human
uugcaaauguaguauggccugu

SEQ ID NO: 1459546 - RNA, 19 nt, Human
uugaucuggaacccagacu

SEQ ID NO: 1459547 - RNA, 17 nt, Human
uugaucuggaacccaga

SEQ ID NO: 1459548 - RNA, 16 nt, Human
uugaucuggaacccag

SEQ ID NO: 1459549 - RNA, 15 nt, Human
uugaucuggaaccca

SEQ ID NO: 1459550 - RNA, 13 nt, Human
uugaugaagaagu

SEQ ID NO: 1459551 - RNA, 12 nt, Human
uugaugaagaag

SEQ ID NO: 1459552 - RNA, 21 nt, Human
uugauuggugauuagguggug

SEQ ID NO: 1459553 - RNA, 15 nt, Human
uugaggggaccagga

SEQ ID NO: 1459554 - RNA, 17 nt, Human
uugaggggaccaggagu

SEQ ID NO: 1459555 - RNA, 14 nt, Human
uugaggggaccagg

SEQ ID NO: 1459556 - RNA, 15 nt, Human
uugaggacacugaua

SEQ ID NO: 1459557 - RNA, 14 nt, Human
uugaggacacugau

SEQ ID NO: 1459558 - RNA, 13 nt, Human
uugaggacacaug

SEQ ID NO: 1459559 - RNA, 14 nt, Human
uugaggacacaugu

SEQ ID NO: 1459560 - RNA, 15 nt, Human
uugaggacacauguc

SEQ ID NO: 1459561 - RNA, 16 nt, Human
uugaggacacaugucc

SEQ ID NO: 1459562 - RNA, 23 nt, Human
uugacuagaugauggaugccaau

SEQ ID NO: 1459563 - RNA, 22 nt, Human
uugacuagaaaauuuaaaacau

SEQ ID NO: 1459564 - RNA, 16 nt, Human
uugagcuuaaucuuug

SEQ ID NO: 1459565 - RNA, 15 nt, Human
uugagcuuaaucuuu

SEQ ID NO: 1459566 - RNA, 23 nt, Human
uugaggaaaacaagcauucacaa

SEQ ID NO: 1459567 - RNA, 13 nt, Human
uugaggaaaacaa

SEQ ID NO: 1459568 - RNA, 23 nt, Human
uugaggaaagcaagaaucagaga

SEQ ID NO: 1459569 - RNA, 15 nt, Human
uugaggaaagcaaga

SEQ ID NO: 1459570 - RNA, 11 nt, Human
uugaggacaca

SEQ ID NO: 1459571 - RNA, 16 nt, Human
uugaaugcaaaccaua

SEQ ID NO: 1459572 - RNA, 16 nt, Human
uugaaugcauuuuguu

SEQ ID NO: 1459573 - RNA, 23 nt, Human
uugaaugcauuuuguuugguauu

SEQ ID NO: 1459574 - RNA, 15 nt, Human
uugaaugcaaaccau

SEQ ID NO: 1459575 - RNA, 12 nt, Human
uugaaugcauuu

SEQ ID NO: 1459576 - RNA, 13 nt, Human
uugaaugcauuuu

SEQ ID NO: 1459577 - RNA, 16 nt, Human
uugaauggcuauguuu

SEQ ID NO: 1459578 - RNA, 20 nt, Human
uugaauggcuauguuuuuaa

SEQ ID NO: 1459579 - RNA, 13 nt, Human
uugaccugaggcu

SEQ ID NO: 1459580 - RNA, 19 nt, Human
uugaccugaggcugugguc

SEQ ID NO: 1459581 - RNA, 21 nt, Human
uugaccugccucccuucaugc

SEQ ID NO: 1459582 - RNA, 21 nt, Human
uugaccuuuuauguaguaauu

SEQ ID NO: 1459583 - RNA, 23 nt, Human
uugaccugccucccuucaugcau

SEQ ID NO: 1459584 - RNA, 22 nt, Human
uugaccuggauggggcaggcca

SEQ ID NO: 1459585 - RNA, 22 nt, Human
uugaccugccucccuucaugca

SEQ ID NO: 1459586 - RNA, 12 nt, Human
uucuuguaauuu

SEQ ID NO: 1459587 - RNA, 23 nt, Human
uucuugguuuguaaauuaacuuu

SEQ ID NO: 1459588 - RNA, 17 nt, Human
uucuugguuuguaaauu

SEQ ID NO: 1459589 - RNA, 18 nt, Human
uucuugguuuguaaauua

SEQ ID NO: 1459590 - RNA, 22 nt, Human
uucuugguugaggaaacaaaca

SEQ ID NO: 1459591 - RNA, 14 nt, Human
uucuucacugcaac

SEQ ID NO: 1459592 - RNA, 13 nt, Human
uucuucacugcaa

SEQ ID NO: 1459593 - RNA, 16 nt, Human
uucuucaccaaaucuu

SEQ ID NO: 1459594 - RNA, 13 nt, Human
uucuugguuugua

SEQ ID NO: 1459595 - RNA, 16 nt, Human
uucuugguuuguaaau

SEQ ID NO: 1459596 - RNA, 19 nt, Human
uucuuauuuuuuucuauuu

SEQ ID NO: 1459597 - RNA, 21 nt, Human
uucuguucuaguuuuuuacuu

SEQ ID NO: 1459598 - RNA, 14 nt, Human
uucuguucuaguuu

SEQ ID NO: 1459599 - RNA, 13 nt, Human
uucuguucuaguu

SEQ ID NO: 1459600 - RNA, 19 nt, Human
uucuguuccaaauucaguu

SEQ ID NO: 1459601 - RNA, 17 nt, Human
uucuguuccaaauucag

SEQ ID NO: 1459602 - RNA, 11 nt, Human
uucuguucuuu

SEQ ID NO: 1459603 - RNA, 13 nt, Human
uucuguuccaaau

SEQ ID NO: 1459604 - RNA, 17 nt, Human
uucuguuaacugaauac

SEQ ID NO: 1459605 - RNA, 21 nt, Human
uucuguuaacugaauaccacu

SEQ ID NO: 1459606 - RNA, 16 nt, Human
uucuguuaacugaaua

SEQ ID NO: 1459607 - RNA, 15 nt, Human
uucuguuaacugaau

SEQ ID NO: 1459608 - RNA, 14 nt, Human
uucuguuaacugaa

SEQ ID NO: 1459609 - RNA, 13 nt, Human
uucuguuaacuga

SEQ ID NO: 1459610 - RNA, 15 nt, Human
uucugagcuccuguc

SEQ ID NO: 1459611 - RNA, 14 nt, Human
uucugagccugccu

SEQ ID NO: 1459612 - RNA, 19 nt, Human
uucugagcuccuguccccu

SEQ ID NO: 1459613 - RNA, 13 nt, Human
uucugagcuccug

SEQ ID NO: 1459614 - RNA, 22 nt, Human
uucugagcccgguaagagcaaa

SEQ ID NO: 1459615 - RNA, 23 nt, Human
uucugagcuauuucaucuauuuu

SEQ ID NO: 1459616 - RNA, 16 nt, Human
uucugagcuauuucau

SEQ ID NO: 1459617 - RNA, 19 nt, Human
uucugagcccgguaagagc

SEQ ID NO: 1459618 - RNA, 22 nt, Human
uucugagcagcgagccugcuag

SEQ ID NO: 1459619 - RNA, 20 nt, Human
uucugagcagcgagccugcu

SEQ ID NO: 1459620 - RNA, 14 nt, Human
uucugagcauuuaa

SEQ ID NO: 1459621 - RNA, 20 nt, Human
uugaacucuucacucuucaa

SEQ ID NO: 1459622 - RNA, 15 nt, Human
uugaacucugguggc

SEQ ID NO: 1459623 - RNA, 14 nt, Human
uugaaagaauagaa

SEQ ID NO: 1459624 - RNA, 16 nt, Human
uugaacugauaaagau

SEQ ID NO: 1459625 - RNA, 19 nt, Human
uugaagaauguuaagacuu

SEQ ID NO: 1459626 - RNA, 15 nt, Human
uugaagaauguuaag

SEQ ID NO: 1459627 - RNA, 19 nt, Human
uugaagaacugcaggcccu

SEQ ID NO: 1459628 - RNA, 20 nt, Human
uugaagaacugcaggcccug

SEQ ID NO: 1459629 - RNA, 16 nt, Human
uugaagaacugcaggc

SEQ ID NO: 1459630 - RNA, 22 nt, Human
uugaacuuugaccucugcagca

SEQ ID NO: 1459631 - RNA, 21 nt, Human
uugaagaauguuaagacuuga

SEQ ID NO: 1459632 - RNA, 23 nt, Human
uugaagaauguuaagacuugaca

SEQ ID NO: 1459633 - RNA, 14 nt, Human
uugaaucuugucuc

SEQ ID NO: 1459634 - RNA, 15 nt, Human
uugaaucuugucuca

SEQ ID NO: 1459635 - RNA, 16 nt, Human
uugaaucuugucucaa

SEQ ID NO: 1459636 - RNA, 17 nt, Human
uugaaucuugucucaau

SEQ ID NO: 1459637 - RNA, 20 nt, Human
uugaaucuugucucaaugcu

SEQ ID NO: 1459638 - RNA, 22 nt, Human
uugaaucuugucucaaugcuca

SEQ ID NO: 1459639 - RNA, 23 nt, Human
uugaaucuugucucaaugcucau

SEQ ID NO: 1459640 - RNA, 15 nt, Human
uucuuucaauacaga

SEQ ID NO: 1459641 - RNA, 18 nt, Human
uucuuucaauacagauau

SEQ ID NO: 1459642 - RNA, 13 nt, Human
uucuuguaauuuu

SEQ ID NO: 1459643 - RNA, 22 nt, Human
uucuuuauaagaaagccugagu

SEQ ID NO: 1459644 - RNA, 14 nt, Human
uucuuuauaagaaa

SEQ ID NO: 1459645 - RNA, 18 nt, Human
uucucaaaggagcgagca

SEQ ID NO: 1459646 - RNA, 15 nt, Human
uucucauccugcagg

SEQ ID NO: 1459647 - RNA, 16 nt, Human
uucuccaagagcuaca

SEQ ID NO: 1459648 - RNA, 22 nt, Human
uucuccaacaucacagcccagc

SEQ ID NO: 1459649 - RNA, 20 nt, Human
uucuccaaacugaagcagcc

SEQ ID NO: 1459650 - RNA, 14 nt, Human
uucucaugauccaa

SEQ ID NO: 1459651 - RNA, 15 nt, Human
uucuauuuuuuguuu

SEQ ID NO: 1459652 - RNA, 16 nt, Human
uucuauuuuuaucuga

SEQ ID NO: 1459653 - RNA, 23 nt, Human
uucuauuuuuuguuuuguuuccu

SEQ ID NO: 1459654 - RNA, 16 nt, Human
uucuauuuuguaaacu

SEQ ID NO: 1459655 - RNA, 13 nt, Human
uucuauuuuguaa

SEQ ID NO: 1459656 - RNA, 19 nt, Human
uucuauuuuauuaugaaga

SEQ ID NO: 1459657 - RNA, 20 nt, Human
uucuauuuuauuaugaagaa

SEQ ID NO: 1459658 - RNA, 18 nt, Human
uucuauuuuauuaugaag

SEQ ID NO: 1459659 - RNA, 15 nt, Human
uucuauuuuauuaug

SEQ ID NO: 1459660 - RNA, 18 nt, Human
uucuauuuggggcuugau

SEQ ID NO: 1459661 - RNA, 16 nt, Human
uucuauuuggggcuug

SEQ ID NO: 1459662 - RNA, 14 nt, Human
uucuauuuggggcu

SEQ ID NO: 1459663 - RNA, 15 nt, Human
uucuauuucacugga

SEQ ID NO: 1459664 - RNA, 19 nt, Human
uucuauuucuccuccaugg

SEQ ID NO: 1459665 - RNA, 17 nt, Human
uucuauuucuccuccau

SEQ ID NO: 1459666 - RNA, 17 nt, Human
uucuauuucacuggagc

SEQ ID NO: 1459667 - RNA, 19 nt, Human
uucuauuuauauguacaug

SEQ ID NO: 1459668 - RNA, 18 nt, Human
uucuauuuauauguacau

SEQ ID NO: 1459669 - RNA, 19 nt, Human
uucuaauaauuucuaaugu

SEQ ID NO: 1459670 - RNA, 13 nt, Human
uucuaaugaugau

SEQ ID NO: 1459671 - RNA, 16 nt, Human
uucuaugacacaugca

SEQ ID NO: 1459672 - RNA, 17 nt, Human
uucuaugacacaugcaa

SEQ ID NO: 1459673 - RNA, 20 nt, Human
uucuauuacauuuucaguga

SEQ ID NO: 1459674 - RNA, 15 nt, Human
uucuauuaaagugcu

SEQ ID NO: 1459675 - RNA, 21 nt, Human
uucuauuaaagugcuaagguu

SEQ ID NO: 1459676 - RNA, 12 nt, Human
uucuauuaaagu

SEQ ID NO: 1459677 - RNA, 23 nt, Human
uucuauuaaaagugggaauuagg

SEQ ID NO: 1459678 - RNA, 18 nt, Human
uucuauuaaaagugggaa

SEQ ID NO: 1459679 - RNA, 14 nt, Human
uucuauuaaaagug

SEQ ID NO: 1459680 - RNA, 22 nt, Human
uucuauuaaaagacucauccgu

SEQ ID NO: 1459681 - RNA, 21 nt, Human
uucuauuaaaagacucauccg

SEQ ID NO: 1459682 - RNA, 19 nt, Human
uucuauuaaaagacucauc

SEQ ID NO: 1459683 - RNA, 18 nt, Human
uucuauuaaaagacucau

SEQ ID NO: 1459684 - RNA, 17 nt, Human
uucuauuaaaagacuca

SEQ ID NO: 1459685 - RNA, 16 nt, Human
uucuauuaaaagacuc

SEQ ID NO: 1459686 - RNA, 15 nt, Human
uucuauuaaaagacu

SEQ ID NO: 1459687 - RNA, 14 nt, Human
uucuauuaaaagac

SEQ ID NO: 1459688 - RNA, 13 nt, Human
uucuauuaaaaga

SEQ ID NO: 1459689 - RNA, 18 nt, Human
uucuauggguguuaucac

SEQ ID NO: 1459690 - RNA, 15 nt, Human
uucuauggguguuau

SEQ ID NO: 1459691 - RNA, 15 nt, Human
uucuccacagcaacc

SEQ ID NO: 1459692 - RNA, 22 nt, Human
uucuccacagcaaccccaggcu

SEQ ID NO: 1459693 - RNA, 15 nt, Human
uucuccauccuacca

SEQ ID NO: 1459694 - RNA, 20 nt, Human
uucuccauccacaugggagc

SEQ ID NO: 1459695 - RNA, 19 nt, Human
uucucccaggcaaggcugu

SEQ ID NO: 1459696 - RNA, 18 nt, Human
uucucccacucuccuagg

SEQ ID NO: 1459697 - RNA, 16 nt, Human
uucucccacucuccua

SEQ ID NO: 1459698 - RNA, 12 nt, Human
uucucccacucu

SEQ ID NO: 1459699 - RNA, 11 nt, Human
uucucccacuc

SEQ ID NO: 1459700 - RNA, 23 nt, Human
uucucccaauucauccucacuca

SEQ ID NO: 1459701 - RNA, 18 nt, Human
uucuccauggcccugcca

SEQ ID NO: 1459702 - RNA, 21 nt, Human
uucucccccauguucuguccc

SEQ ID NO: 1459703 - RNA, 18 nt, Human
uucuccccagcucccagg

SEQ ID NO: 1459704 - RNA, 15 nt, Human
uucuccccagcuccc

SEQ ID NO: 1459705 - RNA, 12 nt, Human
uucuccccagcu

SEQ ID NO: 1459706 - RNA, 12 nt, Human
uucucuccagcu

SEQ ID NO: 1459707 - RNA, 15 nt, Human
uucuccccugcacug

SEQ ID NO: 1459708 - RNA, 16 nt, Human
uucuccccugcacugu

SEQ ID NO: 1459709 - RNA, 17 nt, Human
uucucucggcuccccau

SEQ ID NO: 1459710 - RNA, 19 nt, Human
uucucuccagcugacuaaa

SEQ ID NO: 1459711 - RNA, 23 nt, Human
uucucuccucuccccaugauguu

SEQ ID NO: 1459712 - RNA, 16 nt, Human
uucugacucugagcua

SEQ ID NO: 1459713 - RNA, 15 nt, Human
uucugacucugagcu

SEQ ID NO: 1459714 - RNA, 19 nt, Human
uucugacucgguuucucca

SEQ ID NO: 1459715 - RNA, 18 nt, Human
uucugacucgguuucucc

SEQ ID NO: 1459716 - RNA, 12 nt, Human
uucucugucuca

SEQ ID NO: 1459717 - RNA, 13 nt, Human
uucucugucucau

SEQ ID NO: 1459718 - RNA, 19 nt, Human
uucucugguaauauugacu

SEQ ID NO: 1459719 - RNA, 20 nt, Human
uucucuggcuguaaggcucu

SEQ ID NO: 1459720 - RNA, 13 nt, Human
uucucugccagug

SEQ ID NO: 1459721 - RNA, 12 nt, Human
uucucugccagu

SEQ ID NO: 1459722 - RNA, 10 nt, Human
uucucugcca

SEQ ID NO: 1459723 - RNA, 17 nt, Human
uucucugauacagaaaa

SEQ ID NO: 1459724 - RNA, 16 nt, Human
uucucugacuucugcc

SEQ ID NO: 1459725 - RNA, 12 nt, Human
uucucugacuuc

SEQ ID NO: 1459726 - RNA, 11 nt, Human
uucucugacuu

SEQ ID NO: 1459727 - RNA, 21 nt, Human
uucucucuuuauacagcugua

SEQ ID NO: 1459728 - RNA, 20 nt, Human
uucucucuuuauacagcugu

SEQ ID NO: 1459729 - RNA, 18 nt, Human
uucucucuuuauacagcu

SEQ ID NO: 1459730 - RNA, 17 nt, Human
uucucucuuuauacagc

SEQ ID NO: 1459731 - RNA, 16 nt, Human
uucucugauacagaaa

SEQ ID NO: 1459732 - RNA, 15 nt, Human
uucucugauacagaa

SEQ ID NO: 1459733 - RNA, 17 nt, Human
uucucugacuucugccu

SEQ ID NO: 1459734 - RNA, 14 nt, Human
uucucugauacaga

SEQ ID NO: 1459735 - RNA, 22 nt, Human
uuccuuugaauccucucucugu

SEQ ID NO: 1459736 - RNA, 18 nt, Human
uuccuuucuuuucccccu

SEQ ID NO: 1459737 - RNA, 14 nt, Human
uucuaaaaugccuu

SEQ ID NO: 1459738 - RNA, 15 nt, Human
uucuaaaaugauugu

SEQ ID NO: 1459739 - RNA, 22 nt, Human
uucuaaaaucuuauaguucuag

SEQ ID NO: 1459740 - RNA, 21 nt, Human
uucuaaaaucuuauaguucua

SEQ ID NO: 1459741 - RNA, 20 nt, Human
uucuaaaaucuuauaguucu

SEQ ID NO: 1459742 - RNA, 17 nt, Human
uuccuuucuuuuccccc

SEQ ID NO: 1459743 - RNA, 15 nt, Human
uucuaaaagguguga

SEQ ID NO: 1459744 - RNA, 18 nt, Human
uucuaauaauuucuaaug

SEQ ID NO: 1459745 - RNA, 16 nt, Human
uucuaauaauuucuaa

SEQ ID NO: 1459746 - RNA, 15 nt, Human
uucuaauaauuucua

SEQ ID NO: 1459747 - RNA, 21 nt, Human
uucuaaguuucuaagauucua

SEQ ID NO: 1459748 - RNA, 19 nt, Human
uucuaaaggaguuuauguu

SEQ ID NO: 1459749 - RNA, 20 nt, Human
uucuaaguuucuaagauucu

SEQ ID NO: 1459750 - RNA, 23 nt, Human
uucuaaaggaguuuauguuccau

SEQ ID NO: 1459751 - RNA, 19 nt, Human
uucuaaaggcuaccuuugu

SEQ ID NO: 1459752 - RNA, 17 nt, Human
uucuaaaggcuaccuuu

SEQ ID NO: 1459753 - RNA, 18 nt, Human
uucuaaaggcuaccuuug

SEQ ID NO: 1459754 - RNA, 15 nt, Human
uucuaaacuggagac

SEQ ID NO: 1459755 - RNA, 23 nt, Human
uucuaaacccaauccaaauggcg

SEQ ID NO: 1459756 - RNA, 19 nt, Human
uucuaaacccaauccaaau

SEQ ID NO: 1459757 - RNA, 18 nt, Human
uucuaaacccaauccaaa

SEQ ID NO: 1459758 - RNA, 23 nt, Human
uucuaaaaugugauguucuaagg

SEQ ID NO: 1459759 - RNA, 20 nt, Human
uucuaaaaugugauguucua

SEQ ID NO: 1459760 - RNA, 19 nt, Human
uucuaaaaugugauguucu

SEQ ID NO: 1459761 - RNA, 15 nt, Human
uucuaaaaugugaug

SEQ ID NO: 1459762 - RNA, 16 nt, Human
uucuaaaggaguuuau

SEQ ID NO: 1459763 - RNA, 18 nt, Human
uucuaaacuggagacugu

SEQ ID NO: 1459764 - RNA, 16 nt, Human
uucuaaaggcuaccuu

SEQ ID NO: 1459765 - RNA, 14 nt, Human
uuccuccuggaaau

SEQ ID NO: 1459766 - RNA, 13 nt, Human
uuccuccuggaaa

SEQ ID NO: 1459767 - RNA, 11 nt, Human
uuccuccugga

SEQ ID NO: 1459768 - RNA, 15 nt, Human
uuccuccugcucaua

SEQ ID NO: 1459769 - RNA, 13 nt, Human
uuccuccugcuca

SEQ ID NO: 1459770 - RNA, 18 nt, Human
uuccugccccaggccuga

SEQ ID NO: 1459771 - RNA, 12 nt, Human
uuccuuccgcuu

SEQ ID NO: 1459772 - RNA, 21 nt, Human
uuccuuccaaugucuggagac

SEQ ID NO: 1459773 - RNA, 17 nt, Human
uuccuucauuuccuccg

SEQ ID NO: 1459774 - RNA, 18 nt, Human
uuccugccgcaacaguuu

SEQ ID NO: 1459775 - RNA, 19 nt, Human
uuccuucccuuuucuguuc

SEQ ID NO: 1459776 - RNA, 16 nt, Human
uuccuucccugugccu

SEQ ID NO: 1459777 - RNA, 14 nt, Human
uuccuucccaugga

SEQ ID NO: 1459778 - RNA, 15 nt, Human
uuccuucccugcugu

SEQ ID NO: 1459779 - RNA, 19 nt, Human
uuccuucccugcugugaaa

SEQ ID NO: 1459780 - RNA, 21 nt, Human
uuccuucccugcugugaaaga

SEQ ID NO: 1459781 - RNA, 13 nt, Human
uuccuccucaggc

SEQ ID NO: 1459782 - RNA, 16 nt, Human
uuccuccuccccacuu

SEQ ID NO: 1459783 - RNA, 14 nt, Human
uuccuccuccccac

SEQ ID NO: 1459784 - RNA, 20 nt, Human
uuccuccucaggcacacagc

SEQ ID NO: 1459785 - RNA, 21 nt, Human
uuccucaugaauguaaauuug

SEQ ID NO: 1459786 - RNA, 18 nt, Human
uuccucaugaauguaaau

SEQ ID NO: 1459787 - RNA, 17 nt, Human
uuccucaugaauguaaa

SEQ ID NO: 1459788 - RNA, 16 nt, Human
uuccucaugaauguaa

SEQ ID NO: 1459789 - RNA, 15 nt, Human
uuccucaugaaugua

SEQ ID NO: 1459790 - RNA, 14 nt, Human
uuccucaugaaugu

SEQ ID NO: 1459791 - RNA, 18 nt, Human
uuccucauccaccccauc

SEQ ID NO: 1459792 - RNA, 19 nt, Human
uuccucauccaccccaucc

SEQ ID NO: 1459793 - RNA, 15 nt, Human
uuccucagccagccu

SEQ ID NO: 1459794 - RNA, 14 nt, Human
uuccucagccagcc

SEQ ID NO: 1459795 - RNA, 18 nt, Human
uuccuaguuuucuccucc

SEQ ID NO: 1459796 - RNA, 15 nt, Human
uuccuaguuuucucc

SEQ ID NO: 1459797 - RNA, 16 nt, Human
uuccuaguucuguaga

SEQ ID NO: 1459798 - RNA, 17 nt, Human
uuccuaguucuguagaa

SEQ ID NO: 1459799 - RNA, 20 nt, Human
uuccuaguucuguagaaaug

SEQ ID NO: 1459800 - RNA, 16 nt, Human
uuccucagccagccuc

SEQ ID NO: 1459801 - RNA, 19 nt, Human
uuccucagccagccucgcc

SEQ ID NO: 1459802 - RNA, 18 nt, Human
uuccuagcugugugaaua

SEQ ID NO: 1459803 - RNA, 18 nt, Human
uuccuagcccucucacau

SEQ ID NO: 1459804 - RNA, 14 nt, Human
uuccuagcccucuc

SEQ ID NO: 1459805 - RNA, 20 nt, Human
uuccuagguauaauucacau

SEQ ID NO: 1459806 - RNA, 23 nt, Human
uucccuucaguacccucucagcu

SEQ ID NO: 1459807 - RNA, 22 nt, Human
uucccuucaguacccucucagc

SEQ ID NO: 1459808 - RNA, 19 nt, Human
uucccuucaguacccucuc

SEQ ID NO: 1459809 - RNA, 18 nt, Human
uucccuguuuucccccca

SEQ ID NO: 1459810 - RNA, 18 nt, Human
uucccugugccuccuccc

SEQ ID NO: 1459811 - RNA, 23 nt, Human
uucccuggucccuuguauccccu

SEQ ID NO: 1459812 - RNA, 19 nt, Human
uuccccacccaccaacccu

SEQ ID NO: 1459813 - RNA, 23 nt, Human
uuccccacccaccaacccucagg

SEQ ID NO: 1459814 - RNA, 20 nt, Human
uuccccaccagaugcugaaa

SEQ ID NO: 1459815 - RNA, 12 nt, Human
uuccccagagaa

SEQ ID NO: 1459816 - RNA, 11 nt, Human
uuccccagaga

SEQ ID NO: 1459817 - RNA, 15 nt, Human
uuccccagacuuguu

SEQ ID NO: 1459818 - RNA, 18 nt, Human
uuccccagacgccuggcu

SEQ ID NO: 1459819 - RNA, 14 nt, Human
uuccccacuggagc

SEQ ID NO: 1459820 - RNA, 13 nt, Human
uuccccacuggag

SEQ ID NO: 1459821 - RNA, 19 nt, Human
uuccuagagaagacaggcu

SEQ ID NO: 1459822 - RNA, 13 nt, Human
uucccuuuccuga

SEQ ID NO: 1459823 - RNA, 20 nt, Human
uucccuuguagcuccucccc

SEQ ID NO: 1459824 - RNA, 16 nt, Human
uucccuuguagcuccu

SEQ ID NO: 1459825 - RNA, 15 nt, Human
uucccugugccuccu

SEQ ID NO: 1459826 - RNA, 14 nt, Human
uucccuucaucugg

SEQ ID NO: 1459827 - RNA, 15 nt, Human
uucccuucaucugga

SEQ ID NO: 1459828 - RNA, 16 nt, Human
uucccuucaucuggaa

SEQ ID NO: 1459829 - RNA, 17 nt, Human
uucaguuguucuuuuua

SEQ ID NO: 1459830 - RNA, 15 nt, Human
uucaguugucucuga

SEQ ID NO: 1459831 - RNA, 23 nt, Human
uucagggaaggaggagccugucc

SEQ ID NO: 1459832 - RNA, 22 nt, Human
uucagggaaggaggagccuguc

SEQ ID NO: 1459833 - RNA, 21 nt, Human
uucagggaaggaggagccugu

SEQ ID NO: 1459834 - RNA, 20 nt, Human
uucagggaaggaggagccug

SEQ ID NO: 1459835 - RNA, 23 nt, Human
uucaucuauuuuuggcagucuga

SEQ ID NO: 1459836 - RNA, 20 nt, Human
uucaucuaccauuuucuggu

SEQ ID NO: 1459837 - RNA, 15 nt, Human
uucaucuaggauuuu

SEQ ID NO: 1459838 - RNA, 15 nt, Human
uucauaaucacucua

SEQ ID NO: 1459839 - RNA, 17 nt, Human
uucauaaguauuucaaa

SEQ ID NO: 1459840 - RNA, 20 nt, Human
uucauaaguauuaugucucu

SEQ ID NO: 1459841 - RNA, 19 nt, Human
uucauaaguauuaugucuc

SEQ ID NO: 1459842 - RNA, 12 nt, Human
uucauaaguauu

SEQ ID NO: 1459843 - RNA, 21 nt, Human
uucaguuuucauuugguucau

SEQ ID NO: 1459844 - RNA, 13 nt, Human
uucaguuucauaa

SEQ ID NO: 1459845 - RNA, 16 nt, Human
uucaguuucauaaaag

SEQ ID NO: 1459846 - RNA, 22 nt, Human
uucaguuuauuugaaccaauaa

SEQ ID NO: 1459847 - RNA, 15 nt, Human
uucaugacagccucc

SEQ ID NO: 1459848 - RNA, 19 nt, Human
uucaucuucaguugucucu

SEQ ID NO: 1459849 - RNA, 18 nt, Human
uucaugaaagauucaaug

SEQ ID NO: 1459850 - RNA, 22 nt, Human
uucaucucccaccuagcagcac

SEQ ID NO: 1459851 - RNA, 21 nt, Human
uucauuuuaacaucugagaaa

SEQ ID NO: 1459852 - RNA, 18 nt, Human
uucauuuuaacaucugag

SEQ ID NO: 1459853 - RNA, 16 nt, Human
uucauuuccuccguca

SEQ ID NO: 1459854 - RNA, 22 nt, Human
uucauuugguucauuaauucua

SEQ ID NO: 1459855 - RNA, 16 nt, Human
uucauuuccucaaaaa

SEQ ID NO: 1459856 - RNA, 13 nt, Human
uucauuuccucaa

SEQ ID NO: 1459857 - RNA, 13 nt, Human
uucauuucaucua

SEQ ID NO: 1459858 - RNA, 15 nt, Human
uucauuucaacuguu

SEQ ID NO: 1459859 - RNA, 18 nt, Human
uucauuuaucuauaauuu

SEQ ID NO: 1459860 - RNA, 17 nt, Human
uucauuuaucuauaauu

SEQ ID NO: 1459861 - RNA, 19 nt, Human
uucauuuagucaugugacc

SEQ ID NO: 1459862 - RNA, 23 nt, Human
uucaugauuucauuucaacuguu

SEQ ID NO: 1459863 - RNA, 17 nt, Human
uucaugauuucauuuca

SEQ ID NO: 1459864 - RNA, 23 nt, Human
uucaugauuagaaauuaccugug

SEQ ID NO: 1459865 - RNA, 15 nt, Human
uucaugauuagaaau

SEQ ID NO: 1459866 - RNA, 18 nt, Human
uucaugauaaugaacaga

SEQ ID NO: 1459867 - RNA, 15 nt, Human
uucaugauaaugaac

SEQ ID NO: 1459868 - RNA, 12 nt, Human
uucaugauaaug

SEQ ID NO: 1459869 - RNA, 16 nt, Human
uucaugacagccucca

SEQ ID NO: 1459870 - RNA, 16 nt, Human
uucaugaccaguaaag

SEQ ID NO: 1459871 - RNA, 15 nt, Human
uuccacugagggcag

SEQ ID NO: 1459872 - RNA, 13 nt, Human
uucauuuucucua

SEQ ID NO: 1459873 - RNA, 16 nt, Human
uuccacugagggcagu

SEQ ID NO: 1459874 - RNA, 17 nt, Human
uuccacuuauagccucu

SEQ ID NO: 1459875 - RNA, 22 nt, Human
uuccacugugcagguucccacu

SEQ ID NO: 1459876 - RNA, 20 nt, Human
uuccacuuauagccucuguc

SEQ ID NO: 1459877 - RNA, 18 nt, Human
uuccacuuauagccucug

SEQ ID NO: 1459878 - RNA, 14 nt, Human
uuccagccccucug

SEQ ID NO: 1459879 - RNA, 17 nt, Human
uuccagcauucccaggu

SEQ ID NO: 1459880 - RNA, 20 nt, Human
uuccagcauucccagguagg

SEQ ID NO: 1459881 - RNA, 15 nt, Human
uuccagcauucccag

SEQ ID NO: 1459882 - RNA, 20 nt, Human
uuccagccccucuggucgcu

SEQ ID NO: 1459883 - RNA, 17 nt, Human
uuccagccccucugguc

SEQ ID NO: 1459884 - RNA, 16 nt, Human
uuccagccccucuggu

SEQ ID NO: 1459885 - RNA, 21 nt, Human
uuccaugacugcuugcccuaa

SEQ ID NO: 1459886 - RNA, 16 nt, Human
uuccaugacaucaaga

SEQ ID NO: 1459887 - RNA, 18 nt, Human
uuccaucuuuacaaaacu

SEQ ID NO: 1459888 - RNA, 13 nt, Human
uuccaucuuuaca

SEQ ID NO: 1459889 - RNA, 12 nt, Human
uuccaucugauu

SEQ ID NO: 1459890 - RNA, 18 nt, Human
uuccaugauucuauuuau

SEQ ID NO: 1459891 - RNA, 17 nt, Human
uuccaugauucuauuua

SEQ ID NO: 1459892 - RNA, 19 nt, Human
uuccaugacugcuugcccu

SEQ ID NO: 1459893 - RNA, 18 nt, Human
uuccauuugcauuuguuu

SEQ ID NO: 1459894 - RNA, 15 nt, Human
uuccauuugcauuug

SEQ ID NO: 1459895 - RNA, 17 nt, Human
uuccauuugcaagggaa

SEQ ID NO: 1459896 - RNA, 13 nt, Human
uuccauuugcaag

SEQ ID NO: 1459897 - RNA, 20 nt, Human
uuccauugguccaagauucc

SEQ ID NO: 1459898 - RNA, 15 nt, Human
uuccccaccagaugc

SEQ ID NO: 1459899 - RNA, 19 nt, Human
uucccaaaauguugaaaua

SEQ ID NO: 1459900 - RNA, 17 nt, Human
uuccauuugcauuuguu

SEQ ID NO: 1459901 - RNA, 22 nt, Human
uucccaaaauguugaaauauga

SEQ ID NO: 1459902 - RNA, 11 nt, Human
uucccaaaagc

SEQ ID NO: 1459903 - RNA, 21 nt, Human
uucccaaaagcccauucauuc

SEQ ID NO: 1459904 - RNA, 23 nt, Human
uucagcugccaguguccugagcc

SEQ ID NO: 1459905 - RNA, 23 nt, Human
uucagcugagguuugcacuuccu

SEQ ID NO: 1459906 - RNA, 15 nt, Human
uucagcucugaaaga

SEQ ID NO: 1459907 - RNA, 13 nt, Human
uucagcuccugac

SEQ ID NO: 1459908 - RNA, 14 nt, Human
uucagcuccugacc

SEQ ID NO: 1459909 - RNA, 12 nt, Human
uucagcuccuga

SEQ ID NO: 1459910 - RNA, 10 nt, Human
uucagcuccu

SEQ ID NO: 1459911 - RNA, 20 nt, Human
uucaggaggaauacugaaca

SEQ ID NO: 1459912 - RNA, 18 nt, Human
uucaggaggaauacugaa

SEQ ID NO: 1459913 - RNA, 15 nt, Human
uucaggaggaauacu

SEQ ID NO: 1459914 - RNA, 21 nt, Human
uucaggagagaguugaaccua

SEQ ID NO: 1459915 - RNA, 20 nt, Human
uucaggagagaguugaaccu

SEQ ID NO: 1459916 - RNA, 18 nt, Human
uucaggacacucacuaca

SEQ ID NO: 1459917 - RNA, 22 nt, Human
uucaggaucuauuuuuggaggu

SEQ ID NO: 1459918 - RNA, 14 nt, Human
uucaggaucuauuu

SEQ ID NO: 1459919 - RNA, 12 nt, Human
uucaggaucuau

SEQ ID NO: 1459920 - RNA, 23 nt, Human
uucaggaucuauuuuuggagguu

SEQ ID NO: 1459921 - RNA, 13 nt, Human
uucagcugccagu

SEQ ID NO: 1459922 - RNA, 19 nt, Human
uucacccccuuuccuggac

SEQ ID NO: 1459923 - RNA, 20 nt, Human
uucacucuucaaaugccuga

SEQ ID NO: 1459924 - RNA, 16 nt, Human
uucacccccuuuccug

SEQ ID NO: 1459925 - RNA, 22 nt, Human
uucagaggcucagauuguaaua

SEQ ID NO: 1459926 - RNA, 13 nt, Human
uucagaggcucag

SEQ ID NO: 1459927 - RNA, 12 nt, Human
uucagaggcuca

SEQ ID NO: 1459928 - RNA, 23 nt, Human
uucagaggcccucgcugccagcu

SEQ ID NO: 1459929 - RNA, 22 nt, Human
uucagaggcccucgcugccagc

SEQ ID NO: 1459930 - RNA, 21 nt, Human
uucagacucccauuccugaag

SEQ ID NO: 1459931 - RNA, 20 nt, Human
uucagacucccauuccugaa

SEQ ID NO: 1459932 - RNA, 21 nt, Human
uucaaagccagcguccuccuc

SEQ ID NO: 1459933 - RNA, 13 nt, Human
uucaaagccagcg

SEQ ID NO: 1459934 - RNA, 16 nt, Human
uucaaagcaugaaaug

SEQ ID NO: 1459935 - RNA, 18 nt, Human
uucaaagaugcugugagu

SEQ ID NO: 1459936 - RNA, 13 nt, Human
uucaaagaugcug

SEQ ID NO: 1459937 - RNA, 21 nt, Human
uucaacaaagaaacaaagaug

SEQ ID NO: 1459938 - RNA, 20 nt, Human
uucaacaaacauuugcugaa

SEQ ID NO: 1459939 - RNA, 12 nt, Human
uucaacaaacau

SEQ ID NO: 1459940 - RNA, 16 nt, Human
uuauuuugauguaaag

SEQ ID NO: 1459941 - RNA, 11 nt, Human
uuauuuugaug

SEQ ID NO: 1459942 - RNA, 17 nt, Human
uuauuuugacauaaagu

SEQ ID NO: 1459943 - RNA, 12 nt, Human
uuauuuucuggu

SEQ ID NO: 1459944 - RNA, 12 nt, Human
uucaaagaugcu

SEQ ID NO: 1459945 - RNA, 15 nt, Human
uuauuuugacauaaa

SEQ ID NO: 1459946 - RNA, 13 nt, Human
uuauuuugaugua

SEQ ID NO: 1459947 - RNA, 13 nt, Human
uucaaagauauuu

SEQ ID NO: 1459948 - RNA, 18 nt, Human
uuacuaaaaaaaagauga

SEQ ID NO: 1459949 - RNA, 17 nt, Human
uuacuaaaaaaaagaug

SEQ ID NO: 1459950 - RNA, 15 nt, Human
uuacgugcucugugg

SEQ ID NO: 1459951 - RNA, 12 nt, Human
uuauuuucacug

SEQ ID NO: 1459952 - RNA, 15 nt, Human
uucaaucuguaaacu

SEQ ID NO: 1459953 - RNA, 14 nt, Human
uucaaucuguaaac

SEQ ID NO: 1459954 - RNA, 16 nt, Human
uucaauauuuucuuuu

SEQ ID NO: 1459955 - RNA, 11 nt, Human
uucaauauuuu

SEQ ID NO: 1459956 - RNA, 19 nt, Human
uucaacaauucuaaaauga

SEQ ID NO: 1459957 - RNA, 15 nt, Human
uucaacaauucuaaa

SEQ ID NO: 1459958 - RNA, 14 nt, Human
uucaacaauucuaa

SEQ ID NO: 1459959 - RNA, 22 nt, Human
uucaacaaagaaacaaagaugu

SEQ ID NO: 1459960 - RNA, 18 nt, Human
uucaacaauucuaaaaug

SEQ ID NO: 1459961 - RNA, 15 nt, Human
uucaauucaaagcug

SEQ ID NO: 1459962 - RNA, 15 nt, Human
uucaauguuagccuc

SEQ ID NO: 1459963 - RNA, 20 nt, Human
uucaaucuguaaacugugua

SEQ ID NO: 1459964 - RNA, 18 nt, Human
uucaaucuguaaacugug

SEQ ID NO: 1459965 - RNA, 17 nt, Human
uucaaucuguaaacugu

SEQ ID NO: 1459966 - RNA, 16 nt, Human
uucaaucuguaaacug

SEQ ID NO: 1459967 - RNA, 19 nt, Human
uucaaugccccugaauuua

SEQ ID NO: 1459968 - RNA, 16 nt, Human
uuuucacuguagaaug

SEQ ID NO: 1459969 - RNA, 18 nt, Human
uuuucaaugaauuuuaua

SEQ ID NO: 1459970 - RNA, 16 nt, Human
uuuucaauagccacua

SEQ ID NO: 1459971 - RNA, 14 nt, Human
uuuucaauagccac

SEQ ID NO: 1459972 - RNA, 16 nt, Human
uuuucaagaauaauca

SEQ ID NO: 1459973 - RNA, 15 nt, Human
uuuucaagaaacuga

SEQ ID NO: 1459974 - RNA, 14 nt, Human
uuuucaagaaacug

SEQ ID NO: 1459975 - RNA, 17 nt, Human
uuuuaucccucaccugu

SEQ ID NO: 1459976 - RNA, 19 nt, Human
uuuucggccccauguaucu

SEQ ID NO: 1459977 - RNA, 16 nt, Human
uuuucgaaaaucaaau

SEQ ID NO: 1459978 - RNA, 15 nt, Human
uuuucgaaaaucaaa

SEQ ID NO: 1459979 - RNA, 14 nt, Human
uuuucgaaaaucaa

SEQ ID NO: 1459980 - RNA, 13 nt, Human
uuuuccuuugugc

SEQ ID NO: 1459981 - RNA, 17 nt, Human
uuuuccuuugaauccuc

SEQ ID NO: 1459982 - RNA, 21 nt, Human
uuuuccuuccaaugucuggag

SEQ ID NO: 1459983 - RNA, 19 nt, Human
uuuuccuucccuuuucugu

SEQ ID NO: 1459984 - RNA, 16 nt, Human
uuuuccucuccacaca

SEQ ID NO: 1459985 - RNA, 18 nt, Human
uuuuccucuucuauuuug

SEQ ID NO: 1459986 - RNA, 21 nt, Human
uuuuccauggcaggaaggcuu

SEQ ID NO: 1459987 - RNA, 22 nt, Human
uuuuccauggcaggaaggcuug

SEQ ID NO: 1459988 - RNA, 20 nt, Human
uuuuccaugcguguuucuga

SEQ ID NO: 1459989 - RNA, 13 nt, Human
uuuuccucccuca

SEQ ID NO: 1459990 - RNA, 11 nt, Human
uuuuccuauau

SEQ ID NO: 1459991 - RNA, 17 nt, Human
uuuucccacuccaagcc

SEQ ID NO: 1459992 - RNA, 12 nt, Human
uuuucccacgag

SEQ ID NO: 1459993 - RNA, 20 nt, Human
uuuucccaaagcaucccucu

SEQ ID NO: 1459994 - RNA, 18 nt, Human
uuuucccaaaauguugaa

SEQ ID NO: 1459995 - RNA, 16 nt, Human
uuuuccuccugagugc

SEQ ID NO: 1459996 - RNA, 13 nt, Human
uuuuccugaaaac

SEQ ID NO: 1459997 - RNA, 15 nt, Human
uuuuaucccaaaguu

SEQ ID NO: 1459998 - RNA, 19 nt, Human
uuuuaucauuuucaaaaug

SEQ ID NO: 1459999 - RNA, 19 nt, Human
uuuuaucgucacugcuuaa

SEQ ID NO: 1460000 - RNA, 18 nt, Human
uuuuaucgucacugcuua

SEQ ID NO: 1460001 - RNA, 16 nt, Human
uuuuaugauacuugaa

SEQ ID NO: 1460002 - RNA, 20 nt, Human
uuuuaugauacuugaaaauu

SEQ ID NO: 1460003 - RNA, 16 nt, Human
uuuuaucaugcauguc

SEQ ID NO: 1460004 - RNA, 12 nt, Human
uuuuaucaguag

SEQ ID NO: 1460005 - RNA, 21 nt, Human
uuuuauauuaaccagauauau

SEQ ID NO: 1460006 - RNA, 20 nt, Human
uuuuauauuaaccagauaua

SEQ ID NO: 1460007 - RNA, 10 nt, Human
uuuuauauuu

SEQ ID NO: 1460008 - RNA, 15 nt, Human
uuuuauauauuauau

SEQ ID NO: 1460009 - RNA, 12 nt, Human
uuuuauauauua

SEQ ID NO: 1460010 - RNA, 13 nt, Human
uuuuauaucccau

SEQ ID NO: 1460011 - RNA, 20 nt, Human
uuuuauaugcuucuguuuua

SEQ ID NO: 1460012 - RNA, 15 nt, Human
uuuuauaugcuucug

SEQ ID NO: 1460013 - RNA, 16 nt, Human
uuuuacugcucugaga

SEQ ID NO: 1460014 - RNA, 16 nt, Human
uuuuacucugccuaca

SEQ ID NO: 1460015 - RNA, 22 nt, Human
uuuuacucugccuacagaacuu

SEQ ID NO: 1460016 - RNA, 14 nt, Human
uuuuacucugccua

SEQ ID NO: 1460017 - RNA, 13 nt, Human
uuuuacucugccu

SEQ ID NO: 1460018 - RNA, 11 nt, Human
uuuuauauaua

SEQ ID NO: 1460019 - RNA, 14 nt, Human
uuuuacuguacaga

SEQ ID NO: 1460020 - RNA, 21 nt, Human
uuuuaauuugguuuucacauu

SEQ ID NO: 1460021 - RNA, 17 nt, Human
uuuuaauuugguuuuca

SEQ ID NO: 1460022 - RNA, 22 nt, Human
uuuuacauaaauuuaguauuuu

SEQ ID NO: 1460023 - RNA, 12 nt, Human
uuuuacucugcc

SEQ ID NO: 1460024 - RNA, 17 nt, Human
uuuuacuauuguuacau

SEQ ID NO: 1460025 - RNA, 14 nt, Human
uuuuacaugaagua

SEQ ID NO: 1460026 - RNA, 12 nt, Human
uuuuacaugaag

SEQ ID NO: 1460027 - RNA, 11 nt, Human
uuuuacaugaa

SEQ ID NO: 1460028 - RNA, 18 nt, Human
uuuuacaugaaguauuuu

SEQ ID NO: 1460029 - RNA, 15 nt, Human
uuuuacaugaaguau

SEQ ID NO: 1460030 - RNA, 13 nt, Human
uuuuacauuaaau

SEQ ID NO: 1460031 - RNA, 22 nt, Human
uuuguuuaauuuuuauuucuuc

SEQ ID NO: 1460032 - RNA, 21 nt, Human
uuuguuuaauuuuuauuucuu

SEQ ID NO: 1460033 - RNA, 14 nt, Human
uuuguuuaaaaagu

SEQ ID NO: 1460034 - RNA, 20 nt, Human
uuuguuuaaaaaguaauaaa

SEQ ID NO: 1460035 - RNA, 14 nt, Human
uuuguuuaaaaagg

SEQ ID NO: 1460036 - RNA, 21 nt, Human
uuuguuuaugguaaaaaauuu

SEQ ID NO: 1460037 - RNA, 15 nt, Human
uuuguuuauguaauu

SEQ ID NO: 1460038 - RNA, 15 nt, Human
uuuuaaaaugagaaa

SEQ ID NO: 1460039 - RNA, 20 nt, Human
uuuuaaaauuuguucuugua

SEQ ID NO: 1460040 - RNA, 15 nt, Human
uuuuaaaauuuguuc

SEQ ID NO: 1460041 - RNA, 11 nt, Human
uuuuaaaauuu

SEQ ID NO: 1460042 - RNA, 13 nt, Human
uuuuaaaauguac

SEQ ID NO: 1460043 - RNA, 14 nt, Human
uuuuaaaauguaca

SEQ ID NO: 1460044 - RNA, 22 nt, Human
uuuuaaaaugagaaaucuaaaa

SEQ ID NO: 1460045 - RNA, 22 nt, Human
uuugucaugcugggauuuccaa

SEQ ID NO: 1460046 - RNA, 20 nt, Human
uuugucauuagccugaguag

SEQ ID NO: 1460047 - RNA, 23 nt, Human
uuugucauuagccugaguagaaa

SEQ ID NO: 1460048 - RNA, 17 nt, Human
uuuguguucuguuuugu

SEQ ID NO: 1460049 - RNA, 13 nt, Human
uuuguguucuguu

SEQ ID NO: 1460050 - RNA, 12 nt, Human
uuugucccaggu

SEQ ID NO: 1460051 - RNA, 16 nt, Human
uuuguuauuuugcaac

SEQ ID NO: 1460052 - RNA, 21 nt, Human
uuuguuaauuuagaaaacuuu

SEQ ID NO: 1460053 - RNA, 12 nt, Human
uuuguuaauuua

SEQ ID NO: 1460054 - RNA, 15 nt, Human
uuuguucccaagagc

SEQ ID NO: 1460055 - RNA, 19 nt, Human
uuuguuccccacuggagca

SEQ ID NO: 1460056 - RNA, 17 nt, Human
uuuguuccccacuggag

SEQ ID NO: 1460057 - RNA, 13 nt, Human
uuugguguauggu

SEQ ID NO: 1460058 - RNA, 12 nt, Human
uuugguguaugg

SEQ ID NO: 1460059 - RNA, 17 nt, Human
uuuggaauacuuuuugu

SEQ ID NO: 1460060 - RNA, 15 nt, Human
uuuggaauacuuuuu

SEQ ID NO: 1460061 - RNA, 13 nt, Human
uuuggaauacuuu

SEQ ID NO: 1460062 - RNA, 11 nt, Human
uuuggaaggag

SEQ ID NO: 1460063 - RNA, 19 nt, Human
uuuggaaguuuagcucuga

SEQ ID NO: 1460064 - RNA, 20 nt, Human
uuugguuaugaauacuuugc

SEQ ID NO: 1460065 - RNA, 15 nt, Human
uuuguaaauuaacuu

SEQ ID NO: 1460066 - RNA, 16 nt, Human
uuuguaaauuaacuuu

SEQ ID NO: 1460067 - RNA, 17 nt, Human
uuuguaaauuaacuuuu

SEQ ID NO: 1460068 - RNA, 21 nt, Human
uuuguauaauuggauuuccua

SEQ ID NO: 1460069 - RNA, 13 nt, Human
uuuguauaauugg

SEQ ID NO: 1460070 - RNA, 21 nt, Human
uuuguauaaaauaauuuuuau

SEQ ID NO: 1460071 - RNA, 22 nt, Human
uuuguaaauuaacuuuuauaaa

SEQ ID NO: 1460072 - RNA, 21 nt, Human
uuugucagggaguguucccua

SEQ ID NO: 1460073 - RNA, 22 nt, Human
uuugucagaacuagaauuugau

SEQ ID NO: 1460074 - RNA, 20 nt, Human
uuugucagaacuagaauuug

SEQ ID NO: 1460075 - RNA, 15 nt, Human
uuugucacuuuuucu

SEQ ID NO: 1460076 - RNA, 14 nt, Human
uuugucacuuuuuc

SEQ ID NO: 1460077 - RNA, 23 nt, Human
uuugcauaguaccaaucauuuua

SEQ ID NO: 1460078 - RNA, 22 nt, Human
uuugccaugacaacuucuaauu

SEQ ID NO: 1460079 - RNA, 21 nt, Human
uuuggaaccagacucuugccu

SEQ ID NO: 1460080 - RNA, 13 nt, Human
uuuggaaccuugu

SEQ ID NO: 1460081 - RNA, 12 nt, Human
uuuggaagaagg

SEQ ID NO: 1460082 - RNA, 14 nt, Human
uuuggaaccuuguu

SEQ ID NO: 1460083 - RNA, 18 nt, Human
uuuggaacccuaaauaau

SEQ ID NO: 1460084 - RNA, 21 nt, Human
uuugauagauuuucugcuacu

SEQ ID NO: 1460085 - RNA, 23 nt, Human
uuugauauagaaguauaaagaau

SEQ ID NO: 1460086 - RNA, 21 nt, Human
uuugauacuaagcauugaaug

SEQ ID NO: 1460087 - RNA, 16 nt, Human
uuugcagcgacuggca

SEQ ID NO: 1460088 - RNA, 11 nt, Human
uuugcagcuuu

SEQ ID NO: 1460089 - RNA, 19 nt, Human
uuugcauaacguauaaaag

SEQ ID NO: 1460090 - RNA, 23 nt, Human
uuugcauaacguauaaaagccug

SEQ ID NO: 1460091 - RNA, 18 nt, Human
uuugauacuaagcauuga

SEQ ID NO: 1460092 - RNA, 17 nt, Human
uuugauacuaagcauug

SEQ ID NO: 1460093 - RNA, 16 nt, Human
uuugauacuaagcauu

SEQ ID NO: 1460094 - RNA, 14 nt, Human
uuugauacauuuuu

SEQ ID NO: 1460095 - RNA, 15 nt, Human
uuugagcuuaaucuu

SEQ ID NO: 1460096 - RNA, 22 nt, Human
uuugaggucuguucuuuccaaa

SEQ ID NO: 1460097 - RNA, 21 nt, Human
uuucuuaacuucuugcuucuu

SEQ ID NO: 1460098 - RNA, 18 nt, Human
uuucuuaacuucuugcuu

SEQ ID NO: 1460099 - RNA, 17 nt, Human
uuucuuaacuucuugcu

SEQ ID NO: 1460100 - RNA, 16 nt, Human
uuucugaguuccugca

SEQ ID NO: 1460101 - RNA, 21 nt, Human
uuucugaggugcacugggagg

SEQ ID NO: 1460102 - RNA, 17 nt, Human
uuucugaggcuuuauga

SEQ ID NO: 1460103 - RNA, 14 nt, Human
uuucuuagaaauuu

SEQ ID NO: 1460104 - RNA, 22 nt, Human
uuucuuagaaauuuauuuccua

SEQ ID NO: 1460105 - RNA, 22 nt, Human
uuucuuacugucuuuuuucuaa

SEQ ID NO: 1460106 - RNA, 19 nt, Human
uuuccaaaaucucccauuu

SEQ ID NO: 1460107 - RNA, 20 nt, Human
uuuccagcauucccagguag

SEQ ID NO: 1460108 - RNA, 18 nt, Human
uuuccagcauucccaggu

SEQ ID NO: 1460109 - RNA, 17 nt, Human
uuuccagcauucccagg

SEQ ID NO: 1460110 - RNA, 19 nt, Human
uuuccagaggcuauuauuu

SEQ ID NO: 1460111 - RNA, 12 nt, Human
uuuccaaaguac

SEQ ID NO: 1460112 - RNA, 15 nt, Human
uuuccaaaguacacu

SEQ ID NO: 1460113 - RNA, 19 nt, Human
uuucaggcauuggauauuu

SEQ ID NO: 1460114 - RNA, 16 nt, Human
uuucaggaucuauuuu

SEQ ID NO: 1460115 - RNA, 14 nt, Human
uuucaggaucuauu

SEQ ID NO: 1460116 - RNA, 13 nt, Human
uuucaggaucuau

SEQ ID NO: 1460117 - RNA, 19 nt, Human
uuucagggagguggcuggg

SEQ ID NO: 1460118 - RNA, 22 nt, Human
uuucagggagguggcuggguuu

SEQ ID NO: 1460119 - RNA, 21 nt, Human
uuucauuccuucagauuuggc

SEQ ID NO: 1460120 - RNA, 13 nt, Human
uuucauuccuuca

SEQ ID NO: 1460121 - RNA, 22 nt, Human
uuucaggaggaauacugaacau

SEQ ID NO: 1460122 - RNA, 21 nt, Human
uuucaggaggaauacugaaca

SEQ ID NO: 1460123 - RNA, 19 nt, Human
uuucaggaggaauacugaa

SEQ ID NO: 1460124 - RNA, 18 nt, Human
uuucaggaggaauacuga

SEQ ID NO: 1460125 - RNA, 12 nt, Human
uuucaggaggaa

SEQ ID NO: 1460126 - RNA, 22 nt, Human
uuucaggagagaguugaaccua

SEQ ID NO: 1460127 - RNA, 16 nt, Human
uuuauuucugcauaug

SEQ ID NO: 1460128 - RNA, 13 nt, Human
uuuauuuccuccc

SEQ ID NO: 1460129 - RNA, 20 nt, Human
uuuauuucauuuuucaauag

SEQ ID NO: 1460130 - RNA, 18 nt, Human
uuuauuuguugagagugu

SEQ ID NO: 1460131 - RNA, 12 nt, Human
uuuauuuguuga

SEQ ID NO: 1460132 - RNA, 22 nt, Human
uuucagaguucuuuuugaagua

SEQ ID NO: 1460133 - RNA, 18 nt, Human
uuucagaguucuuuuuga

SEQ ID NO: 1460134 - RNA, 23 nt, Human
uuucagaguucuuuuugaaguau

SEQ ID NO: 1460135 - RNA, 21 nt, Human
uuucagauaaucacaauacau

SEQ ID NO: 1460136 - RNA, 15 nt, Human
uuucagcagcugcag

SEQ ID NO: 1460137 - RNA, 14 nt, Human
uuuauuuguugaga

SEQ ID NO: 1460138 - RNA, 13 nt, Human
uuuauuuguugag

SEQ ID NO: 1460139 - RNA, 22 nt, Human
uuucagagugacuacacacagu

SEQ ID NO: 1460140 - RNA, 13 nt, Human
uuucagagccucc

SEQ ID NO: 1460141 - RNA, 15 nt, Human
uuucagauaaucaca

SEQ ID NO: 1460142 - RNA, 19 nt, Human
uuucuaagcauaaaagaug

SEQ ID NO: 1460143 - RNA, 18 nt, Human
uuucuaagauucuaaagg

SEQ ID NO: 1460144 - RNA, 17 nt, Human
uuucuaagauucuaaag

SEQ ID NO: 1460145 - RNA, 15 nt, Human
uuucuaagauucuaa

SEQ ID NO: 1460146 - RNA, 14 nt, Human
uuucuaagauucua

SEQ ID NO: 1460147 - RNA, 13 nt, Human
uuucuaagauucu

SEQ ID NO: 1460148 - RNA, 14 nt, Human
uuucuaagaaacau

SEQ ID NO: 1460149 - RNA, 17 nt, Human
uuucuaagaaacauuua

SEQ ID NO: 1460150 - RNA, 22 nt, Human
uuucuaacuacaaagguuuaaa

SEQ ID NO: 1460151 - RNA, 20 nt, Human
uuucuaacuacaaagguuua

SEQ ID NO: 1460152 - RNA, 18 nt, Human
uuucuaacuacaaagguu

SEQ ID NO: 1460153 - RNA, 21 nt, Human
uuucuaaaggaguuuauguuc

SEQ ID NO: 1460154 - RNA, 18 nt, Human
uuucuaaaggcuaccuuu

SEQ ID NO: 1460155 - RNA, 16 nt, Human
uuucuaaaggaguuua

SEQ ID NO: 1460156 - RNA, 14 nt, Human
uuucuaaaggaguu

SEQ ID NO: 1460157 - RNA, 14 nt, Human
uuucuaaaggcuac

SEQ ID NO: 1460158 - RNA, 23 nt, Human
uuuccaggcuucugcuggggccu

SEQ ID NO: 1460159 - RNA, 19 nt, Human
uuuccaggcuucugcuggg

SEQ ID NO: 1460160 - RNA, 18 nt, Human
uuuccaggcuucugcugg

SEQ ID NO: 1460161 - RNA, 16 nt, Human
uuuccaggcuucugcu

SEQ ID NO: 1460162 - RNA, 23 nt, Human
uuuccuagcccucucacauuuau

SEQ ID NO: 1460163 - RNA, 21 nt, Human
uuuccuaguucuguagaaaug

SEQ ID NO: 1460164 - RNA, 17 nt, Human
uuuccuagcccucucac

SEQ ID NO: 1460165 - RNA, 15 nt, Human
uuuccuaugcuuuga

SEQ ID NO: 1460166 - RNA, 22 nt, Human
uuuccucuucuauuuuguaaac

SEQ ID NO: 1460167 - RNA, 21 nt, Human
uuuccucuucuauuuuguaaa

SEQ ID NO: 1460168 - RNA, 17 nt, Human
uuuccuaugggaacaau

SEQ ID NO: 1460169 - RNA, 15 nt, Human
uuuccuaugggaaca

SEQ ID NO: 1460170 - RNA, 21 nt, Human
uuuccugaaacaacuuggaaa

SEQ ID NO: 1460171 - RNA, 20 nt, Human
uuucuaagcauaaaagauga

SEQ ID NO: 1460172 - RNA, 15 nt, Human
uuucuccucccagga

SEQ ID NO: 1460173 - RNA, 14 nt, Human
uuucuccuccaugg

SEQ ID NO: 1460174 - RNA, 16 nt, Human
uuucuaggacugaauu

SEQ ID NO: 1460175 - RNA, 20 nt, Human
uuucucuuucccuggucccu

SEQ ID NO: 1460176 - RNA, 17 nt, Human
uuucucuuuccaugaca

SEQ ID NO: 1460177 - RNA, 22 nt, Human
uuucuccuuuaauuguaaagua

SEQ ID NO: 1460178 - RNA, 19 nt, Human
uuucuccuuuaauuguaaa

SEQ ID NO: 1460179 - RNA, 18 nt, Human
uuucuccuuuaauuguaa

SEQ ID NO: 1460180 - RNA, 18 nt, Human
uuuauuguauucuggggu

SEQ ID NO: 1460181 - RNA, 14 nt, Human
uuuauuguauucug

SEQ ID NO: 1460182 - RNA, 16 nt, Human
uuuauuguguuuguca

SEQ ID NO: 1460183 - RNA, 17 nt, Human
uuuauuguguuugucau

SEQ ID NO: 1460184 - RNA, 21 nt, Human
uuuauuguguuugucauuagc

SEQ ID NO: 1460185 - RNA, 22 nt, Human
uuuauuguguuugucauuagcc

SEQ ID NO: 1460186 - RNA, 13 nt, Human
uuuauuguauucu

SEQ ID NO: 1460187 - RNA, 23 nt, Human
uuuauugguuuugcagaagaagg

SEQ ID NO: 1460188 - RNA, 17 nt, Human
uuuauugguuuugcaga

SEQ ID NO: 1460189 - RNA, 15 nt, Human
uuuauugguuuugca

SEQ ID NO: 1460190 - RNA, 16 nt, Human
uuuauuggcugagaua

SEQ ID NO: 1460191 - RNA, 23 nt, Human
uuuauuccagaaugcuguacauc

SEQ ID NO: 1460192 - RNA, 22 nt, Human
uuuauuccagaaugcuguacau

SEQ ID NO: 1460193 - RNA, 19 nt, Human
uuuauuccagaaugcugua

SEQ ID NO: 1460194 - RNA, 18 nt, Human
uuuauuccagaaugcugu

SEQ ID NO: 1460195 - RNA, 14 nt, Human
uuuaugcauauuau

SEQ ID NO: 1460196 - RNA, 13 nt, Human
uuuauucaauaaa

SEQ ID NO: 1460197 - RNA, 21 nt, Human
uuuagagauaagaguuggcug

SEQ ID NO: 1460198 - RNA, 16 nt, Human
uuuagaguuagacugu

SEQ ID NO: 1460199 - RNA, 17 nt, Human
uuuagaguuagacuguu

SEQ ID NO: 1460200 - RNA, 22 nt, Human
uuuauaaaaguguucauuguuu

SEQ ID NO: 1460201 - RNA, 18 nt, Human
uuuagaguugauacuaca

SEQ ID NO: 1460202 - RNA, 18 nt, Human
uuuagaguuagacuguug

SEQ ID NO: 1460203 - RNA, 14 nt, Human
uuuauaaacuuuac

SEQ ID NO: 1460204 - RNA, 16 nt, Human
uuuauaaacuuuaccu

SEQ ID NO: 1460205 - RNA, 21 nt, Human
uuuaucgucacugcuuaacuu

SEQ ID NO: 1460206 - RNA, 18 nt, Human
uuuauaaacuuuaccuuu

SEQ ID NO: 1460207 - RNA, 19 nt, Human
uuuaugaaaaagaagaauc

SEQ ID NO: 1460208 - RNA, 12 nt, Human
uuuaucuuuuua

SEQ ID NO: 1460209 - RNA, 18 nt, Human
uuuaucuuuauaugaaga

SEQ ID NO: 1460210 - RNA, 20 nt, Human
uuuaucuauaauuuaccuaa

SEQ ID NO: 1460211 - RNA, 19 nt, Human
uuuaucuauaauuuaccua

SEQ ID NO: 1460212 - RNA, 14 nt, Human
uuuaucuauaauuu

SEQ ID NO: 1460213 - RNA, 16 nt, Human
uuuaucuuuuuaccuu

SEQ ID NO: 1460214 - RNA, 22 nt, Human
uuguauuuaacagaaauuguau

SEQ ID NO: 1460215 - RNA, 18 nt, Human
uuguauuuaacagaaauu

SEQ ID NO: 1460216 - RNA, 17 nt, Human
uuguauuuaacagaaau

SEQ ID NO: 1460217 - RNA, 13 nt, Human
uuguauuuaacag

SEQ ID NO: 1460218 - RNA, 18 nt, Human
uuguauuguugaaaaagu

SEQ ID NO: 1460219 - RNA, 16 nt, Human
uuguauuguuucaauu

SEQ ID NO: 1460220 - RNA, 14 nt, Human
uuguauuuauucaa

SEQ ID NO: 1460221 - RNA, 15 nt, Human
uuguauuuauucaau

SEQ ID NO: 1460222 - RNA, 16 nt, Human
uuguauuuauucaaua

SEQ ID NO: 1460223 - RNA, 20 nt, Human
uuguauuuauucaauaaagu

SEQ ID NO: 1460224 - RNA, 22 nt, Human
uuguauucucugagcugugcag

SEQ ID NO: 1460225 - RNA, 20 nt, Human
uuguauucucugagcugugc

SEQ ID NO: 1460226 - RNA, 16 nt, Human
uuguauucucugagcu

SEQ ID NO: 1460227 - RNA, 15 nt, Human
uuguauucucugagc

SEQ ID NO: 1460228 - RNA, 14 nt, Human
uuguauucucugag

SEQ ID NO: 1460229 - RNA, 15 nt, Human
uuguauuguuucaau

SEQ ID NO: 1460230 - RNA, 13 nt, Human
uuguauuguugaa

SEQ ID NO: 1460231 - RNA, 18 nt, Human
uuguauuguauauuacaa

SEQ ID NO: 1460232 - RNA, 19 nt, Human
uuguauuguauauuacaau

SEQ ID NO: 1460233 - RNA, 15 nt, Human
uuuaauccccaguaa

SEQ ID NO: 1460234 - RNA, 16 nt, Human
uuuaauccccaguaaa

SEQ ID NO: 1460235 - RNA, 22 nt, Human
uuuaauccccaguaaaauugcc

SEQ ID NO: 1460236 - RNA, 19 nt, Human
uuuacaauguaauuauuua

SEQ ID NO: 1460237 - RNA, 19 nt, Human
uuuacaauuuuuuaucaug

SEQ ID NO: 1460238 - RNA, 17 nt, Human
uuuacauggcuggagcu

SEQ ID NO: 1460239 - RNA, 16 nt, Human
uuuacaaguaacaaaa

SEQ ID NO: 1460240 - RNA, 17 nt, Human
uuuacaauguaauuauu

SEQ ID NO: 1460241 - RNA, 16 nt, Human
uuuacaauguaauuau

SEQ ID NO: 1460242 - RNA, 15 nt, Human
uuuacaauguaauua

SEQ ID NO: 1460243 - RNA, 17 nt, Human
uuuacaauaguucugug

SEQ ID NO: 1460244 - RNA, 18 nt, Human
uuuacuuuagaagccugc

SEQ ID NO: 1460245 - RNA, 12 nt, Human
uuuacauguuuu

SEQ ID NO: 1460246 - RNA, 22 nt, Human
uuuacauggcuggagcuagaau

SEQ ID NO: 1460247 - RNA, 13 nt, Human
uuuacuuuuguuu

SEQ ID NO: 1460248 - RNA, 16 nt, Human
uuuacuuuuaaacugu

SEQ ID NO: 1460249 - RNA, 15 nt, Human
uuuacuuuuaaacug

SEQ ID NO: 1460250 - RNA, 18 nt, Human
uuuacuuuuaaacaguga

SEQ ID NO: 1460251 - RNA, 15 nt, Human
uuuacuuuuaaacag

SEQ ID NO: 1460252 - RNA, 12 nt, Human
uuuagaaacaca

SEQ ID NO: 1460253 - RNA, 22 nt, Human
uuuagaaacagugcaacacugg

SEQ ID NO: 1460254 - RNA, 16 nt, Human
uuuagaaaacuuuaaa

SEQ ID NO: 1460255 - RNA, 15 nt, Human
uuuagaaaacuuuaa

SEQ ID NO: 1460256 - RNA, 14 nt, Human
uuuagaaaacuuua

SEQ ID NO: 1460257 - RNA, 13 nt, Human
uuuagaaaacuuu

SEQ ID NO: 1460258 - RNA, 12 nt, Human
uuuagaaaacuu

SEQ ID NO: 1460259 - RNA, 20 nt, Human
uuuagaaacacaacuauauu

SEQ ID NO: 1460260 - RNA, 22 nt, Human
uuuagagauaagaguuggcugg

SEQ ID NO: 1460261 - RNA, 15 nt, Human
uuuagacuuuaacau

SEQ ID NO: 1460262 - RNA, 22 nt, Human
uuuagacuuggauucuuuccau

SEQ ID NO: 1460263 - RNA, 21 nt, Human
uuuagacuuggauucuuucca

SEQ ID NO: 1460264 - RNA, 22 nt, Human
uuuagaagccaacuaugauuau

SEQ ID NO: 1460265 - RNA, 14 nt, Human
uuuagaagccaacu

SEQ ID NO: 1460266 - RNA, 15 nt, Human
uuuagacuucaagca

SEQ ID NO: 1460267 - RNA, 19 nt, Human
uuuagaaucccagcccccu

SEQ ID NO: 1460268 - RNA, 14 nt, Human
uuuagaaucccagc

SEQ ID NO: 1460269 - RNA, 14 nt, Human
uuuagaagccugca

SEQ ID NO: 1460270 - RNA, 17 nt, Human
uuuagaauaugccuugu

SEQ ID NO: 1460271 - RNA, 13 nt, Human
uuuuuuaugcuaa

SEQ ID NO: 1460272 - RNA, 15 nt, Human
uuuuuuauauaugug

SEQ ID NO: 1460273 - RNA, 13 nt, Human
uuuuuuaguugaa

SEQ ID NO: 1460274 - RNA, 13 nt, Human
uuuuuucguuugu

SEQ ID NO: 1460275 - RNA, 16 nt, Human
uuuuuuaugcuaauca

SEQ ID NO: 1460276 - RNA, 12 nt, Human
uuuuuucugaaa

SEQ ID NO: 1460277 - RNA, 12 nt, Human
uuuuuuaggaaa

SEQ ID NO: 1460278 - RNA, 14 nt, Human
uuuuuuacuuuugu

SEQ ID NO: 1460279 - RNA, 23 nt, Human
uuuuuuagaaagcauuugaaugc

SEQ ID NO: 1460280 - RNA, 16 nt, Human
uuuuucuucacugcaa

SEQ ID NO: 1460281 - RNA, 20 nt, Human
uuuuuuauacaggaugauga

SEQ ID NO: 1460282 - RNA, 13 nt, Human
uuuuucuguauaa

SEQ ID NO: 1460283 - RNA, 16 nt, Human
uuuuucuguaccaguu

SEQ ID NO: 1460284 - RNA, 14 nt, Human
uuuuucuguaccag

SEQ ID NO: 1460285 - RNA, 12 nt, Human
uuuugaaagaau

SEQ ID NO: 1460286 - RNA, 17 nt, Human
uuuugaaagucuguccu

SEQ ID NO: 1460287 - RNA, 20 nt, Human
uuuugaaaagcagacauuuu

SEQ ID NO: 1460288 - RNA, 13 nt, Human
uuuuuucuuacug

SEQ ID NO: 1460289 - RNA, 16 nt, Human
ggcuaggguggggaga

SEQ ID NO: 1460290 - RNA, 11 nt, Human
ggacuugggug

SEQ ID NO: 1460291 - RNA, 21 nt, Human
ggugucucuucuuuagaacag

SEQ ID NO: 1460292 - RNA, 15 nt, Human
gcuccccuggggagu

SEQ ID NO: 1460293 - RNA, 23 nt, Human
gcugcucggggugcacaggaggg

SEQ ID NO: 1460294 - RNA, 22 nt, Human
cccacccaggaguauccucuug

SEQ ID NO: 1460295 - RNA, 15 nt, Human
cccuuccuggacagc

SEQ ID NO: 1460296 - RNA, 22 nt, Human
cgcagacacacccacagaagga

SEQ ID NO: 1460297 - RNA, 14 nt, Human
ccuguguggacagg

SEQ ID NO: 1460298 - RNA, 22 nt, Human
gaacauaucuuagauggggagc

SEQ ID NO: 1460299 - RNA, 20 nt, Human
gaaccuggaacuuggggagu

SEQ ID NO: 1460300 - RNA, 13 nt, Human
gaaguguggggau

SEQ ID NO: 1460301 - RNA, 21 nt, Human
gaggcagggaacauggggagg

SEQ ID NO: 1460302 - RNA, 12 nt, Human
gcagcaggaggg

SEQ ID NO: 1460303 - RNA, 17 nt, Human
gaguggggguggggggu

SEQ ID NO: 1460304 - RNA, 17 nt, Human
gcacccucuccagauga

SEQ ID NO: 1460305 - RNA, 20 nt, Human
gacugcuguggccaggaggu

SEQ ID NO: 1460306 - RNA, 12 nt, Human
gauggggagcgu

SEQ ID NO: 1460307 - RNA, 15 nt, Human
gagaccacuugggcg

SEQ ID NO: 1460308 - RNA, 12 nt, Human
gagagggagacc

SEQ ID NO: 1460309 - RNA, 13 nt, Human
gcauuuuggucca

SEQ ID NO: 1460310 - RNA, 23 nt, Human
gcccagagccucgaggagguaau

SEQ ID NO: 1460311 - RNA, 21 nt, Human
cugggugacauuugggagaca

SEQ ID NO: 1460312 - RNA, 15 nt, Human
gaaaaaccuuggguu

SEQ ID NO: 1460313 - RNA, 15 nt, Human
guccaaagaggcugc

SEQ ID NO: 1460314 - RNA, 16 nt, Human
gugcgcccagggcugg

SEQ ID NO: 1460315 - RNA, 16 nt, Human
guggcuuugccaucgu

SEQ ID NO: 1460316 - RNA, 13 nt, Human
guggcacuugggg

SEQ ID NO: 1460317 - RNA, 21 nt, Human
gggcucaaucucugggggcug

SEQ ID NO: 1460318 - RNA, 14 nt, Human
ggagaggaguguga

SEQ ID NO: 1460319 - RNA, 20 nt, Human
gcuaagguguauuugguccu

SEQ ID NO: 1460320 - RNA, 21 nt, Human
ggagcucaggaaggggugugc

SEQ ID NO: 1460321 - RNA, 16 nt, Human
gcuuucuccaggagga

SEQ ID NO: 1460322 - RNA, 16 nt, Human
ggguugggcccagugu

SEQ ID NO: 1460323 - RNA, 16 nt, Human
gccacaccuuugucca

SEQ ID NO: 1460324 - RNA, 23 nt, Human
gcuaaaauaaagaaauagaacaa

SEQ ID NO: 1460325 - RNA, 23 nt, Human
guuggaaucacuguuuagaacac

SEQ ID NO: 1460326 - RNA, 19 nt, Human
uaccauuucagagaggccu

SEQ ID NO: 1460327 - RNA, 22 nt, Human
gugagaguaaugaggcuugggg

SEQ ID NO: 1460328 - RNA, 16 nt, Human
gugagguucuuggguu

SEQ ID NO: 1460329 - RNA, 15 nt, Human
ggacaaggaguguga

SEQ ID NO: 1460330 - RNA, 14 nt, Human
ggagcagaguguuc

SEQ ID NO: 1460331 - RNA, 23 nt, Human
guugcuuccguucauggaagcgc

SEQ ID NO: 1460332 - RNA, 16 nt, Human
ucagagaccagggcuc

SEQ ID NO: 1460333 - RNA, 14 nt, Human
ugccuugagguacu

SEQ ID NO: 1460334 - RNA, 14 nt, Human
ugucaggaggaacu

SEQ ID NO: 1460335 - RNA, 17 nt, Human
ucucagggugaggugcu

SEQ ID NO: 1460336 - RNA, 14 nt, Human
cgggaguggacagg

SEQ ID NO: 1460337 - RNA, 15 nt, Human
gaaguaacuacaguu

SEQ ID NO: 1460338 - RNA, 19 nt, Human
gagaaagcugacuuggcug

SEQ ID NO: 1460339 - RNA, 23 nt, Human
gacugcaacaggaacuuggagug

SEQ ID NO: 1460340 - RNA, 15 nt, Human
gacugucuggggagc

SEQ ID NO: 1460341 - RNA, 15 nt, Human
gaugauacuuggaug

SEQ ID NO: 1460342 - RNA, 18 nt, Human
gaugauauaaugcgggug

SEQ ID NO: 1460343 - RNA, 16 nt, Human
gaugccuggcggggug

SEQ ID NO: 1460344 - RNA, 19 nt, Human
gccagcccugccuggagga

SEQ ID NO: 1460345 - RNA, 15 nt, Human
gccacagcuugggug

SEQ ID NO: 1460346 - RNA, 14 nt, Human
uggccaagcggcca

SEQ ID NO: 1460347 - RNA, 19 nt, Human
gcauuuggguccaggagga

SEQ ID NO: 1460348 - RNA, 12 nt, Human
gcagagggcugg

SEQ ID NO: 1460349 - RNA, 22 nt, Human
gagcuggcccucuccuggggau

SEQ ID NO: 1460350 - RNA, 14 nt, Human
gaggcuuggggcug

SEQ ID NO: 1460351 - RNA, 18 nt, Human
gagagaaggaggggagca

SEQ ID NO: 1460352 - RNA, 14 nt, Human
gaaggacaggagga

SEQ ID NO: 1460353 - RNA, 19 nt, Human
gaagucucaucuggggagc

SEQ ID NO: 1460354 - RNA, 16 nt, Human
gccaguaauugguccg

SEQ ID NO: 1460355 - RNA, 21 nt, Human
gccacacacagaaaaggcugc

SEQ ID NO: 1460356 - RNA, 14 nt, Human
gccugccaggagga

SEQ ID NO: 1460357 - RNA, 15 nt, Human
cggggcucaggaggg

SEQ ID NO: 1460358 - RNA, 16 nt, Human
cuccagcugccccggc

SEQ ID NO: 1460359 - RNA, 22 nt, Human
cuccaggcccaaggcucccgga

SEQ ID NO: 1460360 - RNA, 16 nt, Human
cugaguagggggagca

SEQ ID NO: 1460361 - RNA, 21 nt, Human
cugcaagcuccgccucccggg

SEQ ID NO: 1460362 - RNA, 22 nt, Human
auaacaagacuuugacuugggg

SEQ ID NO: 1460363 - RNA, 18 nt, Human
aagugcaagauggggagu

SEQ ID NO: 1460364 - RNA, 13 nt, Human
agcuucaggaggg

SEQ ID NO: 1460365 - RNA, 22 nt, Human
ccaagcugaggugcccaggaga

SEQ ID NO: 1460366 - RNA, 22 nt, Human
ccagagcccccgggaagggcgc

SEQ ID NO: 1460367 - RNA, 17 nt, Human
augcccaauuagggccu

SEQ ID NO: 1460368 - RNA, 19 nt, Human
ccaggcugcucagggcugg

SEQ ID NO: 1460369 - RNA, 14 nt, Human
cacugccaggaggg

SEQ ID NO: 1460370 - RNA, 22 nt, Human
cccagcccugcagcaaggagga

SEQ ID NO: 1460371 - RNA, 19 nt, Human
cccucaggucccuugguca

SEQ ID NO: 1460372 - RNA, 15 nt, Human
ccgccuguggacagc

SEQ ID NO: 1460373 - RNA, 18 nt, Human
cgcaggugcacaggggga

SEQ ID NO: 1460374 - RNA, 23 nt, Human
cuccccaccuucccucucccggc

SEQ ID NO: 1460375 - RNA, 17 nt, Human
cugccaacacgcccggc

SEQ ID NO: 1460376 - RNA, 15 nt, Human
cuggcaugggagacc

SEQ ID NO: 1460377 - RNA, 14 nt, Human
cgaggaggggagaa

SEQ ID NO: 1460378 - RNA, 17 nt, Human
gugggagccagggcugu

SEQ ID NO: 1460379 - RNA, 16 nt, Human
uccccacgagggcugg

SEQ ID NO: 1460380 - RNA, 14 nt, Human
accucuuggggagu

SEQ ID NO: 1460381 - RNA, 13 nt, Hepatitis D virus
cuacucccucucg

SEQ ID NO: 1460382 - RNA, 17 nt, Hepatitis D virus
gcgaugcgcucucuguu

SEQ ID NO: 1460383 - RNA, 14 nt, Hepatitis D virus
ugcuuuccuccucg

SEQ ID NO: 1460384 - RNA, 11 nt, Hepatitis D virus
cuuugcuuucc

SEQ ID NO: 1460385 - RNA, 13 nt, Hepatitis D virus
cuucuugcuuucu

SEQ ID NO: 1460386 - RNA, 13 nt, Hepatitis D virus
ucuuuccccuucc

SEQ ID NO: 1460387 - RNA, 20 nt, Hepatitis D virus
cucgcgguccgaccugggca

SEQ ID NO: 1460388 - RNA, 20 nt, Hepatitis D virus
gccucacucguccccucucg

SEQ ID NO: 1460389 - RNA, 11 nt, Hepatitis D virus
auuccugggcg

SEQ ID NO: 1460390 - RNA, 21 nt, Hepatitis D virus
agccucacucguccccucucg

SEQ ID NO: 1460391 - RNA, 19 nt, Hepatitis D virus
cuauggucuacucccucuc

SEQ ID NO: 1460392 - RNA, 13 nt, Hepatitis D virus
cccucugggguac

SEQ ID NO: 1460393 - RNA, 22 nt, Hepatitis D virus
ccugcagaguggggucccgcca

SEQ ID NO: 1460394 - RNA, 17 nt, Hepatitis D virus
uucucucugggaagcua

SEQ ID NO: 1460395 - RNA, 12 nt, Hepatitis D virus
gguccucuggag

SEQ ID NO: 1460396 - RNA, 19 nt, Hepatitis D virus
gccuccuucucuuccaccu

SEQ ID NO: 1460397 - RNA, 20 nt, Hepatitis D virus
gccgacccucccuccucucc

SEQ ID NO: 1460398 - RNA, 17 nt, Hepatitis D virus
cuuugcuuuccuccucg

SEQ ID NO: 1460399 - RNA, 15 nt, Hepatitis D virus
ucccauggcuccacu

SEQ ID NO: 1460400 - RNA, 19 nt, Hepatitis D virus
ucucgcgaugcgcucucug

SEQ ID NO: 1460401 - RNA, 13 nt, Hepatitis D virus
cccucuuuccccu

SEQ ID NO: 1460402 - RNA, 17 nt, Hepatitis D virus
acuccguguggcuuccu

SEQ ID NO: 1460403 - RNA, 13 nt, Hepatitis D virus
ugcuuuccuccuc

SEQ ID NO: 1460404 - RNA, 17 nt, Hepatitis D virus
ccgacccucccuccucu

SEQ ID NO: 1460405 - RNA, 16 nt, Hepatitis D virus
ccuagcauccccuccu

SEQ ID NO: 1460406 - RNA, 13 nt, Hepatitis D virus
acccucccuccuc

SEQ ID NO: 1460407 - RNA, 21 nt, Hepatitis D virus
ccgacucaccccucucgggcg

SEQ ID NO: 1460408 - RNA, 22 nt, Hepatitis D virus
cuacuccguguggcuuccuccc

SEQ ID NO: 1460409 - RNA, 21 nt, Hepatitis D virus
uccccgggauaagccucacuc

SEQ ID NO: 1460410 - RNA, 13 nt, Hepatitis D virus
cuccaccuccucg

SEQ ID NO: 1460411 - RNA, 15 nt, Hepatitis D virus
ccgacccucccuccu

SEQ ID NO: 1460412 - RNA, 19 nt, Hepatitis D virus
gaggacgcacguccacucg

SEQ ID NO: 1460413 - RNA, 12 nt, Hepatitis D virus
uccucuggaggu

SEQ ID NO: 1460414 - RNA, 22 nt, Hepatitis D virus
ccgcugcucucuuugcuuuccu

SEQ ID NO: 1460415 - RNA, 20 nt, Hepatitis D virus
agccucacucguccccucuc

SEQ ID NO: 1460416 - RNA, 19 nt, Hepatitis D virus
cucucuuugcuuuccuccu

SEQ ID NO: 1460417 - RNA, 21 nt, Hepatitis D virus
gcuauggucuacucccucucg

SEQ ID NO: 1460418 - RNA, 18 nt, Hepatitis D virus
cggaacacccaccugcua

SEQ ID NO: 1460419 - RNA, 13 nt, Hepatitis D virus
cccaacuccuagc

SEQ ID NO: 1460420 - RNA, 20 nt, Hepatitis D virus
cucucaacccuucgggccgg

SEQ ID NO: 1460421 - RNA, 23 nt, Hepatitis D virus
aauucauccgcuucuugcuuucu

SEQ ID NO: 1460422 - RNA, 22 nt, Hepatitis D virus
gggcgacccuuggggggaagga

SEQ ID NO: 1460423 - RNA, 21 nt, Hepatitis D virus
cucuggaggugauuucucugu

SEQ ID NO: 1460424 - RNA, 23 nt, Hepatitis D virus
cgacccuuggggggaaggagcuu

SEQ ID NO: 1460425 - RNA, 19 nt, Hepatitis D virus
cucacucguccccucucgg

SEQ ID NO: 1460426 - RNA, 17 nt, Hepatitis D virus
uggcuaagggagagcca

SEQ ID NO: 1460427 - RNA, 18 nt, Hepatitis D virus
cauggcaucuccaccucc

SEQ ID NO: 1460428 - RNA, 21 nt, Hepatitis D virus
cuuccaccuucccucuuuccc

SEQ ID NO: 1460429 - RNA, 16 nt, Hepatitis D virus
ccgccauuccugggcg

SEQ ID NO: 1460430 - RNA, 18 nt, Hepatitis D virus
cugaagggguccucugga

SEQ ID NO: 1460431 - RNA, 15 nt, Hepatitis D virus
cugaucuauccuccc

SEQ ID NO: 1460432 - RNA, 16 nt, Hepatitis D virus
cgacucaccccucucg

SEQ ID NO: 1460433 - RNA, 23 nt, Hepatitis D virus
uuccccgggauaagccucacucg

SEQ ID NO: 1460434 - RNA, 12 nt, Hepatitis D virus
ccuucucuucca

SEQ ID NO: 1460435 - RNA, 14 nt, Hepatitis D virus
cccgcugcucucuu

SEQ ID NO: 1460436 - RNA, 22 nt, Hepatitis D virus
gggaggcccgccuccuucucuu

SEQ ID NO: 1460437 - RNA, 21 nt, Hepatitis D virus
uucgcugaagggguccucugg

SEQ ID NO: 1460438 - RNA, 18 nt, Hepatitis D virus
cuuggccgccgggccccu

SEQ ID NO: 1460439 - RNA, 22 nt, Hepatitis D virus
cccuccuaucgcuauggucuac

SEQ ID NO: 1460440 - RNA, 21 nt, Hepatitis D virus
uguggcuuccucccucugggg

SEQ ID NO: 1460441 - RNA, 14 nt, Hepatitis D virus
cauccgaaggagga

SEQ ID NO: 1460442 - RNA, 16 nt, Hepatitis D virus
agcggguuuccacucg

SEQ ID NO: 1460443 - RNA, 22 nt, Hepatitis D virus
ccuucucuuccaccuucccucu

SEQ ID NO: 1460444 - RNA, 20 nt, Hepatitis D virus
ucgcugaagggguccucugg

SEQ ID NO: 1460445 - RNA, 20 nt, Hepatitis D virus
ccucucgcgaugcgcucucu

SEQ ID NO: 1460446 - RNA, 20 nt, Hepatitis D virus
caccugcuagccccgcugcu

SEQ ID NO: 1460447 - RNA, 23 nt, Hepatitis D virus
cuccguguggcuuccucccucug

SEQ ID NO: 1460448 - RNA, 19 nt, Hepatitis D virus
auaaagcggguuuccacuc

SEQ ID NO: 1460449 - RNA, 17 nt, Hepatitis D virus
ggcuuccucccucuggg

SEQ ID NO: 1460450 - RNA, 19 nt, Hepatitis D virus
agccucacucguccccucu

SEQ ID NO: 1460451 - RNA, 13 nt, Hepatitis D virus
gccuccuucucuu

SEQ ID NO: 1460452 - RNA, 21 nt, Hepatitis D virus
gcuucggucucccccaacucc

SEQ ID NO: 1460453 - RNA, 20 nt, Hepatitis D virus
ccaauguucaaagucacccc

SEQ ID NO: 1460454 - RNA, 14 nt, Hepatitis D virus
acucaccccucucg

SEQ ID NO: 1460455 - RNA, 15 nt, Hepatitis D virus
agggguccucuggag

SEQ ID NO: 1460456 - RNA, 12 nt, Hepatitis D virus
aguguccuccaa

SEQ ID NO: 1460457 - RNA, 20 nt, Hepatitis D virus
gcguccuucuuuccucuucg

SEQ ID NO: 1460458 - RNA, 20 nt, Hepatitis D virus
cccaccugcuagccccgcug

SEQ ID NO: 1460459 - RNA, 15 nt, Hepatitis D virus
ccguguggcuuccuc

SEQ ID NO: 1460460 - RNA, 18 nt, Hepatitis D virus
cagaguggggucccgcca

SEQ ID NO: 1460461 - RNA, 14 nt, Hepatitis D virus
uggcaucuccaccu

SEQ ID NO: 1460462 - RNA, 14 nt, Hepatitis D virus
gcaucuccaccucc

SEQ ID NO: 1460463 - RNA, 13 nt, Hepatitis D virus
cacccaccugcua

SEQ ID NO: 1460464 - RNA, 14 nt, Hepatitis D virus
gugauuucucuguu

SEQ ID NO: 1460465 - RNA, 13 nt, Hepatitis D virus
cgggagucugcua

SEQ ID NO: 1460466 - RNA, 20 nt, Hepatitis D virus
ccccucucgggcgcugaucu

SEQ ID NO: 1460467 - RNA, 20 nt, Hepatitis D virus
gagccacuuuucucucgcuu

SEQ ID NO: 1460468 - RNA, 21 nt, Hepatitis D virus
uucucucgcuucucucuggga

SEQ ID NO: 1460469 - RNA, 13 nt, Hepatitis D virus
caccuucccucuu

SEQ ID NO: 1460470 - RNA, 15 nt, Hepatitis D virus
aucuccaccuccucg

SEQ ID NO: 1460471 - RNA, 20 nt, Hepatitis D virus
aggggacgguccccucggaa

SEQ ID NO: 1460472 - RNA, 15 nt, Hepatitis D virus
cgaugcgcucucugu

SEQ ID NO: 1460473 - RNA, 19 nt, Hepatitis D virus
uacuccguguggcuuccuc

SEQ ID NO: 1460474 - RNA, 19 nt, Hepatitis D virus
acuccguguggcuuccucc

SEQ ID NO: 1460475 - RNA, 15 nt, Hepatitis D virus
guccuucuuuccucu

SEQ ID NO: 1460476 - RNA, 21 nt, Hepatitis D virus
cguguggcuuccucccucugg

SEQ ID NO: 1460477 - RNA, 18 nt, Hepatitis D virus
gccgccgggccccucgga

SEQ ID NO: 1460478 - RNA, 13 nt, Hepatitis D virus
gacccucccuccu

SEQ ID NO: 1460479 - RNA, 12 nt, Hepatitis D virus
cgccgggccccu

SEQ ID NO: 1460480 - RNA, 14 nt, Hepatitis D virus
cuucucucugggaa

SEQ ID NO: 1460481 - RNA, 14 nt, Hepatitis D virus
agggguccucugga

SEQ ID NO: 1460482 - RNA, 16 nt, Hepatitis D virus
ucccagccgacccucc

SEQ ID NO: 1460483 - RNA, 16 nt, Hepatitis D virus
cuagccccgcugcucu

SEQ ID NO: 1460484 - RNA, 21 nt, Hepatitis D virus
cuagccccgcugcucucuuug

SEQ ID NO: 1460485 - RNA, 22 nt, Hepatitis D virus
ugcucucuuugcuuuccuccuc

SEQ ID NO: 1460486 - RNA, 15 nt, Hepatitis D virus
acuccuagcaucccc

SEQ ID NO: 1460487 - RNA, 14 nt, Hepatitis D virus
cucucgcuucucuc

SEQ ID NO: 1460488 - RNA, 13 nt, Hepatitis D virus
cgcuucucucugg

SEQ ID NO: 1460489 - RNA, 20 nt, Hepatitis D virus
aggcccgccuccuucucuuc

SEQ ID NO: 1460490 - RNA, 23 nt, Hepatitis D virus
auccgcuucuugcuuucucuuuu

SEQ ID NO: 1460491 - RNA, 17 nt, Hepatitis D virus
cgcguccuucuuuccuc

SEQ ID NO: 1460492 - RNA, 21 nt, Hepatitis D virus
caccuccucgcgguccgaccu

SEQ ID NO: 1460493 - RNA, 12 nt, Hepatitis D virus
cgaccugggcau

SEQ ID NO: 1460494 - RNA, 19 nt, Hepatitis D virus
ccacuuuucucucgcuucu

SEQ ID NO: 1460495 - RNA, 13 nt, Hepatitis D virus
ucuccaccuccuc

SEQ ID NO: 1460496 - RNA, 23 nt, Hepatitis D virus
ccgcugcucucuuugcuuuccuc

SEQ ID NO: 1460497 - RNA, 15 nt, Hepatitis D virus
ucgggaggagcaucc

SEQ ID NO: 1460498 - RNA, 13 nt, Hepatitis D virus
cucucgcuucucu

SEQ ID NO: 1460499 - RNA, 23 nt, Hepatitis D virus
cucuucccagccgacccucccuc

SEQ ID NO: 1460500 - RNA, 14 nt, Hepatitis D virus
cgaugcgcucucug

SEQ ID NO: 1460501 - RNA, 22 nt, Hepatitis D virus
ucuuuaccgacucaccccucuc

SEQ ID NO: 1460502 - RNA, 17 nt, Hepatitis D virus
cucuuuccccuuccuag

SEQ ID NO: 1460503 - RNA, 16 nt, Hepatitis D virus
uuugcuuuccuccucg

SEQ ID NO: 1460504 - RNA, 16 nt, Hepatitis D virus
gcuuccucccucuggg

SEQ ID NO: 1460505 - RNA, 18 nt, Hepatitis D virus
cucuuugcuuuccuccuc

SEQ ID NO: 1460506 - RNA, 15 nt, Hepatitis D virus
gccgccgggccccuc

SEQ ID NO: 1460507 - RNA, 16 nt, Hepatitis D virus
cuccuagcauccccuc

SEQ ID NO: 1460508 - RNA, 19 nt, Hepatitis D virus
ggucggcauggcaucucca

SEQ ID NO: 1460509 - RNA, 16 nt, Hepatitis D virus
cuuucucuuuuuuccu

SEQ ID NO: 1460510 - RNA, 19 nt, Hepatitis D virus
cggaaucgggaggagcauc

SEQ ID NO: 1460511 - RNA, 12 nt, Hepatitis D virus
gcccgccuccuu

SEQ ID NO: 1460512 - RNA, 22 nt, Hepatitis D virus
uggggacgauaagucgaguucc

SEQ ID NO: 1460513 - RNA, 23 nt, Hepatitis D virus
cuccucgcgguccgaccugggca

SEQ ID NO: 1460514 - RNA, 17 nt, Hepatitis D virus
cucuuuuuuccuucuug

SEQ ID NO: 1460515 - RNA, 15 nt, Hepatitis D virus
aagggguccucugga

SEQ ID NO: 1460516 - RNA, 15 nt, Hepatitis D virus
gaugcgcucucuguu

SEQ ID NO: 1460517 - RNA, 14 nt, Hepatitis D virus
cucaccccucucgg

SEQ ID NO: 1460518 - RNA, 19 nt, Hepatitis D virus
gcugcucucuuugcuuucc

SEQ ID NO: 1460519 - RNA, 13 nt, Hepatitis D virus
gcuucuugcuuuc

SEQ ID NO: 1460520 - RNA, 15 nt, Hepatitis D virus
ucucuuccaccuucc

SEQ ID NO: 1460521 - RNA, 15 nt, Hepatitis D virus
gcuuccucccucugg

SEQ ID NO: 1460522 - RNA, 22 nt, Hepatitis D virus
cccgccuccuucucuuccaccu

SEQ ID NO: 1460523 - RNA, 23 nt, Hepatitis D virus
cugcucucuuugcuuuccuccuc

SEQ ID NO: 1460524 - RNA, 20 nt, Hepatitis D virus
cagccgacccucccuccucu

SEQ ID NO: 1460525 - RNA, 19 nt, Hepatitis D virus
cccagccgacccucccucc

SEQ ID NO: 1460526 - RNA, 20 nt, Hepatitis D virus
ggggaaauucauccgcuucu

SEQ ID NO: 1460527 - RNA, 15 nt, Hepatitis D virus
ucgccauuaccgagg

SEQ ID NO: 1460528 - RNA, 14 nt, Hepatitis D virus
cccagccggcgcca

SEQ ID NO: 1460529 - RNA, 23 nt, Hepatitis D virus
cuucgggucggcauggcaucucc

SEQ ID NO: 1460530 - RNA, 15 nt, Hepatitis D virus
ggaggcccgccuccu

SEQ ID NO: 1460531 - RNA, 18 nt, Hepatitis D virus
cccuucgggccggagugu

SEQ ID NO: 1460532 - RNA, 14 nt, Hepatitis D virus
cagguaagaaagga

SEQ ID NO: 1460533 - RNA, 16 nt, Hepatitis D virus
guggcuuccucccucu

SEQ ID NO: 1460534 - RNA, 18 nt, Hepatitis D virus
ugggcauccgaaggagga

SEQ ID NO: 1460535 - RNA, 16 nt, Hepatitis D virus
uccuagcauccccucc

SEQ ID NO: 1460536 - RNA, 22 nt, Hepatitis D virus
gccagcgaggaggcugggacca

SEQ ID NO: 1460537 - RNA, 18 nt, Hepatitis D virus
aggcccgccuccuucucu

SEQ ID NO: 1460538 - RNA, 16 nt, Hepatitis D virus
ccucacucguccccuc

SEQ ID NO: 1460539 - RNA, 14 nt, Hepatitis D virus
uacucucaacccuu

SEQ ID NO: 1460540 - RNA, 19 nt, Hepatitis D virus
ccgaggggacgguccccuc

SEQ ID NO: 1460541 - RNA, 15 nt, Hepatitis D virus
cgcuucggucucccc

SEQ ID NO: 1460542 - RNA, 15 nt, Hepatitis D virus
cuuugcuuuccuccu

SEQ ID NO: 1460543 - RNA, 23 nt, Hepatitis D virus
ggagagccacuuuucucucgcuu

SEQ ID NO: 1460544 - RNA, 22 nt, Hepatitis D virus
agccucacucguccccucucgg

SEQ ID NO: 1460545 - RNA, 20 nt, Hepatitis D virus
cucucuuugcuuuccuccuc

SEQ ID NO: 1460546 - RNA, 14 nt, Hepatitis D virus
ggucuacucccucu

SEQ ID NO: 1460547 - RNA, 13 nt, Hepatitis D virus
gcugcucucuuug

SEQ ID NO: 1460548 - RNA, 19 nt, Hepatitis D virus
cucgcgaugcgcucucugu

SEQ ID NO: 1460549 - RNA, 17 nt, Hepatitis D virus
cauggcaucuccaccuc

SEQ ID NO: 1460550 - RNA, 22 nt, Hepatitis D virus
ccguguggcuuccucccucugg

SEQ ID NO: 1460551 - RNA, 15 nt, Hepatitis D virus
accccucucgggcgc

SEQ ID NO: 1460552 - RNA, 14 nt, Hepatitis D virus
cgcacguccacucg

SEQ ID NO: 1460553 - RNA, 19 nt, Hepatitis D virus
ccugcagaguggggucccg

SEQ ID NO: 1460554 - RNA, 22 nt, Hepatitis D virus
gcuucggucucccccaacuccu

SEQ ID NO: 1460555 - RNA, 15 nt, Hepatitis D virus
uggcuuccucccucu

SEQ ID NO: 1460556 - RNA, 14 nt, Hepatitis D virus
gaacacccaccugc

SEQ ID NO: 1460557 - RNA, 22 nt, Hepatitis D virus
ugcccagccggcgccagcgagg

SEQ ID NO: 1460558 - RNA, 14 nt, Hepatitis D virus
cuuccucccucugg

SEQ ID NO: 1460559 - RNA, 18 nt, Hepatitis D virus
cucgcguccuucuuuccu

SEQ ID NO: 1460560 - RNA, 18 nt, Hepatitis D virus
ucuuugcuuuccuccucg

SEQ ID NO: 1460561 - RNA, 19 nt, Hepatitis D virus
aaucgggaggagcauccca

SEQ ID NO: 1460562 - RNA, 22 nt, Hepatitis D virus
caacuccuagcauccccuccua

SEQ ID NO: 1460563 - RNA, 13 nt, Hepatitis D virus
agcauccccuccu

SEQ ID NO: 1460564 - RNA, 15 nt, Hepatitis D virus
cucacucguccccuc

SEQ ID NO: 1460565 - RNA, 15 nt, Hepatitis D virus
cacucguccccucuc

SEQ ID NO: 1460566 - RNA, 16 nt, Hepatitis D virus
guccuucuuuccucuu

SEQ ID NO: 1460567 - RNA, 18 nt, Hepatitis D virus
ccgccuccuucucuucca

SEQ ID NO: 1460568 - RNA, 15 nt, Hepatitis D virus
cuuccucccucuggg

SEQ ID NO: 1460569 - RNA, 18 nt, Hepatitis D virus
cggaauguugcccagccg

SEQ ID NO: 1460570 - RNA, 14 nt, Hepatitis D virus
ugggcgacccuugg

SEQ ID NO: 1460571 - RNA, 22 nt, Hepatitis D virus
ccucucgcgaugcgcucucugu

SEQ ID NO: 1460572 - RNA, 20 nt, Hepatitis D virus
cuccaaacuuggccgccggg

SEQ ID NO: 1460573 - RNA, 15 nt, Hepatitis D virus
cuccaccuccucgcg

SEQ ID NO: 1460574 - RNA, 22 nt, Hepatitis D virus
cccaacuccuagcauccccucc

SEQ ID NO: 1460575 - RNA, 23 nt, Hepatitis D virus
gcuaagggagagccacuuuucuc

SEQ ID NO: 1460576 - RNA, 16 nt, Hepatitis D virus
cgguccgaccugggca

SEQ ID NO: 1460577 - RNA, 13 nt, Hepatitis D virus
ucucaacccuucg

SEQ ID NO: 1460578 - RNA, 14 nt, Hepatitis D virus
uucucuuccaccuu

SEQ ID NO: 1460579 - RNA, 20 nt, Hepatitis D virus
cucacucguccccucucggg

SEQ ID NO: 1460580 - RNA, 18 nt, Hepatitis D virus
cccgccauuccugggcga

SEQ ID NO: 1460581 - RNA, 19 nt, Hepatitis D virus
gcuauggucuacucccucu

SEQ ID NO: 1460582 - RNA, 13 nt, Hepatitis D virus
acucaccccucuc

SEQ ID NO: 1460583 - RNA, 12 nt, Hepatitis D virus
gguuuccacucg

SEQ ID NO: 1460584 - RNA, 21 nt, Hepatitis D virus
accgaggggacgguccccucg

SEQ ID NO: 1460585 - RNA, 14 nt, Hepatitis D virus
ucuccaccuccucg

SEQ ID NO: 1460586 - RNA, 13 nt, Hepatitis D virus
uccaccuucccuc

SEQ ID NO: 1460587 - RNA, 18 nt, Hepatitis D virus
ucccucuuuccccuuccu

SEQ ID NO: 1460588 - RNA, 20 nt, Hepatitis D virus
cauuccugggcgacccuugg

SEQ ID NO: 1460589 - RNA, 16 nt, Hepatitis D virus
gccauuccugggcgac

SEQ ID NO: 1460590 - RNA, 17 nt, Hepatitis D virus
uggcuuccucccucugg

SEQ ID NO: 1460591 - RNA, 23 nt, Hepatitis D virus
ucccagccgacccucccuccucu

SEQ ID NO: 1460592 - RNA, 21 nt, Hepatitis D virus
gcugaucuauccuccccgcga

SEQ ID NO: 1460593 - RNA, 15 nt, Hepatitis D virus
cuugcuuucucuuuu

SEQ ID NO: 1460594 - RNA, 22 nt, Hepatitis D virus
ccugcuagccccgcugcucucu

SEQ ID NO: 1460595 - RNA, 23 nt, Hepatitis D virus
ccguguggcuuccucccucuggg

SEQ ID NO: 1460596 - RNA, 22 nt, Hepatitis D virus
uuuaccgacucaccccucucgg

SEQ ID NO: 1460597 - RNA, 19 nt, Hepatitis D virus
cguccuucuuuccucuucg

SEQ ID NO: 1460598 - RNA, 14 nt, Hepatitis D virus
acccuucgggccgg

SEQ ID NO: 1460599 - RNA, 12 nt, Hepatitis D virus
ccucccucuggg

SEQ ID NO: 1460600 - RNA, 20 nt, Hepatitis D virus
cccucuuuccccuuccuaga

SEQ ID NO: 1460601 - RNA, 13 nt, Hepatitis D virus
auuucucuguucu

SEQ ID NO: 1460602 - RNA, 17 nt, Hepatitis D virus
accgacucaccccucuc

SEQ ID NO: 1460603 - RNA, 18 nt, Hepatitis D virus
ccguguggcuuccucccu

SEQ ID NO: 1460604 - RNA, 15 nt, Hepatitis D virus
ucucgcuucucucug

SEQ ID NO: 1460605 - RNA, 15 nt, Hepatitis D virus
ugaagggguccucug

SEQ ID NO: 1460606 - RNA, 15 nt, Hepatitis D virus
gccgacccucccucc

SEQ ID NO: 1460607 - RNA, 17 nt, Hepatitis D virus
gccgccgggccccucgg

SEQ ID NO: 1460608 - RNA, 18 nt, Hepatitis D virus
cuccuucucuuccaccuu

SEQ ID NO: 1460609 - RNA, 14 nt, Hepatitis D virus
ucguccccucucgg

SEQ ID NO: 1460610 - RNA, 13 nt, Hepatitis D virus
gccgggccccucg

SEQ ID NO: 1460611 - RNA, 15 nt, Hepatitis D virus
gcucucuuugcuuuc

SEQ ID NO: 1460612 - RNA, 21 nt, Hepatitis D virus
cuccguguggcuuccucccuc

SEQ ID NO: 1460613 - RNA, 16 nt, Hepatitis D virus
cguguggcuuccuccc

SEQ ID NO: 1460614 - RNA, 21 nt, Hepatitis D virus
cgucucgcguccuucuuuccu

SEQ ID NO: 1460615 - RNA, 16 nt, Hepatitis D virus
cuuggccgccgggccc

SEQ ID NO: 1460616 - RNA, 19 nt, Hepatitis D virus
uguggcuuccucccucugg

SEQ ID NO: 1460617 - RNA, 12 nt, Hepatitis D virus
uacucccucucg

SEQ ID NO: 1460618 - RNA, 20 nt, Hepatitis D virus
aucgggaggcccgccuccuu

SEQ ID NO: 1460619 - RNA, 21 nt, Hepatitis D virus
cccucucgcgaugcgcucucu

SEQ ID NO: 1460620 - RNA, 20 nt, Hepatitis D virus
cgcugaagggguccucugga

SEQ ID NO: 1460621 - RNA, 16 nt, Hepatitis D virus
cauggcaucuccaccu

SEQ ID NO: 1460622 - RNA, 11 nt, Hepatitis D virus
cucucuguucg

SEQ ID NO: 1460623 - RNA, 21 nt, Hepatitis D virus
cacucggauggcuaagggaga

SEQ ID NO: 1460624 - RNA, 15 nt, Hepatitis D virus
cucaccccucucggg

SEQ ID NO: 1460625 - RNA, 21 nt, Hepatitis D virus
aucgcuauggucuacucccuc

SEQ ID NO: 1460626 - RNA, 17 nt, Hepatitis D virus
ucacucguccccucucg

SEQ ID NO: 1460627 - RNA, 14 nt, Hepatitis D virus
cucaacccuucggg

SEQ ID NO: 1460628 - RNA, 19 nt, Hepatitis D virus
agccgacccucccuccucu

SEQ ID NO: 1460629 - RNA, 15 nt, Hepatitis D virus
cgccauuccugggcg

SEQ ID NO: 1460630 - RNA, 18 nt, Hepatitis D virus
ccagccgacccucccucc

SEQ ID NO: 1460631 - RNA, 21 nt, Human
aaaacacuaaaaauaaaaaug

SEQ ID NO: 1460632 - RNA, 17 nt, Human
aaaacagacacuggcau

SEQ ID NO: 1460633 - RNA, 23 nt, Human
aaaacagggccacauagaugcug

SEQ ID NO: 1460634 - RNA, 18 nt, Human
aaaacagggccacauaga

SEQ ID NO: 1460635 - RNA, 12 nt, Human
aaaacagguaga

SEQ ID NO: 1460636 - RNA, 17 nt, Human
aaaacagguagaauuau

SEQ ID NO: 1460637 - RNA, 15 nt, Human
aaaagaaaauuuuug

SEQ ID NO: 1460638 - RNA, 13 nt, Human
aaaagaaaaagau

SEQ ID NO: 1460639 - RNA, 12 nt, Human
aaaagaaacuuu

SEQ ID NO: 1460640 - RNA, 12 nt, Human
aaaagaagaagu

SEQ ID NO: 1460641 - RNA, 20 nt, Human
aaaagacaaggaaaaaauaa

SEQ ID NO: 1460642 - RNA, 14 nt, Human
aaaagaagaaguuu

SEQ ID NO: 1460643 - RNA, 11 nt, Human
aaaagaaguaa

SEQ ID NO: 1460644 - RNA, 11 nt, Human
aaaagaaugau

SEQ ID NO: 1460645 - RNA, 10 nt, Human
aaaagauccc

SEQ ID NO: 1460646 - RNA, 14 nt, Human
aaaaguugcuauuu

SEQ ID NO: 1460647 - RNA, 18 nt, Human
aaaaguugaauuuuacau

SEQ ID NO: 1460648 - RNA, 22 nt, Human
aaaaguugcuauuugaacuuuu

SEQ ID NO: 1460649 - RNA, 13 nt, Human
aaaauaaaaaugg

SEQ ID NO: 1460650 - RNA, 13 nt, Human
aaagccaugcugg

SEQ ID NO: 1460651 - RNA, 13 nt, Human
aaagaucccaaau

SEQ ID NO: 1460652 - RNA, 16 nt, Human
aaagauauuuuuaucu

SEQ ID NO: 1460653 - RNA, 22 nt, Human
aaaccgaacugauguaaguaaa

SEQ ID NO: 1460654 - RNA, 20 nt, Human
aaaaucuauuuuguaacuuu

SEQ ID NO: 1460655 - RNA, 18 nt, Human
aacaucuuuaaggggagg

SEQ ID NO: 1460656 - RNA, 12 nt, Human
aacaucuuuaag

SEQ ID NO: 1460657 - RNA, 14 nt, Human
aacaggcucagagg

SEQ ID NO: 1460658 - RNA, 18 nt, Human
aacagccugacaacauuu

SEQ ID NO: 1460659 - RNA, 23 nt, Human
aaauucuucugaacucaaacuga

SEQ ID NO: 1460660 - RNA, 18 nt, Human
aaccuuuguuugcaucug

SEQ ID NO: 1460661 - RNA, 16 nt, Human
aaccgucuguuaugcu

SEQ ID NO: 1460662 - RNA, 18 nt, Human
aaccgucuguuaugcugu

SEQ ID NO: 1460663 - RNA, 22 nt, Human
aaccgucuguuaugcugugaca

SEQ ID NO: 1460664 - RNA, 22 nt, Human
aaauguugacaugggacauuug

SEQ ID NO: 1460665 - RNA, 15 nt, Human
aaauguucagaaggu

SEQ ID NO: 1460666 - RNA, 21 nt, Human
aaauguucagaagguugcucu

SEQ ID NO: 1460667 - RNA, 23 nt, Human
aaauguugacaugggacauuugc

SEQ ID NO: 1460668 - RNA, 16 nt, Human
aaauggccauuugcuu

SEQ ID NO: 1460669 - RNA, 13 nt, Human
aaauggccauuug

SEQ ID NO: 1460670 - RNA, 22 nt, Human
aaauauuguuuuacaauaguuc

SEQ ID NO: 1460671 - RNA, 16 nt, Human
aaauagcaaaagaaga

SEQ ID NO: 1460672 - RNA, 17 nt, Human
aaauagcaaaagaagaa

SEQ ID NO: 1460673 - RNA, 21 nt, Human
aaauauuuauuuuaauaaugu

SEQ ID NO: 1460674 - RNA, 14 nt, Human
aaauauuuguacau

SEQ ID NO: 1460675 - RNA, 15 nt, Human
aaauauuuguacaua

SEQ ID NO: 1460676 - RNA, 22 nt, Human
aaauauuuguacauaguuauuu

SEQ ID NO: 1460677 - RNA, 14 nt, Human
aaauauuuuaaaga

SEQ ID NO: 1460678 - RNA, 15 nt, Human
aaauauuuuaaagaa

SEQ ID NO: 1460679 - RNA, 16 nt, Human
aaauauuuuaaagaau

SEQ ID NO: 1460680 - RNA, 17 nt, Human
aaauauuuuaaagaauu

SEQ ID NO: 1460681 - RNA, 16 nt, Human
aaauauuuugcuaguu

SEQ ID NO: 1460682 - RNA, 14 nt, Human
aaaugaaaaaauau

SEQ ID NO: 1460683 - RNA, 18 nt, Human
aaaucuuuuauaggauuu

SEQ ID NO: 1460684 - RNA, 18 nt, Human
aaaucucaauauuucaga

SEQ ID NO: 1460685 - RNA, 21 nt, Human
aaauauuuuuucuuuucuauu

SEQ ID NO: 1460686 - RNA, 22 nt, Human
aaaucaaaagggccaaagaacc

SEQ ID NO: 1460687 - RNA, 16 nt, Human
aaaucucaauucuucc

SEQ ID NO: 1460688 - RNA, 13 nt, Human
aagcuacuuauug

SEQ ID NO: 1460689 - RNA, 19 nt, Human
aagcgauucucuugccuca

SEQ ID NO: 1460690 - RNA, 20 nt, Human
aagcgauucucuugccucaa

SEQ ID NO: 1460691 - RNA, 15 nt, Human
aagcgaaaaaaucag

SEQ ID NO: 1460692 - RNA, 19 nt, Human
aagcuagaauugaguguuu

SEQ ID NO: 1460693 - RNA, 14 nt, Human
aaggcagggaggag

SEQ ID NO: 1460694 - RNA, 19 nt, Human
aaggcagggaggaggcaga

SEQ ID NO: 1460695 - RNA, 22 nt, Human
aagagaucaggaagagaaggag

SEQ ID NO: 1460696 - RNA, 16 nt, Human
aagagaucaggaagag

SEQ ID NO: 1460697 - RNA, 15 nt, Human
aagagaucaggaaga

SEQ ID NO: 1460698 - RNA, 14 nt, Human
aagagauacagagg

SEQ ID NO: 1460699 - RNA, 16 nt, Human
aagacagaaguuugca

SEQ ID NO: 1460700 - RNA, 18 nt, Human
aagacagaaguuugcacu

SEQ ID NO: 1460701 - RNA, 14 nt, Human
aagaacggaagaag

SEQ ID NO: 1460702 - RNA, 16 nt, Human
aagaaccaaagaagaa

SEQ ID NO: 1460703 - RNA, 11 nt, Human
aagaacugaaa

SEQ ID NO: 1460704 - RNA, 13 nt, Human
aagaacucucugg

SEQ ID NO: 1460705 - RNA, 12 nt, Human
aagaacugaaau

SEQ ID NO: 1460706 - RNA, 13 nt, Human
aagaacugaaauc

SEQ ID NO: 1460707 - RNA, 15 nt, Human
aagaacugaaaucau

SEQ ID NO: 1460708 - RNA, 14 nt, Human
aagaacucucugga

SEQ ID NO: 1460709 - RNA, 21 nt, Human
aagacaaggaaaaaauaacaa

SEQ ID NO: 1460710 - RNA, 20 nt, Human
aagaagacugcauuauauuu

SEQ ID NO: 1460711 - RNA, 15 nt, Human
aagaagacugcauua

SEQ ID NO: 1460712 - RNA, 20 nt, Human
aagaacuuugagcuacugcc

SEQ ID NO: 1460713 - RNA, 13 nt, Human
aagaacuuugagc

SEQ ID NO: 1460714 - RNA, 18 nt, Human
aagaacuuugagcuacug

SEQ ID NO: 1460715 - RNA, 22 nt, Human
aagacaagaacuccccuuuuuu

SEQ ID NO: 1460716 - RNA, 13 nt, Human
aagacaauauaau

SEQ ID NO: 1460717 - RNA, 18 nt, Human
aagacaccguucauucag

SEQ ID NO: 1460718 - RNA, 14 nt, Human
aagaguucaagaaa

SEQ ID NO: 1460719 - RNA, 16 nt, Human
aagaguucaagaaaua

SEQ ID NO: 1460720 - RNA, 16 nt, Human
aauaaacacucuugaa

SEQ ID NO: 1460721 - RNA, 11 nt, Human
aauaaacacuc

SEQ ID NO: 1460722 - RNA, 14 nt, Human
aaguuuaauaaauu

SEQ ID NO: 1460723 - RNA, 17 nt, Human
aaguuuaauaaauuuau

SEQ ID NO: 1460724 - RNA, 19 nt, Human
aauaaacacucuugaaaaa

SEQ ID NO: 1460725 - RNA, 21 nt, Human
aaguuggggacacauguauuu

SEQ ID NO: 1460726 - RNA, 12 nt, Human
aauaaagcaauu

SEQ ID NO: 1460727 - RNA, 11 nt, Human
aauaaagcaau

SEQ ID NO: 1460728 - RNA, 17 nt, Human
aauaaagaauggaaagc

SEQ ID NO: 1460729 - RNA, 12 nt, Human
aauaaagaaugg

SEQ ID NO: 1460730 - RNA, 17 nt, Human
aaucucaauucuucccu

SEQ ID NO: 1460731 - RNA, 16 nt, Human
aaucucaauauuucag

SEQ ID NO: 1460732 - RNA, 22 nt, Human
aaucucaguugauuuucuggau

SEQ ID NO: 1460733 - RNA, 16 nt, Human
aaucucaguugauuuu

SEQ ID NO: 1460734 - RNA, 21 nt, Human
aaucucaguugauuuucugga

SEQ ID NO: 1460735 - RNA, 14 nt, Human
aaugaagcaaugcu

SEQ ID NO: 1460736 - RNA, 20 nt, Human
aaugaagauacugaaauaaa

SEQ ID NO: 1460737 - RNA, 20 nt, Human
aaugaauacuuuauaaagga

SEQ ID NO: 1460738 - RNA, 14 nt, Human
aaugauggcaauuu

SEQ ID NO: 1460739 - RNA, 17 nt, Human
aaugauggcaauuuugu

SEQ ID NO: 1460740 - RNA, 18 nt, Human
aaugauggcaauuuugua

SEQ ID NO: 1460741 - RNA, 19 nt, Human
aaugauggcaauuuuguaa

SEQ ID NO: 1460742 - RNA, 16 nt, Human
aauauauaucaaauau

SEQ ID NO: 1460743 - RNA, 16 nt, Human
aaucacgcuuuccuga

SEQ ID NO: 1460744 - RNA, 17 nt, Human
aaucacgcuuuuugaaa

SEQ ID NO: 1460745 - RNA, 18 nt, Human
aaucacgcuuuuugaaaa

SEQ ID NO: 1460746 - RNA, 14 nt, Human
aaucacgcuuuuug

SEQ ID NO: 1460747 - RNA, 15 nt, Human
aaucacgcuuuuuga

SEQ ID NO: 1460748 - RNA, 16 nt, Human
aaucacgcuuuuugaa

SEQ ID NO: 1460749 - RNA, 20 nt, Human
aaucacgcuuuuugaaaaag

SEQ ID NO: 1460750 - RNA, 18 nt, Human
aaucaaaagggccaaaga

SEQ ID NO: 1460751 - RNA, 19 nt, Human
aaucaaaagggccaaagaa

SEQ ID NO: 1460752 - RNA, 23 nt, Human
aaucaaaagggccaaagaaccaa

SEQ ID NO: 1460753 - RNA, 20 nt, Human
aaucaaaagggccaaagaac

SEQ ID NO: 1460754 - RNA, 12 nt, Human
acccucaugcug

SEQ ID NO: 1460755 - RNA, 16 nt, Human
acccucaucuuucuuc

SEQ ID NO: 1460756 - RNA, 19 nt, Human
acccucaucuuucuuccaa

SEQ ID NO: 1460757 - RNA, 13 nt, Human
acccucaucuuuc

SEQ ID NO: 1460758 - RNA, 14 nt, Human
acccucaucuuucu

SEQ ID NO: 1460759 - RNA, 13 nt, Human
acccucaugcugu

SEQ ID NO: 1460760 - RNA, 18 nt, Human
acccucauacacagaaac

SEQ ID NO: 1460761 - RNA, 13 nt, Human
acccuagcaaaag

SEQ ID NO: 1460762 - RNA, 18 nt, Human
acccuacuucuuuugcuc

SEQ ID NO: 1460763 - RNA, 14 nt, Human
acccuacuucuuuu

SEQ ID NO: 1460764 - RNA, 17 nt, Human
acccuaaccaaguuccu

SEQ ID NO: 1460765 - RNA, 16 nt, Human
acccuaaccaaguucc

SEQ ID NO: 1460766 - RNA, 13 nt, Human
acccuaccugugc

SEQ ID NO: 1460767 - RNA, 16 nt, Human
acccuaccugugccug

SEQ ID NO: 1460768 - RNA, 17 nt, Human
acccuaccugugccuga

SEQ ID NO: 1460769 - RNA, 15 nt, Human
acccuaaccaaguuc

SEQ ID NO: 1460770 - RNA, 14 nt, Human
acccuaaccaaguu

SEQ ID NO: 1460771 - RNA, 13 nt, Human
acccuaaccaagu

SEQ ID NO: 1460772 - RNA, 20 nt, Human
acccuaaauaauaaaaauaa

SEQ ID NO: 1460773 - RNA, 16 nt, Human
acccuaaauaauaaaa

SEQ ID NO: 1460774 - RNA, 13 nt, Human
acccguucaacuu

SEQ ID NO: 1460775 - RNA, 21 nt, Human
acccguucaacuuuuccuuug

SEQ ID NO: 1460776 - RNA, 16 nt, Human
acccguucacauuuuu

SEQ ID NO: 1460777 - RNA, 15 nt, Human
acccucacacuggga

SEQ ID NO: 1460778 - RNA, 23 nt, Human
acccuaugggucuaggacacagu

SEQ ID NO: 1460779 - RNA, 19 nt, Human
acccuaugggucuaggaca

SEQ ID NO: 1460780 - RNA, 16 nt, Human
acccuaugggucuagg

SEQ ID NO: 1460781 - RNA, 14 nt, Human
acccuaugggucua

SEQ ID NO: 1460782 - RNA, 15 nt, Human
accucaguaauuuag

SEQ ID NO: 1460783 - RNA, 17 nt, Human
accucaguaauuuagaa

SEQ ID NO: 1460784 - RNA, 21 nt, Human
accucaguaauuuagaaauca

SEQ ID NO: 1460785 - RNA, 13 nt, Human
accggggccuggg

SEQ ID NO: 1460786 - RNA, 21 nt, Human
accuccaaagcuucccacggc

SEQ ID NO: 1460787 - RNA, 19 nt, Human
accuccaaagcuucccacg

SEQ ID NO: 1460788 - RNA, 13 nt, Human
acgucuuaaauau

SEQ ID NO: 1460789 - RNA, 14 nt, Human
acgucuuaaauauu

SEQ ID NO: 1460790 - RNA, 13 nt, Human
acgugacacaaac

SEQ ID NO: 1460791 - RNA, 19 nt, Human
acgugacacaaacacacac

SEQ ID NO: 1460792 - RNA, 22 nt, Human
acgcaccaccaugccaggcuaa

SEQ ID NO: 1460793 - RNA, 18 nt, Human
acgugcucugugggucuc

SEQ ID NO: 1460794 - RNA, 20 nt, Human
acuaauguguaagacaaaaa

SEQ ID NO: 1460795 - RNA, 21 nt, Human
acuaauggcaugagaaauaca

SEQ ID NO: 1460796 - RNA, 22 nt, Human
acuaauggcaugagaaauacaa

SEQ ID NO: 1460797 - RNA, 23 nt, Human
acuaaugccuuacucuucuugaa

SEQ ID NO: 1460798 - RNA, 24 nt, Human
acuaaugccuuacucuucuugaaa

SEQ ID NO: 1460799 - RNA, 12 nt, Human
acuaauggcaug

SEQ ID NO: 1460800 - RNA, 13 nt, Human
acuaauggcauga

SEQ ID NO: 1460801 - RNA, 16 nt, Human
acuaauggcaugagaa

SEQ ID NO: 1460802 - RNA, 23 nt, Human
accuguggaacauaaaaaggaca

SEQ ID NO: 1460803 - RNA, 20 nt, Human
accuguggaacauaaaaagg

SEQ ID NO: 1460804 - RNA, 22 nt, Human
accucuguauuugaaucagccu

SEQ ID NO: 1460805 - RNA, 19 nt, Human
accuugcuuugauggaaua

SEQ ID NO: 1460806 - RNA, 13 nt, Human
acugaauuaugaa

SEQ ID NO: 1460807 - RNA, 14 nt, Human
acugaauuaugaaa

SEQ ID NO: 1460808 - RNA, 15 nt, Human
acugaauuaugaaac

SEQ ID NO: 1460809 - RNA, 20 nt, Human
acugaauuaugaaacuuuug

SEQ ID NO: 1460810 - RNA, 12 nt, Human
acugaaugaggu

SEQ ID NO: 1460811 - RNA, 20 nt, Human
acugaaugaggucagcaugu

SEQ ID NO: 1460812 - RNA, 13 nt, Human
acugacacacacg

SEQ ID NO: 1460813 - RNA, 14 nt, Human
acugauuacugccu

SEQ ID NO: 1460814 - RNA, 19 nt, Human
acugauaugggucuugaua

SEQ ID NO: 1460815 - RNA, 13 nt, Human
acugauguugugu

SEQ ID NO: 1460816 - RNA, 17 nt, Human
acugauguuguguuuuu

SEQ ID NO: 1460817 - RNA, 18 nt, Human
acugauguuguguuuuua

SEQ ID NO: 1460818 - RNA, 14 nt, Human
acucguuaauuugu

SEQ ID NO: 1460819 - RNA, 19 nt, Human
acucguuaauuuguagugu

SEQ ID NO: 1460820 - RNA, 14 nt, Human
acucguuuuuuaca

SEQ ID NO: 1460821 - RNA, 20 nt, Human
acuccgugcuuaaccaaaga

SEQ ID NO: 1460822 - RNA, 14 nt, Human
acuccauguuggcu

SEQ ID NO: 1460823 - RNA, 20 nt, Human
acuccauguuggcuagccuc

SEQ ID NO: 1460824 - RNA, 17 nt, Human
acuucagcgguuuauau

SEQ ID NO: 1460825 - RNA, 16 nt, Human
acuugaaaauuaacau

SEQ ID NO: 1460826 - RNA, 14 nt, Human
acuugaaaauuaac

SEQ ID NO: 1460827 - RNA, 12 nt, Human
acuugaaaauua

SEQ ID NO: 1460828 - RNA, 23 nt, Human
acuucuuuuuucaaaagaaaguc

SEQ ID NO: 1460829 - RNA, 22 nt, Human
acuucuuuuuucaaaagaaagu

SEQ ID NO: 1460830 - RNA, 21 nt, Human
acuucuuuuuucaaaagaaag

SEQ ID NO: 1460831 - RNA, 16 nt, Human
acuugguaauuguacu

SEQ ID NO: 1460832 - RNA, 14 nt, Human
acuuguacaaaaua

SEQ ID NO: 1460833 - RNA, 18 nt, Human
acuuguacaaaauaaaca

SEQ ID NO: 1460834 - RNA, 20 nt, Human
acuuguacaaaauaaacaaa

SEQ ID NO: 1460835 - RNA, 17 nt, Human
acuucaaauccuugaag

SEQ ID NO: 1460836 - RNA, 18 nt, Human
acuucaaauccuugaaga

SEQ ID NO: 1460837 - RNA, 19 nt, Human
acuucaaauccuugaagau

SEQ ID NO: 1460838 - RNA, 19 nt, Human
acuguuuuucggacaguuu

SEQ ID NO: 1460839 - RNA, 18 nt, Human
acuguuuuucggacaguu

SEQ ID NO: 1460840 - RNA, 16 nt, Human
acuggagugugcgugg

SEQ ID NO: 1460841 - RNA, 17 nt, Human
acuguaaaauaauaacu

SEQ ID NO: 1460842 - RNA, 15 nt, Human
acugccuauuuuaau

SEQ ID NO: 1460843 - RNA, 18 nt, Human
acugccgucagugcugug

SEQ ID NO: 1460844 - RNA, 12 nt, Human
acuggaaagaag

SEQ ID NO: 1460845 - RNA, 22 nt, Human
acuggaacacuagacaagccag

SEQ ID NO: 1460846 - RNA, 16 nt, Human
acuggaacacuagaca

SEQ ID NO: 1460847 - RNA, 17 nt, Human
acugcccaggcacugca

SEQ ID NO: 1460848 - RNA, 20 nt, Human
acugccgucagugcugugcu

SEQ ID NO: 1460849 - RNA, 16 nt, Human
acugucuuuuuucuaa

SEQ ID NO: 1460850 - RNA, 16 nt, Human
acuguaaaauguggga

SEQ ID NO: 1460851 - RNA, 21 nt, Human
acuguaaaaugugggauuaug

SEQ ID NO: 1460852 - RNA, 22 nt, Human
acuguaaaaugugggauuaugg

SEQ ID NO: 1460853 - RNA, 13 nt, Human
acuguaaacacag

SEQ ID NO: 1460854 - RNA, 16 nt, Human
acuguaaacacagaca

SEQ ID NO: 1460855 - RNA, 14 nt, Human
acuguaaacacaga

SEQ ID NO: 1460856 - RNA, 14 nt, Human
acugguuuucacau

SEQ ID NO: 1460857 - RNA, 23 nt, Human
acugucuuuuuucuaaaguaaaa

SEQ ID NO: 1460858 - RNA, 22 nt, Human
acugucuuuuuucuaaaguaaa

SEQ ID NO: 1460859 - RNA, 16 nt, Human
acuguaacugauuaca

SEQ ID NO: 1460860 - RNA, 16 nt, Human
acugugccauguguuu

SEQ ID NO: 1460861 - RNA, 23 nt, Human
acagugaucaaguuauuuuuaau

SEQ ID NO: 1460862 - RNA, 20 nt, Human
acagugcugaccagacagcc

SEQ ID NO: 1460863 - RNA, 16 nt, Human
acaguggaacuacauu

SEQ ID NO: 1460864 - RNA, 18 nt, Human
acaguggaacuacauuag

SEQ ID NO: 1460865 - RNA, 24 nt, Human
acaggaugguucccuugaugaaga

SEQ ID NO: 1460866 - RNA, 22 nt, Human
acaggauguguuugcuuucuga

SEQ ID NO: 1460867 - RNA, 16 nt, Human
acaggauguguuugcu

SEQ ID NO: 1460868 - RNA, 18 nt, Human
acaggauguguuugcuuu

SEQ ID NO: 1460869 - RNA, 19 nt, Human
acaggauguguuugcuuuc

SEQ ID NO: 1460870 - RNA, 20 nt, Human
acaggauguguuugcuuucu

SEQ ID NO: 1460871 - RNA, 21 nt, Human
acaggauguguuugcuuucug

SEQ ID NO: 1460872 - RNA, 15 nt, Human
acauuugcucaugga

SEQ ID NO: 1460873 - RNA, 16 nt, Human
acauuugcucauggaa

SEQ ID NO: 1460874 - RNA, 16 nt, Human
acauuuguauaaaaua

SEQ ID NO: 1460875 - RNA, 19 nt, Human
acauuuguauaaaauaauu

SEQ ID NO: 1460876 - RNA, 21 nt, Human
acauuuguauaaaauaauuuu

SEQ ID NO: 1460877 - RNA, 19 nt, Human
accaaccugaagacaccgu

SEQ ID NO: 1460878 - RNA, 20 nt, Human
acaucccuuaccugggaaag

SEQ ID NO: 1460879 - RNA, 18 nt, Human
acaugcacuuggcugcau

SEQ ID NO: 1460880 - RNA, 22 nt, Human
acaugcacuuggcugcauaaau

SEQ ID NO: 1460881 - RNA, 21 nt, Human
acaucauuucuuuuugggaga

SEQ ID NO: 1460882 - RNA, 20 nt, Human
acauaaguauuuaauucaug

SEQ ID NO: 1460883 - RNA, 12 nt, Human
acauaacugaaa

SEQ ID NO: 1460884 - RNA, 20 nt, Human
acauaacugaaaaugugcua

SEQ ID NO: 1460885 - RNA, 23 nt, Human
acauaaucuucugccuucucaug

SEQ ID NO: 1460886 - RNA, 21 nt, Human
acauacaccuaugucauuuca

SEQ ID NO: 1460887 - RNA, 18 nt, Human
acauacagaauuacugua

SEQ ID NO: 1460888 - RNA, 19 nt, Human
acauacagaauuacuguaa

SEQ ID NO: 1460889 - RNA, 20 nt, Human
acauacagaauuacuguaac

SEQ ID NO: 1460890 - RNA, 15 nt, Human
acaucauucuugaga

SEQ ID NO: 1460891 - RNA, 11 nt, Human
acaucauuucu

SEQ ID NO: 1460892 - RNA, 12 nt, Human
acaucauuucuu

SEQ ID NO: 1460893 - RNA, 13 nt, Human
acaucauuucuuu

SEQ ID NO: 1460894 - RNA, 22 nt, Human
acaucauuucuuuuugggagag

SEQ ID NO: 1460895 - RNA, 21 nt, Human
acauguuugcaccuuucuagu

SEQ ID NO: 1460896 - RNA, 22 nt, Human
acauguuugcaccuuucuaguu

SEQ ID NO: 1460897 - RNA, 22 nt, Human
aauuaucuauagcuaaguacac

SEQ ID NO: 1460898 - RNA, 15 nt, Human
aauuaucuauagcua

SEQ ID NO: 1460899 - RNA, 19 nt, Human
aauuaucuaauuuauaaaa

SEQ ID NO: 1460900 - RNA, 14 nt, Human
aauuaucuaauuua

SEQ ID NO: 1460901 - RNA, 15 nt, Human
aauuaucuaauuuau

SEQ ID NO: 1460902 - RNA, 18 nt, Human
aauuaucuaauuuauaaa

SEQ ID NO: 1460903 - RNA, 13 nt, Human
aauuauccaggaa

SEQ ID NO: 1460904 - RNA, 12 nt, Human
aauuaugaaacu

SEQ ID NO: 1460905 - RNA, 13 nt, Human
aauuaugaaacuu

SEQ ID NO: 1460906 - RNA, 15 nt, Human
aauuaugaaacuuuu

SEQ ID NO: 1460907 - RNA, 23 nt, Human
aauuaucuauagcuaaguacaca

SEQ ID NO: 1460908 - RNA, 18 nt, Human
aauuaugaaacuuuugga

SEQ ID NO: 1460909 - RNA, 16 nt, Human
aauucugcucagauag

SEQ ID NO: 1460910 - RNA, 21 nt, Human
aauugggagcuugggaaugga

SEQ ID NO: 1460911 - RNA, 23 nt, Human
aauucuaccaaggucuucuuaau

SEQ ID NO: 1460912 - RNA, 12 nt, Human
aauucuaaaaug

SEQ ID NO: 1460913 - RNA, 14 nt, Human
aauucuaaaaugau

SEQ ID NO: 1460914 - RNA, 17 nt, Human
aauucuaacccagguau

SEQ ID NO: 1460915 - RNA, 17 nt, Human
aauuuccugggagcuuu

SEQ ID NO: 1460916 - RNA, 12 nt, Human
aauuuccuggga

SEQ ID NO: 1460917 - RNA, 15 nt, Human
aauuuccugggagcu

SEQ ID NO: 1460918 - RNA, 16 nt, Human
aauuguacuaaagcca

SEQ ID NO: 1460919 - RNA, 17 nt, Human
aauuguacuaaagccaa

SEQ ID NO: 1460920 - RNA, 11 nt, Human
aauuguaauag

SEQ ID NO: 1460921 - RNA, 21 nt, Human
acacgcacggcagccacagcu

SEQ ID NO: 1460922 - RNA, 19 nt, Human
acacguaucccaccugaca

SEQ ID NO: 1460923 - RNA, 17 nt, Human
acacgugacacaaacac

SEQ ID NO: 1460924 - RNA, 16 nt, Human
acaaggucuuuaaagu

SEQ ID NO: 1460925 - RNA, 16 nt, Human
acaacuggcaggcagg

SEQ ID NO: 1460926 - RNA, 19 nt, Human
acaacuggcaggcaggcuc

SEQ ID NO: 1460927 - RNA, 16 nt, Human
acaaacuguaauacaa

SEQ ID NO: 1460928 - RNA, 17 nt, Human
acaaacuguaauacaau

SEQ ID NO: 1460929 - RNA, 21 nt, Human
acaaacucguuuuuuacaaag

SEQ ID NO: 1460930 - RNA, 20 nt, Human
acaaacucguuuuuuacaaa

SEQ ID NO: 1460931 - RNA, 19 nt, Human
acaaacuguaauacaauga

SEQ ID NO: 1460932 - RNA, 14 nt, Human
acaacauuucuaua

SEQ ID NO: 1460933 - RNA, 20 nt, Human
acaacauuucuauagccaaa

SEQ ID NO: 1460934 - RNA, 22 nt, Human
acaacauuucuauagccaaaaa

SEQ ID NO: 1460935 - RNA, 16 nt, Human
acaaccaauggaaugu

SEQ ID NO: 1460936 - RNA, 14 nt, Human
acaaccauuccaga

SEQ ID NO: 1460937 - RNA, 17 nt, Human
acaaacacacacaaaag

SEQ ID NO: 1460938 - RNA, 15 nt, Human
acaaacaccucccag

SEQ ID NO: 1460939 - RNA, 20 nt, Human
acaaacagggcugccuucug

SEQ ID NO: 1460940 - RNA, 18 nt, Human
aggaguuucguuuucaaa

SEQ ID NO: 1460941 - RNA, 14 nt, Human
aggaggugccacug

SEQ ID NO: 1460942 - RNA, 23 nt, Human
aggagguccuuaggccucugaga

SEQ ID NO: 1460943 - RNA, 18 nt, Human
aggagguccuuaggccuc

SEQ ID NO: 1460944 - RNA, 20 nt, Human
aggagacagguuagcugcuc

SEQ ID NO: 1460945 - RNA, 18 nt, Human
aggagacaguucaagaaa

SEQ ID NO: 1460946 - RNA, 14 nt, Human
aggagagaguugaa

SEQ ID NO: 1460947 - RNA, 15 nt, Human
aggagggcaggcauc

SEQ ID NO: 1460948 - RNA, 15 nt, Human
aggagggaggugcuu

SEQ ID NO: 1460949 - RNA, 13 nt, Human
aggagggcaggca

SEQ ID NO: 1460950 - RNA, 17 nt, Human
aggauguguuugcuuuc

SEQ ID NO: 1460951 - RNA, 18 nt, Human
aggauguguuugcuuucu

SEQ ID NO: 1460952 - RNA, 19 nt, Human
aggauguguuugcuuucug

SEQ ID NO: 1460953 - RNA, 14 nt, Human
aggaugugaauugu

SEQ ID NO: 1460954 - RNA, 20 nt, Human
aggauguggaaaccuccuuc

SEQ ID NO: 1460955 - RNA, 21 nt, Human
aggaugugucccaucuaggga

SEQ ID NO: 1460956 - RNA, 13 nt, Human
aggauguguuugc

SEQ ID NO: 1460957 - RNA, 13 nt, Human
aggauggcgcagg

SEQ ID NO: 1460958 - RNA, 23 nt, Human
aggcaugugucaccaugcccagc

SEQ ID NO: 1460959 - RNA, 19 nt, Human
aggcaucggggagccggga

SEQ ID NO: 1460960 - RNA, 14 nt, Human
aggcauuaaauuuu

SEQ ID NO: 1460961 - RNA, 22 nt, Human
aggcauuaaauuuuagcaaaga

SEQ ID NO: 1460962 - RNA, 22 nt, Human
aggcagaacucaucuagguaaa

SEQ ID NO: 1460963 - RNA, 14 nt, Human
agggacugagaaau

SEQ ID NO: 1460964 - RNA, 13 nt, Human
agggacugagaaa

SEQ ID NO: 1460965 - RNA, 15 nt, Human
agggacugagaaauu

SEQ ID NO: 1460966 - RNA, 17 nt, Human
agggacugagaaauuua

SEQ ID NO: 1460967 - RNA, 15 nt, Human
agggaugacuaaaau

SEQ ID NO: 1460968 - RNA, 22 nt, Human
agggaugacuaaaauauuuauu

SEQ ID NO: 1460969 - RNA, 22 nt, Human
aggcucuggagcccacuguacu

SEQ ID NO: 1460970 - RNA, 21 nt, Human
aggcuagguggguugaaagcc

SEQ ID NO: 1460971 - RNA, 23 nt, Human
aggcuagguggguugaaagccaa

SEQ ID NO: 1460972 - RNA, 14 nt, Human
aggcuagggugggg

SEQ ID NO: 1460973 - RNA, 15 nt, Human
aggcuagggugggga

SEQ ID NO: 1460974 - RNA, 16 nt, Human
aggcuaggguggggag

SEQ ID NO: 1460975 - RNA, 19 nt, Human
aggcuaggguggggagaga

SEQ ID NO: 1460976 - RNA, 14 nt, Human
aggcuuaaacccau

SEQ ID NO: 1460977 - RNA, 14 nt, Human
aggcuuacacccac

SEQ ID NO: 1460978 - RNA, 17 nt, Human
agcuguaugauucccag

SEQ ID NO: 1460979 - RNA, 18 nt, Human
agcuguaugauucccagc

SEQ ID NO: 1460980 - RNA, 17 nt, Human
agcugguuagaaaugca

SEQ ID NO: 1460981 - RNA, 18 nt, Human
aggaaaaaauaacaauga

SEQ ID NO: 1460982 - RNA, 19 nt, Human
agcuuuuuucucugauaca

SEQ ID NO: 1460983 - RNA, 20 nt, Human
agcuuuuuucucugauacag

SEQ ID NO: 1460984 - RNA, 22 nt, Human
agcuuuuuucucugauacagaa

SEQ ID NO: 1460985 - RNA, 23 nt, Human
agcuuuuuucucugauacagaaa

SEQ ID NO: 1460986 - RNA, 18 nt, Human
agcuuuguucuucuuaaa

SEQ ID NO: 1460987 - RNA, 12 nt, Human
agcuuuguucuu

SEQ ID NO: 1460988 - RNA, 13 nt, Human
agcugacucacac

SEQ ID NO: 1460989 - RNA, 15 nt, Human
agcugguuagaaaug

SEQ ID NO: 1460990 - RNA, 24 nt, Human
agcgauucuccugccucagccucc

SEQ ID NO: 1460991 - RNA, 20 nt, Human
agcuaaauaccucaaucagu

SEQ ID NO: 1460992 - RNA, 13 nt, Human
agcuacaaaugca

SEQ ID NO: 1460993 - RNA, 17 nt, Human
agcuaagcuaggaauga

SEQ ID NO: 1460994 - RNA, 18 nt, Human
agcuaagcuaggaaugaa

SEQ ID NO: 1460995 - RNA, 17 nt, Human
agccugcugccugcuuu

SEQ ID NO: 1460996 - RNA, 19 nt, Human
agccuggcuauguccuaau

SEQ ID NO: 1460997 - RNA, 23 nt, Human
agcgaaaaaaucagguggcuuuu

SEQ ID NO: 1460998 - RNA, 14 nt, Human
agauaugauucaaa

SEQ ID NO: 1460999 - RNA, 15 nt, Human
agauaugauucaaau

SEQ ID NO: 1461000 - RNA, 16 nt, Human
agauaugauucaaaug

SEQ ID NO: 1461001 - RNA, 18 nt, Human
agauaugaacauauuguu

SEQ ID NO: 1461002 - RNA, 20 nt, Human
agauagauaggucagugcaa

SEQ ID NO: 1461003 - RNA, 12 nt, Human
agaguugaaccu

SEQ ID NO: 1461004 - RNA, 13 nt, Human
agaguugaaccua

SEQ ID NO: 1461005 - RNA, 12 nt, Human
agauagaaugac

SEQ ID NO: 1461006 - RNA, 15 nt, Human
agauagaaugacagu

SEQ ID NO: 1461007 - RNA, 16 nt, Human
agauagaaugacaguc

SEQ ID NO: 1461008 - RNA, 17 nt, Human
agauugagauguguuca

SEQ ID NO: 1461009 - RNA, 18 nt, Human
agauugagagaagagaca

SEQ ID NO: 1461010 - RNA, 19 nt, Human
agauugagagaagagacaa

SEQ ID NO: 1461011 - RNA, 13 nt, Human
agauugagagaau

SEQ ID NO: 1461012 - RNA, 15 nt, Human
agauugagagaauuu

SEQ ID NO: 1461013 - RNA, 13 nt, Human
agauugcugaaau

SEQ ID NO: 1461014 - RNA, 14 nt, Human
agauugcugaaauu

SEQ ID NO: 1461015 - RNA, 23 nt, Human
agcaaaauuuuuucucuaggaaa

SEQ ID NO: 1461016 - RNA, 13 nt, Human
agcaaacucuuuu

SEQ ID NO: 1461017 - RNA, 17 nt, Human
agcaaacucuuuuccca

SEQ ID NO: 1461018 - RNA, 20 nt, Human
agcaaagauaucucaucucu

SEQ ID NO: 1461019 - RNA, 18 nt, Human
agcaacaauaaauagaca

SEQ ID NO: 1461020 - RNA, 13 nt, Human
agcaacaauaaau

SEQ ID NO: 1461021 - RNA, 12 nt, Human
agcaacaauaaa

SEQ ID NO: 1461022 - RNA, 15 nt, Human
agcaaaucgaaugaa

SEQ ID NO: 1461023 - RNA, 17 nt, Human
agcaaaucgaaugaaau

SEQ ID NO: 1461024 - RNA, 23 nt, Human
agcaaaucaccacaaacuguaau

SEQ ID NO: 1461025 - RNA, 11 nt, Human
agcaaaucacc

SEQ ID NO: 1461026 - RNA, 18 nt, Human
agcaaaucaccacaaacu

SEQ ID NO: 1461027 - RNA, 21 nt, Human
agcaaaucaccacaaacugua

SEQ ID NO: 1461028 - RNA, 22 nt, Human
agcaaaucaccacaaacuguaa

SEQ ID NO: 1461029 - RNA, 21 nt, Human
agaucugcagggggugugucu

SEQ ID NO: 1461030 - RNA, 17 nt, Human
agccaacuauggccugu

SEQ ID NO: 1461031 - RNA, 16 nt, Human
agccaaggggcuucag

SEQ ID NO: 1461032 - RNA, 19 nt, Human
agcaauuuaaauguuauga

SEQ ID NO: 1461033 - RNA, 17 nt, Human
agcaauuuaaauguuau

SEQ ID NO: 1461034 - RNA, 16 nt, Human
agcaauuuaaauguua

SEQ ID NO: 1461035 - RNA, 13 nt, Human
agcaauuuaaaug

SEQ ID NO: 1461036 - RNA, 14 nt, Human
agcacugccaccag

SEQ ID NO: 1461037 - RNA, 19 nt, Human
agcagugauugucuuaaua

SEQ ID NO: 1461038 - RNA, 18 nt, Human
agacgaaacauuuguucu

SEQ ID NO: 1461039 - RNA, 16 nt, Human
agaccuuuuuuaggaa

SEQ ID NO: 1461040 - RNA, 14 nt, Human
agaccuuuuuuagg

SEQ ID NO: 1461041 - RNA, 23 nt, Human
agaccauggacacuacacccagc

SEQ ID NO: 1461042 - RNA, 22 nt, Human
agaccauggacacuacacccag

SEQ ID NO: 1461043 - RNA, 21 nt, Human
agaccauggacacuacaccca

SEQ ID NO: 1461044 - RNA, 12 nt, Human
agaccauggaca

SEQ ID NO: 1461045 - RNA, 17 nt, Human
agaccaccucucaauau

SEQ ID NO: 1461046 - RNA, 12 nt, Human
agaccaccucuc

SEQ ID NO: 1461047 - RNA, 23 nt, Human
agacaauugagguaaguuuuuug

SEQ ID NO: 1461048 - RNA, 19 nt, Human
agacaauugacaacaguua

SEQ ID NO: 1461049 - RNA, 19 nt, Human
agacaaggaaaaaauaaca

SEQ ID NO: 1461050 - RNA, 15 nt, Human
agacaagccagaacu

SEQ ID NO: 1461051 - RNA, 16 nt, Human
agacaauugacaacag

SEQ ID NO: 1461052 - RNA, 17 nt, Human
agacaagccagaacuug

SEQ ID NO: 1461053 - RNA, 22 nt, Human
agagaggccauucuuucccaac

SEQ ID NO: 1461054 - RNA, 23 nt, Human
agagaggccauucuuucccaaca

SEQ ID NO: 1461055 - RNA, 12 nt, Human
agagaggccauu

SEQ ID NO: 1461056 - RNA, 17 nt, Human
agagccugcaggaucuc

SEQ ID NO: 1461057 - RNA, 14 nt, Human
agagccugcaggau

SEQ ID NO: 1461058 - RNA, 16 nt, Human
agagccugcaggaucu

SEQ ID NO: 1461059 - RNA, 14 nt, Human
agacucuuuaugcu

SEQ ID NO: 1461060 - RNA, 16 nt, Human
agagaaguagaaauca

SEQ ID NO: 1461061 - RNA, 14 nt, Human
agagaaauaugaag

SEQ ID NO: 1461062 - RNA, 21 nt, Human
agaagacugcauuauauuuau

SEQ ID NO: 1461063 - RNA, 11 nt, Human
agaaccaaaga

SEQ ID NO: 1461064 - RNA, 19 nt, Human
agaaccaaagaagaaaguc

SEQ ID NO: 1461065 - RNA, 16 nt, Human
agaaccaaagaagaaa

SEQ ID NO: 1461066 - RNA, 21 nt, Human
agaauccuaggcuccacccca

SEQ ID NO: 1461067 - RNA, 18 nt, Human
agaaucuauauuuaacaa

SEQ ID NO: 1461068 - RNA, 19 nt, Human
agaaucuugguuugccuuc

SEQ ID NO: 1461069 - RNA, 20 nt, Human
agaaucuugguuugccuucc

SEQ ID NO: 1461070 - RNA, 12 nt, Human
agaaugagccuc

SEQ ID NO: 1461071 - RNA, 17 nt, Human
agaacaucccuccuggg

SEQ ID NO: 1461072 - RNA, 13 nt, Human
agaacaucccucc

SEQ ID NO: 1461073 - RNA, 19 nt, Human
agaacauagacagaagaaa

SEQ ID NO: 1461074 - RNA, 21 nt, Human
agaacauagacagaagaaaca

SEQ ID NO: 1461075 - RNA, 18 nt, Human
agaacagcagacucagcu

SEQ ID NO: 1461076 - RNA, 10 nt, Human
agaacaaggc

SEQ ID NO: 1461077 - RNA, 15 nt, Human
agaacaacuaccuga

SEQ ID NO: 1461078 - RNA, 12 nt, Human
agaacacacaca

SEQ ID NO: 1461079 - RNA, 14 nt, Human
agaacacacacacu

SEQ ID NO: 1461080 - RNA, 15 nt, Human
agaacacacacacuu

SEQ ID NO: 1461081 - RNA, 20 nt, Human
agaacacagcaauuccucag

SEQ ID NO: 1461082 - RNA, 17 nt, Human
aucccccagaaaagaaa

SEQ ID NO: 1461083 - RNA, 12 nt, Human
aucccccagaaa

SEQ ID NO: 1461084 - RNA, 17 nt, Human
auccagggggcaagagg

SEQ ID NO: 1461085 - RNA, 12 nt, Human
auccuugaagau

SEQ ID NO: 1461086 - RNA, 17 nt, Human
auccuuccucacaccag

SEQ ID NO: 1461087 - RNA, 13 nt, Human
aucgaaugaaauu

SEQ ID NO: 1461088 - RNA, 14 nt, Human
aucgaaugaaauua

SEQ ID NO: 1461089 - RNA, 23 nt, Human
auccaggccggcuugccacaccc

SEQ ID NO: 1461090 - RNA, 14 nt, Human
auccaggccggcuu

SEQ ID NO: 1461091 - RNA, 21 nt, Human
auccagccuggggcugaggcu

SEQ ID NO: 1461092 - RNA, 12 nt, Human
auccacuuugca

SEQ ID NO: 1461093 - RNA, 19 nt, Human
auccagccuggggcugagg

SEQ ID NO: 1461094 - RNA, 23 nt, Human
auccagccuaacuuacauucuua

SEQ ID NO: 1461095 - RNA, 23 nt, Human
auccacuuuaucuugaauaaugu

SEQ ID NO: 1461096 - RNA, 21 nt, Human
aucaugcauguccuguaaagg

SEQ ID NO: 1461097 - RNA, 19 nt, Human
auauuuuuuucugaaauuu

SEQ ID NO: 1461098 - RNA, 14 nt, Human
auauuuuuuucuga

SEQ ID NO: 1461099 - RNA, 16 nt, Human
auauuuuuuucugaaa

SEQ ID NO: 1461100 - RNA, 18 nt, Human
auauuuuuuucugaaauu

SEQ ID NO: 1461101 - RNA, 18 nt, Human
aucaaaagggccaaagaa

SEQ ID NO: 1461102 - RNA, 22 nt, Human
aucaaaagggccaaagaaccaa

SEQ ID NO: 1461103 - RNA, 16 nt, Human
augaaacuuuuggaag

SEQ ID NO: 1461104 - RNA, 20 nt, Human
augaagccuccuuagaaaaa

SEQ ID NO: 1461105 - RNA, 14 nt, Human
augaauacauuucc

SEQ ID NO: 1461106 - RNA, 21 nt, Human
augaauacauuuccaaaaugg

SEQ ID NO: 1461107 - RNA, 13 nt, Human
augaagcuguugu

SEQ ID NO: 1461108 - RNA, 17 nt, Human
augaggccagaccaugg

SEQ ID NO: 1461109 - RNA, 14 nt, Human
augaggccagacca

SEQ ID NO: 1461110 - RNA, 13 nt, Human
augaggccagacc

SEQ ID NO: 1461111 - RNA, 12 nt, Human
augaggccagac

SEQ ID NO: 1461112 - RNA, 16 nt, Human
augagcucuucauguu

SEQ ID NO: 1461113 - RNA, 19 nt, Human
aucuaggauuuuaagggaa

SEQ ID NO: 1461114 - RNA, 18 nt, Human
aucuaggcaacauaguau

SEQ ID NO: 1461115 - RNA, 11 nt, Human
aucuaggauuu

SEQ ID NO: 1461116 - RNA, 13 nt, Human
augagggaaaaga

SEQ ID NO: 1461117 - RNA, 14 nt, Human
augagggaaaagaa

SEQ ID NO: 1461118 - RNA, 13 nt, Human
augaggcuuucca

SEQ ID NO: 1461119 - RNA, 20 nt, Human
augggacauuugcucaugga

SEQ ID NO: 1461120 - RNA, 23 nt, Human
auggcuuccuggcaauagucaaa

SEQ ID NO: 1461121 - RNA, 18 nt, Human
auggagugcaccaaagag

SEQ ID NO: 1461122 - RNA, 19 nt, Human
auggagugcaccaaagaga

SEQ ID NO: 1461123 - RNA, 20 nt, Human
auggagugcaccaaagagaa

SEQ ID NO: 1461124 - RNA, 16 nt, Human
auggaguguacaagua

SEQ ID NO: 1461125 - RNA, 17 nt, Human
augcuuugaaacagaaa

SEQ ID NO: 1461126 - RNA, 18 nt, Human
augcuuugaaacagaaaa

SEQ ID NO: 1461127 - RNA, 16 nt, Human
augcuuugaaacagaa

SEQ ID NO: 1461128 - RNA, 17 nt, Human
auggagugcaccaaaga

SEQ ID NO: 1461129 - RNA, 24 nt, Human
augcauauuauuuuauguugcaua

SEQ ID NO: 1461130 - RNA, 17 nt, Human
augcauacacucucaaa

SEQ ID NO: 1461131 - RNA, 16 nt, Human
augcauggaaauuccc

SEQ ID NO: 1461132 - RNA, 23 nt, Human
augcauggagggcugcccuguac

SEQ ID NO: 1461133 - RNA, 14 nt, Human
augcauaaaugcau

SEQ ID NO: 1461134 - RNA, 16 nt, Human
augcauguccuguaaa

SEQ ID NO: 1461135 - RNA, 15 nt, Human
agucuggugaagcuc

SEQ ID NO: 1461136 - RNA, 18 nt, Human
agucugugagauucauuc

SEQ ID NO: 1461137 - RNA, 20 nt, Human
aguaucaucagauagcaucu

SEQ ID NO: 1461138 - RNA, 19 nt, Human
agugccuuccuguuuuuca

SEQ ID NO: 1461139 - RNA, 11 nt, Human
agugacagcua

SEQ ID NO: 1461140 - RNA, 22 nt, Human
aguauauugauccagaaagaaa

SEQ ID NO: 1461141 - RNA, 19 nt, Human
aguaacuacaguuagggcu

SEQ ID NO: 1461142 - RNA, 17 nt, Human
aguaacuacaguuaggg

SEQ ID NO: 1461143 - RNA, 14 nt, Human
aguaacucaucugu

SEQ ID NO: 1461144 - RNA, 16 nt, Human
aguaaagaauuauuuu

SEQ ID NO: 1461145 - RNA, 15 nt, Human
aguaaagaauuauuu

SEQ ID NO: 1461146 - RNA, 13 nt, Human
auaaaaagaauga

SEQ ID NO: 1461147 - RNA, 14 nt, Human
auaaaaagaucacu

SEQ ID NO: 1461148 - RNA, 17 nt, Human
auaaaaaagaucccaaa

SEQ ID NO: 1461149 - RNA, 11 nt, Human
auaaaaaagau

SEQ ID NO: 1461150 - RNA, 15 nt, Human
auaaaaaagauccca

SEQ ID NO: 1461151 - RNA, 16 nt, Human
auaaaaaagaucccaa

SEQ ID NO: 1461152 - RNA, 15 nt, Human
auaaaagacagugaa

SEQ ID NO: 1461153 - RNA, 16 nt, Human
auaaaagacagugaaa

SEQ ID NO: 1461154 - RNA, 22 nt, Human
auaaaaagaucacuuucucagu

SEQ ID NO: 1461155 - RNA, 18 nt, Human
auaaaaagaucacuuucu

SEQ ID NO: 1461156 - RNA, 17 nt, Human
auaaaaaugaucuaaac

SEQ ID NO: 1461157 - RNA, 12 nt, Human
auaaaaauguuu

SEQ ID NO: 1461158 - RNA, 16 nt, Human
auaaaaaugaucuaaa

SEQ ID NO: 1461159 - RNA, 20 nt, Human
aguuaacuauugcauuuaua

SEQ ID NO: 1461160 - RNA, 24 nt, Human
aguuaacuauugcauuuauaugua

SEQ ID NO: 1461161 - RNA, 14 nt, Human
aguuaauuuaaagu

SEQ ID NO: 1461162 - RNA, 19 nt, Human
aguuaacuauugcauuuau

SEQ ID NO: 1461163 - RNA, 17 nt, Human
aguuaacuauugcauuu

SEQ ID NO: 1461164 - RNA, 15 nt, Human
aguuaacuauugcau

SEQ ID NO: 1461165 - RNA, 20 nt, Human
aguuaacaccuuuaaagugu

SEQ ID NO: 1461166 - RNA, 18 nt, Human
aguguuuuaugagaaagc

SEQ ID NO: 1461167 - RNA, 21 nt, Human
aguguuuuaugagaaagccuu

SEQ ID NO: 1461168 - RNA, 14 nt, Human
aguguuuucucuga

SEQ ID NO: 1461169 - RNA, 15 nt, Human
aguguuuucucugaa

SEQ ID NO: 1461170 - RNA, 11 nt, Human
aguguuucuuu

SEQ ID NO: 1461171 - RNA, 19 nt, Human
aguggcaucaucucagcuc

SEQ ID NO: 1461172 - RNA, 20 nt, Human
aguggcaucaucucagcuca

SEQ ID NO: 1461173 - RNA, 17 nt, Human
agugcucauuucaggau

SEQ ID NO: 1461174 - RNA, 17 nt, Human
aguucauccauucuauu

SEQ ID NO: 1461175 - RNA, 14 nt, Human
aguugaagcaaauc

SEQ ID NO: 1461176 - RNA, 19 nt, Human
aguuguuccuuaagucaga

SEQ ID NO: 1461177 - RNA, 18 nt, Human
auaagcuuaugcuuaaau

SEQ ID NO: 1461178 - RNA, 16 nt, Human
auaaagauauuguuca

SEQ ID NO: 1461179 - RNA, 16 nt, Human
auacuuuuacaaguaa

SEQ ID NO: 1461180 - RNA, 20 nt, Human
auacuuuuacaaguaacaaa

SEQ ID NO: 1461181 - RNA, 21 nt, Human
auacuuuuacaaguaacaaaa

SEQ ID NO: 1461182 - RNA, 19 nt, Human
auacuuuuuaaauguaaag

SEQ ID NO: 1461183 - RNA, 17 nt, Human
gccuacuccaaaauguu

SEQ ID NO: 1461184 - RNA, 18 nt, Human
gccucugucuucuggacu

SEQ ID NO: 1461185 - RNA, 21 nt, Human
gccuccuggcugucugaggcu

SEQ ID NO: 1461186 - RNA, 19 nt, Human
gccucugucuucuggacug

SEQ ID NO: 1461187 - RNA, 13 nt, Human
gccuccugccggc

SEQ ID NO: 1461188 - RNA, 17 nt, Human
gccuccugccggcuccu

SEQ ID NO: 1461189 - RNA, 20 nt, Human
gccuccugccggcuccuugg

SEQ ID NO: 1461190 - RNA, 22 nt, Human
gccugccuccccugccucacca

SEQ ID NO: 1461191 - RNA, 17 nt, Human
gcccugcugcccucccc

SEQ ID NO: 1461192 - RNA, 15 nt, Human
gcccugcugcccucc

SEQ ID NO: 1461193 - RNA, 14 nt, Human
gcccugcugcccuc

SEQ ID NO: 1461194 - RNA, 13 nt, Human
gcccugcugcccu

SEQ ID NO: 1461195 - RNA, 20 nt, Human
gcccaugggagcugguuaga

SEQ ID NO: 1461196 - RNA, 22 nt, Human
gcccccaguaucucuucagucu

SEQ ID NO: 1461197 - RNA, 12 nt, Human
gcccuacuggga

SEQ ID NO: 1461198 - RNA, 17 nt, Human
gccaugucaaacaaaua

SEQ ID NO: 1461199 - RNA, 20 nt, Human
gccauucuccugccucagcc

SEQ ID NO: 1461200 - RNA, 21 nt, Human
gccauucacuucauaauccag

SEQ ID NO: 1461201 - RNA, 22 nt, Human
gccauucacuucauaauccagu

SEQ ID NO: 1461202 - RNA, 13 nt, Human
gccaggccgggaa

SEQ ID NO: 1461203 - RNA, 21 nt, Human
gccagccacggggacucagcc

SEQ ID NO: 1461204 - RNA, 15 nt, Human
gccaggaggacccag

SEQ ID NO: 1461205 - RNA, 16 nt, Human
gccaggaggacccagg

SEQ ID NO: 1461206 - RNA, 17 nt, Human
gccaggaggacccaggg

SEQ ID NO: 1461207 - RNA, 19 nt, Human
gccaggaggacccagggcu

SEQ ID NO: 1461208 - RNA, 22 nt, Human
gccaggaggacccagggcucug

SEQ ID NO: 1461209 - RNA, 17 nt, Human
gccaggaggugccacug

SEQ ID NO: 1461210 - RNA, 18 nt, Human
gccaggaggugccacugg

SEQ ID NO: 1461211 - RNA, 17 nt, Human
gccagaccauggacacu

SEQ ID NO: 1461212 - RNA, 16 nt, Human
gccagaccauggacac

SEQ ID NO: 1461213 - RNA, 13 nt, Human
gccagaccaugga

SEQ ID NO: 1461214 - RNA, 16 nt, Human
gccagaccagcaggcu

SEQ ID NO: 1461215 - RNA, 18 nt, Human
gccagaccagcaggcugg

SEQ ID NO: 1461216 - RNA, 12 nt, Human
gccagauuuuuu

SEQ ID NO: 1461217 - RNA, 13 nt, Human
gccagauuuuuua

SEQ ID NO: 1461218 - RNA, 23 nt, Human
gccagauuuuuuaaaauuuauau

SEQ ID NO: 1461219 - RNA, 16 nt, Human
gccagauuuuuuaaaa

SEQ ID NO: 1461220 - RNA, 15 nt, Human
gcacuuggcugcaua

SEQ ID NO: 1461221 - RNA, 16 nt, Human
gccacccucaugcugu

SEQ ID NO: 1461222 - RNA, 15 nt, Human
gccacccucaugcug

SEQ ID NO: 1461223 - RNA, 13 nt, Human
gccacccucaugc

SEQ ID NO: 1461224 - RNA, 22 nt, Human
gccacuggagugugcguggugg

SEQ ID NO: 1461225 - RNA, 13 nt, Human
gccaccaugcccg

SEQ ID NO: 1461226 - RNA, 23 nt, Human
gcucuggagcccacuguacuugc

SEQ ID NO: 1461227 - RNA, 14 nt, Human
gcucuucauguuuc

SEQ ID NO: 1461228 - RNA, 15 nt, Human
gcugaaauuuuauau

SEQ ID NO: 1461229 - RNA, 17 nt, Human
gcugaaauuuuauaugc

SEQ ID NO: 1461230 - RNA, 14 nt, Human
gcugagcucucugu

SEQ ID NO: 1461231 - RNA, 12 nt, Human
gcucuaauacau

SEQ ID NO: 1461232 - RNA, 21 nt, Human
gccuguuagcaugcuggugag

SEQ ID NO: 1461233 - RNA, 21 nt, Human
gcuaguaauuggaaaggcagc

SEQ ID NO: 1461234 - RNA, 18 nt, Human
gcuauggugcucugucua

SEQ ID NO: 1461235 - RNA, 13 nt, Human
gcuaugguuuucu

SEQ ID NO: 1461236 - RNA, 14 nt, Human
gcuauuucaucuau

SEQ ID NO: 1461237 - RNA, 15 nt, Human
gcuauuucaucuauu

SEQ ID NO: 1461238 - RNA, 18 nt, Human
gcucaggagcccugggag

SEQ ID NO: 1461239 - RNA, 15 nt, Human
gcucaggagcccugg

SEQ ID NO: 1461240 - RNA, 21 nt, Human
gcucaggagcccugggaggcu

SEQ ID NO: 1461241 - RNA, 16 nt, Human
gcucagguacuuguaa

SEQ ID NO: 1461242 - RNA, 14 nt, Human
gcucaggagcccug

SEQ ID NO: 1461243 - RNA, 18 nt, Human
gcucaccuugugcugggg

SEQ ID NO: 1461244 - RNA, 16 nt, Human
gcugcugccugccugg

SEQ ID NO: 1461245 - RNA, 12 nt, Human
gcugcugccugc

SEQ ID NO: 1461246 - RNA, 20 nt, Human
gcugccuggaagagcagccc

SEQ ID NO: 1461247 - RNA, 12 nt, Human
gcuggagugcag

SEQ ID NO: 1461248 - RNA, 19 nt, Human
gcugggucgcccuggacug

SEQ ID NO: 1461249 - RNA, 18 nt, Human
gcugggucgcccuggacu

SEQ ID NO: 1461250 - RNA, 17 nt, Human
gcugggucgcccuggac

SEQ ID NO: 1461251 - RNA, 16 nt, Human
gcugggucgcccugga

SEQ ID NO: 1461252 - RNA, 14 nt, Human
gcuggagugcagug

SEQ ID NO: 1461253 - RNA, 19 nt, Human
gcuguaauguuaauauuga

SEQ ID NO: 1461254 - RNA, 16 nt, Human
gcuguacacugcacga

SEQ ID NO: 1461255 - RNA, 12 nt, Human
gcuguacacugc

SEQ ID NO: 1461256 - RNA, 17 nt, Human
gcugugcuuaugguacc

SEQ ID NO: 1461257 - RNA, 12 nt, Human
gcuguggccagg

SEQ ID NO: 1461258 - RNA, 13 nt, Human
gcuguggccagga

SEQ ID NO: 1461259 - RNA, 12 nt, Human
gcuuaaaacuuu

SEQ ID NO: 1461260 - RNA, 13 nt, Human
gcuuaaaacuuug

SEQ ID NO: 1461261 - RNA, 18 nt, Human
gcuuaaaacuuugaaguu

SEQ ID NO: 1461262 - RNA, 22 nt, Human
gcuuaaacccauauuguaaaac

SEQ ID NO: 1461263 - RNA, 14 nt, Human
gcuucccuuuccug

SEQ ID NO: 1461264 - RNA, 14 nt, Human
gcuuccuucauuuc

SEQ ID NO: 1461265 - RNA, 17 nt, Human
gcuuccuucauuuccuc

SEQ ID NO: 1461266 - RNA, 13 nt, Human
gcuuccuucauuu

SEQ ID NO: 1461267 - RNA, 19 nt, Human
gcuugaaacccguggcgcu

SEQ ID NO: 1461268 - RNA, 22 nt, Human
gcuugggaaaggugguguuucu

SEQ ID NO: 1461269 - RNA, 17 nt, Human
gcuugggcagcaucccc

SEQ ID NO: 1461270 - RNA, 21 nt, Human
ggccuccguccaggagccugg

SEQ ID NO: 1461271 - RNA, 11 nt, Human
ggccaaagaac

SEQ ID NO: 1461272 - RNA, 22 nt, Human
ggccaaagaaccaaagaagaaa

SEQ ID NO: 1461273 - RNA, 17 nt, Human
ggccaaagaaccaaaga

SEQ ID NO: 1461274 - RNA, 14 nt, Human
ggcaacaucuuuau

SEQ ID NO: 1461275 - RNA, 22 nt, Human
ggaugguucccuugaugaagaa

SEQ ID NO: 1461276 - RNA, 23 nt, Human
ggaugguucccuugaugaagaag

SEQ ID NO: 1461277 - RNA, 16 nt, Human
ggcaaaauccuugcuu

SEQ ID NO: 1461278 - RNA, 16 nt, Human
ggcaaauaucuugaaa

SEQ ID NO: 1461279 - RNA, 20 nt, Human
ggcagagaagaaagaacgga

SEQ ID NO: 1461280 - RNA, 19 nt, Human
ggcagacucuuuaugcuug

SEQ ID NO: 1461281 - RNA, 20 nt, Human
ggcagacucuuuaugcuugc

SEQ ID NO: 1461282 - RNA, 22 nt, Human
ggcagacucuuuaugcuugcaa

SEQ ID NO: 1461283 - RNA, 23 nt, Human
ggcaggcaucggggagccgggag

SEQ ID NO: 1461284 - RNA, 18 nt, Human
ggcaggcaggcucccagg

SEQ ID NO: 1461285 - RNA, 12 nt, Human
ggcagccucugg

SEQ ID NO: 1461286 - RNA, 19 nt, Human
ggagcagagcugauggaga

SEQ ID NO: 1461287 - RNA, 15 nt, Human
ggagcccacuguacu

SEQ ID NO: 1461288 - RNA, 23 nt, Human
ggagcagagcugauggagaagga

SEQ ID NO: 1461289 - RNA, 21 nt, Human
ggaggcucuggagcccacugu

SEQ ID NO: 1461290 - RNA, 22 nt, Human
ggagcccacuguacuugcucuu

SEQ ID NO: 1461291 - RNA, 18 nt, Human
ggagcccacuguacuugc

SEQ ID NO: 1461292 - RNA, 15 nt, Human
ggagcuugggaaugg

SEQ ID NO: 1461293 - RNA, 20 nt, Human
ggaggcucuggagcccacug

SEQ ID NO: 1461294 - RNA, 17 nt, Human
ggaggcucuggagccca

SEQ ID NO: 1461295 - RNA, 17 nt, Human
ggaggccauugugugag

SEQ ID NO: 1461296 - RNA, 19 nt, Human
ggaggaaccagagugcuga

SEQ ID NO: 1461297 - RNA, 16 nt, Human
ggaggcaucagugucc

SEQ ID NO: 1461298 - RNA, 15 nt, Human
ggagagacgggcccu

SEQ ID NO: 1461299 - RNA, 17 nt, Human
ggagagacgggcccugg

SEQ ID NO: 1461300 - RNA, 12 nt, Human
ggagagacuugu

SEQ ID NO: 1461301 - RNA, 17 nt, Human
ggagagaguugaaccua

SEQ ID NO: 1461302 - RNA, 20 nt, Human
ggagagaguugaaccuaaac

SEQ ID NO: 1461303 - RNA, 16 nt, Human
ggacuugugucucugu

SEQ ID NO: 1461304 - RNA, 12 nt, Human
ggacuugugucu

SEQ ID NO: 1461305 - RNA, 23 nt, Human
ggacugugugcucaggagcccug

SEQ ID NO: 1461306 - RNA, 22 nt, Human
ggacugugugcucaggagcccu

SEQ ID NO: 1461307 - RNA, 13 nt, Human
ggaccucaccaag

SEQ ID NO: 1461308 - RNA, 17 nt, Human
ggaccccagccauccag

SEQ ID NO: 1461309 - RNA, 22 nt, Human
ggcugggaauggaggggcagag

SEQ ID NO: 1461310 - RNA, 21 nt, Human
ggcugggaauggaggggcaga

SEQ ID NO: 1461311 - RNA, 23 nt, Human
ggcuccuccaggguggcagcaac

SEQ ID NO: 1461312 - RNA, 17 nt, Human
ggcuccgugugggagac

SEQ ID NO: 1461313 - RNA, 20 nt, Human
ggcuccucgagaucccaaca

SEQ ID NO: 1461314 - RNA, 17 nt, Human
ggcuccuauucaacaca

SEQ ID NO: 1461315 - RNA, 18 nt, Human
ggcuccgugugggagacc

SEQ ID NO: 1461316 - RNA, 14 nt, Human
ggcuccguguggga

SEQ ID NO: 1461317 - RNA, 15 nt, Human
ggcuccgugugggag

SEQ ID NO: 1461318 - RNA, 16 nt, Human
ggcuccgugugggaga

SEQ ID NO: 1461319 - RNA, 21 nt, Human
ggcugaaaggaagcugugcgu

SEQ ID NO: 1461320 - RNA, 15 nt, Human
aaaaagggaggggga

SEQ ID NO: 1461321 - RNA, 18 nt, Human
aaaaagcgaaaaaaucag

SEQ ID NO: 1461322 - RNA, 12 nt, Human
aaaaagcuuaaa

SEQ ID NO: 1461323 - RNA, 15 nt, Human
aaaaagcuuaaaacu

SEQ ID NO: 1461324 - RNA, 17 nt, Human
aaaaagcuuaaaacuuu

SEQ ID NO: 1461325 - RNA, 19 nt, Human
aaaaagcuuaaaacuuuga

SEQ ID NO: 1461326 - RNA, 20 nt, Human
aaaaagcuuaaaacuuugaa

SEQ ID NO: 1461327 - RNA, 13 nt, Human
aaaaagguuuaca

SEQ ID NO: 1461328 - RNA, 18 nt, Human
aaaaagguuuacagaauu

SEQ ID NO: 1461329 - RNA, 12 nt, Human
aaaaaaaauaca

SEQ ID NO: 1461330 - RNA, 16 nt, Human
ggcuucagguccaggc

SEQ ID NO: 1461331 - RNA, 13 nt, Human
ggcuucaggucca

SEQ ID NO: 1461332 - RNA, 20 nt, Human
aaaaaguggguuuuuuaguu

SEQ ID NO: 1461333 - RNA, 22 nt, Human
aaaaaguggguuuuuuaguuga

SEQ ID NO: 1461334 - RNA, 23 nt, Human
aaaaaguggguuuuuuaguugaa

SEQ ID NO: 1461335 - RNA, 19 nt, Human
aaaagggacugagaaauuu

SEQ ID NO: 1461336 - RNA, 13 nt, Human
aaaagguuuacag

SEQ ID NO: 1461337 - RNA, 14 nt, Human
aaaagguuuacaga

SEQ ID NO: 1461338 - RNA, 16 nt, Human
aaaagguuuacagaau

SEQ ID NO: 1461339 - RNA, 16 nt, Human
aaaagggacugagaaa

SEQ ID NO: 1461340 - RNA, 20 nt, Human
aaaaggcuagguacacagcu

SEQ ID NO: 1461341 - RNA, 18 nt, Human
gggauuaugggucacagg

SEQ ID NO: 1461342 - RNA, 20 nt, Human
gggauuaugggucacaggaa

SEQ ID NO: 1461343 - RNA, 14 nt, Human
gggagggggagagg

SEQ ID NO: 1461344 - RNA, 16 nt, Human
gggcagagccaggaag

SEQ ID NO: 1461345 - RNA, 14 nt, Human
gggcagagccagga

SEQ ID NO: 1461346 - RNA, 13 nt, Human
gggcagagccagg

SEQ ID NO: 1461347 - RNA, 16 nt, Human
gggcagcaauuuaaau

SEQ ID NO: 1461348 - RNA, 14 nt, Human
aaaauauauacuaa

SEQ ID NO: 1461349 - RNA, 14 nt, Human
aaaauauguaccaa

SEQ ID NO: 1461350 - RNA, 18 nt, Human
aaaauauauaucaaauau

SEQ ID NO: 1461351 - RNA, 17 nt, Human
aaaauauauacuaaaca

SEQ ID NO: 1461352 - RNA, 13 nt, Human
aaaauauauacua

SEQ ID NO: 1461353 - RNA, 20 nt, Human
aaaauagcuaaauaccucaa

SEQ ID NO: 1461354 - RNA, 13 nt, Human
aaaauaguuugga

SEQ ID NO: 1461355 - RNA, 16 nt, Human
aaaauaguuuggauau

SEQ ID NO: 1461356 - RNA, 19 nt, Human
aaaauaguuuggauaugua

SEQ ID NO: 1461357 - RNA, 22 nt, Human
aaaauaguuuggauauguaaaa

SEQ ID NO: 1461358 - RNA, 20 nt, Human
aaaauaguuuggauauguaa

SEQ ID NO: 1461359 - RNA, 21 nt, Human
aaaauaauuuuuauauuugaa

SEQ ID NO: 1461360 - RNA, 23 nt, Human
aaaauaauuuuuauauuugaaau

SEQ ID NO: 1461361 - RNA, 17 nt, Human
aaaauagcaaaagaaga

SEQ ID NO: 1461362 - RNA, 15 nt, Human
aaaauacuauucuga

SEQ ID NO: 1461363 - RNA, 18 nt, Human
aaaagguuuacagaauuu

SEQ ID NO: 1461364 - RNA, 14 nt, Human
aaaagguuuaugaa

SEQ ID NO: 1461365 - RNA, 19 nt, Human
aaaagguuuaugaaaaaga

SEQ ID NO: 1461366 - RNA, 20 nt, Human
aaaagguuuaugaaaaagaa

SEQ ID NO: 1461367 - RNA, 23 nt, Human
aaaagguuuaugaaaaagaagaa

SEQ ID NO: 1461368 - RNA, 13 nt, Human
aaaaguaauaaaa

SEQ ID NO: 1461369 - RNA, 15 nt, Human
aaaauaaagaaugga

SEQ ID NO: 1461370 - RNA, 16 nt, Human
aaaauaaagaauggaa

SEQ ID NO: 1461371 - RNA, 18 nt, Human
aaaagccuguuuaagaga

SEQ ID NO: 1461372 - RNA, 16 nt, Human
aaaagccuguuuaaga

SEQ ID NO: 1461373 - RNA, 13 nt, Human
aaaacuuuaaagc

SEQ ID NO: 1461374 - RNA, 22 nt, Human
aaaagcuccauuuuuagugaaa

SEQ ID NO: 1461375 - RNA, 14 nt, Human
aaaagcuagaauug

SEQ ID NO: 1461376 - RNA, 17 nt, Human
gggacugcggaggaagg

SEQ ID NO: 1461377 - RNA, 21 nt, Human
aaaaauuaaaccggaccaucu

SEQ ID NO: 1461378 - RNA, 20 nt, Human
aaaaauguucuauuuuaauu

SEQ ID NO: 1461379 - RNA, 14 nt, Human
aaaaaugaucuaaa

SEQ ID NO: 1461380 - RNA, 20 nt, Human
aaaaaugauuucaguagcac

SEQ ID NO: 1461381 - RNA, 16 nt, Human
aaaaaugauuucagua

SEQ ID NO: 1461382 - RNA, 22 nt, Human
gggaaaucaaaagggccaaaga

SEQ ID NO: 1461383 - RNA, 19 nt, Human
aaaaauuaucuauagcuaa

SEQ ID NO: 1461384 - RNA, 22 nt, Human
aaaacauuuauuuugacauaaa

SEQ ID NO: 1461385 - RNA, 19 nt, Human
aaaacugcucauaugaugu

SEQ ID NO: 1461386 - RNA, 17 nt, Human
aaaacuacuucuuuuuu

SEQ ID NO: 1461387 - RNA, 14 nt, Human
aaaacugcauuuca

SEQ ID NO: 1461388 - RNA, 13 nt, Human
aaaacuaaaaacu

SEQ ID NO: 1461389 - RNA, 16 nt, Human
aaaacuaaaaacuaga

SEQ ID NO: 1461390 - RNA, 22 nt, Human
aaaacuacaaccaauggaaugu

SEQ ID NO: 1461391 - RNA, 19 nt, Human
aaaauuuuuaaucuuuaau

SEQ ID NO: 1461392 - RNA, 19 nt, Human
aaaauuuuuucucuaggaa

SEQ ID NO: 1461393 - RNA, 22 nt, Human
aaaauuuuuucucuaggaaaua

SEQ ID NO: 1461394 - RNA, 16 nt, Human
aaaauuuuuaaucuuu

SEQ ID NO: 1461395 - RNA, 13 nt, Human
aaacaaagaaauu

SEQ ID NO: 1461396 - RNA, 20 nt, Human
aaacaaacucguuuuuuaca

SEQ ID NO: 1461397 - RNA, 18 nt, Human
aaacaaagaguucaagaa

SEQ ID NO: 1461398 - RNA, 17 nt, Human
aaacaaggaugaauuaa

SEQ ID NO: 1461399 - RNA, 12 nt, Human
aaaauggaauac

SEQ ID NO: 1461400 - RNA, 22 nt, Human
aaaauggaggccauugugugag

SEQ ID NO: 1461401 - RNA, 19 nt, Human
aaaauggccauuugcuuuu

SEQ ID NO: 1461402 - RNA, 12 nt, Human
aaaauguaggag

SEQ ID NO: 1461403 - RNA, 17 nt, Human
aaaauguaggagacugu

SEQ ID NO: 1461404 - RNA, 14 nt, Human
aaacacaacuauau

SEQ ID NO: 1461405 - RNA, 23 nt, Human
aaacaaguauuuguuaauuuaga

SEQ ID NO: 1461406 - RNA, 19 nt, Human
aaacaagucagucauucag

SEQ ID NO: 1461407 - RNA, 16 nt, Human
aaacaagguuuucagu

SEQ ID NO: 1461408 - RNA, 12 nt, Human
aaacaaguauuu

SEQ ID NO: 1461409 - RNA, 13 nt, Human
aaacaaguauuug

SEQ ID NO: 1461410 - RNA, 22 nt, Human
aaacaaguauuuguuaauuuag

SEQ ID NO: 1461411 - RNA, 13 nt, Human
aaacauauauaac

SEQ ID NO: 1461412 - RNA, 20 nt, Human
aaacauaaucuucugccuuc

SEQ ID NO: 1461413 - RNA, 16 nt, Human
aaacauauauaacaau

SEQ ID NO: 1461414 - RNA, 19 nt, Human
aaacauauauaacaaugcu

SEQ ID NO: 1461415 - RNA, 21 nt, Human
aaacauauauaacaaugcugu

SEQ ID NO: 1461416 - RNA, 14 nt, Human
ggggccaggcuggg

SEQ ID NO: 1461417 - RNA, 13 nt, Human
ggggccaggcugg

SEQ ID NO: 1461418 - RNA, 16 nt, Human
ggggccaggcuggguc

SEQ ID NO: 1461419 - RNA, 23 nt, Human
ggggucucuucugaauaaagcaa

SEQ ID NO: 1461420 - RNA, 12 nt, Human
ggggccugggca

SEQ ID NO: 1461421 - RNA, 12 nt, Human
ggggaagacagu

SEQ ID NO: 1461422 - RNA, 16 nt, Human
ggggaagacaguggcc

SEQ ID NO: 1461423 - RNA, 15 nt, Human
ggggccugggcagga

SEQ ID NO: 1461424 - RNA, 12 nt, Human
ggguaggcagga

SEQ ID NO: 1461425 - RNA, 13 nt, Human
ggguaggcaggau

SEQ ID NO: 1461426 - RNA, 20 nt, Human
ggguaggcaggauuggggaa

SEQ ID NO: 1461427 - RNA, 18 nt, Human
aaaccaaaucacugaacu

SEQ ID NO: 1461428 - RNA, 21 nt, Human
aaacauuuauuuugacauaaa

SEQ ID NO: 1461429 - RNA, 20 nt, Human
aaacauuuauuuugacauaa

SEQ ID NO: 1461430 - RNA, 14 nt, Human
aaacauuuauuuug

SEQ ID NO: 1461431 - RNA, 17 nt, Human
aaacauuuauuuugaca

SEQ ID NO: 1461432 - RNA, 18 nt, Human
aaacauuuauuuugacau

SEQ ID NO: 1461433 - RNA, 23 nt, Human
aaacauguuucuuuguaaugaaa

SEQ ID NO: 1461434 - RNA, 22 nt, Human
aaacauguuucuuuguaaugaa

SEQ ID NO: 1461435 - RNA, 19 nt, Human
aaacauguuucuuuguaau

SEQ ID NO: 1461436 - RNA, 19 nt, Human
aaacauguuuccacuauug

SEQ ID NO: 1461437 - RNA, 12 nt, Human
gggucaggccuu

SEQ ID NO: 1461438 - RNA, 21 nt, Human
aaaccacauuggagauguuua

SEQ ID NO: 1461439 - RNA, 15 nt, Human
aaacuacauauugua

SEQ ID NO: 1461440 - RNA, 21 nt, Human
aaacuacaaccaauggaaugu

SEQ ID NO: 1461441 - RNA, 11 nt, Human
aaacuaaucca

SEQ ID NO: 1461442 - RNA, 15 nt, Human
aaacgucuuaaauau

SEQ ID NO: 1461443 - RNA, 17 nt, Human
aaacuguaauacaauga

SEQ ID NO: 1461444 - RNA, 23 nt, Human
aaacucccacuugucaugugaca

SEQ ID NO: 1461445 - RNA, 22 nt, Human
aaacuagaggugagaaauuuaa

SEQ ID NO: 1461446 - RNA, 18 nt, Human
aaagagaacuuccagauc

SEQ ID NO: 1461447 - RNA, 13 nt, Human
aaagagaaacacg

SEQ ID NO: 1461448 - RNA, 12 nt, Human
aaagagaaacac

SEQ ID NO: 1461449 - RNA, 17 nt, Human
aaagaauggcagaaaag

SEQ ID NO: 1461450 - RNA, 15 nt, Human
aaagaauuauuuugu

SEQ ID NO: 1461451 - RNA, 22 nt, Human
aaacuuuaaagcguuugcacag

SEQ ID NO: 1461452 - RNA, 12 nt, Human
aaacuuuuuuau

SEQ ID NO: 1461453 - RNA, 17 nt, Human
aaacuuuuuuauuuaaa

SEQ ID NO: 1461454 - RNA, 19 nt, Human
aaacuuuuuuauuuaaaaa

SEQ ID NO: 1461455 - RNA, 16 nt, Human
aaagaaugauuaugaa

SEQ ID NO: 1461456 - RNA, 17 nt, Human
gguauucguuaucuaau

SEQ ID NO: 1461457 - RNA, 20 nt, Human
gguagucucacugcuugaac

SEQ ID NO: 1461458 - RNA, 15 nt, Human
gguagucucacugcu

SEQ ID NO: 1461459 - RNA, 17 nt, Human
ggugcacuggccccacc

SEQ ID NO: 1461460 - RNA, 18 nt, Human
ggugauuccgcagugaga

SEQ ID NO: 1461461 - RNA, 13 nt, Human
aaagauuuuuuaa

SEQ ID NO: 1461462 - RNA, 14 nt, Human
aaagauuuuuuaau

SEQ ID NO: 1461463 - RNA, 19 nt, Human
aaagauuuuuuaauaauuu

SEQ ID NO: 1461464 - RNA, 20 nt, Human
aaagauuuuuuaauaauuua

SEQ ID NO: 1461465 - RNA, 22 nt, Human
aaagauuuuuuaauaauuuaga

SEQ ID NO: 1461466 - RNA, 21 nt, Human
aaagauuuuuuaauaauuuag

SEQ ID NO: 1461467 - RNA, 14 nt, Human
aaagcaaaaaagaa

SEQ ID NO: 1461468 - RNA, 15 nt, Human
aaagcaaaaaagaaa

SEQ ID NO: 1461469 - RNA, 21 nt, Human
aaagcaaaaaagaaaaccuuu

SEQ ID NO: 1461470 - RNA, 16 nt, Human
aaagcaaaaaagaaaa

SEQ ID NO: 1461471 - RNA, 15 nt, Human
ggucugguugggcag

SEQ ID NO: 1461472 - RNA, 16 nt, Human
aaagcuacuuauugua

SEQ ID NO: 1461473 - RNA, 17 nt, Human
aaagcuacuuauuguag

SEQ ID NO: 1461474 - RNA, 14 nt, Human
aaagcguuugcaca

SEQ ID NO: 1461475 - RNA, 14 nt, Human
aaagcuaaaauaaa

SEQ ID NO: 1461476 - RNA, 16 nt, Human
aaagcuaaaauaaaga

SEQ ID NO: 1461477 - RNA, 21 nt, Human
aaagcuaaaauaaagaaauag

SEQ ID NO: 1461478 - RNA, 17 nt, Human
aaagcuauauaagacaa

SEQ ID NO: 1461479 - RNA, 17 nt, Human
aaagcuucagugcugcc

SEQ ID NO: 1461480 - RNA, 20 nt, Human
aaagcuucagugcugccgau

SEQ ID NO: 1461481 - RNA, 19 nt, Human
aaagcuuuuuauuccuccu

SEQ ID NO: 1461482 - RNA, 15 nt, Human
aaaggacaucagcaa

SEQ ID NO: 1461483 - RNA, 16 nt, Human
aaaggacaucagcaaa

SEQ ID NO: 1461484 - RNA, 14 nt, Human
aaaggacaucagca

SEQ ID NO: 1461485 - RNA, 13 nt, Human
aaaggaauuuaaa

SEQ ID NO: 1461486 - RNA, 16 nt, Human
aaaggaaagaaaacau

SEQ ID NO: 1461487 - RNA, 15 nt, Human
aaaggaaagaaaaca

SEQ ID NO: 1461488 - RNA, 20 nt, Human
gaacccuaaauaauaaaaau

SEQ ID NO: 1461489 - RNA, 14 nt, Human
gaacugaaaucaua

SEQ ID NO: 1461490 - RNA, 22 nt, Human
gaacuccuugauuuuagccuuc

SEQ ID NO: 1461491 - RNA, 12 nt, Human
gaaccgaggcag

SEQ ID NO: 1461492 - RNA, 15 nt, Human
gaaccgaggcaggga

SEQ ID NO: 1461493 - RNA, 15 nt, Human
gaacuccuugauuuu

SEQ ID NO: 1461494 - RNA, 23 nt, Human
gaagaauacuucucauuuuuuaa

SEQ ID NO: 1461495 - RNA, 21 nt, Human
gaagaaucucaucucagugaa

SEQ ID NO: 1461496 - RNA, 24 nt, Human
gaagaaugcuuaaucagauagaua

SEQ ID NO: 1461497 - RNA, 22 nt, Human
gaagaauguuaagacuugacag

SEQ ID NO: 1461498 - RNA, 12 nt, Human
gaagaauuccag

SEQ ID NO: 1461499 - RNA, 12 nt, Human
gaacugaacacc

SEQ ID NO: 1461500 - RNA, 21 nt, Human
gaacugaacaccauugaaggc

SEQ ID NO: 1461501 - RNA, 22 nt, Human
gaacugaacaccauugaaggcu

SEQ ID NO: 1461502 - RNA, 23 nt, Human
gaacugaacaccauugaaggcuu

SEQ ID NO: 1461503 - RNA, 20 nt, Human
gaagcaaugcuucaucccuu

SEQ ID NO: 1461504 - RNA, 22 nt, Human
gaagcaaccucaguaauuuaga

SEQ ID NO: 1461505 - RNA, 16 nt, Human
gaagcaagcuuaaugg

SEQ ID NO: 1461506 - RNA, 17 nt, Human
gaagcaaaucgaaugaa

SEQ ID NO: 1461507 - RNA, 20 nt, Human
gaagcaaguaaaaaggcuaa

SEQ ID NO: 1461508 - RNA, 20 nt, Human
gaagcaaccucaguaauuua

SEQ ID NO: 1461509 - RNA, 14 nt, Human
gaagcaaaauuuuu

SEQ ID NO: 1461510 - RNA, 14 nt, Human
gaagacaauugaca

SEQ ID NO: 1461511 - RNA, 18 nt, Human
gaagacaauugacaacag

SEQ ID NO: 1461512 - RNA, 12 nt, Human
gaagacacagac

SEQ ID NO: 1461513 - RNA, 21 nt, Human
gaagacacagacugcgauuug

SEQ ID NO: 1461514 - RNA, 23 nt, Human
gaaguugacuuauaguacaugau

SEQ ID NO: 1461515 - RNA, 21 nt, Human
gaaguugacuuauaguacaug

SEQ ID NO: 1461516 - RNA, 19 nt, Human
gaaguuagcuuuaacuuaa

SEQ ID NO: 1461517 - RNA, 17 nt, Human
gaaguuagcuuuaacuu

SEQ ID NO: 1461518 - RNA, 19 nt, Human
gaauauaauuguuuuaucu

SEQ ID NO: 1461519 - RNA, 20 nt, Human
gaauauaauuguuuuaucug

SEQ ID NO: 1461520 - RNA, 20 nt, Human
gaagcuaucguaaaauuaag

SEQ ID NO: 1461521 - RNA, 20 nt, Human
gaagcuauuuuuuucaguuu

SEQ ID NO: 1461522 - RNA, 22 nt, Human
gaccucuccccuggaacugucu

SEQ ID NO: 1461523 - RNA, 12 nt, Human
gaccugaagaau

SEQ ID NO: 1461524 - RNA, 19 nt, Human
gacuuuauagaucagccag

SEQ ID NO: 1461525 - RNA, 17 nt, Human
gacuuuauguaguuuuu

SEQ ID NO: 1461526 - RNA, 14 nt, Human
gacucuuaagaaga

SEQ ID NO: 1461527 - RNA, 15 nt, Human
gacucuuaagaagac

SEQ ID NO: 1461528 - RNA, 21 nt, Human
gacucuuaagaagacugcauu

SEQ ID NO: 1461529 - RNA, 17 nt, Human
gacucuucugagcaccu

SEQ ID NO: 1461530 - RNA, 19 nt, Human
gacugaaaauauuguuuua

SEQ ID NO: 1461531 - RNA, 22 nt, Human
gacugugugcucaggagcccug

SEQ ID NO: 1461532 - RNA, 20 nt, Human
gacugaauuaugaaacuuuu

SEQ ID NO: 1461533 - RNA, 14 nt, Human
gacugaauuaugaa

SEQ ID NO: 1461534 - RNA, 20 nt, Human
gacagaaccccuacaugaaa

SEQ ID NO: 1461535 - RNA, 15 nt, Human
gacacacugaagaag

SEQ ID NO: 1461536 - RNA, 16 nt, Human
gacacacugaagaagc

SEQ ID NO: 1461537 - RNA, 16 nt, Human
gacauuugcucaugga

SEQ ID NO: 1461538 - RNA, 17 nt, Human
gacauuugcucauggaa

SEQ ID NO: 1461539 - RNA, 23 nt, Human
gacauugaccuauuuccagaaau

SEQ ID NO: 1461540 - RNA, 13 nt, Human
gacauucugauuc

SEQ ID NO: 1461541 - RNA, 23 nt, Human
gacauucugauucgaaugacacu

SEQ ID NO: 1461542 - RNA, 22 nt, Human
gacauucugauucgaaugacac

SEQ ID NO: 1461543 - RNA, 20 nt, Human
gagcuggagaugaggccaga

SEQ ID NO: 1461544 - RNA, 17 nt, Human
gagcuggaccucaccaa

SEQ ID NO: 1461545 - RNA, 21 nt, Human
gagcgcacagggagugcacau

SEQ ID NO: 1461546 - RNA, 18 nt, Human
gaggccagaccauggaca

SEQ ID NO: 1461547 - RNA, 12 nt, Human
gaggccagacca

SEQ ID NO: 1461548 - RNA, 22 nt, Human
gaggcuagguggguugaaagcc

SEQ ID NO: 1461549 - RNA, 20 nt, Human
gaggcuauuauuuucacugu

SEQ ID NO: 1461550 - RNA, 9 nt, Human
gagggcugc

SEQ ID NO: 1461551 - RNA, 16 nt, Human
gagggcugccuuugga

SEQ ID NO: 1461552 - RNA, 13 nt, Human
gagggcugcccug

SEQ ID NO: 1461553 - RNA, 16 nt, Human
gaguuuaaauuguaau

SEQ ID NO: 1461554 - RNA, 18 nt, Human
gaguugcugcaaaccuga

SEQ ID NO: 1461555 - RNA, 15 nt, Human
gaguuggaaucacug

SEQ ID NO: 1461556 - RNA, 15 nt, Human
gaggugagaccaccu

SEQ ID NO: 1461557 - RNA, 16 nt, Human
gaggugagaccaccuc

SEQ ID NO: 1461558 - RNA, 22 nt, Human
gaggugcuucuaguucugccag

SEQ ID NO: 1461559 - RNA, 23 nt, Human
gaggugcuucuaguucugccagg

SEQ ID NO: 1461560 - RNA, 17 nt, Human
gagucacuacgccuggc

SEQ ID NO: 1461561 - RNA, 17 nt, Human
gaguccaucagccucca

SEQ ID NO: 1461562 - RNA, 14 nt, Human
gagugcaccaaaga

SEQ ID NO: 1461563 - RNA, 17 nt, Human
gagugcaccaaagagaa

SEQ ID NO: 1461564 - RNA, 15 nt, Human
gagugcaccaaagag

SEQ ID NO: 1461565 - RNA, 19 nt, Human
gagguccuuaggccucuga

SEQ ID NO: 1461566 - RNA, 21 nt, Human
gagguccuuaggccucugaga

SEQ ID NO: 1461567 - RNA, 21 nt, Human
gauuuuuuucccaauugagaa

SEQ ID NO: 1461568 - RNA, 18 nt, Human
gauuuuuuccuucaaagu

SEQ ID NO: 1461569 - RNA, 21 nt, Human
gauuuuuuccuucaaaguuua

SEQ ID NO: 1461570 - RNA, 15 nt, Human
gauuuuuuuuucaua

SEQ ID NO: 1461571 - RNA, 20 nt, Human
gcaaguauuagaauaccaca

SEQ ID NO: 1461572 - RNA, 18 nt, Human
gcaagucagaauagaaau

SEQ ID NO: 1461573 - RNA, 22 nt, Human
gcaauagucaaauugugugaaa

SEQ ID NO: 1461574 - RNA, 17 nt, Human
gcacauaguagaacgcu

SEQ ID NO: 1461575 - RNA, 16 nt, Human
gcacaauaaaaauguu

SEQ ID NO: 1461576 - RNA, 17 nt, Human
gcacaauaaaaauguuu

SEQ ID NO: 1461577 - RNA, 17 nt, Human
gcacaaguuauuuaaau

SEQ ID NO: 1461578 - RNA, 15 nt, Human
gcacuugcuggaaga

SEQ ID NO: 1461579 - RNA, 13 nt, Human
gcacaucccugga

SEQ ID NO: 1461580 - RNA, 14 nt, Human
gcaccggggccugg

SEQ ID NO: 1461581 - RNA, 16 nt, Human
gcaccggggccugggc

SEQ ID NO: 1461582 - RNA, 14 nt, Human
gcaccuacuuacau

SEQ ID NO: 1461583 - RNA, 15 nt, Human
gauggagaaggaagg

SEQ ID NO: 1461584 - RNA, 16 nt, Human
gauggagaaggaaggc

SEQ ID NO: 1461585 - RNA, 14 nt, Human
gauggagaaggaag

SEQ ID NO: 1461586 - RNA, 13 nt, Human
gauggagaaggaa

SEQ ID NO: 1461587 - RNA, 12 nt, Human
gauggagaagga

SEQ ID NO: 1461588 - RNA, 14 nt, Human
gaugcugauggagc

SEQ ID NO: 1461589 - RNA, 17 nt, Human
gauguaaaaucuuguca

SEQ ID NO: 1461590 - RNA, 13 nt, Human
gauguaaaaucuu

SEQ ID NO: 1461591 - RNA, 14 nt, Human
gauguaaaaucuug

SEQ ID NO: 1461592 - RNA, 15 nt, Human
gauguaaaaucuugu

SEQ ID NO: 1461593 - RNA, 16 nt, Human
gauguaaaaucuuguc

SEQ ID NO: 1461594 - RNA, 20 nt, Human
gauguaaaaucuugucaugu

SEQ ID NO: 1461595 - RNA, 16 nt, Human
gauuuaccacuugugu

SEQ ID NO: 1461596 - RNA, 15 nt, Human
gauuuacgcucauug

SEQ ID NO: 1461597 - RNA, 19 nt, Human
gauuuuuuaauaauuuaga

SEQ ID NO: 1461598 - RNA, 15 nt, Human
gauuuaccacuugug

SEQ ID NO: 1461599 - RNA, 14 nt, Human
gauucuuccaucug

SEQ ID NO: 1461600 - RNA, 14 nt, Human
gauuauauuaugaa

SEQ ID NO: 1461601 - RNA, 13 nt, Human
gauuaugggucac

SEQ ID NO: 1461602 - RNA, 15 nt, Human
cuucuguuuuauaau

SEQ ID NO: 1461603 - RNA, 20 nt, Human
cuucuguuuuauaauuuugu

SEQ ID NO: 1461604 - RNA, 22 nt, Human
cuucugagcccgguaagagcaa

SEQ ID NO: 1461605 - RNA, 16 nt, Human
cuucugagcuauuuca

SEQ ID NO: 1461606 - RNA, 17 nt, Human
cuucugagcuauuucau

SEQ ID NO: 1461607 - RNA, 18 nt, Human
cuucugagcuauuucauc

SEQ ID NO: 1461608 - RNA, 20 nt, Human
cuucugagcuauuucaucua

SEQ ID NO: 1461609 - RNA, 18 nt, Human
cuuggccaugcagaaagc

SEQ ID NO: 1461610 - RNA, 15 nt, Human
cuuggccaugcagaa

SEQ ID NO: 1461611 - RNA, 23 nt, Human
cuuggccaugggaggccuuuccc

SEQ ID NO: 1461612 - RNA, 19 nt, Human
cuuggccaugggaggccuu

SEQ ID NO: 1461613 - RNA, 16 nt, Human
cuuggccaugggaggc

SEQ ID NO: 1461614 - RNA, 20 nt, Human
cuuggccaugggaggccuuu

SEQ ID NO: 1461615 - RNA, 14 nt, Human
cuugacaacuggca

SEQ ID NO: 1461616 - RNA, 20 nt, Human
cuugacaacuggcaggcagg

SEQ ID NO: 1461617 - RNA, 16 nt, Human
cuugacaacuggcagg

SEQ ID NO: 1461618 - RNA, 12 nt, Human
cuugccugcagg

SEQ ID NO: 1461619 - RNA, 17 nt, Human
cuugccucaaccuccca

SEQ ID NO: 1461620 - RNA, 18 nt, Human
cuugccucaaccucccaa

SEQ ID NO: 1461621 - RNA, 14 nt, Human
cuuucuaguugaaa

SEQ ID NO: 1461622 - RNA, 16 nt, Human
cuuucuaguugaaaau

SEQ ID NO: 1461623 - RNA, 18 nt, Human
cuuucuaguugaaaauaa

SEQ ID NO: 1461624 - RNA, 21 nt, Human
cuuucuaguugaaaauaaagu

SEQ ID NO: 1461625 - RNA, 22 nt, Human
cuuugagcuacugccgucagug

SEQ ID NO: 1461626 - RNA, 16 nt, Human
cuuuuacuuuucuucu

SEQ ID NO: 1461627 - RNA, 14 nt, Human
cuuugguagaaaag

SEQ ID NO: 1461628 - RNA, 14 nt, Human
cuuugguccuucaa

SEQ ID NO: 1461629 - RNA, 19 nt, Human
cuuuggugagaaccugggu

SEQ ID NO: 1461630 - RNA, 22 nt, Human
cuuuucaaauagggucuaacuc

SEQ ID NO: 1461631 - RNA, 14 nt, Human
cuuucagagccucc

SEQ ID NO: 1461632 - RNA, 23 nt, Human
cuugugauccacucgccucagcc

SEQ ID NO: 1461633 - RNA, 23 nt, Human
cuuuaaagugacuaauggcauga

SEQ ID NO: 1461634 - RNA, 20 nt, Human
cuuuacacaauagaauuaua

SEQ ID NO: 1461635 - RNA, 20 nt, Human
cuuuaaggggaggaaccaga

SEQ ID NO: 1461636 - RNA, 11 nt, Human
cuuucagagcc

SEQ ID NO: 1461637 - RNA, 12 nt, Human
cuuucagagccu

SEQ ID NO: 1461638 - RNA, 13 nt, Human
cuuucagagccuc

SEQ ID NO: 1461639 - RNA, 19 nt, Human
cuuaugguaccagaugcag

SEQ ID NO: 1461640 - RNA, 13 nt, Human
cuuaugguaccag

SEQ ID NO: 1461641 - RNA, 21 nt, Human
cuuauuaacaauuaggcagac

SEQ ID NO: 1461642 - RNA, 23 nt, Human
cuucaugcauggaaauucccuuc

SEQ ID NO: 1461643 - RNA, 21 nt, Human
cuucaugcauggaaauucccu

SEQ ID NO: 1461644 - RNA, 23 nt, Human
cuucaugcugucuacacuaagag

SEQ ID NO: 1461645 - RNA, 17 nt, Human
cuucaguguauggaaau

SEQ ID NO: 1461646 - RNA, 20 nt, Human
cuucaguguauggaaauaaa

SEQ ID NO: 1461647 - RNA, 17 nt, Human
cuucaguuaugauuuuu

SEQ ID NO: 1461648 - RNA, 13 nt, Human
cuuauugccucac

SEQ ID NO: 1461649 - RNA, 14 nt, Human
cuuauugccucacu

SEQ ID NO: 1461650 - RNA, 19 nt, Human
cuuauugccucacuucagg

SEQ ID NO: 1461651 - RNA, 16 nt, Human
cuguucacuuuuccuc

SEQ ID NO: 1461652 - RNA, 17 nt, Human
cuguucacuuuuccucc

SEQ ID NO: 1461653 - RNA, 18 nt, Human
cuguucacuuuuccuccc

SEQ ID NO: 1461654 - RNA, 19 nt, Human
cugugcuauggugcucugu

SEQ ID NO: 1461655 - RNA, 21 nt, Human
cugugcuauggugcucugucu

SEQ ID NO: 1461656 - RNA, 22 nt, Human
cugugcguguguguguguguau

SEQ ID NO: 1461657 - RNA, 23 nt, Human
cuguguaagggccagaaauaucu

SEQ ID NO: 1461658 - RNA, 17 nt, Human
cuguguacauaacugaa

SEQ ID NO: 1461659 - RNA, 19 nt, Human
cuguguacauaacugaaaa

SEQ ID NO: 1461660 - RNA, 20 nt, Human
cuguguacauaacugaaaau

SEQ ID NO: 1461661 - RNA, 22 nt, Human
cuguguacauaacugaaaaugu

SEQ ID NO: 1461662 - RNA, 15 nt, Human
cuguguacugcaguu

SEQ ID NO: 1461663 - RNA, 11 nt, Human
cuuacacccac

SEQ ID NO: 1461664 - RNA, 20 nt, Human
cuuacacccacaguggaaag

SEQ ID NO: 1461665 - RNA, 20 nt, Human
cuguugggagagggcgcagg

SEQ ID NO: 1461666 - RNA, 22 nt, Human
cuguugggagagggcgcaggcc

SEQ ID NO: 1461667 - RNA, 19 nt, Human
cugcccccagagccacagu

SEQ ID NO: 1461668 - RNA, 20 nt, Human
cugcccccagagccacaguu

SEQ ID NO: 1461669 - RNA, 18 nt, Human
cugcccccagagccacag

SEQ ID NO: 1461670 - RNA, 17 nt, Human
cugcccccagagccaca

SEQ ID NO: 1461671 - RNA, 16 nt, Human
cugcccccagagccac

SEQ ID NO: 1461672 - RNA, 14 nt, Human
cugcccccagagcc

SEQ ID NO: 1461673 - RNA, 17 nt, Human
cugccccuacccuggac

SEQ ID NO: 1461674 - RNA, 22 nt, Human
cugcaggcaggaacaaacaggg

SEQ ID NO: 1461675 - RNA, 15 nt, Human
cugcaggcaggaaca

SEQ ID NO: 1461676 - RNA, 14 nt, Human
cugcaggcaggaac

SEQ ID NO: 1461677 - RNA, 14 nt, Human
cugcaggaaucuuu

SEQ ID NO: 1461678 - RNA, 20 nt, Human
cugcaggaucucaccaggca

SEQ ID NO: 1461679 - RNA, 21 nt, Human
cugcaggaucucaccaggcag

SEQ ID NO: 1461680 - RNA, 22 nt, Human
cugcacgaauggaagaggcacc

SEQ ID NO: 1461681 - RNA, 11 nt, Human
cugcagccucc

SEQ ID NO: 1461682 - RNA, 16 nt, Human
cugcaaccuccaccuc

SEQ ID NO: 1461683 - RNA, 14 nt, Human
cugcaaccuccacc

SEQ ID NO: 1461684 - RNA, 17 nt, Human
cugcaaccuccaccucc

SEQ ID NO: 1461685 - RNA, 13 nt, Human
cugcaaccuccac

SEQ ID NO: 1461686 - RNA, 17 nt, Human
cugcaaggucuuugguu

SEQ ID NO: 1461687 - RNA, 14 nt, Human
cugcaccggggccu

SEQ ID NO: 1461688 - RNA, 16 nt, Human
cugcaccggggccugg

SEQ ID NO: 1461689 - RNA, 18 nt, Human
cugcaccggggccugggc

SEQ ID NO: 1461690 - RNA, 19 nt, Human
cugcaccggggccugggca

SEQ ID NO: 1461691 - RNA, 15 nt, Human
cucuuauaucuauau

SEQ ID NO: 1461692 - RNA, 18 nt, Human
cucuuauaucuauauuuu

SEQ ID NO: 1461693 - RNA, 21 nt, Human
cugaugauuuagagugcuguc

SEQ ID NO: 1461694 - RNA, 17 nt, Human
cugauggagaaggaagg

SEQ ID NO: 1461695 - RNA, 15 nt, Human
cugauggagccuucc

SEQ ID NO: 1461696 - RNA, 16 nt, Human
cugauggagaaggaag

SEQ ID NO: 1461697 - RNA, 15 nt, Human
cugauggagaaggaa

SEQ ID NO: 1461698 - RNA, 14 nt, Human
cugauggagaagga

SEQ ID NO: 1461699 - RNA, 13 nt, Human
cugauggagaagg

SEQ ID NO: 1461700 - RNA, 23 nt, Human
cugaugggguggaaggcauggcg

SEQ ID NO: 1461701 - RNA, 21 nt, Human
cugaugggguggaaggcaugg

SEQ ID NO: 1461702 - RNA, 23 nt, Human
cuggacugugugcucaggagccc

SEQ ID NO: 1461703 - RNA, 22 nt, Human
cuggacugugugcucaggagcc

SEQ ID NO: 1461704 - RNA, 19 nt, Human
cuggacugugugcucagga

SEQ ID NO: 1461705 - RNA, 13 nt, Human
cugcuuaauucaa

SEQ ID NO: 1461706 - RNA, 12 nt, Human
cugcuuaauuca

SEQ ID NO: 1461707 - RNA, 15 nt, Human
cuggaugacauuaaa

SEQ ID NO: 1461708 - RNA, 15 nt, Human
cugcugugaaagaag

SEQ ID NO: 1461709 - RNA, 12 nt, Human
cugcuguggcca

SEQ ID NO: 1461710 - RNA, 14 nt, Human
cugcuguggccagg

SEQ ID NO: 1461711 - RNA, 15 nt, Human
cugcuguggccagga

SEQ ID NO: 1461712 - RNA, 16 nt, Human
cugcuguggccaggag

SEQ ID NO: 1461713 - RNA, 17 nt, Human
cugcuguggccaggagg

SEQ ID NO: 1461714 - RNA, 21 nt, Human
cugcuguggccaggaggugcc

SEQ ID NO: 1461715 - RNA, 18 nt, Human
cugcuguggccaggaggu

SEQ ID NO: 1461716 - RNA, 14 nt, Human
cugcugauauuuuc

SEQ ID NO: 1461717 - RNA, 17 nt, Human
cugcugauauuuucucu

SEQ ID NO: 1461718 - RNA, 18 nt, Human
cugcugauauuuucucua

SEQ ID NO: 1461719 - RNA, 19 nt, Human
cugcugauauuuucucuag

SEQ ID NO: 1461720 - RNA, 19 nt, Human
cuggguguaaaaccuggag

SEQ ID NO: 1461721 - RNA, 21 nt, Human
cuggguguaaaaccuggagau

SEQ ID NO: 1461722 - RNA, 15 nt, Human
cuggugccaauuuca

SEQ ID NO: 1461723 - RNA, 16 nt, Human
cuggugccaauuucaa

SEQ ID NO: 1461724 - RNA, 18 nt, Human
cuggugccaauuucaagu

SEQ ID NO: 1461725 - RNA, 20 nt, Human
cuggugccaauuucaaguuc

SEQ ID NO: 1461726 - RNA, 20 nt, Human
cuggguguaaaaccuggaga

SEQ ID NO: 1461727 - RNA, 19 nt, Human
cuggggacagguccucagu

SEQ ID NO: 1461728 - RNA, 12 nt, Human
cuggggacaggu

SEQ ID NO: 1461729 - RNA, 13 nt, Human
cuggggacuugug

SEQ ID NO: 1461730 - RNA, 18 nt, Human
cuggggacuugugucugc

SEQ ID NO: 1461731 - RNA, 17 nt, Human
cuggggacuugugucug

SEQ ID NO: 1461732 - RNA, 13 nt, Human
cugggcaggaggg

SEQ ID NO: 1461733 - RNA, 13 nt, Human
cugggagaaaucu

SEQ ID NO: 1461734 - RNA, 18 nt, Human
cugggagaaaucuggcuu

SEQ ID NO: 1461735 - RNA, 19 nt, Human
cugggagaaaucuggcuuc

SEQ ID NO: 1461736 - RNA, 20 nt, Human
cugggagaaaucuggcuucu

SEQ ID NO: 1461737 - RNA, 21 nt, Human
cugggagaaaucuggcuucug

SEQ ID NO: 1461738 - RNA, 16 nt, Human
cugggagaaaugaaaa

SEQ ID NO: 1461739 - RNA, 18 nt, Human
cugggacuugcaaaaagg

SEQ ID NO: 1461740 - RNA, 17 nt, Human
cugggagaaaugaaaaa

SEQ ID NO: 1461741 - RNA, 20 nt, Human
cuggcuccguccaggagccu

SEQ ID NO: 1461742 - RNA, 13 nt, Human
cucugcagguccc

SEQ ID NO: 1461743 - RNA, 13 nt, Human
cucuuagcugucu

SEQ ID NO: 1461744 - RNA, 22 nt, Human
cucugcacacccuccagagaca

SEQ ID NO: 1461745 - RNA, 20 nt, Human
cucugcacacccuccagaga

SEQ ID NO: 1461746 - RNA, 16 nt, Human
cucuccccaugauguu

SEQ ID NO: 1461747 - RNA, 19 nt, Human
cucuauggggcauccucuu

SEQ ID NO: 1461748 - RNA, 19 nt, Human
cucucugugggcuggcagu

SEQ ID NO: 1461749 - RNA, 23 nt, Human
cucucuuauugccucacuucagg

SEQ ID NO: 1461750 - RNA, 16 nt, Human
cucguggacaccugcc

SEQ ID NO: 1461751 - RNA, 15 nt, Human
cucguggacaccugc

SEQ ID NO: 1461752 - RNA, 20 nt, Human
cucuaugaacucuguuuucu

SEQ ID NO: 1461753 - RNA, 14 nt, Human
cucguggacaccug

SEQ ID NO: 1461754 - RNA, 12 nt, Human
cucguggacacc

SEQ ID NO: 1461755 - RNA, 19 nt, Human
cucccaggagacaguucaa

SEQ ID NO: 1461756 - RNA, 18 nt, Human
cucccaggaacugggcca

SEQ ID NO: 1461757 - RNA, 16 nt, Human
cucccaggagacaguu

SEQ ID NO: 1461758 - RNA, 11 nt, Human
cucccccugcc

SEQ ID NO: 1461759 - RNA, 14 nt, Human
cucaugugacucuu

SEQ ID NO: 1461760 - RNA, 14 nt, Human
cucaugaauguaaa

SEQ ID NO: 1461761 - RNA, 16 nt, Human
cuccugucucccuccu

SEQ ID NO: 1461762 - RNA, 21 nt, Human
cuccuugguucuugaggggac

SEQ ID NO: 1461763 - RNA, 22 nt, Human
cuccucugcccgggagcucagg

SEQ ID NO: 1461764 - RNA, 24 nt, Human
cuccucugcccgggagcucaggaa

SEQ ID NO: 1461765 - RNA, 16 nt, Human
cucagccucucgaagu

SEQ ID NO: 1461766 - RNA, 22 nt, Human
cucaggcccccaccuggcucac

SEQ ID NO: 1461767 - RNA, 17 nt, Human
cucaggcugaccacuuu

SEQ ID NO: 1461768 - RNA, 21 nt, Human
cucaccuugugcuggggacag

SEQ ID NO: 1461769 - RNA, 22 nt, Human
cucaccuugugcuggggacagg

SEQ ID NO: 1461770 - RNA, 22 nt, Human
cucacgccuguaaucccagcau

SEQ ID NO: 1461771 - RNA, 15 nt, Human
cucacuaauucauua

SEQ ID NO: 1461772 - RNA, 15 nt, Human
cucagacccuuucuu

SEQ ID NO: 1461773 - RNA, 14 nt, Human
cucagacccuuucu

SEQ ID NO: 1461774 - RNA, 19 nt, Human
cucagacucuaagaaagaa

SEQ ID NO: 1461775 - RNA, 14 nt, Human
cucagacucuaaga

SEQ ID NO: 1461776 - RNA, 18 nt, Human
cucagacucuaagaaaga

SEQ ID NO: 1461777 - RNA, 15 nt, Human
cucagcccugcacca

SEQ ID NO: 1461778 - RNA, 20 nt, Human
cucagcccugcaccaugcug

SEQ ID NO: 1461779 - RNA, 16 nt, Human
cucagcccugcaccau

SEQ ID NO: 1461780 - RNA, 15 nt, Human
cucagugaagaauac

SEQ ID NO: 1461781 - RNA, 18 nt, Human
cucagugaagaauacuuc

SEQ ID NO: 1461782 - RNA, 15 nt, Human
cucaugaauguaaau

SEQ ID NO: 1461783 - RNA, 16 nt, Human
cucaugaauguaaauu

SEQ ID NO: 1461784 - RNA, 22 nt, Human
cucaugaauguaaauuuguacu

SEQ ID NO: 1461785 - RNA, 21 nt, Human
cucaugaauguaaauuuguac

SEQ ID NO: 1461786 - RNA, 16 nt, Human
cucaugcaaaucaauu

SEQ ID NO: 1461787 - RNA, 19 nt, Human
cucaugcaaaucaauuacu

SEQ ID NO: 1461788 - RNA, 20 nt, Human
cucaugcaaaucaauuacug

SEQ ID NO: 1461789 - RNA, 16 nt, Human
cucaaucagucucaga

SEQ ID NO: 1461790 - RNA, 16 nt, Human
cuauguuuuuaaugua

SEQ ID NO: 1461791 - RNA, 14 nt, Human
cuauguuuuuaaug

SEQ ID NO: 1461792 - RNA, 19 nt, Human
cuauguuuugacauuuuua

SEQ ID NO: 1461793 - RNA, 18 nt, Human
cuauguuuugacauuuuu

SEQ ID NO: 1461794 - RNA, 15 nt, Human
cuauguuuuuaaugu

SEQ ID NO: 1461795 - RNA, 18 nt, Human
cuaucucauuuccaagca

SEQ ID NO: 1461796 - RNA, 16 nt, Human
cuauguccuaauaaua

SEQ ID NO: 1461797 - RNA, 19 nt, Human
cuaucagaguugcugcaaa

SEQ ID NO: 1461798 - RNA, 23 nt, Human
cguuaucuaauagggcaauuaau

SEQ ID NO: 1461799 - RNA, 19 nt, Human
cguucaacuuuuccuuuga

SEQ ID NO: 1461800 - RNA, 14 nt, Human
cguguuucugacuc

SEQ ID NO: 1461801 - RNA, 15 nt, Human
cguguuucugacucu

SEQ ID NO: 1461802 - RNA, 11 nt, Human
cuaaagccaaa

SEQ ID NO: 1461803 - RNA, 18 nt, Human
cuaaagccaaacauauau

SEQ ID NO: 1461804 - RNA, 23 nt, Human
cuaaaguaaaaacaaagaaauua

SEQ ID NO: 1461805 - RNA, 13 nt, Human
cgugacacaaaca

SEQ ID NO: 1461806 - RNA, 14 nt, Human
cgugagccaccucg

SEQ ID NO: 1461807 - RNA, 19 nt, Human
cuaaguacacaauaagcaa

SEQ ID NO: 1461808 - RNA, 20 nt, Human
cuaaguacacaauaagcaaa

SEQ ID NO: 1461809 - RNA, 19 nt, Human
cuaaguccaguguuucuuu

SEQ ID NO: 1461810 - RNA, 22 nt, Human
cuaagaaguacauuguuaccuc

SEQ ID NO: 1461811 - RNA, 13 nt, Human
cuaagagaaguag

SEQ ID NO: 1461812 - RNA, 15 nt, Human
cuaagagaaguagaa

SEQ ID NO: 1461813 - RNA, 17 nt, Human
cuaagagaaguagaaau

SEQ ID NO: 1461814 - RNA, 19 nt, Human
cuaagagaaguagaaauca

SEQ ID NO: 1461815 - RNA, 20 nt, Human
cgccacagcccuuuugucuc

SEQ ID NO: 1461816 - RNA, 21 nt, Human
cgccacagcccuuuugucucu

SEQ ID NO: 1461817 - RNA, 19 nt, Human
cgccacagcccuuuugucu

SEQ ID NO: 1461818 - RNA, 17 nt, Human
cgccacagcccuuuugu

SEQ ID NO: 1461819 - RNA, 14 nt, Human
cgccacagcccuuu

SEQ ID NO: 1461820 - RNA, 12 nt, Human
ccuuuucccaac

SEQ ID NO: 1461821 - RNA, 12 nt, Human
ccuuuuccaugc

SEQ ID NO: 1461822 - RNA, 23 nt, Human
ccuuuucccaaaauguugaaaua

SEQ ID NO: 1461823 - RNA, 12 nt, Human
ccuuucccuaag

SEQ ID NO: 1461824 - RNA, 14 nt, Human
cguacugcagccuc

SEQ ID NO: 1461825 - RNA, 15 nt, Human
cguacugcagccucc

SEQ ID NO: 1461826 - RNA, 20 nt, Human
cgguggcucacgccuguaau

SEQ ID NO: 1461827 - RNA, 14 nt, Human
cguaagauuuccuu

SEQ ID NO: 1461828 - RNA, 14 nt, Human
ccuugcauaauggu

SEQ ID NO: 1461829 - RNA, 15 nt, Human
ccuuucccuaagcca

SEQ ID NO: 1461830 - RNA, 17 nt, Human
ccuuucccuaagccagc

SEQ ID NO: 1461831 - RNA, 15 nt, Human
ccuugcggcuccuca

SEQ ID NO: 1461832 - RNA, 16 nt, Human
ccuugcggcuccucag

SEQ ID NO: 1461833 - RNA, 17 nt, Human
ccuugcggcuccucagg

SEQ ID NO: 1461834 - RNA, 18 nt, Human
ccuugcggcuccucaggg

SEQ ID NO: 1461835 - RNA, 19 nt, Human
ccuugcggcuccucaggga

SEQ ID NO: 1461836 - RNA, 20 nt, Human
ccuugcggcuccucagggac

SEQ ID NO: 1461837 - RNA, 13 nt, Human
ccuucccugcugu

SEQ ID NO: 1461838 - RNA, 19 nt, Human
ccuucucuguucauuuccu

SEQ ID NO: 1461839 - RNA, 21 nt, Human
ccuucucuguucauuuccuca

SEQ ID NO: 1461840 - RNA, 13 nt, Human
ccuucucuguuca

SEQ ID NO: 1461841 - RNA, 17 nt, Human
ccuucucuguucauuuc

SEQ ID NO: 1461842 - RNA, 18 nt, Human
ccuucucuguucauuucc

SEQ ID NO: 1461843 - RNA, 18 nt, Human
ccugcugcugccugccug

SEQ ID NO: 1461844 - RNA, 17 nt, Human
ccugcugcugccugccu

SEQ ID NO: 1461845 - RNA, 16 nt, Human
ccugcugcugccugcc

SEQ ID NO: 1461846 - RNA, 15 nt, Human
ccugcugcugccugc

SEQ ID NO: 1461847 - RNA, 14 nt, Human
ccugcugcccuccc

SEQ ID NO: 1461848 - RNA, 17 nt, Human
ccuguuaccuacuuuga

SEQ ID NO: 1461849 - RNA, 18 nt, Human
ccuguuaccuacuuugac

SEQ ID NO: 1461850 - RNA, 19 nt, Human
ccuguuaccuacuuugacu

SEQ ID NO: 1461851 - RNA, 17 nt, Human
ccuguugagcaucacag

SEQ ID NO: 1461852 - RNA, 12 nt, Human
ccuguugggaga

SEQ ID NO: 1461853 - RNA, 19 nt, Human
ccuuagcuggcauuacagc

SEQ ID NO: 1461854 - RNA, 22 nt, Human
ccuuagcuggcauuacagcugg

SEQ ID NO: 1461855 - RNA, 17 nt, Human
ccuuaugacugccaaga

SEQ ID NO: 1461856 - RNA, 16 nt, Human
ccuuaucgaaacucau

SEQ ID NO: 1461857 - RNA, 16 nt, Human
ccuuaggccucugaga

SEQ ID NO: 1461858 - RNA, 14 nt, Human
ccuuaggccucuga

SEQ ID NO: 1461859 - RNA, 18 nt, Human
ccuuauugcuguccugga

SEQ ID NO: 1461860 - RNA, 14 nt, Human
ccagagacuuuagg

SEQ ID NO: 1461861 - RNA, 23 nt, Human
ccagacuucccacggcuccucga

SEQ ID NO: 1461862 - RNA, 22 nt, Human
ccagacugcuuccaauuuucug

SEQ ID NO: 1461863 - RNA, 18 nt, Human
ccagagaaaaagggaggg

SEQ ID NO: 1461864 - RNA, 18 nt, Human
ccagaugcacaucccugg

SEQ ID NO: 1461865 - RNA, 15 nt, Human
ccacucuuucuuuca

SEQ ID NO: 1461866 - RNA, 20 nt, Human
ccacuuugcacagcucuccg

SEQ ID NO: 1461867 - RNA, 16 nt, Human
ccagacuacuugggag

SEQ ID NO: 1461868 - RNA, 18 nt, Human
ccaggcaggagcccuucu

SEQ ID NO: 1461869 - RNA, 12 nt, Human
ccaggcagccuc

SEQ ID NO: 1461870 - RNA, 16 nt, Human
ccaggcagccucuggg

SEQ ID NO: 1461871 - RNA, 17 nt, Human
ccaggcagccucugggg

SEQ ID NO: 1461872 - RNA, 14 nt, Human
ccaggcagccucug

SEQ ID NO: 1461873 - RNA, 15 nt, Human
ccaggauacuggcac

SEQ ID NO: 1461874 - RNA, 17 nt, Human
ccaggauacuggcacag

SEQ ID NO: 1461875 - RNA, 15 nt, Human
ccaggggccaugaau

SEQ ID NO: 1461876 - RNA, 17 nt, Human
ccccagccauccagggg

SEQ ID NO: 1461877 - RNA, 16 nt, Human
ccccauucuuccuagu

SEQ ID NO: 1461878 - RNA, 21 nt, Human
ccccauucuuccuaguuuucu

SEQ ID NO: 1461879 - RNA, 23 nt, Human
ccccauucuuccuaguuuucucc

SEQ ID NO: 1461880 - RNA, 20 nt, Human
cccauucuuccuaguuuucu

SEQ ID NO: 1461881 - RNA, 22 nt, Human
cccccugugccuugucacgcca

SEQ ID NO: 1461882 - RNA, 21 nt, Human
ccccgcguggaacucgugucu

SEQ ID NO: 1461883 - RNA, 12 nt, Human
cccauucuuccu

SEQ ID NO: 1461884 - RNA, 21 nt, Human
cccauucuuccuaguuuucuc

SEQ ID NO: 1461885 - RNA, 23 nt, Human
cccagcuggggccaggcuggguc

SEQ ID NO: 1461886 - RNA, 22 nt, Human
cccagcuggggccaggcugggu

SEQ ID NO: 1461887 - RNA, 14 nt, Human
cccauccaguucau

SEQ ID NO: 1461888 - RNA, 21 nt, Human
cccauccaguucaugagaauc

SEQ ID NO: 1461889 - RNA, 20 nt, Human
ccauugugccuaaguccagu

SEQ ID NO: 1461890 - RNA, 15 nt, Human
ccauugucucagagc

SEQ ID NO: 1461891 - RNA, 19 nt, Human
cccaagcuguuuucuucua

SEQ ID NO: 1461892 - RNA, 20 nt, Human
cccaagcaccugggauuaca

SEQ ID NO: 1461893 - RNA, 18 nt, Human
cccaccauuuggcauccc

SEQ ID NO: 1461894 - RNA, 23 nt, Human
cccaccauuuggcaucccugggc

SEQ ID NO: 1461895 - RNA, 20 nt, Human
cccaccauuuggcaucccug

SEQ ID NO: 1461896 - RNA, 23 nt, Human
cccacuguacuugcucuugaugc

SEQ ID NO: 1461897 - RNA, 19 nt, Human
cccacuguaucuaggcaac

SEQ ID NO: 1461898 - RNA, 19 nt, Human
cccacuguacuugcucuug

SEQ ID NO: 1461899 - RNA, 18 nt, Human
cccacuguacuugcucuu

SEQ ID NO: 1461900 - RNA, 18 nt, Human
ccaugggcacugugggua

SEQ ID NO: 1461901 - RNA, 21 nt, Human
ccaugagcuccuuaaggcucu

SEQ ID NO: 1461902 - RNA, 16 nt, Human
ccauggguagccuggg

SEQ ID NO: 1461903 - RNA, 23 nt, Human
ccugccuggacuuggccccugcc

SEQ ID NO: 1461904 - RNA, 19 nt, Human
ccugccuggaccagccucu

SEQ ID NO: 1461905 - RNA, 12 nt, Human
ccugccuggacc

SEQ ID NO: 1461906 - RNA, 14 nt, Human
ccugccucuuaaau

SEQ ID NO: 1461907 - RNA, 21 nt, Human
ccugccucuuaaauaaaccuu

SEQ ID NO: 1461908 - RNA, 21 nt, Human
ccugccucucugcaggucccu

SEQ ID NO: 1461909 - RNA, 20 nt, Human
ccugccucucugcagguccc

SEQ ID NO: 1461910 - RNA, 23 nt, Human
ccugccuccugccggcuccuugg

SEQ ID NO: 1461911 - RNA, 13 nt, Human
ccugcugcccucc

SEQ ID NO: 1461912 - RNA, 12 nt, Human
ccugcugcccuc

SEQ ID NO: 1461913 - RNA, 11 nt, Human
ccugcugcccu

SEQ ID NO: 1461914 - RNA, 18 nt, Human
ccugcugcccucccccuc

SEQ ID NO: 1461915 - RNA, 17 nt, Human
ccugccucucugcaggu

SEQ ID NO: 1461916 - RNA, 19 nt, Human
ccugacuagggagccaugu

SEQ ID NO: 1461917 - RNA, 16 nt, Human
ccugcagacucacugu

SEQ ID NO: 1461918 - RNA, 23 nt, Human
ccucuuggggaguuuaggguggg

SEQ ID NO: 1461919 - RNA, 22 nt, Human
ccucuuggggaguuuagggugg

SEQ ID NO: 1461920 - RNA, 19 nt, Human
ccucgccggaucugaggga

SEQ ID NO: 1461921 - RNA, 18 nt, Human
ccucgccggaucugaggg

SEQ ID NO: 1461922 - RNA, 20 nt, Human
ccucucgcuccucaaccccu

SEQ ID NO: 1461923 - RNA, 23 nt, Human
ccucucgcuccucaaccccuccc

SEQ ID NO: 1461924 - RNA, 17 nt, Human
ccucucugcaggucccu

SEQ ID NO: 1461925 - RNA, 16 nt, Human
ccucucugcagguccc

SEQ ID NO: 1461926 - RNA, 23 nt, Human
ccucucguaagauuuccuucuuu

SEQ ID NO: 1461927 - RNA, 22 nt, Human
ccucucgcuccucaaccccucc

SEQ ID NO: 1461928 - RNA, 19 nt, Human
ccucucguaagauuuccuu

SEQ ID NO: 1461929 - RNA, 22 nt, Human
ccucucguaagauuuccuucuu

SEQ ID NO: 1461930 - RNA, 19 nt, Human
ccucucugcaggucccuaa

SEQ ID NO: 1461931 - RNA, 18 nt, Human
ccucucugcaggucccua

SEQ ID NO: 1461932 - RNA, 20 nt, Human
ccucucugcaggucccuaau

SEQ ID NO: 1461933 - RNA, 21 nt, Human
ccucugcccgggagcucagga

SEQ ID NO: 1461934 - RNA, 22 nt, Human
ccucugcccgggagcucaggaa

SEQ ID NO: 1461935 - RNA, 15 nt, Human
ccucugcccuuccug

SEQ ID NO: 1461936 - RNA, 19 nt, Human
ccucugcccuuccugcagg

SEQ ID NO: 1461937 - RNA, 18 nt, Human
ccuccguccaggagccug

SEQ ID NO: 1461938 - RNA, 15 nt, Human
ccuccuuucuggcuu

SEQ ID NO: 1461939 - RNA, 12 nt, Human
ccucccuggaug

SEQ ID NO: 1461940 - RNA, 15 nt, Human
ccucaugaauguaaa

SEQ ID NO: 1461941 - RNA, 16 nt, Human
ccucaugaauguaaau

SEQ ID NO: 1461942 - RNA, 17 nt, Human
ccucaugaauguaaauu

SEQ ID NO: 1461943 - RNA, 19 nt, Human
ccucaugaauguaaauuug

SEQ ID NO: 1461944 - RNA, 20 nt, Human
ccucaugaauguaaauuugu

SEQ ID NO: 1461945 - RNA, 23 nt, Human
ccucaugaauguaaauuuguacu

SEQ ID NO: 1461946 - RNA, 22 nt, Human
ccucaugaauguaaauuuguac

SEQ ID NO: 1461947 - RNA, 13 nt, Human
ccucaugaaugua

SEQ ID NO: 1461948 - RNA, 22 nt, Human
ccucaggcaaucugcccgccug

SEQ ID NO: 1461949 - RNA, 21 nt, Human
ccuagcgcuaucucccugccu

SEQ ID NO: 1461950 - RNA, 21 nt, Human
ccuagcugugaccucuccccu

SEQ ID NO: 1461951 - RNA, 17 nt, Human
ccuagcuggcucuguga

SEQ ID NO: 1461952 - RNA, 15 nt, Human
ccuagcuggcucugu

SEQ ID NO: 1461953 - RNA, 14 nt, Human
ccuagcuggcucug

SEQ ID NO: 1461954 - RNA, 13 nt, Human
ccuagcuggcucu

SEQ ID NO: 1461955 - RNA, 18 nt, Human
cccugcccugccaccugu

SEQ ID NO: 1461956 - RNA, 17 nt, Human
cccugcccugccaccug

SEQ ID NO: 1461957 - RNA, 15 nt, Human
cccugcccugccacc

SEQ ID NO: 1461958 - RNA, 20 nt, Human
cccuggauuuuuaccagucu

SEQ ID NO: 1461959 - RNA, 24 nt, Human
cccuggauuuuuaccagucucaca

SEQ ID NO: 1461960 - RNA, 16 nt, Human
cccuggauuuuuacca

SEQ ID NO: 1461961 - RNA, 11 nt, Human
cccugagcuga

SEQ ID NO: 1461962 - RNA, 14 nt, Human
cccugagcugacca

SEQ ID NO: 1461963 - RNA, 20 nt, Human
cccugaauuuaaauagcuuu

SEQ ID NO: 1461964 - RNA, 14 nt, Human
cccugaacaagaau

SEQ ID NO: 1461965 - RNA, 17 nt, Human
cccuccucuccaccauc

SEQ ID NO: 1461966 - RNA, 16 nt, Human
ccuaauccccuucucc

SEQ ID NO: 1461967 - RNA, 18 nt, Human
ccuaauccccuucucccc

SEQ ID NO: 1461968 - RNA, 22 nt, Human
ccuaaugacaucaccacaguuu

SEQ ID NO: 1461969 - RNA, 20 nt, Human
ccuagcccucucacauuuau

SEQ ID NO: 1461970 - RNA, 13 nt, Human
ccuagcccucuca

SEQ ID NO: 1461971 - RNA, 23 nt, Human
ccgaaggugaggagcuugaaacc

SEQ ID NO: 1461972 - RNA, 19 nt, Human
ccgaaggaaaagggcuuuc

SEQ ID NO: 1461973 - RNA, 15 nt, Human
ccgaaaaucauauaa

SEQ ID NO: 1461974 - RNA, 17 nt, Human
caucagaaacacccuca

SEQ ID NO: 1461975 - RNA, 19 nt, Human
caucagaaacacccucaca

SEQ ID NO: 1461976 - RNA, 19 nt, Human
caucacuuguacaaaauaa

SEQ ID NO: 1461977 - RNA, 16 nt, Human
caucuggauuccagag

SEQ ID NO: 1461978 - RNA, 20 nt, Human
caucuggcaacaucuuuauc

SEQ ID NO: 1461979 - RNA, 12 nt, Human
cauccugcaggc

SEQ ID NO: 1461980 - RNA, 15 nt, Human
cauccucuuuuucca

SEQ ID NO: 1461981 - RNA, 23 nt, Human
caucccacucacaacagcugccu

SEQ ID NO: 1461982 - RNA, 23 nt, Human
caucccaaaaucauaagauauuu

SEQ ID NO: 1461983 - RNA, 16 nt, Human
cauccauucuccugag

SEQ ID NO: 1461984 - RNA, 21 nt, Human
cauauuauuuuauguugcaua

SEQ ID NO: 1461985 - RNA, 16 nt, Human
cauagguuuaauaauu

SEQ ID NO: 1461986 - RNA, 17 nt, Human
cauagguagaauguaaa

SEQ ID NO: 1461987 - RNA, 23 nt, Human
cauagguagaauguaaagcuugu

SEQ ID NO: 1461988 - RNA, 18 nt, Human
cauaauuauuauuuggcc

SEQ ID NO: 1461989 - RNA, 14 nt, Human
cauaauucacucug

SEQ ID NO: 1461990 - RNA, 17 nt, Human
cauaauucacucugagu

SEQ ID NO: 1461991 - RNA, 21 nt, Human
cauaauucacucugaguguuu

SEQ ID NO: 1461992 - RNA, 23 nt, Human
cauaauucacucugaguguuuua

SEQ ID NO: 1461993 - RNA, 21 nt, Human
cauaauuauccaggaagggaa

SEQ ID NO: 1461994 - RNA, 12 nt, Human
caguuuucauaa

SEQ ID NO: 1461995 - RNA, 19 nt, Human
caguuuuccuaugcuuuga

SEQ ID NO: 1461996 - RNA, 19 nt, Human
caguuuauuugaaccaaua

SEQ ID NO: 1461997 - RNA, 18 nt, Human
caguuuauuugaaccaau

SEQ ID NO: 1461998 - RNA, 14 nt, Human
caguuuauuuguug

SEQ ID NO: 1461999 - RNA, 15 nt, Human
caguucaaagcagga

SEQ ID NO: 1462000 - RNA, 14 nt, Human
caguucaagaaagc

SEQ ID NO: 1462001 - RNA, 22 nt, Human
caguuauuauauuuacaaaugg

SEQ ID NO: 1462002 - RNA, 22 nt, Human
caguuaucuaaguuaauuuaaa

SEQ ID NO: 1462003 - RNA, 22 nt, Human
caguuaugauuuuuuuuucaua

SEQ ID NO: 1462004 - RNA, 17 nt, Human
cagucucuauaccaaua

SEQ ID NO: 1462005 - RNA, 22 nt, Human
cagucucacaugauuccagcca

SEQ ID NO: 1462006 - RNA, 23 nt, Human
cagucucuauaccaauaaaguga

SEQ ID NO: 1462007 - RNA, 22 nt, Human
cagucucuauaccaauaaagug

SEQ ID NO: 1462008 - RNA, 21 nt, Human
cagucucuauaccaauaaagu

SEQ ID NO: 1462009 - RNA, 20 nt, Human
cagucucuauaccaauaaag

SEQ ID NO: 1462010 - RNA, 19 nt, Human
cagucucuauaccaauaaa

SEQ ID NO: 1462011 - RNA, 22 nt, Human
cagucuaaagcugguuuaaugu

SEQ ID NO: 1462012 - RNA, 21 nt, Human
caguuauuauauuuacaaaug

SEQ ID NO: 1462013 - RNA, 17 nt, Human
caguuauuauauuuaca

SEQ ID NO: 1462014 - RNA, 21 nt, Human
caguuauaaguagcaggccaa

SEQ ID NO: 1462015 - RNA, 16 nt, Human
caguuaucuaaguuaa

SEQ ID NO: 1462016 - RNA, 16 nt, Human
cagugauugucuuaau

SEQ ID NO: 1462017 - RNA, 20 nt, Human
cagugauugucuuaauauug

SEQ ID NO: 1462018 - RNA, 15 nt, Human
cagugguaaaaaggc

SEQ ID NO: 1462019 - RNA, 21 nt, Human
ccaacuccagaaagugacaag

SEQ ID NO: 1462020 - RNA, 20 nt, Human
ccaaaucacugaacuuugcu

SEQ ID NO: 1462021 - RNA, 14 nt, Human
ccaacucaccugag

SEQ ID NO: 1462022 - RNA, 15 nt, Human
ccaacuauggccugu

SEQ ID NO: 1462023 - RNA, 14 nt, Human
ccaacuauggccug

SEQ ID NO: 1462024 - RNA, 16 nt, Human
ccaacuauggccugug

SEQ ID NO: 1462025 - RNA, 20 nt, Human
ccaauggaaugugauguuca

SEQ ID NO: 1462026 - RNA, 22 nt, Human
ccaauggaaugugauguucaug

SEQ ID NO: 1462027 - RNA, 17 nt, Human
ccaaggagucacugaga

SEQ ID NO: 1462028 - RNA, 19 nt, Human
ccaaggagucacugagacc

SEQ ID NO: 1462029 - RNA, 22 nt, Human
ccaaggagucacugagaccaag

SEQ ID NO: 1462030 - RNA, 19 nt, Human
ccaaaguccugggauuaca

SEQ ID NO: 1462031 - RNA, 16 nt, Human
cauuggagauguuuag

SEQ ID NO: 1462032 - RNA, 15 nt, Human
cauuuagguuucuga

SEQ ID NO: 1462033 - RNA, 14 nt, Human
cauuuauauugaua

SEQ ID NO: 1462034 - RNA, 20 nt, Human
cauuuauauugauaagaucu

SEQ ID NO: 1462035 - RNA, 21 nt, Human
cauuuauauugauaagaucuu

SEQ ID NO: 1462036 - RNA, 12 nt, Human
ccaaaaaacuac

SEQ ID NO: 1462037 - RNA, 19 nt, Human
ccaaaaaaaaauacaugcu

SEQ ID NO: 1462038 - RNA, 17 nt, Human
ccaaaaguuacauguuu

SEQ ID NO: 1462039 - RNA, 15 nt, Human
ccaaaagcuuuuuau

SEQ ID NO: 1462040 - RNA, 23 nt, Human
ccaaaagauugcugaaauuuuau

SEQ ID NO: 1462041 - RNA, 17 nt, Human
cauuuguauaaaauaau

SEQ ID NO: 1462042 - RNA, 14 nt, Human
cauuuguauaaaau

SEQ ID NO: 1462043 - RNA, 16 nt, Human
cauuuguauaaaauaa

SEQ ID NO: 1462044 - RNA, 15 nt, Human
cauuuguuucuacuu

SEQ ID NO: 1462045 - RNA, 16 nt, Human
cauuuguuggaaugaa

SEQ ID NO: 1462046 - RNA, 14 nt, Human
cauuuggguccagg

SEQ ID NO: 1462047 - RNA, 15 nt, Human
cauuuggguccagga

SEQ ID NO: 1462048 - RNA, 16 nt, Human
cauuuggguccaggag

SEQ ID NO: 1462049 - RNA, 17 nt, Human
cauuuggguccaggagg

SEQ ID NO: 1462050 - RNA, 18 nt, Human
cauuuggguccaggagga

SEQ ID NO: 1462051 - RNA, 16 nt, Human
cauuuggcaucccugg

SEQ ID NO: 1462052 - RNA, 20 nt, Human
cauuuggcaucccugggccu

SEQ ID NO: 1462053 - RNA, 18 nt, Human
cauuuggcaucccugggc

SEQ ID NO: 1462054 - RNA, 16 nt, Human
cauuuaugaagcaagc

SEQ ID NO: 1462055 - RNA, 17 nt, Human
cauuuaugagcucuuca

SEQ ID NO: 1462056 - RNA, 20 nt, Human
cauuuaugagcucuucaugu

SEQ ID NO: 1462057 - RNA, 23 nt, Human
cauuuaugagcucuucauguuuc

SEQ ID NO: 1462058 - RNA, 21 nt, Human
caugaauauuuaguguucaua

SEQ ID NO: 1462059 - RNA, 13 nt, Human
caugaauguaaau

SEQ ID NO: 1462060 - RNA, 14 nt, Human
caugaauguaaauu

SEQ ID NO: 1462061 - RNA, 16 nt, Human
caugaauguaaauuug

SEQ ID NO: 1462062 - RNA, 17 nt, Human
caugaauguaaauuugu

SEQ ID NO: 1462063 - RNA, 22 nt, Human
caugaauguaaauuuguacuau

SEQ ID NO: 1462064 - RNA, 19 nt, Human
caugaauguaaauuuguac

SEQ ID NO: 1462065 - RNA, 22 nt, Human
caugaugccucugucuucugga

SEQ ID NO: 1462066 - RNA, 23 nt, Human
caugaugccucugucuucuggac

SEQ ID NO: 1462067 - RNA, 16 nt, Human
caugaugccucugucu

SEQ ID NO: 1462068 - RNA, 17 nt, Human
caugaugccucugucuu

SEQ ID NO: 1462069 - RNA, 20 nt, Human
caugaugccucugucuucug

SEQ ID NO: 1462070 - RNA, 16 nt, Human
cauggcccugccaugc

SEQ ID NO: 1462071 - RNA, 18 nt, Human
cauuauuacuuuugcugu

SEQ ID NO: 1462072 - RNA, 23 nt, Human
cauuauuacuuuugcuguaaugu

SEQ ID NO: 1462073 - RNA, 12 nt, Human
cauuauuacuuu

SEQ ID NO: 1462074 - RNA, 16 nt, Human
cauuauuacuuuugcu

SEQ ID NO: 1462075 - RNA, 17 nt, Human
cagauuucugaggaaau

SEQ ID NO: 1462076 - RNA, 15 nt, Human
cagauuucugaggaa

SEQ ID NO: 1462077 - RNA, 14 nt, Human
cagauuucugagga

SEQ ID NO: 1462078 - RNA, 14 nt, Human
cagauuuccagccu

SEQ ID NO: 1462079 - RNA, 14 nt, Human
cagcaccagaaugu

SEQ ID NO: 1462080 - RNA, 13 nt, Human
cagauuuaugcau

SEQ ID NO: 1462081 - RNA, 14 nt, Human
cagauugucagcuc

SEQ ID NO: 1462082 - RNA, 13 nt, Human
cagauuguuugca

SEQ ID NO: 1462083 - RNA, 16 nt, Human
cagccagaccagcagg

SEQ ID NO: 1462084 - RNA, 14 nt, Human
cagauaugauucaa

SEQ ID NO: 1462085 - RNA, 15 nt, Human
cagauaugauucaaa

SEQ ID NO: 1462086 - RNA, 22 nt, Human
cagagcugauggagaaggaagg

SEQ ID NO: 1462087 - RNA, 19 nt, Human
cagagcugauggagaagga

SEQ ID NO: 1462088 - RNA, 21 nt, Human
cagagcugauggagaaggaag

SEQ ID NO: 1462089 - RNA, 20 nt, Human
cagagcugauggagaaggaa

SEQ ID NO: 1462090 - RNA, 17 nt, Human
cagagacuuuagggggu

SEQ ID NO: 1462091 - RNA, 11 nt, Human
cagacagauga

SEQ ID NO: 1462092 - RNA, 17 nt, Human
cagacagaugaggcuuu

SEQ ID NO: 1462093 - RNA, 18 nt, Human
cagacagaugaggcuuuc

SEQ ID NO: 1462094 - RNA, 23 nt, Human
cagacuccuucaacaauucuaaa

SEQ ID NO: 1462095 - RNA, 18 nt, Human
cagacuccuucaacaauu

SEQ ID NO: 1462096 - RNA, 14 nt, Human
cagacucuaagaaa

SEQ ID NO: 1462097 - RNA, 17 nt, Human
cagacucuaagaaagaa

SEQ ID NO: 1462098 - RNA, 18 nt, Human
cagacucuaagaaagaac

SEQ ID NO: 1462099 - RNA, 15 nt, Human
cagacucuuuaugcu

SEQ ID NO: 1462100 - RNA, 19 nt, Human
cagacucuuuaugcuugca

SEQ ID NO: 1462101 - RNA, 18 nt, Human
cagacucuuuaugcuugc

SEQ ID NO: 1462102 - RNA, 14 nt, Human
cagacugcuuccaa

SEQ ID NO: 1462103 - RNA, 20 nt, Human
cagacugcuuccaauuuucu

SEQ ID NO: 1462104 - RNA, 18 nt, Human
cagacugcgauuuguccc

SEQ ID NO: 1462105 - RNA, 22 nt, Human
cagggagacuggguaggaaaga

SEQ ID NO: 1462106 - RNA, 15 nt, Human
cagggcggggguggc

SEQ ID NO: 1462107 - RNA, 20 nt, Human
caggccggcuugccacaccc

SEQ ID NO: 1462108 - RNA, 13 nt, Human
caggccgggaaaa

SEQ ID NO: 1462109 - RNA, 13 nt, Human
caggcuaauuuuu

SEQ ID NO: 1462110 - RNA, 22 nt, Human
caggcuaauuuuuuuguauuuu

SEQ ID NO: 1462111 - RNA, 18 nt, Human
caggcgugagccaccucg

SEQ ID NO: 1462112 - RNA, 17 nt, Human
caggccuuugagcucag

SEQ ID NO: 1462113 - RNA, 16 nt, Human
caggccuuugagcuca

SEQ ID NO: 1462114 - RNA, 17 nt, Human
caggccgugacgucugg

SEQ ID NO: 1462115 - RNA, 18 nt, Human
caggccgugacgucuggg

SEQ ID NO: 1462116 - RNA, 19 nt, Human
caggccgugacgucugggu

SEQ ID NO: 1462117 - RNA, 20 nt, Human
caggccgugacgucugggug

SEQ ID NO: 1462118 - RNA, 19 nt, Human
caggaggacccagggcucu

SEQ ID NO: 1462119 - RNA, 15 nt, Human
caggaggacccaggg

SEQ ID NO: 1462120 - RNA, 16 nt, Human
caggaggacccagggc

SEQ ID NO: 1462121 - RNA, 17 nt, Human
caggaggacccagggcu

SEQ ID NO: 1462122 - RNA, 18 nt, Human
caggaggacccagggcuc

SEQ ID NO: 1462123 - RNA, 20 nt, Human
caggaggacccagggcucug

SEQ ID NO: 1462124 - RNA, 20 nt, Human
cagcuguaugauucccagcc

SEQ ID NO: 1462125 - RNA, 18 nt, Human
cagcugucaucaauuaaa

SEQ ID NO: 1462126 - RNA, 14 nt, Human
cagcuuauugucua

SEQ ID NO: 1462127 - RNA, 20 nt, Human
cagcuuauugucuagugaaa

SEQ ID NO: 1462128 - RNA, 16 nt, Human
caggaaagagaacuuc

SEQ ID NO: 1462129 - RNA, 20 nt, Human
caggaaagagaacuuccaga

SEQ ID NO: 1462130 - RNA, 17 nt, Human
cagcugagagaaaauaa

SEQ ID NO: 1462131 - RNA, 14 nt, Human
cagcggcaucaggc

SEQ ID NO: 1462132 - RNA, 13 nt, Human
caccugcccugcc

SEQ ID NO: 1462133 - RNA, 12 nt, Human
caccugcccugc

SEQ ID NO: 1462134 - RNA, 18 nt, Human
caccuaggcuaggguggg

SEQ ID NO: 1462135 - RNA, 19 nt, Human
caccuaggcuagggugggg

SEQ ID NO: 1462136 - RNA, 17 nt, Human
caccuaggcuagggugg

SEQ ID NO: 1462137 - RNA, 20 nt, Human
cacccucguggacaccugcc

SEQ ID NO: 1462138 - RNA, 19 nt, Human
cacccucguggacaccugc

SEQ ID NO: 1462139 - RNA, 18 nt, Human
cacccucguggacaccug

SEQ ID NO: 1462140 - RNA, 17 nt, Human
cacccucguggacaccu

SEQ ID NO: 1462141 - RNA, 16 nt, Human
caccugcccugcccug

SEQ ID NO: 1462142 - RNA, 14 nt, Human
caccugcccugccc

SEQ ID NO: 1462143 - RNA, 23 nt, Human
cacugaagaagcaccaaucauga

SEQ ID NO: 1462144 - RNA, 14 nt, Human
cacuagacaagcca

SEQ ID NO: 1462145 - RNA, 16 nt, Human
cacuagacaagccaga

SEQ ID NO: 1462146 - RNA, 17 nt, Human
cacuagacaagccagaa

SEQ ID NO: 1462147 - RNA, 19 nt, Human
cacuagacaagccagaacu

SEQ ID NO: 1462148 - RNA, 21 nt, Human
cacuagacaagccagaacuug

SEQ ID NO: 1462149 - RNA, 19 nt, Human
cacuagcccaaugaaauga

SEQ ID NO: 1462150 - RNA, 16 nt, Human
cacuagcccaaugaaa

SEQ ID NO: 1462151 - RNA, 14 nt, Human
cacgcuuuccugaa

SEQ ID NO: 1462152 - RNA, 16 nt, Human
cacaugaaguccaagc

SEQ ID NO: 1462153 - RNA, 16 nt, Human
caccaggacuagggcu

SEQ ID NO: 1462154 - RNA, 13 nt, Human
cacccagcaauag

SEQ ID NO: 1462155 - RNA, 22 nt, Human
caccaggauagagacuggaaca

SEQ ID NO: 1462156 - RNA, 13 nt, Human
caccaggcagccu

SEQ ID NO: 1462157 - RNA, 20 nt, Human
cacccagguuggagugcagu

SEQ ID NO: 1462158 - RNA, 20 nt, Human
cacccaggcuggacugcaau

SEQ ID NO: 1462159 - RNA, 16 nt, Human
cacccagcaauagaga

SEQ ID NO: 1462160 - RNA, 21 nt, Human
caaguuccuuggccaugcaga

SEQ ID NO: 1462161 - RNA, 20 nt, Human
caaguuauuuuuaauuuggu

SEQ ID NO: 1462162 - RNA, 18 nt, Human
caaguuccaaguugcuaa

SEQ ID NO: 1462163 - RNA, 16 nt, Human
caaguauuuguuaauu

SEQ ID NO: 1462164 - RNA, 19 nt, Human
caaguauuuguuaauuuag

SEQ ID NO: 1462165 - RNA, 15 nt, Human
caaguaaaaaggcua

SEQ ID NO: 1462166 - RNA, 10 nt, Human
caaguaaaaa

SEQ ID NO: 1462167 - RNA, 14 nt, Human
caaguaacaaaaau

SEQ ID NO: 1462168 - RNA, 17 nt, Human
caaguaacaaaaauaaa

SEQ ID NO: 1462169 - RNA, 17 nt, Human
caaucagccuaguugau

SEQ ID NO: 1462170 - RNA, 12 nt, Human
caauauuuuucu

SEQ ID NO: 1462171 - RNA, 15 nt, Human
caaucaagucuguuu

SEQ ID NO: 1462172 - RNA, 18 nt, Human
caaucaagucuguuuacu

SEQ ID NO: 1462173 - RNA, 17 nt, Human
caauugggagcugccaa

SEQ ID NO: 1462174 - RNA, 20 nt, Human
caauugggagcugccaagag

SEQ ID NO: 1462175 - RNA, 21 nt, Human
caauugggagcugccaagagu

SEQ ID NO: 1462176 - RNA, 11 nt, Human
caauuucaagu

SEQ ID NO: 1462177 - RNA, 19 nt, Human
caacuauauuguuugcuaa

SEQ ID NO: 1462178 - RNA, 19 nt, Human
caacuaucucauuuccaag

SEQ ID NO: 1462179 - RNA, 13 nt, Human
caacuauggccug

SEQ ID NO: 1462180 - RNA, 14 nt, Human
caacuauggccugu

SEQ ID NO: 1462181 - RNA, 14 nt, Human
caacuauuuucaga

SEQ ID NO: 1462182 - RNA, 12 nt, Human
caacuccagaaa

SEQ ID NO: 1462183 - RNA, 21 nt, Human
caacuauuuucagaugugaac

SEQ ID NO: 1462184 - RNA, 17 nt, Human
caacuauuuucagaugu

SEQ ID NO: 1462185 - RNA, 22 nt, Human
caagaauaaucacgcuuuccug

SEQ ID NO: 1462186 - RNA, 23 nt, Human
caagaauaaucacgcuuuccuga

SEQ ID NO: 1462187 - RNA, 21 nt, Human
caagaauaaucacgcuuuccu

SEQ ID NO: 1462188 - RNA, 14 nt, Human
caagacaugucugu

SEQ ID NO: 1462189 - RNA, 15 nt, Human
caagacaugucuguu

SEQ ID NO: 1462190 - RNA, 17 nt, Human
caagacaugucuguucu

SEQ ID NO: 1462191 - RNA, 19 nt, Human
caagcaaaugugaaucauu

SEQ ID NO: 1462192 - RNA, 17 nt, Human
caagcaaaugugaauca

SEQ ID NO: 1462193 - RNA, 15 nt, Human
caagcaaaugugaau

SEQ ID NO: 1462194 - RNA, 14 nt, Human
caagcaauccuccc

SEQ ID NO: 1462195 - RNA, 14 nt, Human
caagcaaguauuag

SEQ ID NO: 1462196 - RNA, 19 nt, Human
auuuuuauauuugaaauau

SEQ ID NO: 1462197 - RNA, 15 nt, Human
auuuuuaaacaagua

SEQ ID NO: 1462198 - RNA, 13 nt, Human
auuuuuaaacaag

SEQ ID NO: 1462199 - RNA, 14 nt, Human
auuuuuaaacaagu

SEQ ID NO: 1462200 - RNA, 17 nt, Human
auuuuuaugccaccuga

SEQ ID NO: 1462201 - RNA, 16 nt, Human
auuuuuaaaacccauu

SEQ ID NO: 1462202 - RNA, 17 nt, Human
auuuuuaaaacccauuu

SEQ ID NO: 1462203 - RNA, 15 nt, Human
auuuuuuucugaauu

SEQ ID NO: 1462204 - RNA, 16 nt, Human
auuuuuuucugaaauu

SEQ ID NO: 1462205 - RNA, 17 nt, Human
auuuuuuucugaaauuu

SEQ ID NO: 1462206 - RNA, 19 nt, Human
auuuuuuucccaauugaga

SEQ ID NO: 1462207 - RNA, 18 nt, Human
auuuuuauuuuugcugag

SEQ ID NO: 1462208 - RNA, 14 nt, Human
auuuuuuuuacauu

SEQ ID NO: 1462209 - RNA, 14 nt, Human
auuuuuuuuaacau

SEQ ID NO: 1462210 - RNA, 18 nt, Human
auuuuuuuuaaguauuua

SEQ ID NO: 1462211 - RNA, 18 nt, Human
auuuuuuuuaacauuccu

SEQ ID NO: 1462212 - RNA, 21 nt, Human
auuuuuuuuucauacacuuau

SEQ ID NO: 1462213 - RNA, 19 nt, Human
auuuuuuuuucauacacuu

SEQ ID NO: 1462214 - RNA, 20 nt, Human
auuuuuuuuucauacacuua

SEQ ID NO: 1462215 - RNA, 22 nt, Human
caaaagauugcugaaauuuuau

SEQ ID NO: 1462216 - RNA, 14 nt, Human
auuuuuuuuucaua

SEQ ID NO: 1462217 - RNA, 16 nt, Human
auuuuuuuuucauaca

SEQ ID NO: 1462218 - RNA, 19 nt, Human
caaaagcccauucauucca

SEQ ID NO: 1462219 - RNA, 15 nt, Human
caaaagcccauucau

SEQ ID NO: 1462220 - RNA, 21 nt, Human
caaacauauauauacuauuaa

SEQ ID NO: 1462221 - RNA, 14 nt, Human
caaaccaggacccu

SEQ ID NO: 1462222 - RNA, 20 nt, Human
caaaccacuuuuugcagcuu

SEQ ID NO: 1462223 - RNA, 15 nt, Human
auuuugaaaaacugc

SEQ ID NO: 1462224 - RNA, 22 nt, Human
auuuucuggauuccccaucuca

SEQ ID NO: 1462225 - RNA, 13 nt, Human
auuuugaaaaacu

SEQ ID NO: 1462226 - RNA, 18 nt, Human
auuuucuggaauacauga

SEQ ID NO: 1462227 - RNA, 19 nt, Human
auuuucuggaauacaugaa

SEQ ID NO: 1462228 - RNA, 22 nt, Human
auuuucuggaauacaugaaaua

SEQ ID NO: 1462229 - RNA, 15 nt, Human
auuuucugcuacuuu

SEQ ID NO: 1462230 - RNA, 23 nt, Human
auuuucucccuggauuuuuacca

SEQ ID NO: 1462231 - RNA, 22 nt, Human
auuuucucccuggauuuuuacc

SEQ ID NO: 1462232 - RNA, 18 nt, Human
auuuucucccuggauuuu

SEQ ID NO: 1462233 - RNA, 14 nt, Human
auuuucucccugga

SEQ ID NO: 1462234 - RNA, 19 nt, Human
auuuucuauaauuuaaaua

SEQ ID NO: 1462235 - RNA, 18 nt, Human
auuuucuauaauuuaaau

SEQ ID NO: 1462236 - RNA, 17 nt, Human
auuuucuauaauuuaaa

SEQ ID NO: 1462237 - RNA, 19 nt, Human
auuuguucuauagcuuuuc

SEQ ID NO: 1462238 - RNA, 23 nt, Human
auuuguuaauuuagaaaacuuua

SEQ ID NO: 1462239 - RNA, 19 nt, Human
auuuguuaauuuagaaaac

SEQ ID NO: 1462240 - RNA, 14 nt, Human
auuuguguugaaga

SEQ ID NO: 1462241 - RNA, 15 nt, Human
auuuguguugaagag

SEQ ID NO: 1462242 - RNA, 21 nt, Human
auuugcagcugagagaaaaua

SEQ ID NO: 1462243 - RNA, 18 nt, Human
auuuguguugaagagguu

SEQ ID NO: 1462244 - RNA, 22 nt, Human
auuuguguugaagagguuuuaa

SEQ ID NO: 1462245 - RNA, 20 nt, Human
auuuugaaaucaugaagaua

SEQ ID NO: 1462246 - RNA, 16 nt, Human
auugagguaaguuuuu

SEQ ID NO: 1462247 - RNA, 14 nt, Human
auugagguaaguuu

SEQ ID NO: 1462248 - RNA, 17 nt, Human
auugauaagaucuuuua

SEQ ID NO: 1462249 - RNA, 22 nt, Human
auuuaauagguuuggacaaaau

SEQ ID NO: 1462250 - RNA, 17 nt, Human
auuuaauagcaaagaau

SEQ ID NO: 1462251 - RNA, 18 nt, Human
auuuaauagcaaagaauu

SEQ ID NO: 1462252 - RNA, 20 nt, Human
auuuaauagcaaagaauuga

SEQ ID NO: 1462253 - RNA, 15 nt, Human
auuucaccuguaaac

SEQ ID NO: 1462254 - RNA, 16 nt, Human
auuucaccuguaaacc

SEQ ID NO: 1462255 - RNA, 18 nt, Human
auuucaccuguaaaccug

SEQ ID NO: 1462256 - RNA, 19 nt, Human
auuucaccuguaaaccuga

SEQ ID NO: 1462257 - RNA, 14 nt, Human
auuucaccuguaaa

SEQ ID NO: 1462258 - RNA, 18 nt, Human
auuuauccugaaauuuca

SEQ ID NO: 1462259 - RNA, 19 nt, Human
auuuauccugaaauuucag

SEQ ID NO: 1462260 - RNA, 20 nt, Human
auuuauccugaaauuucaga

SEQ ID NO: 1462261 - RNA, 21 nt, Human
auuuauccugaaauuucagau

SEQ ID NO: 1462262 - RNA, 17 nt, Human
auuuaucgcagaccuuu

SEQ ID NO: 1462263 - RNA, 19 nt, Human
auuucacaacagccugaca

SEQ ID NO: 1462264 - RNA, 14 nt, Human
auuucuuaaacacu

SEQ ID NO: 1462265 - RNA, 20 nt, Human
auuaaauuuuuuuuacauuu

SEQ ID NO: 1462266 - RNA, 19 nt, Human
auuaaauuuuuuuuacauu

SEQ ID NO: 1462267 - RNA, 18 nt, Human
auuaaauuuuuuuuacau

SEQ ID NO: 1462268 - RNA, 17 nt, Human
auuaaauuuuuuuuaca

SEQ ID NO: 1462269 - RNA, 21 nt, Human
auuaacaugaauauuuagugu

SEQ ID NO: 1462270 - RNA, 12 nt, Human
auuaacauaccu

SEQ ID NO: 1462271 - RNA, 23 nt, Human
auuaacauaccuaagaaguacau

SEQ ID NO: 1462272 - RNA, 24 nt, Human
auuaacauaccuaagaaguacauu

SEQ ID NO: 1462273 - RNA, 19 nt, Human
auuaacaauuaggcagacu

SEQ ID NO: 1462274 - RNA, 16 nt, Human
auuaauuuaugcagaa

SEQ ID NO: 1462275 - RNA, 17 nt, Human
auuaauuuaugcagaau

SEQ ID NO: 1462276 - RNA, 14 nt, Human
auuacacuugguaa

SEQ ID NO: 1462277 - RNA, 19 nt, Human
auuacacuugguaauugua

SEQ ID NO: 1462278 - RNA, 14 nt, Human
auuacacccaaaga

SEQ ID NO: 1462279 - RNA, 22 nt, Human
auugaggacacugauauggguc

SEQ ID NO: 1462280 - RNA, 21 nt, Human
auugagcuggaccucaccaag

SEQ ID NO: 1462281 - RNA, 14 nt, Human
auugagcuugcaug

SEQ ID NO: 1462282 - RNA, 17 nt, Human
auucguuaucuaauagg

SEQ ID NO: 1462283 - RNA, 22 nt, Human
auucguagauauuggacaaaga

SEQ ID NO: 1462284 - RNA, 16 nt, Human
auucgaaugacacugu

SEQ ID NO: 1462285 - RNA, 13 nt, Human
auucuuucccaac

SEQ ID NO: 1462286 - RNA, 18 nt, Human
auucauuccauucuggaa

SEQ ID NO: 1462287 - RNA, 19 nt, Human
auucauuccauucuggaag

SEQ ID NO: 1462288 - RNA, 17 nt, Human
auucauuccauucugga

SEQ ID NO: 1462289 - RNA, 12 nt, Human
auucauuccauu

SEQ ID NO: 1462290 - RNA, 22 nt, Human
auuacaggcgugagccaccucg

SEQ ID NO: 1462291 - RNA, 13 nt, Human
auucaauaaagcu

SEQ ID NO: 1462292 - RNA, 12 nt, Human
auucaauaaagc

SEQ ID NO: 1462293 - RNA, 20 nt, Human
auuaugugacauuuuacauu

SEQ ID NO: 1462294 - RNA, 23 nt, Human
auuaugugccagauuuaugcaua

SEQ ID NO: 1462295 - RNA, 21 nt, Human
auuaugugccagauuuaugca

SEQ ID NO: 1462296 - RNA, 13 nt, Human
auuaugugccaga

SEQ ID NO: 1462297 - RNA, 19 nt, Human
auuaugugacauuuuacau

SEQ ID NO: 1462298 - RNA, 13 nt, Human
auuaugugacauu

SEQ ID NO: 1462299 - RNA, 21 nt, Human
auuagagggaggagaaugagc

SEQ ID NO: 1462300 - RNA, 15 nt, Human
auuuaccacuugugu

SEQ ID NO: 1462301 - RNA, 16 nt, Human
auuuacaucauuucuu

SEQ ID NO: 1462302 - RNA, 22 nt, Human
auuuaccacuuguguuuugcaa

SEQ ID NO: 1462303 - RNA, 13 nt, Human
auuuaaaucuguu

SEQ ID NO: 1462304 - RNA, 16 nt, Human
auuuaaauagcuuuuu

SEQ ID NO: 1462305 - RNA, 23 nt, Human
auuuaaaauagcaaaagaagaag

SEQ ID NO: 1462306 - RNA, 22 nt, Human
auuuaaaguuguuugugccuuu

SEQ ID NO: 1462307 - RNA, 16 nt, Human
auuguaguccuguaau

SEQ ID NO: 1462308 - RNA, 17 nt, Human
auuguagcauccuggaa

SEQ ID NO: 1462309 - RNA, 20 nt, Human
auuguagcauccuggaauau

SEQ ID NO: 1462310 - RNA, 21 nt, Human
auuguacuaaagccaaacaua

SEQ ID NO: 1462311 - RNA, 13 nt, Human
auuguaguaaucu

SEQ ID NO: 1462312 - RNA, 19 nt, Human
auuguuuuacaauaguucu

SEQ ID NO: 1462313 - RNA, 19 nt, Human
auuguuuuaucugaauuuu

SEQ ID NO: 1462314 - RNA, 13 nt, Human
auuuaaaauagca

SEQ ID NO: 1462315 - RNA, 15 nt, Human
auuuaaaauagcaaa

SEQ ID NO: 1462316 - RNA, 18 nt, Human
auuuaaaauagcaaaaga

SEQ ID NO: 1462317 - RNA, 20 nt, Human
auuuaaaauagcaaaagaag

SEQ ID NO: 1462318 - RNA, 21 nt, Human
auuuaaaauagcaaaagaaga

SEQ ID NO: 1462319 - RNA, 22 nt, Human
auuuaaaauagcaaaagaagaa

SEQ ID NO: 1462320 - RNA, 15 nt, Human
auuuauaaacuuuuu

SEQ ID NO: 1462321 - RNA, 17 nt, Human
auuuaguguucauaaau

SEQ ID NO: 1462322 - RNA, 13 nt, Human
auuuagaaaacuu

SEQ ID NO: 1462323 - RNA, 14 nt, Human
auuuagaaaacuuu

SEQ ID NO: 1462324 - RNA, 16 nt, Human
auuuaguuguaaacca

SEQ ID NO: 1462325 - RNA, 16 nt, Human
auuuaguguucauaaa

SEQ ID NO: 1462326 - RNA, 19 nt, Human
auuuauuacuguaagaaaa

SEQ ID NO: 1462327 - RNA, 20 nt, Human
auuuauuacuguaagaaaau

SEQ ID NO: 1462328 - RNA, 21 nt, Human
auuuauuuuaauaauguuuca

SEQ ID NO: 1462329 - RNA, 12 nt, Human
auuuauuuugac

SEQ ID NO: 1462330 - RNA, 13 nt, Human
auuuauuuugaca

SEQ ID NO: 1462331 - RNA, 14 nt, Human
auuuauuuugacau

SEQ ID NO: 1462332 - RNA, 21 nt, Human
auuuauuuugacauaaaguug

SEQ ID NO: 1462333 - RNA, 18 nt, Human
auuucaugcuaucucugu

SEQ ID NO: 1462334 - RNA, 14 nt, Human
auuucaugaaaauu

SEQ ID NO: 1462335 - RNA, 19 nt, Human
auuuccuauuuuuggaaga

SEQ ID NO: 1462336 - RNA, 20 nt, Human
auuuccuccgucaccucaga

SEQ ID NO: 1462337 - RNA, 19 nt, Human
auuuccuuuuuuguuauua

SEQ ID NO: 1462338 - RNA, 21 nt, Human
auuucgucuguuuauaaacau

SEQ ID NO: 1462339 - RNA, 21 nt, Human
auuuccuaaauauauuuuaag

SEQ ID NO: 1462340 - RNA, 19 nt, Human
auuuccuaauuuugagaaa

SEQ ID NO: 1462341 - RNA, 14 nt, Human
auuuccuaaauaua

SEQ ID NO: 1462342 - RNA, 12 nt, Human
auuugguuuuca

SEQ ID NO: 1462343 - RNA, 14 nt, Human
auuugguuuucaca

SEQ ID NO: 1462344 - RNA, 17 nt, Human
auuuguaauagauguuu

SEQ ID NO: 1462345 - RNA, 22 nt, Human
auuuguaauagauguuugauag

SEQ ID NO: 1462346 - RNA, 21 nt, Human
auuuguacauaguuauuuauu

SEQ ID NO: 1462347 - RNA, 15 nt, Human
auuuggauccugugu

SEQ ID NO: 1462348 - RNA, 14 nt, Human
auuuggcaucccug

SEQ ID NO: 1462349 - RNA, 16 nt, Human
auuuggcaucccuggg

SEQ ID NO: 1462350 - RNA, 17 nt, Human
auuuggcaucccugggc

SEQ ID NO: 1462351 - RNA, 18 nt, Human
auuugauaugugaacagu

SEQ ID NO: 1462352 - RNA, 19 nt, Human
auuugauaugugaacaguu

SEQ ID NO: 1462353 - RNA, 18 nt, Human
auuugagagaaauaugaa

SEQ ID NO: 1462354 - RNA, 17 nt, Human
auuugagagaaauauga

SEQ ID NO: 1462355 - RNA, 14 nt, Human
auuggaaacaaguc

SEQ ID NO: 1462356 - RNA, 23 nt, Human
auuggggaagagagccugcagga

SEQ ID NO: 1462357 - RNA, 15 nt, Human
auuguacuaaagcca

SEQ ID NO: 1462358 - RNA, 22 nt, Human
auuguacuaaagccaaacauau

SEQ ID NO: 1462359 - RNA, 16 nt, Human
auuggggaagagagcc

SEQ ID NO: 1462360 - RNA, 22 nt, Human
auuggggaagagagccugcagg

SEQ ID NO: 1462361 - RNA, 16 nt, Human
auuggagcucguggaa

SEQ ID NO: 1462362 - RNA, 17 nt, Human
auuggagcucgugggac

SEQ ID NO: 1462363 - RNA, 19 nt, Human
auuggagcucgugggacag

SEQ ID NO: 1462364 - RNA, 12 nt, Human
auugauuuuugg

SEQ ID NO: 1462365 - RNA, 12 nt, Human
auugauuuugaa

SEQ ID NO: 1462366 - RNA, 13 nt, Human
auugauuuugaac

SEQ ID NO: 1462367 - RNA, 21 nt, Human
auugaauuaucuugguugaaa

SEQ ID NO: 1462368 - RNA, 21 nt, Human
auugaauggcuauguuuuuaa

SEQ ID NO: 1462369 - RNA, 22 nt, Human
auugaauggcuauguuuuuaau

SEQ ID NO: 1462370 - RNA, 23 nt, Human
auugaauggcuauguuuuuaaug

SEQ ID NO: 1462371 - RNA, 13 nt, Human
auugaauuaucuu

SEQ ID NO: 1462372 - RNA, 19 nt, Human
auugaaguauuuugcugga

SEQ ID NO: 1462373 - RNA, 15 nt, Human
auugaaggcuuaaac

SEQ ID NO: 1462374 - RNA, 19 nt, Human
auugaaggcuuaaacccau

SEQ ID NO: 1462375 - RNA, 15 nt, Human
auguguguuuuaaaa

SEQ ID NO: 1462376 - RNA, 12 nt, Human
auguguuugcuu

SEQ ID NO: 1462377 - RNA, 15 nt, Human
auguguuugcuuucu

SEQ ID NO: 1462378 - RNA, 16 nt, Human
auguguuugcuuucug

SEQ ID NO: 1462379 - RNA, 17 nt, Human
auguguuugcuuucuga

SEQ ID NO: 1462380 - RNA, 15 nt, Human
auguuaaaaaaauaa

SEQ ID NO: 1462381 - RNA, 21 nt, Human
augugcuaguaauuggaaagg

SEQ ID NO: 1462382 - RNA, 19 nt, Human
augugcuauacugcauacu

SEQ ID NO: 1462383 - RNA, 18 nt, Human
augugcuauacugcauac

SEQ ID NO: 1462384 - RNA, 17 nt, Human
augugcauucuccagcc

SEQ ID NO: 1462385 - RNA, 24 nt, Human
auguuaugacuauguaaacuacuu

SEQ ID NO: 1462386 - RNA, 18 nt, Human
auguuaugacuauguaaa

SEQ ID NO: 1462387 - RNA, 18 nt, Human
auguuaagacuugacagu

SEQ ID NO: 1462388 - RNA, 15 nt, Human
auguuauuuguaaua

SEQ ID NO: 1462389 - RNA, 19 nt, Human
auguuauuuguaauagaug

SEQ ID NO: 1462390 - RNA, 16 nt, Human
auguuaagacuugaca

SEQ ID NO: 1462391 - RNA, 20 nt, Human
auguuaagacuugacagugg

SEQ ID NO: 1462392 - RNA, 20 nt, Human
auguucuuuuaaaugauuga

SEQ ID NO: 1462393 - RNA, 22 nt, Human
auguugaaauaugauguuaaaa

SEQ ID NO: 1462394 - RNA, 15 nt, Human
auguugcuggacugu

SEQ ID NO: 1462395 - RNA, 19 nt, Human
auguugcuggacugucaua

SEQ ID NO: 1462396 - RNA, 16 nt, Human
uuuucuauaauuuaaa

SEQ ID NO: 1462397 - RNA, 17 nt, Human
uuuucucugauacagaa

SEQ ID NO: 1462398 - RNA, 17 nt, Human
uuuucucugaacacauu

SEQ ID NO: 1462399 - RNA, 20 nt, Human
uuuucucuaggaaauauacu

SEQ ID NO: 1462400 - RNA, 20 nt, Human
uuuucaggcuagauguaugu

SEQ ID NO: 1462401 - RNA, 21 nt, Human
uuuuccaacuuggcugcagga

SEQ ID NO: 1462402 - RNA, 19 nt, Human
uuuuaguugcaacuuugua

SEQ ID NO: 1462403 - RNA, 19 nt, Human
uuuuagugaacuugaaaua

SEQ ID NO: 1462404 - RNA, 18 nt, Human
uuuuagugauuuuaauaa

SEQ ID NO: 1462405 - RNA, 12 nt, Human
uuuuaguugaau

SEQ ID NO: 1462406 - RNA, 12 nt, Human
uuuuauuaauaa

SEQ ID NO: 1462407 - RNA, 22 nt, Human
uuuuauuaauaaacauucuauc

SEQ ID NO: 1462408 - RNA, 19 nt, Human
uuuuauuaauaaacauucu

SEQ ID NO: 1462409 - RNA, 15 nt, Human
auguuuuuuuuuaaa

SEQ ID NO: 1462410 - RNA, 12 nt, Human
auguuuuuaaug

SEQ ID NO: 1462411 - RNA, 13 nt, Human
auguuuuuaaugu

SEQ ID NO: 1462412 - RNA, 14 nt, Human
auguuuuuaaugua

SEQ ID NO: 1462413 - RNA, 19 nt, Human
auguuuuuaauguauagua

SEQ ID NO: 1462414 - RNA, 16 nt, Human
auguuuuuaauguaua

SEQ ID NO: 1462415 - RNA, 21 nt, Human
uuuucuuaaccagaucauugu

SEQ ID NO: 1462416 - RNA, 17 nt, Human
uuuucuggaauacauga

SEQ ID NO: 1462417 - RNA, 21 nt, Human
uuuucuggaauacaugaaaua

SEQ ID NO: 1462418 - RNA, 14 nt, Human
auguuuaaaccuuu

SEQ ID NO: 1462419 - RNA, 14 nt, Human
auguuuaaaacauc

SEQ ID NO: 1462420 - RNA, 18 nt, Human
auguuggucauuuuaugu

SEQ ID NO: 1462421 - RNA, 15 nt, Human
uuuguaguagcguuu

SEQ ID NO: 1462422 - RNA, 19 nt, Human
uuuguacauaguuauuuau

SEQ ID NO: 1462423 - RNA, 19 nt, Human
uuuguaguagcguuuuuua

SEQ ID NO: 1462424 - RNA, 15 nt, Human
uuuguagugauuuuu

SEQ ID NO: 1462425 - RNA, 17 nt, Human
uuuguaguguuggagaa

SEQ ID NO: 1462426 - RNA, 17 nt, Human
uuuguaguagcguuuuu

SEQ ID NO: 1462427 - RNA, 22 nt, Human
uuuguagugauuuuuaugccac

SEQ ID NO: 1462428 - RNA, 18 nt, Human
uuuguaagguuuuuguag

SEQ ID NO: 1462429 - RNA, 16 nt, Human
uuuguaaguugaagca

SEQ ID NO: 1462430 - RNA, 20 nt, Human
uuuguaaguugaagcaaauc

SEQ ID NO: 1462431 - RNA, 22 nt, Human
uuuguaaguuagguaacuguau

SEQ ID NO: 1462432 - RNA, 15 nt, Human
uuugugauucaaucu

SEQ ID NO: 1462433 - RNA, 20 nt, Human
uuugugauucaaucuguaaa

SEQ ID NO: 1462434 - RNA, 13 nt, Human
uuugugcauucug

SEQ ID NO: 1462435 - RNA, 14 nt, Human
uuuguuuccuuugu

SEQ ID NO: 1462436 - RNA, 15 nt, Human
uuuguuuccuuuguu

SEQ ID NO: 1462437 - RNA, 23 nt, Human
augucgucaaagcugaaauggac

SEQ ID NO: 1462438 - RNA, 16 nt, Human
augugacagguaaacu

SEQ ID NO: 1462439 - RNA, 17 nt, Human
augugauaaggaaauca

SEQ ID NO: 1462440 - RNA, 20 nt, Human
augugauaaggaaaucaacu

SEQ ID NO: 1462441 - RNA, 18 nt, Human
augugauaaggaaaucaa

SEQ ID NO: 1462442 - RNA, 21 nt, Human
augucauguguacaaaaguuu

SEQ ID NO: 1462443 - RNA, 13 nt, Human
augucauuaaaug

SEQ ID NO: 1462444 - RNA, 15 nt, Human
augucauuucauuuc

SEQ ID NO: 1462445 - RNA, 18 nt, Human
augucauuucauuuccua

SEQ ID NO: 1462446 - RNA, 19 nt, Human
auguauacuauaguaccag

SEQ ID NO: 1462447 - RNA, 14 nt, Human
uuuggguccaggag

SEQ ID NO: 1462448 - RNA, 13 nt, Human
uuuggguccagga

SEQ ID NO: 1462449 - RNA, 15 nt, Human
uuuggguccaggagg

SEQ ID NO: 1462450 - RNA, 12 nt, Human
auguauaguaaa

SEQ ID NO: 1462451 - RNA, 15 nt, Human
auguauaguaaauca

SEQ ID NO: 1462452 - RNA, 16 nt, Human
auguauaguaaaucac

SEQ ID NO: 1462453 - RNA, 21 nt, Human
uuugggcagcaauuuaaaugu

SEQ ID NO: 1462454 - RNA, 19 nt, Human
uuugcuaagcauuccaacu

SEQ ID NO: 1462455 - RNA, 22 nt, Human
uuugcuguaauguuaauauuga

SEQ ID NO: 1462456 - RNA, 20 nt, Human
uuugagacagagucuuccuc

SEQ ID NO: 1462457 - RNA, 21 nt, Human
uuugagagaaauaugaagaac

SEQ ID NO: 1462458 - RNA, 19 nt, Human
uuucccuuccuuccucucc

SEQ ID NO: 1462459 - RNA, 17 nt, Human
uuucccuacugaagccc

SEQ ID NO: 1462460 - RNA, 23 nt, Human
uuucccuacugaagcccuuguga

SEQ ID NO: 1462461 - RNA, 13 nt, Human
uuucccuccuugg

SEQ ID NO: 1462462 - RNA, 11 nt, Human
uuucccuccuu

SEQ ID NO: 1462463 - RNA, 16 nt, Human
uuucccugccucucau

SEQ ID NO: 1462464 - RNA, 14 nt, Human
uuucccuccuuggu

SEQ ID NO: 1462465 - RNA, 18 nt, Human
uuugacaaagguaaauca

SEQ ID NO: 1462466 - RNA, 15 nt, Human
auucagccuggcuuc

SEQ ID NO: 1462467 - RNA, 23 nt, Human
auucaaaaauuaucuauagcuaa

SEQ ID NO: 1462468 - RNA, 16 nt, Human
auucaaaaauuaucua

SEQ ID NO: 1462469 - RNA, 11 nt, Human
auucaaaacau

SEQ ID NO: 1462470 - RNA, 20 nt, Human
auuauuggaauauaauuguu

SEQ ID NO: 1462471 - RNA, 18 nt, Human
auuauuguugcauuaaaa

SEQ ID NO: 1462472 - RNA, 22 nt, Human
auuauuuaaaccgcuaaaagaa

SEQ ID NO: 1462473 - RNA, 21 nt, Human
auucacucugaguguuuuaug

SEQ ID NO: 1462474 - RNA, 22 nt, Human
auuauaaccuuaauuuauuauu

SEQ ID NO: 1462475 - RNA, 14 nt, Human
auuauaaccuuaau

SEQ ID NO: 1462476 - RNA, 17 nt, Human
auuauaacuggaaagaa

SEQ ID NO: 1462477 - RNA, 19 nt, Human
auuauaucaauuuccucau

SEQ ID NO: 1462478 - RNA, 14 nt, Human
auuauucacuagua

SEQ ID NO: 1462479 - RNA, 20 nt, Human
auuauauggcuugaguuuaa

SEQ ID NO: 1462480 - RNA, 14 nt, Human
auucagccuggcuu

SEQ ID NO: 1462481 - RNA, 17 nt, Human
auuccaagugauugaaa

SEQ ID NO: 1462482 - RNA, 18 nt, Human
auuccagaccugaagaau

SEQ ID NO: 1462483 - RNA, 23 nt, Human
auuccagacugcuuccaauuuuc

SEQ ID NO: 1462484 - RNA, 17 nt, Human
auuccagaccugaagaa

SEQ ID NO: 1462485 - RNA, 22 nt, Human
auucccacccaauucaaaacau

SEQ ID NO: 1462486 - RNA, 16 nt, Human
auuccccaucucaggc

SEQ ID NO: 1462487 - RNA, 18 nt, Human
auuccccaucucaggcca

SEQ ID NO: 1462488 - RNA, 14 nt, Human
auuccccauucuuc

SEQ ID NO: 1462489 - RNA, 15 nt, Human
auuccccauucuucc

SEQ ID NO: 1462490 - RNA, 15 nt, Human
auuacuguaagaaaa

SEQ ID NO: 1462491 - RNA, 16 nt, Human
auuacuguaagaaaau

SEQ ID NO: 1462492 - RNA, 15 nt, Human
auuacugguccaaaa

SEQ ID NO: 1462493 - RNA, 13 nt, Human
auuaaguucuuua

SEQ ID NO: 1462494 - RNA, 24 nt, Human
auuaagucugugagauucauucau

SEQ ID NO: 1462495 - RNA, 17 nt, Human
auuaauauuccucaguu

SEQ ID NO: 1462496 - RNA, 20 nt, Human
auuagacuggacagcuugug

SEQ ID NO: 1462497 - RNA, 19 nt, Human
auuagacuggacagcuugu

SEQ ID NO: 1462498 - RNA, 15 nt, Human
auuagacuggaacuu

SEQ ID NO: 1462499 - RNA, 22 nt, Human
auuagacuggaacuugaacuga

SEQ ID NO: 1462500 - RNA, 14 nt, Human
auuagacuggacag

SEQ ID NO: 1462501 - RNA, 15 nt, Human
auuagacuggacagc

SEQ ID NO: 1462502 - RNA, 16 nt, Human
auuagacuggacagcu

SEQ ID NO: 1462503 - RNA, 11 nt, Human
uuuuuacauuu

SEQ ID NO: 1462504 - RNA, 15 nt, Human
uuuuuacaaagcccu

SEQ ID NO: 1462505 - RNA, 19 nt, Human
uuuuguuguuucuuaaaua

SEQ ID NO: 1462506 - RNA, 21 nt, Human
uuuuguuguuucuuaaauaag

SEQ ID NO: 1462507 - RNA, 14 nt, Human
uuuugugaagcaaa

SEQ ID NO: 1462508 - RNA, 16 nt, Human
uuuuugagacagaguc

SEQ ID NO: 1462509 - RNA, 13 nt, Human
uuuuugauacuaa

SEQ ID NO: 1462510 - RNA, 15 nt, Human
uuuuugauacuaagc

SEQ ID NO: 1462511 - RNA, 17 nt, Human
uuuuugcauuuaaaaca

SEQ ID NO: 1462512 - RNA, 22 nt, Human
uuuuuggaagaggacuccuuaa

SEQ ID NO: 1462513 - RNA, 13 nt, Human
uuuuucaaaagaa

SEQ ID NO: 1462514 - RNA, 17 nt, Human
uuuuuauauuugaaaua

SEQ ID NO: 1462515 - RNA, 13 nt, Human
uuuuuauuuaaaa

SEQ ID NO: 1462516 - RNA, 11 nt, Human
uuuuuguagua

SEQ ID NO: 1462517 - RNA, 23 nt, Human
uuuuugggcagcaauuuaaaugu

SEQ ID NO: 1462518 - RNA, 21 nt, Human
uuuuugggcagcaauuuaaau

SEQ ID NO: 1462519 - RNA, 20 nt, Human
uuuuugggcagcaauuuaaa

SEQ ID NO: 1462520 - RNA, 20 nt, Human
uugucaauaaaauccauaca

SEQ ID NO: 1462521 - RNA, 16 nt, Human
uuguagcauccuggaa

SEQ ID NO: 1462522 - RNA, 18 nt, Human
uuguagcauccuggaaua

SEQ ID NO: 1462523 - RNA, 12 nt, Human
uuguacaaaaua

SEQ ID NO: 1462524 - RNA, 14 nt, Human
uuguacaaaauaaa

SEQ ID NO: 1462525 - RNA, 23 nt, Human
uugugaaucaagggucaggccuu

SEQ ID NO: 1462526 - RNA, 20 nt, Human
uugugaaucaagggucaggc

SEQ ID NO: 1462527 - RNA, 21 nt, Human
uugugaaucaagggucaggcc

SEQ ID NO: 1462528 - RNA, 21 nt, Human
uugugacagggcggggguggc

SEQ ID NO: 1462529 - RNA, 13 nt, Human
uugugacaaaaaa

SEQ ID NO: 1462530 - RNA, 14 nt, Human
uugugacaaaaaau

SEQ ID NO: 1462531 - RNA, 16 nt, Human
uugugacaaaaaauua

SEQ ID NO: 1462532 - RNA, 22 nt, Human
uugugacaaaaaauuaaagcau

SEQ ID NO: 1462533 - RNA, 18 nt, Human
uugugaugugaguugcac

SEQ ID NO: 1462534 - RNA, 19 nt, Human
uugugauucaaucuguaaa

SEQ ID NO: 1462535 - RNA, 23 nt, Human
uugugauucaaucuguaaacugu

SEQ ID NO: 1462536 - RNA, 14 nt, Human
uugugauucugccu

SEQ ID NO: 1462537 - RNA, 22 nt, Human
uugugucccauucccccagugc

SEQ ID NO: 1462538 - RNA, 18 nt, Human
uugugucccauuccccca

SEQ ID NO: 1462539 - RNA, 9 nt, Human
uuguguccc

SEQ ID NO: 1462540 - RNA, 19 nt, Human
uugugucauguuuaagaaa

SEQ ID NO: 1462541 - RNA, 19 nt, Human
uugugucuggcaguuuaua

SEQ ID NO: 1462542 - RNA, 20 nt, Human
uuuaaaaaagaaacauuugg

SEQ ID NO: 1462543 - RNA, 21 nt, Human
uuuaaaaaacuaaaaacuaga

SEQ ID NO: 1462544 - RNA, 15 nt, Human
uuuaaaaaacuaaaa

SEQ ID NO: 1462545 - RNA, 14 nt, Human
uuuaaaaaacuaaa

SEQ ID NO: 1462546 - RNA, 12 nt, Human
uuuaaaaaguaa

SEQ ID NO: 1462547 - RNA, 15 nt, Human
uuuaaaaaccuugua

SEQ ID NO: 1462548 - RNA, 21 nt, Human
uuuaaauauaugcuaagucuu

SEQ ID NO: 1462549 - RNA, 20 nt, Human
uuuaaaucuguuuuucuaac

SEQ ID NO: 1462550 - RNA, 13 nt, Human
uuuaaauguauac

SEQ ID NO: 1462551 - RNA, 12 nt, Human
uuuaaauguaua

SEQ ID NO: 1462552 - RNA, 15 nt, Human
uuuaaauguaaagau

SEQ ID NO: 1462553 - RNA, 18 nt, Human
uuuaaauguaaagauauu

SEQ ID NO: 1462554 - RNA, 12 nt, Human
uuuaaaucuguu

SEQ ID NO: 1462555 - RNA, 14 nt, Human
uuuaaaugaagaaa

SEQ ID NO: 1462556 - RNA, 18 nt, Human
uuuaaaugcauaaaugca

SEQ ID NO: 1462557 - RNA, 14 nt, Human
uuuaagagacagcc

SEQ ID NO: 1462558 - RNA, 18 nt, Human
uuuaaaaaaauuccaagu

SEQ ID NO: 1462559 - RNA, 15 nt, Human
augcagaaagcaucc

SEQ ID NO: 1462560 - RNA, 16 nt, Human
augcacugauguugug

SEQ ID NO: 1462561 - RNA, 12 nt, Human
augcagaauguu

SEQ ID NO: 1462562 - RNA, 21 nt, Human
augcagaauguugauuacagu

SEQ ID NO: 1462563 - RNA, 19 nt, Human
augcagaauguugauuaca

SEQ ID NO: 1462564 - RNA, 16 nt, Human
augcagaaagcauccc

SEQ ID NO: 1462565 - RNA, 14 nt, Human
uuguucuucuuaaa

SEQ ID NO: 1462566 - RNA, 18 nt, Human
augauuuagagugcuguc

SEQ ID NO: 1462567 - RNA, 17 nt, Human
augauuuuuuuuucaua

SEQ ID NO: 1462568 - RNA, 21 nt, Human
augauuuuuuuuucauacacu

SEQ ID NO: 1462569 - RNA, 15 nt, Human
augccccugaauuua

SEQ ID NO: 1462570 - RNA, 20 nt, Human
augccccugaauuuaaauag

SEQ ID NO: 1462571 - RNA, 20 nt, Human
augccuuuucccaacuccag

SEQ ID NO: 1462572 - RNA, 22 nt, Human
augccuuuucccaacuccagaa

SEQ ID NO: 1462573 - RNA, 17 nt, Human
augcccggcuaauuuuu

SEQ ID NO: 1462574 - RNA, 19 nt, Human
augcgagugcucauuucag

SEQ ID NO: 1462575 - RNA, 21 nt, Human
augccuuuucccaaaauguug

SEQ ID NO: 1462576 - RNA, 23 nt, Human
augccuuuucccaaaauguugaa

SEQ ID NO: 1462577 - RNA, 16 nt, Human
uuuagugaacuugaaa

SEQ ID NO: 1462578 - RNA, 21 nt, Human
uuuauauguaccguaggcuuu

SEQ ID NO: 1462579 - RNA, 21 nt, Human
uuuauaugcuucuguuuuaua

SEQ ID NO: 1462580 - RNA, 17 nt, Human
uuuagggguagcauuug

SEQ ID NO: 1462581 - RNA, 13 nt, Human
uuuaggagcagug

SEQ ID NO: 1462582 - RNA, 16 nt, Human
augcguguuucugacu

SEQ ID NO: 1462583 - RNA, 17 nt, Human
augcguguuucugacuc

SEQ ID NO: 1462584 - RNA, 13 nt, Human
uuucacauuggaa

SEQ ID NO: 1462585 - RNA, 17 nt, Human
uuucacauuagaagaca

SEQ ID NO: 1462586 - RNA, 18 nt, Human
uuucacauuagaagacaa

SEQ ID NO: 1462587 - RNA, 19 nt, Human
uuucacauuagaagacaau

SEQ ID NO: 1462588 - RNA, 14 nt, Human
uuucacauuggaaa

SEQ ID NO: 1462589 - RNA, 19 nt, Human
uuucacauuggaaacaagu

SEQ ID NO: 1462590 - RNA, 18 nt, Human
uuucaccuggaagcauuu

SEQ ID NO: 1462591 - RNA, 22 nt, Human
uuucaccuggaagcauuuguuu

SEQ ID NO: 1462592 - RNA, 13 nt, Human
uuucaccuguaaa

SEQ ID NO: 1462593 - RNA, 14 nt, Human
uuucaccuguaaac

SEQ ID NO: 1462594 - RNA, 17 nt, Human
uuucaccuguaaaccug

SEQ ID NO: 1462595 - RNA, 18 nt, Human
uuucaccuguaaaccuga

SEQ ID NO: 1462596 - RNA, 19 nt, Human
uuucaaacauauauaacaa

SEQ ID NO: 1462597 - RNA, 21 nt, Human
uuucaugcuguucaugaaaga

SEQ ID NO: 1462598 - RNA, 19 nt, Human
uuucaugcuguucaugaaa

SEQ ID NO: 1462599 - RNA, 13 nt, Human
uuucaucauuuuu

SEQ ID NO: 1462600 - RNA, 22 nt, Human
uuucccuaagccagcugccccc

SEQ ID NO: 1462601 - RNA, 20 nt, Human
uuucccuaagccagcugccc

SEQ ID NO: 1462602 - RNA, 11 nt, Human
uuucccuaagc

SEQ ID NO: 1462603 - RNA, 20 nt, Human
uuuccauggcaggaaggcuu

SEQ ID NO: 1462604 - RNA, 21 nt, Human
uuuccauggcaggaaggcuug

SEQ ID NO: 1462605 - RNA, 19 nt, Human
uuuccaugggaccacaacu

SEQ ID NO: 1462606 - RNA, 22 nt, Human
uuuccaugggaccacaacuauu

SEQ ID NO: 1462607 - RNA, 23 nt, Human
augcuguauuuuaaaagaaugau

SEQ ID NO: 1462608 - RNA, 22 nt, Human
augcuguauuuuaaaagaauga

SEQ ID NO: 1462609 - RNA, 21 nt, Human
augcuucuguuuuauaauuuu

SEQ ID NO: 1462610 - RNA, 12 nt, Human
uuguaaugaaaa

SEQ ID NO: 1462611 - RNA, 22 nt, Human
uuguaagcaugcacaaauucug

SEQ ID NO: 1462612 - RNA, 14 nt, Human
uuguaauaaaaugu

SEQ ID NO: 1462613 - RNA, 21 nt, Human
uuguaauagauguuugauaga

SEQ ID NO: 1462614 - RNA, 20 nt, Human
uugguuuucacauuggaaac

SEQ ID NO: 1462615 - RNA, 18 nt, Human
uuguaagacaaagguuuu

SEQ ID NO: 1462616 - RNA, 21 nt, Human
uuguaagacaaagguuuuccu

SEQ ID NO: 1462617 - RNA, 22 nt, Human
uuguaagacaaagguuuuccuc

SEQ ID NO: 1462618 - RNA, 23 nt, Human
uuggguagaaagagauacagagg

SEQ ID NO: 1462619 - RNA, 14 nt, Human
uuggguccaggagg

SEQ ID NO: 1462620 - RNA, 12 nt, Human
uuggguccagga

SEQ ID NO: 1462621 - RNA, 13 nt, Human
uuggguccaggag

SEQ ID NO: 1462622 - RNA, 14 nt, Human
uugguggccacaua

SEQ ID NO: 1462623 - RNA, 14 nt, Human
uugguuugccuucc

SEQ ID NO: 1462624 - RNA, 19 nt, Human
uuggccaugcagaaagcau

SEQ ID NO: 1462625 - RNA, 13 nt, Human
uuggccaugcaga

SEQ ID NO: 1462626 - RNA, 14 nt, Human
uuggccaugggagg

SEQ ID NO: 1462627 - RNA, 13 nt, Human
augaaauauuaug

SEQ ID NO: 1462628 - RNA, 12 nt, Human
augaacaaaugg

SEQ ID NO: 1462629 - RNA, 14 nt, Human
augaagcaaugcuu

SEQ ID NO: 1462630 - RNA, 19 nt, Human
augaagaaaaucacuuagg

SEQ ID NO: 1462631 - RNA, 14 nt, Human
augaagaacugagg

SEQ ID NO: 1462632 - RNA, 16 nt, Human
augaacagaacauaga

SEQ ID NO: 1462633 - RNA, 23 nt, Human
augaaccucaagcugcaucuaga

SEQ ID NO: 1462634 - RNA, 15 nt, Human
augaagcaaugcuuc

SEQ ID NO: 1462635 - RNA, 15 nt, Human
aucuuauaauuuaaa

SEQ ID NO: 1462636 - RNA, 16 nt, Human
aucuuauaauuuaaaa

SEQ ID NO: 1462637 - RNA, 16 nt, Human
aucuuaauuauuguac

SEQ ID NO: 1462638 - RNA, 14 nt, Human
aucuguuuuucuaa

SEQ ID NO: 1462639 - RNA, 17 nt, Human
uuggagaagaacugaaa

SEQ ID NO: 1462640 - RNA, 22 nt, Human
uuggagaagaacugaaaucaua

SEQ ID NO: 1462641 - RNA, 15 nt, Human
uuggagaagaacuga

SEQ ID NO: 1462642 - RNA, 16 nt, Human
uuggacuugucccggg

SEQ ID NO: 1462643 - RNA, 20 nt, Human
uuggagauaaucuagaacac

SEQ ID NO: 1462644 - RNA, 16 nt, Human
uugcuuuuaaaaucca

SEQ ID NO: 1462645 - RNA, 20 nt, Human
uugcuuuguauuguauauua

SEQ ID NO: 1462646 - RNA, 18 nt, Human
uugcucuugaugccuggc

SEQ ID NO: 1462647 - RNA, 17 nt, Human
uugcucuugaugccugg

SEQ ID NO: 1462648 - RNA, 14 nt, Human
uugcucuugaugcc

SEQ ID NO: 1462649 - RNA, 21 nt, Human
aucuuuaaaagaugcuuuuaa

SEQ ID NO: 1462650 - RNA, 20 nt, Human
aucuuuaaaagaugcuuuua

SEQ ID NO: 1462651 - RNA, 19 nt, Human
uugcuuaucaacuuccuaa

SEQ ID NO: 1462652 - RNA, 13 nt, Human
uugcuuaugacau

SEQ ID NO: 1462653 - RNA, 17 nt, Human
uugcaacuuuguauaaa

SEQ ID NO: 1462654 - RNA, 16 nt, Human
uugcaacuuuguauaa

SEQ ID NO: 1462655 - RNA, 18 nt, Human
uugcaacuuuguauaaaa

SEQ ID NO: 1462656 - RNA, 22 nt, Human
uugcaagccagauuuuccugaa

SEQ ID NO: 1462657 - RNA, 22 nt, Human
aucugagaaaagcuuugaaccc

SEQ ID NO: 1462658 - RNA, 21 nt, Human
aucugacccuaugggucuagg

SEQ ID NO: 1462659 - RNA, 18 nt, Human
aucugagaaaagcuuuga

SEQ ID NO: 1462660 - RNA, 16 nt, Human
aucucuuguuuaaauu

SEQ ID NO: 1462661 - RNA, 18 nt, Human
aucucaccaggcagccuc

SEQ ID NO: 1462662 - RNA, 20 nt, Human
aucucacacucaugcauugu

SEQ ID NO: 1462663 - RNA, 11 nt, Human
aucucacacuc

SEQ ID NO: 1462664 - RNA, 15 nt, Human
aucucaccaggcagc

SEQ ID NO: 1462665 - RNA, 22 nt, Human
aucucaccaggcagccucuggg

SEQ ID NO: 1462666 - RNA, 22 nt, Human
aucucacacucaugcauugucc

SEQ ID NO: 1462667 - RNA, 18 nt, Human
uugcaaucccuuaauauc

SEQ ID NO: 1462668 - RNA, 21 nt, Human
uugccaagggcauaaauuauu

SEQ ID NO: 1462669 - RNA, 13 nt, Human
uugacaugggaca

SEQ ID NO: 1462670 - RNA, 23 nt, Human
uugacacuagcccaaugaaauga

SEQ ID NO: 1462671 - RNA, 20 nt, Human
aucccuuaauauccuaaaca

SEQ ID NO: 1462672 - RNA, 21 nt, Human
aucccuuaauauccuaaacau

SEQ ID NO: 1462673 - RNA, 16 nt, Human
uugacaauugggagcu

SEQ ID NO: 1462674 - RNA, 19 nt, Human
uugagaaaaauauauacua

SEQ ID NO: 1462675 - RNA, 11 nt, Human
uugagaaaaau

SEQ ID NO: 1462676 - RNA, 17 nt, Human
uugacuuuuugcauuua

SEQ ID NO: 1462677 - RNA, 16 nt, Human
uugacuuuuugcauuu

SEQ ID NO: 1462678 - RNA, 12 nt, Human
uugacuuuuuau

SEQ ID NO: 1462679 - RNA, 15 nt, Human
uugagcaucacagaa

SEQ ID NO: 1462680 - RNA, 16 nt, Human
uugagcaucacagaau

SEQ ID NO: 1462681 - RNA, 13 nt, Human
uugaguguuuaaa

SEQ ID NO: 1462682 - RNA, 15 nt, Human
uugauagaaaugcca

SEQ ID NO: 1462683 - RNA, 13 nt, Human
aucuaauuuauaa

SEQ ID NO: 1462684 - RNA, 14 nt, Human
aucuaauuuauaaa

SEQ ID NO: 1462685 - RNA, 15 nt, Human
aucuaauuuauaaaa

SEQ ID NO: 1462686 - RNA, 19 nt, Human
aucuaauuuauaaaaaggu

SEQ ID NO: 1462687 - RNA, 23 nt, Human
aucuaauuuauaaaaagguguuu

SEQ ID NO: 1462688 - RNA, 19 nt, Human
aucuauuuuuggcagucug

SEQ ID NO: 1462689 - RNA, 23 nt, Human
aucuauuuuuggcagucugaauu

SEQ ID NO: 1462690 - RNA, 14 nt, Human
auauuugaaauauu

SEQ ID NO: 1462691 - RNA, 19 nt, Human
auauuugaaauauugacuu

SEQ ID NO: 1462692 - RNA, 23 nt, Human
auauuugaaauauugacuuuuua

SEQ ID NO: 1462693 - RNA, 13 nt, Human
auauuuguacaua

SEQ ID NO: 1462694 - RNA, 12 nt, Human
auauuuguacau

SEQ ID NO: 1462695 - RNA, 18 nt, Human
auauuugugacaaaaaau

SEQ ID NO: 1462696 - RNA, 15 nt, Human
auauuuguuauguag

SEQ ID NO: 1462697 - RNA, 14 nt, Human
auauuuuaaagaau

SEQ ID NO: 1462698 - RNA, 15 nt, Human
auauuuuaaagaauu

SEQ ID NO: 1462699 - RNA, 16 nt, Human
auauuuuaaagaauug

SEQ ID NO: 1462700 - RNA, 20 nt, Human
auauuuuaaagaauuguguc

SEQ ID NO: 1462701 - RNA, 13 nt, Human
auauuugaaauau

SEQ ID NO: 1462702 - RNA, 21 nt, Human
auauuguggguguuaauuuuu

SEQ ID NO: 1462703 - RNA, 19 nt, Human
auauuguggguguuaauuu

SEQ ID NO: 1462704 - RNA, 13 nt, Human
auauugauuuauu

SEQ ID NO: 1462705 - RNA, 15 nt, Human
auauugauuuauuaa

SEQ ID NO: 1462706 - RNA, 22 nt, Human
auauucucacagcuccaagaau

SEQ ID NO: 1462707 - RNA, 23 nt, Human
auauucucacagcuccaagaauu

SEQ ID NO: 1462708 - RNA, 17 nt, Human
auauuccuauugugcaa

SEQ ID NO: 1462709 - RNA, 22 nt, Human
auauuccuauugugcaauguaa

SEQ ID NO: 1462710 - RNA, 23 nt, Human
auauuccuauugugcaauguaaa

SEQ ID NO: 1462711 - RNA, 22 nt, Human
auauugauccagaaagaaaacu

SEQ ID NO: 1462712 - RNA, 15 nt, Human
auauugauccagaaa

SEQ ID NO: 1462713 - RNA, 14 nt, Human
auauuaauauuccu

SEQ ID NO: 1462714 - RNA, 16 nt, Human
uucaugucugcuauca

SEQ ID NO: 1462715 - RNA, 18 nt, Human
auauuuucaugcuguuca

SEQ ID NO: 1462716 - RNA, 21 nt, Human
auauuuucaugcuguucauga

SEQ ID NO: 1462717 - RNA, 16 nt, Human
uuccuucagcacuuua

SEQ ID NO: 1462718 - RNA, 19 nt, Human
uuccuucagcacuuuagaa

SEQ ID NO: 1462719 - RNA, 15 nt, Human
uuccuucagcacuuu

SEQ ID NO: 1462720 - RNA, 16 nt, Human
uuccugggagcuuuug

SEQ ID NO: 1462721 - RNA, 16 nt, Human
uuccugggaacaucac

SEQ ID NO: 1462722 - RNA, 15 nt, Human
uuccugggagcuuuu

SEQ ID NO: 1462723 - RNA, 19 nt, Human
uuccuggugccaauuucaa

SEQ ID NO: 1462724 - RNA, 20 nt, Human
uuccuggugccaauuucaag

SEQ ID NO: 1462725 - RNA, 18 nt, Human
uuccucugucuccuaagc

SEQ ID NO: 1462726 - RNA, 20 nt, Human
uuccucuucuauuuuguaaa

SEQ ID NO: 1462727 - RNA, 14 nt, Human
auauuuuaagacga

SEQ ID NO: 1462728 - RNA, 12 nt, Human
auauuuuaaaua

SEQ ID NO: 1462729 - RNA, 13 nt, Human
aucaagagacuga

SEQ ID NO: 1462730 - RNA, 13 nt, Human
aucaaucaacuua

SEQ ID NO: 1462731 - RNA, 17 nt, Human
aucacuagcccuccuuu

SEQ ID NO: 1462732 - RNA, 12 nt, Human
uuccuuuuaauu

SEQ ID NO: 1462733 - RNA, 22 nt, Human
uuccuuuuacuuuucuucuauu

SEQ ID NO: 1462734 - RNA, 12 nt, Human
uuccuuuuacuu

SEQ ID NO: 1462735 - RNA, 18 nt, Human
uuccuuuuacuuuucuuc

SEQ ID NO: 1462736 - RNA, 22 nt, Human
aucacuagcccuccuuuuucca

SEQ ID NO: 1462737 - RNA, 20 nt, Human
aucacuguuuagaacacaca

SEQ ID NO: 1462738 - RNA, 18 nt, Human
aucacuguuuagaacaca

SEQ ID NO: 1462739 - RNA, 14 nt, Human
aucauucauuuucu

SEQ ID NO: 1462740 - RNA, 15 nt, Human
aucauucauuuuugu

SEQ ID NO: 1462741 - RNA, 17 nt, Human
aucagaguugcugcaaa

SEQ ID NO: 1462742 - RNA, 15 nt, Human
aucagauagcaucuu

SEQ ID NO: 1462743 - RNA, 17 nt, Human
aucauaagauauuuuuc

SEQ ID NO: 1462744 - RNA, 12 nt, Human
aucauagaaaug

SEQ ID NO: 1462745 - RNA, 15 nt, Human
aucauagaaauguaa

SEQ ID NO: 1462746 - RNA, 14 nt, Human
uucucaacuccaaa

SEQ ID NO: 1462747 - RNA, 18 nt, Human
uucucaacuccaaacuga

SEQ ID NO: 1462748 - RNA, 17 nt, Human
uucuaguucugccagga

SEQ ID NO: 1462749 - RNA, 14 nt, Human
uucuaguugaaaau

SEQ ID NO: 1462750 - RNA, 14 nt, Human
uucuagguaggaaa

SEQ ID NO: 1462751 - RNA, 18 nt, Human
uucuagguaggaaaugug

SEQ ID NO: 1462752 - RNA, 20 nt, Human
uucucacagcuccaagaauu

SEQ ID NO: 1462753 - RNA, 14 nt, Human
uucucaguuuucau

SEQ ID NO: 1462754 - RNA, 15 nt, Human
uucucaguuuucaua

SEQ ID NO: 1462755 - RNA, 12 nt, Human
uucucauaacuu

SEQ ID NO: 1462756 - RNA, 17 nt, Human
aucagagcgcacaggga

SEQ ID NO: 1462757 - RNA, 22 nt, Human
uucugguaugaacuugaggaca

SEQ ID NO: 1462758 - RNA, 21 nt, Human
uucugguaugaacuugaggac

SEQ ID NO: 1462759 - RNA, 19 nt, Human
uucuguaagaaaccuacug

SEQ ID NO: 1462760 - RNA, 15 nt, Human
uucuguaagaaaccu

SEQ ID NO: 1462761 - RNA, 12 nt, Human
uucugccaggag

SEQ ID NO: 1462762 - RNA, 14 nt, Human
uucugaagaagaug

SEQ ID NO: 1462763 - RNA, 12 nt, Human
uucugaagaaga

SEQ ID NO: 1462764 - RNA, 13 nt, Human
uucugaagaagau

SEQ ID NO: 1462765 - RNA, 21 nt, Human
uucugaaauuuccugggagcu

SEQ ID NO: 1462766 - RNA, 20 nt, Human
aucauuuuaccuuugacaaa

SEQ ID NO: 1462767 - RNA, 15 nt, Human
auccauucuccugag

SEQ ID NO: 1462768 - RNA, 11 nt, Human
aucccaacacu

SEQ ID NO: 1462769 - RNA, 15 nt, Human
aucccaacacugcca

SEQ ID NO: 1462770 - RNA, 16 nt, Human
aucccaacacugccag

SEQ ID NO: 1462771 - RNA, 17 nt, Human
aucccaacacugccagc

SEQ ID NO: 1462772 - RNA, 23 nt, Human
aucauuucuuuuugggagagacu

SEQ ID NO: 1462773 - RNA, 18 nt, Human
aucauuuguuggaaugaa

SEQ ID NO: 1462774 - RNA, 12 nt, Human
aucccuccuguu

SEQ ID NO: 1462775 - RNA, 15 nt, Human
aucccuccuguuggg

SEQ ID NO: 1462776 - RNA, 13 nt, Human
aucccuccuguug

SEQ ID NO: 1462777 - RNA, 12 nt, Human
aucccuggcccc

SEQ ID NO: 1462778 - RNA, 16 nt, Human
aucccuggcccccucc

SEQ ID NO: 1462779 - RNA, 22 nt, Human
aucccuggcccccucccuggau

SEQ ID NO: 1462780 - RNA, 10 nt, Human
aucccuggcc

SEQ ID NO: 1462781 - RNA, 11 nt, Human
aucccuggccc

SEQ ID NO: 1462782 - RNA, 20 nt, Human
aucccugggccuugggcucc

SEQ ID NO: 1462783 - RNA, 15 nt, Human
aucccugggccuugg

SEQ ID NO: 1462784 - RNA, 16 nt, Human
uucaaaauuguuacaa

SEQ ID NO: 1462785 - RNA, 15 nt, Human
uucaaacauauauaa

SEQ ID NO: 1462786 - RNA, 19 nt, Human
uucaacuuauuaacaauua

SEQ ID NO: 1462787 - RNA, 18 nt, Human
uucaagugcuucuccagc

SEQ ID NO: 1462788 - RNA, 23 nt, Human
uucaaguuccaaguugcuaauac

SEQ ID NO: 1462789 - RNA, 23 nt, Human
uucaagaaacugaggaauuuucu

SEQ ID NO: 1462790 - RNA, 22 nt, Human
uucaagaaagcuucaaacugca

SEQ ID NO: 1462791 - RNA, 12 nt, Human
uucaacuuuucc

SEQ ID NO: 1462792 - RNA, 12 nt, Human
uucaagaaacug

SEQ ID NO: 1462793 - RNA, 13 nt, Human
uucaagaaacuga

SEQ ID NO: 1462794 - RNA, 20 nt, Human
uucaagaaacugaggaauuu

SEQ ID NO: 1462795 - RNA, 23 nt, Human
auagggcaauuaauuccuucagc

SEQ ID NO: 1462796 - RNA, 22 nt, Human
auagggcaauuaauuccuucag

SEQ ID NO: 1462797 - RNA, 21 nt, Human
auagggcaauuaauuccuuca

SEQ ID NO: 1462798 - RNA, 22 nt, Human
auagggaaaauucuaacccagg

SEQ ID NO: 1462799 - RNA, 17 nt, Human
auagggcugagcucucu

SEQ ID NO: 1462800 - RNA, 14 nt, Human
auagggcugagcuc

SEQ ID NO: 1462801 - RNA, 14 nt, Human
auagggucuaacuc

SEQ ID NO: 1462802 - RNA, 22 nt, Human
auaggauuuauuuaaaauagca

SEQ ID NO: 1462803 - RNA, 16 nt, Human
auagggaaaauucuaa

SEQ ID NO: 1462804 - RNA, 17 nt, Human
auaggcacaggaaacca

SEQ ID NO: 1462805 - RNA, 23 nt, Human
auaggauuuauuuaaaauagcaa

SEQ ID NO: 1462806 - RNA, 23 nt, Human
auaggaucauuuguuggaaugaa

SEQ ID NO: 1462807 - RNA, 16 nt, Human
auaggauuuauuuaaa

SEQ ID NO: 1462808 - RNA, 21 nt, Human
auaggauuuauuuaaaauagc

SEQ ID NO: 1462809 - RNA, 14 nt, Human
uucacauuggaaac

SEQ ID NO: 1462810 - RNA, 19 nt, Human
uucacauuuuccuuuucaa

SEQ ID NO: 1462811 - RNA, 14 nt, Human
uucaccaaaucuug

SEQ ID NO: 1462812 - RNA, 17 nt, Human
uucacauuuuuguauuu

SEQ ID NO: 1462813 - RNA, 18 nt, Human
uucaccagauuugcuaau

SEQ ID NO: 1462814 - RNA, 19 nt, Human
uucacauuguauucagagu

SEQ ID NO: 1462815 - RNA, 13 nt, Human
uucacauuggaaa

SEQ ID NO: 1462816 - RNA, 12 nt, Human
uucaauaaagcu

SEQ ID NO: 1462817 - RNA, 13 nt, Human
uucaauaaagcug

SEQ ID NO: 1462818 - RNA, 18 nt, Human
auagcuaaguacacaaua

SEQ ID NO: 1462819 - RNA, 15 nt, Human
auagcuaaguacaca

SEQ ID NO: 1462820 - RNA, 14 nt, Human
auagcuaaguacac

SEQ ID NO: 1462821 - RNA, 13 nt, Human
auagcuaaguaca

SEQ ID NO: 1462822 - RNA, 13 nt, Human
auagcuaaauacc

SEQ ID NO: 1462823 - RNA, 17 nt, Human
auagcuacuaauuuuaa

SEQ ID NO: 1462824 - RNA, 14 nt, Human
auagcuacuaauuu

SEQ ID NO: 1462825 - RNA, 16 nt, Human
auaagauauuuuucau

SEQ ID NO: 1462826 - RNA, 15 nt, Human
auaagauauuuuuca

SEQ ID NO: 1462827 - RNA, 19 nt, Human
auaacuugagaccuaaucu

SEQ ID NO: 1462828 - RNA, 21 nt, Human
auaacuugagaccuaaucucu

SEQ ID NO: 1462829 - RNA, 15 nt, Human
auaagagcucaggau

SEQ ID NO: 1462830 - RNA, 18 nt, Human
auagcuacuaauuuuaaa

SEQ ID NO: 1462831 - RNA, 12 nt, Human
uuauuucaauau

SEQ ID NO: 1462832 - RNA, 15 nt, Human
uuauuucaugaaaau

SEQ ID NO: 1462833 - RNA, 15 nt, Human
uuauuuauuggagau

SEQ ID NO: 1462834 - RNA, 14 nt, Human
auagcugaucaguu

SEQ ID NO: 1462835 - RNA, 22 nt, Human
uuauuuaaaauagcaaaagaag

SEQ ID NO: 1462836 - RNA, 21 nt, Human
uuauuuaaaauagcaaaagaa

SEQ ID NO: 1462837 - RNA, 23 nt, Human
uuauuuaaaccgcuaaaagaaac

SEQ ID NO: 1462838 - RNA, 17 nt, Human
uuauuuaaaaaacuaaa

SEQ ID NO: 1462839 - RNA, 15 nt, Human
uuauuuaaaauagca

SEQ ID NO: 1462840 - RNA, 16 nt, Human
uuauuuaaaauagcaa

SEQ ID NO: 1462841 - RNA, 14 nt, Human
uuauuuaaaucugu

SEQ ID NO: 1462842 - RNA, 18 nt, Human
auauauucagccuggcuu

SEQ ID NO: 1462843 - RNA, 16 nt, Human
auauauuaucuuuuca

SEQ ID NO: 1462844 - RNA, 17 nt, Human
auaucuauauuuuacau

SEQ ID NO: 1462845 - RNA, 16 nt, Human
auaucuauauuuuaca

SEQ ID NO: 1462846 - RNA, 20 nt, Human
auaucuauauuuuacauaaa

SEQ ID NO: 1462847 - RNA, 22 nt, Human
auaucuauauuuuacauaaauu

SEQ ID NO: 1462848 - RNA, 14 nt, Human
uucaucauuuuuua

SEQ ID NO: 1462849 - RNA, 13 nt, Human
auauauuaucuuu

SEQ ID NO: 1462850 - RNA, 14 nt, Human
auauauuaucuuuu

SEQ ID NO: 1462851 - RNA, 15 nt, Human
auauauuaucuuuuc

SEQ ID NO: 1462852 - RNA, 18 nt, Human
uucauagagacuugggaa

SEQ ID NO: 1462853 - RNA, 13 nt, Human
auaugauucaaau

SEQ ID NO: 1462854 - RNA, 22 nt, Human
auaugauucaaaugucuauaaa

SEQ ID NO: 1462855 - RNA, 12 nt, Human
auaugauucaaa

SEQ ID NO: 1462856 - RNA, 13 nt, Human
auaugugaacagu

SEQ ID NO: 1462857 - RNA, 22 nt, Human
auaugucaagugcugugcaagg

SEQ ID NO: 1462858 - RNA, 17 nt, Human
auauaacaaugcuguau

SEQ ID NO: 1462859 - RNA, 19 nt, Human
auauaagcuuguauuccuu

SEQ ID NO: 1462860 - RNA, 12 nt, Human
auauaagcuuuu

SEQ ID NO: 1462861 - RNA, 12 nt, Human
auauaacaaugc

SEQ ID NO: 1462862 - RNA, 15 nt, Human
auauaacaaugcugu

SEQ ID NO: 1462863 - RNA, 17 nt, Human
auauauaacaaugcugu

SEQ ID NO: 1462864 - RNA, 18 nt, Human
auauauaacaaugcugua

SEQ ID NO: 1462865 - RNA, 19 nt, Human
auauauaacaaugcuguau

SEQ ID NO: 1462866 - RNA, 12 nt, Human
auauaguuuuac

SEQ ID NO: 1462867 - RNA, 13 nt, Human
auauaguuuuacu

SEQ ID NO: 1462868 - RNA, 16 nt, Human
auauaguuuuacuuuu

SEQ ID NO: 1462869 - RNA, 18 nt, Human
auauaguuuuacuuuuaa

SEQ ID NO: 1462870 - RNA, 23 nt, Human
auauaguuuuacuuuuaaacugu

SEQ ID NO: 1462871 - RNA, 18 nt, Human
auagucaaauugugugaa

SEQ ID NO: 1462872 - RNA, 20 nt, Human
auaggguuugugacagggcg

SEQ ID NO: 1462873 - RNA, 18 nt, Human
auagguagaauguaaagc

SEQ ID NO: 1462874 - RNA, 20 nt, Human
auagguagaauguaaagcuu

SEQ ID NO: 1462875 - RNA, 22 nt, Human
auagucauguaagcugaaaaua

SEQ ID NO: 1462876 - RNA, 18 nt, Human
auaguuuggauauguaaa

SEQ ID NO: 1462877 - RNA, 23 nt, Human
auaguuuggauauguaaaacauu

SEQ ID NO: 1462878 - RNA, 17 nt, Human
auaguccagcuuuguuc

SEQ ID NO: 1462879 - RNA, 19 nt, Human
auaguuuggauauguaaaa

SEQ ID NO: 1462880 - RNA, 15 nt, Human
auaguuuuacuuuua

SEQ ID NO: 1462881 - RNA, 21 nt, Human
auaguuuuacuuuuaaacugu

SEQ ID NO: 1462882 - RNA, 22 nt, Human
auaguuuuacuuuuaaacugug

SEQ ID NO: 1462883 - RNA, 23 nt, Human
auaguuuuacuuuuaaacugugu

SEQ ID NO: 1462884 - RNA, 16 nt, Human
auaguuuuauuaauaa

SEQ ID NO: 1462885 - RNA, 22 nt, Human
auauaaauauuagaaacagcuu

SEQ ID NO: 1462886 - RNA, 16 nt, Human
auauaaauauuagaaa

SEQ ID NO: 1462887 - RNA, 18 nt, Human
uucagaugugaaccauua

SEQ ID NO: 1462888 - RNA, 20 nt, Human
uucagcaaacucuuuuccca

SEQ ID NO: 1462889 - RNA, 15 nt, Human
uucagaugugaacca

SEQ ID NO: 1462890 - RNA, 16 nt, Human
uucagaugugaaccau

SEQ ID NO: 1462891 - RNA, 19 nt, Human
uucagcaaguuagaacuag

SEQ ID NO: 1462892 - RNA, 14 nt, Human
auauauacuauuaa

SEQ ID NO: 1462893 - RNA, 15 nt, Human
uucacuguagaauga

SEQ ID NO: 1462894 - RNA, 22 nt, Human
uucacuguagaaugauuucaug

SEQ ID NO: 1462895 - RNA, 15 nt, Human
uuacuguaagaaaau

SEQ ID NO: 1462896 - RNA, 18 nt, Human
uuacugguccaaaagauu

SEQ ID NO: 1462897 - RNA, 14 nt, Human
uuacugguccaaaa

SEQ ID NO: 1462898 - RNA, 15 nt, Human
uuacugguccaaaag

SEQ ID NO: 1462899 - RNA, 17 nt, Human
uuacugguccaaaagau

SEQ ID NO: 1462900 - RNA, 15 nt, Human
uuacuguaacugauu

SEQ ID NO: 1462901 - RNA, 17 nt, Human
uuagaagacaauugaca

SEQ ID NO: 1462902 - RNA, 14 nt, Human
uuacugauauauuu

SEQ ID NO: 1462903 - RNA, 23 nt, Human
uuacugauauauuuuacaauuuu

SEQ ID NO: 1462904 - RNA, 20 nt, Human
uuacauaauucacucugagu

SEQ ID NO: 1462905 - RNA, 13 nt, Human
uuacaucauuucu

SEQ ID NO: 1462906 - RNA, 14 nt, Human
uuacaucauuucuu

SEQ ID NO: 1462907 - RNA, 18 nt, Human
auaaacacucuugaaaaa

SEQ ID NO: 1462908 - RNA, 16 nt, Human
auaaaguugauaaaga

SEQ ID NO: 1462909 - RNA, 21 nt, Human
auaaaguugauaaagauuuuu

SEQ ID NO: 1462910 - RNA, 17 nt, Human
auaaaguugauaaagau

SEQ ID NO: 1462911 - RNA, 20 nt, Human
auaaaguugauaaagauuuu

SEQ ID NO: 1462912 - RNA, 21 nt, Human
auaaauauccuuuaauugauc

SEQ ID NO: 1462913 - RNA, 14 nt, Human
auaaauauccuuua

SEQ ID NO: 1462914 - RNA, 13 nt, Human
auaaauguaucau

SEQ ID NO: 1462915 - RNA, 17 nt, Human
auaaauguaucauagaa

SEQ ID NO: 1462916 - RNA, 21 nt, Human
auaaauguaucauagaaaugu

SEQ ID NO: 1462917 - RNA, 21 nt, Human
auaacuaacaaccaaagacua

SEQ ID NO: 1462918 - RNA, 20 nt, Human
auaaaaggucggaccagcuu

SEQ ID NO: 1462919 - RNA, 16 nt, Human
auaaaauaauuuuuau

SEQ ID NO: 1462920 - RNA, 21 nt, Human
auaaaauaauuuuuauauuug

SEQ ID NO: 1462921 - RNA, 22 nt, Human
auaaaauaauuuuuauauuuga

SEQ ID NO: 1462922 - RNA, 18 nt, Human
auaaaauccauacauuug

SEQ ID NO: 1462923 - RNA, 19 nt, Human
auaaaauccauacauuugu

SEQ ID NO: 1462924 - RNA, 18 nt, Human
uuaaguaaugauaacugg

SEQ ID NO: 1462925 - RNA, 18 nt, Human
uuaaguaaggaauuuuau

SEQ ID NO: 1462926 - RNA, 22 nt, Human
uuaagaagacugcauuauauuu

SEQ ID NO: 1462927 - RNA, 20 nt, Human
uuaauuccuucagcacuuua

SEQ ID NO: 1462928 - RNA, 19 nt, Human
uuaauuccuucagcacuuu

SEQ ID NO: 1462929 - RNA, 17 nt, Human
uuaauuccuucagcacu

SEQ ID NO: 1462930 - RNA, 14 nt, Human
uuaaugaacaaaug

SEQ ID NO: 1462931 - RNA, 17 nt, Human
uuaauaaacacucuuga

SEQ ID NO: 1462932 - RNA, 13 nt, Human
uuaauaaacacuc

SEQ ID NO: 1462933 - RNA, 20 nt, Human
auaaaauuuuuaaucuuuaa

SEQ ID NO: 1462934 - RNA, 15 nt, Human
uuaauuuagaaaacu

SEQ ID NO: 1462935 - RNA, 16 nt, Human
uuaauuuagaaaacuu

SEQ ID NO: 1462936 - RNA, 16 nt, Human
uuaaaauuacaacuaa

SEQ ID NO: 1462937 - RNA, 16 nt, Human
uuaaaaagguuuacag

SEQ ID NO: 1462938 - RNA, 20 nt, Human
uuaaaaaguaauaaaauuca

SEQ ID NO: 1462939 - RNA, 14 nt, Human
uuaaaaacugagug

SEQ ID NO: 1462940 - RNA, 14 nt, Human
uuaacaacuugucu

SEQ ID NO: 1462941 - RNA, 19 nt, Human
uuaacagagucugaaccua

SEQ ID NO: 1462942 - RNA, 12 nt, Human
uuaacauaccua

SEQ ID NO: 1462943 - RNA, 22 nt, Human
uuaacauaccuaagaaguacau

SEQ ID NO: 1462944 - RNA, 17 nt, Human
uuaacauaccuaagaag

SEQ ID NO: 1462945 - RNA, 20 nt, Human
uuaaauuuuuuuuacauuuu

SEQ ID NO: 1462946 - RNA, 19 nt, Human
uuaaauuuuuuuuacauuu

SEQ ID NO: 1462947 - RNA, 18 nt, Human
uuaaauuuuuuuuacauu

SEQ ID NO: 1462948 - RNA, 18 nt, Human
uuaacaaauguaucacua

SEQ ID NO: 1462949 - RNA, 17 nt, Human
uuaaauuuuuuuuacau

SEQ ID NO: 1462950 - RNA, 15 nt, Human
uuaaauaagaaacuu

SEQ ID NO: 1462951 - RNA, 17 nt, Human
uuaaauaagaaacuuuu

SEQ ID NO: 1462952 - RNA, 15 nt, Human
aguuguuugugccuu

SEQ ID NO: 1462953 - RNA, 17 nt, Human
aguuuaauaaauuuauu

SEQ ID NO: 1462954 - RNA, 22 nt, Human
aguuuaauggugccuucauuug

SEQ ID NO: 1462955 - RNA, 20 nt, Human
aguuuaauggugccuucauu

SEQ ID NO: 1462956 - RNA, 12 nt, Human
aguuuagggugg

SEQ ID NO: 1462957 - RNA, 13 nt, Human
aguuuaggguggg

SEQ ID NO: 1462958 - RNA, 14 nt, Human
aguuuagggugggg

SEQ ID NO: 1462959 - RNA, 10 nt, Human
aguugcagcc

SEQ ID NO: 1462960 - RNA, 22 nt, Human
aguugcauagguuuaauaauuu

SEQ ID NO: 1462961 - RNA, 18 nt, Human
aguugggacuacaggcgu

SEQ ID NO: 1462962 - RNA, 15 nt, Human
aguugcuauuugaac

SEQ ID NO: 1462963 - RNA, 16 nt, Human
aguugcugcaaaccug

SEQ ID NO: 1462964 - RNA, 17 nt, Human
aguugcugcaaaccuga

SEQ ID NO: 1462965 - RNA, 16 nt, Human
uguuuauaaacauugu

SEQ ID NO: 1462966 - RNA, 19 nt, Human
uguugccuugcauaauggu

SEQ ID NO: 1462967 - RNA, 19 nt, Human
uguuucuuuguaaugaaaa

SEQ ID NO: 1462968 - RNA, 18 nt, Human
uguuucuuuguaaugaaa

SEQ ID NO: 1462969 - RNA, 13 nt, Human
uguuugauagauu

SEQ ID NO: 1462970 - RNA, 14 nt, Human
uguuuugcaagcca

SEQ ID NO: 1462971 - RNA, 12 nt, Human
aguucugccagg

SEQ ID NO: 1462972 - RNA, 23 nt, Human
aguucuuacugcuuaauucaaau

SEQ ID NO: 1462973 - RNA, 19 nt, Human
aguucuuacugcuuaauuc

SEQ ID NO: 1462974 - RNA, 13 nt, Human
aguucugccagga

SEQ ID NO: 1462975 - RNA, 14 nt, Human
aguucugccaggag

SEQ ID NO: 1462976 - RNA, 20 nt, Human
aguucugccaggagacaggu

SEQ ID NO: 1462977 - RNA, 21 nt, Human
uguuuuauuuaaccucuaaau

SEQ ID NO: 1462978 - RNA, 14 nt, Human
uguuuuaugagaaa

SEQ ID NO: 1462979 - RNA, 15 nt, Human
uguuuuaugagaaag

SEQ ID NO: 1462980 - RNA, 19 nt, Human
uguuuuaugagaaagccuu

SEQ ID NO: 1462981 - RNA, 18 nt, Human
uguuugcaccuuucuagu

SEQ ID NO: 1462982 - RNA, 20 nt, Human
uguuugcaccuuucuaguug

SEQ ID NO: 1462983 - RNA, 23 nt, Human
uguuugcaccuuucuaguugaaa

SEQ ID NO: 1462984 - RNA, 22 nt, Human
uguuugcaccuuucuaguugaa

SEQ ID NO: 1462985 - RNA, 12 nt, Human
uguuugcuuucu

SEQ ID NO: 1462986 - RNA, 22 nt, Human
uguuugcuuucugaucaaggcc

SEQ ID NO: 1462987 - RNA, 13 nt, Human
uguuugcuuucug

SEQ ID NO: 1462988 - RNA, 16 nt, Human
uguuuuaugagaaagc

SEQ ID NO: 1462989 - RNA, 11 nt, Human
uguuuucuucu

SEQ ID NO: 1462990 - RNA, 13 nt, Human
uguguugaagagg

SEQ ID NO: 1462991 - RNA, 13 nt, Human
uguguguuuggaa

SEQ ID NO: 1462992 - RNA, 19 nt, Human
uguguucccauuucagcug

SEQ ID NO: 1462993 - RNA, 20 nt, Human
uguuaagggaagaauuccag

SEQ ID NO: 1462994 - RNA, 15 nt, Human
uguuaauuuagaaaa

SEQ ID NO: 1462995 - RNA, 17 nt, Human
uguuaauuuagaaaacu

SEQ ID NO: 1462996 - RNA, 18 nt, Human
uguuaauuuagaaaacuu

SEQ ID NO: 1462997 - RNA, 20 nt, Human
uguuaauuuagaaaacuuua

SEQ ID NO: 1462998 - RNA, 22 nt, Human
uguuaauuuagaaaacuuuaaa

SEQ ID NO: 1462999 - RNA, 13 nt, Human
uguuaauuuuuga

SEQ ID NO: 1463000 - RNA, 15 nt, Human
uguuaauuuuugaua

SEQ ID NO: 1463001 - RNA, 16 nt, Human
uguuaauuuuugauac

SEQ ID NO: 1463002 - RNA, 20 nt, Human
ugugugaaagguacuucaaa

SEQ ID NO: 1463003 - RNA, 13 nt, Human
uguguaaguagau

SEQ ID NO: 1463004 - RNA, 18 nt, Human
uguguaagacaaaaagcu

SEQ ID NO: 1463005 - RNA, 14 nt, Human
uguggguguuaauu

SEQ ID NO: 1463006 - RNA, 22 nt, Human
uguggguguuaauuuuugauac

SEQ ID NO: 1463007 - RNA, 18 nt, Human
agugcugugcaagguauu

SEQ ID NO: 1463008 - RNA, 17 nt, Human
agugcugugcugugcua

SEQ ID NO: 1463009 - RNA, 12 nt, Human
agugcugugcug

SEQ ID NO: 1463010 - RNA, 19 nt, Human
agugcugaauuucccucuc

SEQ ID NO: 1463011 - RNA, 15 nt, Human
agugcugaauuuccc

SEQ ID NO: 1463012 - RNA, 15 nt, Human
uguuauaaucuuuca

SEQ ID NO: 1463013 - RNA, 15 nt, Human
uguuauauaaucauu

SEQ ID NO: 1463014 - RNA, 16 nt, Human
uguuauauaaucauua

SEQ ID NO: 1463015 - RNA, 18 nt, Human
uguucugugauauaagug

SEQ ID NO: 1463016 - RNA, 15 nt, Human
uguucugugauauaa

SEQ ID NO: 1463017 - RNA, 13 nt, Human
aguggacaggagu

SEQ ID NO: 1463018 - RNA, 14 nt, Human
uguuacaaauugua

SEQ ID NO: 1463019 - RNA, 15 nt, Human
aguguagaaccuaau

SEQ ID NO: 1463020 - RNA, 20 nt, Human
aguguagaaccuaauucaau

SEQ ID NO: 1463021 - RNA, 16 nt, Human
uguggcauccagaguc

SEQ ID NO: 1463022 - RNA, 18 nt, Human
ugugcccccaaccauuuc

SEQ ID NO: 1463023 - RNA, 23 nt, Human
ugugcccccaaccauuuccucag

SEQ ID NO: 1463024 - RNA, 19 nt, Human
uguggcauccagagucccu

SEQ ID NO: 1463025 - RNA, 21 nt, Human
uguggcauccagagucccugc

SEQ ID NO: 1463026 - RNA, 11 nt, Human
uguggccagga

SEQ ID NO: 1463027 - RNA, 12 nt, Human
uguggccaggag

SEQ ID NO: 1463028 - RNA, 14 nt, Human
uguggccaggaggu

SEQ ID NO: 1463029 - RNA, 13 nt, Human
uguggccaggagg

SEQ ID NO: 1463030 - RNA, 18 nt, Human
ugugccagauuuaugcau

SEQ ID NO: 1463031 - RNA, 20 nt, Human
ugugccagauuuaugcauau

SEQ ID NO: 1463032 - RNA, 16 nt, Human
ugugccaugucaaaca

SEQ ID NO: 1463033 - RNA, 21 nt, Human
ugugccaugucaaacaaauag

SEQ ID NO: 1463034 - RNA, 17 nt, Human
agugaaagaaaauaaca

SEQ ID NO: 1463035 - RNA, 15 nt, Human
agugaaagaaaauaa

SEQ ID NO: 1463036 - RNA, 20 nt, Human
ugugaacaguuguguuugaa

SEQ ID NO: 1463037 - RNA, 12 nt, Human
ugugacucuuuc

SEQ ID NO: 1463038 - RNA, 14 nt, Human
ugugacucuuucca

SEQ ID NO: 1463039 - RNA, 12 nt, Human
ugugaaauuauu

SEQ ID NO: 1463040 - RNA, 14 nt, Human
ugugaaauuuacau

SEQ ID NO: 1463041 - RNA, 22 nt, Human
agucucuauaccaauaaaguga

SEQ ID NO: 1463042 - RNA, 21 nt, Human
agucucuauaccaauaaagug

SEQ ID NO: 1463043 - RNA, 20 nt, Human
agucucuauaccaauaaagu

SEQ ID NO: 1463044 - RNA, 19 nt, Human
agucucuauaccaauaaag

SEQ ID NO: 1463045 - RNA, 17 nt, Human
agucucuauaccaauaa

SEQ ID NO: 1463046 - RNA, 15 nt, Human
agucucuauaccaau

SEQ ID NO: 1463047 - RNA, 15 nt, Human
ugugacucuuuccaa

SEQ ID NO: 1463048 - RNA, 17 nt, Human
ugugacucuuuccaacc

SEQ ID NO: 1463049 - RNA, 17 nt, Human
agucuuuggaacccuaa

SEQ ID NO: 1463050 - RNA, 14 nt, Human
uguaguguuggaga

SEQ ID NO: 1463051 - RNA, 15 nt, Human
uguaguguuggagaa

SEQ ID NO: 1463052 - RNA, 16 nt, Human
uguaguguuggagaag

SEQ ID NO: 1463053 - RNA, 15 nt, Human
uguaucauagaaaug

SEQ ID NO: 1463054 - RNA, 16 nt, Human
uguaucauagaaaugu

SEQ ID NO: 1463055 - RNA, 17 nt, Human
uguaucauagaaaugua

SEQ ID NO: 1463056 - RNA, 22 nt, Human
uguauuacaaauccaaugaaau

SEQ ID NO: 1463057 - RNA, 13 nt, Human
uguauuacaaauc

SEQ ID NO: 1463058 - RNA, 21 nt, Human
ugucaaggguucaagauuguu

SEQ ID NO: 1463059 - RNA, 13 nt, Human
ugucaaacaaaua

SEQ ID NO: 1463060 - RNA, 21 nt, Human
ugucaaacaaauagucuauca

SEQ ID NO: 1463061 - RNA, 18 nt, Human
aguauuagaauaccacag

SEQ ID NO: 1463062 - RNA, 17 nt, Human
aguauuucuaugaaaua

SEQ ID NO: 1463063 - RNA, 18 nt, Human
aguauuucuaugaaauau

SEQ ID NO: 1463064 - RNA, 22 nt, Human
aguauuucuaugaaauauuaug

SEQ ID NO: 1463065 - RNA, 21 nt, Human
aguauuagaauaccacaggaa

SEQ ID NO: 1463066 - RNA, 14 nt, Human
agucaccucaugga

SEQ ID NO: 1463067 - RNA, 15 nt, Human
agucaccucauggaa

SEQ ID NO: 1463068 - RNA, 17 nt, Human
agucaccucauggaauu

SEQ ID NO: 1463069 - RNA, 20 nt, Human
agucacccuaccugugccug

SEQ ID NO: 1463070 - RNA, 19 nt, Human
agucacccuaccugugccu

SEQ ID NO: 1463071 - RNA, 23 nt, Human
uguacuugcucuugaugccuggc

SEQ ID NO: 1463072 - RNA, 22 nt, Human
uguacuugcucuugaugccugg

SEQ ID NO: 1463073 - RNA, 21 nt, Human
agguuuaugaaaaagaagaau

SEQ ID NO: 1463074 - RNA, 14 nt, Human
agguuuaugaaaaa

SEQ ID NO: 1463075 - RNA, 16 nt, Human
agguuuaugaaaaaga

SEQ ID NO: 1463076 - RNA, 14 nt, Human
agguuuacagaauu

SEQ ID NO: 1463077 - RNA, 13 nt, Human
aguaaaauccaca

SEQ ID NO: 1463078 - RNA, 19 nt, Human
agguuuuuguagugauuuu

SEQ ID NO: 1463079 - RNA, 19 nt, Human
agguuuuuguuuguuuccu

SEQ ID NO: 1463080 - RNA, 16 nt, Human
aguaaaagcaaaaaag

SEQ ID NO: 1463081 - RNA, 18 nt, Human
aguaaugauaacuggaaa

SEQ ID NO: 1463082 - RNA, 20 nt, Human
aguaaugauaacuggaaacu

SEQ ID NO: 1463083 - RNA, 17 nt, Human
aguaaugauaacuggaa

SEQ ID NO: 1463084 - RNA, 17 nt, Human
aguaaaauaauaauuuu

SEQ ID NO: 1463085 - RNA, 12 nt, Human
aguaaaagcaaa

SEQ ID NO: 1463086 - RNA, 22 nt, Human
aguacaugauaaaugauagaca

SEQ ID NO: 1463087 - RNA, 19 nt, Human
aguacauuguuaccucuau

SEQ ID NO: 1463088 - RNA, 14 nt, Human
aguacauuguuacc

SEQ ID NO: 1463089 - RNA, 21 nt, Human
aguagaaucucaguugauuuu

SEQ ID NO: 1463090 - RNA, 19 nt, Human
aguacccguucacauuuuu

SEQ ID NO: 1463091 - RNA, 21 nt, Human
aguaccuagcuggcucuguga

SEQ ID NO: 1463092 - RNA, 23 nt, Human
uguaguagcguuuuuuaaaugua

SEQ ID NO: 1463093 - RNA, 20 nt, Human
uguaguaggcauuuuuacca

SEQ ID NO: 1463094 - RNA, 22 nt, Human
uguaguagcguuuuuuaaaugu

SEQ ID NO: 1463095 - RNA, 21 nt, Human
uguaguagcguuuuuuaaaug

SEQ ID NO: 1463096 - RNA, 16 nt, Human
uguaguagcguuuuuu

SEQ ID NO: 1463097 - RNA, 20 nt, Human
aguagcguuuuuuaaaugua

SEQ ID NO: 1463098 - RNA, 19 nt, Human
aguagcguuuuuuaaaugu

SEQ ID NO: 1463099 - RNA, 18 nt, Human
aguagcguuuuuuaaaug

SEQ ID NO: 1463100 - RNA, 14 nt, Human
aguagaaucucagu

SEQ ID NO: 1463101 - RNA, 22 nt, Human
uguaaacuguguauuccaagac

SEQ ID NO: 1463102 - RNA, 13 nt, Human
ugguuucccaaga

SEQ ID NO: 1463103 - RNA, 17 nt, Human
ugguuucccaagagcua

SEQ ID NO: 1463104 - RNA, 18 nt, Human
ugguuucccaagagcuac

SEQ ID NO: 1463105 - RNA, 19 nt, Human
uguaaacuguguauuccaa

SEQ ID NO: 1463106 - RNA, 16 nt, Human
ugguuugccuuccaga

SEQ ID NO: 1463107 - RNA, 17 nt, Human
ugguuugccuuccagaa

SEQ ID NO: 1463108 - RNA, 23 nt, Human
agguguggcuuuaggagcagugg

SEQ ID NO: 1463109 - RNA, 13 nt, Human
aggugccacugga

SEQ ID NO: 1463110 - RNA, 18 nt, Human
aggugccacuggagugug

SEQ ID NO: 1463111 - RNA, 16 nt, Human
aggugagaccaccucu

SEQ ID NO: 1463112 - RNA, 13 nt, Human
aggugagaaauuu

SEQ ID NO: 1463113 - RNA, 15 nt, Human
aggugagaccaccuc

SEQ ID NO: 1463114 - RNA, 14 nt, Human
aggugagaccaccu

SEQ ID NO: 1463115 - RNA, 19 nt, Human
aggucuucuuaauauguuc

SEQ ID NO: 1463116 - RNA, 15 nt, Human
aggucagcaugucua

SEQ ID NO: 1463117 - RNA, 16 nt, Human
aggucagcaugucuau

SEQ ID NO: 1463118 - RNA, 23 nt, Human
uggugcuucucagauuucugagg

SEQ ID NO: 1463119 - RNA, 21 nt, Human
ugguggaugauccccacgcca

SEQ ID NO: 1463120 - RNA, 13 nt, Human
ugguuagaaaagu

SEQ ID NO: 1463121 - RNA, 13 nt, Human
ugguuagaaaugc

SEQ ID NO: 1463122 - RNA, 14 nt, Human
ugguuagaaaugca

SEQ ID NO: 1463123 - RNA, 12 nt, Human
uggugccuucau

SEQ ID NO: 1463124 - RNA, 14 nt, Human
uggugccuucauuu

SEQ ID NO: 1463125 - RNA, 18 nt, Human
ugggucgcccuggacugu

SEQ ID NO: 1463126 - RNA, 16 nt, Human
ugggucgcccuggacu

SEQ ID NO: 1463127 - RNA, 21 nt, Human
aggguggggggggggcgcggc

SEQ ID NO: 1463128 - RNA, 20 nt, Human
uggucacguuuggugcuucu

SEQ ID NO: 1463129 - RNA, 17 nt, Human
ugguagaccaaaauaaa

SEQ ID NO: 1463130 - RNA, 13 nt, Human
ugguaccagaugc

SEQ ID NO: 1463131 - RNA, 16 nt, Human
aggggaauugaggaca

SEQ ID NO: 1463132 - RNA, 16 nt, Human
agggggcaagaggaau

SEQ ID NO: 1463133 - RNA, 23 nt, Human
agggggccccuuugcugacccuc

SEQ ID NO: 1463134 - RNA, 23 nt, Human
uggggcuccuccaggguggcagc

SEQ ID NO: 1463135 - RNA, 13 nt, Human
uggggagagacgg

SEQ ID NO: 1463136 - RNA, 20 nt, Human
agggaggaggcagagaagaa

SEQ ID NO: 1463137 - RNA, 21 nt, Human
agggacaccugggagaaaucu

SEQ ID NO: 1463138 - RNA, 14 nt, Human
agggacaccuggga

SEQ ID NO: 1463139 - RNA, 23 nt, Human
ugggagaccggccugccaggagg

SEQ ID NO: 1463140 - RNA, 12 nt, Human
ugggagagacuu

SEQ ID NO: 1463141 - RNA, 14 nt, Human
ugggagagacuugu

SEQ ID NO: 1463142 - RNA, 15 nt, Human
ugggagagacuuguu

SEQ ID NO: 1463143 - RNA, 21 nt, Human
ugggagagacuuguuuuggau

SEQ ID NO: 1463144 - RNA, 20 nt, Human
ugggagaccggccugccagg

SEQ ID NO: 1463145 - RNA, 21 nt, Human
ugggagaccggccugccagga

SEQ ID NO: 1463146 - RNA, 22 nt, Human
ugggagaccggccugccaggag

SEQ ID NO: 1463147 - RNA, 23 nt, Human
agggaacccagcucuaauacauu

SEQ ID NO: 1463148 - RNA, 22 nt, Human
agggaacccagcucuaauacau

SEQ ID NO: 1463149 - RNA, 14 nt, Human
agggaagagacagc

SEQ ID NO: 1463150 - RNA, 19 nt, Human
agggaagagacagcccagg

SEQ ID NO: 1463151 - RNA, 15 nt, Human
agggaaggaucccau

SEQ ID NO: 1463152 - RNA, 22 nt, Human
agggaaggaucccaugagcucc

SEQ ID NO: 1463153 - RNA, 23 nt, Human
agggaaggaucccaugagcuccu

SEQ ID NO: 1463154 - RNA, 19 nt, Human
agggaaggcuggacuaggc

SEQ ID NO: 1463155 - RNA, 14 nt, Human
agggaaugugaaau

SEQ ID NO: 1463156 - RNA, 16 nt, Human
agggaauugcagagua

SEQ ID NO: 1463157 - RNA, 13 nt, Human
agggaaugugaaa

SEQ ID NO: 1463158 - RNA, 19 nt, Human
agggaauaagguacaagaa

SEQ ID NO: 1463159 - RNA, 19 nt, Human
ugggccccugccucucugc

SEQ ID NO: 1463160 - RNA, 15 nt, Human
ugggccccugccucu

SEQ ID NO: 1463161 - RNA, 20 nt, Human
ugggccccugccucucugca

SEQ ID NO: 1463162 - RNA, 19 nt, Human
ugggccccauguuaacccc

SEQ ID NO: 1463163 - RNA, 13 nt, Human
ugcuauuugaagu

SEQ ID NO: 1463164 - RNA, 23 nt, Human
aggaaaccaguuaggucucaaua

SEQ ID NO: 1463165 - RNA, 16 nt, Human
aggaaaauugaaugca

SEQ ID NO: 1463166 - RNA, 21 nt, Human
aggaaaauuuuagcgugcuca

SEQ ID NO: 1463167 - RNA, 14 nt, Human
aggaaaauugaaug

SEQ ID NO: 1463168 - RNA, 17 nt, Human
ugcucuugaugccuggc

SEQ ID NO: 1463169 - RNA, 18 nt, Human
ugcucuuagcugucugcu

SEQ ID NO: 1463170 - RNA, 16 nt, Human
aggaagaucccccaga

SEQ ID NO: 1463171 - RNA, 23 nt, Human
ugcugagccuguaaaauaaaagg

SEQ ID NO: 1463172 - RNA, 20 nt, Human
ugcugagauacauacagaau

SEQ ID NO: 1463173 - RNA, 10 nt, Human
ugcugagacu

SEQ ID NO: 1463174 - RNA, 18 nt, Human
ugcugagauacauacaga

SEQ ID NO: 1463175 - RNA, 19 nt, Human
ugcugagauacauacagaa

SEQ ID NO: 1463176 - RNA, 20 nt, Human
ugcugagauuacagguguga

SEQ ID NO: 1463177 - RNA, 16 nt, Human
aggaauuacgugcucu

SEQ ID NO: 1463178 - RNA, 22 nt, Human
aggaaggcagggaggaggcaga

SEQ ID NO: 1463179 - RNA, 20 nt, Human
aggaaggcagggaggaggca

SEQ ID NO: 1463180 - RNA, 18 nt, Human
aggaaggcagggaggagg

SEQ ID NO: 1463181 - RNA, 16 nt, Human
aggaaggcagggagga

SEQ ID NO: 1463182 - RNA, 22 nt, Human
aggaaggaggacccaggacagg

SEQ ID NO: 1463183 - RNA, 17 nt, Human
aggaagaucccccagaa

SEQ ID NO: 1463184 - RNA, 18 nt, Human
aggaagaucccccagaaa

SEQ ID NO: 1463185 - RNA, 17 nt, Human
aggaagauuacucagua

SEQ ID NO: 1463186 - RNA, 19 nt, Human
aggaagcaaauagaagaga

SEQ ID NO: 1463187 - RNA, 14 nt, Human
aggaagcagccaag

SEQ ID NO: 1463188 - RNA, 20 nt, Human
ugcuaauuuugaaaaacugc

SEQ ID NO: 1463189 - RNA, 19 nt, Human
ugcuaauuuugaaaaacug

SEQ ID NO: 1463190 - RNA, 18 nt, Human
ugcuaauuuugaaaaacu

SEQ ID NO: 1463191 - RNA, 16 nt, Human
ugcuaauuuugaaaaa

SEQ ID NO: 1463192 - RNA, 13 nt, Human
ugcuaccaaagca

SEQ ID NO: 1463193 - RNA, 19 nt, Human
ugccuuuucccaacuccag

SEQ ID NO: 1463194 - RNA, 15 nt, Human
ugccuugucacgcca

SEQ ID NO: 1463195 - RNA, 13 nt, Human
ugcuaaucuucuu

SEQ ID NO: 1463196 - RNA, 20 nt, Human
ugcuaaucuucuuaugcaau

SEQ ID NO: 1463197 - RNA, 22 nt, Human
ugcuaaucuucuuaugcaauuu

SEQ ID NO: 1463198 - RNA, 18 nt, Human
ugcuaauuuauccugaaa

SEQ ID NO: 1463199 - RNA, 19 nt, Human
agcuuaauggcugauaauu

SEQ ID NO: 1463200 - RNA, 22 nt, Human
agcuuaauggcugauaauuuua

SEQ ID NO: 1463201 - RNA, 18 nt, Human
agcuuguggcaagugaau

SEQ ID NO: 1463202 - RNA, 17 nt, Human
agcuuguggcaagugaa

SEQ ID NO: 1463203 - RNA, 19 nt, Human
agcuuuggaccuaauccaa

SEQ ID NO: 1463204 - RNA, 18 nt, Human
agcuuuggaccuaaucca

SEQ ID NO: 1463205 - RNA, 18 nt, Human
agcuuugcucuuugguag

SEQ ID NO: 1463206 - RNA, 21 nt, Human
agcuuugcucuuugguagaaa

SEQ ID NO: 1463207 - RNA, 23 nt, Human
agcuuugcucuuugguagaaaag

SEQ ID NO: 1463208 - RNA, 10 nt, Human
agcuuugcua

SEQ ID NO: 1463209 - RNA, 16 nt, Human
agcuuugcuaccaaag

SEQ ID NO: 1463210 - RNA, 21 nt, Human
agcuuugcuaccaaagcaccu

SEQ ID NO: 1463211 - RNA, 10 nt, Human
agcuuugcuc

SEQ ID NO: 1463212 - RNA, 12 nt, Human
agcuuucccugc

SEQ ID NO: 1463213 - RNA, 16 nt, Human
agcuuucccugccucu

SEQ ID NO: 1463214 - RNA, 15 nt, Human
agcucugaaagagaa

SEQ ID NO: 1463215 - RNA, 22 nt, Human
agcucugaaagagaaacacgua

SEQ ID NO: 1463216 - RNA, 16 nt, Human
agcucugaaagagaaa

SEQ ID NO: 1463217 - RNA, 21 nt, Human
agcucugaagaacucucugga

SEQ ID NO: 1463218 - RNA, 20 nt, Human
agcucugacauucugauucg

SEQ ID NO: 1463219 - RNA, 22 nt, Human
agcucugaagaacucucuggaa

SEQ ID NO: 1463220 - RNA, 14 nt, Human
agcugcccccagag

SEQ ID NO: 1463221 - RNA, 21 nt, Human
agcugcccccagagccacagu

SEQ ID NO: 1463222 - RNA, 20 nt, Human
agcugcccccagagccacag

SEQ ID NO: 1463223 - RNA, 19 nt, Human
agcugcccccagagccaca

SEQ ID NO: 1463224 - RNA, 17 nt, Human
agcugcccccagagcca

SEQ ID NO: 1463225 - RNA, 16 nt, Human
agcugcccccagagcc

SEQ ID NO: 1463226 - RNA, 22 nt, Human
ugccgagaguccaucagccucc

SEQ ID NO: 1463227 - RNA, 21 nt, Human
ugccugcuuuuuauggccugu

SEQ ID NO: 1463228 - RNA, 20 nt, Human
ugccugcuuuuuauggccug

SEQ ID NO: 1463229 - RNA, 22 nt, Human
ugccugcuuuuuauggccugug

SEQ ID NO: 1463230 - RNA, 18 nt, Human
ugccuggaagagcagccc

SEQ ID NO: 1463231 - RNA, 19 nt, Human
ugccuggaagagcagcccu

SEQ ID NO: 1463232 - RNA, 20 nt, Human
ugccuggaagagcagcccua

SEQ ID NO: 1463233 - RNA, 22 nt, Human
agcugugcuuaugguaccagau

SEQ ID NO: 1463234 - RNA, 17 nt, Human
agcugugcgugugugug

SEQ ID NO: 1463235 - RNA, 16 nt, Human
agcugugcgugugugu

SEQ ID NO: 1463236 - RNA, 19 nt, Human
agcugugcuuaugguacca

SEQ ID NO: 1463237 - RNA, 17 nt, Human
uggagcucguggaacag

SEQ ID NO: 1463238 - RNA, 21 nt, Human
uggagcucguggaacaguuac

SEQ ID NO: 1463239 - RNA, 21 nt, Human
uggagcucgugggacagucac

SEQ ID NO: 1463240 - RNA, 23 nt, Human
aggcacacaccaccacgccuggc

SEQ ID NO: 1463241 - RNA, 19 nt, Human
aggcaguaauaaaaagauu

SEQ ID NO: 1463242 - RNA, 20 nt, Human
aggcagcuuuuucucuccca

SEQ ID NO: 1463243 - RNA, 19 nt, Human
aggcaggaacaaacagggc

SEQ ID NO: 1463244 - RNA, 16 nt, Human
aggcaggauuggggaa

SEQ ID NO: 1463245 - RNA, 19 nt, Human
aggcaggauuggggaagag

SEQ ID NO: 1463246 - RNA, 23 nt, Human
aggcaggauuggggaagagagcc

SEQ ID NO: 1463247 - RNA, 20 nt, Human
aggcaggauuggggaagaga

SEQ ID NO: 1463248 - RNA, 15 nt, Human
aggcaggcucccagg

SEQ ID NO: 1463249 - RNA, 16 nt, Human
aggcaggcucccaggg

SEQ ID NO: 1463250 - RNA, 12 nt, Human
uggauuccagag

SEQ ID NO: 1463251 - RNA, 18 nt, Human
uggauuccccaucucagg

SEQ ID NO: 1463252 - RNA, 22 nt, Human
uggauuccccaucucaggccag

SEQ ID NO: 1463253 - RNA, 19 nt, Human
uggauuccccaucucaggc

SEQ ID NO: 1463254 - RNA, 15 nt, Human
uggauucuaaaaugc

SEQ ID NO: 1463255 - RNA, 13 nt, Human
uggauucuaaaau

SEQ ID NO: 1463256 - RNA, 13 nt, Human
uggagugcagugg

SEQ ID NO: 1463257 - RNA, 16 nt, Human
uggagugcaccaaaga

SEQ ID NO: 1463258 - RNA, 18 nt, Human
uggagugcaccaaagaga

SEQ ID NO: 1463259 - RNA, 14 nt, Human
uggaguugaaaauc

SEQ ID NO: 1463260 - RNA, 19 nt, Human
aggcccccaccuggcucac

SEQ ID NO: 1463261 - RNA, 17 nt, Human
aggcccccaccuggcuc

SEQ ID NO: 1463262 - RNA, 18 nt, Human
aggcccccaccuggcuca

SEQ ID NO: 1463263 - RNA, 16 nt, Human
ugcuuuuuauggccug

SEQ ID NO: 1463264 - RNA, 15 nt, Human
ugcuuuuucaccaga

SEQ ID NO: 1463265 - RNA, 13 nt, Human
uggaaauaaaugu

SEQ ID NO: 1463266 - RNA, 15 nt, Human
uggaaauaaauguau

SEQ ID NO: 1463267 - RNA, 23 nt, Human
uggaaauaaauguaucauagaaa

SEQ ID NO: 1463268 - RNA, 16 nt, Human
uggaaauuggaagagc

SEQ ID NO: 1463269 - RNA, 17 nt, Human
uggaaauuggaagagca

SEQ ID NO: 1463270 - RNA, 23 nt, Human
uggaagacgcaagggccugaugg

SEQ ID NO: 1463271 - RNA, 17 nt, Human
uggaagacgcaagggcc

SEQ ID NO: 1463272 - RNA, 21 nt, Human
ugcuugagccaggaggccugc

SEQ ID NO: 1463273 - RNA, 18 nt, Human
aggaggacccaggacagg

SEQ ID NO: 1463274 - RNA, 16 nt, Human
aggaggacccagggcu

SEQ ID NO: 1463275 - RNA, 17 nt, Human
aggaggacccagggcuc

SEQ ID NO: 1463276 - RNA, 17 nt, Human
aggaggacccaggacag

SEQ ID NO: 1463277 - RNA, 16 nt, Human
aggaggacccaggaca

SEQ ID NO: 1463278 - RNA, 15 nt, Human
aggaggacccaggac

SEQ ID NO: 1463279 - RNA, 14 nt, Human
aggaggacccagga

SEQ ID NO: 1463280 - RNA, 13 nt, Human
aggaggacccagg

SEQ ID NO: 1463281 - RNA, 12 nt, Human
aggaggacccag

SEQ ID NO: 1463282 - RNA, 15 nt, Human
uggaagccagcuuuc

SEQ ID NO: 1463283 - RNA, 16 nt, Human
uggaagccagcuuucc

SEQ ID NO: 1463284 - RNA, 18 nt, Human
uggaagccagcuuucccu

SEQ ID NO: 1463285 - RNA, 20 nt, Human
uggaagccccugggcccagu

SEQ ID NO: 1463286 - RNA, 16 nt, Human
uggaagccccugggcc

SEQ ID NO: 1463287 - RNA, 18 nt, Human
aggaggacccagggcucu

SEQ ID NO: 1463288 - RNA, 11 nt, Human
aggauccaggc

SEQ ID NO: 1463289 - RNA, 21 nt, Human
aggaucauuuguuggaaugaa

SEQ ID NO: 1463290 - RNA, 17 nt, Human
aggaucaguuaacuauu

SEQ ID NO: 1463291 - RNA, 20 nt, Human
aggaucauuuguuggaauga

SEQ ID NO: 1463292 - RNA, 23 nt, Human
aggaucaguuaacuauugcauuu

SEQ ID NO: 1463293 - RNA, 15 nt, Human
aggaucaguuaacua

SEQ ID NO: 1463294 - RNA, 16 nt, Human
aggacacaguuccugg

SEQ ID NO: 1463295 - RNA, 15 nt, Human
aggacacaguuccug

SEQ ID NO: 1463296 - RNA, 18 nt, Human
aggacacaguuccuggga

SEQ ID NO: 1463297 - RNA, 21 nt, Human
aggacacaguuccugggaaca

SEQ ID NO: 1463298 - RNA, 17 nt, Human
aggacuccuuaaauuug

SEQ ID NO: 1463299 - RNA, 23 nt, Human
aggagcccuucuauacccaccca

SEQ ID NO: 1463300 - RNA, 22 nt, Human
aggagauccagggcaaggccau

SEQ ID NO: 1463301 - RNA, 15 nt, Human
ugauuaaguaaugau

SEQ ID NO: 1463302 - RNA, 16 nt, Human
ugauuaaguaaugaua

SEQ ID NO: 1463303 - RNA, 15 nt, Human
ugauggcaauuuugu

SEQ ID NO: 1463304 - RNA, 17 nt, Human
ugauggcaauuuuguaa

SEQ ID NO: 1463305 - RNA, 17 nt, Human
ugaucuagagccaguua

SEQ ID NO: 1463306 - RNA, 23 nt, Human
ugauccagaaagaaaacuuguau

SEQ ID NO: 1463307 - RNA, 13 nt, Human
ugauccagaaaga

SEQ ID NO: 1463308 - RNA, 18 nt, Human
ugauccccacgccacagc

SEQ ID NO: 1463309 - RNA, 13 nt, Human
ugauccccacgcc

SEQ ID NO: 1463310 - RNA, 19 nt, Human
ugauccccacgccacagcc

SEQ ID NO: 1463311 - RNA, 20 nt, Human
ugauccccacgccacagccc

SEQ ID NO: 1463312 - RNA, 21 nt, Human
agccaaacauauauauacuau

SEQ ID NO: 1463313 - RNA, 13 nt, Human
agccacaccagga

SEQ ID NO: 1463314 - RNA, 14 nt, Human
agccacaccaggau

SEQ ID NO: 1463315 - RNA, 24 nt, Human
agccacaccaggauagagacugga

SEQ ID NO: 1463316 - RNA, 17 nt, Human
agccacaccaggauaga

SEQ ID NO: 1463317 - RNA, 20 nt, Human
agccacaguuccccuaugug

SEQ ID NO: 1463318 - RNA, 15 nt, Human
agcaucccucaccca

SEQ ID NO: 1463319 - RNA, 17 nt, Human
agcauccccuugaacuc

SEQ ID NO: 1463320 - RNA, 20 nt, Human
agcauccccuugaacucuuc

SEQ ID NO: 1463321 - RNA, 14 nt, Human
agcauccuggaaua

SEQ ID NO: 1463322 - RNA, 15 nt, Human
agcauccuggaauau

SEQ ID NO: 1463323 - RNA, 13 nt, Human
agcauccuggaau

SEQ ID NO: 1463324 - RNA, 18 nt, Human
agcauccccuugaacucu

SEQ ID NO: 1463325 - RNA, 21 nt, Human
agcaucaggccuagaggccug

SEQ ID NO: 1463326 - RNA, 16 nt, Human
agcaucaggccuagag

SEQ ID NO: 1463327 - RNA, 19 nt, Human
ugaucaccgacugaaaaua

SEQ ID NO: 1463328 - RNA, 17 nt, Human
ugaucaccgacugaaaa

SEQ ID NO: 1463329 - RNA, 17 nt, Human
agcauuuguguugaaga

SEQ ID NO: 1463330 - RNA, 18 nt, Human
agcauuuguguugaagag

SEQ ID NO: 1463331 - RNA, 14 nt, Human
agcauuuguuucua

SEQ ID NO: 1463332 - RNA, 19 nt, Human
agcauuuguuucuacuuug

SEQ ID NO: 1463333 - RNA, 17 nt, Human
agcauuuguuucuacuu

SEQ ID NO: 1463334 - RNA, 15 nt, Human
agcauuuagaaaacu

SEQ ID NO: 1463335 - RNA, 17 nt, Human
agcauuuuguaaguuga

SEQ ID NO: 1463336 - RNA, 14 nt, Human
agccaaaaauagcu

SEQ ID NO: 1463337 - RNA, 15 nt, Human
agccaaaaauagcua

SEQ ID NO: 1463338 - RNA, 18 nt, Human
agccaaaaauagcuaaau

SEQ ID NO: 1463339 - RNA, 22 nt, Human
agccaaaaauagcuaaauaccu

SEQ ID NO: 1463340 - RNA, 12 nt, Human
agccaaaccagg

SEQ ID NO: 1463341 - RNA, 22 nt, Human
agcauuuagauguauagguuga

SEQ ID NO: 1463342 - RNA, 12 nt, Human
agcauucugucu

SEQ ID NO: 1463343 - RNA, 14 nt, Human
agcauucagaagaa

SEQ ID NO: 1463344 - RNA, 15 nt, Human
agcauucagaagaaa

SEQ ID NO: 1463345 - RNA, 17 nt, Human
agcauucagaagaaaaa

SEQ ID NO: 1463346 - RNA, 19 nt, Human
agcauucagaagaaaaaga

SEQ ID NO: 1463347 - RNA, 21 nt, Human
agcauucagaagaaaaagaag

SEQ ID NO: 1463348 - RNA, 17 nt, Human
agcagucaggaaagaga

SEQ ID NO: 1463349 - RNA, 18 nt, Human
agcagucaggaaagagaa

SEQ ID NO: 1463350 - RNA, 19 nt, Human
agcagucaggaaagagaac

SEQ ID NO: 1463351 - RNA, 15 nt, Human
agcaguuugaaauug

SEQ ID NO: 1463352 - RNA, 20 nt, Human
ugagucacccuaccugugcc

SEQ ID NO: 1463353 - RNA, 22 nt, Human
ugagucacccuaccugugccug

SEQ ID NO: 1463354 - RNA, 14 nt, Human
ugauaauuuuaaau

SEQ ID NO: 1463355 - RNA, 13 nt, Human
ugauaauuuuaaa

SEQ ID NO: 1463356 - RNA, 21 nt, Human
ugaguguuuuaugagaaagcc

SEQ ID NO: 1463357 - RNA, 19 nt, Human
ugaguguuuuaugagaaag

SEQ ID NO: 1463358 - RNA, 14 nt, Human
ugaguuacagaaau

SEQ ID NO: 1463359 - RNA, 16 nt, Human
agcagggacuguaaac

SEQ ID NO: 1463360 - RNA, 17 nt, Human
agccuccuuagaaaaaa

SEQ ID NO: 1463361 - RNA, 16 nt, Human
agccuccuuucuggcu

SEQ ID NO: 1463362 - RNA, 16 nt, Human
agccucuccacucaug

SEQ ID NO: 1463363 - RNA, 13 nt, Human
ugcagacaggaau

SEQ ID NO: 1463364 - RNA, 15 nt, Human
ugcagacaggaaucu

SEQ ID NO: 1463365 - RNA, 16 nt, Human
ugcagacaggaaucuu

SEQ ID NO: 1463366 - RNA, 18 nt, Human
ugcagacaggaaucuuaa

SEQ ID NO: 1463367 - RNA, 20 nt, Human
ugcagacaggaaucuuaagg

SEQ ID NO: 1463368 - RNA, 22 nt, Human
ugcaggucccuaauaaagcugu

SEQ ID NO: 1463369 - RNA, 11 nt, Human
ugcaggucccu

SEQ ID NO: 1463370 - RNA, 19 nt, Human
ugcagggggugugucugcu

SEQ ID NO: 1463371 - RNA, 22 nt, Human
ugcagggggugugucugcucag

SEQ ID NO: 1463372 - RNA, 17 nt, Human
ugcauagaauaaaauuu

SEQ ID NO: 1463373 - RNA, 18 nt, Human
ugcauacuuuuuaaaugu

SEQ ID NO: 1463374 - RNA, 19 nt, Human
ugcauacuuuuuaaaugua

SEQ ID NO: 1463375 - RNA, 22 nt, Human
ugcauacuuuuuaaauguaaag

SEQ ID NO: 1463376 - RNA, 23 nt, Human
ugcauacuuuuuaaauguaaaga

SEQ ID NO: 1463377 - RNA, 16 nt, Human
ugcaguaugaaaauaa

SEQ ID NO: 1463378 - RNA, 15 nt, Human
ugcaguaugaaaaua

SEQ ID NO: 1463379 - RNA, 11 nt, Human
ugcauggaaau

SEQ ID NO: 1463380 - RNA, 21 nt, Human
ugcaucuagaggcuuccuuca

SEQ ID NO: 1463381 - RNA, 23 nt, Human
ugcauggaaauucccuucaucug

SEQ ID NO: 1463382 - RNA, 19 nt, Human
ugcauggaaauucccuuca

SEQ ID NO: 1463383 - RNA, 16 nt, Human
agccuuggggauucuu

SEQ ID NO: 1463384 - RNA, 23 nt, Human
agccuuggggauucuuccaucug

SEQ ID NO: 1463385 - RNA, 12 nt, Human
agccugugccuc

SEQ ID NO: 1463386 - RNA, 18 nt, Human
agccuuaaucagguccuc

SEQ ID NO: 1463387 - RNA, 14 nt, Human
agccuucucuguuc

SEQ ID NO: 1463388 - RNA, 15 nt, Human
agccuucucuguuca

SEQ ID NO: 1463389 - RNA, 19 nt, Human
agccuucucuguucauuuc

SEQ ID NO: 1463390 - RNA, 20 nt, Human
agccuucucuguucauuucc

SEQ ID NO: 1463391 - RNA, 21 nt, Human
agccuucucuguucauuuccu

SEQ ID NO: 1463392 - RNA, 22 nt, Human
agccuucucuguucauuuccuc

SEQ ID NO: 1463393 - RNA, 23 nt, Human
agccuucucuguucauuuccuca

SEQ ID NO: 1463394 - RNA, 20 nt, Human
ugcauuuaaaacagacacug

SEQ ID NO: 1463395 - RNA, 22 nt, Human
ugcauuuaaaacagacacuggc

SEQ ID NO: 1463396 - RNA, 15 nt, Human
ugcauuuaaaacaga

SEQ ID NO: 1463397 - RNA, 17 nt, Human
ugcauuuaaaacagaca

SEQ ID NO: 1463398 - RNA, 19 nt, Human
ugcauuuaaaacagacacu

SEQ ID NO: 1463399 - RNA, 23 nt, Human
ugccaagccauggguagccuggg

SEQ ID NO: 1463400 - RNA, 15 nt, Human
ugccaguuguccucc

SEQ ID NO: 1463401 - RNA, 22 nt, Human
ugccaguuguccuccuuccggg

SEQ ID NO: 1463402 - RNA, 20 nt, Human
agcccugggaggcucuggag

SEQ ID NO: 1463403 - RNA, 18 nt, Human
agcccugggaggcucugg

SEQ ID NO: 1463404 - RNA, 22 nt, Human
agcccugcaccaugcugcuggg

SEQ ID NO: 1463405 - RNA, 16 nt, Human
ugcaccaaagagaaug

SEQ ID NO: 1463406 - RNA, 12 nt, Human
agcccugcacca

SEQ ID NO: 1463407 - RNA, 13 nt, Human
agcccugcaccau

SEQ ID NO: 1463408 - RNA, 14 nt, Human
agcccugcaccaug

SEQ ID NO: 1463409 - RNA, 20 nt, Human
agcccugcaccaugcugcug

SEQ ID NO: 1463410 - RNA, 23 nt, Human
agccccgcguggaacucgugucu

SEQ ID NO: 1463411 - RNA, 14 nt, Human
agccccugggccca

SEQ ID NO: 1463412 - RNA, 16 nt, Human
agccccugggcccagu

SEQ ID NO: 1463413 - RNA, 23 nt, Human
ugcaaggccugguguuucuugau

SEQ ID NO: 1463414 - RNA, 21 nt, Human
ugcaaggccugguguuucuug

SEQ ID NO: 1463415 - RNA, 13 nt, Human
ugcaaggcaaaga

SEQ ID NO: 1463416 - RNA, 17 nt, Human
ugcaaggaccuaaaaca

SEQ ID NO: 1463417 - RNA, 21 nt, Human
ugcaagguauuacacucugua

SEQ ID NO: 1463418 - RNA, 22 nt, Human
ugcaagguauuacacucuguaa

SEQ ID NO: 1463419 - RNA, 16 nt, Human
ugcaaggucuuugguu

SEQ ID NO: 1463420 - RNA, 15 nt, Human
ugcaaucccuuaaua

SEQ ID NO: 1463421 - RNA, 15 nt, Human
ugcaagccagauuuu

SEQ ID NO: 1463422 - RNA, 21 nt, Human
ugcaagccagauuuuccugaa

SEQ ID NO: 1463423 - RNA, 12 nt, Human
ugcaaauuucau

SEQ ID NO: 1463424 - RNA, 21 nt, Human
ugcaaaugcuaugagaugcau

SEQ ID NO: 1463425 - RNA, 15 nt, Human
agccacgguguucug

SEQ ID NO: 1463426 - RNA, 19 nt, Human
agccacggggacucagccc

SEQ ID NO: 1463427 - RNA, 22 nt, Human
ugauuuaucugagucaacuccu

SEQ ID NO: 1463428 - RNA, 23 nt, Human
ugauuuauuaauauauauuaucu

SEQ ID NO: 1463429 - RNA, 13 nt, Human
ugcaaauaaauau

SEQ ID NO: 1463430 - RNA, 23 nt, Human
ugcaaauaaauauccuuuaauug

SEQ ID NO: 1463431 - RNA, 18 nt, Human
agaugcaguucugaagaa

SEQ ID NO: 1463432 - RNA, 19 nt, Human
agaugcaguucugaagaag

SEQ ID NO: 1463433 - RNA, 20 nt, Human
agaugcaguucugaagaaga

SEQ ID NO: 1463434 - RNA, 17 nt, Human
agaugcuggcuugggca

SEQ ID NO: 1463435 - RNA, 19 nt, Human
agaugcuggcuugggcagc

SEQ ID NO: 1463436 - RNA, 18 nt, Human
agaugcuggcuugggcag

SEQ ID NO: 1463437 - RNA, 18 nt, Human
agaucccaacacugccag

SEQ ID NO: 1463438 - RNA, 19 nt, Human
agaucccaacacugccagc

SEQ ID NO: 1463439 - RNA, 20 nt, Human
agaucccaacacugccagca

SEQ ID NO: 1463440 - RNA, 10 nt, Human
agaucccaaa

SEQ ID NO: 1463441 - RNA, 22 nt, Human
agaucccaaguagaaucucagu

SEQ ID NO: 1463442 - RNA, 15 nt, Human
agauguucacccaac

SEQ ID NO: 1463443 - RNA, 12 nt, Human
agaucauuguga

SEQ ID NO: 1463444 - RNA, 19 nt, Human
agaucaggaagagaaggag

SEQ ID NO: 1463445 - RNA, 18 nt, Human
agaucaggaagagaagga

SEQ ID NO: 1463446 - RNA, 17 nt, Human
agaucaggaagagaagg

SEQ ID NO: 1463447 - RNA, 13 nt, Human
agaucaggaagag

SEQ ID NO: 1463448 - RNA, 14 nt, Human
ugacauaaaguuga

SEQ ID NO: 1463449 - RNA, 22 nt, Human
ugacagcuaggaugugcauucu

SEQ ID NO: 1463450 - RNA, 20 nt, Human
ugacagcuaggaugugcauu

SEQ ID NO: 1463451 - RNA, 18 nt, Human
ugacaguggaacuacauu

SEQ ID NO: 1463452 - RNA, 16 nt, Human
ugacaguggaacuaca

SEQ ID NO: 1463453 - RNA, 16 nt, Human
ugacaguguugaaaau

SEQ ID NO: 1463454 - RNA, 19 nt, Human
ugacaguguugaaaauguu

SEQ ID NO: 1463455 - RNA, 16 nt, Human
agaguuuagcuggaaa

SEQ ID NO: 1463456 - RNA, 17 nt, Human
agaguuuagcuggaaaa

SEQ ID NO: 1463457 - RNA, 20 nt, Human
agaguugaugguuguacaua

SEQ ID NO: 1463458 - RNA, 23 nt, Human
agagucuggugaagcucacuucu

SEQ ID NO: 1463459 - RNA, 16 nt, Human
agagucugaaccuauu

SEQ ID NO: 1463460 - RNA, 18 nt, Human
agagucuggugaagcuca

SEQ ID NO: 1463461 - RNA, 15 nt, Human
ugaauguaaauuugu

SEQ ID NO: 1463462 - RNA, 16 nt, Human
ugaauguaaauuugua

SEQ ID NO: 1463463 - RNA, 18 nt, Human
ugaauguaaauuuguacu

SEQ ID NO: 1463464 - RNA, 19 nt, Human
ugaauguaaauuuguacua

SEQ ID NO: 1463465 - RNA, 23 nt, Human
agaguccaucagccuccauccua

SEQ ID NO: 1463466 - RNA, 14 nt, Human
agagucccugccug

SEQ ID NO: 1463467 - RNA, 17 nt, Human
agagucccugccuggac

SEQ ID NO: 1463468 - RNA, 12 nt, Human
agauacugaaau

SEQ ID NO: 1463469 - RNA, 13 nt, Human
agauacugaaaua

SEQ ID NO: 1463470 - RNA, 15 nt, Human
agauacugaaauaaa

SEQ ID NO: 1463471 - RNA, 17 nt, Human
agauaaagguucaugca

SEQ ID NO: 1463472 - RNA, 17 nt, Human
agauaugggacauuuuu

SEQ ID NO: 1463473 - RNA, 15 nt, Human
agauauuaccaguuu

SEQ ID NO: 1463474 - RNA, 18 nt, Human
agauauuccuauugugca

SEQ ID NO: 1463475 - RNA, 14 nt, Human
agauauuggacaaa

SEQ ID NO: 1463476 - RNA, 17 nt, Human
agauauuggacaaagaa

SEQ ID NO: 1463477 - RNA, 16 nt, Human
agauauuggacaaaga

SEQ ID NO: 1463478 - RNA, 11 nt, Human
ugaauuucauc

SEQ ID NO: 1463479 - RNA, 16 nt, Human
ugaauuuuacauggcu

SEQ ID NO: 1463480 - RNA, 21 nt, Human
agaucaccaguguguggcuuu

SEQ ID NO: 1463481 - RNA, 15 nt, Human
ugaauuuuuuuuaac

SEQ ID NO: 1463482 - RNA, 16 nt, Human
ugaauuuuuuuuaaca

SEQ ID NO: 1463483 - RNA, 17 nt, Human
ugaauuuuuuuuaacau

SEQ ID NO: 1463484 - RNA, 18 nt, Human
ugaauuuuuuuuaacauu

SEQ ID NO: 1463485 - RNA, 19 nt, Human
ugaauuuuuuuuaacauuc

SEQ ID NO: 1463486 - RNA, 20 nt, Human
ugaauuuuuuuuaacauucc

SEQ ID NO: 1463487 - RNA, 21 nt, Human
ugaauuuuuuuuaacauuccu

SEQ ID NO: 1463488 - RNA, 16 nt, Human
ugaauuuuuuuuuccu

SEQ ID NO: 1463489 - RNA, 19 nt, Human
ugaauuuuuuuuuccuagc

SEQ ID NO: 1463490 - RNA, 20 nt, Human
ugaauuuuuuuuuccuagcc

SEQ ID NO: 1463491 - RNA, 22 nt, Human
ugaauuuuuuuuaacauuccuc

SEQ ID NO: 1463492 - RNA, 19 nt, Human
ugacaaaaaauuaaagcau

SEQ ID NO: 1463493 - RNA, 12 nt, Human
agagguuuuaaa

SEQ ID NO: 1463494 - RNA, 22 nt, Human
ugaagcacagugaucaaguuau

SEQ ID NO: 1463495 - RNA, 20 nt, Human
ugaagcaaaucgaaugaaau

SEQ ID NO: 1463496 - RNA, 14 nt, Human
agagguugucugug

SEQ ID NO: 1463497 - RNA, 17 nt, Human
agagguauuuaucuuua

SEQ ID NO: 1463498 - RNA, 21 nt, Human
agaggccauucuuucccaaca

SEQ ID NO: 1463499 - RNA, 19 nt, Human
agaggcuauuauuuucacu

SEQ ID NO: 1463500 - RNA, 22 nt, Human
agagcuggagaugaggccagac

SEQ ID NO: 1463501 - RNA, 23 nt, Human
agagcuggagaugaggccagacc

SEQ ID NO: 1463502 - RNA, 21 nt, Human
agagcuggagaugaggccaga

SEQ ID NO: 1463503 - RNA, 16 nt, Human
ugaacuuugcugagcc

SEQ ID NO: 1463504 - RNA, 17 nt, Human
ugaacuuuuuauugauu

SEQ ID NO: 1463505 - RNA, 15 nt, Human
ugaagaaaaucacuu

SEQ ID NO: 1463506 - RNA, 21 nt, Human
ugaagaaaaucacuuaggaaa

SEQ ID NO: 1463507 - RNA, 15 nt, Human
ugaacuuugcugagc

SEQ ID NO: 1463508 - RNA, 11 nt, Human
ugaacuuugcu

SEQ ID NO: 1463509 - RNA, 21 nt, Human
ugaacuaggauuguaguccca

SEQ ID NO: 1463510 - RNA, 23 nt, Human
ugaacuaggguggugcauuuuug

SEQ ID NO: 1463511 - RNA, 18 nt, Human
ugaacuaggcugagcaau

SEQ ID NO: 1463512 - RNA, 17 nt, Human
ugaacuaggcugagcaa

SEQ ID NO: 1463513 - RNA, 14 nt, Human
ugaacucaaacuga

SEQ ID NO: 1463514 - RNA, 16 nt, Human
ugaacucaaacugagg

SEQ ID NO: 1463515 - RNA, 17 nt, Human
ugaacucaaacugagga

SEQ ID NO: 1463516 - RNA, 18 nt, Human
ugaacucaaacugaggaa

SEQ ID NO: 1463517 - RNA, 18 nt, Human
ugaaccugaugaaaauaa

SEQ ID NO: 1463518 - RNA, 23 nt, Human
ugaaccugaugaaaauaaagaau

SEQ ID NO: 1463519 - RNA, 12 nt, Human
ugaaccugcccu

SEQ ID NO: 1463520 - RNA, 16 nt, Human
agagcacugcuccagu

SEQ ID NO: 1463521 - RNA, 12 nt, Human
agagcacugcuc

SEQ ID NO: 1463522 - RNA, 15 nt, Human
agagcacugccacca

SEQ ID NO: 1463523 - RNA, 18 nt, Human
agagcacugccaccagua

SEQ ID NO: 1463524 - RNA, 14 nt, Human
agagcacugccacc

SEQ ID NO: 1463525 - RNA, 18 nt, Human
agagcaaaauaauuuuaa

SEQ ID NO: 1463526 - RNA, 13 nt, Human
agagauuuuucau

SEQ ID NO: 1463527 - RNA, 18 nt, Human
agagacagcccaggauac

SEQ ID NO: 1463528 - RNA, 16 nt, Human
agagacagcccaggau

SEQ ID NO: 1463529 - RNA, 18 nt, Human
agagcaggugcuggcucu

SEQ ID NO: 1463530 - RNA, 11 nt, Human
agagccacagu

SEQ ID NO: 1463531 - RNA, 23 nt, Human
ugaaauuuccugggagcuuuugu

SEQ ID NO: 1463532 - RNA, 14 nt, Human
ugaaauuuuaaccu

SEQ ID NO: 1463533 - RNA, 20 nt, Human
ugaaauuuuaaccuaugaua

SEQ ID NO: 1463534 - RNA, 22 nt, Human
ugaaauuuuaaccuaugauauu

SEQ ID NO: 1463535 - RNA, 16 nt, Human
ugaaauuuuauaugcu

SEQ ID NO: 1463536 - RNA, 18 nt, Human
ugaaauuuuauaugcuua

SEQ ID NO: 1463537 - RNA, 22 nt, Human
ugaaauuuuauaugcuuacuga

SEQ ID NO: 1463538 - RNA, 15 nt, Human
ugaaauuguauuaca

SEQ ID NO: 1463539 - RNA, 18 nt, Human
ugaaauauuauguuaaaa

SEQ ID NO: 1463540 - RNA, 20 nt, Human
ugaaauaugauguuaaaaaa

SEQ ID NO: 1463541 - RNA, 16 nt, Human
ugaaauaugauguuaa

SEQ ID NO: 1463542 - RNA, 15 nt, Human
ugaaauauccugcuu

SEQ ID NO: 1463543 - RNA, 17 nt, Human
ugaaauauccugcuuga

SEQ ID NO: 1463544 - RNA, 14 nt, Human
agagcgcacaggga

SEQ ID NO: 1463545 - RNA, 20 nt, Human
ucugugaagugagaccuucc

SEQ ID NO: 1463546 - RNA, 19 nt, Human
ucugugaagugagaccuuc

SEQ ID NO: 1463547 - RNA, 23 nt, Human
ucuguauuuccccaacauguaau

SEQ ID NO: 1463548 - RNA, 20 nt, Human
ucuguauuuccccaacaugu

SEQ ID NO: 1463549 - RNA, 23 nt, Human
ucugguaugaacuugaggacaca

SEQ ID NO: 1463550 - RNA, 22 nt, Human
ucugguaugaacuugaggacac

SEQ ID NO: 1463551 - RNA, 14 nt, Human
agaauuacuguaac

SEQ ID NO: 1463552 - RNA, 20 nt, Human
agaauuccaggguauggcca

SEQ ID NO: 1463553 - RNA, 14 nt, Human
ucugggcugugggc

SEQ ID NO: 1463554 - RNA, 19 nt, Human
ucugggcugucuauucuag

SEQ ID NO: 1463555 - RNA, 13 nt, Human
ucugggggguggc

SEQ ID NO: 1463556 - RNA, 17 nt, Human
ucugggggguggccagg

SEQ ID NO: 1463557 - RNA, 18 nt, Human
ucugggggguggccaggc

SEQ ID NO: 1463558 - RNA, 19 nt, Human
ucugggggguggccaggcc

SEQ ID NO: 1463559 - RNA, 20 nt, Human
ucugggggguggccaggccg

SEQ ID NO: 1463560 - RNA, 13 nt, Human
agaauuacuguaa

SEQ ID NO: 1463561 - RNA, 20 nt, Human
agaauuacuguaacugauua

SEQ ID NO: 1463562 - RNA, 16 nt, Human
agaaugucauuuuggu

SEQ ID NO: 1463563 - RNA, 20 nt, Human
agaaugucauuuugguacuu

SEQ ID NO: 1463564 - RNA, 23 nt, Human
agaaugucauuuugguacuuugg

SEQ ID NO: 1463565 - RNA, 14 nt, Human
agaauguuaagacu

SEQ ID NO: 1463566 - RNA, 19 nt, Human
agaauguuaagacuugaca

SEQ ID NO: 1463567 - RNA, 21 nt, Human
agaauguuaagacuugacagu

SEQ ID NO: 1463568 - RNA, 17 nt, Human
agaaccccuacaugaaa

SEQ ID NO: 1463569 - RNA, 19 nt, Human
agaaccccuacaugaaaca

SEQ ID NO: 1463570 - RNA, 12 nt, Human
agacagaaaaaa

SEQ ID NO: 1463571 - RNA, 22 nt, Human
agacacgcacggcagccacagc

SEQ ID NO: 1463572 - RNA, 21 nt, Human
agacacgcacggcagccacag

SEQ ID NO: 1463573 - RNA, 20 nt, Human
agacacgcacggcagccaca

SEQ ID NO: 1463574 - RNA, 15 nt, Human
agacacgcacggcag

SEQ ID NO: 1463575 - RNA, 13 nt, Human
agacacgcacggc

SEQ ID NO: 1463576 - RNA, 17 nt, Human
agacagaaccccuacau

SEQ ID NO: 1463577 - RNA, 12 nt, Human
agacagaagaaa

SEQ ID NO: 1463578 - RNA, 14 nt, Human
agacagaagaaaca

SEQ ID NO: 1463579 - RNA, 15 nt, Human
agacagaagaaacaa

SEQ ID NO: 1463580 - RNA, 16 nt, Human
agacagaagaaacaag

SEQ ID NO: 1463581 - RNA, 17 nt, Human
agacagaagaaacaagg

SEQ ID NO: 1463582 - RNA, 16 nt, Human
agacacacugaagaag

SEQ ID NO: 1463583 - RNA, 13 nt, Human
agacacaccugag

SEQ ID NO: 1463584 - RNA, 14 nt, Human
agacacaccugagg

SEQ ID NO: 1463585 - RNA, 17 nt, Human
agacacacugaagaagc

SEQ ID NO: 1463586 - RNA, 19 nt, Human
ucuuacugucuuuuuucua

SEQ ID NO: 1463587 - RNA, 20 nt, Human
ucuuacuuauuaucuucagg

SEQ ID NO: 1463588 - RNA, 22 nt, Human
ucuuacugcuuaauucaaauaa

SEQ ID NO: 1463589 - RNA, 15 nt, Human
ucuuacuauuucaca

SEQ ID NO: 1463590 - RNA, 21 nt, Human
ucuuaccuguaugucuccagu

SEQ ID NO: 1463591 - RNA, 23 nt, Human
ucuuaccuguaugucuccaguau

SEQ ID NO: 1463592 - RNA, 23 nt, Human
ucuuagaugcaguucugaagaag

SEQ ID NO: 1463593 - RNA, 19 nt, Human
ucuuacaauaauucuauga

SEQ ID NO: 1463594 - RNA, 14 nt, Human
agacaguucaagaa

SEQ ID NO: 1463595 - RNA, 15 nt, Human
agacaguucaagaaa

SEQ ID NO: 1463596 - RNA, 22 nt, Human
agacauuuuaaaaaauggucac

SEQ ID NO: 1463597 - RNA, 19 nt, Human
agacauuuuaaaaaauggu

SEQ ID NO: 1463598 - RNA, 12 nt, Human
ucuucuuaugca

SEQ ID NO: 1463599 - RNA, 22 nt, Human
ucuucuuaauauguucuuuuaa

SEQ ID NO: 1463600 - RNA, 13 nt, Human
ucuucuugaaauu

SEQ ID NO: 1463601 - RNA, 17 nt, Human
ucuucuugaaauuuuaa

SEQ ID NO: 1463602 - RNA, 18 nt, Human
ucuucugaauaaagcaau

SEQ ID NO: 1463603 - RNA, 19 nt, Human
ucuucugagcuauuucauc

SEQ ID NO: 1463604 - RNA, 21 nt, Human
ucuucugagcuauuucaucua

SEQ ID NO: 1463605 - RNA, 17 nt, Human
ucuucugaauaaagcaa

SEQ ID NO: 1463606 - RNA, 18 nt, Human
ucuuauuucaugaaaauu

SEQ ID NO: 1463607 - RNA, 16 nt, Human
ucuuauuucaugaaaa

SEQ ID NO: 1463608 - RNA, 15 nt, Human
ucuuauucauuuucu

SEQ ID NO: 1463609 - RNA, 16 nt, Human
ucuuauucauuuucuc

SEQ ID NO: 1463610 - RNA, 14 nt, Human
ucuuauuucaugaa

SEQ ID NO: 1463611 - RNA, 18 nt, Human
ucuucuggacugguuuuc

SEQ ID NO: 1463612 - RNA, 15 nt, Human
agaccgaucggcggc

SEQ ID NO: 1463613 - RNA, 15 nt, Human
agaccggccugccag

SEQ ID NO: 1463614 - RNA, 17 nt, Human
agaccggccugccagga

SEQ ID NO: 1463615 - RNA, 18 nt, Human
agaccggccugccaggag

SEQ ID NO: 1463616 - RNA, 19 nt, Human
agaccggccugccaggagg

SEQ ID NO: 1463617 - RNA, 20 nt, Human
agaccggccugccaggagga

SEQ ID NO: 1463618 - RNA, 23 nt, Human
agaccggccugccaggaggaccc

SEQ ID NO: 1463619 - RNA, 20 nt, Human
agacauuuuaaaaaaugguc

SEQ ID NO: 1463620 - RNA, 13 nt, Human
agaccaaaauaaa

SEQ ID NO: 1463621 - RNA, 18 nt, Human
agaccucagugccuuccu

SEQ ID NO: 1463622 - RNA, 20 nt, Human
agaccucagugccuuccugu

SEQ ID NO: 1463623 - RNA, 18 nt, Human
agaccucugugcacuuau

SEQ ID NO: 1463624 - RNA, 13 nt, Human
agaccugaagaau

SEQ ID NO: 1463625 - RNA, 22 nt, Human
agacuggguaggaaagaggaag

SEQ ID NO: 1463626 - RNA, 18 nt, Human
agacuggguaggaaagag

SEQ ID NO: 1463627 - RNA, 19 nt, Human
agacuucccacggcuccuc

SEQ ID NO: 1463628 - RNA, 16 nt, Human
agacuuuauguaguuu

SEQ ID NO: 1463629 - RNA, 17 nt, Human
agacuuuauguaguuuu

SEQ ID NO: 1463630 - RNA, 20 nt, Human
agagacaaacaccucccagg

SEQ ID NO: 1463631 - RNA, 15 nt, Human
agagacagcccagga

SEQ ID NO: 1463632 - RNA, 14 nt, Human
agagacagcccagg

SEQ ID NO: 1463633 - RNA, 22 nt, Human
agagaauuucuaccauuucaga

SEQ ID NO: 1463634 - RNA, 23 nt, Human
agagaauuucuaccauuucagag

SEQ ID NO: 1463635 - RNA, 19 nt, Human
agagacaaacaccucccag

SEQ ID NO: 1463636 - RNA, 21 nt, Human
agagacaaacaccucccagga

SEQ ID NO: 1463637 - RNA, 14 nt, Human
ucuuuaauuuuaca

SEQ ID NO: 1463638 - RNA, 23 nt, Human
ucuugguugaaaauaaaaagauc

SEQ ID NO: 1463639 - RNA, 19 nt, Human
ucuugguugaaaauaaaaa

SEQ ID NO: 1463640 - RNA, 17 nt, Human
agacuccuucaacaauu

SEQ ID NO: 1463641 - RNA, 21 nt, Human
agacuccuucaacaauucuaa

SEQ ID NO: 1463642 - RNA, 13 nt, Human
ucuuucuuccaaa

SEQ ID NO: 1463643 - RNA, 13 nt, Human
ucugauacagaaa

SEQ ID NO: 1463644 - RNA, 15 nt, Human
ucugauaaugaaaau

SEQ ID NO: 1463645 - RNA, 16 nt, Human
ucugaguuuuaccaaa

SEQ ID NO: 1463646 - RNA, 14 nt, Human
ucugaguuuuacca

SEQ ID NO: 1463647 - RNA, 14 nt, Human
ucugagagaggcca

SEQ ID NO: 1463648 - RNA, 20 nt, Human
ucugagagaggccauucuuu

SEQ ID NO: 1463649 - RNA, 23 nt, Human
ucugaguguuuuaugagaaagcc

SEQ ID NO: 1463650 - RNA, 17 nt, Human
ucugaguuccugcaugc

SEQ ID NO: 1463651 - RNA, 17 nt, Human
agaaauuuauaaacuuu

SEQ ID NO: 1463652 - RNA, 16 nt, Human
agaaauuuauaaacuu

SEQ ID NO: 1463653 - RNA, 22 nt, Human
agaaauuaugugccagauuuau

SEQ ID NO: 1463654 - RNA, 21 nt, Human
agaaauuaugugccagauuua

SEQ ID NO: 1463655 - RNA, 13 nt, Human
agaaauuaugugc

SEQ ID NO: 1463656 - RNA, 18 nt, Human
ucugcaggucccuaauaa

SEQ ID NO: 1463657 - RNA, 17 nt, Human
ucugcaggucccuaaua

SEQ ID NO: 1463658 - RNA, 16 nt, Human
ucugcaggucccuaau

SEQ ID NO: 1463659 - RNA, 15 nt, Human
ucugcaggucccuaa

SEQ ID NO: 1463660 - RNA, 17 nt, Human
agaaaugaaaaaauaua

SEQ ID NO: 1463661 - RNA, 15 nt, Human
agaaaucuaaaaaac

SEQ ID NO: 1463662 - RNA, 22 nt, Human
agaaaucauuuugcaaucccuu

SEQ ID NO: 1463663 - RNA, 12 nt, Human
agaaaucuaaaa

SEQ ID NO: 1463664 - RNA, 14 nt, Human
agaaaucauagcug

SEQ ID NO: 1463665 - RNA, 15 nt, Human
agaaacuuucuuucu

SEQ ID NO: 1463666 - RNA, 15 nt, Human
agaaacuuuuuuauu

SEQ ID NO: 1463667 - RNA, 19 nt, Human
agaaacuuuuuuauuuaaa

SEQ ID NO: 1463668 - RNA, 13 nt, Human
agaaagccuucuu

SEQ ID NO: 1463669 - RNA, 15 nt, Human
agaaagccuucuuuu

SEQ ID NO: 1463670 - RNA, 13 nt, Human
agaaagcugccug

SEQ ID NO: 1463671 - RNA, 23 nt, Human
agaaaugaaaaaauauauaucaa

SEQ ID NO: 1463672 - RNA, 18 nt, Human
agaaaugaaaaaauauau

SEQ ID NO: 1463673 - RNA, 12 nt, Human
ucugaagaagau

SEQ ID NO: 1463674 - RNA, 17 nt, Human
agaaaucauuuugcaau

SEQ ID NO: 1463675 - RNA, 15 nt, Human
ucugaauuuuuaaac

SEQ ID NO: 1463676 - RNA, 16 nt, Human
ucugaauuuuuaaaca

SEQ ID NO: 1463677 - RNA, 17 nt, Human
ucugaauuuuuaaacaa

SEQ ID NO: 1463678 - RNA, 19 nt, Human
ucugaauuuuuaaacaagu

SEQ ID NO: 1463679 - RNA, 17 nt, Human
ucucucacuuguuuuau

SEQ ID NO: 1463680 - RNA, 21 nt, Human
ucucucacuuguuuuauuuaa

SEQ ID NO: 1463681 - RNA, 18 nt, Human
acuuucucaguuuucaua

SEQ ID NO: 1463682 - RNA, 15 nt, Human
ucucucauacccucc

SEQ ID NO: 1463683 - RNA, 12 nt, Human
ucucucaugaac

SEQ ID NO: 1463684 - RNA, 15 nt, Human
ucucucaugaaccuc

SEQ ID NO: 1463685 - RNA, 17 nt, Human
ucucucaugaaccucaa

SEQ ID NO: 1463686 - RNA, 22 nt, Human
ucucucaugaaccucaagcugc

SEQ ID NO: 1463687 - RNA, 15 nt, Human
ucucuggaauuugaa

SEQ ID NO: 1463688 - RNA, 19 nt, Human
ucucuggaauuugaaacac

SEQ ID NO: 1463689 - RNA, 20 nt, Human
ucucuggaagccccugggcc

SEQ ID NO: 1463690 - RNA, 19 nt, Human
ucucuggaagccccugggc

SEQ ID NO: 1463691 - RNA, 21 nt, Human
agaaaacuuguauuaugugug

SEQ ID NO: 1463692 - RNA, 14 nt, Human
agaaaaagaagcaa

SEQ ID NO: 1463693 - RNA, 23 nt, Human
agaaacacguaucccaccugaca

SEQ ID NO: 1463694 - RNA, 17 nt, Human
agaaacacccucacacu

SEQ ID NO: 1463695 - RNA, 21 nt, Human
ucucuuuaaaaggaaagaaaa

SEQ ID NO: 1463696 - RNA, 19 nt, Human
ucucuuuaaaaggaaagaa

SEQ ID NO: 1463697 - RNA, 18 nt, Human
ucucuuuaaaaggaaaga

SEQ ID NO: 1463698 - RNA, 21 nt, Human
ucucuugccucaaccucccaa

SEQ ID NO: 1463699 - RNA, 13 nt, Human
ucucuugccucaa

SEQ ID NO: 1463700 - RNA, 12 nt, Human
ucucuugauuuu

SEQ ID NO: 1463701 - RNA, 12 nt, Human
ucucuugccuca

SEQ ID NO: 1463702 - RNA, 16 nt, Human
ucucagcucacugcaa

SEQ ID NO: 1463703 - RNA, 15 nt, Human
ucucagcucacugca

SEQ ID NO: 1463704 - RNA, 18 nt, Human
ucucagcucacugcaacc

SEQ ID NO: 1463705 - RNA, 14 nt, Human
ucuccaaaccacuu

SEQ ID NO: 1463706 - RNA, 19 nt, Human
ucuccaguauccacuuugc

SEQ ID NO: 1463707 - RNA, 15 nt, Human
ucuccagugcaccug

SEQ ID NO: 1463708 - RNA, 16 nt, Human
acuuguguuuugcaag

SEQ ID NO: 1463709 - RNA, 12 nt, Human
ucuccucccagg

SEQ ID NO: 1463710 - RNA, 13 nt, Human
acuuucucaguuu

SEQ ID NO: 1463711 - RNA, 14 nt, Human
acuuucucaguuuu

SEQ ID NO: 1463712 - RNA, 17 nt, Human
acuuucucaguuuucau

SEQ ID NO: 1463713 - RNA, 12 nt, Human
acuuuaaagcgu

SEQ ID NO: 1463714 - RNA, 19 nt, Human
acuuuaauuaccaaccugu

SEQ ID NO: 1463715 - RNA, 19 nt, Human
ucuccuaagcuggagugca

SEQ ID NO: 1463716 - RNA, 17 nt, Human
ucuccauggcccugcca

SEQ ID NO: 1463717 - RNA, 16 nt, Human
ucuccauggcccugcc

SEQ ID NO: 1463718 - RNA, 24 nt, Human
ucuccauggcccugccaugcucuc

SEQ ID NO: 1463719 - RNA, 20 nt, Human
ucuccauggcccugccaugc

SEQ ID NO: 1463720 - RNA, 19 nt, Human
ucucccacuagacaagucc

SEQ ID NO: 1463721 - RNA, 14 nt, Human
acuugcucuugaug

SEQ ID NO: 1463722 - RNA, 16 nt, Human
acuugaggacacaugu

SEQ ID NO: 1463723 - RNA, 15 nt, Human
acuugaggacacaug

SEQ ID NO: 1463724 - RNA, 22 nt, Human
acuugcucagguacuuguaaau

SEQ ID NO: 1463725 - RNA, 20 nt, Human
acuugcucagguacuuguaa

SEQ ID NO: 1463726 - RNA, 23 nt, Human
acuugucccgggacaccuaggcu

SEQ ID NO: 1463727 - RNA, 24 nt, Human
acuugucauuguuauauaaucauu

SEQ ID NO: 1463728 - RNA, 16 nt, Human
acuugucaauaaaauc

SEQ ID NO: 1463729 - RNA, 13 nt, Human
acuugucauguga

SEQ ID NO: 1463730 - RNA, 23 nt, Human
acuugucauuguuauauaaucau

SEQ ID NO: 1463731 - RNA, 14 nt, Human
acuugaggacacau

SEQ ID NO: 1463732 - RNA, 13 nt, Human
acuugaggacaca

SEQ ID NO: 1463733 - RNA, 12 nt, Human
acuugaggacac

SEQ ID NO: 1463734 - RNA, 11 nt, Human
acuugaggaca

SEQ ID NO: 1463735 - RNA, 14 nt, Human
acuugagaccuaau

SEQ ID NO: 1463736 - RNA, 21 nt, Human
acuugagaccuaaucucugua

SEQ ID NO: 1463737 - RNA, 20 nt, Human
acuucucauuuuuuaaaaaa

SEQ ID NO: 1463738 - RNA, 21 nt, Human
ucucacagcuccaagaauuuc

SEQ ID NO: 1463739 - RNA, 14 nt, Human
ucucacuaaaucuu

SEQ ID NO: 1463740 - RNA, 19 nt, Human
acuucucauuuuuuaaaaa

SEQ ID NO: 1463741 - RNA, 13 nt, Human
acuggccccaccc

SEQ ID NO: 1463742 - RNA, 12 nt, Human
acuggccccacc

SEQ ID NO: 1463743 - RNA, 17 nt, Human
acuggccucaaagcaag

SEQ ID NO: 1463744 - RNA, 15 nt, Human
acuggccucaaagca

SEQ ID NO: 1463745 - RNA, 22 nt, Human
acuggccucaaagcaagcauuc

SEQ ID NO: 1463746 - RNA, 15 nt, Human
uccuuccaccaaguu

SEQ ID NO: 1463747 - RNA, 24 nt, Human
uccuucugagcccgguaagagcaa

SEQ ID NO: 1463748 - RNA, 15 nt, Human
uccuucuauucuagc

SEQ ID NO: 1463749 - RNA, 13 nt, Human
uccuugucacugg

SEQ ID NO: 1463750 - RNA, 13 nt, Human
ucgaagugcugag

SEQ ID NO: 1463751 - RNA, 12 nt, Human
ucgaagugcuga

SEQ ID NO: 1463752 - RNA, 13 nt, Human
uccuuucuggcuu

SEQ ID NO: 1463753 - RNA, 20 nt, Human
uccuuucuagagcacugcca

SEQ ID NO: 1463754 - RNA, 19 nt, Human
uccuuucuagagcacugcc

SEQ ID NO: 1463755 - RNA, 17 nt, Human
ucgagaucccaacacug

SEQ ID NO: 1463756 - RNA, 12 nt, Human
ucgaaugaaauu

SEQ ID NO: 1463757 - RNA, 17 nt, Human
ucgaaugaaauuaacug

SEQ ID NO: 1463758 - RNA, 15 nt, Human
ucgaaugacacuguu

SEQ ID NO: 1463759 - RNA, 14 nt, Human
ucgaaugacacugu

SEQ ID NO: 1463760 - RNA, 18 nt, Human
ucgagaucccaacacugc

SEQ ID NO: 1463761 - RNA, 21 nt, Human
ucgagaucccaacacugccag

SEQ ID NO: 1463762 - RNA, 13 nt, Human
acuggcuucagca

SEQ ID NO: 1463763 - RNA, 15 nt, Human
acuggcuucagcaag

SEQ ID NO: 1463764 - RNA, 13 nt, Human
acugccuucucaa

SEQ ID NO: 1463765 - RNA, 19 nt, Human
acugccuucucaacuccaa

SEQ ID NO: 1463766 - RNA, 20 nt, Human
acugccuucucaacuccaaa

SEQ ID NO: 1463767 - RNA, 14 nt, Human
acugcuguggccag

SEQ ID NO: 1463768 - RNA, 15 nt, Human
acugcuguggccagg

SEQ ID NO: 1463769 - RNA, 16 nt, Human
acugcuguggccagga

SEQ ID NO: 1463770 - RNA, 17 nt, Human
acugcuguggccaggag

SEQ ID NO: 1463771 - RNA, 13 nt, Human
acugcuuaauuca

SEQ ID NO: 1463772 - RNA, 16 nt, Human
acugcuuaauucaaau

SEQ ID NO: 1463773 - RNA, 18 nt, Human
acugcuguggccaggagg

SEQ ID NO: 1463774 - RNA, 19 nt, Human
acugcuguggccaggaggu

SEQ ID NO: 1463775 - RNA, 20 nt, Human
acugcuguggccaggaggug

SEQ ID NO: 1463776 - RNA, 17 nt, Human
acuggagugugcguggu

SEQ ID NO: 1463777 - RNA, 22 nt, Human
acuggagugugcgugguggucc

SEQ ID NO: 1463778 - RNA, 14 nt, Human
acuggcacagaggu

SEQ ID NO: 1463779 - RNA, 12 nt, Human
acuggcacagag

SEQ ID NO: 1463780 - RNA, 21 nt, Human
acugccuauuuuaauaaacac

SEQ ID NO: 1463781 - RNA, 16 nt, Human
acugccuauuuuaaua

SEQ ID NO: 1463782 - RNA, 15 nt, Human
acugcauuauauuua

SEQ ID NO: 1463783 - RNA, 14 nt, Human
acugcauuauauuu

SEQ ID NO: 1463784 - RNA, 15 nt, Human
acugcauccagccug

SEQ ID NO: 1463785 - RNA, 14 nt, Human
acugcauccagccu

SEQ ID NO: 1463786 - RNA, 20 nt, Human
acugcauacuuuuuaaaugu

SEQ ID NO: 1463787 - RNA, 23 nt, Human
acugcauacuuuuuaaauguaaa

SEQ ID NO: 1463788 - RNA, 12 nt, Human
acugcaugcacu

SEQ ID NO: 1463789 - RNA, 14 nt, Human
acugcaugcacuuc

SEQ ID NO: 1463790 - RNA, 18 nt, Human
acugcaugcacuucuuac

SEQ ID NO: 1463791 - RNA, 13 nt, Human
acugcauacuuuu

SEQ ID NO: 1463792 - RNA, 16 nt, Human
acugcauacuuuuuaa

SEQ ID NO: 1463793 - RNA, 17 nt, Human
acugcauacuuuuuaaa

SEQ ID NO: 1463794 - RNA, 18 nt, Human
acugcauacuuuuuaaau

SEQ ID NO: 1463795 - RNA, 20 nt, Human
ucuaaagccauuguaguccu

SEQ ID NO: 1463796 - RNA, 14 nt, Human
ucuaccauuucaga

SEQ ID NO: 1463797 - RNA, 15 nt, Human
ucuaccauuucagag

SEQ ID NO: 1463798 - RNA, 18 nt, Human
ucuaccauuucagagagg

SEQ ID NO: 1463799 - RNA, 19 nt, Human
acuguuguagaagacaaaa

SEQ ID NO: 1463800 - RNA, 18 nt, Human
acuuauaguacaugauaa

SEQ ID NO: 1463801 - RNA, 17 nt, Human
acuuauaguacaugaua

SEQ ID NO: 1463802 - RNA, 15 nt, Human
acuuauaguacauga

SEQ ID NO: 1463803 - RNA, 14 nt, Human
acuuauaguacaug

SEQ ID NO: 1463804 - RNA, 18 nt, Human
acuuauauggaaauucug

SEQ ID NO: 1463805 - RNA, 13 nt, Human
acuuacuuuuucu

SEQ ID NO: 1463806 - RNA, 21 nt, Human
acuuacuuuuucuggucucua

SEQ ID NO: 1463807 - RNA, 19 nt, Human
acuuacaugauucauuuua

SEQ ID NO: 1463808 - RNA, 17 nt, Human
acuuacaugauucauuu

SEQ ID NO: 1463809 - RNA, 18 nt, Human
acuuacaugauucauuuu

SEQ ID NO: 1463810 - RNA, 21 nt, Human
acuuaccaggcaccaaaagaa

SEQ ID NO: 1463811 - RNA, 22 nt, Human
acuuaccaggcaccaaaagaag

SEQ ID NO: 1463812 - RNA, 18 nt, Human
acuuaccaggcaccaaaa

SEQ ID NO: 1463813 - RNA, 21 nt, Human
acugugugcucaggagcccug

SEQ ID NO: 1463814 - RNA, 20 nt, Human
acugugugcucaggagcccu

SEQ ID NO: 1463815 - RNA, 19 nt, Human
acugugugcucaggagccc

SEQ ID NO: 1463816 - RNA, 15 nt, Human
acugugugcucagga

SEQ ID NO: 1463817 - RNA, 12 nt, Human
acugugugcuca

SEQ ID NO: 1463818 - RNA, 21 nt, Human
acuguguauuccaagacaugu

SEQ ID NO: 1463819 - RNA, 17 nt, Human
acuguguacauaacuga

SEQ ID NO: 1463820 - RNA, 15 nt, Human
acuguguauuccaag

SEQ ID NO: 1463821 - RNA, 16 nt, Human
acuguguauuccaaga

SEQ ID NO: 1463822 - RNA, 19 nt, Human
acuguguaagggccagaaa

SEQ ID NO: 1463823 - RNA, 21 nt, Human
acuguguaagggccagaaaua

SEQ ID NO: 1463824 - RNA, 12 nt, Human
acuguguacaua

SEQ ID NO: 1463825 - RNA, 16 nt, Human
acuguguacauaacug

SEQ ID NO: 1463826 - RNA, 18 nt, Human
acuguguacauaacugaa

SEQ ID NO: 1463827 - RNA, 18 nt, Human
acuguggguagacacaca

SEQ ID NO: 1463828 - RNA, 17 nt, Human
acugggagaaaugaaaa

SEQ ID NO: 1463829 - RNA, 15 nt, Human
acugucacuguuccu

SEQ ID NO: 1463830 - RNA, 16 nt, Human
acugggagaaaugaaa

SEQ ID NO: 1463831 - RNA, 18 nt, Human
acugggacaggggagaac

SEQ ID NO: 1463832 - RNA, 19 nt, Human
acugucagcagggacugua

SEQ ID NO: 1463833 - RNA, 22 nt, Human
acugucagcagggacuguaaac

SEQ ID NO: 1463834 - RNA, 13 nt, Human
ucguaaaauuaag

SEQ ID NO: 1463835 - RNA, 16 nt, Human
ucguaaaauuaagaaa

SEQ ID NO: 1463836 - RNA, 22 nt, Human
ucguuuucaaaauuguuacaaa

SEQ ID NO: 1463837 - RNA, 14 nt, Human
ucguuuuuuacaaa

SEQ ID NO: 1463838 - RNA, 19 nt, Human
uccuaaauauauuuuaaga

SEQ ID NO: 1463839 - RNA, 14 nt, Human
uccuaaauauuaug

SEQ ID NO: 1463840 - RNA, 21 nt, Human
uccuaaauauuaugagaugcu

SEQ ID NO: 1463841 - RNA, 20 nt, Human
ucccuggguagcgggggagg

SEQ ID NO: 1463842 - RNA, 21 nt, Human
ucccuuaauauccuaaacauc

SEQ ID NO: 1463843 - RNA, 17 nt, Human
ucccuuaauauccuaaa

SEQ ID NO: 1463844 - RNA, 14 nt, Human
ucccuuaauauccu

SEQ ID NO: 1463845 - RNA, 13 nt, Human
acucauuagacug

SEQ ID NO: 1463846 - RNA, 14 nt, Human
acucauuagacugg

SEQ ID NO: 1463847 - RNA, 15 nt, Human
acucauuagacugga

SEQ ID NO: 1463848 - RNA, 21 nt, Human
acucauuagacuggaacuuga

SEQ ID NO: 1463849 - RNA, 18 nt, Human
acucaugugacucuuucc

SEQ ID NO: 1463850 - RNA, 19 nt, Human
acucaugugacucuuucca

SEQ ID NO: 1463851 - RNA, 15 nt, Human
acucacuuucuagau

SEQ ID NO: 1463852 - RNA, 21 nt, Human
acuacuagggaaaugccuuug

SEQ ID NO: 1463853 - RNA, 23 nt, Human
uccccuauguggaaguggggcgg

SEQ ID NO: 1463854 - RNA, 14 nt, Human
uccccuccaucccu

SEQ ID NO: 1463855 - RNA, 15 nt, Human
uccccuccaucccug

SEQ ID NO: 1463856 - RNA, 16 nt, Human
uccccuccaucccugg

SEQ ID NO: 1463857 - RNA, 20 nt, Human
uccccuccaucccuggcccc

SEQ ID NO: 1463858 - RNA, 18 nt, Human
uccccuccaucccuggcc

SEQ ID NO: 1463859 - RNA, 24 nt, Human
uccccuuugcuucauucaagucag

SEQ ID NO: 1463860 - RNA, 18 nt, Human
acucacuaauucauuaau

SEQ ID NO: 1463861 - RNA, 20 nt, Human
acucacuaauucauuaaucu

SEQ ID NO: 1463862 - RNA, 21 nt, Human
ucccgggacaccuaggcuagg

SEQ ID NO: 1463863 - RNA, 17 nt, Human
acgugggcauucaaaug

SEQ ID NO: 1463864 - RNA, 20 nt, Human
acgugggcauucaaauguau

SEQ ID NO: 1463865 - RNA, 22 nt, Human
acguauaaaagccuguuuaaga

SEQ ID NO: 1463866 - RNA, 20 nt, Human
acguacugcagccuccagag

SEQ ID NO: 1463867 - RNA, 13 nt, Human
acguauuuaauag

SEQ ID NO: 1463868 - RNA, 15 nt, Human
acguauuuaauagca

SEQ ID NO: 1463869 - RNA, 15 nt, Human
acggggacucagccc

SEQ ID NO: 1463870 - RNA, 18 nt, Human
acgggacugcggaggaag

SEQ ID NO: 1463871 - RNA, 16 nt, Human
ucccaaguugugcuug

SEQ ID NO: 1463872 - RNA, 20 nt, Human
ucccaaguagcugagacuac

SEQ ID NO: 1463873 - RNA, 16 nt, Human
ucccaaguagaaucuc

SEQ ID NO: 1463874 - RNA, 17 nt, Human
ucccaaguagaaucuca

SEQ ID NO: 1463875 - RNA, 19 nt, Human
ucccaaguagaaucucagu

SEQ ID NO: 1463876 - RNA, 13 nt, Human
ucccaaagugcug

SEQ ID NO: 1463877 - RNA, 21 nt, Human
ucccaaaguccugggauuaca

SEQ ID NO: 1463878 - RNA, 20 nt, Human
ucccaaaagcccauucauuc

SEQ ID NO: 1463879 - RNA, 14 nt, Human
ucccaaaaaacuac

SEQ ID NO: 1463880 - RNA, 21 nt, Human
ucccaaagaaguucugguaug

SEQ ID NO: 1463881 - RNA, 20 nt, Human
ucccaaaauguugaaauaug

SEQ ID NO: 1463882 - RNA, 14 nt, Human
uccauucuggaagu

SEQ ID NO: 1463883 - RNA, 13 nt, Human
uccauucuggaag

SEQ ID NO: 1463884 - RNA, 12 nt, Human
uccauucuggaa

SEQ ID NO: 1463885 - RNA, 14 nt, Human
uccauucuccugag

SEQ ID NO: 1463886 - RNA, 20 nt, Human
uccaucucuuguuuaaauuc

SEQ ID NO: 1463887 - RNA, 20 nt, Human
uccauccuugagucaaaaaa

SEQ ID NO: 1463888 - RNA, 15 nt, Human
acuacaguuagggcu

SEQ ID NO: 1463889 - RNA, 16 nt, Human
acuacagucuaaagcu

SEQ ID NO: 1463890 - RNA, 17 nt, Human
acuacagucuaaagcug

SEQ ID NO: 1463891 - RNA, 20 nt, Human
ucccagcaugcugagauuac

SEQ ID NO: 1463892 - RNA, 20 nt, Human
acuacaggcacacaccacca

SEQ ID NO: 1463893 - RNA, 17 nt, Human
acuacaggcgugagcca

SEQ ID NO: 1463894 - RNA, 22 nt, Human
acuacacacuguguacugcagu

SEQ ID NO: 1463895 - RNA, 16 nt, Human
acuacaaccaauggaa

SEQ ID NO: 1463896 - RNA, 14 nt, Human
ucccaucccugcgu

SEQ ID NO: 1463897 - RNA, 12 nt, Human
ucccaucccugc

SEQ ID NO: 1463898 - RNA, 14 nt, Human
uccccauucuuccu

SEQ ID NO: 1463899 - RNA, 17 nt, Human
uccccauucuuccuagu

SEQ ID NO: 1463900 - RNA, 22 nt, Human
uccccauucuuccuaguuuucu

SEQ ID NO: 1463901 - RNA, 19 nt, Human
uccccauuuagguuucuga

SEQ ID NO: 1463902 - RNA, 14 nt, Human
uccacucaugugac

SEQ ID NO: 1463903 - RNA, 21 nt, Human
uccacucaugugacucuuucc

SEQ ID NO: 1463904 - RNA, 21 nt, Human
accuuagaccaccaagccuug

SEQ ID NO: 1463905 - RNA, 20 nt, Human
accuuagaccaccaagccuu

SEQ ID NO: 1463906 - RNA, 19 nt, Human
accuuagaccaccaagccu

SEQ ID NO: 1463907 - RNA, 18 nt, Human
accuuagaccaccaagcc

SEQ ID NO: 1463908 - RNA, 22 nt, Human
accuuagaccaccaagccuuga

SEQ ID NO: 1463909 - RNA, 15 nt, Human
uccagaccugaagaa

SEQ ID NO: 1463910 - RNA, 16 nt, Human
uccagaccugaagaau

SEQ ID NO: 1463911 - RNA, 22 nt, Human
uccagacugcuuccaauuuucu

SEQ ID NO: 1463912 - RNA, 23 nt, Human
uccagacugcuuccaauuuucug

SEQ ID NO: 1463913 - RNA, 15 nt, Human
uccagagacaacagg

SEQ ID NO: 1463914 - RNA, 14 nt, Human
uccagagacaacag

SEQ ID NO: 1463915 - RNA, 14 nt, Human
acgagaaaacaaua

SEQ ID NO: 1463916 - RNA, 15 nt, Human
uccaggcuguguuug

SEQ ID NO: 1463917 - RNA, 16 nt, Human
uccagagacaacaggu

SEQ ID NO: 1463918 - RNA, 13 nt, Human
uccaggcaccagg

SEQ ID NO: 1463919 - RNA, 21 nt, Human
uccaggcaccaggacuagggc

SEQ ID NO: 1463920 - RNA, 21 nt, Human
uccaggcaggucugaagcuca

SEQ ID NO: 1463921 - RNA, 15 nt, Human
uccaacccuagcaaa

SEQ ID NO: 1463922 - RNA, 21 nt, Human
uccaaccggcuuuguggcacu

SEQ ID NO: 1463923 - RNA, 14 nt, Human
uccaacccuagcaa

SEQ ID NO: 1463924 - RNA, 13 nt, Human
uccaacccuagca

SEQ ID NO: 1463925 - RNA, 15 nt, Human
uccaacuuggcugca

SEQ ID NO: 1463926 - RNA, 23 nt, Human
uccaacuuggcugcaggaaucuu

SEQ ID NO: 1463927 - RNA, 16 nt, Human
accuggguugcagaca

SEQ ID NO: 1463928 - RNA, 18 nt, Human
accuggguugcagacagg

SEQ ID NO: 1463929 - RNA, 20 nt, Human
accuggguugcagacaggaa

SEQ ID NO: 1463930 - RNA, 21 nt, Human
accuagggugauauuaaccag

SEQ ID NO: 1463931 - RNA, 14 nt, Human
accuaguuuuccau

SEQ ID NO: 1463932 - RNA, 17 nt, Human
accuaaucucuguaaag

SEQ ID NO: 1463933 - RNA, 21 nt, Human
accuaaucucuguaaagcuaa

SEQ ID NO: 1463934 - RNA, 13 nt, Human
accgcuaaaagaa

SEQ ID NO: 1463935 - RNA, 15 nt, Human
accgcuaaaagaaac

SEQ ID NO: 1463936 - RNA, 16 nt, Human
accgcuaaaagaaacu

SEQ ID NO: 1463937 - RNA, 23 nt, Human
accuaaacauagaaauugccuga

SEQ ID NO: 1463938 - RNA, 12 nt, Human
accuaaagaaaa

SEQ ID NO: 1463939 - RNA, 13 nt, Human
accuaaagaaaaa

SEQ ID NO: 1463940 - RNA, 17 nt, Human
accuaaagaaaaacaaa

SEQ ID NO: 1463941 - RNA, 13 nt, Human
ucaucucagcuca

SEQ ID NO: 1463942 - RNA, 16 nt, Human
ucaugaauuaguuuua

SEQ ID NO: 1463943 - RNA, 12 nt, Human
ucaugaauguaa

SEQ ID NO: 1463944 - RNA, 14 nt, Human
ucaucuaggauuuu

SEQ ID NO: 1463945 - RNA, 18 nt, Human
ucaucuagguaaauuaca

SEQ ID NO: 1463946 - RNA, 22 nt, Human
ucauccucuccacagcugccuc

SEQ ID NO: 1463947 - RNA, 12 nt, Human
ucauccugcagg

SEQ ID NO: 1463948 - RNA, 13 nt, Human
ucauccugcaggc

SEQ ID NO: 1463949 - RNA, 19 nt, Human
accucccucaaccucaucc

SEQ ID NO: 1463950 - RNA, 16 nt, Human
accucaacugccuacu

SEQ ID NO: 1463951 - RNA, 22 nt, Human
accucaacugccuacuccaaaa

SEQ ID NO: 1463952 - RNA, 22 nt, Human
accucuccagccucagcucuca

SEQ ID NO: 1463953 - RNA, 20 nt, Human
accucuccagccucagcucu

SEQ ID NO: 1463954 - RNA, 18 nt, Human
accucuccagccucagcu

SEQ ID NO: 1463955 - RNA, 16 nt, Human
accucuccagccucag

SEQ ID NO: 1463956 - RNA, 23 nt, Human
accucucaauauucaauaaagcu

SEQ ID NO: 1463957 - RNA, 21 nt, Human
accucucaauauucaauaaag

SEQ ID NO: 1463958 - RNA, 20 nt, Human
accucucaauauucaauaaa

SEQ ID NO: 1463959 - RNA, 19 nt, Human
accucucaauauucaauaa

SEQ ID NO: 1463960 - RNA, 12 nt, Human
accucucaauau

SEQ ID NO: 1463961 - RNA, 14 nt, Human
accucuaaauucuu

SEQ ID NO: 1463962 - RNA, 17 nt, Human
accucuccccuggaacu

SEQ ID NO: 1463963 - RNA, 12 nt, Human
accugagcuaaa

SEQ ID NO: 1463964 - RNA, 22 nt, Human
accugagcuaaauaaagauauu

SEQ ID NO: 1463965 - RNA, 16 nt, Human
accugaccccugcuca

SEQ ID NO: 1463966 - RNA, 17 nt, Human
accugaccccugcucag

SEQ ID NO: 1463967 - RNA, 23 nt, Human
accugaccccugcucaguaaagc

SEQ ID NO: 1463968 - RNA, 22 nt, Human
accugagucacccuaccugugc

SEQ ID NO: 1463969 - RNA, 23 nt, Human
accugagucacccuaccugugcc

SEQ ID NO: 1463970 - RNA, 21 nt, Human
accugagucguacagaaagcu

SEQ ID NO: 1463971 - RNA, 17 nt, Human
accucgugauccacccg

SEQ ID NO: 1463972 - RNA, 21 nt, Human
ucaugaauuaguuuuauaugc

SEQ ID NO: 1463973 - RNA, 13 nt, Human
ucaugaauguaaa

SEQ ID NO: 1463974 - RNA, 14 nt, Human
ucaugaauguaaau

SEQ ID NO: 1463975 - RNA, 19 nt, Human
ucaugaauguaaauuugua

SEQ ID NO: 1463976 - RNA, 20 nt, Human
ucaugaauguaaauuuguac

SEQ ID NO: 1463977 - RNA, 21 nt, Human
ucaugaauguaaauuuguacu

SEQ ID NO: 1463978 - RNA, 16 nt, Human
ucaugauccaacuaau

SEQ ID NO: 1463979 - RNA, 18 nt, Human
ucauuaaucugccucccu

SEQ ID NO: 1463980 - RNA, 17 nt, Human
ucauuaaucugccuccc

SEQ ID NO: 1463981 - RNA, 12 nt, Human
ucauuacuauaa

SEQ ID NO: 1463982 - RNA, 18 nt, Human
ucauucuuauuucaugaa

SEQ ID NO: 1463983 - RNA, 14 nt, Human
ucauucuuauuuca

SEQ ID NO: 1463984 - RNA, 12 nt, Human
uauuuuuaucuu

SEQ ID NO: 1463985 - RNA, 18 nt, Human
uauuuuuacauucugaau

SEQ ID NO: 1463986 - RNA, 19 nt, Human
ucaaaauuguuacaaauug

SEQ ID NO: 1463987 - RNA, 16 nt, Human
ucaaaauuguuacaaa

SEQ ID NO: 1463988 - RNA, 16 nt, Human
ucaaaauauuuguaca

SEQ ID NO: 1463989 - RNA, 17 nt, Human
ucaaaauauuuguacau

SEQ ID NO: 1463990 - RNA, 19 nt, Human
ucaaaauauuuguacauag

SEQ ID NO: 1463991 - RNA, 18 nt, Human
ucaaaauauuuguacaua

SEQ ID NO: 1463992 - RNA, 21 nt, Human
ucaaaauaugccccauucaac

SEQ ID NO: 1463993 - RNA, 14 nt, Human
ucaaaguuuaauaa

SEQ ID NO: 1463994 - RNA, 13 nt, Human
ucaaaguuuaaua

SEQ ID NO: 1463995 - RNA, 19 nt, Human
ucaaagcuguguguuugga

SEQ ID NO: 1463996 - RNA, 15 nt, Human
ucaaagcuuuuucca

SEQ ID NO: 1463997 - RNA, 16 nt, Human
ucaaagcuuuuuccag

SEQ ID NO: 1463998 - RNA, 14 nt, Human
ucaaagcugaaaug

SEQ ID NO: 1463999 - RNA, 24 nt, Human
ucaaaauuagugcuuuuuguguca

SEQ ID NO: 1464000 - RNA, 21 nt, Human
ucaaacaccaacauaaaaaug

SEQ ID NO: 1464001 - RNA, 16 nt, Human
acaugaaguccaagca

SEQ ID NO: 1464002 - RNA, 19 nt, Human
acaugaagcuguuguguga

SEQ ID NO: 1464003 - RNA, 13 nt, Human
acaugaagcuguu

SEQ ID NO: 1464004 - RNA, 20 nt, Human
ucaaauacgugggcauucaa

SEQ ID NO: 1464005 - RNA, 22 nt, Human
ucaagaacacagcccugcuucu

SEQ ID NO: 1464006 - RNA, 21 nt, Human
ucaagaaagcuucaaacugca

SEQ ID NO: 1464007 - RNA, 17 nt, Human
ucaagaaauaaguuuuu

SEQ ID NO: 1464008 - RNA, 14 nt, Human
ucaagaaauaaguu

SEQ ID NO: 1464009 - RNA, 21 nt, Human
ucaagaauaaucacgcuuucc

SEQ ID NO: 1464010 - RNA, 15 nt, Human
ucaagagacugaguc

SEQ ID NO: 1464011 - RNA, 15 nt, Human
ucaacagugaagaca

SEQ ID NO: 1464012 - RNA, 17 nt, Human
ucaacagugaagacaga

SEQ ID NO: 1464013 - RNA, 22 nt, Human
ucaacagugaagacagaaguuu

SEQ ID NO: 1464014 - RNA, 18 nt, Human
ucaacagugaagacagaa

SEQ ID NO: 1464015 - RNA, 14 nt, Human
ucaacaguuuuccu

SEQ ID NO: 1464016 - RNA, 15 nt, Human
ucaacaguuuuccua

SEQ ID NO: 1464017 - RNA, 17 nt, Human
ucaacaguuuuccuaug

SEQ ID NO: 1464018 - RNA, 20 nt, Human
ucaacaguuuuccuaugcuu

SEQ ID NO: 1464019 - RNA, 22 nt, Human
ucaacaguuuuccuaugcuuug

SEQ ID NO: 1464020 - RNA, 23 nt, Human
ucaacaguuuuccuaugcuuuga

SEQ ID NO: 1464021 - RNA, 12 nt, Human
ucaagaaacuga

SEQ ID NO: 1464022 - RNA, 13 nt, Human
ucaagaaacugag

SEQ ID NO: 1464023 - RNA, 17 nt, Human
ucaagaaacugaggaau

SEQ ID NO: 1464024 - RNA, 18 nt, Human
ucaagaaacugaggaauu

SEQ ID NO: 1464025 - RNA, 20 nt, Human
ucaagaaacugaggaauuuu

SEQ ID NO: 1464026 - RNA, 22 nt, Human
ucaagaaacugaggaauuuucu

SEQ ID NO: 1464027 - RNA, 23 nt, Human
ucaagaaacugaggaauuuucuu

SEQ ID NO: 1464028 - RNA, 16 nt, Human
ucaagggucaggccuu

SEQ ID NO: 1464029 - RNA, 13 nt, Human
ucaagggucaggc

SEQ ID NO: 1464030 - RNA, 15 nt, Human
ucaagggucaggccu

SEQ ID NO: 1464031 - RNA, 13 nt, Human
acauuccauccuu

SEQ ID NO: 1464032 - RNA, 15 nt, Human
acauuccaacucgua

SEQ ID NO: 1464033 - RNA, 22 nt, Human
acauuccaacucguauagcaug

SEQ ID NO: 1464034 - RNA, 14 nt, Human
ucaacaauucuaaa

SEQ ID NO: 1464035 - RNA, 15 nt, Human
ucaacaauucuaaaa

SEQ ID NO: 1464036 - RNA, 17 nt, Human
ucaacaauucuaaaaug

SEQ ID NO: 1464037 - RNA, 22 nt, Human
acauuaaauuuuuuuuacauuu

SEQ ID NO: 1464038 - RNA, 18 nt, Human
acaugucuguucuacaua

SEQ ID NO: 1464039 - RNA, 21 nt, Human
acauguccagugggaggugag

SEQ ID NO: 1464040 - RNA, 19 nt, Human
acauguccuucugagcccg

SEQ ID NO: 1464041 - RNA, 17 nt, Human
acaugucuguucuacau

SEQ ID NO: 1464042 - RNA, 19 nt, Human
acauuaggaaaaguugcua

SEQ ID NO: 1464043 - RNA, 13 nt, Human
acauuaacucauu

SEQ ID NO: 1464044 - RNA, 14 nt, Human
acauuaacucauua

SEQ ID NO: 1464045 - RNA, 15 nt, Human
acauuaacucauuag

SEQ ID NO: 1464046 - RNA, 22 nt, Human
acauuaacucauuagacuggaa

SEQ ID NO: 1464047 - RNA, 22 nt, Human
uaugaacuugaggacacauguc

SEQ ID NO: 1464048 - RNA, 23 nt, Human
uaugaacuugaggacacaugucc

SEQ ID NO: 1464049 - RNA, 14 nt, Human
uaugaagaacugag

SEQ ID NO: 1464050 - RNA, 21 nt, Human
uaugaacuugaggacacaugu

SEQ ID NO: 1464051 - RNA, 20 nt, Human
uaugaacuugaggacacaug

SEQ ID NO: 1464052 - RNA, 19 nt, Human
uaugaacuugaggacacau

SEQ ID NO: 1464053 - RNA, 21 nt, Human
uaugaaauauuauguuaaaac

SEQ ID NO: 1464054 - RNA, 16 nt, Human
uaugaagaacugagga

SEQ ID NO: 1464055 - RNA, 17 nt, Human
uaugaagaacugaggag

SEQ ID NO: 1464056 - RNA, 21 nt, Human
uauuuccccaacauguaauaa

SEQ ID NO: 1464057 - RNA, 20 nt, Human
acaguuuaauaccacagcuu

SEQ ID NO: 1464058 - RNA, 15 nt, Human
acaguuuauuuguug

SEQ ID NO: 1464059 - RNA, 14 nt, Human
acauaaaaaggaca

SEQ ID NO: 1464060 - RNA, 14 nt, Human
acauaccuaagaag

SEQ ID NO: 1464061 - RNA, 12 nt, Human
acauacucauuu

SEQ ID NO: 1464062 - RNA, 13 nt, Human
acauacucauuuu

SEQ ID NO: 1464063 - RNA, 14 nt, Human
acauacucauuuuu

SEQ ID NO: 1464064 - RNA, 16 nt, Human
acauacucauuuuuca

SEQ ID NO: 1464065 - RNA, 17 nt, Human
acauacucauuuuucau

SEQ ID NO: 1464066 - RNA, 16 nt, Human
acauagaaauugccug

SEQ ID NO: 1464067 - RNA, 21 nt, Human
acauagaaauugccugacgaa

SEQ ID NO: 1464068 - RNA, 20 nt, Human
acaguuuuccuaugcuuuga

SEQ ID NO: 1464069 - RNA, 12 nt, Human
acaucucauuuu

SEQ ID NO: 1464070 - RNA, 16 nt, Human
acaucaccacaguuua

SEQ ID NO: 1464071 - RNA, 15 nt, Human
acaucacuuguacaa

SEQ ID NO: 1464072 - RNA, 16 nt, Human
acaucacuuguacaaa

SEQ ID NO: 1464073 - RNA, 19 nt, Human
acaucacuuguacaaaaua

SEQ ID NO: 1464074 - RNA, 22 nt, Human
uauuuggugauuacauuuuaaa

SEQ ID NO: 1464075 - RNA, 17 nt, Human
uauuuggugauuacauu

SEQ ID NO: 1464076 - RNA, 19 nt, Human
acauaguauucaugacuau

SEQ ID NO: 1464077 - RNA, 14 nt, Human
acauaguauucaug

SEQ ID NO: 1464078 - RNA, 20 nt, Human
acauagugggacccugucuc

SEQ ID NO: 1464079 - RNA, 15 nt, Human
acauaguuauuuauu

SEQ ID NO: 1464080 - RNA, 19 nt, Human
acauauauaacaaugcugu

SEQ ID NO: 1464081 - RNA, 16 nt, Human
acauagacagaagaaa

SEQ ID NO: 1464082 - RNA, 18 nt, Human
acauagacagaagaaaca

SEQ ID NO: 1464083 - RNA, 17 nt, Human
acauagacagaagaaac

SEQ ID NO: 1464084 - RNA, 20 nt, Human
accacuuuuugcagcuuucu

SEQ ID NO: 1464085 - RNA, 18 nt, Human
accacuuuuugcagcuuu

SEQ ID NO: 1464086 - RNA, 24 nt, Human
accagaaagcaguugagacaagaa

SEQ ID NO: 1464087 - RNA, 17 nt, Human
accacuuuuugcagcuu

SEQ ID NO: 1464088 - RNA, 16 nt, Human
accacuuuuugcagcu

SEQ ID NO: 1464089 - RNA, 15 nt, Human
accacuuuuugcagc

SEQ ID NO: 1464090 - RNA, 14 nt, Human
accacuuuuugcag

SEQ ID NO: 1464091 - RNA, 13 nt, Human
accacuuuuugca

SEQ ID NO: 1464092 - RNA, 23 nt, Human
accagaaagcaguugagacaaga

SEQ ID NO: 1464093 - RNA, 21 nt, Human
accagacuacuugggagcacc

SEQ ID NO: 1464094 - RNA, 23 nt, Human
accagacuacuugggagcaccgc

SEQ ID NO: 1464095 - RNA, 18 nt, Human
accacuuguguuuugcaa

SEQ ID NO: 1464096 - RNA, 21 nt, Human
accacugcugauauuuucucu

SEQ ID NO: 1464097 - RNA, 14 nt, Human
accagccgugagca

SEQ ID NO: 1464098 - RNA, 19 nt, Human
accagccgugagcauguuu

SEQ ID NO: 1464099 - RNA, 18 nt, Human
accaggcuugccugcagg

SEQ ID NO: 1464100 - RNA, 22 nt, Human
accagccgugagcauguuugga

SEQ ID NO: 1464101 - RNA, 19 nt, Human
accaggcuugccugcaggc

SEQ ID NO: 1464102 - RNA, 19 nt, Human
ucaccugagucacccuacc

SEQ ID NO: 1464103 - RNA, 18 nt, Human
ucacuagcccuccuuuuu

SEQ ID NO: 1464104 - RNA, 21 nt, Human
ucacuagcccuccuuuuucca

SEQ ID NO: 1464105 - RNA, 22 nt, Human
ucaccuuagaccaccaagccuu

SEQ ID NO: 1464106 - RNA, 21 nt, Human
ucaccuuagaccaccaagccu

SEQ ID NO: 1464107 - RNA, 20 nt, Human
ucaccuuagaccaccaagcc

SEQ ID NO: 1464108 - RNA, 19 nt, Human
ucaccuuagaccaccaagc

SEQ ID NO: 1464109 - RNA, 16 nt, Human
ucaccuuagaccacca

SEQ ID NO: 1464110 - RNA, 23 nt, Human
ucaauucuucccuaucuuugcca

SEQ ID NO: 1464111 - RNA, 19 nt, Human
ucaauucuucccuaucuuu

SEQ ID NO: 1464112 - RNA, 17 nt, Human
ucaauucuucccuaucu

SEQ ID NO: 1464113 - RNA, 15 nt, Human
ucaauucuugccaaa

SEQ ID NO: 1464114 - RNA, 14 nt, Human
accacaaacuguaa

SEQ ID NO: 1464115 - RNA, 13 nt, Human
accaaucaugaau

SEQ ID NO: 1464116 - RNA, 15 nt, Human
accaaucaugaauua

SEQ ID NO: 1464117 - RNA, 14 nt, Human
ucaagucagcucuu

SEQ ID NO: 1464118 - RNA, 19 nt, Human
ucacccagguuggagugca

SEQ ID NO: 1464119 - RNA, 19 nt, Human
ucacccaggcuggacugca

SEQ ID NO: 1464120 - RNA, 18 nt, Human
ucaccaguguguggcuuu

SEQ ID NO: 1464121 - RNA, 23 nt, Human
ucaccaguguguggcuuucagag

SEQ ID NO: 1464122 - RNA, 17 nt, Human
ucaccaggcagccucug

SEQ ID NO: 1464123 - RNA, 19 nt, Human
ucaccaggcagccucuggg

SEQ ID NO: 1464124 - RNA, 22 nt, Human
ucaccaggcagccucugggggg

SEQ ID NO: 1464125 - RNA, 20 nt, Human
ucaccaggcagccucugggg

SEQ ID NO: 1464126 - RNA, 21 nt, Human
accauguaaagaacauaaaua

SEQ ID NO: 1464127 - RNA, 13 nt, Human
accauugaaggcu

SEQ ID NO: 1464128 - RNA, 16 nt, Human
accauugaaggcuuaa

SEQ ID NO: 1464129 - RNA, 18 nt, Human
accauugauuuaauguaa

SEQ ID NO: 1464130 - RNA, 13 nt, Human
accauuaaccaga

SEQ ID NO: 1464131 - RNA, 19 nt, Human
accauuauaaccuuaauuu

SEQ ID NO: 1464132 - RNA, 21 nt, Human
accauuauaaccuuaauuuau

SEQ ID NO: 1464133 - RNA, 21 nt, Human
acccagauaaagguucaugca

SEQ ID NO: 1464134 - RNA, 23 nt, Human
accauuucuugagguaaaagcau

SEQ ID NO: 1464135 - RNA, 14 nt, Human
accauugucucaga

SEQ ID NO: 1464136 - RNA, 15 nt, Human
accauugucucagag

SEQ ID NO: 1464137 - RNA, 18 nt, Human
accauugucucagagcag

SEQ ID NO: 1464138 - RNA, 19 nt, Human
accauugucucagagcagg

SEQ ID NO: 1464139 - RNA, 23 nt, Human
accauuuggauccuguguggaga

SEQ ID NO: 1464140 - RNA, 19 nt, Human
accauuuccucagacucua

SEQ ID NO: 1464141 - RNA, 22 nt, Human
accauuuggcaucccugggccu

SEQ ID NO: 1464142 - RNA, 19 nt, Human
accauuuggcaucccuggg

SEQ ID NO: 1464143 - RNA, 20 nt, Human
accauuuggcaucccugggc

SEQ ID NO: 1464144 - RNA, 14 nt, Human
ucagaaugucauuu

SEQ ID NO: 1464145 - RNA, 23 nt, Human
accccagcuggggccaggcuggg

SEQ ID NO: 1464146 - RNA, 14 nt, Human
accccagacacugg

SEQ ID NO: 1464147 - RNA, 20 nt, Human
ucagccagugaccaaccuuu

SEQ ID NO: 1464148 - RNA, 14 nt, Human
ucagccauguauuu

SEQ ID NO: 1464149 - RNA, 21 nt, Human
ucagagaggccuuuuggaaug

SEQ ID NO: 1464150 - RNA, 22 nt, Human
ucagagaggccuuuuggaaugu

SEQ ID NO: 1464151 - RNA, 21 nt, Human
ucagagccuccuuucuggcuu

SEQ ID NO: 1464152 - RNA, 14 nt, Human
ucagagcgcacagg

SEQ ID NO: 1464153 - RNA, 16 nt, Human
ucagagcgcacaggga

SEQ ID NO: 1464154 - RNA, 19 nt, Human
ucagccuacaggccucaca

SEQ ID NO: 1464155 - RNA, 13 nt, Human
ucaggaaagagaa

SEQ ID NO: 1464156 - RNA, 12 nt, Human
ucaggaaaauug

SEQ ID NO: 1464157 - RNA, 19 nt, Human
ucaggaaagagaacuucca

SEQ ID NO: 1464158 - RNA, 18 nt, Human
ucaggaaaauugaaugca

SEQ ID NO: 1464159 - RNA, 12 nt, Human
ucagcucaugga

SEQ ID NO: 1464160 - RNA, 19 nt, Human
ucagcuucguuuauuuuca

SEQ ID NO: 1464161 - RNA, 21 nt, Human
ucagcuucguuuauuuucaag

SEQ ID NO: 1464162 - RNA, 21 nt, Human
aaugccccugaauuuaaauag

SEQ ID NO: 1464163 - RNA, 21 nt, Human
aauggaaugugauguucaugg

SEQ ID NO: 1464164 - RNA, 12 nt, Human
aaugcuuugaua

SEQ ID NO: 1464165 - RNA, 18 nt, Human
aaugcuuugauauuucaa

SEQ ID NO: 1464166 - RNA, 12 nt, Human
aaugcuuucgau

SEQ ID NO: 1464167 - RNA, 14 nt, Human
aaugccaagcacuu

SEQ ID NO: 1464168 - RNA, 19 nt, Human
aaugccaagcacuucuuuu

SEQ ID NO: 1464169 - RNA, 14 nt, Human
aaugcauaaaugca

SEQ ID NO: 1464170 - RNA, 22 nt, Human
aaugcauuauaggaucauuugu

SEQ ID NO: 1464171 - RNA, 23 nt, Human
aaugcauuauaggaucauuuguu

SEQ ID NO: 1464172 - RNA, 15 nt, Human
uacaaguaacaaaaa

SEQ ID NO: 1464173 - RNA, 19 nt, Human
uacaaguaacaaaaauaaa

SEQ ID NO: 1464174 - RNA, 20 nt, Human
uacaaaauaaacaaauaaca

SEQ ID NO: 1464175 - RNA, 19 nt, Human
uacaaaauaaacaaauaac

SEQ ID NO: 1464176 - RNA, 13 nt, Human
uacaaaaauuccu

SEQ ID NO: 1464177 - RNA, 14 nt, Human
uaauuuaugcagaa

SEQ ID NO: 1464178 - RNA, 14 nt, Human
uaauuuauuauuaa

SEQ ID NO: 1464179 - RNA, 14 nt, Human
aaugaggagacaca

SEQ ID NO: 1464180 - RNA, 16 nt, Human
uaauucaauucaaagc

SEQ ID NO: 1464181 - RNA, 15 nt, Human
uacaggccucacaca

SEQ ID NO: 1464182 - RNA, 19 nt, Human
uacacuaagagagaaugag

SEQ ID NO: 1464183 - RNA, 13 nt, Human
uacacuaucuuaa

SEQ ID NO: 1464184 - RNA, 19 nt, Human
aauggacuuuuguacauag

SEQ ID NO: 1464185 - RNA, 17 nt, Human
uacauagaugcuuaguc

SEQ ID NO: 1464186 - RNA, 22 nt, Human
uacauauaagugauugcugguu

SEQ ID NO: 1464187 - RNA, 19 nt, Human
uacauauaagugauugcug

SEQ ID NO: 1464188 - RNA, 16 nt, Human
aaugugauauuauaca

SEQ ID NO: 1464189 - RNA, 20 nt, Human
uaauagggcaauuaauuccu

SEQ ID NO: 1464190 - RNA, 19 nt, Human
uaauagguuuggacaaaau

SEQ ID NO: 1464191 - RNA, 14 nt, Human
uaauagguuuggac

SEQ ID NO: 1464192 - RNA, 18 nt, Human
uaauagggaaaauucuaa

SEQ ID NO: 1464193 - RNA, 19 nt, Human
uaauacugcugagauacau

SEQ ID NO: 1464194 - RNA, 15 nt, Human
uaaucacgcuuuccu

SEQ ID NO: 1464195 - RNA, 14 nt, Human
uaauacugcugaga

SEQ ID NO: 1464196 - RNA, 23 nt, Human
uaauacugcugagauacauacag

SEQ ID NO: 1464197 - RNA, 17 nt, Human
uaaugaaacaaagaguu

SEQ ID NO: 1464198 - RNA, 20 nt, Human
uaaugacaucaccacaguuu

SEQ ID NO: 1464199 - RNA, 23 nt, Human
uaaugaaacaaagaguucaagaa

SEQ ID NO: 1464200 - RNA, 17 nt, Human
uaaucacgcuuuccuga

SEQ ID NO: 1464201 - RNA, 15 nt, Human
aaugaaaaccacauu

SEQ ID NO: 1464202 - RNA, 11 nt, Human
aaugacacugu

SEQ ID NO: 1464203 - RNA, 22 nt, Human
aaugacaguccgucaaaacaga

SEQ ID NO: 1464204 - RNA, 18 nt, Human
aaugacaucaccacaguu

SEQ ID NO: 1464205 - RNA, 15 nt, Human
aaugagacauccagc

SEQ ID NO: 1464206 - RNA, 14 nt, Human
aaugagacauccag

SEQ ID NO: 1464207 - RNA, 13 nt, Human
aaugagacaucca

SEQ ID NO: 1464208 - RNA, 21 nt, Human
aaugagagacacacugaagaa

SEQ ID NO: 1464209 - RNA, 17 nt, Human
aaucuuuaaaagaugcu

SEQ ID NO: 1464210 - RNA, 16 nt, Human
uaaugauaacuggaaa

SEQ ID NO: 1464211 - RNA, 16 nt, Human
uaauggugccuucauu

SEQ ID NO: 1464212 - RNA, 18 nt, Human
uaauggugccuucauuug

SEQ ID NO: 1464213 - RNA, 17 nt, Human
aaucuugucauguguau

SEQ ID NO: 1464214 - RNA, 18 nt, Human
aaucuugucauguguaua

SEQ ID NO: 1464215 - RNA, 19 nt, Human
aaucuugucauguguauaa

SEQ ID NO: 1464216 - RNA, 20 nt, Human
aauccucaguuuuugugaaa

SEQ ID NO: 1464217 - RNA, 13 nt, Human
aauccuugaagau

SEQ ID NO: 1464218 - RNA, 19 nt, Human
aauccuuagaucuggcaug

SEQ ID NO: 1464219 - RNA, 20 nt, Human
aauccuuagaucuggcaugu

SEQ ID NO: 1464220 - RNA, 13 nt, Human
aauccuugcuuau

SEQ ID NO: 1464221 - RNA, 19 nt, Human
aauccuucuauucuagccu

SEQ ID NO: 1464222 - RNA, 22 nt, Human
aauccuucuauucuagccugca

SEQ ID NO: 1464223 - RNA, 17 nt, Human
aauccuugcuuaugaca

SEQ ID NO: 1464224 - RNA, 18 nt, Human
aauccuugcuuaugacau

SEQ ID NO: 1464225 - RNA, 16 nt, Human
aaucuuauaauuuaaa

SEQ ID NO: 1464226 - RNA, 14 nt, Human
aaucuuauaauuua

SEQ ID NO: 1464227 - RNA, 15 nt, Human
aaucaucaagucuuu

SEQ ID NO: 1464228 - RNA, 17 nt, Human
aaucauggugcucagag

SEQ ID NO: 1464229 - RNA, 19 nt, Human
aaucaugaauuaguuuuau

SEQ ID NO: 1464230 - RNA, 17 nt, Human
aaucaugaauuaguuuu

SEQ ID NO: 1464231 - RNA, 23 nt, Human
aaucaugaauuaguuuuauaugc

SEQ ID NO: 1464232 - RNA, 17 nt, Human
aaucagacuaugaaguu

SEQ ID NO: 1464233 - RNA, 14 nt, Human
aaucagacuaugaa

SEQ ID NO: 1464234 - RNA, 20 nt, Human
aaucagagaccuuccagaaa

SEQ ID NO: 1464235 - RNA, 14 nt, Human
aaucagauagauau

SEQ ID NO: 1464236 - RNA, 16 nt, Human
aaucagauagauauuc

SEQ ID NO: 1464237 - RNA, 21 nt, Human
aaucagauagauauuccuauu

SEQ ID NO: 1464238 - RNA, 18 nt, Human
uaaguuuuuuuuuaaaaa

SEQ ID NO: 1464239 - RNA, 19 nt, Human
uaaguucaaauucuucuga

SEQ ID NO: 1464240 - RNA, 20 nt, Human
uaaguuauuuuuacauucug

SEQ ID NO: 1464241 - RNA, 20 nt, Human
uaaguucaaauucuucugaa

SEQ ID NO: 1464242 - RNA, 18 nt, Human
aauaggcguaacuaauuu

SEQ ID NO: 1464243 - RNA, 21 nt, Human
aauagggcugagcucucugug

SEQ ID NO: 1464244 - RNA, 24 nt, Human
aauagcuuuuuucucugauacaga

SEQ ID NO: 1464245 - RNA, 14 nt, Human
uaaauuuuuuuccu

SEQ ID NO: 1464246 - RNA, 21 nt, Human
aauagauauccacuugagaca

SEQ ID NO: 1464247 - RNA, 11 nt, Human
aauagauguuu

SEQ ID NO: 1464248 - RNA, 22 nt, Human
aauagauguuugauagauuuuc

SEQ ID NO: 1464249 - RNA, 19 nt, Human
aauagauguuugauagauu

SEQ ID NO: 1464250 - RNA, 12 nt, Human
aauaucacuugu

SEQ ID NO: 1464251 - RNA, 16 nt, Human
aauaguauuucccauu

SEQ ID NO: 1464252 - RNA, 15 nt, Human
aauaguauuucccau

SEQ ID NO: 1464253 - RNA, 15 nt, Human
aauaucacuugucaa

SEQ ID NO: 1464254 - RNA, 20 nt, Human
aauaucacuugucaauaaaa

SEQ ID NO: 1464255 - RNA, 23 nt, Human
aauaucccuccuguugggagagg

SEQ ID NO: 1464256 - RNA, 12 nt, Human
aauaucccuccu

SEQ ID NO: 1464257 - RNA, 19 nt, Human
aauaucccuccuguuggga

SEQ ID NO: 1464258 - RNA, 22 nt, Human
aauaucccuccuguugggagag

SEQ ID NO: 1464259 - RNA, 14 nt, Human
aauauccuaaacau

SEQ ID NO: 1464260 - RNA, 18 nt, Human
aauauccuaaacaucauu

SEQ ID NO: 1464261 - RNA, 16 nt, Human
uaaccucuaaauucuu

SEQ ID NO: 1464262 - RNA, 15 nt, Human
aauauccuaaacauc

SEQ ID NO: 1464263 - RNA, 16 nt, Human
aauauccuaaacauca

SEQ ID NO: 1464264 - RNA, 17 nt, Human
aauauccuaaacaucau

SEQ ID NO: 1464265 - RNA, 14 nt, Human
uaacaugauuuggg

SEQ ID NO: 1464266 - RNA, 22 nt, Human
uaacauaccuaagaaguacauu

SEQ ID NO: 1464267 - RNA, 16 nt, Human
aauaucuccgucaacu

SEQ ID NO: 1464268 - RNA, 21 nt, Human
aauaucuccgucaacucauau

SEQ ID NO: 1464269 - RNA, 13 nt, Human
aauauccugcuug

SEQ ID NO: 1464270 - RNA, 17 nt, Human
aauaucuucacuuguca

SEQ ID NO: 1464271 - RNA, 22 nt, Human
uaagacccuuauugcuguccug

SEQ ID NO: 1464272 - RNA, 16 nt, Human
aauauuuuaaagaauu

SEQ ID NO: 1464273 - RNA, 19 nt, Human
aaucacuguuuagaacaca

SEQ ID NO: 1464274 - RNA, 21 nt, Human
aaucacuguuuagaacacaca

SEQ ID NO: 1464275 - RNA, 16 nt, Human
aaucacuuaggaaaug

SEQ ID NO: 1464276 - RNA, 17 nt, Human
aauauuguuuuacaaua

SEQ ID NO: 1464277 - RNA, 18 nt, Human
aauauuguuuuacaauag

SEQ ID NO: 1464278 - RNA, 15 nt, Human
aauauuucagauaau

SEQ ID NO: 1464279 - RNA, 12 nt, Human
aauauuucuuca

SEQ ID NO: 1464280 - RNA, 16 nt, Human
aauaugauguuaaaaa

SEQ ID NO: 1464281 - RNA, 14 nt, Human
aauaauuuuaucuc

SEQ ID NO: 1464282 - RNA, 11 nt, Human
aauaauuuuau

SEQ ID NO: 1464283 - RNA, 16 nt, Human
aauaauuuuaaacaaa

SEQ ID NO: 1464284 - RNA, 12 nt, Human
aauaauuuagac

SEQ ID NO: 1464285 - RNA, 21 nt, Human
aauaauuuagacuucaagcau

SEQ ID NO: 1464286 - RNA, 16 nt, Human
aauaauuuuuauauuu

SEQ ID NO: 1464287 - RNA, 17 nt, Human
aauaauuuuuauauuug

SEQ ID NO: 1464288 - RNA, 19 nt, Human
aauaauuuuuauauuugaa

SEQ ID NO: 1464289 - RNA, 13 nt, Human
aauaagaaacuuu

SEQ ID NO: 1464290 - RNA, 21 nt, Human
uaaauaaaguuuguugaaaca

SEQ ID NO: 1464291 - RNA, 12 nt, Human
uaaauaaaguuu

SEQ ID NO: 1464292 - RNA, 20 nt, Human
aauaauuuuuauauuugaaa

SEQ ID NO: 1464293 - RNA, 22 nt, Human
aauaauuuuucacuucaaaaca

SEQ ID NO: 1464294 - RNA, 11 nt, Human
uaaauaagaaa

SEQ ID NO: 1464295 - RNA, 13 nt, Human
uaaauaagaaacu

SEQ ID NO: 1464296 - RNA, 16 nt, Human
uaaauaagaaacuuuu

SEQ ID NO: 1464297 - RNA, 15 nt, Human
uaaauaagaaacuuu

SEQ ID NO: 1464298 - RNA, 24 nt, Human
uaaauguuuuuuuuuaaagacuuu

SEQ ID NO: 1464299 - RNA, 15 nt, Human
uaaauguugacaugg

SEQ ID NO: 1464300 - RNA, 23 nt, Human
uaaauguuaugacuauguaaacu

SEQ ID NO: 1464301 - RNA, 22 nt, Human
uaaauguuaugacuauguaaac

SEQ ID NO: 1464302 - RNA, 13 nt, Human
uaaaucuuuuaua

SEQ ID NO: 1464303 - RNA, 16 nt, Human
uaaaugcauaaaugca

SEQ ID NO: 1464304 - RNA, 14 nt, Human
uaaaugcauuauag

SEQ ID NO: 1464305 - RNA, 15 nt, Human
uaaauagacacgcac

SEQ ID NO: 1464306 - RNA, 17 nt, Human
uaaauagaccauuaauc

SEQ ID NO: 1464307 - RNA, 22 nt, Human
uaaaguaaaaacaaagaaauua

SEQ ID NO: 1464308 - RNA, 21 nt, Human
uaaaguaaaaacaaagaaauu

SEQ ID NO: 1464309 - RNA, 19 nt, Human
uaaaguaaaaacaaagaaa

SEQ ID NO: 1464310 - RNA, 22 nt, Human
uaaagguucaugcaaacuuuau

SEQ ID NO: 1464311 - RNA, 20 nt, Human
uaaaguaucaggauacuaua

SEQ ID NO: 1464312 - RNA, 22 nt, Human
uaaagguuacaagccugcacaa

SEQ ID NO: 1464313 - RNA, 13 nt, Human
aauaaaaccagcu

SEQ ID NO: 1464314 - RNA, 17 nt, Human
aauaaaaagaucacuuu

SEQ ID NO: 1464315 - RNA, 19 nt, Human
aauaaaaagaucacuuucu

SEQ ID NO: 1464316 - RNA, 23 nt, Human
aauaaaaagaucacuuucucagu

SEQ ID NO: 1464317 - RNA, 21 nt, Human
aauaacaaugaaaguugauaa

SEQ ID NO: 1464318 - RNA, 15 nt, Human
aauaacgauaaaaga

SEQ ID NO: 1464319 - RNA, 20 nt, Human
aauaaauuuauuuucuugga

SEQ ID NO: 1464320 - RNA, 13 nt, Human
aauaacaaugugc

SEQ ID NO: 1464321 - RNA, 19 nt, Human
aauaacaaugugcucucgg

SEQ ID NO: 1464322 - RNA, 12 nt, Human
aauaaagugacc

SEQ ID NO: 1464323 - RNA, 12 nt, Human
aauaaaguguau

SEQ ID NO: 1464324 - RNA, 13 nt, Human
acacccagcaaua

SEQ ID NO: 1464325 - RNA, 23 nt, Human
acacccagcaauagagacgggac

SEQ ID NO: 1464326 - RNA, 17 nt, Human
acaccccgacuuuuguu

SEQ ID NO: 1464327 - RNA, 13 nt, Human
acaccucccagga

SEQ ID NO: 1464328 - RNA, 19 nt, Human
acaccucccaggagacagu

SEQ ID NO: 1464329 - RNA, 22 nt, Human
acaccugcccugcccugccacc

SEQ ID NO: 1464330 - RNA, 20 nt, Human
acaccugcccugcccugcca

SEQ ID NO: 1464331 - RNA, 18 nt, Human
acaccugcccugcccugc

SEQ ID NO: 1464332 - RNA, 17 nt, Human
acaccugcccugcccug

SEQ ID NO: 1464333 - RNA, 15 nt, Human
acaccugcccugccc

SEQ ID NO: 1464334 - RNA, 12 nt, Human
acaccugcccug

SEQ ID NO: 1464335 - RNA, 14 nt, Human
acaccugcccugcc

SEQ ID NO: 1464336 - RNA, 13 nt, Human
acaccugcccugc

SEQ ID NO: 1464337 - RNA, 18 nt, Human
acacuaagagagaaugag

SEQ ID NO: 1464338 - RNA, 19 nt, Human
acacuaagagagaaugaga

SEQ ID NO: 1464339 - RNA, 15 nt, Human
acacuacacccagca

SEQ ID NO: 1464340 - RNA, 14 nt, Human
acacuacacccagc

SEQ ID NO: 1464341 - RNA, 13 nt, Human
acacuacacccag

SEQ ID NO: 1464342 - RNA, 17 nt, Human
acacuacacacugugua

SEQ ID NO: 1464343 - RNA, 17 nt, Human
acacuaagagagaauga

SEQ ID NO: 1464344 - RNA, 17 nt, Human
acacuacacccagcaau

SEQ ID NO: 1464345 - RNA, 23 nt, Human
acacuacacccagcaauagagac

SEQ ID NO: 1464346 - RNA, 16 nt, Human
acacuagacaagccag

SEQ ID NO: 1464347 - RNA, 17 nt, Human
acacuagcccaaugaaa

SEQ ID NO: 1464348 - RNA, 20 nt, Human
acacuagcccaaugaaauga

SEQ ID NO: 1464349 - RNA, 14 nt, Human
uauaagcuuuucuu

SEQ ID NO: 1464350 - RNA, 15 nt, Human
uauaaccuuaauuua

SEQ ID NO: 1464351 - RNA, 20 nt, Human
uauaaccuuaauuuauuauu

SEQ ID NO: 1464352 - RNA, 23 nt, Human
acacaugcuucccuuuccugagu

SEQ ID NO: 1464353 - RNA, 21 nt, Human
acacaugcuucccuuuccuga

SEQ ID NO: 1464354 - RNA, 19 nt, Human
acacaugcuucccuuuccu

SEQ ID NO: 1464355 - RNA, 16 nt, Human
acacauuaggaaaagu

SEQ ID NO: 1464356 - RNA, 15 nt, Human
acacauguauuuggu

SEQ ID NO: 1464357 - RNA, 22 nt, Human
acacauugaguuggaaucacug

SEQ ID NO: 1464358 - RNA, 15 nt, Human
acacccacacucaga

SEQ ID NO: 1464359 - RNA, 21 nt, Human
uauaaaaauaaaaaacacugg

SEQ ID NO: 1464360 - RNA, 20 nt, Human
uauaaaaauaaaaaacacug

SEQ ID NO: 1464361 - RNA, 22 nt, Human
uauaaaaauaaaaaagauccca

SEQ ID NO: 1464362 - RNA, 19 nt, Human
uauaaaaauaaaaaagauc

SEQ ID NO: 1464363 - RNA, 15 nt, Human
uaguuuuuauauguu

SEQ ID NO: 1464364 - RNA, 22 nt, Human
uagguuuggacaaaauggaaua

SEQ ID NO: 1464365 - RNA, 14 nt, Human
acacacugaagaag

SEQ ID NO: 1464366 - RNA, 19 nt, Human
uagucucacugcuugaacu

SEQ ID NO: 1464367 - RNA, 12 nt, Human
uaguguuggaga

SEQ ID NO: 1464368 - RNA, 16 nt, Human
uaguguuggagaagaa

SEQ ID NO: 1464369 - RNA, 17 nt, Human
uaguguuggagaagaac

SEQ ID NO: 1464370 - RNA, 13 nt, Human
acacacugaagaa

SEQ ID NO: 1464371 - RNA, 17 nt, Human
acacaacuauauuguuu

SEQ ID NO: 1464372 - RNA, 14 nt, Human
acaaugcuguauuu

SEQ ID NO: 1464373 - RNA, 17 nt, Human
acaaugcuguauuuuaa

SEQ ID NO: 1464374 - RNA, 18 nt, Human
acaaugcuguauuuuaaa

SEQ ID NO: 1464375 - RNA, 22 nt, Human
uagcuuaucuacuuccaaacua

SEQ ID NO: 1464376 - RNA, 15 nt, Human
uagcuuaucuacuuc

SEQ ID NO: 1464377 - RNA, 19 nt, Human
uagcuuaucuacuuccaaa

SEQ ID NO: 1464378 - RNA, 12 nt, Human
acacugaagaag

SEQ ID NO: 1464379 - RNA, 14 nt, Human
acacugaagaagca

SEQ ID NO: 1464380 - RNA, 13 nt, Human
acacucuguaauu

SEQ ID NO: 1464381 - RNA, 20 nt, Human
acacucucaaagcaaauaau

SEQ ID NO: 1464382 - RNA, 16 nt, Human
uauaaguagcaggcca

SEQ ID NO: 1464383 - RNA, 19 nt, Human
acacucagauccuccucau

SEQ ID NO: 1464384 - RNA, 12 nt, Human
uauauuuacaaa

SEQ ID NO: 1464385 - RNA, 15 nt, Human
uauauuuaacaagau

SEQ ID NO: 1464386 - RNA, 19 nt, Human
uauauuuaacucucuuuau

SEQ ID NO: 1464387 - RNA, 13 nt, Human
uauauuaucuuuu

SEQ ID NO: 1464388 - RNA, 22 nt, Human
acacuuuaauuaccaaccuguu

SEQ ID NO: 1464389 - RNA, 12 nt, Human
acagaaacaaaa

SEQ ID NO: 1464390 - RNA, 17 nt, Human
acagaaacaaaaacacu

SEQ ID NO: 1464391 - RNA, 20 nt, Human
acagcccuucuuuccacaga

SEQ ID NO: 1464392 - RNA, 21 nt, Human
acagcccuucuuuccacagaa

SEQ ID NO: 1464393 - RNA, 17 nt, Human
acagcaacaauuuauga

SEQ ID NO: 1464394 - RNA, 20 nt, Human
acagcaacaauuuaugaauu

SEQ ID NO: 1464395 - RNA, 23 nt, Human
uaucuuggugaauuuuuuuuucc

SEQ ID NO: 1464396 - RNA, 16 nt, Human
acagcccuuuugucuc

SEQ ID NO: 1464397 - RNA, 15 nt, Human
acagcccuuuugucu

SEQ ID NO: 1464398 - RNA, 23 nt, Human
acagagcuggagaugaggccaga

SEQ ID NO: 1464399 - RNA, 16 nt, Human
uaucucugugugcaca

SEQ ID NO: 1464400 - RNA, 17 nt, Human
uaucucugugugcacaa

SEQ ID NO: 1464401 - RNA, 18 nt, Human
uaucucugugugcacaaa

SEQ ID NO: 1464402 - RNA, 23 nt, Human
uaucucugugugcacaaauauuu

SEQ ID NO: 1464403 - RNA, 15 nt, Human
uauauuuauuacugu

SEQ ID NO: 1464404 - RNA, 19 nt, Human
uauauuuauuacuguaaga

SEQ ID NO: 1464405 - RNA, 20 nt, Human
uauauuuauuacuguaagaa

SEQ ID NO: 1464406 - RNA, 14 nt, Human
uaucccuccuguug

SEQ ID NO: 1464407 - RNA, 20 nt, Human
uaucccuccuguugggagag

SEQ ID NO: 1464408 - RNA, 19 nt, Human
uaucccuccuguugggaga

SEQ ID NO: 1464409 - RNA, 12 nt, Human
uaucucacacuc

SEQ ID NO: 1464410 - RNA, 16 nt, Human
uauccuaucucuccaa

SEQ ID NO: 1464411 - RNA, 19 nt, Human
uacugaaauaaacgucuua

SEQ ID NO: 1464412 - RNA, 22 nt, Human
uacugaaauaaacgucuuaaau

SEQ ID NO: 1464413 - RNA, 23 nt, Human
uacugguccaaaagauugcugaa

SEQ ID NO: 1464414 - RNA, 18 nt, Human
uacuggucuuguggaauu

SEQ ID NO: 1464415 - RNA, 13 nt, Human
uacugguccaaaa

SEQ ID NO: 1464416 - RNA, 18 nt, Human
uacugguccaaaagauug

SEQ ID NO: 1464417 - RNA, 23 nt, Human
uacuguacagacagaaaaaacug

SEQ ID NO: 1464418 - RNA, 19 nt, Human
uacuguacagacagaaaaa

SEQ ID NO: 1464419 - RNA, 18 nt, Human
aauugaggacacugauau

SEQ ID NO: 1464420 - RNA, 15 nt, Human
aauugagaaggaaaa

SEQ ID NO: 1464421 - RNA, 23 nt, Human
aauugagaaaaauauauacuaaa

SEQ ID NO: 1464422 - RNA, 19 nt, Human
aauugagaaaaauauauac

SEQ ID NO: 1464423 - RNA, 13 nt, Human
aauugauuuugaa

SEQ ID NO: 1464424 - RNA, 14 nt, Human
aauugauuuugaac

SEQ ID NO: 1464425 - RNA, 22 nt, Human
aauugcacgcggagugaguuuu

SEQ ID NO: 1464426 - RNA, 18 nt, Human
uacuagggaaaugccuuu

SEQ ID NO: 1464427 - RNA, 12 nt, Human
uacuauuuaacu

SEQ ID NO: 1464428 - RNA, 13 nt, Human
uacuauuuaacug

SEQ ID NO: 1464429 - RNA, 14 nt, Human
uacuauuuaacuga

SEQ ID NO: 1464430 - RNA, 19 nt, Human
uacuauuuaacugacuauu

SEQ ID NO: 1464431 - RNA, 16 nt, Human
uacuauuuaacugacu

SEQ ID NO: 1464432 - RNA, 13 nt, Human
uacuauuucacaa

SEQ ID NO: 1464433 - RNA, 12 nt, Human
uacuauuucaca

SEQ ID NO: 1464434 - RNA, 14 nt, Human
aauugaauauuauu

SEQ ID NO: 1464435 - RNA, 15 nt, Human
aauugaaucacugcu

SEQ ID NO: 1464436 - RNA, 22 nt, Human
aauugaaucacugcucacacug

SEQ ID NO: 1464437 - RNA, 15 nt, Human
aauugaauauuauuc

SEQ ID NO: 1464438 - RNA, 18 nt, Human
aauugaaugcaaaccaua

SEQ ID NO: 1464439 - RNA, 14 nt, Human
aaugugggauuaug

SEQ ID NO: 1464440 - RNA, 16 nt, Human
aaugugguagccucac

SEQ ID NO: 1464441 - RNA, 21 nt, Human
aauguguaagaacaacuaccu

SEQ ID NO: 1464442 - RNA, 13 nt, Human
aauguguaagaac

SEQ ID NO: 1464443 - RNA, 22 nt, Human
aauguguauuacaaauauuuug

SEQ ID NO: 1464444 - RNA, 22 nt, Human
aauuuauaaacuuuuuucuuac

SEQ ID NO: 1464445 - RNA, 12 nt, Human
aauuuaguuuca

SEQ ID NO: 1464446 - RNA, 14 nt, Human
aauuuaguuucaua

SEQ ID NO: 1464447 - RNA, 22 nt, Human
aauuuaguuucauauaaaguau

SEQ ID NO: 1464448 - RNA, 21 nt, Human
aauuuaguuucauauaaagua

SEQ ID NO: 1464449 - RNA, 16 nt, Human
aauuuauaaaaaggug

SEQ ID NO: 1464450 - RNA, 22 nt, Human
aauuuauaaaaagguguuuuga

SEQ ID NO: 1464451 - RNA, 16 nt, Human
aauuuauauuguaaau

SEQ ID NO: 1464452 - RNA, 23 nt, Human
aauuucuaggacugaauuaugaa

SEQ ID NO: 1464453 - RNA, 18 nt, Human
aauuucuaggacugaauu

SEQ ID NO: 1464454 - RNA, 22 nt, Human
aauuucuaggacugaauuauga

SEQ ID NO: 1464455 - RNA, 17 nt, Human
aauuucuaggacugaau

SEQ ID NO: 1464456 - RNA, 11 nt, Human
aauuuaaaugu

SEQ ID NO: 1464457 - RNA, 13 nt, Human
aauuuaaauguua

SEQ ID NO: 1464458 - RNA, 15 nt, Human
aauuggagcucgugg

SEQ ID NO: 1464459 - RNA, 20 nt, Human
aauuggaagcugcccugccc

SEQ ID NO: 1464460 - RNA, 22 nt, Human
aauugcuuuaccuuuuuucuua

SEQ ID NO: 1464461 - RNA, 13 nt, Human
aauuuaguauuuu

SEQ ID NO: 1464462 - RNA, 15 nt, Human
uacuugaaaauuaac

SEQ ID NO: 1464463 - RNA, 22 nt, Human
uacuucuuuuuucaaaagaaag

SEQ ID NO: 1464464 - RNA, 20 nt, Human
uacuucuuuuuucaaaagaa

SEQ ID NO: 1464465 - RNA, 15 nt, Human
uacuuugugcauucu

SEQ ID NO: 1464466 - RNA, 14 nt, Human
uacuuugacuuuuu

SEQ ID NO: 1464467 - RNA, 19 nt, Human
uacuucuuaggguuaugau

SEQ ID NO: 1464468 - RNA, 22 nt, Human
uacuucguguccgacucuucug

SEQ ID NO: 1464469 - RNA, 20 nt, Human
uacuucucauuuuuuaaaaa

SEQ ID NO: 1464470 - RNA, 15 nt, Human
aauuugaaacacuuu

SEQ ID NO: 1464471 - RNA, 16 nt, Human
uacuuauauggaaauu

SEQ ID NO: 1464472 - RNA, 17 nt, Human
uacuuauuuuugacagu

SEQ ID NO: 1464473 - RNA, 19 nt, Human
uacuuauuuuugacagugu

SEQ ID NO: 1464474 - RNA, 14 nt, Human
uacuuccaaacuaa

SEQ ID NO: 1464475 - RNA, 14 nt, Human
uacuuuuaaacugu

SEQ ID NO: 1464476 - RNA, 15 nt, Human
uacuuuuaaacugug

SEQ ID NO: 1464477 - RNA, 21 nt, Human
uacuuuuaaacagugagccug

SEQ ID NO: 1464478 - RNA, 13 nt, Human
aauuugguuuuca

SEQ ID NO: 1464479 - RNA, 18 nt, Human
aauuugggggacuuacau

SEQ ID NO: 1464480 - RNA, 21 nt, Human
aauuugggggacuuacaugau

SEQ ID NO: 1464481 - RNA, 16 nt, Human
aauuugccuguaacaa

SEQ ID NO: 1464482 - RNA, 22 nt, Human
aauuugccuguaacaagccaga

SEQ ID NO: 1464483 - RNA, 15 nt, Human
aauuugguuuucaca

SEQ ID NO: 1464484 - RNA, 21 nt, Human
aauuugguuuucacauuggaa

SEQ ID NO: 1464485 - RNA, 22 nt, Human
aauuuuuaaucuuuaauuuuac

SEQ ID NO: 1464486 - RNA, 13 nt, Human
aauuuuuaaacaa

SEQ ID NO: 1464487 - RNA, 15 nt, Human
aauuuuuaaacaagu

SEQ ID NO: 1464488 - RNA, 19 nt, Human
aauuuuuaaacaaguauuu

SEQ ID NO: 1464489 - RNA, 13 nt, Human
aauuuuugauacu

SEQ ID NO: 1464490 - RNA, 16 nt, Human
aauuuuuuuuacauuu

SEQ ID NO: 1464491 - RNA, 12 nt, Human
aauuuuuuuuac

SEQ ID NO: 1464492 - RNA, 15 nt, Human
aauuuuuuuuaacau

SEQ ID NO: 1464493 - RNA, 17 nt, Human
aauuuuuuuuaacauuc

SEQ ID NO: 1464494 - RNA, 18 nt, Human
aauuuuuuuuaacauucc

SEQ ID NO: 1464495 - RNA, 19 nt, Human
aauuuuuuuuaacauuccu

SEQ ID NO: 1464496 - RNA, 18 nt, Human
aauuuuuuuguauuuuag

SEQ ID NO: 1464497 - RNA, 14 nt, Human
aauuuuuuuuaaca

SEQ ID NO: 1464498 - RNA, 22 nt, Human
uagauaggucagugcaaauacu

SEQ ID NO: 1464499 - RNA, 17 nt, Human
uagauaggccaugggca

SEQ ID NO: 1464500 - RNA, 12 nt, Human
acaaauauuuau

SEQ ID NO: 1464501 - RNA, 18 nt, Human
acaaauauuuauuuucuu

SEQ ID NO: 1464502 - RNA, 22 nt, Human
acaaauauuuauuuucuuucug

SEQ ID NO: 1464503 - RNA, 23 nt, Human
acaaauauuuauuuucuuucugu

SEQ ID NO: 1464504 - RNA, 16 nt, Human
uagaucuggcauguua

SEQ ID NO: 1464505 - RNA, 15 nt, Human
uagaucuggcauguu

SEQ ID NO: 1464506 - RNA, 21 nt, Human
uagaugcaguucugaagaaga

SEQ ID NO: 1464507 - RNA, 15 nt, Human
uagaugcauuugggu

SEQ ID NO: 1464508 - RNA, 19 nt, Human
uagaugcauuuggguccag

SEQ ID NO: 1464509 - RNA, 20 nt, Human
uagaugcauuuggguccagg

SEQ ID NO: 1464510 - RNA, 21 nt, Human
uagaugcauuuggguccagga

SEQ ID NO: 1464511 - RNA, 23 nt, Human
uagaugcauuuggguccaggagg

SEQ ID NO: 1464512 - RNA, 22 nt, Human
uagaugcauuuggguccaggag

SEQ ID NO: 1464513 - RNA, 22 nt, Human
uagaugcucuaugugcuuguaa

SEQ ID NO: 1464514 - RNA, 17 nt, Human
uagcaaagauaucucau

SEQ ID NO: 1464515 - RNA, 19 nt, Human
uagcaaagauaucucaucu

SEQ ID NO: 1464516 - RNA, 19 nt, Human
acaaaguuuaccagaaagc

SEQ ID NO: 1464517 - RNA, 15 nt, Human
acaaagcccuuuuau

SEQ ID NO: 1464518 - RNA, 16 nt, Human
acaaagcccuuuuaua

SEQ ID NO: 1464519 - RNA, 14 nt, Human
acaaaacugcauuu

SEQ ID NO: 1464520 - RNA, 16 nt, Human
acaaaacugcauuuca

SEQ ID NO: 1464521 - RNA, 19 nt, Human
aauuuuuuuuuccuagccc

SEQ ID NO: 1464522 - RNA, 16 nt, Human
acaaaacuagagacuc

SEQ ID NO: 1464523 - RNA, 16 nt, Human
uagcuacuaauuuuaa

SEQ ID NO: 1464524 - RNA, 16 nt, Human
uagccuucucuguuca

SEQ ID NO: 1464525 - RNA, 20 nt, Human
uagccuucucuguucauuuc

SEQ ID NO: 1464526 - RNA, 22 nt, Human
uagccuucucuguucauuuccu

SEQ ID NO: 1464527 - RNA, 13 nt, Human
uagccuucucugu

SEQ ID NO: 1464528 - RNA, 14 nt, Human
uagccuucucuguu

SEQ ID NO: 1464529 - RNA, 15 nt, Human
uagccuucucuguuc

SEQ ID NO: 1464530 - RNA, 17 nt, Human
acaaguuauuuaaaucu

SEQ ID NO: 1464531 - RNA, 16 nt, Human
acaaguuauuuaaauc

SEQ ID NO: 1464532 - RNA, 22 nt, Human
acaaguuauuuaaaucuguuuu

SEQ ID NO: 1464533 - RNA, 14 nt, Human
acaauaaaaauguu

SEQ ID NO: 1464534 - RNA, 16 nt, Human
acaauaaaaauguuua

SEQ ID NO: 1464535 - RNA, 21 nt, Human
acaaauucugucucuggauua

SEQ ID NO: 1464536 - RNA, 22 nt, Human
uagcaacuacagucuaaagcug

SEQ ID NO: 1464537 - RNA, 21 nt, Human
uagcaacuacagucuaaagcu

SEQ ID NO: 1464538 - RNA, 14 nt, Human
acaacagcugccug

SEQ ID NO: 1464539 - RNA, 16 nt, Human
acaacagguaaaacag

SEQ ID NO: 1464540 - RNA, 23 nt, Human
acaacaguuacauaauucacucu

SEQ ID NO: 1464541 - RNA, 14 nt, Human
acaaauggccuuua

SEQ ID NO: 1464542 - RNA, 17 nt, Human
guuguaauauuucuuca

SEQ ID NO: 1464543 - RNA, 13 nt, Human
guuuaauguuuug

SEQ ID NO: 1464544 - RNA, 17 nt, Human
guuuaagccaaaacaau

SEQ ID NO: 1464545 - RNA, 20 nt, Human
guuuaagccaaaacaauguu

SEQ ID NO: 1464546 - RNA, 20 nt, Human
guuuucuuaaccagaucauu

SEQ ID NO: 1464547 - RNA, 20 nt, Human
guuuuacaauaguucugugg

SEQ ID NO: 1464548 - RNA, 16 nt, Human
guuuuacaauaguucu

SEQ ID NO: 1464549 - RNA, 13 nt, Human
guuuuacaauagu

SEQ ID NO: 1464550 - RNA, 11 nt, Human
guuuuacaaua

SEQ ID NO: 1464551 - RNA, 20 nt, Human
aaguaauaaaauucaacaaa

SEQ ID NO: 1464552 - RNA, 13 nt, Human
guuuggcuuucag

SEQ ID NO: 1464553 - RNA, 18 nt, Human
guuuggcuuucagggagg

SEQ ID NO: 1464554 - RNA, 17 nt, Human
guuugcaccuuucuagu

SEQ ID NO: 1464555 - RNA, 21 nt, Human
guuucaaacauauauaacaau

SEQ ID NO: 1464556 - RNA, 17 nt, Human
aaggcuuguugugcuuu

SEQ ID NO: 1464557 - RNA, 19 nt, Human
aaggcuuguugugcuuuua

SEQ ID NO: 1464558 - RNA, 20 nt, Human
aaggcuuguugugcuuuuag

SEQ ID NO: 1464559 - RNA, 14 nt, Human
aaggcuuucucuac

SEQ ID NO: 1464560 - RNA, 21 nt, Human
aaggcuuugcccugcugcccu

SEQ ID NO: 1464561 - RNA, 22 nt, Human
aaggcuuugcccugcugcccuc

SEQ ID NO: 1464562 - RNA, 17 nt, Human
aaggggaauugaggaca

SEQ ID NO: 1464563 - RNA, 20 nt, Human
aaguaaaaacaaagaaauua

SEQ ID NO: 1464564 - RNA, 13 nt, Human
aaguaaaaacaaa

SEQ ID NO: 1464565 - RNA, 22 nt, Human
aaguaaaaacaaagaaauuaug

SEQ ID NO: 1464566 - RNA, 14 nt, Human
aaguaauaaaauuc

SEQ ID NO: 1464567 - RNA, 13 nt, Human
aagguacuucaaa

SEQ ID NO: 1464568 - RNA, 18 nt, Human
aagguaaaaugccaugau

SEQ ID NO: 1464569 - RNA, 18 nt, Human
aagguacaagaagcauuu

SEQ ID NO: 1464570 - RNA, 19 nt, Human
aagguacaagaagcauuuu

SEQ ID NO: 1464571 - RNA, 20 nt, Human
aagguuuuccucuucuauuu

SEQ ID NO: 1464572 - RNA, 14 nt, Human
aagguaaaaugcca

SEQ ID NO: 1464573 - RNA, 22 nt, Human
aagguaaaaugccaugaugccu

SEQ ID NO: 1464574 - RNA, 19 nt, Human
aagccuccuuagaaaaaaa

SEQ ID NO: 1464575 - RNA, 16 nt, Human
guuauuuguaauagau

SEQ ID NO: 1464576 - RNA, 17 nt, Human
guuauuuguaauagaug

SEQ ID NO: 1464577 - RNA, 11 nt, Human
guuauuuaaau

SEQ ID NO: 1464578 - RNA, 17 nt, Human
guuagccaauauuuuuc

SEQ ID NO: 1464579 - RNA, 13 nt, Human
guguuugcuuucu

SEQ ID NO: 1464580 - RNA, 18 nt, Human
guguuuuaaaaugagaaa

SEQ ID NO: 1464581 - RNA, 14 nt, Human
guguuuggcuuuca

SEQ ID NO: 1464582 - RNA, 14 nt, Human
guugacaugggaca

SEQ ID NO: 1464583 - RNA, 18 nt, Human
guugacaugggacauuug

SEQ ID NO: 1464584 - RNA, 16 nt, Human
guucuuacugcuuaau

SEQ ID NO: 1464585 - RNA, 23 nt, Human
guucuuuaaaauguaaagccaug

SEQ ID NO: 1464586 - RNA, 23 nt, Human
guucugguaugaacuugaggaca

SEQ ID NO: 1464587 - RNA, 22 nt, Human
guucuuaccuguaugucuccag

SEQ ID NO: 1464588 - RNA, 17 nt, Human
aagcuaucguaaaauua

SEQ ID NO: 1464589 - RNA, 18 nt, Human
aagcuucaaacugcauga

SEQ ID NO: 1464590 - RNA, 19 nt, Human
aagcuucagugcugccgau

SEQ ID NO: 1464591 - RNA, 17 nt, Human
guuccccuuugcuucau

SEQ ID NO: 1464592 - RNA, 16 nt, Human
guucccauuucagcug

SEQ ID NO: 1464593 - RNA, 15 nt, Human
gugugucugcucagu

SEQ ID NO: 1464594 - RNA, 16 nt, Human
gugugucugcucagua

SEQ ID NO: 1464595 - RNA, 15 nt, Human
gugugucuguucacu

SEQ ID NO: 1464596 - RNA, 22 nt, Human
gugugucuguucacuuuuccuc

SEQ ID NO: 1464597 - RNA, 14 nt, Human
aagagguuuuaaag

SEQ ID NO: 1464598 - RNA, 18 nt, Human
aagagguuuuaaagcuuc

SEQ ID NO: 1464599 - RNA, 17 nt, Human
aagagguguuuuuucua

SEQ ID NO: 1464600 - RNA, 19 nt, Human
aagauaugggacauuuuug

SEQ ID NO: 1464601 - RNA, 16 nt, Human
aagauaugggacauuu

SEQ ID NO: 1464602 - RNA, 11 nt, Human
aagaucuuuua

SEQ ID NO: 1464603 - RNA, 15 nt, Human
aagaucuuuuauuuu

SEQ ID NO: 1464604 - RNA, 17 nt, Human
aagaucuuuuauuuugc

SEQ ID NO: 1464605 - RNA, 18 nt, Human
aagaucuuuuauuuugcc

SEQ ID NO: 1464606 - RNA, 18 nt, Human
aagcaaccucaguaauuu

SEQ ID NO: 1464607 - RNA, 19 nt, Human
aagcaaccucaguaauuua

SEQ ID NO: 1464608 - RNA, 20 nt, Human
aagcaaccucaguaauuuag

SEQ ID NO: 1464609 - RNA, 21 nt, Human
aagcaaccucaguaauuuaga

SEQ ID NO: 1464610 - RNA, 22 nt, Human
aagcaaccucaguaauuuagaa

SEQ ID NO: 1464611 - RNA, 17 nt, Human
gugggaggugagaccac

SEQ ID NO: 1464612 - RNA, 15 nt, Human
gugggaggguaccag

SEQ ID NO: 1464613 - RNA, 16 nt, Human
gugggaggguaccagc

SEQ ID NO: 1464614 - RNA, 20 nt, Human
gugggaggguaccagcagaa

SEQ ID NO: 1464615 - RNA, 19 nt, Human
guggcgugaucucagcuca

SEQ ID NO: 1464616 - RNA, 21 nt, Human
gugggacagucaccucaugga

SEQ ID NO: 1464617 - RNA, 19 nt, Human
guggcgcgaucucagcuca

SEQ ID NO: 1464618 - RNA, 14 nt, Human
guggguagacacac

SEQ ID NO: 1464619 - RNA, 14 nt, Human
gugguggcucggga

SEQ ID NO: 1464620 - RNA, 15 nt, Human
gugguggucccuggg

SEQ ID NO: 1464621 - RNA, 16 nt, Human
gugguggucccugggu

SEQ ID NO: 1464622 - RNA, 23 nt, Human
guggggggggggcgcggcuggga

SEQ ID NO: 1464623 - RNA, 14 nt, Human
aagaggaagcaaau

SEQ ID NO: 1464624 - RNA, 13 nt, Human
aagaggaagcaaa

SEQ ID NO: 1464625 - RNA, 14 nt, Human
aagagcuacauaau

SEQ ID NO: 1464626 - RNA, 14 nt, Human
aagagcuuaagaac

SEQ ID NO: 1464627 - RNA, 16 nt, Human
aagagcuacauaauuu

SEQ ID NO: 1464628 - RNA, 15 nt, Human
aagagcaaaagaaug

SEQ ID NO: 1464629 - RNA, 17 nt, Human
aagagauuuuucaugau

SEQ ID NO: 1464630 - RNA, 15 nt, Human
aagagauuuuucaug

SEQ ID NO: 1464631 - RNA, 14 nt, Human
aagagauuuuucau

SEQ ID NO: 1464632 - RNA, 13 nt, Human
aagagauuuuuca

SEQ ID NO: 1464633 - RNA, 20 nt, Human
aagagcaaaagaauggcaga

SEQ ID NO: 1464634 - RNA, 22 nt, Human
aagacuaucuuacuauuucaca

SEQ ID NO: 1464635 - RNA, 18 nt, Human
gugcuaguaauuggaaag

SEQ ID NO: 1464636 - RNA, 12 nt, Human
aagaauacuucu

SEQ ID NO: 1464637 - RNA, 16 nt, Human
aagaauacuucucauu

SEQ ID NO: 1464638 - RNA, 17 nt, Human
aagaauacuucucauuu

SEQ ID NO: 1464639 - RNA, 22 nt, Human
aagaauacuucucauuuuuuaa

SEQ ID NO: 1464640 - RNA, 15 nt, Human
aagaaggcaaaaaua

SEQ ID NO: 1464641 - RNA, 19 nt, Human
aagaaggcaaaaauaguuu

SEQ ID NO: 1464642 - RNA, 13 nt, Human
aagaaauauaccu

SEQ ID NO: 1464643 - RNA, 15 nt, Human
aagaaauagaacaag

SEQ ID NO: 1464644 - RNA, 20 nt, Human
aagaaauagaacaaggcuga

SEQ ID NO: 1464645 - RNA, 14 nt, Human
aagaaauagaacaa

SEQ ID NO: 1464646 - RNA, 16 nt, Human
aagaaagaacggaaga

SEQ ID NO: 1464647 - RNA, 14 nt, Human
aagaaacuuuuuua

SEQ ID NO: 1464648 - RNA, 14 nt, Human
aagaaagaacggaa

SEQ ID NO: 1464649 - RNA, 23 nt, Human
aagaaacuuucuuucucacuaaa

SEQ ID NO: 1464650 - RNA, 17 nt, Human
aagaaacuuguccuucc

SEQ ID NO: 1464651 - RNA, 11 nt, Human
aagaaacuuuc

SEQ ID NO: 1464652 - RNA, 21 nt, Human
aagaaacuggggcuccuccag

SEQ ID NO: 1464653 - RNA, 21 nt, Human
aagaaacugaggaauuuucuu

SEQ ID NO: 1464654 - RNA, 16 nt, Human
aagaaacugaggaauu

SEQ ID NO: 1464655 - RNA, 19 nt, Human
aagaaacugaggaauuuuc

SEQ ID NO: 1464656 - RNA, 20 nt, Human
aagaaacugaggaauuuucu

SEQ ID NO: 1464657 - RNA, 15 nt, Human
aagaaaccuacugcc

SEQ ID NO: 1464658 - RNA, 16 nt, Human
aagaaaccuacugccc

SEQ ID NO: 1464659 - RNA, 21 nt, Human
aagaaaccuacugcccaggca

SEQ ID NO: 1464660 - RNA, 15 nt, Human
aagaaaaagaagcaa

SEQ ID NO: 1464661 - RNA, 16 nt, Human
aacuuguauuaugugu

SEQ ID NO: 1464662 - RNA, 15 nt, Human
aacuuguauuaugug

SEQ ID NO: 1464663 - RNA, 18 nt, Human
aacuuggcugcaggaauc

SEQ ID NO: 1464664 - RNA, 19 nt, Human
aacuuggcugcaggaaucu

SEQ ID NO: 1464665 - RNA, 19 nt, Human
aacuuuaaagcguuugcac

SEQ ID NO: 1464666 - RNA, 16 nt, Human
gugcucaggagcccug

SEQ ID NO: 1464667 - RNA, 15 nt, Human
gugcucaggagcccu

SEQ ID NO: 1464668 - RNA, 14 nt, Human
gugcuauggugcuc

SEQ ID NO: 1464669 - RNA, 16 nt, Human
gugcuauggugcucug

SEQ ID NO: 1464670 - RNA, 20 nt, Human
gugcugggauuacaggugua

SEQ ID NO: 1464671 - RNA, 16 nt, Human
aagaaugauuaugaau

SEQ ID NO: 1464672 - RNA, 12 nt, Human
aagaaucucauc

SEQ ID NO: 1464673 - RNA, 20 nt, Human
aagaaucucaucucagugaa

SEQ ID NO: 1464674 - RNA, 20 nt, Human
aagaaucuugguuugccuuc

SEQ ID NO: 1464675 - RNA, 21 nt, Human
aagaaucuugguuugccuucc

SEQ ID NO: 1464676 - RNA, 14 nt, Human
guggcacuggggca

SEQ ID NO: 1464677 - RNA, 20 nt, Human
aagacaaaaagcuacuuauu

SEQ ID NO: 1464678 - RNA, 23 nt, Human
aagacaaaaagcuacuuauugua

SEQ ID NO: 1464679 - RNA, 17 nt, Human
aagacaaagguuuuccu

SEQ ID NO: 1464680 - RNA, 13 nt, Human
aagacccuccccg

SEQ ID NO: 1464681 - RNA, 18 nt, Human
aagaaugauuaugaauua

SEQ ID NO: 1464682 - RNA, 13 nt, Human
aagaaugcuuaau

SEQ ID NO: 1464683 - RNA, 17 nt, Human
aagaaugcuuaaucaga

SEQ ID NO: 1464684 - RNA, 20 nt, Human
aagaauggcagaaaaguuua

SEQ ID NO: 1464685 - RNA, 17 nt, Human
aagaauggcagaaaagu

SEQ ID NO: 1464686 - RNA, 13 nt, Human
guaggcaggauug

SEQ ID NO: 1464687 - RNA, 18 nt, Human
guaggcaggauuggggaa

SEQ ID NO: 1464688 - RNA, 19 nt, Human
guaggagacuguuuggaaa

SEQ ID NO: 1464689 - RNA, 20 nt, Human
guaggagacuguuuggaaau

SEQ ID NO: 1464690 - RNA, 16 nt, Human
guaggaaagaggaagc

SEQ ID NO: 1464691 - RNA, 12 nt, Human
guagcuuugcuc

SEQ ID NO: 1464692 - RNA, 13 nt, Human
guaggaaaugugg
